(19) United States
(12) Patent Application Publication
(10) Pub. No.: US 2024/0000970 A1
(43) Pub. Date: Jan. 4, 2024

(54) DIFFERENTIAL KNOCKOUT OF A HETEROZYGOUS ALLELE OF LRRK2

(71) Applicant: EmendoBio Inc., Wilmington, DE (US)

(72) Inventors: Rafi Emmanuel, Ramla (IL); Michal Golan Mashiach, Ness Ziona (IL)

(73) Assignee: EmendoBio Inc., Wilmington, DE (US)

(21) Appl. No.: 18/255,264

(22) PCT Filed: Dec. 1, 2021
(86) PCT No.: PCT/US2021/061334

§ 371 Date: May 31, 2023

Related U.S. Application Data
(60) Provisional application No. 63/213,507, filed on Jun. 22, 2021.
(60) Provisional application No. 63/119,905, filed on Dec. 1, 2020.

(51) Int. Cl. A61K 48/00; C12N 9/22; C12N 15/113; A61P 25/16; C12N 5/079

(52) U.S. Cl. CPC A61K 48/005; C12N 9/22; C12N 15/1137; A61P 25/16; C12N 5/0618

(57) ABSTRACT

RNA molecules comprising a guide sequence portion having 17-50 contiguous nucleotides in the sequence set forth in any one of SEQ ID NOs: 1-103,606 and compositions, methods, and uses thereof.

[0001] This application claims the benefit of U.S. Provisional Application Nos. 63/213,506, filed Jun. 22, 2021, and 63/119,905, filed Dec. 1, 2020, the contents of which are hereby incorporated by reference.

[0002] Throughout this application, various publications are referenced, including referenced in parenthesis. The disclosures of all publications mentioned in this application in their entireties are hereby incorporated by reference into this application in order to provide additional description of the art to which this invention pertains and of the features in the art which can be employed with this invention.

### REFERENCE TO SEQUENCE LISTING

[0003] This application incorporates-by-reference nucleotide sequences which are present in the file named “211201_91648-A-PCT_Sequence_Listing_AWG.txt”, which is 19,634 kilobytes in size, and which was created on Nov. 29, 2021 in the IBM-PC machine format, having an operating system compatibility with MS-Windows, which is contained in the text file filed Dec. 1, 2021 as part of this application.

### BACKGROUND OF INVENTION

[0004] There are several classes of DNA variation in the human genome, including insertions and deletions, differences in the copy number of repeated sequences, and single nucleotide polymorphisms (SNPs). A SNP is a DNA sequence variation occurring when a single nucleotide (adenine (A), thymine (T), cytosine (C), or guanine (G)) in the genome differs between human subjects or paired chromosomes in an individual. Over the years, the different types of DNA variations have been the focus of the research community either as markers in studies to pinpoint traits or disease causation or as potential causes of genetic disorders.

[0005] A genetic disorder is caused by one or more abnormalities in the genome. Genetic disorders may be regarded as either “dominant” or “recessive.” Recessive genetic disorders are those which require two copies (i.e., two alleles) of the abnormal/defective gene to be present. In contrast, a dominant genetic disorder involves a gene or genes which exhibit(s) dominance over a normal (functional/healthy) gene or genes. As such, in dominant genetic disorders only a single copy (i.e., allele) of an abnormal gene is required to cause or contribute to the symptoms of a particular genetic disorder. Such mutations include, for example, gain-of-function mutations in which the altered gene product possesses a new molecular function or a new pattern of gene expression. Other examples include dominant negative mutations, which have a gene product that acts antagonistically to the wild-type allele.

### Leucine-Rich Repeat Serine/Threonine-Protein Kinase 2 (LRRK2) and Monogenic Parkinson's Disease (PD)

[0006] Leucine-rich repeat serine/threonine-protein kinase 2 (LRRK2) is a generalist kinase that phosphorylates a broad range of proteins involved in multiple processes, such as neuronal plasticity, autophagy, and vesicle trafficking. It is a key regulator of Rab GTPases such as the Rab-3 family (Rab-3A, Rab-3B, Rab-3C, Rab-3D), the Rab-5 family (Rab-5A, Rab-5B, Rab-5C), the Rab-8 family (Rab-8A, Rab-8B), Rab-10, Rab-12, Rab-35, and Rab-43. It also regulates their interaction partners by extension in modulating the exchange between GDP and GTP on these proteins. These interacting partners govern a wide variety of cellular processes, including autophagy, cell differentiation, cell transport, synaptic vesicle trafficking, retrograde trafficking pathways for protein recycling, neuronal morphology in the central nervous system (CNS), and inhibiting degradation of the microtubule-associated protein tau (MAPT).

[0007] The LRRK2 G2019S mutation (p.Gly2019Ser, c.6055G>A) is the most common PD-associated mutation known. Indeed, LRRK2 G2019S was reported in 41% of sporadic and 37% of familial PD patients (compared to 3% in healthy controls) from the North African Arab population, and in 18.3% of Ashkenazi Jewish PD patients (compared to 1.3% in controls).

[0008] While the precise pathogenic mechanism is unknown, the characterized mutations (such as Gly2019Ser in exon 41) appear to disrupt kinase or GTPase activity. These disruptions in activity seem to result in increased intra- and intermolecular phosphorylation of known LRRK2 substrates. LRRK2-mediated PD is similar to idiopathic PD, which is a disease characterized by progressive degeneration of motor functions, progressive asymmetric tremors at rest, muscle rigidity, postural instability, REM sleep behavior disorders, cognitive decline, and gait abnormalities. Some of these symptoms are less severe in LRRK2-mediated PD patients than they are for idiopathic PD patients. Onset for LRRK2-mediated PD is typically after age 50, though early-onset (20s) and late-onset (90s) versions of the disease have been described. The LRRK2 gene consists of 51 exons, with the coding region starting on exon 1, and the G1y2019Ser mutation occurs in exon 41, in what is known as the “activation hinge” of the kinase domain.

### SUMMARY OF THE INVENTION

[0009] Disclosed is an approach for knocking out the expression of a dominant-mutated LRRK2 allele by disrupting the dominant-mutated allele or degrading the resulting mRNA.

[0010] The present disclosure provides a method for utilizing at least one naturally occurring nucleotide difference or polymorphism (e.g., single nucleotide polymorphism (SNP)) for distinguishing/discriminating between two alleles of a gene, one allele bearing a mutation such that it encodes a mutated protein causing a disease phenotype (“mutated allele”) and a particular sequence in a SNP position (REF/SNP), and the other allele encoding for a functional protein (“functional allele”). In some embodiments, the SNP position is utilized for distinguishing/discriminating between two alleles of a gene bearing one or more disease associated mutations, such as to target one of the alleles bearing both the particular sequence in the SNP position (SNP/REF) and a disease associated mutation. In some embodiments, the disease-associated mutation is targeted. In some embodiments, the method further comprises the step of knocking out expression of the mutated protein and allowing expression of the functional protein.

[0011] The present disclosure also provides a method for modifying in a cell a mutant allele of the Leucine-rich repeat serine/threonine-protein kinase 2 (LRRK2) gene having a mutation associated with monogenic Parkinson's disease, the method comprising
[0012] introducing to the cell a composition comprising:
   [0013] a CRISPR nuclease or a sequence encoding the CRISPR nuclease; and
   [0014] a first RNA molecule comprising a guide sequence portion having 17-50 nucleotides or a nucleotide sequence encoding the same,
[0015] wherein a complex of the CRISPR nuclease and the first RNA molecule affects a double strand break in the mutant allele of the LRRK2 gene.

[0016] According to embodiments of the present invention, there is provided a first RNA molecule comprising a guide sequence portion having 17-50 contiguous nucleotides containing nucleotides in the sequence set forth in any one of SEQ ID Nos: 1-103,606.

[0017] According to some embodiments of the present invention, there is provided a composition comprising an RNA molecule comprising a guide sequence portion having 17-50 contiguous nucleotides containing nucleotides in the sequence set forth in any one of SEQ ID NOs: 1-103,606 and a CRISPR nuclease.

[0018] According to some embodiments of the present invention, there is provided a method for inactivating a mutant LRRK2 allele in a cell, the method comprising delivering to the cell a composition comprising an RNA molecule comprising a guide sequence portion having 17-50 contiguous nucleotides containing nucleotides in the sequence set forth in any one of SEQ ID NOs: 1-103,606 and a CRISPR nuclease. In some embodiments, the cell is a stem cell. In some embodiments, the cell is a neuron. In some embodiments, the cell is a dopaminergic cell. In some embodiments, the delivering to the cell is performed in vitro, ex vivo, or in vivo. In some embodiments, the method is performed ex vivo and the cell is provided/explanted from an individual patient. In some embodiments, the method further comprises the step of introducing the resulting cell, with the modified/knocked out mutant LRRK2 allele, into the individual patient (e.g., autologous transplantation).

[0019] According to some embodiments of the present invention, there is provided a method for treating monogenic Parkinson's disease, the method comprising delivering to a cell of a subject having monogenic Parkinson's disease a composition comprising an RNA molecule comprising a guide sequence portion having 17-50 contiguous nucleotides containing nucleotides in the sequence set forth in any one of SEQ ID NOs: 1-103,606 and a CRISPR nuclease.

[0020] According to some embodiments of the present invention, there is provided use of a composition comprising an RNA molecule comprising a guide sequence portion having 17-50 contiguous nucleotides containing nucleotides in the sequence set forth in any one of SEQ ID NOs: 1-103,606 and a CRISPR nuclease for inactivating a mutant LRRK2 allele in a cell, comprising delivering to the cell the composition comprising an RNA molecule comprising a guide sequence portion having 17-50 contiguous nucleotides containing nucleotides in the sequence set forth in any one of SEQ ID NOs: 1-103,606 and a CRISPR nuclease.

[0021] According to embodiments of the present invention, there is provided a medicament comprising an RNA molecule comprising a guide sequence portion having 17-50 contiguous nucleotides containing nucleotides in the sequence set forth in any one of SEQ ID NOs: 1-103,606 and a CRISPR nuclease for use in inactivating a mutant LRRK2 allele in a cell, wherein the medicament is administered by delivering to the cell the composition comprising an RNA molecule comprising a guide sequence portion having 17-50 contiguous nucleotides containing nucleotides in the sequence set forth in any one of SEQ ID NOs: 1-103,606 and a CRISPR nuclease.

[0022] According to some embodiments of the present invention, there is provided use of a composition comprising an RNA molecule comprising a guide sequence portion having 17-50 contiguous nucleotides containing nucleotides in the sequence set forth in any one of SEQ ID NOs: 1-103,606 and a CRISPR nuclease for treating ameliorating or preventing monogenic Parkinson's disease, comprising delivering to a cell of a subject having or at risk of having monogenic Parkinson's disease the composition of comprising an RNA molecule comprising a guide sequence portion having 17-50 contiguous nucleotides containing nucleotides in the sequence set forth in any one of SEQ ID NOs: 1-103,606 and a CRISPR nuclease. In some embodiments, the method is performed ex vivo and the cell is provided/explanted from the subject. In some embodiments, the method further comprises the step of introducing the resulting cell, with the modified/knocked out mutant LRRK2 allele, into the subject (e.g. autologous transplantation).

[0023] According to some embodiments of the present invention, there is provided a medicament comprising the composition comprising an RNA molecule comprising a guide sequence portion having 17-50 contiguous nucleotides containing nucleotides in the sequence set forth in any one of SEQ ID NOs: 1-103,606 and a CRISPR nuclease for use in treating ameliorating or preventing monogenic Parkinson's disease, wherein the medicament is administered by delivering to a cell of a subject having or at risk of having monogenic Parkinson's disease the composition comprising an RNA molecule comprising a guide sequence portion having 17-50 contiguous nucleotides containing nucleotides in the sequence set forth in any one of SEQ ID NOs: 1-103,606 and a CRISPR nuclease.

[0024] According to some embodiments of the present invention, there is provided a kit for inactivating a mutant LRRK2 allele in a cell, comprising an RNA molecule comprising a guide sequence portion having 17-50 contiguous nucleotides containing nucleotides in the sequence set forth in any one of SEQ ID NOs: 1-103,606, a CRISPR nuclease, and/or a tracrRNA molecule; and instructions for delivering the RNA molecule; CRISPR nuclease, and/or the tracrRNA to the cell.

[0025] According to some embodiments of the present invention, there is provided a kit for treating monogenic Parkinson's disease in a subject, comprising an RNA molecule comprising a guide sequence portion having 17-50 contiguous nucleotides containing nucleotides in the sequence set forth in any one of SEQ ID NOs: 1-103,606, a CRISPR nuclease, and/or a tracrRNA molecule; and instructions for delivering the RNA molecule; CRISPR nuclease, and/or the tracrRNA to a cell of a subject having or at risk of having monogenic Parkinson's disease.

### BRIEF DESCRIPTION OF THE DRAWINGS

[0026] FIG. 1: Editing activity of guides targeting LRRK2 in A549 cells. RNPs complexed with SpCas9 CRISPR nuclease and a guide molecule comprising a specific guide sequence portion were electroporated into A549 cells to determine their activity. Cells were harvested 72 hours post RNP electroporation, genomic was DNA extracted, and the region of the mutation was amplified and analyzed by next-generation sequencing (NGS). The graph represents the % of editing±standard deviation of two (2) independent electroporations. The accompanying table below the graph indicates the genotype of A549 cells at each SNP position.

[0027] FIG. 2: Relative amount of LRRK2 RNA. A549 cells were harvested seven (7) days post-electroporation, total RNA was extracted, and the extracted RNA was subjected to reverse transcription. The level of the generated cDNA was quantified using qRT-PCR relative to untreated cells that were not edited and normalized to an endogenous gene (GAPDH). The graph represents the % of editing±standard deviation of two (2) independent electroporations.

[0028] FIG. 3: Editing activity of guides targeting LRRK2 in HeLa cells with OMNI-159.

[0029] FIG. 4: Editing activity of guides targeting LRRK2 in HeLa cells with OMNI-79 V5570.

### DETAILED DESCRIPTION

[0030] Unless otherwise defined, all technical and/or scientific terms used herein have the same meaning as commonly understood by one of ordinary skill in the art to which the invention pertains. Although methods and materials similar or equivalent to those described herein can be used in the practice or testing of embodiments of the invention, exemplary methods and/or materials are described below. In case of conflict, the patent specification, including definitions, will control. In addition, the materials, methods, and examples are illustrative only and are not intended to be necessarily limiting.

[0031] It should be understood that the terms “a” and “an” as used above and elsewhere herein refer to “one or more” of the enumerated components. It will be clear to one of ordinary skill in the art that the use of the singular includes the plural unless specifically stated otherwise. Therefore, the terms “a,” “an” and “at least one” are used interchangeably in this application.

[0032] For purposes of better understanding the present teachings and in no way limiting the scope of the teachings, unless otherwise indicated, all numbers expressing quantities, percentages or proportions, and other numerical values used in the specification and claims, are to be understood as being modified in all instances by the term “about.” Accordingly, unless indicated to the contrary, the numerical parameters set forth in the following specification and attached claims are approximations that may vary depending upon the desired properties sought to be obtained. At the very least, each numerical parameter should at least be construed in light of the number of reported significant digits and by applying ordinary rounding techniques.

[0033] Unless otherwise stated, adjectives such as “substantially” and “about” modifying a condition or relationship characteristic of a feature or features of an embodiment of the invention, are understood to mean that the condition or characteristic is defined to within tolerances that are acceptable for operation of the embodiment for an application for which it is intended. Unless otherwise indicated, the word “or” in the specification and claims is considered to be the inclusive “or” rather than the exclusive or, and indicates at least one of, or any combination of items it conjoins.

[0034] In the description and claims of the present application, each of the verbs, “comprise,” “include” and “have” and conjugates thereof, are used to indicate that the object or objects of the verb are not necessarily a complete listing of components, elements or parts of the subject or subjects of the verb. Other terms as used herein are meant to be defined by their well-known meanings in the art.

[0035] The terms “nucleic acid template” and “donor”, refer to a nucleotide sequence that is inserted or copied into a genome. The nucleic acid template comprises a nucleotide sequence, e.g., of one or more nucleotides, that will be added to or will template a change in the target nucleic acid or may be used to modify the target sequence. A nucleic acid template sequence may be of any length, for example between 2 and 10,000 nucleotides in length, preferably between about 100 and 1,000 nucleotides in length, more preferably between about 200 and 500 nucleotides in length. A nucleic acid template may be a single stranded nucleic acid, a double stranded nucleic acid. In some embodiments, the nucleic acid template comprises a nucleotide sequence, e.g., of one or more nucleotides, that corresponds to wild type sequence of the target nucleic acid, e.g., of the target position. In some embodiments, the nucleic acid template comprises a nucleotide sequence, e.g., of one or more ribonucleotides, that corresponds to wild type sequence of the target nucleic acid, e.g., of the target position. In some embodiments, the nucleic acid template comprises modified nucleotides.

[0036] Insertion of an exogenous sequence (also called a “donor sequence,” donor template,” “donor molecule” or “donor”) can also be carried out. For example, a donor sequence can contain a non-homologous sequence flanked by two regions of homology to allow for efficient HDR at the location of interest. Additionally, donor sequences can comprise a vector molecule containing sequences that are not homologous to the region of interest in cellular chromatin. A donor molecule can contain several, discontinuous regions of homology to cellular chromatin. For example, for targeted insertion of sequences not normally present in a region of interest, said sequences can be present in a donor nucleic acid molecule and flanked by regions of homology to sequence in the region of interest. A donor molecule may be any length, for example ranging from several bases e.g. 10-20 bases to multiple kilobases in length.

[0037] The donor polynucleotide can be DNA or RNA, single-stranded and/or double-stranded and can be introduced into a cell in linear or circular form. See, e.g., U.S. Patent Publication Nos. 2010/0047805; 2011/0281361; 2011/0207221; and 2019/0330620. If introduced in linear form, the ends of the donor sequence can be protected (e.g., from exonucleolytic degradation) by methods known to those of skill in the art. For example, one or more dideoxynucleotide residues are added to the 3′ terminus of a linear molecule and/or self-complementary oligonucleotides are ligated to one or both ends. See, for example, Chang et al. (1987) and Nehls et al. (1996). Additional methods for protecting exogenous polynucleotides from degradation include, but are not limited to, addition of terminal amino group(s) and the use of modified intemucleotide linkages such as, for example, phosphorothioates, phosphoramidates, and O-methyl ribose or deoxyribose residues.

[0038] A donor sequence may be an oligonucleotide and be used for targeted alteration of an endogenous sequence. The oligonucleotide may be introduced to the cell on a vector, may be electroporated into the cell, or may be introduced via other methods known in the art. Donor polynucleotides can be introduced as naked nucleic acid, as nucleic acid complexed with an agent such as a liposome or poloxamer, or can be delivered by viruses (e.g., adenovirus, AAV, herpesvirus, retrovirus, lentivirus and integrase defective lentivirus (IDLY)).

[0039] As used herein, the term “modified cells” refers to cells in which a double strand break is affected by a complex of an RNA molecule and the CRISPR nuclease as a result of hybridization with the target sequence, i.e. on-target hybridization. The term “modified cells” may further encompass cells in which a repair or correction of a mutation was affected following the double strand break.

[0040] This invention provides a modified cell or cells obtained by use of any of the methods described herein. In an embodiment these modified cell or cells are capable of giving rise to progeny cells. In an embodiment these modified cell or cells are capable of giving rise to progeny cells after engraftment. As a non-limiting example, the modified cells may be hematopoietic stem cells (HSCs), or any cell suitable for an allogenic cell transplant or autologous cell transplant. As a non-limiting example, the modified cells may be stem cells, neurons, or dopaminergic cells.

[0041] This invention also provides a composition comprising these modified cells and a pharmaceutically acceptable carrier. Also provided is an in vitro or ex vivo method of preparing this, comprising mixing the cells with the pharmaceutically acceptable carrier.

[0042] As used herein, the term “targeting sequence” or “targeting molecule” refers a nucleotide sequence or molecule comprising a nucleotide sequence that is capable of hybridizing to a specific target sequence, e.g., the targeting sequence has a nucleotide sequence which is at least partially complementary to the sequence being targeted along the length of the targeting sequence. The targeting sequence or targeting molecule may be part of an RNA molecule that can form a complex with a CRISPR nuclease, either alone or in combination with other RNA molecules, with the targeting sequence serving as the targeting portion of the CRISPR complex. When the molecule having the targeting sequence is present contemporaneously with the CRISPR nuclease, the RNA molecule, alone or in combination with an additional one or more RNA molecules (e.g. a tracrRNA molecule), is capable of targeting the CRISPR nuclease to the specific target sequence. As non-limiting example, a guide sequence portion of a CRISPR RNA molecule or single-guide RNA molecule may serve as a targeting molecule. Each possibility represents a separate embodiment. A targeting sequence can be custom designed to target any desired sequence.

[0043] The term “targets” as used herein, refers to preferentially hybridizing a targeting sequence of a targeting molecule to a nucleic acid having a targeted nucleotide sequence. It is understood that the term “targets” encompasses variable hybridization efficiencies, such that there is preferential targeting of the nucleic acid having the targeted nucleotide sequence, but unintentional off-target hybridization in addition to on-target hybridization might also occur. It is understood that where an RNA molecule targets a sequence, a complex of the RNA molecule and a CRISPR nuclease molecule targets the sequence for nuclease activity.

[0044] The “guide sequence portion” of an RNA molecule refers to a nucleotide sequence that is capable of hybridizing to a specific target DNA sequence, e.g., the guide sequence portion has a nucleotide sequence which is partially or fully complementary to the DNA sequence being targeted along the length of the guide sequence portion. In some embodiments, the guide sequence portion is 17, 18, 19, 20, 21, 22, 23, 24, 25, 26, 27, 28, 29, 30, 31, 32, 33, 34, 35, 36, 37, 38, 39, 40, 41, 42, 43, 44, 45, 46, 47, 48, 49 or 50 nucleotides in length, or approximately 17-50, 17-49, 17-48, 17-47, 17-46, 17-45, 17-44, 17-43, 17-42, 17-41, 17-40, 17-39, 17-38, 17-37, 17-36, 17-35, 17-34, 17-33, 17-31, 17-30, 17-29, 17-28, 17-27, 17-26, 17-25, 17-24, 17-22, 17-21, 18-25, 18-24, 18-23, 18-22, 18-21, 19-25, 19-24, 19-23, 19-22, 19-21, 19-20, 20-22, 18-20, 20-21, 21-22, or 17-20 nucleotides in length. Preferably, the entire length of the guide sequence portion is fully complementary to the DNA sequence being targeted along the length of the guide sequence portion. The guide sequence portion may be part of an RNA molecule that can form a complex with a CRISPR nuclease with the guide sequence portion serving as the DNA targeting portion of the CRISPR complex. When the RNA molecule having the guide sequence portion is present contemporaneously with the CRISPR molecule, alone or in combination with an additional one or more RNA molecules (e.g. a tracrRNA molecule), the RNA molecule is capable of targeting the CRISPR nuclease to the specific target DNA sequence. Accordingly, a CRISPR complex can be formed by direct binding of the RNA molecule having the guide sequence portion to a CRISPR nuclease or by binding of the RNA molecule having the guide sequence portion and an additional one or more RNA molecules to the CRISPR nuclease. Each possibility represents a separate embodiment. A guide sequence portion can be custom designed to target any desired sequence. Accordingly, a molecule comprising a “guide sequence portion” is a type of targeting molecule. In some embodiments, the guide sequence portion comprises a sequence that is the same as, or differs by no more than 1, 2, 3, 4, or 5 nucleotides from, a guide sequence portion described herein, e.g., a guide sequence set forth in any of SEQ ID NOs:1-103,606. Each possibility represents a separate embodiment. In some embodiments, the guide sequence portion comprises a sequence that is the same as, or differs by up to 1, 2, 3, 4, or 5 nucleotides from, a guide sequence portion described herein, e.g., a guide sequence set forth in any of SEQ ID NOs:1-103,606. Each possibility represents a separate embodiment. In some of these embodiments, the guide sequence portion comprises a sequence that is the same as a sequence set forth in any of SEQ ID NOs:1-103,606. Throughout this application, the terms “guide molecule,” “RNA guide molecule,” “guide RNA molecule,” and “gRNA molecule” are synonymous with a molecule comprising a guide sequence portion.”

[0045] The term “non-discriminatory” as used herein refers to a guide sequence portion of an RNA molecule that targets a specific DNA sequence that is common both a mutant and functional allele of a gene.

[0046] In embodiments of the present invention, an RNA molecule comprises a guide sequence portion having 17-50 contiguous nucleotides containing nucleotides in the sequence set forth in any one of SEQ ID NOs: 1-103,606.

[0047] The RNA molecule and or the guide sequence portion of the RNA molecule may contain modified nucleotides. Exemplary modifications to nucleotides or polynucleotides may be synthetic and encompass polynucleotides which contain nucleotides comprising bases other than the naturally occurring adenine, cytosine, thymine, uracil, or guanine bases. Modifications to polynucleotides include polynucleotides which contain synthetic, non-naturally occurring nucleosides e.g., locked nucleic acids. Modifications to polynucleotides may be utilized to increase or decrease stability of an RNA. An example of a modified polynucleotide is an mRNA containing 1-methyl pseudo-uridine. For examples of modified polynucleotides and their uses, see U.S. Pat. No. 8,278,036, PCT International Publication No. WO/2015/006747, and Weissman and Kariko (2015), each of which is hereby incorporated by reference.

[0048] As used herein, “contiguous nucleotides” set forth in a SEQ ID NO refers to nucleotides in a sequence of nucleotides in the order set forth in the SEQ ID NO without any intervening nucleotides.

[0049] In embodiments of the present invention, the guide sequence portion may be 25 nucleotides in length and contain 20-22 contiguous nucleotides in the sequence set forth in any one of SEQ ID NOs: 1-103,606. In embodiments of the present invention, the guide sequence portion may be less than 22 nucleotides in length. For example, in embodiments of the present invention the guide sequence portion may be 17, 18, 19, 20, or 21 nucleotides in length. In such embodiments the guide sequence portion may consist of 17, 18, 19, 20, or 21 nucleotides, respectively, in the sequence of 17-22 contiguous nucleotides set forth in any one of SEQ ID NOs: 1-103,606. For example, a guide sequence portion having 17 nucleotides in the sequence of 17 contiguous nucleotides set forth in SEQ ID NO: 103,605 may consist of any one of the following nucleotide sequences (nucleotides excluded from the contiguous sequence are marked in strike-through):

(SEQ ID NO: 103, 607)
AAAAAAAUGUACUUGGUUCC
17 nucleotide guide sequence 1:
(SEQ ID NO: 103, 608) [symbol]
AAAAUGUACUUGGUUCC
17 nucleotide guide sequence 2:
(SEQ ID NO: 103, 609) [symbol]
AAAAAUGUACUUGGUUC [symbol]
17 nucleotide guide sequence 3:
(SEQ ID NO: 103, 610) [symbol]
AAAAAAUGUACUUGGUU [symbol]
17 nucleotide guide sequence 4:
(SEQ ID NO: 103, 611)
AAAAAAAUGUACUUGGU

[symbol]

[0050] In embodiments of the present invention, the guide sequence portion may be greater than 20 nucleotides in length. For example, in embodiments of the present invention the guide sequence portion may be 21, 22, 23, 24, 25, 26, 27, 28, 29, or 30 nucleotides in length. In such embodiments the guide sequence portion comprises 17-50 nucleotides containing the sequence of 20, 21 or 22 contiguous nucleotides set forth in any one of SEQ ID NOs: 1-103,606 and additional nucleotides fully complimentary to a nucleotide or sequence of nucleotides adjacent to the 3′ end of the target sequence, 5′ end of the target sequence, or both.

[0051] In embodiments of the present invention a CRISPR nuclease and an RNA molecule comprising a guide sequence portion form a CRISPR complex that binds to a target DNA sequence to effect cleavage of the target DNA sequence. CRISPR nucleases, e.g. Cpf1, may form a CRISPR complex comprising a CRISPR nuclease and RNA molecule without a further tracrRNA molecule. Alternatively, CRISPR nucleases, e.g. Cas9, may form a CRISPR complex between the CRISPR nuclease, an RNA molecule, and a tracrRNA molecule. A guide sequence portion, which comprises a nucleotide sequence that is capable of hybridizing to a specific target DNA sequence, and a sequence portion that participates in CRIPSR nuclease binding, e.g. a tracrRNA sequence portion, can be located on the same RNA molecule. Alternatively, a guide sequence portion may be located on one RNA molecule and a sequence portion that participates in CRIPSR nuclease binding, e.g. a tracrRNA portion, may located on a separate RNA molecule. A single RNA molecule comprising a guide sequence portion (e.g. a DNA-targeting RNA sequence) and at least one CRISPR protein-binding RNA sequence portion (e.g. a tracrRNA sequence portion), can form a complex with a CRISPR nuclease and serve as the DNA-targeting molecule. In some embodiments, a first RNA molecule comprising a DNA-targeting RNA portion, which includes a guide sequence portion, and a second RNA molecule comprising a CRISPR protein-binding RNA sequence interact by base pairing to form an RNA complex that targets the CRISPR nuclease to a DNA target site or, alternatively, are fused together to form an RNA molecule that complexes with the CRISPR nuclease and targets the CRISPR nuclease to a DNA target site.

[0052] In embodiments of the present invention, a RNA molecule comprising a guide sequence portion may further comprise the sequence of a tracrRNA molecule. Such embodiments may be designed as a synthetic fusion of the guide portion of the RNA molecule and the trans-activating crRNA (tracrRNA). (See Jinek et al., 2012). In such an embodiment, the RNA molecule is a single guide RNA (sgRNA) molecule. Embodiments of the present invention may also form CRISPR complexes utilizing a separate tracrRNA molecule and a separate RNA molecule comprising a guide sequence portion. In such embodiments the tracrRNA molecule may hybridize with the RNA molecule via basepairing and may be advantageous in certain applications of the invention described herein.

[0053] The term “tracr mate sequence” refers to a sequence sufficiently complementary to a tracrRNA molecule so as to hybridize to the tracrRNA via basepairing and promote the formation of a CRISPR complex. (See U.S. Pat. No. 8,906,616). In embodiments of the present invention, the RNA molecule may further comprise a portion having a tracr mate sequence.

[0054] A “gene,” for the purposes of the present disclosure, includes a DNA region encoding a gene product, as well as all DNA regions which regulate the production of the gene product, whether or not such regulatory sequences are adjacent to coding and/or transcribed sequences. Accordingly, a gene includes, but is not necessarily limited to, promoter sequences, terminators, translational regulatory sequences such as ribosome binding sites and internal ribosome entry sites, enhancers, silencers, insulators, boundary elements, replication origins, matrix attachment sites and locus control regions.

[0055] “Eukaryotic” cells include, but are not limited to, fungal cells (such as yeast), plant cells, animal cells, mammalian cells and human cells.

[0056] The term “nuclease” as used herein refers to an enzyme capable of cleaving the phosphodiester bonds between the nucleotide subunits of nucleic acid. A nuclease may be isolated or derived from a natural source. The natural source may be any living organism. Alternatively, a nuclease may be a modified or a synthetic protein which retains the phosphodiester bond cleaving activity. Gene modification can be achieved using a nuclease, for example a CRISPR nuclease.

[0057] As used herein, the term “HSC” refers to both hematopoietic stem cells and hematopoietic stem progenitor cells. Non-limiting examples of stem cells include bone marrow cells, myeloid progenitor cells, a multipotent progenitor cells, and lineage restricted progenitor cells.

[0058] As used herein, “progenitor cell” refers to a lineage cell that is derived from stem cell and retains mitotic capacity and multipotency (e.g., can differentiate or develop into more than one but not all types of mature lineage of cell). As used herein “hematopoiesis” or “hemopoiesis” refers to the formation and development of various types of blood cells (e.g., red blood cells, megakaryocytes, myeloid cells (e.g., monocytes, macrophages and neutrophil), and lymphocytes) and other formed elements in the body (e.g., in the bone marrow).

[0059] The term “single nucleotide polymorphism (SNP) position”, as used herein, refers to a position in which a single nucleotide DNA sequence variation occurs between members of a species, or between paired chromosomes in an individual. In the case that a SNP position exists at paired chromosomes in an individual, a SNP on one of the chromosomes is a “heterozygous SNP.” The term SNP position refers to the particular nucleic acid position where a specific variation occurs and encompasses both a sequence including the variation from the most frequently occurring base at the particular nucleic acid position (also referred to as “SNP” or alternative “ALT”) and a sequence including the most frequently occurring base at the particular nucleic acid position (also referred to as reference, or “REF”). Accordingly, the sequence of a SNP position may reflect a SNP (i.e. an alternative sequence variant relative to a consensus reference sequence within a population), or the reference sequence itself.

[0060] According to embodiments of the present invention, there is provided a method for modifying in a cell a mutant allele of the Leucine-rich repeat serine/threonine-protein kinase 2 (LRRK2) gene having a mutation associated with monogenic Parkinson's disease, the method comprising
[0061] introducing to the cell a composition comprising:
   [0062] at least one CRISPR nuclease or a sequence encoding a CRISPR nuclease; and
   [0063] a first RNA molecule comprising a guide sequence portion having 17-50 nucleotides or a nucleotide sequence encoding the same,
[0064] wherein a complex of the CRISPR nuclease and the first RNA molecule affects a double strand break in the mutant allele of the LRRK2 gene.

[0065] In some embodiments, the first RNA molecule targets the CRISPR nuclease to the mutation associated with monogenic Parkinson's disease.

[0066] In some embodiments, the mutation associated with monogenic Parkinson's disease is any one of 12:40225041_C_T, 12:40225058_C_A, 12:40225088_G_A, 12:40225159_G_A, 12:40225233_G_C, 12:40225558_C_T, 12:40225618_T_C, 12:40225628_G_A, 12:40225631_T_C, 12:40232303_A_C, 12:40232345_G_C, 12:40232380_A_C, 12:40232385_T_C, 12:40235634_T_C, 12:40235646_C_G, 12:40235660_A_G, 12:40238078_A_G, 12:40240517_C_T, 12:40240531_T_C, 12:40240594_G_C, 12:40240602_T_C, 12:40243551_CAAT_C, 12:40243556_A_T, 12:40249822_T_G, 12:40249843_C_G, 12:40249854_C_T, 12:40249881_T_C, 12:40249908_A_G, 12:40251273_G_A, 12:40251303_G_A, 12:40251361_A_G, 12:40251366_C_A, 12:40251369_G_A, 12:40251495_C_T, 12:40252906_A_G, 12:40252929_G_A, 12:40252939_C_T, 12:40252952_T_G, 12:40252958_A_C, 12:40252968_G_A, 12:40252974_C_T, 12:40252978_C_T, 12:40252984_C_T, 12:40252988_T_C, 12:40253016_G_A, 12:40257311_A_G, 12:40257341_G_T, 12:40259507_A_G, 12:40259525_A_T, 12:40259534_G_T, 12:40259578_G_A, 12:40263806_A_G, 12:40263875_A_G, 12:40263900_G_A, 12:40263907_T_C, 12:40274646_CC_C, 12:40274881_T_C, 12:40274899_A_G, 12:40274917_G_C, 12:40277933_T_C, 12:40277968_A_C, 12:40277971_A_G, 12:40278025_T_A, 12:40278154_A_G, 12:40278167_C_T, 12:40283881_G_A, 12:40283915_T_C, 12:40283947_C_T, 12:40283966_G_A, 12:40283985_C_A, 12:40283990_T_C, 12:40284061_A_G, 12:40284076_C_A, 12:40284139_T_C, 12:40287363_C_A, 12:40287438_A_G, 12:40287461_A_G, 12:40293555_CTC_CCT, 12:40293607_C_T, 12:40293613_G_A, 12:40293624_G_C, 12:40293626_G_A, 12:40293644_A_G, 12:40294854_T_G, 12:40294862_T_C, 12:40294866_G_T, 12:40294878_C_T, 12:40295448_A_G, 12:40295463_A_G, 12:40295466_G_A, 12:40295535_A_T, 12:40295566_A_G, 12:40295574_A_C, 12:40295581_G_T, 12:40298330_A_G, 12:40298333_C_T, 12:40298346_G_A, 12:40298433_C_G, 12:40298479_G_T, 12:40298488_A_G, 12:40299125_A_G, 12:40299190_C_T, 12:40299196_A_C, 12:40299212_G_A, 12:40299255_T_C, 12:40302866_A_G, 12:40303952_C_A, 12:40303972_C_G, 12:40304000_G_A, 12:40304004_A_G, 12:40304035_A_C, 12:40304040_G_C, 12:40304040_G_T, 12:40304078_G_A, 12:40304141_C_T, 12:40305776_C_T, 12:40305781_T_A, 12:40305791_C_G, 12:40305871_G_A, 12:40305942_G_A, 12:40305946_T_A, 12:40308467_G_T, 12:40308476_A_G, 12:40308481_G_A, 12:40308543_GG_G, 12:40308632_C_A, 12:40308672_G_A, 12:40309174_G_A, 12:40309206_C_T, 12:40309225_A_C, 12:40309226_A_G, 12:40309230_A_G, 12:40309236_G_A, 12:40310434_C_A, 12:40310434_C_G, 12:40310434_C_T, 12:40310435_G_A, 12:40310436_C_T, 12:40310437_G_C, 12:40310440_T_G, 12:40310450_C_T, 12:40310461_G_A, 12:40310471_A_G, 12:40310476_GAT_G, 12:40310515_A_G, 12:40310530_C_T, 12:40310546_G_A, 12:40310554_G_A, 12:40310561_G_A, 12:40314043_G_A, 12:40314059_C_T, 12:40314062_A_G, 12:40314101_C_A, 12:40315266_T_A, 12:40319979_A_T, 12:40319998_T_C, 12:40320043_G_A, 12:40320054_G_C, 12:40320090_A_G, 12:40320094_A_G, 12:40320097_T_C, 12:40320119_A_G, 12:40321114_A_G, 12:40321123_T_C, 12:40322037_C_T, 12:40322038_G_A, 12:40322047_G_A, 12:40322047_G_T, 12:40322134_A_G, 12:40322137_A_C, 12:40322364_T_C, 12:40322386_G_T, 12:40322468_C_A, 12:40323244_C_G, 12:40323255_A_G, 12:40323256_T_C, 12:40323260_G_T, 12:40323270_G_T, 12:40323297_T_C, 12:40328416_G_C, 12:40335008_A_T, 12:40335031_G_A, 12:40335036_C_T, 12:40335037_G_A, 12:40335079_G_T, 12:40340349_C_G, 12:40340361_T_C, 12:40340380_T_C, 12:40340400_G_A, 12:40340404_T_C, 12:40340432_A_G, 12:40340436_A_T, 12:40346818_T_C, 12:40346826_ACTACT_A, 12:40346884_A_G, 12:40348402_G_GTGT, 12:40348475_A_G, 12:40348484_C_T, 12:40351537_A_G, 12:40351572_T_A, 12:40351579_C_T, 12:40351585_G_A, 12:40351605_G_C, 12:40351623_G_T, 12:40351667_C_A, 12:40351680_G_C, 12:40351720_G_C, 12:40351723_A_G, 12:40354304_T_C, 12:40354305_G_T, 12:40354410_G_A, 12:40356126_A_T, 12:40356145_C_T, 12:40359345_C_T, 12:40359422_A_G, 12:40363435_C_T, 12:40363440_C_T, 12:40363541_G_A, 12:40364843_G_A, 12:40364845_G_GGT, 12:40364884_G_A, 12:40364927_A_T, 12:40364960_A_G, 12:40365044_C_T, 12:40367012_T_A, 12:40367050_A_G, 12:40367648_AC_A, 12:40367656_G_T, 12:40367754_T_C, 12:40367849_G_A, 12:40367888_A_C, 12:40367988_C_T, 12:40368042_A_G, 12:40368073_A_C, 12:40368170_C_T, 12:40368262_C_T, 12:40368380_T_A, 12:40368486_G_T, 12:40368516_C_A, 12:40368534_T_G, 12:40368673_A_C, 12:40368736_C_A, 12:40368783_G_T, 12:40368800_T_C, 12:40368807_A_G, 12:40368834_A_G, 12:40368860_C_T, 12:40368905_A_T, 12:40368930_C_T, 12:40368947_C_T, 12:40368951_C_T, 12:40369044_T_C, 12:40369153_T_C, and 12:40369167_G_T.

[0067] In some embodiments, the guide sequence portion of the first RNA molecule comprises 17-50 contiguous nucleotides containing nucleotides in the sequence set forth in any one of SEQ ID NOs: 1-103,606 that targets a mutation associated with monogenic Parkinson's disease.

[0068] In some embodiments, the first RNA molecule targets the CRISPR nuclease to a SNP position of the mutant allele.

[0069] In some embodiments, the SNP position is any one of rs1388598, rs28365207, rs7294619, rs10878226, rs1491943, rs1491942, rs1491941, rs11175645, rs4567538, rs12230685, rs11175655, rs11175656, rs1402299410, rs780970090, rs1479481931, rs71078229, rs11175658, rs3057613, rs35642658, rs74324737, rs2708441, rs10631840, rs35991926, rs61931634, rs11175666, rs751672176, rs36024911, rs377568728, rs1279923177, rs2249281, rs10878244, rs138000936, rs10878245, rs10878246, rs10878247, rs954884, rs10878249, rs10784444, rs6581622, rs17519573, rs35987733, rs868476079, rs1399756142, rs1474763022, rs1450276224, rs1191097078, rs1425272990, rs1477924701, rs2404580, rs2404581, rs1388599, rs1388596, rs10878258, rs12371502, rs11175729, rs17443414, rs1486599371, rs7134379, rs7955902, rs1491939, rs1491938, rs7969677, rs2723265, rs7132171, rs10784451, rs10784452, rs1907633, rs1491936, rs1907632, rs2046928, rs2723264, rs17465870, rs10878278, rs11175766, rs11564183, rs11175769, rs17465912, rs17443552, rs17490817, rs11430638, rs4293189, rs10784461, rs7308720, rs10784462, rs10878284, rs11175780, rs11175784, rs11175787, rs144463374, rs73108329, rs12426891, rs4768224, rs11175793, rs10784470, rs12146857, rs11564207, rs7308193, rs10506150, rs76660489, rs10878299, rs373619252, rs10878302, rs11564129, rs7971935, rs11175836, rs4272849, rs10784485, rs10506151, rs7309197, rs7134572, rs11175843, rs147801391, rs376096297, rs7488873, rs11175845, rs7979341, rs1226327150, rs777452337, rs1339001348, rs11175847, rs112859457, rs17466080, rs11175852, rs10784486, rs73108368, rs398019201, rs17519846, rs17466150, rs11175862, rs4310676, rs11564150, rs4318033, rs4473003, rs1429478461, rs886049356, rs11564270, rs17519881, rs17466178, rs17466185, rs11175902, rs76033741, rs56325408, rs7957754, rs11175911, rs12369882, rs11175913, rs4483664, rs66487867, rs1491426750, rs5006481, rs139565575, rs150276517, rs72446556, rs1186032972, rs12820920, rs7966550, rs12314692, rs11175922, rs73102746, rs10784497, rs17443815, rs7957057, rs76607433, rs28365224, rs7962011, rs10878336, rs11175934, rs11175935, rs17491061, rs11175941, rs10878340, rs10784498, rs10878341, rs10784499, rs17484286, rs146071397, rs10878343, rs11564180, rs11175958, rs11175959, rs113772607, rs11564149, rs11175963, rs7305344, rs7133914, rs11175964, rs397805328, rs11175966, rs10784501, rs41286474, rs869212703, rs2069228, rs10784503, rs386376250, rs11564128, rs2896975, rs7302503, rs7137160, rs369794148, rs34709132, rs10467144, rs11175985, rs10784504, rs57421387, rs7973058, rs1427267, rs1427266, rs721713, rs721712, rs721711, rs721709, rs4768227, rs398098159, rs4767969, rs10878356, rs10784506, rs10878358, rs7132073, rs1427265, rs17466339, rs2114569, rs2114568, rs2162469, rs10784509, rs1896254, rs5797667, rs373676201, rs1896253, rs1896252, rs1427263, rs11176013, rs11564148, rs11564205, rs10748030, rs10748031, rs10748032, rs11564177, rs10748033, rs10735931, rs10748034, rs10878368, rs7307276, rs4768229, rs4768230, rs397968969, rs11564204, rs4423250, rs7137665, rs10878371, rs11176022, rs60750674, rs10878372, rs398055492, rs761931834, rs1415940047, rs17466430, rs11176030, rs3747891, rs7298930, rs17444089, rs10878377, rs12316801, rs17444096, rs11564175, rs2404832, rs17466486, rs11564267, rs17520244, rs10506152, rs11176052, rs11176053, rs17444124, rs11564203, r57307562, rs17520251, rs11461395, rs10506153, rs73275761, rs963243, rs17444145, rs10878386, rs17466521, rs12367542, rs17520278, rs35031086, rs11834950, rs11829088, rs4465428, rs61007767, rs60776971, rs2404834, rs7302841, rs2404835, rs11356084, rs715403, rs715402, rs6581667, rs6581668, rs200521371, rs4767970, rs4767971, rs4767972, rs1427271, rs1427272, rs1427273, rs10735934, rs10732751, rs12306060, rs1365763, rs7963697, rs11316380, rs7963086, rs17491536, rs7956787, rs7956898, rs10506155, rs7954061, rs7957151, rs919174, rs3065921, rs919175, rs1035812, rs1365764, rs397724721, rs17461964, rs10784518, rs4768231, rs4768232, rs3943893, rs2162471, rs1035813, rs10459264, rs10459265, rs11564147, rs10715759, rs7296657, rs7312497, rs10715758, rs10784522, rs796827140, rs74467833, rs7131694, rs12311273, rs58911468, rs35847030, rs1365765, rs66513412, rs2896977, rs199606989, rs1365766, rs10878405, rs11176143, rs7294958, rs61915610, rs7294952, rs59096461, rs59980086, rs4768233, rs4768234, rs4768235, rs7314455, rs7313525, rs7313895, rs7314863, rs7303525, rs7132187, rs7307310, rs11176153, rs11176154, rs7311247, rs7137437, rs75439407, rs73107108, rs1307806388, rs10878409, rs10878410, rs138382676, rs11176161, rs10878412, rs10878413, rs183544696, rs189538849, rs11610569, rs142726158, rs1194726090, rs576444406, rs185723137, rs1179215763, rs71449759, rs61915613, rs140722234, rs191099092, rs113693842, rs112767992, rs34531686, rs12368227, rs12368229, rs3930031, rs7308626, rs890575, rs890575, rs10748040, rs61230125, rs11176165, rs7976715, rs7976724, rs7963987, rs2162472, rs767501990, rs552326490, rs1365381164, rs760911090, rs754028820, rs11564173, rs7306545, rs7306684, rs112259589, rs73277531, rs77689380, rs73277533, rs17462055, rs758880647, rs10784528, rs796949072, rs10784532, rs145580704, rs386376254, rs11836288, rs11564146, rs10784536, rs11277474, rs7971919, rs7962116, rs67512688, rs2896978, rs2404836, rs11176195, rs4767973, rs17444202, rs4768236, rs4768237, rs58724345, rs397897325, rs33962975, rs7134408, rs11835105, rs137858615, rs10878434, rs35403247, rs3761863, rs17444223, rs12426362, rs17466605, rs3789328, rs12426498, rs4768238, rs66737902, rs10878441, rs3886747, rs1365770, rs367772598, rs386376255, rs10784548, rs1465527, rs1465528, rs17444285, rs7968048, rs11609433, rs776238897, rs149833872, rs1299545494, rs4374003, and rs7962370.

[0070] In some embodiments, the guide sequence portion of the first RNA molecule comprises 17-50 contiguous nucleotides containing nucleotides in the sequence set forth in any one of SEQ ID NOs: 1-103,606 that targets a SNP position of the mutant allele.

[0071] In some embodiments, the SNP position is in an exon or intron of the LRRK2 mutant allele, or within 3,000 basepairs upstream of the transcription start site or within 3,000 basepairs downstream of the 3′ UTR of the LRRK2 mutant allele.

[0072] In some embodiments, the SNP position contains a heterozygous SNP.

[0073] In some embodiments, the method further comprises introducing to the cell a second RNA molecule comprising a guide sequence portion having 17-50 nucleotides or a nucleotide sequence encoding the same, wherein a complex of the second RNA molecule and a CRISPR nuclease affects a second double strand break in the LRRK2 gene.

[0074] In some embodiments, the guide sequence portion of the second RNA molecule comprises 17-50 contiguous nucleotides containing nucleotides in the sequence set forth in any one of SEQ ID NOs: 1-103,606 other than the sequence of the first RNA molecule.

[0075] In some embodiments, the second RNA molecule comprises a non-discriminatory guide portion that targets both functional and mutated LRRK2 alleles.

[0076] In some embodiments, the second RNA molecule comprises a non-discriminatory guide portion that targets any one of Intron 1 of LRRK2, Intron 49 of LRRK2, Intron 2 of LRRK2, Intron 3 of LRRK2, a 3′ untranslated region (3′ UTR) of LRRK2, and an intergenic region downstream of LRRK2.

[0077] In some embodiments, the second RNA molecule comprises a non-discriminatory guide portion that targets a sequence that is located within a genomic range selected from any one of 12:40224997-40225496, 12:40225283-40225554, 12:40366506-40367005, 12:40367078-40367643, 12:40225641-40226140, and 12:40235126-40235625.

[0078] In some embodiments, the second RNA molecule comprises a non-discriminatory guide portion that targets a sequence that is located up to 500 base pairs from an exon that is excised by the first and second RNA molecules.

[0079] In some embodiments, an exon or a portion thereof is excised from the mutant allele of the LRRK2 gene.

[0080] In some embodiments, the first RNA molecule targets a SNP position in the 3′ UTR of the mutated allele, and the second RNA molecule comprises a non-discriminatory guide portion that targets downstream of a polyadenylation signal sequence that is common to both a functional allele and the mutant allele of the LRRK2 gene.

[0081] In some embodiments, the first RNA molecule targets a SNP position downstream of a polyadenylation signal of the mutated allele, and the second RNA molecule comprises a non-discriminatory guide portion that targets a sequence upstream of a polyadenylation signal that is common to both a functional allele and the mutant allele of the LRRK2 gene.

[0082] In some embodiments, the polyadenylation signal is excised from the mutant allele of the LRRK2 gene.

[0083] In some embodiments, the guide sequence portion of the first RNA molecule or second RNA molecule comprises 1, 2, 3, 4, or 5 nucleotide mismatches relative to a fully complementary target sequence of the guide sequence portion.

[0084] In some embodiments, the guide sequence portion comprises 17-50 contiguous nucleotides containing nucleotides in the sequence set forth in any one of SEQ ID NOs: 1-103,606 modified to contain 1, 2, 3, 4, or 5 nucleotide mismatches relative to a fully complementary target sequence of the guide sequence portion.

[0085] In some embodiments, the guide sequence portion provides higher targeting specificity to the complex of the CRISPR nuclease and the first RNA molecule relative to a guide sequence portion that has higher complementarity to the mutant allele of the LRRK2 gene

[0086] According to embodiments of the present invention, there is provided a modified cell obtained by the method of any one of the embodiments presented herein. In some embodiments the modified cell is a stem cell, a neuron, or a dopaminergic cell.

[0087] According to embodiments of the present invention, there is provided a first RNA molecule comprising a guide sequence portion having 17-50 contiguous nucleotides containing nucleotides in the sequence set forth in any one of SEQ ID NOs: 1-103,606, or any one of SEQ ID NOs: 1-103,606 modified to contain 1, 2, 3, 4, or 5 nucleotide mismatches relative to a fully complementary target sequence of the guide sequence portion.

[0088] According to embodiments of the present invention, there is provided a composition comprising the first RNA molecule and at least one CRISPR nuclease.

[0089] In some embodiments, the composition further comprises a second RNA molecule comprising a guide sequence portion having 17-50 contiguous nucleotides, wherein the second RNA molecule targets a LRRK2 allele, and wherein the guide sequence portion of the second RNA molecule is a different sequence from the sequence of the guide sequence portion of the first RNA molecule.

[0090] In some embodiments, the guide sequence portion of the second RNA molecule comprises 17-50 contiguous nucleotides containing nucleotides in the sequence set forth in any one of SEQ ID NOs: 1-103,606 other than the sequence of the first RNA molecule, or any one of SEQ ID NOs: 1-103,606 modified to contain 1, 2, 3, 4, or 5 nucleotide mismatches relative to a fully complementary target sequence of the guide sequence portion.

[0091] According to embodiments of the present invention, there is provided a method for inactivating a mutant LRRK2 allele in a cell, the method comprising delivering to the cell the composition of any one of the embodiments presented herein.

[0092] According to embodiments of the present invention, there is provided a method for treating monogenic Parkinson's disease, the method comprising delivering to a cell of a subject having monogenic Parkinson's disease the composition of any one of the embodiments presented herein.

[0093] According to embodiments of the present invention, there is provided use of any one of the compositions presented herein for inactivating a mutant LRRK2 allele in a cell, comprising delivering to the cell the composition of any one of the embodiments presented herein.

[0094] According to embodiments of the present invention, there is provided a medicament comprising the composition of any one of the embodiments presented herein for use in inactivating a mutant LRRK2 allele in a cell, wherein the medicament is administered by delivering to the cell the composition of any one of the embodiments presented herein.

[0095] According to embodiments of the present invention, there is provided use of the composition of any one of the embodiments presented herein for treating ameliorating or preventing monogenic Parkinson's disease, comprising delivering to a cell of a subject having or at risk of having monogenic Parkinson's disease the composition of any one of the embodiments presented herein.

[0096] According to embodiments of the present invention, there is provided a medicament comprising the composition of any one of the embodiments presented herein for use in treating ameliorating or preventing monogenic Parkinson's disease, wherein the medicament is administered by delivering to a cell of a subject having or at risk of having monogenic Parkinson's disease the composition of any one of the embodiments presented herein.

[0097] According to embodiments of the present invention, there is provided a kit for inactivating a mutant LRRK2 allele in a cell, comprising an RNA molecule of any one of the embodiments presented herein, a CRISPR nuclease, and/or a tracrRNA molecule; and instructions for delivering the RNA molecule; CRISPR nuclease, and/or the tracrRNA to the cell.

[0098] According to embodiments of the present invention, there is provided a kit for treating monogenic Parkinson's disease in a subject, comprising an RNA molecule of any one of the embodiments presented herein, a CRISPR nuclease, and/or a tracrRNA molecule; and instructions for delivering the RNA molecule; CRISPR nuclease, and/or the tracrRNA to a cell of a subject having or at risk of having monogenic Parkinson's disease.

[0099] According to embodiments of the present invention, there is provided a gene editing composition comprising an RNA molecule comprising a guide sequence portion having 17-50 contiguous nucleotides containing nucleotides in the sequence set forth in any one of SEQ ID NOs: 1-103,606. In some embodiments, the RNA molecule further comprises a portion having a sequence which binds to a CRISPR nuclease. In some embodiments, the sequence which binds to a CRISPR nuclease is a tracrRNA sequence.

[0100] In some embodiments, the RNA molecule further comprises a portion having a tracr mate sequence.

[0101] In some embodiments, the RNA molecule may further comprise one or more linker portions.

[0102] According to embodiments of the present invention, an RNA molecule may be up to 1000, 900, 800, 700, 600, 500, 450, 400, 350, 300, 290, 280, 270, 260, 250, 240, 230, 220, 210, 200, 190, 180, 170, 160, 150, 140, 130, 120, 110, or 100 nucleotides in length. Each possibility represents a separate embodiment. In embodiments of the present invention, the RNA molecule may be 17 up to 300 nucleotides in length, 100 up to 300 nucleotides in length, 150 up to 300 nucleotides in length, 100 up to 500 nucleotides in length, 100 up to 400 nucleotides in length, 200 up to 300 nucleotides in length, 100 to 200 nucleotides in length, or 150 up to 250 nucleotides in length. Each possibility represents a separate embodiment.

[0103] According to some embodiments of the present invention, the composition further comprises a tracrRNA molecule.

[0104] The present disclosure provides a method for utilizing at least one naturally occurring nucleotide difference or polymorphism (e.g., single nucleotide polymorphism (SNP)) for distinguishing/discriminating between two alleles of a gene, one allele bearing a mutation such that it encodes a mutated protein causing a disease phenotype (“mutated allele”) and a particular sequence in a SNP position (SNP/REF), and the other allele encoding for a functional protein (“functional allele”). The method further comprises the step of knocking out expression of the mutated protein and allowing expression of the functional protein. In some embodiments, the method is for treating, ameliorating, or preventing a dominant negative genetic disorder.

[0105] According to some embodiments of the present invention, there is provided a method for inactivating a mutant LRRK2 allele in a cell, the method comprising delivering to the cell a composition comprising an RNA molecule comprising a guide sequence portion having 17-50 contiguous nucleotides containing nucleotides in the sequence set forth in any one of SEQ ID NOs: 1-103,606 and a CRISPR nuclease.

[0106] According to some embodiments of the present invention, there is provided a method for treating monogenic Parkinson's disease, the method comprising delivering to a cell of a subject having monogenic Parkinson's disease a composition comprising an RNA molecule comprising a guide sequence portion having 17-50 contiguous nucleotides containing nucleotides in the sequence set forth in any one of SEQ ID NOs: 1-103,606 and a CRISPR nuclease.

[0107] According to embodiments of the present invention, the composition comprises a second RNA molecule comprising a guide sequence portion having 17-50 contiguous nucleotides containing nucleotides in the sequence set forth in any one of SEQ ID NOs: 1-103,606. In some embodiments, the 17-50 nucleotides of the guide sequence portion of the second RNA molecule are in a different sequence from the sequence of the guide sequence portion of the first RNA molecule.

[0108] According to embodiments of the present invention, at least one CRISPR nuclease and the RNA molecule or RNA molecules are delivered to the subject and/or cells substantially at the same time or at different times.

[0109] In some embodiments, a tracrRNA molecule is delivered to the subject and/or cells substantially at the same time or at different times as the CRISPR nuclease and RNA molecule or RNA molecules.

[0110] According to embodiments of the present invention, the first RNA molecule targets a SNP or disease-causing mutation in the exon or promoter of a mutated allele, and the second RNA molecule targets a SNP in an exon of the mutated allele, a SNP in an intron, or a sequence present in both the mutated or functional allele.

[0111] According to embodiments of the present invention, the first RNA molecule or the first and the second RNA molecules target a SNP in the promoter region, the start codon, or an untranslated region (UTR) of a mutated allele.

[0112] According to embodiments of the present invention, the first RNA molecule or the first and the second RNA molecules targets at least a portion of the promoter and/or the start codon and/or a portion of a UTR of a mutated allele.

[0113] According to embodiments of the present invention, the first RNA molecule targets a portion of the promoter, a first SNP in the promoter, or a SNP upstream to the promoter of a mutated allele and the second RNA molecule is targets a second SNP, which is downstream of the first SNP, and is in the promoter, in a UTR, or in an intron or in an exon of a mutated allele.

[0114] According to embodiments of the present invention, the first RNA molecule targets a SNP in the promoter, upstream of the promoter, or a UTR of a mutated allele and the second RNA molecule is designed to target a sequence which is present in an intron of both the mutated allele and the functional allele.

[0115] According to embodiments of the present invention, the first RNA molecule targets a SNP in an intron of a mutated allele, and wherein the second RNA molecule targets a SNP in an intron of the mutated allele, or a sequence in an intron present in both the mutated and functional allele.

[0116] According to embodiments of the present invention, the first RNA molecule targets a sequence upstream of the promotor which is present in both a mutated and functional allele and the second RNA molecule targets a SNP or disease-causing mutation in any location of the gene.

[0117] According to embodiments of the present invention, there is provided a method comprising removing an exon containing a disease-causing mutation from a mutated allele, wherein the first RNA molecule or the first and the second RNA molecules target regions flanking an entire exon or a portion of the exon.

[0118] According to embodiments of the present invention, there is provided a method comprising removing an exon or a portion thereof from a mutant LRRK2 allele, the entire open reading frame of a mutant LRRK2 allele, or removing the entire mutant LRRK2 allele.

[0119] According to embodiments of the present invention, the first RNA molecule targets a SNP or disease-causing mutation in an exon or promoter of a mutated allele, and wherein the second RNA molecule targets a SNP in the same exon of the mutated allele, a SNP in an intron, or a sequence in an intron present in both the mutated and functional allele.

[0120] According to embodiments of the present invention, the first RNA molecule or the first and the second RNA molecules target an alternative splicing signal sequence between an exon and an intron of a mutant LRRK2 allele.

[0121] According to embodiments of the present invention, the second RNA molecule is non-discriminatory targets a sequence present in both a mutated allele and a functional allele.

[0122] The compositions and methods of the present disclosure may be utilized for treating, preventing, ameliorating, or slowing progression of an autosomal dominant genetic disorder, such as monogenic Parkinson's disease.

[0123] In some embodiments, a mutated allele is deactivated by delivering to a cell an RNA molecule which targets a SNP in the promoter region, the start codon, or an untranslated region (UTR) of the mutated allele.

[0124] In some embodiments, a mutated allele is inactivated by removing at least a portion of the promoter, and/or removing the start codon, and/or a portion of the UTR, and/or a polyadenylation signal. In such embodiments one RNA molecule may be designed for targeting a first SNP in the promoter or upstream to the promoter and another RNA molecule is designed to target a second SNP, which is downstream of the first SNP, and is in the promoter, in the UTR, in an intron, or in an exon. Alternatively, one RNA molecule may be designed for targeting a SNP in the promoter, upstream of the promoter, or the UTR, and another RNA molecule is designed to target a sequence which is present in an intron of both the mutated allele and the functional allele. Alternatively, one RNA molecule may be designed for targeting a sequence upstream of the promotor which is present in both the mutated and functional allele and the other guide is designed to target a SNP or disease-causing mutation in any location of the gene e.g., in an exon, intron, UTR, or downstream of the promoter.

[0125] In some embodiments, the method of deactivating a mutated allele comprises an exon skipping step comprising removing an exon containing a disease-causing mutation from the mutated allele. Removing an exon containing a disease-causing mutation in the mutated allele requires two RNA molecules which target regions flanking the entire exon or a portion of the exon. Removal of an exon containing the disease-causing mutation may be designed to eliminate the disease-causing action of the protein while allowing for expression of the remaining protein product which retains some or all of the wild-type activity. The entire open reading frame or the entire gene can be excised using two RNA molecules flanking the region desired to be excised.

[0126] In some embodiments, the method of deactivating a mutated allele comprises delivering two RNA molecules to a cell, wherein one RNA molecule targets a SNP or disease-causing mutation in an exon or promoter of the mutated allele, and wherein the other RNA molecule targets a SNP in the same of the mutated allele, a SNP in an intron, or a sequence in an intron present in both the mutated or functional allele.

[0127] Any one of, or combination of, the above-mentioned strategies for deactivating a mutant allele may be used in the context of the invention.

[0128] In embodiments of the present invention, an RNA molecule is used to direct a CRISPR nuclease to an exon or a splice site of a mutated allele in order to create a double-stranded break (DSB), leading to insertion or deletion of nucleotides by inducing an error-prone non-homologous end-joining (NHEJ) mechanism and formation of a frameshift mutation in the mutated allele. The frameshift mutation may result in, for example, inactivation or knockout of the mutated allele by generation of an early stop codon in the mutated allele and to generation of a truncated protein or to nonsense-mediated mRNA decay of the transcript of the mutant allele. In further embodiments, one RNA molecule is used to direct a CRISPR nuclease to a promotor of a mutated allele.

[0129] In some embodiments, the method of deactivating a mutated allele further comprises enhancing activity of the functional protein such as by providing a protein/peptide, a nucleic acid encoding a protein/peptide, or a small molecule such as a chemical compound, capable of activating/enhancing activity of the functional protein.

[0130] According to some embodiments, the present disclosure provides an RNA sequence (also referred to as an ‘RNA molecule’) which binds to or associates with and/or directs an RNA-guided DNA nuclease e.g., a CRISPR nuclease, to a target sequence comprising at least one nucleotide which differs between a mutated allele and a functional allele (e.g., SNP) of a gene of interest (i.e., a sequence of the mutated allele which is not present in the functional allele).

[0131] In some embodiments, the method comprises contacting a mutated allele of a gene of interest with an allele-specific RNA molecule and a CRISPR nuclease e.g., a Cas9 protein, wherein the allele-specific RNA molecule and the CRISPR nuclease associate with a nucleotide sequence of the mutated allele of the gene of interest which differs by at least one nucleotide from a nucleotide sequence of a functional allele of the gene of interest, thereby modifying or knocking-out the mutated allele.

[0132] In some embodiments, the allele-specific RNA molecule and a CRISPR nuclease is introduced to a cell encoding the gene of interest. In some embodiments, the cell encoding the gene of interest is in a mammalian subject. In some embodiments, the cell encoding the gene of interest is in a plant.

[0133] In some embodiments, the mutated allele is an allele of LRRK2 gene. In some embodiments, the RNA molecule targets a SNP which co-exists with or is genetically linked to the mutated sequence associated with monogenic Parkinson's disease genetic disorder. In some embodiments, the RNA molecule targets a SNP which is highly prevalent in the population and exists in the mutated allele having the mutated sequence associated with monogenic Parkinson's disease genetic disorder and not in the functional allele of an individual subject to be treated. In some embodiments, a disease-causing mutation within a mutated LRRK2 allele is targeted.

[0134] In some embodiments, the SNP is within an exon of the gene of interest. In such embodiments, a guide sequence portion of an RNA molecule is designed to associate with a sequence of an exon of the gene of interest.

[0135] In some embodiments, SNP is within an intron or the exon of the gene of interest. In some embodiments, the SNP is in close proximity to the splice site between an intron and an exon. In some embodiments, the close proximity to a splice site is 1, 2, 3, 4, 5, 6, 7, 8, 9, 10, 11, 12, 13, 14, 15, 16, 17, 18, 19, or 20 nucleotides upstream or downstream to the splice site. Each possibility represents a separate embodiment of the present invention. In such embodiments, a guide sequence portion of an RNA molecule may be designed to associate with a sequence of the gene of interest which comprises the splice site.

[0136] In some embodiments, the method is utilized for treating a subject having a disease phenotype resulting from the heterozygote LRRK2 gene. In such embodiments, the method results in improvement, amelioration or prevention of the disease phenotype.

[0137] Embodiments of compositions described herein include at least one CRISPR nuclease, RNA molecule(s), and a tracrRNA molecule, being effective in a subject or cells at the same time. The at least one CRISPR nuclease, RNA molecule(s), and tracrRNA may be delivered substantially at the same time or can be delivered at different times but have effect at the same time. For example, this includes delivering the CRISPR nuclease to the subject or cells before the RNA molecule and/or tracrRNA is substantially extant in the subject or cells.

[0138] In some embodiments, the cell is a stem cell. In some embodiments, the cell is a neuron. In some embodiments, the cell is a dopaminergic cell.

### Dominant Genetic Disorders

[0139] One of skill in the art will appreciate that all subjects with any type of heterozygote genetic disorder (e.g., dominant genetic disorder) may be subjected to the methods described herein. In one embodiment, the present invention may be used to target a gene involved in, associated with, or causative of dominant genetic disorders such as, for example, monogenic Parkinson's disease. In some embodiments, the dominant genetic disorder is monogenic Parkinson's disease. In some embodiments, the target gene is the LRRK2 gene. Non-limiting examples of mutations characterized as gain of function mutations associated with monogenic Parkinson's disease phenotype include: 12:40225041_C_T, 12:40225058_C_A, 12:40225088_G_A, 12:40225159_G_A, 12:40225233_G_C, 12:40225558_C_T, 12:40225618_T_C, 12:40225628_G_A, 12:40225631_T_C, 12:40232303_A_C, 12:40232345_G_C, 12:40232380_A_C, 12:40232385_T_C, 12:40235634_T_C, 12:40235646_C_G, 12:40235660_A_G, 12:40238078_A_G, 12:40240517_C_T, 12:40240531_T_C, 12:40240594_G_C, 12:40240602_T_C, 12:40243551_CAAT_C, 12:40243556_A_T, 12:40249822_T_G, 12:40249843_C_G, 12:40249854_C_T, 12:40249881_T_C, 12:40249908_A_G, 12:40251273_G_A, 12:40251303_G_A, 12:40251361_A_G, 12:40251366_C_A, 12:40251369_G_A, 12:40251495_C_T, 12:40252906_A_G, 12:40252929_G_A, 12:40252939_C_T, 12:40252952_T_G, 12:40252958_A_C, 12:40252968_G_A, 12:40252974_C_T, 12:40252978_C_T, 12:40252984_C_T, 12:40252988_T_C, 12:40253016_G_A, 12:40257311_A_G, 12:40257341_G_T, 12:40259507_A_G, 12:40259525_A_T, 12:40259534_G_T, 12:40259578_G_A, 12:40263806_A_G, 12:40263875_A_G, 12:40263900_G_A, 12:40263907_T_C, 12:40274646_CC_C, 12:40274881_T_C, 12:40274899_A_G, 12:40274917_G_C, 12:40277933_T_C, 12:40277968_A_C, 12:40277971_A_G, 12:40278025_T_A, 12:40278154_A_G, 12:40278167_C_T, 12:40283881_G_A, 12:40283915_T_C, 12:40283947_C_T, 12:40283966_G_A, 12:40283985_C_A, 12:40283990_T_C, 12:40284061_A_G, 12:40284076_C_A, 12:40284139_T_C, 12:40287363_C_A, 12:40287438_A_G, 12:40287461_A_G, 12:40293555_CTC_CCT, 12:40293607_C_T, 12:40293613_G_A, 12:40293624_G_C, 12:40293626_G_A, 12:40293644_A_G, 12:40294854_T_G, 12:40294862_T_C, 12:40294866_G_T, 12:40294878_C_T, 12:40295448_A_G, 12:40295463_A_G, 12:40295466_G_A, 12:40295535_A_T, 12:40295566_A_G, 12:40295574_A_C, 12:40295581_G_T, 12:40298330_A_G, 12:40298333_C_T, 12:40298346_G_A, 12:40298433_C_G, 12:40298479_G_T, 12:40298488_A_G, 12:40299125_A_G, 12:40299190_C_T, 12:40299196_A_C, 12:40299212_G_A, 12:40299255_T_C, 12:40302866_A_G, 12:40303952_C_A, 12:40303972_C_G, 12:40304000_G_A, 12:40304004_A_G, 12:40304035_A_C, 12:40304040_G_C, 12:40304040_G_T, 12:40304078_G_A, 12:40304141_C_T, 12:40305776_C_T, 12:40305781_T_A, 12:40305791_C_G, 12:40305871_G_A, 12:40305942_G_A, 12:40305946_T_A, 12:40308467_G_T, 12:40308476_A_G, 12:40308481_G_A, 12:40308543_GG_G, 12:40308632_C_A, 12:40308672_G_A, 12:40309174_G_A, 12:40309206_C_T, 12:40309225_A_C, 12:40309226_A_G, 12:40309230_A_G, 12:40309236_G_A, 12:40310434_C_A, 12:40310434_C_G, 12:40310434_C_T, 12:40310435_G_A, 12:40310436_C_T, 12:40310437_G_C, 12:40310440_T_G, 12:40310450_C_T, 12:40310461_G_A, 12:40310471_A_G, 12:40310476_GAT_G, 12:40310515_A_G, 12:40310530_C_T, 12:40310546_G_A, 12:40310554_G_A, 12:40310561_G_A, 12:40314043_G_A, 12:40314059_C_T, 12:40314062_A_G, 12:40314101_C_A, 12:40315266_T_A, 12:40319979_A_T, 12:40319998_T_C, 12:40320043_G_A, 12:40320054_G_C, 12:40320090_A_G, 12:40320094_A_G, 12:40320097_T_C, 12:40320119_A_G, 12:40321114_A_G, 12:40321123_T_C, 12:40322037_C_T, 12:40322038_G_A, 12:40322047_G_A, 12:40322047_G_T, 12:40322134_A_G, 12:40322137_A_C, 12:40322364_T_C, 12:40322386_G_T, 12:40322468_C_A, 12:40323244_C_G, 12:40323255_A_G, 12:40323256_T_C, 12:40323260_G_T, 12:40323270_G_T, 12:40323297_T_C, 12:40328416_G_C, 12:40335008_A_T, 12:40335031_G_A, 12:40335036_C_T, 12:40335037_G_A, 12:40335079_G_T, 12:40340349_C_G, 12:40340361_T_C, 12:40340380_T_C, 12:40340400_G_A, 12:40340404_T_C, 12:40340432_A_G, 12:40340436_A_T, 12:40346818_T_C, 12:40346826_ACTACT_A, 12:40346884_A_G, 12:40348402_G_GTGT, 12:40348475_A_G, 12:40348484_C_T, 12:40351537_A_G, 12:40351572_T_A, 12:40351579_C_T, 12:40351585_G_A, 12:40351605_G_C, 12:40351623_G_T, 12:40351667_C_A, 12:40351680_G_C, 12:40351720_G_C, 12:40351723_A_G, 12:40354304_T_C, 12:40354305_G_T, 12:40354410_G_A, 12:40356126_A_T, 12:40356145_C_T, 12:40359345_C_T, 12:40359422_A_G, 12:40363435_C_T, 12:40363440_C_T, 12:40363541_G_A, 12:40364843_G_A, 12:40364845_G_GGT, 12:40364884_G_A, 12:40364927_A_T, 12:40364960_A_G, 12:40365044_C_T, 12:40367012_T_A, 12:40367050_A_G, 12:40367648_AC_A, 12:40367656_G_T, 12:40367754_T_C, 12:40367849_G_A, 12:40367888_A_C, 12:40367988_C_T, 12:40368042_A_G, 12:40368073_A_C, 12:40368170_C_T, 12:40368262_C_T, 12:40368380_T_A, 12:40368486_G_T, 12:40368516_C_A, 12:40368534_T_G, 12:40368673_A_C, 12:40368736_C_A, 12:40368783_G_T, 12:40368800_T_C, 12:40368807_A_G, 12:40368834_A_G, 12:40368860_C_T, 12:40368905_A_T, 12:40368930_C_T, 12:40368947_C_T, 12:40368951_C_T, 12:40369044_T_C, 12:40369153_T_C, and 12:40369167_G_T.

[0140] LRRK2 editing strategies include, but are not limited to, (1) knockout, for example, by targeting a LRRK2 mutation or SNP position with one guide RNA molecule to induce a frameshift that may lead to truncation or nonsense-mediated decay; and (2) allele-specific excision using two guide RNA molecules, for example, excision of at least one exon or a portion thereof, knockout of a large portion of the allele or the entire allele, or excision of the polyadenylation signal or the promoter region.

[0141] Knockout may be achieved by several approaches. For example, knockout may be achieved by targeting a SNP within a coding exon of a mutant LRRK2 allele using only one guide RNA molecule (e.g. a single guide RNA molecule or “sgRNA”). Alternatively, excision may be achieved by targeting the mutant LRRK2 allele with two different RNA molecules, with at least one RNA molecule being allele-specific.

[0142] In another editing strategy, expression of a mutated LRRK2 allele may be inhibited. An example of this strategy includes excising the polyadenylation signal in the 3′UTR region, which leads to an unstable transcript.

[0143] According to embodiments of the present invention, there is provided an RNA molecule comprising a guide sequence portion (e.g. a targeting sequence) comprising a nucleotide sequence that is fully or partially complementary to a target sequence in a SNP position (REF/SNP sequence) located in or near a mutated allele of the LRRK2 gene. In some embodiments, the guide sequence portion of the RNA molecule consists of 16, 17, 18, 19, 20, 21, 22, 23, 24, 25, 26, or more than 26 nucleotides. In some embodiments the guide sequence portion is configured to target a CRISPR nuclease to a target sequence and provide a cleavage event, by a CRISPR nuclease complexed therewith, selected from a double-strand break and a single-strand break within 500, 400, 300, 200, 100, 50, 25, or 10 nucleotides of a LRRK2 target site. In some embodiments, the cleavage event enables non-sense mediated decay of the LRRK2 gene. In some embodiments, the RNA molecule is a guide RNA molecule such as a crRNA molecule or a single guide RNA molecule.

[0144] In some embodiments, the target sequence of a mutated allele of LRRK2 gene is altered (e.g., by introduction of an NHEJ-mediated indel (e.g., insertion or deletion), and results in reduction or elimination of expression of the gene product encoded by the mutant allele of LRRK2 gene. In some embodiments, the reduction or elimination of expression is due to non-sense mediated mRNA decay such as due to immature stop codon. In some embodiments, the reduction or elimination of expression is due to expression of a truncated form of the LRRK2 gene product.

### CRISPR Nucleases and PAM Recognition

[0145] In some embodiments, the sequence specific nuclease is selected from CRISPR nucleases, or a functional variant thereof. In some embodiments, the sequence specific nuclease is an RNA guided DNA nuclease. In such embodiments, the RNA sequence which guides the RNA guided DNA nuclease (e.g., Cpf1) binds to and/or directs the RNA guided DNA nuclease to the sequence comprising at least one nucleotide which differs between a mutated allele and its counterpart functional allele (e.g., SNP). In some embodiments, the CRISPR complex does not further comprise a tracrRNA. In a non-limiting example, in which the RNA guided DNA nuclease is a CRISPR protein, the at least one nucleotide which differs between the dominant mutated allele and the functional allele may be within the PAM site and/or proximal to the PAM site within the region that the RNA molecule is designed to hybridize to. A skilled artisan will appreciate that RNA molecules can be engineered to bind to a target of choice in a genome by commonly known methods in the art.

[0146] The term “PAM” as used herein refers to a nucleotide sequence of a target DNA located in proximity to the targeted DNA sequence and recognized by the CRISPR nuclease complex. The PAM sequence may differ depending on the nuclease identity. In addition, there are CRISPR nucleases that can target almost all PAMs. In some embodiments of the present invention, a CRISPR system utilizes one or more RNA molecules having a guide sequence portion to direct a CRISPR nuclease to a target DNA site via Watson-Crick base-pairing between the guide sequence portion and the protospacer on the target DNA site, which is next to the protospacer adjacent motif (PAM), which is an additional requirement for target recognition. The CRISPR nuclease then mediates cleavage of the target DNA site to create a double-stranded break within the protospacer. In a non-limiting example, a type II CRISPR system utilizes a mature crRNA:tracrRNA complex that directs the CRISPR nuclease, e.g. Cas9 to the target DNA the target DNA via Watson-Crick base-pairing between the guide sequence portion of the crRNA and the protospacer on the target DNA next to the protospacer adjacent motif (PAM). A skilled artisan will appreciate that each of the engineered RNA molecule of the present invention is further designed such as to associate with a target genomic DNA sequence of interest next to a protospacer adjacent motif (PAM), e.g., a PAM matching the sequence relevant for the type of CRISPR nuclease utilized, such as for a non-limiting example, NGG or NAG, wherein “N” is any nucleobase, for Streptococcus pyogenes Cas9 WT (SpCAS9); NNGRRT for Staphylococcus aureus (SaCas9); NNNVRYM for Jejuni Cas9 WT; NGAN or NGNG for SpCas9-VQR variant; NGCG for SpCas9-VRER variant; NGAG for SpCas9-EQR variant; NRRH for SpCas9-NRRH variant, wherein N is any nucleobase, R is A or G and H is A, C, or T; NRTH for SpCas9-NRTH variant, wherein N is any nucleobase, R is A or G and H is A, C, or T; NRCH for SpCas9-NRCH variant, wherein N is any nucleobase, R is A or G and H is A, C, or T; NG for SpG variant of SpCas9 wherein N is any nucleobase; NG or NA for SpCas9-NG variant of SpCas9 wherein N is any nucleobase; NR or NRN or NYN for SpRY variant of SpCas9, wherein N is any nucleobase, R is A or G and Y is C or T; NNG for Streptococcus canis Cas9 variant (ScCas9), wherein N is any nucleobase; NNNRRT for SaKKH-Cas9 variant of Staphylococcus aureus (SaCas9), wherein N is any nucleobase, and R is A or G; NNNNGATT for Neisseria meningitidis (NmCas9), wherein N is any nucleobase; TTN for Alicyclobacillus acidiphilus Cas12b (AacCas12b), wherein N is any nucleobase; or TTTV for Cpf1, wherein V is A, C or G. RNA molecules of the present invention are each designed to form complexes in conjunction with one or more different CRISPR nucleases and designed to target polynucleotide sequences of interest utilizing one or more different PAM sequences respective to the CRISPR nuclease utilized.

[0147] In some embodiments, an RNA-guided DNA nuclease e.g., a CRISPR nuclease, may be used to cause a DNA break, either double or single-stranded in nature, at a desired location in the genome of a cell. The most commonly used RNA-guided DNA nucleases are derived from CRISPR systems, however, other RNA-guided DNA nucleases are also contemplated for use in the genome editing compositions and methods described herein. For instance, see U.S. Patent Publication No. 2015/0211023, incorporated herein by reference.

[0148] CRISPR systems that may be used in the practice of the invention vary greatly. CRISPR systems can be a type I, a type II, or a type III system. Non-limiting examples of suitable CRISPR proteins include Cas3, Cas4, Cas5, Cas5e (or CasD), Cas6, Cas6e, Cas6f, Cas7, Cas8a1, Cas8a2, Cas8b, Cas8c, Cas9, Cas10, Casl Od, CasF, CasG, CasH, Csy1, Csy2, Csy3, Cse1 (or CasA), Cse2 (or CasB), Cse3 (or CasE), Cse4 (or CasC), Cscl, Csc2, Csa5, Csn2, Csm2, Csm3, Csm4, Csm5, Csm6, Cmr1, Cmr3, Cmr4, Cmr5, Cmr6, Csb1, Csb2, Csb3,Csx17, Csx14, Csx10, Csx16, CsaX, Csx3, Cszl, Csx5, Csf1, Csf2, Csf3, Csf4, and Cul966.

[0149] In some embodiments, the RNA-guided DNA nuclease is a CRISPR nuclease derived from a type II CRISPR system (e.g., Cas9). The CRISPR nuclease may be derived from Streptococcus pyogenes, Streptococcus thermophilus, Streptococcus sp., Staphylococcus aureus, Neisseria meningitidis, Treponema denticola, Nocardiopsis dassonvillei, Streptomyces pristinaespiralis, Streptomyces viridochromogenes, Streptomyces viridochromogenes, Streptosporangium roseum, Streptosporangium roseum, Alicyclobacillus acidocaldarius, Bacillus pseudomycoides, Bacillus selenitireducens, Exiguobacterium sibiricum, Lactobacillus delbrueckii, Lactobacillus salivarius, Microscilla marina, Burkholderiales bacterium, Polaromonas naphthalenivorans, Polaromonas sp., Crocosphaera watsonii, Cyanothece sp., Microcystis aeruginosa, Synechococcus sp., Acetohalobium arabaticum, Ammonifex degensii, Caldicelulosiruptor becscii, Candidatus Desulforudis, Clostridium botulinum, Clostridium Finegoldia magna, Natranaerobius thermophilus, Pelotomaculumthermopropionicum, Acidithiobacillus caldus, Acidithiobacillus ferrooxidans, Allochromatium vinosum, Marinobacter sp., Nitrosococcus halophilus, Nitrosococcus watsoni, Pseudoalteromonas haloplanktis, Ktedonobacter racemifer, Methanohalobium evestigatum, Anabaena variabilis, Nodularia spumigena, Nostoc sp., Arthrospira maxima, Arthrospira platensis, Arthrospira sp., Lyngbya sp., Microcoleus chthonoplastes, Oscillatoria sp., Petrotoga mobilis, Thermosipho africanus, Acaryochloris marina, or any species which encodes a CRISPR nuclease with a known PAM sequence. CRISPR nucleases encoded by uncultured bacteria may also be used in the context of the invention. (See Burstein et al. Nature, 2017). Variants of CRIPSR proteins having known PAM sequences e.g., SpCas9 D1135E variant, SpCas9 VQR variant, SpCas9 EQR variant, or SpCas9 VRER variant may also be used in the context of the invention.

[0150] Thus, an RNA guided DNA nuclease of a CRISPR system, such as a Cas9 protein or modified Cas9 or homolog or ortholog of Cas9, or other RNA guided DNA nucleases belonging to other types of CRISPR systems, such as Cpf1 and its homologs and orthologs, may be used in the compositions of the present invention. Additional CRISPR nucleases may also be used, for example, the nucleases described in PCT International Application Publication Nos. WO2020/223514 and WO2020/223553, which are hereby incorporated by reference.

[0151] In certain embodiments, the CRIPSR nuclease may be a “functional derivative” of a naturally occurring Cas protein. A “functional derivative” of a native sequence polypeptide is a compound having a qualitative biological property in common with a native sequence polypeptide. “Functional derivatives” include, but are not limited to, fragments of a native sequence and derivatives of a native sequence polypeptide and its fragments, provided that they have a biological activity in common with a corresponding native sequence polypeptide. A biological activity contemplated herein is the ability of the functional derivative to hydrolyze a DNA substrate into fragments. The term “derivative” encompasses both amino acid sequence variants of polypeptide, covalent modifications, and fusions thereof. Suitable derivatives of a Cas polypeptide or a fragment thereof include but are not limited to mutants, fusions, covalent modifications of Cas protein or a fragment thereof. Cas protein, which includes Cas protein or a fragment thereof, as well as derivatives of Cas protein or a fragment thereof, may be obtainable from a cell or synthesized chemically or by a combination of these two procedures. The cell may be a cell that naturally produces Cas protein, or a cell that naturally produces Cas protein and is genetically engineered to produce the endogenous Cas protein at a higher expression level or to produce a Cas protein from an exogenously introduced nucleic acid, which nucleic acid encodes a Cas that is same or different from the endogenous Cas. In some cases, the cell does not naturally produce Cas protein and is genetically engineered to produce a Cas protein.

[0152] In some embodiments, the CRISPR nuclease is Cpf1. Cpf1 is a single RNA-guided endonuclease which utilizes a T-rich protospacer-adjacent motif. Cpf1 cleaves DNA via a staggered DNA double-stranded break. Two Cpf1 enzymes from Acidaminococcus and Lachnospiraceae have been shown to carry out efficient genome-editing activity in human cells. (See Zetsche et al., 2015).

[0153] Thus, an RNA guided DNA nuclease of a Type II CRISPR System, such as a Cas9 protein or modified Cas9 or homologs, orthologues, or variants of Cas9, or other RNA guided DNA nucleases belonging to other types of CRISPR systems, such as Cpf1 and its homologs, orthologues, or variants, may be used in the present invention.

[0154] In some embodiments, the guide molecule comprises one or more chemical modifications which imparts a new or improved property (e.g., improved stability from degradation, improved hybridization energetics, or improved binding properties with an RNA guided DNA nuclease). Suitable chemical modifications include, but are not limited to: modified bases, modified sugar moieties, or modified inter-nucleoside linkages. Non-limiting examples of suitable chemical modifications include: 4-acetylcytidine, 5-(carboxyhydroxymethyl)uridine, 2′-O-methylcytidine, 5-carboxymethylaminomethyl-2-thiouridine, 5-carboxymethylaminomethyluridine, dihydrouridine, 2′-O-methylpseundouridine, “beta, D-galactosylquenosine”, 2′-O-methylguanosine, inosine, N6-isopentenyladenosine. 1-methyladenosine, 1-methylpseudouridine, 1-methylguanosine, 1-methylinosine, “2,2-dimethylguanosine”, 2-methyladenosine, 2-methylguanosine, 3-methylcytidine, 5-methylcytidine, N6-methyladenosine, 7-methylguanosine, 5-methylaminomethyluridine, 5-methoxyaminomethyl-2-thiouridine, “beta, D-mannosylqueuosine”, 5-methoxycarbonylmethyl-2-thiouridine, 5-methoxycarbonylmethyluridine, 5-methoxyuridine, 2-methylthio-N6-isopentenyladenosine, N-((9-beta-D-ribofuranosyl-2-methylthiopurine-6-yl)carbamoyl)threonine, N4(9-beta-D-ribofuranosylpurine-6-yl)N-methylcarbamoyl)threonine, uridine-5-oxyacetic acid-methylester, uridine-5-oxyacetic acid, wybutoxosine, queuosine, 2-thiocytidine, 5-methyl-2-thiouridine, 2-thiouridine, 4-thiouridine, N-((9-beta-D-ribofuranosylpurine-6-yl)-carbamoyl)threonine, 2′-O-methyl-2′-O-methyluridine, wybutosine, “3-(3-amino-3-carboxy-propyl)uridine, (acp3)u”, 2′-0-methyl (M), 3′-phosphorothioate (MS), 3′-thioPACE (MSP), pseudouridine, or 1-methyl pseudo-uridine. Each possibility represents a separate embodiment of the present invention.

Guide Sequences which Specifically Target a Mutant Allele

[0155] A given gene may contain thousands of SNPs. Utilizing a twenty-five base pair target window for targeting each SNP in a gene would require hundreds of thousands of guide sequences. Any given guide sequence when utilized to target a SNP may result in degradation of the guide sequence, limited activity, no activity, or off-target effects. Accordingly, suitable guide sequences are necessary for targeting a given gene. By the present invention, a novel set of guide sequences have been identified for knocking out expression of a mutated LRRK2 protein, inactivating a mutant LRRK2 gene allele, and treating monogenic Parkinson's disease.

[0156] The present disclosure provides guide sequences capable of specifically targeting a mutated allele for inactivation while leaving the functional allele unmodified. The guide sequences of the present invention are designed to, and are most likely to, specifically differentiate between a mutated allele and a functional allele. Of all possible guide sequences which target a mutated allele desired to be inactivated, the specific guide sequences disclosed herein are specifically effective to function with the disclosed embodiments.

[0157] Briefly, the guide sequences may have properties as follows: (1) target SNP/insertion/deletion/indel with a high prevalence in the general population, in a specific ethnic population or in a patient population is above 1% and the SNP/insertion/deletion/indel heterozygosity rate in the same population is above 1%; (2) target a location of a SNP/insertion/deletion/indel proximal to a portion of the gene e.g., within 5k bases of any portion of the gene, for example, a promoter, a UTR, an exon or an intron; and (3) target a mutant allele using an RNA molecule which targets a founder or common pathogenic mutations for the disease/gene. In some embodiments, the prevalence of the SNP/insertion/deletion/indel in the general population, in a specific ethnic population or in a patient population is above 1%, 2%, 3%, 4%, 5%, 6%, 7%, 8%, 9%, 10%, 11%, 12%, 13%, 14%, or 15% and the SNP/insertion/deletion/indel heterozygosity rate in the same population is above 1%, 2%, 3%, 4%, 5%, 6%, 7%, 8%, 9%, 10%, 11%, 12%, 13%, 14%, or 15%. Each possibility represents a separate embodiment and may be combined at will.

[0158] For each gene, according to SNP/insertion/deletion/indel any one of the following strategies may be used to deactivate the mutated allele: (1) Knockout strategy using one RNA molecule—one RNA molecule is utilized to direct a CRISPR nuclease to a mutated allele and create a double-strand break (DSB) leading to formation of a frameshift mutation in an exon or in a splice site region of the mutated allele; and (2) Excision of at least one coding exon or a complete knockout of a mutant LRRK2 allele using two RNA molecules, for example, a first RNA molecule targets a SNP position of an Intron 2 of the mutant LRRK2 allele and a second, non-discriminatory RNA molecule targets a sequence in Intron 1, preferably within 500 basepairs upstream to Exon 2, of the LRRK2 gene.

[0159] Based on the locations of identified SNPs/insertions/deletions/indels for each mutant allele, any one of, or a combination of, the above-mentioned methods to deactivate the mutant allele may be utilized.

[0160] In some embodiments of the present invention, an RNA molecule is used to target a pathogenic mutation within a mutant LRRK2 allele. In some embodiments of the present invention, an RNA molecule is used to target a SNP position. In some embodiments, the location of the SNP position is within a region of three kilobases upstream of the transcriptional start site to three kilobases downstream of the LRRK2 3′UTR.

[0161] Guide sequences of the present invention may: (1) target a heterozygous SNP for the targeted gene; (2) target a heterozygous SNP upstream or downstream of the gene; (3) target a SNP with a prevalence of the SNP/insertion/deletion/indel in the general population, in a specific ethnic population, or in a patient population above 1%; (4) have a guanine-cytosine content of greater than 30% and less than 85%; (5) have no repeat of seven or more thymine/uracil, guanine, cytosine, or adenine; and (6) have no additional target in the genome with zero mismatch with the same PAM sequence. Guide sequences of the present invention may satisfy any one of the above criteria and are most likely to differentiate between a mutated allele from its corresponding functional allele.

[0162] In some embodiments of the present invention, at least one nucleotide which differs between the mutated allele and the functional allele is upstream, downstream or within the sequence of the disease-causing mutation of the gene of interest. The at least one nucleotide which differs between the mutated allele and the functional allele may be within an exon or within an intron of the gene of interest. In some embodiments, the at least one nucleotide which differs between the mutated allele and the functional allele is within an exon of the gene of interest. In some embodiments, the at least one nucleotide which differs between the mutated allele and the functional allele is within an intron or the exon of the gene of interest, in close proximity to the splice site between the intron and the exon e.g., 1, 2, 3, 4, 5, 6, 7, 8, 9, 10, 11, 12, 13, 14, 15, 16, 17, 18, 19, 20, 21, 22, 23, 24, 25, 26, 27, 28, 29 or 30 nucleotides upstream or downstream to the splice site. Each possibility represents a separate embodiment.

[0163] In some embodiments, the at least one nucleotide is a single nucleotide polymorphism (SNP). In some embodiments, each of the nucleotide variants of the SNP may be expressed in the mutated allele. In some embodiments, the SNP may be a founder or common pathogenic mutation.

[0164] Guide sequences may target a SNP which has both (1) a high prevalence in the general population e.g., above 1% in the population; and (2) a high heterozygosity rate in the population, e.g., above 1%. Guide sequences may target a SNP that is globally distributed. A SNP may be a founder or common pathogenic mutation. In some embodiments, the prevalence in the general population is above 1%, 2%, 3%, 4%, 5%, 6%, 7%, 8%, 9%, 10%, 11%, 12%, 13%, 14%, or 15%. Each possibility represents a separate embodiment. In some embodiments, the heterozygosity rate in the population is above 1%, 2%, 3%, 4%, 5%, 6%, 7%, 8%, 9%, 10%, 11%, 12%, 13%, 14%, or 15%. Each possibility represents a separate embodiment.

[0165] In some embodiments, the at least one nucleotide which differs between the mutated allele and the functional allele is linked to/co-exists with the disease-causing mutation in high prevalence in a population. In such embodiments, “high prevalence” refers to at least 92%, 93%, 94%, 95%, 96%, 97%, 98%, 99%, or 100%. Each possibility represents a separate embodiment of the present invention. In one embodiment, the at least one nucleotide which differs between the mutated allele and the functional allele, is a disease-associated mutation. In some embodiments, the SNP is highly prevalent in the population. In such embodiments, “highly prevalent” refers to at least 10%, 11%, 12%, 13%, 14%, 15%, 20%, 30%, 40%, 50%, 60%, or 70% of a population. Each possibility represents a separate embodiment of the present invention.

### Delivery to Cells

[0166] The RNA molecule compositions described herein may be delivered to a target cell by any suitable means. RNA molecule compositions of the present invention may be targeted to any cell which contains and/or expresses a mutated allele, including any mammalian or plant cell. For example, in one embodiment the RNA molecule specifically targets a mutated LRRK2 allele and the target cell is an HSC. The delivery to the cell may be performed in-vitro, ex-vivo, or in-vivo. Further, the nucleic acid compositions described herein may be delivered as one or more of DNA molecules, RNA molecules, ribonucleoproteins (RNPs), nucleic acid vectors, or any combination thereof.

[0167] In some embodiments, any one of the compositions described herein is in the form of an RNP composition and is delivered to a cell ex-vivo. In some embodiments, the cell is a stem cell, a neuron, or a dopaminergic cell. The RNP composition may be delivered to the cell by any known ex-vivo delivery method, including but not limited to, electroporation, viral transduction, nanoparticle delivery, liposomes, etc. Additional detailed delivery methods are described throughout this section.

[0168] In some embodiments, the RNA molecule comprises a chemical modification. Non-limiting examples of suitable chemical modifications include 2′-0-methyl (M), 2′-0-methyl, 3′phosphorothioate (MS) or 2′-0-methyl, 3′thioPACE (MSP), pseudouridine, and 1-methyl pseudo-uridine. Each possibility represents a separate embodiment of the present invention.

[0169] Any suitable viral vector system may be used to deliver nucleic acid compositions e.g., the RNA molecule compositions of the subject invention. Conventional viral and non-viral based gene transfer methods can be used to introduce nucleic acids and target tissues. In certain embodiments, nucleic acids are administered for in vivo or ex vivo gene therapy uses. Non-viral vector delivery systems include naked nucleic acid, and nucleic acid complexed with a delivery vehicle such as a liposome or poloxamer. For a review of gene therapy procedures, see Anderson (1992); Nabel & Felgner (1993); Mitani & Caskey (1993); Dillon (1993); Miller (1992); Van Brunt (1988); Vigne (1995); Kremer & Perricaudet (1995); Haddada et al. (1995); and Yu et al. (1994).

[0170] Methods of non-viral delivery of nucleic acids and/or proteins include electroporation, lipofection, microinjection, biolistics, particle gun acceleration, virosomes, liposomes, immunoliposomes, lipid nanoparticles (LNPs), polycation or lipid:nucleic acid conjugates, artificial virions, and agent-enhanced uptake of nucleic acids or can be delivered to plant cells by bacteria or viruses (e.g., Agrobacterium, Rhizobium sp. NGR234, Sinorhizoboiummeliloti, Mesorhizobium loti, tobacco mosaic virus, potato virus X, cauliflower mosaic virus and cassava vein mosaic virus). (See, e.g., Chung et al., 2006). Sonoporation using, e.g., the Sonitron 2000 system (Rich-Mar), can also be used for delivery of nucleic acids. Cationic-lipid mediated delivery of proteins and/or nucleic acids is also contemplated as an in vivo, ex vivo, or in vitro delivery method. (See Zuris et al. (2015); see also Coelho et al. (2013); Judge et al. (2006); and Basha et al. (2011)).

[0171] Non-viral vectors, such as transposon-based systems e.g. recombinant Sleeping Beauty transposon systems or recombinant PiggyBac transposon systems, may also be delivered to a target cell and utilized for transposition of a polynucleotide sequence of a molecule of the composition or a polynucleotide sequence encoding a molecule of the composition in the target cell.

[0172] Additional exemplary nucleic acid delivery systems include those provided by Amaxa.RTM. Biosystems (Cologne, Germany), Maxcyte, Inc. (Rockville, Md.), BTX Molecular Delivery Systems (Holliston, Mass.) and Copernicus Therapeutics Inc., (see, e.g., U.S. Pat. No. 6,008,336). Lipofection is described in e.g., U.S. Pat. Nos. 5,049,386, 4,946,787; and 4,897,355, and lipofection reagents are sold commercially (e.g., Transfectam.™., Lipofectin.™. and Lipofectamine.™. RNAiMAX). Cationic and neutral lipids that are suitable for efficient receptor-recognition lipofection of polynucleotides include those disclosed in PCT International Publication Nos. WO/1991/017424 and WO/1991/016024. Delivery can be to cells (ex vivo administration) or target tissues (in vivo administration).

[0173] The preparation of lipid:nucleic acid complexes, including targeted liposomes such as immunolipid complexes, is well known to one of skill in the art (see, e.g., Crystal, Science (1995); Blaese et al., (1995); Behr et al., (1994); Remy et al. (1994); Gao and Huang (1995); Ahmad and Allen (1992); U.S. Pat. Nos. 4,186,183; 4,217,344; 4,235,871; 4,261,975; 4,485,054; 4,501,728; 4,774,085; 4,837,028; and 4,946,787).

[0174] Additional methods of delivery include the use of packaging the nucleic acids to be delivered into EnGeneIC delivery vehicles (EDVs). These EDVs are specifically delivered to target tissues using bispecific antibodies where one arm of the antibody has specificity for the target tissue and the other has specificity for the EDV. The antibody brings the EDVs to the target cell surface and then the EDV is brought into the cell by endocytosis. Once in the cell, the contents are released (See MacDiarmid et al., 2009).

[0175] The use of RNA or DNA viral based systems for viral mediated delivery of nucleic acids take advantage of highly evolved processes for targeting a virus to specific cells in the body and trafficking the viral payload to the nucleus. Viral vectors can be administered directly to patients (in vivo) or they can be used to treat cells in vitro and the modified cells are administered to patients (ex vivo). Conventional viral based systems for the delivery of nucleic acids include, but are not limited to, retroviral, lentivirus, adenoviral, adeno-associated, vaccinia and herpes simplex virus vectors for gene transfer.

[0176] The tropism of a retrovirus can be altered by incorporating foreign envelope proteins, expanding the potential target population of target cells. Lentiviral vectors are retroviral vectors that are able to transduce or infect non-dividing cells and typically produce high viral titers. Selection of a retroviral gene transfer system depends on the target tissue. Retroviral vectors are comprised of cis-acting long terminal repeats with packaging capacity for up to 6-10 kb of foreign sequence. The minimum cis-acting LTRs are sufficient for replication and packaging of the vectors, which are then used to integrate the therapeutic gene into the target cell to provide permanent transgene expression. Widely used retroviral vectors include those based upon murine leukemia virus (MuLV), gibbon ape leukemia virus (GaLV), Simian Immunodeficiency virus (SIV), human immunodeficiency virus (HIV), and combinations thereof (See, e.g., Buchschacher et al. (1992); Johann et al. (1992); Sommerfelt et al. (1990); Wilson et al. (1989); Miller et al. (1991); PCT International Publication No. WO/1994/026877A1).

[0177] At least six viral vector approaches are currently available for gene transfer in clinical trials, which utilize approaches that involve complementation of defective vectors by genes inserted into helper cell lines to generate the transducing agent.

[0178] pLASN and MFG-S are examples of retroviral vectors that have been used in clinical trials (See Dunbar et al., 1995; Kohn et al., 1995; Malech et al., 1997). PA317/pLASN was the first therapeutic vector used in a gene therapy trial (Blaese et al., 1995). Transduction efficiencies of 50% or greater have been observed for MFG-S packaged vectors. (Ellem et al., (1997); Dranoff et al., 1997).

[0179] Packaging cells are used to form virus particles that are capable of infecting a host cell. Such cells include 293 cells, which package adenovirus, AAV, and Psi-2 cells or PA317 cells, which package retrovirus. Viral vectors used in gene therapy are usually generated by a producer cell line that packages a nucleic acid vector into a viral particle. The vectors typically contain the minimal viral sequences required for packaging and subsequent integration into a host (if applicable), other viral sequences being replaced by an expression cassette encoding the protein to be expressed. The missing viral functions are supplied in trans by the packaging cell line. For example, AAV vectors used in gene therapy typically only possess inverted terminal repeat (ITR) sequences from the AAV genome which are required for packaging and integration into the host genome. Viral DNA is packaged in a cell line, which contains a helper plasmid encoding the other AAV genes, namely rep and cap, but lacking ITR sequences. The cell line is also infected with adenovirus as a helper. The helper virus promotes replication of the AAV vector and expression of AAV genes from the helper plasmid. The helper plasmid is not packaged in significant amounts due to a lack of ITR sequences. Contamination with adenovirus can be reduced by, e.g., heat treatment to which adenovirus is more sensitive than AAV. Additionally, AAV can be produced at clinical scale using baculovirus systems (see U.S. Pat. No. 7,479,554).

[0180] In many gene therapy applications, it is desirable that the gene therapy vector be delivered with a high degree of specificity to a particular tissue type. Accordingly, a viral vector can be modified to have specificity for a given cell type by expressing a ligand as a fusion protein with a viral coat protein on the outer surface of the virus. The ligand is chosen to have affinity for a receptor known to be present on the cell type of interest. For example, Han et al. (1995) reported that Moloney murine leukemia virus can be modified to express human heregulin fused to gp70, and the recombinant virus infects certain human breast cancer cells expressing human epidermal growth factor receptor. This principle can be extended to other virus-target cell pairs, in which the target cell expresses a receptor and the virus expresses a fusion protein comprising a ligand for the cell-surface receptor. For example, filamentous phage can be engineered to display antibody fragments (e.g., FAB or Fv) having specific binding affinity for virtually any chosen cellular receptor. Although the above description applies primarily to viral vectors, the same principles can be applied to nonviral vectors. Such vectors can be engineered to contain specific uptake sequences which favor uptake by specific target cells.

[0181] Gene therapy vectors can be delivered in vivo by administration to an individual patient, typically by systemic administration (e.g., intravitreal, intravenous, intraperitoneal, intramuscular, subdermal, or intracranial infusion) or topical application, as described below. Alternatively, vectors can be delivered to cells ex vivo, such as cells explanted from an individual patient (e.g., lymphocytes, bone marrow aspirates, tissue biopsy) or universal donor hematopoietic stem cells, followed by reimplantation of the cells into a patient, optionally after selection for cells which have incorporated the vector. A non-limiting exemplary ex vivo approach may involve removal of tissue (e.g., peripheral blood, bone marrow, and spleen) from a patient for culture, nucleic acid transfer to the cultured cells (e.g., hematopoietic stem cells), followed by grafting the cells to a target tissue (e.g., bone marrow, and spleen) of the patient. In some embodiments, the stem cell or hematopoietic stem cell may be further treated with a viability enhancer.

[0182] Ex vivo cell transfection for diagnostics, research, or for gene therapy (e.g., via re-infusion of the transfected cells into the host organism) is well known to those of skill in the art. In a preferred embodiment, cells are isolated from the subject organism, transfected with a nucleic acid composition, and re-infused back into the subject organism (e.g., patient). Various cell types suitable for ex vivo transfection are well known to those of skill in the art (See, e.g., Freshney, “Culture of Animal Cells, A Manual of Basic Technique and Specialized Applications (6th edition, 2010) and the references cited therein for a discussion of how to isolate and culture cells from patients).

[0183] Suitable cells include, but are not limited to, eukaryotic cells and/or cell lines. Non-limiting examples of such cells or cell lines generated from such cells include COS, CHO (e.g., CHO—S, CHO-K1, CHO-DG44, CHO-DUXB11, CHO-DUKX, CHOK1SV), VERO, MDCK, WI38, V79, B14AF28-G3, BHK, HaK, NSO, SP2/0-Ag14, HeLa, HEK293 (e.g., HEK293-F, HEK293-H, HEK293-T), perC6 cells, any plant cell (differentiated or undifferentiated), as well as insect cells such as Spodopterafugiperda (Sf), or fungal cells such as Saccharomyces, Pichia and Schizosaccharomyces. In certain embodiments, the cell line is a CHO-K1, MDCK or HEK293 cell line. Additionally, primary cells may be isolated and used ex vivo for reintroduction into the subject to be treated following treatment with a guided nuclease system (e.g. CRISPR/Cas). Suitable primary cells include peripheral blood mononuclear cells (PBMC), and other blood cell subsets such as, but not limited to, CD4+ T cells or CD8+ T cells. Suitable cells also include stem cells such as, by way of example, embryonic stem cells, induced pluripotent stem cells, hematopoietic stem cells (CD34+), neuronal stem cells and mesenchymal stem cells.

[0184] In one embodiment, stem cells are used in ex vivo procedures for cell transfection and gene therapy. The advantage to using stem cells is that they can be differentiated into other cell types in vitro, or can be introduced into a mammal (such as the donor of the cells) where they will engraft in the bone marrow. Methods for differentiating CD34+ cells in vitro into clinically important immune cell types using cytokines such a GM-CSF, IFN-gamma, and TNF-alpha are known (as a non-limiting example see, Inaba et al., 1992).

[0185] Stem cells are isolated for transduction and differentiation using known methods. For example, stem cells are isolated from bone marrow cells by panning the bone marrow cells with antibodies which bind unwanted cells, such as CD4+ and CD8+ (T cells), CD45+(panB cells), GR-1 (granulocytes), and Tad (differentiated antigen presenting cells) (as a non-limiting example, see Inaba et al., 1992). Stem cells that have been modified may also be used in some embodiments.

[0186] Vectors (e.g., retroviruses, liposomes, etc.) containing therapeutic nucleic acid compositions can also be administered directly to an organism for transduction of cells in vivo. Administration is by any of the routes normally used for introducing a molecule into ultimate contact with blood or tissue cells including, but not limited to, injection, infusion, topical application (e.g., eye drops and cream) and electroporation. Suitable methods of administering such nucleic acids are available and well known to those of skill in the art, and, although more than one route can be used to administer a particular composition, a particular route can often provide a more immediate and more effective reaction than another route. According to some embodiments, the composition is delivered via IV injection.

[0187] Vectors suitable for introduction of transgenes into immune cells (e.g., T-cells) include non-integrating lentivirus vectors. See, e.g., U.S. Patent Publication No. 2009/0117617.

[0188] Pharmaceutically acceptable carriers are determined in part by the particular composition being administered, as well as by the particular method used to administer the composition. Accordingly, there is a wide variety of suitable formulations of pharmaceutical compositions available, as described below (See, e.g., Remington's Pharmaceutical Sciences, 17th ed., 1989).

[0189] In accordance with some embodiments, there is provided an RNA molecule which binds to/associates with and/or directs the RNA guided DNA nuclease to a sequence comprising at least one nucleotide which differs between a mutated allele and a functional allele (e.g., SNP) of a gene of interest (i.e., a sequence of the mutated allele which is not present in the functional allele). The sequence may be within the disease associated mutation. The sequence may be upstream or downstream to the disease associated mutation. Any sequence difference between the mutated allele and the functional allele may be targeted by an RNA molecule of the present invention to inactivate the mutant allele, or otherwise disable its dominant disease-causing effects, while preserving the activity of the functional allele.

[0190] The disclosed compositions and methods may also be used in the manufacture of a medicament for treating dominant genetic disorders in a patient.

### Mechanisms of Action for LRRK2 Knockout Methods

[0191] Without being bound by any theory or mechanism, the instant invention may be utilized to apply a CRISPR nuclease to process a mutated pathogenic LRRK2 allele and not a functional LRRK2 allele, such as to prevent expression of the mutated pathogenic allele or to produce a truncated non-pathogenic peptide from the mutated pathogenic allele, in order to prevent or treat monogenic Parkinson's disease. A specific guide sequence may be selected from Table 1 based on the targeted SNP position and the type of CRISPR nuclease used (e.g. according to a required PAM sequence). Notably, according to the Genome Aggregation Database (gnomAd) there are healthy individuals with loss of function mutations in one of their LRRK2 alleles. Therefore, there is no concern for haploinsufficiency upon knocking out a mutated LRRK2 allele.

[0192] The LRRK2 gene is located on chromosome 12 and encodes the Leucine-rich repeat serine/threonine-protein kinase 2 protein. One strategy to knockout a LRRK2 mutant allele is to target a pathogenic mutation position using one RNA molecule in order to mediate truncation or nonsense mediated decay (NMD) of the LRRK2 mutant allele. As a non-limiting example, a frameshift in a mutated LRRK2 allele may be introduced by utilizing one RNA molecule to target a pathogenic mutation or SNP position in a coding exon of the mutated LRRK2 allele (e.g. rs10878245 in Exon 5, rs1427263 in Exon 34 and rs10878405 in Exon 43) in order to mediate a double-strand break, which leads to generation of a frameshift mutation and expression of a truncated protein or nonsense mediated decay (NMD) of its transcripts.

[0193] Alternatively, a LRRK2 mutant allele may be knocked-out by an excision strategy that utilizes two RNA molecules. In such strategies, SNP positions within three kilobases upstream to the transcription start site and three kilobases downstream of the 3′UTR of the LRRK2 gene may be targeted.

[0194] In one excision strategy approach, Exon 2 of a mutant LRRK2 allele is excised by utilizing a first RNA molecule to target a SNP position in Intron 2 of the mutant LRRK2 allele and utilizing a second non-discriminatory RNA molecule to target a region in Intron 1, of the LRRK2 gene. In some embodiments of this approach, the target region is within 500 bps of Exon 2.

[0195] In another excision strategy approach, Exon 3 of a mutant LRRK2 allele is excised by utilizing a first RNA molecule to target a SNP position in Intron 4 and utilizing a second non-discriminatory RNA molecule to target a region in Intron 3. In some embodiments of this approach, the target region is within 500 bps of Exon 4.

[0196] In another excision strategy approach, the 3′UTR of a mutant LRRK2 allele is excised by utilizing a first RNA molecule to target a SNP position in Intron 49 and utilizing a second non-discriminatory RNA molecule to target a region within 500 base pairs downstream to Exon 51. In some embodiments of this approach, the target region is within 500 bps of Exon 4.

[0197] Alternatively, the 3′UTR of a mutant LRRK2 allele is excised by utilizing a first RNA molecule to target a SNP position downstream of Exon 51 and utilizing a second non-discriminatory RNA molecule to target a region in Intron 50 or Intron 49, preferably within 500 base pairs upstream to Exon 50.

[0198] In another excision strategy approach, a promoter region of a mutant LRRK2 allele is excised by utilizing a first RNA molecule to target a SNP with 3000 base pairs of the transcriptional start site and utilizing a second non-discriminatory RNA molecule to target a region in Intron 1 or Intron 2, preferably within 500 base pairs downstream to Exon 2.

Examples of RNA Guide Sequences which Specifically Target Mutated Alleles of LRRK2 Gene

[0199] Although a large number of guide sequences can be designed to target a mutated allele, the nucleotide sequences described in Table 1 identified by SEQ ID NOs: 1-103,606 below were specifically selected to effectively implement the methods set forth herein and to effectively discriminate between alleles.

[0200] Table 1 shows guide sequences designed for use as described in the embodiments above to associate with different SNPs or pathogenic mutations within a sequence of a mutated LRRK2 allele. Each engineered guide molecule is further designed such as to associate with a target genomic DNA sequence of interest that lies next to a protospacer adjacent motif (PAM), e.g., a PAM matching the sequence NGG or NAG, where “N” is any nucleobase. The guide sequences were designed to work in conjunction with one or more different CRISPR nucleases, including, but not limited to, e.g. SpCas9WT (PAM SEQ: NGG), SpCas9.VQR.1 (PAM SEQ: NGAN), SpCas9.VQR.2 (PAM SEQ: NGNG), SpCas9.EQR (PAM SEQ: NGAG), SpCas9.VRER (PAM SEQ: NGCG), SaCas9WT (PAM SEQ: NNGRRT), SpRY (PAM SEQ: NRN or NYN), NmCas9WT (PAM SEQ: NNNNGATT), Cpf1 (PAM SEQ: TTTV), or JeCas9WT (PAM SEQ: NNNVRYM). RNA molecules of the present invention are each designed to form complexes in conjunction with one or more different CRISPR nucleases and designed to target polynucleotide sequences of interest utilizing one or more different PAM sequences respective to the CRISPR nuclease utilized.

TABLE 1
Guide sequences designed to associate with specific LRRK2 gene targets

| | SEQ ID NOS: | | |
|---|---|---|---|
| | of 20 base | SEQ ID NOs: of | SEQ ID NOs: of |
| Target | guides | 21 base guides | 22 base guides |
| 12:40225041_C_T | 1-46 | 47-96 | 97-148 |
| 12:40225058_C_A | 149-196 | 197-246 | 247-298 |
| 12:40225088_G_A | 299-345 | 346-395 | 396-447 |
| 12:40225159_G_A | 448-495 | 496-545 | 546-597 |
| 12:40225233_G_C | 598-645 | 646-695 | 696-747 |
| 12:40225558_C_T | 748-791 | 792-833 | 834-877 |
| 12:40225618_T_C | 878-921 | 922-971 | 972-1023 |
| 12:40225628_G_A | 1024-1070 | 1071-1120 | 1121-1172 |
| 12:40225631_T_C | 1024, 1035, | 1072, 1083, | 1121, 1123, |
| | 1049, 1055, | 1104, 1116, | 1168, 1171, |
| | 1173-1215 | 1216-1261 | 1262-1309 |
| 12:40232303_A_C | 1310-1356 | 1357-1406 | 1407-1458 |
| 12:40232345_G_C | 1459-1505 | 1506-1555 | 1556-1607 |
| 12:40232380_A_C | 1608-1652 | 1653-1698 | 1699-1746 |
| 12:40232385_T_C | 1747-1788 | 1789-1828 | 1829-1870 |
| 12:40235634_T_C | 1871-1912 | 1913-1945 | 1946-1988 |
| 12:40235646_C_G | 1989-2018 | 2019-2041 | 2042-2068 |
| 12:40235660_A_G | 2069-2113 | 2114-2160 | 2161-2209 |
| 12:40238078_A_G | 2210-2257 | 2258-2307 | 2308-2359 |
| 12:40240517_C_T | 2360-2367 | 2368-2373 | 2374-2381 |
| 12:40240531_T_C | 2382-2400 | 2401-2415 | 2416-2432 |
| 12:40240594_G_C | 2433-2479 | 2480-2529 | 2530-2581 |
| 12:40240602_T_C | 2582-2629 | 2630-2679 | 2680-2731 |
| 12:40243551_CAAT_C | 2732-2767 | 2768-2808 | 2809-2852 |
| 12:40243556_A_T | 2738, 2752, | 2776, 2784, | 2818, 2833, |
| | 2760, 2763, | 2791, 2793, | 2835, 2839, |
| | 2853-2885 | 2803-2804, | 2846-2847, |
| | | 2886-2918 | 2851, 2919-2953 |
| 12:40249822_T_G | 2954-2973 | 2974-2982 | 2983-2997 |
| 12:40249843_C_G | 2998-3019 | 3020-3039 | 3040-3065 |
| 12:40249854_C_T | 3066-3098 | 3099-3126 | 3127-3158 |
| 12:40249881_T_C | 3159-3205 | 3206-3255 | 3256-3307 |
| 12:40249908_A_G | 3308-3355 | 3356-3405 | 3406-3457 |
| 12:40251273_G_A | 3458-3475 | 3476-3480 | 3481-3490 |
| 12:40251303_G_A | 3491-3526 | 3527-3563 | 3564-3603 |
| 12:40251361_A_G | 3604-3651 | 3652-3701 | 3702-3753 |
| 12:40251366_C_A | 3754-3800 | 3801-3850 | 3851-3902 |
| 12:40251369_G_A | 3761, 3775, | 3803, 3808, | 3853, 3868, |
| | 3799, 3903- | 3818, 3850, | 3890, 3894, |
| | 3945 | 3946-3991 | 3992-4039 |
| 12:40251495_C_T | 4040-4065 | 4066-4083 | 4084-4108 |
| 12:40252906_A_G | 4109-4135 | 4136-4163 | 4164-4195 |
| 12:40252929_G_A | 4196-4243 | 4244-4293 | 4294-4345 |
| 12:40252939_C_T | 4346-4392 | 4393-4442 | 4443-4494 |
| 12:40252952_T_G | 4495-4541 | 4542-4591 | 4592-4643 |
| 12:40252958_A_C | 4644-4691 | 4692-4741 | 4742-4793 |
| 12:40252968_G_A | 4794-4834 | 4835-4874 | 4875-4920 |
| 12:40252974_C_T | 4921-4966 | 4967-5012 | 5013-5063 |
| 12:40252978_C_T | 4944, 4964, | 4998, 5004, | 5020, 5060, |
| | 5064-5108 | 5109-5156 | 5157-5206 |
| 12:40252984_C_T | 5207-5253 | 5254-5303 | 5304-5355 |
| 12:40252988_T_C | 5236, 5244, | 5262, 5300, | 5306, 5338, |
| | 5356-5400 | 5401-5448 | 5449-5498 |
| 12:40253016_G_A | 5499-5537 | 5538-5567 | 5568-5605 |
| 12:40257311_A_G | 5606-5648 | 5649-5698 | 5699-5750 |
| 12:40257341_G_T | 5751-5796 | 5797-5838 | 5839-5884 |
| 12:40259507_A_G | 5885-5932 | 5933-5982 | 5983-6034 |
| 12:40259525_A_T | 6035-6074 | 6075-6112 | 6113-6154 |
| 12:40259534_G_T | 6155-6186 | 6187-6211 | 6212-6243 |
| 12:40259578_G_A | 6244-6277 | 6278-6311 | 6312-6347 |
| 12:40263806_A_G | 6348-6394 | 6395-6442 | 6443-6493 |
| 12:40263875_A_G | 6494-6538 | 6539-6579 | 6580-6626 |
| 12:40263900_G_A | 6627-6662 | 6663-6690 | 6691-6720 |
| 12:40263907_T_C | 6721-6756 | 6757-6788 | 6789-6824 |
| 12:40274646_CC_C | 6825-6858 | 6859-6879 | 6880-6908 |
| 12:40274881_T_C | 6909-6953 | 6954-6993 | 6994-7040 |
| 12:40274899_A_G | 7041-7084 | 7085-7124 | 7125-7169 |
| 12:40274917_G_C | 7170-7216 | 7217-7262 | 7263-7311 |
| 12:40277933_T_C | 7312-7359 | 7360-7408 | 7409-7460 |
| 12:40277968_A_C | 7461-7500 | 7501-7523 | 7524-7559 |
| 12:40277971_A_G | 7469, 7471, | 7503, 7510, | 7527, 7543, |
| | 7481, 7498, | 7515, 7518, | 7545, 7551, |
| | 7560-7592 | 7593-7613 | 7614-7645 |
| 12:40278025_T_A | 7646-7693 | 7694-7742 | 7743-7794 |
| 12:40278154_A_G | 7795-7831 | 7832-7865 | 7866-7903 |
| 12:40278167_C_T | 7904-7950 | 7951-7998 | 7999-8049 |
| 12:40283881_G_A | 8050-8073 | 8074-8099 | 8100-8127 |
| 12:40283915_T_C | 8128-8174 | 8175-8224 | 8225-8276 |
| 12:40283947_C_T | 8277-8324 | 8325-8374 | 8375-8426 |
| 12:40283966_G_A | 8427-8473 | 8474-8523 | 8524-8575 |
| 12:40283985_C_A | 8576-8622 | 8623-8672 | 8673-8724 |
| 12:40283990_T_C | 8725-8772 | 8773-8822 | 8823-8874 |
| 12:40284061_A_G | 8875-8921 | 8922-8967 | 8968-9017 |
| 12:40284076_C_A | 9018-9056 | 9057-9088 | 9089-9126 |
| 12:40284139_T_C | 9127-9164 | 9165-9193 | 9194-9226 |
| 12:40287363_C_A | 9227-9266 | 9267-9300 | 9301-9338 |
| 12:40287438_A_G | 9339-9385 | 9386-9435 | 9436-9487 |
| 12:40287461_A_G | 9488-9535 | 9536-9581 | 9582-9631 |
| 12:40293555_CTC_CCT | 9632-9671 | 9672-9711 | 9712-9753 |
| 12:40293607_C_T | 9754-9798 | 9799-9842 | 9843-9888 |
| 12:40293613_G_A | 9889-9936 | 9937-9986 | 9987-10038 |
| 12:40293624_G_C | 10039-10086 | 10087-10136 | 10137-10188 |
| 12:40293626_G_A | 10060, 10072, | 10109, 10119, | 10150, 10170, |
| | 10074, 10080, | 10124, 10130, | 10175, 10180, |
| | 10083-10084, | 10133, 10136, | 10185, 10188, |
| | 10189-10230 | 10231-10274 | 10275-10320 |
| 12:40293644_A_G | 10321-10368 | 10369-10418 | 10419-10470 |
| 12:40294854_T_G | 10471-10513 | 10514-10552 | 10553-10596 |
| 12:40294862_T_C | 10597-10639 | 10640-10679 | 10680-10724 |
| 12:40294866_G_T | 10622, 10628, | 10644, 10747- | 10681, 10758- |
| | 10725-10746 | 10757 | 10774 |
| 12:40294878_C_T | 10775-10789 | 10790-10794 | 10795-10802 |
| 12:40295448_A_G | 10803-10849 | 10850-10899 | 10900-10951 |
| 12:40295463_A_G | 10952-10998 | 10999-11048 | 11049-11100 |
| 12:40295466_G_A | 10955, 10965, | 11002, 11016, | 11067, 11076, |
| | 10991, 11101- | 11025, 11041, | 11091, 11095, |
| | 11144 | 11145-11190 | 11191-11238 |
| 12:40295535_A_T | 11239-11277 | 11278-11315 | 11316-11359 |
| 12:40295566_A_G | 11360-11407 | 11408-11457 | 11458-11509 |
| 12:40295574_A_C | 11510-11557 | 11558-11607 | 11608-11659 |
| 12:40295581_G_T | 11660-11706 | 11707-11745 | 11746-11791 |
| 12:40298330_A_G | 11792-11836 | 11837-11880 | 11881-11929 |
| 12:40298333_C_T | 11826, 11831, | 11847, 11864, | 11885, 11894, |
| | 11833, 11930- | 11876, 11957- | 11911, 11924, |
| | 11956 | 11972 | 11973-11994 |
| 12:40298346_G_A | 11995-12042 | 12043-12088 | 12089-12138 |
| 12:40298433_C_G | 12139-12186 | 12187-12236 | 12237-12288 |
| 12:40298479_G_T | 12289-12335 | 12336-12382 | 12383-12434 |
| 12:40298488_A_G | 12435-12481 | 12482-12530 | 12531-12582 |
| 12:40299125_A_G | 12583-12622 | 12623-12659 | 12660-12703 |
| 12:40299190_C_T | 12704-12751 | 12752-12800 | 12801-12852 |
| 12:40299196_A_C | 12853-12900 | 12901-12950 | 12951-13002 |
| 12:40299212_G_A | 13003-13049 | 13050-13099 | 13100-13151 |
| 12:40299255_T_C | 13152-13199 | 13200-13249 | 13250-13300 |
| 12:40302866_A_G | 13301-13347 | 13348-13384 | 13385-13427 |
| 12:40303952_C_A | 13428-13471 | 13472-13517 | 13518-13566 |
| 12:40303972_C_G | 13567-13613 | 13614-13663 | 13664-13715 |
| 12:40304000_G_A | 13716-13762 | 13763-13811 | 13812-13863 |
| 12:40304004_A_G | 13758, 13760, | 13774, 13787, | 13836, 13851, |
| | 13864-13909 | 13910-13956 | 13957-14006 |
| 12:40304035_A_C | 14007-14049 | 14050-14099 | 14100-14151 |
| 12:40304040_G_C | 14152-14193 | 14194-14227 | 14228-14272 |
| 12:40304040_G_T | 14152-14153, | 14194, 14202- | 14235, 14240- |
| | 14157, 14162, | 14203, 14208, | 14241, 14248, |
| | 14166, 14169, | 14215, 14219- | 14257, 14262, |
| | 14182, 14185, | 14220, 14226, | 14264, 14270, |
| | 14273-14291 | 14292-14308 | 14272, 14309- |
| | | | 14331 |
| 12:40304078_G_A | 14332-14352 | 14353-14370 | 14371-14392 |
| 12:40304141_C_T | 14393-14430 | 14431-14455 | 14456-14488 |
| 12:40305776_C_T | 14489-14505 | 14506-14522 | 14523-14541 |
| 12:40305781_T_A | 14542-14568 | 14569-14594 | 14595-14622 |
| 12:40305791_C_G | 14623-14666 | 14667-14711 | 14712-14758 |
| 12:40305871_G_A | 14759-14790 | 14791-14816 | 14817-14849 |
| 12:40305942_G_A | 14850-14868 | 14869-14882 | 14883-14900 |
| 12:40305946_T_A | 14901-14930 | 14873, 14931- | 14883, 14964- |
| | | 14963 | 14998 |
| 12:40308467_G_T | 14999-15018 | 15019-15034 | 15035-15053 |
| 12:40308476_A_G | 15054-15100 | 15101-15145 | 15146-15193 |
| 12:40308481_G_A | 15194-15230 | 15231-15266 | 15267-15309 |
| 12:40308543_GG_G | 15310-15355 | 15356-15403 | 15404-15453 |
| 12:40308632_C_A | 15454-15501 | 15502-15550 | 15551-15602 |
| 12:40308672_G_A | 15603-15649 | 15650-15699 | 15700-15751 |
| 12:40309174_G_A | 15752-15798 | 15799-15848 | 15849-15900 |
| 12:40309206_C_T | 15901-15946 | 15947-15996 | 15997-16048 |
| 12:40309225_A_C | 16049-16094 | 16095-16134 | 16135-16182 |
| 12:40309226_A_G | 16058, 16060, | 16102, 16117- | 16145-16146, |
| | 16066, 16075, | 16119, 16127, | 16162-16163, |
| | 16077, 16084, | 16129, 16223- | 16174-16176, |
| | 16088, 16183- | 16256 | 16257-16298 |
| | 16222 | | |
| 12:40309230_A_G | 16199, 16217, | 16231, 16237, | 16260, 16284, |
| | 16299-16343 | 16344-16382 | 16383-16429 |
| 12:40309236_G_A | 16430-16445 | 16446-16453 | 16454-16465 |
| 12:40310434_C_A | 16466-16510 | 16511-16560 | 16561-16612 |
| 12:40310434_C_G | 16469, 16476- | 16514, 16518, | 16564, 16568, |
| | 16477, 16500, | 16522, 16537, | 16572, 16587- |
| | 16502, 16506, | 16545, 16548, | 16588, 16596- |
| | 16509-16510, | 16550, 16557, | 16597, 16600, |
| | 16613-16649 | 16559-16560, | 16611-16612, |
| | | 16650-16689 | 16690-16731 |
| 12:40310434_C_T | 16469, 16476- | 16514, 16518, | 16564, 16568, |
| | 16477, 16500, | 16522, 16537, | 16572, 16587- |
| | 16502, 16506, | 16545, 16548, | 16588, 16596- |
| | 16509-16510, | 16550, 16557, | 16597, 16600, |
| | 16732-16768 | 16559-16560, | 16611-16612, |
| | | 16769-16808 | 16809-16850 |
| 12:40310435_G_A | 16469, 16476, | 16514, 16518, | 16564, 16568, |
| | 16502, 16506, | 16522, 16537, | 16587-16588, |
| | 16509-16510, | 16548, 16557, | 16597, 16600, |
| | 16851-16889 | 16559-16560, | 16611-16612, |
| | | 16890-16931 | 16932-16975 |
| 12:40310436_C_T | 16469, 16476, | 16514, 16518, | 16568, 16587- |
| | 16506, 16509, | 16537, 16557, | 16588, 16600, |
| | 16856, 16882, | 16559-16560, | 16611-16612, |
| | 16976-17015 | 16913, 16929, | 16949, 16974, |
| | | 17016-17057 | 17058-17101 |
| 12:40310437_G_C | 16469, 16506, | 16518, 16537, | 16568, 16588, |
| | 16856, 16882, | 16557, 16559, | 16611-16612, |
| | 16999, 17013, | 16913, 16929, | 16949, 16974, |
| | 17102-17141 | 17033, 17049, | 17063, 17099, |
| | | 17142-17183 | 17184-17227 |
| 12:40310440_T_G | 16999, 17013, | 17033, 17049, | 17063, 17099, |
| | 17119, 17134, | 17147, 17181, | 17184, 17219, |
| | 17228-17271 | 17272-17317 | 17318-17365 |
| 12:40310450_C_T | 17366-17413 | 17414-17463 | 17464-17515 |
| 12:40310461_G_A | 17516-17561 | 17562-17611 | 17612-17663 |
| 12:40310471_A_G | 17664-17707 | 17708-17757 | 17758-17809 |
| 12:40310476_GAT_G | 17810-17856 | 17857-17905 | 17906-17956 |
| 12:40310515_A_G | 17957-18003 | 18004-18053 | 18054-18105 |
| 12:40310530_C_T | 18106-18153 | 18154-18203 | 18204-18255 |
| 12:40310546_G_A | 18256-18303 | 18304-18353 | 18354-18405 |
| 12:40310554_G_A | 18406-18453 | 18454-18503 | 18504-18555 |
| 12:40310561_G_A | 18556-18602 | 18603-18652 | 18653-18704 |
| 12:40314043_G_A | 18705-18730 | 18731-18745 | 18746-18762 |
| 12:40314059_C_T | 18763-18799 | 18800-18834 | 18835-18876 |
| 12:40314062_A_G | 18783-18784, | 18813, 18819, | 18849, 18852, |
| | 18788, 18796, | 18831, 18833, | 18875-18876, |
| | 18877-18918 | 18919-18960 | 18961-19006 |
| 12:40314101_C_A | 19007-19029 | 19030-19049 | 19050-19077 |
| 12:40315266_T_A | 19078-19123 | 19124-19173 | 19174-19225 |
| 12:40319979_A_T | 19226-19262 | 19263-19289 | 19290-19323 |
| 12:40319998_T_C | 19324-19369 | 19370-19418 | 19419-19470 |
| 12:40320043_G_A | 19471-19515 | 19516-19557 | 19558-19604 |
| 12:40320054_G_C | 19605-19634 | 19635-19658 | 19659-19686 |
| 12:40320090_A_G | 19687-19726 | 19727-19765 | 19766-19808 |
| 12:40320094_A_G | 19712, 19809- | 19739, 19853- | 19793, 19897- |
| | 19852 | 19896 | 19942 |
| 12:40320097_T_C | 19811, 19816, | 19867, 19888, | 19920, 19934, |
| | 19825, 19841, | 19986-20030 | 20031-20077 |
| | 19943-19985 | | |
| 12:40320119_A_G | 20078-20123 | 20124-20167 | 20168-20215 |
| 12:40321114_A_G | 20216-20259 | 20260-20303 | 20304-20353 |
| 12:40321123_T_C | 20354-20396 | 20397-20438 | 20439-20482 |
| 12:40322037_C_T | 20483-20526 | 20527-20566 | 20567-20612 |
| 12:40322038_G_A | 20484-20485, | 20528, 20533, | 20570, 20573, |
| | 20490, 20492, | 20535, 20550, | 20579, 20596, |
| | 20509, 20518, | 20650-20687 | 20688-20731 |
| | 20520, 20613- | | |
| | 20649 | | |
| 12:40322047_G_A | 20732-20774 | 20775-20824 | 20825-20876 |
| 12:40322047_G_T | 20741, 20746, | 20784, 20789, | 20839, 20841, |
| | 20748, 20762, | 20791, 20793- | 20844, 20847, |
| | 20774, 20877- | 20794, 20803, | 20852, 20855, |
| | 20914 | 20809-20810, | 20861-20862, |
| | | 20813, 20819, | 20865, 20871, |
| | | 20915-20954 | 20955-20996 |
| 12:40322134_A_G | 20997-21043 | 21044-21090 | 21091-21139 |
| 12:40322137_A_C | 21006, 21030, | 21074, 21078, | 21120-21121, |
| | 21043, 21140- | 21181-21223 | 21224-21268 |
| | 21180 | | |
| 12:40322364_T_C | 21269-21314 | 21315-21364 | 21365-21416 |
| 12:40322386_G_T | 21417-21463 | 21464-21511 | 21512-21563 |
| 12:40322468_C_A | 21564-21579 | 21580 | 21581-21583 |
| 12:40323244_C_G | 21584-21623 | 21624-21661 | 21662-21701 |
| 12:40323255_A_G | 21702-21729 | 21730-21752 | 21753-21779 |
| 12:40323256_T_C | 21708, 21712, | 21743-21744, | 21768, 21773, |
| | 21716, 21720- | 21746, 21749, | 21776-21778, |
| | 21721, 21723, | 21751, 21801- | 21818-21838 |
| | 21726, 21780- | 21817 | |
| | 21800 | | |
| 12:40323260_G_T | 21797, 21839- | 21810, 21847- | 21832, 21851- |
| | 21846 | 21850 | 21857 |
| 12:40323270_G_T | 21858-21870 | 21871-21878 | 21879-21890 |
| 12:40323297_T_C | 21891-21938 | 21939-21985 | 21986-22035 |
| 12:40328416_G_C | 22036-22071 | 22072-22105 | 22106-22141 |
| 12:40335008_A_T | 22142-22189 | 22190-22239 | 22240-22291 |
| 12:40335031_G_A | 22292-22338 | 22339-22388 | 22389-22440 |
| 12:40335036_C_T | 22441-22488 | 22489-22538 | 22539-22590 |
| 12:40335037_G_A | 22447, 22463, | 22495, 22514, | 22545, 22567, |
| | 22466, 22470- | 22516, 22519- | 22571, 22573, |
| | 22471, 22475, | 22520, 22524, | 22576, 22585, |
| | 22484-22485, | 22533, 22537, | 22589-22590, |
| | 22591-22630 | 22631-22672 | 22673-22716 |
| 12:40335079_G_T | 22717-22764 | 22765-22814 | 22815-22866 |
| 12:40340349_C_G | 22867-22914 | 22915-22963 | 22964-23015 |
| 12:40340361_T_C | 23016-23061 | 23062-23111 | 23112-23163 |
| 12:40340380_T_C | 23164-23209 | 23210-23259 | 23260-23310 |
| 12:40340400_G_A | 23311-23354 | 23355-23403 | 23404-23455 |
| 12:40340404_T_C | 23352-23353, | 23368-23369, | 23426-23427, |
| | 23456-23499 | 23500-23547 | 23548-23597 |
| 12:40340432_A_G | 23598-23644 | 23645-23694 | 23695-23746 |
| 12:40340436_A_T | 23599, 23628, | 23672, 23677, | 23699, 23707, |
| | 23747-23792 | 23793-23840 | 23841-23890 |
| 12:40346818_T_C | 23891-23932 | 23933-23966 | 23967-24008 |
| 12:40346826_ACTACT_A | 24009-24028 | 24029-24036 | 24037-24048 |
| 12:40346884_A_G | 24049-24091 | 24092-24133 | 24134-24177 |
| 12:40348402_G_GTGT | 24178-24191 | , | 24192-24193 |
| 12:40348475_A_G | 24194-24232 | 24233-24262 | 24263-24294 |
| 12:40348484_C_T | 24295-24322 | 24323-24346 | 24347-24376 |
| 12:40351537_A_G | 24377-24418 | 24419-24459 | 24460-24505 |
| 12:40351572_T_A | 24506-24551 | 24552-24597 | 24598-24645 |
| 12:40351579_C_T | 24646-24691 | 24692-24737 | 24738-24786 |
| 12:40351585_G_A | 24787-24820 | 24821-24854 | 24855-24890 |
| 12:40351605_G_C | 24891-24911 | 24912-24924 | 24925-24941 |
| 12:40351623_G_T | 24942-24986 | 24987-25028 | 25029-25076 |
| 12:40351667_C_A | 25077-25124 | 25125-25174 | 25175-25226 |
| 12:40351680_G_C | 25227-25273 | 25274-25323 | 25324-25375 |
| 12:40351720_G_C | 25376-25419 | 25420-25454 | 25455-25497 |
| 12:40351723_A_G | 25408, 25417, | 25429, 25454, | 25467, 25469, |
| | 25419, 25498- | 25542-25586 | 25587-25634 |
| | 25541 | | |
| 12:40354304_T_C | 25635-25678 | 25679-25720 | 25721-25766 |
| 12:40354305_G_T | 25636, 25642, | 25685, 25796- | 25722, 25740, |
| | 25659, 25675, | 25821 | 25748, 25822- |
| | 25677, 25767- | | 25853 |
| | 25795 | | |
| 12:40354410_G_A | 25854-25901 | 25902-25951 | 25952-26003 |
| 12:40356126_A_T | 26004-26011 | 26012-26019 | 26020-26029 |
| 12:40356145_C_T | 26030-26073 | 26074-26117 | 26118-26163 |
| 12:40359345_C_T | 26164-26194 | 26195-26222 | 26223-26258 |
| 12:40359422_A_G | 26259-26305 | 26306-26353 | 26354-26404 |
| 12:40363435_C_T | 26405-26451 | 26452-26491 | 26492-26539 |
| 12:40363440_C_T | 26540-26586 | 26587-26632 | 26633-26684 |
| 12:40363541_G_A | 26685-26727 | 26728-26769 | 26770-26815 |
| 12:40364843_G_A | 26816-26856 | 26857-26892 | 26893-26936 |
| 12:40364845_G_GGT | 26937-26975 | 26976-27013 | 26904, 27014- |
| | | | 27055 |
| 12:40364884_G_A | 27056-27080 | 27081-27097 | 27098-27122 |
| 12:40364927_A_T | 27123-27169 | 27170-27219 | 27220-27271 |
| 12:40364960_A_G | 27272-27318 | 27319-27368 | 27369-27420 |
| 12:40365044_C_T | 27421-27468 | 27469-27518 | 27519-27570 |
| 12:40367012_T_A | 27571-27614 | 27615-27646 | 27647-27685 |
| 12:40367050_A_G | 27686-27733 | 27734-27783 | 27784-27835 |
| 12:40367648_AC_A | 27836-27863 | 27864-27887 | 27888-27913 |
| 12:40367656_G_T | 27914-27954 | 27955-27990 | 27991-28030 |
| 12:40367754_T_C | 28031-28077 | 28078-28127 | 28128-28179 |
| 12:40367849_G_A | 28180-28216 | 28217-28244 | 28245-28278 |
| 12:40367888_A_C | 28279-28304 | 28305-28328 | 28329-28354 |
| 12:40367988_C_T | 28355-28364 | , | , |
| 12:40368042_A_G | 28365-28394 | 28395-28417 | 28418-28444 |
| 12:40368073_A_C | 28445-28476 | 28477-28491 | 28492-28514 |
| 12:40368170_C_T | 28515-28547 | 28548-28566 | 28567-28593 |
| 12:40368262_C_T | , | 28594 | 28595-28596 |
| 12:40368380_T_A | 28597-28602 | 28603 | 28604-28605 |
| 12:40368486_G_T | 28606-28615 | 28616-28620 | 28621-28627 |
| 12:40368516_C_A | 28628-28661 | 28662-28690 | 28691-28724 |
| 12:40368534_T_G | 28725-28745 | 28746-28760 | 28761-28782 |
| 12:40368673_A_C | 28783-28826 | 28827-28871 | 28872-28918 |
| 12:40368736_C_A | 28919-28956 | 28957-28988 | 28989-29024 |
| 12:40368783_G_T | 29025-29062 | 29063-29096 | 29097-29136 |
| 12:40368800_T_C | 29137-29169 | 29170-29203 | 29204-29241 |
| 12:40368807_A_G | 29242-29276 | 29277-29311 | 29312-29350 |
| 12:40368834_A_G | 29351-29368 | 29369-29386 | 29387-29407 |
| 12:40368860_C_T | 29408-29447 | 29448-29481 | 29482-29517 |
| 12:40368905_A_T | 29518-29551 | 29552-29583 | 29584-29619 |
| 12:40368930_C_T | 29620-29652 | 29653-29676 | 29677-29708 |
| 12:40368947_C_T | 29709-29753 | 29754-29795 | 29796-29842 |
| 12:40368951_C_T | 29752, 29843- | 29771, 29876- | 29804, 29909- |
| | 29875 | 29908 | 29945 |
| 12:40369044_T_C | 29946-29948 | 29949 | 29950-29951 |
| 12:40369153_T_C | 29952-29974 | 29975-29988 | 29989-30006 |
| 12:40369167_G_T | 30007-30041 | 30042-30070 | 30071-30103 |
| 12:40222364_G_A | 30104-30107 | 30108 | 30109-30111 |
| rs1388598_REF | | | |
| 12:40222364_G_A | 30107 | , | , |
| rs1388598_SNP | | | |
| 12:40222612_A_G | 30112-30145 | 30146-30171 | 30172-30203 |
| rs28365207_REF | | | |
| 12:40222612_A_G | 30128, 30136- | 30156, 30164- | 30184, 30194, |
| rs28365207_SNP | 30138, 30145, | 30165, 30170- | 30201-30203, |
| | 30204-30236 | 30171, 30237- | 30270-30304 |
| | | 30269 | |
| 12:40223400_T_C | 30305 | , | 30306 |
| rs7294619_REF | | | |
| 12:40223400_T_C | 30305, 30307- | 30312 | 30306, 30313- |
| rs7294619_SNP | 30311 | | 30315 |
| 12:40223890_G_C | 30316-30363 | 30364-30413 | 30414-30465 |
| rs10878226_REF | | | |
| 12:40223890_G_C | 30320, 30330, | 30364, 30369, | 30414, 30419, |
| rs10878226_SNP | 30337, 30343- | 30374, 30387, | 30424, 30437, |
| | 30344, 30349, | 30393-30394, | 30441, 30445- |
| | 30352, 30357- | 30399, 30407- | 30446, 30459- |
| | 30358, 30360, | 30408, 30410, | 30460, 30462, |
| | 30466-30503 | 30504-30543 | 30544-30585 |
| 12:40226614_A_T | 30586-30627 | 30628-30659 | 30660-30697 |
| rs1491943_REF | | | |
| 12:40226614_A_T | 30590, 30593, | 30633, 30637, | 30666, 30671, |
| rs1491943_SNP | 30601, 30613, | 30639, 30650, | 30673-30674, |
| | 30616, 30698- | 30653, 30735- | 30688, 30762- |
| | 30734 | 30761 | 30794 |
| 12:40227006_C_G | 30795-30841 | 30842-30891 | 30892-30943 |
| rs1491942_REF | | | |
| 12:40227006_C_G | 30798, 30802, | 30845, 30848, | 30893, 30896, |
| rs1491942_SNP | 30804, 30815, | 30850, 30852, | 30899, 30903, |
| | 30823, 30825, | 30859, 30865, | 30910, 30916, |
| | 30827, 30829, | 30873, 30879, | 30924, 30930, |
| | 30831, 30838, | 30881, 30888, | 30932, 30935, |
| | 30944-30981 | 30982-31021 | 31022-31063 |
| 12:40227013_G_A | 30796-30797, | 30843-30844, | 30892-30895, |
| rs1491941_REF | 30800-30801, | 30846-30849, | 30897-30900, |
| | 30803-30814, | 30851-30858, | 30902-30909, |
| | 30816-30820, | 30860-30861, | 30911-30912, |
| | 30823-30825, | 30863-30864, | 30914-30915, |
| | 30828, 30830- | 30866-30870, | 30917-30921, |
| | 30835, 30838- | 30873-30875, | 30924-30926, |
| | 30840, 31064- | 30878, 30880- | 30929, 30931- |
| | 31077 | 30885, 30888- | 30934, 30936- |
| | | 30890, 31078- | 30937, 30940- |
| | | 31091 | 30942, 31092- |
| | | | 31105 |
| 12:40227013_G_A | 30801, 30806, | 30846, 30849, | 30892, 30897, |
| rs1491941_SNP | 30816, 30819, | 30854, 30866, | 30905, 30917, |
| | 30824, 31067, | 30869, 31081, | 30920, 31093, |
| | 31074-31077, | 31083, 31089- | 31095, 31097, |
| | 31106-31143 | 31091, 31144- | 31104-31105, |
| | | 31183 | 31184-31225 |
| 12:40228090_A_G | 31226-31247 | 31248-31269 | 31270-31291 |
| rs11175645_REF | | | |
| 12:40228090_A_G | 31226-31227, | 31248-31249, | 31271, 31274, |
| rs11175645_SNP | 31229, 31237- | 31252, 31259- | 31276, 31281- |
| | 31238, 31292- | 31260, 31308- | 31282, 31325- |
| | 31307 | 31324 | 31341 |
| 12:40228102_C_T | 31226-31232, | 31248-31256, | 31270-31291, |
| rs4567538_REF | 31234, 31236- | 31258-31269, | 31388-31410 |
| | 31247, 31342- | 31365-31387 | |
| | 31364 | | |
| 12:40228102_C_T | 31247, 31347, | 31370, 31374, | 31397, 31406, |
| rs4567538_SNP | 31351, 31360- | 31384, 31387, | 31409-31410, |
| | 31361, 31364, | 31441-31473 | 31474-31510 |
| | 31411-31440 | | |
| 12:40228988_C_T | 31511-31558 | 31559-31604 | 31605-31654 |
| rs12230685_REF | | | |
| 12:40228988_C_T | 31511-31513, | 31559-31562, | 31605-31608, |
| rs12230685_SNP | 31515, 31521, | 31569, 31574, | 31610, 31621, |
| | 31526, 31537, | 31585, 31599, | 31623, 31648, |
| | 31544, 31552- | 31689-31721 | 31722-31757 |
| | 31553, 31655- | | |
| | 31688 | | |
| 12:40229925_G_A | 31758-31804 | 31805-31854 | 31855-31906 |
| rs11175655_REF | | | |
| 12:40229925_G_A | 31763, 31767, | 31810, 31813, | 31860, 31863, |
| rs11175655_SNP | 31779, 31782, | 31827, 31830, | 31868, 31881, |
| | 31788, 31792, | 31836, 31847, | 31886, 31888, |
| | 31798, 31801, | 31850, 31852- | 31902, 31904- |
| | 31803-31804, | 31854, 31945- | 31906, 31985- |
| | 31907-31944 | 31984 | 32026 |
| 12:40229953_G_A | 32027-32048 | 32049-32070 | 32071-32092 |
| rs11175656_REF | | | |
| 12:40229953_G_A | 32032-32033, | 32054-32055, | 32076-32078, |
| rs11175656_SNP | 32036-32037, | 32059-32060, | 32082-32083, |
| | 32039, 32093- | 32062, 32110- | 32127-32143 |
| | 32109 | 32126 | |
| 12:40229955_CTTTTTTTTTTT | 32027-32031, | 32049-32053, | 32071-32075, |
| TT_C | 32033-32036, | 32055-32058, | 32077-32081, |
| rs1402299410_REF | 32038-32041, | 32060-32063, | 32083-32085, |
| | 32043, 32045- | 32065, 32067- | 32087, 32089- |
| | 32048 | 32070 | 32092 |
| 12:40229955_CTTTTTTTTTTT | 32027-32031, | 32049-32053, | 32071-32075, |
| C | 32033-32036, | 32055-32058, | 32077-32081, |
| rs780970090_REF | 32038-32041, | 32060-32063, | 32083-32085, |
| | 32043, 32045- | 32065, 32067- | 32087, 32089- |
| | 32048 | 32070 | 32092 |
| 12:40229955_CT_C | 32027-32031, | 32049-32053, | 32071-32075, |
| rs1479481931_REF | 32033-32036, | 32055-32058, | 32077-32081, |
| | 32038-32041, | 32060-32063, | 32083-32085, |
| | 32043, 32045- | 32065, 32067- | 32087, 32089- |
| | 32048 | 32070 | 32092 |
| 12:40229955_C_CT | 32027-32031, | 32049-32053, | 32071-32075, |
| rs71078229_REF | 32033-32036, | 32055-32058, | 32077-32081, |
| | 32038-32041, | 32060-32063, | 32083-32085, |
| | 32043, 32045- | 32065, 32067- | 32087, 32089- |
| | 32048 | 32070 | 32092 |
| 12:40230508_A_G | 32144-32190 | 32191-32238 | 32239-32290 |
| rs11175658_REF | | | |
| 12:40230508_A_G | 32144, 32148, | 32191, 32195, | 32239, 32243, |
| rs11175658_SNP | 32150, 32159, | 32197, 32204, | 32252, 32255, |
| | 32163, 32165, | 32207, 32211, | 32261, 32264, |
| | 32170, 32172, | 32215, 32219, | 32268, 32282- |
| | 32183, 32187, | 32233, 32237, | 32283, 32287, |
| | 32291-32328 | 32329-32368 | 32369-32410 |
| 12:40230668_CT_C | 32411-32422 | 32423-32430 | 32431-32440 |
| rs3057613_REF | | | |
| 12:40230668_C_CT | 32411-32422 | 32423-32430 | 32431-32440 |
| rs35642658_REF | | | |
| 12:40231279_G_A | 32441-32463 | 32464-32488 | 32489-32515 |
| rs74324737_REF | | | |
| 12:40231279_G_A | 32441-32442, | 32464, 32469, | 32494, 32503- |
| rs74324737_SNP | 32453, 32458, | 32478, 32483, | 32504, 32510, |
| | 32463, 32516- | 32488, 32540- | 32515, 32566- |
| | 32539 | 32565 | 32593 |
| 12:40231365_C_A | 32594-32598 | 32599-32605 | 32606-32616 |
| rs2708441_REF | | | |
| 12:40231365_C_A | 32594-32595, | 32599-32600, | 32606, 32609, |
| rs2708441_SNP | 32598, 32617- | 32604-32605, | 32613-32614, |
| | 32633 | 32634-32656 | 32616, 32657- |
| | | | 32682 |
| 12:40231390_C_CAAAA | 32683-32697 | 32698-32713 | 32610, 32616, |
| rs10631840_REF | | | 32714-32728 |
| 12:40231390_C_CAAA | 32683-32697 | 32698-32713 | 32610, 32616, |
| rs35991926_REF | | | 32714-32728 |
| 12:40231570_C_T | 32729-32733 | 32734-32737 | 32738-32742 |
| rs61931634_SNP | | | |
| 12:40234631_C_T | 32743-32764 | 32765-32784 | 32785-32812 |
| rs11175666_REF | | | |
| 12:40234631_C_T | 32743, 32753, | 32765, 32775, | 32785, 32797, |
| | 32755, 32761, | 32777, 32779, | 32801, 32808, |
| rs11175666_SNP | 32813-32834 | 32835-32858 | 32859-32885 |
| 12:40235793_GTTT_G | 32886-32888 | 32889-32890 | 32891-32893 |
| rs751672176_REF | | | |
| 12:40235793_G_GTT | 32886-32888 | 32889-32890 | 32891-32893 |
| rs36024911_REF | | | |
| 12:40235793_G_GT | 32886-32888 | 32889-32890 | 32891-32893 |
| rs36024911_REF | | | |
| 12:40235794_T_TG | 32886, 32888 | 32889 | 32892-32893 |
| rs377568728_REF | | | |
| 12:40235794_T_TG | 32888 | , | 32892 |
| rs377568728_SNP | | | |
| 12:40235813_G_T | 32894-32909 | 32910-32925 | 32926-32943 |
| rs1279923177_REF | | | |
| 12:40235813_G_T | 32894, 32896- | 32910, 32912- | 32926-32927, |
| rs1279923177_SNP | 32897, 32902, | 32914, 32920, | 32930-32931, |
| | 32904, 32944- | 32953-32961 | 32937, 32962- |
| | 32952 | | 32972 |
| 12:40237556_T_C | 32973-33020 | 33021-33070 | 33071-33122 |
| rs2249281_REF | | | |
| 12:40237556_T_C | 32980, 32987, | 33028, 33035, | 33078, 33087- |
| rs2249281_SNP | 32989, 32997, | 33037, 33040, | 33088, 33091, |
| | 33006, 33008, | 33046, 33055, | 33093, 33098, |
| | 33011-33013, | 33060-33062, | 33107, 33112- |
| | 33016, 33123- | 33066, 33161- | 33113, 33118, |
| | 33160 | 33200 | 33201-33242 |
| 12:40237806_G_A | 33243-33286 | 33287-33331 | 33332-33378 |
| rs10878244_REF | | | |
| 12:40237806_G_A | 33252, 33264, | 33296, 33308- | 33341-33342, |
| rs10878244_SNP | 33268, 33272, | 33309, 33313, | 33354-33355, |
| | 33282, 33286, | 33331, 33416- | 33359, 33451- |
| | 33379-33415 | 33450 | 33491 |
| 12:40237823_CAACA_C | 33253, 33257, | 33297, 33301- | 33337, 33343, |
| rs138000936_REF | 33261, 33269- | 33302, 33305, | 33347-33348, |
| | 33270, 33272, | 33314-33315, | 33351, 33360- |
| | 33278, 33280- | 33317, 33323, | 33361, 33363, |
| | 33281, 33285, | 33325-33326, | 33369, 33371- |
| | 33492-33494 | 33330, 33495 | 33372, 33375, |
| | | | 33377, 33496 |
| 12:40237823_CAACA_C | 33497 | , | |
| rs138000936_SNP | | | |
| 12:40237989_T_C | 33498-33540 | 33541-33576 | 33577-33617 |
| rs10878245_REF | | | |
| 12:40237989_T_C | 33499, 33501, | 33543, 33547- | 33578, 33580, |
| rs10878245_SNP | 33506-33507, | 33548, 33563, | 33585-33586, |
| | 33526-33527, | 33565, 33656- | 33600, 33606, |
| | 33529, 33618- | 33695 | 33696-33737 |
| | 33655 | | |
| 12:40238297_T_G | 33738-33785 | 33786-33829 | 33830-33877 |
| rs10878246_REF | | | |
| 12:40238297_T_G | 33742, 33749, | 33789, 33794, | 33833, 33838, |
| rs10878246_SNP | 33759-33761, | 33798, 33801, | 33842, 33845, |
| | 33768, 33776, | 33807-33808, | 33850, 33853, |
| | 33781, 33784- | 33815, 33823, | 33860, 33864, |
| | 33785, 33878- | 33827, 33829, | 33869, 33874, |
| | 33915 | 33916-33955 | 33956-33997 |
| 12:40238298_C_T | 33738-33754, | 33786-33800, | 33830-33845, |
| rs10878247_REF | 33756-33780, | 33803-33829, | 33847-33849, |
| | 33782-33785, | 34000-34001 | 33851-33877, |
| | 33998-33999 | | 34002-34003 |
| 12:40238298_C_T | 33742, 33749, | 33789, 33794, | 33833, 33838, |
| rs10878247_SNP | 33760-33761, | 33798, 33808, | 33842, 33845, |
| | 33768, 33776, | 33815, 33823, | 33860, 33864, |
| | 33780, 33784- | 33827-33829, | 33869, 33874, |
| | 33785, 33998, | 34000, 34032- | 33877, 34002, |
| | 34004-34031 | 34053 | 34054-34081 |
| 12:40239156_G_T | 34082-34129 | 34130-34179 | 34180-34231 |
| rs954884_REF | | | |
| 12:40239156_G_T | 34092, 34103, | 34138, 34141, | 34188, 34191, |
| rs954884_SNP | 34105, 34107, | 34152, 34154, | 34202, 34206, |
| | 34111, 34116, | 34156, 34160, | 34210-34211, |
| | 34121, 34123, | 34169, 34171, | 34215, 34221, |
| | 34126, 34129, | 34176, 34179, | 34223, 34231, |
| | 34232-34269 | 34270-34309 | 34310-34351 |
| 12:40239512_T_C | 34352-34399 | 34400-34449 | 34450-34501 |
| rs10878249_REF | | | |
| 12:40239512_T_C | 34352, 34355, | 34400, 34418, | 34458, 34469, |
| rs10878249_SNP | 34370, 34378, | 34426, 34429, | 34477, 34480, |
| | 34381-34383, | 34431, 34438, | 34482, 34489, |
| | 34394-34395, | 34443-34444, | 34494, 34498- |
| | 34398, 34502- | 34447-34448, | 34499, 34501, |
| | 34539 | 34540-34579 | 34580-34621 |
| 12:40239686_G_A | 34622-34652 | 34653-34682 | 34683-34716 |
| rs10784444_REF | | | |
| 12:40239686_G_A | 34634, 34641, | 34657, 34664, | 34688, 34695, |
| rs10784444_SNP | 34647, 34650, | 34671, 34677, | 34698, 34711, |
| | 34717-34739 | 34680, 34740- | 34714, 34757- |
| | | 34756 | 34775 |
| 12:40240356_T_C | 34776-34787 | 34788-34799 | 34800-34813 |
| rs6581622_REF | | | |
| 12:40240356_T_C | 34776, 34778- | 34788, 34790, | 34803, 34806, |
| rs6581622_SNP | 34779, 34782, | 34793, 34795, | 34808, 34811, |
| | 34784, 34814- | 34798, 34825- | 34813, 34834- |
| | 34824 | 34833 | 34844 |
| 12:40241554_G_A | 34845-34882 | 34883-34914 | 34915-34952 |
| rs17519573_REF | | | |
| 12:40241554_G_A | 34853, 34863, | 34888, 34896, | 34922-34923, |
| rs17519573_SNP | 34868, 34872, | 34903, 34909, | 34932, 34940, |
| | 34880, 34953- | 34912, 34976- | 34946, 34995- |
| | 34975 | 34994 | 35015 |
| 12:40242804_C_CAAAAAAA | 35016-35028 | 35029-35041 | 35042-35056 |
| AAAAAAAAAA | | | |
| rs35987733_REF | | | |
| 12:40242804_C_CAAAAAA | 35016-35028 | 35029-35041 | 35042-35056 |
| rs35987733_REF | | | |
| 12:40242818_G_A | 35057-35062 | 35063-35068 | 35069-35076 |
| rs868476079_SNP | | | |
| 12:40242819_G_A | 35057, 35060- | 35063-35064, | 35070-35072, |
| rs1399756142_SNP | 35062, 35077- | 35067-35068, | 35075, 35085- |
| | 35080 | 35081-35084 | 35090 |
| 12:40242820_T_A_._SNP | 35057, 35061- | 35063-35064, | 35070, 35072, |
| | 35062, 35077, | 35067, 35082, | 35075, 35086, |
| | 35091-35100 | 35101-35107 | 35108-35116 |
| 12:40242823_G_A | 35077, 35096, | 35082, 35131- | 35086, 35135- |
| rs1474763022_SNP | 35117-35130 | 35134 | 35141 |
| 12:40242824_C_A | 35096, 35119, | 35155-35158 | 35159-35167 |
| rs1450276224_SNP | 35127, 35130, | | |
| | 35142-35154 | | |
| 12:40242827_T_A | 35130, 35145, | 35194-35212 | 35160, 35213- |
| rs1191097078_SNP | 35168-35193 | | 35233 |
| 12:40242829_T_A | 35179-35180, | 35200-35201, | 35221, 35229, |
| rs_1425272990_SNP | 35191, 35234- | 35211, 35263- | 35232, 35281- |
| | 35262 | 35280 | 35301 |
| 12:40242832_C_A | 35254, 35260, | 35266, 35277, | 35283, 35287, |
| rs1477924701_SNP | 35302-35319 | 35320-35329 | 35330-35345 |
| 12:40245759_A_G | 35346-35350 | , | 35351 |
| rs2404580_REF | | | |
| 12:40245759_A_G | 35348, 35352- | 35377-35382 | 35351, 35383- |
| rs2404580_SNP | 35376 | | 35392 |
| 12:40246099_C_T | 35393-35404 | 35405-35412 | 35413-35422 |
| rs2404581_REF | | | |
| 12:40246099_C_T | 35395, 35398, | 35405, 35407- | 35414-35415, |
| rs2404581_SNP | 35401-35402, | 35408, 35411- | 35417-35418, |
| | 35404, 35423 | 35412, 35424 | 35421, 35425- |
| | | | 35427 |
| 12:40246358_T_C | , | , | 35428 |
| rs1388599_REF | | | |
| 12:40246358_T_C | 35429-35438 | , | 35428 |
| rs1388599_SNP | | | |
| 12:40246824_A_G | 35439-35485 | 35486-35535 | 35536-35587 |
| rs1388596_REF | | | |
| 12:40246824_A_G | 35446, 35452, | 35490, 35494, | 35540, 35550, |
| rs1388596_SNP | 35456, 35459, | 35504, 35507, | 35558-35559, |
| | 35463, 35466- | 35512, 35515- | 35564, 35567- |
| | 35467, 35472- | 35516, 35521, | 35568, 35573, |
| | 35473, 35479, | 35528, 35530, | 35580, 35582, |
| | 35588-35625 | 35626-35665 | 35666-35707 |
| 12:40247890_A_G | 35708-35747 | 35748-35785 | 35786-35825 |
| rs10878258_REF | | | |
| 12:40247890_A_G | 35715, 35718, | 35749, 35756, | 35786, 35788, |
| rs10878258_SNP | 35735, 35742, | 35759, 35775, | 35795, 35798, |
| | 35745, 35826- | 35783, 35864- | 35814, 35901- |
| | 35863 | 35900 | 35939 |
| 12:40250503_T_C | 35940-35943 | 35944-35946 | 35947-35950 |
| rs12371502_REF | | | |
| 12:40250503_T_C | 35940-35943 | 35944-35946 | 35947-35951 |
| rs12371502_SNP | | | |
| 12:40250565_C_T | 35952-35980 | 35981-36014 | 36015-36054 |
| rs11175729_REF | | | |
| 12:40250565_C_T | 35956-35957, | 35986, 35992, | 36022, 36024, |
| rs11175729_SNP | 35962, 35968, | 35998, 36002, | 36036, 36041- |
| | 35971, 35975, | 36006, 36008, | 36042, 36046, |
| | 36055-36075 | 36010, 36076- | 36048, 36050, |
| | | 36099 | 36100-36126 |
| 12:40250950_A_G | 36127-36139 | 36140-36156 | 36157-36174 |
| rs17443414_REF | | | |
| 12:40250950_A_G | 36127-36128, | 36140-36142, | 36157-36159, |
| rs17443414_SNP | 36130, 36132, | 36144, 36149, | 36161, 36166, |
| | 36135, 36175- | 36204-36236 | 36237-36273 |
| | 36203 | | |
| 12:40251002_G_GT | 36274-36291 | 36292-36309 | 36310-36327 |
| rs1486599371_REF | | | |
| 12:40251072_C_T | 36328-36349 | 36350-36367 | 36368-36387 |
| rs7134379_REF | | | |
| 12:40251072_C_T | 36330, 36332, | 36353, 36356, | 36371, 36375- |
| rs7134379_SNP | 36336, 36339, | 36358, 36363, | 36376, 36378, |
| | 36345, 36388- | 36365, 36399- | 36385, 36410- |
| | 36398 | 36409 | 36422 |
| 12:40251455_C_A | 36423-36467 | 36468-36511 | 36512-36559 |
| rs7955902_REF | | | |
| 12:40251455_C_A | 36425, 36431- | 36470, 36474, | 36514, 36520, |
| rs7955902_SNP | 36433, 36443, | 36476-36477, | 36522-36523, |
| | 36446, 36457, | 36490, 36501, | 36537, 36554, |
| | 36560-36593 | 36594-36625 | 36626-36661 |
| 12:40251794_A_G | 36662-36702 | 36703-36733 | 36734-36772 |
| rs1491939_REF | | | |
| 12:40251794_A_G | 36664, 36669, | 36706, 36719, | 36736, 36741, |
| rs1491939_SNP | 36677, 36684, | 36721, 36811- | 36755, 36757, |
| | 36686, 36688, | 36848 | 36759, 36849- |
| | 36773-36810 | | 36890 |
| 12:40251828_G_A | 36891-36925 | 36926-36959 | 36960-36995 |
| rs1491938_REF | | | |
| 12:40251828_G_A | 36894, 36896, | 36929, 36931, | 36963, 36965- |
| rs1491938_SNP | 36903, 36914, | 36939-36940, | 36966, 36975, |
| | 36922, 36996- | 36949, 37023- | 36985, 37038- |
| | 37022 | 37037 | 37056 |
| 12:40253146_G_A | 37057-37101 | 37102-37138 | 37139-37183 |
| rs7969677_REF | | | |
| 12:40253146_G_A | 37060, 37067, | 37109, 37117, | 37142, 37149, |
| rs7969677_SNP | 37073, 37075, | 37132 | 37173, 37205- |
| | 37091, 37099, | | 37211 |
| | 37101, 37184- | | |
| | 37204 | | |
| 12:40255521_C_T | 37212-37256 | 37257-37301 | 37302-37349 |
| rs2723265_REF | | | |
| 12:40255521_C_T | 37220, 37231- | 37267, 37277- | 37311, 37313, |
| rs2723265_SNP | 37232, 37237, | 37278, 37283, | 37323-37324, |
| | 37242, 37244, | 37289, 37291, | 37329, 37336, |
| | 37246, 37350- | 37383-37407 | 37339, 37408- |
| | 37382 | | 37440 |
| 12:40255947_G_C | 37441-37477 | 37478-37496 | 37497-37522 |
| rs7132171_REF | | | |
| 12:40255947_G_C | 37446, 37458- | 37482, 37490, | 37501, 37509, |
| rs7132171_SNP | 37459, 37466, | 37556-37572 | 37513, 37573- |
| | 37523-37555 | | 37595 |
| 12:40256086_G_A | 37596-37626 | 37627-37655 | 37656-37687 |
| rs10784451_REF | | | |
| 12:40256086_G_A | 37601, 37608- | 37629, 37638- | 37657, 37660, |
| | | 37639, 37649, | 37670-37671, |
| rs10784451_SNP | 37609, 37617, | 37711-37730 | 37681, 37731- |
| | 37620, 37688- | | 37752 |
| | 37710 | | |
| 12:40256173_G_A | 37753-37771 | 37772-37794 | 37795-37821 |
| rs10784452_REF | | | |
| 12:40256173_G__A | 37753, 37755- | 37773, 37776, | 37799, 37805- |
| rs10784452_SNP | 37756, 37762, | 37782, 37793- | 37806, 37819, |
| | 37771, 37822- | 37794, 37846- | 37821, 37874- |
| | 37845 | 37873 | 37903 |
| 12:40256549_C_T | 37904-37935 | 37936-37955 | 37956-37983 |
| rs1907633_REF | | | |
| 12:40256549_C_T | 37907, 37912, | 37936-37937, | 37956-37957, |
| rs1907633_SNP | 37915-37916, | 37939, 37941, | 37960, 37963, |
| | 37919, 37922, | 37943, 37946, | 37969, 37971, |
| | 37924, 37928, | 37948, 37950, | 37974, 37976, |
| | 37933-37934, | 37953-37954, | 37981-37982, |
| | 37984-37988 | 37989-37993 | 37994-38001 |
| 12:40256647_T_C | 38002-38008 | 38009-38010 | 38011-38013 |
| rs1491936_REF | | | |
| 12:40256647_T_C | 38002-38004, | 38009-38010, | 38011-38013, |
| rs1491936_SNP | 38007-38008, | 38035-38039 | 38040-38048 |
| | 38014-38034 | | |
| 12:40256700_G_A | 38049-38096 | 38097-38146 | 38147-38198 |
| rs1907632_REF | | | |
| 12:40256700_G_A | 38050, 38053, | 38097, 38099, | 38147, 38149, |
| rs1907632_SNP | 38059, 38067, | 38102, 38105, | 38152, 38155, |
| | 38072, 38076, | 38109, 38117, | 38159, 38163, |
| | 38079-38081, | 38129-38131, | 38168, 38182, |
| | 38090, 38199- | 38140, 38237- | 38185, 38192, |
| | 38236 | 38276 | 38277-38318 |
| 12:40258592_A_G | 38319-38366 | 38367-38416 | 38417-38468 |
| rs2046928_REF | | | |
| 12:40258592_A_G | 38324, 38326, | 38372, 38374- | 38424-38425, |
| rs2046928_SNP | 38342-38344, | 38375, 38387, | 38432, 38435, |
| | 38348, 38354, | 38392-38393, | 38439, 38444- |
| | 38360-38361, | 38398, 38404, | 38445, 38450, |
| | 38365, 38469- | 38410-38411, | 38462-38463, |
| | 38506 | 38507-38546 | 38547-38588 |
| 12:40258718_T_C | 38589-38636 | 38637-38686 | 38687-38738 |
| rs2723264_REF | | | |
| 12:40258718_T_C | 38591, 38599- | 38639, 38641, | 38691, 38699, |
| rs2723264_SNP | 38600, 38605- | 38649, 38654- | 38704-38706, |
| | 38607, 38609, | 38656, 38658, | 38708, 38710, |
| | 38611, 38618, | 38660, 38667, | 38714, 38719, |
| | 38631, 38739- | 38680, 38777- | 38732, 38817- |
| | 38776 | 38816 | 38858 |
| 12:40259911_C_T | 38859-38896 | 38897-38932 | 38933-38969 |
| rs17465870_REF | | | |
| 12:40259911_C_T | 38876, 38884, | 38926, 39005- | 38950, 38966, |
| | 38889, 38893, | | |
| rs17465870_SNP | 38970-39004 | 39039 | 39040-39074 |
| 12:40260186_C_T | 39075-39121 | 39122-39164 | 39165-39209 |
| rs10878278_REF | | | |
| 12:40260186_C_T | 39075, 39078- | 39122, 39125, | 39193, 39196, |
| | 39079, 39085, | 39150, 39248- | |
| | 39089, 39104, | | |
| rs10878278_SNP | 39107, 39115, | 39283 | 39204, 39284- |
| | 39117, 39210- | | 39325 |
| | 39247 | | |
| 12:40261214_T_C | 39326-39329 | , | , |
| rs11175766_REF | | | |
| 12:40261214_T_C | 39326-39335 | , | 39336 |
| rs11175766_SNP | | | |
| 12:40261905_C_T | 39337-39350 | 39351-39354 | 39355-39360 |
| rs11564183_REF | | | |
| 12:40262377_A_G | 39361-39398 | 39399-39435 | 39436-39475 |
| rs11175769_REF | | | |
| 12:40262377_A_G | 39373, 39382, | 39411, 39419, | 39449, 39453, |
| rs11175769_SNP | 39386, 39388, | 39425, 39428, | 39458, 39464, |
| | 39391, 39395, | 39433-39434, | 39467, 39473, |
| | 39397, 39476- | 39509-39541 | 39475, 39542- |
| | 39508 | | 39577 |
| 12:40262593_C_T | 39578-39619 | 39620-39662 | 39663-39706 |
| rs17465912_REF | | | |
| 12:40262593_C_T | 39587, 39601, | 39644, 39652, | 39686, 39688, |
| rs17465912_SNP | 39609, 39614, | 39657, 39660, | 39700, 39703, |
| | 39617, 39707- | 39744-39778 | 39706, 39779- |
| | 39743 | | 39815 |
| 12:40262875_C_A | 39816-39863 | 39864-39913 | 39914-39965 |
| rs17443552_REF | | | |
| 12:40262875_C_A | 39817-39818, | 39865-39866, | 39915, 39920, |
| rs17443552_SNP | 39824, 39828- | 39872, 39876, | 39923, 39927, |
| | 39829, 39837, | 39885, 39888- | 39936, 39939- |
| | 39840, 39850, | 39889, 39899, | 39940, 39953, |
| | 39854, 39863, | 39902, 39904, | 39955, 39962, |
| | 39966-40003 | 40004-40043 | 40044-40085 |
| 12:40263160_T_A | 40086-40088 | | , |
| rs17490817_REF | | | |
| 12:40263160_T_A | 40086-40088 | | , |
| rs17490817_SNP | | | |
| 12:40263401_G_GA | 40089-40120 | 40121-40142 | 40143-40170 |
| rs11430638_REF | | | |
| 12:40263401_G_GA | 40094, 40104, | 40122, 40129, | 40146, 40154, |
| rs11430638_SNP | 40115, 40119, | 40134, 40141, | 40160, 40166, |
| | 40171-40192 | 40193-40204 | 40205-40222 |
| 12:40263423_G_A | 40094, 40103, | 40122, 40128, | 40146, 40153, |
| rs4293189_REF | 40110, 40114, | 40134-40136, | 40159-40160, |
| | 40223-40265 | 40139, 40266- | 40162-40163, |
| | | 40309 | 40166-40167, |
| | | | 40310-40353 |
| 12:40263423_G_A | 40103, 40114, | 40128, 40135- | 40153, 40162- |
| rs4293189_SNP | 40225, 40227, | 40136, 40268, | 40163, 40167, |
| | 40233, 40235, | 40271-40272, | 40312, 40315- |
| | 40238, 40240, | 40280, 40283, | 40316, 40324, |
| | 40242, 40246, | 40285, 40291, | 40333, 40336, |
| | 40354-40391 | 40392-40425 | 40426-40463 |
| 12:40263735_A_G | 40464-40495 | 40496-40524 | 40525-40555 |
| rs10784461_REF | | | |
| 12:40263735_A_G | 40478, 40487- | 40510, 40518, | 40536, 40549, |
| rs10784461_SNP | 40488, 40491, | 40520, 40523, | 40551, 40554, |
| | 40494, 40556- | 40591-40619 | 40620-40652 |
| | 40590 | | |
| 12:40263898_C_G | 6533, 6628, | 6560, 6577, | 6599, 6603, |
| rs7308720_REF | 6631, 6644, | 6663, 6665, | 6622, 6691, |
| | 6651, 6659, | 6668, 6678, | 6693, 6696, |
| | 6727, 6737- | 6689, 6762, | 6701, 6708, |
| | 6738, 6742, | 6771-6772, | 6804-6805, |
| | 6747, 40653- | 6779, 6783, | 6814-6815, |
| | 40685 | 40686-40716 | 6819, 40717- |
| | | | 40750 |
| 12:40263898_C_G | 6628, 6631, | 6663, 6665, | 6691, 6693, |
| rs7308720_SNP | 6644, 40653, | 6668, 40687, | 6701, 40720, |
| | 40656, 40660, | 40696, 40789- | 40731, 40827- |
| | 40665, 40751- | 40826 | 40868 |
| | 40788 | | |
| 12:40263969_C_G | 40869-40913 | 40914-40956 | 40957-41003 |
| rs10784462_REF | | | |
| 12:40263969_C_G | 40870, 40879, | 40931, 40938, | 40970, 40975, |
| rs10784462_SNP | 40887, 40889, | 40953, 41042- | 40977, 40984, |
| | 40895, 40905, | 41081 | 40997, 41082- |
| | 40910, 41004- | | 41123 |
| | 41041 | | |
| 12:40264403_G_A | 41124-41127 | 41128-41133 | 41134-41139 |
| rs10878284_REF | | | |
| 12:40265294_C_T | 41140-41187 | 41188-41237 | 41238-41289 |
| rs11175780_REF | | | |
| 12:40265294_C_T | 41157, 41168, | 41217, 41219, | 41247, 41250, |
| rs11175780_SNP | 41170, 41174, | 41223-41224, | 41269, 41271, |
| | 41177, 41182- | 41227, 41232- | 41275-41276, |
| | 41183, 41185- | 41233, 41235- | 41285, 41287- |
| | 41187, 41290- | 41237, 41328- | 41289, 41368- |
| | 41327 | 41367 | 41409 |
| 12:40265732_C_T | 41410-41450 | 41451-41493 | 41494-41537 |
| rs11175784_REF | | | |
| 12:40265732_C_T | 41411, 41414, | 41451, 41453, | 41494, 41496, |
| rs11175784_SNP | 41421, 41424, | 41456, 41463, | 41499, 41506, |
| | 41442, 41538- | 41485, 41570- | 41516, 41604- |
| | 41569 | 41603 | 41640 |
| 12:40266292_C_A | 41641 | , | 41642 |
| rs11175787_REF | | | |
| 12:40267078_A_T | , | 41643 | 41644-41646 |
| rs144463374_SNP | | | |
| 12:40267251_A_T | 41647-41691 | 41692-41738 | 41739-41787 |
| rs73108329_REF | | | |
| 12:40267251_A_T | 41655-41656, | 41701, 41708, | 41742, 41744, |
| rs73108329_SNP | 41663, 41668, | 41710, 41714, | 41750, 41757, |
| | 41679, 41682, | 41726, 41729, | 41759, 41763, |
| | 41685, 41688, | 41735, 41826- | 41784, 41866- |
| | 41788-41825 | 41865 | 41907 |
| 12:40267479_T_C | 41908-41953 | 41954-42003 | 42004-42055 |
| rs12426891_REF | | | |
| 12:40267479_T_C | 41908, 41914, | 41962, 41966- | 42012, 42016- |
| rs12426891_SNP | 41916, 41920- | 41967, 41973, | 42017, 42026, |
| | 41921, 41927, | 41976, 41984- | 42035, 42041- |
| | 41930, 41938- | 41985, 41991, | 42042, 42047- |
| | 41939, 41948, | 41996-41997, | 42048, 42054, |
| | 42056-42093 | 42094-42133 | 42134-42175 |
| 12:40267601_A_T | 42176-42223 | 42224-42273 | 42274-42325 |
| rs4768224_REF | | | |
| 12:40267601_A_T | 42184, 42191, | 42232, 42235, | 42282-42283, |
| rs4768224_SNP | 42201-42205, | 42240, 42251, | 42286, 42291, |
| | 42214-42216, | 42253-42255, | 42302-42303, |
| | 42326-42363 | 42264-42266, | 42306-42307, |
| | | 42364-42403 | 42317-42318, |
| | | | 42404-42445 |
| 12:40268237_G_A | 42446-42493 | 42494-42543 | 42544-42595 |
| rs11175793_REF | | | |
| 12:40268237_G_A | 42450, 42459, | 42498, 42507, | 42548, 42557, |
| rs11175793_SNP | 42463-42464, | 42511, 42514, | 42564-42565, |
| | 42466, 42469, | 42521, 42524, | 42572, 42575, |
| | 42473, 42476, | 42532, 42534, | 42583, 42587, |
| | 42485, 42487, | 42536, 42541, | 42592, 42594, |
| | 42596-42633 | 42634-42673 | 42674-42715 |
| 12:40269794_G_T | 42716-42763 | 42764-42813 | 42814-42865 |
| rs10784470_REF | | | |
| 12:40269794_G_T | 42717, 42721- | 42764, 42766, | 42814-42815, |
| rs10784470_SNP | 42722, 42728, | 42770-42771, | 42817, 42821- |
| | 42731, 42738- | 42777, 42780- | 42822, 42828, |
| | 42739, 42741, | 42781, 42788, | 42831-42832, |
| | 42743, 42755, | 42793, 42805, | 42844, 42850, |
| | 42866-42901 | 42902-42923 | 42924-42957 |
| 12:40270116_C_G | 42958-42993 | 42994-43015 | 43016-43041 |
| rs12146857_REF | | | |
| 12:40270116_C_G | 42964, 42968, | 42996, 42998, | 43019, 43022, |
| rs12146857_SNP | 42976, 42984, | 43001, 43003, | 43025, 43029, |
| | 42987, 43042- | 43010, 43073- | 43035, 43090- |
| | 43072 | 43089 | 43110 |
| 12:40270841_T_A | 43111-43131 | 43132-43145 | 43146-43163 |
| rs11564207_REF | | | |
| 12:40270841_T_A | 43119, 43131, | 43183-43196 | 43197-43214 |
| rs11564207_SNP | 43164-43182 | | |
| 12:40271425_G_C | 43215-43262 | 43263-43309 | 43310-43358 |
| rs7308193_REF | | | |
| 12:40271425_G_C | 43222, 43225, | 43272, 43295, | 43319, 43321, |
| rs7308193_SNP | 43231, 43246, | 43302, 43304, | 43341, 43351, |
| | 43249, 43251, | 43306, 43308- | 43355, 43357- |
| | 43256, 43258, | 43309, 43397- | 43358, 43437- |
| | 43260, 43262, | 43436 | 43478 |
| | 43359-43396 | | |
| 12:40272958_A_T | 43479-43524 | 43525-43566 | 43567-43616 |
| rs10506150_REF | | | |
| 12:40272958_A_T | 43495, 43498- | 43539, 43542- | 43579, 43584, |
| rs10506150_SNP | 43499, 43501, | 43543, 43545, | 43587-43588, |
| | 43509, 43512, | 43552-43553, | 43593, 43599- |
| | 43517-43519, | 43556, 43561, | 43600, 43603, |
| | 43524, 43617- | 43565-43566, | 43610, 43615, |
| | 43652 | 43653-43684 | 43685-43724 |
| 12:40273002_GAC_G | 43725-43772 | 43773-43822 | 43823-43874 |
| rs76660489_REF | | | |
| 12:40273002_GAC_G | 43727, 43732, | 43775, 43781, | 43825, 43827, |
| rs76660489_SNP | 43741, 43749- | 43789, 43794, | 43832, 43845, |
| | 43750, 43759, | 43798-43799, | 43849-43850, |
| | 43769, 43772, | 43809, 43822, | 43853, 43860, |
| | 43875-43913 | 43914-43954 | 43955-43997 |
| 12:40273073_C_G | 43998-44028 | 44029-44044 | 44045-44065 |
| rs10878299_REF | | | |
| 12:40273073_C_G | 44007, 44011, | 44035, 44093- | 44055, 44061, |
| rs10878299_SNP | 44014, 44023, | 44107 | 44108-44126 |
| | 44066-44092 | | |
| 12:40275500_TTAAGAA_T | 44127-44155 | 44156-44183 | 44184-44215 |
| rs373619252_REF | | | |
| 12:40275500_TTAAGAA_T | 44130-44131, | 44157-44158, | 44186, 44193, |
| rs373619252_SNP | 44139, 44142, | 44164, 44166, | 44195, 44198, |
| | 44145, 44216- | 44172, 44236- | 44204, 44254- |
| | 44235 | 44253 | 44275 |
| 12:40276024_T_A | 44276-44277 | , | , |
| rs10878302_REF | | | |
| 12:40276024_T_A | 44276-44277 | , | , |
| rs10878302_SNP | | | |
| 12:40276137_T_C | 44278-44300 | 44301-44308 | 44309-44323 |
| rs11564129_REF | | | |
| 12:40276137_T_C | 44283, 44288- | 44301, 44303, | 44310, 44313- |
| rs11564129_SNP | 44289, 44291- | 44306-44308, | 44314, 44318, |
| | 44292, 44295, | 44353-44373 | 44320-44321, |
| | 44324-44352 | | 44374-44397 |
| 12:40276592_G_A | 44398-44427 | 44428-44460 | 44461-44495 |
| rs7971935_REF | | | |
| 12:40276592_G_A | 44405, 44417, | 44449, 44459- | 44469, 44483, |
| rs7971935_SNP | 44425-44427, | 44460, 44516- | 44495, 44538- |
| | 44496-44515 | 44537 | 44561 |
| 12:40276874_C_T | 44562-44570 | 44571-44583 | 44584-44600 |
| rs11175836_REF | | | |
| 12:40276874_C_T | 44563, 44566, | 44571, 44576, | 44584, 44590, |
| rs11175836_SNP | 44601-44628 | 44581, 44629- | 44596, 44599, |
| | | 44661 | 44662-44695 |
| 12:40276999_C_T | 44696-44731 | 44732-44763 | 44764-44798 |
| rs4272849_REF | | | |
| 12:40276999_C_T | 44713, 44717, | 44738, 44747, | 44770, 44783, |
| rs4272849_SNP | 44728, 44799- | 44750, 44825- | 44792, 44851- |
| | 44824 | 44850 | 44878 |
| 12:40277068_T_C | 44879-44889 | 44890-44903 | 44904-44923 |
| rs10784485_REF | | | |
| 12:40277068_T_C | 44879-44880, | 44891-44892, | 44906, 44908- |
| rs10784485_SNP | 44882, 44885- | 44894-44896, | 44910, 44916, |
| | 44886, 44924- | 44900, 44945- | 44918-44919, |
| | 44944 | 44968 | 44969-44995 |
| 12:40277196_C_A | 44996-45033 | 45034-45063 | 45064-45099 |
| rs10506151_REF | | | |
| 12:40277196_C_A | 44996, 44998, | 45034-45035, | 45064-45065, |
| rs10506151_SNP | 45002, 45010, | 45038, 45044, | 45077, 45085, |
| | 45023, 45100- | 45051, 45123- | 45094, 45146- |
| | 45122 | 45145 | 45170 |
| 12:40279458_T_A | 45171-45206 | 45207-45237 | 45238-45274 |
| rs7309197_REF | | | |
| 12:40279458_T_A | 45177, 45185, | 45220, 45235, | 45245, 45253, |
| rs7309197_SNP | 45191, 45200, | 45306-45334 | 45335-45369 |
| | 45204, 45275- | | |
| | 45305 | | |
| 12:40279566_G_A | 45370-45395 | 45396-45403 | 45404-45417 |
| rs7134572_REF | | | |
| 12:40279566_G_A | 45373, 45382- | 45396, 45398, | 45404, 45407, |
| rs7134572_SNP | 45384, 45418- | 45401-45402 | 45411, 45414- |
| | 45419 | | 45415 |
| 12:40280237_G_C | 45420-45422 | 45423-45427 | 45428-45434 |
| rs11175843_REF | | | |
| 12:40280237_G_C | 45421-45422, | 45424, 45426- | 45429, 45431- |
| rs11175843_SNP | 45435-45446 | 45427, 45447- | 45432, 45434, |
| | | 45461 | 45462-45483 |
| 12:40280621_T_TTAAAATAA | 45484-45504 | 45505-45527 | 45528-45554 |
| AA | | | |
| rs147801391_REF | | | |
| 12:40280621_T_TTAAAA | 45484-45504 | 45505-45527 | 45528-45554 |
| rs147801391_REF | | | |
| 12:40280621_T_TTAAATAAA | 45484-45504 | 45505-45527 | 45528-45554 |
| ATAAAA | | | |
| rs147801391_REF | | | |
| 12:40280621_T_TTAAATAAA | 45484, 45490, | 45505, 45511, | 45528, 45533, |
| ATAAAA | 45495, 45555- | 45517, 45519, | 45536, 45542, |
| rs147801391_SNP | 45568 | 45569-45581 | 45545, 45582- |
| | | | 45595 |
| 12:40280621_T_TTAAATAAA | 45484-45504 | 45505-45527 | 45528-45554 |
| A | | | |
| rs147801391_REF | | | |
| 12:40280621_T_TTAAATAAA | 45484, 45490, | 45505, 45511, | 45528, 45533, |
| A | 45495, 45555- | 45517, 45519, | 45536, 45542, |
| rs147801391_SNP | 45568 | 45569-45581 | 45545, 45582- |
| | | | 45595 |
| 12:40280622_TA_T | 45484, 45486- | 45505, 45507- | 45528, 45530- |
| rs376096297_REF | 45504 | 45527 | 45554 |
| 12:40280622_TA_T | 45484, 45490, | 45505, 45511, | 45528, 45533, |
| rs376096297_SNP | 45495, 45555- | 45517, 45519, | 45536, 45542, |
| | 45568 | 45569-45581 | 45545, 45582- |
| | | | 45595 |
| 12:40280792_T_C | 45596-45622 | 45623-45651 | 45652-45682 |
| rs7488873_REF | | | |
| 12:40280792_T_C | 45612-45613, | 45640, 45645, | 45669-45670, |
| rs7488873_SNP | 45617, 45620, | 45648-45649, | 45676, 45680, |
| | 45622, 45683- | 45651, 45704- | 45682, 45719- |
| | 45703 | 45718 | 45738 |
| 12:40281250_A_G | 45739-45786 | 45787-45834 | 45835-45886 |
| rs11175845_REF | | | |
| 12:40281250_A_G | 45745, 45753, | 45792, 45800, | 45841-45842, |
| rs11175845_SNP | 45755, 45758, | 45802, 45805, | 45850, 45852, |
| | 45761, 45765, | 45808, 45812, | 45855, 45862, |
| | 45768, 45772, | 45815-45816, | 45866-45867, |
| | 45775, 45780, | 45824, 45829, | 45875, 45880, |
| | 45887-45924 | 45925-45964 | 45965-46006 |
| 12:40281806_A_G | 46007-46052 | 46053-46096 | 46097-46144 |
| rs7979341_REF | | | |
| 12:40281806_A_G | 46017, 46019, | 46056, 46065, | 46098, 46101, |
| rs7979341_SNP | 46027, 46029- | 46073, 46087, | 46111, 46121- |
| | 46030, 46032, | 46096, 46183- | 46122, 46135, |
| | 46043, 46052, | 46222 | 46144, 46223- |
| | 46145-46182 | | 46264 |
| 12:40282009_GCTTCCCTTCC | 46265-46298 | 46299-46338 | 46339-46382 |
| CTTCCCTTCCCTTCC_G | | | |
| rs1226327150_REF | | | |
| 12:40282053_CCCTTCCCTTC | , | 46383 | 46384-46390 |
| CCTTCCCTTCCCTTCCCTTC | | | |
| CCTTCTCTT_C | | | |
| rs777452337_SNP | | | |
| 12:40282112_TCCCTC_T | 46391-46401 | 46383, 46402- | 46384, 46386- |
| rs1339001348_REF | | 46415 | 46388, 46416- |
| | | | 46432 |
| 12:40282398_G_T | 46433-46475 | 46476-46514 | 46515-46562 |
| rs11175847_REF | | | |
| 12:40282398_G_T | 46435, 46443, | 46477, 46479, | 46516, 46519, |
| rs11175847_SNP | 46445, 46447, | 46486, 46488- | 46524, 46529, |
| | 46450-46451, | 46489, 46492, | 46531, 46533- |
| | 46464, 46467, | 46504, 46506, | 46534, 46537, |
| | 46563-46589 | 46590-46612 | 46551, 46553, |
| | | | 46613-46639 |
| 12:40283044_TA_T | 46640-46644 | 46645-46649 | 46650-46654 |
| rs112859457_REF | | | |
| 12:40283045_A_T | 46641-46644 | 46645-46646, | 46650, 46652- |
| rs17466080_REF | | 46648-46649 | 46654 |
| 12:40283045_A_T | 46641-46644 | 46645-46646, | 46650, 46652- |
| rs17466080_SNP | | 46648-46649 | 46654 |
| 12:40283206_G_A | 46655-46702 | 46703-46752 | 46753-46804 |
| rs11175852_REF | | | |
| 12:40283206_G_A | 46657, 46666, | 46705, 46714- | 46755, 46759, |
| rs11175852_SNP | 46668, 46671, | 46715, 46717, | 46765-46766, |
| | 46680, 46693- | 46720, 46735, | 46768, 46771, |
| | 46695, 46698- | 46744-46745, | 46785, 46787, |
| | 46699, 46805- | 46748-46749, | 46797, 46800, |
| | 46842 | 46843-46882 | 46883-46924 |
| 12:40283227_A_C | 46657-46658, | 46705-46706, | 46755-46756, |
| rs10784486_REF | 46664, 46668, | 46712, 46717, | 46759, 46763, |
| | 46671, 46674, | 46720-46721, | 46768, 46771- |
| | 46925-46966 | 46723, 46735, | 46772, 46774, |
| | | 46967-47008 | 46778, 46787, |
| | | | 47009-47050 |
| 12:40283227_A_C | 46658, 46664, | 46706, 46712, | 46756, 46763, |
| rs10784486_SNP | 46674, 46925- | 46721, 46723, | 46772, 46774, |
| | 46927, 46932, | 46967-46968, | 46778, 47009, |
| | 46939, 46949, | 46974, 46981, | 47016, 47022, |
| | 46955, 47051- | 46983, 46997, | 47024, 47026, |
| | 47088 | 47089-47128 | 47129-47170 |
| 12:40283782_G_T | 47171-47217 | 47218-47248 | 47249-47288 |
| rs73108368_REF | | | |
| 12:40283782_G_T | 47172, 47175, | 47232, 47241, | 47255, 47279, |
| rs73108368_SNP | 47182, 47189, | 47246, 47310- | 47284, 47287, |
| | 47195, 47206, | 47319 | 47320-47336 |
| | 47212-47213, | | |
| | 47215, 47289- | | |
| | 47309 | | |
| 12:40284261_AT_A | 47337-47354 | 47355-47364 | 47365-47376 |
| rs398019201_REF | | | |
| 12:40284539_C_T | 47377-47405 | 47406-47431 | 47432-47464 |
| rs17519846_REF | | | |
| 12:40284539_C_T | 47382, 47390- | 47410-47411, | 47437-47438, |
| | 47391, 47393- | 47419, 47421, | 47440, 47451, |
| | 47394, 47398, | 47424, 47426, | 47456-47457, |
| rs17519846_SNP | 47400, 47402, | 47428, 47478 | 47459, 47461, |
| | 47465-47477 | | 47479-47483 |
| 12:40285452_G_A | 47484-47519 | 47520-47551 | 47552-47587 |
| rs17466150_REF | | | |
| 12:40285452_G_A | 47492-47493, | 47525-47526, | 47559-47561, |
| rs17466150_SNP | 47503, 47509, | 47540-47541, | 47576-47577, |
| | 47512, 47588- | 47544, 47611- | 47634-47658 |
| | 47610 | 47633 | |
| 12:40285467_T_A | 47484-47485, | 47520-47527, | 47552-47553, |
| rs11175862_REF | 47489-47493, | 47531, 47534- | 47556-47562, |
| | 47500, 47503- | 47537, 47539- | 47567, 47570- |
| | 47506, 47508- | 47541, 47544- | 47573, 47575- |
| | 47509, 47512- | 47546, 47550, | 47578, 47580- |
| | 47514, 47518, | 47673-47682 | 47582, 47586, |
| | 47659-47672 | | 47683-47694 |
| 12:40285467_T_A | 47504, 47506, | 47527, 47537, | 47562, 47573, |
| rs11175862_SNP | 47513-47514, | 47545-47546, | 47578, 47582, |
| | 47518, 47695- | 47550, 47722- | 47586, 47747- |
| | 47721 | 47746 | 47775 |
| 12:40286069_A_G | 47776-47822 | 47823-47870 | 47871-47920 |
| rs4310676_REF | | | |
| 12:40286069_A_G | 47782, 47784, | 47826, 47830, | 47874, 47880, |
| rs4310676_SNP | 47788, 47809- | 47832, 47836, | 47884, 47895, |
| | 47810, 47812, | 47858, 47860, | 47909-47910, |
| | 47819-47820, | 47868, 47870, | 47918, 47920, |
| | 47822, 47921- | 47959-47998 | 47999-48040 |
| | 47958 | | |
| 12:40287115_T_C | 48041-48082 | 48083-48115 | 48116-48157 |
| rs11564150_REF | | | |
| 12:40287115_T_C | 48049, 48060, | 48089, 48094, | 48128, 48132, |
| rs11564150_SNP | 48067, 48069, | 48104, 48107, | 48135, 48144, |
| | 48073, 48076, | 48110, 48112, | 48147, 48153, |
| | 48079, 48082, | 48115, 48196- | 48156-48157, |
| | 48158-48195 | 48235 | 48236-48277 |
| 12:40287139_A_G | 48278-48325 | 48093-48094, | 48127-48128, |
| rs4318033_REF | | 48326-48373 | 48131-48132, |
| | | | 48374-48421 |
| 12:40287139_A_G | 48278, 48283- | 48093, 48326, | 48127, 48131, |
| rs4318033_SNP | 48285, 48287, | 48331-48333, | 48374, 48378, |
| | 48298, 48302- | 48335, 48342, | 48381, 48384, |
| | 48303, 48309, | 48350, 48357, | 48391, 48398, |
| | 48312, 48422- | 48360, 48460- | 48405, 48408, |
| | 48459 | 48499 | 48500-48541 |
| 12:40287255_C_T | 48542-48575 | 48576-48609 | 48610-48645 |
| rs4473003_REF | | | |
| 12:40287255_C_T | 48555, 48561, | 48580, 48590, | 48611, 48616, |
| rs4473003_SNP | 48569, 48572, | 48595, 48603, | 48631, 48639, |
| | 48574, 48646- | 48608, 48671- | 48644, 48690- |
| | 48670 | 48689 | 48712 |
| 12:40287340_C_CT | 48713-48743 | 48744-48772 | 48773-48804 |
| rs1429478461_REF | | | |
| 12:40287340_C_CT | 48716, 48722, | 48753, 48763- | 48783-48784, |
| rs1429478461_SNP | 48731, 48734- | 48764, 48770, | 48791, 48795, |
| | 48735, 48741, | 48772, 48823- | 48801, 48804, |
| | 48805-48822 | 48838 | 48839-48858 |
| 12:40287550_T_TA | 48859-48862 | 48863-48865 | 48866-48869 |
| rs886049356_REF | | | |
| 12:40287684_A_G | 48870-48881 | 48882-48890 | 48891-48905 |
| rs11564270_REF | | | |
| 12:40287684_A_G | 48870-48871, | 48882-48883, | 48892, 48895, |
| rs11564270_SNP | 48873-48875, | 48886-48890, | 48898-48899, |
| | 48877-48881, | 48920-48927 | 48901, 48903, |
| | 48906-48919 | | 48905, 48928- |
| | | | 48941 |
| 12:40288395_C_G | 48942-48986 | 48987-49032 | 49033-49080 |
| rs17519881_REF | | | |
| 12:40288395_C_G | 48947, 48951, | 48992, 48996, | 49038, 49045, |
| rs17519881_SNP | 48959, 48963, | 49008, 49012, | 49055, 49059, |
| | 48967, 48970, | 49014, 49022, | 49061, 49063, |
| | 48976, 49081- | 49119-49158 | 49159-49200 |
| | 49118 | | |
| 12:40288788_G_T | 49201-49203 | , | 49204 |
| rs17466178_REF | | | |
| 12:40288788_G_T | 49203 | , | , |
| rs17466178_SNP | | | |
| 12:40290820_T_G | 49205-49236 | 49237-49257 | 49258-49285 |
| rs17466185_REF | | | |
| 12:40290820_T_G | 49205-49206, | 49239-49240, | 49258, 49262, |
| rs17466185_SNP | 49210-49211, | 49246-49247, | 49269-49270, |
| | 49215, 49218, | 49317-49345 | 49280, 49346- |
| | 49224, 49286- | | 49378 |
| | 49316 | | |
| 12:40291078_A_C | 49379-49383 | 49384-49390 | 49391-49398 |
| rs11175902_SNP | | | |
| 12:40291483_C_T | 49399-49444 | 49445-49480 | 49481-49522 |
| rs76033741_REF | | | |
| 12:40291483_C_T | 49400, 49403, | 49446, 49453, | 49481, 49484, |
| rs76033741_SNP | 49410, 49415, | 49458, 49463, | 49491, 49493, |
| | 49422-49423, | 49471, 49473, | 49497, 49512, |
| | 49430, 49434, | 49477, 49479, | 49519, 49521, |
| | 49439, 49444, | 49544-49562 | 49563-49588 |
| | 49523-49543 | | |
| 12:40292044_C_T | 49589-49635 | 49636-49685 | 49686-49737 |
| rs56325408_REF | | | |
| 12:40292044_C_T | 49590, 49592, | 49636, 49638, | 49686-49687, |
| rs56325408_SNP | 49597, 49599, | 49640, 49645, | 49689, 49691, |
| | 49613, 49621, | 49647, 49661, | 49698, 49712, |
| | 49624-49625, | 49672, 49674, | 49725, 49729, |
| | 49629, 49633, | 49678, 49685, | 49736-49737, |
| | 49738-49775 | 49776-49815 | 49816-49857 |
| 12:40292236_G_T | 49858-49902 | 49903-49946 | 49947-49996 |
| rs7957754_REF | | | |
| 12:40292236_G_T | 49862, 49872- | 49913, 49916- | 49958, 49963, |
| rs7957754_SNP | 49873, 49885, | 49917, 49927, | 49971, 49976- |
| | 49891-49892, | 49933-49935, | 49977, 49983- |
| | 49897-49899, | 49939, 49942- | 49984, 49989, |
| | 49997-50006 | 49943, 50007- | 49992-49993, |
| | | 50014 | 50015-50024 |
| 12:40292929_A_G | 50025-50037 | 50038-50046 | 50047-50058 |
| rs11175911_REF | | | |
| 12:40292929_A_G | 50031, 50034, | 50044, 50078- | 50054, 50058, |
| rs11175911_SNP | 50036-50037, | 50088 | 50089-50103 |
| | 50059-50077 | | |
| 12:40293043_A_G | 50104-50115 | 50116-50119 | 50120-50124 |
| rs12369882_REF | | | |
| 12:40293043_A_G | 50107, 50109- | 50116-50119, | 50120-50124, |
| rs12369882_SNP | 50110, 50114- | 50136-50144 | 50145-50155 |
| | 50115, 50125- | | |
| | 50135 | | |
| 12:40293233_C_T | 50156-50202 | 50203-50252 | 50253-50304 |
| rs11175913_REF | | | |
| 12:40293233_C_T | 50161-50163, | 50203, 50210, | 50253-50254, |
| rs11175913_SNP | 50168, 50177, | 50212-50213, | 50261, 50263, |
| | 50185, 50190- | 50218, 50227, | 50269, 50278- |
| | 50191, 50197, | 50235, 50240- | 50279, 50292- |
| | 50200, 50305- | 50241, 50247, | 50293, 50299, |
| | 50342 | 50343-50382 | 50383-50424 |
| 12:40293852_A_G | 50425-50456 | 50457-50473 | 50474-50497 |
| rs4483664_REF | | | |
| 12:40293852_A_G | 50436, 50438, | 50462-50463, | 50475, 50483- |
| rs4483664_SNP | 50442, 50444, | 50467, 50469, | 50484, 50488, |
| | 50446, 50453, | 50472, 50536- | 50495, 50568- |
| | 50498-50535 | 50567 | 50605 |
| 12:40293893_GCA_G | 50606-50639 | 50640-50660 | 50661-50684 |
| rs66487867_REF | | | |
| 12:40293893_GCA_G | 50607, 50616, | 50640, 50645, | 50661, 50666, |
| rs66487867_SNP | 50618, 50620- | 50647, 50649, | 50668, 50670, |
| | 50621, 50685- | 50658, 50695- | 50682, 50699- |
| | 50694 | 50698 | 50704 |
| 12:40293894_C_CAT | 50606-50618, | 50640-50647, | 50661, 50663- |
| rs1491426750_REF | 50620-50628, | 50649-50651, | 50670, 50672- |
| | 50630-50639 | 50653-50660 | 50684 |
| 12:40293894_C_CAT | 50607, 50616, | 50640, 50645, | 50661, 50666, |
| rs1491426750_SNP | 50618, 50620- | 50647, 50649, | 50668, 50670, |
| | 50621, 50688, | 50658, 50695- | 50682, 50700- |
| | 50690, 50692- | 50698, 50729- | 50702, 50704, |
| | 50693, 50705- | 50736 | 50737-50746 |
| | 50728 | | |
| 12:40293896_C_T | 50606-50612, | 50640-50642, | 50661, 50663- |
| rs5006481_REF | 50614-50618, | 50644-50647, | 50670, 50672- |
| | 50620-50622, | 50649-50651, | 50674, 50677- |
| | 50624-50628, | 50654-50658, | 50678, 50680- |
| | 50630-50631, | 50660 | 50682, 50684 |
| | 50634-50639 | | |
| 12:40293896_C_T | 50607, 50616, | 50640, 50645, | 50661, 50666, |
| rs5006481_SNP | 50618, 50620- | 50647, 50649, | 50668, 50670, |
| | 50621, 50685- | 50658, 50696- | 50682, 50699, |
| | 50687, 50689- | 50698 | 50701-50704 |
| | 50694 | | |
| 12:40294132_CATCTATCTAT | 50747-50753 | | 50754-50755 |
| CT_C | | | |
| rs139565575_REF | | | |
| 12:40294132_CATCTATCT_C | 50747-50753 | | 50754-50755 |
| rs150276517_REF | | | |
| 12:40294132_CATCT_C | 50747-50753 | | 50754-50755 |
| rs72446556_REF | | | |
| 12:40294132_C_CATCT | 50747-50753 | | 50754-50755 |
| rs1186032972_REF | | | |
| 12:40294279_A_G | 50756-50802 | 50803-50852 | 50853-50903 |
| rs12820920_REF | | | |
| 12:40294279_A_G | 50756-50757, | 50803-50804, | 50854, 50857, |
| rs12820920_SNP | 50759-50760, | 50807, 50813, | 50863, 50865- |
| | 50767-50768, | 50815-50816, | 50866, 50869, |
| | 50773, 50776, | 50821, 50829, | 50880, 50888, |
| | 50781, 50793, | 50838, 50843, | 50893, 50898, |
| | 50904-50941 | 50942-50981 | 50982-51023 |
| 12:40294893_T_C | 51024-51034 | 51035-51040 | 51041-51048 |
| rs7966550_REF | | | |
| 12:40294893_T_C | 51024-51025, | 51035-51036, | 51041, 51043- |
| rs7966550_SNP | 51028-51034, | 51038-51040, | 51044, 51046, |
| | 51049-51056 | 51057-51061 | 51048, 51062- |
| | | | 51069 |
| 12:40295119_A_G | 51070-51087 | | 51088-51089 |
| rs12314692_SNP | | | |
| 12:40295786_C_T | 51090-51136 | 51137-51184 | 51185-51236 |
| rs11175922_REF | | | |
| 12:40295786_C_T | 51091, 51096, | 51138, 51141, | 51185, 51187, |
| rs11175922_SNP | 51098, 51100, | 51144, 51146, | 51190, 51194, |
| | 51103-51105, | 51148, 51151- | 51196, 51201, |
| | 51118, 51125- | 51152, 51166, | 51216, 51222, |
| | 51126, 51237- | 51173-51174, | 51224-51225, |
| | 51268 | 51269-51296 | 51297-51330 |
| 12:40296087_T_C | 51331-51357 | 51358-51376 | 51377-51403 |
| rs73102746_REF | | | |
| 12:40296087_T_C | 51335, 51340, | 51360, 51362, | 51377, 51380, |
| rs73102746_SNP | 51346-51347, | 51366, 51370, | 51385, 51390, |
| | 51353, 51404- | 51438-51466 | 51395, 51467- |
| | 51437 | | 51499 |
| 12:40296180_T_C | 51500-51536 | 51537-51568 | 51569-51604 |
| rs10784497_REF | | | |
| 12:40296180_T_C | 51514, 51524, | 51559, 51563, | 51598, 51600, |
| rs10784497_SNP | 51530, 51533, | 51565, 51642- | 51602, 51677- |
| | 51605-51641 | 51676 | 51713 |
| 12:40296259_A_G | 51714-51749 | 51750-51773 | 51774-51799 |
| rs17443815_REF | | | |
| 12:40296259_A_G | 51716, 51726- | 51751, 51759- | 51775, 51778, |
| rs17443815_SNP | 51727, 51737, | 51760, 51768, | 51785, 51793, |
| | 51747, 51800- | 51771, 51838- | 51797, 51873- |
| | 51837 | 51872 | 51912 |
| 12:40296904_C_A | 51913-51959 | 51960-52005 | 52006-52057 |
| rs7957057_REF | | | |
| 12:40296904_C_A | 51914-51915, | 51961-51962, | 52007-52008, |
| rs7957057_SNP | 51923-51924, | 51967, 51970- | 52014, 52017- |
| | 51931, 51934, | 51971, 51977, | 52018, 52025, |
| | 51937, 51941, | 51987, 51993- | 52035, 52038, |
| | 51947-51948, | 51994, 52001, | 52050, 52056, |
| | 52058-52087 | 52088-52115 | 52116-52147 |
| 12:40297067_CTT_C | 52148-52193 | 52194-52243 | 52244-52295 |
| rs76607433_REF | | | |
| 12:40297067_CTT_C | 52163-52165, | 52212-52213, | 52256, 52264, |
| rs76607433_SNP | 52167, 52172, | 52215, 52220, | 52266, 52279- |
| | 52178, 52187, | 52227-52228, | 52280, 52291, |
| | 52189, 52296- | 52239, 52242, | 52294-52295, |
| | 52332 | 52333-52371 | 52372-52412 |
| 12:40297142_G_A | 52413-52452 | 52453-52478 | 52479-52511 |
| rs28365224_REF | | | |
| 12:40297142_G_A | 52420, 52423, | 52459, 52466, | 52487, 52490, |
| rs28365224_SNP | 52427, 52435, | 52472, 52474, | 52494, 52503, |
| | 52441, 52450, | 52477, 52523- | 52506, 52510, |
| | 52512-52522 | 52525 | 52526-52534 |
| 12:40298741_C_T | 52535-52541 | 52542-52553 | 52554-52566 |
| rs7962011_SNP | | | |
| 12:40299423_A_C | 52567-52572 | 52573-52574 | 52575-52577 |
| rs10878336_REF | | | |
| 12:40299423_A_C | 52567-52572, | 52573-52574, | 52575-52577, |
| rs10878336_SNP | 52578-52588 | 52589-52590 | 52591-52595 |
| 12:40299999_C_G | 52596-52643 | 52644-52693 | 52694-52745 |
| rs11175934_REF | | | |
| 12:40299999_C_G | 52605, 52610, | 52653, 52658, | 52703, 52708- |
| rs11175934_SNP | 52620, 52630, | 52668, 52678- | 52709, 52729- |
| | 52632, 52635, | 52679, 52684, | 52730, 52735, |
| | 52640-52643, | 52686, 52690- | 52737, 52742- |
| | 52746-52783 | 52691, 52693, | 52743, 52745, |
| | | 52784-52823 | 52824-52865 |
| 12:40300004_G_T | 52596-52599, | 52644-52647, | 52694-52697, |
| rs11175935_REF | 52601-52604, | 52649-52652, | 52699-52702, |
| | 52606-52607, | 52654-52655, | 52704-52705, |
| | 52609-52610, | 52657-52658, | 52707, 52709, |
| | 52614-52619, | 52662-52667, | 52713-52728, |
| | 52621-52634, | 52669-52677, | 52730-52734, |
| | 52636-52640, | 52679-52683, | 52736-52741, |
| | 52643, 52866- | 52685-52690, | 52743-52745, |
| | 52874 | 52692-52693, | 52881-52887 |
| | | 52875-52880 | |
| 12:40300004_G_T | 52615, 52618, | 52663, 52671, | 52719, 52722, |
| rs11175935_SNP | 52623, 52625, | 52673, 52687, | 52724, 52738, |
| | 52637, 52869- | 52692, 52878, | 52744, 52884, |
| | 52870, 52873- | 52926-52964 | 52887, 52965- |
| | 52874, 52888- | | 53005 |
| | 52925 | | |
| 12:40300216_T_C | 53006-53042 | 53043-53076 | 53077-53112 |
| rs17491061_REF | | | |
| 12:40300216_T_C | 53009, 53013, | 53046, 53049, | 53080, 53093, |
| rs17491061_SNP | 53021, 53028- | 53058, 53063- | 53098-53099, |
| | 53029, 53040, | 53064, 53147- | 53105, 53181- |
| | 53113-53146 | 53180 | 53218 |
| 12:40300597_G_A | 53219-53266 | 53267-53316 | 53317-53368 |
| rs11175941_REF | | | |
| 12:40300597_G_A | 53224, 53226, | 53270, 53273, | 53320, 53323, |
| rs11175941_SNP | 53238-53239, | 53275, 53287- | 53327, 53338- |
| | 53245-53246, | 53288, 53294- | 53339, 53345- |
| | 53250-53251, | 53295, 53299, | 53346, 53360, |
| | 53255, 53260, | 53309, 53312, | 53363, 53366, |
| | 53369-53406 | 53407-53446 | 53447-53488 |
| 12:40301293_G_A | 53489 | 53490-53492 | 53493-53499 |
| rs10878340_SNP | | | |
| 12:40303632_G_A | 53500-53533 | 53534-53557 | 53558-53589 |
| rs10784498_REF | | | |
| 12:40303632_G_A | 53500, 53512, | 53547, 53607- | 53565, 53573, |
| rs10784498_SNP | 53525-53526, | 53612 | 53582, 53613- |
| | 53590-53606 | | 53622 |
| 12:40303675_C_T | 53623-53670 | 53671-53715 | 53716-53763 |
| rs10878341_REF | | | |
| 12:40303675_C_T | 53626, 53633, | 53674, 53681, | 53719, 53731, |
| | | 53686, 53703, | |
| rs10878341_SNP | 53638, 53648, | 53707, 53802- | 53750, 53753, |
| | 53650, 53655, | 53841 | 53756, 53762, |
| | 53659, 53662, | | 53842-53883 |
| | 53668-53669, | | |
| | 53764-53801 | | |
| 12:40304688_C_T | 53884-53915 | 53916-53949 | 53950-53988 |
| rs10784499_REF | | | |
| 12:40304688_C_T | 53886-53887, | 53917, 53919, | 53951, 53953, |
| rs10784499_SNP | 53892, 53896, | 53925, 53927, | 53959, 53962, |
| | 53903, 53909, | 53929, 53937, | 53964, 53978, |
| | 53913, 53989- | 53943, 53947, | 53981-53982, |
| | 54023 | 54024-54043 | 53986, 54044- |
| | | | 54072 |
| 12:40304884_A_G | 54073 | | 54074 |
| rs17484286_REF | | | |
| 12:40304884_A_G | 54073 | | 54074 |
| rs17484286_SNP | | | |
| 12:40306303_CTT_C | 54075-54120 | 54121-54144 | 54145-54177 |
| rs146071397_REF | | | |
| 12:40306303_CTT_C | 54085, 54093, | 54131, 54136, | 54166, 54175, |
| rs146071397_SNP | 54101-54102, | 54144, 54216- | 54177, 54250- |
| | 54107, 54116, | 54249 | 54288 |
| | 54178-54215 | | |
| 12:40306782_C_T | 54289-54325 | 54326-54357 | 54358-54391 |
| rs10878343_REF | | | |
| 12:40306782_C_T | 54392-54421 | 54422-54443 | 54444-54471 |
| rs10878343_SNP | | | |
| 12:40307469_G_T | 54472-54488 | 54489-54493 | 54494-54501 |
| rs11564180_REF | | | |
| 12:40307469_G_T | 54473, 54481, | | 54501 |
| rs11564180_SNP | 54502-54504 | | |
| 12:40307586_G_A | 54505-54510 | | |
| rs11175958_REF | | | |
| 12:40307927_A_G | 54511-54535 | 54536-54562 | 54563-54591 |
| rs11175959_REF | | | |
| 12:40307927_A_G | 54511, 54513, | 54536-54537, | 54563-54565, |
| rs11175959_SNP | 54518, 54532, | 54539, 54544, | 54567, 54572, |
| | 54534, 54592- | 54558, 54612- | 54634-54657 |
| | 54611 | 54633 | |
| 12:40308029_C_T | , | 54658-54659 | 54660-54663 |
| rs113772607_SNP | | | |
| 12:40308362_C_T | 54664-54697 | 54698-54726 | 54727-54758 |
| rs11564149_REF | | | |
| 12:40308362_C_T | 54670, 54686, | 54702, 54717, | 54732, 54747, |
| rs11564149_SNP | 54688, 54690, | 54784-54805 | 54749, 54806- |
| | 54697, 54759- | | 54829 |
| | 54783 | | |
| 12:40308969_C_T | 54830-54876 | 54877-54924 | 54925-54976 |
| rs11175963_REF | | | |
| 12:40308969_C_T | 54830, 54832, | 54890, 54893, | 54934, 54940, |
| rs11175963_SNP | 54844, 54848, | 54895, 54906- | 54943, 54945, |
| | 54859, 54861, | 54907, 54909, | 54956-54957, |
| | 54863-54864, | 54912-54913, | 54959, 54962, |
| | 54867, 54869, | 55009-55024 | 54968, 54970, |
| | 54977-55008 | | 55025-55051 |
| 12:40309044_A_T | 55052-55063 | 55064-55073 | 55074-55085 |
| rs7305344_REF | | | |
| 12:40309044_A_T | 55052-55053, | 55064-55065, | 55074-55075, |
| rs7305344_SNP | 55055, 55058- | 55067-55068, | 55077-55078, |
| | 55059, 55086- | 55070, 55093- | 55083, 55098- |
| | 55092 | 55097 | 55104 |
| 12:40309109_G_A | 55105-55140 | 55141-55181 | 55182-55229 |
| rs7133914_REF | | | |
| 12:40309109_G_A | 55120, 55123, | 55149, 55162- | 55191, 55204- |
| rs7133914_SNP | 55126, 55230- | 55164, 55176, | 55207, 55211, |
| | 55260 | 55261-55287 | 55288-55318 |
| 12:40309185_G_A | 15754, 15758, | 15800, 15806, | 15849, 15851, |
| rs11175964_REF | 15769, 15786, | 15817, 15835, | 15869, 15887, |
| | 15903, 15910, | 15845, 15949, | 15897, 15999, |
| | 15916, 55319- | 15956, 15963, | 16003, 16007, |
| | 55354 | 15975, 55355- | 16014, 16026, |
| | | 55395 | 55396-55437 |
| 12:40309185_G_A | 55332, 55336, | 55357, 55362, | 55397, 55401, |
| rs11175964_SNP | 55339, 55341- | 55366, 55371, | 55406, 55411, |
| | 55342, 55350- | 55376, 55381, | 55416, 55424, |
| | 55351, 55354, | 55387, 55391- | 55428, 55433, |
| | 55438-55475 | 55392, 55395, | 55436-55437, |
| | | 55476-55515 | 55516-55557 |
| 12:40309285_C_CGT | 55558-55577 | 55578-55596 | 55597-55617 |
| rs397805328_REF | | | |
| 12:40309350_C_A | 55618-55632 | 55633-55637 | 55638-55645 |
| rs11175966_REF | | | |
| 12:40309350_C_A | 55618, 55622- | 55633, 55635 | 55638, 55640, |
| rs11175966_SNP | 55623, 55631- | | 55642 |
| | 55632, 55646 | | |
| 12:40310063_A_G | 55647-55652 | 55653-55657 | 55658-55663 |
| rs10784501_REF | | | |
| 12:40310063_A_G | 55647-55649, | 55653-55657, | 55658-55660, |
| rs10784501_SNP | 55651-55652, | 55675-55677 | 55662-55663, |
| | 55664-55674 | | 55678-55682 |
| 12:40310755_T_C | 55683-55725 | 55726-55766 | 55767-55811 |
| rs41286474_REF | | | |
| 12:40310755_T_C | 55688-55689, | 55730, 55732- | 55771, 55773, |
| rs41286474_SNP | 55693-55694, | 55733, 55737, | 55778, 55781, |
| | 55697-55698, | 55740, 55745, | 55785, 55790, |
| | 55702, 55705, | 55748, 55758, | 55801-55803, |
| | 55717, 55812- | 55850-55887 | 55888-55929 |
| | 55849 | | |
| 12:40311346_CT_C | 55930-55947 | 55948-55958 | 55959-55971 |
| rs869212703_REF | | | |
| 12:40311346_CT_C | 55940, 55945 | | 55969 |
| rs869212703_SNP | | | |
| 12:40311356_T_A | 55940, 55945, | 55977 | 55969, 55978- |
| rs2069228_REF | 55972-55976 | | 55979 |
| 12:40311356_T_A | 55940, 55945, | 55977 | 55969, 55978- |
| rs2069228_SNP | 55972-55976 | | 55979 |
| 12:40311898_C_G | 55980-55989 | 55990-55993 | 55994-56000 |
| rs10784503_REF | | | |
| 12:40311898_C_G | 55981, 55983, | 55990-55991, | 55995-55996, |
| rs10784503_SNP | 55985, 55987, | 55993, 56006 | 55998-55999, |
| | 55989, 56001- | | |
| | 56005 | | 56007-56009 |
| 12:40311964_G_GT | 56010-56028 | 56029-56044 | 56045-56062 |
| rs386376250_REF | | | |
| 12:40311964_G_GT | 56027 | 56040 | 56061 |
| rs386376250_SNP | | | |
| 12:40312033_C_T | 56063-56100 | 56101-56134 | 56135-56172 |
| rs11564128_REF | | | |
| 12:40312033_C_T | 56073, 56080, | 56108, 56111, | 56140-56141, |
| rs11564128_SNP | 56082, 56090- | 56114, 56116, | 56145, 56149, |
| | 56091, 56094, | 56123, 56130, | 56161, 56168, |
| | 56173-56194 | 56195-56202 | 56203-56218 |
| 12:40312573_G_T | 56219-56265 | 56266-56312 | 56313-56362 |
| rs2896975_REF | | | |
| 12:40312573_G_T | 56219, 56229, | 56270, 56277, | 56314, 56318, |
| rs2896975_SNP | 56243-56244, | 56292, 56299, | 56325, 56340, |
| | 56251, 56257, | 56305, 56309, | 56342, 56358, |
| | 56260, 56263- | 56312, 56401- | 56361-56362, |
| | 56265, 56363- | | |
| | 56400 | 56440 | 56441-56482 |
| 12:40312729_G_A | 56483-56530 | 56531-56580 | 56581-56632 |
| rs7302503_REF | | | |
| 12:40312729_G_A | 56484, 56488, | 56532, 56541, | 56591, 56596, |
| rs7302503_SNP | 56493, 56498, | 56546, 56548, | 56598, 56600, |
| | 56501, 56519, | 56568, 56570, | 56619-56620, |
| | 56521, 56528- | 56577-56580, | 56629-56632, |
| | 56530, 56633- | 56671-56710 | 56711-56752 |
| | 56670 | | |
| 12:40312802_T_C | 56753-56766 | 56767-56775 | 56776-56787 |
| rs7137160_REF | | | |
| 12:40312802_T_C | 56753, 56755, | 56767-56769, | 56776-56777, |
| rs7137160_SNP | 56757-56758, | 56771-56775, | 56779, 56781- |
| | 56760-56761, | 56806-56813 | 56782, 56784- |
| | 56763-56766, | | 56787, 56814- |
| | 56788-56805 | | 56827 |
| 12:40312938_TTAAGAGA_T | 56828-56858 | 56859-56900 | 56901-56948 |
| rs369794148_REF | | | |
| 12:40312938_TTAAGAGA_T | 56829, 56833- | 56860, 56867, | 56901, 56904, |
| rs369794148_SNP | 56834, 56848, | 56884, 56896, | 56911, 56921, |
| | 56857, 56949- | 56987-57026 | 56944, 57027- |
| | 56986 | | 57068 |
| 12:40312990_GA_G | 57069-57109 | 57110-57150 | 57151-57196 |
| rs34709132_REF | | | |
| 12:40312990_GA_G | 57070-57071, | 57110, 57112- | 57151, 57154- |
| rs34709132_SNP | 57075-57077, | 57113, 57117, | 57155, 57160, |
| | 57088, 57091, | 57120, 57133, | 57163, 57165, |
| | 57094, 57100, | 57136, 57141, | 57184-57186, |
| | 57197-57228 | 57229-57260 | 57261-57296 |
| 12:40313399_A_G | 57297-57338 | 57339-57369 | 57370-57409 |
| rs10467144_REF | | | |
| 12:40313399_A_G | 57309, 57314, | 57345, 57350, | 57378, 57380, |
| rs10467144_SNP | 57317, 57321, | 57353, 57362, | 57385, 57397, |
| | 57327, 57334, | 57364, 57367, | 57402, 57405, |
| | 57410-57447 | 57448-57486 | 57409, 57487- |
| | | | 57527 |
| 12:40313476_C_T | 57528-57572 | 57573-57618 | 57619-57668 |
| rs11175985_REF | | | |
| 12:40313476_C_T | 57534, 57545, | 57578, 57591, | 57624-57625, |
| rs11175985_SNP | 57547-57548, | 57593, 57596- | 57640, 57642, |
| | 57551, 57565, | 57597, 57611, | 57646-57647, |
| | 57570, 57669- | 57616, 57706- | 57661, 57666, |
| | 57705 | 57738 | 57739-57775 |
| 12:40313594_T_G | 57776-57801 | 57802-57815 | 57816-57836 |
| rs10784504_REF | | | |
| 12:40313594_T_G | 57779, 57781, | 57804, 57808, | 57819-57820, |
| rs10784504_SNP | 57784-57785, | 57811-57812, | 57826, 57829- |
| | 57792-57793, | 57869-57891 | 57830, 57892- |
| | 57795, 57798- | | 57919 |
| | 57799, 57837- | | |
| | 57868 | | |
| 12:40313687_G_GT | 57920-57926 | 57927-57928 | 57929-57930 |
| rs57421387_REF | | | |
| 12:40313687_G_GT | 57923 | 57927 | 57930 |
| rs57421387_SNP | | | |
| 12:40315043_A_T | 57931-57946 | 57947-57954 | 57955-57964 |
| rs7973058_REF | | | |
| 12:40315043_A_T | 57933, 57935- | 57947-57948, | 57956-57957, |
| rs7973058_SNP | 57936, 57939, | 57951, 57953- | 57960-57961, |
| | 57945, 57965- | 57954, 57976- | 57964, 57979- |
| | 57975 | 57978 | 57983 |
| 12:40315090_T_C | 57984-58030 | 58031-58080 | 58081-58132 |
| rs1427267_REF | | | |
| 12:40315090_T_C | 57984-57985, | 58032, 58034- | 58082, 58084- |
| rs1427267_SNP | 57987-57988, | 58035, 58044, | 58085, 58093, |
| | 57992, 57996, | 58047, 58056- | 58095, 58108, |
| | 57999, 58008- | 58057, 58059, | 58110, 58117, |
| | 58009, 58011, | 58074, 58076, | 58126, 58128, |
| | 58133-58168 | 58169-58208 | 58209-58250 |
| 12:40315120_C_T | 58251-58296 | 58297-58344 | 58345-58396 |
| rs1427266_REF | | | |
| 12:40315120_C_T | 58253, 58257- | 58297, 58299, | 58345-58346, |
| rs1427266_SNP | 58258, 58267- | 58303, 58305- | 58349, 58353, |
| | 58268, 58276, | 58306, 58314- | 58355, 58366, |
| | 58279-58280, | 58315, 58323, | 58374, 58377, |
| | 58284, 58289, | 58327, 58332, | 58379, 58384, |
| | 58397-58425 | 58426-58453 | 58454-58487 |
| 12:40315383_A_G | 58488-58518 | 58519-58544 | 58545-58582 |
| rs721713_REF | | | |
| 12:40315383_A_G | 58494, 58498, | 58524, 58526- | 58547, 58553, |
| rs721713_SNP | 58500, 58502, | 58527, 58529, | 58560, 58562, |
| | 58504, 58510, | 58531, 58536, | 58564, 58572, |
| | 58512-58513, | 58538-58539, | 58574-58575, |
| | 58516, 58518, | 58542, 58544, | 58580, 58582, |
| | 58583-58620 | 58621-58652 | 58653-58688 |
| 12:40315516_G_A | 58689-58735 | 58736-58785 | 58786-58837 |
| rs721712_REF | | | |
| 12:40315516_G_A | 58694, 58697- | 58741, 58744, | 58791, 58793, |
| rs721712_SNP | 58698, 58704, | 58751, 58756, | 58795, 58802, |
| | 58709, 58712, | 58759-58760, | 58810, 58816, |
| | 58717, 58723, | 58765, 58771, | 58818, 58823, |
| | 58727, 58732, | 58775, 58781, | 58827, 58833, |
| | 58838-58875 | 58876-58915 | 58916-58957 |
| 12:40315526_G_A | 58689-58693, | 58736-58740, | 58786-58790, |
| rs721711_REF | 58695-58699, | 58742-58746, | 58792-58798, |
| | 58702-58703, | 58749-58750, | 58800-58801, |
| | 58705, 58710- | 58752, 58757- | 58803, 58808- |
| | 58712, 58715, | 58760, 58763, | 58811, 58814, |
| | 58717, 58719- | 58765, 58767- | 58816, 58819- |
| | 58720, 58722, | 58768, 58770, | 58820, 58822, |
| | 58725, 58727- | 58773-58775, | 58825-58827, |
| | 58728, 58731, | 58777, 58780, | 58829, 58832, |
| | 58733-58735, | 58783-58785, | 58835-58837, |
| | 58958-58977 | 58978-58997 | 58998-59017 |
| 12:40315526_G_A | 58695, 58710- | 58742, 58757- | 58792, 58798, |
| rs721711_SNP | 58711, 58728, | 58758, 58774, | 58808-58809, |
| | 58733, 58963, | 58783, 58983, | 58826, 59001, |
| | 58968, 58974- | 58988, 58991, | 59003, 59008, |
| | 58975, 58977, | 58995, 58997, | 59011, 59017, |
| | 59018-59051 | 59052-59081 | 59082-59119 |
| 12:40315611_T_A | 59120-59160 | 59161-59200 | 59201-59245 |
| rs721709_REF | | | |
| 12:40315611_T_A | 59126, 59139, | 59167, 59182- | 59208, 59225, |
| rs721709_SNP | 59142-59144, | 59183, 59190, | 59232, 59234, |
| | 59151, 59246- | 59196, 59281- | 59240, 59244, |
| | 59280 | 59315 | 59316-59354 |
| 12:40315697_T_G | 59355-59399 | 59400-59443 | 59444-59490 |
| rs4768227_REF | | | |
| 12:40315697_T_G | 59361, 59374- | 59403, 59407, | 59445, 59448, |
| | 59375, 59377, | 59420, 59424, | 59452, 59465- |
| | 59379, 59395, | | |
| rs4768227_SNP | 59399, 59491- | 59440, 59529- | 59466, 59470, |
| | 59528 | 59568 | 59569-59610 |
| 12:40315806_AT_A | 59611-59612 | | |
| rs398098159_REF | | | |
| 12:40315806_AT_A | 59611-59617 | | 59618-59619 |
| rs398098159_SNP | | | |
| 12:40315822_G_T | 59611-59613, | 59642-59650 | 59651-59663 |
| rs4767969_REF | 59620-59641 | | |
| 12:40315822_G_T | 59620-59621, | | 59667-59668 |
| rs4767969_SNP | 59631, 59638, | | |
| | 59664-59666 | | |
| 12:40316155_G_A | 59669-59710 | 59711-59753 | 59754-59798 |
| rs10878356_REF | | | |
| 12:40316155_G_A | 59670, 59675, | 59712, 59718, | 59755, 59762- |
| rs10878356_SNP | 59694-59695, | 59737-59738, | 59763, 59782, |
| | 59799-59835 | 59836-59870 | 59871-59907 |
| 12:40317268_C_T | 59908-59917 | 59918-59922 | 59923-59932 |
| rs10784506_REF | | | |
| 12:40317268_C_T | 59911-59912, | 59918, 59921- | 59924, 59928- |
| rs10784506_SNP | 59915 | 59922 | 59930, 59932 |
| 12:40317289_G_A | 59908, 59911- | 59918-59919, | 59924, 59926, |
| rs10878358_REF | 59913, 59915- | 59921-59922, | 59928-59932, |
| | 59916, 59933- | 59961-59970 | 59971-59987 |
| | 59960 | | |
| 12:40317289_G_A | 59908, 59913, | 59919, 59998- | 59926, 59931, |
| rs10878358_SNP | 59916, 59950, | 60001 | 60002-60007 |
| | 59955, 59988- | | |
| | 59997 | | |
| 12:40317292_A_T | 59933-59960, | 59918-59919, | 59924, 59926, |
| rs7132073_REF | 60008-60009 | 59961-59970, | 59928, 59931, |
| | | 60010 | 59971-59987, |
| | | | 60011 |
| 12:40317292_A_T | 59950, 59958, | 59919, 59970, | 59926, 59931, |
| rs7132073_SNP | 59960, 60012- | 60039-60049 | 59975, 59977, |
| | 60038 | | 59979, 60050- |
| | | | 60066 |
| 12:40318196_C_A | 60067-60112 | 60113-60157 | 60158-60204 |
| rs1427265_REF | | | |
| 12:40318196_C_A | 60068, 60071, | 60116, 60126, | 60162, 60172, |
| rs1427265_SNP | 60075, 60078, | 60129, 60131, | 60175, 60191, |
| | 60083, 60085, | 60147, 60243- | 60194, 60282- |
| | 60095, 60101, | 60281 | 60322 |
| | 60107, 60205- | | |
| | 60242 | | |
| 12:40318557_C_T | 60323-60368 | 60369-60407 | 60408-60455 |
| rs17466339_REF | | | |
| 12:40318557_C_T | 60328, 60330, | 60372, 60384- | 60415-60416, |
| rs17466339_SNP | 60338, 60341, | 60385, 60391, | 60429-60430, |
| | 60348, 60355, | 60397, 60401, | 60436, 60443, |
| | 60359, 60456- | 60481-60499 | 60447, 60500- |
| | 60480 | | 60522 |
| 12:40318773_A_C | 60523-60548 | 60549-60555 | 60556-60568 |
| rs2114569_REF | | | |
| 12:40318773_A_C | 60524, 60526- | 60549, 60552, | 60556, 60559, |
| rs2114569_SNP | 60527, 60529- | 60605-60628 | 60566, 60629- |
| | 60530, 60533- | | 60662 |
| | 60535, 60541- | | |
| | 60542, 60569- | | |
| | 60604 | | |
| 12:40318818_G_A | 60663-60710 | 60711-60759 | 60760-60811 |
| rs2114568_REF | | | |
| 12:40318818_G_A | 60667, 60670, | 60735, 60742- | 60783, 60785, |
| rs2114568_SNP | 60687, 60694- | 60743, 60746, | 60792-60793, |
| | 60695, 60698- | 60751, 60753- | 60802, 60804- |
| | 60699, 60705- | 60755, 60758, | 60806, 60809- |
| | 60706, 60709, | 60850-60888 | 60810, 60889- |
| | 60812-60849 | | 60929 |
| 12:40319201_G_A | 60930-60967 | 60968-61002 | 61003-61043 |
| rs2162469_REF | | | |
| 12:40319201_G_A | 60943, 61044- | 61075-61084 | 61085-61100 |
| rs2162469_SNP | 61074 | | |
| 12:40319398_G_A | 61101-61148 | 61149-61198 | 61199-61250 |
| rs10784509_REF | | | |
| 12:40319398_G_A | 61107, 61118- | 61155, 61166- | 61216, 61224- |
| rs10784509_SNP | 61119, 61122, | 61167, 61174- | 61229, 61232, |
| | 61126-61127, | 61177, 61180, | 61236, 61246, |
| | 61130, 61134, | 61184, 61194, | 61329-61370 |
| | 61144, 61146, | 61289-61328 | |
| | 61251-61288 | | |
| 12:40319758_T_G | 61371-61417 | 61418-61457 | 61458-61504 |
| rs1896254_REF | | | |
| 12:40319758_T_G | 61371, 61375, | 61418, 61421, | 61458, 61461, |
| rs1896254_SNP | 61378, 61383, | 61427, 61431, | 61487-61488, |
| | 61387, 61405, | 61445, 61449, | 61493, 61498, |
| | 61410, 61413, | 61543-61582 | 61501, 61583- |
| | 61416, 61505- | | 61624 |
| | 61542 | | |
| 12:40319784_CA_C | 61625-61627 | 61628-61630 | 61631-61634 |
| rs5797667_REF | | | |
| 12:40319784_CA_C | 61626 | 61629 | 61632, 61634 |
| rs5797667_SNP | | | |
| 12:40319786_AT_A | 61626 | 61629 | 61632, 61634 |
| rs373676201_REF | | | |
| 12:40319793_T_C | 61635-61636 | 61637-61638 | 61639-61640 |
| rs1896253_REF | | | |
| 12:40319793_T_C | 61635-61636 | 61637-61638 | 61639-61640 |
| rs1896253_SNP | | | |
| 12:40319957_T_C | 61641-61644 | | 61645 |
| rs1896252_REF | | | |
| 12:40319957_T_C | 61641-61644, | 61647 | 61645, 61648- |
| rs1896252_SNP | 61646 | | 61650 |
| 12:40320032_C_A | 19471, 19475, | 19516-19517, | 19558-19559, |
| rs1427263_REF | 19477, 19486, | 19520, 19522, | 19561, 19564, |
| | 19491, 19620, | 19530, 19644, | 19574, 19662, |
| | 19622, 61651- | 19646-19647, | 19672, 19674- |
| | 61688 | 61689-61730 | 19675, 61731- |
| | | | 61773 |
| 12:40320032_C_A | 61657, 61660, | 61692, 61698, | 61733, 61739, |
| rs1427263_SNP | 61665, 61668, | 61703, 61706, | 61747, 61756, |
| | 61676, 61678, | 61716, 61718, | 61758, 61760, |
| | 61683, 61686- | 61723, 61728- | 61765, 61770, |
| | 61688, 61774- | 61730, 61812- | 61772-61773, |
| | 61811 | 61851 | 61852-61893 |
| 12:40320071_A_G | 61894-61898 | 61899-61900 | 61901-61904 |
| rs11176013_REF | | | |
| 12:40320071_A_G | 61894-61898, | 61899-61900 | 61901-61904, |
| rs11176013_SNP | 61905-61911 | | 61912 |
| 12:40320099_T_A | 19709, 19712, | 19739, 19752, | 19779, 19790, |
| rs11564148_REF | 19823, 19825, | 19867, 19880, | 19793-19794, |
| | 19838, 19841, | 19884, 19888, | 19913, 19920, |
| | 19958, 19966, | 20001, 20009, | 19930, 19934, |
| | 19969, 19974, | 20017, 20024, | 20037, 20047, |
| | 19979, 20087, | 20029, 20129, | 20070, 20075, |
| | 20093, 20106, | 20134, 20139, | 20077, 20173, |
| | 20116, 61913- | 20152, 20161, | 20178, 20184, |
| | 61931 | 61932-61951 | 20199, 20207, |
| | | | 61952-61977 |
| 12:40320099_T_A | 19958, 19966, | 20001, 20009, | 20037, 20047, |
| rs11564148_SNP | 19969, 19974, | 20017, 20024, | 20070, 20075, |
| | 19979, 61917, | 20029, 62014- | 20077, 61966, |
| | 61929, 61931, | 62044 | 61969, 62045- |
| | 61978-62013 | | 62081 |
| 12:40320207_A_G | 62082-62103 | 62104-62115 | 62116-62131 |
| rs11564205_REF | | | |
| 12:40320207_A_G | 62084, 62092, | 62165-62187 | 62188-62212 |
| rs11564205_SNP | 62132-62164 | | |
| 12:40320386_G_A | 62213-62228 | 62229-62241 | 62242-62257 |
| rs10748030_REF | | | |
| 12:40320386_G_A | 62215, 62221, | 62231, 62234, | 62244, 62247, |
| rs10748030_SNP | 62223, 62225- | 62236, 62239, | 62249, 62251, |
| | 62226, 62258- | 62265-62268 | 62255, 62269- |
| | 62264 | | 62274 |
| 12:40320464_T_C | 62275-62284 | 62285-62296 | 62297-62310 |
| rs10748031_REF | | | |
| 12:40320464_T_C | 62275-62277, | 62285-62286, | 62298-62300, |
| rs10748031_SNP | 62280-62281, | 62288, 62290, | 62303, 62305, |
| | 62284, 62311- | 62292-62293, | 62307, 62310, |
| | 62336 | 62295, 62337- | 62362-62386 |
| | | 62361 | |
| 12:40320465_G_T | 62275-62283, | 62285-62291, | 62297-62299, |
| rs10748032_REF | 62387-62388 | 62293-62296, | 62301-62310, |
| | | 62389-62390 | 62391-62392 |
| 12:40320465_G_T | 62275-62277, | 62286, 62288, | 62298-62299, |
| rs10748032_SNP | 62280-62281, | 62290, 62293, | 62305, 62307, |
| | 62387, 62393- | 62295, 62390, | 62310, 62392, |
| | 62419 | 62420-62446 | 62447-62473 |
| 12:40320530_T_C | 62474-62518 | 62519-62558 | 62559-62601 |
| rs11564177_REF | | | |
| 12:40320530_T_C | 62476, 62481, | 62531, 62545, | 62571, 62587, |
| rs11564177_SNP | 62489, 62506, | 62548, 62640- | 62590, 62598, |
| | 62513-62514, | 62679 | 62680-62721 |
| | 62518, 62602- | | |
| | 62639 | | |
| 12:40320593_C_T | 62722-62762 | 62763-62790 | 62791-62828 |
| rs10748033_REF | | | |
| 12:40320593_C_T | 62724, 62726, | 62764, 62768, | 62792, 62797, |
| rs10748033_SNP | 62735-62736, | 62772-62773, | 62802-62803, |
| | 62746, 62753, | 62785, 62848- | 62805, 62822, |
| | 62829-62847 | 62860 | 62861-62877 |
| 12:40320699_T_G | 62878-62895 | 62896-62913 | 62914-62933 |
| rs10735931_REF | | | |
| 12:40320699_T_G | 62880-62881, | 62899-62900, | 62915, 62918, |
| rs10735931_SNP | 62884, 62888, | 62902, 62906, | 62920, 62926, |
| | 62892, 62934- | 62910, 62953- | 62930, 62968- |
| | 62952 | 62967 | 62984 |
| 12:40320816_C_T | 62985-63024 | 63025-63058 | 63059-63102 |
| rs10748034_REF | | | |
| 12:40320816_C_T | 62994, 63003, | 63033, 63044, | 63068, 63072, |
| rs10748034_SNP | 63008, 63012- | 63047, 63053, | 63090, 63096, |
| | 63013, 63019, | 63055, 63126- | 63098, 63100, |
| | 63103-63125 | 63142 | 63143-63163 |
| 12:40320983_A_T | 63164-63209 | 63210-63255 | 63256-63306 |
| rs10878368_REF | | | |
| 12:40320983_A_T | 63176, 63179- | 63217, 63223, | 63263, 63269, |
| rs10878368_SNP | 63181, 63190- | 63226-63228, | 63272, 63274, |
| | 63191, 63199- | 63237-63238, | 63283-63284, |
| | 63200, 63202- | 63246, 63249, | 63293, 63298- |
| | 63203, 63307- | 63344-63380 | 63300, 63381- |
| | 63343 | | 63421 |
| 12:40321211_T_A | 63422-63424 | 63425-63427 | 63428-63431 |
| rs7307276_REF | | | |
| 12:40321211_T_A | 63422-63424 | 63425-63427 | 63428-63431 |
| rs7307276_SNP | | | |
| 12:40321446_T_C | 63432-63479 | 63480-63529 | 63530-63581 |
| rs4768229_REF | | | |
| 12:40321446_T_C | 63436, 63440- | 63484, 63488, | 63532, 63535, |
| rs4768229_SNP | 63441, 63450, | 63493, 63499, | 63539, 63544, |
| | 63461, 63464, | 63506, 63511, | 63553, 63558, |
| | 63467-63468, | 63517-63518, | 63569-63570, |
| | 63477-63478, | 63527-63528, | 63579-63580, |
| | 63582-63619 | 63620-63659 | 63660-63701 |
| 12:40321500_G_A | 63702-63731 | 63732-63761 | 63762-63793 |
| rs4768230_REF | | | |
| 12:40321500_G_A | 63711, 63720, | 63739, 63741, | 63769, 63771, |
| rs4768230_SNP | 63725, 63728, | 63750, 63758, | 63778, 63781, |
| | 63730, 63794- | 63760, 63817- | 63791, 63838- |
| | 63816 | 63837 | 63860 |
| 12:40321508_C_CA | 63704-63705, | 63734-63735, | 63764-63765, |
| rs397968969_REF | 63707-63709, | 63737-63738, | 63767-63768, |
| | 63712-63713, | 63742-63743, | 63770, 63772- |
| | 63716, 63721- | 63746, 63751- | 63773, 63776, |
| | 63722, 63726- | 63752, 63754, | 63782-63783, |
| | 63727, 63729, | 63756-63757, | 63785, 63787- |
| | 63731, 63861- | 63759, 63761, | 63788, 63790, |
| | 63863 | 63864-63867 | 63792-63793, |
| | | | 63868-63871 |
| 12:40321508_C_CA | 63709, 63713, | 63735, 63743, | 63765, 63768, |
| rs397968969_SNP | 63862-63863 | 63864-63866 | 63773, 63868- |
| | | | 63869, 63871 |
| 12:40321575_G_A | 63872-63909 | 63910-63943 | 63944-63980 |
| rs11564204_REF | | | |
| 12:40321575_G_A | 63873, 63875, | 63911, 63917, | 63945, 63947, |
| rs11564204_SNP | 63882, 63892, | 63933, 64010- | 63953, 63956, |
| | 63899, 63981- | 64038 | 64039-64069 |
| | 64009 | | |
| 12:40321788_C_T | 64070-64114 | 64115-64157 | 64158-64203 |
| rs4423250_REF | | | |
| 12:40321788_C_T | 64083, 64086, | 64128, 64134, | 64171, 64177, |
| rs4423250_SNP | 64089, 64091, | 64136, 64241- | 64192, 64194, |
| | 64102, 64105- | 64266 | 64267-64301 |
| | 64106, 64204- | | |
| | 64240 | | |
| 12:40322213_C_T | 64302-64321 | 64322-64323 | 64324-64329 |
| rs7137665_REF | | | |
| 12:40322458_T_C | 21565, 21569, | 21580, 64351- | 21581, 21583, |
| rs10878371_REF | 21573, 21575, | 64365 | 64366-64385 |
| | 21577, 64330- | | |
| | 64350 | | |
| 12:40322458_T_C | 64386-64422 | 64423-64454 | 64455-64488 |
| rs10878371_SNP | | | |
| 12:40322672_T_C | 64489-64490 | | |
| rs11176022_REF | | | |
| 12:40322672_T_C | 64489-64494 | | 64495-64496 |
| rs11176022_SNP | | | |
| 12:40322834_CAT_C | 64497-64542 | 64543-64589 | 64590-64641 |
| rs60750674_REF | | | |
| 12:40322834_CAT_C | 64498, 64500, | 64543, 64545, | 64591, 64593, |
| rs60750674_SNP | 64506-64507, | 64551-64552, | 64601, 64609, |
| | 64516-64517, | 64560, 64562, | 64611, 64622, |
| | 64526, 64531, | 64572, 64578, | 64628, 64633, |
| | 64642-64680 | 64681-64721 | 64722-64764 |
| 12:40322892_A_G | 64765-64812 | 64813-64860 | 64861-64912 |
| rs10878372_REF | | | |
| 12:40322892_A_G | 64770, 64772, | 64818, 64820, | 64866, 64868, |
| rs10878372_SNP | 64775, 64784, | 64823, 64831, | 64880-64881, |
| | 64786, 64789, | 64833, 64836, | 64883, 64886- |
| | 64793-64794, | 64840, 64852, | 64887, 64891, |
| | 64803, 64811, | 64856, 64859, | 64903, 64908, |
| | 64913-64950 | 64951-64990 | 64991-65032 |
| 12:40323798_CTTT_C | 65033-65044 | 65045-65056 | 65057-65070 |
| rs398055492_REF | | | |
| 12:40323798_CTT_C | 65033-65044 | 65045-65056 | 65057-65070 |
| rs761931834_REF | | | |
| 12:40323798_CT_C | 65033-65044 | 65045-65056 | 65057-65070 |
| rs1415940047_REF | | | |
| 12:40324198_G_A | 65071-65106 | 65107-65140 | 65141-65176 |
| rs17466430_REF | | | |
| 12:40324198_G_A | 65080, 65086, | 65116, 65121, | 65150, 65152, |
| rs17466430_SNP | 65090, 65101, | 65124, 65126, | 65159, 65161, |
| | 65104, 65177- | 65136, 65204- | 65171, 65231- |
| | 65203 | 65230 | 65259 |
| 12:40324651_A_T | 65260-65288 | 65289-65300 | 65301-65316 |
| rs11176030_REF | | | |
| 12:40324651_A_T | 65264, 65268, | 65342-65353 | 65354-65369 |
| rs11176030_SNP | 65273, 65279, | | |
| | 65286, 65317- | | |
| | 65341 | | |
| 12:40325081_T_C | 65370-65377 | 65378-65387 | 65388-65399 |
| rs3747891_REF | | | |
| 12:40325081_T_C | 65371, 65373, | 65379-65380, | 65389, 65397, |
| rs3747891_SNP | 65400-65421 | 65422-65447 | 65448-65477 |
| 12:40325698_A_C | 65478-65509 | 65510-65537 | 65538-65569 |
| rs7298930_REF | | | |
| 12:40325698_A_C | 65480, 65483, | 65512, 65514, | 65542, 65544- |
| rs7298930_SNP | 65488, 65491, | 65516-65517, | 65545, 65552, |
| | 65493, 65496- | 65523, 65527- | 65556-65558, |
| | 65497, 65499- | 65528, 65530- | 65561-65562, |
| | 65501, 65570- | 65532, 65602- | 65566, 65630- |
| | 65601 | 65629 | 65665 |
| 12:40326004_G_C | 65666-65713 | 65714-65763 | 65764-65815 |
| rs17444089_REF | | | |
| 12:40326004_G_C | 65669, 65672, | 65717, 65720, | 65767, 65772, |
| rs17444089_SNP | 65674, 65680, | 65722, 65728, | 65778, 65780, |
| | 65682, 65687, | 65730, 65737, | 65787, 65800, |
| | 65689, 65692, | 65742, 65750, | 65802, 65808, |
| | 65694, 65702, | 65752, 65758, | 65810, 65812, |
| | 65816-65853 | 65854-65893 | 65894-65935 |
| 12:40326202_T_C | 65936 | 65937-65939 | 65940-65944 |
| rs10878377_REF | | | |
| 12:40326202_T_C | 65936 | 65937-65938, | 65940-65942, |
| rs10878377_SNP | | 65945 | 65946-65947 |
| 12:40326497_A_C | 65948-65959 | 65960-65971 | 65972-65983 |
| rs12316801_REF | | | |
| 12:40326497_A_C | 65952-65954, | 65965-65966, | 65976, 65978, |
| rs12316801_SNP | 65958-65959, | 65968, 65970- | 65980, 65982- |
| | 65984-65994 | 65971, 65995- | 65983, 66006- |
| | | 66005 | 66018 |
| 12:40326499_A_C | 65948-65959, | 65960-65971, | 65972-65983, |
| rs17444096_REF | 66019-66022 | 66023-66026 | 66027-66030 |
| 12:40326499_A_C | 65954, 65958- | 65968, 65970- | 65976, 65980, |
| rs17444096_SNP | 65959, 66021- | 65971, 66025- | 65983, 66029- |
| | 66022, 66031- | 66026, 66044- | 66030, 66057- |
| | 66043 | 66056 | 66069 |
| 12:40327240_G_A | 66070-66116 | 66117-66166 | 66167-66218 |
| rs11564175_REF | | | |
| 12:40327240_G_A | 66077, 66082, | 66125, 66130, | 66175, 66180, |
| rs11564175_SNP | 66084, 66099, | 66132, 66147, | 66182, 66189, |
| | 66101, 66104- | 66152-66154, | 66198, 66203, |
| | 66105, 66109, | 66158, 66164, | 66205-66206, |
| | 66112, 66116, | 66166, 66257- | 66210, 66216, |
| | 66219-66256 | 66296 | 66297-66338 |
| 12:40328650_A_G | 66339-66385 | 66386-66431 | 66432-66482 |
| rs2404832_REF | | | |
| 12:40328650_A_G | 66344, 66350, | 66398, 66400, | 66444, 66447, |
| rs2404832_SNP | 66353, 66369, | 66414, 66417, | 66458, 66462, |
| | 66371-66372, | 66419-66420, | 66467-66468, |
| | 66380-66381, | 66428, 66431, | 66474, 66477- |
| | 66383, 66385, | 66521-66560 | 66478, 66561- |
| | 66483-66520 | | 66602 |
| 12:40328747_C_A | 66603-66649 | 66650-66695 | 66696-66747 |
| rs17466486_REF | | | |
| 12:40328747_C_A | 66616, 66618- | 66664-66665, | 66701, 66713, |
| rs17466486_SNP | 66619, 66621, | 66667, 66677, | 66715-66716, |
| | 66624, 66631, | 66680-66681, | 66718, 66727, |
| | 66634-66635, | 66685, 66690, | 66730-66731, |
| | 66639, 66748- | 66783-66807 | 66736, 66741, |
| | 66782 | | 66808-66836 |
| 12:40328922_C_T | 66837-66883 | 66884-66931 | 66932-66981 |
| rs11564267_REF | | | |
| 12:40328922_C_T | 66841, 66844- | 66888, 66892, | 66936, 66939, |
| rs11564267_SNP | 66845, 66850, | 66897, 66900, | 66949, 66961, |
| | 66853, 66861, | 66914, 66922, | 66964, 66972, |
| | 66867, 66871, | 66928, 66931, | 66978, 66981, |
| | 66875, 66881, | 67020-67059 | 67060-67101 |
| | 66982-67019 | | |
| 12:40329067_AG_A | 67102-67126 | 67127-67132 | 67133-67146 |
| rs17520244_REF | | | |
| 12:40329067_AG_A | 67108-67109, | 67130 | 67135, 67139, |
| rs17520244_SNP | 67113, 67121, | | 67144 |
| | 67147-67148 | | |
| 12:40329673_T_A | 67149-67158 | 67159-67160 | 67161-67163 |
| rs10506152_REF | | | |
| 12:40329673_T_A | 67150, 67152, | 67159-67160 | 67161-67163 |
| rs10506152_SNP | 67155, 67157, | | |
| | 67164-67169 | | |
| 12:40330098_C_T | 67170-67212 | 67213-67255 | 67256-67300 |
| rs11176052_REF | | | |
| 12:40330098_C_T | 67173, 67183, | 67226, 67245, | 67266, 67270, |
| rs11176052_SNP | 67199, 67202, | 67254, 67339- | 67290, 67378- |
| | 67207, 67211, | 67377 | 67418 |
| | 67301-67338 | | |
| 12:40330228_C_T | 67419-67460 | 67461-67489 | 67490-67525 |
| rs11176053_REF | | | |
| 12:40330228_C_T | 67427, 67436, | 67463, 67469, | 67490, 67494, |
| rs11176053_SNP | 67440-67441, | 67477, 67481, | 67500, 67508, |
| | 67451, 67526- | 67544-67549 | 67512, 67550- |
| | 67543 | | 67559 |
| 12:40330692_A_C | 67560-67607 | 67608-67657 | 67658-67709 |
| rs17444124_REF | | | |
| 12:40330692_A_C | 67571, 67573, | 67619, 67621, | 67669, 67673- |
| rs17444124_SNP | 67575-67576, | 67623-67625, | 67676, 67701, |
| | 67594-67595, | 67644, 67650, | 67703-67706, |
| | 67597, 67601, | 67652-67654, | 67788-67829 |
| | 67603-67604, | 67748-67787 | |
| | 67710-67747 | | |
| 12:40330779_G_A | 67830-67877 | 67878-67925 | 67926-67976 |
| rs11564203_REF | | | |
| 12:40330779_G_A | 67832-67833, | 67879, 67881, | 67927, 67929, |
| rs11564203_SNP | 67837, 67840, | 67885, 67896, | 67933, 67948- |
| | 67849, 67852, | 67899, 67901, | 67949, 67951, |
| | 67854, 67856, | 67903, 67920, | 67953, 67955, |
| | 67860, 67875, | 68014-68042 | 67971, 68043- |
| | 67977-68013 | | 68077 |
| 12:40331158_G_T | 68078-68123 | 68124-68167 | 68168-68215 |
| rs7307562_REF | | | |
| 12:40331158_G_T | 68078, 68089- | 68124-68125, | 68168, 68170, |
| rs7307562_SNP | 68091, 68099, | 68136, 68159, | 68181-68182, |
| | 68111, 68115, | 68164, 68253- | 68184, 68212, |
| | 68120, 68216- | 68281 | 68282-68316 |
| | 68252 | | |
| 12:40331402_T_A | 68317-68364 | 68365-68414 | 68415-68466 |
| rs17520251_REF | | | |
| 12:40331402_T_A | 68317-68320, | 68365-68368, | 68415-68418, |
| rs17520251_SNP | 68324, 68326, | 68372, 68374, | 68430, 68436, |
| | 68332, 68334, | 68380, 68386, | 68443, 68447, |
| | 68344, 68350, | 68393, 68399, | 68450, 68454, |
| | 68467-68504 | 68505-68544 | 68545-68586 |
| 12:40331597_C_CA | 68587 | , | 68588 |
| rs11461395_REF | | | |
| 12:40331769_T_C | 68589-68616 | 68617-68642 | 68643-68670 |
| rs10506153_REF | | | |
| 12:40331769_T_C | 68594, 68598, | 68622, 68625, | 68648, 68651- |
| rs10506153_SNP | 68600, 68605, | 68632, 68636, | 68652, 68659, |
| | 68611, 68671- | 68638, 68696- | 68663, 68721- |
| | 68695 | 68720 | 68747 |
| 12:40331791_C_G | 68748-68758 | | |
| rs73275761_REF | | | |
| 12:40331791_C_G | 68759-68770 | | |
| rs73275761_SNP | | | |
| 12:40331976_G_A | 68771-68818 | 68819-68868 | 68869-68920 |
| rs963243_REF | | | |
| 12:40331976_G_A | 68778-68779, | 68826, 68833- | 68874, 68877- |
| rs963243_SNP | 68785, 68793, | 68834, 68842- | 68878, 68885- |
| | 68799, 68804- | 68843, 68849, | 68886, 68894, |
| | 68805, 68808- | 68854-68855, | 68901, 68906- |
| | 68809, 68811, | 68858-68859, | 68907, 68910, |
| | 68921-68958 | 68959-68994 | 68995-69034 |
| 12:40332078_C_T | 69035-69080 | 69081-69130 | 69131-69182 |
| rs17444145_REF | | | |
| 12:40332078_C_T | 69045-69046, | 69091-69092, | 69135, 69142- |
| rs17444145_SNP | 69057, 69065, | 69094, 69099, | 69143, 69145, |
| | 69067, 69069, | 69105, 69114, | 69150, 69161, |
| | 69072-69073, | 69116, 69118, | 69166, 69170, |
| | 69077-69078, | 69122, 69127, | 69174, 69179, |
| | 69183-69220 | 69221-69260 | 69261-69302 |
| 12:40332126_A_G | 69303-69348 | 69349-69398 | 69399-69450 |
| rs10878386_REF | | | |
| 12:40332126_A_G | 69319, 69332- | 69362, 69381- | 69412, 69431, |
| rs10878386_SNP | 69333, 69335, | 69382, 69384, | 69434-69435, |
| | 69337, 69339, | 69388, 69391, | 69439, 69443, |
| | 69342, 69344- | 69393-69395, | 69445-69447, |
| | 69346, 69451- | 69397, 69489- | 69449, 69529- |
| | 69488 | 69528 | 69570 |
| 12:40332765_C_G | 69571-69572 | | |
| rs17466521_REF | | | |
| 12:40332765_C_G | 69571-69572 | | |
| rs17466521_SNP | | | |
| 12:40332845_A_T | 69573-69604 | 69605-69630 | 69631-69658 |
| rs12367542_REF | | | |
| 12:40332845_A_T | 69579, 69590- | 69609, 69611, | 69636, 69638- |
| rs12367542_SNP | 69591, 69599- | 69620, 69626- | 69639, 69648, |
| | 69600, 69659- | 69627, 69686- | 69654, 69707- |
| | 69685 | 69706 | 69729 |
| 12:40332946_T_G | 69730-69768 | 69769-69798 | 69799-69828 |
| rs17520278_REF | | | |
| 12:40332946_T_G | 69768, 69829- | 69867-69905 | 69906-69943 |
| rs17520278_SNP | 69866 | | |
| 12:40332960_T_TAA | 69738, 69745- | 69784, 69790, | 69814, 69819, |
| rs35031086_REF | 69746, 69748, | 69793-69798 | 69821-69828 |
| | 69754, 69758- | | |
| | 69768, 69944- | | |
| | 69945 | | |
| 12:40332960_T_TA | 69738, 69745- | 69784, 69790, | 69814, 69819, |
| rs35031086_REF | 69746, 69748, | 69793-69798 | 69821-69828 |
| | 69754, 69758- | | |
| | 69768, 69944- | | |
| | 69945 | | |
| 12:40333796_C_T | 69946-69992 | 69993-70042 | 70043-70094 |
| rs11834950_REF | | | |
| 12:40333796_C_T | 69947-69948, | 69993, 69995- | 70043, 70046, |
| rs11834950_SNP | 69954-69956, | 69996, 70002, | 70052, 70054- |
| | 69965, 69967, | 70004-70005, | 70055, 70073, |
| | 69976, 69982, | 70014, 70025, | 70076-70077, |
| | 69986, 70095- | 70031, 70035, | 70083, 70087, |
| | 70132 | 70133-70172 | 70173-70214 |
| 12:40333977_T_G | 70215-70262 | 70263-70312 | 70313-70364 |
| rs11829088_REF | | | |
| 12:40333977_T_G | 70222, 70229, | 70267, 70271, | 70313, 70318, |
| rs11829088_SNP | 70232-70233, | 70278, 70281- | 70322, 70330, |
| | 70235, 70239, | 70282, 70284, | 70333-70334, |
| | 70246, 70249, | 70288, 70295, | 70336, 70347, |
| | 70259, 70261, | 70298, 70308, | 70350, 70360, |
| | 70365-70402 | 70403-70442 | 70443-70484 |
| 12:40334389_C_A | 70485-70520 | 70521-70553 | 70554-70591 |
| rs4465428_REF | | | |
| 12:40334389_C_A | 70502-70505, | 70538-70540, | 70568, 70573- |
| rs4465428_SNP | 70508, 70515, | 70542, 70548, | 70575, 70577, |
| | 70592-70610 | 70611-70630 | 70585, 70631- |
| | | | 70655 |
| 12:40334496_A_G | 70656-70659 | | |
| rs61007767_REF | | | |
| 12:40334496_A_G | 70656-70664 | | 70665-70667 |
| rs61007767_SNP | | | |
| 12:40334626_G_C | 70668-70680 | 70681-70697 | 70698-70718 |
| rs60776971_REF | | | |
| 12:40334626_G_C | 70671, 70719- | 70681, 70686, | 70699, 70705- |
| rs60776971_SNP | 70760 | 70761-70801 | 70706, 70802- |
| | | | 70846 |
| 12:40335205_C_T | 70847-70893 | 70894-70943 | 70944-70995 |
| rs2404834_REF | | | |
| 12:40335205_C_T | 70856, 70860, | 70907, 70911, | 70957, 70965- |
| rs2404834_SNP | 70862-70863, | 70915, 70929- | 70966, 70980- |
| | 70867, 70881- | 70932, 70934, | 70981, 70983, |
| | 70882, 70884, | 70942-70943, | 70985, 70993- |
| | 70892-70893, | 71034-71073 | 70995, 71074- |
| | 70996-71033 | | 71115 |
| 12:40335853_G_A | 71116-71163 | 71164-71213 | 71214-71265 |
| rs7302841_REF | | | |
| 12:40335853_G_A | 71118, 71126, | 71167, 71175- | 71217, 71225- |
| rs7302841_SNP | 71140, 71144, | 71176, 71190, | 71226, 71231, |
| | 71148, 71153, | 71194, 71198, | 71244, 71246, |
| | 71156, 71159, | 71203, 71209, | 71250, 71261, |
| | 71161, 71163, | 71211, 71213, | 71263, 71265, |
| | 71266-71303 | 71304-71343 | 71344-71385 |
| 12:40336661_C_T | 71386-71433 | 71434-71482 | 71483-71534 |
| rs2404835_REF | | | |
| 12:40336661_C_T | 71393, 71395, | 71443, 71453, | 71491, 71493, |
| rs2404835_SNP | 71415-71416, | 71462, 71465- | 71501, 71504, |
| | 71418, 71426, | 71466, 71468, | 71513, 71516, |
| | 71429-71430, | 71476, 71480, | 71519, 71527, |
| | 71432-71433, | 71482, 71573- | 71531, 71534, |
| | 71535-71572 | 71610 | 71611-71652 |
| 12:40337133_CA_C | 71653-71700 | 71701-71746 | 71747-71798 |
| rs11356084_REF | | | |
| 12:40337133_CA_C | 71654, 71660, | 71708, 71711- | 71750, 71756, |
| rs11356084_SNP | 71663, 71668, | 71712, 71715, | 71760-71761, |
| | 71675, 71681, | 71722, 71725, | 71766, 71773, |
| | 71684, 71688, | 71731, 71734, | 71776, 71786, |
| | 71690, 71799- | 71736, 71835- | 71788, 71873- |
| | 71834 | 71872 | 71912 |
| 12:40337381_A_C | 71913-71916 | 71917-71919 | 71920-71924 |
| rs715403_REF | | | |
| 12:40337381_A_C | 71913-71916, | 71917-71919, | 71920-71924, |
| rs715403_SNP | 71925-71929 | 71930 | 71931-71933 |
| 12:40337412_G_A | 71934-71978 | 71979-72010 | 72011-72050 |
| rs715402_REF | | | |
| 12:40337412_G_A | 71934, 71937, | 71980, 71989, | 72012, 72015, |
| rs715402_SNP | 71941, 71949, | 71998, 72070- | 72035, 72038, |
| | 71952, 71965, | 72076 | 72045, 72077- |
| | 71969, 72051- | | 72091 |
| | 72069 | | |
| 12:40337704_G_C | 72092-72123 | 72124-72149 | 72150-72177 |
| rs6581667_REF | | | |
| 12:40337704_G_C | 72095, 72100, | 72127, 72134, | 72154, 72158, |
| rs6581667_SNP | 72106, 72108, | 72136, 72143, | 72164, 72171, |
| | 72116, 72178- | 72148, 72207- | 72176, 72228- |
| | 72206 | 72227 | 72250 |
| 12:40337804_G_A | 72251-72298 | 72299-72342 | 72343-72389 |
| rs6581668_REF | | | |
| 12:40337804_G_A | 72253, 72272, | 72301, 72308, | 72345, 72354, |
| rs6581668_SNP | 72274, 72280, | 72323, 72325, | 72369, 72371, |
| | 72282, 72284, | 72327-72328, | 72373-72374, |
| | 72287, 72291, | 72335, 72337- | 72376, 72382, |
| | 72293-72294, | 72338, 72428- | 72384-72385, |
| | 72390-72427 | 72467 | 72468-72509 |
| 12:40338157_CCCT_C | 72510-72556 | 72557-72606 | 72607-72658 |
| rs200521371_REF | | | |
| 12:40338157_CCCT_C | 72520, 72522, | 72559, 72571, | 72609, 72627- |
| rs200521371_SNP | 72529, 72538, | 72578, 72588, | 72628, 72638, |
| | 72547, 72551, | 72597, 72599, | 72642, 72648, |
| | 72553, 72659- | 72603, 72697- | 72651, 72737- |
| | 72696 | 72736 | 72778 |
| 12:40338159_C_T | 72510-72527, | 72557-72576, | 72607-72632, |
| rs4767970_REF | 72529-72534, | 72578-72582, | 72634, 72636, |
| | 72536, 72538- | 72584, 72586, | 72638-72649, |
| | 72548, 72550- | 72588-72606, | 72651-72658, |
| | 72556, 72661, | 72720, 72724, | 72745, 72762, |
| | 72685, 72779- | 72781-72782 | 72783-72784 |
| | 72780 | | |
| 12:40338159_C_T | 72513, 72520, | 72559, 72568, | 72609, 72621, |
| rs4767970_SNP | 72522, 72529, | 72571, 72578, | 72627-72628, |
| | 72538, 72547, | 72588, 72597, | 72638, 72642, |
| | 72551, 72553, | 72599, 72603, | 72648, 72651, |
| | 72661, 72685- | 72720, 72724, | 72745, 72762, |
| | 72686, 72785- | 72732, 72822- | 72775, 72861- |
| | 72821 | 72860 | 72901 |
| 12:40338230_C_T | 72902-72949 | 72950-72999 | 73000-73051 |
| rs4767971_REF | | | |
| 12:40338230_C_T | 72902-72903, | 72950, 72953- | 73004, 73013, |
| rs4767971_SNP | 72905-72906, | 72954, 72963, | 73015-73016, |
| | 72914-72915, | 72965-72966, | 73028, 73033, |
| | 72917-72918, | 72978, 72986- | 73037-73038, |
| | 72937, 72946, | 72987, 72996, | 73043, 73048, |
| | 73052-73089 | 73090-73129 | 73130-73171 |
| 12:40338321_C_T | 73172-73209 | 73210-73235 | 73236-73265 |
| rs4767972_REF | | | |
| 12:40338321_C_T | 73172-73173, | 73210-73211, | 73236-73238, |
| rs4767972_SNP | 73182, 73198, | 73215, 73219, | 73248, 73258, |
| | 73205, 73266- | 73229, 73283- | 73300-73318 |
| | 73282 | 73299 | |
| 12:40338592_T_C | 73319-73341 | 73342-73345 | 73346-73351 |
| rs1427271_REF | | | |
| 12:40338592_T_C | 73352-73384 | 73385-73412 | 73413-73446 |
| rs1427271_SNP | | | |
| 12:40338678_G_C | 73447-73487 | 73488-73526 | 73527-73567 |
| rs1427272_REF | | | |
| 12:40338678_G_C | 73452, 73460, | 73606-73644 | 73645-73685 |
| rs1427272_SNP | 73464, 73568- | | |
| | 73605 | | |
| 12:40338928_C_G | 73686-73733 | 73734-73779 | 73780-73828 |
| rs1427273_REF | | | |
| 12:40338928_C_G | 73686, 73690- | 73737, 73745, | 73783, 73786, |
| rs1427273_SNP | 73691, 73699, | 73754, 73760, | 73792, 73802, |
| | 73701, 73711, | 73764, 73769, | 73808-73809, |
| | 73716, 73718, | 73867-73906 | 73813, 73907- |
| | 73723, 73733, | | 73948 |
| | 73829-73866 | | |
| 12:40339098 C A | 73949-73993 | 73994-74041 | 74042-74091 |
| rs10735934 REF | | | |
| 12:40339098_C_A | 73949, 73951, | 73994, 73996, | 74042, 74044, |
| rs10735934_SNP | 73954, 73959, | 73999, 74004- | 74047, 74053, |
| | 73968, 73972, | 74005, 74014, | 74062, 74071, |
| | 73980-73981, | 74016, 74028, | 74076, 74078, |
| | 74092-74128 | 74129-74165 | 74166-74207 |
| 12:40339280_A_G | 74208-74225 | 74226-74241 | 74242-74261 |
| rs10732751_REF | | | |
| 12:40339280_A_G | 74213, 74218, | 74229, 74234, | 74247, 74252, |
| rs10732751_SNP | 74221, 74224- | 74237, 74240- | 74255, 74259, |
| | 74225, 74262- | 74241, 74285- | 74261, 74300- |
| | 74284 | 74299 | 74318 |
| 12:40339762_T_G | 74319-74337 | 74338-74348 | 74349-74363 |
| rs12306060_REF | | | |
| 12:40339762_T_G | 74319-74320, | 74338, 74343, | 74354-74355, |
| rs12306060_SNP | 74323, 74328, | 74383-74399 | 74357, 74359, |
| | 74364-74382 | | 74400-74420 |
| 12:40340781_T_C | 74421-74465 | 74466-74505 | 74506-74548 |
| rs1365763_REF | | | |
| 12:40340781_T_C | 74427, 74429, | 74468, 74470, | 74506, 74510, |
| rs1365763_SNP | 74434-74435, | 74475, 74479, | 74512, 74517, |
| | 74440, 74446- | 74485-74486, | 74521, 74527, |
| | 74447, 74459, | 74498, 74502, | 74540, 74544, |
| | 74463, 74465, | 74505, 74587- | 74547, 74625- |
| | 74549-74586 | 74624 | 74666 |
| 12:40341114_C_A | 74667-74714 | 74715-74764 | 74765-74816 |
| rs7963697_REF | | | |
| 12:40341114_C_A | 74667-74668, | 74715-74716, | 74765, 74786- |
| rs7963697_SNP | 74670, 74674, | 74736-74737, | 74788, 74790, |
| | 74688, 74690, | 74739, 74741, | 74801, 74807, |
| | 74692, 74706, | 74750, 74756, | 74809-74810, |
| | 74708-74709, | 74758-74759, | 74814, 74895- |
| | 74817-74854 | 74855-74894 | 74936 |
| 12:40341174_TG_T | 74937-74983 | 74984-75033 | 75034-75085 |
| rs11316380_REF | | | |
| 12:40341174_TG_T | 74940, 74946, | 74988, 74995, | 75045, 75056, |
| rs11316380_SNP | 74948, 74962- | 75006, 75012, | 75064, 75066, |
| | 74963, 74965, | 75014, 75017, | 75068, 75073, |
| | 74968, 74978, | 75022, 75028, | 75079, 75081, |
| | 74981, 75086- | 75031, 75122- | 75083, 75160- |
| | 75121 | 75159 | 75199 |
| 12:40341367_G_C | 75200-75245 | 75246-75291 | 75292-75340 |
| rs7963086_REF | | | |
| 12:40341367_G_C | 75200, 75202, | 75246, 75248, | 75292, 75294, |
| rs7963086_SNP | 75204, 75208, | 75250, 75254, | 75296, 75305, |
| | 75213, 75218, | 75266, 75282, | 75313, 75317- |
| | 75224, 75236, | 75379-75418 | 75318, 75419- |
| | 75341-75378 | | 75460 |
| 12:40341862_A_G | 75461-75466 | 75467-75471 | 75472-75477 |
| rs17491536_REF | | | |
| 12:40341862_A_G | 75461, 75463- | 75467-75471, | 75472-75473, |
| rs17491536_SNP | 75466, 75478- | 75487-75489 | 75475-75477, |
| | 75486 | | 75490-75494 |
| 12:40341962_T_C | 75495-75541 | 75542-75585 | 75586-75634 |
| rs7956787_REF | | | |
| 12:40341962_T_C | 75495-75496, | 75548, 75553, | 75593, 75599, |
| rs7956787_SNP | 75504-75505, | 75557, 75559, | 75603, 75605, |
| | 75510, 75514, | 75564, 75576- | 75610, 75616, |
| | 75516, 75521, | 75577, 75673- | 75623-75624, |
| | 75534, 75538, | 75712 | 75713-75754 |
| | 75635-75672 | | |
| 12:40342002_T_G | 75755-75802 | 75803-75846 | 75847-75898 |
| rs7956898_REF | | | |
| 12:40342002_T_G | 75759, 75765, | 75806, 75809, | 75857, 75865, |
| rs7956898_SNP | 75767, 75769, | 75817-75818, | 75867, 75871, |
| | 75773, 75777, | 75822, 75828, | 75877, 75879, |
| | 75783, 75785, | 75830, 75832, | 75881, 75883, |
| | 75787, 75793, | 75838, 75841, | 75888, 75892, |
| | 75899-75936 | 75937-75976 | 75977-76018 |
| 12:40342137_G_A | 76019-76066 | 76067-76116 | 76117-76168 |
| rs10506155_REF | | | |
| 12:40342137_G_A | 76019, 76021, | 76069, 76075, | 76119, 76125, |
| rs10506155_SNP | 76027, 76031, | 76078, 76080, | 76128, 76130- |
| | 76041, 76049- | 76090, 76099, | 76131, 76153, |
| | 76050, 76053, | 76102, 76107, | 76158, 76163, |
| | 76058, 76064, | 76112, 76114, | 76165, 76168, |
| | 76169-76206 | 76207-76246 | 76247-76288 |
| 12:40342208_A_G | 76289-76336 | 76337-76386 | 76387-76438 |
| rs7954061_REF | | | |
| 12:40342208_A_G | 76289-76290, | 76337-76338, | 76387-76388, |
| rs7954061_SNP | 76295, 76300- | 76348-76349, | 76390, 76399- |
| | 76301, 76304, | 76352, 76358, | 76400, 76403, |
| | 76315, 76324, | 76361, 76374, | 76409, 76412, |
| | 76326, 76330, | 76376, 76380, | 76427, 76430, |
| | 76439-76476 | 76477-76516 | 76517-76558 |
| 12:40342241_T_A | 76559-76606 | 76607-76656 | 76657-76708 |
| rs7957151_REF | | | |
| 12:40342241_T_A | 76559, 76561, | 76607, 76609, | 76657, 76659, |
| rs7957151_SNP | 76564, 76566- | 76612, 76614- | 76664, 76673, |
| | 76567, 76572, | 76615, 76623, | 76679-76680, |
| | 76575, 76584, | 76632, 76637, | 76684, 76689, |
| | 76589-76590, | 76646, 76649, | 76698, 76701, |
| | 76709-76746 | 76747-76786 | 76787-76828 |
| 12:40342447_C_T | 76829-76876 | 76877-76925 | 76926-76977 |
| rs919174_REF | | | |
| 12:40342447_C_T | 76831-76832, | 76879, 76881, | 76926, 76929, |
| rs919174_SNP | 76838, 76842, | 76887, 76891, | 76937, 76941, |
| | 76845-76846, | 76895, 76905, | 76945, 76955, |
| | 76856, 76859, | 76908-76909, | 76958-76960, |
| | 76862-76863, | 76912, 77016- | 76964, 77051- |
| | 76978-77015 | 77050 | 77089 |
| 12:40342479_C_CTT | 77090-77101 | 77102-77113 | 77114-77127 |
| rs3065921_REF | | | |
| 12:40342479_C_CT | 77090-77101 | 77102-77113 | 77114-77127 |
| rs3065921_REF | | | |
| 12:40342603_C_T | 77128-77165 | 77166-77201 | 77202-77239 |
| rs919175_REF | | | |
| 12:40342603_C_T | 77138, 77153- | 77176-77177, | 77212-77213, |
| rs919175_SNP | 77154, 77161- | 77191-77192, | 77228, 77235- |
| | 77162, 77240- | 77198, 77269- | 77236, 77298- |
| | 77268 | 77297 | 77328 |
| 12:40342980_C_T | 77329-77348 | 77349-77366 | 77367-77386 |
| rs1035812_REF | | | |
| 12:40342980_C_T | 77333, 77338, | 77357, 77359, | 77374, 77377, |
| rs1035812_SNP | 77341, 77346, | 77364-77366, | 77379, 77385- |
| | 77348, 77387- | 77398-77408 | 77386, 77409- |
| | 77397 | | 77421 |
| 12:40343200_G_A | 77422-77441 | 77442-77455 | 77456-77472 |
| rs1365764_REF | | | |
| 12:40343200_G_A | 77426, 77428, | 77444-77445, | 77459-77462, |
| rs1365764_SNP | 77431, 77437, | 77447, 77452, | 77464, 77469, |
| | 77440, 77473- | 77454, 77480- | 77485-77491 |
| | 77479 | 77484 | |
| 12:40343257_C_CTCAG | 77492-77538 | 77539-77585 | 77586-77635 |
| rs397724721_REF | | | |
| 12:40343257_C_CTCAG | 77492, 77503, | 77548, 77550, | 77596, 77598- |
| rs397724721_SNP | 77519, 77522, | 77567, 77570- | 77599, 77613, |
| | 77536, 77538, | 77571, 77585, | 77615, 77619, |
| | 77636-77660 | 77661-77687 | 77688-77716 |
| 12:40343273_C_T | 77492-77494, | 77539-77541, | 77586-77588, |
| rs17461964_REF | 77496-77498, | 77543-77545, | 77591-77593, |
| | 77504, 77507- | 77551, 77555- | 77599, 77603- |
| | 77508, 77511, | 77557, 77559, | 77605, 77607, |
| | 77523-77524, | 77571-77572, | 77616, 77620- |
| | 77526, 77534- | 77581-77582, | 77621, 77623, |
| | 77535, 77717- | 77732-77740 | 77625, 77631- |
| | 77731 | | 77632, 77741- |
| | | | 77752 |
| 12:40343273_C_T | 77493, 77497, | 77540, 77544, | 77587, 77592, |
| rs17461964_SNP | 77508, 77511, | 77556-77557, | 77605, 77607, |
| | 77535, 77721, | 77559, 77732, | 77625, 77742- |
| | 77723-77724, | 77735-77736, | 77743, 77747, |
| | 77726, 77731, | 77738, 77740, | 77749, 77752, |
| | 77753-77763 | 77764-77772 | 77773-77784 |
| 12:40343313_G_T | 77785-77830 | 77831-77880 | 77881-77932 |
| rs10784518_REF | | | |
| 12:40343313_G_T | 77785-77786, | 77831-77832, | 77881, 77889, |
| rs10784518_SNP | 77798, 77804, | 77845, 77851- | 77896, 77902- |
| | 77811, 77814, | 77852, 77859, | 77904, 77911, |
| | 77821, 77825- | 77864, 77870, | 77916, 77922, |
| | 77826, 77933- | 77875-77876, | 77927, 78011- |
| | 77970 | 77971-78010 | 78052 |
| 12:40343381_G_A | 78053-78073 | 78074-78082 | 78083-78097 |
| rs4768231_REF | | | |
| 12:40343381_G_A | 78056, 78058, | 78105-78110 | 78090, 78111- |
| rs4768231_SNP | 78069-78070, | | 78118 |
| | 78098-78104 | | |
| 12:40343438_C_T | 78119-78164 | 78165-78211 | 78212-78262 |
| rs4768232_REF | | | |
| 12:40343438_C_T | 78125, 78128, | 78171, 78173, | 78218, 78220, |
| rs4768232_SNP | 78133, 78140- | 78176, 78181, | 78223, 78228, |
| | 78141, 78148, | 78189, 78196, | 78230, 78237, |
| | 78155, 78158- | 78203, 78299- | 78245, 78250, |
| | 78159, 78263- | 78333 | 78253, 78334- |
| | 78298 | | 78374 |
| 12:40344001_A_G | 78375-78402 | 78403-78408 | 78409-78418 |
| rs3943893_REF | | | |
| 12:40344001_A_G | 78419-78455 | 78456-78487 | 78488-78526 |
| rs3943893_SNP | | | |
| 12:40344030_T_C | 78527-78536 | | |
| rs2162471_REF | | | |
| 12:40344030_T_C | 78530, 78533, | 78560-78570 | 78571-78587 |
| rs2162471_SNP | 78537-78559 | | |
| 12:40344106_C_T | 78588-78609 | 78610-78631 | 78632-78653 |
| rs1035813_REF | | | |
| 12:40344106_C_T | 78593, 78596, | 78618-78619, | 78640, 78643, |
| rs1035813_SNP | 78601-78602, | 78623-78624, | 78645-78646, |
| | 78604, 78606, | 78626, 78628, | 78650-78651, |
| | 78608, 78654- | 78630, 78669- | 78653, 78682- |
| | 78668 | 78681 | 78696 |
| 12:40344206_C_T | 78697-78731 | 78732-78760 | 78761-78796 |
| rs10459264_REF | | | |
| 12:40344206_C_T | 78697-78699, | 78732-78733, | 78761, 78770, |
| rs10459264_SNP | 78703, 78712- | 78741, 78744, | 78773-78774, |
| | 78713, 78718- | | |
| | 78719, 78797- | 78747, 78751, | 78778-78779, |
| | 78817 | 78818-78838 | 78784-78785, |
| | | | 78839-78861 |
| 12:40344501_G_A | 78862-78909 | 78910-78959 | 78960-79011 |
| rs10459265_REF | | | |
| 12:40344501_G_A | 78878, 78880, | 78916, 78925, | 78961, 78964, |
| rs10459265_SNP | 78885-78886, | 78928, 78935- | 78968, 78977, |
| | 78894-78895, | 78936, 78944- | 78980, 78988, |
| | 78897-78898, | 78945, 78948, | 78996, 79000, |
| | 78900, 78905, | 78950, 78955, | 79002, 79007, |
| | 79012-79049 | 79050-79085 | 79086-79127 |
| 12:40345691_G_A | 79128-79165 | 79166-79202 | 79203-79241 |
| rs11564147_REF | | | |
| 12:40345691_G_A | 79131, 79140, | 79169, 79178, | 79206, 79209, |
| rs11564147_SNP | 79145, 79153, | 79183, 79190, | 79221, 79229, |
| | 79164, 79242- | 79273-79303 | 79304-79336 |
| | 79272 | | |
| 12:40345826_TA_T | 79337-79340 | | |
| rs10715759_REF | | | |
| 12:40345826_TA_T | 79337, 79339, | | |
| rs10715759_SNP | 79341-79346 | | |
| 12:40345925_C_T | 79347-79385 | 79386-79422 | 79423-79463 |
| rs7296657_REF | | | |
| 12:40345925_C_T | 79368, 79380, | 79417, 79421, | 79461, 79463, |
| rs7296657_SNP | 79384, 79464- | 79497-79519 | 79520-79548 |
| | 79496 | | |
| 12:40346050_A_T | 79549-79562 | 79563-79576 | 79577-79592 |
| rs7312497_REF | | | |
| 12:40346050_A_T | 79554, 79556, | 79569, 79571, | 79581, 79584, |
| rs7312497_SNP | 79558, 79560, | 79573, 79575- | 79589, 79591- |
| | 79562, 79593- | 79576, 79602- | 79592, 79611- |
| | 79601 | 79610 | 79621 |
| 12:40346187_CT_C | 79622-79639 | 79640-79657 | 79658-79675 |
| rs10715758_REF | | | |
| 12:40346187_CT_C | 79634-79635 | 79646, 79652 | 79662, 79664 |
| rs10715758_SNP | | | |
| 12:40346563_G_T | 79676-79723 | 79724-79773 | 79774-79825 |
| rs10784522_REF | | | |
| 12:40346563_G_T | 79683, 79692, | 79731, 79740, | 79781, 79790, |
| rs10784522_SNP | 79697, 79703- | 79745, 79751, | 79795, 79801, |
| | 79704, 79708, | 79757, 79761, | 79807, 79811, |
| | 79712, 79718- | 79767-79768, | 79817, 79822, |
| | 79719, 79723, | 79771, 79773, | 79824-79825, |
| | 79826-79863 | 79864-79903 | 79904-79945 |
| 12:40347026_AT_A | 79946-79954 | 79955 | 79956-79957 |
| rs796827140_REF | | | |
| 12:40347026_AT_A | 79950 | | |
| rs796827140_SNP | | | |
| 12:40347033_T_G | 79950, 79953 | | |
| rs74467833_REF | | | |
| 12:40347033_T_G | 79950, 79953, | | 79966-79967 |
| rs74467833_SNP | 79958-79965 | | |
| 12:40347145_A_G | 79968-79970 | 79971-79973 | 79974-79977 |
| rs7131694_REF | | | |
| 12:40347145_A_G | 79968-79970 | 79971-79973 | 79974-79977 |
| rs7131694_SNP | | | |
| 12:40347815_T_C | 79978-79979 | 79980-79983 | 79984-79989 |
| rs12311273_REF | | | |
| 12:40347815_T_C | 79978, 79990- | 79980, 79982, | 79985, 79987- |
| rs12311273_SNP | 79991 | 79992-79994 | 79988, 79995- |
| | | | 80000 |
| 12:40347876_T_C | 80001-80005 | 80006-80014 | 80015-80027 |
| rs58911468_REF | | | |
| 12:40347876_T_C | 80001-80003, | 80007-80009, | 80016, 80020- |
| rs58911468_SNP | 80028-80042 | 80013, 80043- | 80021, 80023, |
| | | 80060 | 80026, 80061- |
| | | | 80081 |
| 12:40347956_T_TAA | 80082-80084 | 80085-80089 | 80090-80096 |
| rs35847030_REF | | | |
| 12:40347956_T_TA | 80082-80084 | 80085-80089 | 80090-80096 |
| rs35847030_REF | | | |
| 12:40348019_A_G | 80097-80124 | 80125-80148 | 80149-80178 |
| rs1365765_REF | | | |
| 12:40348019_A_G | 80101-80103, | 80129-80131, | 80155-80157, |
| rs1365765_SNP | 80105-80107, | 80134, 80136- | 80160, 80162, |
| | 80109-80110, | 80137, 80139- | 80165, 80168- |
| | 80118, 80120, | 80140, 80145- | 80169, 80174- |
| | 80179-80210 | 80146, 80211- | 80175, 80235- |
| | | 80234 | 80268 |
| 12:40348202_AT_A | 80269-80278 | 80279-80287 | 80288-80299 |
| rs66513412_REF | | | |
| 12:40348202_AT_A | 80270, 80277- | 80280, 80287, | 80289-80290, |
| rs66513412_SNP | 80278, 80300- | 80306-80311 | 80293, 80312- |
| | 80305 | | 80319 |
| 12:40348203_T_C | 80270-80272, | 80280, 80282- | 80289-80293, |
| rs2896977_REF | 80274-80278 | 80287 | 80295-80299 |
| 12:40348203_T_C | 80270, 80277- | 80280, 80287, | 80289-80290, |
| rs2896977_SNP | 80278, 80320- | 80327-80333 | 80293, 80334- |
| | 80326 | | 80342 |
| 12:40348204_A_C | 80270-80272, | 80280, 80282, | 80289, 80291, |
| rs199606989_REF | 80275-80278, | 80284-80287 | 80293, 80295- |
| | 80343 | | 80299 |
| 12:40348204_A_C | 80270, 80275, | 80280, 80286- | 80289, 80293, |
| rs_199606989_SNP | 80277-80278, | 80287, 80349- | 80299, 80354- |
| | 80343-80348 | 80353 | 80360 |
| 12:40348271_C_T | 80361-80364 | , | , |
| rs1365766_REF | | | |
| 12:40348452_G_A | 80365-80384 | 80385-80406 | 80407-80430 |
| rs10878405_REF | | | |
| 12:40348452_G_A | 80374, 80377, | 80396-80397, | 80419-80421, |
| rs10878405_SNP | 80379, 80381, | 80400, 80402, | 80426, 80429, |
| | 80383, 80431- | 80405, 80446- | 80461-80477 |
| | 80445 | 80460 | |
| 12:40348561_G_A | 80478-80488 | 80489-80492 | 80493-80500 |
| rs11176143_REF | | | |
| 12:40348561_G_A | 80479, 80482, | 80491-80492 | 80497, 80499- |
| rs11176143_SNP | 80486-80487 | | 80500 |
| 12:40348887_T_C | 80501-80531 | 80532-80562 | 80563-80600 |
| rs7294958_REF | | | |
| 12:40348887_T_C | 80505, 80509- | 80537, 80540- | 80567, 80569, |
| rs7294958_SNP | 80510, 80512, | 80541, 80543, | 80573-80574, |
| | 80518-80519, | 80546, 80549- | 80577, 80580, |
| | 80522, 80524- | 80550, 80554, | 80585, 80590, |
| | 80525, 80528, | 80556, 80559, | 80592, 80596, |
| | 80601-80634 | 80635-80666 | 80667-80704 |
| 12:40348899_C_T | 80501-80506, | 80532-80542, | 80563-80566, |
| rs61915610_REF | 80508-80511, | 80544, 80551- | 80568-80570, |
| | 80513, 80520- | 80555, 80557- | 80572-80574, |
| | 80523, 80526- | 80562, 80724- | 80576, 80578, |
| | 80531, 80705- | 80741 | 80581, 80587- |
| | 80723 | | 80591, 80593- |
| | | | 80600, 80742- |
| | | | 80759 |
| 12:40348899_C_T | 80520, 80526, | 80557, 80561, | 80581, 80598, |
| rs61915610_SNP | 80530, 80760- | 80797-80833 | 80600, 80834- |
| | 80796 | | 80872 |
| 12:40349074_A_T | 80873-80890 | 80891-80892 | 80893-80898 |
| rs7294952_REF | | | |
| 12:40349074_A_T | 80873, 80878, | 80912-80913 | 80914-80919 |
| rs7294952_SNP | 80882, 80887, | | |
| | 80890, 80899- | | |
| | 80911 | | |
| 12:40349558_GGCTGGAGT_G | | | 80920 |
| rs59096461_REF | | | |
| 12:40349690_A_AT | 80921-80926 | 80927-80933 | 80934-80943 |
| rs59980086_REF | | | |
| 12:40349986_C_T | 80944-80991 | 80992-81037 | 81038-81086 |
| rs4768233_REF | | | |
| 12:40349986_C_T | 80946-80947, | 81005-81006, | 81041, 81052- |
| rs4768233_SNP | 80955, 80959, | 81019, 81026, | 81053, 81065, |
| | 80972, 80975, | 81031, 81034, | 81075, 81080, |
| | 80980, 80985, | 81123-81148 | 81083, 81149- |
| | 80988, 80991, | | 81180 |
| | 81087-81122 | | |
| 12:40350028_G_A | 81181-81228 | 81229-81277 | 81278-81329 |
| rs4768234_REF | | | |
| 12:40350028_G_A | 81182, 81184, | 81230, 81232, | 81279, 81281, |
| rs4768234_SNP | 81188, 81194, | 81236, 81246- | 81287, 81291, |
| | 81198-81199, | 81247, 81256, | 81297-81298, |
| | 81212, 81216, | 81261, 81271, | 81305, 81308, |
| | 81222, 81227, | 81276, 81366- | 81323, 81328, |
| | 81330-81365 | 81395 | 81396-81435 |
| 12:40350284_A_T | 81436-81447 | 81448-81459 | 81460-81474 |
| rs4768235_REF | | | |
| 12:40350284_A_T | 81436-81437, | 81448-81450, | 81460-81462, |
| rs4768235_SNP | 81439, 81441- | 81452-81453, | 81464, 81466- |
| | 81444, 81446- | 81455, 81457- | 81467, 81469, |
| | 81447, 81475- | 81459, 81478- | 81471, 81473- |
| | 81477 | 81480 | 81474, 81481- |
| | | | 81485 |
| 12:40350343_C_A | 81486-81533 | 81534-81583 | 81584-81635 |
| rs7314455_REF | | | |
| 12:40350343_C_A | 81489, 81492, | 81537, 81540- | 81590-81591, |
| rs7314455_SNP | 81495, 81500- | 81541, 81544, | 81594, 81602, |
| | 81501, 81509- | 81552, 81559- | 81609-81611, |
| | 81510, 81513, | 81560, 81563, | 81616, 81618, |
| | 81515, 81517, | 81565, 81567, | 81628, 81714- |
| | 81636-81673 | 81674-81713 | 81755 |
| 12:40350381_G_A | 81756-81803 | 81804-81853 | 81854-81905 |
| rs7313525_REF | | | |
| 12:40350381_G_A | 81758-81759, | 81806, 81815, | 81856, 81874, |
| rs7313525_SNP | 81767, 81776, | 81824, 81828, | 81878, 81883, |
| | 81779, 81786, | 81833, 81836, | 81886, 81894, |
| | 81794-81795, | 81844-81845, | 81896, 81898, |
| | 81801, 81803, | 81851, 81853, | 81903, 81905, |
| | 81906-81943 | 81944-81983 | 81984-82025 |
| 12:40350592_G_T | 82026-82046 | 82047-82066 | 82067-82088 |
| rs7313895_REF | | | |
| 12:40350592_G_T | 82031-82032, | 82053, 82059- | 82071, 82074, |
| rs7313895_SNP | 82040, 82044, | 82060, 82064, | 82082, 82086, |
| | 82046, 82089- | 82066, 82102- | 82088, 82113- |
| | 82101 | 82112 | 82125 |
| 12:40350689_C_T | 82126-82137 | 82138-82142 | 82143-82149 |
| rs7314863_REF | | | |
| 12:40350689_C_T | 82126-82128, | | |
| rs7314863_SNP | 82150-82152 | | |
| 12:40350973_A_C | 82153-82200 | 82201-82250 | 82251-82302 |
| rs7303525_REF | | | |
| 12:40350973_A_C | 82158, 82164, | 82212, 82216, | 82261, 82263, |
| rs7303525_SNP | 82169, 82184, | 82231, 82234, | 82267, 82277, |
| | 82186, 82191, | 82236, 82241, | 82283, 82288, |
| | 82194, 82198- | 82244, 82248- | 82293, 82300- |
| | 82200, 82303- | 82250, 82341- | 82302, 82381- |
| | 82340 | 82380 | 82422 |
| 12:40351006_G_A | 82423-82469 | 82470-82519 | 82520-82571 |
| rs7132187_REF | | | |
| 12:40351006_G__A | 82425, 82439- | 82472-82473, | 82522-82523, |
| rs7132187_SNP | 82441, 82443, | 82489, 82491, | 82539, 82541, |
| | 82448, 82458, | 82496-82497, | 82547, 82550, |
| | 82467, 82469, | 82505, 82508, | 82556, 82568- |
| | 82572-82609 | 82517, 82519, | 82569, 82571, |
| | | 82610-82649 | 82650-82691 |
| 12:40351379_T_C | 82692 | | 82693 |
| rs7307310_REF | | | |
| 12:40351379_T_C | 82692 | | 82693 |
| rs7307310_SNP | | | |
| 12:40352036_T_C | 82694-82740 | 82741-82790 | 82791-82842 |
| rs11176153_REF | | | |
| 12:40352036_T_C | 82694-82695, | 82741-82742, | 82791, 82800, |
| rs11176153_SNP | 82697, 82703, | 82750, 82753, | 82803, 82806, |
| | 82716, 82719, | 82756, 82765, | 82815, 82818, |
| | 82723-82724, | 82768, 82772, | 82822-82824, |
| | 82728, 82737, | 82777, 82786, | 82829, 82921- |
| | 82843-82880 | 82881-82920 | 82962 |
| 12:40352100_G_C | 82963-83009 | 83010-83059 | 83060-83111 |
| rs11176154_REF | | | |
| 12:40352100_G_C | 82980, 82982- | 83027, 83029- | 83068, 83078, |
| rs11176154_SNP | 82984, 82994, | 83031, 83033, | 83080-83083, |
| | 83001, 83004- | 83041, 83050- | 83085, 83093, |
| | 83005, 83009, | 83051, 83055, | 83102-83103, |
| | 83112-83149 | 83059, 83150- | 83190-83231 |
| | | 83189 | |
| 12:40352112_T_C | 82965, 82968- | 83012, 83015- | 83062, 83065- |
| rs7311247_REF | 82971, 82973, | 83018, 83020, | 83067, 83069, |
| | 82977-82982, | 83024-83029, | 83071, 83075- |
| | 82985, 82989- | 83032-83033, | 83081, 83084- |
| | 82992, 82995- | 83035, 83037- | 83085, 83087, |
| | 82996, 82999, | 83040, 83044- | 83089-83092, |
| | 83004, 83006, | 83045, 83048, | 83096-83097, |
| | 83009, 83232- | 83050, 83054, | 83100, 83102, |
| | 83255 | 83056, 83059, | 83105-83106, |
| | | 83256-83279 | 83108, 83111, |
| | | | 83280-83303 |
| 12:40352112_T_C | 82965, 82971, | 83012, 83018, | 83062, 83071, |
| rs7311247_SNP | 82973, 82995, | 83020, 83035, | 83087, 83100, |
| | 82999, 83232- | 83048, 83256- | 83105, 83280- |
| | 83233, 83237, | 83257, 83261, | 83281, 83286, |
| | 83245, 83247, | 83269, 83275, | 83293, 83299, |
| | 83304-83341 | 83342-83381 | 83382-83423 |
| 12:40352153_C_T | 83424-83470 | 83471-83514 | 83515-83563 |
| rs7137437_REF | | | |
| 12:40352153_C_T | 83428, 83430, | 83475, 83485, | 83521, 83530, |
| rs7137437_SNP | 83439, 83444- | 83487, 83491- | 83532, 83536- |
| | 83445, 83448, | 83492, 83500, | 83538, 83540, |
| | 83451, 83454, | 83506, 83595- | 83548, 83554, |
| | 83461, 83564- | 83617 | 83618-83646 |
| | 83594 | | |
| 12:40352235_AG_A | 83647-83694 | 83695-83742 | 83743-83793 |
| rs75439407_REF | | | |
| 12:40352235_AG_A | 83647, 83652, | 83695, 83700, | 83743, 83748, |
| rs75439407_SNP | 83657, 83669, | 83705, 83721, | 83753, 83770- |
| | 83675-83676, | 83724, 83728, | 83771, 83775, |
| | 83680, 83690, | | |
| | 83692, 83794- | 83738, 83828- | 83778, 83791, |
| | 83827 | 83861 | 83862-83899 |
| 12:40352271_T_C | 83900-83947 | 83948-83997 | 83998-84049 |
| rs73107108_REF | | | |
| 12:40352271_T_C | 83900, 83902, | 83948, 83956, | 84006, 84008, |
| rs73107108_SNP | 83908, 83910, | 83958, 83963, | 84013, 84015- |
| | 83915, 83919, | 83965, 83968, | 84016, 84028, |
| | 83928, 83930, | 83977, 83979, | 84030, 84033, |
| | 83935-83936, | 83984, 83994, | 84036, 84046, |
| | 84050-84087 | 84088-84127 | 84128-84169 |
| 12:40352469_C_CTTTTTTTTT | 84170-84183 | 84184-84190 | 84191-84201 |
| TTTTTT | | | |
| rs1307806388_REF | | | |
| 12:40352469_C_CTTTTTTTTT | 84170-84183 | 84184-84190 | 84191-84201 |
| TTTTT | | | |
| rs1307806388_REF | | | |
| 12:40352469_C_CTTTTTTTTT | 84170-84183 | 84184-84190 | 84191-84201 |
| TTTT | | | |
| rs1307806388_REF | | | |
| 12:40352469_C_CT | 84170-84183 | 84184-84190 | 84191-84201 |
| rs1307806388_REF | | | |
| 12:40352707_T_G | 84202-84244 | 84245-84294 | 84295-84346 |
| rs10878409_SNP | | | |
| 12:40352874_C_T | 84347-84357 | 84358-84368 | 84369-84381 |
| rs10878410_SNP | | | |
| 12:40352927_G_C | 84382-84403 | 84404-84427 | 84428-84453 |
| rs138382676_REF | | | |
| 12:40352927_G_C | 84385-84386, | 84407-84409, | 84431-84433, |
| rs138382676_SNP | 84393, 84399, | 84423, 84483- | 84443, 84517- |
| | 84454-84482 | 84516 | 84554 |
| 12:40353080_G_A | A | , | 84555 |
| rs11176161_SNP | | | |
| 12:40353111_T_C | 84556-84588 | 84589-84623 | 84624-84660 |
| rs10878412_REF | | | |
| 12:40353111_T_C | 84557-84558, | 84591, 84605- | 84626, 84642, |
| rs10878412_SNP | 84571-84572, | 84606, 84610, | 84646, 84653, |
| | 84576, 84661- | 84621, 84683- | 84658, 84688- |
| | 84682 | 84687 | 84701 |
| 12:40353158_T_C | , | 84702 | 84703-84705 |
| rs10878413_REF | | | |
| 12:40353186_C_T | 84706-84716 | 84717-84725 | 84726-84736 |
| rs183544696_REF | | | |
| 12:40353186_C_T | 84737-84776 | 84777-84813 | 84814-84853 |
| rs183544696_SNP | | | |
| 12:40353191_C_T | 84706-84716 | 84717-84725 | 84726-84736 |
| rs189538849_REF | | | |
| 12:40353191_C_T | 84854-84886 | 84887-84913 | 84914-84943 |
| rs189538849_SNP | | | |
| 12:40353217_C_T | 84944-84951 | 84952-84961 | 84962-84975 |
| rs11610569_SNP | | | |
| 12:40353226_C_T | 84976-84988 | 84989-85003 | 85004-85020 |
| rs142726158_REF | | | |
| 12:40353226_C_T | 84979-84981, | 84991, 84993- | 85006, 85008- |
| rs142726158_SNP | 84983, 84985, | 84995, 84999, | 85009, 85014- |
| | 85021-85038 | 85039-85058 | 85015, 85059- |
| | | | 85080 |
| 12:40353242_CAAA_C | 84976-84988, | 84989-85003, | 85004-85020, |
| rs1194726090_REF | 85081-85105 | 85106-85132 | 85133-85159 |
| 12:40353242_CAAA_C | 84977-84978, | 84992, 84996, | 85011, 85016- |
| rs1194726090_SNP | 84986, 85160- | 85000, 85189- | 85017, 85213- |
| | 85188 | 85212 | 85239 |
| 12:40353243_A_G | 84976-84988, | 84989-85003, | 85004-85020, |
| rs576444406_REF | 85081-85105 | 85106-85132 | 85133-85159, |
| | | | 85240 |
| 12:40353243_A_G | 84977-84978, | 84992, 84996, | 85011, 85016- |
| rs576444406_SNP | 84982, 84986, | 85000-85001, | 85018, 85156, |
| | 85103, 85174, | 85116, 85191, | 85220, 85311- |
| | 85241-85274 | 85275-85310 | 85348 |
| 12:40353244_A_G | 84976-84986, | 84989-85001, | 85004-85018, |
| rs185723137_REF | 84988, 85081- | 85003, 85106- | 85020, 85133- |
| | 85105 | 85132 | 85159, 85240, |
| | | | 85349 |
| 12:40353246_GGGGCTCCTCA | 84976-84981, | 84989-84995, | 85004-85011, |
| CTTCTCAGACGGGGCGGCT | 84984-84985, | 84998-85000, | 85013-85016, |
| GCCGGGCA_G | 85081-85105 | 85106-85132 | 85133-85159, |
| rs1179215763_REF | | | 85240, 85349 |
| 12:40353246_GGGGCTCCTCA | 84976, 84984, | 84989-84990, | 85004-85005, |
| CTTCTCAGACGGGGCGGCT | 85091, 85100- | 84998, 85115, | 85007, 85013, |
| GCCGGGCA_G | 85101, 85350- | 85128, 85390- | 85142, 85432- |
| rs1179215763_SNP | 85389 | 85431 | 85475 |
| 12:40353266_C_T | , | , | 85240, 85349 |
| rs71449759_REF | | | |
| 12:40353266_C_T | 85476-85478 | 85479-85483 | 85349, 85484- |
| rs71449759_SNP | | | 85489 |
| 12:40353289_A_G | 85490-85494 | 85495-85501 | 85502-85510 |
| rs61915613_REF | | | |
| 12:40353344_A_G | 85511-85525 | 85526-85542 | 85543-85561 |
| rs140722234_REF | | | |
| 12:40353344_A_G | 85513-85514, | 85528-85529, | 85545-85546, |
| rs140722234_SNP | 85520, 85523- | 85538-85540, | 85556-85557, |
| | 85524, 85562- | 85572-85580 | 85559, 85581- |
| | 85571 | | 85592 |
| 12:40353383_C_T | 85593-85597 | 85598-85604 | 85605-85613 |
| rs191099092_REF | | | |
| 12:40353383_C_T | 85593-85594, | 85598-85599, | 85605-85606, |
| rs191099092_SNP | 85597, 85614- | 85603-85604, | 85611-85613, |
| | 85621 | 85622-85632 | 85633-85646 |
| 12:40353440_C_A | 85647-85686 | 85687-85726 | 85727-85770 |
| rs113693842_REF | | | |
| 12:40353440_C_A | 85655, 85683, | 85695, 85700, | 85735, 85740- |
| rs113693842_SNP | 85771-85775 | 85724, 85776- | 85741, 85768, |
| | | 85786 | 85787-85803 |
| 12:40353467_C_T | 85804-85809 | 85810-85818 | 85819-85829 |
| rs112767992_REF | | | |
| 12:40353467_C_T | 85804-85805, | 85810-85811, | 85820, 85823, |
| rs112767992_SNP | 85807, 85809, | 85814, 85816, | 85825, 85827, |
| | 85830-85835 | 85818, 85836- | 85829, 85845- |
| | | 85844 | 85857 |
| 12:40353515_AG_A | 85858-85884 | 85885-85908 | 85909-85939 |
| rs34531686_REF | | | |
| 12:40353632_C_T | 85940 | 85941-85943 | 85944-85948 |
| rs12368227_REF | | | |
| 12:40353632_C_T | 85940 | 85941, 85943, | 85944-85945, |
| rs12368227_SNP | | 85949 | 85948, 85950- |
| | | | 85951 |
| 12:40353660_C_A | 85952-85986 | 85987-86022 | 86023-86061 |
| rs12368229_REF | | | |
| 12:40353660_C_A | 85953, 85960, | 85994, 85996, | 86031, 86038- |
| rs12368229_SNP | 85965, 85968, | 86001, 86004, | 86039, 86042, |
| | 85983, 86062- | 86019, 86097- | 86058, 86134- |
| | 86096 | 86133 | 86173 |
| 12:40353732_G_C | , | 86174 | 86175-86176 |
| rs3930031_SNP | | | |
| 12:40354127_C_T | 86177-86221 | 86222-86264 | 86265-86312 |
| rs7308626_REF | | | |
| 12:40354127_C_T | 86189, 86193, | 86233, 86238, | 86273, 86280, |
| rs7308626_SNP | 86195, 86201, | 86244, 86248, | 86285-86286, |
| | 86205, 86211, | 86254, 86259, | 86292, 86296, |
| | 86213, 86313- | 86346-86370 | 86302, 86307, |
| | 86345 | | 86371-86401 |
| 12:40354593_G_A | 86402-86423 | 86424-86430 | 86431-86444 |
| rs890575_REF | | | |
| 12:40354593_G_A | 86409-86410, | 86425, 86427, | 86435, 86438, |
| rs890575_SNP | 86412, 86419- | 86448-86450 | 86442, 86451- |
| | 86420, 86445- | | 86455 |
| | 86447 | | |
| 12:40354745_A_G | 86456-86503 | 86504-86553 | 86554-86605 |
| rs10748040_REF | | | |
| 12:40354745_A_G | 86459, 86462, | 86507, 86510, | 86557, 86560, |
| rs10748040_SNP | 86467-86468, | 86515-86516, | 86565, 86572, |
| | 86476, 86478, | 86522, 86525, | 86575-86576, |
| | 86482, 86484, | 86527, 86533- | 86584-86585, |
| | 86489, 86492, | 86534, 86539, | 86590, 86592, |
| | 86606-86643 | 86644-86683 | 86684-86725 |
| 12:40354835_AAAAAAAAAA | 86726-86727 | | |
| TATAT_A | | | |
| rs61230125_REF | | | |
| 12:40354835_AAAAAAAAAA | 86726-86727 | | |
| TATAT_A | | | |
| rs61230125_SNP | | | |
| 12:40354862_A_C | 86728-86743 | 86744-86757 | 86758-86773 |
| rs11176165_REF | | | |
| 12:40354862_A_C | 86728, 86730, | 86744-86745, | 86758-86759, |
| rs11176165_SNP | 86735-86736, | 86749, 86752, | 86766, 86768, |
| | 86738, 86774- | 86754, 86789- | 86773, 86802- |
| | 86788 | 86801 | 86816 |
| 12:40355348_G_A | 86817-86864 | 86865-86914 | 86915-86966 |
| rs7976715_REF | | | |
| 12:40355348_G_A | 86817-86818, | 86865-86867, | 86915-86916, |
| rs7976715_SNP | 86820-86821, | 86870, 86872, | 86918, 86921, |
| | 86823, 86830, | 86879, 86887, | 86923, 86928, |
| | 86838, 86850, | 86898, 86900, | 86931, 86939, |
| | 86853, 86863, | 86903, 87005- | 86950, 86955, |
| | 86967-87004 | 87044 | 87045-87086 |
| 12:40355370_G_A | 86823, 86837, | 86872, 86874, | 86919, 86923, |
| rs7976724_REF | 86843, 86853, | 86886, 86892, | 86925, 86928, |
| | 87087-87130 | 86898, 86903, | 86938, 86944, |
| | | 87131-87174 | 86950, 86955, |
| | | | 87175-87218 |
| 12:40355370_G_A | 86837, 86843, | 86874, 86886, | 86919, 86925, |
| rs7976724_SNP | 87095, 87101, | 86892, 87145, | 86938, 86944, |
| | 87105, 87109, | 87149, 87153, | 87192, 87196- |
| | 87112, 87124, | 87156, 87169, | 87197, 87200, |
| | 87126, 87130, | 87173-87174, | 87213, 87218, |
| | 87219-87256 | 87257-87296 | 87297-87338 |
| 12:40355395_A_G | 87339-87385 | 87386-87435 | 87193, 87197, |
| rs7963987_REF | | | 87436-87485 |
| 12:40355395_A_G | 87342, 87344, | 87389, 87394, | 87193, 87439, |
| rs7963987_SNP | 87347, 87351, | 87398, 87401, | 87444, 87448, |
| | 87354, 87362, | 87410, 87422, | 87458, 87461, |
| | 87373, 87375- | 87424-87426, | 87472, 87474- |
| | 87376, 87381, | 87431, 87524- | 87476, 87564- |
| | 87486-87523 | 87563 | 87605 |
| 12:40355416_G_C | 87341-87342, | 87388-87389, | 87437-87439, |
| rs2162472_REF | 87351, 87366, | 87397-87398, | 87447-87448, |
| | 87372, 87376, | 87414, 87420, | 87458, 87464, |
| | 87606-87629 | 87424, 87426, | 87470, 87474, |
| | | 87630-87654 | 87476, 87655- |
| | | | 87679 |
| 12:40355416_G_C | 87341, 87366, | 87388, 87397, | 87437-87438, |
| rs2162472_SNP | 87372, 87609, | 87414, 87420, | 87447, 87464, |
| | 87623, 87680- | 87634, 87714- | 87470, 87752- |
| | 87713 | 87751 | 87792 |
| 12:40355505_A_ATCCCTCCC | 87793-87807 | 87808-87824 | 87825-87843 |
| TCCCTCCC | | | |
| rs767501990_REF | | | |
| 12:40355505_A_ATCCCTCCC | 87793-87807 | 87808-87824 | 87825-87843 |
| TCCC | | | |
| rs767501990_REF | | | |
| 12:40355505_A_ATCCCTCCC | 87793-87807 | 87808-87824 | 87825-87843 |
| rs767501990_REF | | | |
| 12:40355505_A_ATCCC | 87793-87807 | 87808-87824 | 87825-87843 |
| rs767501990_REF | | | |
| 12:40355543_T_TCCTTC | 87844-87845 | 87846-87849 | 87850-87855 |
| rs552326490_REF | | | |
| 12:40355543_T_TC | 87844-87845 | 87846-87849 | 87850-87855 |
| rs552326490_REF | | | |
| 12:40355544_CTT_C | 87844-87845 | 87846-87849 | 87850-87855 |
| rs1365381164_REF | | | |
| 12:40355546_T_TC | 87844-87845 | 87846-87849 | 87850-87855 |
| rs760911090_REF | | | |
| 12:40355546_T_TC | 87856 | 87857 | 87858-87860 |
| rs760911090_SNP | | | |
| 12:40355549_T_TC | 87844-87845 | 87846-87849 | 87850-87855 |
| rs754028820_REF | | | |
| 12:40356669_G_A | 87861-87908 | 87909-87958 | 87959-88010 |
| rs11564173_REF | | | |
| 12:40356669_G_A | 87872, 87874, | 87918, 87921, | 87961, 87969, |
| rs11564173_SNP | 87883, 87886, | 87927, 87933, | 87972, 87978- |
| | 87891, 87896, | 87936, 87941, | 87979, 87985, |
| | 87900, 87906- | 87946, 87950, | 87988, 87993, |
| | 87908, 88011- | 87957-87958, | 88002, 88010, |
| | 88048 | 88049-88088 | 88089-88130 |
| 12:40356747_T_A | 88131-88142 | 88143-88148 | 88149-88158 |
| rs7306545_REF | | | |
| 12:40356747_T_A | 88135-88136, | 88147-88148, | 88152-88153, |
| rs7306545_SNP | 88140-88142, | 88166-88169 | 88156-88157, |
| | 88159-88165 | | 88170-88175 |
| 12:40357018_A_G | 88176 | | 88177 |
| rs7306684_REF | | | |
| 12:40357018_A_G | 88178-88216 | 88217-88248 | 88249-88284 |
| rs7306684_SNP | | | |
| 12:40357164_C_T | | | 88285 |
| rs112259589_REF | | | |
| 12:40357164_C_T | 88286-88300 | 88301-88319 | 88285, 88320- |
| rs112259589_SNP | | | 88341 |
| 12:40357182_A_G | 88342-88358 | 88359-88375 | 88285, 88376- |
| rs73277531_REF | | | 88399 |
| 12:40357182_A_G | 88400-88436 | 88437-88475 | 88383, 88476- |
| rs73277531_SNP | | | 88517 |
| 12:40357363_CTT_C | 88518-88534 | 88535-88550 | 88551-88568 |
| rs77689380_REF | | | |
| 12:40357363_CTT_C | 88526, 88531, | 88542-88543 | 88560-88561, |
| rs77689380_SNP | 88569 | | 88566, 88570 |
| 12:40357725_G_A | 88571-88606 | 88607-88643 | 88644-88683 |
| rs73277533_REF | | | |
| 12:40357725_G_A | 88571-88572, | 88607, 88621, | 88659, 88666, |
| rs73277533_SNP | 88590, 88600, | 88628, 88718- | 88675, 88737- |
| | 88684-88717 | 88736 | 88759 |
| 12:40357968_A_G | 88760-88798 | 88799-88839 | 88840-88882 |
| rs17462055_REF | | | |
| 12:40357968_A_G | 88794-88798, | 88835-88839, | 88850, 88879- |
| rs17462055_SNP | 88883-88919 | 88920-88960 | 88882, 88961- |
| | | | 89005 |
| 12:40358092_C_CT | 89006-89013 | 89014-89021 | 89022-89031 |
| rs758880647_REF | | | |
| 12:40358177_T_C | 89032-89073 | 89074-89102 | 89103-89137 |
| rs10784528_REF | | | |
| 12:40358177_T_C | 89042, 89047, | 89078, 89083, | 89104, 89108, |
| rs10784528_SNP | 89053, 89058, | 89090, 89098, | 89113, 89121, |
| | 89063, 89068, | 89175-89211 | 89127, 89131, |
| | 89071, 89138- | | 89212-89250 |
| | 89174 | | |
| 12:40358735_AT_A | 89251-89260 | 89261-89266 | 89267-89274 |
| rs796949072_REF | | | |
| 12:40358801_A_T | | 89275 | 89276-89277 |
| rs10784532_REF | | | |
| 12:40358801_A_T | 89278-89285 | 89275, 89286- | 89276-89277, |
| rs_10784532_SNP | | 89292 | 89293-89303 |
| 12:40359018_TTTG_T | 89304-89333 | 89334-89349 | 89350-89371 |
| rs145580704_REF | | | |
| 12:40359018_TTTG_T | 89317, 89322, | 89344, 89346, | 89367, 89369- |
| rs145580704_SNP | 89326, 89330, | 89348-89349, | 89371, 89376- |
| | 89372-89374 | 89375 | 89377 |
| 12:40359242_C_CT | 89378-89396 | 89397-89415 | 89416-89434 |
| rs386376254_REF | | | |
| 12:40359242_C_CT | 89389 | 89410 | 89432 |
| rs386376254_SNP | | | |
| 12:40359972_C_T | 89435-89446 | 89447-89457 | 89458-89470 |
| rs11836288_REF | | | |
| 12:40359972_C_T | 89435, 89471- | | |
| rs11836288_SNP | 89479 | | |
| 12:40360506_T_C | 89480-89527 | 89528-89577 | 89578-89629 |
| rs11564146_REF | | | |
| 12:40360506_T_C | 89482, 89488, | 89530, 89536, | 89580, 89586, |
| rs11564146_SNP | 89495, 89500, | 89543, 89548, | 89594, 89599, |
| | 89502, 89504, | 89550, 89552, | 89601, 89609, |
| | 89510, 89519, | 89558, 89566, | 89613, 89618, |
| | 89522, 89527, | 89568, 89570, | 89620, 89622, |
| | 89630-89667 | 89668-89707 | 89708-89749 |
| 12:40360610_A_G | 89750-89784 | 89785-89812 | 89813-89846 |
| rs10784536_REF | | | |
| 12:40360610_A_G | 89757-89760, | 89786, 89789- | 89816, 89819, |
| rs10784536_SNP | 89763, 89765, | 89793, 89797- | 89821-89822, |
| | 89772, 89774, | 89798, 89802, | 89828-89829, |
| | 89776, 89778, | 89804, 89883- | 89832, 89834, |
| | 89847-89882 | 89914 | 89836, 89842, |
| | | | 89915-89954 |
| 12:40360877_CTGCCTAT_C | 89955-90001 | 90002-90051 | 90052-90103 |
| rs11277474_REF | | | |
| 12:40360877_CTGCCTAT_C | 89957, 89971, | 90004, 90019, | 90055, 90070, |
| rs11277474_SNP | 89974, 89984, | 90022, 90038, | 90074, 90090, |
| | 89997, 90104- | 90047, 90144- | 90101, 90186- |
| | 90143 | 90185 | 90229 |
| 12:40360895_G_A | 89967-89970, | 90009, 90012, | 90053, 90060, |
| rs7971919_REF | 89981-89982, | 90015-90018, | 90063, 90066- |
| | 89986-89987, | 90030-90031, | 90069, 90082- |
| | 89994-89995, | 90035-90037, | 90083, 90087- |
| | 89998, 90108- | 90044-90045, | 90089, 90092, |
| | 90109, 90114, | 90048, 90148- | 90096-90097, |
| | 90125, 90127, | 90149, 90155, | 90100, 90190- |
| | 90230-90260 | 90166, 90168, | 90191, 90197, |
| | | 90261-90291 | 90208, 90220, |
| | | | 90292-90322 |
| 12:40360895_G_A | 89967-89969, | 90012, 90015- | 90063, 90066, |
| rs7971919_SNP | 89981, 89994, | 90016, 90030, | 90082, 90092, |
| | 90232, 90245, | 90044, 90261, | 90096, 90292, |
| | 90248, 90250, | 90264, 90276, | 90294, 90306, |
| | 90257, 90323- | 90279, 90288, | 90309, 90315, |
| | 90360 | 90361-90400 | 90401-90442 |
| 12:40360980_T_G | 90443-90449 | 90450-90453 | 90454-90460 |
| rs7962116_REF | | | |
| 12:40360980_T_G | 90443-90449, | 90450-90453, | 90454-90460, |
| rs7962116_SNP | 90461-90474 | 90475-90477 | 90478-90486 |
| 12:40361242_TTACA_T | 90487-90488 | | |
| rs67512688_REF | | | |
| 12:40361242_TTACA_T | 90487-90488 | | |
| rs67512688_SNP | | | |
| 12:40361614_G_A | 90489-90517 | 90518-90530 | 90531-90550 |
| rs2896978_REF | | | |
| 12:40361614_G_A | 90498, 90516- | | 90535, 90558- |
| rs2896978_SNP | 90517, 90551- | | 90559 |
| | 90557 | | |
| 12:40361674_A_T | 90560-90607 | 90608-90657 | 90658-90709 |
| rs2404836_REF | | | |
| 12:40361674_A_T | 90564, 90569- | 90612, 90614, | 90662, 90664, |
| rs2404836_SNP | 90570, 90574, | 90616, 90619- | 90666, 90669, |
| | 90580, 90586, | 90620, 90624, | 90673, 90675, |
| | 90588, 90593, | 90636, 90638, | 90685, 90688, |
| | 90597, 90600, | 90643, 90647, | 90690, 90695, |
| | 90710-90747 | 90748-90787 | 90788-90829 |
| 12:40362405_T_C | 90830-90876 | 90877-90926 | 90927-90978 |
| rs11176195_REF | | | |
| 12:40362405_T_C | 90840, 90842, | 90888, 90890, | 90931, 90937, |
| rs11176195_SNP | 90856, 90858- | 90894, 90907- | 90940, 90942, |
| | 90860, 90866, | 90910, 90916, | 90946, 90960- |
| | 90869, 90871, | 90921, 90925, | 90962, 90968, |
| | 90875, 90979- | 91017-91056 | 90973, 91057- |
| | 91016 | | 91098 |
| 12:40362446_A_G | 91099-91146 | 91147-91192 | 91193-91242 |
| rs4767973_REF | | | |
| 12:40362446_A_G | 91103, 91108, | 91151, 91156, | 91197, 91207- |
| rs4767973_SNP | 91114, 91118, | 91161-91162, | 91208, 91212, |
| | 91120-91122, | 91166, 91169- | 91216, 91227, |
| | 91130, 91139, | 91170, 91181, | 91234-91235, |
| | 91145, 91243- | 91186, 91191, | 91239, 91241, |
| | 91280 | 91281-91320 | 91321-91362 |
| 12:40362519_C_T | 91363-91404 | 91405-91438 | 91439-91477 |
| rs17444202_REF | | | |
| 12:40362519_C_T | 91369, 91384, | 91411, 91425, | 91450, 91461, |
| rs17444202_SNP | 91387, 91393, | 91434, 91501- | 91467, 91473, |
| | 91400, 91478- | 91507 | 91508-91522 |
| | 91500 | | |
| 12:40362670_C_A | 91523-91570 | 91571-91619 | 91620-91671 |
| rs4768236_REF | | | |
| 12:40362670_C_A | 91535, 91540, | 91583, 91588, | 91633, 91638, |
| rs4768236_SNP | 91543, 91546, | 91591, 91594, | 91641, 91644, |
| | 91558-91559, | 91603, 91608- | 91653, 91657, |
| | 91562, 91566, | 91609, 91612, | 91659-91660, |
| | 91569-91570, | 91619, 91710- | 91663, 91671, |
| | 91672-91709 | 91749 | 91750-91791 |
| 12:40362885_T_C | 91792-91814 | 91815-91825 | 91826-91843 |
| rs4768237_REF | | | |
| 12:40362885_T_C | 91795-91796, | 91815-91816, | 91827-91828, |
| rs4768237_SNP | 91799, 91801, | 91818-91820, | 91831, 91835, |
| | 91803-91804, | 91822-91825, | 91837-91839, |
| | 91808-91809, | 91866-91883 | 91841-91843, |
| | 91811, 91813, | | 91884-91905 |
| | 91844-91865 | | |
| 12:40363312_A_ACATG | 91906-91907 | | |
| rs58724345_SNP | | | |
| 12:40363384_AT_A | 91908-91913 | | |
| rs397897325_REF | | | |
| 12:40363384_AT_A | 91910, 91913- | | |
| rs397897325_SNP | 91914 | | |
| 12:40363528_A_G | 26687, 26689, | 26729, 26731, | 26770, 26772, |
| rs33962975_REF | 26694, 26704, | 26733, 26738, | 26774, 26776, |
| | 26720, 91915- | 26747, 91954- | 26781, 91996- |
| | 91953 | 91995 | 92039 |
| 12:40363528_A_G | 91916, 91918- | 91955, 91957, | 91996, 91998, |
| rs33962975_SNP | 91919, 91921, | 91959, 91964, | 92002, 92006, |
| | 91923, 91926, | 91976, 91985, | 92018, 92029, |
| | 91938, 91946, | 91994, 92078- | 92038, 92118- |
| | 92040-92077 | 92117 | 92159 |
| 12:40363731_A_G | 92160-92179 | 92180-92185 | 92186-92195 |
| rs7134408_REF | | | |
| 12:40363731_A_G | 92160, 92163, | 92185, 92234- | 92186, 92259- |
| rs7134408_SNP | 92170, 92172, | 92258 | 92292 |
| | 92177, 92196- | | |
| | 92233 | | |
| 12:40364243_T_G | 92293-92339 | 92340-92381 | 92382-92429 |
| rs11835105_REF | | | |
| 12:40364243_T_G | 92296, 92298- | 92341, 92343- | 92384, 92388, |
| rs11835105_SNP | 92300, 92304, | 92345, 92353- | 92396-92398, |
| | 92306, 92309- | 92355, 92370- | 92404, 92408, |
| | 92311, 92328, | 92371, 92379, | 92417-92418, |
| | 92430-92467 | 92468-92507 | 92426, 92508- |
| | | | 92549 |
| 12:40364289_T_TA | 92550-92597 | 92598-92647 | 92648-92699 |
| rs137858615_REF | | | |
| 12:40364289_T_TA | 92550-92551, | 92598, 92602, | 92648, 92652, |
| rs137858615_SNP | 92554, 92556, | 92604, 92608, | 92654, 92659, |
| | 92571, 92573- | 92619, 92621, | 92672, 92680, |
| | 92574, 92577, | 92625, 92629, | 92685, 92689, |
| | 92589, 92700- | 92638, 92738- | 92691, 92778- |
| | 92737 | 92777 | 92819 |
| 12:40364489_G_A | 92820-92859 | 92860-92880 | 92881-92911 |
| rs10878434_REF | | | |
| 12:40364489_G_A | 92825, 92829, | 92927-92930 | 92895, 92931- |
| rs10878434_SNP | 92838, 92840, | | 92938 |
| | 92846, 92912- | | |
| | 92926 | | |
| 12:40364516_C_CT | 92939-92942 | 92943 | 92944-92945 |
| rs35403247_REF | | | |
| 12:40364850_T_C | 26835, 26846, | 26978, 26980, | 26904, 26907, |
| rs3761863_REF | 26939, 26949, | 26998, 92980- | 27019, 27037, |
| | 26959, 92946- | 93009 | 27039, 93010- |
| | 92979 | | 93044 |
| 12:40364850_T_C | 26939, 26949, | 26978, 26980, | 27019, 27037, |
| rs3761863_SNP | 26959, 92952, | 26998, 92986, | 27039, 93011, |
| | 92958, 92972, | 92989, 93006, | 93017, 93033, |
| | 92976, 93045- | | |
| | 93082 | 93083-93122 | 93123-93164 |
| 12:40365793_G_A | 93165-93210 | 93211-93253 | 93254-93300 |
| rs17444223_REF | | | |
| 12:40365793_G_A | 93180, 93185, | 93222, 93237- | 93260, 93266, |
| rs17444223_SNP | 93187, 93192- | 93238, 93241, | 93283, 93286, |
| | 93193, 93196, | 93249, 93330- | 93296, 93343- |
| | 93201, 93206, | 93342 | 93367 |
| | 93209, 93301- | | |
| | 93329 | | |
| 12:40366046_T_A | 93368-93409 | 93410-93443 | 93444-93483 |
| rs12426362_REF | | | |
| 12:40366046_T_A | 93371, 93377, | 93412, 93415, | 93447, 93453, |
| rs12426362_SNP | 93391, 93399, | 93427, 93521- | 93474, 93552- |
| | 93406, 93484- | 93551 | 93588 |
| | 93520 | | |
| 12:40366178_A_G | 93589-93635 | 93636-93685 | 93686-93737 |
| rs17466605_REF | | | |
| 12:40366178_A_G | 93591-93592, | 93638, 93648, | 93688, 93695, |
| rs17466605_SNP | 93601, 93605- | 93652-93653, | 93699-93700, |
| | 93606, 93621- | 93666, 93669- | 93704-93705, |
| | 93622, 93625, | 93670, 93673, | 93718, 93721, |
| | 93633, 93738- | 93682-93683, | 93725, 93734, |
| | 93775 | 93776-93815 | 93816-93857 |
| 12:40367205_A_G | 93858-93867 | , | 93868-93869 |
| rs3789328_REF | | | |
| 12:40367205_A_G | 93858-93859, | 93897-93907 | 93908-93924 |
| rs3789328_SNP | 93863-93864, | | |
| | 93867, 93870- | | |
| | 93896 | | |
| 12:40367513_A_T | 93925-93934 | 93935-93938 | 93939-93944 |
| rs12426498_REF | | | |
| 12:40367513_A_T | 93925, 93945- | 93954-93957 | 93958-93963 |
| rs12426498_SNP | 93953 | | |
| 12:40367556_A_G | 93964-93977 | 93978-93987 | 93988-94001 |
| rs4768238_REF | | | |
| 12:40367556_A_G | 93965, 93967, | 93979, 93983, | 93989, 93991, |
| rs4768238_SNP | 93972, 93974, | 93985, 93987, | 93997, 93999, |
| | 93977, 94002- | 94027-94037 | 94001, 94038- |
| | 94026 | | 94052 |
| 12:40367861_T_C | 28203, 94053- | 94090-94122 | 28263, 28266, |
| rs66737902_REF | 94089 | | 94123-94164 |
| 12:40367861_T_C | 94059, 94063, | 94096, 94098, | 94130, 94140, |
| rs66737902_SNP | 94067, 94070- | 94102, 94105- | 94143, 94146, |
| | 94071, 94080, | 94106, 94109, | 94148, 94152, |
| | 94082-94083, | 94115-94116, | 94155, 94157, |
| | 94086, 94165- | 94119, 94201- | 94160-94161, |
| | 94200 | 94236 | 94237-94278 |
| 12:40368129_A_C | 94279-94311 | 94312-94345 | 94346-94381 |
| rs10878441_REF | | | |
| 12:40368129_A_C | 94282, 94288, | 94312, 94316, | 94346-94347, |
| rs10878441_SNP | 94292, 94304, | 94322, 94327, | 94351, 94357, |
| | 94382-94416 | 94340, 94417- | 94375, 94450- |
| | | 94449 | 94484 |
| 12:40368149_C_T | 28531, 28536, | 28556, 28560, | 28577, 28580, |
| rs3886747_REF | 28539, 94282, | 94312, 94316, | 28585, 28587, |
| | 94288, 94292, | 94322, 94327, | 94346-94347, |
| | 94295, 94297, | 94330, 94333, | 94351, 94357, |
| | 94302, 94304, | 94337, 94340, | 94362, 94365, |
| | 94310, 94485- | 94342, 94344, | 94368, 94370, |
| | 94517 | 94518-94547 | 94372, 94375, |
| | | | 94377, 94380, |
| | | | 94548-94581 |
| 12:40368149_C_T | 94295, 94297, | 94330, 94333, | 94365, 94368, |
| rs3886747_SNP | 94302, 94310, | 94337, 94342, | 94370, 94377, |
| | 94488, 94490, | 94344, 94522, | 94380, 94551, |
| | 94498-94499, | 94530-94531, | 94556, 94561- |
| | 94510, 94582- | 94540-94541, | 94562, 94573, |
| | 94603 | 94604-94616 | 94617-94636 |
| 12:40368501_G_C | 28607-28608, | 28616, 28663, | 28621-28622, |
| rs1365770_REF | 28630, 28634, | 28666, 28672, | 28693, 28697, |
| | 28641, 28644, | 28675, 28683, | 28704, 28715, |
| | 28654, 94637- | 94665-94685 | 28721, 94686- |
| | 94664 | | 94709 |
| 12:40368501_G_C | 94637-94638, | 94665-94667, | 94686-94688, |
| rs1365770_SNP | 94640, 94643, | 94671, 94685, | 94694-94695, |
| | 94646, 94652, | 94738-94759 | 94760-94785 |
| | 94658, 94664, | | |
| | 94710-94737 | | |
| 12:40368690_CT_C | 28783, 94786- | 94798-94807 | 94808-94819 |
| rs367772598_REF | 94797 | | |
| 12:40368690_C_CTTT | 28783, 94786- | 94798-94807 | 94808-94819 |
| rs386376255_REF | 94797 | | |
| 12:40368744_T_C | 28925, 28945, | 94850-94877 | 94878-94911 |
| rs10784548_REF | 94820-94849 | | |
| 12:40368744_T_C | 94825, 94829, | 94851, 94855- | 94879, 94884- |
| rs10784548_SNP | 94835, 94839- | 94856, 94860, | 94885, 94889- |
| | 94840, 94846, | 94865, 94868- | 94891, 94900, |
| | 94912-94944 | 94869, 94945- | 94976-95010 |
| | | 94975 | |
| 12:40369805_C_T | 95011-95043 | 95044-95050 | 95051-95066 |
| rs1465527_REF | | | |
| 12:40369805_C_T | 95018, 95021, | 95045, 95050 | 95055, 95057, |
| rs1465527_SNP | 95023, 95033, | | 95063 |
| | 95037 | | |
| 12:40369814_C_T | 95011-95014, | 95046-95049, | 95051-95052, |
| rs1465528_REF | 95016-95017, | 95078-95082 | 95054, 95056, |
| | 95019-95020, | | 95058-95061, |
| | 95022, 95024- | | 95065-95066, |
| | 95025, 95027- | | 95083-95090 |
| | 95028, 95030- | | |
| | 95031, 95035- | | |
| | 95036, 95038- | | |
| | 95039, 95041- | | |
| | 95043, 95067- | | |
| | 95077 | | |
| 12:40369814_C_T | 95019, 95028, | 95078-95080, | 95084-95085, |
| rs1465528_SNP | 95039, 95070- | 95082 | 95087, 95089- |
| | 95072, 95074, | | 95091 |
| | 95076 | | |
| 12:40369850_G_T | 95092-95121 | 95122-95136 | 95137-95158 |
| rs17444285_REF | | | |
| 12:40369850_G_T | 95096, 95101, | 95124, 95127, | 95142, 95149, |
| rs17444285_SNP | 95106-95107, | 95131, 95133- | 95152-95153, |
| | 95110, 95112, | 95136 | 95155-95158, |
| | 95116-95117, | | 95162 |
| | 95120-95121, | | |
| | 95159-95161 | | |
| 12:40370171_C_G | 95163-95210 | 95211-95260 | 95261-95312 |
| rs7968048_REF | | | |
| 12:40370171_C_G | 95165, 95169- | 95213, 95217, | 95267, 95269, |
| rs7968048_SNP | 95171, 95180, | 95219, 95228, | 95277, 95279, |
| | 95182, 95191, | 95230, 95239, | 95281, 95294- |
| | 95195, 95206, | 95243-95244, | 95295, 95306- |
| | 95208, 95313- | 95255-95256, | 95307, 95312, |
| | 95350 | 95351-95390 | 95391-95432 |
| 12:40370967_T_G | 95433-95443 | , | 95444 |
| rs11609433_REF | | | |
| 12:40370967_T_G | 95433, 95438, | 95458-95468 | 95444, 95469- |
| rs11609433_SNP | 95445-95457 | | 95483 |
| 12:40371783_GAAAAAAAAA | 95484-95491 | 95492-95499 | 95500-95509 |
| G | | | |
| rs776238897_REF | | | |
| 12:40371783_GAAAA_G | 95484-95491 | 95492-95499 | 95500-95509 |
| rs149833872_REF | | | |
| 12:40371783_GA_G | 95484-95491 | 95492-95499 | 95500-95509 |
| rs1299545494_REF | | | |
| 12:40371801_A_C | 95510-95514 | 95515-95516 | 95517-95519 |
| rs4374003_REF | | | |
| 12:40371801_A_C | 95510-95514, | 95515-95516, | 95517-95519, |
| rs4374003_SNP | 95520-95522 | 95523-95525 | 95526-95530 |
| 12:40372127_A_G | 95531-95559 | 95560-95573 | 95574-95596 |
| rs7962370_REF | | | |
| 12:40372127_A_G | 95538, 95543, | 95563-95564, | 95578-95579, |
| rs7962370_SNP | 95548, 95551- | 95570-95572, | 95584, 95589, |
| | 95552, 95554- | 95635-95666 | 95591, 95594, |
| | 95555, 95597- | | 95667-95704 |
| | 95634 | | |
| 12:40224997-40225496 | 14, 21, 26, 31, | 67, 79, 84, 96, | 117, 129, 134, |
| Up to 500 bp Downstream | 46, 151, 153, | 244, 357-358, | 147-148, 268, |
| to Exon 51 | 168, 173, 193, | 361-363, 367, | 293, 295-296, |
| | 310, 313-314, | 370, 375, 381, | 397, 408-409, |
| | 318, 320-321, | 383, 499, 508, | 412, 414, 418, |
| | 326, 333, 343, | 512, 517, 520, | 420, 422, 433 |
| | 451, 454, 460, | 529-530, 535 | 435, 558, 562- |
| | 464, 469, 478, | 540, 542, 657 | 563, 568 571, |
| | 480-481, 486, | 659, 663, 666- | 580, 586, 590, |
| | 491, 609, 611, | 667, 670, 681, | 592, 594, 707- |
| | 615, 618-619, | 683, 685, 690, | 708, 710, 717- |
| | 622, 630, 633, | 96490-97286 | 718, 721, 732, |
| | 636, 642, | | 734, 740, 742, |
| | 95705-96489 | | 97287-98083 |
| 12:40225283-40225554 | 95705, 95707- | 96490, 96492- | 97287, 97289- |
| Intron 1 | 95709, 95711, | 96494, 96496, | 97291, 97293, |
| | 95713-95714, | 96498-96499, | 97295-97296, |
| | 95716-95720, | 96501-96505, | 97298-97302, |
| | 95722-95725, | 96507-96510, | 97304-97307, |
| | 95730, 95733, | 96515, 96518, | 97312, 97315, |
| | 95735, 95738, | 96520, 96523, | 97317, 97320, |
| | 95740, 95742- | 96525, 96527- | 97322, 97324- |
| | 95743, 95746- | 96528, 96531- | 97325, 97328- |
| | 95753, 95757, | 96538, 96542, | 97335, 97339, |
| | 95759-95763, | 96544-96548, | 97341-97345, |
| | 95771, 95776- | 96556, 96562- | 97353, 97358- |
| | 95777, 95781- | 96563, 96566- | 97359, 97362- |
| | 95782, 95785, | 96567, 96570, | 97363, 97366, |
| | 95792, 95795- | 96577, 96580, | 97373, 97376, |
| | 95798, 95800, | 96582-96584, | 97378-97380, |
| | 95802-95803, | 96586, 96588- | 97382, 97384- |
| | 95805, 95810- | 96589, 96591, | 97385, 97387, |
| | 95811, 95815, | 96594, 96597- | 97392-97393, |
| | 95824, 95826, | 96598, 96602, | 97397, 97406, |
| | 95831-95833, | 96611, 96614, | 97409, 97414- |
| | 95835-95838, | 96619-96621, | 97416, 97418- |
| | 95842, 95844- | 96623-96626, | 97421, 97426, |
| | 95845, 95847- | 96630, 96632- | 97428-97429, |
| | 95849, 95852, | 96633, 96635- | 97431-97433, |
| | 95854-95855, | 96637, 96640, | 97436, 97438- |
| | 95860, 95863- | 96642-96643, | 97439, 97445, |
| | 95864, 95867, | 96648, 96651- | 97448-97449, |
| | 95873, 95875, | 96652, 96655, | 97453, 97459, |
| | 95878, 95880- | 96661, 96663, | 97461, 97464, |
| | 95882, 95885- | 96666, 96668- | 97466-97468, |
| | 95891, 95893- | 96670, 96673- | 97471-97477, |
| | 95894, 95897, | 96679, 96681- | 97479-97480, |
| | 95906, 95909, | 96682, 96685, | 97483, 97492, |
| | 95916, 95918, | 96694, 96697, | 97495, 97505, |
| | 95920, 95924, | 96707, 96709, | 97507, 97509, |
| | 95927, 95933, | 96711, 96715, | 97513, 97516, |
| | 95943, 95947- | 96718, 96724, | 97522, 97532, |
| | 95948, 95950, | 96734, 96738- | 97536-97538, |
| | 95952, 95954, | 96740, 96742- | 97540-97542, |
| | 95956, 95958, | 96744, 96746, | 97544, 97547- |
| | 95961-95962, | 96749-96750, | 97548, 97550, |
| | 95964, 95967, | 96752, 96755- | 97554, 97556, |
| | 95970, 95972, | 96756, 96758, | 97558, 97561- |
| | 95975-95977, | 96761-96763, | 97563, 97566, |
| | 95979, 95983, | 96766, 96770, | 97570, 97574- |
| | 95987-95990, | 96774-96777, | 97577, 97579- |
| | 95992-95994, | 96779-96781, | 97581, 97586, |
| | 95999, 96009, | 96786, 96797, | 97596, 97600- |
| | 96013-96014, | 96801-96802, | 97601, 97603, |
| | 96017, 96024, | 96804, 96814, | 97613, 97617, |
| | 96027, 96030, | 96818, 96820, | 97619, 97622- |
| | 96032-96033, | 96823-96824, | 97623, 97625, |
| | 96035, 96037- | 96826, 96828- | 97627-97629, |
| | 96038, 96042, | 96830, 96834, | 97633, 97635- |
| | 96044-96045, | 96836-96837, | 97636, 97641, |
| | 96050, 96054- | 96842, 96846- | 97644, 97646, |
| | 96055, 96058, | 96847, 96851, | 97650, 97659- |
| | 96068-96072, | 96859, 96861- | 97663, 97665, |
| | 96074, 96078- | 96865, 96867, | 97668-97675, |
| | 96085, 96087, | 96871-96878, | 97677, 97679, |
| | 96089, 96091- | 96880, 96882, | 97681-97683, |
| | 96093, 96099, | 96884-96887, | 97689, 97693, |
| | 96102, 96104- | 96892, 96896, | 97695-97696, |
| | 96105, 96109- | 96898-96899, | 97700-97701, |
| | 96110, 96114- | 96903-96904, | 97705-97708, |
| | 96117, 96119- | 96908-96912, | 97710-97711, |
| | 96120, 96125, | 96914-96915, | 97718, 97720, |
| | 96127, 96130, | 96921, 96923, | 97723, 97725, |
| | 96132, 96134, | 96926, 96928, | 97727, 97730, |
| | 96137, 96141- | 96930, 96933, | 97734-97737, |
| | 96145, 96148, | 96937-96940, | 97741, 97743, |
| | 96151, 96153, | 96944, 96946, | 97745, 97752, |
| | 96160, 96162, | 96948, 96955, | 97754, 97765, |
| | 96173, 96178, | 96957, 96968, | 97770, 97773, |
| | 96183, 96186, | 96972, 96975, | 97776, 97780, |
| | 96188, 96196- | 96978, 96982, | 97787-97788, |
| | 96197, 96200, | 96989-96990, | 97791, 97794- |
| | 96203-96204, | 96993, 96995- | 97795, 97800- |
| | 96209-96212, | 96996, 97001- | 97803, 97805- |
| | 96214-96215, | 97004, 97006- | 97806, 97809, |
| | 96218, 96220- | 97007, 97010, | 97811-97812, |
| | 96221, 96225, | 97012-97013, | 97816, 97823, |
| | 96234, 96237- | 97017, 97023, | 97825-97826, |
| | 96238, 96240, | 97025-97027, | 97828, 97830- |
| | 96242-96243, | 97029-97030, | 97831, 97834- |
| | 96247-96248, | 97033-97035, | 97836, 97838, |
| | 96250, 96252, | 97037, 97039, | 97841, 97844, |
| | 96255, 96258, | 97042, 97044, | 97846, 97848- |
| | 96260, 96262- | 97046-97047, | 97849, 97857- |
| | 96263, 96271- | 97055-97057, | 97858, 97861- |
| | 96273, 96276- | 97060-97061, | 97862, 97867- |
| | 96277, 96283- | 97067-97068, | 97868, 97870- |
| | 96284, 96286- | 97070-97071, | 97871, 97873, |
| | 96287, 96289, | 97073, 97078, | 97878, 97890- |
| | 96304-96305, | 97091-97092, | 97891, 97893- |
| | 96307-96311, | 97094-97098, | 97897, 97903, |
| | 96316, 96318, | 97104, 97106, | 97905, 97907, |
| | 96320-96321, | 97108, 97110, | 97909, 97911- |
| | 96323-96325, | 97112-97114, | 97913, 97915, |
| | 96327, 96329, | 97116, 97118, | 97917, 97922- |
| | 96333-96334, | 97122-97123, | 97923, 97931- |
| | 96342-96343, | 97131-97132, | 97932, 97934, |
| | 96345, 96348- | 97134, 97138, | 97938, 97940- |
| | 96350, 96353, | 97140-97141, | 97941, 97944, |
| | 96355-96357, | 97144, 97147- | 97947-97949, |
| | 96359, 96363- | 97149, 97151, | 97951, 97956- |
| | 96365, 96367, | 97156-97158, | 97958, 97960, |
| | 96370-96371, | 97160, 97163- | 97963-97964, |
| | 96373-96374, | 97164, 97166- | 97966-97967, |
| | 96379, 96381- | 97167, 97172, | 97972, 97974, |
| | 96383, 96385, | 97174, 97176- | 97976-97977, |
| | 96390-96392, | 97177, 97179, | 97979, 97983- |
| | 96395, 96397- | 97183-97185, | 97985, 97988, |
| | 96398, 96403, | 97188, 97191- | 97991-97992, |
| | 96413, 96417, | 97192, 97197- | 97996-97997, |
| | 96420, 96425- | 97198, 97208, | 98006, 98010, |
| | 96427, 96429- | 97212, 97215, | 98013, 98018- |
| | 96430, 96432, | 97219-97221, | 98019, 98021- |
| | 96434, 96436, | 97223-97224, | 98022, 98024, |
| | 96441, 96443, | 97226, 97228, | 98026, 98029, |
| | 96446-96448, | 97231, 97236, | 98034, 98036, |
| | 96450-96452, | 97238, 97242- | 98040-98045, |
| | 96454-96457, | 97247, 97249- | 98047-98050, |
| | 96460-96461, | 97252, 97255, | 98053, 98055, |
| | 96463, 96465, | 97257, 97259, | 98057, 98059, |
| | 96467-96476, | 97261, 97263, | 98061, 98064- |
| | 96478-96480, | 97266-97273, | 98071, 98073- |
| | 96483-96489, | 97275-97277, | 98075, 98078- |
| | 98084-98199 | 97280-97286, | 98083, 98316- |
| | | 98200-98315 | 98431 |
| 12:40366506-40367005 | 98432-98857 | 98858-99333 | 99334-99715 |
| Intron 49 up to 500 bp | | | |
| Upstream to Exon 50 | | | |
| 12:40367078-40367643 | 93964-93967, | 93978-93987, | 93988-93991, |
| Intron 50 | 93969-93977, | 99872-100053 | 93993-93998, |
| | 99716-99871 | | 100054-100193 |
| 12:40225641-40226140 | 100194-100907 | 100908-101671 | 101672-102343 |
| Intron 2 up to 500 bp | | | |
| Downstream to Exon 2 | | | |
| 12:40235126-40235625 | 102344-102742 | 102743-103177 | 103178-103604 |
| Intron 3 up to 500 bp | | | |
| Upstream to Exon 4 | | | |

The indicated locations listed in column 1 of the Table 1 are based on gnomAD v3 database and UCSC Genome Browser assembly ID: hg38, Sequencing/Assembly provider ID: Genome Reference Consortium Human GRCh38.p12 (GCA_000001405.27). Assembly date: December 2013 initial release; December 2017 patch release 12.
The SNP details are indicated by the listed SNP ID Nos. (“rs numbers”), which are based on the NCBI 2018 database of Single Nucleotide Polymorphisms (dbSNP)). The indicated DNA mutations are associated with Transcript Consequence NM_198578 as obtained from NCBI RefSeq genes.

[0201] Examples are provided below to facilitate a more complete understanding of the invention. The following examples illustrate the exemplary modes of making and practicing the invention. However, the scope of the invention is not limited to specific embodiments disclosed in these Examples, which are for purposes of illustration only.

### Experimental Details

### Example 1: LRRK2 On-Target Activity Anaylsis

[0202] Guide sequence portions comprising 17-50 contiguous nucleotides containing nucleotides in the sequence set forth in any one of SEQ ID NOs: 1-103,606 are screened for high on target activity using SpCas9 in HeLa cells. On target activity is determined by DNA capillary electrophoresis analysis.

### Example 2: LRRK2 Editing Strategy Analysis Using SpCas9

[0203] Point mutations in the leucine-rich repeat kinase 2 (LRRK2) gene are the most frequent cause of familial, autosomal dominant Parkinson's disease. In order to develop an editing strategy requiring only one guide RNA molecule to target and inactivate an LRRK2 mutant allele, guide RNA molecules having guide sequence portions which target SNPs residing in the coding region of the gene were screened. Specifically, guides having one of nine (9) different guide sequence portions, each of which target a CRISPR complex to one of four different SNP positions (rs1878245, rs1427263, rs1878405, or rs3761863), were screened in A549 cells that express LRRK2 to determine if the guides could lead to the formation of indels and/or frameshift mutations in the LRRK2 coding sequence that could result in expression of a truncated protein or induce nonsense mediated decay (NMD).

[0204] Briefly, pre-assembled RNPs composed of 105 pmole SpCas9 CRISPR nuclease protein and 120 pmole of a 20-nucleotide sgRNA (Table 2) were mixed with 100 pmole of electroporation enhancer (IDT-1075916) and electroporated into 2×10⁵ A549 cells using the SF primary cell 4D-nucleofector X Kit S (PBC2-00675, Lonza) and applying the CM-130 program. A fraction of cells was harvested 72 hours post electroporation, genomic DNA was extracted, and amplicons generated from the extracted DNA was subjected to next-generation sequencing (NGS) analysis. As shown in the results presented in FIG. 1, the tested guide molecules depicted high editing activity at the site of the targeted SNPs, ranging from 76%-97% on-target activity.

[0205] To assess the effect of the editing on the level of LRRK2 expression, total RNA was extracted from A549 cells seven (7) days post-electroporation and the level of LRRK2 mRNA was measured by qRT-PCR. A decrease in the level of LRRK2 mRNA was detected only for guide molecules “g8” and “g9_alt,” measuring 60% and 40% editing respectively. The editing pattern for the rest of the guide molecules indicates that truncated protein expression could be produced as the result of a frameshift mutation.

TABLE 2
Sequences of 20-nucleotide guide sequence
portions that target the human LRRK2
coding sequence.

| Location | SNP | Guide | Sequence | PAM |
|---|---|---|---|---|
| Exon 5 | rs1878245 | g1_alt | UUCUUCAUCCAGUAUCAGCA | AGG |
| | (T > C) | | (SEQ ID NO: 33653) | |
| | | g2_alt | UAAAAUCACCUUGCUGAUAC | UGG |
| | | | (SEQ ID NO: 33642) | |
| Exon 34 | rs1427263 | g3 | CUACGCGAAAUAAUGCCCUU | AGG |
| | (C > A) | | (SEQ ID NO: 61673) | |
| | | g4 | UACGCGAAAUAAUGCCCUUA | GGG |
| | | | (SEQ ID NO: 61681) | |
| | | g5 | AUAAUGCCCUUAGGGUGUUU | UGG |
| | | | (SEQ ID NO: 61661) | |
| Exon 43 | rs1878405 | g6 | AAUUUCUCAACCAUAGGCCA | UGG |
| | (G > A) | | (SEQ ID NO: 80365) | |
| | | g7 | AUUUCUCAACCAUAGGCCAU | GGG |
| | | | (SEQ ID NO: 80368) | |
| | | g8 | UUUCUCAACCAUAGGCCAUG | GGG |
| | | | (SEQ ID NO: 80384) | |
| Exon 49 | rs3761863 | g9_alt | GGUAACGGUAAAAGAAAACA | AGG |
| | (T > C) | | (SEQ ID NO: 93060) | |

### Example 3: LRRK2 Editing Strategy Analysis Using Alternate CRISPR Nucleases

[0206] The editing activities of two alternate CRISPR nucleases, OMNI-159 (SEQ ID NO: 103612) and OMNI-79 V5570 (SEQ ID NO: 103613), were preliminarily assessed with select guides in HeLa cells (FIG. 3 and FIG. 4). These initial data suggest that the LRRK2-targeting guide sequence portions provided herein can be utilized with a variety of different CRISPR nucleases.

TABLE 3
Sequences of guide sequence portions that target the human
LRRK2 coding sequence used with alternate CRISPR nucleases.

| | | | | OMNI CRISPR |
|---|---|---|---|---|
| SNP Targeted | Guide Name | Guide Sequence Portion | PAM | Nuclease |
| rs3761863(T > C) | g11_alt | UCUAGGGAGGUAACGGUAAAGG | AAAACA | OMNI-159 |
| | | (SEQ ID NO: 93150) | | |
| rs1427263(C > A) | g5_alt | AAAUAAUUCCCUUAGGGUGUUU | TGGACA | OMNI-159 |
| | | (SEQ ID NO: 61854) | | |
| rs10878245(T > C) | g13_alt | AUAUCACUUUCUUCAUCCAGUA | TCAGCA | OMNI-159 |
| | | (SEQ ID NO: 33706) | | |
| rs10878245(T > C) | g1_alt | CUUUCUUCAUCCAGUAUCAGCA | AGGTG | OMNI-79 V5570 |
| | | (SEQ ID NO: 33719) | | |
| rs1427263(C > A) | g4_alt | UCUACGCGAAAUAAUUCCCUUA | GGGTG | OMNI-79 V5570 |
| | | (SEQ ID NO: 61889) | | |

### REFERENCES

[0207] 1. Ahmad and Allen (1992) “Antibody-mediated Specific Binging and Cytotoxicity of Lipsome-entrapped Doxorubicin to Lung Cancer Cells in Vitro”, Cancer Research 52:4817-20.
[0208] 2. Anderson (1992) “Human gene therapy”, Science 256:808-13.
[0209] 3. Basha et al. (2011) “Influence of Cationic Lipid Composition on Gene Silencing Properties of Lipid Nanoparticle Formulations of siRNA in Antigen-Presenting Cells”, Mol. Ther. 19(12):2186-200.
[0210] 4. Behr (1994) Gene transfer with synthetic cationic amphiphiles: Prospects for gene therapy”, Bioconjuage Chem 5:382-89.

[0211] Blaese (1995) “Vectors in cancer therapy: how will they deliver”, Cancer Gene Ther.

[0212] 2:291-97.
[0213] 6. Blaese et al. (1995) “T lympocyte-directed gene therapy for ADA-SCID: initial trial results after 4 years”, Science 270(5235):475-80.
[0214] 7. Buchschacher and Panganiban (1992) “Human immunodeficiency virus vectors for inducible expression of foreign genes”, J. Virol. 66:2731-39.
[0215] 8. Burstein et al. (2017) “New CRISPR-Cas systems from uncultivated microbes”, Nature 542:237-41.
[0216] 9. Chang and Wilson (1987) “Modification of DNA ends can decrease end-joining relative to homologous recombination in mammalian cells”, Proc. Natl. Acad. Sci. USA 84:4959-4963.
[0217] 10. Chung et al. (2006) “Agrobacterium is not alone: gene transfer to plants by viruses and other bacteria”, Trends Plant Sci. 11(1):1-4.
[0218] 11. Coelho et al. (2013) “Safety and efficacy of RNAi therapy for transthyretin amyloidosis” N. Engl. J. Med. 369, 819-829.
[0219] 12. Collias and Beisel (2021) “CRISPR technologies and the search for the PAM-free nuclease”, Nature Communications 12, 555.
[0220] 13. Crystal (1995) “Transfer of genes to humans: early lessons and obstacles to success”, Science 270(5235):404-10.
[0221] 14. Dillon (1993) “Regulation gene expression in gene therapy” Trends in Biotechnology 11(5):167-173.
[0222] 15. Dranoff et al. (1997) “A phase I study of vaccination with autologous, irradiated melanoma cells engineered to secrete human granulocyte macrophage colony stimulating factor”, Hum. Gene Ther. 8(1):111-23.
[0223] 16. Dunbar et al. (1995) “Retrovirally marked CD34-enriched peripheral blood and bone marrow cells contribute to long-term engraftment after autologous transplantation”, Blood 85:3048-57.
[0224] 17. Ellem et al. (1997) “A case report: immune responses and clinical course of the first human use of ganulocyte/macrophage-colony-stimulating-factor-tranduced autologous melanoma cells for immunotherapy”, Cancer Immunol Immunother 44:10-20.
[0225] 18. Gao and Huang (1995) “Cationic liposome-mediated gene transfer” Gene Ther. 2(10):710-22.
[0226] 19. Haddada et al. (1995) “Gene Therapy Using Adenovirus Vectors”, in: The Molecular Repertoire of Adenoviruses III: Biology and Pathogenesis, ed. Doerfler and Bohm, pp. 297-306.
[0227] 20. Han et al. (1995) “Ligand-directed retro-viral targeting of human breast cancer cells”, Proc Natl Acad Sci U.S.A. 92(21):9747-51.
[0228] 21. Hu et al. (2018) “Evolved Cas9 variants with broad PAM compatibility and high DNA specificity”, Nature 556(7699):57-63.
[0229] 22. Inaba et al. (1992) “Generation of large numbers of dendritic cells from mouse bone marrow cultures supplemented with granulocyte/macrophage colony-stimulating factor”, J Exp Med. 176(6):1693-702.
[0230] 23. Jinek et al. (2012) “A programmable dual-RNA-guided DNA endonuclease in adaptive bacterial immunity,” Science 337(6096):816-21.
[0231] 24. Johan et al. (1992) “GLVR1, a receptor for gibbon ape leukemia virus, is homologous to a phosphate permease of Neurospora crassa and is expressed at high levels in the brain and thymus”, J Virol 66(3):1635-40.
[0232] 25. Judge et al. (2006) “Design of noninflammatory synthetic siRNA mediating potent gene silencing in vivo”, Mol Ther. 13(3):494-505.
[0233] 26. Kohn et al. (1995) “Engraftment of gene-modified umbilical cord blood cells in neonates with adnosine deaminase deficiency”, Nature Medicine 1:1017-23.
[0234] 27. Kremer and Perricaudet (1995) “Adenovirus and adeno-associated virus mediated gene transfer”, Br. Med. Bull. 51(1):31-44.
[0235] 28. Macdiarmid et al. (2009) “Sequential treatment of drug-resistant tumors with targeted minicells containing siRNA or a cytotoxic drug”, Nat Biotehcnol. 27(7):643-51.
[0236] 29. Malech et al. (1997) “Prolonged production of NADPH oxidase-corrected granulocyes after gene therapy of chronic granulomatous disease”, PNAS 94(22):12133-38.
[0237] 30. Miller et al. (1991) “Construction and properties of retrovirus packaging cells based on gibbon ape leukemia virus”, J Virol. 65(5):2220-24.
[0238] 31. Miller (1992) “Human gene therapy comes of age”, Nature 357:455-60.
[0239] 32. Mitani and Caskey (1993) “Delivering therapeutic genes—matching approach and application”, Trends in Biotechnology 11(5):162-66.
[0240] 33. Nabel and Felgner (1993) “Direct gene transfer for immunotherapy and immunization”, Trends in Biotechnology 11(5):211-15.
[0241] 34. Nishimasu et al. (2018) “Engineered CRISPR-Cas9 nuclease with expanded targeting space”, Science 361(6408):1259-1262.
[0242] 35. Remy et al. (1994) “Gene Transfer with a Series of Lipphilic DNA-Binding Molecules”, Bioconjugate Chem. 5(6):647-54.
[0243] 36. Sentmanat et al. (2018) “A Survey of Validation Strategies for CRISPR-Cas9 Editing”, Scientific Reports 8:888, doi:10.1038/s41598-018-19441-8.
[0244] 37. Sommerfelt et al. (1990) “Localization of the receptor gene for type D simian retroviruses on human chromosome 19”, J. Virol. 64(12):6214-20.
[0245] 38. Van Brunt (1988) “Molecular framing: transgenic animals as bioactors” Biotechnology 6:1149-54.
[0246] 39. Vigne et al. (1995) “Third-generation adenovectors for gene therapy”, Restorative Neurology and Neuroscience 8(1,2): 35-36.
[0247] 40. Walton et al. (2020) “Unconstrained genome targeting with near-PAMless engineered CRISPR-Cas9 variants”, Science 368(6488):290-296.
[0248] 41. Weissman and Kariko (2015) “mRNA:Fulfilling the promise of gene therapy”, Molecular Therapy (9):1416-7.
[0249] 42. Wilson et al. (1989) “Formation of infectious hybrid virion with gibbon ape leukemia virus and human T-cell leukemia virus retroviral envelope glycoproteins and the gag and pol proteins of Moloney murine leukemia virus”, J. Virol. 63:2374-78.
[0250] 43. Yu et al. (1994) “Progress towards gene therapy for HIV infection”, Gene Ther. 1(1):13-26.
[0251] 44. Zetsche et al. (2015) “Cpf1 is a single RNA-guided endonuclease of a class 2 CRIPSR-Cas system” Cell 163(3):759-71.
[0252] 45. Zuris et al. (2015) “Cationic lipid-mediated delivery of proteins enables efficient protein based genome editing in vitro and in vivo” Nat Biotechnol. 33(1):73-80.

The application's sequence listing, which the Patent Office published only in electronic form, follows.

SEQUENCE LISTING (103613 sequences)

SEQ ID NO: 1 - RNA, 20 nt, Artificial Sequence
  LRRK2 RNA guide
acagcuccccggggacgagc

SEQ ID NO: 2 - RNA, 20 nt, Artificial Sequence
  LRRK2 RNA guide
agcuccccggggacgagcuc

SEQ ID NO: 3 - RNA, 20 nt, Artificial Sequence
  LRRK2 RNA guide
agcucguccccggggagcug

SEQ ID NO: 4 - RNA, 20 nt, Artificial Sequence
  LRRK2 RNA guide
agcugagcucguccccgggg

SEQ ID NO: 5 - RNA, 20 nt, Artificial Sequence
  LRRK2 RNA guide
cacagcuccccggggacgag

SEQ ID NO: 6 - RNA, 20 nt, Artificial Sequence
  LRRK2 RNA guide
cagcuccccggggacgagcu

SEQ ID NO: 7 - RNA, 20 nt, Artificial Sequence
  LRRK2 RNA guide
ccacagcuccccggggacga

SEQ ID NO: 8 - RNA, 20 nt, Artificial Sequence
  LRRK2 RNA guide
ccccggggacgagcucagcu

SEQ ID NO: 9 - RNA, 20 nt, Artificial Sequence
  LRRK2 RNA guide
cccggggacgagcucagcuc

SEQ ID NO: 10 - RNA, 20 nt, Artificial Sequence
  LRRK2 RNA guide
ccggccacagcuccccgggg

SEQ ID NO: 11 - RNA, 20 nt, Artificial Sequence
  LRRK2 RNA guide
ccggggacgagcucagcuca

SEQ ID NO: 12 - RNA, 20 nt, Artificial Sequence
  LRRK2 RNA guide
cgccggccacagcuccccgg

SEQ ID NO: 13 - RNA, 20 nt, Artificial Sequence
  LRRK2 RNA guide
cggccacagcuccccgggga

SEQ ID NO: 14 - RNA, 20 nt, Artificial Sequence
  LRRK2 RNA guide
cgggcggugagcugagcucg

SEQ ID NO: 15 - RNA, 20 nt, Artificial Sequence
  LRRK2 RNA guide
cggggacgagcucagcucac

SEQ ID NO: 16 - RNA, 20 nt, Artificial Sequence
  LRRK2 RNA guide
cggugagcugagcucguccc

SEQ ID NO: 17 - RNA, 20 nt, Artificial Sequence
  LRRK2 RNA guide
cguccccggggagcuguggc

SEQ ID NO: 18 - RNA, 20 nt, Artificial Sequence
  LRRK2 RNA guide
cuccccggggacgagcucag

SEQ ID NO: 19 - RNA, 20 nt, Artificial Sequence
  LRRK2 RNA guide
cucguccccggggagcugug

SEQ ID NO: 20 - RNA, 20 nt, Artificial Sequence
  LRRK2 RNA guide
cugagcucguccccggggag

SEQ ID NO: 21 - RNA, 20 nt, Artificial Sequence
  LRRK2 RNA guide
cugcgggcggugagcugagc

SEQ ID NO: 22 - RNA, 20 nt, Artificial Sequence
  LRRK2 RNA guide
gacgagcucagcucaccgcc

SEQ ID NO: 23 - RNA, 20 nt, Artificial Sequence
  LRRK2 RNA guide
gagcucguccccggggagcu

SEQ ID NO: 24 - RNA, 20 nt, Artificial Sequence
  LRRK2 RNA guide
gagcugagcucguccccggg

SEQ ID NO: 25 - RNA, 20 nt, Artificial Sequence
  LRRK2 RNA guide
gccacagcuccccggggacg

SEQ ID NO: 26 - RNA, 20 nt, Artificial Sequence
  LRRK2 RNA guide
gcgggcggugagcugagcuc

SEQ ID NO: 27 - RNA, 20 nt, Artificial Sequence
  LRRK2 RNA guide
gcggugagcugagcucgucc

SEQ ID NO: 28 - RNA, 20 nt, Artificial Sequence
  LRRK2 RNA guide
gcuccccggggacgagcuca

SEQ ID NO: 29 - RNA, 20 nt, Artificial Sequence
  LRRK2 RNA guide
gcucguccccggggagcugu

SEQ ID NO: 30 - RNA, 20 nt, Artificial Sequence
  LRRK2 RNA guide
gcugagcucguccccgggga

SEQ ID NO: 31 - RNA, 20 nt, Artificial Sequence
  LRRK2 RNA guide
gcugcgggcggugagcugag

SEQ ID NO: 32 - RNA, 20 nt, Artificial Sequence
  LRRK2 RNA guide
ggacgagcucagcucaccgc

SEQ ID NO: 33 - RNA, 20 nt, Artificial Sequence
  LRRK2 RNA guide
ggccacagcuccccggggac

SEQ ID NO: 34 - RNA, 20 nt, Artificial Sequence
  LRRK2 RNA guide
ggcgccggccacagcucccc

SEQ ID NO: 35 - RNA, 20 nt, Artificial Sequence
  LRRK2 RNA guide
ggcggugagcugagcucguc

SEQ ID NO: 36 - RNA, 20 nt, Artificial Sequence
  LRRK2 RNA guide
gggacgagcucagcucaccg

SEQ ID NO: 37 - RNA, 20 nt, Artificial Sequence
  LRRK2 RNA guide
gggcggugagcugagcucgu

SEQ ID NO: 38 - RNA, 20 nt, Artificial Sequence
  LRRK2 RNA guide
ggggacgagcucagcucacc

SEQ ID NO: 39 - RNA, 20 nt, Artificial Sequence
  LRRK2 RNA guide
ggugagcugagcucgucccc

SEQ ID NO: 40 - RNA, 20 nt, Artificial Sequence
  LRRK2 RNA guide
guccccggggagcuguggcc

SEQ ID NO: 41 - RNA, 20 nt, Artificial Sequence
  LRRK2 RNA guide
gugagcugagcucguccccg

SEQ ID NO: 42 - RNA, 20 nt, Artificial Sequence
  LRRK2 RNA guide
uccccggggacgagcucagc

SEQ ID NO: 43 - RNA, 20 nt, Artificial Sequence
  LRRK2 RNA guide
ucguccccggggagcugugg

SEQ ID NO: 44 - RNA, 20 nt, Artificial Sequence
  LRRK2 RNA guide
ugagcucguccccggggagc

SEQ ID NO: 45 - RNA, 20 nt, Artificial Sequence
  LRRK2 RNA guide
ugagcugagcucguccccgg

SEQ ID NO: 46 - RNA, 20 nt, Artificial Sequence
  LRRK2 RNA guide
ugcgggcggugagcugagcu

SEQ ID NO: 47 - RNA, 21 nt, Artificial Sequence
  LRRK2 RNA guide
acagcuccccggggacgagcu

SEQ ID NO: 48 - RNA, 21 nt, Artificial Sequence
  LRRK2 RNA guide
agcuccccggggacgagcuca

SEQ ID NO: 49 - RNA, 21 nt, Artificial Sequence
  LRRK2 RNA guide
agcucguccccggggagcugu

SEQ ID NO: 50 - RNA, 21 nt, Artificial Sequence
  LRRK2 RNA guide
agcugagcucguccccgggga

SEQ ID NO: 51 - RNA, 21 nt, Artificial Sequence
  LRRK2 RNA guide
cacagcuccccggggacgagc

SEQ ID NO: 52 - RNA, 21 nt, Artificial Sequence
  LRRK2 RNA guide
cagcuccccggggacgagcuc

SEQ ID NO: 53 - RNA, 21 nt, Artificial Sequence
  LRRK2 RNA guide
ccacagcuccccggggacgag

SEQ ID NO: 54 - RNA, 21 nt, Artificial Sequence
  LRRK2 RNA guide
ccccggggacgagcucagcuc

SEQ ID NO: 55 - RNA, 21 nt, Artificial Sequence
  LRRK2 RNA guide
cccggggacgagcucagcuca

SEQ ID NO: 56 - RNA, 21 nt, Artificial Sequence
  LRRK2 RNA guide
ccggccacagcuccccgggga

SEQ ID NO: 57 - RNA, 21 nt, Artificial Sequence
  LRRK2 RNA guide
ccggggacgagcucagcucac

SEQ ID NO: 58 - RNA, 21 nt, Artificial Sequence
  LRRK2 RNA guide
cgccggccacagcuccccggg

SEQ ID NO: 59 - RNA, 21 nt, Artificial Sequence
  LRRK2 RNA guide
cggccacagcuccccggggac

SEQ ID NO: 60 - RNA, 21 nt, Artificial Sequence
  LRRK2 RNA guide
cgggcggugagcugagcucgu

SEQ ID NO: 61 - RNA, 21 nt, Artificial Sequence
  LRRK2 RNA guide
cggggacgagcucagcucacc

SEQ ID NO: 62 - RNA, 21 nt, Artificial Sequence
  LRRK2 RNA guide
cggugagcugagcucgucccc

SEQ ID NO: 63 - RNA, 21 nt, Artificial Sequence
  LRRK2 RNA guide
cguccccggggagcuguggcc

SEQ ID NO: 64 - RNA, 21 nt, Artificial Sequence
  LRRK2 RNA guide
cuccccggggacgagcucagc

SEQ ID NO: 65 - RNA, 21 nt, Artificial Sequence
  LRRK2 RNA guide
cucguccccggggagcugugg

SEQ ID NO: 66 - RNA, 21 nt, Artificial Sequence
  LRRK2 RNA guide
cugagcucguccccggggagc

SEQ ID NO: 67 - RNA, 21 nt, Artificial Sequence
  LRRK2 RNA guide
cugcgggcggugagcugagcu

SEQ ID NO: 68 - RNA, 21 nt, Artificial Sequence
  LRRK2 RNA guide
gacgagcucagcucaccgccc

SEQ ID NO: 69 - RNA, 21 nt, Artificial Sequence
  LRRK2 RNA guide
gagcucguccccggggagcug

SEQ ID NO: 70 - RNA, 21 nt, Artificial Sequence
  LRRK2 RNA guide
gagcugagcucguccccgggg

SEQ ID NO: 71 - RNA, 21 nt, Artificial Sequence
  LRRK2 RNA guide
gccacagcuccccggggacga

SEQ ID NO: 72 - RNA, 21 nt, Artificial Sequence
  LRRK2 RNA guide
gccggccacagcuccccgggg

SEQ ID NO: 73 - RNA, 21 nt, Artificial Sequence
  LRRK2 RNA guide
gcgccggccacagcuccccgg

SEQ ID NO: 74 - RNA, 21 nt, Artificial Sequence
  LRRK2 RNA guide
gcgggcggugagcugagcucg

SEQ ID NO: 75 - RNA, 21 nt, Artificial Sequence
  LRRK2 RNA guide
gcggugagcugagcucguccc

SEQ ID NO: 76 - RNA, 21 nt, Artificial Sequence
  LRRK2 RNA guide
gcuccccggggacgagcucag

SEQ ID NO: 77 - RNA, 21 nt, Artificial Sequence
  LRRK2 RNA guide
gcucguccccggggagcugug

SEQ ID NO: 78 - RNA, 21 nt, Artificial Sequence
  LRRK2 RNA guide
gcugagcucguccccggggag

SEQ ID NO: 79 - RNA, 21 nt, Artificial Sequence
  LRRK2 RNA guide
gcugcgggcggugagcugagc

SEQ ID NO: 80 - RNA, 21 nt, Artificial Sequence
  LRRK2 RNA guide
ggacgagcucagcucaccgcc

SEQ ID NO: 81 - RNA, 21 nt, Artificial Sequence
  LRRK2 RNA guide
ggccacagcuccccggggacg

SEQ ID NO: 82 - RNA, 21 nt, Artificial Sequence
  LRRK2 RNA guide
ggcgccggccacagcuccccg

SEQ ID NO: 83 - RNA, 21 nt, Artificial Sequence
  LRRK2 RNA guide
ggcggugagcugagcucgucc

SEQ ID NO: 84 - RNA, 21 nt, Artificial Sequence
  LRRK2 RNA guide
ggcugcgggcggugagcugag

SEQ ID NO: 85 - RNA, 21 nt, Artificial Sequence
  LRRK2 RNA guide
gggacgagcucagcucaccgc

SEQ ID NO: 86 - RNA, 21 nt, Artificial Sequence
  LRRK2 RNA guide
gggcgccggccacagcucccc

SEQ ID NO: 87 - RNA, 21 nt, Artificial Sequence
  LRRK2 RNA guide
gggcggugagcugagcucguc

SEQ ID NO: 88 - RNA, 21 nt, Artificial Sequence
  LRRK2 RNA guide
ggggacgagcucagcucaccg

SEQ ID NO: 89 - RNA, 21 nt, Artificial Sequence
  LRRK2 RNA guide
ggugagcugagcucguccccg

SEQ ID NO: 90 - RNA, 21 nt, Artificial Sequence
  LRRK2 RNA guide
guccccggggagcuguggccg

SEQ ID NO: 91 - RNA, 21 nt, Artificial Sequence
  LRRK2 RNA guide
gugagcugagcucguccccgg

SEQ ID NO: 92 - RNA, 21 nt, Artificial Sequence
  LRRK2 RNA guide
uccccggggacgagcucagcu

SEQ ID NO: 93 - RNA, 21 nt, Artificial Sequence
  LRRK2 RNA guide
ucguccccggggagcuguggc

SEQ ID NO: 94 - RNA, 21 nt, Artificial Sequence
  LRRK2 RNA guide
ugagcucguccccggggagcu

SEQ ID NO: 95 - RNA, 21 nt, Artificial Sequence
  LRRK2 RNA guide
ugagcugagcucguccccggg

SEQ ID NO: 96 - RNA, 21 nt, Artificial Sequence
  LRRK2 RNA guide
ugcgggcggugagcugagcuc

SEQ ID NO: 97 - RNA, 22 nt, Artificial Sequence
  LRRK2 RNA guide
acagcuccccggggacgagcuc

SEQ ID NO: 98 - RNA, 22 nt, Artificial Sequence
  LRRK2 RNA guide
agcuccccggggacgagcucag

SEQ ID NO: 99 - RNA, 22 nt, Artificial Sequence
  LRRK2 RNA guide
agcucguccccggggagcugug

SEQ ID NO: 100 - RNA, 22 nt, Artificial Sequence
  LRRK2 RNA guide
agcugagcucguccccggggag

SEQ ID NO: 101 - RNA, 22 nt, Artificial Sequence
  LRRK2 RNA guide
cacagcuccccggggacgagcu

SEQ ID NO: 102 - RNA, 22 nt, Artificial Sequence
  LRRK2 RNA guide
cagcuccccggggacgagcuca

SEQ ID NO: 103 - RNA, 22 nt, Artificial Sequence
  LRRK2 RNA guide
ccacagcuccccggggacgagc

SEQ ID NO: 104 - RNA, 22 nt, Artificial Sequence
  LRRK2 RNA guide
ccccggggacgagcucagcuca

SEQ ID NO: 105 - RNA, 22 nt, Artificial Sequence
  LRRK2 RNA guide
cccggggacgagcucagcucac

SEQ ID NO: 106 - RNA, 22 nt, Artificial Sequence
  LRRK2 RNA guide
ccggccacagcuccccggggac

SEQ ID NO: 107 - RNA, 22 nt, Artificial Sequence
  LRRK2 RNA guide
ccggggacgagcucagcucacc

SEQ ID NO: 108 - RNA, 22 nt, Artificial Sequence
  LRRK2 RNA guide
cgccggccacagcuccccgggg

SEQ ID NO: 109 - RNA, 22 nt, Artificial Sequence
  LRRK2 RNA guide
cggccacagcuccccggggacg

SEQ ID NO: 110 - RNA, 22 nt, Artificial Sequence
  LRRK2 RNA guide
cgggcggugagcugagcucguc

SEQ ID NO: 111 - RNA, 22 nt, Artificial Sequence
  LRRK2 RNA guide
cggggacgagcucagcucaccg

SEQ ID NO: 112 - RNA, 22 nt, Artificial Sequence
  LRRK2 RNA guide
cggugagcugagcucguccccg

SEQ ID NO: 113 - RNA, 22 nt, Artificial Sequence
  LRRK2 RNA guide
cguccccggggagcuguggccg

SEQ ID NO: 114 - RNA, 22 nt, Artificial Sequence
  LRRK2 RNA guide
cuccccggggacgagcucagcu

SEQ ID NO: 115 - RNA, 22 nt, Artificial Sequence
  LRRK2 RNA guide
cucguccccggggagcuguggc

SEQ ID NO: 116 - RNA, 22 nt, Artificial Sequence
  LRRK2 RNA guide
cugagcucguccccggggagcu

SEQ ID NO: 117 - RNA, 22 nt, Artificial Sequence
  LRRK2 RNA guide
cugcgggcggugagcugagcuc

SEQ ID NO: 118 - RNA, 22 nt, Artificial Sequence
  LRRK2 RNA guide
gacgagcucagcucaccgcccg

SEQ ID NO: 119 - RNA, 22 nt, Artificial Sequence
  LRRK2 RNA guide
gagcucguccccggggagcugu

SEQ ID NO: 120 - RNA, 22 nt, Artificial Sequence
  LRRK2 RNA guide
gagcugagcucguccccgggga

SEQ ID NO: 121 - RNA, 22 nt, Artificial Sequence
  LRRK2 RNA guide
gccacagcuccccggggacgag

SEQ ID NO: 122 - RNA, 22 nt, Artificial Sequence
  LRRK2 RNA guide
gccggccacagcuccccgggga

SEQ ID NO: 123 - RNA, 22 nt, Artificial Sequence
  LRRK2 RNA guide
gcgccggccacagcuccccggg

SEQ ID NO: 124 - RNA, 22 nt, Artificial Sequence
  LRRK2 RNA guide
gcgggcggugagcugagcucgu

SEQ ID NO: 125 - RNA, 22 nt, Artificial Sequence
  LRRK2 RNA guide
gcggugagcugagcucgucccc

SEQ ID NO: 126 - RNA, 22 nt, Artificial Sequence
  LRRK2 RNA guide
gcuccccggggacgagcucagc

SEQ ID NO: 127 - RNA, 22 nt, Artificial Sequence
  LRRK2 RNA guide
gcucguccccggggagcugugg

SEQ ID NO: 128 - RNA, 22 nt, Artificial Sequence
  LRRK2 RNA guide
gcugagcucguccccggggagc

SEQ ID NO: 129 - RNA, 22 nt, Artificial Sequence
  LRRK2 RNA guide
gcugcgggcggugagcugagcu

SEQ ID NO: 130 - RNA, 22 nt, Artificial Sequence
  LRRK2 RNA guide
ggacgagcucagcucaccgccc

SEQ ID NO: 131 - RNA, 22 nt, Artificial Sequence
  LRRK2 RNA guide
ggccacagcuccccggggacga

SEQ ID NO: 132 - RNA, 22 nt, Artificial Sequence
  LRRK2 RNA guide
ggcgccggccacagcuccccgg

SEQ ID NO: 133 - RNA, 22 nt, Artificial Sequence
  LRRK2 RNA guide
ggcggugagcugagcucguccc

SEQ ID NO: 134 - RNA, 22 nt, Artificial Sequence
  LRRK2 RNA guide
ggcugcgggcggugagcugagc

SEQ ID NO: 135 - RNA, 22 nt, Artificial Sequence
  LRRK2 RNA guide
gggacgagcucagcucaccgcc

SEQ ID NO: 136 - RNA, 22 nt, Artificial Sequence
  LRRK2 RNA guide
gggcgccggccacagcuccccg

SEQ ID NO: 137 - RNA, 22 nt, Artificial Sequence
  LRRK2 RNA guide
gggcggugagcugagcucgucc

SEQ ID NO: 138 - RNA, 22 nt, Artificial Sequence
  LRRK2 RNA guide
ggggacgagcucagcucaccgc

SEQ ID NO: 139 - RNA, 22 nt, Artificial Sequence
  LRRK2 RNA guide
ggggcgccggccacagcucccc

SEQ ID NO: 140 - RNA, 22 nt, Artificial Sequence
  LRRK2 RNA guide
ggugagcugagcucguccccgg

SEQ ID NO: 141 - RNA, 22 nt, Artificial Sequence
  LRRK2 RNA guide
guccccggggagcuguggccgg

SEQ ID NO: 142 - RNA, 22 nt, Artificial Sequence
  LRRK2 RNA guide
gugagcugagcucguccccggg

SEQ ID NO: 143 - RNA, 22 nt, Artificial Sequence
  LRRK2 RNA guide
uccccggggacgagcucagcuc

SEQ ID NO: 144 - RNA, 22 nt, Artificial Sequence
  LRRK2 RNA guide
ucguccccggggagcuguggcc

SEQ ID NO: 145 - RNA, 22 nt, Artificial Sequence
  LRRK2 RNA guide
ugagcucguccccggggagcug

SEQ ID NO: 146 - RNA, 22 nt, Artificial Sequence
  LRRK2 RNA guide
ugagcugagcucguccccgggg

SEQ ID NO: 147 - RNA, 22 nt, Artificial Sequence
  LRRK2 RNA guide
ugcgggcggugagcugagcucg

SEQ ID NO: 148 - RNA, 22 nt, Artificial Sequence
  LRRK2 RNA guide
uggcugcgggcggugagcugag

SEQ ID NO: 149 - RNA, 20 nt, Artificial Sequence
  LRRK2 RNA guide
aaccggcaggggcgccgucc

SEQ ID NO: 150 - RNA, 20 nt, Artificial Sequence
  LRRK2 RNA guide
accggcaggggcgccgucca

SEQ ID NO: 151 - RNA, 20 nt, Artificial Sequence
  LRRK2 RNA guide
agcucgcccccggggagcug

SEQ ID NO: 152 - RNA, 20 nt, Artificial Sequence
  LRRK2 RNA guide
agcuguggacggcgccccug

SEQ ID NO: 153 - RNA, 20 nt, Artificial Sequence
  LRRK2 RNA guide
agggaaccggcaggggcgcc

SEQ ID NO: 154 - RNA, 20 nt, Artificial Sequence
  LRRK2 RNA guide
aggggcgccguccacagcuc

SEQ ID NO: 155 - RNA, 20 nt, Artificial Sequence
  LRRK2 RNA guide
cagggaaccggcaggggcgc

SEQ ID NO: 156 - RNA, 20 nt, Artificial Sequence
  LRRK2 RNA guide
caggggcgccguccacagcu

SEQ ID NO: 157 - RNA, 20 nt, Artificial Sequence
  LRRK2 RNA guide
cccccggggagcuguggacg

SEQ ID NO: 158 - RNA, 20 nt, Artificial Sequence
  LRRK2 RNA guide
ccccggggagcuguggacgg

SEQ ID NO: 159 - RNA, 20 nt, Artificial Sequence
  LRRK2 RNA guide
cccggggagcuguggacggc

SEQ ID NO: 160 - RNA, 20 nt, Artificial Sequence
  LRRK2 RNA guide
ccggcaggggcgccguccac

SEQ ID NO: 161 - RNA, 20 nt, Artificial Sequence
  LRRK2 RNA guide
ccggggagcuguggacggcg

SEQ ID NO: 162 - RNA, 20 nt, Artificial Sequence
  LRRK2 RNA guide
ccguccacagcuccccgggg

SEQ ID NO: 163 - RNA, 20 nt, Artificial Sequence
  LRRK2 RNA guide
cgcccccggggagcugugga

SEQ ID NO: 164 - RNA, 20 nt, Artificial Sequence
  LRRK2 RNA guide
cgccguccacagcuccccgg

SEQ ID NO: 165 - RNA, 20 nt, Artificial Sequence
  LRRK2 RNA guide
cggcaggggcgccguccaca

SEQ ID NO: 166 - RNA, 20 nt, Artificial Sequence
  LRRK2 RNA guide
cggggagcuguggacggcgc

SEQ ID NO: 167 - RNA, 20 nt, Artificial Sequence
  LRRK2 RNA guide
cguccacagcuccccggggg

SEQ ID NO: 168 - RNA, 20 nt, Artificial Sequence
  LRRK2 RNA guide
cucagggaaccggcaggggc

SEQ ID NO: 169 - RNA, 20 nt, Artificial Sequence
  LRRK2 RNA guide
cucgcccccggggagcugug

SEQ ID NO: 170 - RNA, 20 nt, Artificial Sequence
  LRRK2 RNA guide
cuguggacggcgccccugcc

SEQ ID NO: 171 - RNA, 20 nt, Artificial Sequence
  LRRK2 RNA guide
gaaccggcaggggcgccguc

SEQ ID NO: 172 - RNA, 20 nt, Artificial Sequence
  LRRK2 RNA guide
gacggcgccccugccgguuc

SEQ ID NO: 173 - RNA, 20 nt, Artificial Sequence
  LRRK2 RNA guide
gagcucgcccccggggagcu

SEQ ID NO: 174 - RNA, 20 nt, Artificial Sequence
  LRRK2 RNA guide
gagcuguggacggcgccccu

SEQ ID NO: 175 - RNA, 20 nt, Artificial Sequence
  LRRK2 RNA guide
gcaggggcgccguccacagc

SEQ ID NO: 176 - RNA, 20 nt, Artificial Sequence
  LRRK2 RNA guide
gcccccggggagcuguggac

SEQ ID NO: 177 - RNA, 20 nt, Artificial Sequence
  LRRK2 RNA guide
gccguccacagcuccccggg

SEQ ID NO: 178 - RNA, 20 nt, Artificial Sequence
  LRRK2 RNA guide
gcgccguccacagcuccccg

SEQ ID NO: 179 - RNA, 20 nt, Artificial Sequence
  LRRK2 RNA guide
gcucgcccccggggagcugu

SEQ ID NO: 180 - RNA, 20 nt, Artificial Sequence
  LRRK2 RNA guide
gcuguggacggcgccccugc

SEQ ID NO: 181 - RNA, 20 nt, Artificial Sequence
  LRRK2 RNA guide
ggaaccggcaggggcgccgu

SEQ ID NO: 182 - RNA, 20 nt, Artificial Sequence
  LRRK2 RNA guide
ggacggcgccccugccgguu

SEQ ID NO: 183 - RNA, 20 nt, Artificial Sequence
  LRRK2 RNA guide
ggagcuguggacggcgcccc

SEQ ID NO: 184 - RNA, 20 nt, Artificial Sequence
  LRRK2 RNA guide
ggcaggggcgccguccacag

SEQ ID NO: 185 - RNA, 20 nt, Artificial Sequence
  LRRK2 RNA guide
ggcgccguccacagcucccc

SEQ ID NO: 186 - RNA, 20 nt, Artificial Sequence
  LRRK2 RNA guide
gggaaccggcaggggcgccg

SEQ ID NO: 187 - RNA, 20 nt, Artificial Sequence
  LRRK2 RNA guide
gggagcuguggacggcgccc

SEQ ID NO: 188 - RNA, 20 nt, Artificial Sequence
  LRRK2 RNA guide
gggcgccguccacagcuccc

SEQ ID NO: 189 - RNA, 20 nt, Artificial Sequence
  LRRK2 RNA guide
ggggagcuguggacggcgcc

SEQ ID NO: 190 - RNA, 20 nt, Artificial Sequence
  LRRK2 RNA guide
ggggcgccguccacagcucc

SEQ ID NO: 191 - RNA, 20 nt, Artificial Sequence
  LRRK2 RNA guide
guccacagcuccccgggggc

SEQ ID NO: 192 - RNA, 20 nt, Artificial Sequence
  LRRK2 RNA guide
guggacggcgccccugccgg

SEQ ID NO: 193 - RNA, 20 nt, Artificial Sequence
  LRRK2 RNA guide
ucagggaaccggcaggggcg

SEQ ID NO: 194 - RNA, 20 nt, Artificial Sequence
  LRRK2 RNA guide
ucgcccccggggagcugugg

SEQ ID NO: 195 - RNA, 20 nt, Artificial Sequence
  LRRK2 RNA guide
uggacggcgccccugccggu

SEQ ID NO: 196 - RNA, 20 nt, Artificial Sequence
  LRRK2 RNA guide
uguggacggcgccccugccg

SEQ ID NO: 197 - RNA, 21 nt, Artificial Sequence
  LRRK2 RNA guide
aaccggcaggggcgccgucca

SEQ ID NO: 198 - RNA, 21 nt, Artificial Sequence
  LRRK2 RNA guide
accggcaggggcgccguccac

SEQ ID NO: 199 - RNA, 21 nt, Artificial Sequence
  LRRK2 RNA guide
agcucgcccccggggagcugu

SEQ ID NO: 200 - RNA, 21 nt, Artificial Sequence
  LRRK2 RNA guide
agcuguggacggcgccccugc

SEQ ID NO: 201 - RNA, 21 nt, Artificial Sequence
  LRRK2 RNA guide
agggaaccggcaggggcgccg

SEQ ID NO: 202 - RNA, 21 nt, Artificial Sequence
  LRRK2 RNA guide
aggggcgccguccacagcucc

SEQ ID NO: 203 - RNA, 21 nt, Artificial Sequence
  LRRK2 RNA guide
cagggaaccggcaggggcgcc

SEQ ID NO: 204 - RNA, 21 nt, Artificial Sequence
  LRRK2 RNA guide
caggggcgccguccacagcuc

SEQ ID NO: 205 - RNA, 21 nt, Artificial Sequence
  LRRK2 RNA guide
cccccggggagcuguggacgg

SEQ ID NO: 206 - RNA, 21 nt, Artificial Sequence
  LRRK2 RNA guide
ccccggggagcuguggacggc

SEQ ID NO: 207 - RNA, 21 nt, Artificial Sequence
  LRRK2 RNA guide
cccggggagcuguggacggcg

SEQ ID NO: 208 - RNA, 21 nt, Artificial Sequence
  LRRK2 RNA guide
ccggcaggggcgccguccaca

SEQ ID NO: 209 - RNA, 21 nt, Artificial Sequence
  LRRK2 RNA guide
ccggggagcuguggacggcgc

SEQ ID NO: 210 - RNA, 21 nt, Artificial Sequence
  LRRK2 RNA guide
ccguccacagcuccccggggg

SEQ ID NO: 211 - RNA, 21 nt, Artificial Sequence
  LRRK2 RNA guide
cgcccccggggagcuguggac

SEQ ID NO: 212 - RNA, 21 nt, Artificial Sequence
  LRRK2 RNA guide
cgccguccacagcuccccggg

SEQ ID NO: 213 - RNA, 21 nt, Artificial Sequence
  LRRK2 RNA guide
cggcaggggcgccguccacag

SEQ ID NO: 214 - RNA, 21 nt, Artificial Sequence
  LRRK2 RNA guide
cggggagcuguggacggcgcc

SEQ ID NO: 215 - RNA, 21 nt, Artificial Sequence
  LRRK2 RNA guide
cguccacagcuccccgggggc

SEQ ID NO: 216 - RNA, 21 nt, Artificial Sequence
  LRRK2 RNA guide
cucagggaaccggcaggggcg

SEQ ID NO: 217 - RNA, 21 nt, Artificial Sequence
  LRRK2 RNA guide
cucgcccccggggagcugugg

SEQ ID NO: 218 - RNA, 21 nt, Artificial Sequence
  LRRK2 RNA guide
cuguggacggcgccccugccg

SEQ ID NO: 219 - RNA, 21 nt, Artificial Sequence
  LRRK2 RNA guide
gaaccggcaggggcgccgucc

SEQ ID NO: 220 - RNA, 21 nt, Artificial Sequence
  LRRK2 RNA guide
gacggcgccccugccgguucc

SEQ ID NO: 221 - RNA, 21 nt, Artificial Sequence
  LRRK2 RNA guide
gagcucgcccccggggagcug

SEQ ID NO: 222 - RNA, 21 nt, Artificial Sequence
  LRRK2 RNA guide
gagcuguggacggcgccccug

SEQ ID NO: 223 - RNA, 21 nt, Artificial Sequence
  LRRK2 RNA guide
gcaggggcgccguccacagcu

SEQ ID NO: 224 - RNA, 21 nt, Artificial Sequence
  LRRK2 RNA guide
gcccccggggagcuguggacg

SEQ ID NO: 225 - RNA, 21 nt, Artificial Sequence
  LRRK2 RNA guide
gccguccacagcuccccgggg

SEQ ID NO: 226 - RNA, 21 nt, Artificial Sequence
  LRRK2 RNA guide
gcgccguccacagcuccccgg

SEQ ID NO: 227 - RNA, 21 nt, Artificial Sequence
  LRRK2 RNA guide
gcucagggaaccggcaggggc

SEQ ID NO: 228 - RNA, 21 nt, Artificial Sequence
  LRRK2 RNA guide
gcucgcccccggggagcugug

SEQ ID NO: 229 - RNA, 21 nt, Artificial Sequence
  LRRK2 RNA guide
gcuguggacggcgccccugcc

SEQ ID NO: 230 - RNA, 21 nt, Artificial Sequence
  LRRK2 RNA guide
ggaaccggcaggggcgccguc

SEQ ID NO: 231 - RNA, 21 nt, Artificial Sequence
  LRRK2 RNA guide
ggacggcgccccugccgguuc

SEQ ID NO: 232 - RNA, 21 nt, Artificial Sequence
  LRRK2 RNA guide
ggagcuguggacggcgccccu

SEQ ID NO: 233 - RNA, 21 nt, Artificial Sequence
  LRRK2 RNA guide
ggcaggggcgccguccacagc

SEQ ID NO: 234 - RNA, 21 nt, Artificial Sequence
  LRRK2 RNA guide
ggcgccguccacagcuccccg

SEQ ID NO: 235 - RNA, 21 nt, Artificial Sequence
  LRRK2 RNA guide
gggaaccggcaggggcgccgu

SEQ ID NO: 236 - RNA, 21 nt, Artificial Sequence
  LRRK2 RNA guide
gggagcuguggacggcgcccc

SEQ ID NO: 237 - RNA, 21 nt, Artificial Sequence
  LRRK2 RNA guide
gggcgccguccacagcucccc

SEQ ID NO: 238 - RNA, 21 nt, Artificial Sequence
  LRRK2 RNA guide
ggggagcuguggacggcgccc

SEQ ID NO: 239 - RNA, 21 nt, Artificial Sequence
  LRRK2 RNA guide
ggggcgccguccacagcuccc

SEQ ID NO: 240 - RNA, 21 nt, Artificial Sequence
  LRRK2 RNA guide
guccacagcuccccgggggcg

SEQ ID NO: 241 - RNA, 21 nt, Artificial Sequence
  LRRK2 RNA guide
guggacggcgccccugccggu

SEQ ID NO: 242 - RNA, 21 nt, Artificial Sequence
  LRRK2 RNA guide
ucagggaaccggcaggggcgc

SEQ ID NO: 243 - RNA, 21 nt, Artificial Sequence
  LRRK2 RNA guide
ucgcccccggggagcugugga

SEQ ID NO: 244 - RNA, 21 nt, Artificial Sequence
  LRRK2 RNA guide
ugagcucgcccccggggagcu

SEQ ID NO: 245 - RNA, 21 nt, Artificial Sequence
  LRRK2 RNA guide
uggacggcgccccugccgguu

SEQ ID NO: 246 - RNA, 21 nt, Artificial Sequence
  LRRK2 RNA guide
uguggacggcgccccugccgg

SEQ ID NO: 247 - RNA, 22 nt, Artificial Sequence
  LRRK2 RNA guide
aaccggcaggggcgccguccac

SEQ ID NO: 248 - RNA, 22 nt, Artificial Sequence
  LRRK2 RNA guide
accggcaggggcgccguccaca

SEQ ID NO: 249 - RNA, 22 nt, Artificial Sequence
  LRRK2 RNA guide
agcucgcccccggggagcugug

SEQ ID NO: 250 - RNA, 22 nt, Artificial Sequence
  LRRK2 RNA guide
agcuguggacggcgccccugcc

SEQ ID NO: 251 - RNA, 22 nt, Artificial Sequence
  LRRK2 RNA guide
agggaaccggcaggggcgccgu

SEQ ID NO: 252 - RNA, 22 nt, Artificial Sequence
  LRRK2 RNA guide
aggggcgccguccacagcuccc

SEQ ID NO: 253 - RNA, 22 nt, Artificial Sequence
  LRRK2 RNA guide
cagggaaccggcaggggcgccg

SEQ ID NO: 254 - RNA, 22 nt, Artificial Sequence
  LRRK2 RNA guide
caggggcgccguccacagcucc

SEQ ID NO: 255 - RNA, 22 nt, Artificial Sequence
  LRRK2 RNA guide
cccccggggagcuguggacggc

SEQ ID NO: 256 - RNA, 22 nt, Artificial Sequence
  LRRK2 RNA guide
ccccggggagcuguggacggcg

SEQ ID NO: 257 - RNA, 22 nt, Artificial Sequence
  LRRK2 RNA guide
cccggggagcuguggacggcgc

SEQ ID NO: 258 - RNA, 22 nt, Artificial Sequence
  LRRK2 RNA guide
ccggcaggggcgccguccacag

SEQ ID NO: 259 - RNA, 22 nt, Artificial Sequence
  LRRK2 RNA guide
ccggggagcuguggacggcgcc

SEQ ID NO: 260 - RNA, 22 nt, Artificial Sequence
  LRRK2 RNA guide
ccguccacagcuccccgggggc

SEQ ID NO: 261 - RNA, 22 nt, Artificial Sequence
  LRRK2 RNA guide
cgcccccggggagcuguggacg

SEQ ID NO: 262 - RNA, 22 nt, Artificial Sequence
  LRRK2 RNA guide
cgccguccacagcuccccgggg

SEQ ID NO: 263 - RNA, 22 nt, Artificial Sequence
  LRRK2 RNA guide
cggcaggggcgccguccacagc

SEQ ID NO: 264 - RNA, 22 nt, Artificial Sequence
  LRRK2 RNA guide
cggggagcuguggacggcgccc

SEQ ID NO: 265 - RNA, 22 nt, Artificial Sequence
  LRRK2 RNA guide
cguccacagcuccccgggggcg

SEQ ID NO: 266 - RNA, 22 nt, Artificial Sequence
  LRRK2 RNA guide
cucagggaaccggcaggggcgc

SEQ ID NO: 267 - RNA, 22 nt, Artificial Sequence
  LRRK2 RNA guide
cucgcccccggggagcugugga

SEQ ID NO: 268 - RNA, 22 nt, Artificial Sequence
  LRRK2 RNA guide
cugagcucgcccccggggagcu

SEQ ID NO: 269 - RNA, 22 nt, Artificial Sequence
  LRRK2 RNA guide
cuguggacggcgccccugccgg

SEQ ID NO: 270 - RNA, 22 nt, Artificial Sequence
  LRRK2 RNA guide
gaaccggcaggggcgccgucca

SEQ ID NO: 271 - RNA, 22 nt, Artificial Sequence
  LRRK2 RNA guide
gacggcgccccugccgguuccc

SEQ ID NO: 272 - RNA, 22 nt, Artificial Sequence
  LRRK2 RNA guide
gagcucgcccccggggagcugu

SEQ ID NO: 273 - RNA, 22 nt, Artificial Sequence
  LRRK2 RNA guide
gagcuguggacggcgccccugc

SEQ ID NO: 274 - RNA, 22 nt, Artificial Sequence
  LRRK2 RNA guide
gcaggggcgccguccacagcuc

SEQ ID NO: 275 - RNA, 22 nt, Artificial Sequence
  LRRK2 RNA guide
gcccccggggagcuguggacgg

SEQ ID NO: 276 - RNA, 22 nt, Artificial Sequence
  LRRK2 RNA guide
gccguccacagcuccccggggg

SEQ ID NO: 277 - RNA, 22 nt, Artificial Sequence
  LRRK2 RNA guide
gcgccguccacagcuccccggg

SEQ ID NO: 278 - RNA, 22 nt, Artificial Sequence
  LRRK2 RNA guide
gcucagggaaccggcaggggcg

SEQ ID NO: 279 - RNA, 22 nt, Artificial Sequence
  LRRK2 RNA guide
gcucgcccccggggagcugugg

SEQ ID NO: 280 - RNA, 22 nt, Artificial Sequence
  LRRK2 RNA guide
gcuguggacggcgccccugccg

SEQ ID NO: 281 - RNA, 22 nt, Artificial Sequence
  LRRK2 RNA guide
ggaaccggcaggggcgccgucc

SEQ ID NO: 282 - RNA, 22 nt, Artificial Sequence
  LRRK2 RNA guide
ggacggcgccccugccgguucc

SEQ ID NO: 283 - RNA, 22 nt, Artificial Sequence
  LRRK2 RNA guide
ggagcuguggacggcgccccug

SEQ ID NO: 284 - RNA, 22 nt, Artificial Sequence
  LRRK2 RNA guide
ggcaggggcgccguccacagcu

SEQ ID NO: 285 - RNA, 22 nt, Artificial Sequence
  LRRK2 RNA guide
ggcgccguccacagcuccccgg

SEQ ID NO: 286 - RNA, 22 nt, Artificial Sequence
  LRRK2 RNA guide
gggaaccggcaggggcgccguc

SEQ ID NO: 287 - RNA, 22 nt, Artificial Sequence
  LRRK2 RNA guide
gggagcuguggacggcgccccu

SEQ ID NO: 288 - RNA, 22 nt, Artificial Sequence
  LRRK2 RNA guide
gggcgccguccacagcuccccg

SEQ ID NO: 289 - RNA, 22 nt, Artificial Sequence
  LRRK2 RNA guide
ggggagcuguggacggcgcccc

SEQ ID NO: 290 - RNA, 22 nt, Artificial Sequence
  LRRK2 RNA guide
ggggcgccguccacagcucccc

SEQ ID NO: 291 - RNA, 22 nt, Artificial Sequence
  LRRK2 RNA guide
guccacagcuccccgggggcga

SEQ ID NO: 292 - RNA, 22 nt, Artificial Sequence
  LRRK2 RNA guide
guggacggcgccccugccgguu

SEQ ID NO: 293 - RNA, 22 nt, Artificial Sequence
  LRRK2 RNA guide
ucagggaaccggcaggggcgcc

SEQ ID NO: 294 - RNA, 22 nt, Artificial Sequence
  LRRK2 RNA guide
ucgcccccggggagcuguggac

SEQ ID NO: 295 - RNA, 22 nt, Artificial Sequence
  LRRK2 RNA guide
ugagcucgcccccggggagcug

SEQ ID NO: 296 - RNA, 22 nt, Artificial Sequence
  LRRK2 RNA guide
ugcucagggaaccggcaggggc

SEQ ID NO: 297 - RNA, 22 nt, Artificial Sequence
  LRRK2 RNA guide
uggacggcgccccugccgguuc

SEQ ID NO: 298 - RNA, 22 nt, Artificial Sequence
  LRRK2 RNA guide
uguggacggcgccccugccggu

SEQ ID NO: 299 - RNA, 20 nt, Artificial Sequence
  LRRK2 RNA guide
aacguucgcugcucagggaa

SEQ ID NO: 300 - RNA, 20 nt, Artificial Sequence
  LRRK2 RNA guide
acguucgcugcucagggaac

SEQ ID NO: 301 - RNA, 20 nt, Artificial Sequence
  LRRK2 RNA guide
agcagcgaacguucaugcug

SEQ ID NO: 302 - RNA, 20 nt, Artificial Sequence
  LRRK2 RNA guide
agcaugaacguucgcugcuc

SEQ ID NO: 303 - RNA, 20 nt, Artificial Sequence
  LRRK2 RNA guide
agcgaacguucaugcuggga

SEQ ID NO: 304 - RNA, 20 nt, Artificial Sequence
  LRRK2 RNA guide
augaacguucgcugcucagg

SEQ ID NO: 305 - RNA, 20 nt, Artificial Sequence
  LRRK2 RNA guide
cagcaugaacguucgcugcu

SEQ ID NO: 306 - RNA, 20 nt, Artificial Sequence
  LRRK2 RNA guide
cagcgaacguucaugcuggg

SEQ ID NO: 307 - RNA, 20 nt, Artificial Sequence
  LRRK2 RNA guide
caugaacguucgcugcucag

SEQ ID NO: 308 - RNA, 20 nt, Artificial Sequence
  LRRK2 RNA guide
ccagcaugaacguucgcugc

SEQ ID NO: 309 - RNA, 20 nt, Artificial Sequence
  LRRK2 RNA guide
cccagcaugaacguucgcug

SEQ ID NO: 310 - RNA, 20 nt, Artificial Sequence
  LRRK2 RNA guide
ccccugccgguucccugagc

SEQ ID NO: 311 - RNA, 20 nt, Artificial Sequence
  LRRK2 RNA guide
cccucccagcaugaacguuc

SEQ ID NO: 312 - RNA, 20 nt, Artificial Sequence
  LRRK2 RNA guide
cccugagcagcgaacguuca

SEQ ID NO: 313 - RNA, 20 nt, Artificial Sequence
  LRRK2 RNA guide
cccugccgguucccugagca

SEQ ID NO: 314 - RNA, 20 nt, Artificial Sequence
  LRRK2 RNA guide
ccgccgcccucccagcauga

SEQ ID NO: 315 - RNA, 20 nt, Artificial Sequence
  LRRK2 RNA guide
ccgguucccugagcagcgaa

SEQ ID NO: 316 - RNA, 20 nt, Artificial Sequence
  LRRK2 RNA guide
ccucccagcaugaacguucg

SEQ ID NO: 317 - RNA, 20 nt, Artificial Sequence
  LRRK2 RNA guide
ccugagcagcgaacguucau

SEQ ID NO: 318 - RNA, 20 nt, Artificial Sequence
  LRRK2 RNA guide
ccugccgguucccugagcag

SEQ ID NO: 319 - RNA, 20 nt, Artificial Sequence
  LRRK2 RNA guide
cgaacguucaugcugggagg

SEQ ID NO: 320 - RNA, 20 nt, Artificial Sequence
  LRRK2 RNA guide
cgcccucccagcaugaacgu

SEQ ID NO: 321 - RNA, 20 nt, Artificial Sequence
  LRRK2 RNA guide
cgccgcccucccagcaugaa

SEQ ID NO: 322 - RNA, 20 nt, Artificial Sequence
  LRRK2 RNA guide
cgguucccugagcagcgaac

SEQ ID NO: 323 - RNA, 20 nt, Artificial Sequence
  LRRK2 RNA guide
cguucgcugcucagggaacc

SEQ ID NO: 324 - RNA, 20 nt, Artificial Sequence
  LRRK2 RNA guide
cucccagcaugaacguucgc

SEQ ID NO: 325 - RNA, 20 nt, Artificial Sequence
  LRRK2 RNA guide
cugagcagcgaacguucaug

SEQ ID NO: 326 - RNA, 20 nt, Artificial Sequence
  LRRK2 RNA guide
cugccgguucccugagcagc

SEQ ID NO: 327 - RNA, 20 nt, Artificial Sequence
  LRRK2 RNA guide
gaacguucaugcugggaggg

SEQ ID NO: 328 - RNA, 20 nt, Artificial Sequence
  LRRK2 RNA guide
gaacguucgcugcucaggga

SEQ ID NO: 329 - RNA, 20 nt, Artificial Sequence
  LRRK2 RNA guide
gagcagcgaacguucaugcu

SEQ ID NO: 330 - RNA, 20 nt, Artificial Sequence
  LRRK2 RNA guide
gcagcgaacguucaugcugg

SEQ ID NO: 331 - RNA, 20 nt, Artificial Sequence
  LRRK2 RNA guide
gcaugaacguucgcugcuca

SEQ ID NO: 332 - RNA, 20 nt, Artificial Sequence
  LRRK2 RNA guide
gcccucccagcaugaacguu

SEQ ID NO: 333 - RNA, 20 nt, Artificial Sequence
  LRRK2 RNA guide
gccgcccucccagcaugaac

SEQ ID NO: 334 - RNA, 20 nt, Artificial Sequence
  LRRK2 RNA guide
gccgguucccugagcagcga

SEQ ID NO: 335 - RNA, 20 nt, Artificial Sequence
  LRRK2 RNA guide
gcgaacguucaugcugggag

SEQ ID NO: 336 - RNA, 20 nt, Artificial Sequence
  LRRK2 RNA guide
gguucccugagcagcgaacg

SEQ ID NO: 337 - RNA, 20 nt, Artificial Sequence
  LRRK2 RNA guide
guucccugagcagcgaacgu

SEQ ID NO: 338 - RNA, 20 nt, Artificial Sequence
  LRRK2 RNA guide
guucgcugcucagggaaccg

SEQ ID NO: 339 - RNA, 20 nt, Artificial Sequence
  LRRK2 RNA guide
ucccagcaugaacguucgcu

SEQ ID NO: 340 - RNA, 20 nt, Artificial Sequence
  LRRK2 RNA guide
ucccugagcagcgaacguuc

SEQ ID NO: 341 - RNA, 20 nt, Artificial Sequence
  LRRK2 RNA guide
ugaacguucgcugcucaggg

SEQ ID NO: 342 - RNA, 20 nt, Artificial Sequence
  LRRK2 RNA guide
ugagcagcgaacguucaugc

SEQ ID NO: 343 - RNA, 20 nt, Artificial Sequence
  LRRK2 RNA guide
ugccgguucccugagcagcg

SEQ ID NO: 344 - RNA, 20 nt, Artificial Sequence
  LRRK2 RNA guide
uucccugagcagcgaacguu

SEQ ID NO: 345 - RNA, 20 nt, Artificial Sequence
  LRRK2 RNA guide
uucgcugcucagggaaccgg

SEQ ID NO: 346 - RNA, 21 nt, Artificial Sequence
  LRRK2 RNA guide
aacguucgcugcucagggaac

SEQ ID NO: 347 - RNA, 21 nt, Artificial Sequence
  LRRK2 RNA guide
acguucgcugcucagggaacc

SEQ ID NO: 348 - RNA, 21 nt, Artificial Sequence
  LRRK2 RNA guide
agcagcgaacguucaugcugg

SEQ ID NO: 349 - RNA, 21 nt, Artificial Sequence
  LRRK2 RNA guide
agcaugaacguucgcugcuca

SEQ ID NO: 350 - RNA, 21 nt, Artificial Sequence
  LRRK2 RNA guide
agcgaacguucaugcugggag

SEQ ID NO: 351 - RNA, 21 nt, Artificial Sequence
  LRRK2 RNA guide
augaacguucgcugcucaggg

SEQ ID NO: 352 - RNA, 21 nt, Artificial Sequence
  LRRK2 RNA guide
cagcaugaacguucgcugcuc

SEQ ID NO: 353 - RNA, 21 nt, Artificial Sequence
  LRRK2 RNA guide
cagcgaacguucaugcuggga

SEQ ID NO: 354 - RNA, 21 nt, Artificial Sequence
  LRRK2 RNA guide
caugaacguucgcugcucagg

SEQ ID NO: 355 - RNA, 21 nt, Artificial Sequence
  LRRK2 RNA guide
ccagcaugaacguucgcugcu

SEQ ID NO: 356 - RNA, 21 nt, Artificial Sequence
  LRRK2 RNA guide
cccagcaugaacguucgcugc

SEQ ID NO: 357 - RNA, 21 nt, Artificial Sequence
  LRRK2 RNA guide
ccccugccgguucccugagca

SEQ ID NO: 358 - RNA, 21 nt, Artificial Sequence
  LRRK2 RNA guide
cccgccgcccucccagcauga

SEQ ID NO: 359 - RNA, 21 nt, Artificial Sequence
  LRRK2 RNA guide
cccucccagcaugaacguucg

SEQ ID NO: 360 - RNA, 21 nt, Artificial Sequence
  LRRK2 RNA guide
cccugagcagcgaacguucau

SEQ ID NO: 361 - RNA, 21 nt, Artificial Sequence
  LRRK2 RNA guide
cccugccgguucccugagcag

SEQ ID NO: 362 - RNA, 21 nt, Artificial Sequence
  LRRK2 RNA guide
ccgcccucccagcaugaacgu

SEQ ID NO: 363 - RNA, 21 nt, Artificial Sequence
  LRRK2 RNA guide
ccgccgcccucccagcaugaa

SEQ ID NO: 364 - RNA, 21 nt, Artificial Sequence
  LRRK2 RNA guide
ccgguucccugagcagcgaac

SEQ ID NO: 365 - RNA, 21 nt, Artificial Sequence
  LRRK2 RNA guide
ccucccagcaugaacguucgc

SEQ ID NO: 366 - RNA, 21 nt, Artificial Sequence
  LRRK2 RNA guide
ccugagcagcgaacguucaug

SEQ ID NO: 367 - RNA, 21 nt, Artificial Sequence
  LRRK2 RNA guide
ccugccgguucccugagcagc

SEQ ID NO: 368 - RNA, 21 nt, Artificial Sequence
  LRRK2 RNA guide
cgaacguucaugcugggaggg

SEQ ID NO: 369 - RNA, 21 nt, Artificial Sequence
  LRRK2 RNA guide
cgcccucccagcaugaacguu

SEQ ID NO: 370 - RNA, 21 nt, Artificial Sequence
  LRRK2 RNA guide
cgccgcccucccagcaugaac

SEQ ID NO: 371 - RNA, 21 nt, Artificial Sequence
  LRRK2 RNA guide
cgguucccugagcagcgaacg

SEQ ID NO: 372 - RNA, 21 nt, Artificial Sequence
  LRRK2 RNA guide
cguucgcugcucagggaaccg

SEQ ID NO: 373 - RNA, 21 nt, Artificial Sequence
  LRRK2 RNA guide
cucccagcaugaacguucgcu

SEQ ID NO: 374 - RNA, 21 nt, Artificial Sequence
  LRRK2 RNA guide
cugagcagcgaacguucaugc

SEQ ID NO: 375 - RNA, 21 nt, Artificial Sequence
  LRRK2 RNA guide
cugccgguucccugagcagcg

SEQ ID NO: 376 - RNA, 21 nt, Artificial Sequence
  LRRK2 RNA guide
gaacguucaugcugggagggc

SEQ ID NO: 377 - RNA, 21 nt, Artificial Sequence
  LRRK2 RNA guide
gaacguucgcugcucagggaa

SEQ ID NO: 378 - RNA, 21 nt, Artificial Sequence
  LRRK2 RNA guide
gagcagcgaacguucaugcug

SEQ ID NO: 379 - RNA, 21 nt, Artificial Sequence
  LRRK2 RNA guide
gcagcgaacguucaugcuggg

SEQ ID NO: 380 - RNA, 21 nt, Artificial Sequence
  LRRK2 RNA guide
gcaugaacguucgcugcucag

SEQ ID NO: 381 - RNA, 21 nt, Artificial Sequence
  LRRK2 RNA guide
gccccugccgguucccugagc

SEQ ID NO: 382 - RNA, 21 nt, Artificial Sequence
  LRRK2 RNA guide
gcccucccagcaugaacguuc

SEQ ID NO: 383 - RNA, 21 nt, Artificial Sequence
  LRRK2 RNA guide
gccgcccucccagcaugaacg

SEQ ID NO: 384 - RNA, 21 nt, Artificial Sequence
  LRRK2 RNA guide
gccgguucccugagcagcgaa

SEQ ID NO: 385 - RNA, 21 nt, Artificial Sequence
  LRRK2 RNA guide
gcgaacguucaugcugggagg

SEQ ID NO: 386 - RNA, 21 nt, Artificial Sequence
  LRRK2 RNA guide
gguucccugagcagcgaacgu

SEQ ID NO: 387 - RNA, 21 nt, Artificial Sequence
  LRRK2 RNA guide
guucccugagcagcgaacguu

SEQ ID NO: 388 - RNA, 21 nt, Artificial Sequence
  LRRK2 RNA guide
guucgcugcucagggaaccgg

SEQ ID NO: 389 - RNA, 21 nt, Artificial Sequence
  LRRK2 RNA guide
ucccagcaugaacguucgcug

SEQ ID NO: 390 - RNA, 21 nt, Artificial Sequence
  LRRK2 RNA guide
ucccugagcagcgaacguuca

SEQ ID NO: 391 - RNA, 21 nt, Artificial Sequence
  LRRK2 RNA guide
ugaacguucgcugcucaggga

SEQ ID NO: 392 - RNA, 21 nt, Artificial Sequence
  LRRK2 RNA guide
ugagcagcgaacguucaugcu

SEQ ID NO: 393 - RNA, 21 nt, Artificial Sequence
  LRRK2 RNA guide
ugccgguucccugagcagcga

SEQ ID NO: 394 - RNA, 21 nt, Artificial Sequence
  LRRK2 RNA guide
uucccugagcagcgaacguuc

SEQ ID NO: 395 - RNA, 21 nt, Artificial Sequence
  LRRK2 RNA guide
uucgcugcucagggaaccggc

SEQ ID NO: 396 - RNA, 22 nt, Artificial Sequence
  LRRK2 RNA guide
aacguucgcugcucagggaacc

SEQ ID NO: 397 - RNA, 22 nt, Artificial Sequence
  LRRK2 RNA guide
acccgccgcccucccagcauga

SEQ ID NO: 398 - RNA, 22 nt, Artificial Sequence
  LRRK2 RNA guide
acguucgcugcucagggaaccg

SEQ ID NO: 399 - RNA, 22 nt, Artificial Sequence
  LRRK2 RNA guide
agcagcgaacguucaugcuggg

SEQ ID NO: 400 - RNA, 22 nt, Artificial Sequence
  LRRK2 RNA guide
agcaugaacguucgcugcucag

SEQ ID NO: 401 - RNA, 22 nt, Artificial Sequence
  LRRK2 RNA guide
agcgaacguucaugcugggagg

SEQ ID NO: 402 - RNA, 22 nt, Artificial Sequence
  LRRK2 RNA guide
augaacguucgcugcucaggga

SEQ ID NO: 403 - RNA, 22 nt, Artificial Sequence
  LRRK2 RNA guide
cagcaugaacguucgcugcuca

SEQ ID NO: 404 - RNA, 22 nt, Artificial Sequence
  LRRK2 RNA guide
cagcgaacguucaugcugggag

SEQ ID NO: 405 - RNA, 22 nt, Artificial Sequence
  LRRK2 RNA guide
caugaacguucgcugcucaggg

SEQ ID NO: 406 - RNA, 22 nt, Artificial Sequence
  LRRK2 RNA guide
ccagcaugaacguucgcugcuc

SEQ ID NO: 407 - RNA, 22 nt, Artificial Sequence
  LRRK2 RNA guide
cccagcaugaacguucgcugcu

SEQ ID NO: 408 - RNA, 22 nt, Artificial Sequence
  LRRK2 RNA guide
ccccugccgguucccugagcag

SEQ ID NO: 409 - RNA, 22 nt, Artificial Sequence
  LRRK2 RNA guide
cccgccgcccucccagcaugaa

SEQ ID NO: 410 - RNA, 22 nt, Artificial Sequence
  LRRK2 RNA guide
cccucccagcaugaacguucgc

SEQ ID NO: 411 - RNA, 22 nt, Artificial Sequence
  LRRK2 RNA guide
cccugagcagcgaacguucaug

SEQ ID NO: 412 - RNA, 22 nt, Artificial Sequence
  LRRK2 RNA guide
cccugccgguucccugagcagc

SEQ ID NO: 413 - RNA, 22 nt, Artificial Sequence
  LRRK2 RNA guide
ccgcccucccagcaugaacguu

SEQ ID NO: 414 - RNA, 22 nt, Artificial Sequence
  LRRK2 RNA guide
ccgccgcccucccagcaugaac

SEQ ID NO: 415 - RNA, 22 nt, Artificial Sequence
  LRRK2 RNA guide
ccgguucccugagcagcgaacg

SEQ ID NO: 416 - RNA, 22 nt, Artificial Sequence
  LRRK2 RNA guide
ccucccagcaugaacguucgcu

SEQ ID NO: 417 - RNA, 22 nt, Artificial Sequence
  LRRK2 RNA guide
ccugagcagcgaacguucaugc

SEQ ID NO: 418 - RNA, 22 nt, Artificial Sequence
  LRRK2 RNA guide
ccugccgguucccugagcagcg

SEQ ID NO: 419 - RNA, 22 nt, Artificial Sequence
  LRRK2 RNA guide
cgaacguucaugcugggagggc

SEQ ID NO: 420 - RNA, 22 nt, Artificial Sequence
  LRRK2 RNA guide
cgccccugccgguucccugagc

SEQ ID NO: 421 - RNA, 22 nt, Artificial Sequence
  LRRK2 RNA guide
cgcccucccagcaugaacguuc

SEQ ID NO: 422 - RNA, 22 nt, Artificial Sequence
  LRRK2 RNA guide
cgccgcccucccagcaugaacg

SEQ ID NO: 423 - RNA, 22 nt, Artificial Sequence
  LRRK2 RNA guide
cgguucccugagcagcgaacgu

SEQ ID NO: 424 - RNA, 22 nt, Artificial Sequence
  LRRK2 RNA guide
cguucgcugcucagggaaccgg

SEQ ID NO: 425 - RNA, 22 nt, Artificial Sequence
  LRRK2 RNA guide
cucccagcaugaacguucgcug

SEQ ID NO: 426 - RNA, 22 nt, Artificial Sequence
  LRRK2 RNA guide
cugagcagcgaacguucaugcu

SEQ ID NO: 427 - RNA, 22 nt, Artificial Sequence
  LRRK2 RNA guide
cugccgguucccugagcagcga

SEQ ID NO: 428 - RNA, 22 nt, Artificial Sequence
  LRRK2 RNA guide
gaacguucaugcugggagggcg

SEQ ID NO: 429 - RNA, 22 nt, Artificial Sequence
  LRRK2 RNA guide
gaacguucgcugcucagggaac

SEQ ID NO: 430 - RNA, 22 nt, Artificial Sequence
  LRRK2 RNA guide
gagcagcgaacguucaugcugg

SEQ ID NO: 431 - RNA, 22 nt, Artificial Sequence
  LRRK2 RNA guide
gcagcgaacguucaugcuggga

SEQ ID NO: 432 - RNA, 22 nt, Artificial Sequence
  LRRK2 RNA guide
gcaugaacguucgcugcucagg

SEQ ID NO: 433 - RNA, 22 nt, Artificial Sequence
  LRRK2 RNA guide
gccccugccgguucccugagca

SEQ ID NO: 434 - RNA, 22 nt, Artificial Sequence
  LRRK2 RNA guide
gcccucccagcaugaacguucg

SEQ ID NO: 435 - RNA, 22 nt, Artificial Sequence
  LRRK2 RNA guide
gccgcccucccagcaugaacgu

SEQ ID NO: 436 - RNA, 22 nt, Artificial Sequence
  LRRK2 RNA guide
gccgguucccugagcagcgaac

SEQ ID NO: 437 - RNA, 22 nt, Artificial Sequence
  LRRK2 RNA guide
gcgaacguucaugcugggaggg

SEQ ID NO: 438 - RNA, 22 nt, Artificial Sequence
  LRRK2 RNA guide
gguucccugagcagcgaacguu

SEQ ID NO: 439 - RNA, 22 nt, Artificial Sequence
  LRRK2 RNA guide
guucccugagcagcgaacguuc

SEQ ID NO: 440 - RNA, 22 nt, Artificial Sequence
  LRRK2 RNA guide
guucgcugcucagggaaccggc

SEQ ID NO: 441 - RNA, 22 nt, Artificial Sequence
  LRRK2 RNA guide
ucccagcaugaacguucgcugc

SEQ ID NO: 442 - RNA, 22 nt, Artificial Sequence
  LRRK2 RNA guide
ucccugagcagcgaacguucau

SEQ ID NO: 443 - RNA, 22 nt, Artificial Sequence
  LRRK2 RNA guide
ugaacguucgcugcucagggaa

SEQ ID NO: 444 - RNA, 22 nt, Artificial Sequence
  LRRK2 RNA guide
ugagcagcgaacguucaugcug

SEQ ID NO: 445 - RNA, 22 nt, Artificial Sequence
  LRRK2 RNA guide
ugccgguucccugagcagcgaa

SEQ ID NO: 446 - RNA, 22 nt, Artificial Sequence
  LRRK2 RNA guide
uucccugagcagcgaacguuca

SEQ ID NO: 447 - RNA, 22 nt, Artificial Sequence
  LRRK2 RNA guide
uucgcugcucagggaaccggca

SEQ ID NO: 448 - RNA, 20 nt, Artificial Sequence
  LRRK2 RNA guide
agaguuuccucguccucuuu

SEQ ID NO: 449 - RNA, 20 nt, Artificial Sequence
  LRRK2 RNA guide
agcugucaggggugcaaaga

SEQ ID NO: 450 - RNA, 20 nt, Artificial Sequence
  LRRK2 RNA guide
aggggugcaaagaggacgag

SEQ ID NO: 451 - RNA, 20 nt, Artificial Sequence
  LRRK2 RNA guide
aguggcagcugucaggggug

SEQ ID NO: 452 - RNA, 20 nt, Artificial Sequence
  LRRK2 RNA guide
aguuuccucguccucuuugc

SEQ ID NO: 453 - RNA, 20 nt, Artificial Sequence
  LRRK2 RNA guide
caaagaggacgaggaaacuc

SEQ ID NO: 454 - RNA, 20 nt, Artificial Sequence
  LRRK2 RNA guide
cagaguuuccucguccucuu

SEQ ID NO: 455 - RNA, 20 nt, Artificial Sequence
  LRRK2 RNA guide
cagcugucaggggugcaaag

SEQ ID NO: 456 - RNA, 20 nt, Artificial Sequence
  LRRK2 RNA guide
caggggugcaaagaggacga

SEQ ID NO: 457 - RNA, 20 nt, Artificial Sequence
  LRRK2 RNA guide
ccucguccucuuugcacccc

SEQ ID NO: 458 - RNA, 20 nt, Artificial Sequence
  LRRK2 RNA guide
ccucuuugcaccccugacag

SEQ ID NO: 459 - RNA, 20 nt, Artificial Sequence
  LRRK2 RNA guide
cguccucuuugcaccccuga

SEQ ID NO: 460 - RNA, 20 nt, Artificial Sequence
  LRRK2 RNA guide
cuaguggcagcugucagggg

SEQ ID NO: 461 - RNA, 20 nt, Artificial Sequence
  LRRK2 RNA guide
cucguccucuuugcaccccu

SEQ ID NO: 462 - RNA, 20 nt, Artificial Sequence
  LRRK2 RNA guide
cucuuugcaccccugacagc

SEQ ID NO: 463 - RNA, 20 nt, Artificial Sequence
  LRRK2 RNA guide
cugucaggggugcaaagagg

SEQ ID NO: 464 - RNA, 20 nt, Artificial Sequence
  LRRK2 RNA guide
cuucagaguuuccucguccu

SEQ ID NO: 465 - RNA, 20 nt, Artificial Sequence
  LRRK2 RNA guide
cuuugcaccccugacagcug

SEQ ID NO: 466 - RNA, 20 nt, Artificial Sequence
  LRRK2 RNA guide
gaguuuccucguccucuuug

SEQ ID NO: 467 - RNA, 20 nt, Artificial Sequence
  LRRK2 RNA guide
gcaaagaggacgaggaaacu

SEQ ID NO: 468 - RNA, 20 nt, Artificial Sequence
  LRRK2 RNA guide
gcagcugucaggggugcaaa

SEQ ID NO: 469 - RNA, 20 nt, Artificial Sequence
  LRRK2 RNA guide
gcuaguggcagcugucaggg

SEQ ID NO: 470 - RNA, 20 nt, Artificial Sequence
  LRRK2 RNA guide
gcugucaggggugcaaagag

SEQ ID NO: 471 - RNA, 20 nt, Artificial Sequence
  LRRK2 RNA guide
ggcagcugucaggggugcaa

SEQ ID NO: 472 - RNA, 20 nt, Artificial Sequence
  LRRK2 RNA guide
ggggugcaaagaggacgagg

SEQ ID NO: 473 - RNA, 20 nt, Artificial Sequence
  LRRK2 RNA guide
gggugcaaagaggacgagga

SEQ ID NO: 474 - RNA, 20 nt, Artificial Sequence
  LRRK2 RNA guide
ggugcaaagaggacgaggaa

SEQ ID NO: 475 - RNA, 20 nt, Artificial Sequence
  LRRK2 RNA guide
gucaggggugcaaagaggac

SEQ ID NO: 476 - RNA, 20 nt, Artificial Sequence
  LRRK2 RNA guide
guccucuuugcaccccugac

SEQ ID NO: 477 - RNA, 20 nt, Artificial Sequence
  LRRK2 RNA guide
gugcaaagaggacgaggaaa

SEQ ID NO: 478 - RNA, 20 nt, Artificial Sequence
  LRRK2 RNA guide
guggcagcugucaggggugc

SEQ ID NO: 479 - RNA, 20 nt, Artificial Sequence
  LRRK2 RNA guide
guuuccucguccucuuugca

SEQ ID NO: 480 - RNA, 20 nt, Artificial Sequence
  LRRK2 RNA guide
uaguggcagcugucaggggu

SEQ ID NO: 481 - RNA, 20 nt, Artificial Sequence
  LRRK2 RNA guide
ucagaguuuccucguccucu

SEQ ID NO: 482 - RNA, 20 nt, Artificial Sequence
  LRRK2 RNA guide
ucaggggugcaaagaggacg

SEQ ID NO: 483 - RNA, 20 nt, Artificial Sequence
  LRRK2 RNA guide
uccucguccucuuugcaccc

SEQ ID NO: 484 - RNA, 20 nt, Artificial Sequence
  LRRK2 RNA guide
uccucuuugcaccccugaca

SEQ ID NO: 485 - RNA, 20 nt, Artificial Sequence
  LRRK2 RNA guide
ucguccucuuugcaccccug

SEQ ID NO: 486 - RNA, 20 nt, Artificial Sequence
  LRRK2 RNA guide
ucuucagaguuuccucgucc

SEQ ID NO: 487 - RNA, 20 nt, Artificial Sequence
  LRRK2 RNA guide
ucuuugcaccccugacagcu

SEQ ID NO: 488 - RNA, 20 nt, Artificial Sequence
  LRRK2 RNA guide
ugcaaagaggacgaggaaac

SEQ ID NO: 489 - RNA, 20 nt, Artificial Sequence
  LRRK2 RNA guide
uggcagcugucaggggugca

SEQ ID NO: 490 - RNA, 20 nt, Artificial Sequence
  LRRK2 RNA guide
ugucaggggugcaaagagga

SEQ ID NO: 491 - RNA, 20 nt, Artificial Sequence
  LRRK2 RNA guide
uucagaguuuccucguccuc

SEQ ID NO: 492 - RNA, 20 nt, Artificial Sequence
  LRRK2 RNA guide
uuccucguccucuuugcacc

SEQ ID NO: 493 - RNA, 20 nt, Artificial Sequence
  LRRK2 RNA guide
uugcaccccugacagcugcc

SEQ ID NO: 494 - RNA, 20 nt, Artificial Sequence
  LRRK2 RNA guide
uuuccucguccucuuugcac

SEQ ID NO: 495 - RNA, 20 nt, Artificial Sequence
  LRRK2 RNA guide
uuugcaccccugacagcugc

SEQ ID NO: 496 - RNA, 21 nt, Artificial Sequence
  LRRK2 RNA guide
agaguuuccucguccucuuug

SEQ ID NO: 497 - RNA, 21 nt, Artificial Sequence
  LRRK2 RNA guide
agcugucaggggugcaaagag

SEQ ID NO: 498 - RNA, 21 nt, Artificial Sequence
  LRRK2 RNA guide
aggggugcaaagaggacgagg

SEQ ID NO: 499 - RNA, 21 nt, Artificial Sequence
  LRRK2 RNA guide
aguggcagcugucaggggugc

SEQ ID NO: 500 - RNA, 21 nt, Artificial Sequence
  LRRK2 RNA guide
aguuuccucguccucuuugca

SEQ ID NO: 501 - RNA, 21 nt, Artificial Sequence
  LRRK2 RNA guide
caaagaggacgaggaaacucu

SEQ ID NO: 502 - RNA, 21 nt, Artificial Sequence
  LRRK2 RNA guide
cagaguuuccucguccucuuu

SEQ ID NO: 503 - RNA, 21 nt, Artificial Sequence
  LRRK2 RNA guide
cagcugucaggggugcaaaga

SEQ ID NO: 504 - RNA, 21 nt, Artificial Sequence
  LRRK2 RNA guide
caggggugcaaagaggacgag

SEQ ID NO: 505 - RNA, 21 nt, Artificial Sequence
  LRRK2 RNA guide
ccucguccucuuugcaccccu

SEQ ID NO: 506 - RNA, 21 nt, Artificial Sequence
  LRRK2 RNA guide
ccucuuugcaccccugacagc

SEQ ID NO: 507 - RNA, 21 nt, Artificial Sequence
  LRRK2 RNA guide
cguccucuuugcaccccugac

SEQ ID NO: 508 - RNA, 21 nt, Artificial Sequence
  LRRK2 RNA guide
cuaguggcagcugucaggggu

SEQ ID NO: 509 - RNA, 21 nt, Artificial Sequence
  LRRK2 RNA guide
cucguccucuuugcaccccug

SEQ ID NO: 510 - RNA, 21 nt, Artificial Sequence
  LRRK2 RNA guide
cucuuugcaccccugacagcu

SEQ ID NO: 511 - RNA, 21 nt, Artificial Sequence
  LRRK2 RNA guide
cugucaggggugcaaagagga

SEQ ID NO: 512 - RNA, 21 nt, Artificial Sequence
  LRRK2 RNA guide
cuucagaguuuccucguccuc

SEQ ID NO: 513 - RNA, 21 nt, Artificial Sequence
  LRRK2 RNA guide
cuuugcaccccugacagcugc

SEQ ID NO: 514 - RNA, 21 nt, Artificial Sequence
  LRRK2 RNA guide
gaguuuccucguccucuuugc

SEQ ID NO: 515 - RNA, 21 nt, Artificial Sequence
  LRRK2 RNA guide
gcaaagaggacgaggaaacuc

SEQ ID NO: 516 - RNA, 21 nt, Artificial Sequence
  LRRK2 RNA guide
gcagcugucaggggugcaaag

SEQ ID NO: 517 - RNA, 21 nt, Artificial Sequence
  LRRK2 RNA guide
gcuaguggcagcugucagggg

SEQ ID NO: 518 - RNA, 21 nt, Artificial Sequence
  LRRK2 RNA guide
gcugucaggggugcaaagagg

SEQ ID NO: 519 - RNA, 21 nt, Artificial Sequence
  LRRK2 RNA guide
ggcagcugucaggggugcaaa

SEQ ID NO: 520 - RNA, 21 nt, Artificial Sequence
  LRRK2 RNA guide
ggcuaguggcagcugucaggg

SEQ ID NO: 521 - RNA, 21 nt, Artificial Sequence
  LRRK2 RNA guide
ggggugcaaagaggacgagga

SEQ ID NO: 522 - RNA, 21 nt, Artificial Sequence
  LRRK2 RNA guide
gggugcaaagaggacgaggaa

SEQ ID NO: 523 - RNA, 21 nt, Artificial Sequence
  LRRK2 RNA guide
ggugcaaagaggacgaggaaa

SEQ ID NO: 524 - RNA, 21 nt, Artificial Sequence
  LRRK2 RNA guide
gucaggggugcaaagaggacg

SEQ ID NO: 525 - RNA, 21 nt, Artificial Sequence
  LRRK2 RNA guide
guccucuuugcaccccugaca

SEQ ID NO: 526 - RNA, 21 nt, Artificial Sequence
  LRRK2 RNA guide
gugcaaagaggacgaggaaac

SEQ ID NO: 527 - RNA, 21 nt, Artificial Sequence
  LRRK2 RNA guide
guggcagcugucaggggugca

SEQ ID NO: 528 - RNA, 21 nt, Artificial Sequence
  LRRK2 RNA guide
guuuccucguccucuuugcac

SEQ ID NO: 529 - RNA, 21 nt, Artificial Sequence
  LRRK2 RNA guide
uaguggcagcugucaggggug

SEQ ID NO: 530 - RNA, 21 nt, Artificial Sequence
  LRRK2 RNA guide
ucagaguuuccucguccucuu

SEQ ID NO: 531 - RNA, 21 nt, Artificial Sequence
  LRRK2 RNA guide
ucaggggugcaaagaggacga

SEQ ID NO: 532 - RNA, 21 nt, Artificial Sequence
  LRRK2 RNA guide
uccucguccucuuugcacccc

SEQ ID NO: 533 - RNA, 21 nt, Artificial Sequence
  LRRK2 RNA guide
uccucuuugcaccccugacag

SEQ ID NO: 534 - RNA, 21 nt, Artificial Sequence
  LRRK2 RNA guide
ucguccucuuugcaccccuga

SEQ ID NO: 535 - RNA, 21 nt, Artificial Sequence
  LRRK2 RNA guide
ucuucagaguuuccucguccu

SEQ ID NO: 536 - RNA, 21 nt, Artificial Sequence
  LRRK2 RNA guide
ucuuugcaccccugacagcug

SEQ ID NO: 537 - RNA, 21 nt, Artificial Sequence
  LRRK2 RNA guide
ugcaaagaggacgaggaaacu

SEQ ID NO: 538 - RNA, 21 nt, Artificial Sequence
  LRRK2 RNA guide
uggcagcugucaggggugcaa

SEQ ID NO: 539 - RNA, 21 nt, Artificial Sequence
  LRRK2 RNA guide
ugucaggggugcaaagaggac

SEQ ID NO: 540 - RNA, 21 nt, Artificial Sequence
  LRRK2 RNA guide
uucagaguuuccucguccucu

SEQ ID NO: 541 - RNA, 21 nt, Artificial Sequence
  LRRK2 RNA guide
uuccucguccucuuugcaccc

SEQ ID NO: 542 - RNA, 21 nt, Artificial Sequence
  LRRK2 RNA guide
uucuucagaguuuccucgucc

SEQ ID NO: 543 - RNA, 21 nt, Artificial Sequence
  LRRK2 RNA guide
uugcaccccugacagcugcca

SEQ ID NO: 544 - RNA, 21 nt, Artificial Sequence
  LRRK2 RNA guide
uuuccucguccucuuugcacc

SEQ ID NO: 545 - RNA, 21 nt, Artificial Sequence
  LRRK2 RNA guide
uuugcaccccugacagcugcc

SEQ ID NO: 546 - RNA, 22 nt, Artificial Sequence
  LRRK2 RNA guide
agaguuuccucguccucuuugc

SEQ ID NO: 547 - RNA, 22 nt, Artificial Sequence
  LRRK2 RNA guide
agcugucaggggugcaaagagg

SEQ ID NO: 548 - RNA, 22 nt, Artificial Sequence
  LRRK2 RNA guide
aggggugcaaagaggacgagga

SEQ ID NO: 549 - RNA, 22 nt, Artificial Sequence
  LRRK2 RNA guide
aguggcagcugucaggggugca

SEQ ID NO: 550 - RNA, 22 nt, Artificial Sequence
  LRRK2 RNA guide
aguuuccucguccucuuugcac

SEQ ID NO: 551 - RNA, 22 nt, Artificial Sequence
  LRRK2 RNA guide
caaagaggacgaggaaacucug

SEQ ID NO: 552 - RNA, 22 nt, Artificial Sequence
  LRRK2 RNA guide
cagaguuuccucguccucuuug

SEQ ID NO: 553 - RNA, 22 nt, Artificial Sequence
  LRRK2 RNA guide
cagcugucaggggugcaaagag

SEQ ID NO: 554 - RNA, 22 nt, Artificial Sequence
  LRRK2 RNA guide
caggggugcaaagaggacgagg

SEQ ID NO: 555 - RNA, 22 nt, Artificial Sequence
  LRRK2 RNA guide
ccucguccucuuugcaccccug

SEQ ID NO: 556 - RNA, 22 nt, Artificial Sequence
  LRRK2 RNA guide
ccucuuugcaccccugacagcu

SEQ ID NO: 557 - RNA, 22 nt, Artificial Sequence
  LRRK2 RNA guide
cguccucuuugcaccccugaca

SEQ ID NO: 558 - RNA, 22 nt, Artificial Sequence
  LRRK2 RNA guide
cuaguggcagcugucaggggug

SEQ ID NO: 559 - RNA, 22 nt, Artificial Sequence
  LRRK2 RNA guide
cucguccucuuugcaccccuga

SEQ ID NO: 560 - RNA, 22 nt, Artificial Sequence
  LRRK2 RNA guide
cucuuugcaccccugacagcug

SEQ ID NO: 561 - RNA, 22 nt, Artificial Sequence
  LRRK2 RNA guide
cugucaggggugcaaagaggac

SEQ ID NO: 562 - RNA, 22 nt, Artificial Sequence
  LRRK2 RNA guide
cuucagaguuuccucguccucu

SEQ ID NO: 563 - RNA, 22 nt, Artificial Sequence
  LRRK2 RNA guide
cuucuucagaguuuccucgucc

SEQ ID NO: 564 - RNA, 22 nt, Artificial Sequence
  LRRK2 RNA guide
cuuugcaccccugacagcugcc

SEQ ID NO: 565 - RNA, 22 nt, Artificial Sequence
  LRRK2 RNA guide
gaguuuccucguccucuuugca

SEQ ID NO: 566 - RNA, 22 nt, Artificial Sequence
  LRRK2 RNA guide
gcaaagaggacgaggaaacucu

SEQ ID NO: 567 - RNA, 22 nt, Artificial Sequence
  LRRK2 RNA guide
gcagcugucaggggugcaaaga

SEQ ID NO: 568 - RNA, 22 nt, Artificial Sequence
  LRRK2 RNA guide
gcuaguggcagcugucaggggu

SEQ ID NO: 569 - RNA, 22 nt, Artificial Sequence
  LRRK2 RNA guide
gcugucaggggugcaaagagga

SEQ ID NO: 570 - RNA, 22 nt, Artificial Sequence
  LRRK2 RNA guide
ggcagcugucaggggugcaaag

SEQ ID NO: 571 - RNA, 22 nt, Artificial Sequence
  LRRK2 RNA guide
ggcuaguggcagcugucagggg

SEQ ID NO: 572 - RNA, 22 nt, Artificial Sequence
  LRRK2 RNA guide
ggggugcaaagaggacgaggaa

SEQ ID NO: 573 - RNA, 22 nt, Artificial Sequence
  LRRK2 RNA guide
gggugcaaagaggacgaggaaa

SEQ ID NO: 574 - RNA, 22 nt, Artificial Sequence
  LRRK2 RNA guide
ggugcaaagaggacgaggaaac

SEQ ID NO: 575 - RNA, 22 nt, Artificial Sequence
  LRRK2 RNA guide
gucaggggugcaaagaggacga

SEQ ID NO: 576 - RNA, 22 nt, Artificial Sequence
  LRRK2 RNA guide
guccucuuugcaccccugacag

SEQ ID NO: 577 - RNA, 22 nt, Artificial Sequence
  LRRK2 RNA guide
gugcaaagaggacgaggaaacu

SEQ ID NO: 578 - RNA, 22 nt, Artificial Sequence
  LRRK2 RNA guide
guggcagcugucaggggugcaa

SEQ ID NO: 579 - RNA, 22 nt, Artificial Sequence
  LRRK2 RNA guide
guuuccucguccucuuugcacc

SEQ ID NO: 580 - RNA, 22 nt, Artificial Sequence
  LRRK2 RNA guide
uaguggcagcugucaggggugc

SEQ ID NO: 581 - RNA, 22 nt, Artificial Sequence
  LRRK2 RNA guide
ucagaguuuccucguccucuuu

SEQ ID NO: 582 - RNA, 22 nt, Artificial Sequence
  LRRK2 RNA guide
ucaggggugcaaagaggacgag

SEQ ID NO: 583 - RNA, 22 nt, Artificial Sequence
  LRRK2 RNA guide
uccucguccucuuugcaccccu

SEQ ID NO: 584 - RNA, 22 nt, Artificial Sequence
  LRRK2 RNA guide
uccucuuugcaccccugacagc

SEQ ID NO: 585 - RNA, 22 nt, Artificial Sequence
  LRRK2 RNA guide
ucguccucuuugcaccccugac

SEQ ID NO: 586 - RNA, 22 nt, Artificial Sequence
  LRRK2 RNA guide
ucuucagaguuuccucguccuc

SEQ ID NO: 587 - RNA, 22 nt, Artificial Sequence
  LRRK2 RNA guide
ucuuugcaccccugacagcugc

SEQ ID NO: 588 - RNA, 22 nt, Artificial Sequence
  LRRK2 RNA guide
ugcaaagaggacgaggaaacuc

SEQ ID NO: 589 - RNA, 22 nt, Artificial Sequence
  LRRK2 RNA guide
uggcagcugucaggggugcaaa

SEQ ID NO: 590 - RNA, 22 nt, Artificial Sequence
  LRRK2 RNA guide
uggcuaguggcagcugucaggg

SEQ ID NO: 591 - RNA, 22 nt, Artificial Sequence
  LRRK2 RNA guide
ugucaggggugcaaagaggacg

SEQ ID NO: 592 - RNA, 22 nt, Artificial Sequence
  LRRK2 RNA guide
uucagaguuuccucguccucuu

SEQ ID NO: 593 - RNA, 22 nt, Artificial Sequence
  LRRK2 RNA guide
uuccucguccucuuugcacccc

SEQ ID NO: 594 - RNA, 22 nt, Artificial Sequence
  LRRK2 RNA guide
uucuucagaguuuccucguccu

SEQ ID NO: 595 - RNA, 22 nt, Artificial Sequence
  LRRK2 RNA guide
uugcaccccugacagcugccac

SEQ ID NO: 596 - RNA, 22 nt, Artificial Sequence
  LRRK2 RNA guide
uuuccucguccucuuugcaccc

SEQ ID NO: 597 - RNA, 22 nt, Artificial Sequence
  LRRK2 RNA guide
uuugcaccccugacagcugcca

SEQ ID NO: 598 - RNA, 20 nt, Artificial Sequence
  LRRK2 RNA guide
aaaacagauagaaacccugg

SEQ ID NO: 599 - RNA, 20 nt, Artificial Sequence
  LRRK2 RNA guide
aaacagauagaaacccuggu

SEQ ID NO: 600 - RNA, 20 nt, Artificial Sequence
  LRRK2 RNA guide
aaacccugguccaaauccug

SEQ ID NO: 601 - RNA, 20 nt, Artificial Sequence
  LRRK2 RNA guide
aacagauagaaacccugguc

SEQ ID NO: 602 - RNA, 20 nt, Artificial Sequence
  LRRK2 RNA guide
aacccugguccaaauccugg

SEQ ID NO: 603 - RNA, 20 nt, Artificial Sequence
  LRRK2 RNA guide
aaggaaaacagauagaaacc

SEQ ID NO: 604 - RNA, 20 nt, Artificial Sequence
  LRRK2 RNA guide
acagauagaaacccuggucc

SEQ ID NO: 605 - RNA, 20 nt, Artificial Sequence
  LRRK2 RNA guide
accaggguuucuaucuguuu

SEQ ID NO: 606 - RNA, 20 nt, Artificial Sequence
  LRRK2 RNA guide
acccugguccaaauccugga

SEQ ID NO: 607 - RNA, 20 nt, Artificial Sequence
  LRRK2 RNA guide
agaaacccugguccaaaucc

SEQ ID NO: 608 - RNA, 20 nt, Artificial Sequence
  LRRK2 RNA guide
agauagaaacccugguccaa

SEQ ID NO: 609 - RNA, 20 nt, Artificial Sequence
  LRRK2 RNA guide
agauccuccaggauuuggac

SEQ ID NO: 610 - RNA, 20 nt, Artificial Sequence
  LRRK2 RNA guide
aggaaaacagauagaaaccc

SEQ ID NO: 611 - RNA, 20 nt, Artificial Sequence
  LRRK2 RNA guide
aggaaggaaaacagauagaa

SEQ ID NO: 612 - RNA, 20 nt, Artificial Sequence
  LRRK2 RNA guide
aggauuuggaccaggguuuc

SEQ ID NO: 613 - RNA, 20 nt, Artificial Sequence
  LRRK2 RNA guide
aggguuucuaucuguuuucc

SEQ ID NO: 614 - RNA, 20 nt, Artificial Sequence
  LRRK2 RNA guide
auagaaacccugguccaaau

SEQ ID NO: 615 - RNA, 20 nt, Artificial Sequence
  LRRK2 RNA guide
auccuccaggauuuggacca

SEQ ID NO: 616 - RNA, 20 nt, Artificial Sequence
  LRRK2 RNA guide
auuuggaccaggguuucuau

SEQ ID NO: 617 - RNA, 20 nt, Artificial Sequence
  LRRK2 RNA guide
cagauagaaacccuggucca

SEQ ID NO: 618 - RNA, 20 nt, Artificial Sequence
  LRRK2 RNA guide
cagauccuccaggauuugga

SEQ ID NO: 619 - RNA, 20 nt, Artificial Sequence
  LRRK2 RNA guide
caggaaggaaaacagauaga

SEQ ID NO: 620 - RNA, 20 nt, Artificial Sequence
  LRRK2 RNA guide
caggauuuggaccaggguuu

SEQ ID NO: 621 - RNA, 20 nt, Artificial Sequence
  LRRK2 RNA guide
caggguuucuaucuguuuuc

SEQ ID NO: 622 - RNA, 20 nt, Artificial Sequence
  LRRK2 RNA guide
ccaggaaggaaaacagauag

SEQ ID NO: 623 - RNA, 20 nt, Artificial Sequence
  LRRK2 RNA guide
ccaggauuuggaccaggguu

SEQ ID NO: 624 - RNA, 20 nt, Artificial Sequence
  LRRK2 RNA guide
ccaggguuucuaucuguuuu

SEQ ID NO: 625 - RNA, 20 nt, Artificial Sequence
  LRRK2 RNA guide
cccugguccaaauccuggag

SEQ ID NO: 626 - RNA, 20 nt, Artificial Sequence
  LRRK2 RNA guide
ccuccaggauuuggaccagg

SEQ ID NO: 627 - RNA, 20 nt, Artificial Sequence
  LRRK2 RNA guide
cuccaggauuuggaccaggg

SEQ ID NO: 628 - RNA, 20 nt, Artificial Sequence
  LRRK2 RNA guide
gaaaacagauagaaacccug

SEQ ID NO: 629 - RNA, 20 nt, Artificial Sequence
  LRRK2 RNA guide
gaaacccugguccaaauccu

SEQ ID NO: 630 - RNA, 20 nt, Artificial Sequence
  LRRK2 RNA guide
gaaggaaaacagauagaaac

SEQ ID NO: 631 - RNA, 20 nt, Artificial Sequence
  LRRK2 RNA guide
gaccaggguuucuaucuguu

SEQ ID NO: 632 - RNA, 20 nt, Artificial Sequence
  LRRK2 RNA guide
gauagaaacccugguccaaa

SEQ ID NO: 633 - RNA, 20 nt, Artificial Sequence
  LRRK2 RNA guide
gauccuccaggauuuggacc

SEQ ID NO: 634 - RNA, 20 nt, Artificial Sequence
  LRRK2 RNA guide
gauuuggaccaggguuucua

SEQ ID NO: 635 - RNA, 20 nt, Artificial Sequence
  LRRK2 RNA guide
ggaaaacagauagaaacccu

SEQ ID NO: 636 - RNA, 20 nt, Artificial Sequence
  LRRK2 RNA guide
ggaaggaaaacagauagaaa

SEQ ID NO: 637 - RNA, 20 nt, Artificial Sequence
  LRRK2 RNA guide
ggaccaggguuucuaucugu

SEQ ID NO: 638 - RNA, 20 nt, Artificial Sequence
  LRRK2 RNA guide
ggauuuggaccaggguuucu

SEQ ID NO: 639 - RNA, 20 nt, Artificial Sequence
  LRRK2 RNA guide
ggguuucuaucuguuuuccu

SEQ ID NO: 640 - RNA, 20 nt, Artificial Sequence
  LRRK2 RNA guide
uagaaacccugguccaaauc

SEQ ID NO: 641 - RNA, 20 nt, Artificial Sequence
  LRRK2 RNA guide
uccaggauuuggaccagggu

SEQ ID NO: 642 - RNA, 20 nt, Artificial Sequence
  LRRK2 RNA guide
uccuccaggauuuggaccag

SEQ ID NO: 643 - RNA, 20 nt, Artificial Sequence
  LRRK2 RNA guide
uggaccaggguuucuaucug

SEQ ID NO: 644 - RNA, 20 nt, Artificial Sequence
  LRRK2 RNA guide
uuggaccaggguuucuaucu

SEQ ID NO: 645 - RNA, 20 nt, Artificial Sequence
  LRRK2 RNA guide
uuuggaccaggguuucuauc

SEQ ID NO: 646 - RNA, 21 nt, Artificial Sequence
  LRRK2 RNA guide
aaaacagauagaaacccuggu

SEQ ID NO: 647 - RNA, 21 nt, Artificial Sequence
  LRRK2 RNA guide
aaacagauagaaacccugguc

SEQ ID NO: 648 - RNA, 21 nt, Artificial Sequence
  LRRK2 RNA guide
aaacccugguccaaauccugg

SEQ ID NO: 649 - RNA, 21 nt, Artificial Sequence
  LRRK2 RNA guide
aacagauagaaacccuggucc

SEQ ID NO: 650 - RNA, 21 nt, Artificial Sequence
  LRRK2 RNA guide
aacccugguccaaauccugga

SEQ ID NO: 651 - RNA, 21 nt, Artificial Sequence
  LRRK2 RNA guide
aaggaaaacagauagaaaccc

SEQ ID NO: 652 - RNA, 21 nt, Artificial Sequence
  LRRK2 RNA guide
acagauagaaacccuggucca

SEQ ID NO: 653 - RNA, 21 nt, Artificial Sequence
  LRRK2 RNA guide
accaggguuucuaucuguuuu

SEQ ID NO: 654 - RNA, 21 nt, Artificial Sequence
  LRRK2 RNA guide
acccugguccaaauccuggag

SEQ ID NO: 655 - RNA, 21 nt, Artificial Sequence
  LRRK2 RNA guide
agaaacccugguccaaauccu

SEQ ID NO: 656 - RNA, 21 nt, Artificial Sequence
  LRRK2 RNA guide
agauagaaacccugguccaaa

SEQ ID NO: 657 - RNA, 21 nt, Artificial Sequence
  LRRK2 RNA guide
agauccuccaggauuuggacc

SEQ ID NO: 658 - RNA, 21 nt, Artificial Sequence
  LRRK2 RNA guide
aggaaaacagauagaaacccu

SEQ ID NO: 659 - RNA, 21 nt, Artificial Sequence
  LRRK2 RNA guide
aggaaggaaaacagauagaaa

SEQ ID NO: 660 - RNA, 21 nt, Artificial Sequence
  LRRK2 RNA guide
aggauuuggaccaggguuucu

SEQ ID NO: 661 - RNA, 21 nt, Artificial Sequence
  LRRK2 RNA guide
aggguuucuaucuguuuuccu

SEQ ID NO: 662 - RNA, 21 nt, Artificial Sequence
  LRRK2 RNA guide
auagaaacccugguccaaauc

SEQ ID NO: 663 - RNA, 21 nt, Artificial Sequence
  LRRK2 RNA guide
auccuccaggauuuggaccag

SEQ ID NO: 664 - RNA, 21 nt, Artificial Sequence
  LRRK2 RNA guide
auuuggaccaggguuucuauc

SEQ ID NO: 665 - RNA, 21 nt, Artificial Sequence
  LRRK2 RNA guide
cagauagaaacccugguccaa

SEQ ID NO: 666 - RNA, 21 nt, Artificial Sequence
  LRRK2 RNA guide
cagauccuccaggauuuggac

SEQ ID NO: 667 - RNA, 21 nt, Artificial Sequence
  LRRK2 RNA guide
caggaaggaaaacagauagaa

SEQ ID NO: 668 - RNA, 21 nt, Artificial Sequence
  LRRK2 RNA guide
caggauuuggaccaggguuuc

SEQ ID NO: 669 - RNA, 21 nt, Artificial Sequence
  LRRK2 RNA guide
caggguuucuaucuguuuucc

SEQ ID NO: 670 - RNA, 21 nt, Artificial Sequence
  LRRK2 RNA guide
ccaggaaggaaaacagauaga

SEQ ID NO: 671 - RNA, 21 nt, Artificial Sequence
  LRRK2 RNA guide
ccaggauuuggaccaggguuu

SEQ ID NO: 672 - RNA, 21 nt, Artificial Sequence
  LRRK2 RNA guide
ccaggguuucuaucuguuuuc

SEQ ID NO: 673 - RNA, 21 nt, Artificial Sequence
  LRRK2 RNA guide
cccugguccaaauccuggagg

SEQ ID NO: 674 - RNA, 21 nt, Artificial Sequence
  LRRK2 RNA guide
ccuccaggauuuggaccaggg

SEQ ID NO: 675 - RNA, 21 nt, Artificial Sequence
  LRRK2 RNA guide
cuccaggauuuggaccagggu

SEQ ID NO: 676 - RNA, 21 nt, Artificial Sequence
  LRRK2 RNA guide
gaaaacagauagaaacccugg

SEQ ID NO: 677 - RNA, 21 nt, Artificial Sequence
  LRRK2 RNA guide
gaaacccugguccaaauccug

SEQ ID NO: 678 - RNA, 21 nt, Artificial Sequence
  LRRK2 RNA guide
gaaggaaaacagauagaaacc

SEQ ID NO: 679 - RNA, 21 nt, Artificial Sequence
  LRRK2 RNA guide
gaccaggguuucuaucuguuu

SEQ ID NO: 680 - RNA, 21 nt, Artificial Sequence
  LRRK2 RNA guide
gauagaaacccugguccaaau

SEQ ID NO: 681 - RNA, 21 nt, Artificial Sequence
  LRRK2 RNA guide
gauccuccaggauuuggacca

SEQ ID NO: 682 - RNA, 21 nt, Artificial Sequence
  LRRK2 RNA guide
gauuuggaccaggguuucuau

SEQ ID NO: 683 - RNA, 21 nt, Artificial Sequence
  LRRK2 RNA guide
gcagauccuccaggauuugga

SEQ ID NO: 684 - RNA, 21 nt, Artificial Sequence
  LRRK2 RNA guide
ggaaaacagauagaaacccug

SEQ ID NO: 685 - RNA, 21 nt, Artificial Sequence
  LRRK2 RNA guide
ggaaggaaaacagauagaaac

SEQ ID NO: 686 - RNA, 21 nt, Artificial Sequence
  LRRK2 RNA guide
ggaccaggguuucuaucuguu

SEQ ID NO: 687 - RNA, 21 nt, Artificial Sequence
  LRRK2 RNA guide
ggauuuggaccaggguuucua

SEQ ID NO: 688 - RNA, 21 nt, Artificial Sequence
  LRRK2 RNA guide
ggguuucuaucuguuuuccuu

SEQ ID NO: 689 - RNA, 21 nt, Artificial Sequence
  LRRK2 RNA guide
uagaaacccugguccaaaucc

SEQ ID NO: 690 - RNA, 21 nt, Artificial Sequence
  LRRK2 RNA guide
uccaggaaggaaaacagauag

SEQ ID NO: 691 - RNA, 21 nt, Artificial Sequence
  LRRK2 RNA guide
uccaggauuuggaccaggguu

SEQ ID NO: 692 - RNA, 21 nt, Artificial Sequence
  LRRK2 RNA guide
uccuccaggauuuggaccagg

SEQ ID NO: 693 - RNA, 21 nt, Artificial Sequence
  LRRK2 RNA guide
uggaccaggguuucuaucugu

SEQ ID NO: 694 - RNA, 21 nt, Artificial Sequence
  LRRK2 RNA guide
uuggaccaggguuucuaucug

SEQ ID NO: 695 - RNA, 21 nt, Artificial Sequence
  LRRK2 RNA guide
uuuggaccaggguuucuaucu

SEQ ID NO: 696 - RNA, 22 nt, Artificial Sequence
  LRRK2 RNA guide
aaaacagauagaaacccugguc

SEQ ID NO: 697 - RNA, 22 nt, Artificial Sequence
  LRRK2 RNA guide
aaacagauagaaacccuggucc

SEQ ID NO: 698 - RNA, 22 nt, Artificial Sequence
  LRRK2 RNA guide
aaacccugguccaaauccugga

SEQ ID NO: 699 - RNA, 22 nt, Artificial Sequence
  LRRK2 RNA guide
aacagauagaaacccuggucca

SEQ ID NO: 700 - RNA, 22 nt, Artificial Sequence
  LRRK2 RNA guide
aacccugguccaaauccuggag

SEQ ID NO: 701 - RNA, 22 nt, Artificial Sequence
  LRRK2 RNA guide
aaggaaaacagauagaaacccu

SEQ ID NO: 702 - RNA, 22 nt, Artificial Sequence
  LRRK2 RNA guide
acagauagaaacccugguccaa

SEQ ID NO: 703 - RNA, 22 nt, Artificial Sequence
  LRRK2 RNA guide
accaggguuucuaucuguuuuc

SEQ ID NO: 704 - RNA, 22 nt, Artificial Sequence
  LRRK2 RNA guide
acccugguccaaauccuggagg

SEQ ID NO: 705 - RNA, 22 nt, Artificial Sequence
  LRRK2 RNA guide
agaaacccugguccaaauccug

SEQ ID NO: 706 - RNA, 22 nt, Artificial Sequence
  LRRK2 RNA guide
agauagaaacccugguccaaau

SEQ ID NO: 707 - RNA, 22 nt, Artificial Sequence
  LRRK2 RNA guide
agauccuccaggauuuggacca

SEQ ID NO: 708 - RNA, 22 nt, Artificial Sequence
  LRRK2 RNA guide
agcagauccuccaggauuugga

SEQ ID NO: 709 - RNA, 22 nt, Artificial Sequence
  LRRK2 RNA guide
aggaaaacagauagaaacccug

SEQ ID NO: 710 - RNA, 22 nt, Artificial Sequence
  LRRK2 RNA guide
aggaaggaaaacagauagaaac

SEQ ID NO: 711 - RNA, 22 nt, Artificial Sequence
  LRRK2 RNA guide
aggauuuggaccaggguuucua

SEQ ID NO: 712 - RNA, 22 nt, Artificial Sequence
  LRRK2 RNA guide
aggguuucuaucuguuuuccuu

SEQ ID NO: 713 - RNA, 22 nt, Artificial Sequence
  LRRK2 RNA guide
auagaaacccugguccaaaucc

SEQ ID NO: 714 - RNA, 22 nt, Artificial Sequence
  LRRK2 RNA guide
auccuccaggauuuggaccagg

SEQ ID NO: 715 - RNA, 22 nt, Artificial Sequence
  LRRK2 RNA guide
auuuggaccaggguuucuaucu

SEQ ID NO: 716 - RNA, 22 nt, Artificial Sequence
  LRRK2 RNA guide
cagauagaaacccugguccaaa

SEQ ID NO: 717 - RNA, 22 nt, Artificial Sequence
  LRRK2 RNA guide
cagauccuccaggauuuggacc

SEQ ID NO: 718 - RNA, 22 nt, Artificial Sequence
  LRRK2 RNA guide
caggaaggaaaacagauagaaa

SEQ ID NO: 719 - RNA, 22 nt, Artificial Sequence
  LRRK2 RNA guide
caggauuuggaccaggguuucu

SEQ ID NO: 720 - RNA, 22 nt, Artificial Sequence
  LRRK2 RNA guide
caggguuucuaucuguuuuccu

SEQ ID NO: 721 - RNA, 22 nt, Artificial Sequence
  LRRK2 RNA guide
ccaggaaggaaaacagauagaa

SEQ ID NO: 722 - RNA, 22 nt, Artificial Sequence
  LRRK2 RNA guide
ccaggauuuggaccaggguuuc

SEQ ID NO: 723 - RNA, 22 nt, Artificial Sequence
  LRRK2 RNA guide
ccaggguuucuaucuguuuucc

SEQ ID NO: 724 - RNA, 22 nt, Artificial Sequence
  LRRK2 RNA guide
cccugguccaaauccuggagga

SEQ ID NO: 725 - RNA, 22 nt, Artificial Sequence
  LRRK2 RNA guide
ccuccaggauuuggaccagggu

SEQ ID NO: 726 - RNA, 22 nt, Artificial Sequence
  LRRK2 RNA guide
cuccaggauuuggaccaggguu

SEQ ID NO: 727 - RNA, 22 nt, Artificial Sequence
  LRRK2 RNA guide
gaaaacagauagaaacccuggu

SEQ ID NO: 728 - RNA, 22 nt, Artificial Sequence
  LRRK2 RNA guide
gaaacccugguccaaauccugg

SEQ ID NO: 729 - RNA, 22 nt, Artificial Sequence
  LRRK2 RNA guide
gaaggaaaacagauagaaaccc

SEQ ID NO: 730 - RNA, 22 nt, Artificial Sequence
  LRRK2 RNA guide
gaccaggguuucuaucuguuuu

SEQ ID NO: 731 - RNA, 22 nt, Artificial Sequence
  LRRK2 RNA guide
gauagaaacccugguccaaauc

SEQ ID NO: 732 - RNA, 22 nt, Artificial Sequence
  LRRK2 RNA guide
gauccuccaggauuuggaccag

SEQ ID NO: 733 - RNA, 22 nt, Artificial Sequence
  LRRK2 RNA guide
gauuuggaccaggguuucuauc

SEQ ID NO: 734 - RNA, 22 nt, Artificial Sequence
  LRRK2 RNA guide
gcagauccuccaggauuuggac

SEQ ID NO: 735 - RNA, 22 nt, Artificial Sequence
  LRRK2 RNA guide
ggaaaacagauagaaacccugg

SEQ ID NO: 736 - RNA, 22 nt, Artificial Sequence
  LRRK2 RNA guide
ggaaggaaaacagauagaaacc

SEQ ID NO: 737 - RNA, 22 nt, Artificial Sequence
  LRRK2 RNA guide
ggaccaggguuucuaucuguuu

SEQ ID NO: 738 - RNA, 22 nt, Artificial Sequence
  LRRK2 RNA guide
ggauuuggaccaggguuucuau

SEQ ID NO: 739 - RNA, 22 nt, Artificial Sequence
  LRRK2 RNA guide
ggguuucuaucuguuuuccuuc

SEQ ID NO: 740 - RNA, 22 nt, Artificial Sequence
  LRRK2 RNA guide
guccaggaaggaaaacagauag

SEQ ID NO: 741 - RNA, 22 nt, Artificial Sequence
  LRRK2 RNA guide
uagaaacccugguccaaauccu

SEQ ID NO: 742 - RNA, 22 nt, Artificial Sequence
  LRRK2 RNA guide
uccaggaaggaaaacagauaga

SEQ ID NO: 743 - RNA, 22 nt, Artificial Sequence
  LRRK2 RNA guide
uccaggauuuggaccaggguuu

SEQ ID NO: 744 - RNA, 22 nt, Artificial Sequence
  LRRK2 RNA guide
uccuccaggauuuggaccaggg

SEQ ID NO: 745 - RNA, 22 nt, Artificial Sequence
  LRRK2 RNA guide
uggaccaggguuucuaucuguu

SEQ ID NO: 746 - RNA, 22 nt, Artificial Sequence
  LRRK2 RNA guide
uuggaccaggguuucuaucugu

SEQ ID NO: 747 - RNA, 22 nt, Artificial Sequence
  LRRK2 RNA guide
uuuggaccaggguuucuaucug

SEQ ID NO: 748 - RNA, 20 nt, Artificial Sequence
  LRRK2 RNA guide
aaauaacuugaaggcuggaa

SEQ ID NO: 749 - RNA, 20 nt, Artificial Sequence
  LRRK2 RNA guide
aacuugaaggcuggaaaaca

SEQ ID NO: 750 - RNA, 20 nt, Artificial Sequence
  LRRK2 RNA guide
aauaacuugaaggcuggaaa

SEQ ID NO: 751 - RNA, 20 nt, Artificial Sequence
  LRRK2 RNA guide
acccacuuguuuuccagccu

SEQ ID NO: 752 - RNA, 20 nt, Artificial Sequence
  LRRK2 RNA guide
acuugaaggcuggaaaacaa

SEQ ID NO: 753 - RNA, 20 nt, Artificial Sequence
  LRRK2 RNA guide
acuuguuuuccagccuucaa

SEQ ID NO: 754 - RNA, 20 nt, Artificial Sequence
  LRRK2 RNA guide
agccuucaaguuauuucaag

SEQ ID NO: 755 - RNA, 20 nt, Artificial Sequence
  LRRK2 RNA guide
auaacuugaaggcuggaaaa

SEQ ID NO: 756 - RNA, 20 nt, Artificial Sequence
  LRRK2 RNA guide
cacccacuuguuuuccagcc

SEQ ID NO: 757 - RNA, 20 nt, Artificial Sequence
  LRRK2 RNA guide
cacuuguuuuccagccuuca

SEQ ID NO: 758 - RNA, 20 nt, Artificial Sequence
  LRRK2 RNA guide
cagccuucaaguuauuucaa

SEQ ID NO: 759 - RNA, 20 nt, Artificial Sequence
  LRRK2 RNA guide
ccacccacuuguuuuccagc

SEQ ID NO: 760 - RNA, 20 nt, Artificial Sequence
  LRRK2 RNA guide
ccacuuguuuuccagccuuc

SEQ ID NO: 761 - RNA, 20 nt, Artificial Sequence
  LRRK2 RNA guide
ccagccuucaaguuauuuca

SEQ ID NO: 762 - RNA, 20 nt, Artificial Sequence
  LRRK2 RNA guide
cccacccacuuguuuuccag

SEQ ID NO: 763 - RNA, 20 nt, Artificial Sequence
  LRRK2 RNA guide
cccacuuguuuuccagccuu

SEQ ID NO: 764 - RNA, 20 nt, Artificial Sequence
  LRRK2 RNA guide
ccccacccacuuguuuucca

SEQ ID NO: 765 - RNA, 20 nt, Artificial Sequence
  LRRK2 RNA guide
ccuucaaguuauuucaaggc

SEQ ID NO: 766 - RNA, 20 nt, Artificial Sequence
  LRRK2 RNA guide
ccuugaaauaacuugaaggc

SEQ ID NO: 767 - RNA, 20 nt, Artificial Sequence
  LRRK2 RNA guide
cuucaaguuauuucaaggca

SEQ ID NO: 768 - RNA, 20 nt, Artificial Sequence
  LRRK2 RNA guide
cuugaaauaacuugaaggcu

SEQ ID NO: 769 - RNA, 20 nt, Artificial Sequence
  LRRK2 RNA guide
cuugaaggcuggaaaacaag

SEQ ID NO: 770 - RNA, 20 nt, Artificial Sequence
  LRRK2 RNA guide
cuuguuuuccagccuucaag

SEQ ID NO: 771 - RNA, 20 nt, Artificial Sequence
  LRRK2 RNA guide
gaaauaacuugaaggcugga

SEQ ID NO: 772 - RNA, 20 nt, Artificial Sequence
  LRRK2 RNA guide
gaaggcuggaaaacaagugg

SEQ ID NO: 773 - RNA, 20 nt, Artificial Sequence
  LRRK2 RNA guide
gccuucaaguuauuucaagg

SEQ ID NO: 774 - RNA, 20 nt, Artificial Sequence
  LRRK2 RNA guide
gccuugaaauaacuugaagg

SEQ ID NO: 775 - RNA, 20 nt, Artificial Sequence
  LRRK2 RNA guide
guuuuccagccuucaaguua

SEQ ID NO: 776 - RNA, 20 nt, Artificial Sequence
  LRRK2 RNA guide
uaacuugaaggcuggaaaac

SEQ ID NO: 777 - RNA, 20 nt, Artificial Sequence
  LRRK2 RNA guide
uccagccuucaaguuauuuc

SEQ ID NO: 778 - RNA, 20 nt, Artificial Sequence
  LRRK2 RNA guide
ugaaauaacuugaaggcugg

SEQ ID NO: 779 - RNA, 20 nt, Artificial Sequence
  LRRK2 RNA guide
ugaaggcuggaaaacaagug

SEQ ID NO: 780 - RNA, 20 nt, Artificial Sequence
  LRRK2 RNA guide
ugccuugaaauaacuugaag

SEQ ID NO: 781 - RNA, 20 nt, Artificial Sequence
  LRRK2 RNA guide
uguuuuccagccuucaaguu

SEQ ID NO: 782 - RNA, 20 nt, Artificial Sequence
  LRRK2 RNA guide
uucaaguuauuucaaggcaa

SEQ ID NO: 783 - RNA, 20 nt, Artificial Sequence
  LRRK2 RNA guide
uuccagccuucaaguuauuu

SEQ ID NO: 784 - RNA, 20 nt, Artificial Sequence
  LRRK2 RNA guide
uugaaauaacuugaaggcug

SEQ ID NO: 785 - RNA, 20 nt, Artificial Sequence
  LRRK2 RNA guide
uugaaggcuggaaaacaagu

SEQ ID NO: 786 - RNA, 20 nt, Artificial Sequence
  LRRK2 RNA guide
uugccuugaaauaacuugaa

SEQ ID NO: 787 - RNA, 20 nt, Artificial Sequence
  LRRK2 RNA guide
uuguuuuccagccuucaagu

SEQ ID NO: 788 - RNA, 20 nt, Artificial Sequence
  LRRK2 RNA guide
uuuccagccuucaaguuauu

SEQ ID NO: 789 - RNA, 20 nt, Artificial Sequence
  LRRK2 RNA guide
uuugccuugaaauaacuuga

SEQ ID NO: 790 - RNA, 20 nt, Artificial Sequence
  LRRK2 RNA guide
uuuuccagccuucaaguuau

SEQ ID NO: 791 - RNA, 20 nt, Artificial Sequence
  LRRK2 RNA guide
uuuugccuugaaauaacuug

SEQ ID NO: 792 - RNA, 21 nt, Artificial Sequence
  LRRK2 RNA guide
aaauaacuugaaggcuggaaa

SEQ ID NO: 793 - RNA, 21 nt, Artificial Sequence
  LRRK2 RNA guide
aacuugaaggcuggaaaacaa

SEQ ID NO: 794 - RNA, 21 nt, Artificial Sequence
  LRRK2 RNA guide
aauaacuugaaggcuggaaaa

SEQ ID NO: 795 - RNA, 21 nt, Artificial Sequence
  LRRK2 RNA guide
acccacuuguuuuccagccuu

SEQ ID NO: 796 - RNA, 21 nt, Artificial Sequence
  LRRK2 RNA guide
acuugaaggcuggaaaacaag

SEQ ID NO: 797 - RNA, 21 nt, Artificial Sequence
  LRRK2 RNA guide
acuuguuuuccagccuucaag

SEQ ID NO: 798 - RNA, 21 nt, Artificial Sequence
  LRRK2 RNA guide
agccuucaaguuauuucaagg

SEQ ID NO: 799 - RNA, 21 nt, Artificial Sequence
  LRRK2 RNA guide
auaacuugaaggcuggaaaac

SEQ ID NO: 800 - RNA, 21 nt, Artificial Sequence
  LRRK2 RNA guide
cacccacuuguuuuccagccu

SEQ ID NO: 801 - RNA, 21 nt, Artificial Sequence
  LRRK2 RNA guide
cacuuguuuuccagccuucaa

SEQ ID NO: 802 - RNA, 21 nt, Artificial Sequence
  LRRK2 RNA guide
cagccuucaaguuauuucaag

SEQ ID NO: 803 - RNA, 21 nt, Artificial Sequence
  LRRK2 RNA guide
ccacccacuuguuuuccagcc

SEQ ID NO: 804 - RNA, 21 nt, Artificial Sequence
  LRRK2 RNA guide
ccacuuguuuuccagccuuca

SEQ ID NO: 805 - RNA, 21 nt, Artificial Sequence
  LRRK2 RNA guide
ccagccuucaaguuauuucaa

SEQ ID NO: 806 - RNA, 21 nt, Artificial Sequence
  LRRK2 RNA guide
cccacccacuuguuuuccagc

SEQ ID NO: 807 - RNA, 21 nt, Artificial Sequence
  LRRK2 RNA guide
cccacuuguuuuccagccuuc

SEQ ID NO: 808 - RNA, 21 nt, Artificial Sequence
  LRRK2 RNA guide
ccccacccacuuguuuuccag

SEQ ID NO: 809 - RNA, 21 nt, Artificial Sequence
  LRRK2 RNA guide
ccuucaaguuauuucaaggca

SEQ ID NO: 810 - RNA, 21 nt, Artificial Sequence
  LRRK2 RNA guide
ccuugaaauaacuugaaggcu

SEQ ID NO: 811 - RNA, 21 nt, Artificial Sequence
  LRRK2 RNA guide
cuucaaguuauuucaaggcaa

SEQ ID NO: 812 - RNA, 21 nt, Artificial Sequence
  LRRK2 RNA guide
cuugaaauaacuugaaggcug

SEQ ID NO: 813 - RNA, 21 nt, Artificial Sequence
  LRRK2 RNA guide
cuugaaggcuggaaaacaagu

SEQ ID NO: 814 - RNA, 21 nt, Artificial Sequence
  LRRK2 RNA guide
cuuguuuuccagccuucaagu

SEQ ID NO: 815 - RNA, 21 nt, Artificial Sequence
  LRRK2 RNA guide
gaaauaacuugaaggcuggaa

SEQ ID NO: 816 - RNA, 21 nt, Artificial Sequence
  LRRK2 RNA guide
gaaggcuggaaaacaaguggg

SEQ ID NO: 817 - RNA, 21 nt, Artificial Sequence
  LRRK2 RNA guide
gccuucaaguuauuucaaggc

SEQ ID NO: 818 - RNA, 21 nt, Artificial Sequence
  LRRK2 RNA guide
gccuugaaauaacuugaaggc

SEQ ID NO: 819 - RNA, 21 nt, Artificial Sequence
  LRRK2 RNA guide
guuuuccagccuucaaguuau

SEQ ID NO: 820 - RNA, 21 nt, Artificial Sequence
  LRRK2 RNA guide
uaacuugaaggcuggaaaaca

SEQ ID NO: 821 - RNA, 21 nt, Artificial Sequence
  LRRK2 RNA guide
uccagccuucaaguuauuuca

SEQ ID NO: 822 - RNA, 21 nt, Artificial Sequence
  LRRK2 RNA guide
uccccacccacuuguuuucca

SEQ ID NO: 823 - RNA, 21 nt, Artificial Sequence
  LRRK2 RNA guide
ugaaauaacuugaaggcugga

SEQ ID NO: 824 - RNA, 21 nt, Artificial Sequence
  LRRK2 RNA guide
ugaaggcuggaaaacaagugg

SEQ ID NO: 825 - RNA, 21 nt, Artificial Sequence
  LRRK2 RNA guide
ugccuugaaauaacuugaagg

SEQ ID NO: 826 - RNA, 21 nt, Artificial Sequence
  LRRK2 RNA guide
uguuuuccagccuucaaguua

SEQ ID NO: 827 - RNA, 21 nt, Artificial Sequence
  LRRK2 RNA guide
uuccagccuucaaguuauuuc

SEQ ID NO: 828 - RNA, 21 nt, Artificial Sequence
  LRRK2 RNA guide
uugaaauaacuugaaggcugg

SEQ ID NO: 829 - RNA, 21 nt, Artificial Sequence
  LRRK2 RNA guide
uugaaggcuggaaaacaagug

SEQ ID NO: 830 - RNA, 21 nt, Artificial Sequence
  LRRK2 RNA guide
uugccuugaaauaacuugaag

SEQ ID NO: 831 - RNA, 21 nt, Artificial Sequence
  LRRK2 RNA guide
uuguuuuccagccuucaaguu

SEQ ID NO: 832 - RNA, 21 nt, Artificial Sequence
  LRRK2 RNA guide
uuuccagccuucaaguuauuu

SEQ ID NO: 833 - RNA, 21 nt, Artificial Sequence
  LRRK2 RNA guide
uuuuccagccuucaaguuauu

SEQ ID NO: 834 - RNA, 22 nt, Artificial Sequence
  LRRK2 RNA guide
aaauaacuugaaggcuggaaaa

SEQ ID NO: 835 - RNA, 22 nt, Artificial Sequence
  LRRK2 RNA guide
aacuugaaggcuggaaaacaag

SEQ ID NO: 836 - RNA, 22 nt, Artificial Sequence
  LRRK2 RNA guide
aauaacuugaaggcuggaaaac

SEQ ID NO: 837 - RNA, 22 nt, Artificial Sequence
  LRRK2 RNA guide
acccacuuguuuuccagccuuc

SEQ ID NO: 838 - RNA, 22 nt, Artificial Sequence
  LRRK2 RNA guide
acuugaaggcuggaaaacaagu

SEQ ID NO: 839 - RNA, 22 nt, Artificial Sequence
  LRRK2 RNA guide
acuuguuuuccagccuucaagu

SEQ ID NO: 840 - RNA, 22 nt, Artificial Sequence
  LRRK2 RNA guide
agccuucaaguuauuucaaggc

SEQ ID NO: 841 - RNA, 22 nt, Artificial Sequence
  LRRK2 RNA guide
auaacuugaaggcuggaaaaca

SEQ ID NO: 842 - RNA, 22 nt, Artificial Sequence
  LRRK2 RNA guide
cacccacuuguuuuccagccuu

SEQ ID NO: 843 - RNA, 22 nt, Artificial Sequence
  LRRK2 RNA guide
cacuuguuuuccagccuucaag

SEQ ID NO: 844 - RNA, 22 nt, Artificial Sequence
  LRRK2 RNA guide
cagccuucaaguuauuucaagg

SEQ ID NO: 845 - RNA, 22 nt, Artificial Sequence
  LRRK2 RNA guide
ccacccacuuguuuuccagccu

SEQ ID NO: 846 - RNA, 22 nt, Artificial Sequence
  LRRK2 RNA guide
ccacuuguuuuccagccuucaa

SEQ ID NO: 847 - RNA, 22 nt, Artificial Sequence
  LRRK2 RNA guide
ccagccuucaaguuauuucaag

SEQ ID NO: 848 - RNA, 22 nt, Artificial Sequence
  LRRK2 RNA guide
cccacccacuuguuuuccagcc

SEQ ID NO: 849 - RNA, 22 nt, Artificial Sequence
  LRRK2 RNA guide
cccacuuguuuuccagccuuca

SEQ ID NO: 850 - RNA, 22 nt, Artificial Sequence
  LRRK2 RNA guide
ccccacccacuuguuuuccagc

SEQ ID NO: 851 - RNA, 22 nt, Artificial Sequence
  LRRK2 RNA guide
ccuucaaguuauuucaaggcaa

SEQ ID NO: 852 - RNA, 22 nt, Artificial Sequence
  LRRK2 RNA guide
ccuugaaauaacuugaaggcug

SEQ ID NO: 853 - RNA, 22 nt, Artificial Sequence
  LRRK2 RNA guide
cuucaaguuauuucaaggcaaa

SEQ ID NO: 854 - RNA, 22 nt, Artificial Sequence
  LRRK2 RNA guide
cuugaaauaacuugaaggcugg

SEQ ID NO: 855 - RNA, 22 nt, Artificial Sequence
  LRRK2 RNA guide
cuugaaggcuggaaaacaagug

SEQ ID NO: 856 - RNA, 22 nt, Artificial Sequence
  LRRK2 RNA guide
cuuguuuuccagccuucaaguu

SEQ ID NO: 857 - RNA, 22 nt, Artificial Sequence
  LRRK2 RNA guide
gaaauaacuugaaggcuggaaa

SEQ ID NO: 858 - RNA, 22 nt, Artificial Sequence
  LRRK2 RNA guide
gaaggcuggaaaacaagugggu

SEQ ID NO: 859 - RNA, 22 nt, Artificial Sequence
  LRRK2 RNA guide
gccuucaaguuauuucaaggca

SEQ ID NO: 860 - RNA, 22 nt, Artificial Sequence
  LRRK2 RNA guide
gccuugaaauaacuugaaggcu

SEQ ID NO: 861 - RNA, 22 nt, Artificial Sequence
  LRRK2 RNA guide
guuuuccagccuucaaguuauu

SEQ ID NO: 862 - RNA, 22 nt, Artificial Sequence
  LRRK2 RNA guide
uaacuugaaggcuggaaaacaa

SEQ ID NO: 863 - RNA, 22 nt, Artificial Sequence
  LRRK2 RNA guide
uccagccuucaaguuauuucaa

SEQ ID NO: 864 - RNA, 22 nt, Artificial Sequence
  LRRK2 RNA guide
uccccacccacuuguuuuccag

SEQ ID NO: 865 - RNA, 22 nt, Artificial Sequence
  LRRK2 RNA guide
ugaaauaacuugaaggcuggaa

SEQ ID NO: 866 - RNA, 22 nt, Artificial Sequence
  LRRK2 RNA guide
ugaaggcuggaaaacaaguggg

SEQ ID NO: 867 - RNA, 22 nt, Artificial Sequence
  LRRK2 RNA guide
ugccuugaaauaacuugaaggc

SEQ ID NO: 868 - RNA, 22 nt, Artificial Sequence
  LRRK2 RNA guide
uguuuuccagccuucaaguuau

SEQ ID NO: 869 - RNA, 22 nt, Artificial Sequence
  LRRK2 RNA guide
uuccagccuucaaguuauuuca

SEQ ID NO: 870 - RNA, 22 nt, Artificial Sequence
  LRRK2 RNA guide
uuccccacccacuuguuuucca

SEQ ID NO: 871 - RNA, 22 nt, Artificial Sequence
  LRRK2 RNA guide
uugaaauaacuugaaggcugga

SEQ ID NO: 872 - RNA, 22 nt, Artificial Sequence
  LRRK2 RNA guide
uugaaggcuggaaaacaagugg

SEQ ID NO: 873 - RNA, 22 nt, Artificial Sequence
  LRRK2 RNA guide
uugccuugaaauaacuugaagg

SEQ ID NO: 874 - RNA, 22 nt, Artificial Sequence
  LRRK2 RNA guide
uuguuuuccagccuucaaguua

SEQ ID NO: 875 - RNA, 22 nt, Artificial Sequence
  LRRK2 RNA guide
uuuccagccuucaaguuauuuc

SEQ ID NO: 876 - RNA, 22 nt, Artificial Sequence
  LRRK2 RNA guide
uuugccuugaaauaacuugaag

SEQ ID NO: 877 - RNA, 22 nt, Artificial Sequence
  LRRK2 RNA guide
uuuuccagccuucaaguuauuu

SEQ ID NO: 878 - RNA, 20 nt, Artificial Sequence
  LRRK2 RNA guide
acacucgcgacucucguaua

SEQ ID NO: 879 - RNA, 20 nt, Artificial Sequence
  LRRK2 RNA guide
acgagagucgcgagugugca

SEQ ID NO: 880 - RNA, 20 nt, Artificial Sequence
  LRRK2 RNA guide
acuccuauacgagagucgcg

SEQ ID NO: 881 - RNA, 20 nt, Artificial Sequence
  LRRK2 RNA guide
acucgcgacucucguauagg

SEQ ID NO: 882 - RNA, 20 nt, Artificial Sequence
  LRRK2 RNA guide
acucucguauaggaguccaa

SEQ ID NO: 883 - RNA, 20 nt, Artificial Sequence
  LRRK2 RNA guide
auacgagagucgcgagugug

SEQ ID NO: 884 - RNA, 20 nt, Artificial Sequence
  LRRK2 RNA guide
aucgucuuggacuccuauac

SEQ ID NO: 885 - RNA, 20 nt, Artificial Sequence
  LRRK2 RNA guide
cacacucgcgacucucguau

SEQ ID NO: 886 - RNA, 20 nt, Artificial Sequence
  LRRK2 RNA guide
cacucgcgacucucguauag

SEQ ID NO: 887 - RNA, 20 nt, Artificial Sequence
  LRRK2 RNA guide
ccuauacgagagucgcgagu

SEQ ID NO: 888 - RNA, 20 nt, Artificial Sequence
  LRRK2 RNA guide
cgacucucguauaggagucc

SEQ ID NO: 889 - RNA, 20 nt, Artificial Sequence
  LRRK2 RNA guide
cgcgacucucguauaggagu

SEQ ID NO: 890 - RNA, 20 nt, Artificial Sequence
  LRRK2 RNA guide
cguauaggaguccaagacga

SEQ ID NO: 891 - RNA, 20 nt, Artificial Sequence
  LRRK2 RNA guide
cgucuuggacuccuauacga

SEQ ID NO: 892 - RNA, 20 nt, Artificial Sequence
  LRRK2 RNA guide
cuauacgagagucgcgagug

SEQ ID NO: 893 - RNA, 20 nt, Artificial Sequence
  LRRK2 RNA guide
cuccuauacgagagucgcga

SEQ ID NO: 894 - RNA, 20 nt, Artificial Sequence
  LRRK2 RNA guide
cucgcgacucucguauagga

SEQ ID NO: 895 - RNA, 20 nt, Artificial Sequence
  LRRK2 RNA guide
cucguauaggaguccaagac

SEQ ID NO: 896 - RNA, 20 nt, Artificial Sequence
  LRRK2 RNA guide
cucucguauaggaguccaag

SEQ ID NO: 897 - RNA, 20 nt, Artificial Sequence
  LRRK2 RNA guide
cugcacacucgcgacucucg

SEQ ID NO: 898 - RNA, 20 nt, Artificial Sequence
  LRRK2 RNA guide
cuuggacuccuauacgagag

SEQ ID NO: 899 - RNA, 20 nt, Artificial Sequence
  LRRK2 RNA guide
gacuccuauacgagagucgc

SEQ ID NO: 900 - RNA, 20 nt, Artificial Sequence
  LRRK2 RNA guide
gacucucguauaggagucca

SEQ ID NO: 901 - RNA, 20 nt, Artificial Sequence
  LRRK2 RNA guide
gaucgucuuggacuccuaua

SEQ ID NO: 902 - RNA, 20 nt, Artificial Sequence
  LRRK2 RNA guide
gcacacucgcgacucucgua

SEQ ID NO: 903 - RNA, 20 nt, Artificial Sequence
  LRRK2 RNA guide
gcgacucucguauaggaguc

SEQ ID NO: 904 - RNA, 20 nt, Artificial Sequence
  LRRK2 RNA guide
gcugcacacucgcgacucuc

SEQ ID NO: 905 - RNA, 20 nt, Artificial Sequence
  LRRK2 RNA guide
ggacuccuauacgagagucg

SEQ ID NO: 906 - RNA, 20 nt, Artificial Sequence
  LRRK2 RNA guide
gucuuggacuccuauacgag

SEQ ID NO: 907 - RNA, 20 nt, Artificial Sequence
  LRRK2 RNA guide
guugaucgucuuggacuccu

SEQ ID NO: 908 - RNA, 20 nt, Artificial Sequence
  LRRK2 RNA guide
uacgagagucgcgagugugc

SEQ ID NO: 909 - RNA, 20 nt, Artificial Sequence
  LRRK2 RNA guide
uauacgagagucgcgagugu

SEQ ID NO: 910 - RNA, 20 nt, Artificial Sequence
  LRRK2 RNA guide
uccuauacgagagucgcgag

SEQ ID NO: 911 - RNA, 20 nt, Artificial Sequence
  LRRK2 RNA guide
ucgcgacucucguauaggag

SEQ ID NO: 912 - RNA, 20 nt, Artificial Sequence
  LRRK2 RNA guide
ucguauaggaguccaagacg

SEQ ID NO: 913 - RNA, 20 nt, Artificial Sequence
  LRRK2 RNA guide
ucgucuuggacuccuauacg

SEQ ID NO: 914 - RNA, 20 nt, Artificial Sequence
  LRRK2 RNA guide
ucucguauaggaguccaaga

SEQ ID NO: 915 - RNA, 20 nt, Artificial Sequence
  LRRK2 RNA guide
ucuuggacuccuauacgaga

SEQ ID NO: 916 - RNA, 20 nt, Artificial Sequence
  LRRK2 RNA guide
ugaucgucuuggacuccuau

SEQ ID NO: 917 - RNA, 20 nt, Artificial Sequence
  LRRK2 RNA guide
ugcacacucgcgacucucgu

SEQ ID NO: 918 - RNA, 20 nt, Artificial Sequence
  LRRK2 RNA guide
uggacuccuauacgagaguc

SEQ ID NO: 919 - RNA, 20 nt, Artificial Sequence
  LRRK2 RNA guide
uguugaucgucuuggacucc

SEQ ID NO: 920 - RNA, 20 nt, Artificial Sequence
  LRRK2 RNA guide
uugaucgucuuggacuccua

SEQ ID NO: 921 - RNA, 20 nt, Artificial Sequence
  LRRK2 RNA guide
uuggacuccuauacgagagu

SEQ ID NO: 922 - RNA, 21 nt, Artificial Sequence
  LRRK2 RNA guide
acacucgcgacucucguauag

SEQ ID NO: 923 - RNA, 21 nt, Artificial Sequence
  LRRK2 RNA guide
accugcugcacacucgcgacu

SEQ ID NO: 924 - RNA, 21 nt, Artificial Sequence
  LRRK2 RNA guide
acgagagucgcgagugugcag

SEQ ID NO: 925 - RNA, 21 nt, Artificial Sequence
  LRRK2 RNA guide
acuccuauacgagagucgcga

SEQ ID NO: 926 - RNA, 21 nt, Artificial Sequence
  LRRK2 RNA guide
acucgcgacucucguauagga

SEQ ID NO: 927 - RNA, 21 nt, Artificial Sequence
  LRRK2 RNA guide
acucucguauaggaguccaag

SEQ ID NO: 928 - RNA, 21 nt, Artificial Sequence
  LRRK2 RNA guide
auacgagagucgcgagugugc

SEQ ID NO: 929 - RNA, 21 nt, Artificial Sequence
  LRRK2 RNA guide
aucgucuuggacuccuauacg

SEQ ID NO: 930 - RNA, 21 nt, Artificial Sequence
  LRRK2 RNA guide
cacacucgcgacucucguaua

SEQ ID NO: 931 - RNA, 21 nt, Artificial Sequence
  LRRK2 RNA guide
cacucgcgacucucguauagg

SEQ ID NO: 932 - RNA, 21 nt, Artificial Sequence
  LRRK2 RNA guide
ccuauacgagagucgcgagug

SEQ ID NO: 933 - RNA, 21 nt, Artificial Sequence
  LRRK2 RNA guide
ccugcugcacacucgcgacuc

SEQ ID NO: 934 - RNA, 21 nt, Artificial Sequence
  LRRK2 RNA guide
cgacucucguauaggagucca

SEQ ID NO: 935 - RNA, 21 nt, Artificial Sequence
  LRRK2 RNA guide
cgcgacucucguauaggaguc

SEQ ID NO: 936 - RNA, 21 nt, Artificial Sequence
  LRRK2 RNA guide
cguauaggaguccaagacgau

SEQ ID NO: 937 - RNA, 21 nt, Artificial Sequence
  LRRK2 RNA guide
cgucuuggacuccuauacgag

SEQ ID NO: 938 - RNA, 21 nt, Artificial Sequence
  LRRK2 RNA guide
cuauacgagagucgcgagugu

SEQ ID NO: 939 - RNA, 21 nt, Artificial Sequence
  LRRK2 RNA guide
cuccuauacgagagucgcgag

SEQ ID NO: 940 - RNA, 21 nt, Artificial Sequence
  LRRK2 RNA guide
cucgcgacucucguauaggag

SEQ ID NO: 941 - RNA, 21 nt, Artificial Sequence
  LRRK2 RNA guide
cucguauaggaguccaagacg

SEQ ID NO: 942 - RNA, 21 nt, Artificial Sequence
  LRRK2 RNA guide
cucucguauaggaguccaaga

SEQ ID NO: 943 - RNA, 21 nt, Artificial Sequence
  LRRK2 RNA guide
cugcacacucgcgacucucgu

SEQ ID NO: 944 - RNA, 21 nt, Artificial Sequence
  LRRK2 RNA guide
cugcugcacacucgcgacucu

SEQ ID NO: 945 - RNA, 21 nt, Artificial Sequence
  LRRK2 RNA guide
cuguugaucgucuuggacucc

SEQ ID NO: 946 - RNA, 21 nt, Artificial Sequence
  LRRK2 RNA guide
cuuggacuccuauacgagagu

SEQ ID NO: 947 - RNA, 21 nt, Artificial Sequence
  LRRK2 RNA guide
gacuccuauacgagagucgcg

SEQ ID NO: 948 - RNA, 21 nt, Artificial Sequence
  LRRK2 RNA guide
gacucucguauaggaguccaa

SEQ ID NO: 949 - RNA, 21 nt, Artificial Sequence
  LRRK2 RNA guide
gaucgucuuggacuccuauac

SEQ ID NO: 950 - RNA, 21 nt, Artificial Sequence
  LRRK2 RNA guide
gcacacucgcgacucucguau

SEQ ID NO: 951 - RNA, 21 nt, Artificial Sequence
  LRRK2 RNA guide
gcgacucucguauaggagucc

SEQ ID NO: 952 - RNA, 21 nt, Artificial Sequence
  LRRK2 RNA guide
gcugcacacucgcgacucucg

SEQ ID NO: 953 - RNA, 21 nt, Artificial Sequence
  LRRK2 RNA guide
ggacuccuauacgagagucgc

SEQ ID NO: 954 - RNA, 21 nt, Artificial Sequence
  LRRK2 RNA guide
gucuuggacuccuauacgaga

SEQ ID NO: 955 - RNA, 21 nt, Artificial Sequence
  LRRK2 RNA guide
guugaucgucuuggacuccua

SEQ ID NO: 956 - RNA, 21 nt, Artificial Sequence
  LRRK2 RNA guide
uaccugcugcacacucgcgac

SEQ ID NO: 957 - RNA, 21 nt, Artificial Sequence
  LRRK2 RNA guide
uacgagagucgcgagugugca

SEQ ID NO: 958 - RNA, 21 nt, Artificial Sequence
  LRRK2 RNA guide
uauacgagagucgcgagugug

SEQ ID NO: 959 - RNA, 21 nt, Artificial Sequence
  LRRK2 RNA guide
uccuauacgagagucgcgagu

SEQ ID NO: 960 - RNA, 21 nt, Artificial Sequence
  LRRK2 RNA guide
ucgcgacucucguauaggagu

SEQ ID NO: 961 - RNA, 21 nt, Artificial Sequence
  LRRK2 RNA guide
ucguauaggaguccaagacga

SEQ ID NO: 962 - RNA, 21 nt, Artificial Sequence
  LRRK2 RNA guide
ucgucuuggacuccuauacga

SEQ ID NO: 963 - RNA, 21 nt, Artificial Sequence
  LRRK2 RNA guide
ucucguauaggaguccaagac

SEQ ID NO: 964 - RNA, 21 nt, Artificial Sequence
  LRRK2 RNA guide
ucuuggacuccuauacgagag

SEQ ID NO: 965 - RNA, 21 nt, Artificial Sequence
  LRRK2 RNA guide
ugaucgucuuggacuccuaua

SEQ ID NO: 966 - RNA, 21 nt, Artificial Sequence
  LRRK2 RNA guide
ugcacacucgcgacucucgua

SEQ ID NO: 967 - RNA, 21 nt, Artificial Sequence
  LRRK2 RNA guide
ugcugcacacucgcgacucuc

SEQ ID NO: 968 - RNA, 21 nt, Artificial Sequence
  LRRK2 RNA guide
uggacuccuauacgagagucg

SEQ ID NO: 969 - RNA, 21 nt, Artificial Sequence
  LRRK2 RNA guide
uguugaucgucuuggacuccu

SEQ ID NO: 970 - RNA, 21 nt, Artificial Sequence
  LRRK2 RNA guide
uugaucgucuuggacuccuau

SEQ ID NO: 971 - RNA, 21 nt, Artificial Sequence
  LRRK2 RNA guide
uuggacuccuauacgagaguc

SEQ ID NO: 972 - RNA, 22 nt, Artificial Sequence
  LRRK2 RNA guide
acacucgcgacucucguauagg

SEQ ID NO: 973 - RNA, 22 nt, Artificial Sequence
  LRRK2 RNA guide
accugcugcacacucgcgacuc

SEQ ID NO: 974 - RNA, 22 nt, Artificial Sequence
  LRRK2 RNA guide
acgagagucgcgagugugcagc

SEQ ID NO: 975 - RNA, 22 nt, Artificial Sequence
  LRRK2 RNA guide
acuccuauacgagagucgcgag

SEQ ID NO: 976 - RNA, 22 nt, Artificial Sequence
  LRRK2 RNA guide
acucgcgacucucguauaggag

SEQ ID NO: 977 - RNA, 22 nt, Artificial Sequence
  LRRK2 RNA guide
acucucguauaggaguccaaga

SEQ ID NO: 978 - RNA, 22 nt, Artificial Sequence
  LRRK2 RNA guide
auacgagagucgcgagugugca

SEQ ID NO: 979 - RNA, 22 nt, Artificial Sequence
  LRRK2 RNA guide
aucgucuuggacuccuauacga

SEQ ID NO: 980 - RNA, 22 nt, Artificial Sequence
  LRRK2 RNA guide
cacacucgcgacucucguauag

SEQ ID NO: 981 - RNA, 22 nt, Artificial Sequence
  LRRK2 RNA guide
cacucgcgacucucguauagga

SEQ ID NO: 982 - RNA, 22 nt, Artificial Sequence
  LRRK2 RNA guide
ccuauacgagagucgcgagugu

SEQ ID NO: 983 - RNA, 22 nt, Artificial Sequence
  LRRK2 RNA guide
ccugcugcacacucgcgacucu

SEQ ID NO: 984 - RNA, 22 nt, Artificial Sequence
  LRRK2 RNA guide
cgacucucguauaggaguccaa

SEQ ID NO: 985 - RNA, 22 nt, Artificial Sequence
  LRRK2 RNA guide
cgcgacucucguauaggagucc

SEQ ID NO: 986 - RNA, 22 nt, Artificial Sequence
  LRRK2 RNA guide
cguauaggaguccaagacgauc

SEQ ID NO: 987 - RNA, 22 nt, Artificial Sequence
  LRRK2 RNA guide
cgucuuggacuccuauacgaga

SEQ ID NO: 988 - RNA, 22 nt, Artificial Sequence
  LRRK2 RNA guide
cuauacgagagucgcgagugug

SEQ ID NO: 989 - RNA, 22 nt, Artificial Sequence
  LRRK2 RNA guide
cuccuauacgagagucgcgagu

SEQ ID NO: 990 - RNA, 22 nt, Artificial Sequence
  LRRK2 RNA guide
cucgcgacucucguauaggagu

SEQ ID NO: 991 - RNA, 22 nt, Artificial Sequence
  LRRK2 RNA guide
cucguauaggaguccaagacga

SEQ ID NO: 992 - RNA, 22 nt, Artificial Sequence
  LRRK2 RNA guide
cucucguauaggaguccaagac

SEQ ID NO: 993 - RNA, 22 nt, Artificial Sequence
  LRRK2 RNA guide
cugcacacucgcgacucucgua

SEQ ID NO: 994 - RNA, 22 nt, Artificial Sequence
  LRRK2 RNA guide
cugcugcacacucgcgacucuc

SEQ ID NO: 995 - RNA, 22 nt, Artificial Sequence
  LRRK2 RNA guide
cuguugaucgucuuggacuccu

SEQ ID NO: 996 - RNA, 22 nt, Artificial Sequence
  LRRK2 RNA guide
cuuggacuccuauacgagaguc

SEQ ID NO: 997 - RNA, 22 nt, Artificial Sequence
  LRRK2 RNA guide
gacuccuauacgagagucgcga

SEQ ID NO: 998 - RNA, 22 nt, Artificial Sequence
  LRRK2 RNA guide
gacucucguauaggaguccaag

SEQ ID NO: 999 - RNA, 22 nt, Artificial Sequence
  LRRK2 RNA guide
gaucgucuuggacuccuauacg

SEQ ID NO: 1000 - RNA, 22 nt, Artificial Sequence
  LRRK2 RNA guide
gcacacucgcgacucucguaua

SEQ ID NO: 1001 - RNA, 22 nt, Artificial Sequence
  LRRK2 RNA guide
gcgacucucguauaggagucca

SEQ ID NO: 1002 - RNA, 22 nt, Artificial Sequence
  LRRK2 RNA guide
gcugcacacucgcgacucucgu

SEQ ID NO: 1003 - RNA, 22 nt, Artificial Sequence
  LRRK2 RNA guide
ggacuccuauacgagagucgcg

SEQ ID NO: 1004 - RNA, 22 nt, Artificial Sequence
  LRRK2 RNA guide
gucuuggacuccuauacgagag

SEQ ID NO: 1005 - RNA, 22 nt, Artificial Sequence
  LRRK2 RNA guide
guugaucgucuuggacuccuau

SEQ ID NO: 1006 - RNA, 22 nt, Artificial Sequence
  LRRK2 RNA guide
uaccugcugcacacucgcgacu

SEQ ID NO: 1007 - RNA, 22 nt, Artificial Sequence
  LRRK2 RNA guide
uacgagagucgcgagugugcag

SEQ ID NO: 1008 - RNA, 22 nt, Artificial Sequence
  LRRK2 RNA guide
uauacgagagucgcgagugugc

SEQ ID NO: 1009 - RNA, 22 nt, Artificial Sequence
  LRRK2 RNA guide
uccuauacgagagucgcgagug

SEQ ID NO: 1010 - RNA, 22 nt, Artificial Sequence
  LRRK2 RNA guide
ucgcgacucucguauaggaguc

SEQ ID NO: 1011 - RNA, 22 nt, Artificial Sequence
  LRRK2 RNA guide
ucguauaggaguccaagacgau

SEQ ID NO: 1012 - RNA, 22 nt, Artificial Sequence
  LRRK2 RNA guide
ucgucuuggacuccuauacgag

SEQ ID NO: 1013 - RNA, 22 nt, Artificial Sequence
  LRRK2 RNA guide
ucucguauaggaguccaagacg

SEQ ID NO: 1014 - RNA, 22 nt, Artificial Sequence
  LRRK2 RNA guide
ucuguugaucgucuuggacucc

SEQ ID NO: 1015 - RNA, 22 nt, Artificial Sequence
  LRRK2 RNA guide
ucuuggacuccuauacgagagu

SEQ ID NO: 1016 - RNA, 22 nt, Artificial Sequence
  LRRK2 RNA guide
ugaucgucuuggacuccuauac

SEQ ID NO: 1017 - RNA, 22 nt, Artificial Sequence
  LRRK2 RNA guide
ugcacacucgcgacucucguau

SEQ ID NO: 1018 - RNA, 22 nt, Artificial Sequence
  LRRK2 RNA guide
ugcugcacacucgcgacucucg

SEQ ID NO: 1019 - RNA, 22 nt, Artificial Sequence
  LRRK2 RNA guide
uggacuccuauacgagagucgc

SEQ ID NO: 1020 - RNA, 22 nt, Artificial Sequence
  LRRK2 RNA guide
uguugaucgucuuggacuccua

SEQ ID NO: 1021 - RNA, 22 nt, Artificial Sequence
  LRRK2 RNA guide
uuaccugcugcacacucgcgac

SEQ ID NO: 1022 - RNA, 22 nt, Artificial Sequence
  LRRK2 RNA guide
uugaucgucuuggacuccuaua

SEQ ID NO: 1023 - RNA, 22 nt, Artificial Sequence
  LRRK2 RNA guide
uuggacuccuauacgagagucg

SEQ ID NO: 1024 - RNA, 20 nt, Artificial Sequence
  LRRK2 RNA guide
aaugccuuuaccugcugcac

SEQ ID NO: 1025 - RNA, 20 nt, Artificial Sequence
  LRRK2 RNA guide
acacuugcgacucucauaua

SEQ ID NO: 1026 - RNA, 20 nt, Artificial Sequence
  LRRK2 RNA guide
accugcugcacacuugcgac

SEQ ID NO: 1027 - RNA, 20 nt, Artificial Sequence
  LRRK2 RNA guide
acuccuauaugagagucgca

SEQ ID NO: 1028 - RNA, 20 nt, Artificial Sequence
  LRRK2 RNA guide
acuugcgacucucauauagg

SEQ ID NO: 1029 - RNA, 20 nt, Artificial Sequence
  LRRK2 RNA guide
agagucgcaagugugcagca

SEQ ID NO: 1030 - RNA, 20 nt, Artificial Sequence
  LRRK2 RNA guide
agucgcaagugugcagcagg

SEQ ID NO: 1031 - RNA, 20 nt, Artificial Sequence
  LRRK2 RNA guide
auaugagagucgcaagugug

SEQ ID NO: 1032 - RNA, 20 nt, Artificial Sequence
  LRRK2 RNA guide
augagagucgcaagugugca

SEQ ID NO: 1033 - RNA, 20 nt, Artificial Sequence
  LRRK2 RNA guide
augccuuuaccugcugcaca

SEQ ID NO: 1034 - RNA, 20 nt, Artificial Sequence
  LRRK2 RNA guide
caagugugcagcagguaaag

SEQ ID NO: 1035 - RNA, 20 nt, Artificial Sequence
  LRRK2 RNA guide
caaugccuuuaccugcugca

SEQ ID NO: 1036 - RNA, 20 nt, Artificial Sequence
  LRRK2 RNA guide
cacacuugcgacucucauau

SEQ ID NO: 1037 - RNA, 20 nt, Artificial Sequence
  LRRK2 RNA guide
cacuugcgacucucauauag

SEQ ID NO: 1038 - RNA, 20 nt, Artificial Sequence
  LRRK2 RNA guide
ccuauaugagagucgcaagu

SEQ ID NO: 1039 - RNA, 20 nt, Artificial Sequence
  LRRK2 RNA guide
ccugcugcacacuugcgacu

SEQ ID NO: 1040 - RNA, 20 nt, Artificial Sequence
  LRRK2 RNA guide
ccuuuaccugcugcacacuu

SEQ ID NO: 1041 - RNA, 20 nt, Artificial Sequence
  LRRK2 RNA guide
cgcaagugugcagcagguaa

SEQ ID NO: 1042 - RNA, 20 nt, Artificial Sequence
  LRRK2 RNA guide
cuauaugagagucgcaagug

SEQ ID NO: 1043 - RNA, 20 nt, Artificial Sequence
  LRRK2 RNA guide
cuccuauaugagagucgcaa

SEQ ID NO: 1044 - RNA, 20 nt, Artificial Sequence
  LRRK2 RNA guide
cugcacacuugcgacucuca

SEQ ID NO: 1045 - RNA, 20 nt, Artificial Sequence
  LRRK2 RNA guide
cugcugcacacuugcgacuc

SEQ ID NO: 1046 - RNA, 20 nt, Artificial Sequence
  LRRK2 RNA guide
cuugcgacucucauauagga

SEQ ID NO: 1047 - RNA, 20 nt, Artificial Sequence
  LRRK2 RNA guide
cuuggacuccuauaugagag

SEQ ID NO: 1048 - RNA, 20 nt, Artificial Sequence
  LRRK2 RNA guide
cuuuaccugcugcacacuug

SEQ ID NO: 1049 - RNA, 20 nt, Artificial Sequence
  LRRK2 RNA guide
gacuccuauaugagagucgc

SEQ ID NO: 1050 - RNA, 20 nt, Artificial Sequence
  LRRK2 RNA guide
gagagucgcaagugugcagc

SEQ ID NO: 1051 - RNA, 20 nt, Artificial Sequence
  LRRK2 RNA guide
gagucgcaagugugcagcag

SEQ ID NO: 1052 - RNA, 20 nt, Artificial Sequence
  LRRK2 RNA guide
gcaagugugcagcagguaaa

SEQ ID NO: 1053 - RNA, 20 nt, Artificial Sequence
  LRRK2 RNA guide
gcacacuugcgacucucaua

SEQ ID NO: 1054 - RNA, 20 nt, Artificial Sequence
  LRRK2 RNA guide
gcugcacacuugcgacucuc

SEQ ID NO: 1055 - RNA, 20 nt, Artificial Sequence
  LRRK2 RNA guide
ggacuccuauaugagagucg

SEQ ID NO: 1056 - RNA, 20 nt, Artificial Sequence
  LRRK2 RNA guide
gucgcaagugugcagcaggu

SEQ ID NO: 1057 - RNA, 20 nt, Artificial Sequence
  LRRK2 RNA guide
uaccugcugcacacuugcga

SEQ ID NO: 1058 - RNA, 20 nt, Artificial Sequence
  LRRK2 RNA guide
uauaugagagucgcaagugu

SEQ ID NO: 1059 - RNA, 20 nt, Artificial Sequence
  LRRK2 RNA guide
uaugagagucgcaagugugc

SEQ ID NO: 1060 - RNA, 20 nt, Artificial Sequence
  LRRK2 RNA guide
uccuauaugagagucgcaag

SEQ ID NO: 1061 - RNA, 20 nt, Artificial Sequence
  LRRK2 RNA guide
ucgcaagugugcagcaggua

SEQ ID NO: 1062 - RNA, 20 nt, Artificial Sequence
  LRRK2 RNA guide
ugagagucgcaagugugcag

SEQ ID NO: 1063 - RNA, 20 nt, Artificial Sequence
  LRRK2 RNA guide
ugcacacuugcgacucucau

SEQ ID NO: 1064 - RNA, 20 nt, Artificial Sequence
  LRRK2 RNA guide
ugccuuuaccugcugcacac

SEQ ID NO: 1065 - RNA, 20 nt, Artificial Sequence
  LRRK2 RNA guide
ugcugcacacuugcgacucu

SEQ ID NO: 1066 - RNA, 20 nt, Artificial Sequence
  LRRK2 RNA guide
uggacuccuauaugagaguc

SEQ ID NO: 1067 - RNA, 20 nt, Artificial Sequence
  LRRK2 RNA guide
uuaccugcugcacacuugcg

SEQ ID NO: 1068 - RNA, 20 nt, Artificial Sequence
  LRRK2 RNA guide
uugcgacucucauauaggag

SEQ ID NO: 1069 - RNA, 20 nt, Artificial Sequence
  LRRK2 RNA guide
uuggacuccuauaugagagu

SEQ ID NO: 1070 - RNA, 20 nt, Artificial Sequence
  LRRK2 RNA guide
uuuaccugcugcacacuugc

SEQ ID NO: 1071 - RNA, 21 nt, Artificial Sequence
  LRRK2 RNA guide
aaugccuuuaccugcugcaca

SEQ ID NO: 1072 - RNA, 21 nt, Artificial Sequence
  LRRK2 RNA guide
acaaugccuuuaccugcugca

SEQ ID NO: 1073 - RNA, 21 nt, Artificial Sequence
  LRRK2 RNA guide
acacuugcgacucucauauag

SEQ ID NO: 1074 - RNA, 21 nt, Artificial Sequence
  LRRK2 RNA guide
accugcugcacacuugcgacu

SEQ ID NO: 1075 - RNA, 21 nt, Artificial Sequence
  LRRK2 RNA guide
acuccuauaugagagucgcaa

SEQ ID NO: 1076 - RNA, 21 nt, Artificial Sequence
  LRRK2 RNA guide
acuugcgacucucauauagga

SEQ ID NO: 1077 - RNA, 21 nt, Artificial Sequence
  LRRK2 RNA guide
agagucgcaagugugcagcag

SEQ ID NO: 1078 - RNA, 21 nt, Artificial Sequence
  LRRK2 RNA guide
agucgcaagugugcagcaggu

SEQ ID NO: 1079 - RNA, 21 nt, Artificial Sequence
  LRRK2 RNA guide
auaugagagucgcaagugugc

SEQ ID NO: 1080 - RNA, 21 nt, Artificial Sequence
  LRRK2 RNA guide
augagagucgcaagugugcag

SEQ ID NO: 1081 - RNA, 21 nt, Artificial Sequence
  LRRK2 RNA guide
augccuuuaccugcugcacac

SEQ ID NO: 1082 - RNA, 21 nt, Artificial Sequence
  LRRK2 RNA guide
caagugugcagcagguaaagg

SEQ ID NO: 1083 - RNA, 21 nt, Artificial Sequence
  LRRK2 RNA guide
caaugccuuuaccugcugcac

SEQ ID NO: 1084 - RNA, 21 nt, Artificial Sequence
  LRRK2 RNA guide
cacacuugcgacucucauaua

SEQ ID NO: 1085 - RNA, 21 nt, Artificial Sequence
  LRRK2 RNA guide
cacuugcgacucucauauagg

SEQ ID NO: 1086 - RNA, 21 nt, Artificial Sequence
  LRRK2 RNA guide
ccuauaugagagucgcaagug

SEQ ID NO: 1087 - RNA, 21 nt, Artificial Sequence
  LRRK2 RNA guide
ccugcugcacacuugcgacuc

SEQ ID NO: 1088 - RNA, 21 nt, Artificial Sequence
  LRRK2 RNA guide
ccuuuaccugcugcacacuug

SEQ ID NO: 1089 - RNA, 21 nt, Artificial Sequence
  LRRK2 RNA guide
cgcaagugugcagcagguaaa

SEQ ID NO: 1090 - RNA, 21 nt, Artificial Sequence
  LRRK2 RNA guide
cuauaugagagucgcaagugu

SEQ ID NO: 1091 - RNA, 21 nt, Artificial Sequence
  LRRK2 RNA guide
cuccuauaugagagucgcaag

SEQ ID NO: 1092 - RNA, 21 nt, Artificial Sequence
  LRRK2 RNA guide
cugcacacuugcgacucucau

SEQ ID NO: 1093 - RNA, 21 nt, Artificial Sequence
  LRRK2 RNA guide
cugcugcacacuugcgacucu

SEQ ID NO: 1094 - RNA, 21 nt, Artificial Sequence
  LRRK2 RNA guide
cuugcgacucucauauaggag

SEQ ID NO: 1095 - RNA, 21 nt, Artificial Sequence
  LRRK2 RNA guide
cuuggacuccuauaugagagu

SEQ ID NO: 1096 - RNA, 21 nt, Artificial Sequence
  LRRK2 RNA guide
cuuuaccugcugcacacuugc

SEQ ID NO: 1097 - RNA, 21 nt, Artificial Sequence
  LRRK2 RNA guide
gacuccuauaugagagucgca

SEQ ID NO: 1098 - RNA, 21 nt, Artificial Sequence
  LRRK2 RNA guide
gagagucgcaagugugcagca

SEQ ID NO: 1099 - RNA, 21 nt, Artificial Sequence
  LRRK2 RNA guide
gagucgcaagugugcagcagg

SEQ ID NO: 1100 - RNA, 21 nt, Artificial Sequence
  LRRK2 RNA guide
gcaagugugcagcagguaaag

SEQ ID NO: 1101 - RNA, 21 nt, Artificial Sequence
  LRRK2 RNA guide
gcacacuugcgacucucauau

SEQ ID NO: 1102 - RNA, 21 nt, Artificial Sequence
  LRRK2 RNA guide
gccuuuaccugcugcacacuu

SEQ ID NO: 1103 - RNA, 21 nt, Artificial Sequence
  LRRK2 RNA guide
gcugcacacuugcgacucuca

SEQ ID NO: 1104 - RNA, 21 nt, Artificial Sequence
  LRRK2 RNA guide
ggacuccuauaugagagucgc

SEQ ID NO: 1105 - RNA, 21 nt, Artificial Sequence
  LRRK2 RNA guide
gucgcaagugugcagcaggua

SEQ ID NO: 1106 - RNA, 21 nt, Artificial Sequence
  LRRK2 RNA guide
uaccugcugcacacuugcgac

SEQ ID NO: 1107 - RNA, 21 nt, Artificial Sequence
  LRRK2 RNA guide
uauaugagagucgcaagugug

SEQ ID NO: 1108 - RNA, 21 nt, Artificial Sequence
  LRRK2 RNA guide
uaugagagucgcaagugugca

SEQ ID NO: 1109 - RNA, 21 nt, Artificial Sequence
  LRRK2 RNA guide
uccuauaugagagucgcaagu

SEQ ID NO: 1110 - RNA, 21 nt, Artificial Sequence
  LRRK2 RNA guide
ucgcaagugugcagcagguaa

SEQ ID NO: 1111 - RNA, 21 nt, Artificial Sequence
  LRRK2 RNA guide
ucuuggacuccuauaugagag

SEQ ID NO: 1112 - RNA, 21 nt, Artificial Sequence
  LRRK2 RNA guide
ugagagucgcaagugugcagc

SEQ ID NO: 1113 - RNA, 21 nt, Artificial Sequence
  LRRK2 RNA guide
ugcacacuugcgacucucaua

SEQ ID NO: 1114 - RNA, 21 nt, Artificial Sequence
  LRRK2 RNA guide
ugccuuuaccugcugcacacu

SEQ ID NO: 1115 - RNA, 21 nt, Artificial Sequence
  LRRK2 RNA guide
ugcugcacacuugcgacucuc

SEQ ID NO: 1116 - RNA, 21 nt, Artificial Sequence
  LRRK2 RNA guide
uggacuccuauaugagagucg

SEQ ID NO: 1117 - RNA, 21 nt, Artificial Sequence
  LRRK2 RNA guide
uuaccugcugcacacuugcga

SEQ ID NO: 1118 - RNA, 21 nt, Artificial Sequence
  LRRK2 RNA guide
uugcgacucucauauaggagu

SEQ ID NO: 1119 - RNA, 21 nt, Artificial Sequence
  LRRK2 RNA guide
uuggacuccuauaugagaguc

SEQ ID NO: 1120 - RNA, 21 nt, Artificial Sequence
  LRRK2 RNA guide
uuuaccugcugcacacuugcg

SEQ ID NO: 1121 - RNA, 22 nt, Artificial Sequence
  LRRK2 RNA guide
aacaaugccuuuaccugcugca

SEQ ID NO: 1122 - RNA, 22 nt, Artificial Sequence
  LRRK2 RNA guide
aaugccuuuaccugcugcacac

SEQ ID NO: 1123 - RNA, 22 nt, Artificial Sequence
  LRRK2 RNA guide
acaaugccuuuaccugcugcac

SEQ ID NO: 1124 - RNA, 22 nt, Artificial Sequence
  LRRK2 RNA guide
acacuugcgacucucauauagg

SEQ ID NO: 1125 - RNA, 22 nt, Artificial Sequence
  LRRK2 RNA guide
accugcugcacacuugcgacuc

SEQ ID NO: 1126 - RNA, 22 nt, Artificial Sequence
  LRRK2 RNA guide
acuccuauaugagagucgcaag

SEQ ID NO: 1127 - RNA, 22 nt, Artificial Sequence
  LRRK2 RNA guide
acuugcgacucucauauaggag

SEQ ID NO: 1128 - RNA, 22 nt, Artificial Sequence
  LRRK2 RNA guide
agagucgcaagugugcagcagg

SEQ ID NO: 1129 - RNA, 22 nt, Artificial Sequence
  LRRK2 RNA guide
agucgcaagugugcagcaggua

SEQ ID NO: 1130 - RNA, 22 nt, Artificial Sequence
  LRRK2 RNA guide
auaugagagucgcaagugugca

SEQ ID NO: 1131 - RNA, 22 nt, Artificial Sequence
  LRRK2 RNA guide
augagagucgcaagugugcagc

SEQ ID NO: 1132 - RNA, 22 nt, Artificial Sequence
  LRRK2 RNA guide
augccuuuaccugcugcacacu

SEQ ID NO: 1133 - RNA, 22 nt, Artificial Sequence
  LRRK2 RNA guide
caagugugcagcagguaaaggc

SEQ ID NO: 1134 - RNA, 22 nt, Artificial Sequence
  LRRK2 RNA guide
caaugccuuuaccugcugcaca

SEQ ID NO: 1135 - RNA, 22 nt, Artificial Sequence
  LRRK2 RNA guide
cacacuugcgacucucauauag

SEQ ID NO: 1136 - RNA, 22 nt, Artificial Sequence
  LRRK2 RNA guide
cacuugcgacucucauauagga

SEQ ID NO: 1137 - RNA, 22 nt, Artificial Sequence
  LRRK2 RNA guide
ccuauaugagagucgcaagugu

SEQ ID NO: 1138 - RNA, 22 nt, Artificial Sequence
  LRRK2 RNA guide
ccugcugcacacuugcgacucu

SEQ ID NO: 1139 - RNA, 22 nt, Artificial Sequence
  LRRK2 RNA guide
ccuuuaccugcugcacacuugc

SEQ ID NO: 1140 - RNA, 22 nt, Artificial Sequence
  LRRK2 RNA guide
cgcaagugugcagcagguaaag

SEQ ID NO: 1141 - RNA, 22 nt, Artificial Sequence
  LRRK2 RNA guide
cuauaugagagucgcaagugug

SEQ ID NO: 1142 - RNA, 22 nt, Artificial Sequence
  LRRK2 RNA guide
cuccuauaugagagucgcaagu

SEQ ID NO: 1143 - RNA, 22 nt, Artificial Sequence
  LRRK2 RNA guide
cugcacacuugcgacucucaua

SEQ ID NO: 1144 - RNA, 22 nt, Artificial Sequence
  LRRK2 RNA guide
cugcugcacacuugcgacucuc

SEQ ID NO: 1145 - RNA, 22 nt, Artificial Sequence
  LRRK2 RNA guide
cuugcgacucucauauaggagu

SEQ ID NO: 1146 - RNA, 22 nt, Artificial Sequence
  LRRK2 RNA guide
cuuggacuccuauaugagaguc

SEQ ID NO: 1147 - RNA, 22 nt, Artificial Sequence
  LRRK2 RNA guide
cuuuaccugcugcacacuugcg

SEQ ID NO: 1148 - RNA, 22 nt, Artificial Sequence
  LRRK2 RNA guide
gacuccuauaugagagucgcaa

SEQ ID NO: 1149 - RNA, 22 nt, Artificial Sequence
  LRRK2 RNA guide
gagagucgcaagugugcagcag

SEQ ID NO: 1150 - RNA, 22 nt, Artificial Sequence
  LRRK2 RNA guide
gagucgcaagugugcagcaggu

SEQ ID NO: 1151 - RNA, 22 nt, Artificial Sequence
  LRRK2 RNA guide
gcaagugugcagcagguaaagg

SEQ ID NO: 1152 - RNA, 22 nt, Artificial Sequence
  LRRK2 RNA guide
gcacacuugcgacucucauaua

SEQ ID NO: 1153 - RNA, 22 nt, Artificial Sequence
  LRRK2 RNA guide
gccuuuaccugcugcacacuug

SEQ ID NO: 1154 - RNA, 22 nt, Artificial Sequence
  LRRK2 RNA guide
gcugcacacuugcgacucucau

SEQ ID NO: 1155 - RNA, 22 nt, Artificial Sequence
  LRRK2 RNA guide
ggacuccuauaugagagucgca

SEQ ID NO: 1156 - RNA, 22 nt, Artificial Sequence
  LRRK2 RNA guide
gucgcaagugugcagcagguaa

SEQ ID NO: 1157 - RNA, 22 nt, Artificial Sequence
  LRRK2 RNA guide
gucuuggacuccuauaugagag

SEQ ID NO: 1158 - RNA, 22 nt, Artificial Sequence
  LRRK2 RNA guide
uaccugcugcacacuugcgacu

SEQ ID NO: 1159 - RNA, 22 nt, Artificial Sequence
  LRRK2 RNA guide
uauaugagagucgcaagugugc

SEQ ID NO: 1160 - RNA, 22 nt, Artificial Sequence
  LRRK2 RNA guide
uaugagagucgcaagugugcag

SEQ ID NO: 1161 - RNA, 22 nt, Artificial Sequence
  LRRK2 RNA guide
uccuauaugagagucgcaagug

SEQ ID NO: 1162 - RNA, 22 nt, Artificial Sequence
  LRRK2 RNA guide
ucgcaagugugcagcagguaaa

SEQ ID NO: 1163 - RNA, 22 nt, Artificial Sequence
  LRRK2 RNA guide
ucuuggacuccuauaugagagu

SEQ ID NO: 1164 - RNA, 22 nt, Artificial Sequence
  LRRK2 RNA guide
ugagagucgcaagugugcagca

SEQ ID NO: 1165 - RNA, 22 nt, Artificial Sequence
  LRRK2 RNA guide
ugcacacuugcgacucucauau

SEQ ID NO: 1166 - RNA, 22 nt, Artificial Sequence
  LRRK2 RNA guide
ugccuuuaccugcugcacacuu

SEQ ID NO: 1167 - RNA, 22 nt, Artificial Sequence
  LRRK2 RNA guide
ugcugcacacuugcgacucuca

SEQ ID NO: 1168 - RNA, 22 nt, Artificial Sequence
  LRRK2 RNA guide
uggacuccuauaugagagucgc

SEQ ID NO: 1169 - RNA, 22 nt, Artificial Sequence
  LRRK2 RNA guide
uuaccugcugcacacuugcgac

SEQ ID NO: 1170 - RNA, 22 nt, Artificial Sequence
  LRRK2 RNA guide
uugcgacucucauauaggaguc

SEQ ID NO: 1171 - RNA, 22 nt, Artificial Sequence
  LRRK2 RNA guide
uuggacuccuauaugagagucg

SEQ ID NO: 1172 - RNA, 22 nt, Artificial Sequence
  LRRK2 RNA guide
uuuaccugcugcacacuugcga

SEQ ID NO: 1173 - RNA, 20 nt, Artificial Sequence
  LRRK2 RNA guide
aaacaaugccuuuaccugcu

SEQ ID NO: 1174 - RNA, 20 nt, Artificial Sequence
  LRRK2 RNA guide
aacaaugccuuuaccugcug

SEQ ID NO: 1175 - RNA, 20 nt, Artificial Sequence
  LRRK2 RNA guide
accugcugcacgcucgcgac

SEQ ID NO: 1176 - RNA, 20 nt, Artificial Sequence
  LRRK2 RNA guide
acgcucgcgacucucauaua

SEQ ID NO: 1177 - RNA, 20 nt, Artificial Sequence
  LRRK2 RNA guide
acuccuauaugagagucgcg

SEQ ID NO: 1178 - RNA, 20 nt, Artificial Sequence
  LRRK2 RNA guide
agagucgcgagcgugcagca

SEQ ID NO: 1179 - RNA, 20 nt, Artificial Sequence
  LRRK2 RNA guide
agcgugcagcagguaaaggc

SEQ ID NO: 1180 - RNA, 20 nt, Artificial Sequence
  LRRK2 RNA guide
agucgcgagcgugcagcagg

SEQ ID NO: 1181 - RNA, 20 nt, Artificial Sequence
  LRRK2 RNA guide
auaugagagucgcgagcgug

SEQ ID NO: 1182 - RNA, 20 nt, Artificial Sequence
  LRRK2 RNA guide
augagagucgcgagcgugca

SEQ ID NO: 1183 - RNA, 20 nt, Artificial Sequence
  LRRK2 RNA guide
augccuuuaccugcugcacg

SEQ ID NO: 1184 - RNA, 20 nt, Artificial Sequence
  LRRK2 RNA guide
cacgcucgcgacucucauau

SEQ ID NO: 1185 - RNA, 20 nt, Artificial Sequence
  LRRK2 RNA guide
ccuauaugagagucgcgagc

SEQ ID NO: 1186 - RNA, 20 nt, Artificial Sequence
  LRRK2 RNA guide
ccugcugcacgcucgcgacu

SEQ ID NO: 1187 - RNA, 20 nt, Artificial Sequence
  LRRK2 RNA guide
ccuuuaccugcugcacgcuc

SEQ ID NO: 1188 - RNA, 20 nt, Artificial Sequence
  LRRK2 RNA guide
cgagcgugcagcagguaaag

SEQ ID NO: 1189 - RNA, 20 nt, Artificial Sequence
  LRRK2 RNA guide
cgcgagcgugcagcagguaa

SEQ ID NO: 1190 - RNA, 20 nt, Artificial Sequence
  LRRK2 RNA guide
cgcucgcgacucucauauag

SEQ ID NO: 1191 - RNA, 20 nt, Artificial Sequence
  LRRK2 RNA guide
cuauaugagagucgcgagcg

SEQ ID NO: 1192 - RNA, 20 nt, Artificial Sequence
  LRRK2 RNA guide
cuccuauaugagagucgcga

SEQ ID NO: 1193 - RNA, 20 nt, Artificial Sequence
  LRRK2 RNA guide
cugcacgcucgcgacucuca

SEQ ID NO: 1194 - RNA, 20 nt, Artificial Sequence
  LRRK2 RNA guide
cugcugcacgcucgcgacuc

SEQ ID NO: 1195 - RNA, 20 nt, Artificial Sequence
  LRRK2 RNA guide
cuuuaccugcugcacgcucg

SEQ ID NO: 1196 - RNA, 20 nt, Artificial Sequence
  LRRK2 RNA guide
gagagucgcgagcgugcagc

SEQ ID NO: 1197 - RNA, 20 nt, Artificial Sequence
  LRRK2 RNA guide
gagcgugcagcagguaaagg

SEQ ID NO: 1198 - RNA, 20 nt, Artificial Sequence
  LRRK2 RNA guide
gagucgcgagcgugcagcag

SEQ ID NO: 1199 - RNA, 20 nt, Artificial Sequence
  LRRK2 RNA guide
gcacgcucgcgacucucaua

SEQ ID NO: 1200 - RNA, 20 nt, Artificial Sequence
  LRRK2 RNA guide
gccuuuaccugcugcacgcu

SEQ ID NO: 1201 - RNA, 20 nt, Artificial Sequence
  LRRK2 RNA guide
gcgagcgugcagcagguaaa

SEQ ID NO: 1202 - RNA, 20 nt, Artificial Sequence
  LRRK2 RNA guide
gcgugcagcagguaaaggca

SEQ ID NO: 1203 - RNA, 20 nt, Artificial Sequence
  LRRK2 RNA guide
gcugcacgcucgcgacucuc

SEQ ID NO: 1204 - RNA, 20 nt, Artificial Sequence
  LRRK2 RNA guide
gucgcgagcgugcagcaggu

SEQ ID NO: 1205 - RNA, 20 nt, Artificial Sequence
  LRRK2 RNA guide
uaccugcugcacgcucgcga

SEQ ID NO: 1206 - RNA, 20 nt, Artificial Sequence
  LRRK2 RNA guide
uauaugagagucgcgagcgu

SEQ ID NO: 1207 - RNA, 20 nt, Artificial Sequence
  LRRK2 RNA guide
uaugagagucgcgagcgugc

SEQ ID NO: 1208 - RNA, 20 nt, Artificial Sequence
  LRRK2 RNA guide
uccuauaugagagucgcgag

SEQ ID NO: 1209 - RNA, 20 nt, Artificial Sequence
  LRRK2 RNA guide
ucgcgagcgugcagcaggua

SEQ ID NO: 1210 - RNA, 20 nt, Artificial Sequence
  LRRK2 RNA guide
ugagagucgcgagcgugcag

SEQ ID NO: 1211 - RNA, 20 nt, Artificial Sequence
  LRRK2 RNA guide
ugcacgcucgcgacucucau

SEQ ID NO: 1212 - RNA, 20 nt, Artificial Sequence
  LRRK2 RNA guide
ugccuuuaccugcugcacgc

SEQ ID NO: 1213 - RNA, 20 nt, Artificial Sequence
  LRRK2 RNA guide
ugcugcacgcucgcgacucu

SEQ ID NO: 1214 - RNA, 20 nt, Artificial Sequence
  LRRK2 RNA guide
uuaccugcugcacgcucgcg

SEQ ID NO: 1215 - RNA, 20 nt, Artificial Sequence
  LRRK2 RNA guide
uuuaccugcugcacgcucgc

SEQ ID NO: 1216 - RNA, 21 nt, Artificial Sequence
  LRRK2 RNA guide
aaaacaaugccuuuaccugcu

SEQ ID NO: 1217 - RNA, 21 nt, Artificial Sequence
  LRRK2 RNA guide
aaacaaugccuuuaccugcug

SEQ ID NO: 1218 - RNA, 21 nt, Artificial Sequence
  LRRK2 RNA guide
aacaaugccuuuaccugcugc

SEQ ID NO: 1219 - RNA, 21 nt, Artificial Sequence
  LRRK2 RNA guide
aaugccuuuaccugcugcacg

SEQ ID NO: 1220 - RNA, 21 nt, Artificial Sequence
  LRRK2 RNA guide
accugcugcacgcucgcgacu

SEQ ID NO: 1221 - RNA, 21 nt, Artificial Sequence
  LRRK2 RNA guide
acgcucgcgacucucauauag

SEQ ID NO: 1222 - RNA, 21 nt, Artificial Sequence
  LRRK2 RNA guide
acuccuauaugagagucgcga

SEQ ID NO: 1223 - RNA, 21 nt, Artificial Sequence
  LRRK2 RNA guide
agagucgcgagcgugcagcag

SEQ ID NO: 1224 - RNA, 21 nt, Artificial Sequence
  LRRK2 RNA guide
agcgugcagcagguaaaggca

SEQ ID NO: 1225 - RNA, 21 nt, Artificial Sequence
  LRRK2 RNA guide
agucgcgagcgugcagcaggu

SEQ ID NO: 1226 - RNA, 21 nt, Artificial Sequence
  LRRK2 RNA guide
auaugagagucgcgagcgugc

SEQ ID NO: 1227 - RNA, 21 nt, Artificial Sequence
  LRRK2 RNA guide
augagagucgcgagcgugcag

SEQ ID NO: 1228 - RNA, 21 nt, Artificial Sequence
  LRRK2 RNA guide
augccuuuaccugcugcacgc

SEQ ID NO: 1229 - RNA, 21 nt, Artificial Sequence
  LRRK2 RNA guide
cacgcucgcgacucucauaua

SEQ ID NO: 1230 - RNA, 21 nt, Artificial Sequence
  LRRK2 RNA guide
ccuauaugagagucgcgagcg

SEQ ID NO: 1231 - RNA, 21 nt, Artificial Sequence
  LRRK2 RNA guide
ccugcugcacgcucgcgacuc

SEQ ID NO: 1232 - RNA, 21 nt, Artificial Sequence
  LRRK2 RNA guide
ccuuuaccugcugcacgcucg

SEQ ID NO: 1233 - RNA, 21 nt, Artificial Sequence
  LRRK2 RNA guide
cgagcgugcagcagguaaagg

SEQ ID NO: 1234 - RNA, 21 nt, Artificial Sequence
  LRRK2 RNA guide
cgcgagcgugcagcagguaaa

SEQ ID NO: 1235 - RNA, 21 nt, Artificial Sequence
  LRRK2 RNA guide
cgcucgcgacucucauauagg

SEQ ID NO: 1236 - RNA, 21 nt, Artificial Sequence
  LRRK2 RNA guide
cuauaugagagucgcgagcgu

SEQ ID NO: 1237 - RNA, 21 nt, Artificial Sequence
  LRRK2 RNA guide
cuccuauaugagagucgcgag

SEQ ID NO: 1238 - RNA, 21 nt, Artificial Sequence
  LRRK2 RNA guide
cugcacgcucgcgacucucau

SEQ ID NO: 1239 - RNA, 21 nt, Artificial Sequence
  LRRK2 RNA guide
cugcugcacgcucgcgacucu

SEQ ID NO: 1240 - RNA, 21 nt, Artificial Sequence
  LRRK2 RNA guide
cuuuaccugcugcacgcucgc

SEQ ID NO: 1241 - RNA, 21 nt, Artificial Sequence
  LRRK2 RNA guide
gacuccuauaugagagucgcg

SEQ ID NO: 1242 - RNA, 21 nt, Artificial Sequence
  LRRK2 RNA guide
gagagucgcgagcgugcagca

SEQ ID NO: 1243 - RNA, 21 nt, Artificial Sequence
  LRRK2 RNA guide
gagcgugcagcagguaaaggc

SEQ ID NO: 1244 - RNA, 21 nt, Artificial Sequence
  LRRK2 RNA guide
gagucgcgagcgugcagcagg

SEQ ID NO: 1245 - RNA, 21 nt, Artificial Sequence
  LRRK2 RNA guide
gcacgcucgcgacucucauau

SEQ ID NO: 1246 - RNA, 21 nt, Artificial Sequence
  LRRK2 RNA guide
gccuuuaccugcugcacgcuc

SEQ ID NO: 1247 - RNA, 21 nt, Artificial Sequence
  LRRK2 RNA guide
gcgagcgugcagcagguaaag

SEQ ID NO: 1248 - RNA, 21 nt, Artificial Sequence
  LRRK2 RNA guide
gcgugcagcagguaaaggcau

SEQ ID NO: 1249 - RNA, 21 nt, Artificial Sequence
  LRRK2 RNA guide
gcugcacgcucgcgacucuca

SEQ ID NO: 1250 - RNA, 21 nt, Artificial Sequence
  LRRK2 RNA guide
gucgcgagcgugcagcaggua

SEQ ID NO: 1251 - RNA, 21 nt, Artificial Sequence
  LRRK2 RNA guide
uaccugcugcacgcucgcgac

SEQ ID NO: 1252 - RNA, 21 nt, Artificial Sequence
  LRRK2 RNA guide
uauaugagagucgcgagcgug

SEQ ID NO: 1253 - RNA, 21 nt, Artificial Sequence
  LRRK2 RNA guide
uaugagagucgcgagcgugca

SEQ ID NO: 1254 - RNA, 21 nt, Artificial Sequence
  LRRK2 RNA guide
uccuauaugagagucgcgagc

SEQ ID NO: 1255 - RNA, 21 nt, Artificial Sequence
  LRRK2 RNA guide
ucgcgagcgugcagcagguaa

SEQ ID NO: 1256 - RNA, 21 nt, Artificial Sequence
  LRRK2 RNA guide
ugagagucgcgagcgugcagc

SEQ ID NO: 1257 - RNA, 21 nt, Artificial Sequence
  LRRK2 RNA guide
ugcacgcucgcgacucucaua

SEQ ID NO: 1258 - RNA, 21 nt, Artificial Sequence
  LRRK2 RNA guide
ugccuuuaccugcugcacgcu

SEQ ID NO: 1259 - RNA, 21 nt, Artificial Sequence
  LRRK2 RNA guide
ugcugcacgcucgcgacucuc

SEQ ID NO: 1260 - RNA, 21 nt, Artificial Sequence
  LRRK2 RNA guide
uuaccugcugcacgcucgcga

SEQ ID NO: 1261 - RNA, 21 nt, Artificial Sequence
  LRRK2 RNA guide
uuuaccugcugcacgcucgcg

SEQ ID NO: 1262 - RNA, 22 nt, Artificial Sequence
  LRRK2 RNA guide
aaaacaaugccuuuaccugcug

SEQ ID NO: 1263 - RNA, 22 nt, Artificial Sequence
  LRRK2 RNA guide
aaacaaugccuuuaccugcugc

SEQ ID NO: 1264 - RNA, 22 nt, Artificial Sequence
  LRRK2 RNA guide
aaugccuuuaccugcugcacgc

SEQ ID NO: 1265 - RNA, 22 nt, Artificial Sequence
  LRRK2 RNA guide
accugcugcacgcucgcgacuc

SEQ ID NO: 1266 - RNA, 22 nt, Artificial Sequence
  LRRK2 RNA guide
acgcucgcgacucucauauagg

SEQ ID NO: 1267 - RNA, 22 nt, Artificial Sequence
  LRRK2 RNA guide
acuccuauaugagagucgcgag

SEQ ID NO: 1268 - RNA, 22 nt, Artificial Sequence
  LRRK2 RNA guide
agagucgcgagcgugcagcagg

SEQ ID NO: 1269 - RNA, 22 nt, Artificial Sequence
  LRRK2 RNA guide
agcgugcagcagguaaaggcau

SEQ ID NO: 1270 - RNA, 22 nt, Artificial Sequence
  LRRK2 RNA guide
agucgcgagcgugcagcaggua

SEQ ID NO: 1271 - RNA, 22 nt, Artificial Sequence
  LRRK2 RNA guide
auaugagagucgcgagcgugca

SEQ ID NO: 1272 - RNA, 22 nt, Artificial Sequence
  LRRK2 RNA guide
augagagucgcgagcgugcagc

SEQ ID NO: 1273 - RNA, 22 nt, Artificial Sequence
  LRRK2 RNA guide
augccuuuaccugcugcacgcu

SEQ ID NO: 1274 - RNA, 22 nt, Artificial Sequence
  LRRK2 RNA guide
caaugccuuuaccugcugcacg

SEQ ID NO: 1275 - RNA, 22 nt, Artificial Sequence
  LRRK2 RNA guide
cacgcucgcgacucucauauag

SEQ ID NO: 1276 - RNA, 22 nt, Artificial Sequence
  LRRK2 RNA guide
ccuauaugagagucgcgagcgu

SEQ ID NO: 1277 - RNA, 22 nt, Artificial Sequence
  LRRK2 RNA guide
ccugcugcacgcucgcgacucu

SEQ ID NO: 1278 - RNA, 22 nt, Artificial Sequence
  LRRK2 RNA guide
ccuuuaccugcugcacgcucgc

SEQ ID NO: 1279 - RNA, 22 nt, Artificial Sequence
  LRRK2 RNA guide
cgagcgugcagcagguaaaggc

SEQ ID NO: 1280 - RNA, 22 nt, Artificial Sequence
  LRRK2 RNA guide
cgcgagcgugcagcagguaaag

SEQ ID NO: 1281 - RNA, 22 nt, Artificial Sequence
  LRRK2 RNA guide
cgcucgcgacucucauauagga

SEQ ID NO: 1282 - RNA, 22 nt, Artificial Sequence
  LRRK2 RNA guide
cuauaugagagucgcgagcgug

SEQ ID NO: 1283 - RNA, 22 nt, Artificial Sequence
  LRRK2 RNA guide
cuccuauaugagagucgcgagc

SEQ ID NO: 1284 - RNA, 22 nt, Artificial Sequence
  LRRK2 RNA guide
cugcacgcucgcgacucucaua

SEQ ID NO: 1285 - RNA, 22 nt, Artificial Sequence
  LRRK2 RNA guide
cugcugcacgcucgcgacucuc

SEQ ID NO: 1286 - RNA, 22 nt, Artificial Sequence
  LRRK2 RNA guide
cuuuaccugcugcacgcucgcg

SEQ ID NO: 1287 - RNA, 22 nt, Artificial Sequence
  LRRK2 RNA guide
gaaaacaaugccuuuaccugcu

SEQ ID NO: 1288 - RNA, 22 nt, Artificial Sequence
  LRRK2 RNA guide
gacuccuauaugagagucgcga

SEQ ID NO: 1289 - RNA, 22 nt, Artificial Sequence
  LRRK2 RNA guide
gagagucgcgagcgugcagcag

SEQ ID NO: 1290 - RNA, 22 nt, Artificial Sequence
  LRRK2 RNA guide
gagcgugcagcagguaaaggca

SEQ ID NO: 1291 - RNA, 22 nt, Artificial Sequence
  LRRK2 RNA guide
gagucgcgagcgugcagcaggu

SEQ ID NO: 1292 - RNA, 22 nt, Artificial Sequence
  LRRK2 RNA guide
gcacgcucgcgacucucauaua

SEQ ID NO: 1293 - RNA, 22 nt, Artificial Sequence
  LRRK2 RNA guide
gccuuuaccugcugcacgcucg

SEQ ID NO: 1294 - RNA, 22 nt, Artificial Sequence
  LRRK2 RNA guide
gcgagcgugcagcagguaaagg

SEQ ID NO: 1295 - RNA, 22 nt, Artificial Sequence
  LRRK2 RNA guide
gcgugcagcagguaaaggcauu

SEQ ID NO: 1296 - RNA, 22 nt, Artificial Sequence
  LRRK2 RNA guide
gcugcacgcucgcgacucucau

SEQ ID NO: 1297 - RNA, 22 nt, Artificial Sequence
  LRRK2 RNA guide
ggacuccuauaugagagucgcg

SEQ ID NO: 1298 - RNA, 22 nt, Artificial Sequence
  LRRK2 RNA guide
gucgcgagcgugcagcagguaa

SEQ ID NO: 1299 - RNA, 22 nt, Artificial Sequence
  LRRK2 RNA guide
uaccugcugcacgcucgcgacu

SEQ ID NO: 1300 - RNA, 22 nt, Artificial Sequence
  LRRK2 RNA guide
uauaugagagucgcgagcgugc

SEQ ID NO: 1301 - RNA, 22 nt, Artificial Sequence
  LRRK2 RNA guide
uaugagagucgcgagcgugcag

SEQ ID NO: 1302 - RNA, 22 nt, Artificial Sequence
  LRRK2 RNA guide
uccuauaugagagucgcgagcg

SEQ ID NO: 1303 - RNA, 22 nt, Artificial Sequence
  LRRK2 RNA guide
ucgcgagcgugcagcagguaaa

SEQ ID NO: 1304 - RNA, 22 nt, Artificial Sequence
  LRRK2 RNA guide
ugagagucgcgagcgugcagca

SEQ ID NO: 1305 - RNA, 22 nt, Artificial Sequence
  LRRK2 RNA guide
ugcacgcucgcgacucucauau

SEQ ID NO: 1306 - RNA, 22 nt, Artificial Sequence
  LRRK2 RNA guide
ugccuuuaccugcugcacgcuc

SEQ ID NO: 1307 - RNA, 22 nt, Artificial Sequence
  LRRK2 RNA guide
ugcugcacgcucgcgacucuca

SEQ ID NO: 1308 - RNA, 22 nt, Artificial Sequence
  LRRK2 RNA guide
uuaccugcugcacgcucgcgac

SEQ ID NO: 1309 - RNA, 22 nt, Artificial Sequence
  LRRK2 RNA guide
uuuaccugcugcacgcucgcga

SEQ ID NO: 1310 - RNA, 20 nt, Artificial Sequence
  LRRK2 RNA guide
aaauuaaucgaagucugucc

SEQ ID NO: 1311 - RNA, 20 nt, Artificial Sequence
  LRRK2 RNA guide
aaucgaagucuguccaggua

SEQ ID NO: 1312 - RNA, 20 nt, Artificial Sequence
  LRRK2 RNA guide
aauuaaucgaagucugucca

SEQ ID NO: 1313 - RNA, 20 nt, Artificial Sequence
  LRRK2 RNA guide
acagacuucgauuaauuugc

SEQ ID NO: 1314 - RNA, 20 nt, Artificial Sequence
  LRRK2 RNA guide
accuggacagacuucgauua

SEQ ID NO: 1315 - RNA, 20 nt, Artificial Sequence
  LRRK2 RNA guide
acuucgauuaauuugcacag

SEQ ID NO: 1316 - RNA, 20 nt, Artificial Sequence
  LRRK2 RNA guide
acuucugugcaaauuaaucg

SEQ ID NO: 1317 - RNA, 20 nt, Artificial Sequence
  LRRK2 RNA guide
agacuucgauuaauuugcac

SEQ ID NO: 1318 - RNA, 20 nt, Artificial Sequence
  LRRK2 RNA guide
aucgaagucuguccagguac

SEQ ID NO: 1319 - RNA, 20 nt, Artificial Sequence
  LRRK2 RNA guide
auuaaucgaagucuguccag

SEQ ID NO: 1320 - RNA, 20 nt, Artificial Sequence
  LRRK2 RNA guide
caaauuaaucgaagucuguc

SEQ ID NO: 1321 - RNA, 20 nt, Artificial Sequence
  LRRK2 RNA guide
cacuucugugcaaauuaauc

SEQ ID NO: 1322 - RNA, 20 nt, Artificial Sequence
  LRRK2 RNA guide
cagacuucgauuaauuugca

SEQ ID NO: 1323 - RNA, 20 nt, Artificial Sequence
  LRRK2 RNA guide
cauuguaccuggacagacuu

SEQ ID NO: 1324 - RNA, 20 nt, Artificial Sequence
  LRRK2 RNA guide
ccuggacagacuucgauuaa

SEQ ID NO: 1325 - RNA, 20 nt, Artificial Sequence
  LRRK2 RNA guide
cgauuaauuugcacagaagu

SEQ ID NO: 1326 - RNA, 20 nt, Artificial Sequence
  LRRK2 RNA guide
cuggacagacuucgauuaau

SEQ ID NO: 1327 - RNA, 20 nt, Artificial Sequence
  LRRK2 RNA guide
cugugcaaauuaaucgaagu

SEQ ID NO: 1328 - RNA, 20 nt, Artificial Sequence
  LRRK2 RNA guide
cuucgauuaauuugcacaga

SEQ ID NO: 1329 - RNA, 20 nt, Artificial Sequence
  LRRK2 RNA guide
cuucugugcaaauuaaucga

SEQ ID NO: 1330 - RNA, 20 nt, Artificial Sequence
  LRRK2 RNA guide
gacagacuucgauuaauuug

SEQ ID NO: 1331 - RNA, 20 nt, Artificial Sequence
  LRRK2 RNA guide
gacuucgauuaauuugcaca

SEQ ID NO: 1332 - RNA, 20 nt, Artificial Sequence
  LRRK2 RNA guide
gcaaauuaaucgaagucugu

SEQ ID NO: 1333 - RNA, 20 nt, Artificial Sequence
  LRRK2 RNA guide
gcauuguaccuggacagacu

SEQ ID NO: 1334 - RNA, 20 nt, Artificial Sequence
  LRRK2 RNA guide
ggacagacuucgauuaauuu

SEQ ID NO: 1335 - RNA, 20 nt, Artificial Sequence
  LRRK2 RNA guide
ggucacuucugugcaaauua

SEQ ID NO: 1336 - RNA, 20 nt, Artificial Sequence
  LRRK2 RNA guide
guaccuggacagacuucgau

SEQ ID NO: 1337 - RNA, 20 nt, Artificial Sequence
  LRRK2 RNA guide
gucacuucugugcaaauuaa

SEQ ID NO: 1338 - RNA, 20 nt, Artificial Sequence
  LRRK2 RNA guide
gugcaaauuaaucgaagucu

SEQ ID NO: 1339 - RNA, 20 nt, Artificial Sequence
  LRRK2 RNA guide
uaaucgaagucuguccaggu

SEQ ID NO: 1340 - RNA, 20 nt, Artificial Sequence
  LRRK2 RNA guide
uaccuggacagacuucgauu

SEQ ID NO: 1341 - RNA, 20 nt, Artificial Sequence
  LRRK2 RNA guide
ucacuucugugcaaauuaau

SEQ ID NO: 1342 - RNA, 20 nt, Artificial Sequence
  LRRK2 RNA guide
ucgaagucuguccagguaca

SEQ ID NO: 1343 - RNA, 20 nt, Artificial Sequence
  LRRK2 RNA guide
ucgauuaauuugcacagaag

SEQ ID NO: 1344 - RNA, 20 nt, Artificial Sequence
  LRRK2 RNA guide
ucugugcaaauuaaucgaag

SEQ ID NO: 1345 - RNA, 20 nt, Artificial Sequence
  LRRK2 RNA guide
ugcaaauuaaucgaagucug

SEQ ID NO: 1346 - RNA, 20 nt, Artificial Sequence
  LRRK2 RNA guide
ugcauuguaccuggacagac

SEQ ID NO: 1347 - RNA, 20 nt, Artificial Sequence
  LRRK2 RNA guide
uggacagacuucgauuaauu

SEQ ID NO: 1348 - RNA, 20 nt, Artificial Sequence
  LRRK2 RNA guide
uggucacuucugugcaaauu

SEQ ID NO: 1349 - RNA, 20 nt, Artificial Sequence
  LRRK2 RNA guide
uguaccuggacagacuucga

SEQ ID NO: 1350 - RNA, 20 nt, Artificial Sequence
  LRRK2 RNA guide
ugugcaaauuaaucgaaguc

SEQ ID NO: 1351 - RNA, 20 nt, Artificial Sequence
  LRRK2 RNA guide
uuaaucgaagucuguccagg

SEQ ID NO: 1352 - RNA, 20 nt, Artificial Sequence
  LRRK2 RNA guide
uucgauuaauuugcacagaa

SEQ ID NO: 1353 - RNA, 20 nt, Artificial Sequence
  LRRK2 RNA guide
uucugugcaaauuaaucgaa

SEQ ID NO: 1354 - RNA, 20 nt, Artificial Sequence
  LRRK2 RNA guide
uugcauuguaccuggacaga

SEQ ID NO: 1355 - RNA, 20 nt, Artificial Sequence
  LRRK2 RNA guide
uuggucacuucugugcaaau

SEQ ID NO: 1356 - RNA, 20 nt, Artificial Sequence
  LRRK2 RNA guide
uuguaccuggacagacuucg

SEQ ID NO: 1357 - RNA, 21 nt, Artificial Sequence
  LRRK2 RNA guide
aaauuaaucgaagucugucca

SEQ ID NO: 1358 - RNA, 21 nt, Artificial Sequence
  LRRK2 RNA guide
aaucgaagucuguccagguac

SEQ ID NO: 1359 - RNA, 21 nt, Artificial Sequence
  LRRK2 RNA guide
aauuaaucgaagucuguccag

SEQ ID NO: 1360 - RNA, 21 nt, Artificial Sequence
  LRRK2 RNA guide
acagacuucgauuaauuugca

SEQ ID NO: 1361 - RNA, 21 nt, Artificial Sequence
  LRRK2 RNA guide
accuggacagacuucgauuaa

SEQ ID NO: 1362 - RNA, 21 nt, Artificial Sequence
  LRRK2 RNA guide
acuucgauuaauuugcacaga

SEQ ID NO: 1363 - RNA, 21 nt, Artificial Sequence
  LRRK2 RNA guide
acuucugugcaaauuaaucga

SEQ ID NO: 1364 - RNA, 21 nt, Artificial Sequence
  LRRK2 RNA guide
agacuucgauuaauuugcaca

SEQ ID NO: 1365 - RNA, 21 nt, Artificial Sequence
  LRRK2 RNA guide
aucgaagucuguccagguaca

SEQ ID NO: 1366 - RNA, 21 nt, Artificial Sequence
  LRRK2 RNA guide
auuaaucgaagucuguccagg

SEQ ID NO: 1367 - RNA, 21 nt, Artificial Sequence
  LRRK2 RNA guide
auuguaccuggacagacuucg

SEQ ID NO: 1368 - RNA, 21 nt, Artificial Sequence
  LRRK2 RNA guide
caaauuaaucgaagucugucc

SEQ ID NO: 1369 - RNA, 21 nt, Artificial Sequence
  LRRK2 RNA guide
cacuucugugcaaauuaaucg

SEQ ID NO: 1370 - RNA, 21 nt, Artificial Sequence
  LRRK2 RNA guide
cagacuucgauuaauuugcac

SEQ ID NO: 1371 - RNA, 21 nt, Artificial Sequence
  LRRK2 RNA guide
cauuguaccuggacagacuuc

SEQ ID NO: 1372 - RNA, 21 nt, Artificial Sequence
  LRRK2 RNA guide
ccuggacagacuucgauuaau

SEQ ID NO: 1373 - RNA, 21 nt, Artificial Sequence
  LRRK2 RNA guide
cgauuaauuugcacagaagug

SEQ ID NO: 1374 - RNA, 21 nt, Artificial Sequence
  LRRK2 RNA guide
cuggacagacuucgauuaauu

SEQ ID NO: 1375 - RNA, 21 nt, Artificial Sequence
  LRRK2 RNA guide
cugugcaaauuaaucgaaguc

SEQ ID NO: 1376 - RNA, 21 nt, Artificial Sequence
  LRRK2 RNA guide
cuucgauuaauuugcacagaa

SEQ ID NO: 1377 - RNA, 21 nt, Artificial Sequence
  LRRK2 RNA guide
cuucugugcaaauuaaucgaa

SEQ ID NO: 1378 - RNA, 21 nt, Artificial Sequence
  LRRK2 RNA guide
gacagacuucgauuaauuugc

SEQ ID NO: 1379 - RNA, 21 nt, Artificial Sequence
  LRRK2 RNA guide
gacuucgauuaauuugcacag

SEQ ID NO: 1380 - RNA, 21 nt, Artificial Sequence
  LRRK2 RNA guide
gcaaauuaaucgaagucuguc

SEQ ID NO: 1381 - RNA, 21 nt, Artificial Sequence
  LRRK2 RNA guide
gcauuguaccuggacagacuu

SEQ ID NO: 1382 - RNA, 21 nt, Artificial Sequence
  LRRK2 RNA guide
ggacagacuucgauuaauuug

SEQ ID NO: 1383 - RNA, 21 nt, Artificial Sequence
  LRRK2 RNA guide
ggucacuucugugcaaauuaa

SEQ ID NO: 1384 - RNA, 21 nt, Artificial Sequence
  LRRK2 RNA guide
guaccuggacagacuucgauu

SEQ ID NO: 1385 - RNA, 21 nt, Artificial Sequence
  LRRK2 RNA guide
gucacuucugugcaaauuaau

SEQ ID NO: 1386 - RNA, 21 nt, Artificial Sequence
  LRRK2 RNA guide
gugcaaauuaaucgaagucug

SEQ ID NO: 1387 - RNA, 21 nt, Artificial Sequence
  LRRK2 RNA guide
guuggucacuucugugcaaau

SEQ ID NO: 1388 - RNA, 21 nt, Artificial Sequence
  LRRK2 RNA guide
uaaucgaagucuguccaggua

SEQ ID NO: 1389 - RNA, 21 nt, Artificial Sequence
  LRRK2 RNA guide
uaccuggacagacuucgauua

SEQ ID NO: 1390 - RNA, 21 nt, Artificial Sequence
  LRRK2 RNA guide
ucacuucugugcaaauuaauc

SEQ ID NO: 1391 - RNA, 21 nt, Artificial Sequence
  LRRK2 RNA guide
ucgaagucuguccagguacaa

SEQ ID NO: 1392 - RNA, 21 nt, Artificial Sequence
  LRRK2 RNA guide
ucgauuaauuugcacagaagu

SEQ ID NO: 1393 - RNA, 21 nt, Artificial Sequence
  LRRK2 RNA guide
ucugugcaaauuaaucgaagu

SEQ ID NO: 1394 - RNA, 21 nt, Artificial Sequence
  LRRK2 RNA guide
ugcaaauuaaucgaagucugu

SEQ ID NO: 1395 - RNA, 21 nt, Artificial Sequence
  LRRK2 RNA guide
ugcauuguaccuggacagacu

SEQ ID NO: 1396 - RNA, 21 nt, Artificial Sequence
  LRRK2 RNA guide
uggacagacuucgauuaauuu

SEQ ID NO: 1397 - RNA, 21 nt, Artificial Sequence
  LRRK2 RNA guide
uggucacuucugugcaaauua

SEQ ID NO: 1398 - RNA, 21 nt, Artificial Sequence
  LRRK2 RNA guide
uguaccuggacagacuucgau

SEQ ID NO: 1399 - RNA, 21 nt, Artificial Sequence
  LRRK2 RNA guide
ugugcaaauuaaucgaagucu

SEQ ID NO: 1400 - RNA, 21 nt, Artificial Sequence
  LRRK2 RNA guide
uuaaucgaagucuguccaggu

SEQ ID NO: 1401 - RNA, 21 nt, Artificial Sequence
  LRRK2 RNA guide
uucgauuaauuugcacagaag

SEQ ID NO: 1402 - RNA, 21 nt, Artificial Sequence
  LRRK2 RNA guide
uucugugcaaauuaaucgaag

SEQ ID NO: 1403 - RNA, 21 nt, Artificial Sequence
  LRRK2 RNA guide
uugcauuguaccuggacagac

SEQ ID NO: 1404 - RNA, 21 nt, Artificial Sequence
  LRRK2 RNA guide
uuggucacuucugugcaaauu

SEQ ID NO: 1405 - RNA, 21 nt, Artificial Sequence
  LRRK2 RNA guide
uuguaccuggacagacuucga

SEQ ID NO: 1406 - RNA, 21 nt, Artificial Sequence
  LRRK2 RNA guide
uuugcauuguaccuggacaga

SEQ ID NO: 1407 - RNA, 22 nt, Artificial Sequence
  LRRK2 RNA guide
aaauuaaucgaagucuguccag

SEQ ID NO: 1408 - RNA, 22 nt, Artificial Sequence
  LRRK2 RNA guide
aaucgaagucuguccagguaca

SEQ ID NO: 1409 - RNA, 22 nt, Artificial Sequence
  LRRK2 RNA guide
aauuaaucgaagucuguccagg

SEQ ID NO: 1410 - RNA, 22 nt, Artificial Sequence
  LRRK2 RNA guide
acagacuucgauuaauuugcac

SEQ ID NO: 1411 - RNA, 22 nt, Artificial Sequence
  LRRK2 RNA guide
accuggacagacuucgauuaau

SEQ ID NO: 1412 - RNA, 22 nt, Artificial Sequence
  LRRK2 RNA guide
acuucgauuaauuugcacagaa

SEQ ID NO: 1413 - RNA, 22 nt, Artificial Sequence
  LRRK2 RNA guide
acuucugugcaaauuaaucgaa

SEQ ID NO: 1414 - RNA, 22 nt, Artificial Sequence
  LRRK2 RNA guide
agacuucgauuaauuugcacag

SEQ ID NO: 1415 - RNA, 22 nt, Artificial Sequence
  LRRK2 RNA guide
aucgaagucuguccagguacaa

SEQ ID NO: 1416 - RNA, 22 nt, Artificial Sequence
  LRRK2 RNA guide
auuaaucgaagucuguccaggu

SEQ ID NO: 1417 - RNA, 22 nt, Artificial Sequence
  LRRK2 RNA guide
auuguaccuggacagacuucga

SEQ ID NO: 1418 - RNA, 22 nt, Artificial Sequence
  LRRK2 RNA guide
caaauuaaucgaagucugucca

SEQ ID NO: 1419 - RNA, 22 nt, Artificial Sequence
  LRRK2 RNA guide
cacuucugugcaaauuaaucga

SEQ ID NO: 1420 - RNA, 22 nt, Artificial Sequence
  LRRK2 RNA guide
cagacuucgauuaauuugcaca

SEQ ID NO: 1421 - RNA, 22 nt, Artificial Sequence
  LRRK2 RNA guide
cauuguaccuggacagacuucg

SEQ ID NO: 1422 - RNA, 22 nt, Artificial Sequence
  LRRK2 RNA guide
ccuggacagacuucgauuaauu

SEQ ID NO: 1423 - RNA, 22 nt, Artificial Sequence
  LRRK2 RNA guide
cgauuaauuugcacagaaguga

SEQ ID NO: 1424 - RNA, 22 nt, Artificial Sequence
  LRRK2 RNA guide
cuggacagacuucgauuaauuu

SEQ ID NO: 1425 - RNA, 22 nt, Artificial Sequence
  LRRK2 RNA guide
cugugcaaauuaaucgaagucu

SEQ ID NO: 1426 - RNA, 22 nt, Artificial Sequence
  LRRK2 RNA guide
cuucgauuaauuugcacagaag

SEQ ID NO: 1427 - RNA, 22 nt, Artificial Sequence
  LRRK2 RNA guide
cuucugugcaaauuaaucgaag

SEQ ID NO: 1428 - RNA, 22 nt, Artificial Sequence
  LRRK2 RNA guide
cuuugcauuguaccuggacaga

SEQ ID NO: 1429 - RNA, 22 nt, Artificial Sequence
  LRRK2 RNA guide
gacagacuucgauuaauuugca

SEQ ID NO: 1430 - RNA, 22 nt, Artificial Sequence
  LRRK2 RNA guide
gacuucgauuaauuugcacaga

SEQ ID NO: 1431 - RNA, 22 nt, Artificial Sequence
  LRRK2 RNA guide
gcaaauuaaucgaagucugucc

SEQ ID NO: 1432 - RNA, 22 nt, Artificial Sequence
  LRRK2 RNA guide
gcauuguaccuggacagacuuc

SEQ ID NO: 1433 - RNA, 22 nt, Artificial Sequence
  LRRK2 RNA guide
ggacagacuucgauuaauuugc

SEQ ID NO: 1434 - RNA, 22 nt, Artificial Sequence
  LRRK2 RNA guide
ggucacuucugugcaaauuaau

SEQ ID NO: 1435 - RNA, 22 nt, Artificial Sequence
  LRRK2 RNA guide
gguuggucacuucugugcaaau

SEQ ID NO: 1436 - RNA, 22 nt, Artificial Sequence
  LRRK2 RNA guide
guaccuggacagacuucgauua

SEQ ID NO: 1437 - RNA, 22 nt, Artificial Sequence
  LRRK2 RNA guide
gucacuucugugcaaauuaauc

SEQ ID NO: 1438 - RNA, 22 nt, Artificial Sequence
  LRRK2 RNA guide
gugcaaauuaaucgaagucugu

SEQ ID NO: 1439 - RNA, 22 nt, Artificial Sequence
  LRRK2 RNA guide
guuggucacuucugugcaaauu

SEQ ID NO: 1440 - RNA, 22 nt, Artificial Sequence
  LRRK2 RNA guide
uaaucgaagucuguccagguac

SEQ ID NO: 1441 - RNA, 22 nt, Artificial Sequence
  LRRK2 RNA guide
uaccuggacagacuucgauuaa

SEQ ID NO: 1442 - RNA, 22 nt, Artificial Sequence
  LRRK2 RNA guide
ucacuucugugcaaauuaaucg

SEQ ID NO: 1443 - RNA, 22 nt, Artificial Sequence
  LRRK2 RNA guide
ucgaagucuguccagguacaau

SEQ ID NO: 1444 - RNA, 22 nt, Artificial Sequence
  LRRK2 RNA guide
ucgauuaauuugcacagaagug

SEQ ID NO: 1445 - RNA, 22 nt, Artificial Sequence
  LRRK2 RNA guide
ucugugcaaauuaaucgaaguc

SEQ ID NO: 1446 - RNA, 22 nt, Artificial Sequence
  LRRK2 RNA guide
ugcaaauuaaucgaagucuguc

SEQ ID NO: 1447 - RNA, 22 nt, Artificial Sequence
  LRRK2 RNA guide
ugcauuguaccuggacagacuu

SEQ ID NO: 1448 - RNA, 22 nt, Artificial Sequence
  LRRK2 RNA guide
uggacagacuucgauuaauuug

SEQ ID NO: 1449 - RNA, 22 nt, Artificial Sequence
  LRRK2 RNA guide
uggucacuucugugcaaauuaa

SEQ ID NO: 1450 - RNA, 22 nt, Artificial Sequence
  LRRK2 RNA guide
uguaccuggacagacuucgauu

SEQ ID NO: 1451 - RNA, 22 nt, Artificial Sequence
  LRRK2 RNA guide
ugugcaaauuaaucgaagucug

SEQ ID NO: 1452 - RNA, 22 nt, Artificial Sequence
  LRRK2 RNA guide
uuaaucgaagucuguccaggua

SEQ ID NO: 1453 - RNA, 22 nt, Artificial Sequence
  LRRK2 RNA guide
uucgauuaauuugcacagaagu

SEQ ID NO: 1454 - RNA, 22 nt, Artificial Sequence
  LRRK2 RNA guide
uucugugcaaauuaaucgaagu

SEQ ID NO: 1455 - RNA, 22 nt, Artificial Sequence
  LRRK2 RNA guide
uugcauuguaccuggacagacu

SEQ ID NO: 1456 - RNA, 22 nt, Artificial Sequence
  LRRK2 RNA guide
uuggucacuucugugcaaauua

SEQ ID NO: 1457 - RNA, 22 nt, Artificial Sequence
  LRRK2 RNA guide
uuguaccuggacagacuucgau

SEQ ID NO: 1458 - RNA, 22 nt, Artificial Sequence
  LRRK2 RNA guide
uuugcauuguaccuggacagac

SEQ ID NO: 1459 - RNA, 20 nt, Artificial Sequence
  LRRK2 RNA guide
aaagcuuaaugggaccccac

SEQ ID NO: 1460 - RNA, 20 nt, Artificial Sequence
  LRRK2 RNA guide
aacaucguggggucccauua

SEQ ID NO: 1461 - RNA, 20 nt, Artificial Sequence
  LRRK2 RNA guide
aagcuuaaugggaccccacg

SEQ ID NO: 1462 - RNA, 20 nt, Artificial Sequence
  LRRK2 RNA guide
aaucauuuccaacaucgugg

SEQ ID NO: 1463 - RNA, 20 nt, Artificial Sequence
  LRRK2 RNA guide
aaugcaaagcuuaaugggac

SEQ ID NO: 1464 - RNA, 20 nt, Artificial Sequence
  LRRK2 RNA guide
aaugggaccccacgauguug

SEQ ID NO: 1465 - RNA, 20 nt, Artificial Sequence
  LRRK2 RNA guide
acaucguggggucccauuaa

SEQ ID NO: 1466 - RNA, 20 nt, Artificial Sequence
  LRRK2 RNA guide
accccacgauguuggaaaug

SEQ ID NO: 1467 - RNA, 20 nt, Artificial Sequence
  LRRK2 RNA guide
acgauguuggaaaugauugg

SEQ ID NO: 1468 - RNA, 20 nt, Artificial Sequence
  LRRK2 RNA guide
acuucccaaucauuuccaac

SEQ ID NO: 1469 - RNA, 20 nt, Artificial Sequence
  LRRK2 RNA guide
agcuuaaugggaccccacga

SEQ ID NO: 1470 - RNA, 20 nt, Artificial Sequence
  LRRK2 RNA guide
aucauuuccaacaucguggg

SEQ ID NO: 1471 - RNA, 20 nt, Artificial Sequence
  LRRK2 RNA guide
aucguggggucccauuaagc

SEQ ID NO: 1472 - RNA, 20 nt, Artificial Sequence
  LRRK2 RNA guide
augcaaagcuuaaugggacc

SEQ ID NO: 1473 - RNA, 20 nt, Artificial Sequence
  LRRK2 RNA guide
augggaccccacgauguugg

SEQ ID NO: 1474 - RNA, 20 nt, Artificial Sequence
  LRRK2 RNA guide
auuuccaacaucgugggguc

SEQ ID NO: 1475 - RNA, 20 nt, Artificial Sequence
  LRRK2 RNA guide
caaagcuuaaugggacccca

SEQ ID NO: 1476 - RNA, 20 nt, Artificial Sequence
  LRRK2 RNA guide
caacaucguggggucccauu

SEQ ID NO: 1477 - RNA, 20 nt, Artificial Sequence
  LRRK2 RNA guide
caaucauuuccaacaucgug

SEQ ID NO: 1478 - RNA, 20 nt, Artificial Sequence
  LRRK2 RNA guide
cacgauguuggaaaugauug

SEQ ID NO: 1479 - RNA, 20 nt, Artificial Sequence
  LRRK2 RNA guide
caucguggggucccauuaag

SEQ ID NO: 1480 - RNA, 20 nt, Artificial Sequence
  LRRK2 RNA guide
cauuuccaacaucguggggu

SEQ ID NO: 1481 - RNA, 20 nt, Artificial Sequence
  LRRK2 RNA guide
ccaacaucguggggucccau

SEQ ID NO: 1482 - RNA, 20 nt, Artificial Sequence
  LRRK2 RNA guide
ccaaucauuuccaacaucgu

SEQ ID NO: 1483 - RNA, 20 nt, Artificial Sequence
  LRRK2 RNA guide
ccacgauguuggaaaugauu

SEQ ID NO: 1484 - RNA, 20 nt, Artificial Sequence
  LRRK2 RNA guide
cccaaucauuuccaacaucg

SEQ ID NO: 1485 - RNA, 20 nt, Artificial Sequence
  LRRK2 RNA guide
cccacgauguuggaaaugau

SEQ ID NO: 1486 - RNA, 20 nt, Artificial Sequence
  LRRK2 RNA guide
ccccacgauguuggaaauga

SEQ ID NO: 1487 - RNA, 20 nt, Artificial Sequence
  LRRK2 RNA guide
cguggggucccauuaagcuu

SEQ ID NO: 1488 - RNA, 20 nt, Artificial Sequence
  LRRK2 RNA guide
cuuaaugggaccccacgaug

SEQ ID NO: 1489 - RNA, 20 nt, Artificial Sequence
  LRRK2 RNA guide
cuucccaaucauuuccaaca

SEQ ID NO: 1490 - RNA, 20 nt, Artificial Sequence
  LRRK2 RNA guide
gaccccacgauguuggaaau

SEQ ID NO: 1491 - RNA, 20 nt, Artificial Sequence
  LRRK2 RNA guide
gcaaagcuuaaugggacccc

SEQ ID NO: 1492 - RNA, 20 nt, Artificial Sequence
  LRRK2 RNA guide
gcuuaaugggaccccacgau

SEQ ID NO: 1493 - RNA, 20 nt, Artificial Sequence
  LRRK2 RNA guide
ggaccccacgauguuggaaa

SEQ ID NO: 1494 - RNA, 20 nt, Artificial Sequence
  LRRK2 RNA guide
gggaccccacgauguuggaa

SEQ ID NO: 1495 - RNA, 20 nt, Artificial Sequence
  LRRK2 RNA guide
uaaugggaccccacgauguu

SEQ ID NO: 1496 - RNA, 20 nt, Artificial Sequence
  LRRK2 RNA guide
ucauuuccaacaucgugggg

SEQ ID NO: 1497 - RNA, 20 nt, Artificial Sequence
  LRRK2 RNA guide
uccaacaucgugggguccca

SEQ ID NO: 1498 - RNA, 20 nt, Artificial Sequence
  LRRK2 RNA guide
ucccaaucauuuccaacauc

SEQ ID NO: 1499 - RNA, 20 nt, Artificial Sequence
  LRRK2 RNA guide
ucguggggucccauuaagcu

SEQ ID NO: 1500 - RNA, 20 nt, Artificial Sequence
  LRRK2 RNA guide
ugcaaagcuuaaugggaccc

SEQ ID NO: 1501 - RNA, 20 nt, Artificial Sequence
  LRRK2 RNA guide
ugggaccccacgauguugga

SEQ ID NO: 1502 - RNA, 20 nt, Artificial Sequence
  LRRK2 RNA guide
uuaaugggaccccacgaugu

SEQ ID NO: 1503 - RNA, 20 nt, Artificial Sequence
  LRRK2 RNA guide
uuccaacaucgugggguccc

SEQ ID NO: 1504 - RNA, 20 nt, Artificial Sequence
  LRRK2 RNA guide
uucccaaucauuuccaacau

SEQ ID NO: 1505 - RNA, 20 nt, Artificial Sequence
  LRRK2 RNA guide
uuuccaacaucguggggucc

SEQ ID NO: 1506 - RNA, 21 nt, Artificial Sequence
  LRRK2 RNA guide
aaagcuuaaugggaccccacg

SEQ ID NO: 1507 - RNA, 21 nt, Artificial Sequence
  LRRK2 RNA guide
aacaucguggggucccauuaa

SEQ ID NO: 1508 - RNA, 21 nt, Artificial Sequence
  LRRK2 RNA guide
aagcuuaaugggaccccacga

SEQ ID NO: 1509 - RNA, 21 nt, Artificial Sequence
  LRRK2 RNA guide
aaucauuuccaacaucguggg

SEQ ID NO: 1510 - RNA, 21 nt, Artificial Sequence
  LRRK2 RNA guide
aaugcaaagcuuaaugggacc

SEQ ID NO: 1511 - RNA, 21 nt, Artificial Sequence
  LRRK2 RNA guide
aaugggaccccacgauguugg

SEQ ID NO: 1512 - RNA, 21 nt, Artificial Sequence
  LRRK2 RNA guide
acaucguggggucccauuaag

SEQ ID NO: 1513 - RNA, 21 nt, Artificial Sequence
  LRRK2 RNA guide
accccacgauguuggaaauga

SEQ ID NO: 1514 - RNA, 21 nt, Artificial Sequence
  LRRK2 RNA guide
acgauguuggaaaugauuggg

SEQ ID NO: 1515 - RNA, 21 nt, Artificial Sequence
  LRRK2 RNA guide
acuucccaaucauuuccaaca

SEQ ID NO: 1516 - RNA, 21 nt, Artificial Sequence
  LRRK2 RNA guide
agcuuaaugggaccccacgau

SEQ ID NO: 1517 - RNA, 21 nt, Artificial Sequence
  LRRK2 RNA guide
aucauuuccaacaucgugggg

SEQ ID NO: 1518 - RNA, 21 nt, Artificial Sequence
  LRRK2 RNA guide
aucguggggucccauuaagcu

SEQ ID NO: 1519 - RNA, 21 nt, Artificial Sequence
  LRRK2 RNA guide
augcaaagcuuaaugggaccc

SEQ ID NO: 1520 - RNA, 21 nt, Artificial Sequence
  LRRK2 RNA guide
augggaccccacgauguugga

SEQ ID NO: 1521 - RNA, 21 nt, Artificial Sequence
  LRRK2 RNA guide
auuuccaacaucguggggucc

SEQ ID NO: 1522 - RNA, 21 nt, Artificial Sequence
  LRRK2 RNA guide
caaagcuuaaugggaccccac

SEQ ID NO: 1523 - RNA, 21 nt, Artificial Sequence
  LRRK2 RNA guide
caacaucguggggucccauua

SEQ ID NO: 1524 - RNA, 21 nt, Artificial Sequence
  LRRK2 RNA guide
caaucauuuccaacaucgugg

SEQ ID NO: 1525 - RNA, 21 nt, Artificial Sequence
  LRRK2 RNA guide
caaugcaaagcuuaaugggac

SEQ ID NO: 1526 - RNA, 21 nt, Artificial Sequence
  LRRK2 RNA guide
cacgauguuggaaaugauugg

SEQ ID NO: 1527 - RNA, 21 nt, Artificial Sequence
  LRRK2 RNA guide
caucguggggucccauuaagc

SEQ ID NO: 1528 - RNA, 21 nt, Artificial Sequence
  LRRK2 RNA guide
cauuuccaacaucgugggguc

SEQ ID NO: 1529 - RNA, 21 nt, Artificial Sequence
  LRRK2 RNA guide
ccaacaucguggggucccauu

SEQ ID NO: 1530 - RNA, 21 nt, Artificial Sequence
  LRRK2 RNA guide
ccaaucauuuccaacaucgug

SEQ ID NO: 1531 - RNA, 21 nt, Artificial Sequence
  LRRK2 RNA guide
ccacgauguuggaaaugauug

SEQ ID NO: 1532 - RNA, 21 nt, Artificial Sequence
  LRRK2 RNA guide
cccaaucauuuccaacaucgu

SEQ ID NO: 1533 - RNA, 21 nt, Artificial Sequence
  LRRK2 RNA guide
cccacgauguuggaaaugauu

SEQ ID NO: 1534 - RNA, 21 nt, Artificial Sequence
  LRRK2 RNA guide
ccccacgauguuggaaaugau

SEQ ID NO: 1535 - RNA, 21 nt, Artificial Sequence
  LRRK2 RNA guide
cguggggucccauuaagcuuu

SEQ ID NO: 1536 - RNA, 21 nt, Artificial Sequence
  LRRK2 RNA guide
cuuaaugggaccccacgaugu

SEQ ID NO: 1537 - RNA, 21 nt, Artificial Sequence
  LRRK2 RNA guide
cuucccaaucauuuccaacau

SEQ ID NO: 1538 - RNA, 21 nt, Artificial Sequence
  LRRK2 RNA guide
gaccccacgauguuggaaaug

SEQ ID NO: 1539 - RNA, 21 nt, Artificial Sequence
  LRRK2 RNA guide
gacuucccaaucauuuccaac

SEQ ID NO: 1540 - RNA, 21 nt, Artificial Sequence
  LRRK2 RNA guide
gcaaagcuuaaugggacccca

SEQ ID NO: 1541 - RNA, 21 nt, Artificial Sequence
  LRRK2 RNA guide
gcuuaaugggaccccacgaug

SEQ ID NO: 1542 - RNA, 21 nt, Artificial Sequence
  LRRK2 RNA guide
ggaccccacgauguuggaaau

SEQ ID NO: 1543 - RNA, 21 nt, Artificial Sequence
  LRRK2 RNA guide
ggacuucccaaucauuuccaa

SEQ ID NO: 1544 - RNA, 21 nt, Artificial Sequence
  LRRK2 RNA guide
gggaccccacgauguuggaaa

SEQ ID NO: 1545 - RNA, 21 nt, Artificial Sequence
  LRRK2 RNA guide
uaaugggaccccacgauguug

SEQ ID NO: 1546 - RNA, 21 nt, Artificial Sequence
  LRRK2 RNA guide
ucauuuccaacaucguggggu

SEQ ID NO: 1547 - RNA, 21 nt, Artificial Sequence
  LRRK2 RNA guide
uccaacaucguggggucccau

SEQ ID NO: 1548 - RNA, 21 nt, Artificial Sequence
  LRRK2 RNA guide
ucccaaucauuuccaacaucg

SEQ ID NO: 1549 - RNA, 21 nt, Artificial Sequence
  LRRK2 RNA guide
ucguggggucccauuaagcuu

SEQ ID NO: 1550 - RNA, 21 nt, Artificial Sequence
  LRRK2 RNA guide
ugcaaagcuuaaugggacccc

SEQ ID NO: 1551 - RNA, 21 nt, Artificial Sequence
  LRRK2 RNA guide
ugggaccccacgauguuggaa

SEQ ID NO: 1552 - RNA, 21 nt, Artificial Sequence
  LRRK2 RNA guide
uuaaugggaccccacgauguu

SEQ ID NO: 1553 - RNA, 21 nt, Artificial Sequence
  LRRK2 RNA guide
uuccaacaucgugggguccca

SEQ ID NO: 1554 - RNA, 21 nt, Artificial Sequence
  LRRK2 RNA guide
uucccaaucauuuccaacauc

SEQ ID NO: 1555 - RNA, 21 nt, Artificial Sequence
  LRRK2 RNA guide
uuuccaacaucgugggguccc

SEQ ID NO: 1556 - RNA, 22 nt, Artificial Sequence
  LRRK2 RNA guide
aaagcuuaaugggaccccacga

SEQ ID NO: 1557 - RNA, 22 nt, Artificial Sequence
  LRRK2 RNA guide
aacaucguggggucccauuaag

SEQ ID NO: 1558 - RNA, 22 nt, Artificial Sequence
  LRRK2 RNA guide
aagcuuaaugggaccccacgau

SEQ ID NO: 1559 - RNA, 22 nt, Artificial Sequence
  LRRK2 RNA guide
aaucauuuccaacaucgugggg

SEQ ID NO: 1560 - RNA, 22 nt, Artificial Sequence
  LRRK2 RNA guide
aaugcaaagcuuaaugggaccc

SEQ ID NO: 1561 - RNA, 22 nt, Artificial Sequence
  LRRK2 RNA guide
aaugggaccccacgauguugga

SEQ ID NO: 1562 - RNA, 22 nt, Artificial Sequence
  LRRK2 RNA guide
acaaugcaaagcuuaaugggac

SEQ ID NO: 1563 - RNA, 22 nt, Artificial Sequence
  LRRK2 RNA guide
acaucguggggucccauuaagc

SEQ ID NO: 1564 - RNA, 22 nt, Artificial Sequence
  LRRK2 RNA guide
accccacgauguuggaaaugau

SEQ ID NO: 1565 - RNA, 22 nt, Artificial Sequence
  LRRK2 RNA guide
acgauguuggaaaugauuggga

SEQ ID NO: 1566 - RNA, 22 nt, Artificial Sequence
  LRRK2 RNA guide
acuucccaaucauuuccaacau

SEQ ID NO: 1567 - RNA, 22 nt, Artificial Sequence
  LRRK2 RNA guide
agcuuaaugggaccccacgaug

SEQ ID NO: 1568 - RNA, 22 nt, Artificial Sequence
  LRRK2 RNA guide
aggacuucccaaucauuuccaa

SEQ ID NO: 1569 - RNA, 22 nt, Artificial Sequence
  LRRK2 RNA guide
aucauuuccaacaucguggggu

SEQ ID NO: 1570 - RNA, 22 nt, Artificial Sequence
  LRRK2 RNA guide
aucguggggucccauuaagcuu

SEQ ID NO: 1571 - RNA, 22 nt, Artificial Sequence
  LRRK2 RNA guide
augcaaagcuuaaugggacccc

SEQ ID NO: 1572 - RNA, 22 nt, Artificial Sequence
  LRRK2 RNA guide
augggaccccacgauguuggaa

SEQ ID NO: 1573 - RNA, 22 nt, Artificial Sequence
  LRRK2 RNA guide
auuuccaacaucgugggguccc

SEQ ID NO: 1574 - RNA, 22 nt, Artificial Sequence
  LRRK2 RNA guide
caaagcuuaaugggaccccacg

SEQ ID NO: 1575 - RNA, 22 nt, Artificial Sequence
  LRRK2 RNA guide
caacaucguggggucccauuaa

SEQ ID NO: 1576 - RNA, 22 nt, Artificial Sequence
  LRRK2 RNA guide
caaucauuuccaacaucguggg

SEQ ID NO: 1577 - RNA, 22 nt, Artificial Sequence
  LRRK2 RNA guide
caaugcaaagcuuaaugggacc

SEQ ID NO: 1578 - RNA, 22 nt, Artificial Sequence
  LRRK2 RNA guide
cacgauguuggaaaugauuggg

SEQ ID NO: 1579 - RNA, 22 nt, Artificial Sequence
  LRRK2 RNA guide
caucguggggucccauuaagcu

SEQ ID NO: 1580 - RNA, 22 nt, Artificial Sequence
  LRRK2 RNA guide
cauuuccaacaucguggggucc

SEQ ID NO: 1581 - RNA, 22 nt, Artificial Sequence
  LRRK2 RNA guide
ccaacaucguggggucccauua

SEQ ID NO: 1582 - RNA, 22 nt, Artificial Sequence
  LRRK2 RNA guide
ccaaucauuuccaacaucgugg

SEQ ID NO: 1583 - RNA, 22 nt, Artificial Sequence
  LRRK2 RNA guide
ccacgauguuggaaaugauugg

SEQ ID NO: 1584 - RNA, 22 nt, Artificial Sequence
  LRRK2 RNA guide
cccaaucauuuccaacaucgug

SEQ ID NO: 1585 - RNA, 22 nt, Artificial Sequence
  LRRK2 RNA guide
cccacgauguuggaaaugauug

SEQ ID NO: 1586 - RNA, 22 nt, Artificial Sequence
  LRRK2 RNA guide
ccccacgauguuggaaaugauu

SEQ ID NO: 1587 - RNA, 22 nt, Artificial Sequence
  LRRK2 RNA guide
cguggggucccauuaagcuuug

SEQ ID NO: 1588 - RNA, 22 nt, Artificial Sequence
  LRRK2 RNA guide
cuuaaugggaccccacgauguu

SEQ ID NO: 1589 - RNA, 22 nt, Artificial Sequence
  LRRK2 RNA guide
cuucccaaucauuuccaacauc

SEQ ID NO: 1590 - RNA, 22 nt, Artificial Sequence
  LRRK2 RNA guide
gaccccacgauguuggaaauga

SEQ ID NO: 1591 - RNA, 22 nt, Artificial Sequence
  LRRK2 RNA guide
gacuucccaaucauuuccaaca

SEQ ID NO: 1592 - RNA, 22 nt, Artificial Sequence
  LRRK2 RNA guide
gcaaagcuuaaugggaccccac

SEQ ID NO: 1593 - RNA, 22 nt, Artificial Sequence
  LRRK2 RNA guide
gcuuaaugggaccccacgaugu

SEQ ID NO: 1594 - RNA, 22 nt, Artificial Sequence
  LRRK2 RNA guide
ggaccccacgauguuggaaaug

SEQ ID NO: 1595 - RNA, 22 nt, Artificial Sequence
  LRRK2 RNA guide
ggacuucccaaucauuuccaac

SEQ ID NO: 1596 - RNA, 22 nt, Artificial Sequence
  LRRK2 RNA guide
gggaccccacgauguuggaaau

SEQ ID NO: 1597 - RNA, 22 nt, Artificial Sequence
  LRRK2 RNA guide
uaaugggaccccacgauguugg

SEQ ID NO: 1598 - RNA, 22 nt, Artificial Sequence
  LRRK2 RNA guide
ucauuuccaacaucgugggguc

SEQ ID NO: 1599 - RNA, 22 nt, Artificial Sequence
  LRRK2 RNA guide
uccaacaucguggggucccauu

SEQ ID NO: 1600 - RNA, 22 nt, Artificial Sequence
  LRRK2 RNA guide
ucccaaucauuuccaacaucgu

SEQ ID NO: 1601 - RNA, 22 nt, Artificial Sequence
  LRRK2 RNA guide
ucguggggucccauuaagcuuu

SEQ ID NO: 1602 - RNA, 22 nt, Artificial Sequence
  LRRK2 RNA guide
ugcaaagcuuaaugggacccca

SEQ ID NO: 1603 - RNA, 22 nt, Artificial Sequence
  LRRK2 RNA guide
ugggaccccacgauguuggaaa

SEQ ID NO: 1604 - RNA, 22 nt, Artificial Sequence
  LRRK2 RNA guide
uuaaugggaccccacgauguug

SEQ ID NO: 1605 - RNA, 22 nt, Artificial Sequence
  LRRK2 RNA guide
uuccaacaucguggggucccau

SEQ ID NO: 1606 - RNA, 22 nt, Artificial Sequence
  LRRK2 RNA guide
uucccaaucauuuccaacaucg

SEQ ID NO: 1607 - RNA, 22 nt, Artificial Sequence
  LRRK2 RNA guide
uuuccaacaucgugggguccca

SEQ ID NO: 1608 - RNA, 20 nt, Artificial Sequence
  LRRK2 RNA guide
aaguccuugguguuccccag

SEQ ID NO: 1609 - RNA, 20 nt, Artificial Sequence
  LRRK2 RNA guide
acuggggaacaccaaggacu

SEQ ID NO: 1610 - RNA, 20 nt, Artificial Sequence
  LRRK2 RNA guide
acuuacuggggaacaccaag

SEQ ID NO: 1611 - RNA, 20 nt, Artificial Sequence
  LRRK2 RNA guide
aguccuugguguuccccagu

SEQ ID NO: 1612 - RNA, 20 nt, Artificial Sequence
  LRRK2 RNA guide
auacuuacuggggaacacca

SEQ ID NO: 1613 - RNA, 20 nt, Artificial Sequence
  LRRK2 RNA guide
auaucuaucauacuuacugg

SEQ ID NO: 1614 - RNA, 20 nt, Artificial Sequence
  LRRK2 RNA guide
aucauacuuacuggggaaca

SEQ ID NO: 1615 - RNA, 20 nt, Artificial Sequence
  LRRK2 RNA guide
aucuaucauacuuacugggg

SEQ ID NO: 1616 - RNA, 20 nt, Artificial Sequence
  LRRK2 RNA guide
augauugggaaguccuuggu

SEQ ID NO: 1617 - RNA, 20 nt, Artificial Sequence
  LRRK2 RNA guide
auugggaaguccuugguguu

SEQ ID NO: 1618 - RNA, 20 nt, Artificial Sequence
  LRRK2 RNA guide
cauacuuacuggggaacacc

SEQ ID NO: 1619 - RNA, 20 nt, Artificial Sequence
  LRRK2 RNA guide
cauaucuaucauacuuacug

SEQ ID NO: 1620 - RNA, 20 nt, Artificial Sequence
  LRRK2 RNA guide
ccccaguaaguaugauagau

SEQ ID NO: 1621 - RNA, 20 nt, Artificial Sequence
  LRRK2 RNA guide
ccuugguguuccccaguaag

SEQ ID NO: 1622 - RNA, 20 nt, Artificial Sequence
  LRRK2 RNA guide
cuaucauacuuacuggggaa

SEQ ID NO: 1623 - RNA, 20 nt, Artificial Sequence
  LRRK2 RNA guide
cuggggaacaccaaggacuu

SEQ ID NO: 1624 - RNA, 20 nt, Artificial Sequence
  LRRK2 RNA guide
cuuacuggggaacaccaagg

SEQ ID NO: 1625 - RNA, 20 nt, Artificial Sequence
  LRRK2 RNA guide
cuugguguuccccaguaagu

SEQ ID NO: 1626 - RNA, 20 nt, Artificial Sequence
  LRRK2 RNA guide
gaaguccuugguguucccca

SEQ ID NO: 1627 - RNA, 20 nt, Artificial Sequence
  LRRK2 RNA guide
gauugggaaguccuuggugu

SEQ ID NO: 1628 - RNA, 20 nt, Artificial Sequence
  LRRK2 RNA guide
ggaaguccuugguguucccc

SEQ ID NO: 1629 - RNA, 20 nt, Artificial Sequence
  LRRK2 RNA guide
gggaacaccaaggacuuccc

SEQ ID NO: 1630 - RNA, 20 nt, Artificial Sequence
  LRRK2 RNA guide
gggaaguccuugguguuccc

SEQ ID NO: 1631 - RNA, 20 nt, Artificial Sequence
  LRRK2 RNA guide
ggggaacaccaaggacuucc

SEQ ID NO: 1632 - RNA, 20 nt, Artificial Sequence
  LRRK2 RNA guide
gguguuccccaguaaguaug

SEQ ID NO: 1633 - RNA, 20 nt, Artificial Sequence
  LRRK2 RNA guide
guccuugguguuccccagua

SEQ ID NO: 1634 - RNA, 20 nt, Artificial Sequence
  LRRK2 RNA guide
guguuccccaguaaguauga

SEQ ID NO: 1635 - RNA, 20 nt, Artificial Sequence
  LRRK2 RNA guide
guuccccaguaaguaugaua

SEQ ID NO: 1636 - RNA, 20 nt, Artificial Sequence
  LRRK2 RNA guide
uacuggggaacaccaaggac

SEQ ID NO: 1637 - RNA, 20 nt, Artificial Sequence
  LRRK2 RNA guide
uacuuacuggggaacaccaa

SEQ ID NO: 1638 - RNA, 20 nt, Artificial Sequence
  LRRK2 RNA guide
uaucauacuuacuggggaac

SEQ ID NO: 1639 - RNA, 20 nt, Artificial Sequence
  LRRK2 RNA guide
uaucuaucauacuuacuggg

SEQ ID NO: 1640 - RNA, 20 nt, Artificial Sequence
  LRRK2 RNA guide
ucauacuuacuggggaacac

SEQ ID NO: 1641 - RNA, 20 nt, Artificial Sequence
  LRRK2 RNA guide
uccccaguaaguaugauaga

SEQ ID NO: 1642 - RNA, 20 nt, Artificial Sequence
  LRRK2 RNA guide
uccuugguguuccccaguaa

SEQ ID NO: 1643 - RNA, 20 nt, Artificial Sequence
  LRRK2 RNA guide
ucuaucauacuuacugggga

SEQ ID NO: 1644 - RNA, 20 nt, Artificial Sequence
  LRRK2 RNA guide
ugauugggaaguccuuggug

SEQ ID NO: 1645 - RNA, 20 nt, Artificial Sequence
  LRRK2 RNA guide
ugggaaguccuugguguucc

SEQ ID NO: 1646 - RNA, 20 nt, Artificial Sequence
  LRRK2 RNA guide
uggggaacaccaaggacuuc

SEQ ID NO: 1647 - RNA, 20 nt, Artificial Sequence
  LRRK2 RNA guide
ugguguuccccaguaaguau

SEQ ID NO: 1648 - RNA, 20 nt, Artificial Sequence
  LRRK2 RNA guide
uguuccccaguaaguaugau

SEQ ID NO: 1649 - RNA, 20 nt, Artificial Sequence
  LRRK2 RNA guide
uuacuggggaacaccaagga

SEQ ID NO: 1650 - RNA, 20 nt, Artificial Sequence
  LRRK2 RNA guide
uuccccaguaaguaugauag

SEQ ID NO: 1651 - RNA, 20 nt, Artificial Sequence
  LRRK2 RNA guide
uugggaaguccuugguguuc

SEQ ID NO: 1652 - RNA, 20 nt, Artificial Sequence
  LRRK2 RNA guide
uugguguuccccaguaagua

SEQ ID NO: 1653 - RNA, 21 nt, Artificial Sequence
  LRRK2 RNA guide
aaguccuugguguuccccagu

SEQ ID NO: 1654 - RNA, 21 nt, Artificial Sequence
  LRRK2 RNA guide
aaugauugggaaguccuuggu

SEQ ID NO: 1655 - RNA, 21 nt, Artificial Sequence
  LRRK2 RNA guide
acuggggaacaccaaggacuu

SEQ ID NO: 1656 - RNA, 21 nt, Artificial Sequence
  LRRK2 RNA guide
acuuacuggggaacaccaagg

SEQ ID NO: 1657 - RNA, 21 nt, Artificial Sequence
  LRRK2 RNA guide
aguccuugguguuccccagua

SEQ ID NO: 1658 - RNA, 21 nt, Artificial Sequence
  LRRK2 RNA guide
auacuuacuggggaacaccaa

SEQ ID NO: 1659 - RNA, 21 nt, Artificial Sequence
  LRRK2 RNA guide
auaucuaucauacuuacuggg

SEQ ID NO: 1660 - RNA, 21 nt, Artificial Sequence
  LRRK2 RNA guide
aucauacuuacuggggaacac

SEQ ID NO: 1661 - RNA, 21 nt, Artificial Sequence
  LRRK2 RNA guide
aucuaucauacuuacugggga

SEQ ID NO: 1662 - RNA, 21 nt, Artificial Sequence
  LRRK2 RNA guide
augauugggaaguccuuggug

SEQ ID NO: 1663 - RNA, 21 nt, Artificial Sequence
  LRRK2 RNA guide
auugggaaguccuugguguuc

SEQ ID NO: 1664 - RNA, 21 nt, Artificial Sequence
  LRRK2 RNA guide
cauacuuacuggggaacacca

SEQ ID NO: 1665 - RNA, 21 nt, Artificial Sequence
  LRRK2 RNA guide
cauaucuaucauacuuacugg

SEQ ID NO: 1666 - RNA, 21 nt, Artificial Sequence
  LRRK2 RNA guide
ccccaguaaguaugauagaua

SEQ ID NO: 1667 - RNA, 21 nt, Artificial Sequence
  LRRK2 RNA guide
ccuugguguuccccaguaagu

SEQ ID NO: 1668 - RNA, 21 nt, Artificial Sequence
  LRRK2 RNA guide
cuaucauacuuacuggggaac

SEQ ID NO: 1669 - RNA, 21 nt, Artificial Sequence
  LRRK2 RNA guide
cuggggaacaccaaggacuuc

SEQ ID NO: 1670 - RNA, 21 nt, Artificial Sequence
  LRRK2 RNA guide
cuuacuggggaacaccaagga

SEQ ID NO: 1671 - RNA, 21 nt, Artificial Sequence
  LRRK2 RNA guide
cuugguguuccccaguaagua

SEQ ID NO: 1672 - RNA, 21 nt, Artificial Sequence
  LRRK2 RNA guide
gaaguccuugguguuccccag

SEQ ID NO: 1673 - RNA, 21 nt, Artificial Sequence
  LRRK2 RNA guide
gauugggaaguccuugguguu

SEQ ID NO: 1674 - RNA, 21 nt, Artificial Sequence
  LRRK2 RNA guide
ggaaguccuugguguucccca

SEQ ID NO: 1675 - RNA, 21 nt, Artificial Sequence
  LRRK2 RNA guide
gggaacaccaaggacuuccca

SEQ ID NO: 1676 - RNA, 21 nt, Artificial Sequence
  LRRK2 RNA guide
gggaaguccuugguguucccc

SEQ ID NO: 1677 - RNA, 21 nt, Artificial Sequence
  LRRK2 RNA guide
ggggaacaccaaggacuuccc

SEQ ID NO: 1678 - RNA, 21 nt, Artificial Sequence
  LRRK2 RNA guide
gguguuccccaguaaguauga

SEQ ID NO: 1679 - RNA, 21 nt, Artificial Sequence
  LRRK2 RNA guide
guccuugguguuccccaguaa

SEQ ID NO: 1680 - RNA, 21 nt, Artificial Sequence
  LRRK2 RNA guide
guguuccccaguaaguaugau

SEQ ID NO: 1681 - RNA, 21 nt, Artificial Sequence
  LRRK2 RNA guide
guuccccaguaaguaugauag

SEQ ID NO: 1682 - RNA, 21 nt, Artificial Sequence
  LRRK2 RNA guide
uacuggggaacaccaaggacu

SEQ ID NO: 1683 - RNA, 21 nt, Artificial Sequence
  LRRK2 RNA guide
uacuuacuggggaacaccaag

SEQ ID NO: 1684 - RNA, 21 nt, Artificial Sequence
  LRRK2 RNA guide
uaucauacuuacuggggaaca

SEQ ID NO: 1685 - RNA, 21 nt, Artificial Sequence
  LRRK2 RNA guide
uaucuaucauacuuacugggg

SEQ ID NO: 1686 - RNA, 21 nt, Artificial Sequence
  LRRK2 RNA guide
ucauacuuacuggggaacacc

SEQ ID NO: 1687 - RNA, 21 nt, Artificial Sequence
  LRRK2 RNA guide
uccccaguaaguaugauagau

SEQ ID NO: 1688 - RNA, 21 nt, Artificial Sequence
  LRRK2 RNA guide
uccuugguguuccccaguaag

SEQ ID NO: 1689 - RNA, 21 nt, Artificial Sequence
  LRRK2 RNA guide
ucuaucauacuuacuggggaa

SEQ ID NO: 1690 - RNA, 21 nt, Artificial Sequence
  LRRK2 RNA guide
ugauugggaaguccuuggugu

SEQ ID NO: 1691 - RNA, 21 nt, Artificial Sequence
  LRRK2 RNA guide
ugggaaguccuugguguuccc

SEQ ID NO: 1692 - RNA, 21 nt, Artificial Sequence
  LRRK2 RNA guide
uggggaacaccaaggacuucc

SEQ ID NO: 1693 - RNA, 21 nt, Artificial Sequence
  LRRK2 RNA guide
ugguguuccccaguaaguaug

SEQ ID NO: 1694 - RNA, 21 nt, Artificial Sequence
  LRRK2 RNA guide
uguuccccaguaaguaugaua

SEQ ID NO: 1695 - RNA, 21 nt, Artificial Sequence
  LRRK2 RNA guide
uuacuggggaacaccaaggac

SEQ ID NO: 1696 - RNA, 21 nt, Artificial Sequence
  LRRK2 RNA guide
uuccccaguaaguaugauaga

SEQ ID NO: 1697 - RNA, 21 nt, Artificial Sequence
  LRRK2 RNA guide
uugggaaguccuugguguucc

SEQ ID NO: 1698 - RNA, 21 nt, Artificial Sequence
  LRRK2 RNA guide
uugguguuccccaguaaguau

SEQ ID NO: 1699 - RNA, 22 nt, Artificial Sequence
  LRRK2 RNA guide
aaaugauugggaaguccuuggu

SEQ ID NO: 1700 - RNA, 22 nt, Artificial Sequence
  LRRK2 RNA guide
aaguccuugguguuccccagua

SEQ ID NO: 1701 - RNA, 22 nt, Artificial Sequence
  LRRK2 RNA guide
aaugauugggaaguccuuggug

SEQ ID NO: 1702 - RNA, 22 nt, Artificial Sequence
  LRRK2 RNA guide
acauaucuaucauacuuacugg

SEQ ID NO: 1703 - RNA, 22 nt, Artificial Sequence
  LRRK2 RNA guide
acuggggaacaccaaggacuuc

SEQ ID NO: 1704 - RNA, 22 nt, Artificial Sequence
  LRRK2 RNA guide
acuuacuggggaacaccaagga

SEQ ID NO: 1705 - RNA, 22 nt, Artificial Sequence
  LRRK2 RNA guide
aguccuugguguuccccaguaa

SEQ ID NO: 1706 - RNA, 22 nt, Artificial Sequence
  LRRK2 RNA guide
auacuuacuggggaacaccaag

SEQ ID NO: 1707 - RNA, 22 nt, Artificial Sequence
  LRRK2 RNA guide
auaucuaucauacuuacugggg

SEQ ID NO: 1708 - RNA, 22 nt, Artificial Sequence
  LRRK2 RNA guide
aucauacuuacuggggaacacc

SEQ ID NO: 1709 - RNA, 22 nt, Artificial Sequence
  LRRK2 RNA guide
aucuaucauacuuacuggggaa

SEQ ID NO: 1710 - RNA, 22 nt, Artificial Sequence
  LRRK2 RNA guide
augauugggaaguccuuggugu

SEQ ID NO: 1711 - RNA, 22 nt, Artificial Sequence
  LRRK2 RNA guide
auugggaaguccuugguguucc

SEQ ID NO: 1712 - RNA, 22 nt, Artificial Sequence
  LRRK2 RNA guide
cauacuuacuggggaacaccaa

SEQ ID NO: 1713 - RNA, 22 nt, Artificial Sequence
  LRRK2 RNA guide
cauaucuaucauacuuacuggg

SEQ ID NO: 1714 - RNA, 22 nt, Artificial Sequence
  LRRK2 RNA guide
ccccaguaaguaugauagauau

SEQ ID NO: 1715 - RNA, 22 nt, Artificial Sequence
  LRRK2 RNA guide
ccuugguguuccccaguaagua

SEQ ID NO: 1716 - RNA, 22 nt, Artificial Sequence
  LRRK2 RNA guide
cuaucauacuuacuggggaaca

SEQ ID NO: 1717 - RNA, 22 nt, Artificial Sequence
  LRRK2 RNA guide
cuggggaacaccaaggacuucc

SEQ ID NO: 1718 - RNA, 22 nt, Artificial Sequence
  LRRK2 RNA guide
cuuacuggggaacaccaaggac

SEQ ID NO: 1719 - RNA, 22 nt, Artificial Sequence
  LRRK2 RNA guide
cuugguguuccccaguaaguau

SEQ ID NO: 1720 - RNA, 22 nt, Artificial Sequence
  LRRK2 RNA guide
gaaguccuugguguuccccagu

SEQ ID NO: 1721 - RNA, 22 nt, Artificial Sequence
  LRRK2 RNA guide
gauugggaaguccuugguguuc

SEQ ID NO: 1722 - RNA, 22 nt, Artificial Sequence
  LRRK2 RNA guide
ggaaguccuugguguuccccag

SEQ ID NO: 1723 - RNA, 22 nt, Artificial Sequence
  LRRK2 RNA guide
gggaacaccaaggacuucccaa

SEQ ID NO: 1724 - RNA, 22 nt, Artificial Sequence
  LRRK2 RNA guide
gggaaguccuugguguucccca

SEQ ID NO: 1725 - RNA, 22 nt, Artificial Sequence
  LRRK2 RNA guide
ggggaacaccaaggacuuccca

SEQ ID NO: 1726 - RNA, 22 nt, Artificial Sequence
  LRRK2 RNA guide
gguguuccccaguaaguaugau

SEQ ID NO: 1727 - RNA, 22 nt, Artificial Sequence
  LRRK2 RNA guide
guccuugguguuccccaguaag

SEQ ID NO: 1728 - RNA, 22 nt, Artificial Sequence
  LRRK2 RNA guide
guguuccccaguaaguaugaua

SEQ ID NO: 1729 - RNA, 22 nt, Artificial Sequence
  LRRK2 RNA guide
guuccccaguaaguaugauaga

SEQ ID NO: 1730 - RNA, 22 nt, Artificial Sequence
  LRRK2 RNA guide
uacuggggaacaccaaggacuu

SEQ ID NO: 1731 - RNA, 22 nt, Artificial Sequence
  LRRK2 RNA guide
uacuuacuggggaacaccaagg

SEQ ID NO: 1732 - RNA, 22 nt, Artificial Sequence
  LRRK2 RNA guide
uaucauacuuacuggggaacac

SEQ ID NO: 1733 - RNA, 22 nt, Artificial Sequence
  LRRK2 RNA guide
uaucuaucauacuuacugggga

SEQ ID NO: 1734 - RNA, 22 nt, Artificial Sequence
  LRRK2 RNA guide
ucauacuuacuggggaacacca

SEQ ID NO: 1735 - RNA, 22 nt, Artificial Sequence
  LRRK2 RNA guide
uccccaguaaguaugauagaua

SEQ ID NO: 1736 - RNA, 22 nt, Artificial Sequence
  LRRK2 RNA guide
uccuugguguuccccaguaagu

SEQ ID NO: 1737 - RNA, 22 nt, Artificial Sequence
  LRRK2 RNA guide
ucuaucauacuuacuggggaac

SEQ ID NO: 1738 - RNA, 22 nt, Artificial Sequence
  LRRK2 RNA guide
ugauugggaaguccuugguguu

SEQ ID NO: 1739 - RNA, 22 nt, Artificial Sequence
  LRRK2 RNA guide
ugggaaguccuugguguucccc

SEQ ID NO: 1740 - RNA, 22 nt, Artificial Sequence
  LRRK2 RNA guide
uggggaacaccaaggacuuccc

SEQ ID NO: 1741 - RNA, 22 nt, Artificial Sequence
  LRRK2 RNA guide
ugguguuccccaguaaguauga

SEQ ID NO: 1742 - RNA, 22 nt, Artificial Sequence
  LRRK2 RNA guide
uguuccccaguaaguaugauag

SEQ ID NO: 1743 - RNA, 22 nt, Artificial Sequence
  LRRK2 RNA guide
uuacuggggaacaccaaggacu

SEQ ID NO: 1744 - RNA, 22 nt, Artificial Sequence
  LRRK2 RNA guide
uuccccaguaaguaugauagau

SEQ ID NO: 1745 - RNA, 22 nt, Artificial Sequence
  LRRK2 RNA guide
uugggaaguccuugguguuccc

SEQ ID NO: 1746 - RNA, 22 nt, Artificial Sequence
  LRRK2 RNA guide
uugguguuccccaguaaguaug

SEQ ID NO: 1747 - RNA, 20 nt, Artificial Sequence
  LRRK2 RNA guide
aaguccuugguguucaccag

SEQ ID NO: 1748 - RNA, 20 nt, Artificial Sequence
  LRRK2 RNA guide
acauaucuaucauacuugcu

SEQ ID NO: 1749 - RNA, 20 nt, Artificial Sequence
  LRRK2 RNA guide
accagcaaguaugauagaua

SEQ ID NO: 1750 - RNA, 20 nt, Artificial Sequence
  LRRK2 RNA guide
acuugcuggugaacaccaag

SEQ ID NO: 1751 - RNA, 20 nt, Artificial Sequence
  LRRK2 RNA guide
agcaaguaugauagauaugu

SEQ ID NO: 1752 - RNA, 20 nt, Artificial Sequence
  LRRK2 RNA guide
aguccuugguguucaccagc

SEQ ID NO: 1753 - RNA, 20 nt, Artificial Sequence
  LRRK2 RNA guide
auacuugcuggugaacacca

SEQ ID NO: 1754 - RNA, 20 nt, Artificial Sequence
  LRRK2 RNA guide
auaucuaucauacuugcugg

SEQ ID NO: 1755 - RNA, 20 nt, Artificial Sequence
  LRRK2 RNA guide
aucauacuugcuggugaaca

SEQ ID NO: 1756 - RNA, 20 nt, Artificial Sequence
  LRRK2 RNA guide
aucuaucauacuugcuggug

SEQ ID NO: 1757 - RNA, 20 nt, Artificial Sequence
  LRRK2 RNA guide
caccagcaaguaugauagau

SEQ ID NO: 1758 - RNA, 20 nt, Artificial Sequence
  LRRK2 RNA guide
cagcaaguaugauagauaug

SEQ ID NO: 1759 - RNA, 20 nt, Artificial Sequence
  LRRK2 RNA guide
cauacuugcuggugaacacc

SEQ ID NO: 1760 - RNA, 20 nt, Artificial Sequence
  LRRK2 RNA guide
cauaucuaucauacuugcug

SEQ ID NO: 1761 - RNA, 20 nt, Artificial Sequence
  LRRK2 RNA guide
ccagcaaguaugauagauau

SEQ ID NO: 1762 - RNA, 20 nt, Artificial Sequence
  LRRK2 RNA guide
ccuugguguucaccagcaag

SEQ ID NO: 1763 - RNA, 20 nt, Artificial Sequence
  LRRK2 RNA guide
cuaucauacuugcuggugaa

SEQ ID NO: 1764 - RNA, 20 nt, Artificial Sequence
  LRRK2 RNA guide
cuugcuggugaacaccaagg

SEQ ID NO: 1765 - RNA, 20 nt, Artificial Sequence
  LRRK2 RNA guide
cuugguguucaccagcaagu

SEQ ID NO: 1766 - RNA, 20 nt, Artificial Sequence
  LRRK2 RNA guide
gaaguccuugguguucacca

SEQ ID NO: 1767 - RNA, 20 nt, Artificial Sequence
  LRRK2 RNA guide
gcaaguaugauagauaugua

SEQ ID NO: 1768 - RNA, 20 nt, Artificial Sequence
  LRRK2 RNA guide
ggaaguccuugguguucacc

SEQ ID NO: 1769 - RNA, 20 nt, Artificial Sequence
  LRRK2 RNA guide
gggaaguccuugguguucac

SEQ ID NO: 1770 - RNA, 20 nt, Artificial Sequence
  LRRK2 RNA guide
gguguucaccagcaaguaug

SEQ ID NO: 1771 - RNA, 20 nt, Artificial Sequence
  LRRK2 RNA guide
guccuugguguucaccagca

SEQ ID NO: 1772 - RNA, 20 nt, Artificial Sequence
  LRRK2 RNA guide
guguucaccagcaaguauga

SEQ ID NO: 1773 - RNA, 20 nt, Artificial Sequence
  LRRK2 RNA guide
guucaccagcaaguaugaua

SEQ ID NO: 1774 - RNA, 20 nt, Artificial Sequence
  LRRK2 RNA guide
uacauaucuaucauacuugc

SEQ ID NO: 1775 - RNA, 20 nt, Artificial Sequence
  LRRK2 RNA guide
uacuugcuggugaacaccaa

SEQ ID NO: 1776 - RNA, 20 nt, Artificial Sequence
  LRRK2 RNA guide
uaucauacuugcuggugaac

SEQ ID NO: 1777 - RNA, 20 nt, Artificial Sequence
  LRRK2 RNA guide
uaucuaucauacuugcuggu

SEQ ID NO: 1778 - RNA, 20 nt, Artificial Sequence
  LRRK2 RNA guide
ucaccagcaaguaugauaga

SEQ ID NO: 1779 - RNA, 20 nt, Artificial Sequence
  LRRK2 RNA guide
ucauacuugcuggugaacac

SEQ ID NO: 1780 - RNA, 20 nt, Artificial Sequence
  LRRK2 RNA guide
uccuugguguucaccagcaa

SEQ ID NO: 1781 - RNA, 20 nt, Artificial Sequence
  LRRK2 RNA guide
ucuaucauacuugcugguga

SEQ ID NO: 1782 - RNA, 20 nt, Artificial Sequence
  LRRK2 RNA guide
ugcuggugaacaccaaggac

SEQ ID NO: 1783 - RNA, 20 nt, Artificial Sequence
  LRRK2 RNA guide
ugggaaguccuugguguuca

SEQ ID NO: 1784 - RNA, 20 nt, Artificial Sequence
  LRRK2 RNA guide
ugguguucaccagcaaguau

SEQ ID NO: 1785 - RNA, 20 nt, Artificial Sequence
  LRRK2 RNA guide
uguucaccagcaaguaugau

SEQ ID NO: 1786 - RNA, 20 nt, Artificial Sequence
  LRRK2 RNA guide
uucaccagcaaguaugauag

SEQ ID NO: 1787 - RNA, 20 nt, Artificial Sequence
  LRRK2 RNA guide
uugcuggugaacaccaagga

SEQ ID NO: 1788 - RNA, 20 nt, Artificial Sequence
  LRRK2 RNA guide
uugguguucaccagcaagua

SEQ ID NO: 1789 - RNA, 21 nt, Artificial Sequence
  LRRK2 RNA guide
aaguccuugguguucaccagc

SEQ ID NO: 1790 - RNA, 21 nt, Artificial Sequence
  LRRK2 RNA guide
acauaucuaucauacuugcug

SEQ ID NO: 1791 - RNA, 21 nt, Artificial Sequence
  LRRK2 RNA guide
accagcaaguaugauagauau

SEQ ID NO: 1792 - RNA, 21 nt, Artificial Sequence
  LRRK2 RNA guide
acuugcuggugaacaccaagg

SEQ ID NO: 1793 - RNA, 21 nt, Artificial Sequence
  LRRK2 RNA guide
aguccuugguguucaccagca

SEQ ID NO: 1794 - RNA, 21 nt, Artificial Sequence
  LRRK2 RNA guide
auacuugcuggugaacaccaa

SEQ ID NO: 1795 - RNA, 21 nt, Artificial Sequence
  LRRK2 RNA guide
auaucuaucauacuugcuggu

SEQ ID NO: 1796 - RNA, 21 nt, Artificial Sequence
  LRRK2 RNA guide
aucauacuugcuggugaacac

SEQ ID NO: 1797 - RNA, 21 nt, Artificial Sequence
  LRRK2 RNA guide
aucuaucauacuugcugguga

SEQ ID NO: 1798 - RNA, 21 nt, Artificial Sequence
  LRRK2 RNA guide
caccagcaaguaugauagaua

SEQ ID NO: 1799 - RNA, 21 nt, Artificial Sequence
  LRRK2 RNA guide
cagcaaguaugauagauaugu

SEQ ID NO: 1800 - RNA, 21 nt, Artificial Sequence
  LRRK2 RNA guide
cauacuugcuggugaacacca

SEQ ID NO: 1801 - RNA, 21 nt, Artificial Sequence
  LRRK2 RNA guide
cauaucuaucauacuugcugg

SEQ ID NO: 1802 - RNA, 21 nt, Artificial Sequence
  LRRK2 RNA guide
ccagcaaguaugauagauaug

SEQ ID NO: 1803 - RNA, 21 nt, Artificial Sequence
  LRRK2 RNA guide
ccuugguguucaccagcaagu

SEQ ID NO: 1804 - RNA, 21 nt, Artificial Sequence
  LRRK2 RNA guide
cuaucauacuugcuggugaac

SEQ ID NO: 1805 - RNA, 21 nt, Artificial Sequence
  LRRK2 RNA guide
cuugcuggugaacaccaagga

SEQ ID NO: 1806 - RNA, 21 nt, Artificial Sequence
  LRRK2 RNA guide
cuugguguucaccagcaagua

SEQ ID NO: 1807 - RNA, 21 nt, Artificial Sequence
  LRRK2 RNA guide
gaaguccuugguguucaccag

SEQ ID NO: 1808 - RNA, 21 nt, Artificial Sequence
  LRRK2 RNA guide
ggaaguccuugguguucacca

SEQ ID NO: 1809 - RNA, 21 nt, Artificial Sequence
  LRRK2 RNA guide
gggaaguccuugguguucacc

SEQ ID NO: 1810 - RNA, 21 nt, Artificial Sequence
  LRRK2 RNA guide
gguguucaccagcaaguauga

SEQ ID NO: 1811 - RNA, 21 nt, Artificial Sequence
  LRRK2 RNA guide
guccuugguguucaccagcaa

SEQ ID NO: 1812 - RNA, 21 nt, Artificial Sequence
  LRRK2 RNA guide
guguucaccagcaaguaugau

SEQ ID NO: 1813 - RNA, 21 nt, Artificial Sequence
  LRRK2 RNA guide
guucaccagcaaguaugauag

SEQ ID NO: 1814 - RNA, 21 nt, Artificial Sequence
  LRRK2 RNA guide
uacuugcuggugaacaccaag

SEQ ID NO: 1815 - RNA, 21 nt, Artificial Sequence
  LRRK2 RNA guide
uaucauacuugcuggugaaca

SEQ ID NO: 1816 - RNA, 21 nt, Artificial Sequence
  LRRK2 RNA guide
uaucuaucauacuugcuggug

SEQ ID NO: 1817 - RNA, 21 nt, Artificial Sequence
  LRRK2 RNA guide
ucaccagcaaguaugauagau

SEQ ID NO: 1818 - RNA, 21 nt, Artificial Sequence
  LRRK2 RNA guide
ucauacuugcuggugaacacc

SEQ ID NO: 1819 - RNA, 21 nt, Artificial Sequence
  LRRK2 RNA guide
uccuugguguucaccagcaag

SEQ ID NO: 1820 - RNA, 21 nt, Artificial Sequence
  LRRK2 RNA guide
ucuaucauacuugcuggugaa

SEQ ID NO: 1821 - RNA, 21 nt, Artificial Sequence
  LRRK2 RNA guide
ugcuggugaacaccaaggacu

SEQ ID NO: 1822 - RNA, 21 nt, Artificial Sequence
  LRRK2 RNA guide
ugggaaguccuugguguucac

SEQ ID NO: 1823 - RNA, 21 nt, Artificial Sequence
  LRRK2 RNA guide
ugguguucaccagcaaguaug

SEQ ID NO: 1824 - RNA, 21 nt, Artificial Sequence
  LRRK2 RNA guide
uguucaccagcaaguaugaua

SEQ ID NO: 1825 - RNA, 21 nt, Artificial Sequence
  LRRK2 RNA guide
uucaccagcaaguaugauaga

SEQ ID NO: 1826 - RNA, 21 nt, Artificial Sequence
  LRRK2 RNA guide
uugcuggugaacaccaaggac

SEQ ID NO: 1827 - RNA, 21 nt, Artificial Sequence
  LRRK2 RNA guide
uugggaaguccuugguguuca

SEQ ID NO: 1828 - RNA, 21 nt, Artificial Sequence
  LRRK2 RNA guide
uugguguucaccagcaaguau

SEQ ID NO: 1829 - RNA, 22 nt, Artificial Sequence
  LRRK2 RNA guide
aaguccuugguguucaccagca

SEQ ID NO: 1830 - RNA, 22 nt, Artificial Sequence
  LRRK2 RNA guide
acauaucuaucauacuugcugg

SEQ ID NO: 1831 - RNA, 22 nt, Artificial Sequence
  LRRK2 RNA guide
accagcaaguaugauagauaug

SEQ ID NO: 1832 - RNA, 22 nt, Artificial Sequence
  LRRK2 RNA guide
acuugcuggugaacaccaagga

SEQ ID NO: 1833 - RNA, 22 nt, Artificial Sequence
  LRRK2 RNA guide
aguccuugguguucaccagcaa

SEQ ID NO: 1834 - RNA, 22 nt, Artificial Sequence
  LRRK2 RNA guide
auacuugcuggugaacaccaag

SEQ ID NO: 1835 - RNA, 22 nt, Artificial Sequence
  LRRK2 RNA guide
auaucuaucauacuugcuggug

SEQ ID NO: 1836 - RNA, 22 nt, Artificial Sequence
  LRRK2 RNA guide
aucauacuugcuggugaacacc

SEQ ID NO: 1837 - RNA, 22 nt, Artificial Sequence
  LRRK2 RNA guide
aucuaucauacuugcuggugaa

SEQ ID NO: 1838 - RNA, 22 nt, Artificial Sequence
  LRRK2 RNA guide
auugggaaguccuugguguuca

SEQ ID NO: 1839 - RNA, 22 nt, Artificial Sequence
  LRRK2 RNA guide
caccagcaaguaugauagauau

SEQ ID NO: 1840 - RNA, 22 nt, Artificial Sequence
  LRRK2 RNA guide
cagcaaguaugauagauaugua

SEQ ID NO: 1841 - RNA, 22 nt, Artificial Sequence
  LRRK2 RNA guide
cauacuugcuggugaacaccaa

SEQ ID NO: 1842 - RNA, 22 nt, Artificial Sequence
  LRRK2 RNA guide
cauaucuaucauacuugcuggu

SEQ ID NO: 1843 - RNA, 22 nt, Artificial Sequence
  LRRK2 RNA guide
ccagcaaguaugauagauaugu

SEQ ID NO: 1844 - RNA, 22 nt, Artificial Sequence
  LRRK2 RNA guide
ccuugguguucaccagcaagua

SEQ ID NO: 1845 - RNA, 22 nt, Artificial Sequence
  LRRK2 RNA guide
cuaucauacuugcuggugaaca

SEQ ID NO: 1846 - RNA, 22 nt, Artificial Sequence
  LRRK2 RNA guide
cuugcuggugaacaccaaggac

SEQ ID NO: 1847 - RNA, 22 nt, Artificial Sequence
  LRRK2 RNA guide
cuugguguucaccagcaaguau

SEQ ID NO: 1848 - RNA, 22 nt, Artificial Sequence
  LRRK2 RNA guide
gaaguccuugguguucaccagc

SEQ ID NO: 1849 - RNA, 22 nt, Artificial Sequence
  LRRK2 RNA guide
ggaaguccuugguguucaccag

SEQ ID NO: 1850 - RNA, 22 nt, Artificial Sequence
  LRRK2 RNA guide
gggaaguccuugguguucacca

SEQ ID NO: 1851 - RNA, 22 nt, Artificial Sequence
  LRRK2 RNA guide
gguguucaccagcaaguaugau

SEQ ID NO: 1852 - RNA, 22 nt, Artificial Sequence
  LRRK2 RNA guide
guccuugguguucaccagcaag

SEQ ID NO: 1853 - RNA, 22 nt, Artificial Sequence
  LRRK2 RNA guide
guguucaccagcaaguaugaua

SEQ ID NO: 1854 - RNA, 22 nt, Artificial Sequence
  LRRK2 RNA guide
guucaccagcaaguaugauaga

SEQ ID NO: 1855 - RNA, 22 nt, Artificial Sequence
  LRRK2 RNA guide
uacauaucuaucauacuugcug

SEQ ID NO: 1856 - RNA, 22 nt, Artificial Sequence
  LRRK2 RNA guide
uacuugcuggugaacaccaagg

SEQ ID NO: 1857 - RNA, 22 nt, Artificial Sequence
  LRRK2 RNA guide
uaucauacuugcuggugaacac

SEQ ID NO: 1858 - RNA, 22 nt, Artificial Sequence
  LRRK2 RNA guide
uaucuaucauacuugcugguga

SEQ ID NO: 1859 - RNA, 22 nt, Artificial Sequence
  LRRK2 RNA guide
ucaccagcaaguaugauagaua

SEQ ID NO: 1860 - RNA, 22 nt, Artificial Sequence
  LRRK2 RNA guide
ucauacuugcuggugaacacca

SEQ ID NO: 1861 - RNA, 22 nt, Artificial Sequence
  LRRK2 RNA guide
uccuugguguucaccagcaagu

SEQ ID NO: 1862 - RNA, 22 nt, Artificial Sequence
  LRRK2 RNA guide
ucuaucauacuugcuggugaac

SEQ ID NO: 1863 - RNA, 22 nt, Artificial Sequence
  LRRK2 RNA guide
ugcuggugaacaccaaggacuu

SEQ ID NO: 1864 - RNA, 22 nt, Artificial Sequence
  LRRK2 RNA guide
ugggaaguccuugguguucacc

SEQ ID NO: 1865 - RNA, 22 nt, Artificial Sequence
  LRRK2 RNA guide
ugguguucaccagcaaguauga

SEQ ID NO: 1866 - RNA, 22 nt, Artificial Sequence
  LRRK2 RNA guide
uguucaccagcaaguaugauag

SEQ ID NO: 1867 - RNA, 22 nt, Artificial Sequence
  LRRK2 RNA guide
uucaccagcaaguaugauagau

SEQ ID NO: 1868 - RNA, 22 nt, Artificial Sequence
  LRRK2 RNA guide
uugcuggugaacaccaaggacu

SEQ ID NO: 1869 - RNA, 22 nt, Artificial Sequence
  LRRK2 RNA guide
uugggaaguccuugguguucac

SEQ ID NO: 1870 - RNA, 22 nt, Artificial Sequence
  LRRK2 RNA guide
uugguguucaccagcaaguaug

SEQ ID NO: 1871 - RNA, 20 nt, Artificial Sequence
  LRRK2 RNA guide
aacuccagauugauuccuaa

SEQ ID NO: 1872 - RNA, 20 nt, Artificial Sequence
  LRRK2 RNA guide
aacuguuagcauuuuaggaa

SEQ ID NO: 1873 - RNA, 20 nt, Artificial Sequence
  LRRK2 RNA guide
acuccagauugauuccuaaa

SEQ ID NO: 1874 - RNA, 20 nt, Artificial Sequence
  LRRK2 RNA guide
acuguuagcauuuuaggaau

SEQ ID NO: 1875 - RNA, 20 nt, Artificial Sequence
  LRRK2 RNA guide
agauugauuccuaaaaugcu

SEQ ID NO: 1876 - RNA, 20 nt, Artificial Sequence
  LRRK2 RNA guide
agcauuuuaggaaucaaucu

SEQ ID NO: 1877 - RNA, 20 nt, Artificial Sequence
  LRRK2 RNA guide
aggaaucaaucuggaguuaa

SEQ ID NO: 1878 - RNA, 20 nt, Artificial Sequence
  LRRK2 RNA guide
augaacuguuagcauuuuag

SEQ ID NO: 1879 - RNA, 20 nt, Artificial Sequence
  LRRK2 RNA guide
auuccuaaaaugcuaacagu

SEQ ID NO: 1880 - RNA, 20 nt, Artificial Sequence
  LRRK2 RNA guide
auuuuaggaaucaaucugga

SEQ ID NO: 1881 - RNA, 20 nt, Artificial Sequence
  LRRK2 RNA guide
cagauugauuccuaaaaugc

SEQ ID NO: 1882 - RNA, 20 nt, Artificial Sequence
  LRRK2 RNA guide
cauuaugaacuguuagcauu

SEQ ID NO: 1883 - RNA, 20 nt, Artificial Sequence
  LRRK2 RNA guide
cauuuuaggaaucaaucugg

SEQ ID NO: 1884 - RNA, 20 nt, Artificial Sequence
  LRRK2 RNA guide
ccagauugauuccuaaaaug

SEQ ID NO: 1885 - RNA, 20 nt, Artificial Sequence
  LRRK2 RNA guide
ccuaaaaugcuaacaguuca

SEQ ID NO: 1886 - RNA, 20 nt, Artificial Sequence
  LRRK2 RNA guide
cuccagauugauuccuaaaa

SEQ ID NO: 1887 - RNA, 20 nt, Artificial Sequence
  LRRK2 RNA guide
cuguuagcauuuuaggaauc

SEQ ID NO: 1888 - RNA, 20 nt, Artificial Sequence
  LRRK2 RNA guide
cuguuuuuaacuccagauug

SEQ ID NO: 1889 - RNA, 20 nt, Artificial Sequence
  LRRK2 RNA guide
gaacuguuagcauuuuagga

SEQ ID NO: 1890 - RNA, 20 nt, Artificial Sequence
  LRRK2 RNA guide
gauuccuaaaaugcuaacag

SEQ ID NO: 1891 - RNA, 20 nt, Artificial Sequence
  LRRK2 RNA guide
gauugauuccuaaaaugcua

SEQ ID NO: 1892 - RNA, 20 nt, Artificial Sequence
  LRRK2 RNA guide
gcauuaugaacuguuagcau

SEQ ID NO: 1893 - RNA, 20 nt, Artificial Sequence
  LRRK2 RNA guide
gcauuuuaggaaucaaucug

SEQ ID NO: 1894 - RNA, 20 nt, Artificial Sequence
  LRRK2 RNA guide
guuagcauuuuaggaaucaa

SEQ ID NO: 1895 - RNA, 20 nt, Artificial Sequence
  LRRK2 RNA guide
guuuuuaacuccagauugau

SEQ ID NO: 1896 - RNA, 20 nt, Artificial Sequence
  LRRK2 RNA guide
uaacuccagauugauuccua

SEQ ID NO: 1897 - RNA, 20 nt, Artificial Sequence
  LRRK2 RNA guide
uagcauuuuaggaaucaauc

SEQ ID NO: 1898 - RNA, 20 nt, Artificial Sequence
  LRRK2 RNA guide
uaggaaucaaucuggaguua

SEQ ID NO: 1899 - RNA, 20 nt, Artificial Sequence
  LRRK2 RNA guide
uccagauugauuccuaaaau

SEQ ID NO: 1900 - RNA, 20 nt, Artificial Sequence
  LRRK2 RNA guide
uccuaaaaugcuaacaguuc

SEQ ID NO: 1901 - RNA, 20 nt, Artificial Sequence
  LRRK2 RNA guide
ugaacuguuagcauuuuagg

SEQ ID NO: 1902 - RNA, 20 nt, Artificial Sequence
  LRRK2 RNA guide
ugauuccuaaaaugcuaaca

SEQ ID NO: 1903 - RNA, 20 nt, Artificial Sequence
  LRRK2 RNA guide
uguuagcauuuuaggaauca

SEQ ID NO: 1904 - RNA, 20 nt, Artificial Sequence
  LRRK2 RNA guide
uguuuuuaacuccagauuga

SEQ ID NO: 1905 - RNA, 20 nt, Artificial Sequence
  LRRK2 RNA guide
uuaacuccagauugauuccu

SEQ ID NO: 1906 - RNA, 20 nt, Artificial Sequence
  LRRK2 RNA guide
uuaggaaucaaucuggaguu

SEQ ID NO: 1907 - RNA, 20 nt, Artificial Sequence
  LRRK2 RNA guide
uuccuaaaaugcuaacaguu

SEQ ID NO: 1908 - RNA, 20 nt, Artificial Sequence
  LRRK2 RNA guide
uugauuccuaaaaugcuaac

SEQ ID NO: 1909 - RNA, 20 nt, Artificial Sequence
  LRRK2 RNA guide
uuuaacuccagauugauucc

SEQ ID NO: 1910 - RNA, 20 nt, Artificial Sequence
  LRRK2 RNA guide
uuuaggaaucaaucuggagu

SEQ ID NO: 1911 - RNA, 20 nt, Artificial Sequence
  LRRK2 RNA guide
uuuuaacuccagauugauuc

SEQ ID NO: 1912 - RNA, 20 nt, Artificial Sequence
  LRRK2 RNA guide
uuuuaggaaucaaucuggag

SEQ ID NO: 1913 - RNA, 21 nt, Artificial Sequence
  LRRK2 RNA guide
aacuccagauugauuccuaaa

SEQ ID NO: 1914 - RNA, 21 nt, Artificial Sequence
  LRRK2 RNA guide
acuccagauugauuccuaaaa

SEQ ID NO: 1915 - RNA, 21 nt, Artificial Sequence
  LRRK2 RNA guide
acuguuagcauuuuaggaauc

SEQ ID NO: 1916 - RNA, 21 nt, Artificial Sequence
  LRRK2 RNA guide
agcauuuuaggaaucaaucug

SEQ ID NO: 1917 - RNA, 21 nt, Artificial Sequence
  LRRK2 RNA guide
aggaaucaaucuggaguuaaa

SEQ ID NO: 1918 - RNA, 21 nt, Artificial Sequence
  LRRK2 RNA guide
augaacuguuagcauuuuagg

SEQ ID NO: 1919 - RNA, 21 nt, Artificial Sequence
  LRRK2 RNA guide
auuuuaggaaucaaucuggag

SEQ ID NO: 1920 - RNA, 21 nt, Artificial Sequence
  LRRK2 RNA guide
cagauugauuccuaaaaugcu

SEQ ID NO: 1921 - RNA, 21 nt, Artificial Sequence
  LRRK2 RNA guide
cauuuuaggaaucaaucugga

SEQ ID NO: 1922 - RNA, 21 nt, Artificial Sequence
  LRRK2 RNA guide
ccagauugauuccuaaaaugc

SEQ ID NO: 1923 - RNA, 21 nt, Artificial Sequence
  LRRK2 RNA guide
ccuaaaaugcuaacaguucau

SEQ ID NO: 1924 - RNA, 21 nt, Artificial Sequence
  LRRK2 RNA guide
cuccagauugauuccuaaaau

SEQ ID NO: 1925 - RNA, 21 nt, Artificial Sequence
  LRRK2 RNA guide
cuguuagcauuuuaggaauca

SEQ ID NO: 1926 - RNA, 21 nt, Artificial Sequence
  LRRK2 RNA guide
cuguuuuuaacuccagauuga

SEQ ID NO: 1927 - RNA, 21 nt, Artificial Sequence
  LRRK2 RNA guide
gaacuguuagcauuuuaggaa

SEQ ID NO: 1928 - RNA, 21 nt, Artificial Sequence
  LRRK2 RNA guide
gauuccuaaaaugcuaacagu

SEQ ID NO: 1929 - RNA, 21 nt, Artificial Sequence
  LRRK2 RNA guide
gcauuaugaacuguuagcauu

SEQ ID NO: 1930 - RNA, 21 nt, Artificial Sequence
  LRRK2 RNA guide
gcauuuuaggaaucaaucugg

SEQ ID NO: 1931 - RNA, 21 nt, Artificial Sequence
  LRRK2 RNA guide
ggcauuaugaacuguuagcau

SEQ ID NO: 1932 - RNA, 21 nt, Artificial Sequence
  LRRK2 RNA guide
uaacuccagauugauuccuaa

SEQ ID NO: 1933 - RNA, 21 nt, Artificial Sequence
  LRRK2 RNA guide
uaggaaucaaucuggaguuaa

SEQ ID NO: 1934 - RNA, 21 nt, Artificial Sequence
  LRRK2 RNA guide
uccagauugauuccuaaaaug

SEQ ID NO: 1935 - RNA, 21 nt, Artificial Sequence
  LRRK2 RNA guide
uccuaaaaugcuaacaguuca

SEQ ID NO: 1936 - RNA, 21 nt, Artificial Sequence
  LRRK2 RNA guide
ucuguuuuuaacuccagauug

SEQ ID NO: 1937 - RNA, 21 nt, Artificial Sequence
  LRRK2 RNA guide
ugaacuguuagcauuuuagga

SEQ ID NO: 1938 - RNA, 21 nt, Artificial Sequence
  LRRK2 RNA guide
ugauuccuaaaaugcuaacag

SEQ ID NO: 1939 - RNA, 21 nt, Artificial Sequence
  LRRK2 RNA guide
uuaacuccagauugauuccua

SEQ ID NO: 1940 - RNA, 21 nt, Artificial Sequence
  LRRK2 RNA guide
uuaggaaucaaucuggaguua

SEQ ID NO: 1941 - RNA, 21 nt, Artificial Sequence
  LRRK2 RNA guide
uuccuaaaaugcuaacaguuc

SEQ ID NO: 1942 - RNA, 21 nt, Artificial Sequence
  LRRK2 RNA guide
uuuaacuccagauugauuccu

SEQ ID NO: 1943 - RNA, 21 nt, Artificial Sequence
  LRRK2 RNA guide
uuuaggaaucaaucuggaguu

SEQ ID NO: 1944 - RNA, 21 nt, Artificial Sequence
  LRRK2 RNA guide
uuuuaacuccagauugauucc

SEQ ID NO: 1945 - RNA, 21 nt, Artificial Sequence
  LRRK2 RNA guide
uuuuaggaaucaaucuggagu

SEQ ID NO: 1946 - RNA, 22 nt, Artificial Sequence
  LRRK2 RNA guide
aacuccagauugauuccuaaaa

SEQ ID NO: 1947 - RNA, 22 nt, Artificial Sequence
  LRRK2 RNA guide
aacuguuagcauuuuaggaauc

SEQ ID NO: 1948 - RNA, 22 nt, Artificial Sequence
  LRRK2 RNA guide
acuccagauugauuccuaaaau

SEQ ID NO: 1949 - RNA, 22 nt, Artificial Sequence
  LRRK2 RNA guide
acuguuagcauuuuaggaauca

SEQ ID NO: 1950 - RNA, 22 nt, Artificial Sequence
  LRRK2 RNA guide
agcauuuuaggaaucaaucugg

SEQ ID NO: 1951 - RNA, 22 nt, Artificial Sequence
  LRRK2 RNA guide
aggaaucaaucuggaguuaaaa

SEQ ID NO: 1952 - RNA, 22 nt, Artificial Sequence
  LRRK2 RNA guide
augaacuguuagcauuuuagga

SEQ ID NO: 1953 - RNA, 22 nt, Artificial Sequence
  LRRK2 RNA guide
auuccuaaaaugcuaacaguuc

SEQ ID NO: 1954 - RNA, 22 nt, Artificial Sequence
  LRRK2 RNA guide
auuuuaggaaucaaucuggagu

SEQ ID NO: 1955 - RNA, 22 nt, Artificial Sequence
  LRRK2 RNA guide
cagauugauuccuaaaaugcua

SEQ ID NO: 1956 - RNA, 22 nt, Artificial Sequence
  LRRK2 RNA guide
cauuuuaggaaucaaucuggag

SEQ ID NO: 1957 - RNA, 22 nt, Artificial Sequence
  LRRK2 RNA guide
ccagauugauuccuaaaaugcu

SEQ ID NO: 1958 - RNA, 22 nt, Artificial Sequence
  LRRK2 RNA guide
ccuaaaaugcuaacaguucaua

SEQ ID NO: 1959 - RNA, 22 nt, Artificial Sequence
  LRRK2 RNA guide
cuccagauugauuccuaaaaug

SEQ ID NO: 1960 - RNA, 22 nt, Artificial Sequence
  LRRK2 RNA guide
cuguuagcauuuuaggaaucaa

SEQ ID NO: 1961 - RNA, 22 nt, Artificial Sequence
  LRRK2 RNA guide
cuguuuuuaacuccagauugau

SEQ ID NO: 1962 - RNA, 22 nt, Artificial Sequence
  LRRK2 RNA guide
gaacuguuagcauuuuaggaau

SEQ ID NO: 1963 - RNA, 22 nt, Artificial Sequence
  LRRK2 RNA guide
gauuccuaaaaugcuaacaguu

SEQ ID NO: 1964 - RNA, 22 nt, Artificial Sequence
  LRRK2 RNA guide
gauugauuccuaaaaugcuaac

SEQ ID NO: 1965 - RNA, 22 nt, Artificial Sequence
  LRRK2 RNA guide
gcauuaugaacuguuagcauuu

SEQ ID NO: 1966 - RNA, 22 nt, Artificial Sequence
  LRRK2 RNA guide
gcauuuuaggaaucaaucugga

SEQ ID NO: 1967 - RNA, 22 nt, Artificial Sequence
  LRRK2 RNA guide
ggcauuaugaacuguuagcauu

SEQ ID NO: 1968 - RNA, 22 nt, Artificial Sequence
  LRRK2 RNA guide
guuagcauuuuaggaaucaauc

SEQ ID NO: 1969 - RNA, 22 nt, Artificial Sequence
  LRRK2 RNA guide
uaacuccagauugauuccuaaa

SEQ ID NO: 1970 - RNA, 22 nt, Artificial Sequence
  LRRK2 RNA guide
uagcauuuuaggaaucaaucug

SEQ ID NO: 1971 - RNA, 22 nt, Artificial Sequence
  LRRK2 RNA guide
uaggaaucaaucuggaguuaaa

SEQ ID NO: 1972 - RNA, 22 nt, Artificial Sequence
  LRRK2 RNA guide
uaugaacuguuagcauuuuagg

SEQ ID NO: 1973 - RNA, 22 nt, Artificial Sequence
  LRRK2 RNA guide
uccagauugauuccuaaaaugc

SEQ ID NO: 1974 - RNA, 22 nt, Artificial Sequence
  LRRK2 RNA guide
uccuaaaaugcuaacaguucau

SEQ ID NO: 1975 - RNA, 22 nt, Artificial Sequence
  LRRK2 RNA guide
ucuguuuuuaacuccagauuga

SEQ ID NO: 1976 - RNA, 22 nt, Artificial Sequence
  LRRK2 RNA guide
ugaacuguuagcauuuuaggaa

SEQ ID NO: 1977 - RNA, 22 nt, Artificial Sequence
  LRRK2 RNA guide
ugauuccuaaaaugcuaacagu

SEQ ID NO: 1978 - RNA, 22 nt, Artificial Sequence
  LRRK2 RNA guide
uggcauuaugaacuguuagcau

SEQ ID NO: 1979 - RNA, 22 nt, Artificial Sequence
  LRRK2 RNA guide
uuaacuccagauugauuccuaa

SEQ ID NO: 1980 - RNA, 22 nt, Artificial Sequence
  LRRK2 RNA guide
uuaggaaucaaucuggaguuaa

SEQ ID NO: 1981 - RNA, 22 nt, Artificial Sequence
  LRRK2 RNA guide
uuccuaaaaugcuaacaguuca

SEQ ID NO: 1982 - RNA, 22 nt, Artificial Sequence
  LRRK2 RNA guide
uucuguuuuuaacuccagauug

SEQ ID NO: 1983 - RNA, 22 nt, Artificial Sequence
  LRRK2 RNA guide
uugauuccuaaaaugcuaacag

SEQ ID NO: 1984 - RNA, 22 nt, Artificial Sequence
  LRRK2 RNA guide
uuuaacuccagauugauuccua

SEQ ID NO: 1985 - RNA, 22 nt, Artificial Sequence
  LRRK2 RNA guide
uuuaggaaucaaucuggaguua

SEQ ID NO: 1986 - RNA, 22 nt, Artificial Sequence
  LRRK2 RNA guide
uuuuaacuccagauugauuccu

SEQ ID NO: 1987 - RNA, 22 nt, Artificial Sequence
  LRRK2 RNA guide
uuuuaggaaucaaucuggaguu

SEQ ID NO: 1988 - RNA, 22 nt, Artificial Sequence
  LRRK2 RNA guide
uuuuuaacuccagauugauucc

SEQ ID NO: 1989 - RNA, 20 nt, Artificial Sequence
  LRRK2 RNA guide
aagaguucauaaugccagug

SEQ ID NO: 1990 - RNA, 20 nt, Artificial Sequence
  LRRK2 RNA guide
aaguuuacacuggcauuaug

SEQ ID NO: 1991 - RNA, 20 nt, Artificial Sequence
  LRRK2 RNA guide
aaugcuaagaguucauaaug

SEQ ID NO: 1992 - RNA, 20 nt, Artificial Sequence
  LRRK2 RNA guide
acacuggcauuaugaacucu

SEQ ID NO: 1993 - RNA, 20 nt, Artificial Sequence
  LRRK2 RNA guide
acuggcauuaugaacucuua

SEQ ID NO: 1994 - RNA, 20 nt, Artificial Sequence
  LRRK2 RNA guide
agaguucauaaugccagugu

SEQ ID NO: 1995 - RNA, 20 nt, Artificial Sequence
  LRRK2 RNA guide
aguuuacacuggcauuauga

SEQ ID NO: 1996 - RNA, 20 nt, Artificial Sequence
  LRRK2 RNA guide
augcuaagaguucauaaugc

SEQ ID NO: 1997 - RNA, 20 nt, Artificial Sequence
  LRRK2 RNA guide
cacuggcauuaugaacucuu

SEQ ID NO: 1998 - RNA, 20 nt, Artificial Sequence
  LRRK2 RNA guide
cagauugauucuuaaaaugc

SEQ ID NO: 1999 - RNA, 20 nt, Artificial Sequence
  LRRK2 RNA guide
cauuaugaacucuuagcauu

SEQ ID NO: 2000 - RNA, 20 nt, Artificial Sequence
  LRRK2 RNA guide
ccagauugauucuuaaaaug

SEQ ID NO: 2001 - RNA, 20 nt, Artificial Sequence
  LRRK2 RNA guide
cuaagaguucauaaugccag

SEQ ID NO: 2002 - RNA, 20 nt, Artificial Sequence
  LRRK2 RNA guide
cucuuagcauuuuaagaauc

SEQ ID NO: 2003 - RNA, 20 nt, Artificial Sequence
  LRRK2 RNA guide
cuggcauuaugaacucuuag

SEQ ID NO: 2004 - RNA, 20 nt, Artificial Sequence
  LRRK2 RNA guide
cuuaaaaugcuaagaguuca

SEQ ID NO: 2005 - RNA, 20 nt, Artificial Sequence
  LRRK2 RNA guide
gaacucuuagcauuuuaaga

SEQ ID NO: 2006 - RNA, 20 nt, Artificial Sequence
  LRRK2 RNA guide
gauucuuaaaaugcuaagag

SEQ ID NO: 2007 - RNA, 20 nt, Artificial Sequence
  LRRK2 RNA guide
gcauuaugaacucuuagcau

SEQ ID NO: 2008 - RNA, 20 nt, Artificial Sequence
  LRRK2 RNA guide
gcuaagaguucauaaugcca

SEQ ID NO: 2009 - RNA, 20 nt, Artificial Sequence
  LRRK2 RNA guide
ggcauuaugaacucuuagca

SEQ ID NO: 2010 - RNA, 20 nt, Artificial Sequence
  LRRK2 RNA guide
guuuacacuggcauuaugaa

SEQ ID NO: 2011 - RNA, 20 nt, Artificial Sequence
  LRRK2 RNA guide
uaagaguucauaaugccagu

SEQ ID NO: 2012 - RNA, 20 nt, Artificial Sequence
  LRRK2 RNA guide
uacacuggcauuaugaacuc

SEQ ID NO: 2013 - RNA, 20 nt, Artificial Sequence
  LRRK2 RNA guide
ucuuaaaaugcuaagaguuc

SEQ ID NO: 2014 - RNA, 20 nt, Artificial Sequence
  LRRK2 RNA guide
ugaacucuuagcauuuuaag

SEQ ID NO: 2015 - RNA, 20 nt, Artificial Sequence
  LRRK2 RNA guide
ugcuaagaguucauaaugcc

SEQ ID NO: 2016 - RNA, 20 nt, Artificial Sequence
  LRRK2 RNA guide
uggcauuaugaacucuuagc

SEQ ID NO: 2017 - RNA, 20 nt, Artificial Sequence
  LRRK2 RNA guide
uuacacuggcauuaugaacu

SEQ ID NO: 2018 - RNA, 20 nt, Artificial Sequence
  LRRK2 RNA guide
uuuacacuggcauuaugaac

SEQ ID NO: 2019 - RNA, 21 nt, Artificial Sequence
  LRRK2 RNA guide
aagaguucauaaugccagugu

SEQ ID NO: 2020 - RNA, 21 nt, Artificial Sequence
  LRRK2 RNA guide
aaguuuacacuggcauuauga

SEQ ID NO: 2021 - RNA, 21 nt, Artificial Sequence
  LRRK2 RNA guide
aaugcuaagaguucauaaugc

SEQ ID NO: 2022 - RNA, 21 nt, Artificial Sequence
  LRRK2 RNA guide
acacuggcauuaugaacucuu

SEQ ID NO: 2023 - RNA, 21 nt, Artificial Sequence
  LRRK2 RNA guide
acuggcauuaugaacucuuag

SEQ ID NO: 2024 - RNA, 21 nt, Artificial Sequence
  LRRK2 RNA guide
agaguucauaaugccagugua

SEQ ID NO: 2025 - RNA, 21 nt, Artificial Sequence
  LRRK2 RNA guide
aguuuacacuggcauuaugaa

SEQ ID NO: 2026 - RNA, 21 nt, Artificial Sequence
  LRRK2 RNA guide
augcuaagaguucauaaugcc

SEQ ID NO: 2027 - RNA, 21 nt, Artificial Sequence
  LRRK2 RNA guide
caaguuuacacuggcauuaug

SEQ ID NO: 2028 - RNA, 21 nt, Artificial Sequence
  LRRK2 RNA guide
cacuggcauuaugaacucuua

SEQ ID NO: 2029 - RNA, 21 nt, Artificial Sequence
  LRRK2 RNA guide
ccagauugauucuuaaaaugc

SEQ ID NO: 2030 - RNA, 21 nt, Artificial Sequence
  LRRK2 RNA guide
cuaagaguucauaaugccagu

SEQ ID NO: 2031 - RNA, 21 nt, Artificial Sequence
  LRRK2 RNA guide
cuggcauuaugaacucuuagc

SEQ ID NO: 2032 - RNA, 21 nt, Artificial Sequence
  LRRK2 RNA guide
gcauuaugaacucuuagcauu

SEQ ID NO: 2033 - RNA, 21 nt, Artificial Sequence
  LRRK2 RNA guide
gcuaagaguucauaaugccag

SEQ ID NO: 2034 - RNA, 21 nt, Artificial Sequence
  LRRK2 RNA guide
ggcauuaugaacucuuagcau

SEQ ID NO: 2035 - RNA, 21 nt, Artificial Sequence
  LRRK2 RNA guide
guuuacacuggcauuaugaac

SEQ ID NO: 2036 - RNA, 21 nt, Artificial Sequence
  LRRK2 RNA guide
uaagaguucauaaugccagug

SEQ ID NO: 2037 - RNA, 21 nt, Artificial Sequence
  LRRK2 RNA guide
uacacuggcauuaugaacucu

SEQ ID NO: 2038 - RNA, 21 nt, Artificial Sequence
  LRRK2 RNA guide
ugcuaagaguucauaaugcca

SEQ ID NO: 2039 - RNA, 21 nt, Artificial Sequence
  LRRK2 RNA guide
uggcauuaugaacucuuagca

SEQ ID NO: 2040 - RNA, 21 nt, Artificial Sequence
  LRRK2 RNA guide
uuacacuggcauuaugaacuc

SEQ ID NO: 2041 - RNA, 21 nt, Artificial Sequence
  LRRK2 RNA guide
uuuacacuggcauuaugaacu

SEQ ID NO: 2042 - RNA, 22 nt, Artificial Sequence
  LRRK2 RNA guide
aaaugcuaagaguucauaaugc

SEQ ID NO: 2043 - RNA, 22 nt, Artificial Sequence
  LRRK2 RNA guide
aagaguucauaaugccagugua

SEQ ID NO: 2044 - RNA, 22 nt, Artificial Sequence
  LRRK2 RNA guide
aaguuuacacuggcauuaugaa

SEQ ID NO: 2045 - RNA, 22 nt, Artificial Sequence
  LRRK2 RNA guide
aaugcuaagaguucauaaugcc

SEQ ID NO: 2046 - RNA, 22 nt, Artificial Sequence
  LRRK2 RNA guide
acaaguuuacacuggcauuaug

SEQ ID NO: 2047 - RNA, 22 nt, Artificial Sequence
  LRRK2 RNA guide
acacuggcauuaugaacucuua

SEQ ID NO: 2048 - RNA, 22 nt, Artificial Sequence
  LRRK2 RNA guide
acuggcauuaugaacucuuagc

SEQ ID NO: 2049 - RNA, 22 nt, Artificial Sequence
  LRRK2 RNA guide
agaguucauaaugccaguguaa

SEQ ID NO: 2050 - RNA, 22 nt, Artificial Sequence
  LRRK2 RNA guide
aguuuacacuggcauuaugaac

SEQ ID NO: 2051 - RNA, 22 nt, Artificial Sequence
  LRRK2 RNA guide
augcuaagaguucauaaugcca

SEQ ID NO: 2052 - RNA, 22 nt, Artificial Sequence
  LRRK2 RNA guide
caaguuuacacuggcauuauga

SEQ ID NO: 2053 - RNA, 22 nt, Artificial Sequence
  LRRK2 RNA guide
cacuggcauuaugaacucuuag

SEQ ID NO: 2054 - RNA, 22 nt, Artificial Sequence
  LRRK2 RNA guide
ccagauugauucuuaaaaugcu

SEQ ID NO: 2055 - RNA, 22 nt, Artificial Sequence
  LRRK2 RNA guide
cuaagaguucauaaugccagug

SEQ ID NO: 2056 - RNA, 22 nt, Artificial Sequence
  LRRK2 RNA guide
cuccagauugauucuuaaaaug

SEQ ID NO: 2057 - RNA, 22 nt, Artificial Sequence
  LRRK2 RNA guide
cuggcauuaugaacucuuagca

SEQ ID NO: 2058 - RNA, 22 nt, Artificial Sequence
  LRRK2 RNA guide
gcauuaugaacucuuagcauuu

SEQ ID NO: 2059 - RNA, 22 nt, Artificial Sequence
  LRRK2 RNA guide
gcuaagaguucauaaugccagu

SEQ ID NO: 2060 - RNA, 22 nt, Artificial Sequence
  LRRK2 RNA guide
ggcauuaugaacucuuagcauu

SEQ ID NO: 2061 - RNA, 22 nt, Artificial Sequence
  LRRK2 RNA guide
guuuacacuggcauuaugaacu

SEQ ID NO: 2062 - RNA, 22 nt, Artificial Sequence
  LRRK2 RNA guide
uaagaguucauaaugccagugu

SEQ ID NO: 2063 - RNA, 22 nt, Artificial Sequence
  LRRK2 RNA guide
uacacuggcauuaugaacucuu

SEQ ID NO: 2064 - RNA, 22 nt, Artificial Sequence
  LRRK2 RNA guide
uccagauugauucuuaaaaugc

SEQ ID NO: 2065 - RNA, 22 nt, Artificial Sequence
  LRRK2 RNA guide
ugcuaagaguucauaaugccag

SEQ ID NO: 2066 - RNA, 22 nt, Artificial Sequence
  LRRK2 RNA guide
uggcauuaugaacucuuagcau

SEQ ID NO: 2067 - RNA, 22 nt, Artificial Sequence
  LRRK2 RNA guide
uuacacuggcauuaugaacucu

SEQ ID NO: 2068 - RNA, 22 nt, Artificial Sequence
  LRRK2 RNA guide
uuuacacuggcauuaugaacuc

SEQ ID NO: 2069 - RNA, 20 nt, Artificial Sequence
  LRRK2 RNA guide
aacaguucauaaugccggug

SEQ ID NO: 2070 - RNA, 20 nt, Artificial Sequence
  LRRK2 RNA guide
aaguuuacaccggcauuaug

SEQ ID NO: 2071 - RNA, 20 nt, Artificial Sequence
  LRRK2 RNA guide
aaugccgguguaaacuuguc

SEQ ID NO: 2072 - RNA, 20 nt, Artificial Sequence
  LRRK2 RNA guide
aaugcuaacaguucauaaug

SEQ ID NO: 2073 - RNA, 20 nt, Artificial Sequence
  LRRK2 RNA guide
acaaguuuacaccggcauua

SEQ ID NO: 2074 - RNA, 20 nt, Artificial Sequence
  LRRK2 RNA guide
acaccggcauuaugaacugu

SEQ ID NO: 2075 - RNA, 20 nt, Artificial Sequence
  LRRK2 RNA guide
acaguucauaaugccggugu

SEQ ID NO: 2076 - RNA, 20 nt, Artificial Sequence
  LRRK2 RNA guide
accggcauuaugaacuguua

SEQ ID NO: 2077 - RNA, 20 nt, Artificial Sequence
  LRRK2 RNA guide
acugacaaguuuacaccggc

SEQ ID NO: 2078 - RNA, 20 nt, Artificial Sequence
  LRRK2 RNA guide
aguucauaaugccgguguaa

SEQ ID NO: 2079 - RNA, 20 nt, Artificial Sequence
  LRRK2 RNA guide
aguuuacaccggcauuauga

SEQ ID NO: 2080 - RNA, 20 nt, Artificial Sequence
  LRRK2 RNA guide
auaaugccgguguaaacuug

SEQ ID NO: 2081 - RNA, 20 nt, Artificial Sequence
  LRRK2 RNA guide
aucacugacaaguuuacacc

SEQ ID NO: 2082 - RNA, 20 nt, Artificial Sequence
  LRRK2 RNA guide
augccgguguaaacuuguca

SEQ ID NO: 2083 - RNA, 20 nt, Artificial Sequence
  LRRK2 RNA guide
augcuaacaguucauaaugc

SEQ ID NO: 2084 - RNA, 20 nt, Artificial Sequence
  LRRK2 RNA guide
caaguuuacaccggcauuau

SEQ ID NO: 2085 - RNA, 20 nt, Artificial Sequence
  LRRK2 RNA guide
caaucacugacaaguuuaca

SEQ ID NO: 2086 - RNA, 20 nt, Artificial Sequence
  LRRK2 RNA guide
caccggcauuaugaacuguu

SEQ ID NO: 2087 - RNA, 20 nt, Artificial Sequence
  LRRK2 RNA guide
cacugacaaguuuacaccgg

SEQ ID NO: 2088 - RNA, 20 nt, Artificial Sequence
  LRRK2 RNA guide
caguucauaaugccggugua

SEQ ID NO: 2089 - RNA, 20 nt, Artificial Sequence
  LRRK2 RNA guide
cauaaugccgguguaaacuu

SEQ ID NO: 2090 - RNA, 20 nt, Artificial Sequence
  LRRK2 RNA guide
ccaaucacugacaaguuuac

SEQ ID NO: 2091 - RNA, 20 nt, Artificial Sequence
  LRRK2 RNA guide
ccggcauuaugaacuguuag

SEQ ID NO: 2092 - RNA, 20 nt, Artificial Sequence
  LRRK2 RNA guide
ccgguguaaacuugucagug

SEQ ID NO: 2093 - RNA, 20 nt, Artificial Sequence
  LRRK2 RNA guide
cgguguaaacuugucaguga

SEQ ID NO: 2094 - RNA, 20 nt, Artificial Sequence
  LRRK2 RNA guide
cuaacaguucauaaugccgg

SEQ ID NO: 2095 - RNA, 20 nt, Artificial Sequence
  LRRK2 RNA guide
cugacaaguuuacaccggca

SEQ ID NO: 2096 - RNA, 20 nt, Artificial Sequence
  LRRK2 RNA guide
gacaaguuuacaccggcauu

SEQ ID NO: 2097 - RNA, 20 nt, Artificial Sequence
  LRRK2 RNA guide
gccgguguaaacuugucagu

SEQ ID NO: 2098 - RNA, 20 nt, Artificial Sequence
  LRRK2 RNA guide
gcuaacaguucauaaugccg

SEQ ID NO: 2099 - RNA, 20 nt, Artificial Sequence
  LRRK2 RNA guide
guccaaucacugacaaguuu

SEQ ID NO: 2100 - RNA, 20 nt, Artificial Sequence
  LRRK2 RNA guide
guucauaaugccgguguaaa

SEQ ID NO: 2101 - RNA, 20 nt, Artificial Sequence
  LRRK2 RNA guide
guuuacaccggcauuaugaa

SEQ ID NO: 2102 - RNA, 20 nt, Artificial Sequence
  LRRK2 RNA guide
uaacaguucauaaugccggu

SEQ ID NO: 2103 - RNA, 20 nt, Artificial Sequence
  LRRK2 RNA guide
uaaugccgguguaaacuugu

SEQ ID NO: 2104 - RNA, 20 nt, Artificial Sequence
  LRRK2 RNA guide
uacaccggcauuaugaacug

SEQ ID NO: 2105 - RNA, 20 nt, Artificial Sequence
  LRRK2 RNA guide
ucacugacaaguuuacaccg

SEQ ID NO: 2106 - RNA, 20 nt, Artificial Sequence
  LRRK2 RNA guide
ucauaaugccgguguaaacu

SEQ ID NO: 2107 - RNA, 20 nt, Artificial Sequence
  LRRK2 RNA guide
uccaaucacugacaaguuua

SEQ ID NO: 2108 - RNA, 20 nt, Artificial Sequence
  LRRK2 RNA guide
ugacaaguuuacaccggcau

SEQ ID NO: 2109 - RNA, 20 nt, Artificial Sequence
  LRRK2 RNA guide
ugccgguguaaacuugucag

SEQ ID NO: 2110 - RNA, 20 nt, Artificial Sequence
  LRRK2 RNA guide
ugcuaacaguucauaaugcc

SEQ ID NO: 2111 - RNA, 20 nt, Artificial Sequence
  LRRK2 RNA guide
uuacaccggcauuaugaacu

SEQ ID NO: 2112 - RNA, 20 nt, Artificial Sequence
  LRRK2 RNA guide
uucauaaugccgguguaaac

SEQ ID NO: 2113 - RNA, 20 nt, Artificial Sequence
  LRRK2 RNA guide
uuuacaccggcauuaugaac

SEQ ID NO: 2114 - RNA, 21 nt, Artificial Sequence
  LRRK2 RNA guide
aacaguucauaaugccggugu

SEQ ID NO: 2115 - RNA, 21 nt, Artificial Sequence
  LRRK2 RNA guide
aaguuuacaccggcauuauga

SEQ ID NO: 2116 - RNA, 21 nt, Artificial Sequence
  LRRK2 RNA guide
aaucacugacaaguuuacacc

SEQ ID NO: 2117 - RNA, 21 nt, Artificial Sequence
  LRRK2 RNA guide
aaugccgguguaaacuuguca

SEQ ID NO: 2118 - RNA, 21 nt, Artificial Sequence
  LRRK2 RNA guide
aaugcuaacaguucauaaugc

SEQ ID NO: 2119 - RNA, 21 nt, Artificial Sequence
  LRRK2 RNA guide
acaaguuuacaccggcauuau

SEQ ID NO: 2120 - RNA, 21 nt, Artificial Sequence
  LRRK2 RNA guide
acaccggcauuaugaacuguu

SEQ ID NO: 2121 - RNA, 21 nt, Artificial Sequence
  LRRK2 RNA guide
acaguucauaaugccggugua

SEQ ID NO: 2122 - RNA, 21 nt, Artificial Sequence
  LRRK2 RNA guide
accggcauuaugaacuguuag

SEQ ID NO: 2123 - RNA, 21 nt, Artificial Sequence
  LRRK2 RNA guide
acugacaaguuuacaccggca

SEQ ID NO: 2124 - RNA, 21 nt, Artificial Sequence
  LRRK2 RNA guide
aguccaaucacugacaaguuu

SEQ ID NO: 2125 - RNA, 21 nt, Artificial Sequence
  LRRK2 RNA guide
aguucauaaugccgguguaaa

SEQ ID NO: 2126 - RNA, 21 nt, Artificial Sequence
  LRRK2 RNA guide
aguuuacaccggcauuaugaa

SEQ ID NO: 2127 - RNA, 21 nt, Artificial Sequence
  LRRK2 RNA guide
auaaugccgguguaaacuugu

SEQ ID NO: 2128 - RNA, 21 nt, Artificial Sequence
  LRRK2 RNA guide
aucacugacaaguuuacaccg

SEQ ID NO: 2129 - RNA, 21 nt, Artificial Sequence
  LRRK2 RNA guide
augccgguguaaacuugucag

SEQ ID NO: 2130 - RNA, 21 nt, Artificial Sequence
  LRRK2 RNA guide
augcuaacaguucauaaugcc

SEQ ID NO: 2131 - RNA, 21 nt, Artificial Sequence
  LRRK2 RNA guide
caaguuuacaccggcauuaug

SEQ ID NO: 2132 - RNA, 21 nt, Artificial Sequence
  LRRK2 RNA guide
caaucacugacaaguuuacac

SEQ ID NO: 2133 - RNA, 21 nt, Artificial Sequence
  LRRK2 RNA guide
caccggcauuaugaacuguua

SEQ ID NO: 2134 - RNA, 21 nt, Artificial Sequence
  LRRK2 RNA guide
cacugacaaguuuacaccggc

SEQ ID NO: 2135 - RNA, 21 nt, Artificial Sequence
  LRRK2 RNA guide
caguucauaaugccgguguaa

SEQ ID NO: 2136 - RNA, 21 nt, Artificial Sequence
  LRRK2 RNA guide
cauaaugccgguguaaacuug

SEQ ID NO: 2137 - RNA, 21 nt, Artificial Sequence
  LRRK2 RNA guide
ccaaucacugacaaguuuaca

SEQ ID NO: 2138 - RNA, 21 nt, Artificial Sequence
  LRRK2 RNA guide
ccggcauuaugaacuguuagc

SEQ ID NO: 2139 - RNA, 21 nt, Artificial Sequence
  LRRK2 RNA guide
ccgguguaaacuugucaguga

SEQ ID NO: 2140 - RNA, 21 nt, Artificial Sequence
  LRRK2 RNA guide
cgguguaaacuugucagugau

SEQ ID NO: 2141 - RNA, 21 nt, Artificial Sequence
  LRRK2 RNA guide
cuaacaguucauaaugccggu

SEQ ID NO: 2142 - RNA, 21 nt, Artificial Sequence
  LRRK2 RNA guide
cugacaaguuuacaccggcau

SEQ ID NO: 2143 - RNA, 21 nt, Artificial Sequence
  LRRK2 RNA guide
gacaaguuuacaccggcauua

SEQ ID NO: 2144 - RNA, 21 nt, Artificial Sequence
  LRRK2 RNA guide
gccgguguaaacuugucagug

SEQ ID NO: 2145 - RNA, 21 nt, Artificial Sequence
  LRRK2 RNA guide
gcuaacaguucauaaugccgg

SEQ ID NO: 2146 - RNA, 21 nt, Artificial Sequence
  LRRK2 RNA guide
guccaaucacugacaaguuua

SEQ ID NO: 2147 - RNA, 21 nt, Artificial Sequence
  LRRK2 RNA guide
guucauaaugccgguguaaac

SEQ ID NO: 2148 - RNA, 21 nt, Artificial Sequence
  LRRK2 RNA guide
guuuacaccggcauuaugaac

SEQ ID NO: 2149 - RNA, 21 nt, Artificial Sequence
  LRRK2 RNA guide
uaacaguucauaaugccggug

SEQ ID NO: 2150 - RNA, 21 nt, Artificial Sequence
  LRRK2 RNA guide
uaaugccgguguaaacuuguc

SEQ ID NO: 2151 - RNA, 21 nt, Artificial Sequence
  LRRK2 RNA guide
uacaccggcauuaugaacugu

SEQ ID NO: 2152 - RNA, 21 nt, Artificial Sequence
  LRRK2 RNA guide
ucacugacaaguuuacaccgg

SEQ ID NO: 2153 - RNA, 21 nt, Artificial Sequence
  LRRK2 RNA guide
ucauaaugccgguguaaacuu

SEQ ID NO: 2154 - RNA, 21 nt, Artificial Sequence
  LRRK2 RNA guide
uccaaucacugacaaguuuac

SEQ ID NO: 2155 - RNA, 21 nt, Artificial Sequence
  LRRK2 RNA guide
ugacaaguuuacaccggcauu

SEQ ID NO: 2156 - RNA, 21 nt, Artificial Sequence
  LRRK2 RNA guide
ugccgguguaaacuugucagu

SEQ ID NO: 2157 - RNA, 21 nt, Artificial Sequence
  LRRK2 RNA guide
ugcuaacaguucauaaugccg

SEQ ID NO: 2158 - RNA, 21 nt, Artificial Sequence
  LRRK2 RNA guide
uuacaccggcauuaugaacug

SEQ ID NO: 2159 - RNA, 21 nt, Artificial Sequence
  LRRK2 RNA guide
uucauaaugccgguguaaacu

SEQ ID NO: 2160 - RNA, 21 nt, Artificial Sequence
  LRRK2 RNA guide
uuuacaccggcauuaugaacu

SEQ ID NO: 2161 - RNA, 22 nt, Artificial Sequence
  LRRK2 RNA guide
aaaugcuaacaguucauaaugc

SEQ ID NO: 2162 - RNA, 22 nt, Artificial Sequence
  LRRK2 RNA guide
aacaguucauaaugccggugua

SEQ ID NO: 2163 - RNA, 22 nt, Artificial Sequence
  LRRK2 RNA guide
aaguuuacaccggcauuaugaa

SEQ ID NO: 2164 - RNA, 22 nt, Artificial Sequence
  LRRK2 RNA guide
aaucacugacaaguuuacaccg

SEQ ID NO: 2165 - RNA, 22 nt, Artificial Sequence
  LRRK2 RNA guide
aaugccgguguaaacuugucag

SEQ ID NO: 2166 - RNA, 22 nt, Artificial Sequence
  LRRK2 RNA guide
aaugcuaacaguucauaaugcc

SEQ ID NO: 2167 - RNA, 22 nt, Artificial Sequence
  LRRK2 RNA guide
acaaguuuacaccggcauuaug

SEQ ID NO: 2168 - RNA, 22 nt, Artificial Sequence
  LRRK2 RNA guide
acaccggcauuaugaacuguua

SEQ ID NO: 2169 - RNA, 22 nt, Artificial Sequence
  LRRK2 RNA guide
acaguucauaaugccgguguaa

SEQ ID NO: 2170 - RNA, 22 nt, Artificial Sequence
  LRRK2 RNA guide
accggcauuaugaacuguuagc

SEQ ID NO: 2171 - RNA, 22 nt, Artificial Sequence
  LRRK2 RNA guide
acugacaaguuuacaccggcau

SEQ ID NO: 2172 - RNA, 22 nt, Artificial Sequence
  LRRK2 RNA guide
aguccaaucacugacaaguuua

SEQ ID NO: 2173 - RNA, 22 nt, Artificial Sequence
  LRRK2 RNA guide
aguucauaaugccgguguaaac

SEQ ID NO: 2174 - RNA, 22 nt, Artificial Sequence
  LRRK2 RNA guide
aguuuacaccggcauuaugaac

SEQ ID NO: 2175 - RNA, 22 nt, Artificial Sequence
  LRRK2 RNA guide
auaaugccgguguaaacuuguc

SEQ ID NO: 2176 - RNA, 22 nt, Artificial Sequence
  LRRK2 RNA guide
aucacugacaaguuuacaccgg

SEQ ID NO: 2177 - RNA, 22 nt, Artificial Sequence
  LRRK2 RNA guide
augccgguguaaacuugucagu

SEQ ID NO: 2178 - RNA, 22 nt, Artificial Sequence
  LRRK2 RNA guide
augcuaacaguucauaaugccg

SEQ ID NO: 2179 - RNA, 22 nt, Artificial Sequence
  LRRK2 RNA guide
caaguuuacaccggcauuauga

SEQ ID NO: 2180 - RNA, 22 nt, Artificial Sequence
  LRRK2 RNA guide
caaucacugacaaguuuacacc

SEQ ID NO: 2181 - RNA, 22 nt, Artificial Sequence
  LRRK2 RNA guide
caccggcauuaugaacuguuag

SEQ ID NO: 2182 - RNA, 22 nt, Artificial Sequence
  LRRK2 RNA guide
cacugacaaguuuacaccggca

SEQ ID NO: 2183 - RNA, 22 nt, Artificial Sequence
  LRRK2 RNA guide
caguccaaucacugacaaguuu

SEQ ID NO: 2184 - RNA, 22 nt, Artificial Sequence
  LRRK2 RNA guide
caguucauaaugccgguguaaa

SEQ ID NO: 2185 - RNA, 22 nt, Artificial Sequence
  LRRK2 RNA guide
cauaaugccgguguaaacuugu

SEQ ID NO: 2186 - RNA, 22 nt, Artificial Sequence
  LRRK2 RNA guide
ccaaucacugacaaguuuacac

SEQ ID NO: 2187 - RNA, 22 nt, Artificial Sequence
  LRRK2 RNA guide
ccggcauuaugaacuguuagca

SEQ ID NO: 2188 - RNA, 22 nt, Artificial Sequence
  LRRK2 RNA guide
ccgguguaaacuugucagugau

SEQ ID NO: 2189 - RNA, 22 nt, Artificial Sequence
  LRRK2 RNA guide
cgguguaaacuugucagugauu

SEQ ID NO: 2190 - RNA, 22 nt, Artificial Sequence
  LRRK2 RNA guide
cuaacaguucauaaugccggug

SEQ ID NO: 2191 - RNA, 22 nt, Artificial Sequence
  LRRK2 RNA guide
cugacaaguuuacaccggcauu

SEQ ID NO: 2192 - RNA, 22 nt, Artificial Sequence
  LRRK2 RNA guide
gacaaguuuacaccggcauuau

SEQ ID NO: 2193 - RNA, 22 nt, Artificial Sequence
  LRRK2 RNA guide
gccgguguaaacuugucaguga

SEQ ID NO: 2194 - RNA, 22 nt, Artificial Sequence
  LRRK2 RNA guide
gcuaacaguucauaaugccggu

SEQ ID NO: 2195 - RNA, 22 nt, Artificial Sequence
  LRRK2 RNA guide
guccaaucacugacaaguuuac

SEQ ID NO: 2196 - RNA, 22 nt, Artificial Sequence
  LRRK2 RNA guide
guucauaaugccgguguaaacu

SEQ ID NO: 2197 - RNA, 22 nt, Artificial Sequence
  LRRK2 RNA guide
guuuacaccggcauuaugaacu

SEQ ID NO: 2198 - RNA, 22 nt, Artificial Sequence
  LRRK2 RNA guide
uaacaguucauaaugccggugu

SEQ ID NO: 2199 - RNA, 22 nt, Artificial Sequence
  LRRK2 RNA guide
uaaugccgguguaaacuuguca

SEQ ID NO: 2200 - RNA, 22 nt, Artificial Sequence
  LRRK2 RNA guide
uacaccggcauuaugaacuguu

SEQ ID NO: 2201 - RNA, 22 nt, Artificial Sequence
  LRRK2 RNA guide
ucacugacaaguuuacaccggc

SEQ ID NO: 2202 - RNA, 22 nt, Artificial Sequence
  LRRK2 RNA guide
ucauaaugccgguguaaacuug

SEQ ID NO: 2203 - RNA, 22 nt, Artificial Sequence
  LRRK2 RNA guide
uccaaucacugacaaguuuaca

SEQ ID NO: 2204 - RNA, 22 nt, Artificial Sequence
  LRRK2 RNA guide
ugacaaguuuacaccggcauua

SEQ ID NO: 2205 - RNA, 22 nt, Artificial Sequence
  LRRK2 RNA guide
ugccgguguaaacuugucagug

SEQ ID NO: 2206 - RNA, 22 nt, Artificial Sequence
  LRRK2 RNA guide
ugcuaacaguucauaaugccgg

SEQ ID NO: 2207 - RNA, 22 nt, Artificial Sequence
  LRRK2 RNA guide
uuacaccggcauuaugaacugu

SEQ ID NO: 2208 - RNA, 22 nt, Artificial Sequence
  LRRK2 RNA guide
uucauaaugccgguguaaacuu

SEQ ID NO: 2209 - RNA, 22 nt, Artificial Sequence
  LRRK2 RNA guide
uuuacaccggcauuaugaacug

SEQ ID NO: 2210 - RNA, 20 nt, Artificial Sequence
  LRRK2 RNA guide
aaacagcacauguaaagccu

SEQ ID NO: 2211 - RNA, 20 nt, Artificial Sequence
  LRRK2 RNA guide
aaacuuggaugcaaggcuuu

SEQ ID NO: 2212 - RNA, 20 nt, Artificial Sequence
  LRRK2 RNA guide
aaagccuugcauccaaguuu

SEQ ID NO: 2213 - RNA, 20 nt, Artificial Sequence
  LRRK2 RNA guide
aacagcacauguaaagccuu

SEQ ID NO: 2214 - RNA, 20 nt, Artificial Sequence
  LRRK2 RNA guide
aacuuggaugcaaggcuuua

SEQ ID NO: 2215 - RNA, 20 nt, Artificial Sequence
  LRRK2 RNA guide
aagccuugcauccaaguuuc

SEQ ID NO: 2216 - RNA, 20 nt, Artificial Sequence
  LRRK2 RNA guide
aaggcuuuacaugugcuguu

SEQ ID NO: 2217 - RNA, 20 nt, Artificial Sequence
  LRRK2 RNA guide
aaguccagaaacuuggaugc

SEQ ID NO: 2218 - RNA, 20 nt, Artificial Sequence
  LRRK2 RNA guide
acagcacauguaaagccuug

SEQ ID NO: 2219 - RNA, 20 nt, Artificial Sequence
  LRRK2 RNA guide
acauguaaagccuugcaucc

SEQ ID NO: 2220 - RNA, 20 nt, Artificial Sequence
  LRRK2 RNA guide
acuuggaugcaaggcuuuac

SEQ ID NO: 2221 - RNA, 20 nt, Artificial Sequence
  LRRK2 RNA guide
agaaacuuggaugcaaggcu

SEQ ID NO: 2222 - RNA, 20 nt, Artificial Sequence
  LRRK2 RNA guide
agcacauguaaagccuugca

SEQ ID NO: 2223 - RNA, 20 nt, Artificial Sequence
  LRRK2 RNA guide
agccuugcauccaaguuucu

SEQ ID NO: 2224 - RNA, 20 nt, Artificial Sequence
  LRRK2 RNA guide
aggcuuuacaugugcuguuu

SEQ ID NO: 2225 - RNA, 20 nt, Artificial Sequence
  LRRK2 RNA guide
aguccagaaacuuggaugca

SEQ ID NO: 2226 - RNA, 20 nt, Artificial Sequence
  LRRK2 RNA guide
augcaaggcuuuacaugugc

SEQ ID NO: 2227 - RNA, 20 nt, Artificial Sequence
  LRRK2 RNA guide
auguaaagccuugcauccaa

SEQ ID NO: 2228 - RNA, 20 nt, Artificial Sequence
  LRRK2 RNA guide
caaacagcacauguaaagcc

SEQ ID NO: 2229 - RNA, 20 nt, Artificial Sequence
  LRRK2 RNA guide
caaggcuuuacaugugcugu

SEQ ID NO: 2230 - RNA, 20 nt, Artificial Sequence
  LRRK2 RNA guide
cacauguaaagccuugcauc

SEQ ID NO: 2231 - RNA, 20 nt, Artificial Sequence
  LRRK2 RNA guide
cagaaacuuggaugcaaggc

SEQ ID NO: 2232 - RNA, 20 nt, Artificial Sequence
  LRRK2 RNA guide
cagcacauguaaagccuugc

SEQ ID NO: 2233 - RNA, 20 nt, Artificial Sequence
  LRRK2 RNA guide
cauguaaagccuugcaucca

SEQ ID NO: 2234 - RNA, 20 nt, Artificial Sequence
  LRRK2 RNA guide
ccagaaacuuggaugcaagg

SEQ ID NO: 2235 - RNA, 20 nt, Artificial Sequence
  LRRK2 RNA guide
ccuugcauccaaguuucugg

SEQ ID NO: 2236 - RNA, 20 nt, Artificial Sequence
  LRRK2 RNA guide
cucaaacagcacauguaaag

SEQ ID NO: 2237 - RNA, 20 nt, Artificial Sequence
  LRRK2 RNA guide
cucucaaacagcacauguaa

SEQ ID NO: 2238 - RNA, 20 nt, Artificial Sequence
  LRRK2 RNA guide
cuuggaugcaaggcuuuaca

SEQ ID NO: 2239 - RNA, 20 nt, Artificial Sequence
  LRRK2 RNA guide
gaaacuuggaugcaaggcuu

SEQ ID NO: 2240 - RNA, 20 nt, Artificial Sequence
  LRRK2 RNA guide
gaaguccagaaacuuggaug

SEQ ID NO: 2241 - RNA, 20 nt, Artificial Sequence
  LRRK2 RNA guide
gaugcaaggcuuuacaugug

SEQ ID NO: 2242 - RNA, 20 nt, Artificial Sequence
  LRRK2 RNA guide
gcaaggcuuuacaugugcug

SEQ ID NO: 2243 - RNA, 20 nt, Artificial Sequence
  LRRK2 RNA guide
gcacauguaaagccuugcau

SEQ ID NO: 2244 - RNA, 20 nt, Artificial Sequence
  LRRK2 RNA guide
gccuugcauccaaguuucug

SEQ ID NO: 2245 - RNA, 20 nt, Artificial Sequence
  LRRK2 RNA guide
ggaugcaaggcuuuacaugu

SEQ ID NO: 2246 - RNA, 20 nt, Artificial Sequence
  LRRK2 RNA guide
guaaagccuugcauccaagu

SEQ ID NO: 2247 - RNA, 20 nt, Artificial Sequence
  LRRK2 RNA guide
guccagaaacuuggaugcaa

SEQ ID NO: 2248 - RNA, 20 nt, Artificial Sequence
  LRRK2 RNA guide
uaaagccuugcauccaaguu

SEQ ID NO: 2249 - RNA, 20 nt, Artificial Sequence
  LRRK2 RNA guide
ucaaacagcacauguaaagc

SEQ ID NO: 2250 - RNA, 20 nt, Artificial Sequence
  LRRK2 RNA guide
uccagaaacuuggaugcaag

SEQ ID NO: 2251 - RNA, 20 nt, Artificial Sequence
  LRRK2 RNA guide
ucucaaacagcacauguaaa

SEQ ID NO: 2252 - RNA, 20 nt, Artificial Sequence
  LRRK2 RNA guide
ucucucaaacagcacaugua

SEQ ID NO: 2253 - RNA, 20 nt, Artificial Sequence
  LRRK2 RNA guide
ugaaguccagaaacuuggau

SEQ ID NO: 2254 - RNA, 20 nt, Artificial Sequence
  LRRK2 RNA guide
ugcaaggcuuuacaugugcu

SEQ ID NO: 2255 - RNA, 20 nt, Artificial Sequence
  LRRK2 RNA guide
uggaugcaaggcuuuacaug

SEQ ID NO: 2256 - RNA, 20 nt, Artificial Sequence
  LRRK2 RNA guide
uguaaagccuugcauccaag

SEQ ID NO: 2257 - RNA, 20 nt, Artificial Sequence
  LRRK2 RNA guide
uuggaugcaaggcuuuacau

SEQ ID NO: 2258 - RNA, 21 nt, Artificial Sequence
  LRRK2 RNA guide
aaacagcacauguaaagccuu

SEQ ID NO: 2259 - RNA, 21 nt, Artificial Sequence
  LRRK2 RNA guide
aaacuuggaugcaaggcuuua

SEQ ID NO: 2260 - RNA, 21 nt, Artificial Sequence
  LRRK2 RNA guide
aaagccuugcauccaaguuuc

SEQ ID NO: 2261 - RNA, 21 nt, Artificial Sequence
  LRRK2 RNA guide
aacagcacauguaaagccuug

SEQ ID NO: 2262 - RNA, 21 nt, Artificial Sequence
  LRRK2 RNA guide
aacuuggaugcaaggcuuuac

SEQ ID NO: 2263 - RNA, 21 nt, Artificial Sequence
  LRRK2 RNA guide
aagccuugcauccaaguuucu

SEQ ID NO: 2264 - RNA, 21 nt, Artificial Sequence
  LRRK2 RNA guide
aaggcuuuacaugugcuguuu

SEQ ID NO: 2265 - RNA, 21 nt, Artificial Sequence
  LRRK2 RNA guide
aaguccagaaacuuggaugca

SEQ ID NO: 2266 - RNA, 21 nt, Artificial Sequence
  LRRK2 RNA guide
acagcacauguaaagccuugc

SEQ ID NO: 2267 - RNA, 21 nt, Artificial Sequence
  LRRK2 RNA guide
acauguaaagccuugcaucca

SEQ ID NO: 2268 - RNA, 21 nt, Artificial Sequence
  LRRK2 RNA guide
acuuggaugcaaggcuuuaca

SEQ ID NO: 2269 - RNA, 21 nt, Artificial Sequence
  LRRK2 RNA guide
agaaacuuggaugcaaggcuu

SEQ ID NO: 2270 - RNA, 21 nt, Artificial Sequence
  LRRK2 RNA guide
agcacauguaaagccuugcau

SEQ ID NO: 2271 - RNA, 21 nt, Artificial Sequence
  LRRK2 RNA guide
agccuugcauccaaguuucug

SEQ ID NO: 2272 - RNA, 21 nt, Artificial Sequence
  LRRK2 RNA guide
aggcuuuacaugugcuguuug

SEQ ID NO: 2273 - RNA, 21 nt, Artificial Sequence
  LRRK2 RNA guide
aguccagaaacuuggaugcaa

SEQ ID NO: 2274 - RNA, 21 nt, Artificial Sequence
  LRRK2 RNA guide
augaaguccagaaacuuggau

SEQ ID NO: 2275 - RNA, 21 nt, Artificial Sequence
  LRRK2 RNA guide
augcaaggcuuuacaugugcu

SEQ ID NO: 2276 - RNA, 21 nt, Artificial Sequence
  LRRK2 RNA guide
auguaaagccuugcauccaag

SEQ ID NO: 2277 - RNA, 21 nt, Artificial Sequence
  LRRK2 RNA guide
caaacagcacauguaaagccu

SEQ ID NO: 2278 - RNA, 21 nt, Artificial Sequence
  LRRK2 RNA guide
caaggcuuuacaugugcuguu

SEQ ID NO: 2279 - RNA, 21 nt, Artificial Sequence
  LRRK2 RNA guide
cacauguaaagccuugcaucc

SEQ ID NO: 2280 - RNA, 21 nt, Artificial Sequence
  LRRK2 RNA guide
cagaaacuuggaugcaaggcu

SEQ ID NO: 2281 - RNA, 21 nt, Artificial Sequence
  LRRK2 RNA guide
cagcacauguaaagccuugca

SEQ ID NO: 2282 - RNA, 21 nt, Artificial Sequence
  LRRK2 RNA guide
cauguaaagccuugcauccaa

SEQ ID NO: 2283 - RNA, 21 nt, Artificial Sequence
  LRRK2 RNA guide
ccagaaacuuggaugcaaggc

SEQ ID NO: 2284 - RNA, 21 nt, Artificial Sequence
  LRRK2 RNA guide
ccuugcauccaaguuucugga

SEQ ID NO: 2285 - RNA, 21 nt, Artificial Sequence
  LRRK2 RNA guide
cucaaacagcacauguaaagc

SEQ ID NO: 2286 - RNA, 21 nt, Artificial Sequence
  LRRK2 RNA guide
cucucaaacagcacauguaaa

SEQ ID NO: 2287 - RNA, 21 nt, Artificial Sequence
  LRRK2 RNA guide
cucucucaaacagcacaugua

SEQ ID NO: 2288 - RNA, 21 nt, Artificial Sequence
  LRRK2 RNA guide
cuuggaugcaaggcuuuacau

SEQ ID NO: 2289 - RNA, 21 nt, Artificial Sequence
  LRRK2 RNA guide
gaaacuuggaugcaaggcuuu

SEQ ID NO: 2290 - RNA, 21 nt, Artificial Sequence
  LRRK2 RNA guide
gaaguccagaaacuuggaugc

SEQ ID NO: 2291 - RNA, 21 nt, Artificial Sequence
  LRRK2 RNA guide
gaugcaaggcuuuacaugugc

SEQ ID NO: 2292 - RNA, 21 nt, Artificial Sequence
  LRRK2 RNA guide
gcaaggcuuuacaugugcugu

SEQ ID NO: 2293 - RNA, 21 nt, Artificial Sequence
  LRRK2 RNA guide
gcacauguaaagccuugcauc

SEQ ID NO: 2294 - RNA, 21 nt, Artificial Sequence
  LRRK2 RNA guide
gccuugcauccaaguuucugg

SEQ ID NO: 2295 - RNA, 21 nt, Artificial Sequence
  LRRK2 RNA guide
ggaugcaaggcuuuacaugug

SEQ ID NO: 2296 - RNA, 21 nt, Artificial Sequence
  LRRK2 RNA guide
guaaagccuugcauccaaguu

SEQ ID NO: 2297 - RNA, 21 nt, Artificial Sequence
  LRRK2 RNA guide
guccagaaacuuggaugcaag

SEQ ID NO: 2298 - RNA, 21 nt, Artificial Sequence
  LRRK2 RNA guide
uaaagccuugcauccaaguuu

SEQ ID NO: 2299 - RNA, 21 nt, Artificial Sequence
  LRRK2 RNA guide
ucaaacagcacauguaaagcc

SEQ ID NO: 2300 - RNA, 21 nt, Artificial Sequence
  LRRK2 RNA guide
uccagaaacuuggaugcaagg

SEQ ID NO: 2301 - RNA, 21 nt, Artificial Sequence
  LRRK2 RNA guide
ucucaaacagcacauguaaag

SEQ ID NO: 2302 - RNA, 21 nt, Artificial Sequence
  LRRK2 RNA guide
ucucucaaacagcacauguaa

SEQ ID NO: 2303 - RNA, 21 nt, Artificial Sequence
  LRRK2 RNA guide
ugaaguccagaaacuuggaug

SEQ ID NO: 2304 - RNA, 21 nt, Artificial Sequence
  LRRK2 RNA guide
ugcaaggcuuuacaugugcug

SEQ ID NO: 2305 - RNA, 21 nt, Artificial Sequence
  LRRK2 RNA guide
uggaugcaaggcuuuacaugu

SEQ ID NO: 2306 - RNA, 21 nt, Artificial Sequence
  LRRK2 RNA guide
uguaaagccuugcauccaagu

SEQ ID NO: 2307 - RNA, 21 nt, Artificial Sequence
  LRRK2 RNA guide
uuggaugcaaggcuuuacaug

SEQ ID NO: 2308 - RNA, 22 nt, Artificial Sequence
  LRRK2 RNA guide
aaacagcacauguaaagccuug

SEQ ID NO: 2309 - RNA, 22 nt, Artificial Sequence
  LRRK2 RNA guide
aaacuuggaugcaaggcuuuac

SEQ ID NO: 2310 - RNA, 22 nt, Artificial Sequence
  LRRK2 RNA guide
aaagccuugcauccaaguuucu

SEQ ID NO: 2311 - RNA, 22 nt, Artificial Sequence
  LRRK2 RNA guide
aacagcacauguaaagccuugc

SEQ ID NO: 2312 - RNA, 22 nt, Artificial Sequence
  LRRK2 RNA guide
aacuuggaugcaaggcuuuaca

SEQ ID NO: 2313 - RNA, 22 nt, Artificial Sequence
  LRRK2 RNA guide
aagccuugcauccaaguuucug

SEQ ID NO: 2314 - RNA, 22 nt, Artificial Sequence
  LRRK2 RNA guide
aaggcuuuacaugugcuguuug

SEQ ID NO: 2315 - RNA, 22 nt, Artificial Sequence
  LRRK2 RNA guide
aaguccagaaacuuggaugcaa

SEQ ID NO: 2316 - RNA, 22 nt, Artificial Sequence
  LRRK2 RNA guide
acagcacauguaaagccuugca

SEQ ID NO: 2317 - RNA, 22 nt, Artificial Sequence
  LRRK2 RNA guide
acauguaaagccuugcauccaa

SEQ ID NO: 2318 - RNA, 22 nt, Artificial Sequence
  LRRK2 RNA guide
acuuggaugcaaggcuuuacau

SEQ ID NO: 2319 - RNA, 22 nt, Artificial Sequence
  LRRK2 RNA guide
agaaacuuggaugcaaggcuuu

SEQ ID NO: 2320 - RNA, 22 nt, Artificial Sequence
  LRRK2 RNA guide
agcacauguaaagccuugcauc

SEQ ID NO: 2321 - RNA, 22 nt, Artificial Sequence
  LRRK2 RNA guide
agccuugcauccaaguuucugg

SEQ ID NO: 2322 - RNA, 22 nt, Artificial Sequence
  LRRK2 RNA guide
aggcuuuacaugugcuguuuga

SEQ ID NO: 2323 - RNA, 22 nt, Artificial Sequence
  LRRK2 RNA guide
aguccagaaacuuggaugcaag

SEQ ID NO: 2324 - RNA, 22 nt, Artificial Sequence
  LRRK2 RNA guide
augaaguccagaaacuuggaug

SEQ ID NO: 2325 - RNA, 22 nt, Artificial Sequence
  LRRK2 RNA guide
augcaaggcuuuacaugugcug

SEQ ID NO: 2326 - RNA, 22 nt, Artificial Sequence
  LRRK2 RNA guide
auguaaagccuugcauccaagu

SEQ ID NO: 2327 - RNA, 22 nt, Artificial Sequence
  LRRK2 RNA guide
caaacagcacauguaaagccuu

SEQ ID NO: 2328 - RNA, 22 nt, Artificial Sequence
  LRRK2 RNA guide
caaggcuuuacaugugcuguuu

SEQ ID NO: 2329 - RNA, 22 nt, Artificial Sequence
  LRRK2 RNA guide
cacauguaaagccuugcaucca

SEQ ID NO: 2330 - RNA, 22 nt, Artificial Sequence
  LRRK2 RNA guide
cagaaacuuggaugcaaggcuu

SEQ ID NO: 2331 - RNA, 22 nt, Artificial Sequence
  LRRK2 RNA guide
cagcacauguaaagccuugcau

SEQ ID NO: 2332 - RNA, 22 nt, Artificial Sequence
  LRRK2 RNA guide
cauguaaagccuugcauccaag

SEQ ID NO: 2333 - RNA, 22 nt, Artificial Sequence
  LRRK2 RNA guide
ccagaaacuuggaugcaaggcu

SEQ ID NO: 2334 - RNA, 22 nt, Artificial Sequence
  LRRK2 RNA guide
ccucucucaaacagcacaugua

SEQ ID NO: 2335 - RNA, 22 nt, Artificial Sequence
  LRRK2 RNA guide
ccuugcauccaaguuucuggac

SEQ ID NO: 2336 - RNA, 22 nt, Artificial Sequence
  LRRK2 RNA guide
cucaaacagcacauguaaagcc

SEQ ID NO: 2337 - RNA, 22 nt, Artificial Sequence
  LRRK2 RNA guide
cucucaaacagcacauguaaag

SEQ ID NO: 2338 - RNA, 22 nt, Artificial Sequence
  LRRK2 RNA guide
cucucucaaacagcacauguaa

SEQ ID NO: 2339 - RNA, 22 nt, Artificial Sequence
  LRRK2 RNA guide
cuuggaugcaaggcuuuacaug

SEQ ID NO: 2340 - RNA, 22 nt, Artificial Sequence
  LRRK2 RNA guide
gaaacuuggaugcaaggcuuua

SEQ ID NO: 2341 - RNA, 22 nt, Artificial Sequence
  LRRK2 RNA guide
gaaguccagaaacuuggaugca

SEQ ID NO: 2342 - RNA, 22 nt, Artificial Sequence
  LRRK2 RNA guide
gaugaaguccagaaacuuggau

SEQ ID NO: 2343 - RNA, 22 nt, Artificial Sequence
  LRRK2 RNA guide
gaugcaaggcuuuacaugugcu

SEQ ID NO: 2344 - RNA, 22 nt, Artificial Sequence
  LRRK2 RNA guide
gcaaggcuuuacaugugcuguu

SEQ ID NO: 2345 - RNA, 22 nt, Artificial Sequence
  LRRK2 RNA guide
gcacauguaaagccuugcaucc

SEQ ID NO: 2346 - RNA, 22 nt, Artificial Sequence
  LRRK2 RNA guide
gccuugcauccaaguuucugga

SEQ ID NO: 2347 - RNA, 22 nt, Artificial Sequence
  LRRK2 RNA guide
ggaugcaaggcuuuacaugugc

SEQ ID NO: 2348 - RNA, 22 nt, Artificial Sequence
  LRRK2 RNA guide
guaaagccuugcauccaaguuu

SEQ ID NO: 2349 - RNA, 22 nt, Artificial Sequence
  LRRK2 RNA guide
guccagaaacuuggaugcaagg

SEQ ID NO: 2350 - RNA, 22 nt, Artificial Sequence
  LRRK2 RNA guide
uaaagccuugcauccaaguuuc

SEQ ID NO: 2351 - RNA, 22 nt, Artificial Sequence
  LRRK2 RNA guide
ucaaacagcacauguaaagccu

SEQ ID NO: 2352 - RNA, 22 nt, Artificial Sequence
  LRRK2 RNA guide
uccagaaacuuggaugcaaggc

SEQ ID NO: 2353 - RNA, 22 nt, Artificial Sequence
  LRRK2 RNA guide
ucucaaacagcacauguaaagc

SEQ ID NO: 2354 - RNA, 22 nt, Artificial Sequence
  LRRK2 RNA guide
ucucucaaacagcacauguaaa

SEQ ID NO: 2355 - RNA, 22 nt, Artificial Sequence
  LRRK2 RNA guide
ugaaguccagaaacuuggaugc

SEQ ID NO: 2356 - RNA, 22 nt, Artificial Sequence
  LRRK2 RNA guide
ugcaaggcuuuacaugugcugu

SEQ ID NO: 2357 - RNA, 22 nt, Artificial Sequence
  LRRK2 RNA guide
uggaugcaaggcuuuacaugug

SEQ ID NO: 2358 - RNA, 22 nt, Artificial Sequence
  LRRK2 RNA guide
uguaaagccuugcauccaaguu

SEQ ID NO: 2359 - RNA, 22 nt, Artificial Sequence
  LRRK2 RNA guide
uuggaugcaaggcuuuacaugu

SEQ ID NO: 2360 - RNA, 20 nt, Artificial Sequence
  LRRK2 RNA guide
aacugacugaauuuguugag

SEQ ID NO: 2361 - RNA, 20 nt, Artificial Sequence
  LRRK2 RNA guide
acugacugaauuuguugaga

SEQ ID NO: 2362 - RNA, 20 nt, Artificial Sequence
  LRRK2 RNA guide
caacugacugaauuuguuga

SEQ ID NO: 2363 - RNA, 20 nt, Artificial Sequence
  LRRK2 RNA guide
cugacugaauuuguugagaa

SEQ ID NO: 2364 - RNA, 20 nt, Artificial Sequence
  LRRK2 RNA guide
gacugaauuuguugagaaua

SEQ ID NO: 2365 - RNA, 20 nt, Artificial Sequence
  LRRK2 RNA guide
gcaacugacugaauuuguug

SEQ ID NO: 2366 - RNA, 20 nt, Artificial Sequence
  LRRK2 RNA guide
uauucucaacaaauucaguc

SEQ ID NO: 2367 - RNA, 20 nt, Artificial Sequence
  LRRK2 RNA guide
ugacugaauuuguugagaau

SEQ ID NO: 2368 - RNA, 21 nt, Artificial Sequence
  LRRK2 RNA guide
aacugacugaauuuguugaga

SEQ ID NO: 2369 - RNA, 21 nt, Artificial Sequence
  LRRK2 RNA guide
acugacugaauuuguugagaa

SEQ ID NO: 2370 - RNA, 21 nt, Artificial Sequence
  LRRK2 RNA guide
agcaacugacugaauuuguug

SEQ ID NO: 2371 - RNA, 21 nt, Artificial Sequence
  LRRK2 RNA guide
caacugacugaauuuguugag

SEQ ID NO: 2372 - RNA, 21 nt, Artificial Sequence
  LRRK2 RNA guide
cugacugaauuuguugagaau

SEQ ID NO: 2373 - RNA, 21 nt, Artificial Sequence
  LRRK2 RNA guide
gcaacugacugaauuuguuga

SEQ ID NO: 2374 - RNA, 22 nt, Artificial Sequence
  LRRK2 RNA guide
aacugacugaauuuguugagaa

SEQ ID NO: 2375 - RNA, 22 nt, Artificial Sequence
  LRRK2 RNA guide
acugacugaauuuguugagaau

SEQ ID NO: 2376 - RNA, 22 nt, Artificial Sequence
  LRRK2 RNA guide
agcaacugacugaauuuguuga

SEQ ID NO: 2377 - RNA, 22 nt, Artificial Sequence
  LRRK2 RNA guide
caacugacugaauuuguugaga

SEQ ID NO: 2378 - RNA, 22 nt, Artificial Sequence
  LRRK2 RNA guide
cugacugaauuuguugagaaua

SEQ ID NO: 2379 - RNA, 22 nt, Artificial Sequence
  LRRK2 RNA guide
gagcaacugacugaauuuguug

SEQ ID NO: 2380 - RNA, 22 nt, Artificial Sequence
  LRRK2 RNA guide
gcaacugacugaauuuguugag

SEQ ID NO: 2381 - RNA, 22 nt, Artificial Sequence
  LRRK2 RNA guide
uauucucaacaaauucagucag

SEQ ID NO: 2382 - RNA, 20 nt, Artificial Sequence
  LRRK2 RNA guide
aacgcacuuaacaaugucau

SEQ ID NO: 2383 - RNA, 20 nt, Artificial Sequence
  LRRK2 RNA guide
aauuuguuaacgcacuuaac

SEQ ID NO: 2384 - RNA, 20 nt, Artificial Sequence
  LRRK2 RNA guide
acauuguuaagugcguuaac

SEQ ID NO: 2385 - RNA, 20 nt, Artificial Sequence
  LRRK2 RNA guide
acgcacuuaacaaugucaua

SEQ ID NO: 2386 - RNA, 20 nt, Artificial Sequence
  LRRK2 RNA guide
auaugacauuguuaagugcg

SEQ ID NO: 2387 - RNA, 20 nt, Artificial Sequence
  LRRK2 RNA guide
augacauuguuaagugcguu

SEQ ID NO: 2388 - RNA, 20 nt, Artificial Sequence
  LRRK2 RNA guide
cgcacuuaacaaugucauau

SEQ ID NO: 2389 - RNA, 20 nt, Artificial Sequence
  LRRK2 RNA guide
gacauuguuaagugcguuaa

SEQ ID NO: 2390 - RNA, 20 nt, Artificial Sequence
  LRRK2 RNA guide
gagaacaaagauuauaugac

SEQ ID NO: 2391 - RNA, 20 nt, Artificial Sequence
  LRRK2 RNA guide
gcacuuaacaaugucauaua

SEQ ID NO: 2392 - RNA, 20 nt, Artificial Sequence
  LRRK2 RNA guide
guuaacgcacuuaacaaugu

SEQ ID NO: 2393 - RNA, 20 nt, Artificial Sequence
  LRRK2 RNA guide
uaacgcacuuaacaauguca

SEQ ID NO: 2394 - RNA, 20 nt, Artificial Sequence
  LRRK2 RNA guide
uauaugacauuguuaagugc

SEQ ID NO: 2395 - RNA, 20 nt, Artificial Sequence
  LRRK2 RNA guide
uaugacauuguuaagugcgu

SEQ ID NO: 2396 - RNA, 20 nt, Artificial Sequence
  LRRK2 RNA guide
ugacauuguuaagugcguua

SEQ ID NO: 2397 - RNA, 20 nt, Artificial Sequence
  LRRK2 RNA guide
uguuaacgcacuuaacaaug

SEQ ID NO: 2398 - RNA, 20 nt, Artificial Sequence
  LRRK2 RNA guide
uuaacgcacuuaacaauguc

SEQ ID NO: 2399 - RNA, 20 nt, Artificial Sequence
  LRRK2 RNA guide
uuguuaacgcacuuaacaau

SEQ ID NO: 2400 - RNA, 20 nt, Artificial Sequence
  LRRK2 RNA guide
uuuguuaacgcacuuaacaa

SEQ ID NO: 2401 - RNA, 21 nt, Artificial Sequence
  LRRK2 RNA guide
aacgcacuuaacaaugucaua

SEQ ID NO: 2402 - RNA, 21 nt, Artificial Sequence
  LRRK2 RNA guide
acauuguuaagugcguuaaca

SEQ ID NO: 2403 - RNA, 21 nt, Artificial Sequence
  LRRK2 RNA guide
acgcacuuaacaaugucauau

SEQ ID NO: 2404 - RNA, 21 nt, Artificial Sequence
  LRRK2 RNA guide
auaugacauuguuaagugcgu

SEQ ID NO: 2405 - RNA, 21 nt, Artificial Sequence
  LRRK2 RNA guide
augacauuguuaagugcguua

SEQ ID NO: 2406 - RNA, 21 nt, Artificial Sequence
  LRRK2 RNA guide
cgcacuuaacaaugucauaua

SEQ ID NO: 2407 - RNA, 21 nt, Artificial Sequence
  LRRK2 RNA guide
gacauuguuaagugcguuaac

SEQ ID NO: 2408 - RNA, 21 nt, Artificial Sequence
  LRRK2 RNA guide
guuaacgcacuuaacaauguc

SEQ ID NO: 2409 - RNA, 21 nt, Artificial Sequence
  LRRK2 RNA guide
uaacgcacuuaacaaugucau

SEQ ID NO: 2410 - RNA, 21 nt, Artificial Sequence
  LRRK2 RNA guide
uauaugacauuguuaagugcg

SEQ ID NO: 2411 - RNA, 21 nt, Artificial Sequence
  LRRK2 RNA guide
uaugacauuguuaagugcguu

SEQ ID NO: 2412 - RNA, 21 nt, Artificial Sequence
  LRRK2 RNA guide
ugacauuguuaagugcguuaa

SEQ ID NO: 2413 - RNA, 21 nt, Artificial Sequence
  LRRK2 RNA guide
uguuaacgcacuuaacaaugu

SEQ ID NO: 2414 - RNA, 21 nt, Artificial Sequence
  LRRK2 RNA guide
uuaacgcacuuaacaauguca

SEQ ID NO: 2415 - RNA, 21 nt, Artificial Sequence
  LRRK2 RNA guide
uuguuaacgcacuuaacaaug

SEQ ID NO: 2416 - RNA, 22 nt, Artificial Sequence
  LRRK2 RNA guide
aacgcacuuaacaaugucauau

SEQ ID NO: 2417 - RNA, 22 nt, Artificial Sequence
  LRRK2 RNA guide
acauuguuaagugcguuaacaa

SEQ ID NO: 2418 - RNA, 22 nt, Artificial Sequence
  LRRK2 RNA guide
acgcacuuaacaaugucauaua

SEQ ID NO: 2419 - RNA, 22 nt, Artificial Sequence
  LRRK2 RNA guide
auaugacauuguuaagugcguu

SEQ ID NO: 2420 - RNA, 22 nt, Artificial Sequence
  LRRK2 RNA guide
augacauuguuaagugcguuaa

SEQ ID NO: 2421 - RNA, 22 nt, Artificial Sequence
  LRRK2 RNA guide
cgcacuuaacaaugucauauaa

SEQ ID NO: 2422 - RNA, 22 nt, Artificial Sequence
  LRRK2 RNA guide
gacauuguuaagugcguuaaca

SEQ ID NO: 2423 - RNA, 22 nt, Artificial Sequence
  LRRK2 RNA guide
guuaacgcacuuaacaauguca

SEQ ID NO: 2424 - RNA, 22 nt, Artificial Sequence
  LRRK2 RNA guide
uaacgcacuuaacaaugucaua

SEQ ID NO: 2425 - RNA, 22 nt, Artificial Sequence
  LRRK2 RNA guide
uauaugacauuguuaagugcgu

SEQ ID NO: 2426 - RNA, 22 nt, Artificial Sequence
  LRRK2 RNA guide
uaugacauuguuaagugcguua

SEQ ID NO: 2427 - RNA, 22 nt, Artificial Sequence
  LRRK2 RNA guide
ugacauuguuaagugcguuaac

SEQ ID NO: 2428 - RNA, 22 nt, Artificial Sequence
  LRRK2 RNA guide
uguuaacgcacuuaacaauguc

SEQ ID NO: 2429 - RNA, 22 nt, Artificial Sequence
  LRRK2 RNA guide
uuaacgcacuuaacaaugucau

SEQ ID NO: 2430 - RNA, 22 nt, Artificial Sequence
  LRRK2 RNA guide
uuauaugacauuguuaagugcg

SEQ ID NO: 2431 - RNA, 22 nt, Artificial Sequence
  LRRK2 RNA guide
uuguuaacgcacuuaacaaugu

SEQ ID NO: 2432 - RNA, 22 nt, Artificial Sequence
  LRRK2 RNA guide
uuuguuaacgcacuuaacaaug

SEQ ID NO: 2433 - RNA, 20 nt, Artificial Sequence
  LRRK2 RNA guide
aaagaaugcagcacaugaag

SEQ ID NO: 2434 - RNA, 20 nt, Artificial Sequence
  LRRK2 RNA guide
aaauugugcuucaugugcug

SEQ ID NO: 2435 - RNA, 20 nt, Artificial Sequence
  LRRK2 RNA guide
aagaaugcagcacaugaagc

SEQ ID NO: 2436 - RNA, 20 nt, Artificial Sequence
  LRRK2 RNA guide
aaucgcuagggaauguaaag

SEQ ID NO: 2437 - RNA, 20 nt, Artificial Sequence
  LRRK2 RNA guide
aauguaaagaaugcagcaca

SEQ ID NO: 2438 - RNA, 20 nt, Artificial Sequence
  LRRK2 RNA guide
aauugugcuucaugugcugc

SEQ ID NO: 2439 - RNA, 20 nt, Artificial Sequence
  LRRK2 RNA guide
agaaugcagcacaugaagca

SEQ ID NO: 2440 - RNA, 20 nt, Artificial Sequence
  LRRK2 RNA guide
aggaaucgcuagggaaugua

SEQ ID NO: 2441 - RNA, 20 nt, Artificial Sequence
  LRRK2 RNA guide
agggaauguaaagaaugcag

SEQ ID NO: 2442 - RNA, 20 nt, Artificial Sequence
  LRRK2 RNA guide
aucgcuagggaauguaaaga

SEQ ID NO: 2443 - RNA, 20 nt, Artificial Sequence
  LRRK2 RNA guide
auguaaagaaugcagcacau

SEQ ID NO: 2444 - RNA, 20 nt, Artificial Sequence
  LRRK2 RNA guide
augugcugcauucuuuacau

SEQ ID NO: 2445 - RNA, 20 nt, Artificial Sequence
  LRRK2 RNA guide
auucuuuacauucccuagcg

SEQ ID NO: 2446 - RNA, 20 nt, Artificial Sequence
  LRRK2 RNA guide
auugugcuucaugugcugca

SEQ ID NO: 2447 - RNA, 20 nt, Artificial Sequence
  LRRK2 RNA guide
caaggaaucgcuagggaaug

SEQ ID NO: 2448 - RNA, 20 nt, Artificial Sequence
  LRRK2 RNA guide
caugugcugcauucuuuaca

SEQ ID NO: 2449 - RNA, 20 nt, Artificial Sequence
  LRRK2 RNA guide
cauucuuuacauucccuagc

SEQ ID NO: 2450 - RNA, 20 nt, Artificial Sequence
  LRRK2 RNA guide
cgcuagggaauguaaagaau

SEQ ID NO: 2451 - RNA, 20 nt, Artificial Sequence
  LRRK2 RNA guide
cuagggaauguaaagaaugc

SEQ ID NO: 2452 - RNA, 20 nt, Artificial Sequence
  LRRK2 RNA guide
cugcauucuuuacauucccu

SEQ ID NO: 2453 - RNA, 20 nt, Artificial Sequence
  LRRK2 RNA guide
cuucaugugcugcauucuuu

SEQ ID NO: 2454 - RNA, 20 nt, Artificial Sequence
  LRRK2 RNA guide
gaaucgcuagggaauguaaa

SEQ ID NO: 2455 - RNA, 20 nt, Artificial Sequence
  LRRK2 RNA guide
gaauguaaagaaugcagcac

SEQ ID NO: 2456 - RNA, 20 nt, Artificial Sequence
  LRRK2 RNA guide
gcauucuuuacauucccuag

SEQ ID NO: 2457 - RNA, 20 nt, Artificial Sequence
  LRRK2 RNA guide
gcuagggaauguaaagaaug

SEQ ID NO: 2458 - RNA, 20 nt, Artificial Sequence
  LRRK2 RNA guide
gcugcauucuuuacauuccc

SEQ ID NO: 2459 - RNA, 20 nt, Artificial Sequence
  LRRK2 RNA guide
gcuucaugugcugcauucuu

SEQ ID NO: 2460 - RNA, 20 nt, Artificial Sequence
  LRRK2 RNA guide
ggaaucgcuagggaauguaa

SEQ ID NO: 2461 - RNA, 20 nt, Artificial Sequence
  LRRK2 RNA guide
ggaauguaaagaaugcagca

SEQ ID NO: 2462 - RNA, 20 nt, Artificial Sequence
  LRRK2 RNA guide
gggaauguaaagaaugcagc

SEQ ID NO: 2463 - RNA, 20 nt, Artificial Sequence
  LRRK2 RNA guide
guaaagaaugcagcacauga

SEQ ID NO: 2464 - RNA, 20 nt, Artificial Sequence
  LRRK2 RNA guide
gugcugcauucuuuacauuc

SEQ ID NO: 2465 - RNA, 20 nt, Artificial Sequence
  LRRK2 RNA guide
gugcuucaugugcugcauuc

SEQ ID NO: 2466 - RNA, 20 nt, Artificial Sequence
  LRRK2 RNA guide
uaaagaaugcagcacaugaa

SEQ ID NO: 2467 - RNA, 20 nt, Artificial Sequence
  LRRK2 RNA guide
uagggaauguaaagaaugca

SEQ ID NO: 2468 - RNA, 20 nt, Artificial Sequence
  LRRK2 RNA guide
ucaugugcugcauucuuuac

SEQ ID NO: 2469 - RNA, 20 nt, Artificial Sequence
  LRRK2 RNA guide
ucgcuagggaauguaaagaa

SEQ ID NO: 2470 - RNA, 20 nt, Artificial Sequence
  LRRK2 RNA guide
ucuuuacauucccuagcgau

SEQ ID NO: 2471 - RNA, 20 nt, Artificial Sequence
  LRRK2 RNA guide
ugcauucuuuacauucccua

SEQ ID NO: 2472 - RNA, 20 nt, Artificial Sequence
  LRRK2 RNA guide
ugcugcauucuuuacauucc

SEQ ID NO: 2473 - RNA, 20 nt, Artificial Sequence
  LRRK2 RNA guide
ugcuucaugugcugcauucu

SEQ ID NO: 2474 - RNA, 20 nt, Artificial Sequence
  LRRK2 RNA guide
uguaaagaaugcagcacaug

SEQ ID NO: 2475 - RNA, 20 nt, Artificial Sequence
  LRRK2 RNA guide
ugugcugcauucuuuacauu

SEQ ID NO: 2476 - RNA, 20 nt, Artificial Sequence
  LRRK2 RNA guide
ugugcuucaugugcugcauu

SEQ ID NO: 2477 - RNA, 20 nt, Artificial Sequence
  LRRK2 RNA guide
uucaugugcugcauucuuua

SEQ ID NO: 2478 - RNA, 20 nt, Artificial Sequence
  LRRK2 RNA guide
uucuuuacauucccuagcga

SEQ ID NO: 2479 - RNA, 20 nt, Artificial Sequence
  LRRK2 RNA guide
uugugcuucaugugcugcau

SEQ ID NO: 2480 - RNA, 21 nt, Artificial Sequence
  LRRK2 RNA guide
aaagaaugcagcacaugaagc

SEQ ID NO: 2481 - RNA, 21 nt, Artificial Sequence
  LRRK2 RNA guide
aaauugugcuucaugugcugc

SEQ ID NO: 2482 - RNA, 21 nt, Artificial Sequence
  LRRK2 RNA guide
aagaaugcagcacaugaagca

SEQ ID NO: 2483 - RNA, 21 nt, Artificial Sequence
  LRRK2 RNA guide
aaggaaucgcuagggaaugua

SEQ ID NO: 2484 - RNA, 21 nt, Artificial Sequence
  LRRK2 RNA guide
aaucgcuagggaauguaaaga

SEQ ID NO: 2485 - RNA, 21 nt, Artificial Sequence
  LRRK2 RNA guide
aauguaaagaaugcagcacau

SEQ ID NO: 2486 - RNA, 21 nt, Artificial Sequence
  LRRK2 RNA guide
aauugugcuucaugugcugca

SEQ ID NO: 2487 - RNA, 21 nt, Artificial Sequence
  LRRK2 RNA guide
acaaggaaucgcuagggaaug

SEQ ID NO: 2488 - RNA, 21 nt, Artificial Sequence
  LRRK2 RNA guide
agaaugcagcacaugaagcac

SEQ ID NO: 2489 - RNA, 21 nt, Artificial Sequence
  LRRK2 RNA guide
aggaaucgcuagggaauguaa

SEQ ID NO: 2490 - RNA, 21 nt, Artificial Sequence
  LRRK2 RNA guide
agggaauguaaagaaugcagc

SEQ ID NO: 2491 - RNA, 21 nt, Artificial Sequence
  LRRK2 RNA guide
aucgcuagggaauguaaagaa

SEQ ID NO: 2492 - RNA, 21 nt, Artificial Sequence
  LRRK2 RNA guide
auguaaagaaugcagcacaug

SEQ ID NO: 2493 - RNA, 21 nt, Artificial Sequence
  LRRK2 RNA guide
augugcugcauucuuuacauu

SEQ ID NO: 2494 - RNA, 21 nt, Artificial Sequence
  LRRK2 RNA guide
auucuuuacauucccuagcga

SEQ ID NO: 2495 - RNA, 21 nt, Artificial Sequence
  LRRK2 RNA guide
auugugcuucaugugcugcau

SEQ ID NO: 2496 - RNA, 21 nt, Artificial Sequence
  LRRK2 RNA guide
caaggaaucgcuagggaaugu

SEQ ID NO: 2497 - RNA, 21 nt, Artificial Sequence
  LRRK2 RNA guide
caugugcugcauucuuuacau

SEQ ID NO: 2498 - RNA, 21 nt, Artificial Sequence
  LRRK2 RNA guide
cauucuuuacauucccuagcg

SEQ ID NO: 2499 - RNA, 21 nt, Artificial Sequence
  LRRK2 RNA guide
cgcuagggaauguaaagaaug

SEQ ID NO: 2500 - RNA, 21 nt, Artificial Sequence
  LRRK2 RNA guide
cuagggaauguaaagaaugca

SEQ ID NO: 2501 - RNA, 21 nt, Artificial Sequence
  LRRK2 RNA guide
cugcauucuuuacauucccua

SEQ ID NO: 2502 - RNA, 21 nt, Artificial Sequence
  LRRK2 RNA guide
cuucaugugcugcauucuuua

SEQ ID NO: 2503 - RNA, 21 nt, Artificial Sequence
  LRRK2 RNA guide
gaaauugugcuucaugugcug

SEQ ID NO: 2504 - RNA, 21 nt, Artificial Sequence
  LRRK2 RNA guide
gaaucgcuagggaauguaaag

SEQ ID NO: 2505 - RNA, 21 nt, Artificial Sequence
  LRRK2 RNA guide
gaauguaaagaaugcagcaca

SEQ ID NO: 2506 - RNA, 21 nt, Artificial Sequence
  LRRK2 RNA guide
gcauucuuuacauucccuagc

SEQ ID NO: 2507 - RNA, 21 nt, Artificial Sequence
  LRRK2 RNA guide
gcuagggaauguaaagaaugc

SEQ ID NO: 2508 - RNA, 21 nt, Artificial Sequence
  LRRK2 RNA guide
gcugcauucuuuacauucccu

SEQ ID NO: 2509 - RNA, 21 nt, Artificial Sequence
  LRRK2 RNA guide
gcuucaugugcugcauucuuu

SEQ ID NO: 2510 - RNA, 21 nt, Artificial Sequence
  LRRK2 RNA guide
ggaaucgcuagggaauguaaa

SEQ ID NO: 2511 - RNA, 21 nt, Artificial Sequence
  LRRK2 RNA guide
ggaauguaaagaaugcagcac

SEQ ID NO: 2512 - RNA, 21 nt, Artificial Sequence
  LRRK2 RNA guide
gggaauguaaagaaugcagca

SEQ ID NO: 2513 - RNA, 21 nt, Artificial Sequence
  LRRK2 RNA guide
guaaagaaugcagcacaugaa

SEQ ID NO: 2514 - RNA, 21 nt, Artificial Sequence
  LRRK2 RNA guide
gugcugcauucuuuacauucc

SEQ ID NO: 2515 - RNA, 21 nt, Artificial Sequence
  LRRK2 RNA guide
gugcuucaugugcugcauucu

SEQ ID NO: 2516 - RNA, 21 nt, Artificial Sequence
  LRRK2 RNA guide
uaaagaaugcagcacaugaag

SEQ ID NO: 2517 - RNA, 21 nt, Artificial Sequence
  LRRK2 RNA guide
uagggaauguaaagaaugcag

SEQ ID NO: 2518 - RNA, 21 nt, Artificial Sequence
  LRRK2 RNA guide
ucaugugcugcauucuuuaca

SEQ ID NO: 2519 - RNA, 21 nt, Artificial Sequence
  LRRK2 RNA guide
ucgcuagggaauguaaagaau

SEQ ID NO: 2520 - RNA, 21 nt, Artificial Sequence
  LRRK2 RNA guide
ucuuuacauucccuagcgauu

SEQ ID NO: 2521 - RNA, 21 nt, Artificial Sequence
  LRRK2 RNA guide
ugcauucuuuacauucccuag

SEQ ID NO: 2522 - RNA, 21 nt, Artificial Sequence
  LRRK2 RNA guide
ugcugcauucuuuacauuccc

SEQ ID NO: 2523 - RNA, 21 nt, Artificial Sequence
  LRRK2 RNA guide
ugcuucaugugcugcauucuu

SEQ ID NO: 2524 - RNA, 21 nt, Artificial Sequence
  LRRK2 RNA guide
uguaaagaaugcagcacauga

SEQ ID NO: 2525 - RNA, 21 nt, Artificial Sequence
  LRRK2 RNA guide
ugugcugcauucuuuacauuc

SEQ ID NO: 2526 - RNA, 21 nt, Artificial Sequence
  LRRK2 RNA guide
ugugcuucaugugcugcauuc

SEQ ID NO: 2527 - RNA, 21 nt, Artificial Sequence
  LRRK2 RNA guide
uucaugugcugcauucuuuac

SEQ ID NO: 2528 - RNA, 21 nt, Artificial Sequence
  LRRK2 RNA guide
uucuuuacauucccuagcgau

SEQ ID NO: 2529 - RNA, 21 nt, Artificial Sequence
  LRRK2 RNA guide
uugugcuucaugugcugcauu

SEQ ID NO: 2530 - RNA, 22 nt, Artificial Sequence
  LRRK2 RNA guide
aaagaaugcagcacaugaagca

SEQ ID NO: 2531 - RNA, 22 nt, Artificial Sequence
  LRRK2 RNA guide
aaauugugcuucaugugcugca

SEQ ID NO: 2532 - RNA, 22 nt, Artificial Sequence
  LRRK2 RNA guide
aagaaugcagcacaugaagcac

SEQ ID NO: 2533 - RNA, 22 nt, Artificial Sequence
  LRRK2 RNA guide
aaggaaucgcuagggaauguaa

SEQ ID NO: 2534 - RNA, 22 nt, Artificial Sequence
  LRRK2 RNA guide
aaucgcuagggaauguaaagaa

SEQ ID NO: 2535 - RNA, 22 nt, Artificial Sequence
  LRRK2 RNA guide
aauguaaagaaugcagcacaug

SEQ ID NO: 2536 - RNA, 22 nt, Artificial Sequence
  LRRK2 RNA guide
aauugugcuucaugugcugcau

SEQ ID NO: 2537 - RNA, 22 nt, Artificial Sequence
  LRRK2 RNA guide
acaaggaaucgcuagggaaugu

SEQ ID NO: 2538 - RNA, 22 nt, Artificial Sequence
  LRRK2 RNA guide
agaaugcagcacaugaagcaca

SEQ ID NO: 2539 - RNA, 22 nt, Artificial Sequence
  LRRK2 RNA guide
aggaaucgcuagggaauguaaa

SEQ ID NO: 2540 - RNA, 22 nt, Artificial Sequence
  LRRK2 RNA guide
agggaauguaaagaaugcagca

SEQ ID NO: 2541 - RNA, 22 nt, Artificial Sequence
  LRRK2 RNA guide
aucgcuagggaauguaaagaau

SEQ ID NO: 2542 - RNA, 22 nt, Artificial Sequence
  LRRK2 RNA guide
auguaaagaaugcagcacauga

SEQ ID NO: 2543 - RNA, 22 nt, Artificial Sequence
  LRRK2 RNA guide
augugcugcauucuuuacauuc

SEQ ID NO: 2544 - RNA, 22 nt, Artificial Sequence
  LRRK2 RNA guide
auucuuuacauucccuagcgau

SEQ ID NO: 2545 - RNA, 22 nt, Artificial Sequence
  LRRK2 RNA guide
auugugcuucaugugcugcauu

SEQ ID NO: 2546 - RNA, 22 nt, Artificial Sequence
  LRRK2 RNA guide
caaggaaucgcuagggaaugua

SEQ ID NO: 2547 - RNA, 22 nt, Artificial Sequence
  LRRK2 RNA guide
caugugcugcauucuuuacauu

SEQ ID NO: 2548 - RNA, 22 nt, Artificial Sequence
  LRRK2 RNA guide
cauucuuuacauucccuagcga

SEQ ID NO: 2549 - RNA, 22 nt, Artificial Sequence
  LRRK2 RNA guide
cgcuagggaauguaaagaaugc

SEQ ID NO: 2550 - RNA, 22 nt, Artificial Sequence
  LRRK2 RNA guide
cuagggaauguaaagaaugcag

SEQ ID NO: 2551 - RNA, 22 nt, Artificial Sequence
  LRRK2 RNA guide
cugcauucuuuacauucccuag

SEQ ID NO: 2552 - RNA, 22 nt, Artificial Sequence
  LRRK2 RNA guide
cuucaugugcugcauucuuuac

SEQ ID NO: 2553 - RNA, 22 nt, Artificial Sequence
  LRRK2 RNA guide
gaaauugugcuucaugugcugc

SEQ ID NO: 2554 - RNA, 22 nt, Artificial Sequence
  LRRK2 RNA guide
gaaucgcuagggaauguaaaga

SEQ ID NO: 2555 - RNA, 22 nt, Artificial Sequence
  LRRK2 RNA guide
gaauguaaagaaugcagcacau

SEQ ID NO: 2556 - RNA, 22 nt, Artificial Sequence
  LRRK2 RNA guide
gcauucuuuacauucccuagcg

SEQ ID NO: 2557 - RNA, 22 nt, Artificial Sequence
  LRRK2 RNA guide
gcuagggaauguaaagaaugca

SEQ ID NO: 2558 - RNA, 22 nt, Artificial Sequence
  LRRK2 RNA guide
gcugcauucuuuacauucccua

SEQ ID NO: 2559 - RNA, 22 nt, Artificial Sequence
  LRRK2 RNA guide
gcuucaugugcugcauucuuua

SEQ ID NO: 2560 - RNA, 22 nt, Artificial Sequence
  LRRK2 RNA guide
ggaaauugugcuucaugugcug

SEQ ID NO: 2561 - RNA, 22 nt, Artificial Sequence
  LRRK2 RNA guide
ggaaucgcuagggaauguaaag

SEQ ID NO: 2562 - RNA, 22 nt, Artificial Sequence
  LRRK2 RNA guide
ggaauguaaagaaugcagcaca

SEQ ID NO: 2563 - RNA, 22 nt, Artificial Sequence
  LRRK2 RNA guide
gggaauguaaagaaugcagcac

SEQ ID NO: 2564 - RNA, 22 nt, Artificial Sequence
  LRRK2 RNA guide
guaaagaaugcagcacaugaag

SEQ ID NO: 2565 - RNA, 22 nt, Artificial Sequence
  LRRK2 RNA guide
gugcugcauucuuuacauuccc

SEQ ID NO: 2566 - RNA, 22 nt, Artificial Sequence
  LRRK2 RNA guide
gugcuucaugugcugcauucuu

SEQ ID NO: 2567 - RNA, 22 nt, Artificial Sequence
  LRRK2 RNA guide
uaaagaaugcagcacaugaagc

SEQ ID NO: 2568 - RNA, 22 nt, Artificial Sequence
  LRRK2 RNA guide
uacaaggaaucgcuagggaaug

SEQ ID NO: 2569 - RNA, 22 nt, Artificial Sequence
  LRRK2 RNA guide
uagggaauguaaagaaugcagc

SEQ ID NO: 2570 - RNA, 22 nt, Artificial Sequence
  LRRK2 RNA guide
ucaugugcugcauucuuuacau

SEQ ID NO: 2571 - RNA, 22 nt, Artificial Sequence
  LRRK2 RNA guide
ucgcuagggaauguaaagaaug

SEQ ID NO: 2572 - RNA, 22 nt, Artificial Sequence
  LRRK2 RNA guide
ucuuuacauucccuagcgauuc

SEQ ID NO: 2573 - RNA, 22 nt, Artificial Sequence
  LRRK2 RNA guide
ugcauucuuuacauucccuagc

SEQ ID NO: 2574 - RNA, 22 nt, Artificial Sequence
  LRRK2 RNA guide
ugcugcauucuuuacauucccu

SEQ ID NO: 2575 - RNA, 22 nt, Artificial Sequence
  LRRK2 RNA guide
ugcuucaugugcugcauucuuu

SEQ ID NO: 2576 - RNA, 22 nt, Artificial Sequence
  LRRK2 RNA guide
uguaaagaaugcagcacaugaa

SEQ ID NO: 2577 - RNA, 22 nt, Artificial Sequence
  LRRK2 RNA guide
ugugcugcauucuuuacauucc

SEQ ID NO: 2578 - RNA, 22 nt, Artificial Sequence
  LRRK2 RNA guide
ugugcuucaugugcugcauucu

SEQ ID NO: 2579 - RNA, 22 nt, Artificial Sequence
  LRRK2 RNA guide
uucaugugcugcauucuuuaca

SEQ ID NO: 2580 - RNA, 22 nt, Artificial Sequence
  LRRK2 RNA guide
uucuuuacauucccuagcgauu

SEQ ID NO: 2581 - RNA, 22 nt, Artificial Sequence
  LRRK2 RNA guide
uugugcuucaugugcugcauuc

SEQ ID NO: 2582 - RNA, 20 nt, Artificial Sequence
  LRRK2 RNA guide
aaggaaucgcuaggggaugu

SEQ ID NO: 2583 - RNA, 20 nt, Artificial Sequence
  LRRK2 RNA guide
aaucgcuaggggauguaaac

SEQ ID NO: 2584 - RNA, 20 nt, Artificial Sequence
  LRRK2 RNA guide
acaaggaaucgcuaggggau

SEQ ID NO: 2585 - RNA, 20 nt, Artificial Sequence
  LRRK2 RNA guide
acauccccuagcgauuccuu

SEQ ID NO: 2586 - RNA, 20 nt, Artificial Sequence
  LRRK2 RNA guide
acuuacaaggaaucgcuagg

SEQ ID NO: 2587 - RNA, 20 nt, Artificial Sequence
  LRRK2 RNA guide
aggaaucgcuaggggaugua

SEQ ID NO: 2588 - RNA, 20 nt, Artificial Sequence
  LRRK2 RNA guide
aggggauguaaacaaugcag

SEQ ID NO: 2589 - RNA, 20 nt, Artificial Sequence
  LRRK2 RNA guide
auccccuagcgauuccuugu

SEQ ID NO: 2590 - RNA, 20 nt, Artificial Sequence
  LRRK2 RNA guide
aucgcuaggggauguaaaca

SEQ ID NO: 2591 - RNA, 20 nt, Artificial Sequence
  LRRK2 RNA guide
augugcugcauuguuuacau

SEQ ID NO: 2592 - RNA, 20 nt, Artificial Sequence
  LRRK2 RNA guide
auuguuuacauccccuagcg

SEQ ID NO: 2593 - RNA, 20 nt, Artificial Sequence
  LRRK2 RNA guide
caaggaaucgcuaggggaug

SEQ ID NO: 2594 - RNA, 20 nt, Artificial Sequence
  LRRK2 RNA guide
cauccccuagcgauuccuug

SEQ ID NO: 2595 - RNA, 20 nt, Artificial Sequence
  LRRK2 RNA guide
caugugcugcauuguuuaca

SEQ ID NO: 2596 - RNA, 20 nt, Artificial Sequence
  LRRK2 RNA guide
cauuguuuacauccccuagc

SEQ ID NO: 2597 - RNA, 20 nt, Artificial Sequence
  LRRK2 RNA guide
cgcuaggggauguaaacaau

SEQ ID NO: 2598 - RNA, 20 nt, Artificial Sequence
  LRRK2 RNA guide
cuacuuacaaggaaucgcua

SEQ ID NO: 2599 - RNA, 20 nt, Artificial Sequence
  LRRK2 RNA guide
cuaggggauguaaacaaugc

SEQ ID NO: 2600 - RNA, 20 nt, Artificial Sequence
  LRRK2 RNA guide
cugcauuguuuacauccccu

SEQ ID NO: 2601 - RNA, 20 nt, Artificial Sequence
  LRRK2 RNA guide
cuuacaaggaaucgcuaggg

SEQ ID NO: 2602 - RNA, 20 nt, Artificial Sequence
  LRRK2 RNA guide
cuucaugugcugcauuguuu

SEQ ID NO: 2603 - RNA, 20 nt, Artificial Sequence
  LRRK2 RNA guide
gaaucgcuaggggauguaaa

SEQ ID NO: 2604 - RNA, 20 nt, Artificial Sequence
  LRRK2 RNA guide
gcauuguuuacauccccuag

SEQ ID NO: 2605 - RNA, 20 nt, Artificial Sequence
  LRRK2 RNA guide
gcuacuuacaaggaaucgcu

SEQ ID NO: 2606 - RNA, 20 nt, Artificial Sequence
  LRRK2 RNA guide
gcuaggggauguaaacaaug

SEQ ID NO: 2607 - RNA, 20 nt, Artificial Sequence
  LRRK2 RNA guide
gcugcauuguuuacaucccc

SEQ ID NO: 2608 - RNA, 20 nt, Artificial Sequence
  LRRK2 RNA guide
ggaaucgcuaggggauguaa

SEQ ID NO: 2609 - RNA, 20 nt, Artificial Sequence
  LRRK2 RNA guide
ggauguaaacaaugcagcac

SEQ ID NO: 2610 - RNA, 20 nt, Artificial Sequence
  LRRK2 RNA guide
gggauguaaacaaugcagca

SEQ ID NO: 2611 - RNA, 20 nt, Artificial Sequence
  LRRK2 RNA guide
ggggauguaaacaaugcagc

SEQ ID NO: 2612 - RNA, 20 nt, Artificial Sequence
  LRRK2 RNA guide
gugcugcauuguuuacaucc

SEQ ID NO: 2613 - RNA, 20 nt, Artificial Sequence
  LRRK2 RNA guide
guuuacauccccuagcgauu

SEQ ID NO: 2614 - RNA, 20 nt, Artificial Sequence
  LRRK2 RNA guide
uacaaggaaucgcuagggga

SEQ ID NO: 2615 - RNA, 20 nt, Artificial Sequence
  LRRK2 RNA guide
uacauccccuagcgauuccu

SEQ ID NO: 2616 - RNA, 20 nt, Artificial Sequence
  LRRK2 RNA guide
uacuuacaaggaaucgcuag

SEQ ID NO: 2617 - RNA, 20 nt, Artificial Sequence
  LRRK2 RNA guide
uaggggauguaaacaaugca

SEQ ID NO: 2618 - RNA, 20 nt, Artificial Sequence
  LRRK2 RNA guide
ucaugugcugcauuguuuac

SEQ ID NO: 2619 - RNA, 20 nt, Artificial Sequence
  LRRK2 RNA guide
uccccuagcgauuccuugua

SEQ ID NO: 2620 - RNA, 20 nt, Artificial Sequence
  LRRK2 RNA guide
ucgcuaggggauguaaacaa

SEQ ID NO: 2621 - RNA, 20 nt, Artificial Sequence
  LRRK2 RNA guide
ugcauuguuuacauccccua

SEQ ID NO: 2622 - RNA, 20 nt, Artificial Sequence
  LRRK2 RNA guide
ugcugcauuguuuacauccc

SEQ ID NO: 2623 - RNA, 20 nt, Artificial Sequence
  LRRK2 RNA guide
ugugcugcauuguuuacauc

SEQ ID NO: 2624 - RNA, 20 nt, Artificial Sequence
  LRRK2 RNA guide
uguuuacauccccuagcgau

SEQ ID NO: 2625 - RNA, 20 nt, Artificial Sequence
  LRRK2 RNA guide
uuacaaggaaucgcuagggg

SEQ ID NO: 2626 - RNA, 20 nt, Artificial Sequence
  LRRK2 RNA guide
uuacauccccuagcgauucc

SEQ ID NO: 2627 - RNA, 20 nt, Artificial Sequence
  LRRK2 RNA guide
uucaugugcugcauuguuua

SEQ ID NO: 2628 - RNA, 20 nt, Artificial Sequence
  LRRK2 RNA guide
uuguuuacauccccuagcga

SEQ ID NO: 2629 - RNA, 20 nt, Artificial Sequence
  LRRK2 RNA guide
uuuacauccccuagcgauuc

SEQ ID NO: 2630 - RNA, 21 nt, Artificial Sequence
  LRRK2 RNA guide
aaggaaucgcuaggggaugua

SEQ ID NO: 2631 - RNA, 21 nt, Artificial Sequence
  LRRK2 RNA guide
aaucgcuaggggauguaaaca

SEQ ID NO: 2632 - RNA, 21 nt, Artificial Sequence
  LRRK2 RNA guide
acaaggaaucgcuaggggaug

SEQ ID NO: 2633 - RNA, 21 nt, Artificial Sequence
  LRRK2 RNA guide
acauccccuagcgauuccuug

SEQ ID NO: 2634 - RNA, 21 nt, Artificial Sequence
  LRRK2 RNA guide
acuuacaaggaaucgcuaggg

SEQ ID NO: 2635 - RNA, 21 nt, Artificial Sequence
  LRRK2 RNA guide
aggaaucgcuaggggauguaa

SEQ ID NO: 2636 - RNA, 21 nt, Artificial Sequence
  LRRK2 RNA guide
aggggauguaaacaaugcagc

SEQ ID NO: 2637 - RNA, 21 nt, Artificial Sequence
  LRRK2 RNA guide
auccccuagcgauuccuugua

SEQ ID NO: 2638 - RNA, 21 nt, Artificial Sequence
  LRRK2 RNA guide
aucgcuaggggauguaaacaa

SEQ ID NO: 2639 - RNA, 21 nt, Artificial Sequence
  LRRK2 RNA guide
augugcugcauuguuuacauc

SEQ ID NO: 2640 - RNA, 21 nt, Artificial Sequence
  LRRK2 RNA guide
auuguuuacauccccuagcga

SEQ ID NO: 2641 - RNA, 21 nt, Artificial Sequence
  LRRK2 RNA guide
caaggaaucgcuaggggaugu

SEQ ID NO: 2642 - RNA, 21 nt, Artificial Sequence
  LRRK2 RNA guide
cauccccuagcgauuccuugu

SEQ ID NO: 2643 - RNA, 21 nt, Artificial Sequence
  LRRK2 RNA guide
caugugcugcauuguuuacau

SEQ ID NO: 2644 - RNA, 21 nt, Artificial Sequence
  LRRK2 RNA guide
cauuguuuacauccccuagcg

SEQ ID NO: 2645 - RNA, 21 nt, Artificial Sequence
  LRRK2 RNA guide
cgcuaggggauguaaacaaug

SEQ ID NO: 2646 - RNA, 21 nt, Artificial Sequence
  LRRK2 RNA guide
cuacuuacaaggaaucgcuag

SEQ ID NO: 2647 - RNA, 21 nt, Artificial Sequence
  LRRK2 RNA guide
cuaggggauguaaacaaugca

SEQ ID NO: 2648 - RNA, 21 nt, Artificial Sequence
  LRRK2 RNA guide
cugcauuguuuacauccccua

SEQ ID NO: 2649 - RNA, 21 nt, Artificial Sequence
  LRRK2 RNA guide
cuuacaaggaaucgcuagggg

SEQ ID NO: 2650 - RNA, 21 nt, Artificial Sequence
  LRRK2 RNA guide
cuucaugugcugcauuguuua

SEQ ID NO: 2651 - RNA, 21 nt, Artificial Sequence
  LRRK2 RNA guide
gaaucgcuaggggauguaaac

SEQ ID NO: 2652 - RNA, 21 nt, Artificial Sequence
  LRRK2 RNA guide
gcauuguuuacauccccuagc

SEQ ID NO: 2653 - RNA, 21 nt, Artificial Sequence
  LRRK2 RNA guide
gcuacuuacaaggaaucgcua

SEQ ID NO: 2654 - RNA, 21 nt, Artificial Sequence
  LRRK2 RNA guide
gcuaggggauguaaacaaugc

SEQ ID NO: 2655 - RNA, 21 nt, Artificial Sequence
  LRRK2 RNA guide
gcugcauuguuuacauccccu

SEQ ID NO: 2656 - RNA, 21 nt, Artificial Sequence
  LRRK2 RNA guide
gcuucaugugcugcauuguuu

SEQ ID NO: 2657 - RNA, 21 nt, Artificial Sequence
  LRRK2 RNA guide
ggaaucgcuaggggauguaaa

SEQ ID NO: 2658 - RNA, 21 nt, Artificial Sequence
  LRRK2 RNA guide
ggauguaaacaaugcagcaca

SEQ ID NO: 2659 - RNA, 21 nt, Artificial Sequence
  LRRK2 RNA guide
gggauguaaacaaugcagcac

SEQ ID NO: 2660 - RNA, 21 nt, Artificial Sequence
  LRRK2 RNA guide
ggggauguaaacaaugcagca

SEQ ID NO: 2661 - RNA, 21 nt, Artificial Sequence
  LRRK2 RNA guide
gugcugcauuguuuacauccc

SEQ ID NO: 2662 - RNA, 21 nt, Artificial Sequence
  LRRK2 RNA guide
guuuacauccccuagcgauuc

SEQ ID NO: 2663 - RNA, 21 nt, Artificial Sequence
  LRRK2 RNA guide
uacaaggaaucgcuaggggau

SEQ ID NO: 2664 - RNA, 21 nt, Artificial Sequence
  LRRK2 RNA guide
uacauccccuagcgauuccuu

SEQ ID NO: 2665 - RNA, 21 nt, Artificial Sequence
  LRRK2 RNA guide
uacuuacaaggaaucgcuagg

SEQ ID NO: 2666 - RNA, 21 nt, Artificial Sequence
  LRRK2 RNA guide
uaggggauguaaacaaugcag

SEQ ID NO: 2667 - RNA, 21 nt, Artificial Sequence
  LRRK2 RNA guide
ucaugugcugcauuguuuaca

SEQ ID NO: 2668 - RNA, 21 nt, Artificial Sequence
  LRRK2 RNA guide
uccccuagcgauuccuuguaa

SEQ ID NO: 2669 - RNA, 21 nt, Artificial Sequence
  LRRK2 RNA guide
ucgcuaggggauguaaacaau

SEQ ID NO: 2670 - RNA, 21 nt, Artificial Sequence
  LRRK2 RNA guide
ugcauuguuuacauccccuag

SEQ ID NO: 2671 - RNA, 21 nt, Artificial Sequence
  LRRK2 RNA guide
ugcuacuuacaaggaaucgcu

SEQ ID NO: 2672 - RNA, 21 nt, Artificial Sequence
  LRRK2 RNA guide
ugcugcauuguuuacaucccc

SEQ ID NO: 2673 - RNA, 21 nt, Artificial Sequence
  LRRK2 RNA guide
ugugcugcauuguuuacaucc

SEQ ID NO: 2674 - RNA, 21 nt, Artificial Sequence
  LRRK2 RNA guide
uguuuacauccccuagcgauu

SEQ ID NO: 2675 - RNA, 21 nt, Artificial Sequence
  LRRK2 RNA guide
uuacaaggaaucgcuagggga

SEQ ID NO: 2676 - RNA, 21 nt, Artificial Sequence
  LRRK2 RNA guide
uuacauccccuagcgauuccu

SEQ ID NO: 2677 - RNA, 21 nt, Artificial Sequence
  LRRK2 RNA guide
uucaugugcugcauuguuuac

SEQ ID NO: 2678 - RNA, 21 nt, Artificial Sequence
  LRRK2 RNA guide
uuguuuacauccccuagcgau

SEQ ID NO: 2679 - RNA, 21 nt, Artificial Sequence
  LRRK2 RNA guide
uuuacauccccuagcgauucc

SEQ ID NO: 2680 - RNA, 22 nt, Artificial Sequence
  LRRK2 RNA guide
aaggaaucgcuaggggauguaa

SEQ ID NO: 2681 - RNA, 22 nt, Artificial Sequence
  LRRK2 RNA guide
aaucgcuaggggauguaaacaa

SEQ ID NO: 2682 - RNA, 22 nt, Artificial Sequence
  LRRK2 RNA guide
acaaggaaucgcuaggggaugu

SEQ ID NO: 2683 - RNA, 22 nt, Artificial Sequence
  LRRK2 RNA guide
acauccccuagcgauuccuugu

SEQ ID NO: 2684 - RNA, 22 nt, Artificial Sequence
  LRRK2 RNA guide
acuuacaaggaaucgcuagggg

SEQ ID NO: 2685 - RNA, 22 nt, Artificial Sequence
  LRRK2 RNA guide
aggaaucgcuaggggauguaaa

SEQ ID NO: 2686 - RNA, 22 nt, Artificial Sequence
  LRRK2 RNA guide
aggggauguaaacaaugcagca

SEQ ID NO: 2687 - RNA, 22 nt, Artificial Sequence
  LRRK2 RNA guide
auccccuagcgauuccuuguaa

SEQ ID NO: 2688 - RNA, 22 nt, Artificial Sequence
  LRRK2 RNA guide
aucgcuaggggauguaaacaau

SEQ ID NO: 2689 - RNA, 22 nt, Artificial Sequence
  LRRK2 RNA guide
augcuacuuacaaggaaucgcu

SEQ ID NO: 2690 - RNA, 22 nt, Artificial Sequence
  LRRK2 RNA guide
augugcugcauuguuuacaucc

SEQ ID NO: 2691 - RNA, 22 nt, Artificial Sequence
  LRRK2 RNA guide
auuguuuacauccccuagcgau

SEQ ID NO: 2692 - RNA, 22 nt, Artificial Sequence
  LRRK2 RNA guide
caaggaaucgcuaggggaugua

SEQ ID NO: 2693 - RNA, 22 nt, Artificial Sequence
  LRRK2 RNA guide
cauccccuagcgauuccuugua

SEQ ID NO: 2694 - RNA, 22 nt, Artificial Sequence
  LRRK2 RNA guide
caugugcugcauuguuuacauc

SEQ ID NO: 2695 - RNA, 22 nt, Artificial Sequence
  LRRK2 RNA guide
cauuguuuacauccccuagcga

SEQ ID NO: 2696 - RNA, 22 nt, Artificial Sequence
  LRRK2 RNA guide
cgcuaggggauguaaacaaugc

SEQ ID NO: 2697 - RNA, 22 nt, Artificial Sequence
  LRRK2 RNA guide
cuacuuacaaggaaucgcuagg

SEQ ID NO: 2698 - RNA, 22 nt, Artificial Sequence
  LRRK2 RNA guide
cuaggggauguaaacaaugcag

SEQ ID NO: 2699 - RNA, 22 nt, Artificial Sequence
  LRRK2 RNA guide
cugcauuguuuacauccccuag

SEQ ID NO: 2700 - RNA, 22 nt, Artificial Sequence
  LRRK2 RNA guide
cuuacaaggaaucgcuagggga

SEQ ID NO: 2701 - RNA, 22 nt, Artificial Sequence
  LRRK2 RNA guide
cuucaugugcugcauuguuuac

SEQ ID NO: 2702 - RNA, 22 nt, Artificial Sequence
  LRRK2 RNA guide
gaaucgcuaggggauguaaaca

SEQ ID NO: 2703 - RNA, 22 nt, Artificial Sequence
  LRRK2 RNA guide
gcauuguuuacauccccuagcg

SEQ ID NO: 2704 - RNA, 22 nt, Artificial Sequence
  LRRK2 RNA guide
gcuacuuacaaggaaucgcuag

SEQ ID NO: 2705 - RNA, 22 nt, Artificial Sequence
  LRRK2 RNA guide
gcuaggggauguaaacaaugca

SEQ ID NO: 2706 - RNA, 22 nt, Artificial Sequence
  LRRK2 RNA guide
gcugcauuguuuacauccccua

SEQ ID NO: 2707 - RNA, 22 nt, Artificial Sequence
  LRRK2 RNA guide
gcuucaugugcugcauuguuua

SEQ ID NO: 2708 - RNA, 22 nt, Artificial Sequence
  LRRK2 RNA guide
ggaaucgcuaggggauguaaac

SEQ ID NO: 2709 - RNA, 22 nt, Artificial Sequence
  LRRK2 RNA guide
ggauguaaacaaugcagcacau

SEQ ID NO: 2710 - RNA, 22 nt, Artificial Sequence
  LRRK2 RNA guide
gggauguaaacaaugcagcaca

SEQ ID NO: 2711 - RNA, 22 nt, Artificial Sequence
  LRRK2 RNA guide
ggggauguaaacaaugcagcac

SEQ ID NO: 2712 - RNA, 22 nt, Artificial Sequence
  LRRK2 RNA guide
gugcugcauuguuuacaucccc

SEQ ID NO: 2713 - RNA, 22 nt, Artificial Sequence
  LRRK2 RNA guide
guuuacauccccuagcgauucc

SEQ ID NO: 2714 - RNA, 22 nt, Artificial Sequence
  LRRK2 RNA guide
uacaaggaaucgcuaggggaug

SEQ ID NO: 2715 - RNA, 22 nt, Artificial Sequence
  LRRK2 RNA guide
uacauccccuagcgauuccuug

SEQ ID NO: 2716 - RNA, 22 nt, Artificial Sequence
  LRRK2 RNA guide
uacuuacaaggaaucgcuaggg

SEQ ID NO: 2717 - RNA, 22 nt, Artificial Sequence
  LRRK2 RNA guide
uaggggauguaaacaaugcagc

SEQ ID NO: 2718 - RNA, 22 nt, Artificial Sequence
  LRRK2 RNA guide
ucaugugcugcauuguuuacau

SEQ ID NO: 2719 - RNA, 22 nt, Artificial Sequence
  LRRK2 RNA guide
uccccuagcgauuccuuguaag

SEQ ID NO: 2720 - RNA, 22 nt, Artificial Sequence
  LRRK2 RNA guide
ucgcuaggggauguaaacaaug

SEQ ID NO: 2721 - RNA, 22 nt, Artificial Sequence
  LRRK2 RNA guide
ugcauuguuuacauccccuagc

SEQ ID NO: 2722 - RNA, 22 nt, Artificial Sequence
  LRRK2 RNA guide
ugcuacuuacaaggaaucgcua

SEQ ID NO: 2723 - RNA, 22 nt, Artificial Sequence
  LRRK2 RNA guide
ugcugcauuguuuacauccccu

SEQ ID NO: 2724 - RNA, 22 nt, Artificial Sequence
  LRRK2 RNA guide
ugcuucaugugcugcauuguuu

SEQ ID NO: 2725 - RNA, 22 nt, Artificial Sequence
  LRRK2 RNA guide
ugugcugcauuguuuacauccc

SEQ ID NO: 2726 - RNA, 22 nt, Artificial Sequence
  LRRK2 RNA guide
uguuuacauccccuagcgauuc

SEQ ID NO: 2727 - RNA, 22 nt, Artificial Sequence
  LRRK2 RNA guide
uuacaaggaaucgcuaggggau

SEQ ID NO: 2728 - RNA, 22 nt, Artificial Sequence
  LRRK2 RNA guide
uuacauccccuagcgauuccuu

SEQ ID NO: 2729 - RNA, 22 nt, Artificial Sequence
  LRRK2 RNA guide
uucaugugcugcauuguuuaca

SEQ ID NO: 2730 - RNA, 22 nt, Artificial Sequence
  LRRK2 RNA guide
uuguuuacauccccuagcgauu

SEQ ID NO: 2731 - RNA, 22 nt, Artificial Sequence
  LRRK2 RNA guide
uuuacauccccuagcgauuccu

SEQ ID NO: 2732 - RNA, 20 nt, Artificial Sequence
  LRRK2 RNA guide
aaauucaggcaauguggaag

SEQ ID NO: 2733 - RNA, 20 nt, Artificial Sequence
  LRRK2 RNA guide
aauucaggcaauguggaagu

SEQ ID NO: 2734 - RNA, 20 nt, Artificial Sequence
  LRRK2 RNA guide
acauugccugaauuuaaaga

SEQ ID NO: 2735 - RNA, 20 nt, Artificial Sequence
  LRRK2 RNA guide
acuuccacauugccugaauu

SEQ ID NO: 2736 - RNA, 20 nt, Artificial Sequence
  LRRK2 RNA guide
aggacuuccacauugccuga

SEQ ID NO: 2737 - RNA, 20 nt, Artificial Sequence
  LRRK2 RNA guide
aggcaauguggaaguccuca

SEQ ID NO: 2738 - RNA, 20 nt, Artificial Sequence
  LRRK2 RNA guide
aucucuuuaaauucaggcaa

SEQ ID NO: 2739 - RNA, 20 nt, Artificial Sequence
  LRRK2 RNA guide
augaggacuuccacauugcc

SEQ ID NO: 2740 - RNA, 20 nt, Artificial Sequence
  LRRK2 RNA guide
augaucucuuuaaauucagg

SEQ ID NO: 2741 - RNA, 20 nt, Artificial Sequence
  LRRK2 RNA guide
auucaggcaauguggaaguc

SEQ ID NO: 2742 - RNA, 20 nt, Artificial Sequence
  LRRK2 RNA guide
cacauugccugaauuuaaag

SEQ ID NO: 2743 - RNA, 20 nt, Artificial Sequence
  LRRK2 RNA guide
caggcaauguggaaguccuc

SEQ ID NO: 2744 - RNA, 20 nt, Artificial Sequence
  LRRK2 RNA guide
caugaggacuuccacauugc

SEQ ID NO: 2745 - RNA, 20 nt, Artificial Sequence
  LRRK2 RNA guide
cauugccugaauuuaaagag

SEQ ID NO: 2746 - RNA, 20 nt, Artificial Sequence
  LRRK2 RNA guide
ccacauugccugaauuuaaa

SEQ ID NO: 2747 - RNA, 20 nt, Artificial Sequence
  LRRK2 RNA guide
cucuuuaaauucaggcaaug

SEQ ID NO: 2748 - RNA, 20 nt, Artificial Sequence
  LRRK2 RNA guide
cuuccacauugccugaauuu

SEQ ID NO: 2749 - RNA, 20 nt, Artificial Sequence
  LRRK2 RNA guide
cuuuaaauucaggcaaugug

SEQ ID NO: 2750 - RNA, 20 nt, Artificial Sequence
  LRRK2 RNA guide
gacuuccacauugccugaau

SEQ ID NO: 2751 - RNA, 20 nt, Artificial Sequence
  LRRK2 RNA guide
gaggacuuccacauugccug

SEQ ID NO: 2752 - RNA, 20 nt, Artificial Sequence
  LRRK2 RNA guide
gaucucuuuaaauucaggca

SEQ ID NO: 2753 - RNA, 20 nt, Artificial Sequence
  LRRK2 RNA guide
gcaauguggaaguccucaug

SEQ ID NO: 2754 - RNA, 20 nt, Artificial Sequence
  LRRK2 RNA guide
ggacuuccacauugccugaa

SEQ ID NO: 2755 - RNA, 20 nt, Artificial Sequence
  LRRK2 RNA guide
ggcaauguggaaguccucau

SEQ ID NO: 2756 - RNA, 20 nt, Artificial Sequence
  LRRK2 RNA guide
uaaauucaggcaauguggaa

SEQ ID NO: 2757 - RNA, 20 nt, Artificial Sequence
  LRRK2 RNA guide
ucaggcaauguggaaguccu

SEQ ID NO: 2758 - RNA, 20 nt, Artificial Sequence
  LRRK2 RNA guide
ucaugaggacuuccacauug

SEQ ID NO: 2759 - RNA, 20 nt, Artificial Sequence
  LRRK2 RNA guide
uccacauugccugaauuuaa

SEQ ID NO: 2760 - RNA, 20 nt, Artificial Sequence
  LRRK2 RNA guide
ucucuuuaaauucaggcaau

SEQ ID NO: 2761 - RNA, 20 nt, Artificial Sequence
  LRRK2 RNA guide
ucuuuaaauucaggcaaugu

SEQ ID NO: 2762 - RNA, 20 nt, Artificial Sequence
  LRRK2 RNA guide
ugaggacuuccacauugccu

SEQ ID NO: 2763 - RNA, 20 nt, Artificial Sequence
  LRRK2 RNA guide
ugaucucuuuaaauucaggc

SEQ ID NO: 2764 - RNA, 20 nt, Artificial Sequence
  LRRK2 RNA guide
uuaaauucaggcaaugugga

SEQ ID NO: 2765 - RNA, 20 nt, Artificial Sequence
  LRRK2 RNA guide
uucaggcaauguggaagucc

SEQ ID NO: 2766 - RNA, 20 nt, Artificial Sequence
  LRRK2 RNA guide
uuccacauugccugaauuua

SEQ ID NO: 2767 - RNA, 20 nt, Artificial Sequence
  LRRK2 RNA guide
uuuaaauucaggcaaugugg

SEQ ID NO: 2768 - RNA, 21 nt, Artificial Sequence
  LRRK2 RNA guide
aaauucaggcaauguggaagu

SEQ ID NO: 2769 - RNA, 21 nt, Artificial Sequence
  LRRK2 RNA guide
aauucaggcaauguggaaguc

SEQ ID NO: 2770 - RNA, 21 nt, Artificial Sequence
  LRRK2 RNA guide
acauugccugaauuuaaagag

SEQ ID NO: 2771 - RNA, 21 nt, Artificial Sequence
  LRRK2 RNA guide
acucaugaggacuuccacauu

SEQ ID NO: 2772 - RNA, 21 nt, Artificial Sequence
  LRRK2 RNA guide
acuuccacauugccugaauuu

SEQ ID NO: 2773 - RNA, 21 nt, Artificial Sequence
  LRRK2 RNA guide
aggacuuccacauugccugaa

SEQ ID NO: 2774 - RNA, 21 nt, Artificial Sequence
  LRRK2 RNA guide
aggcaauguggaaguccucau

SEQ ID NO: 2775 - RNA, 21 nt, Artificial Sequence
  LRRK2 RNA guide
augaggacuuccacauugccu

SEQ ID NO: 2776 - RNA, 21 nt, Artificial Sequence
  LRRK2 RNA guide
augaucucuuuaaauucaggc

SEQ ID NO: 2777 - RNA, 21 nt, Artificial Sequence
  LRRK2 RNA guide
auucaggcaauguggaagucc

SEQ ID NO: 2778 - RNA, 21 nt, Artificial Sequence
  LRRK2 RNA guide
cacauugccugaauuuaaaga

SEQ ID NO: 2779 - RNA, 21 nt, Artificial Sequence
  LRRK2 RNA guide
cacucaugaggacuuccacau

SEQ ID NO: 2780 - RNA, 21 nt, Artificial Sequence
  LRRK2 RNA guide
caggcaauguggaaguccuca

SEQ ID NO: 2781 - RNA, 21 nt, Artificial Sequence
  LRRK2 RNA guide
caugaggacuuccacauugcc

SEQ ID NO: 2782 - RNA, 21 nt, Artificial Sequence
  LRRK2 RNA guide
cauugccugaauuuaaagaga

SEQ ID NO: 2783 - RNA, 21 nt, Artificial Sequence
  LRRK2 RNA guide
ccacauugccugaauuuaaag

SEQ ID NO: 2784 - RNA, 21 nt, Artificial Sequence
  LRRK2 RNA guide
ccacucaugaggacuuccaca

SEQ ID NO: 2785 - RNA, 21 nt, Artificial Sequence
  LRRK2 RNA guide
cucaugaggacuuccacauug

SEQ ID NO: 2786 - RNA, 21 nt, Artificial Sequence
  LRRK2 RNA guide
cucuuuaaauucaggcaaugu

SEQ ID NO: 2787 - RNA, 21 nt, Artificial Sequence
  LRRK2 RNA guide
cuuccacauugccugaauuua

SEQ ID NO: 2788 - RNA, 21 nt, Artificial Sequence
  LRRK2 RNA guide
cuuuaaauucaggcaaugugg

SEQ ID NO: 2789 - RNA, 21 nt, Artificial Sequence
  LRRK2 RNA guide
gacuuccacauugccugaauu

SEQ ID NO: 2790 - RNA, 21 nt, Artificial Sequence
  LRRK2 RNA guide
gaggacuuccacauugccuga

SEQ ID NO: 2791 - RNA, 21 nt, Artificial Sequence
  LRRK2 RNA guide
gaucucuuuaaauucaggcaa

SEQ ID NO: 2792 - RNA, 21 nt, Artificial Sequence
  LRRK2 RNA guide
gcaauguggaaguccucauga

SEQ ID NO: 2793 - RNA, 21 nt, Artificial Sequence
  LRRK2 RNA guide
gccacucaugaggacuuccac

SEQ ID NO: 2794 - RNA, 21 nt, Artificial Sequence
  LRRK2 RNA guide
ggacuuccacauugccugaau

SEQ ID NO: 2795 - RNA, 21 nt, Artificial Sequence
  LRRK2 RNA guide
ggcaauguggaaguccucaug

SEQ ID NO: 2796 - RNA, 21 nt, Artificial Sequence
  LRRK2 RNA guide
uaaauucaggcaauguggaag

SEQ ID NO: 2797 - RNA, 21 nt, Artificial Sequence
  LRRK2 RNA guide
ucaggcaauguggaaguccuc

SEQ ID NO: 2798 - RNA, 21 nt, Artificial Sequence
  LRRK2 RNA guide
ucaugaggacuuccacauugc

SEQ ID NO: 2799 - RNA, 21 nt, Artificial Sequence
  LRRK2 RNA guide
uccacauugccugaauuuaaa

SEQ ID NO: 2800 - RNA, 21 nt, Artificial Sequence
  LRRK2 RNA guide
ucucuuuaaauucaggcaaug

SEQ ID NO: 2801 - RNA, 21 nt, Artificial Sequence
  LRRK2 RNA guide
ucuuuaaauucaggcaaugug

SEQ ID NO: 2802 - RNA, 21 nt, Artificial Sequence
  LRRK2 RNA guide
ugaggacuuccacauugccug

SEQ ID NO: 2803 - RNA, 21 nt, Artificial Sequence
  LRRK2 RNA guide
ugaucucuuuaaauucaggca

SEQ ID NO: 2804 - RNA, 21 nt, Artificial Sequence
  LRRK2 RNA guide
ugccacucaugaggacuucca

SEQ ID NO: 2805 - RNA, 21 nt, Artificial Sequence
  LRRK2 RNA guide
uuaaauucaggcaauguggaa

SEQ ID NO: 2806 - RNA, 21 nt, Artificial Sequence
  LRRK2 RNA guide
uucaggcaauguggaaguccu

SEQ ID NO: 2807 - RNA, 21 nt, Artificial Sequence
  LRRK2 RNA guide
uuccacauugccugaauuuaa

SEQ ID NO: 2808 - RNA, 21 nt, Artificial Sequence
  LRRK2 RNA guide
uuuaaauucaggcaaugugga

SEQ ID NO: 2809 - RNA, 22 nt, Artificial Sequence
  LRRK2 RNA guide
aaauucaggcaauguggaaguc

SEQ ID NO: 2810 - RNA, 22 nt, Artificial Sequence
  LRRK2 RNA guide
aauucaggcaauguggaagucc

SEQ ID NO: 2811 - RNA, 22 nt, Artificial Sequence
  LRRK2 RNA guide
acauugccugaauuuaaagaga

SEQ ID NO: 2812 - RNA, 22 nt, Artificial Sequence
  LRRK2 RNA guide
acucaugaggacuuccacauug

SEQ ID NO: 2813 - RNA, 22 nt, Artificial Sequence
  LRRK2 RNA guide
acuuccacauugccugaauuua

SEQ ID NO: 2814 - RNA, 22 nt, Artificial Sequence
  LRRK2 RNA guide
aggacuuccacauugccugaau

SEQ ID NO: 2815 - RNA, 22 nt, Artificial Sequence
  LRRK2 RNA guide
aggcaauguggaaguccucaug

SEQ ID NO: 2816 - RNA, 22 nt, Artificial Sequence
  LRRK2 RNA guide
aucucuuuaaauucaggcaaug

SEQ ID NO: 2817 - RNA, 22 nt, Artificial Sequence
  LRRK2 RNA guide
augaggacuuccacauugccug

SEQ ID NO: 2818 - RNA, 22 nt, Artificial Sequence
  LRRK2 RNA guide
augaucucuuuaaauucaggca

SEQ ID NO: 2819 - RNA, 22 nt, Artificial Sequence
  LRRK2 RNA guide
auucaggcaauguggaaguccu

SEQ ID NO: 2820 - RNA, 22 nt, Artificial Sequence
  LRRK2 RNA guide
cacauugccugaauuuaaagag

SEQ ID NO: 2821 - RNA, 22 nt, Artificial Sequence
  LRRK2 RNA guide
cacucaugaggacuuccacauu

SEQ ID NO: 2822 - RNA, 22 nt, Artificial Sequence
  LRRK2 RNA guide
caggcaauguggaaguccucau

SEQ ID NO: 2823 - RNA, 22 nt, Artificial Sequence
  LRRK2 RNA guide
caugaggacuuccacauugccu

SEQ ID NO: 2824 - RNA, 22 nt, Artificial Sequence
  LRRK2 RNA guide
cauugccugaauuuaaagagau

SEQ ID NO: 2825 - RNA, 22 nt, Artificial Sequence
  LRRK2 RNA guide
ccacauugccugaauuuaaaga

SEQ ID NO: 2826 - RNA, 22 nt, Artificial Sequence
  LRRK2 RNA guide
ccacucaugaggacuuccacau

SEQ ID NO: 2827 - RNA, 22 nt, Artificial Sequence
  LRRK2 RNA guide
cucaugaggacuuccacauugc

SEQ ID NO: 2828 - RNA, 22 nt, Artificial Sequence
  LRRK2 RNA guide
cucuuuaaauucaggcaaugug

SEQ ID NO: 2829 - RNA, 22 nt, Artificial Sequence
  LRRK2 RNA guide
cuuccacauugccugaauuuaa

SEQ ID NO: 2830 - RNA, 22 nt, Artificial Sequence
  LRRK2 RNA guide
cuuuaaauucaggcaaugugga

SEQ ID NO: 2831 - RNA, 22 nt, Artificial Sequence
  LRRK2 RNA guide
gacuuccacauugccugaauuu

SEQ ID NO: 2832 - RNA, 22 nt, Artificial Sequence
  LRRK2 RNA guide
gaggacuuccacauugccugaa

SEQ ID NO: 2833 - RNA, 22 nt, Artificial Sequence
  LRRK2 RNA guide
gaucucuuuaaauucaggcaau

SEQ ID NO: 2834 - RNA, 22 nt, Artificial Sequence
  LRRK2 RNA guide
gcaauguggaaguccucaugag

SEQ ID NO: 2835 - RNA, 22 nt, Artificial Sequence
  LRRK2 RNA guide
gccacucaugaggacuuccaca

SEQ ID NO: 2836 - RNA, 22 nt, Artificial Sequence
  LRRK2 RNA guide
ggacuuccacauugccugaauu

SEQ ID NO: 2837 - RNA, 22 nt, Artificial Sequence
  LRRK2 RNA guide
ggcaauguggaaguccucauga

SEQ ID NO: 2838 - RNA, 22 nt, Artificial Sequence
  LRRK2 RNA guide
uaaauucaggcaauguggaagu

SEQ ID NO: 2839 - RNA, 22 nt, Artificial Sequence
  LRRK2 RNA guide
uaugaucucuuuaaauucaggc

SEQ ID NO: 2840 - RNA, 22 nt, Artificial Sequence
  LRRK2 RNA guide
ucaggcaauguggaaguccuca

SEQ ID NO: 2841 - RNA, 22 nt, Artificial Sequence
  LRRK2 RNA guide
ucaugaggacuuccacauugcc

SEQ ID NO: 2842 - RNA, 22 nt, Artificial Sequence
  LRRK2 RNA guide
uccacauugccugaauuuaaag

SEQ ID NO: 2843 - RNA, 22 nt, Artificial Sequence
  LRRK2 RNA guide
ucucuuuaaauucaggcaaugu

SEQ ID NO: 2844 - RNA, 22 nt, Artificial Sequence
  LRRK2 RNA guide
ucuuuaaauucaggcaaugugg

SEQ ID NO: 2845 - RNA, 22 nt, Artificial Sequence
  LRRK2 RNA guide
ugaggacuuccacauugccuga

SEQ ID NO: 2846 - RNA, 22 nt, Artificial Sequence
  LRRK2 RNA guide
ugaucucuuuaaauucaggcaa

SEQ ID NO: 2847 - RNA, 22 nt, Artificial Sequence
  LRRK2 RNA guide
ugccacucaugaggacuuccac

SEQ ID NO: 2848 - RNA, 22 nt, Artificial Sequence
  LRRK2 RNA guide
uuaaauucaggcaauguggaag

SEQ ID NO: 2849 - RNA, 22 nt, Artificial Sequence
  LRRK2 RNA guide
uucaggcaauguggaaguccuc

SEQ ID NO: 2850 - RNA, 22 nt, Artificial Sequence
  LRRK2 RNA guide
uuccacauugccugaauuuaaa

SEQ ID NO: 2851 - RNA, 22 nt, Artificial Sequence
  LRRK2 RNA guide
uugccacucaugaggacuucca

SEQ ID NO: 2852 - RNA, 22 nt, Artificial Sequence
  LRRK2 RNA guide
uuuaaauucaggcaauguggaa

SEQ ID NO: 2853 - RNA, 20 nt, Artificial Sequence
  LRRK2 RNA guide
aaauucaggcaauauugugg

SEQ ID NO: 2854 - RNA, 20 nt, Artificial Sequence
  LRRK2 RNA guide
aauauuguggaaguccucau

SEQ ID NO: 2855 - RNA, 20 nt, Artificial Sequence
  LRRK2 RNA guide
aauucaggcaauauugugga

SEQ ID NO: 2856 - RNA, 20 nt, Artificial Sequence
  LRRK2 RNA guide
acucaugaggacuuccacaa

SEQ ID NO: 2857 - RNA, 20 nt, Artificial Sequence
  LRRK2 RNA guide
acuuccacaauauugccuga

SEQ ID NO: 2858 - RNA, 20 nt, Artificial Sequence
  LRRK2 RNA guide
aggacuuccacaauauugcc

SEQ ID NO: 2859 - RNA, 20 nt, Artificial Sequence
  LRRK2 RNA guide
aggcaauauuguggaagucc

SEQ ID NO: 2860 - RNA, 20 nt, Artificial Sequence
  LRRK2 RNA guide
auauuguggaaguccucaug

SEQ ID NO: 2861 - RNA, 20 nt, Artificial Sequence
  LRRK2 RNA guide
augaggacuuccacaauauu

SEQ ID NO: 2862 - RNA, 20 nt, Artificial Sequence
  LRRK2 RNA guide
auucaggcaauauuguggaa

SEQ ID NO: 2863 - RNA, 20 nt, Artificial Sequence
  LRRK2 RNA guide
auuguggaaguccucaugag

SEQ ID NO: 2864 - RNA, 20 nt, Artificial Sequence
  LRRK2 RNA guide
caauauuguggaaguccuca

SEQ ID NO: 2865 - RNA, 20 nt, Artificial Sequence
  LRRK2 RNA guide
cacaauauugccugaauuua

SEQ ID NO: 2866 - RNA, 20 nt, Artificial Sequence
  LRRK2 RNA guide
caggcaauauuguggaaguc

SEQ ID NO: 2867 - RNA, 20 nt, Artificial Sequence
  LRRK2 RNA guide
caugaggacuuccacaauau

SEQ ID NO: 2868 - RNA, 20 nt, Artificial Sequence
  LRRK2 RNA guide
ccacaauauugccugaauuu

SEQ ID NO: 2869 - RNA, 20 nt, Artificial Sequence
  LRRK2 RNA guide
cucaugaggacuuccacaau

SEQ ID NO: 2870 - RNA, 20 nt, Artificial Sequence
  LRRK2 RNA guide
cucuuuaaauucaggcaaua

SEQ ID NO: 2871 - RNA, 20 nt, Artificial Sequence
  LRRK2 RNA guide
cuuccacaauauugccugaa

SEQ ID NO: 2872 - RNA, 20 nt, Artificial Sequence
  LRRK2 RNA guide
gacuuccacaauauugccug

SEQ ID NO: 2873 - RNA, 20 nt, Artificial Sequence
  LRRK2 RNA guide
gaggacuuccacaauauugc

SEQ ID NO: 2874 - RNA, 20 nt, Artificial Sequence
  LRRK2 RNA guide
gcaauauuguggaaguccuc

SEQ ID NO: 2875 - RNA, 20 nt, Artificial Sequence
  LRRK2 RNA guide
ggacuuccacaauauugccu

SEQ ID NO: 2876 - RNA, 20 nt, Artificial Sequence
  LRRK2 RNA guide
ggcaauauuguggaaguccu

SEQ ID NO: 2877 - RNA, 20 nt, Artificial Sequence
  LRRK2 RNA guide
uaaauucaggcaauauugug

SEQ ID NO: 2878 - RNA, 20 nt, Artificial Sequence
  LRRK2 RNA guide
uauuguggaaguccucauga

SEQ ID NO: 2879 - RNA, 20 nt, Artificial Sequence
  LRRK2 RNA guide
ucaggcaauauuguggaagu

SEQ ID NO: 2880 - RNA, 20 nt, Artificial Sequence
  LRRK2 RNA guide
ucaugaggacuuccacaaua

SEQ ID NO: 2881 - RNA, 20 nt, Artificial Sequence
  LRRK2 RNA guide
uccacaauauugccugaauu

SEQ ID NO: 2882 - RNA, 20 nt, Artificial Sequence
  LRRK2 RNA guide
ugaggacuuccacaauauug

SEQ ID NO: 2883 - RNA, 20 nt, Artificial Sequence
  LRRK2 RNA guide
uucaggcaauauuguggaag

SEQ ID NO: 2884 - RNA, 20 nt, Artificial Sequence
  LRRK2 RNA guide
uuccacaauauugccugaau

SEQ ID NO: 2885 - RNA, 20 nt, Artificial Sequence
  LRRK2 RNA guide
uugccacucaugaggacuuc

SEQ ID NO: 2886 - RNA, 21 nt, Artificial Sequence
  LRRK2 RNA guide
aaauucaggcaauauugugga

SEQ ID NO: 2887 - RNA, 21 nt, Artificial Sequence
  LRRK2 RNA guide
aauauuguggaaguccucaug

SEQ ID NO: 2888 - RNA, 21 nt, Artificial Sequence
  LRRK2 RNA guide
aauucaggcaauauuguggaa

SEQ ID NO: 2889 - RNA, 21 nt, Artificial Sequence
  LRRK2 RNA guide
acucaugaggacuuccacaau

SEQ ID NO: 2890 - RNA, 21 nt, Artificial Sequence
  LRRK2 RNA guide
acuuccacaauauugccugaa

SEQ ID NO: 2891 - RNA, 21 nt, Artificial Sequence
  LRRK2 RNA guide
aggacuuccacaauauugccu

SEQ ID NO: 2892 - RNA, 21 nt, Artificial Sequence
  LRRK2 RNA guide
aggcaauauuguggaaguccu

SEQ ID NO: 2893 - RNA, 21 nt, Artificial Sequence
  LRRK2 RNA guide
auauuguggaaguccucauga

SEQ ID NO: 2894 - RNA, 21 nt, Artificial Sequence
  LRRK2 RNA guide
augaggacuuccacaauauug

SEQ ID NO: 2895 - RNA, 21 nt, Artificial Sequence
  LRRK2 RNA guide
auucaggcaauauuguggaag

SEQ ID NO: 2896 - RNA, 21 nt, Artificial Sequence
  LRRK2 RNA guide
auugccacucaugaggacuuc

SEQ ID NO: 2897 - RNA, 21 nt, Artificial Sequence
  LRRK2 RNA guide
auuguggaaguccucaugagu

SEQ ID NO: 2898 - RNA, 21 nt, Artificial Sequence
  LRRK2 RNA guide
caauauuguggaaguccucau

SEQ ID NO: 2899 - RNA, 21 nt, Artificial Sequence
  LRRK2 RNA guide
cacucaugaggacuuccacaa

SEQ ID NO: 2900 - RNA, 21 nt, Artificial Sequence
  LRRK2 RNA guide
caggcaauauuguggaagucc

SEQ ID NO: 2901 - RNA, 21 nt, Artificial Sequence
  LRRK2 RNA guide
caugaggacuuccacaauauu

SEQ ID NO: 2902 - RNA, 21 nt, Artificial Sequence
  LRRK2 RNA guide
ccacaauauugccugaauuua

SEQ ID NO: 2903 - RNA, 21 nt, Artificial Sequence
  LRRK2 RNA guide
cucaugaggacuuccacaaua

SEQ ID NO: 2904 - RNA, 21 nt, Artificial Sequence
  LRRK2 RNA guide
cuuccacaauauugccugaau

SEQ ID NO: 2905 - RNA, 21 nt, Artificial Sequence
  LRRK2 RNA guide
gacuuccacaauauugccuga

SEQ ID NO: 2906 - RNA, 21 nt, Artificial Sequence
  LRRK2 RNA guide
gaggacuuccacaauauugcc

SEQ ID NO: 2907 - RNA, 21 nt, Artificial Sequence
  LRRK2 RNA guide
gcaauauuguggaaguccuca

SEQ ID NO: 2908 - RNA, 21 nt, Artificial Sequence
  LRRK2 RNA guide
ggacuuccacaauauugccug

SEQ ID NO: 2909 - RNA, 21 nt, Artificial Sequence
  LRRK2 RNA guide
ggcaauauuguggaaguccuc

SEQ ID NO: 2910 - RNA, 21 nt, Artificial Sequence
  LRRK2 RNA guide
uaaauucaggcaauauugugg

SEQ ID NO: 2911 - RNA, 21 nt, Artificial Sequence
  LRRK2 RNA guide
uauuguggaaguccucaugag

SEQ ID NO: 2912 - RNA, 21 nt, Artificial Sequence
  LRRK2 RNA guide
ucaggcaauauuguggaaguc

SEQ ID NO: 2913 - RNA, 21 nt, Artificial Sequence
  LRRK2 RNA guide
ucaugaggacuuccacaauau

SEQ ID NO: 2914 - RNA, 21 nt, Artificial Sequence
  LRRK2 RNA guide
uccacaauauugccugaauuu

SEQ ID NO: 2915 - RNA, 21 nt, Artificial Sequence
  LRRK2 RNA guide
ugaggacuuccacaauauugc

SEQ ID NO: 2916 - RNA, 21 nt, Artificial Sequence
  LRRK2 RNA guide
uucaggcaauauuguggaagu

SEQ ID NO: 2917 - RNA, 21 nt, Artificial Sequence
  LRRK2 RNA guide
uuccacaauauugccugaauu

SEQ ID NO: 2918 - RNA, 21 nt, Artificial Sequence
  LRRK2 RNA guide
uugccacucaugaggacuucc

SEQ ID NO: 2919 - RNA, 22 nt, Artificial Sequence
  LRRK2 RNA guide
aaauucaggcaauauuguggaa

SEQ ID NO: 2920 - RNA, 22 nt, Artificial Sequence
  LRRK2 RNA guide
aauauuguggaaguccucauga

SEQ ID NO: 2921 - RNA, 22 nt, Artificial Sequence
  LRRK2 RNA guide
aauucaggcaauauuguggaag

SEQ ID NO: 2922 - RNA, 22 nt, Artificial Sequence
  LRRK2 RNA guide
acucaugaggacuuccacaaua

SEQ ID NO: 2923 - RNA, 22 nt, Artificial Sequence
  LRRK2 RNA guide
acuuccacaauauugccugaau

SEQ ID NO: 2924 - RNA, 22 nt, Artificial Sequence
  LRRK2 RNA guide
aggacuuccacaauauugccug

SEQ ID NO: 2925 - RNA, 22 nt, Artificial Sequence
  LRRK2 RNA guide
aggcaauauuguggaaguccuc

SEQ ID NO: 2926 - RNA, 22 nt, Artificial Sequence
  LRRK2 RNA guide
auauuguggaaguccucaugag

SEQ ID NO: 2927 - RNA, 22 nt, Artificial Sequence
  LRRK2 RNA guide
augaggacuuccacaauauugc

SEQ ID NO: 2928 - RNA, 22 nt, Artificial Sequence
  LRRK2 RNA guide
auucaggcaauauuguggaagu

SEQ ID NO: 2929 - RNA, 22 nt, Artificial Sequence
  LRRK2 RNA guide
auugccacucaugaggacuucc

SEQ ID NO: 2930 - RNA, 22 nt, Artificial Sequence
  LRRK2 RNA guide
auuguggaaguccucaugagug

SEQ ID NO: 2931 - RNA, 22 nt, Artificial Sequence
  LRRK2 RNA guide
caauauuguggaaguccucaug

SEQ ID NO: 2932 - RNA, 22 nt, Artificial Sequence
  LRRK2 RNA guide
cacucaugaggacuuccacaau

SEQ ID NO: 2933 - RNA, 22 nt, Artificial Sequence
  LRRK2 RNA guide
caggcaauauuguggaaguccu

SEQ ID NO: 2934 - RNA, 22 nt, Artificial Sequence
  LRRK2 RNA guide
caugaggacuuccacaauauug

SEQ ID NO: 2935 - RNA, 22 nt, Artificial Sequence
  LRRK2 RNA guide
cauugccacucaugaggacuuc

SEQ ID NO: 2936 - RNA, 22 nt, Artificial Sequence
  LRRK2 RNA guide
ccacaauauugccugaauuuaa

SEQ ID NO: 2937 - RNA, 22 nt, Artificial Sequence
  LRRK2 RNA guide
ccacucaugaggacuuccacaa

SEQ ID NO: 2938 - RNA, 22 nt, Artificial Sequence
  LRRK2 RNA guide
cucaugaggacuuccacaauau

SEQ ID NO: 2939 - RNA, 22 nt, Artificial Sequence
  LRRK2 RNA guide
cuuccacaauauugccugaauu

SEQ ID NO: 2940 - RNA, 22 nt, Artificial Sequence
  LRRK2 RNA guide
gacuuccacaauauugccugaa

SEQ ID NO: 2941 - RNA, 22 nt, Artificial Sequence
  LRRK2 RNA guide
gaggacuuccacaauauugccu

SEQ ID NO: 2942 - RNA, 22 nt, Artificial Sequence
  LRRK2 RNA guide
gcaauauuguggaaguccucau

SEQ ID NO: 2943 - RNA, 22 nt, Artificial Sequence
  LRRK2 RNA guide
ggacuuccacaauauugccuga

SEQ ID NO: 2944 - RNA, 22 nt, Artificial Sequence
  LRRK2 RNA guide
ggcaauauuguggaaguccuca

SEQ ID NO: 2945 - RNA, 22 nt, Artificial Sequence
  LRRK2 RNA guide
uaaauucaggcaauauugugga

SEQ ID NO: 2946 - RNA, 22 nt, Artificial Sequence
  LRRK2 RNA guide
uauuguggaaguccucaugagu

SEQ ID NO: 2947 - RNA, 22 nt, Artificial Sequence
  LRRK2 RNA guide
ucaggcaauauuguggaagucc

SEQ ID NO: 2948 - RNA, 22 nt, Artificial Sequence
  LRRK2 RNA guide
ucaugaggacuuccacaauauu

SEQ ID NO: 2949 - RNA, 22 nt, Artificial Sequence
  LRRK2 RNA guide
uccacaauauugccugaauuua

SEQ ID NO: 2950 - RNA, 22 nt, Artificial Sequence
  LRRK2 RNA guide
ugaggacuuccacaauauugcc

SEQ ID NO: 2951 - RNA, 22 nt, Artificial Sequence
  LRRK2 RNA guide
uuaaauucaggcaauauugugg

SEQ ID NO: 2952 - RNA, 22 nt, Artificial Sequence
  LRRK2 RNA guide
uucaggcaauauuguggaaguc

SEQ ID NO: 2953 - RNA, 22 nt, Artificial Sequence
  LRRK2 RNA guide
uuccacaauauugccugaauuu

SEQ ID NO: 2954 - RNA, 20 nt, Artificial Sequence
  LRRK2 RNA guide
aauuaccuacaaguuaagug

SEQ ID NO: 2955 - RNA, 20 nt, Artificial Sequence
  LRRK2 RNA guide
accuacaaguuaagugaaac

SEQ ID NO: 2956 - RNA, 20 nt, Artificial Sequence
  LRRK2 RNA guide
agcuaauguuucacuuaacu

SEQ ID NO: 2957 - RNA, 20 nt, Artificial Sequence
  LRRK2 RNA guide
auguuucacuuaacuuguag

SEQ ID NO: 2958 - RNA, 20 nt, Artificial Sequence
  LRRK2 RNA guide
auuaccuacaaguuaaguga

SEQ ID NO: 2959 - RNA, 20 nt, Artificial Sequence
  LRRK2 RNA guide
cacuuaacuuguagguaauu

SEQ ID NO: 2960 - RNA, 20 nt, Artificial Sequence
  LRRK2 RNA guide
cagcuaauguuucacuuaac

SEQ ID NO: 2961 - RNA, 20 nt, Artificial Sequence
  LRRK2 RNA guide
ccuacaaguuaagugaaaca

SEQ ID NO: 2962 - RNA, 20 nt, Artificial Sequence
  LRRK2 RNA guide
cuaauguuucacuuaacuug

SEQ ID NO: 2963 - RNA, 20 nt, Artificial Sequence
  LRRK2 RNA guide
cuacaaguuaagugaaacau

SEQ ID NO: 2964 - RNA, 20 nt, Artificial Sequence
  LRRK2 RNA guide
gcuaauguuucacuuaacuu

SEQ ID NO: 2965 - RNA, 20 nt, Artificial Sequence
  LRRK2 RNA guide
guuucacuuaacuuguaggu

SEQ ID NO: 2966 - RNA, 20 nt, Artificial Sequence
  LRRK2 RNA guide
uaccuacaaguuaagugaaa

SEQ ID NO: 2967 - RNA, 20 nt, Artificial Sequence
  LRRK2 RNA guide
ucacuuaacuuguagguaau

SEQ ID NO: 2968 - RNA, 20 nt, Artificial Sequence
  LRRK2 RNA guide
ucagcuaauguuucacuuaa

SEQ ID NO: 2969 - RNA, 20 nt, Artificial Sequence
  LRRK2 RNA guide
uguuucacuuaacuuguagg

SEQ ID NO: 2970 - RNA, 20 nt, Artificial Sequence
  LRRK2 RNA guide
uuaccuacaaguuaagugaa

SEQ ID NO: 2971 - RNA, 20 nt, Artificial Sequence
  LRRK2 RNA guide
uucacuuaacuuguagguaa

SEQ ID NO: 2972 - RNA, 20 nt, Artificial Sequence
  LRRK2 RNA guide
uucagcuaauguuucacuua

SEQ ID NO: 2973 - RNA, 20 nt, Artificial Sequence
  LRRK2 RNA guide
uuucacuuaacuuguaggua

SEQ ID NO: 2974 - RNA, 21 nt, Artificial Sequence
  LRRK2 RNA guide
accuacaaguuaagugaaaca

SEQ ID NO: 2975 - RNA, 21 nt, Artificial Sequence
  LRRK2 RNA guide
auguuucacuuaacuuguagg

SEQ ID NO: 2976 - RNA, 21 nt, Artificial Sequence
  LRRK2 RNA guide
cagcuaauguuucacuuaacu

SEQ ID NO: 2977 - RNA, 21 nt, Artificial Sequence
  LRRK2 RNA guide
ccuacaaguuaagugaaacau

SEQ ID NO: 2978 - RNA, 21 nt, Artificial Sequence
  LRRK2 RNA guide
gcuaauguuucacuuaacuug

SEQ ID NO: 2979 - RNA, 21 nt, Artificial Sequence
  LRRK2 RNA guide
guuucacuuaacuuguaggua

SEQ ID NO: 2980 - RNA, 21 nt, Artificial Sequence
  LRRK2 RNA guide
uaccuacaaguuaagugaaac

SEQ ID NO: 2981 - RNA, 21 nt, Artificial Sequence
  LRRK2 RNA guide
ucagcuaauguuucacuuaac

SEQ ID NO: 2982 - RNA, 21 nt, Artificial Sequence
  LRRK2 RNA guide
uguuucacuuaacuuguaggu

SEQ ID NO: 2983 - RNA, 22 nt, Artificial Sequence
  LRRK2 RNA guide
aauguuucacuuaacuuguagg

SEQ ID NO: 2984 - RNA, 22 nt, Artificial Sequence
  LRRK2 RNA guide
acaaguuaagugaaacauuagc

SEQ ID NO: 2985 - RNA, 22 nt, Artificial Sequence
  LRRK2 RNA guide
accuacaaguuaagugaaacau

SEQ ID NO: 2986 - RNA, 22 nt, Artificial Sequence
  LRRK2 RNA guide
agcuaauguuucacuuaacuug

SEQ ID NO: 2987 - RNA, 22 nt, Artificial Sequence
  LRRK2 RNA guide
auguuucacuuaacuuguaggu

SEQ ID NO: 2988 - RNA, 22 nt, Artificial Sequence
  LRRK2 RNA guide
cagcuaauguuucacuuaacuu

SEQ ID NO: 2989 - RNA, 22 nt, Artificial Sequence
  LRRK2 RNA guide
ccaggauauugaaaaaauuacc

SEQ ID NO: 2990 - RNA, 22 nt, Artificial Sequence
  LRRK2 RNA guide
ccuacaaguuaagugaaacauu

SEQ ID NO: 2991 - RNA, 22 nt, Artificial Sequence
  LRRK2 RNA guide
gcuaauguuucacuuaacuugu

SEQ ID NO: 2992 - RNA, 22 nt, Artificial Sequence
  LRRK2 RNA guide
guuucacuuaacuuguagguaa

SEQ ID NO: 2993 - RNA, 22 nt, Artificial Sequence
  LRRK2 RNA guide
uaccuacaaguuaagugaaaca

SEQ ID NO: 2994 - RNA, 22 nt, Artificial Sequence
  LRRK2 RNA guide
ucagcuaauguuucacuuaacu

SEQ ID NO: 2995 - RNA, 22 nt, Artificial Sequence
  LRRK2 RNA guide
uguuucacuuaacuuguaggua

SEQ ID NO: 2996 - RNA, 22 nt, Artificial Sequence
  LRRK2 RNA guide
uuaccuacaaguuaagugaaac

SEQ ID NO: 2997 - RNA, 22 nt, Artificial Sequence
  LRRK2 RNA guide
uucagcuaauguuucacuuaac

SEQ ID NO: 2998 - RNA, 20 nt, Artificial Sequence
  LRRK2 RNA guide
aauaucgugguauuaaacga

SEQ ID NO: 2999 - RNA, 20 nt, Artificial Sequence
  LRRK2 RNA guide
acucauggacuucguuuaau

SEQ ID NO: 3000 - RNA, 20 nt, Artificial Sequence
  LRRK2 RNA guide
acuucguuuaauaccacgau

SEQ ID NO: 3001 - RNA, 20 nt, Artificial Sequence
  LRRK2 RNA guide
auaucgugguauuaaacgaa

SEQ ID NO: 3002 - RNA, 20 nt, Artificial Sequence
  LRRK2 RNA guide
aucgugguauuaaacgaagu

SEQ ID NO: 3003 - RNA, 20 nt, Artificial Sequence
  LRRK2 RNA guide
auggacuucguuuaauacca

SEQ ID NO: 3004 - RNA, 20 nt, Artificial Sequence
  LRRK2 RNA guide
caauaucgugguauuaaacg

SEQ ID NO: 3005 - RNA, 20 nt, Artificial Sequence
  LRRK2 RNA guide
cauggacuucguuuaauacc

SEQ ID NO: 3006 - RNA, 20 nt, Artificial Sequence
  LRRK2 RNA guide
cgugguauuaaacgaagucc

SEQ ID NO: 3007 - RNA, 20 nt, Artificial Sequence
  LRRK2 RNA guide
cguuuaauaccacgauauug

SEQ ID NO: 3008 - RNA, 20 nt, Artificial Sequence
  LRRK2 RNA guide
cucauggacuucguuuaaua

SEQ ID NO: 3009 - RNA, 20 nt, Artificial Sequence
  LRRK2 RNA guide
cuucguuuaauaccacgaua

SEQ ID NO: 3010 - RNA, 20 nt, Artificial Sequence
  LRRK2 RNA guide
gacuucguuuaauaccacga

SEQ ID NO: 3011 - RNA, 20 nt, Artificial Sequence
  LRRK2 RNA guide
ggacuucguuuaauaccacg

SEQ ID NO: 3012 - RNA, 20 nt, Artificial Sequence
  LRRK2 RNA guide
guuuaauaccacgauauuga

SEQ ID NO: 3013 - RNA, 20 nt, Artificial Sequence
  LRRK2 RNA guide
uaucgugguauuaaacgaag

SEQ ID NO: 3014 - RNA, 20 nt, Artificial Sequence
  LRRK2 RNA guide
ucaauaucgugguauuaaac

SEQ ID NO: 3015 - RNA, 20 nt, Artificial Sequence
  LRRK2 RNA guide
ucauggacuucguuuaauac

SEQ ID NO: 3016 - RNA, 20 nt, Artificial Sequence
  LRRK2 RNA guide
ucgugguauuaaacgaaguc

SEQ ID NO: 3017 - RNA, 20 nt, Artificial Sequence
  LRRK2 RNA guide
ucguuuaauaccacgauauu

SEQ ID NO: 3018 - RNA, 20 nt, Artificial Sequence
  LRRK2 RNA guide
uggacuucguuuaauaccac

SEQ ID NO: 3019 - RNA, 20 nt, Artificial Sequence
  LRRK2 RNA guide
uucguuuaauaccacgauau

SEQ ID NO: 3020 - RNA, 21 nt, Artificial Sequence
  LRRK2 RNA guide
aacucauggacuucguuuaau

SEQ ID NO: 3021 - RNA, 21 nt, Artificial Sequence
  LRRK2 RNA guide
acucauggacuucguuuaaua

SEQ ID NO: 3022 - RNA, 21 nt, Artificial Sequence
  LRRK2 RNA guide
acuucguuuaauaccacgaua

SEQ ID NO: 3023 - RNA, 21 nt, Artificial Sequence
  LRRK2 RNA guide
auaucgugguauuaaacgaag

SEQ ID NO: 3024 - RNA, 21 nt, Artificial Sequence
  LRRK2 RNA guide
aucgugguauuaaacgaaguc

SEQ ID NO: 3025 - RNA, 21 nt, Artificial Sequence
  LRRK2 RNA guide
auggacuucguuuaauaccac

SEQ ID NO: 3026 - RNA, 21 nt, Artificial Sequence
  LRRK2 RNA guide
caauaucgugguauuaaacga

SEQ ID NO: 3027 - RNA, 21 nt, Artificial Sequence
  LRRK2 RNA guide
cauggacuucguuuaauacca

SEQ ID NO: 3028 - RNA, 21 nt, Artificial Sequence
  LRRK2 RNA guide
cgugguauuaaacgaagucca

SEQ ID NO: 3029 - RNA, 21 nt, Artificial Sequence
  LRRK2 RNA guide
cguuuaauaccacgauauuga

SEQ ID NO: 3030 - RNA, 21 nt, Artificial Sequence
  LRRK2 RNA guide
cucauggacuucguuuaauac

SEQ ID NO: 3031 - RNA, 21 nt, Artificial Sequence
  LRRK2 RNA guide
cuucguuuaauaccacgauau

SEQ ID NO: 3032 - RNA, 21 nt, Artificial Sequence
  LRRK2 RNA guide
gacuucguuuaauaccacgau

SEQ ID NO: 3033 - RNA, 21 nt, Artificial Sequence
  LRRK2 RNA guide
ggacuucguuuaauaccacga

SEQ ID NO: 3034 - RNA, 21 nt, Artificial Sequence
  LRRK2 RNA guide
uaucgugguauuaaacgaagu

SEQ ID NO: 3035 - RNA, 21 nt, Artificial Sequence
  LRRK2 RNA guide
ucaauaucgugguauuaaacg

SEQ ID NO: 3036 - RNA, 21 nt, Artificial Sequence
  LRRK2 RNA guide
ucauggacuucguuuaauacc

SEQ ID NO: 3037 - RNA, 21 nt, Artificial Sequence
  LRRK2 RNA guide
ucgugguauuaaacgaagucc

SEQ ID NO: 3038 - RNA, 21 nt, Artificial Sequence
  LRRK2 RNA guide
ucguuuaauaccacgauauug

SEQ ID NO: 3039 - RNA, 21 nt, Artificial Sequence
  LRRK2 RNA guide
uggacuucguuuaauaccacg

SEQ ID NO: 3040 - RNA, 22 nt, Artificial Sequence
  LRRK2 RNA guide
aaacucauggacuucguuuaau

SEQ ID NO: 3041 - RNA, 22 nt, Artificial Sequence
  LRRK2 RNA guide
aacucauggacuucguuuaaua

SEQ ID NO: 3042 - RNA, 22 nt, Artificial Sequence
  LRRK2 RNA guide
aauaucgugguauuaaacgaag

SEQ ID NO: 3043 - RNA, 22 nt, Artificial Sequence
  LRRK2 RNA guide
acucauggacuucguuuaauac

SEQ ID NO: 3044 - RNA, 22 nt, Artificial Sequence
  LRRK2 RNA guide
acuucguuuaauaccacgauau

SEQ ID NO: 3045 - RNA, 22 nt, Artificial Sequence
  LRRK2 RNA guide
auaucgugguauuaaacgaagu

SEQ ID NO: 3046 - RNA, 22 nt, Artificial Sequence
  LRRK2 RNA guide
aucgugguauuaaacgaagucc

SEQ ID NO: 3047 - RNA, 22 nt, Artificial Sequence
  LRRK2 RNA guide
auggacuucguuuaauaccacg

SEQ ID NO: 3048 - RNA, 22 nt, Artificial Sequence
  LRRK2 RNA guide
caauaucgugguauuaaacgaa

SEQ ID NO: 3049 - RNA, 22 nt, Artificial Sequence
  LRRK2 RNA guide
cauggacuucguuuaauaccac

SEQ ID NO: 3050 - RNA, 22 nt, Artificial Sequence
  LRRK2 RNA guide
ccacgauauugaaaaaauuacc

SEQ ID NO: 3051 - RNA, 22 nt, Artificial Sequence
  LRRK2 RNA guide
cgugguauuaaacgaaguccau

SEQ ID NO: 3052 - RNA, 22 nt, Artificial Sequence
  LRRK2 RNA guide
cguuuaauaccacgauauugaa

SEQ ID NO: 3053 - RNA, 22 nt, Artificial Sequence
  LRRK2 RNA guide
cucauggacuucguuuaauacc

SEQ ID NO: 3054 - RNA, 22 nt, Artificial Sequence
  LRRK2 RNA guide
cuucguuuaauaccacgauauu

SEQ ID NO: 3055 - RNA, 22 nt, Artificial Sequence
  LRRK2 RNA guide
gacuucguuuaauaccacgaua

SEQ ID NO: 3056 - RNA, 22 nt, Artificial Sequence
  LRRK2 RNA guide
ggacuucguuuaauaccacgau

SEQ ID NO: 3057 - RNA, 22 nt, Artificial Sequence
  LRRK2 RNA guide
gguaauuuuuucaauaucgugg

SEQ ID NO: 3058 - RNA, 22 nt, Artificial Sequence
  LRRK2 RNA guide
uaucgugguauuaaacgaaguc

SEQ ID NO: 3059 - RNA, 22 nt, Artificial Sequence
  LRRK2 RNA guide
ucaauaucgugguauuaaacga

SEQ ID NO: 3060 - RNA, 22 nt, Artificial Sequence
  LRRK2 RNA guide
ucauggacuucguuuaauacca

SEQ ID NO: 3061 - RNA, 22 nt, Artificial Sequence
  LRRK2 RNA guide
ucgugguauuaaacgaagucca

SEQ ID NO: 3062 - RNA, 22 nt, Artificial Sequence
  LRRK2 RNA guide
ucguuuaauaccacgauauuga

SEQ ID NO: 3063 - RNA, 22 nt, Artificial Sequence
  LRRK2 RNA guide
uggacuucguuuaauaccacga

SEQ ID NO: 3064 - RNA, 22 nt, Artificial Sequence
  LRRK2 RNA guide
uucaauaucgugguauuaaacg

SEQ ID NO: 3065 - RNA, 22 nt, Artificial Sequence
  LRRK2 RNA guide
uucguuuaauaccacgauauug

SEQ ID NO: 3066 - RNA, 20 nt, Artificial Sequence
  LRRK2 RNA guide
aaacucauggacuucauuua

SEQ ID NO: 3067 - RNA, 20 nt, Artificial Sequence
  LRRK2 RNA guide
aaaugaaguccaugaguuug

SEQ ID NO: 3068 - RNA, 20 nt, Artificial Sequence
  LRRK2 RNA guide
aacucauggacuucauuuaa

SEQ ID NO: 3069 - RNA, 20 nt, Artificial Sequence
  LRRK2 RNA guide
aaugaaguccaugaguuugu

SEQ ID NO: 3070 - RNA, 20 nt, Artificial Sequence
  LRRK2 RNA guide
acaaacucauggacuucauu

SEQ ID NO: 3071 - RNA, 20 nt, Artificial Sequence
  LRRK2 RNA guide
acucauggacuucauuuaau

SEQ ID NO: 3072 - RNA, 20 nt, Artificial Sequence
  LRRK2 RNA guide
acuucauuuaauaccaggau

SEQ ID NO: 3073 - RNA, 20 nt, Artificial Sequence
  LRRK2 RNA guide
auccugguauuaaaugaagu

SEQ ID NO: 3074 - RNA, 20 nt, Artificial Sequence
  LRRK2 RNA guide
augaaguccaugaguuugug

SEQ ID NO: 3075 - RNA, 20 nt, Artificial Sequence
  LRRK2 RNA guide
auggacuucauuuaauacca

SEQ ID NO: 3076 - RNA, 20 nt, Artificial Sequence
  LRRK2 RNA guide
auuaaaugaaguccaugagu

SEQ ID NO: 3077 - RNA, 20 nt, Artificial Sequence
  LRRK2 RNA guide
caaacucauggacuucauuu

SEQ ID NO: 3078 - RNA, 20 nt, Artificial Sequence
  LRRK2 RNA guide
caauauccugguauuaaaug

SEQ ID NO: 3079 - RNA, 20 nt, Artificial Sequence
  LRRK2 RNA guide
cacaaacucauggacuucau

SEQ ID NO: 3080 - RNA, 20 nt, Artificial Sequence
  LRRK2 RNA guide
cauggacuucauuuaauacc

SEQ ID NO: 3081 - RNA, 20 nt, Artificial Sequence
  LRRK2 RNA guide
cauuuaauaccaggauauug

SEQ ID NO: 3082 - RNA, 20 nt, Artificial Sequence
  LRRK2 RNA guide
ccacaaacucauggacuuca

SEQ ID NO: 3083 - RNA, 20 nt, Artificial Sequence
  LRRK2 RNA guide
ccugguauuaaaugaagucc

SEQ ID NO: 3084 - RNA, 20 nt, Artificial Sequence
  LRRK2 RNA guide
cucauggacuucauuuaaua

SEQ ID NO: 3085 - RNA, 20 nt, Artificial Sequence
  LRRK2 RNA guide
cugguauuaaaugaagucca

SEQ ID NO: 3086 - RNA, 20 nt, Artificial Sequence
  LRRK2 RNA guide
cuucauuuaauaccaggaua

SEQ ID NO: 3087 - RNA, 20 nt, Artificial Sequence
  LRRK2 RNA guide
gacuucauuuaauaccagga

SEQ ID NO: 3088 - RNA, 20 nt, Artificial Sequence
  LRRK2 RNA guide
ggacuucauuuaauaccagg

SEQ ID NO: 3089 - RNA, 20 nt, Artificial Sequence
  LRRK2 RNA guide
gguauuaaaugaaguccaug

SEQ ID NO: 3090 - RNA, 20 nt, Artificial Sequence
  LRRK2 RNA guide
guauuaaaugaaguccauga

SEQ ID NO: 3091 - RNA, 20 nt, Artificial Sequence
  LRRK2 RNA guide
uaaaugaaguccaugaguuu

SEQ ID NO: 3092 - RNA, 20 nt, Artificial Sequence
  LRRK2 RNA guide
uauccugguauuaaaugaag

SEQ ID NO: 3093 - RNA, 20 nt, Artificial Sequence
  LRRK2 RNA guide
uauuaaaugaaguccaugag

SEQ ID NO: 3094 - RNA, 20 nt, Artificial Sequence
  LRRK2 RNA guide
ucauggacuucauuuaauac

SEQ ID NO: 3095 - RNA, 20 nt, Artificial Sequence
  LRRK2 RNA guide
uccugguauuaaaugaaguc

SEQ ID NO: 3096 - RNA, 20 nt, Artificial Sequence
  LRRK2 RNA guide
uggacuucauuuaauaccag

SEQ ID NO: 3097 - RNA, 20 nt, Artificial Sequence
  LRRK2 RNA guide
ugguauuaaaugaaguccau

SEQ ID NO: 3098 - RNA, 20 nt, Artificial Sequence
  LRRK2 RNA guide
uuaaaugaaguccaugaguu

SEQ ID NO: 3099 - RNA, 21 nt, Artificial Sequence
  LRRK2 RNA guide
aaaugaaguccaugaguuugu

SEQ ID NO: 3100 - RNA, 21 nt, Artificial Sequence
  LRRK2 RNA guide
aaugaaguccaugaguuugug

SEQ ID NO: 3101 - RNA, 21 nt, Artificial Sequence
  LRRK2 RNA guide
acaaacucauggacuucauuu

SEQ ID NO: 3102 - RNA, 21 nt, Artificial Sequence
  LRRK2 RNA guide
accacaaacucauggacuuca

SEQ ID NO: 3103 - RNA, 21 nt, Artificial Sequence
  LRRK2 RNA guide
auccugguauuaaaugaaguc

SEQ ID NO: 3104 - RNA, 21 nt, Artificial Sequence
  LRRK2 RNA guide
augaaguccaugaguuugugg

SEQ ID NO: 3105 - RNA, 21 nt, Artificial Sequence
  LRRK2 RNA guide
auggacuucauuuaauaccag

SEQ ID NO: 3106 - RNA, 21 nt, Artificial Sequence
  LRRK2 RNA guide
caaacucauggacuucauuua

SEQ ID NO: 3107 - RNA, 21 nt, Artificial Sequence
  LRRK2 RNA guide
cacaaacucauggacuucauu

SEQ ID NO: 3108 - RNA, 21 nt, Artificial Sequence
  LRRK2 RNA guide
caccacaaacucauggacuuc

SEQ ID NO: 3109 - RNA, 21 nt, Artificial Sequence
  LRRK2 RNA guide
cauggacuucauuuaauacca

SEQ ID NO: 3110 - RNA, 21 nt, Artificial Sequence
  LRRK2 RNA guide
ccacaaacucauggacuucau

SEQ ID NO: 3111 - RNA, 21 nt, Artificial Sequence
  LRRK2 RNA guide
ccugguauuaaaugaagucca

SEQ ID NO: 3112 - RNA, 21 nt, Artificial Sequence
  LRRK2 RNA guide
cucauggacuucauuuaauac

SEQ ID NO: 3113 - RNA, 21 nt, Artificial Sequence
  LRRK2 RNA guide
cugguauuaaaugaaguccau

SEQ ID NO: 3114 - RNA, 21 nt, Artificial Sequence
  LRRK2 RNA guide
cuuucaccacaaacucaugga

SEQ ID NO: 3115 - RNA, 21 nt, Artificial Sequence
  LRRK2 RNA guide
gacuucauuuaauaccaggau

SEQ ID NO: 3116 - RNA, 21 nt, Artificial Sequence
  LRRK2 RNA guide
ggacuucauuuaauaccagga

SEQ ID NO: 3117 - RNA, 21 nt, Artificial Sequence
  LRRK2 RNA guide
gguauuaaaugaaguccauga

SEQ ID NO: 3118 - RNA, 21 nt, Artificial Sequence
  LRRK2 RNA guide
guauuaaaugaaguccaugag

SEQ ID NO: 3119 - RNA, 21 nt, Artificial Sequence
  LRRK2 RNA guide
uaaaugaaguccaugaguuug

SEQ ID NO: 3120 - RNA, 21 nt, Artificial Sequence
  LRRK2 RNA guide
ucaccacaaacucauggacuu

SEQ ID NO: 3121 - RNA, 21 nt, Artificial Sequence
  LRRK2 RNA guide
ucauggacuucauuuaauacc

SEQ ID NO: 3122 - RNA, 21 nt, Artificial Sequence
  LRRK2 RNA guide
uccugguauuaaaugaagucc

SEQ ID NO: 3123 - RNA, 21 nt, Artificial Sequence
  LRRK2 RNA guide
uggacuucauuuaauaccagg

SEQ ID NO: 3124 - RNA, 21 nt, Artificial Sequence
  LRRK2 RNA guide
ugguauuaaaugaaguccaug

SEQ ID NO: 3125 - RNA, 21 nt, Artificial Sequence
  LRRK2 RNA guide
uucaccacaaacucauggacu

SEQ ID NO: 3126 - RNA, 21 nt, Artificial Sequence
  LRRK2 RNA guide
uuucaccacaaacucauggac

SEQ ID NO: 3127 - RNA, 22 nt, Artificial Sequence
  LRRK2 RNA guide
aaaugaaguccaugaguuugug

SEQ ID NO: 3128 - RNA, 22 nt, Artificial Sequence
  LRRK2 RNA guide
aaugaaguccaugaguuugugg

SEQ ID NO: 3129 - RNA, 22 nt, Artificial Sequence
  LRRK2 RNA guide
acaaacucauggacuucauuua

SEQ ID NO: 3130 - RNA, 22 nt, Artificial Sequence
  LRRK2 RNA guide
accacaaacucauggacuucau

SEQ ID NO: 3131 - RNA, 22 nt, Artificial Sequence
  LRRK2 RNA guide
acucauggacuucauuuaauac

SEQ ID NO: 3132 - RNA, 22 nt, Artificial Sequence
  LRRK2 RNA guide
auccugguauuaaaugaagucc

SEQ ID NO: 3133 - RNA, 22 nt, Artificial Sequence
  LRRK2 RNA guide
augaaguccaugaguuuguggu

SEQ ID NO: 3134 - RNA, 22 nt, Artificial Sequence
  LRRK2 RNA guide
auggacuucauuuaauaccagg

SEQ ID NO: 3135 - RNA, 22 nt, Artificial Sequence
  LRRK2 RNA guide
caaacucauggacuucauuuaa

SEQ ID NO: 3136 - RNA, 22 nt, Artificial Sequence
  LRRK2 RNA guide
cacaaacucauggacuucauuu

SEQ ID NO: 3137 - RNA, 22 nt, Artificial Sequence
  LRRK2 RNA guide
caccacaaacucauggacuuca

SEQ ID NO: 3138 - RNA, 22 nt, Artificial Sequence
  LRRK2 RNA guide
cauggacuucauuuaauaccag

SEQ ID NO: 3139 - RNA, 22 nt, Artificial Sequence
  LRRK2 RNA guide
ccacaaacucauggacuucauu

SEQ ID NO: 3140 - RNA, 22 nt, Artificial Sequence
  LRRK2 RNA guide
ccugguauuaaaugaaguccau

SEQ ID NO: 3141 - RNA, 22 nt, Artificial Sequence
  LRRK2 RNA guide
cucauggacuucauuuaauacc

SEQ ID NO: 3142 - RNA, 22 nt, Artificial Sequence
  LRRK2 RNA guide
cugguauuaaaugaaguccaug

SEQ ID NO: 3143 - RNA, 22 nt, Artificial Sequence
  LRRK2 RNA guide
cuuucaccacaaacucauggac

SEQ ID NO: 3144 - RNA, 22 nt, Artificial Sequence
  LRRK2 RNA guide
gacuucauuuaauaccaggaua

SEQ ID NO: 3145 - RNA, 22 nt, Artificial Sequence
  LRRK2 RNA guide
gcuuucaccacaaacucaugga

SEQ ID NO: 3146 - RNA, 22 nt, Artificial Sequence
  LRRK2 RNA guide
ggacuucauuuaauaccaggau

SEQ ID NO: 3147 - RNA, 22 nt, Artificial Sequence
  LRRK2 RNA guide
gguauuaaaugaaguccaugag

SEQ ID NO: 3148 - RNA, 22 nt, Artificial Sequence
  LRRK2 RNA guide
guauuaaaugaaguccaugagu

SEQ ID NO: 3149 - RNA, 22 nt, Artificial Sequence
  LRRK2 RNA guide
uaaaugaaguccaugaguuugu

SEQ ID NO: 3150 - RNA, 22 nt, Artificial Sequence
  LRRK2 RNA guide
uauccugguauuaaaugaaguc

SEQ ID NO: 3151 - RNA, 22 nt, Artificial Sequence
  LRRK2 RNA guide
ucaccacaaacucauggacuuc

SEQ ID NO: 3152 - RNA, 22 nt, Artificial Sequence
  LRRK2 RNA guide
ucauggacuucauuuaauacca

SEQ ID NO: 3153 - RNA, 22 nt, Artificial Sequence
  LRRK2 RNA guide
uccugguauuaaaugaagucca

SEQ ID NO: 3154 - RNA, 22 nt, Artificial Sequence
  LRRK2 RNA guide
uggacuucauuuaauaccagga

SEQ ID NO: 3155 - RNA, 22 nt, Artificial Sequence
  LRRK2 RNA guide
ugguauuaaaugaaguccauga

SEQ ID NO: 3156 - RNA, 22 nt, Artificial Sequence
  LRRK2 RNA guide
uuaaaugaaguccaugaguuug

SEQ ID NO: 3157 - RNA, 22 nt, Artificial Sequence
  LRRK2 RNA guide
uucaccacaaacucauggacuu

SEQ ID NO: 3158 - RNA, 22 nt, Artificial Sequence
  LRRK2 RNA guide
uuucaccacaaacucauggacu

SEQ ID NO: 3159 - RNA, 20 nt, Artificial Sequence
  LRRK2 RNA guide
aaagccgugcagcaguaccc

SEQ ID NO: 3160 - RNA, 20 nt, Artificial Sequence
  LRRK2 RNA guide
aagccgugcagcaguaccca

SEQ ID NO: 3161 - RNA, 20 nt, Artificial Sequence
  LRRK2 RNA guide
acggcuuucaccacaaacuc

SEQ ID NO: 3162 - RNA, 20 nt, Artificial Sequence
  LRRK2 RNA guide
acugcugcacggcuuucacc

SEQ ID NO: 3163 - RNA, 20 nt, Artificial Sequence
  LRRK2 RNA guide
agccgugcagcaguacccag

SEQ ID NO: 3164 - RNA, 20 nt, Artificial Sequence
  LRRK2 RNA guide
aguccaugaguuugugguga

SEQ ID NO: 3165 - RNA, 20 nt, Artificial Sequence
  LRRK2 RNA guide
aguuuguggugaaagccgug

SEQ ID NO: 3166 - RNA, 20 nt, Artificial Sequence
  LRRK2 RNA guide
augaguuuguggugaaagcc

SEQ ID NO: 3167 - RNA, 20 nt, Artificial Sequence
  LRRK2 RNA guide
auucucuggguacugcugca

SEQ ID NO: 3168 - RNA, 20 nt, Artificial Sequence
  LRRK2 RNA guide
cacggcuuucaccacaaacu

SEQ ID NO: 3169 - RNA, 20 nt, Artificial Sequence
  LRRK2 RNA guide
caugaguuuguggugaaagc

SEQ ID NO: 3170 - RNA, 20 nt, Artificial Sequence
  LRRK2 RNA guide
cauucucuggguacugcugc

SEQ ID NO: 3171 - RNA, 20 nt, Artificial Sequence
  LRRK2 RNA guide
ccaugaguuuguggugaaag

SEQ ID NO: 3172 - RNA, 20 nt, Artificial Sequence
  LRRK2 RNA guide
ccgugcagcaguacccagag

SEQ ID NO: 3173 - RNA, 20 nt, Artificial Sequence
  LRRK2 RNA guide
cggcuuucaccacaaacuca

SEQ ID NO: 3174 - RNA, 20 nt, Artificial Sequence
  LRRK2 RNA guide
cucuggguacugcugcacgg

SEQ ID NO: 3175 - RNA, 20 nt, Artificial Sequence
  LRRK2 RNA guide
cugcacggcuuucaccacaa

SEQ ID NO: 3176 - RNA, 20 nt, Artificial Sequence
  LRRK2 RNA guide
cugcugcacggcuuucacca

SEQ ID NO: 3177 - RNA, 20 nt, Artificial Sequence
  LRRK2 RNA guide
cuggguacugcugcacggcu

SEQ ID NO: 3178 - RNA, 20 nt, Artificial Sequence
  LRRK2 RNA guide
gaaagccgugcagcaguacc

SEQ ID NO: 3179 - RNA, 20 nt, Artificial Sequence
  LRRK2 RNA guide
gaguuuguggugaaagccgu

SEQ ID NO: 3180 - RNA, 20 nt, Artificial Sequence
  LRRK2 RNA guide
gcacggcuuucaccacaaac

SEQ ID NO: 3181 - RNA, 20 nt, Artificial Sequence
  LRRK2 RNA guide
gcauucucuggguacugcug

SEQ ID NO: 3182 - RNA, 20 nt, Artificial Sequence
  LRRK2 RNA guide
gccgugcagcaguacccaga

SEQ ID NO: 3183 - RNA, 20 nt, Artificial Sequence
  LRRK2 RNA guide
gcugcacggcuuucaccaca

SEQ ID NO: 3184 - RNA, 20 nt, Artificial Sequence
  LRRK2 RNA guide
ggguacugcugcacggcuuu

SEQ ID NO: 3185 - RNA, 20 nt, Artificial Sequence
  LRRK2 RNA guide
gguacugcugcacggcuuuc

SEQ ID NO: 3186 - RNA, 20 nt, Artificial Sequence
  LRRK2 RNA guide
ggugaaagccgugcagcagu

SEQ ID NO: 3187 - RNA, 20 nt, Artificial Sequence
  LRRK2 RNA guide
guacugcugcacggcuuuca

SEQ ID NO: 3188 - RNA, 20 nt, Artificial Sequence
  LRRK2 RNA guide
guccaugaguuuguggugaa

SEQ ID NO: 3189 - RNA, 20 nt, Artificial Sequence
  LRRK2 RNA guide
gugaaagccgugcagcagua

SEQ ID NO: 3190 - RNA, 20 nt, Artificial Sequence
  LRRK2 RNA guide
guggugaaagccgugcagca

SEQ ID NO: 3191 - RNA, 20 nt, Artificial Sequence
  LRRK2 RNA guide
guuuguggugaaagccgugc

SEQ ID NO: 3192 - RNA, 20 nt, Artificial Sequence
  LRRK2 RNA guide
uacugcugcacggcuuucac

SEQ ID NO: 3193 - RNA, 20 nt, Artificial Sequence
  LRRK2 RNA guide
uccaugaguuuguggugaaa

SEQ ID NO: 3194 - RNA, 20 nt, Artificial Sequence
  LRRK2 RNA guide
ucucuggguacugcugcacg

SEQ ID NO: 3195 - RNA, 20 nt, Artificial Sequence
  LRRK2 RNA guide
ucuggguacugcugcacggc

SEQ ID NO: 3196 - RNA, 20 nt, Artificial Sequence
  LRRK2 RNA guide
ugaaagccgugcagcaguac

SEQ ID NO: 3197 - RNA, 20 nt, Artificial Sequence
  LRRK2 RNA guide
ugaguuuguggugaaagccg

SEQ ID NO: 3198 - RNA, 20 nt, Artificial Sequence
  LRRK2 RNA guide
ugcacggcuuucaccacaaa

SEQ ID NO: 3199 - RNA, 20 nt, Artificial Sequence
  LRRK2 RNA guide
ugcauucucuggguacugcu

SEQ ID NO: 3200 - RNA, 20 nt, Artificial Sequence
  LRRK2 RNA guide
ugcugcacggcuuucaccac

SEQ ID NO: 3201 - RNA, 20 nt, Artificial Sequence
  LRRK2 RNA guide
uggguacugcugcacggcuu

SEQ ID NO: 3202 - RNA, 20 nt, Artificial Sequence
  LRRK2 RNA guide
uggugaaagccgugcagcag

SEQ ID NO: 3203 - RNA, 20 nt, Artificial Sequence
  LRRK2 RNA guide
uguggugaaagccgugcagc

SEQ ID NO: 3204 - RNA, 20 nt, Artificial Sequence
  LRRK2 RNA guide
uuguggugaaagccgugcag

SEQ ID NO: 3205 - RNA, 20 nt, Artificial Sequence
  LRRK2 RNA guide
uuuguggugaaagccgugca

SEQ ID NO: 3206 - RNA, 21 nt, Artificial Sequence
  LRRK2 RNA guide
aaagccgugcagcaguaccca

SEQ ID NO: 3207 - RNA, 21 nt, Artificial Sequence
  LRRK2 RNA guide
aagccgugcagcaguacccag

SEQ ID NO: 3208 - RNA, 21 nt, Artificial Sequence
  LRRK2 RNA guide
aaguccaugaguuugugguga

SEQ ID NO: 3209 - RNA, 21 nt, Artificial Sequence
  LRRK2 RNA guide
acggcuuucaccacaaacuca

SEQ ID NO: 3210 - RNA, 21 nt, Artificial Sequence
  LRRK2 RNA guide
acugcugcacggcuuucacca

SEQ ID NO: 3211 - RNA, 21 nt, Artificial Sequence
  LRRK2 RNA guide
agccgugcagcaguacccaga

SEQ ID NO: 3212 - RNA, 21 nt, Artificial Sequence
  LRRK2 RNA guide
aguccaugaguuuguggugaa

SEQ ID NO: 3213 - RNA, 21 nt, Artificial Sequence
  LRRK2 RNA guide
aguuuguggugaaagccgugc

SEQ ID NO: 3214 - RNA, 21 nt, Artificial Sequence
  LRRK2 RNA guide
augaguuuguggugaaagccg

SEQ ID NO: 3215 - RNA, 21 nt, Artificial Sequence
  LRRK2 RNA guide
auucucuggguacugcugcac

SEQ ID NO: 3216 - RNA, 21 nt, Artificial Sequence
  LRRK2 RNA guide
cacggcuuucaccacaaacuc

SEQ ID NO: 3217 - RNA, 21 nt, Artificial Sequence
  LRRK2 RNA guide
caugaguuuguggugaaagcc

SEQ ID NO: 3218 - RNA, 21 nt, Artificial Sequence
  LRRK2 RNA guide
cauucucuggguacugcugca

SEQ ID NO: 3219 - RNA, 21 nt, Artificial Sequence
  LRRK2 RNA guide
ccaugaguuuguggugaaagc

SEQ ID NO: 3220 - RNA, 21 nt, Artificial Sequence
  LRRK2 RNA guide
ccgugcagcaguacccagaga

SEQ ID NO: 3221 - RNA, 21 nt, Artificial Sequence
  LRRK2 RNA guide
cggcuuucaccacaaacucau

SEQ ID NO: 3222 - RNA, 21 nt, Artificial Sequence
  LRRK2 RNA guide
cucuggguacugcugcacggc

SEQ ID NO: 3223 - RNA, 21 nt, Artificial Sequence
  LRRK2 RNA guide
cugcacggcuuucaccacaaa

SEQ ID NO: 3224 - RNA, 21 nt, Artificial Sequence
  LRRK2 RNA guide
cugcauucucuggguacugcu

SEQ ID NO: 3225 - RNA, 21 nt, Artificial Sequence
  LRRK2 RNA guide
cugcugcacggcuuucaccac

SEQ ID NO: 3226 - RNA, 21 nt, Artificial Sequence
  LRRK2 RNA guide
cuggguacugcugcacggcuu

SEQ ID NO: 3227 - RNA, 21 nt, Artificial Sequence
  LRRK2 RNA guide
gaaagccgugcagcaguaccc

SEQ ID NO: 3228 - RNA, 21 nt, Artificial Sequence
  LRRK2 RNA guide
gaguuuguggugaaagccgug

SEQ ID NO: 3229 - RNA, 21 nt, Artificial Sequence
  LRRK2 RNA guide
gcacggcuuucaccacaaacu

SEQ ID NO: 3230 - RNA, 21 nt, Artificial Sequence
  LRRK2 RNA guide
gcauucucuggguacugcugc

SEQ ID NO: 3231 - RNA, 21 nt, Artificial Sequence
  LRRK2 RNA guide
gccgugcagcaguacccagag

SEQ ID NO: 3232 - RNA, 21 nt, Artificial Sequence
  LRRK2 RNA guide
gcugcacggcuuucaccacaa

SEQ ID NO: 3233 - RNA, 21 nt, Artificial Sequence
  LRRK2 RNA guide
ggguacugcugcacggcuuuc

SEQ ID NO: 3234 - RNA, 21 nt, Artificial Sequence
  LRRK2 RNA guide
gguacugcugcacggcuuuca

SEQ ID NO: 3235 - RNA, 21 nt, Artificial Sequence
  LRRK2 RNA guide
ggugaaagccgugcagcagua

SEQ ID NO: 3236 - RNA, 21 nt, Artificial Sequence
  LRRK2 RNA guide
guacugcugcacggcuuucac

SEQ ID NO: 3237 - RNA, 21 nt, Artificial Sequence
  LRRK2 RNA guide
guccaugaguuuguggugaaa

SEQ ID NO: 3238 - RNA, 21 nt, Artificial Sequence
  LRRK2 RNA guide
gugaaagccgugcagcaguac

SEQ ID NO: 3239 - RNA, 21 nt, Artificial Sequence
  LRRK2 RNA guide
guggugaaagccgugcagcag

SEQ ID NO: 3240 - RNA, 21 nt, Artificial Sequence
  LRRK2 RNA guide
guuuguggugaaagccgugca

SEQ ID NO: 3241 - RNA, 21 nt, Artificial Sequence
  LRRK2 RNA guide
uacugcugcacggcuuucacc

SEQ ID NO: 3242 - RNA, 21 nt, Artificial Sequence
  LRRK2 RNA guide
uccaugaguuuguggugaaag

SEQ ID NO: 3243 - RNA, 21 nt, Artificial Sequence
  LRRK2 RNA guide
ucucuggguacugcugcacgg

SEQ ID NO: 3244 - RNA, 21 nt, Artificial Sequence
  LRRK2 RNA guide
ucuggguacugcugcacggcu

SEQ ID NO: 3245 - RNA, 21 nt, Artificial Sequence
  LRRK2 RNA guide
ugaaagccgugcagcaguacc

SEQ ID NO: 3246 - RNA, 21 nt, Artificial Sequence
  LRRK2 RNA guide
ugaguuuguggugaaagccgu

SEQ ID NO: 3247 - RNA, 21 nt, Artificial Sequence
  LRRK2 RNA guide
ugcacggcuuucaccacaaac

SEQ ID NO: 3248 - RNA, 21 nt, Artificial Sequence
  LRRK2 RNA guide
ugcauucucuggguacugcug

SEQ ID NO: 3249 - RNA, 21 nt, Artificial Sequence
  LRRK2 RNA guide
ugcugcacggcuuucaccaca

SEQ ID NO: 3250 - RNA, 21 nt, Artificial Sequence
  LRRK2 RNA guide
uggguacugcugcacggcuuu

SEQ ID NO: 3251 - RNA, 21 nt, Artificial Sequence
  LRRK2 RNA guide
uggugaaagccgugcagcagu

SEQ ID NO: 3252 - RNA, 21 nt, Artificial Sequence
  LRRK2 RNA guide
uguggugaaagccgugcagca

SEQ ID NO: 3253 - RNA, 21 nt, Artificial Sequence
  LRRK2 RNA guide
uucucuggguacugcugcacg

SEQ ID NO: 3254 - RNA, 21 nt, Artificial Sequence
  LRRK2 RNA guide
uuguggugaaagccgugcagc

SEQ ID NO: 3255 - RNA, 21 nt, Artificial Sequence
  LRRK2 RNA guide
uuuguggugaaagccgugcag

SEQ ID NO: 3256 - RNA, 22 nt, Artificial Sequence
  LRRK2 RNA guide
aaagccgugcagcaguacccag

SEQ ID NO: 3257 - RNA, 22 nt, Artificial Sequence
  LRRK2 RNA guide
aagccgugcagcaguacccaga

SEQ ID NO: 3258 - RNA, 22 nt, Artificial Sequence
  LRRK2 RNA guide
aaguccaugaguuuguggugaa

SEQ ID NO: 3259 - RNA, 22 nt, Artificial Sequence
  LRRK2 RNA guide
acggcuuucaccacaaacucau

SEQ ID NO: 3260 - RNA, 22 nt, Artificial Sequence
  LRRK2 RNA guide
acugcugcacggcuuucaccac

SEQ ID NO: 3261 - RNA, 22 nt, Artificial Sequence
  LRRK2 RNA guide
agccgugcagcaguacccagag

SEQ ID NO: 3262 - RNA, 22 nt, Artificial Sequence
  LRRK2 RNA guide
aguccaugaguuuguggugaaa

SEQ ID NO: 3263 - RNA, 22 nt, Artificial Sequence
  LRRK2 RNA guide
aguuuguggugaaagccgugca

SEQ ID NO: 3264 - RNA, 22 nt, Artificial Sequence
  LRRK2 RNA guide
augaguuuguggugaaagccgu

SEQ ID NO: 3265 - RNA, 22 nt, Artificial Sequence
  LRRK2 RNA guide
auucucuggguacugcugcacg

SEQ ID NO: 3266 - RNA, 22 nt, Artificial Sequence
  LRRK2 RNA guide
cacggcuuucaccacaaacuca

SEQ ID NO: 3267 - RNA, 22 nt, Artificial Sequence
  LRRK2 RNA guide
caugaguuuguggugaaagccg

SEQ ID NO: 3268 - RNA, 22 nt, Artificial Sequence
  LRRK2 RNA guide
cauucucuggguacugcugcac

SEQ ID NO: 3269 - RNA, 22 nt, Artificial Sequence
  LRRK2 RNA guide
ccaugaguuuguggugaaagcc

SEQ ID NO: 3270 - RNA, 22 nt, Artificial Sequence
  LRRK2 RNA guide
ccgugcagcaguacccagagaa

SEQ ID NO: 3271 - RNA, 22 nt, Artificial Sequence
  LRRK2 RNA guide
cggcuuucaccacaaacucaug

SEQ ID NO: 3272 - RNA, 22 nt, Artificial Sequence
  LRRK2 RNA guide
cucuggguacugcugcacggcu

SEQ ID NO: 3273 - RNA, 22 nt, Artificial Sequence
  LRRK2 RNA guide
cugcacggcuuucaccacaaac

SEQ ID NO: 3274 - RNA, 22 nt, Artificial Sequence
  LRRK2 RNA guide
cugcauucucuggguacugcug

SEQ ID NO: 3275 - RNA, 22 nt, Artificial Sequence
  LRRK2 RNA guide
cugcugcacggcuuucaccaca

SEQ ID NO: 3276 - RNA, 22 nt, Artificial Sequence
  LRRK2 RNA guide
cuggguacugcugcacggcuuu

SEQ ID NO: 3277 - RNA, 22 nt, Artificial Sequence
  LRRK2 RNA guide
gaaagccgugcagcaguaccca

SEQ ID NO: 3278 - RNA, 22 nt, Artificial Sequence
  LRRK2 RNA guide
gaaguccaugaguuugugguga

SEQ ID NO: 3279 - RNA, 22 nt, Artificial Sequence
  LRRK2 RNA guide
gaguuuguggugaaagccgugc

SEQ ID NO: 3280 - RNA, 22 nt, Artificial Sequence
  LRRK2 RNA guide
gcacggcuuucaccacaaacuc

SEQ ID NO: 3281 - RNA, 22 nt, Artificial Sequence
  LRRK2 RNA guide
gcauucucuggguacugcugca

SEQ ID NO: 3282 - RNA, 22 nt, Artificial Sequence
  LRRK2 RNA guide
gccgugcagcaguacccagaga

SEQ ID NO: 3283 - RNA, 22 nt, Artificial Sequence
  LRRK2 RNA guide
gcugcacggcuuucaccacaaa

SEQ ID NO: 3284 - RNA, 22 nt, Artificial Sequence
  LRRK2 RNA guide
gcugcauucucuggguacugcu

SEQ ID NO: 3285 - RNA, 22 nt, Artificial Sequence
  LRRK2 RNA guide
ggguacugcugcacggcuuuca

SEQ ID NO: 3286 - RNA, 22 nt, Artificial Sequence
  LRRK2 RNA guide
gguacugcugcacggcuuucac

SEQ ID NO: 3287 - RNA, 22 nt, Artificial Sequence
  LRRK2 RNA guide
ggugaaagccgugcagcaguac

SEQ ID NO: 3288 - RNA, 22 nt, Artificial Sequence
  LRRK2 RNA guide
guacugcugcacggcuuucacc

SEQ ID NO: 3289 - RNA, 22 nt, Artificial Sequence
  LRRK2 RNA guide
guccaugaguuuguggugaaag

SEQ ID NO: 3290 - RNA, 22 nt, Artificial Sequence
  LRRK2 RNA guide
gugaaagccgugcagcaguacc

SEQ ID NO: 3291 - RNA, 22 nt, Artificial Sequence
  LRRK2 RNA guide
guggugaaagccgugcagcagu

SEQ ID NO: 3292 - RNA, 22 nt, Artificial Sequence
  LRRK2 RNA guide
guuuguggugaaagccgugcag

SEQ ID NO: 3293 - RNA, 22 nt, Artificial Sequence
  LRRK2 RNA guide
uacugcugcacggcuuucacca

SEQ ID NO: 3294 - RNA, 22 nt, Artificial Sequence
  LRRK2 RNA guide
uccaugaguuuguggugaaagc

SEQ ID NO: 3295 - RNA, 22 nt, Artificial Sequence
  LRRK2 RNA guide
ucucuggguacugcugcacggc

SEQ ID NO: 3296 - RNA, 22 nt, Artificial Sequence
  LRRK2 RNA guide
ucuggguacugcugcacggcuu

SEQ ID NO: 3297 - RNA, 22 nt, Artificial Sequence
  LRRK2 RNA guide
ugaaagccgugcagcaguaccc

SEQ ID NO: 3298 - RNA, 22 nt, Artificial Sequence
  LRRK2 RNA guide
ugaguuuguggugaaagccgug

SEQ ID NO: 3299 - RNA, 22 nt, Artificial Sequence
  LRRK2 RNA guide
ugcacggcuuucaccacaaacu

SEQ ID NO: 3300 - RNA, 22 nt, Artificial Sequence
  LRRK2 RNA guide
ugcauucucuggguacugcugc

SEQ ID NO: 3301 - RNA, 22 nt, Artificial Sequence
  LRRK2 RNA guide
ugcugcacggcuuucaccacaa

SEQ ID NO: 3302 - RNA, 22 nt, Artificial Sequence
  LRRK2 RNA guide
uggguacugcugcacggcuuuc

SEQ ID NO: 3303 - RNA, 22 nt, Artificial Sequence
  LRRK2 RNA guide
uggugaaagccgugcagcagua

SEQ ID NO: 3304 - RNA, 22 nt, Artificial Sequence
  LRRK2 RNA guide
uguggugaaagccgugcagcag

SEQ ID NO: 3305 - RNA, 22 nt, Artificial Sequence
  LRRK2 RNA guide
uucucuggguacugcugcacgg

SEQ ID NO: 3306 - RNA, 22 nt, Artificial Sequence
  LRRK2 RNA guide
uuguggugaaagccgugcagca

SEQ ID NO: 3307 - RNA, 22 nt, Artificial Sequence
  LRRK2 RNA guide
uuuguggugaaagccgugcagc

SEQ ID NO: 3308 - RNA, 20 nt, Artificial Sequence
  LRRK2 RNA guide
aacgcugcauucucugggua

SEQ ID NO: 3309 - RNA, 20 nt, Artificial Sequence
  LRRK2 RNA guide
aaugcagcguugcagaucuc

SEQ ID NO: 3310 - RNA, 20 nt, Artificial Sequence
  LRRK2 RNA guide
acagcugagcgcugagaucu

SEQ ID NO: 3311 - RNA, 20 nt, Artificial Sequence
  LRRK2 RNA guide
acccagagaaugcagcguug

SEQ ID NO: 3312 - RNA, 20 nt, Artificial Sequence
  LRRK2 RNA guide
acgcugcauucucuggguac

SEQ ID NO: 3313 - RNA, 20 nt, Artificial Sequence
  LRRK2 RNA guide
agaaugcagcguugcagauc

SEQ ID NO: 3314 - RNA, 20 nt, Artificial Sequence
  LRRK2 RNA guide
agagaaugcagcguugcaga

SEQ ID NO: 3315 - RNA, 20 nt, Artificial Sequence
  LRRK2 RNA guide
agaucugcaacgcugcauuc

SEQ ID NO: 3316 - RNA, 20 nt, Artificial Sequence
  LRRK2 RNA guide
agcaguacccagagaaugca

SEQ ID NO: 3317 - RNA, 20 nt, Artificial Sequence
  LRRK2 RNA guide
agcgcugagaucugcaacgc

SEQ ID NO: 3318 - RNA, 20 nt, Artificial Sequence
  LRRK2 RNA guide
agcguugcagaucucagcgc

SEQ ID NO: 3319 - RNA, 20 nt, Artificial Sequence
  LRRK2 RNA guide
agcugagcgcugagaucugc

SEQ ID NO: 3320 - RNA, 20 nt, Artificial Sequence
  LRRK2 RNA guide
aguacccagagaaugcagcg

SEQ ID NO: 3321 - RNA, 20 nt, Artificial Sequence
  LRRK2 RNA guide
aucugcaacgcugcauucuc

SEQ ID NO: 3322 - RNA, 20 nt, Artificial Sequence
  LRRK2 RNA guide
augcagcguugcagaucuca

SEQ ID NO: 3323 - RNA, 20 nt, Artificial Sequence
  LRRK2 RNA guide
caacgcugcauucucugggu

SEQ ID NO: 3324 - RNA, 20 nt, Artificial Sequence
  LRRK2 RNA guide
cagagaaugcagcguugcag

SEQ ID NO: 3325 - RNA, 20 nt, Artificial Sequence
  LRRK2 RNA guide
cagcaguacccagagaaugc

SEQ ID NO: 3326 - RNA, 20 nt, Artificial Sequence
  LRRK2 RNA guide
cagcguugcagaucucagcg

SEQ ID NO: 3327 - RNA, 20 nt, Artificial Sequence
  LRRK2 RNA guide
cagcugagcgcugagaucug

SEQ ID NO: 3328 - RNA, 20 nt, Artificial Sequence
  LRRK2 RNA guide
caguacccagagaaugcagc

SEQ ID NO: 3329 - RNA, 20 nt, Artificial Sequence
  LRRK2 RNA guide
ccagagaaugcagcguugca

SEQ ID NO: 3330 - RNA, 20 nt, Artificial Sequence
  LRRK2 RNA guide
cccagagaaugcagcguugc

SEQ ID NO: 3331 - RNA, 20 nt, Artificial Sequence
  LRRK2 RNA guide
cgcugagaucugcaacgcug

SEQ ID NO: 3332 - RNA, 20 nt, Artificial Sequence
  LRRK2 RNA guide
cguugcagaucucagcgcuc

SEQ ID NO: 3333 - RNA, 20 nt, Artificial Sequence
  LRRK2 RNA guide
cugagaucugcaacgcugca

SEQ ID NO: 3334 - RNA, 20 nt, Artificial Sequence
  LRRK2 RNA guide
cugagcgcugagaucugcaa

SEQ ID NO: 3335 - RNA, 20 nt, Artificial Sequence
  LRRK2 RNA guide
cugcaacgcugcauucucug

SEQ ID NO: 3336 - RNA, 20 nt, Artificial Sequence
  LRRK2 RNA guide
gaaugcagcguugcagaucu

SEQ ID NO: 3337 - RNA, 20 nt, Artificial Sequence
  LRRK2 RNA guide
gagaaugcagcguugcagau

SEQ ID NO: 3338 - RNA, 20 nt, Artificial Sequence
  LRRK2 RNA guide
gagaucugcaacgcugcauu

SEQ ID NO: 3339 - RNA, 20 nt, Artificial Sequence
  LRRK2 RNA guide
gagcgcugagaucugcaacg

SEQ ID NO: 3340 - RNA, 20 nt, Artificial Sequence
  LRRK2 RNA guide
gaucugcaacgcugcauucu

SEQ ID NO: 3341 - RNA, 20 nt, Artificial Sequence
  LRRK2 RNA guide
gcaacgcugcauucucuggg

SEQ ID NO: 3342 - RNA, 20 nt, Artificial Sequence
  LRRK2 RNA guide
gcagcaguacccagagaaug

SEQ ID NO: 3343 - RNA, 20 nt, Artificial Sequence
  LRRK2 RNA guide
gcagcguugcagaucucagc

SEQ ID NO: 3344 - RNA, 20 nt, Artificial Sequence
  LRRK2 RNA guide
gcaguacccagagaaugcag

SEQ ID NO: 3345 - RNA, 20 nt, Artificial Sequence
  LRRK2 RNA guide
gcgcugagaucugcaacgcu

SEQ ID NO: 3346 - RNA, 20 nt, Artificial Sequence
  LRRK2 RNA guide
gcguugcagaucucagcgcu

SEQ ID NO: 3347 - RNA, 20 nt, Artificial Sequence
  LRRK2 RNA guide
gcugagaucugcaacgcugc

SEQ ID NO: 3348 - RNA, 20 nt, Artificial Sequence
  LRRK2 RNA guide
gcugagcgcugagaucugca

SEQ ID NO: 3349 - RNA, 20 nt, Artificial Sequence
  LRRK2 RNA guide
guacccagagaaugcagcgu

SEQ ID NO: 3350 - RNA, 20 nt, Artificial Sequence
  LRRK2 RNA guide
uacccagagaaugcagcguu

SEQ ID NO: 3351 - RNA, 20 nt, Artificial Sequence
  LRRK2 RNA guide
ucugcaacgcugcauucucu

SEQ ID NO: 3352 - RNA, 20 nt, Artificial Sequence
  LRRK2 RNA guide
ugagaucugcaacgcugcau

SEQ ID NO: 3353 - RNA, 20 nt, Artificial Sequence
  LRRK2 RNA guide
ugagcgcugagaucugcaac

SEQ ID NO: 3354 - RNA, 20 nt, Artificial Sequence
  LRRK2 RNA guide
ugcaacgcugcauucucugg

SEQ ID NO: 3355 - RNA, 20 nt, Artificial Sequence
  LRRK2 RNA guide
ugcagcguugcagaucucag

SEQ ID NO: 3356 - RNA, 21 nt, Artificial Sequence
  LRRK2 RNA guide
aacagcugagcgcugagaucu

SEQ ID NO: 3357 - RNA, 21 nt, Artificial Sequence
  LRRK2 RNA guide
aacgcugcauucucuggguac

SEQ ID NO: 3358 - RNA, 21 nt, Artificial Sequence
  LRRK2 RNA guide
aaugcagcguugcagaucuca

SEQ ID NO: 3359 - RNA, 21 nt, Artificial Sequence
  LRRK2 RNA guide
acagcugagcgcugagaucug

SEQ ID NO: 3360 - RNA, 21 nt, Artificial Sequence
  LRRK2 RNA guide
acccagagaaugcagcguugc

SEQ ID NO: 3361 - RNA, 21 nt, Artificial Sequence
  LRRK2 RNA guide
acgcugcauucucuggguacu

SEQ ID NO: 3362 - RNA, 21 nt, Artificial Sequence
  LRRK2 RNA guide
agaaugcagcguugcagaucu

SEQ ID NO: 3363 - RNA, 21 nt, Artificial Sequence
  LRRK2 RNA guide
agagaaugcagcguugcagau

SEQ ID NO: 3364 - RNA, 21 nt, Artificial Sequence
  LRRK2 RNA guide
agaucugcaacgcugcauucu

SEQ ID NO: 3365 - RNA, 21 nt, Artificial Sequence
  LRRK2 RNA guide
agcaguacccagagaaugcag

SEQ ID NO: 3366 - RNA, 21 nt, Artificial Sequence
  LRRK2 RNA guide
agcgcugagaucugcaacgcu

SEQ ID NO: 3367 - RNA, 21 nt, Artificial Sequence
  LRRK2 RNA guide
agcguugcagaucucagcgcu

SEQ ID NO: 3368 - RNA, 21 nt, Artificial Sequence
  LRRK2 RNA guide
agcugagcgcugagaucugca

SEQ ID NO: 3369 - RNA, 21 nt, Artificial Sequence
  LRRK2 RNA guide
aguacccagagaaugcagcgu

SEQ ID NO: 3370 - RNA, 21 nt, Artificial Sequence
  LRRK2 RNA guide
aucugcaacgcugcauucucu

SEQ ID NO: 3371 - RNA, 21 nt, Artificial Sequence
  LRRK2 RNA guide
augcagcguugcagaucucag

SEQ ID NO: 3372 - RNA, 21 nt, Artificial Sequence
  LRRK2 RNA guide
caacgcugcauucucugggua

SEQ ID NO: 3373 - RNA, 21 nt, Artificial Sequence
  LRRK2 RNA guide
cagagaaugcagcguugcaga

SEQ ID NO: 3374 - RNA, 21 nt, Artificial Sequence
  LRRK2 RNA guide
cagcaguacccagagaaugca

SEQ ID NO: 3375 - RNA, 21 nt, Artificial Sequence
  LRRK2 RNA guide
cagcguugcagaucucagcgc

SEQ ID NO: 3376 - RNA, 21 nt, Artificial Sequence
  LRRK2 RNA guide
cagcugagcgcugagaucugc

SEQ ID NO: 3377 - RNA, 21 nt, Artificial Sequence
  LRRK2 RNA guide
caguacccagagaaugcagcg

SEQ ID NO: 3378 - RNA, 21 nt, Artificial Sequence
  LRRK2 RNA guide
ccagagaaugcagcguugcag

SEQ ID NO: 3379 - RNA, 21 nt, Artificial Sequence
  LRRK2 RNA guide
cccagagaaugcagcguugca

SEQ ID NO: 3380 - RNA, 21 nt, Artificial Sequence
  LRRK2 RNA guide
cgcugagaucugcaacgcugc

SEQ ID NO: 3381 - RNA, 21 nt, Artificial Sequence
  LRRK2 RNA guide
cguugcagaucucagcgcuca

SEQ ID NO: 3382 - RNA, 21 nt, Artificial Sequence
  LRRK2 RNA guide
cugagaucugcaacgcugcau

SEQ ID NO: 3383 - RNA, 21 nt, Artificial Sequence
  LRRK2 RNA guide
cugagcgcugagaucugcaac

SEQ ID NO: 3384 - RNA, 21 nt, Artificial Sequence
  LRRK2 RNA guide
cugcaacgcugcauucucugg

SEQ ID NO: 3385 - RNA, 21 nt, Artificial Sequence
  LRRK2 RNA guide
gaaugcagcguugcagaucuc

SEQ ID NO: 3386 - RNA, 21 nt, Artificial Sequence
  LRRK2 RNA guide
gagaaugcagcguugcagauc

SEQ ID NO: 3387 - RNA, 21 nt, Artificial Sequence
  LRRK2 RNA guide
gagaucugcaacgcugcauuc

SEQ ID NO: 3388 - RNA, 21 nt, Artificial Sequence
  LRRK2 RNA guide
gagcgcugagaucugcaacgc

SEQ ID NO: 3389 - RNA, 21 nt, Artificial Sequence
  LRRK2 RNA guide
gaucugcaacgcugcauucuc

SEQ ID NO: 3390 - RNA, 21 nt, Artificial Sequence
  LRRK2 RNA guide
gcaacgcugcauucucugggu

SEQ ID NO: 3391 - RNA, 21 nt, Artificial Sequence
  LRRK2 RNA guide
gcagcaguacccagagaaugc

SEQ ID NO: 3392 - RNA, 21 nt, Artificial Sequence
  LRRK2 RNA guide
gcagcguugcagaucucagcg

SEQ ID NO: 3393 - RNA, 21 nt, Artificial Sequence
  LRRK2 RNA guide
gcaguacccagagaaugcagc

SEQ ID NO: 3394 - RNA, 21 nt, Artificial Sequence
  LRRK2 RNA guide
gcgcugagaucugcaacgcug

SEQ ID NO: 3395 - RNA, 21 nt, Artificial Sequence
  LRRK2 RNA guide
gcguugcagaucucagcgcuc

SEQ ID NO: 3396 - RNA, 21 nt, Artificial Sequence
  LRRK2 RNA guide
gcugagaucugcaacgcugca

SEQ ID NO: 3397 - RNA, 21 nt, Artificial Sequence
  LRRK2 RNA guide
gcugagcgcugagaucugcaa

SEQ ID NO: 3398 - RNA, 21 nt, Artificial Sequence
  LRRK2 RNA guide
guacccagagaaugcagcguu

SEQ ID NO: 3399 - RNA, 21 nt, Artificial Sequence
  LRRK2 RNA guide
uacccagagaaugcagcguug

SEQ ID NO: 3400 - RNA, 21 nt, Artificial Sequence
  LRRK2 RNA guide
ucugcaacgcugcauucucug

SEQ ID NO: 3401 - RNA, 21 nt, Artificial Sequence
  LRRK2 RNA guide
ugagaucugcaacgcugcauu

SEQ ID NO: 3402 - RNA, 21 nt, Artificial Sequence
  LRRK2 RNA guide
ugagcgcugagaucugcaacg

SEQ ID NO: 3403 - RNA, 21 nt, Artificial Sequence
  LRRK2 RNA guide
ugcaacgcugcauucucuggg

SEQ ID NO: 3404 - RNA, 21 nt, Artificial Sequence
  LRRK2 RNA guide
ugcagcaguacccagagaaug

SEQ ID NO: 3405 - RNA, 21 nt, Artificial Sequence
  LRRK2 RNA guide
ugcagcguugcagaucucagc

SEQ ID NO: 3406 - RNA, 22 nt, Artificial Sequence
  LRRK2 RNA guide
aaacagcugagcgcugagaucu

SEQ ID NO: 3407 - RNA, 22 nt, Artificial Sequence
  LRRK2 RNA guide
aacagcugagcgcugagaucug

SEQ ID NO: 3408 - RNA, 22 nt, Artificial Sequence
  LRRK2 RNA guide
aacgcugcauucucuggguacu

SEQ ID NO: 3409 - RNA, 22 nt, Artificial Sequence
  LRRK2 RNA guide
aaugcagcguugcagaucucag

SEQ ID NO: 3410 - RNA, 22 nt, Artificial Sequence
  LRRK2 RNA guide
acagcugagcgcugagaucugc

SEQ ID NO: 3411 - RNA, 22 nt, Artificial Sequence
  LRRK2 RNA guide
acccagagaaugcagcguugca

SEQ ID NO: 3412 - RNA, 22 nt, Artificial Sequence
  LRRK2 RNA guide
acgcugcauucucuggguacug

SEQ ID NO: 3413 - RNA, 22 nt, Artificial Sequence
  LRRK2 RNA guide
agaaugcagcguugcagaucuc

SEQ ID NO: 3414 - RNA, 22 nt, Artificial Sequence
  LRRK2 RNA guide
agagaaugcagcguugcagauc

SEQ ID NO: 3415 - RNA, 22 nt, Artificial Sequence
  LRRK2 RNA guide
agaucugcaacgcugcauucuc

SEQ ID NO: 3416 - RNA, 22 nt, Artificial Sequence
  LRRK2 RNA guide
agcaguacccagagaaugcagc

SEQ ID NO: 3417 - RNA, 22 nt, Artificial Sequence
  LRRK2 RNA guide
agcgcugagaucugcaacgcug

SEQ ID NO: 3418 - RNA, 22 nt, Artificial Sequence
  LRRK2 RNA guide
agcguugcagaucucagcgcuc

SEQ ID NO: 3419 - RNA, 22 nt, Artificial Sequence
  LRRK2 RNA guide
agcugagcgcugagaucugcaa

SEQ ID NO: 3420 - RNA, 22 nt, Artificial Sequence
  LRRK2 RNA guide
aguacccagagaaugcagcguu

SEQ ID NO: 3421 - RNA, 22 nt, Artificial Sequence
  LRRK2 RNA guide
aucugcaacgcugcauucucug

SEQ ID NO: 3422 - RNA, 22 nt, Artificial Sequence
  LRRK2 RNA guide
augcagcguugcagaucucagc

SEQ ID NO: 3423 - RNA, 22 nt, Artificial Sequence
  LRRK2 RNA guide
caacgcugcauucucuggguac

SEQ ID NO: 3424 - RNA, 22 nt, Artificial Sequence
  LRRK2 RNA guide
cagagaaugcagcguugcagau

SEQ ID NO: 3425 - RNA, 22 nt, Artificial Sequence
  LRRK2 RNA guide
cagcaguacccagagaaugcag

SEQ ID NO: 3426 - RNA, 22 nt, Artificial Sequence
  LRRK2 RNA guide
cagcguugcagaucucagcgcu

SEQ ID NO: 3427 - RNA, 22 nt, Artificial Sequence
  LRRK2 RNA guide
cagcugagcgcugagaucugca

SEQ ID NO: 3428 - RNA, 22 nt, Artificial Sequence
  LRRK2 RNA guide
caguacccagagaaugcagcgu

SEQ ID NO: 3429 - RNA, 22 nt, Artificial Sequence
  LRRK2 RNA guide
ccagagaaugcagcguugcaga

SEQ ID NO: 3430 - RNA, 22 nt, Artificial Sequence
  LRRK2 RNA guide
cccagagaaugcagcguugcag

SEQ ID NO: 3431 - RNA, 22 nt, Artificial Sequence
  LRRK2 RNA guide
cgcugagaucugcaacgcugca

SEQ ID NO: 3432 - RNA, 22 nt, Artificial Sequence
  LRRK2 RNA guide
cguugcagaucucagcgcucag

SEQ ID NO: 3433 - RNA, 22 nt, Artificial Sequence
  LRRK2 RNA guide
cugagaucugcaacgcugcauu

SEQ ID NO: 3434 - RNA, 22 nt, Artificial Sequence
  LRRK2 RNA guide
cugagcgcugagaucugcaacg

SEQ ID NO: 3435 - RNA, 22 nt, Artificial Sequence
  LRRK2 RNA guide
cugcaacgcugcauucucuggg

SEQ ID NO: 3436 - RNA, 22 nt, Artificial Sequence
  LRRK2 RNA guide
gaaugcagcguugcagaucuca

SEQ ID NO: 3437 - RNA, 22 nt, Artificial Sequence
  LRRK2 RNA guide
gagaaugcagcguugcagaucu

SEQ ID NO: 3438 - RNA, 22 nt, Artificial Sequence
  LRRK2 RNA guide
gagaucugcaacgcugcauucu

SEQ ID NO: 3439 - RNA, 22 nt, Artificial Sequence
  LRRK2 RNA guide
gagcgcugagaucugcaacgcu

SEQ ID NO: 3440 - RNA, 22 nt, Artificial Sequence
  LRRK2 RNA guide
gaucugcaacgcugcauucucu

SEQ ID NO: 3441 - RNA, 22 nt, Artificial Sequence
  LRRK2 RNA guide
gcaacgcugcauucucugggua

SEQ ID NO: 3442 - RNA, 22 nt, Artificial Sequence
  LRRK2 RNA guide
gcagcaguacccagagaaugca

SEQ ID NO: 3443 - RNA, 22 nt, Artificial Sequence
  LRRK2 RNA guide
gcagcguugcagaucucagcgc

SEQ ID NO: 3444 - RNA, 22 nt, Artificial Sequence
  LRRK2 RNA guide
gcaguacccagagaaugcagcg

SEQ ID NO: 3445 - RNA, 22 nt, Artificial Sequence
  LRRK2 RNA guide
gcgcugagaucugcaacgcugc

SEQ ID NO: 3446 - RNA, 22 nt, Artificial Sequence
  LRRK2 RNA guide
gcguugcagaucucagcgcuca

SEQ ID NO: 3447 - RNA, 22 nt, Artificial Sequence
  LRRK2 RNA guide
gcugagaucugcaacgcugcau

SEQ ID NO: 3448 - RNA, 22 nt, Artificial Sequence
  LRRK2 RNA guide
gcugagcgcugagaucugcaac

SEQ ID NO: 3449 - RNA, 22 nt, Artificial Sequence
  LRRK2 RNA guide
guacccagagaaugcagcguug

SEQ ID NO: 3450 - RNA, 22 nt, Artificial Sequence
  LRRK2 RNA guide
gugcagcaguacccagagaaug

SEQ ID NO: 3451 - RNA, 22 nt, Artificial Sequence
  LRRK2 RNA guide
uacccagagaaugcagcguugc

SEQ ID NO: 3452 - RNA, 22 nt, Artificial Sequence
  LRRK2 RNA guide
ucugcaacgcugcauucucugg

SEQ ID NO: 3453 - RNA, 22 nt, Artificial Sequence
  LRRK2 RNA guide
ugagaucugcaacgcugcauuc

SEQ ID NO: 3454 - RNA, 22 nt, Artificial Sequence
  LRRK2 RNA guide
ugagcgcugagaucugcaacgc

SEQ ID NO: 3455 - RNA, 22 nt, Artificial Sequence
  LRRK2 RNA guide
ugcaacgcugcauucucugggu

SEQ ID NO: 3456 - RNA, 22 nt, Artificial Sequence
  LRRK2 RNA guide
ugcagcaguacccagagaaugc

SEQ ID NO: 3457 - RNA, 22 nt, Artificial Sequence
  LRRK2 RNA guide
ugcagcguugcagaucucagcg

SEQ ID NO: 3458 - RNA, 20 nt, Artificial Sequence
  LRRK2 RNA guide
agaggaaaagaauaagaauc

SEQ ID NO: 3459 - RNA, 20 nt, Artificial Sequence
  LRRK2 RNA guide
aucaagauuuagaggaaaag

SEQ ID NO: 3460 - RNA, 20 nt, Artificial Sequence
  LRRK2 RNA guide
aucaucauucucuugauucu

SEQ ID NO: 3461 - RNA, 20 nt, Artificial Sequence
  LRRK2 RNA guide
caagauuuagaggaaaagaa

SEQ ID NO: 3462 - RNA, 20 nt, Artificial Sequence
  LRRK2 RNA guide
caucauucucuugauucuua

SEQ ID NO: 3463 - RNA, 20 nt, Artificial Sequence
  LRRK2 RNA guide
cauucucuugauucuuauuc

SEQ ID NO: 3464 - RNA, 20 nt, Artificial Sequence
  LRRK2 RNA guide
ccucaucaucauucucuuga

SEQ ID NO: 3465 - RNA, 20 nt, Artificial Sequence
  LRRK2 RNA guide
cucaucaucauucucuugau

SEQ ID NO: 3466 - RNA, 20 nt, Artificial Sequence
  LRRK2 RNA guide
cuugauucuuauucuuuucc

SEQ ID NO: 3467 - RNA, 20 nt, Artificial Sequence
  LRRK2 RNA guide
gaauaagaaucaagagaaug

SEQ ID NO: 3468 - RNA, 20 nt, Artificial Sequence
  LRRK2 RNA guide
gaggaaaagaauaagaauca

SEQ ID NO: 3469 - RNA, 20 nt, Artificial Sequence
  LRRK2 RNA guide
gauucuuauucuuuuccucu

SEQ ID NO: 3470 - RNA, 20 nt, Artificial Sequence
  LRRK2 RNA guide
ggaaaagaauaagaaucaag

SEQ ID NO: 3471 - RNA, 20 nt, Artificial Sequence
  LRRK2 RNA guide
uaagaaucaagagaaugaug

SEQ ID NO: 3472 - RNA, 20 nt, Artificial Sequence
  LRRK2 RNA guide
ucaagauuuagaggaaaaga

SEQ ID NO: 3473 - RNA, 20 nt, Artificial Sequence
  LRRK2 RNA guide
ucaucaucauucucuugauu

SEQ ID NO: 3474 - RNA, 20 nt, Artificial Sequence
  LRRK2 RNA guide
ucaucauucucuugauucuu

SEQ ID NO: 3475 - RNA, 20 nt, Artificial Sequence
  LRRK2 RNA guide
ugauucuuauucuuuuccuc

SEQ ID NO: 3476 - RNA, 21 nt, Artificial Sequence
  LRRK2 RNA guide
caucaucauucucuugauucu

SEQ ID NO: 3477 - RNA, 21 nt, Artificial Sequence
  LRRK2 RNA guide
cccucaucaucauucucuuga

SEQ ID NO: 3478 - RNA, 21 nt, Artificial Sequence
  LRRK2 RNA guide
ccucaucaucauucucuugau

SEQ ID NO: 3479 - RNA, 21 nt, Artificial Sequence
  LRRK2 RNA guide
cucaucaucauucucuugauu

SEQ ID NO: 3480 - RNA, 21 nt, Artificial Sequence
  LRRK2 RNA guide
ucaucaucauucucuugauuc

SEQ ID NO: 3481 - RNA, 22 nt, Artificial Sequence
  LRRK2 RNA guide
caucaucauucucuugauucuu

SEQ ID NO: 3482 - RNA, 22 nt, Artificial Sequence
  LRRK2 RNA guide
ccccucaucaucauucucuuga

SEQ ID NO: 3483 - RNA, 22 nt, Artificial Sequence
  LRRK2 RNA guide
cccucaucaucauucucuugau

SEQ ID NO: 3484 - RNA, 22 nt, Artificial Sequence
  LRRK2 RNA guide
ccucaucaucauucucuugauu

SEQ ID NO: 3485 - RNA, 22 nt, Artificial Sequence
  LRRK2 RNA guide
cucaucaucauucucuugauuc

SEQ ID NO: 3486 - RNA, 22 nt, Artificial Sequence
  LRRK2 RNA guide
cucuugauucuuauucuuuucc

SEQ ID NO: 3487 - RNA, 22 nt, Artificial Sequence
  LRRK2 RNA guide
cuugauucuuauucuuuuccuc

SEQ ID NO: 3488 - RNA, 22 nt, Artificial Sequence
  LRRK2 RNA guide
gaggaaaagaauaagaaucaag

SEQ ID NO: 3489 - RNA, 22 nt, Artificial Sequence
  LRRK2 RNA guide
ggaaaagaauaagaaucaagag

SEQ ID NO: 3490 - RNA, 22 nt, Artificial Sequence
  LRRK2 RNA guide
ucaucaucauucucuugauucu

SEQ ID NO: 3491 - RNA, 20 nt, Artificial Sequence
  LRRK2 RNA guide
aacaauuuaucuuuuucccc

SEQ ID NO: 3492 - RNA, 20 nt, Artificial Sequence
  LRRK2 RNA guide
aagagaaugaugaugagggg

SEQ ID NO: 3493 - RNA, 20 nt, Artificial Sequence
  LRRK2 RNA guide
aaugaugaugagggggaaaa

SEQ ID NO: 3494 - RNA, 20 nt, Artificial Sequence
  LRRK2 RNA guide
aauuuaucuuuuucccccuc

SEQ ID NO: 3495 - RNA, 20 nt, Artificial Sequence
  LRRK2 RNA guide
acaauuuaucuuuuuccccc

SEQ ID NO: 3496 - RNA, 20 nt, Artificial Sequence
  LRRK2 RNA guide
agaaugaugaugagggggaa

SEQ ID NO: 3497 - RNA, 20 nt, Artificial Sequence
  LRRK2 RNA guide
agagaaugaugaugaggggg

SEQ ID NO: 3498 - RNA, 20 nt, Artificial Sequence
  LRRK2 RNA guide
agggggaaaaagauaaauug

SEQ ID NO: 3499 - RNA, 20 nt, Artificial Sequence
  LRRK2 RNA guide
aucuuuuucccccucaucau

SEQ ID NO: 3500 - RNA, 20 nt, Artificial Sequence
  LRRK2 RNA guide
augagggggaaaaagauaaa

SEQ ID NO: 3501 - RNA, 20 nt, Artificial Sequence
  LRRK2 RNA guide
augaugagggggaaaaagau

SEQ ID NO: 3502 - RNA, 20 nt, Artificial Sequence
  LRRK2 RNA guide
augaugaugagggggaaaaa

SEQ ID NO: 3503 - RNA, 20 nt, Artificial Sequence
  LRRK2 RNA guide
auuuaucuuuuucccccuca

SEQ ID NO: 3504 - RNA, 20 nt, Artificial Sequence
  LRRK2 RNA guide
caagagaaugaugaugaggg

SEQ ID NO: 3505 - RNA, 20 nt, Artificial Sequence
  LRRK2 RNA guide
caauuuaucuuuuucccccu

SEQ ID NO: 3506 - RNA, 20 nt, Artificial Sequence
  LRRK2 RNA guide
cagccaaaacaauuuaucuu

SEQ ID NO: 3507 - RNA, 20 nt, Artificial Sequence
  LRRK2 RNA guide
ccagccaaaacaauuuaucu

SEQ ID NO: 3508 - RNA, 20 nt, Artificial Sequence
  LRRK2 RNA guide
cuuuuucccccucaucauca

SEQ ID NO: 3509 - RNA, 20 nt, Artificial Sequence
  LRRK2 RNA guide
gaaugaugaugagggggaaa

SEQ ID NO: 3510 - RNA, 20 nt, Artificial Sequence
  LRRK2 RNA guide
gagaaugaugaugaggggga

SEQ ID NO: 3511 - RNA, 20 nt, Artificial Sequence
  LRRK2 RNA guide
gagggggaaaaagauaaauu

SEQ ID NO: 3512 - RNA, 20 nt, Artificial Sequence
  LRRK2 RNA guide
gaugagggggaaaaagauaa

SEQ ID NO: 3513 - RNA, 20 nt, Artificial Sequence
  LRRK2 RNA guide
gaugaugagggggaaaaaga

SEQ ID NO: 3514 - RNA, 20 nt, Artificial Sequence
  LRRK2 RNA guide
ggggaaaaagauaaauuguu

SEQ ID NO: 3515 - RNA, 20 nt, Artificial Sequence
  LRRK2 RNA guide
gggggaaaaagauaaauugu

SEQ ID NO: 3516 - RNA, 20 nt, Artificial Sequence
  LRRK2 RNA guide
uaucuuuuucccccucauca

SEQ ID NO: 3517 - RNA, 20 nt, Artificial Sequence
  LRRK2 RNA guide
uccagccaaaacaauuuauc

SEQ ID NO: 3518 - RNA, 20 nt, Artificial Sequence
  LRRK2 RNA guide
ucuuuuucccccucaucauc

SEQ ID NO: 3519 - RNA, 20 nt, Artificial Sequence
  LRRK2 RNA guide
ugagggggaaaaagauaaau

SEQ ID NO: 3520 - RNA, 20 nt, Artificial Sequence
  LRRK2 RNA guide
ugaugagggggaaaaagaua

SEQ ID NO: 3521 - RNA, 20 nt, Artificial Sequence
  LRRK2 RNA guide
ugaugaugagggggaaaaag

SEQ ID NO: 3522 - RNA, 20 nt, Artificial Sequence
  LRRK2 RNA guide
uuaucuuuuucccccucauc

SEQ ID NO: 3523 - RNA, 20 nt, Artificial Sequence
  LRRK2 RNA guide
uuccagccaaaacaauuuau

SEQ ID NO: 3524 - RNA, 20 nt, Artificial Sequence
  LRRK2 RNA guide
uuuaucuuuuucccccucau

SEQ ID NO: 3525 - RNA, 20 nt, Artificial Sequence
  LRRK2 RNA guide
uuuucccccucaucaucauu

SEQ ID NO: 3526 - RNA, 20 nt, Artificial Sequence
  LRRK2 RNA guide
uuuuucccccucaucaucau

SEQ ID NO: 3527 - RNA, 21 nt, Artificial Sequence
  LRRK2 RNA guide
aacaauuuaucuuuuuccccc

SEQ ID NO: 3528 - RNA, 21 nt, Artificial Sequence
  LRRK2 RNA guide
aagagaaugaugaugaggggg

SEQ ID NO: 3529 - RNA, 21 nt, Artificial Sequence
  LRRK2 RNA guide
aaugaugaugagggggaaaaa

SEQ ID NO: 3530 - RNA, 21 nt, Artificial Sequence
  LRRK2 RNA guide
aauuuaucuuuuucccccuca

SEQ ID NO: 3531 - RNA, 21 nt, Artificial Sequence
  LRRK2 RNA guide
acaauuuaucuuuuucccccu

SEQ ID NO: 3532 - RNA, 21 nt, Artificial Sequence
  LRRK2 RNA guide
agaaugaugaugagggggaaa

SEQ ID NO: 3533 - RNA, 21 nt, Artificial Sequence
  LRRK2 RNA guide
agagaaugaugaugaggggga

SEQ ID NO: 3534 - RNA, 21 nt, Artificial Sequence
  LRRK2 RNA guide
agggggaaaaagauaaauugu

SEQ ID NO: 3535 - RNA, 21 nt, Artificial Sequence
  LRRK2 RNA guide
aucuuuuucccccucaucauc

SEQ ID NO: 3536 - RNA, 21 nt, Artificial Sequence
  LRRK2 RNA guide
augagggggaaaaagauaaau

SEQ ID NO: 3537 - RNA, 21 nt, Artificial Sequence
  LRRK2 RNA guide
augaugagggggaaaaagaua

SEQ ID NO: 3538 - RNA, 21 nt, Artificial Sequence
  LRRK2 RNA guide
augaugaugagggggaaaaag

SEQ ID NO: 3539 - RNA, 21 nt, Artificial Sequence
  LRRK2 RNA guide
auuuaucuuuuucccccucau

SEQ ID NO: 3540 - RNA, 21 nt, Artificial Sequence
  LRRK2 RNA guide
caagagaaugaugaugagggg

SEQ ID NO: 3541 - RNA, 21 nt, Artificial Sequence
  LRRK2 RNA guide
caauuuaucuuuuucccccuc

SEQ ID NO: 3542 - RNA, 21 nt, Artificial Sequence
  LRRK2 RNA guide
ccagccaaaacaauuuaucuu

SEQ ID NO: 3543 - RNA, 21 nt, Artificial Sequence
  LRRK2 RNA guide
cuuccagccaaaacaauuuau

SEQ ID NO: 3544 - RNA, 21 nt, Artificial Sequence
  LRRK2 RNA guide
cuuuuucccccucaucaucau

SEQ ID NO: 3545 - RNA, 21 nt, Artificial Sequence
  LRRK2 RNA guide
gaaugaugaugagggggaaaa

SEQ ID NO: 3546 - RNA, 21 nt, Artificial Sequence
  LRRK2 RNA guide
gagaaugaugaugagggggaa

SEQ ID NO: 3547 - RNA, 21 nt, Artificial Sequence
  LRRK2 RNA guide
gagggggaaaaagauaaauug

SEQ ID NO: 3548 - RNA, 21 nt, Artificial Sequence
  LRRK2 RNA guide
gaugagggggaaaaagauaaa

SEQ ID NO: 3549 - RNA, 21 nt, Artificial Sequence
  LRRK2 RNA guide
gaugaugagggggaaaaagau

SEQ ID NO: 3550 - RNA, 21 nt, Artificial Sequence
  LRRK2 RNA guide
gcuuccagccaaaacaauuua

SEQ ID NO: 3551 - RNA, 21 nt, Artificial Sequence
  LRRK2 RNA guide
gggggaaaaagauaaauuguu

SEQ ID NO: 3552 - RNA, 21 nt, Artificial Sequence
  LRRK2 RNA guide
uaucuuuuucccccucaucau

SEQ ID NO: 3553 - RNA, 21 nt, Artificial Sequence
  LRRK2 RNA guide
ucaagagaaugaugaugaggg

SEQ ID NO: 3554 - RNA, 21 nt, Artificial Sequence
  LRRK2 RNA guide
uccagccaaaacaauuuaucu

SEQ ID NO: 3555 - RNA, 21 nt, Artificial Sequence
  LRRK2 RNA guide
ucuuuuucccccucaucauca

SEQ ID NO: 3556 - RNA, 21 nt, Artificial Sequence
  LRRK2 RNA guide
ugagggggaaaaagauaaauu

SEQ ID NO: 3557 - RNA, 21 nt, Artificial Sequence
  LRRK2 RNA guide
ugaugagggggaaaaagauaa

SEQ ID NO: 3558 - RNA, 21 nt, Artificial Sequence
  LRRK2 RNA guide
ugaugaugagggggaaaaaga

SEQ ID NO: 3559 - RNA, 21 nt, Artificial Sequence
  LRRK2 RNA guide
uuaucuuuuucccccucauca

SEQ ID NO: 3560 - RNA, 21 nt, Artificial Sequence
  LRRK2 RNA guide
uuccagccaaaacaauuuauc

SEQ ID NO: 3561 - RNA, 21 nt, Artificial Sequence
  LRRK2 RNA guide
uuuaucuuuuucccccucauc

SEQ ID NO: 3562 - RNA, 21 nt, Artificial Sequence
  LRRK2 RNA guide
uuuucccccucaucaucauuc

SEQ ID NO: 3563 - RNA, 21 nt, Artificial Sequence
  LRRK2 RNA guide
uuuuucccccucaucaucauu

SEQ ID NO: 3564 - RNA, 22 nt, Artificial Sequence
  LRRK2 RNA guide
aaacaauuuaucuuuuuccccc

SEQ ID NO: 3565 - RNA, 22 nt, Artificial Sequence
  LRRK2 RNA guide
aacaauuuaucuuuuucccccu

SEQ ID NO: 3566 - RNA, 22 nt, Artificial Sequence
  LRRK2 RNA guide
aagagaaugaugaugaggggga

SEQ ID NO: 3567 - RNA, 22 nt, Artificial Sequence
  LRRK2 RNA guide
aaugaugaugagggggaaaaag

SEQ ID NO: 3568 - RNA, 22 nt, Artificial Sequence
  LRRK2 RNA guide
aauuuaucuuuuucccccucau

SEQ ID NO: 3569 - RNA, 22 nt, Artificial Sequence
  LRRK2 RNA guide
acaauuuaucuuuuucccccuc

SEQ ID NO: 3570 - RNA, 22 nt, Artificial Sequence
  LRRK2 RNA guide
agaaugaugaugagggggaaaa

SEQ ID NO: 3571 - RNA, 22 nt, Artificial Sequence
  LRRK2 RNA guide
agagaaugaugaugagggggaa

SEQ ID NO: 3572 - RNA, 22 nt, Artificial Sequence
  LRRK2 RNA guide
agggggaaaaagauaaauuguu

SEQ ID NO: 3573 - RNA, 22 nt, Artificial Sequence
  LRRK2 RNA guide
aucaagagaaugaugaugaggg

SEQ ID NO: 3574 - RNA, 22 nt, Artificial Sequence
  LRRK2 RNA guide
aucuuuuucccccucaucauca

SEQ ID NO: 3575 - RNA, 22 nt, Artificial Sequence
  LRRK2 RNA guide
augagggggaaaaagauaaauu

SEQ ID NO: 3576 - RNA, 22 nt, Artificial Sequence
  LRRK2 RNA guide
augaugagggggaaaaagauaa

SEQ ID NO: 3577 - RNA, 22 nt, Artificial Sequence
  LRRK2 RNA guide
augaugaugagggggaaaaaga

SEQ ID NO: 3578 - RNA, 22 nt, Artificial Sequence
  LRRK2 RNA guide
auuuaucuuuuucccccucauc

SEQ ID NO: 3579 - RNA, 22 nt, Artificial Sequence
  LRRK2 RNA guide
caagagaaugaugaugaggggg

SEQ ID NO: 3580 - RNA, 22 nt, Artificial Sequence
  LRRK2 RNA guide
caauuuaucuuuuucccccuca

SEQ ID NO: 3581 - RNA, 22 nt, Artificial Sequence
  LRRK2 RNA guide
ccagccaaaacaauuuaucuuu

SEQ ID NO: 3582 - RNA, 22 nt, Artificial Sequence
  LRRK2 RNA guide
cuuccagccaaaacaauuuauc

SEQ ID NO: 3583 - RNA, 22 nt, Artificial Sequence
  LRRK2 RNA guide
cuuuuucccccucaucaucauu

SEQ ID NO: 3584 - RNA, 22 nt, Artificial Sequence
  LRRK2 RNA guide
gaaugaugaugagggggaaaaa

SEQ ID NO: 3585 - RNA, 22 nt, Artificial Sequence
  LRRK2 RNA guide
gagaaugaugaugagggggaaa

SEQ ID NO: 3586 - RNA, 22 nt, Artificial Sequence
  LRRK2 RNA guide
gagggggaaaaagauaaauugu

SEQ ID NO: 3587 - RNA, 22 nt, Artificial Sequence
  LRRK2 RNA guide
gaugagggggaaaaagauaaau

SEQ ID NO: 3588 - RNA, 22 nt, Artificial Sequence
  LRRK2 RNA guide
gaugaugagggggaaaaagaua

SEQ ID NO: 3589 - RNA, 22 nt, Artificial Sequence
  LRRK2 RNA guide
gcuuccagccaaaacaauuuau

SEQ ID NO: 3590 - RNA, 22 nt, Artificial Sequence
  LRRK2 RNA guide
ggcuuccagccaaaacaauuua

SEQ ID NO: 3591 - RNA, 22 nt, Artificial Sequence
  LRRK2 RNA guide
gggggaaaaagauaaauuguuu

SEQ ID NO: 3592 - RNA, 22 nt, Artificial Sequence
  LRRK2 RNA guide
uaucuuuuucccccucaucauc

SEQ ID NO: 3593 - RNA, 22 nt, Artificial Sequence
  LRRK2 RNA guide
ucaagagaaugaugaugagggg

SEQ ID NO: 3594 - RNA, 22 nt, Artificial Sequence
  LRRK2 RNA guide
uccagccaaaacaauuuaucuu

SEQ ID NO: 3595 - RNA, 22 nt, Artificial Sequence
  LRRK2 RNA guide
ucuuuuucccccucaucaucau

SEQ ID NO: 3596 - RNA, 22 nt, Artificial Sequence
  LRRK2 RNA guide
ugagggggaaaaagauaaauug

SEQ ID NO: 3597 - RNA, 22 nt, Artificial Sequence
  LRRK2 RNA guide
ugaugagggggaaaaagauaaa

SEQ ID NO: 3598 - RNA, 22 nt, Artificial Sequence
  LRRK2 RNA guide
ugaugaugagggggaaaaagau

SEQ ID NO: 3599 - RNA, 22 nt, Artificial Sequence
  LRRK2 RNA guide
uuaucuuuuucccccucaucau

SEQ ID NO: 3600 - RNA, 22 nt, Artificial Sequence
  LRRK2 RNA guide
uuccagccaaaacaauuuaucu

SEQ ID NO: 3601 - RNA, 22 nt, Artificial Sequence
  LRRK2 RNA guide
uuuaucuuuuucccccucauca

SEQ ID NO: 3602 - RNA, 22 nt, Artificial Sequence
  LRRK2 RNA guide
uuuucccccucaucaucauucu

SEQ ID NO: 3603 - RNA, 22 nt, Artificial Sequence
  LRRK2 RNA guide
uuuuucccccucaucaucauuc

SEQ ID NO: 3604 - RNA, 20 nt, Artificial Sequence
  LRRK2 RNA guide
aaagagcaagcacgugcagg

SEQ ID NO: 3605 - RNA, 20 nt, Artificial Sequence
  LRRK2 RNA guide
aacguggcauagaaagagca

SEQ ID NO: 3606 - RNA, 20 nt, Artificial Sequence
  LRRK2 RNA guide
aagagcaagcacgugcaggu

SEQ ID NO: 3607 - RNA, 20 nt, Artificial Sequence
  LRRK2 RNA guide
aagcauuaacguggcauaga

SEQ ID NO: 3608 - RNA, 20 nt, Artificial Sequence
  LRRK2 RNA guide
accugcacgugcuugcucuu

SEQ ID NO: 3609 - RNA, 20 nt, Artificial Sequence
  LRRK2 RNA guide
acgugcuugcucuuucuaug

SEQ ID NO: 3610 - RNA, 20 nt, Artificial Sequence
  LRRK2 RNA guide
acguggcauagaaagagcaa

SEQ ID NO: 3611 - RNA, 20 nt, Artificial Sequence
  LRRK2 RNA guide
agaaagagcaagcacgugca

SEQ ID NO: 3612 - RNA, 20 nt, Artificial Sequence
  LRRK2 RNA guide
agagcaagcacgugcaggua

SEQ ID NO: 3613 - RNA, 20 nt, Artificial Sequence
  LRRK2 RNA guide
agaguccuaccugcacgugc

SEQ ID NO: 3614 - RNA, 20 nt, Artificial Sequence
  LRRK2 RNA guide
agcaagcacgugcagguagg

SEQ ID NO: 3615 - RNA, 20 nt, Artificial Sequence
  LRRK2 RNA guide
agcauuaacguggcauagaa

SEQ ID NO: 3616 - RNA, 20 nt, Artificial Sequence
  LRRK2 RNA guide
aguccuaccugcacgugcuu

SEQ ID NO: 3617 - RNA, 20 nt, Artificial Sequence
  LRRK2 RNA guide
auagaaagagcaagcacgug

SEQ ID NO: 3618 - RNA, 20 nt, Artificial Sequence
  LRRK2 RNA guide
auuaacguggcauagaaaga

SEQ ID NO: 3619 - RNA, 20 nt, Artificial Sequence
  LRRK2 RNA guide
cacgugcuugcucuuucuau

SEQ ID NO: 3620 - RNA, 20 nt, Artificial Sequence
  LRRK2 RNA guide
cauagaaagagcaagcacgu

SEQ ID NO: 3621 - RNA, 20 nt, Artificial Sequence
  LRRK2 RNA guide
cauuaacguggcauagaaag

SEQ ID NO: 3622 - RNA, 20 nt, Artificial Sequence
  LRRK2 RNA guide
ccuaccugcacgugcuugcu

SEQ ID NO: 3623 - RNA, 20 nt, Artificial Sequence
  LRRK2 RNA guide
ccugcacgugcuugcucuuu

SEQ ID NO: 3624 - RNA, 20 nt, Artificial Sequence
  LRRK2 RNA guide
cgugcuugcucuuucuaugc

SEQ ID NO: 3625 - RNA, 20 nt, Artificial Sequence
  LRRK2 RNA guide
cguggcauagaaagagcaag

SEQ ID NO: 3626 - RNA, 20 nt, Artificial Sequence
  LRRK2 RNA guide
cuaccugcacgugcuugcuc

SEQ ID NO: 3627 - RNA, 20 nt, Artificial Sequence
  LRRK2 RNA guide
cugcacgugcuugcucuuuc

SEQ ID NO: 3628 - RNA, 20 nt, Artificial Sequence
  LRRK2 RNA guide
cuugcucuuucuaugccacg

SEQ ID NO: 3629 - RNA, 20 nt, Artificial Sequence
  LRRK2 RNA guide
gaaagagcaagcacgugcag

SEQ ID NO: 3630 - RNA, 20 nt, Artificial Sequence
  LRRK2 RNA guide
gagaguccuaccugcacgug

SEQ ID NO: 3631 - RNA, 20 nt, Artificial Sequence
  LRRK2 RNA guide
gagcaagcacgugcagguag

SEQ ID NO: 3632 - RNA, 20 nt, Artificial Sequence
  LRRK2 RNA guide
gaguccuaccugcacgugcu

SEQ ID NO: 3633 - RNA, 20 nt, Artificial Sequence
  LRRK2 RNA guide
gcacgugcuugcucuuucua

SEQ ID NO: 3634 - RNA, 20 nt, Artificial Sequence
  LRRK2 RNA guide
gcauagaaagagcaagcacg

SEQ ID NO: 3635 - RNA, 20 nt, Artificial Sequence
  LRRK2 RNA guide
gcauuaacguggcauagaaa

SEQ ID NO: 3636 - RNA, 20 nt, Artificial Sequence
  LRRK2 RNA guide
gcucuuucuaugccacguua

SEQ ID NO: 3637 - RNA, 20 nt, Artificial Sequence
  LRRK2 RNA guide
gcuugcucuuucuaugccac

SEQ ID NO: 3638 - RNA, 20 nt, Artificial Sequence
  LRRK2 RNA guide
ggcauagaaagagcaagcac

SEQ ID NO: 3639 - RNA, 20 nt, Artificial Sequence
  LRRK2 RNA guide
guccuaccugcacgugcuug

SEQ ID NO: 3640 - RNA, 20 nt, Artificial Sequence
  LRRK2 RNA guide
gugcuugcucuuucuaugcc

SEQ ID NO: 3641 - RNA, 20 nt, Artificial Sequence
  LRRK2 RNA guide
guggcauagaaagagcaagc

SEQ ID NO: 3642 - RNA, 20 nt, Artificial Sequence
  LRRK2 RNA guide
uaacguggcauagaaagagc

SEQ ID NO: 3643 - RNA, 20 nt, Artificial Sequence
  LRRK2 RNA guide
uaccugcacgugcuugcucu

SEQ ID NO: 3644 - RNA, 20 nt, Artificial Sequence
  LRRK2 RNA guide
uagaaagagcaagcacgugc

SEQ ID NO: 3645 - RNA, 20 nt, Artificial Sequence
  LRRK2 RNA guide
uccuaccugcacgugcuugc

SEQ ID NO: 3646 - RNA, 20 nt, Artificial Sequence
  LRRK2 RNA guide
ugcacgugcuugcucuuucu

SEQ ID NO: 3647 - RNA, 20 nt, Artificial Sequence
  LRRK2 RNA guide
ugcucuuucuaugccacguu

SEQ ID NO: 3648 - RNA, 20 nt, Artificial Sequence
  LRRK2 RNA guide
ugcuugcucuuucuaugcca

SEQ ID NO: 3649 - RNA, 20 nt, Artificial Sequence
  LRRK2 RNA guide
uggcauagaaagagcaagca

SEQ ID NO: 3650 - RNA, 20 nt, Artificial Sequence
  LRRK2 RNA guide
uuaacguggcauagaaagag

SEQ ID NO: 3651 - RNA, 20 nt, Artificial Sequence
  LRRK2 RNA guide
uugcucuuucuaugccacgu

SEQ ID NO: 3652 - RNA, 21 nt, Artificial Sequence
  LRRK2 RNA guide
aaagagcaagcacgugcaggu

SEQ ID NO: 3653 - RNA, 21 nt, Artificial Sequence
  LRRK2 RNA guide
aaagcauuaacguggcauaga

SEQ ID NO: 3654 - RNA, 21 nt, Artificial Sequence
  LRRK2 RNA guide
aacguggcauagaaagagcaa

SEQ ID NO: 3655 - RNA, 21 nt, Artificial Sequence
  LRRK2 RNA guide
aagagcaagcacgugcaggua

SEQ ID NO: 3656 - RNA, 21 nt, Artificial Sequence
  LRRK2 RNA guide
aagcauuaacguggcauagaa

SEQ ID NO: 3657 - RNA, 21 nt, Artificial Sequence
  LRRK2 RNA guide
accugcacgugcuugcucuuu

SEQ ID NO: 3658 - RNA, 21 nt, Artificial Sequence
  LRRK2 RNA guide
acgugcuugcucuuucuaugc

SEQ ID NO: 3659 - RNA, 21 nt, Artificial Sequence
  LRRK2 RNA guide
acguggcauagaaagagcaag

SEQ ID NO: 3660 - RNA, 21 nt, Artificial Sequence
  LRRK2 RNA guide
agaaagagcaagcacgugcag

SEQ ID NO: 3661 - RNA, 21 nt, Artificial Sequence
  LRRK2 RNA guide
agagcaagcacgugcagguag

SEQ ID NO: 3662 - RNA, 21 nt, Artificial Sequence
  LRRK2 RNA guide
agaguccuaccugcacgugcu

SEQ ID NO: 3663 - RNA, 21 nt, Artificial Sequence
  LRRK2 RNA guide
agcaagcacgugcagguagga

SEQ ID NO: 3664 - RNA, 21 nt, Artificial Sequence
  LRRK2 RNA guide
agcauuaacguggcauagaaa

SEQ ID NO: 3665 - RNA, 21 nt, Artificial Sequence
  LRRK2 RNA guide
aguccuaccugcacgugcuug

SEQ ID NO: 3666 - RNA, 21 nt, Artificial Sequence
  LRRK2 RNA guide
auagaaagagcaagcacgugc

SEQ ID NO: 3667 - RNA, 21 nt, Artificial Sequence
  LRRK2 RNA guide
auuaacguggcauagaaagag

SEQ ID NO: 3668 - RNA, 21 nt, Artificial Sequence
  LRRK2 RNA guide
cacgugcuugcucuuucuaug

SEQ ID NO: 3669 - RNA, 21 nt, Artificial Sequence
  LRRK2 RNA guide
cauagaaagagcaagcacgug

SEQ ID NO: 3670 - RNA, 21 nt, Artificial Sequence
  LRRK2 RNA guide
cauuaacguggcauagaaaga

SEQ ID NO: 3671 - RNA, 21 nt, Artificial Sequence
  LRRK2 RNA guide
ccuaccugcacgugcuugcuc

SEQ ID NO: 3672 - RNA, 21 nt, Artificial Sequence
  LRRK2 RNA guide
ccugcacgugcuugcucuuuc

SEQ ID NO: 3673 - RNA, 21 nt, Artificial Sequence
  LRRK2 RNA guide
cgugcuugcucuuucuaugcc

SEQ ID NO: 3674 - RNA, 21 nt, Artificial Sequence
  LRRK2 RNA guide
cguggcauagaaagagcaagc

SEQ ID NO: 3675 - RNA, 21 nt, Artificial Sequence
  LRRK2 RNA guide
cuaccugcacgugcuugcucu

SEQ ID NO: 3676 - RNA, 21 nt, Artificial Sequence
  LRRK2 RNA guide
cugcacgugcuugcucuuucu

SEQ ID NO: 3677 - RNA, 21 nt, Artificial Sequence
  LRRK2 RNA guide
cuugcucuuucuaugccacgu

SEQ ID NO: 3678 - RNA, 21 nt, Artificial Sequence
  LRRK2 RNA guide
gaaagagcaagcacgugcagg

SEQ ID NO: 3679 - RNA, 21 nt, Artificial Sequence
  LRRK2 RNA guide
gagaguccuaccugcacgugc

SEQ ID NO: 3680 - RNA, 21 nt, Artificial Sequence
  LRRK2 RNA guide
gagcaagcacgugcagguagg

SEQ ID NO: 3681 - RNA, 21 nt, Artificial Sequence
  LRRK2 RNA guide
gaguccuaccugcacgugcuu

SEQ ID NO: 3682 - RNA, 21 nt, Artificial Sequence
  LRRK2 RNA guide
gcacgugcuugcucuuucuau

SEQ ID NO: 3683 - RNA, 21 nt, Artificial Sequence
  LRRK2 RNA guide
gcauagaaagagcaagcacgu

SEQ ID NO: 3684 - RNA, 21 nt, Artificial Sequence
  LRRK2 RNA guide
gcauuaacguggcauagaaag

SEQ ID NO: 3685 - RNA, 21 nt, Artificial Sequence
  LRRK2 RNA guide
gcucuuucuaugccacguuaa

SEQ ID NO: 3686 - RNA, 21 nt, Artificial Sequence
  LRRK2 RNA guide
gcuugcucuuucuaugccacg

SEQ ID NO: 3687 - RNA, 21 nt, Artificial Sequence
  LRRK2 RNA guide
ggcauagaaagagcaagcacg

SEQ ID NO: 3688 - RNA, 21 nt, Artificial Sequence
  LRRK2 RNA guide
guccuaccugcacgugcuugc

SEQ ID NO: 3689 - RNA, 21 nt, Artificial Sequence
  LRRK2 RNA guide
gugcuugcucuuucuaugcca

SEQ ID NO: 3690 - RNA, 21 nt, Artificial Sequence
  LRRK2 RNA guide
guggcauagaaagagcaagca

SEQ ID NO: 3691 - RNA, 21 nt, Artificial Sequence
  LRRK2 RNA guide
uaacguggcauagaaagagca

SEQ ID NO: 3692 - RNA, 21 nt, Artificial Sequence
  LRRK2 RNA guide
uaccugcacgugcuugcucuu

SEQ ID NO: 3693 - RNA, 21 nt, Artificial Sequence
  LRRK2 RNA guide
uagaaagagcaagcacgugca

SEQ ID NO: 3694 - RNA, 21 nt, Artificial Sequence
  LRRK2 RNA guide
uccuaccugcacgugcuugcu

SEQ ID NO: 3695 - RNA, 21 nt, Artificial Sequence
  LRRK2 RNA guide
ugagaguccuaccugcacgug

SEQ ID NO: 3696 - RNA, 21 nt, Artificial Sequence
  LRRK2 RNA guide
ugcacgugcuugcucuuucua

SEQ ID NO: 3697 - RNA, 21 nt, Artificial Sequence
  LRRK2 RNA guide
ugcucuuucuaugccacguua

SEQ ID NO: 3698 - RNA, 21 nt, Artificial Sequence
  LRRK2 RNA guide
ugcuugcucuuucuaugccac

SEQ ID NO: 3699 - RNA, 21 nt, Artificial Sequence
  LRRK2 RNA guide
uggcauagaaagagcaagcac

SEQ ID NO: 3700 - RNA, 21 nt, Artificial Sequence
  LRRK2 RNA guide
uuaacguggcauagaaagagc

SEQ ID NO: 3701 - RNA, 21 nt, Artificial Sequence
  LRRK2 RNA guide
uugcucuuucuaugccacguu

SEQ ID NO: 3702 - RNA, 22 nt, Artificial Sequence
  LRRK2 RNA guide
aaagagcaagcacgugcaggua

SEQ ID NO: 3703 - RNA, 22 nt, Artificial Sequence
  LRRK2 RNA guide
aaagcauuaacguggcauagaa

SEQ ID NO: 3704 - RNA, 22 nt, Artificial Sequence
  LRRK2 RNA guide
aacguggcauagaaagagcaag

SEQ ID NO: 3705 - RNA, 22 nt, Artificial Sequence
  LRRK2 RNA guide
aagagcaagcacgugcagguag

SEQ ID NO: 3706 - RNA, 22 nt, Artificial Sequence
  LRRK2 RNA guide
aagcauuaacguggcauagaaa

SEQ ID NO: 3707 - RNA, 22 nt, Artificial Sequence
  LRRK2 RNA guide
accugcacgugcuugcucuuuc

SEQ ID NO: 3708 - RNA, 22 nt, Artificial Sequence
  LRRK2 RNA guide
acgugcuugcucuuucuaugcc

SEQ ID NO: 3709 - RNA, 22 nt, Artificial Sequence
  LRRK2 RNA guide
acguggcauagaaagagcaagc

SEQ ID NO: 3710 - RNA, 22 nt, Artificial Sequence
  LRRK2 RNA guide
agaaagagcaagcacgugcagg

SEQ ID NO: 3711 - RNA, 22 nt, Artificial Sequence
  LRRK2 RNA guide
agagcaagcacgugcagguagg

SEQ ID NO: 3712 - RNA, 22 nt, Artificial Sequence
  LRRK2 RNA guide
agaguccuaccugcacgugcuu

SEQ ID NO: 3713 - RNA, 22 nt, Artificial Sequence
  LRRK2 RNA guide
agcaagcacgugcagguaggac

SEQ ID NO: 3714 - RNA, 22 nt, Artificial Sequence
  LRRK2 RNA guide
agcauuaacguggcauagaaag

SEQ ID NO: 3715 - RNA, 22 nt, Artificial Sequence
  LRRK2 RNA guide
aguccuaccugcacgugcuugc

SEQ ID NO: 3716 - RNA, 22 nt, Artificial Sequence
  LRRK2 RNA guide
auagaaagagcaagcacgugca

SEQ ID NO: 3717 - RNA, 22 nt, Artificial Sequence
  LRRK2 RNA guide
augagaguccuaccugcacgug

SEQ ID NO: 3718 - RNA, 22 nt, Artificial Sequence
  LRRK2 RNA guide
auuaacguggcauagaaagagc

SEQ ID NO: 3719 - RNA, 22 nt, Artificial Sequence
  LRRK2 RNA guide
caaagcauuaacguggcauaga

SEQ ID NO: 3720 - RNA, 22 nt, Artificial Sequence
  LRRK2 RNA guide
cacgugcuugcucuuucuaugc

SEQ ID NO: 3721 - RNA, 22 nt, Artificial Sequence
  LRRK2 RNA guide
cauagaaagagcaagcacgugc

SEQ ID NO: 3722 - RNA, 22 nt, Artificial Sequence
  LRRK2 RNA guide
cauuaacguggcauagaaagag

SEQ ID NO: 3723 - RNA, 22 nt, Artificial Sequence
  LRRK2 RNA guide
ccuaccugcacgugcuugcucu

SEQ ID NO: 3724 - RNA, 22 nt, Artificial Sequence
  LRRK2 RNA guide
ccugcacgugcuugcucuuucu

SEQ ID NO: 3725 - RNA, 22 nt, Artificial Sequence
  LRRK2 RNA guide
cgugcuugcucuuucuaugcca

SEQ ID NO: 3726 - RNA, 22 nt, Artificial Sequence
  LRRK2 RNA guide
cguggcauagaaagagcaagca

SEQ ID NO: 3727 - RNA, 22 nt, Artificial Sequence
  LRRK2 RNA guide
cuaccugcacgugcuugcucuu

SEQ ID NO: 3728 - RNA, 22 nt, Artificial Sequence
  LRRK2 RNA guide
cugcacgugcuugcucuuucua

SEQ ID NO: 3729 - RNA, 22 nt, Artificial Sequence
  LRRK2 RNA guide
cuugcucuuucuaugccacguu

SEQ ID NO: 3730 - RNA, 22 nt, Artificial Sequence
  LRRK2 RNA guide
gaaagagcaagcacgugcaggu

SEQ ID NO: 3731 - RNA, 22 nt, Artificial Sequence
  LRRK2 RNA guide
gagaguccuaccugcacgugcu

SEQ ID NO: 3732 - RNA, 22 nt, Artificial Sequence
  LRRK2 RNA guide
gagcaagcacgugcagguagga

SEQ ID NO: 3733 - RNA, 22 nt, Artificial Sequence
  LRRK2 RNA guide
gaguccuaccugcacgugcuug

SEQ ID NO: 3734 - RNA, 22 nt, Artificial Sequence
  LRRK2 RNA guide
gcacgugcuugcucuuucuaug

SEQ ID NO: 3735 - RNA, 22 nt, Artificial Sequence
  LRRK2 RNA guide
gcauagaaagagcaagcacgug

SEQ ID NO: 3736 - RNA, 22 nt, Artificial Sequence
  LRRK2 RNA guide
gcauuaacguggcauagaaaga

SEQ ID NO: 3737 - RNA, 22 nt, Artificial Sequence
  LRRK2 RNA guide
gcucuuucuaugccacguuaau

SEQ ID NO: 3738 - RNA, 22 nt, Artificial Sequence
  LRRK2 RNA guide
gcuugcucuuucuaugccacgu

SEQ ID NO: 3739 - RNA, 22 nt, Artificial Sequence
  LRRK2 RNA guide
ggcauagaaagagcaagcacgu

SEQ ID NO: 3740 - RNA, 22 nt, Artificial Sequence
  LRRK2 RNA guide
guccuaccugcacgugcuugcu

SEQ ID NO: 3741 - RNA, 22 nt, Artificial Sequence
  LRRK2 RNA guide
gugcuugcucuuucuaugccac

SEQ ID NO: 3742 - RNA, 22 nt, Artificial Sequence
  LRRK2 RNA guide
guggcauagaaagagcaagcac

SEQ ID NO: 3743 - RNA, 22 nt, Artificial Sequence
  LRRK2 RNA guide
uaacguggcauagaaagagcaa

SEQ ID NO: 3744 - RNA, 22 nt, Artificial Sequence
  LRRK2 RNA guide
uaccugcacgugcuugcucuuu

SEQ ID NO: 3745 - RNA, 22 nt, Artificial Sequence
  LRRK2 RNA guide
uagaaagagcaagcacgugcag

SEQ ID NO: 3746 - RNA, 22 nt, Artificial Sequence
  LRRK2 RNA guide
uccuaccugcacgugcuugcuc

SEQ ID NO: 3747 - RNA, 22 nt, Artificial Sequence
  LRRK2 RNA guide
ugagaguccuaccugcacgugc

SEQ ID NO: 3748 - RNA, 22 nt, Artificial Sequence
  LRRK2 RNA guide
ugcacgugcuugcucuuucuau

SEQ ID NO: 3749 - RNA, 22 nt, Artificial Sequence
  LRRK2 RNA guide
ugcucuuucuaugccacguuaa

SEQ ID NO: 3750 - RNA, 22 nt, Artificial Sequence
  LRRK2 RNA guide
ugcuugcucuuucuaugccacg

SEQ ID NO: 3751 - RNA, 22 nt, Artificial Sequence
  LRRK2 RNA guide
uggcauagaaagagcaagcacg

SEQ ID NO: 3752 - RNA, 22 nt, Artificial Sequence
  LRRK2 RNA guide
uuaacguggcauagaaagagca

SEQ ID NO: 3753 - RNA, 22 nt, Artificial Sequence
  LRRK2 RNA guide
uugcucuuucuaugccacguua

SEQ ID NO: 3754 - RNA, 20 nt, Artificial Sequence
  LRRK2 RNA guide
aaagaacaagaacgugcagg

SEQ ID NO: 3755 - RNA, 20 nt, Artificial Sequence
  LRRK2 RNA guide
aacaagaacgugcagguagg

SEQ ID NO: 3756 - RNA, 20 nt, Artificial Sequence
  LRRK2 RNA guide
aacguggcauagaaagaaca

SEQ ID NO: 3757 - RNA, 20 nt, Artificial Sequence
  LRRK2 RNA guide
aagaacaagaacgugcaggu

SEQ ID NO: 3758 - RNA, 20 nt, Artificial Sequence
  LRRK2 RNA guide
aagaacgugcagguaggacu

SEQ ID NO: 3759 - RNA, 20 nt, Artificial Sequence
  LRRK2 RNA guide
acaagaacgugcagguagga

SEQ ID NO: 3760 - RNA, 20 nt, Artificial Sequence
  LRRK2 RNA guide
accugcacguucuuguucuu

SEQ ID NO: 3761 - RNA, 20 nt, Artificial Sequence
  LRRK2 RNA guide
acguggcauagaaagaacaa

SEQ ID NO: 3762 - RNA, 20 nt, Artificial Sequence
  LRRK2 RNA guide
acguucuuguucuuucuaug

SEQ ID NO: 3763 - RNA, 20 nt, Artificial Sequence
  LRRK2 RNA guide
agaaagaacaagaacgugca

SEQ ID NO: 3764 - RNA, 20 nt, Artificial Sequence
  LRRK2 RNA guide
agaacaagaacgugcaggua

SEQ ID NO: 3765 - RNA, 20 nt, Artificial Sequence
  LRRK2 RNA guide
agaacgugcagguaggacuc

SEQ ID NO: 3766 - RNA, 20 nt, Artificial Sequence
  LRRK2 RNA guide
agaguccuaccugcacguuc

SEQ ID NO: 3767 - RNA, 20 nt, Artificial Sequence
  LRRK2 RNA guide
aguccuaccugcacguucuu

SEQ ID NO: 3768 - RNA, 20 nt, Artificial Sequence
  LRRK2 RNA guide
auagaaagaacaagaacgug

SEQ ID NO: 3769 - RNA, 20 nt, Artificial Sequence
  LRRK2 RNA guide
augagaguccuaccugcacg

SEQ ID NO: 3770 - RNA, 20 nt, Artificial Sequence
  LRRK2 RNA guide
caagaacgugcagguaggac

SEQ ID NO: 3771 - RNA, 20 nt, Artificial Sequence
  LRRK2 RNA guide
cacguucuuguucuuucuau

SEQ ID NO: 3772 - RNA, 20 nt, Artificial Sequence
  LRRK2 RNA guide
cauagaaagaacaagaacgu

SEQ ID NO: 3773 - RNA, 20 nt, Artificial Sequence
  LRRK2 RNA guide
ccuaccugcacguucuuguu

SEQ ID NO: 3774 - RNA, 20 nt, Artificial Sequence
  LRRK2 RNA guide
ccugcacguucuuguucuuu

SEQ ID NO: 3775 - RNA, 20 nt, Artificial Sequence
  LRRK2 RNA guide
cguggcauagaaagaacaag

SEQ ID NO: 3776 - RNA, 20 nt, Artificial Sequence
  LRRK2 RNA guide
cguucuuguucuuucuaugc

SEQ ID NO: 3777 - RNA, 20 nt, Artificial Sequence
  LRRK2 RNA guide
cuaccugcacguucuuguuc

SEQ ID NO: 3778 - RNA, 20 nt, Artificial Sequence
  LRRK2 RNA guide
cugcacguucuuguucuuuc

SEQ ID NO: 3779 - RNA, 20 nt, Artificial Sequence
  LRRK2 RNA guide
gaaagaacaagaacgugcag

SEQ ID NO: 3780 - RNA, 20 nt, Artificial Sequence
  LRRK2 RNA guide
gaacaagaacgugcagguag

SEQ ID NO: 3781 - RNA, 20 nt, Artificial Sequence
  LRRK2 RNA guide
gaacgugcagguaggacucu

SEQ ID NO: 3782 - RNA, 20 nt, Artificial Sequence
  LRRK2 RNA guide
gagaguccuaccugcacguu

SEQ ID NO: 3783 - RNA, 20 nt, Artificial Sequence
  LRRK2 RNA guide
gaguccuaccugcacguucu

SEQ ID NO: 3784 - RNA, 20 nt, Artificial Sequence
  LRRK2 RNA guide
gcacguucuuguucuuucua

SEQ ID NO: 3785 - RNA, 20 nt, Artificial Sequence
  LRRK2 RNA guide
gcauagaaagaacaagaacg

SEQ ID NO: 3786 - RNA, 20 nt, Artificial Sequence
  LRRK2 RNA guide
ggcauagaaagaacaagaac

SEQ ID NO: 3787 - RNA, 20 nt, Artificial Sequence
  LRRK2 RNA guide
guccuaccugcacguucuug

SEQ ID NO: 3788 - RNA, 20 nt, Artificial Sequence
  LRRK2 RNA guide
guggcauagaaagaacaaga

SEQ ID NO: 3789 - RNA, 20 nt, Artificial Sequence
  LRRK2 RNA guide
guucuuguucuuucuaugcc

SEQ ID NO: 3790 - RNA, 20 nt, Artificial Sequence
  LRRK2 RNA guide
uaacguggcauagaaagaac

SEQ ID NO: 3791 - RNA, 20 nt, Artificial Sequence
  LRRK2 RNA guide
uaccugcacguucuuguucu

SEQ ID NO: 3792 - RNA, 20 nt, Artificial Sequence
  LRRK2 RNA guide
uagaaagaacaagaacgugc

SEQ ID NO: 3793 - RNA, 20 nt, Artificial Sequence
  LRRK2 RNA guide
uaugagaguccuaccugcac

SEQ ID NO: 3794 - RNA, 20 nt, Artificial Sequence
  LRRK2 RNA guide
uccuaccugcacguucuugu

SEQ ID NO: 3795 - RNA, 20 nt, Artificial Sequence
  LRRK2 RNA guide
ugagaguccuaccugcacgu

SEQ ID NO: 3796 - RNA, 20 nt, Artificial Sequence
  LRRK2 RNA guide
ugcacguucuuguucuuucu

SEQ ID NO: 3797 - RNA, 20 nt, Artificial Sequence
  LRRK2 RNA guide
uggcauagaaagaacaagaa

SEQ ID NO: 3798 - RNA, 20 nt, Artificial Sequence
  LRRK2 RNA guide
uuaacguggcauagaaagaa

SEQ ID NO: 3799 - RNA, 20 nt, Artificial Sequence
  LRRK2 RNA guide
uuaugagaguccuaccugca

SEQ ID NO: 3800 - RNA, 20 nt, Artificial Sequence
  LRRK2 RNA guide
uucuuguucuuucuaugcca

SEQ ID NO: 3801 - RNA, 21 nt, Artificial Sequence
  LRRK2 RNA guide
aaagaacaagaacgugcaggu

SEQ ID NO: 3802 - RNA, 21 nt, Artificial Sequence
  LRRK2 RNA guide
aacaagaacgugcagguagga

SEQ ID NO: 3803 - RNA, 21 nt, Artificial Sequence
  LRRK2 RNA guide
aacguggcauagaaagaacaa

SEQ ID NO: 3804 - RNA, 21 nt, Artificial Sequence
  LRRK2 RNA guide
aagaacaagaacgugcaggua

SEQ ID NO: 3805 - RNA, 21 nt, Artificial Sequence
  LRRK2 RNA guide
aagaacgugcagguaggacuc

SEQ ID NO: 3806 - RNA, 21 nt, Artificial Sequence
  LRRK2 RNA guide
acaagaacgugcagguaggac

SEQ ID NO: 3807 - RNA, 21 nt, Artificial Sequence
  LRRK2 RNA guide
accugcacguucuuguucuuu

SEQ ID NO: 3808 - RNA, 21 nt, Artificial Sequence
  LRRK2 RNA guide
acguggcauagaaagaacaag

SEQ ID NO: 3809 - RNA, 21 nt, Artificial Sequence
  LRRK2 RNA guide
acguucuuguucuuucuaugc

SEQ ID NO: 3810 - RNA, 21 nt, Artificial Sequence
  LRRK2 RNA guide
agaaagaacaagaacgugcag

SEQ ID NO: 3811 - RNA, 21 nt, Artificial Sequence
  LRRK2 RNA guide
agaacaagaacgugcagguag

SEQ ID NO: 3812 - RNA, 21 nt, Artificial Sequence
  LRRK2 RNA guide
agaacgugcagguaggacucu

SEQ ID NO: 3813 - RNA, 21 nt, Artificial Sequence
  LRRK2 RNA guide
agaguccuaccugcacguucu

SEQ ID NO: 3814 - RNA, 21 nt, Artificial Sequence
  LRRK2 RNA guide
aguccuaccugcacguucuug

SEQ ID NO: 3815 - RNA, 21 nt, Artificial Sequence
  LRRK2 RNA guide
auagaaagaacaagaacgugc

SEQ ID NO: 3816 - RNA, 21 nt, Artificial Sequence
  LRRK2 RNA guide
augagaguccuaccugcacgu

SEQ ID NO: 3817 - RNA, 21 nt, Artificial Sequence
  LRRK2 RNA guide
auuaacguggcauagaaagaa

SEQ ID NO: 3818 - RNA, 21 nt, Artificial Sequence
  LRRK2 RNA guide
auuuaugagaguccuaccugc

SEQ ID NO: 3819 - RNA, 21 nt, Artificial Sequence
  LRRK2 RNA guide
caagaacgugcagguaggacu

SEQ ID NO: 3820 - RNA, 21 nt, Artificial Sequence
  LRRK2 RNA guide
cacguucuuguucuuucuaug

SEQ ID NO: 3821 - RNA, 21 nt, Artificial Sequence
  LRRK2 RNA guide
cauagaaagaacaagaacgug

SEQ ID NO: 3822 - RNA, 21 nt, Artificial Sequence
  LRRK2 RNA guide
ccuaccugcacguucuuguuc

SEQ ID NO: 3823 - RNA, 21 nt, Artificial Sequence
  LRRK2 RNA guide
ccugcacguucuuguucuuuc

SEQ ID NO: 3824 - RNA, 21 nt, Artificial Sequence
  LRRK2 RNA guide
cguggcauagaaagaacaaga

SEQ ID NO: 3825 - RNA, 21 nt, Artificial Sequence
  LRRK2 RNA guide
cguucuuguucuuucuaugcc

SEQ ID NO: 3826 - RNA, 21 nt, Artificial Sequence
  LRRK2 RNA guide
cuaccugcacguucuuguucu

SEQ ID NO: 3827 - RNA, 21 nt, Artificial Sequence
  LRRK2 RNA guide
cugcacguucuuguucuuucu

SEQ ID NO: 3828 - RNA, 21 nt, Artificial Sequence
  LRRK2 RNA guide
gaaagaacaagaacgugcagg

SEQ ID NO: 3829 - RNA, 21 nt, Artificial Sequence
  LRRK2 RNA guide
gaacaagaacgugcagguagg

SEQ ID NO: 3830 - RNA, 21 nt, Artificial Sequence
  LRRK2 RNA guide
gaacgugcagguaggacucuc

SEQ ID NO: 3831 - RNA, 21 nt, Artificial Sequence
  LRRK2 RNA guide
gagaguccuaccugcacguuc

SEQ ID NO: 3832 - RNA, 21 nt, Artificial Sequence
  LRRK2 RNA guide
gaguccuaccugcacguucuu

SEQ ID NO: 3833 - RNA, 21 nt, Artificial Sequence
  LRRK2 RNA guide
gcacguucuuguucuuucuau

SEQ ID NO: 3834 - RNA, 21 nt, Artificial Sequence
  LRRK2 RNA guide
gcauagaaagaacaagaacgu

SEQ ID NO: 3835 - RNA, 21 nt, Artificial Sequence
  LRRK2 RNA guide
ggcauagaaagaacaagaacg

SEQ ID NO: 3836 - RNA, 21 nt, Artificial Sequence
  LRRK2 RNA guide
guccuaccugcacguucuugu

SEQ ID NO: 3837 - RNA, 21 nt, Artificial Sequence
  LRRK2 RNA guide
guggcauagaaagaacaagaa

SEQ ID NO: 3838 - RNA, 21 nt, Artificial Sequence
  LRRK2 RNA guide
guucuuguucuuucuaugcca

SEQ ID NO: 3839 - RNA, 21 nt, Artificial Sequence
  LRRK2 RNA guide
uaacguggcauagaaagaaca

SEQ ID NO: 3840 - RNA, 21 nt, Artificial Sequence
  LRRK2 RNA guide
uaccugcacguucuuguucuu

SEQ ID NO: 3841 - RNA, 21 nt, Artificial Sequence
  LRRK2 RNA guide
uagaaagaacaagaacgugca

SEQ ID NO: 3842 - RNA, 21 nt, Artificial Sequence
  LRRK2 RNA guide
uaugagaguccuaccugcacg

SEQ ID NO: 3843 - RNA, 21 nt, Artificial Sequence
  LRRK2 RNA guide
uccuaccugcacguucuuguu

SEQ ID NO: 3844 - RNA, 21 nt, Artificial Sequence
  LRRK2 RNA guide
ugagaguccuaccugcacguu

SEQ ID NO: 3845 - RNA, 21 nt, Artificial Sequence
  LRRK2 RNA guide
ugcacguucuuguucuuucua

SEQ ID NO: 3846 - RNA, 21 nt, Artificial Sequence
  LRRK2 RNA guide
uggcauagaaagaacaagaac

SEQ ID NO: 3847 - RNA, 21 nt, Artificial Sequence
  LRRK2 RNA guide
uuaacguggcauagaaagaac

SEQ ID NO: 3848 - RNA, 21 nt, Artificial Sequence
  LRRK2 RNA guide
uuaugagaguccuaccugcac

SEQ ID NO: 3849 - RNA, 21 nt, Artificial Sequence
  LRRK2 RNA guide
uucuuguucuuucuaugccac

SEQ ID NO: 3850 - RNA, 21 nt, Artificial Sequence
  LRRK2 RNA guide
uuuaugagaguccuaccugca

SEQ ID NO: 3851 - RNA, 22 nt, Artificial Sequence
  LRRK2 RNA guide
aaagaacaagaacgugcaggua

SEQ ID NO: 3852 - RNA, 22 nt, Artificial Sequence
  LRRK2 RNA guide
aacaagaacgugcagguaggac

SEQ ID NO: 3853 - RNA, 22 nt, Artificial Sequence
  LRRK2 RNA guide
aacguggcauagaaagaacaag

SEQ ID NO: 3854 - RNA, 22 nt, Artificial Sequence
  LRRK2 RNA guide
aagaacaagaacgugcagguag

SEQ ID NO: 3855 - RNA, 22 nt, Artificial Sequence
  LRRK2 RNA guide
aagaacgugcagguaggacucu

SEQ ID NO: 3856 - RNA, 22 nt, Artificial Sequence
  LRRK2 RNA guide
acaagaacgugcagguaggacu

SEQ ID NO: 3857 - RNA, 22 nt, Artificial Sequence
  LRRK2 RNA guide
accugcacguucuuguucuuuc

SEQ ID NO: 3858 - RNA, 22 nt, Artificial Sequence
  LRRK2 RNA guide
acguggcauagaaagaacaaga

SEQ ID NO: 3859 - RNA, 22 nt, Artificial Sequence
  LRRK2 RNA guide
acguucuuguucuuucuaugcc

SEQ ID NO: 3860 - RNA, 22 nt, Artificial Sequence
  LRRK2 RNA guide
agaaagaacaagaacgugcagg

SEQ ID NO: 3861 - RNA, 22 nt, Artificial Sequence
  LRRK2 RNA guide
agaacaagaacgugcagguagg

SEQ ID NO: 3862 - RNA, 22 nt, Artificial Sequence
  LRRK2 RNA guide
agaacgugcagguaggacucuc

SEQ ID NO: 3863 - RNA, 22 nt, Artificial Sequence
  LRRK2 RNA guide
agaguccuaccugcacguucuu

SEQ ID NO: 3864 - RNA, 22 nt, Artificial Sequence
  LRRK2 RNA guide
aguccuaccugcacguucuugu

SEQ ID NO: 3865 - RNA, 22 nt, Artificial Sequence
  LRRK2 RNA guide
auagaaagaacaagaacgugca

SEQ ID NO: 3866 - RNA, 22 nt, Artificial Sequence
  LRRK2 RNA guide
augagaguccuaccugcacguu

SEQ ID NO: 3867 - RNA, 22 nt, Artificial Sequence
  LRRK2 RNA guide
auuaacguggcauagaaagaac

SEQ ID NO: 3868 - RNA, 22 nt, Artificial Sequence
  LRRK2 RNA guide
auuuaugagaguccuaccugca

SEQ ID NO: 3869 - RNA, 22 nt, Artificial Sequence
  LRRK2 RNA guide
caagaacgugcagguaggacuc

SEQ ID NO: 3870 - RNA, 22 nt, Artificial Sequence
  LRRK2 RNA guide
cacguucuuguucuuucuaugc

SEQ ID NO: 3871 - RNA, 22 nt, Artificial Sequence
  LRRK2 RNA guide
cauagaaagaacaagaacgugc

SEQ ID NO: 3872 - RNA, 22 nt, Artificial Sequence
  LRRK2 RNA guide
cauuaacguggcauagaaagaa

SEQ ID NO: 3873 - RNA, 22 nt, Artificial Sequence
  LRRK2 RNA guide
ccuaccugcacguucuuguucu

SEQ ID NO: 3874 - RNA, 22 nt, Artificial Sequence
  LRRK2 RNA guide
ccugcacguucuuguucuuucu

SEQ ID NO: 3875 - RNA, 22 nt, Artificial Sequence
  LRRK2 RNA guide
cguggcauagaaagaacaagaa

SEQ ID NO: 3876 - RNA, 22 nt, Artificial Sequence
  LRRK2 RNA guide
cguucuuguucuuucuaugcca

SEQ ID NO: 3877 - RNA, 22 nt, Artificial Sequence
  LRRK2 RNA guide
cuaccugcacguucuuguucuu

SEQ ID NO: 3878 - RNA, 22 nt, Artificial Sequence
  LRRK2 RNA guide
cugcacguucuuguucuuucua

SEQ ID NO: 3879 - RNA, 22 nt, Artificial Sequence
  LRRK2 RNA guide
gaaagaacaagaacgugcaggu

SEQ ID NO: 3880 - RNA, 22 nt, Artificial Sequence
  LRRK2 RNA guide
gaacaagaacgugcagguagga

SEQ ID NO: 3881 - RNA, 22 nt, Artificial Sequence
  LRRK2 RNA guide
gaacgugcagguaggacucuca

SEQ ID NO: 3882 - RNA, 22 nt, Artificial Sequence
  LRRK2 RNA guide
gagaguccuaccugcacguucu

SEQ ID NO: 3883 - RNA, 22 nt, Artificial Sequence
  LRRK2 RNA guide
gaguccuaccugcacguucuug

SEQ ID NO: 3884 - RNA, 22 nt, Artificial Sequence
  LRRK2 RNA guide
gcacguucuuguucuuucuaug

SEQ ID NO: 3885 - RNA, 22 nt, Artificial Sequence
  LRRK2 RNA guide
gcauagaaagaacaagaacgug

SEQ ID NO: 3886 - RNA, 22 nt, Artificial Sequence
  LRRK2 RNA guide
ggcauagaaagaacaagaacgu

SEQ ID NO: 3887 - RNA, 22 nt, Artificial Sequence
  LRRK2 RNA guide
guccuaccugcacguucuuguu

SEQ ID NO: 3888 - RNA, 22 nt, Artificial Sequence
  LRRK2 RNA guide
guggcauagaaagaacaagaac

SEQ ID NO: 3889 - RNA, 22 nt, Artificial Sequence
  LRRK2 RNA guide
guucuuguucuuucuaugccac

SEQ ID NO: 3890 - RNA, 22 nt, Artificial Sequence
  LRRK2 RNA guide
uaacguggcauagaaagaacaa

SEQ ID NO: 3891 - RNA, 22 nt, Artificial Sequence
  LRRK2 RNA guide
uaccugcacguucuuguucuuu

SEQ ID NO: 3892 - RNA, 22 nt, Artificial Sequence
  LRRK2 RNA guide
uagaaagaacaagaacgugcag

SEQ ID NO: 3893 - RNA, 22 nt, Artificial Sequence
  LRRK2 RNA guide
uaugagaguccuaccugcacgu

SEQ ID NO: 3894 - RNA, 22 nt, Artificial Sequence
  LRRK2 RNA guide
uauuuaugagaguccuaccugc

SEQ ID NO: 3895 - RNA, 22 nt, Artificial Sequence
  LRRK2 RNA guide
uccuaccugcacguucuuguuc

SEQ ID NO: 3896 - RNA, 22 nt, Artificial Sequence
  LRRK2 RNA guide
ugagaguccuaccugcacguuc

SEQ ID NO: 3897 - RNA, 22 nt, Artificial Sequence
  LRRK2 RNA guide
ugcacguucuuguucuuucuau

SEQ ID NO: 3898 - RNA, 22 nt, Artificial Sequence
  LRRK2 RNA guide
uggcauagaaagaacaagaacg

SEQ ID NO: 3899 - RNA, 22 nt, Artificial Sequence
  LRRK2 RNA guide
uuaacguggcauagaaagaaca

SEQ ID NO: 3900 - RNA, 22 nt, Artificial Sequence
  LRRK2 RNA guide
uuaugagaguccuaccugcacg

SEQ ID NO: 3901 - RNA, 22 nt, Artificial Sequence
  LRRK2 RNA guide
uucuuguucuuucuaugccacg

SEQ ID NO: 3902 - RNA, 22 nt, Artificial Sequence
  LRRK2 RNA guide
uuuaugagaguccuaccugcac

SEQ ID NO: 3903 - RNA, 20 nt, Artificial Sequence
  LRRK2 RNA guide
aaagaacaagcacaugcagg

SEQ ID NO: 3904 - RNA, 20 nt, Artificial Sequence
  LRRK2 RNA guide
aacaagcacaugcagguagg

SEQ ID NO: 3905 - RNA, 20 nt, Artificial Sequence
  LRRK2 RNA guide
aagaacaagcacaugcaggu

SEQ ID NO: 3906 - RNA, 20 nt, Artificial Sequence
  LRRK2 RNA guide
aagcacaugcagguaggacu

SEQ ID NO: 3907 - RNA, 20 nt, Artificial Sequence
  LRRK2 RNA guide
acaagcacaugcagguagga

SEQ ID NO: 3908 - RNA, 20 nt, Artificial Sequence
  LRRK2 RNA guide
acaugcagguaggacucuca

SEQ ID NO: 3909 - RNA, 20 nt, Artificial Sequence
  LRRK2 RNA guide
accugcaugugcuuguucuu

SEQ ID NO: 3910 - RNA, 20 nt, Artificial Sequence
  LRRK2 RNA guide
agaaagaacaagcacaugca

SEQ ID NO: 3911 - RNA, 20 nt, Artificial Sequence
  LRRK2 RNA guide
agaacaagcacaugcaggua

SEQ ID NO: 3912 - RNA, 20 nt, Artificial Sequence
  LRRK2 RNA guide
agaguccuaccugcaugugc

SEQ ID NO: 3913 - RNA, 20 nt, Artificial Sequence
  LRRK2 RNA guide
agcacaugcagguaggacuc

SEQ ID NO: 3914 - RNA, 20 nt, Artificial Sequence
  LRRK2 RNA guide
aguccuaccugcaugugcuu

SEQ ID NO: 3915 - RNA, 20 nt, Artificial Sequence
  LRRK2 RNA guide
auagaaagaacaagcacaug

SEQ ID NO: 3916 - RNA, 20 nt, Artificial Sequence
  LRRK2 RNA guide
auauuuaugagaguccuacc

SEQ ID NO: 3917 - RNA, 20 nt, Artificial Sequence
  LRRK2 RNA guide
augagaguccuaccugcaug

SEQ ID NO: 3918 - RNA, 20 nt, Artificial Sequence
  LRRK2 RNA guide
augugcuuguucuuucuaug

SEQ ID NO: 3919 - RNA, 20 nt, Artificial Sequence
  LRRK2 RNA guide
auuuaugagaguccuaccug

SEQ ID NO: 3920 - RNA, 20 nt, Artificial Sequence
  LRRK2 RNA guide
caagcacaugcagguaggac

SEQ ID NO: 3921 - RNA, 20 nt, Artificial Sequence
  LRRK2 RNA guide
cacaugcagguaggacucuc

SEQ ID NO: 3922 - RNA, 20 nt, Artificial Sequence
  LRRK2 RNA guide
cauagaaagaacaagcacau

SEQ ID NO: 3923 - RNA, 20 nt, Artificial Sequence
  LRRK2 RNA guide
caugcagguaggacucucau

SEQ ID NO: 3924 - RNA, 20 nt, Artificial Sequence
  LRRK2 RNA guide
caugugcuuguucuuucuau

SEQ ID NO: 3925 - RNA, 20 nt, Artificial Sequence
  LRRK2 RNA guide
ccuaccugcaugugcuuguu

SEQ ID NO: 3926 - RNA, 20 nt, Artificial Sequence
  LRRK2 RNA guide
ccugcaugugcuuguucuuu

SEQ ID NO: 3927 - RNA, 20 nt, Artificial Sequence
  LRRK2 RNA guide
cuaccugcaugugcuuguuc

SEQ ID NO: 3928 - RNA, 20 nt, Artificial Sequence
  LRRK2 RNA guide
cugcaugugcuuguucuuuc

SEQ ID NO: 3929 - RNA, 20 nt, Artificial Sequence
  LRRK2 RNA guide
gaaagaacaagcacaugcag

SEQ ID NO: 3930 - RNA, 20 nt, Artificial Sequence
  LRRK2 RNA guide
gaacaagcacaugcagguag

SEQ ID NO: 3931 - RNA, 20 nt, Artificial Sequence
  LRRK2 RNA guide
gagaguccuaccugcaugug

SEQ ID NO: 3932 - RNA, 20 nt, Artificial Sequence
  LRRK2 RNA guide
gaguccuaccugcaugugcu

SEQ ID NO: 3933 - RNA, 20 nt, Artificial Sequence
  LRRK2 RNA guide
gcacaugcagguaggacucu

SEQ ID NO: 3934 - RNA, 20 nt, Artificial Sequence
  LRRK2 RNA guide
gcauagaaagaacaagcaca

SEQ ID NO: 3935 - RNA, 20 nt, Artificial Sequence
  LRRK2 RNA guide
gcaugugcuuguucuuucua

SEQ ID NO: 3936 - RNA, 20 nt, Artificial Sequence
  LRRK2 RNA guide
guccuaccugcaugugcuug

SEQ ID NO: 3937 - RNA, 20 nt, Artificial Sequence
  LRRK2 RNA guide
guggcauagaaagaacaagc

SEQ ID NO: 3938 - RNA, 20 nt, Artificial Sequence
  LRRK2 RNA guide
uaccugcaugugcuuguucu

SEQ ID NO: 3939 - RNA, 20 nt, Artificial Sequence
  LRRK2 RNA guide
uagaaagaacaagcacaugc

SEQ ID NO: 3940 - RNA, 20 nt, Artificial Sequence
  LRRK2 RNA guide
uaugagaguccuaccugcau

SEQ ID NO: 3941 - RNA, 20 nt, Artificial Sequence
  LRRK2 RNA guide
uauuuaugagaguccuaccu

SEQ ID NO: 3942 - RNA, 20 nt, Artificial Sequence
  LRRK2 RNA guide
uccuaccugcaugugcuugu

SEQ ID NO: 3943 - RNA, 20 nt, Artificial Sequence
  LRRK2 RNA guide
ugagaguccuaccugcaugu

SEQ ID NO: 3944 - RNA, 20 nt, Artificial Sequence
  LRRK2 RNA guide
ugcaugugcuuguucuuucu

SEQ ID NO: 3945 - RNA, 20 nt, Artificial Sequence
  LRRK2 RNA guide
uggcauagaaagaacaagca

SEQ ID NO: 3946 - RNA, 21 nt, Artificial Sequence
  LRRK2 RNA guide
aaagaacaagcacaugcaggu

SEQ ID NO: 3947 - RNA, 21 nt, Artificial Sequence
  LRRK2 RNA guide
aacaagcacaugcagguagga

SEQ ID NO: 3948 - RNA, 21 nt, Artificial Sequence
  LRRK2 RNA guide
aagaacaagcacaugcaggua

SEQ ID NO: 3949 - RNA, 21 nt, Artificial Sequence
  LRRK2 RNA guide
aagcacaugcagguaggacuc

SEQ ID NO: 3950 - RNA, 21 nt, Artificial Sequence
  LRRK2 RNA guide
aauauuuaugagaguccuacc

SEQ ID NO: 3951 - RNA, 21 nt, Artificial Sequence
  LRRK2 RNA guide
acaagcacaugcagguaggac

SEQ ID NO: 3952 - RNA, 21 nt, Artificial Sequence
  LRRK2 RNA guide
acaugcagguaggacucucau

SEQ ID NO: 3953 - RNA, 21 nt, Artificial Sequence
  LRRK2 RNA guide
accugcaugugcuuguucuuu

SEQ ID NO: 3954 - RNA, 21 nt, Artificial Sequence
  LRRK2 RNA guide
agaaagaacaagcacaugcag

SEQ ID NO: 3955 - RNA, 21 nt, Artificial Sequence
  LRRK2 RNA guide
agaacaagcacaugcagguag

SEQ ID NO: 3956 - RNA, 21 nt, Artificial Sequence
  LRRK2 RNA guide
agaguccuaccugcaugugcu

SEQ ID NO: 3957 - RNA, 21 nt, Artificial Sequence
  LRRK2 RNA guide
agcacaugcagguaggacucu

SEQ ID NO: 3958 - RNA, 21 nt, Artificial Sequence
  LRRK2 RNA guide
aguccuaccugcaugugcuug

SEQ ID NO: 3959 - RNA, 21 nt, Artificial Sequence
  LRRK2 RNA guide
auagaaagaacaagcacaugc

SEQ ID NO: 3960 - RNA, 21 nt, Artificial Sequence
  LRRK2 RNA guide
auauuuaugagaguccuaccu

SEQ ID NO: 3961 - RNA, 21 nt, Artificial Sequence
  LRRK2 RNA guide
augagaguccuaccugcaugu

SEQ ID NO: 3962 - RNA, 21 nt, Artificial Sequence
  LRRK2 RNA guide
augugcuuguucuuucuaugc

SEQ ID NO: 3963 - RNA, 21 nt, Artificial Sequence
  LRRK2 RNA guide
caagcacaugcagguaggacu

SEQ ID NO: 3964 - RNA, 21 nt, Artificial Sequence
  LRRK2 RNA guide
cacaugcagguaggacucuca

SEQ ID NO: 3965 - RNA, 21 nt, Artificial Sequence
  LRRK2 RNA guide
cauagaaagaacaagcacaug

SEQ ID NO: 3966 - RNA, 21 nt, Artificial Sequence
  LRRK2 RNA guide
caugcagguaggacucucaua

SEQ ID NO: 3967 - RNA, 21 nt, Artificial Sequence
  LRRK2 RNA guide
caugugcuuguucuuucuaug

SEQ ID NO: 3968 - RNA, 21 nt, Artificial Sequence
  LRRK2 RNA guide
ccuaccugcaugugcuuguuc

SEQ ID NO: 3969 - RNA, 21 nt, Artificial Sequence
  LRRK2 RNA guide
ccugcaugugcuuguucuuuc

SEQ ID NO: 3970 - RNA, 21 nt, Artificial Sequence
  LRRK2 RNA guide
cguggcauagaaagaacaagc

SEQ ID NO: 3971 - RNA, 21 nt, Artificial Sequence
  LRRK2 RNA guide
cuaccugcaugugcuuguucu

SEQ ID NO: 3972 - RNA, 21 nt, Artificial Sequence
  LRRK2 RNA guide
cugcaugugcuuguucuuucu

SEQ ID NO: 3973 - RNA, 21 nt, Artificial Sequence
  LRRK2 RNA guide
gaaagaacaagcacaugcagg

SEQ ID NO: 3974 - RNA, 21 nt, Artificial Sequence
  LRRK2 RNA guide
gaacaagcacaugcagguagg

SEQ ID NO: 3975 - RNA, 21 nt, Artificial Sequence
  LRRK2 RNA guide
gagaguccuaccugcaugugc

SEQ ID NO: 3976 - RNA, 21 nt, Artificial Sequence
  LRRK2 RNA guide
gaguccuaccugcaugugcuu

SEQ ID NO: 3977 - RNA, 21 nt, Artificial Sequence
  LRRK2 RNA guide
gcacaugcagguaggacucuc

SEQ ID NO: 3978 - RNA, 21 nt, Artificial Sequence
  LRRK2 RNA guide
gcauagaaagaacaagcacau

SEQ ID NO: 3979 - RNA, 21 nt, Artificial Sequence
  LRRK2 RNA guide
gcaugugcuuguucuuucuau

SEQ ID NO: 3980 - RNA, 21 nt, Artificial Sequence
  LRRK2 RNA guide
ggcauagaaagaacaagcaca

SEQ ID NO: 3981 - RNA, 21 nt, Artificial Sequence
  LRRK2 RNA guide
guccuaccugcaugugcuugu

SEQ ID NO: 3982 - RNA, 21 nt, Artificial Sequence
  LRRK2 RNA guide
guggcauagaaagaacaagca

SEQ ID NO: 3983 - RNA, 21 nt, Artificial Sequence
  LRRK2 RNA guide
uaccugcaugugcuuguucuu

SEQ ID NO: 3984 - RNA, 21 nt, Artificial Sequence
  LRRK2 RNA guide
uagaaagaacaagcacaugca

SEQ ID NO: 3985 - RNA, 21 nt, Artificial Sequence
  LRRK2 RNA guide
uaugagaguccuaccugcaug

SEQ ID NO: 3986 - RNA, 21 nt, Artificial Sequence
  LRRK2 RNA guide
uauuuaugagaguccuaccug

SEQ ID NO: 3987 - RNA, 21 nt, Artificial Sequence
  LRRK2 RNA guide
uccuaccugcaugugcuuguu

SEQ ID NO: 3988 - RNA, 21 nt, Artificial Sequence
  LRRK2 RNA guide
ugagaguccuaccugcaugug

SEQ ID NO: 3989 - RNA, 21 nt, Artificial Sequence
  LRRK2 RNA guide
ugcaugugcuuguucuuucua

SEQ ID NO: 3990 - RNA, 21 nt, Artificial Sequence
  LRRK2 RNA guide
uggcauagaaagaacaagcac

SEQ ID NO: 3991 - RNA, 21 nt, Artificial Sequence
  LRRK2 RNA guide
uuaugagaguccuaccugcau

SEQ ID NO: 3992 - RNA, 22 nt, Artificial Sequence
  LRRK2 RNA guide
aaagaacaagcacaugcaggua

SEQ ID NO: 3993 - RNA, 22 nt, Artificial Sequence
  LRRK2 RNA guide
aacaagcacaugcagguaggac

SEQ ID NO: 3994 - RNA, 22 nt, Artificial Sequence
  LRRK2 RNA guide
aagaacaagcacaugcagguag

SEQ ID NO: 3995 - RNA, 22 nt, Artificial Sequence
  LRRK2 RNA guide
aagcacaugcagguaggacucu

SEQ ID NO: 3996 - RNA, 22 nt, Artificial Sequence
  LRRK2 RNA guide
aauauuuaugagaguccuaccu

SEQ ID NO: 3997 - RNA, 22 nt, Artificial Sequence
  LRRK2 RNA guide
acaagcacaugcagguaggacu

SEQ ID NO: 3998 - RNA, 22 nt, Artificial Sequence
  LRRK2 RNA guide
acaugcagguaggacucucaua

SEQ ID NO: 3999 - RNA, 22 nt, Artificial Sequence
  LRRK2 RNA guide
accugcaugugcuuguucuuuc

SEQ ID NO: 4000 - RNA, 22 nt, Artificial Sequence
  LRRK2 RNA guide
acguggcauagaaagaacaagc

SEQ ID NO: 4001 - RNA, 22 nt, Artificial Sequence
  LRRK2 RNA guide
agaaagaacaagcacaugcagg

SEQ ID NO: 4002 - RNA, 22 nt, Artificial Sequence
  LRRK2 RNA guide
agaacaagcacaugcagguagg

SEQ ID NO: 4003 - RNA, 22 nt, Artificial Sequence
  LRRK2 RNA guide
agaguccuaccugcaugugcuu

SEQ ID NO: 4004 - RNA, 22 nt, Artificial Sequence
  LRRK2 RNA guide
agcacaugcagguaggacucuc

SEQ ID NO: 4005 - RNA, 22 nt, Artificial Sequence
  LRRK2 RNA guide
aguccuaccugcaugugcuugu

SEQ ID NO: 4006 - RNA, 22 nt, Artificial Sequence
  LRRK2 RNA guide
auagaaagaacaagcacaugca

SEQ ID NO: 4007 - RNA, 22 nt, Artificial Sequence
  LRRK2 RNA guide
auauuuaugagaguccuaccug

SEQ ID NO: 4008 - RNA, 22 nt, Artificial Sequence
  LRRK2 RNA guide
augagaguccuaccugcaugug

SEQ ID NO: 4009 - RNA, 22 nt, Artificial Sequence
  LRRK2 RNA guide
augugcuuguucuuucuaugcc

SEQ ID NO: 4010 - RNA, 22 nt, Artificial Sequence
  LRRK2 RNA guide
caagcacaugcagguaggacuc

SEQ ID NO: 4011 - RNA, 22 nt, Artificial Sequence
  LRRK2 RNA guide
cacaugcagguaggacucucau

SEQ ID NO: 4012 - RNA, 22 nt, Artificial Sequence
  LRRK2 RNA guide
cauagaaagaacaagcacaugc

SEQ ID NO: 4013 - RNA, 22 nt, Artificial Sequence
  LRRK2 RNA guide
caugcagguaggacucucauaa

SEQ ID NO: 4014 - RNA, 22 nt, Artificial Sequence
  LRRK2 RNA guide
caugugcuuguucuuucuaugc

SEQ ID NO: 4015 - RNA, 22 nt, Artificial Sequence
  LRRK2 RNA guide
ccuaccugcaugugcuuguucu

SEQ ID NO: 4016 - RNA, 22 nt, Artificial Sequence
  LRRK2 RNA guide
ccugcaugugcuuguucuuucu

SEQ ID NO: 4017 - RNA, 22 nt, Artificial Sequence
  LRRK2 RNA guide
cguggcauagaaagaacaagca

SEQ ID NO: 4018 - RNA, 22 nt, Artificial Sequence
  LRRK2 RNA guide
cuaccugcaugugcuuguucuu

SEQ ID NO: 4019 - RNA, 22 nt, Artificial Sequence
  LRRK2 RNA guide
cugcaugugcuuguucuuucua

SEQ ID NO: 4020 - RNA, 22 nt, Artificial Sequence
  LRRK2 RNA guide
gaaagaacaagcacaugcaggu

SEQ ID NO: 4021 - RNA, 22 nt, Artificial Sequence
  LRRK2 RNA guide
gaacaagcacaugcagguagga

SEQ ID NO: 4022 - RNA, 22 nt, Artificial Sequence
  LRRK2 RNA guide
gagaguccuaccugcaugugcu

SEQ ID NO: 4023 - RNA, 22 nt, Artificial Sequence
  LRRK2 RNA guide
gaguccuaccugcaugugcuug

SEQ ID NO: 4024 - RNA, 22 nt, Artificial Sequence
  LRRK2 RNA guide
gcacaugcagguaggacucuca

SEQ ID NO: 4025 - RNA, 22 nt, Artificial Sequence
  LRRK2 RNA guide
gcauagaaagaacaagcacaug

SEQ ID NO: 4026 - RNA, 22 nt, Artificial Sequence
  LRRK2 RNA guide
gcaugugcuuguucuuucuaug

SEQ ID NO: 4027 - RNA, 22 nt, Artificial Sequence
  LRRK2 RNA guide
ggcauagaaagaacaagcacau

SEQ ID NO: 4028 - RNA, 22 nt, Artificial Sequence
  LRRK2 RNA guide
guccuaccugcaugugcuuguu

SEQ ID NO: 4029 - RNA, 22 nt, Artificial Sequence
  LRRK2 RNA guide
guggcauagaaagaacaagcac

SEQ ID NO: 4030 - RNA, 22 nt, Artificial Sequence
  LRRK2 RNA guide
uaauauuuaugagaguccuacc

SEQ ID NO: 4031 - RNA, 22 nt, Artificial Sequence
  LRRK2 RNA guide
uaccugcaugugcuuguucuuu

SEQ ID NO: 4032 - RNA, 22 nt, Artificial Sequence
  LRRK2 RNA guide
uagaaagaacaagcacaugcag

SEQ ID NO: 4033 - RNA, 22 nt, Artificial Sequence
  LRRK2 RNA guide
uaugagaguccuaccugcaugu

SEQ ID NO: 4034 - RNA, 22 nt, Artificial Sequence
  LRRK2 RNA guide
uccuaccugcaugugcuuguuc

SEQ ID NO: 4035 - RNA, 22 nt, Artificial Sequence
  LRRK2 RNA guide
ugagaguccuaccugcaugugc

SEQ ID NO: 4036 - RNA, 22 nt, Artificial Sequence
  LRRK2 RNA guide
ugcaugugcuuguucuuucuau

SEQ ID NO: 4037 - RNA, 22 nt, Artificial Sequence
  LRRK2 RNA guide
uggcauagaaagaacaagcaca

SEQ ID NO: 4038 - RNA, 22 nt, Artificial Sequence
  LRRK2 RNA guide
uuaugagaguccuaccugcaug

SEQ ID NO: 4039 - RNA, 22 nt, Artificial Sequence
  LRRK2 RNA guide
uuuaugagaguccuaccugcau

SEQ ID NO: 4040 - RNA, 20 nt, Artificial Sequence
  LRRK2 RNA guide
aaagagauuauuuagugccc

SEQ ID NO: 4041 - RNA, 20 nt, Artificial Sequence
  LRRK2 RNA guide
aacuguuuugguacauaaag

SEQ ID NO: 4042 - RNA, 20 nt, Artificial Sequence
  LRRK2 RNA guide
aagagauuauuuagugccca

SEQ ID NO: 4043 - RNA, 20 nt, Artificial Sequence
  LRRK2 RNA guide
acuguuuugguacauaaaga

SEQ ID NO: 4044 - RNA, 20 nt, Artificial Sequence
  LRRK2 RNA guide
aucucuuuauguaccaaaac

SEQ ID NO: 4045 - RNA, 20 nt, Artificial Sequence
  LRRK2 RNA guide
augcugggcacuaaauaauc

SEQ ID NO: 4046 - RNA, 20 nt, Artificial Sequence
  LRRK2 RNA guide
auguaaacuguuuugguaca

SEQ ID NO: 4047 - RNA, 20 nt, Artificial Sequence
  LRRK2 RNA guide
caugcugggcacuaaauaau

SEQ ID NO: 4048 - RNA, 20 nt, Artificial Sequence
  LRRK2 RNA guide
cauguaaacuguuuugguac

SEQ ID NO: 4049 - RNA, 20 nt, Artificial Sequence
  LRRK2 RNA guide
cucuuuauguaccaaaacag

SEQ ID NO: 4050 - RNA, 20 nt, Artificial Sequence
  LRRK2 RNA guide
cugggcacuaaauaaucucu

SEQ ID NO: 4051 - RNA, 20 nt, Artificial Sequence
  LRRK2 RNA guide
cuguuuugguacauaaagag

SEQ ID NO: 4052 - RNA, 20 nt, Artificial Sequence
  LRRK2 RNA guide
cuuuauguaccaaaacaguu

SEQ ID NO: 4053 - RNA, 20 nt, Artificial Sequence
  LRRK2 RNA guide
gcaugcugggcacuaaauaa

SEQ ID NO: 4054 - RNA, 20 nt, Artificial Sequence
  LRRK2 RNA guide
gcugggcacuaaauaaucuc

SEQ ID NO: 4055 - RNA, 20 nt, Artificial Sequence
  LRRK2 RNA guide
ggcacuaaauaaucucuuua

SEQ ID NO: 4056 - RNA, 20 nt, Artificial Sequence
  LRRK2 RNA guide
gggcacuaaauaaucucuuu

SEQ ID NO: 4057 - RNA, 20 nt, Artificial Sequence
  LRRK2 RNA guide
guaaacuguuuugguacaua

SEQ ID NO: 4058 - RNA, 20 nt, Artificial Sequence
  LRRK2 RNA guide
guuuugguacauaaagagau

SEQ ID NO: 4059 - RNA, 20 nt, Artificial Sequence
  LRRK2 RNA guide
uaaagagauuauuuagugcc

SEQ ID NO: 4060 - RNA, 20 nt, Artificial Sequence
  LRRK2 RNA guide
ucucuuuauguaccaaaaca

SEQ ID NO: 4061 - RNA, 20 nt, Artificial Sequence
  LRRK2 RNA guide
ucuuuauguaccaaaacagu

SEQ ID NO: 4062 - RNA, 20 nt, Artificial Sequence
  LRRK2 RNA guide
ugcugggcacuaaauaaucu

SEQ ID NO: 4063 - RNA, 20 nt, Artificial Sequence
  LRRK2 RNA guide
ugggcacuaaauaaucucuu

SEQ ID NO: 4064 - RNA, 20 nt, Artificial Sequence
  LRRK2 RNA guide
uguaaacuguuuugguacau

SEQ ID NO: 4065 - RNA, 20 nt, Artificial Sequence
  LRRK2 RNA guide
uguuuugguacauaaagaga

SEQ ID NO: 4066 - RNA, 21 nt, Artificial Sequence
  LRRK2 RNA guide
aaagagauuauuuagugccca

SEQ ID NO: 4067 - RNA, 21 nt, Artificial Sequence
  LRRK2 RNA guide
aagagauuauuuagugcccag

SEQ ID NO: 4068 - RNA, 21 nt, Artificial Sequence
  LRRK2 RNA guide
acuguuuugguacauaaagag

SEQ ID NO: 4069 - RNA, 21 nt, Artificial Sequence
  LRRK2 RNA guide
augcugggcacuaaauaaucu

SEQ ID NO: 4070 - RNA, 21 nt, Artificial Sequence
  LRRK2 RNA guide
caugcugggcacuaaauaauc

SEQ ID NO: 4071 - RNA, 21 nt, Artificial Sequence
  LRRK2 RNA guide
cauguaaacuguuuugguaca

SEQ ID NO: 4072 - RNA, 21 nt, Artificial Sequence
  LRRK2 RNA guide
cgcaugcugggcacuaaauaa

SEQ ID NO: 4073 - RNA, 21 nt, Artificial Sequence
  LRRK2 RNA guide
cucuuuauguaccaaaacagu

SEQ ID NO: 4074 - RNA, 21 nt, Artificial Sequence
  LRRK2 RNA guide
cugggcacuaaauaaucucuu

SEQ ID NO: 4075 - RNA, 21 nt, Artificial Sequence
  LRRK2 RNA guide
cuguuuugguacauaaagaga

SEQ ID NO: 4076 - RNA, 21 nt, Artificial Sequence
  LRRK2 RNA guide
gcaugcugggcacuaaauaau

SEQ ID NO: 4077 - RNA, 21 nt, Artificial Sequence
  LRRK2 RNA guide
gcugggcacuaaauaaucucu

SEQ ID NO: 4078 - RNA, 21 nt, Artificial Sequence
  LRRK2 RNA guide
gggcacuaaauaaucucuuua

SEQ ID NO: 4079 - RNA, 21 nt, Artificial Sequence
  LRRK2 RNA guide
uaaagagauuauuuagugccc

SEQ ID NO: 4080 - RNA, 21 nt, Artificial Sequence
  LRRK2 RNA guide
ucauguaaacuguuuugguac

SEQ ID NO: 4081 - RNA, 21 nt, Artificial Sequence
  LRRK2 RNA guide
ucucuuuauguaccaaaacag

SEQ ID NO: 4082 - RNA, 21 nt, Artificial Sequence
  LRRK2 RNA guide
ugcugggcacuaaauaaucuc

SEQ ID NO: 4083 - RNA, 21 nt, Artificial Sequence
  LRRK2 RNA guide
ugggcacuaaauaaucucuuu

SEQ ID NO: 4084 - RNA, 22 nt, Artificial Sequence
  LRRK2 RNA guide
aaagagauuauuuagugcccag

SEQ ID NO: 4085 - RNA, 22 nt, Artificial Sequence
  LRRK2 RNA guide
aacuguuuugguacauaaagag

SEQ ID NO: 4086 - RNA, 22 nt, Artificial Sequence
  LRRK2 RNA guide
aagagauuauuuagugcccagc

SEQ ID NO: 4087 - RNA, 22 nt, Artificial Sequence
  LRRK2 RNA guide
acuguuuugguacauaaagaga

SEQ ID NO: 4088 - RNA, 22 nt, Artificial Sequence
  LRRK2 RNA guide
auaaagagauuauuuagugccc

SEQ ID NO: 4089 - RNA, 22 nt, Artificial Sequence
  LRRK2 RNA guide
aucucuuuauguaccaaaacag

SEQ ID NO: 4090 - RNA, 22 nt, Artificial Sequence
  LRRK2 RNA guide
augcugggcacuaaauaaucuc

SEQ ID NO: 4091 - RNA, 22 nt, Artificial Sequence
  LRRK2 RNA guide
cauaaagagauuauuuagugcc

SEQ ID NO: 4092 - RNA, 22 nt, Artificial Sequence
  LRRK2 RNA guide
caugcugggcacuaaauaaucu

SEQ ID NO: 4093 - RNA, 22 nt, Artificial Sequence
  LRRK2 RNA guide
cauguaaacuguuuugguacau

SEQ ID NO: 4094 - RNA, 22 nt, Artificial Sequence
  LRRK2 RNA guide
ccgcaugcugggcacuaaauaa

SEQ ID NO: 4095 - RNA, 22 nt, Artificial Sequence
  LRRK2 RNA guide
cgcaugcugggcacuaaauaau

SEQ ID NO: 4096 - RNA, 22 nt, Artificial Sequence
  LRRK2 RNA guide
cucauguaaacuguuuugguac

SEQ ID NO: 4097 - RNA, 22 nt, Artificial Sequence
  LRRK2 RNA guide
cucuuuauguaccaaaacaguu

SEQ ID NO: 4098 - RNA, 22 nt, Artificial Sequence
  LRRK2 RNA guide
cugggcacuaaauaaucucuuu

SEQ ID NO: 4099 - RNA, 22 nt, Artificial Sequence
  LRRK2 RNA guide
cuguuuugguacauaaagagau

SEQ ID NO: 4100 - RNA, 22 nt, Artificial Sequence
  LRRK2 RNA guide
gcaugcugggcacuaaauaauc

SEQ ID NO: 4101 - RNA, 22 nt, Artificial Sequence
  LRRK2 RNA guide
gcugggcacuaaauaaucucuu

SEQ ID NO: 4102 - RNA, 22 nt, Artificial Sequence
  LRRK2 RNA guide
ggcacuaaauaaucucuuuaug

SEQ ID NO: 4103 - RNA, 22 nt, Artificial Sequence
  LRRK2 RNA guide
gggcacuaaauaaucucuuuau

SEQ ID NO: 4104 - RNA, 22 nt, Artificial Sequence
  LRRK2 RNA guide
uaaagagauuauuuagugccca

SEQ ID NO: 4105 - RNA, 22 nt, Artificial Sequence
  LRRK2 RNA guide
ucauguaaacuguuuugguaca

SEQ ID NO: 4106 - RNA, 22 nt, Artificial Sequence
  LRRK2 RNA guide
ucucuuuauguaccaaaacagu

SEQ ID NO: 4107 - RNA, 22 nt, Artificial Sequence
  LRRK2 RNA guide
ugcugggcacuaaauaaucucu

SEQ ID NO: 4108 - RNA, 22 nt, Artificial Sequence
  LRRK2 RNA guide
ugggcacuaaauaaucucuuua

SEQ ID NO: 4109 - RNA, 20 nt, Artificial Sequence
  LRRK2 RNA guide
aauuuuuggaaguuucccag

SEQ ID NO: 4110 - RNA, 20 nt, Artificial Sequence
  LRRK2 RNA guide
agcugggaaacuuccaaaaa

SEQ ID NO: 4111 - RNA, 20 nt, Artificial Sequence
  LRRK2 RNA guide
augagcugggaaacuuccaa

SEQ ID NO: 4112 - RNA, 20 nt, Artificial Sequence
  LRRK2 RNA guide
auuuuuggaaguuucccagc

SEQ ID NO: 4113 - RNA, 20 nt, Artificial Sequence
  LRRK2 RNA guide
cccuaugagcugggaaacuu

SEQ ID NO: 4114 - RNA, 20 nt, Artificial Sequence
  LRRK2 RNA guide
ccuaugagcugggaaacuuc

SEQ ID NO: 4115 - RNA, 20 nt, Artificial Sequence
  LRRK2 RNA guide
cuaugagcugggaaacuucc

SEQ ID NO: 4116 - RNA, 20 nt, Artificial Sequence
  LRRK2 RNA guide
cugggaaacuuccaaaaauu

SEQ ID NO: 4117 - RNA, 20 nt, Artificial Sequence
  LRRK2 RNA guide
cuucccuaugagcugggaaa

SEQ ID NO: 4118 - RNA, 20 nt, Artificial Sequence
  LRRK2 RNA guide
gaauuuuuggaaguuuccca

SEQ ID NO: 4119 - RNA, 20 nt, Artificial Sequence
  LRRK2 RNA guide
gagcugggaaacuuccaaaa

SEQ ID NO: 4120 - RNA, 20 nt, Artificial Sequence
  LRRK2 RNA guide
gcugggaaacuuccaaaaau

SEQ ID NO: 4121 - RNA, 20 nt, Artificial Sequence
  LRRK2 RNA guide
ggaaacuuccaaaaauucaa

SEQ ID NO: 4122 - RNA, 20 nt, Artificial Sequence
  LRRK2 RNA guide
ggaaguuucccagcucauag

SEQ ID NO: 4123 - RNA, 20 nt, Artificial Sequence
  LRRK2 RNA guide
gggaaacuuccaaaaauuca

SEQ ID NO: 4124 - RNA, 20 nt, Artificial Sequence
  LRRK2 RNA guide
uaugagcugggaaacuucca

SEQ ID NO: 4125 - RNA, 20 nt, Artificial Sequence
  LRRK2 RNA guide
ucccuaugagcugggaaacu

SEQ ID NO: 4126 - RNA, 20 nt, Artificial Sequence
  LRRK2 RNA guide
ugaauuuuuggaaguuuccc

SEQ ID NO: 4127 - RNA, 20 nt, Artificial Sequence
  LRRK2 RNA guide
ugagcugggaaacuuccaaa

SEQ ID NO: 4128 - RNA, 20 nt, Artificial Sequence
  LRRK2 RNA guide
uggaaguuucccagcucaua

SEQ ID NO: 4129 - RNA, 20 nt, Artificial Sequence
  LRRK2 RNA guide
ugggaaacuuccaaaaauuc

SEQ ID NO: 4130 - RNA, 20 nt, Artificial Sequence
  LRRK2 RNA guide
uucccuaugagcugggaaac

SEQ ID NO: 4131 - RNA, 20 nt, Artificial Sequence
  LRRK2 RNA guide
uugaauuuuuggaaguuucc

SEQ ID NO: 4132 - RNA, 20 nt, Artificial Sequence
  LRRK2 RNA guide
uuggaaguuucccagcucau

SEQ ID NO: 4133 - RNA, 20 nt, Artificial Sequence
  LRRK2 RNA guide
uuuggaaguuucccagcuca

SEQ ID NO: 4134 - RNA, 20 nt, Artificial Sequence
  LRRK2 RNA guide
uuuuggaaguuucccagcuc

SEQ ID NO: 4135 - RNA, 20 nt, Artificial Sequence
  LRRK2 RNA guide
uuuuuggaaguuucccagcu

SEQ ID NO: 4136 - RNA, 21 nt, Artificial Sequence
  LRRK2 RNA guide
aauuuuuggaaguuucccagc

SEQ ID NO: 4137 - RNA, 21 nt, Artificial Sequence
  LRRK2 RNA guide
acuucccuaugagcugggaaa

SEQ ID NO: 4138 - RNA, 21 nt, Artificial Sequence
  LRRK2 RNA guide
agcugggaaacuuccaaaaau

SEQ ID NO: 4139 - RNA, 21 nt, Artificial Sequence
  LRRK2 RNA guide
augagcugggaaacuuccaaa

SEQ ID NO: 4140 - RNA, 21 nt, Artificial Sequence
  LRRK2 RNA guide
auuuuuggaaguuucccagcu

SEQ ID NO: 4141 - RNA, 21 nt, Artificial Sequence
  LRRK2 RNA guide
cacuucccuaugagcugggaa

SEQ ID NO: 4142 - RNA, 21 nt, Artificial Sequence
  LRRK2 RNA guide
cccuaugagcugggaaacuuc

SEQ ID NO: 4143 - RNA, 21 nt, Artificial Sequence
  LRRK2 RNA guide
ccuaugagcugggaaacuucc

SEQ ID NO: 4144 - RNA, 21 nt, Artificial Sequence
  LRRK2 RNA guide
cuaugagcugggaaacuucca

SEQ ID NO: 4145 - RNA, 21 nt, Artificial Sequence
  LRRK2 RNA guide
cugggaaacuuccaaaaauuc

SEQ ID NO: 4146 - RNA, 21 nt, Artificial Sequence
  LRRK2 RNA guide
cuucccuaugagcugggaaac

SEQ ID NO: 4147 - RNA, 21 nt, Artificial Sequence
  LRRK2 RNA guide
gaauuuuuggaaguuucccag

SEQ ID NO: 4148 - RNA, 21 nt, Artificial Sequence
  LRRK2 RNA guide
gagcugggaaacuuccaaaaa

SEQ ID NO: 4149 - RNA, 21 nt, Artificial Sequence
  LRRK2 RNA guide
gcugggaaacuuccaaaaauu

SEQ ID NO: 4150 - RNA, 21 nt, Artificial Sequence
  LRRK2 RNA guide
ggaaguuucccagcucauagg

SEQ ID NO: 4151 - RNA, 21 nt, Artificial Sequence
  LRRK2 RNA guide
gggaaacuuccaaaaauucaa

SEQ ID NO: 4152 - RNA, 21 nt, Artificial Sequence
  LRRK2 RNA guide
uaugagcugggaaacuuccaa

SEQ ID NO: 4153 - RNA, 21 nt, Artificial Sequence
  LRRK2 RNA guide
ucccuaugagcugggaaacuu

SEQ ID NO: 4154 - RNA, 21 nt, Artificial Sequence
  LRRK2 RNA guide
ugaauuuuuggaaguuuccca

SEQ ID NO: 4155 - RNA, 21 nt, Artificial Sequence
  LRRK2 RNA guide
ugagcugggaaacuuccaaaa

SEQ ID NO: 4156 - RNA, 21 nt, Artificial Sequence
  LRRK2 RNA guide
uggaaguuucccagcucauag

SEQ ID NO: 4157 - RNA, 21 nt, Artificial Sequence
  LRRK2 RNA guide
ugggaaacuuccaaaaauuca

SEQ ID NO: 4158 - RNA, 21 nt, Artificial Sequence
  LRRK2 RNA guide
uucccuaugagcugggaaacu

SEQ ID NO: 4159 - RNA, 21 nt, Artificial Sequence
  LRRK2 RNA guide
uugaauuuuuggaaguuuccc

SEQ ID NO: 4160 - RNA, 21 nt, Artificial Sequence
  LRRK2 RNA guide
uuggaaguuucccagcucaua

SEQ ID NO: 4161 - RNA, 21 nt, Artificial Sequence
  LRRK2 RNA guide
uuuggaaguuucccagcucau

SEQ ID NO: 4162 - RNA, 21 nt, Artificial Sequence
  LRRK2 RNA guide
uuuuggaaguuucccagcuca

SEQ ID NO: 4163 - RNA, 21 nt, Artificial Sequence
  LRRK2 RNA guide
uuuuuggaaguuucccagcuc

SEQ ID NO: 4164 - RNA, 22 nt, Artificial Sequence
  LRRK2 RNA guide
aauuuuuggaaguuucccagcu

SEQ ID NO: 4165 - RNA, 22 nt, Artificial Sequence
  LRRK2 RNA guide
acuucccuaugagcugggaaac

SEQ ID NO: 4166 - RNA, 22 nt, Artificial Sequence
  LRRK2 RNA guide
agcugggaaacuuccaaaaauu

SEQ ID NO: 4167 - RNA, 22 nt, Artificial Sequence
  LRRK2 RNA guide
augagcugggaaacuuccaaaa

SEQ ID NO: 4168 - RNA, 22 nt, Artificial Sequence
  LRRK2 RNA guide
auuuuuggaaguuucccagcuc

SEQ ID NO: 4169 - RNA, 22 nt, Artificial Sequence
  LRRK2 RNA guide
cacuucccuaugagcugggaaa

SEQ ID NO: 4170 - RNA, 22 nt, Artificial Sequence
  LRRK2 RNA guide
cccuaugagcugggaaacuucc

SEQ ID NO: 4171 - RNA, 22 nt, Artificial Sequence
  LRRK2 RNA guide
ccuaugagcugggaaacuucca

SEQ ID NO: 4172 - RNA, 22 nt, Artificial Sequence
  LRRK2 RNA guide
cuaugagcugggaaacuuccaa

SEQ ID NO: 4173 - RNA, 22 nt, Artificial Sequence
  LRRK2 RNA guide
cugggaaacuuccaaaaauuca

SEQ ID NO: 4174 - RNA, 22 nt, Artificial Sequence
  LRRK2 RNA guide
cuucccuaugagcugggaaacu

SEQ ID NO: 4175 - RNA, 22 nt, Artificial Sequence
  LRRK2 RNA guide
gaauuuuuggaaguuucccagc

SEQ ID NO: 4176 - RNA, 22 nt, Artificial Sequence
  LRRK2 RNA guide
gagcugggaaacuuccaaaaau

SEQ ID NO: 4177 - RNA, 22 nt, Artificial Sequence
  LRRK2 RNA guide
gcugggaaacuuccaaaaauuc

SEQ ID NO: 4178 - RNA, 22 nt, Artificial Sequence
  LRRK2 RNA guide
ggaaacuuccaaaaauucaaac

SEQ ID NO: 4179 - RNA, 22 nt, Artificial Sequence
  LRRK2 RNA guide
ggaaguuucccagcucauaggg

SEQ ID NO: 4180 - RNA, 22 nt, Artificial Sequence
  LRRK2 RNA guide
gggaaacuuccaaaaauucaaa

SEQ ID NO: 4181 - RNA, 22 nt, Artificial Sequence
  LRRK2 RNA guide
guuugaauuuuuggaaguuucc

SEQ ID NO: 4182 - RNA, 22 nt, Artificial Sequence
  LRRK2 RNA guide
uaugagcugggaaacuuccaaa

SEQ ID NO: 4183 - RNA, 22 nt, Artificial Sequence
  LRRK2 RNA guide
ucacuucccuaugagcugggaa

SEQ ID NO: 4184 - RNA, 22 nt, Artificial Sequence
  LRRK2 RNA guide
ucccuaugagcugggaaacuuc

SEQ ID NO: 4185 - RNA, 22 nt, Artificial Sequence
  LRRK2 RNA guide
ugaauuuuuggaaguuucccag

SEQ ID NO: 4186 - RNA, 22 nt, Artificial Sequence
  LRRK2 RNA guide
ugagcugggaaacuuccaaaaa

SEQ ID NO: 4187 - RNA, 22 nt, Artificial Sequence
  LRRK2 RNA guide
uggaaguuucccagcucauagg

SEQ ID NO: 4188 - RNA, 22 nt, Artificial Sequence
  LRRK2 RNA guide
ugggaaacuuccaaaaauucaa

SEQ ID NO: 4189 - RNA, 22 nt, Artificial Sequence
  LRRK2 RNA guide
uucccuaugagcugggaaacuu

SEQ ID NO: 4190 - RNA, 22 nt, Artificial Sequence
  LRRK2 RNA guide
uugaauuuuuggaaguuuccca

SEQ ID NO: 4191 - RNA, 22 nt, Artificial Sequence
  LRRK2 RNA guide
uuggaaguuucccagcucauag

SEQ ID NO: 4192 - RNA, 22 nt, Artificial Sequence
  LRRK2 RNA guide
uuugaauuuuuggaaguuuccc

SEQ ID NO: 4193 - RNA, 22 nt, Artificial Sequence
  LRRK2 RNA guide
uuuggaaguuucccagcucaua

SEQ ID NO: 4194 - RNA, 22 nt, Artificial Sequence
  LRRK2 RNA guide
uuuuggaaguuucccagcucau

SEQ ID NO: 4195 - RNA, 22 nt, Artificial Sequence
  LRRK2 RNA guide
uuuuuggaaguuucccagcuca

SEQ ID NO: 4196 - RNA, 20 nt, Artificial Sequence
  LRRK2 RNA guide
aaaguuucccagcucauagg

SEQ ID NO: 4197 - RNA, 20 nt, Artificial Sequence
  LRRK2 RNA guide
aaaugaugcucuccaugcug

SEQ ID NO: 4198 - RNA, 20 nt, Artificial Sequence
  LRRK2 RNA guide
aaguuucccagcucauaggg

SEQ ID NO: 4199 - RNA, 20 nt, Artificial Sequence
  LRRK2 RNA guide
aaugaugcucuccaugcuga

SEQ ID NO: 4200 - RNA, 20 nt, Artificial Sequence
  LRRK2 RNA guide
aaugcaucagcauggagagc

SEQ ID NO: 4201 - RNA, 20 nt, Artificial Sequence
  LRRK2 RNA guide
agagcaucauuucccuauga

SEQ ID NO: 4202 - RNA, 20 nt, Artificial Sequence
  LRRK2 RNA guide
agcaucauuucccuaugagc

SEQ ID NO: 4203 - RNA, 20 nt, Artificial Sequence
  LRRK2 RNA guide
agcauggagagcaucauuuc

SEQ ID NO: 4204 - RNA, 20 nt, Artificial Sequence
  LRRK2 RNA guide
agcucauagggaaaugaugc

SEQ ID NO: 4205 - RNA, 20 nt, Artificial Sequence
  LRRK2 RNA guide
agggaaaugaugcucuccau

SEQ ID NO: 4206 - RNA, 20 nt, Artificial Sequence
  LRRK2 RNA guide
aguuucccagcucauaggga

SEQ ID NO: 4207 - RNA, 20 nt, Artificial Sequence
  LRRK2 RNA guide
auagggaaaugaugcucucc

SEQ ID NO: 4208 - RNA, 20 nt, Artificial Sequence
  LRRK2 RNA guide
aucagcauggagagcaucau

SEQ ID NO: 4209 - RNA, 20 nt, Artificial Sequence
  LRRK2 RNA guide
aucauuucccuaugagcugg

SEQ ID NO: 4210 - RNA, 20 nt, Artificial Sequence
  LRRK2 RNA guide
augcaucagcauggagagca

SEQ ID NO: 4211 - RNA, 20 nt, Artificial Sequence
  LRRK2 RNA guide
auggagagcaucauuucccu

SEQ ID NO: 4212 - RNA, 20 nt, Artificial Sequence
  LRRK2 RNA guide
auuucccuaugagcugggaa

SEQ ID NO: 4213 - RNA, 20 nt, Artificial Sequence
  LRRK2 RNA guide
cagcauggagagcaucauuu

SEQ ID NO: 4214 - RNA, 20 nt, Artificial Sequence
  LRRK2 RNA guide
cagcucauagggaaaugaug

SEQ ID NO: 4215 - RNA, 20 nt, Artificial Sequence
  LRRK2 RNA guide
cauagggaaaugaugcucuc

SEQ ID NO: 4216 - RNA, 20 nt, Artificial Sequence
  LRRK2 RNA guide
caucagcauggagagcauca

SEQ ID NO: 4217 - RNA, 20 nt, Artificial Sequence
  LRRK2 RNA guide
caucauuucccuaugagcug

SEQ ID NO: 4218 - RNA, 20 nt, Artificial Sequence
  LRRK2 RNA guide
cauggagagcaucauuuccc

SEQ ID NO: 4219 - RNA, 20 nt, Artificial Sequence
  LRRK2 RNA guide
cauuucccuaugagcuggga

SEQ ID NO: 4220 - RNA, 20 nt, Artificial Sequence
  LRRK2 RNA guide
ccagcucauagggaaaugau

SEQ ID NO: 4221 - RNA, 20 nt, Artificial Sequence
  LRRK2 RNA guide
cccagcucauagggaaauga

SEQ ID NO: 4222 - RNA, 20 nt, Artificial Sequence
  LRRK2 RNA guide
cucauagggaaaugaugcuc

SEQ ID NO: 4223 - RNA, 20 nt, Artificial Sequence
  LRRK2 RNA guide
gaaaguuucccagcucauag

SEQ ID NO: 4224 - RNA, 20 nt, Artificial Sequence
  LRRK2 RNA guide
gaaaugaugcucuccaugcu

SEQ ID NO: 4225 - RNA, 20 nt, Artificial Sequence
  LRRK2 RNA guide
gagagcaucauuucccuaug

SEQ ID NO: 4226 - RNA, 20 nt, Artificial Sequence
  LRRK2 RNA guide
gagcaucauuucccuaugag

SEQ ID NO: 4227 - RNA, 20 nt, Artificial Sequence
  LRRK2 RNA guide
gcaucagcauggagagcauc

SEQ ID NO: 4228 - RNA, 20 nt, Artificial Sequence
  LRRK2 RNA guide
gcaucauuucccuaugagcu

SEQ ID NO: 4229 - RNA, 20 nt, Artificial Sequence
  LRRK2 RNA guide
gcauggagagcaucauuucc

SEQ ID NO: 4230 - RNA, 20 nt, Artificial Sequence
  LRRK2 RNA guide
gcucauagggaaaugaugcu

SEQ ID NO: 4231 - RNA, 20 nt, Artificial Sequence
  LRRK2 RNA guide
ggaaaugaugcucuccaugc

SEQ ID NO: 4232 - RNA, 20 nt, Artificial Sequence
  LRRK2 RNA guide
ggagagcaucauuucccuau

SEQ ID NO: 4233 - RNA, 20 nt, Artificial Sequence
  LRRK2 RNA guide
gggaaaugaugcucuccaug

SEQ ID NO: 4234 - RNA, 20 nt, Artificial Sequence
  LRRK2 RNA guide
guuucccagcucauagggaa

SEQ ID NO: 4235 - RNA, 20 nt, Artificial Sequence
  LRRK2 RNA guide
uagggaaaugaugcucucca

SEQ ID NO: 4236 - RNA, 20 nt, Artificial Sequence
  LRRK2 RNA guide
ucagcauggagagcaucauu

SEQ ID NO: 4237 - RNA, 20 nt, Artificial Sequence
  LRRK2 RNA guide
ucauagggaaaugaugcucu

SEQ ID NO: 4238 - RNA, 20 nt, Artificial Sequence
  LRRK2 RNA guide
ucauuucccuaugagcuggg

SEQ ID NO: 4239 - RNA, 20 nt, Artificial Sequence
  LRRK2 RNA guide
ucccagcucauagggaaaug

SEQ ID NO: 4240 - RNA, 20 nt, Artificial Sequence
  LRRK2 RNA guide
ugcaucagcauggagagcau

SEQ ID NO: 4241 - RNA, 20 nt, Artificial Sequence
  LRRK2 RNA guide
uggagagcaucauuucccua

SEQ ID NO: 4242 - RNA, 20 nt, Artificial Sequence
  LRRK2 RNA guide
uucccagcucauagggaaau

SEQ ID NO: 4243 - RNA, 20 nt, Artificial Sequence
  LRRK2 RNA guide
uuucccagcucauagggaaa

SEQ ID NO: 4244 - RNA, 21 nt, Artificial Sequence
  LRRK2 RNA guide
aaaguuucccagcucauaggg

SEQ ID NO: 4245 - RNA, 21 nt, Artificial Sequence
  LRRK2 RNA guide
aaaugaugcucuccaugcuga

SEQ ID NO: 4246 - RNA, 21 nt, Artificial Sequence
  LRRK2 RNA guide
aaguuucccagcucauaggga

SEQ ID NO: 4247 - RNA, 21 nt, Artificial Sequence
  LRRK2 RNA guide
aaugaugcucuccaugcugau

SEQ ID NO: 4248 - RNA, 21 nt, Artificial Sequence
  LRRK2 RNA guide
aaugcaucagcauggagagca

SEQ ID NO: 4249 - RNA, 21 nt, Artificial Sequence
  LRRK2 RNA guide
agagcaucauuucccuaugag

SEQ ID NO: 4250 - RNA, 21 nt, Artificial Sequence
  LRRK2 RNA guide
agcaucauuucccuaugagcu

SEQ ID NO: 4251 - RNA, 21 nt, Artificial Sequence
  LRRK2 RNA guide
agcauggagagcaucauuucc

SEQ ID NO: 4252 - RNA, 21 nt, Artificial Sequence
  LRRK2 RNA guide
agcucauagggaaaugaugcu

SEQ ID NO: 4253 - RNA, 21 nt, Artificial Sequence
  LRRK2 RNA guide
agggaaaugaugcucuccaug

SEQ ID NO: 4254 - RNA, 21 nt, Artificial Sequence
  LRRK2 RNA guide
aguuucccagcucauagggaa

SEQ ID NO: 4255 - RNA, 21 nt, Artificial Sequence
  LRRK2 RNA guide
auagggaaaugaugcucucca

SEQ ID NO: 4256 - RNA, 21 nt, Artificial Sequence
  LRRK2 RNA guide
aucagcauggagagcaucauu

SEQ ID NO: 4257 - RNA, 21 nt, Artificial Sequence
  LRRK2 RNA guide
aucauuucccuaugagcuggg

SEQ ID NO: 4258 - RNA, 21 nt, Artificial Sequence
  LRRK2 RNA guide
augcaucagcauggagagcau

SEQ ID NO: 4259 - RNA, 21 nt, Artificial Sequence
  LRRK2 RNA guide
auggagagcaucauuucccua

SEQ ID NO: 4260 - RNA, 21 nt, Artificial Sequence
  LRRK2 RNA guide
auuucccuaugagcugggaaa

SEQ ID NO: 4261 - RNA, 21 nt, Artificial Sequence
  LRRK2 RNA guide
cagcauggagagcaucauuuc

SEQ ID NO: 4262 - RNA, 21 nt, Artificial Sequence
  LRRK2 RNA guide
cagcucauagggaaaugaugc

SEQ ID NO: 4263 - RNA, 21 nt, Artificial Sequence
  LRRK2 RNA guide
cauagggaaaugaugcucucc

SEQ ID NO: 4264 - RNA, 21 nt, Artificial Sequence
  LRRK2 RNA guide
caucagcauggagagcaucau

SEQ ID NO: 4265 - RNA, 21 nt, Artificial Sequence
  LRRK2 RNA guide
caucauuucccuaugagcugg

SEQ ID NO: 4266 - RNA, 21 nt, Artificial Sequence
  LRRK2 RNA guide
cauggagagcaucauuucccu

SEQ ID NO: 4267 - RNA, 21 nt, Artificial Sequence
  LRRK2 RNA guide
cauuucccuaugagcugggaa

SEQ ID NO: 4268 - RNA, 21 nt, Artificial Sequence
  LRRK2 RNA guide
ccagcucauagggaaaugaug

SEQ ID NO: 4269 - RNA, 21 nt, Artificial Sequence
  LRRK2 RNA guide
cccagcucauagggaaaugau

SEQ ID NO: 4270 - RNA, 21 nt, Artificial Sequence
  LRRK2 RNA guide
cucauagggaaaugaugcucu

SEQ ID NO: 4271 - RNA, 21 nt, Artificial Sequence
  LRRK2 RNA guide
gaaaguuucccagcucauagg

SEQ ID NO: 4272 - RNA, 21 nt, Artificial Sequence
  LRRK2 RNA guide
gaaaugaugcucuccaugcug

SEQ ID NO: 4273 - RNA, 21 nt, Artificial Sequence
  LRRK2 RNA guide
gaaugcaucagcauggagagc

SEQ ID NO: 4274 - RNA, 21 nt, Artificial Sequence
  LRRK2 RNA guide
gagagcaucauuucccuauga

SEQ ID NO: 4275 - RNA, 21 nt, Artificial Sequence
  LRRK2 RNA guide
gagcaucauuucccuaugagc

SEQ ID NO: 4276 - RNA, 21 nt, Artificial Sequence
  LRRK2 RNA guide
gcaucagcauggagagcauca

SEQ ID NO: 4277 - RNA, 21 nt, Artificial Sequence
  LRRK2 RNA guide
gcaucauuucccuaugagcug

SEQ ID NO: 4278 - RNA, 21 nt, Artificial Sequence
  LRRK2 RNA guide
gcauggagagcaucauuuccc

SEQ ID NO: 4279 - RNA, 21 nt, Artificial Sequence
  LRRK2 RNA guide
gcucauagggaaaugaugcuc

SEQ ID NO: 4280 - RNA, 21 nt, Artificial Sequence
  LRRK2 RNA guide
ggaaaugaugcucuccaugcu

SEQ ID NO: 4281 - RNA, 21 nt, Artificial Sequence
  LRRK2 RNA guide
ggagagcaucauuucccuaug

SEQ ID NO: 4282 - RNA, 21 nt, Artificial Sequence
  LRRK2 RNA guide
gggaaaugaugcucuccaugc

SEQ ID NO: 4283 - RNA, 21 nt, Artificial Sequence
  LRRK2 RNA guide
guuucccagcucauagggaaa

SEQ ID NO: 4284 - RNA, 21 nt, Artificial Sequence
  LRRK2 RNA guide
uagggaaaugaugcucuccau

SEQ ID NO: 4285 - RNA, 21 nt, Artificial Sequence
  LRRK2 RNA guide
ucagcauggagagcaucauuu

SEQ ID NO: 4286 - RNA, 21 nt, Artificial Sequence
  LRRK2 RNA guide
ucauagggaaaugaugcucuc

SEQ ID NO: 4287 - RNA, 21 nt, Artificial Sequence
  LRRK2 RNA guide
ucauuucccuaugagcuggga

SEQ ID NO: 4288 - RNA, 21 nt, Artificial Sequence
  LRRK2 RNA guide
ucccagcucauagggaaauga

SEQ ID NO: 4289 - RNA, 21 nt, Artificial Sequence
  LRRK2 RNA guide
ugaaaguuucccagcucauag

SEQ ID NO: 4290 - RNA, 21 nt, Artificial Sequence
  LRRK2 RNA guide
ugcaucagcauggagagcauc

SEQ ID NO: 4291 - RNA, 21 nt, Artificial Sequence
  LRRK2 RNA guide
uggagagcaucauuucccuau

SEQ ID NO: 4292 - RNA, 21 nt, Artificial Sequence
  LRRK2 RNA guide
uucccagcucauagggaaaug

SEQ ID NO: 4293 - RNA, 21 nt, Artificial Sequence
  LRRK2 RNA guide
uuucccagcucauagggaaau

SEQ ID NO: 4294 - RNA, 22 nt, Artificial Sequence
  LRRK2 RNA guide
aaaguuucccagcucauaggga

SEQ ID NO: 4295 - RNA, 22 nt, Artificial Sequence
  LRRK2 RNA guide
aaaugaugcucuccaugcugau

SEQ ID NO: 4296 - RNA, 22 nt, Artificial Sequence
  LRRK2 RNA guide
aaguuucccagcucauagggaa

SEQ ID NO: 4297 - RNA, 22 nt, Artificial Sequence
  LRRK2 RNA guide
aaugaugcucuccaugcugaug

SEQ ID NO: 4298 - RNA, 22 nt, Artificial Sequence
  LRRK2 RNA guide
aaugcaucagcauggagagcau

SEQ ID NO: 4299 - RNA, 22 nt, Artificial Sequence
  LRRK2 RNA guide
agaaugcaucagcauggagagc

SEQ ID NO: 4300 - RNA, 22 nt, Artificial Sequence
  LRRK2 RNA guide
agagcaucauuucccuaugagc

SEQ ID NO: 4301 - RNA, 22 nt, Artificial Sequence
  LRRK2 RNA guide
agcaucauuucccuaugagcug

SEQ ID NO: 4302 - RNA, 22 nt, Artificial Sequence
  LRRK2 RNA guide
agcauggagagcaucauuuccc

SEQ ID NO: 4303 - RNA, 22 nt, Artificial Sequence
  LRRK2 RNA guide
agcucauagggaaaugaugcuc

SEQ ID NO: 4304 - RNA, 22 nt, Artificial Sequence
  LRRK2 RNA guide
agggaaaugaugcucuccaugc

SEQ ID NO: 4305 - RNA, 22 nt, Artificial Sequence
  LRRK2 RNA guide
aguuucccagcucauagggaaa

SEQ ID NO: 4306 - RNA, 22 nt, Artificial Sequence
  LRRK2 RNA guide
auagggaaaugaugcucuccau

SEQ ID NO: 4307 - RNA, 22 nt, Artificial Sequence
  LRRK2 RNA guide
aucagcauggagagcaucauuu

SEQ ID NO: 4308 - RNA, 22 nt, Artificial Sequence
  LRRK2 RNA guide
aucauuucccuaugagcuggga

SEQ ID NO: 4309 - RNA, 22 nt, Artificial Sequence
  LRRK2 RNA guide
augcaucagcauggagagcauc

SEQ ID NO: 4310 - RNA, 22 nt, Artificial Sequence
  LRRK2 RNA guide
auggagagcaucauuucccuau

SEQ ID NO: 4311 - RNA, 22 nt, Artificial Sequence
  LRRK2 RNA guide
auuucccuaugagcugggaaac

SEQ ID NO: 4312 - RNA, 22 nt, Artificial Sequence
  LRRK2 RNA guide
cagcauggagagcaucauuucc

SEQ ID NO: 4313 - RNA, 22 nt, Artificial Sequence
  LRRK2 RNA guide
cagcucauagggaaaugaugcu

SEQ ID NO: 4314 - RNA, 22 nt, Artificial Sequence
  LRRK2 RNA guide
cauagggaaaugaugcucucca

SEQ ID NO: 4315 - RNA, 22 nt, Artificial Sequence
  LRRK2 RNA guide
caucagcauggagagcaucauu

SEQ ID NO: 4316 - RNA, 22 nt, Artificial Sequence
  LRRK2 RNA guide
caucauuucccuaugagcuggg

SEQ ID NO: 4317 - RNA, 22 nt, Artificial Sequence
  LRRK2 RNA guide
cauggagagcaucauuucccua

SEQ ID NO: 4318 - RNA, 22 nt, Artificial Sequence
  LRRK2 RNA guide
cauuucccuaugagcugggaaa

SEQ ID NO: 4319 - RNA, 22 nt, Artificial Sequence
  LRRK2 RNA guide
ccagcucauagggaaaugaugc

SEQ ID NO: 4320 - RNA, 22 nt, Artificial Sequence
  LRRK2 RNA guide
cccagcucauagggaaaugaug

SEQ ID NO: 4321 - RNA, 22 nt, Artificial Sequence
  LRRK2 RNA guide
cucauagggaaaugaugcucuc

SEQ ID NO: 4322 - RNA, 22 nt, Artificial Sequence
  LRRK2 RNA guide
gaaaguuucccagcucauaggg

SEQ ID NO: 4323 - RNA, 22 nt, Artificial Sequence
  LRRK2 RNA guide
gaaaugaugcucuccaugcuga

SEQ ID NO: 4324 - RNA, 22 nt, Artificial Sequence
  LRRK2 RNA guide
gaaugcaucagcauggagagca

SEQ ID NO: 4325 - RNA, 22 nt, Artificial Sequence
  LRRK2 RNA guide
gagagcaucauuucccuaugag

SEQ ID NO: 4326 - RNA, 22 nt, Artificial Sequence
  LRRK2 RNA guide
gagcaucauuucccuaugagcu

SEQ ID NO: 4327 - RNA, 22 nt, Artificial Sequence
  LRRK2 RNA guide
gcaucagcauggagagcaucau

SEQ ID NO: 4328 - RNA, 22 nt, Artificial Sequence
  LRRK2 RNA guide
gcaucauuucccuaugagcugg

SEQ ID NO: 4329 - RNA, 22 nt, Artificial Sequence
  LRRK2 RNA guide
gcauggagagcaucauuucccu

SEQ ID NO: 4330 - RNA, 22 nt, Artificial Sequence
  LRRK2 RNA guide
gcucauagggaaaugaugcucu

SEQ ID NO: 4331 - RNA, 22 nt, Artificial Sequence
  LRRK2 RNA guide
ggaaaugaugcucuccaugcug

SEQ ID NO: 4332 - RNA, 22 nt, Artificial Sequence
  LRRK2 RNA guide
ggagagcaucauuucccuauga

SEQ ID NO: 4333 - RNA, 22 nt, Artificial Sequence
  LRRK2 RNA guide
gggaaaugaugcucuccaugcu

SEQ ID NO: 4334 - RNA, 22 nt, Artificial Sequence
  LRRK2 RNA guide
guuucccagcucauagggaaau

SEQ ID NO: 4335 - RNA, 22 nt, Artificial Sequence
  LRRK2 RNA guide
uagggaaaugaugcucuccaug

SEQ ID NO: 4336 - RNA, 22 nt, Artificial Sequence
  LRRK2 RNA guide
ucagcauggagagcaucauuuc

SEQ ID NO: 4337 - RNA, 22 nt, Artificial Sequence
  LRRK2 RNA guide
ucauagggaaaugaugcucucc

SEQ ID NO: 4338 - RNA, 22 nt, Artificial Sequence
  LRRK2 RNA guide
ucauuucccuaugagcugggaa

SEQ ID NO: 4339 - RNA, 22 nt, Artificial Sequence
  LRRK2 RNA guide
ucccagcucauagggaaaugau

SEQ ID NO: 4340 - RNA, 22 nt, Artificial Sequence
  LRRK2 RNA guide
ugaaaguuucccagcucauagg

SEQ ID NO: 4341 - RNA, 22 nt, Artificial Sequence
  LRRK2 RNA guide
ugcaucagcauggagagcauca

SEQ ID NO: 4342 - RNA, 22 nt, Artificial Sequence
  LRRK2 RNA guide
uggagagcaucauuucccuaug

SEQ ID NO: 4343 - RNA, 22 nt, Artificial Sequence
  LRRK2 RNA guide
uucccagcucauagggaaauga

SEQ ID NO: 4344 - RNA, 22 nt, Artificial Sequence
  LRRK2 RNA guide
uugaaaguuucccagcucauag

SEQ ID NO: 4345 - RNA, 22 nt, Artificial Sequence
  LRRK2 RNA guide
uuucccagcucauagggaaaug

SEQ ID NO: 4346 - RNA, 20 nt, Artificial Sequence
  LRRK2 RNA guide
aagaaugcaucagcaugaag

SEQ ID NO: 4347 - RNA, 20 nt, Artificial Sequence
  LRRK2 RNA guide
aagugaugcucuucaugcug

SEQ ID NO: 4348 - RNA, 20 nt, Artificial Sequence
  LRRK2 RNA guide
aaugcaucagcaugaagagc

SEQ ID NO: 4349 - RNA, 20 nt, Artificial Sequence
  LRRK2 RNA guide
agaaugcaucagcaugaaga

SEQ ID NO: 4350 - RNA, 20 nt, Artificial Sequence
  LRRK2 RNA guide
agcaugaagagcaucacuuc

SEQ ID NO: 4351 - RNA, 20 nt, Artificial Sequence
  LRRK2 RNA guide
agcucauagggaagugaugc

SEQ ID NO: 4352 - RNA, 20 nt, Artificial Sequence
  LRRK2 RNA guide
agggaagugaugcucuucau

SEQ ID NO: 4353 - RNA, 20 nt, Artificial Sequence
  LRRK2 RNA guide
agugaugcucuucaugcuga

SEQ ID NO: 4354 - RNA, 20 nt, Artificial Sequence
  LRRK2 RNA guide
auagggaagugaugcucuuc

SEQ ID NO: 4355 - RNA, 20 nt, Artificial Sequence
  LRRK2 RNA guide
aucagcaugaagagcaucac

SEQ ID NO: 4356 - RNA, 20 nt, Artificial Sequence
  LRRK2 RNA guide
augaagaaugcaucagcaug

SEQ ID NO: 4357 - RNA, 20 nt, Artificial Sequence
  LRRK2 RNA guide
augaagagcaucacuucccu

SEQ ID NO: 4358 - RNA, 20 nt, Artificial Sequence
  LRRK2 RNA guide
augcaucagcaugaagagca

SEQ ID NO: 4359 - RNA, 20 nt, Artificial Sequence
  LRRK2 RNA guide
augcucuucaugcugaugca

SEQ ID NO: 4360 - RNA, 20 nt, Artificial Sequence
  LRRK2 RNA guide
cagcaugaagagcaucacuu

SEQ ID NO: 4361 - RNA, 20 nt, Artificial Sequence
  LRRK2 RNA guide
cagcucauagggaagugaug

SEQ ID NO: 4362 - RNA, 20 nt, Artificial Sequence
  LRRK2 RNA guide
cauagggaagugaugcucuu

SEQ ID NO: 4363 - RNA, 20 nt, Artificial Sequence
  LRRK2 RNA guide
caucagcaugaagagcauca

SEQ ID NO: 4364 - RNA, 20 nt, Artificial Sequence
  LRRK2 RNA guide
caugaagagcaucacuuccc

SEQ ID NO: 4365 - RNA, 20 nt, Artificial Sequence
  LRRK2 RNA guide
cucauagggaagugaugcuc

SEQ ID NO: 4366 - RNA, 20 nt, Artificial Sequence
  LRRK2 RNA guide
cucuucaugcugaugcauuc

SEQ ID NO: 4367 - RNA, 20 nt, Artificial Sequence
  LRRK2 RNA guide
cuucaugcugaugcauucuu

SEQ ID NO: 4368 - RNA, 20 nt, Artificial Sequence
  LRRK2 RNA guide
gaagaaugcaucagcaugaa

SEQ ID NO: 4369 - RNA, 20 nt, Artificial Sequence
  LRRK2 RNA guide
gaagagcaucacuucccuau

SEQ ID NO: 4370 - RNA, 20 nt, Artificial Sequence
  LRRK2 RNA guide
gaagugaugcucuucaugcu

SEQ ID NO: 4371 - RNA, 20 nt, Artificial Sequence
  LRRK2 RNA guide
gaaugcaucagcaugaagag

SEQ ID NO: 4372 - RNA, 20 nt, Artificial Sequence
  LRRK2 RNA guide
gaugaagaaugcaucagcau

SEQ ID NO: 4373 - RNA, 20 nt, Artificial Sequence
  LRRK2 RNA guide
gaugcucuucaugcugaugc

SEQ ID NO: 4374 - RNA, 20 nt, Artificial Sequence
  LRRK2 RNA guide
gcaucagcaugaagagcauc

SEQ ID NO: 4375 - RNA, 20 nt, Artificial Sequence
  LRRK2 RNA guide
gcaugaagagcaucacuucc

SEQ ID NO: 4376 - RNA, 20 nt, Artificial Sequence
  LRRK2 RNA guide
gcucauagggaagugaugcu

SEQ ID NO: 4377 - RNA, 20 nt, Artificial Sequence
  LRRK2 RNA guide
gcucuucaugcugaugcauu

SEQ ID NO: 4378 - RNA, 20 nt, Artificial Sequence
  LRRK2 RNA guide
ggaagugaugcucuucaugc

SEQ ID NO: 4379 - RNA, 20 nt, Artificial Sequence
  LRRK2 RNA guide
gggaagugaugcucuucaug

SEQ ID NO: 4380 - RNA, 20 nt, Artificial Sequence
  LRRK2 RNA guide
gugaugcucuucaugcugau

SEQ ID NO: 4381 - RNA, 20 nt, Artificial Sequence
  LRRK2 RNA guide
uagggaagugaugcucuuca

SEQ ID NO: 4382 - RNA, 20 nt, Artificial Sequence
  LRRK2 RNA guide
ucagcaugaagagcaucacu

SEQ ID NO: 4383 - RNA, 20 nt, Artificial Sequence
  LRRK2 RNA guide
ucauagggaagugaugcucu

SEQ ID NO: 4384 - RNA, 20 nt, Artificial Sequence
  LRRK2 RNA guide
ucuucaugcugaugcauucu

SEQ ID NO: 4385 - RNA, 20 nt, Artificial Sequence
  LRRK2 RNA guide
ugaagaaugcaucagcauga

SEQ ID NO: 4386 - RNA, 20 nt, Artificial Sequence
  LRRK2 RNA guide
ugaagagcaucacuucccua

SEQ ID NO: 4387 - RNA, 20 nt, Artificial Sequence
  LRRK2 RNA guide
ugaugaagaaugcaucagca

SEQ ID NO: 4388 - RNA, 20 nt, Artificial Sequence
  LRRK2 RNA guide
ugaugcucuucaugcugaug

SEQ ID NO: 4389 - RNA, 20 nt, Artificial Sequence
  LRRK2 RNA guide
ugcaucagcaugaagagcau

SEQ ID NO: 4390 - RNA, 20 nt, Artificial Sequence
  LRRK2 RNA guide
ugcucuucaugcugaugcau

SEQ ID NO: 4391 - RNA, 20 nt, Artificial Sequence
  LRRK2 RNA guide
uucaugcugaugcauucuuc

SEQ ID NO: 4392 - RNA, 20 nt, Artificial Sequence
  LRRK2 RNA guide
uugaugaagaaugcaucagc

SEQ ID NO: 4393 - RNA, 21 nt, Artificial Sequence
  LRRK2 RNA guide
aagaaugcaucagcaugaaga

SEQ ID NO: 4394 - RNA, 21 nt, Artificial Sequence
  LRRK2 RNA guide
aagugaugcucuucaugcuga

SEQ ID NO: 4395 - RNA, 21 nt, Artificial Sequence
  LRRK2 RNA guide
aaugcaucagcaugaagagca

SEQ ID NO: 4396 - RNA, 21 nt, Artificial Sequence
  LRRK2 RNA guide
agaaugcaucagcaugaagag

SEQ ID NO: 4397 - RNA, 21 nt, Artificial Sequence
  LRRK2 RNA guide
agcaugaagagcaucacuucc

SEQ ID NO: 4398 - RNA, 21 nt, Artificial Sequence
  LRRK2 RNA guide
agcucauagggaagugaugcu

SEQ ID NO: 4399 - RNA, 21 nt, Artificial Sequence
  LRRK2 RNA guide
agggaagugaugcucuucaug

SEQ ID NO: 4400 - RNA, 21 nt, Artificial Sequence
  LRRK2 RNA guide
agugaugcucuucaugcugau

SEQ ID NO: 4401 - RNA, 21 nt, Artificial Sequence
  LRRK2 RNA guide
auagggaagugaugcucuuca

SEQ ID NO: 4402 - RNA, 21 nt, Artificial Sequence
  LRRK2 RNA guide
aucagcaugaagagcaucacu

SEQ ID NO: 4403 - RNA, 21 nt, Artificial Sequence
  LRRK2 RNA guide
augaagaaugcaucagcauga

SEQ ID NO: 4404 - RNA, 21 nt, Artificial Sequence
  LRRK2 RNA guide
augaagagcaucacuucccua

SEQ ID NO: 4405 - RNA, 21 nt, Artificial Sequence
  LRRK2 RNA guide
augcaucagcaugaagagcau

SEQ ID NO: 4406 - RNA, 21 nt, Artificial Sequence
  LRRK2 RNA guide
augcucuucaugcugaugcau

SEQ ID NO: 4407 - RNA, 21 nt, Artificial Sequence
  LRRK2 RNA guide
cagcaugaagagcaucacuuc

SEQ ID NO: 4408 - RNA, 21 nt, Artificial Sequence
  LRRK2 RNA guide
cagcucauagggaagugaugc

SEQ ID NO: 4409 - RNA, 21 nt, Artificial Sequence
  LRRK2 RNA guide
cauagggaagugaugcucuuc

SEQ ID NO: 4410 - RNA, 21 nt, Artificial Sequence
  LRRK2 RNA guide
caucagcaugaagagcaucac

SEQ ID NO: 4411 - RNA, 21 nt, Artificial Sequence
  LRRK2 RNA guide
caugaagagcaucacuucccu

SEQ ID NO: 4412 - RNA, 21 nt, Artificial Sequence
  LRRK2 RNA guide
ccagcucauagggaagugaug

SEQ ID NO: 4413 - RNA, 21 nt, Artificial Sequence
  LRRK2 RNA guide
cucauagggaagugaugcucu

SEQ ID NO: 4414 - RNA, 21 nt, Artificial Sequence
  LRRK2 RNA guide
cucuucaugcugaugcauucu

SEQ ID NO: 4415 - RNA, 21 nt, Artificial Sequence
  LRRK2 RNA guide
cuucaugcugaugcauucuuc

SEQ ID NO: 4416 - RNA, 21 nt, Artificial Sequence
  LRRK2 RNA guide
cuuugaugaagaaugcaucag

SEQ ID NO: 4417 - RNA, 21 nt, Artificial Sequence
  LRRK2 RNA guide
gaagaaugcaucagcaugaag

SEQ ID NO: 4418 - RNA, 21 nt, Artificial Sequence
  LRRK2 RNA guide
gaagagcaucacuucccuaug

SEQ ID NO: 4419 - RNA, 21 nt, Artificial Sequence
  LRRK2 RNA guide
gaagugaugcucuucaugcug

SEQ ID NO: 4420 - RNA, 21 nt, Artificial Sequence
  LRRK2 RNA guide
gaaugcaucagcaugaagagc

SEQ ID NO: 4421 - RNA, 21 nt, Artificial Sequence
  LRRK2 RNA guide
gaugaagaaugcaucagcaug

SEQ ID NO: 4422 - RNA, 21 nt, Artificial Sequence
  LRRK2 RNA guide
gaugcucuucaugcugaugca

SEQ ID NO: 4423 - RNA, 21 nt, Artificial Sequence
  LRRK2 RNA guide
gcaucagcaugaagagcauca

SEQ ID NO: 4424 - RNA, 21 nt, Artificial Sequence
  LRRK2 RNA guide
gcaugaagagcaucacuuccc

SEQ ID NO: 4425 - RNA, 21 nt, Artificial Sequence
  LRRK2 RNA guide
gcucauagggaagugaugcuc

SEQ ID NO: 4426 - RNA, 21 nt, Artificial Sequence
  LRRK2 RNA guide
gcucuucaugcugaugcauuc

SEQ ID NO: 4427 - RNA, 21 nt, Artificial Sequence
  LRRK2 RNA guide
ggaagugaugcucuucaugcu

SEQ ID NO: 4428 - RNA, 21 nt, Artificial Sequence
  LRRK2 RNA guide
gggaagugaugcucuucaugc

SEQ ID NO: 4429 - RNA, 21 nt, Artificial Sequence
  LRRK2 RNA guide
gugaugcucuucaugcugaug

SEQ ID NO: 4430 - RNA, 21 nt, Artificial Sequence
  LRRK2 RNA guide
uagggaagugaugcucuucau

SEQ ID NO: 4431 - RNA, 21 nt, Artificial Sequence
  LRRK2 RNA guide
ucagcaugaagagcaucacuu

SEQ ID NO: 4432 - RNA, 21 nt, Artificial Sequence
  LRRK2 RNA guide
ucauagggaagugaugcucuu

SEQ ID NO: 4433 - RNA, 21 nt, Artificial Sequence
  LRRK2 RNA guide
ucuucaugcugaugcauucuu

SEQ ID NO: 4434 - RNA, 21 nt, Artificial Sequence
  LRRK2 RNA guide
ugaagaaugcaucagcaugaa

SEQ ID NO: 4435 - RNA, 21 nt, Artificial Sequence
  LRRK2 RNA guide
ugaagagcaucacuucccuau

SEQ ID NO: 4436 - RNA, 21 nt, Artificial Sequence
  LRRK2 RNA guide
ugaugaagaaugcaucagcau

SEQ ID NO: 4437 - RNA, 21 nt, Artificial Sequence
  LRRK2 RNA guide
ugaugcucuucaugcugaugc

SEQ ID NO: 4438 - RNA, 21 nt, Artificial Sequence
  LRRK2 RNA guide
ugcaucagcaugaagagcauc

SEQ ID NO: 4439 - RNA, 21 nt, Artificial Sequence
  LRRK2 RNA guide
ugcucuucaugcugaugcauu

SEQ ID NO: 4440 - RNA, 21 nt, Artificial Sequence
  LRRK2 RNA guide
uucaugcugaugcauucuuca

SEQ ID NO: 4441 - RNA, 21 nt, Artificial Sequence
  LRRK2 RNA guide
uugaugaagaaugcaucagca

SEQ ID NO: 4442 - RNA, 21 nt, Artificial Sequence
  LRRK2 RNA guide
uuugaugaagaaugcaucagc

SEQ ID NO: 4443 - RNA, 22 nt, Artificial Sequence
  LRRK2 RNA guide
aagaaugcaucagcaugaagag

SEQ ID NO: 4444 - RNA, 22 nt, Artificial Sequence
  LRRK2 RNA guide
aagugaugcucuucaugcugau

SEQ ID NO: 4445 - RNA, 22 nt, Artificial Sequence
  LRRK2 RNA guide
aaugcaucagcaugaagagcau

SEQ ID NO: 4446 - RNA, 22 nt, Artificial Sequence
  LRRK2 RNA guide
agaaugcaucagcaugaagagc

SEQ ID NO: 4447 - RNA, 22 nt, Artificial Sequence
  LRRK2 RNA guide
agcaugaagagcaucacuuccc

SEQ ID NO: 4448 - RNA, 22 nt, Artificial Sequence
  LRRK2 RNA guide
agcucauagggaagugaugcuc

SEQ ID NO: 4449 - RNA, 22 nt, Artificial Sequence
  LRRK2 RNA guide
agggaagugaugcucuucaugc

SEQ ID NO: 4450 - RNA, 22 nt, Artificial Sequence
  LRRK2 RNA guide
agugaugcucuucaugcugaug

SEQ ID NO: 4451 - RNA, 22 nt, Artificial Sequence
  LRRK2 RNA guide
auagggaagugaugcucuucau

SEQ ID NO: 4452 - RNA, 22 nt, Artificial Sequence
  LRRK2 RNA guide
aucagcaugaagagcaucacuu

SEQ ID NO: 4453 - RNA, 22 nt, Artificial Sequence
  LRRK2 RNA guide
augaagaaugcaucagcaugaa

SEQ ID NO: 4454 - RNA, 22 nt, Artificial Sequence
  LRRK2 RNA guide
augaagagcaucacuucccuau

SEQ ID NO: 4455 - RNA, 22 nt, Artificial Sequence
  LRRK2 RNA guide
augcaucagcaugaagagcauc

SEQ ID NO: 4456 - RNA, 22 nt, Artificial Sequence
  LRRK2 RNA guide
augcucuucaugcugaugcauu

SEQ ID NO: 4457 - RNA, 22 nt, Artificial Sequence
  LRRK2 RNA guide
cagcaugaagagcaucacuucc

SEQ ID NO: 4458 - RNA, 22 nt, Artificial Sequence
  LRRK2 RNA guide
cagcucauagggaagugaugcu

SEQ ID NO: 4459 - RNA, 22 nt, Artificial Sequence
  LRRK2 RNA guide
cauagggaagugaugcucuuca

SEQ ID NO: 4460 - RNA, 22 nt, Artificial Sequence
  LRRK2 RNA guide
caucagcaugaagagcaucacu

SEQ ID NO: 4461 - RNA, 22 nt, Artificial Sequence
  LRRK2 RNA guide
caugaagagcaucacuucccua

SEQ ID NO: 4462 - RNA, 22 nt, Artificial Sequence
  LRRK2 RNA guide
ccagcucauagggaagugaugc

SEQ ID NO: 4463 - RNA, 22 nt, Artificial Sequence
  LRRK2 RNA guide
cccagcucauagggaagugaug

SEQ ID NO: 4464 - RNA, 22 nt, Artificial Sequence
  LRRK2 RNA guide
ccuuugaugaagaaugcaucag

SEQ ID NO: 4465 - RNA, 22 nt, Artificial Sequence
  LRRK2 RNA guide
cucauagggaagugaugcucuu

SEQ ID NO: 4466 - RNA, 22 nt, Artificial Sequence
  LRRK2 RNA guide
cucuucaugcugaugcauucuu

SEQ ID NO: 4467 - RNA, 22 nt, Artificial Sequence
  LRRK2 RNA guide
cuucaugcugaugcauucuuca

SEQ ID NO: 4468 - RNA, 22 nt, Artificial Sequence
  LRRK2 RNA guide
cuuugaugaagaaugcaucagc

SEQ ID NO: 4469 - RNA, 22 nt, Artificial Sequence
  LRRK2 RNA guide
gaagaaugcaucagcaugaaga

SEQ ID NO: 4470 - RNA, 22 nt, Artificial Sequence
  LRRK2 RNA guide
gaagagcaucacuucccuauga

SEQ ID NO: 4471 - RNA, 22 nt, Artificial Sequence
  LRRK2 RNA guide
gaagugaugcucuucaugcuga

SEQ ID NO: 4472 - RNA, 22 nt, Artificial Sequence
  LRRK2 RNA guide
gaaugcaucagcaugaagagca

SEQ ID NO: 4473 - RNA, 22 nt, Artificial Sequence
  LRRK2 RNA guide
gaugaagaaugcaucagcauga

SEQ ID NO: 4474 - RNA, 22 nt, Artificial Sequence
  LRRK2 RNA guide
gaugcucuucaugcugaugcau

SEQ ID NO: 4475 - RNA, 22 nt, Artificial Sequence
  LRRK2 RNA guide
gcaucagcaugaagagcaucac

SEQ ID NO: 4476 - RNA, 22 nt, Artificial Sequence
  LRRK2 RNA guide
gcaugaagagcaucacuucccu

SEQ ID NO: 4477 - RNA, 22 nt, Artificial Sequence
  LRRK2 RNA guide
gcucauagggaagugaugcucu

SEQ ID NO: 4478 - RNA, 22 nt, Artificial Sequence
  LRRK2 RNA guide
gcucuucaugcugaugcauucu

SEQ ID NO: 4479 - RNA, 22 nt, Artificial Sequence
  LRRK2 RNA guide
ggaagugaugcucuucaugcug

SEQ ID NO: 4480 - RNA, 22 nt, Artificial Sequence
  LRRK2 RNA guide
gggaagugaugcucuucaugcu

SEQ ID NO: 4481 - RNA, 22 nt, Artificial Sequence
  LRRK2 RNA guide
gugaugcucuucaugcugaugc

SEQ ID NO: 4482 - RNA, 22 nt, Artificial Sequence
  LRRK2 RNA guide
uagggaagugaugcucuucaug

SEQ ID NO: 4483 - RNA, 22 nt, Artificial Sequence
  LRRK2 RNA guide
ucagcaugaagagcaucacuuc

SEQ ID NO: 4484 - RNA, 22 nt, Artificial Sequence
  LRRK2 RNA guide
ucauagggaagugaugcucuuc

SEQ ID NO: 4485 - RNA, 22 nt, Artificial Sequence
  LRRK2 RNA guide
ucuucaugcugaugcauucuuc

SEQ ID NO: 4486 - RNA, 22 nt, Artificial Sequence
  LRRK2 RNA guide
ugaagaaugcaucagcaugaag

SEQ ID NO: 4487 - RNA, 22 nt, Artificial Sequence
  LRRK2 RNA guide
ugaagagcaucacuucccuaug

SEQ ID NO: 4488 - RNA, 22 nt, Artificial Sequence
  LRRK2 RNA guide
ugaugaagaaugcaucagcaug

SEQ ID NO: 4489 - RNA, 22 nt, Artificial Sequence
  LRRK2 RNA guide
ugaugcucuucaugcugaugca

SEQ ID NO: 4490 - RNA, 22 nt, Artificial Sequence
  LRRK2 RNA guide
ugcaucagcaugaagagcauca

SEQ ID NO: 4491 - RNA, 22 nt, Artificial Sequence
  LRRK2 RNA guide
ugcucuucaugcugaugcauuc

SEQ ID NO: 4492 - RNA, 22 nt, Artificial Sequence
  LRRK2 RNA guide
uucaugcugaugcauucuucau

SEQ ID NO: 4493 - RNA, 22 nt, Artificial Sequence
  LRRK2 RNA guide
uugaugaagaaugcaucagcau

SEQ ID NO: 4494 - RNA, 22 nt, Artificial Sequence
  LRRK2 RNA guide
uuugaugaagaaugcaucagca

SEQ ID NO: 4495 - RNA, 20 nt, Artificial Sequence
  LRRK2 RNA guide
aaaacuuccuuugaugaaga

SEQ ID NO: 4496 - RNA, 20 nt, Artificial Sequence
  LRRK2 RNA guide
aaacuuccuuugaugaagac

SEQ ID NO: 4497 - RNA, 20 nt, Artificial Sequence
  LRRK2 RNA guide
aacuuccuuugaugaagacu

SEQ ID NO: 4498 - RNA, 20 nt, Artificial Sequence
  LRRK2 RNA guide
aagacugcaucagcauggag

SEQ ID NO: 4499 - RNA, 20 nt, Artificial Sequence
  LRRK2 RNA guide
acugcaucagcauggagagc

SEQ ID NO: 4500 - RNA, 20 nt, Artificial Sequence
  LRRK2 RNA guide
acuuccuuugaugaagacug

SEQ ID NO: 4501 - RNA, 20 nt, Artificial Sequence
  LRRK2 RNA guide
agacugcaucagcauggaga

SEQ ID NO: 4502 - RNA, 20 nt, Artificial Sequence
  LRRK2 RNA guide
agucuucaucaaaggaaguu

SEQ ID NO: 4503 - RNA, 20 nt, Artificial Sequence
  LRRK2 RNA guide
agugaugcucuccaugcuga

SEQ ID NO: 4504 - RNA, 20 nt, Artificial Sequence
  LRRK2 RNA guide
augaagacugcaucagcaug

SEQ ID NO: 4505 - RNA, 20 nt, Artificial Sequence
  LRRK2 RNA guide
augcagucuucaucaaagga

SEQ ID NO: 4506 - RNA, 20 nt, Artificial Sequence
  LRRK2 RNA guide
augcucuccaugcugaugca

SEQ ID NO: 4507 - RNA, 20 nt, Artificial Sequence
  LRRK2 RNA guide
augcugaugcagucuucauc

SEQ ID NO: 4508 - RNA, 20 nt, Artificial Sequence
  LRRK2 RNA guide
cagucuucaucaaaggaagu

SEQ ID NO: 4509 - RNA, 20 nt, Artificial Sequence
  LRRK2 RNA guide
caugcugaugcagucuucau

SEQ ID NO: 4510 - RNA, 20 nt, Artificial Sequence
  LRRK2 RNA guide
ccaugcugaugcagucuuca

SEQ ID NO: 4511 - RNA, 20 nt, Artificial Sequence
  LRRK2 RNA guide
ccuuugaugaagacugcauc

SEQ ID NO: 4512 - RNA, 20 nt, Artificial Sequence
  LRRK2 RNA guide
cuccaugcugaugcagucuu

SEQ ID NO: 4513 - RNA, 20 nt, Artificial Sequence
  LRRK2 RNA guide
cucuccaugcugaugcaguc

SEQ ID NO: 4514 - RNA, 20 nt, Artificial Sequence
  LRRK2 RNA guide
cugaugcagucuucaucaaa

SEQ ID NO: 4515 - RNA, 20 nt, Artificial Sequence
  LRRK2 RNA guide
cuggaaaacuuccuuugaug

SEQ ID NO: 4516 - RNA, 20 nt, Artificial Sequence
  LRRK2 RNA guide
cuuccuuugaugaagacugc

SEQ ID NO: 4517 - RNA, 20 nt, Artificial Sequence
  LRRK2 RNA guide
cuuugaugaagacugcauca

SEQ ID NO: 4518 - RNA, 20 nt, Artificial Sequence
  LRRK2 RNA guide
gaaaacuuccuuugaugaag

SEQ ID NO: 4519 - RNA, 20 nt, Artificial Sequence
  LRRK2 RNA guide
gaagacugcaucagcaugga

SEQ ID NO: 4520 - RNA, 20 nt, Artificial Sequence
  LRRK2 RNA guide
gacugcaucagcauggagag

SEQ ID NO: 4521 - RNA, 20 nt, Artificial Sequence
  LRRK2 RNA guide
gaugaagacugcaucagcau

SEQ ID NO: 4522 - RNA, 20 nt, Artificial Sequence
  LRRK2 RNA guide
gaugcagucuucaucaaagg

SEQ ID NO: 4523 - RNA, 20 nt, Artificial Sequence
  LRRK2 RNA guide
gaugcucuccaugcugaugc

SEQ ID NO: 4524 - RNA, 20 nt, Artificial Sequence
  LRRK2 RNA guide
gcagucuucaucaaaggaag

SEQ ID NO: 4525 - RNA, 20 nt, Artificial Sequence
  LRRK2 RNA guide
gcucuccaugcugaugcagu

SEQ ID NO: 4526 - RNA, 20 nt, Artificial Sequence
  LRRK2 RNA guide
gcugaugcagucuucaucaa

SEQ ID NO: 4527 - RNA, 20 nt, Artificial Sequence
  LRRK2 RNA guide
gugaugcucuccaugcugau

SEQ ID NO: 4528 - RNA, 20 nt, Artificial Sequence
  LRRK2 RNA guide
uccaugcugaugcagucuuc

SEQ ID NO: 4529 - RNA, 20 nt, Artificial Sequence
  LRRK2 RNA guide
uccuuugaugaagacugcau

SEQ ID NO: 4530 - RNA, 20 nt, Artificial Sequence
  LRRK2 RNA guide
ucuccaugcugaugcagucu

SEQ ID NO: 4531 - RNA, 20 nt, Artificial Sequence
  LRRK2 RNA guide
ugaagacugcaucagcaugg

SEQ ID NO: 4532 - RNA, 20 nt, Artificial Sequence
  LRRK2 RNA guide
ugaugaagacugcaucagca

SEQ ID NO: 4533 - RNA, 20 nt, Artificial Sequence
  LRRK2 RNA guide
ugaugcagucuucaucaaag

SEQ ID NO: 4534 - RNA, 20 nt, Artificial Sequence
  LRRK2 RNA guide
ugaugcucuccaugcugaug

SEQ ID NO: 4535 - RNA, 20 nt, Artificial Sequence
  LRRK2 RNA guide
ugcagucuucaucaaaggaa

SEQ ID NO: 4536 - RNA, 20 nt, Artificial Sequence
  LRRK2 RNA guide
ugcucuccaugcugaugcag

SEQ ID NO: 4537 - RNA, 20 nt, Artificial Sequence
  LRRK2 RNA guide
ugcugaugcagucuucauca

SEQ ID NO: 4538 - RNA, 20 nt, Artificial Sequence
  LRRK2 RNA guide
uggaaaacuuccuuugauga

SEQ ID NO: 4539 - RNA, 20 nt, Artificial Sequence
  LRRK2 RNA guide
uuccuuugaugaagacugca

SEQ ID NO: 4540 - RNA, 20 nt, Artificial Sequence
  LRRK2 RNA guide
uugaugaagacugcaucagc

SEQ ID NO: 4541 - RNA, 20 nt, Artificial Sequence
  LRRK2 RNA guide
uuugaugaagacugcaucag

SEQ ID NO: 4542 - RNA, 21 nt, Artificial Sequence
  LRRK2 RNA guide
aaaacuuccuuugaugaagac

SEQ ID NO: 4543 - RNA, 21 nt, Artificial Sequence
  LRRK2 RNA guide
aaacuuccuuugaugaagacu

SEQ ID NO: 4544 - RNA, 21 nt, Artificial Sequence
  LRRK2 RNA guide
aacuuccuuugaugaagacug

SEQ ID NO: 4545 - RNA, 21 nt, Artificial Sequence
  LRRK2 RNA guide
aagacugcaucagcauggaga

SEQ ID NO: 4546 - RNA, 21 nt, Artificial Sequence
  LRRK2 RNA guide
aagugaugcucuccaugcuga

SEQ ID NO: 4547 - RNA, 21 nt, Artificial Sequence
  LRRK2 RNA guide
acugcaucagcauggagagca

SEQ ID NO: 4548 - RNA, 21 nt, Artificial Sequence
  LRRK2 RNA guide
acuuccuuugaugaagacugc

SEQ ID NO: 4549 - RNA, 21 nt, Artificial Sequence
  LRRK2 RNA guide
agacugcaucagcauggagag

SEQ ID NO: 4550 - RNA, 21 nt, Artificial Sequence
  LRRK2 RNA guide
agucuucaucaaaggaaguuu

SEQ ID NO: 4551 - RNA, 21 nt, Artificial Sequence
  LRRK2 RNA guide
agugaugcucuccaugcugau

SEQ ID NO: 4552 - RNA, 21 nt, Artificial Sequence
  LRRK2 RNA guide
augaagacugcaucagcaugg

SEQ ID NO: 4553 - RNA, 21 nt, Artificial Sequence
  LRRK2 RNA guide
augcagucuucaucaaaggaa

SEQ ID NO: 4554 - RNA, 21 nt, Artificial Sequence
  LRRK2 RNA guide
augcucuccaugcugaugcag

SEQ ID NO: 4555 - RNA, 21 nt, Artificial Sequence
  LRRK2 RNA guide
augcugaugcagucuucauca

SEQ ID NO: 4556 - RNA, 21 nt, Artificial Sequence
  LRRK2 RNA guide
cagucuucaucaaaggaaguu

SEQ ID NO: 4557 - RNA, 21 nt, Artificial Sequence
  LRRK2 RNA guide
caugcugaugcagucuucauc

SEQ ID NO: 4558 - RNA, 21 nt, Artificial Sequence
  LRRK2 RNA guide
ccaugcugaugcagucuucau

SEQ ID NO: 4559 - RNA, 21 nt, Artificial Sequence
  LRRK2 RNA guide
ccuggaaaacuuccuuugaug

SEQ ID NO: 4560 - RNA, 21 nt, Artificial Sequence
  LRRK2 RNA guide
ccuuugaugaagacugcauca

SEQ ID NO: 4561 - RNA, 21 nt, Artificial Sequence
  LRRK2 RNA guide
cuccaugcugaugcagucuuc

SEQ ID NO: 4562 - RNA, 21 nt, Artificial Sequence
  LRRK2 RNA guide
cucuccaugcugaugcagucu

SEQ ID NO: 4563 - RNA, 21 nt, Artificial Sequence
  LRRK2 RNA guide
cugaugcagucuucaucaaag

SEQ ID NO: 4564 - RNA, 21 nt, Artificial Sequence
  LRRK2 RNA guide
cuggaaaacuuccuuugauga

SEQ ID NO: 4565 - RNA, 21 nt, Artificial Sequence
  LRRK2 RNA guide
cuuccuuugaugaagacugca

SEQ ID NO: 4566 - RNA, 21 nt, Artificial Sequence
  LRRK2 RNA guide
cuuugaugaagacugcaucag

SEQ ID NO: 4567 - RNA, 21 nt, Artificial Sequence
  LRRK2 RNA guide
gaaaacuuccuuugaugaaga

SEQ ID NO: 4568 - RNA, 21 nt, Artificial Sequence
  LRRK2 RNA guide
gaagacugcaucagcauggag

SEQ ID NO: 4569 - RNA, 21 nt, Artificial Sequence
  LRRK2 RNA guide
gacugcaucagcauggagagc

SEQ ID NO: 4570 - RNA, 21 nt, Artificial Sequence
  LRRK2 RNA guide
gaugaagacugcaucagcaug

SEQ ID NO: 4571 - RNA, 21 nt, Artificial Sequence
  LRRK2 RNA guide
gaugcagucuucaucaaagga

SEQ ID NO: 4572 - RNA, 21 nt, Artificial Sequence
  LRRK2 RNA guide
gaugcucuccaugcugaugca

SEQ ID NO: 4573 - RNA, 21 nt, Artificial Sequence
  LRRK2 RNA guide
gcagucuucaucaaaggaagu

SEQ ID NO: 4574 - RNA, 21 nt, Artificial Sequence
  LRRK2 RNA guide
gcucuccaugcugaugcaguc

SEQ ID NO: 4575 - RNA, 21 nt, Artificial Sequence
  LRRK2 RNA guide
gcugaugcagucuucaucaaa

SEQ ID NO: 4576 - RNA, 21 nt, Artificial Sequence
  LRRK2 RNA guide
ggaaaacuuccuuugaugaag

SEQ ID NO: 4577 - RNA, 21 nt, Artificial Sequence
  LRRK2 RNA guide
gugaugcucuccaugcugaug

SEQ ID NO: 4578 - RNA, 21 nt, Artificial Sequence
  LRRK2 RNA guide
uccaugcugaugcagucuuca

SEQ ID NO: 4579 - RNA, 21 nt, Artificial Sequence
  LRRK2 RNA guide
uccuuugaugaagacugcauc

SEQ ID NO: 4580 - RNA, 21 nt, Artificial Sequence
  LRRK2 RNA guide
ucuccaugcugaugcagucuu

SEQ ID NO: 4581 - RNA, 21 nt, Artificial Sequence
  LRRK2 RNA guide
ugaagacugcaucagcaugga

SEQ ID NO: 4582 - RNA, 21 nt, Artificial Sequence
  LRRK2 RNA guide
ugaugaagacugcaucagcau

SEQ ID NO: 4583 - RNA, 21 nt, Artificial Sequence
  LRRK2 RNA guide
ugaugcagucuucaucaaagg

SEQ ID NO: 4584 - RNA, 21 nt, Artificial Sequence
  LRRK2 RNA guide
ugaugcucuccaugcugaugc

SEQ ID NO: 4585 - RNA, 21 nt, Artificial Sequence
  LRRK2 RNA guide
ugcagucuucaucaaaggaag

SEQ ID NO: 4586 - RNA, 21 nt, Artificial Sequence
  LRRK2 RNA guide
ugcucuccaugcugaugcagu

SEQ ID NO: 4587 - RNA, 21 nt, Artificial Sequence
  LRRK2 RNA guide
ugcugaugcagucuucaucaa

SEQ ID NO: 4588 - RNA, 21 nt, Artificial Sequence
  LRRK2 RNA guide
uggaaaacuuccuuugaugaa

SEQ ID NO: 4589 - RNA, 21 nt, Artificial Sequence
  LRRK2 RNA guide
uuccuuugaugaagacugcau

SEQ ID NO: 4590 - RNA, 21 nt, Artificial Sequence
  LRRK2 RNA guide
uugaugaagacugcaucagca

SEQ ID NO: 4591 - RNA, 21 nt, Artificial Sequence
  LRRK2 RNA guide
uuugaugaagacugcaucagc

SEQ ID NO: 4592 - RNA, 22 nt, Artificial Sequence
  LRRK2 RNA guide
aaaacuuccuuugaugaagacu

SEQ ID NO: 4593 - RNA, 22 nt, Artificial Sequence
  LRRK2 RNA guide
aaacuuccuuugaugaagacug

SEQ ID NO: 4594 - RNA, 22 nt, Artificial Sequence
  LRRK2 RNA guide
aacuuccuuugaugaagacugc

SEQ ID NO: 4595 - RNA, 22 nt, Artificial Sequence
  LRRK2 RNA guide
aagacugcaucagcauggagag

SEQ ID NO: 4596 - RNA, 22 nt, Artificial Sequence
  LRRK2 RNA guide
aagugaugcucuccaugcugau

SEQ ID NO: 4597 - RNA, 22 nt, Artificial Sequence
  LRRK2 RNA guide
acugcaucagcauggagagcau

SEQ ID NO: 4598 - RNA, 22 nt, Artificial Sequence
  LRRK2 RNA guide
acuuccuuugaugaagacugca

SEQ ID NO: 4599 - RNA, 22 nt, Artificial Sequence
  LRRK2 RNA guide
agacugcaucagcauggagagc

SEQ ID NO: 4600 - RNA, 22 nt, Artificial Sequence
  LRRK2 RNA guide
agucuucaucaaaggaaguuuu

SEQ ID NO: 4601 - RNA, 22 nt, Artificial Sequence
  LRRK2 RNA guide
agugaugcucuccaugcugaug

SEQ ID NO: 4602 - RNA, 22 nt, Artificial Sequence
  LRRK2 RNA guide
augaagacugcaucagcaugga

SEQ ID NO: 4603 - RNA, 22 nt, Artificial Sequence
  LRRK2 RNA guide
augcagucuucaucaaaggaag

SEQ ID NO: 4604 - RNA, 22 nt, Artificial Sequence
  LRRK2 RNA guide
augcucuccaugcugaugcagu

SEQ ID NO: 4605 - RNA, 22 nt, Artificial Sequence
  LRRK2 RNA guide
augcugaugcagucuucaucaa

SEQ ID NO: 4606 - RNA, 22 nt, Artificial Sequence
  LRRK2 RNA guide
cagucuucaucaaaggaaguuu

SEQ ID NO: 4607 - RNA, 22 nt, Artificial Sequence
  LRRK2 RNA guide
caugcugaugcagucuucauca

SEQ ID NO: 4608 - RNA, 22 nt, Artificial Sequence
  LRRK2 RNA guide
ccaugcugaugcagucuucauc

SEQ ID NO: 4609 - RNA, 22 nt, Artificial Sequence
  LRRK2 RNA guide
ccuggaaaacuuccuuugauga

SEQ ID NO: 4610 - RNA, 22 nt, Artificial Sequence
  LRRK2 RNA guide
ccuuugaugaagacugcaucag

SEQ ID NO: 4611 - RNA, 22 nt, Artificial Sequence
  LRRK2 RNA guide
cuccaugcugaugcagucuuca

SEQ ID NO: 4612 - RNA, 22 nt, Artificial Sequence
  LRRK2 RNA guide
cucuccaugcugaugcagucuu

SEQ ID NO: 4613 - RNA, 22 nt, Artificial Sequence
  LRRK2 RNA guide
cugaugcagucuucaucaaagg

SEQ ID NO: 4614 - RNA, 22 nt, Artificial Sequence
  LRRK2 RNA guide
cuggaaaacuuccuuugaugaa

SEQ ID NO: 4615 - RNA, 22 nt, Artificial Sequence
  LRRK2 RNA guide
cuuccuuugaugaagacugcau

SEQ ID NO: 4616 - RNA, 22 nt, Artificial Sequence
  LRRK2 RNA guide
cuuugaugaagacugcaucagc

SEQ ID NO: 4617 - RNA, 22 nt, Artificial Sequence
  LRRK2 RNA guide
gaaaacuuccuuugaugaagac

SEQ ID NO: 4618 - RNA, 22 nt, Artificial Sequence
  LRRK2 RNA guide
gaagacugcaucagcauggaga

SEQ ID NO: 4619 - RNA, 22 nt, Artificial Sequence
  LRRK2 RNA guide
gaagugaugcucuccaugcuga

SEQ ID NO: 4620 - RNA, 22 nt, Artificial Sequence
  LRRK2 RNA guide
gacugcaucagcauggagagca

SEQ ID NO: 4621 - RNA, 22 nt, Artificial Sequence
  LRRK2 RNA guide
gaugaagacugcaucagcaugg

SEQ ID NO: 4622 - RNA, 22 nt, Artificial Sequence
  LRRK2 RNA guide
gaugcagucuucaucaaaggaa

SEQ ID NO: 4623 - RNA, 22 nt, Artificial Sequence
  LRRK2 RNA guide
gaugcucuccaugcugaugcag

SEQ ID NO: 4624 - RNA, 22 nt, Artificial Sequence
  LRRK2 RNA guide
gcagucuucaucaaaggaaguu

SEQ ID NO: 4625 - RNA, 22 nt, Artificial Sequence
  LRRK2 RNA guide
gccuggaaaacuuccuuugaug

SEQ ID NO: 4626 - RNA, 22 nt, Artificial Sequence
  LRRK2 RNA guide
gcucuccaugcugaugcagucu

SEQ ID NO: 4627 - RNA, 22 nt, Artificial Sequence
  LRRK2 RNA guide
gcugaugcagucuucaucaaag

SEQ ID NO: 4628 - RNA, 22 nt, Artificial Sequence
  LRRK2 RNA guide
ggaaaacuuccuuugaugaaga

SEQ ID NO: 4629 - RNA, 22 nt, Artificial Sequence
  LRRK2 RNA guide
gugaugcucuccaugcugaugc

SEQ ID NO: 4630 - RNA, 22 nt, Artificial Sequence
  LRRK2 RNA guide
uccaugcugaugcagucuucau

SEQ ID NO: 4631 - RNA, 22 nt, Artificial Sequence
  LRRK2 RNA guide
uccuuugaugaagacugcauca

SEQ ID NO: 4632 - RNA, 22 nt, Artificial Sequence
  LRRK2 RNA guide
ucuccaugcugaugcagucuuc

SEQ ID NO: 4633 - RNA, 22 nt, Artificial Sequence
  LRRK2 RNA guide
ugaagacugcaucagcauggag

SEQ ID NO: 4634 - RNA, 22 nt, Artificial Sequence
  LRRK2 RNA guide
ugaugaagacugcaucagcaug

SEQ ID NO: 4635 - RNA, 22 nt, Artificial Sequence
  LRRK2 RNA guide
ugaugcagucuucaucaaagga

SEQ ID NO: 4636 - RNA, 22 nt, Artificial Sequence
  LRRK2 RNA guide
ugaugcucuccaugcugaugca

SEQ ID NO: 4637 - RNA, 22 nt, Artificial Sequence
  LRRK2 RNA guide
ugcagucuucaucaaaggaagu

SEQ ID NO: 4638 - RNA, 22 nt, Artificial Sequence
  LRRK2 RNA guide
ugcucuccaugcugaugcaguc

SEQ ID NO: 4639 - RNA, 22 nt, Artificial Sequence
  LRRK2 RNA guide
ugcugaugcagucuucaucaaa

SEQ ID NO: 4640 - RNA, 22 nt, Artificial Sequence
  LRRK2 RNA guide
uggaaaacuuccuuugaugaag

SEQ ID NO: 4641 - RNA, 22 nt, Artificial Sequence
  LRRK2 RNA guide
uuccuuugaugaagacugcauc

SEQ ID NO: 4642 - RNA, 22 nt, Artificial Sequence
  LRRK2 RNA guide
uugaugaagacugcaucagcau

SEQ ID NO: 4643 - RNA, 22 nt, Artificial Sequence
  LRRK2 RNA guide
uuugaugaagacugcaucagca

SEQ ID NO: 4644 - RNA, 20 nt, Artificial Sequence
  LRRK2 RNA guide
aaaacuuccuuugaggaaga

SEQ ID NO: 4645 - RNA, 20 nt, Artificial Sequence
  LRRK2 RNA guide
aaacuuccuuugaggaagaa

SEQ ID NO: 4646 - RNA, 20 nt, Artificial Sequence
  LRRK2 RNA guide
aacuuccuuugaggaagaau

SEQ ID NO: 4647 - RNA, 20 nt, Artificial Sequence
  LRRK2 RNA guide
acuuccuuugaggaagaaug

SEQ ID NO: 4648 - RNA, 20 nt, Artificial Sequence
  LRRK2 RNA guide
agaugccuggaaaacuuccu

SEQ ID NO: 4649 - RNA, 20 nt, Artificial Sequence
  LRRK2 RNA guide
aggaagaaugcaucagcaug

SEQ ID NO: 4650 - RNA, 20 nt, Artificial Sequence
  LRRK2 RNA guide
augcauucuuccucaaagga

SEQ ID NO: 4651 - RNA, 20 nt, Artificial Sequence
  LRRK2 RNA guide
augccuggaaaacuuccuuu

SEQ ID NO: 4652 - RNA, 20 nt, Artificial Sequence
  LRRK2 RNA guide
augcugaugcauucuuccuc

SEQ ID NO: 4653 - RNA, 20 nt, Artificial Sequence
  LRRK2 RNA guide
auucuuccucaaaggaaguu

SEQ ID NO: 4654 - RNA, 20 nt, Artificial Sequence
  LRRK2 RNA guide
caugcugaugcauucuuccu

SEQ ID NO: 4655 - RNA, 20 nt, Artificial Sequence
  LRRK2 RNA guide
cauucuuccucaaaggaagu

SEQ ID NO: 4656 - RNA, 20 nt, Artificial Sequence
  LRRK2 RNA guide
ccaugcugaugcauucuucc

SEQ ID NO: 4657 - RNA, 20 nt, Artificial Sequence
  LRRK2 RNA guide
ccucaaaggaaguuuuccag

SEQ ID NO: 4658 - RNA, 20 nt, Artificial Sequence
  LRRK2 RNA guide
ccuggaaaacuuccuuugag

SEQ ID NO: 4659 - RNA, 20 nt, Artificial Sequence
  LRRK2 RNA guide
ccuuugaggaagaaugcauc

SEQ ID NO: 4660 - RNA, 20 nt, Artificial Sequence
  LRRK2 RNA guide
cuccaugcugaugcauucuu

SEQ ID NO: 4661 - RNA, 20 nt, Artificial Sequence
  LRRK2 RNA guide
cucuccaugcugaugcauuc

SEQ ID NO: 4662 - RNA, 20 nt, Artificial Sequence
  LRRK2 RNA guide
cugaugcauucuuccucaaa

SEQ ID NO: 4663 - RNA, 20 nt, Artificial Sequence
  LRRK2 RNA guide
cuggaaaacuuccuuugagg

SEQ ID NO: 4664 - RNA, 20 nt, Artificial Sequence
  LRRK2 RNA guide
cuuccucaaaggaaguuuuc

SEQ ID NO: 4665 - RNA, 20 nt, Artificial Sequence
  LRRK2 RNA guide
cuuccuuugaggaagaaugc

SEQ ID NO: 4666 - RNA, 20 nt, Artificial Sequence
  LRRK2 RNA guide
cuuugaggaagaaugcauca

SEQ ID NO: 4667 - RNA, 20 nt, Artificial Sequence
  LRRK2 RNA guide
gaaaacuuccuuugaggaag

SEQ ID NO: 4668 - RNA, 20 nt, Artificial Sequence
  LRRK2 RNA guide
gaggaagaaugcaucagcau

SEQ ID NO: 4669 - RNA, 20 nt, Artificial Sequence
  LRRK2 RNA guide
gaugcauucuuccucaaagg

SEQ ID NO: 4670 - RNA, 20 nt, Artificial Sequence
  LRRK2 RNA guide
gaugccuggaaaacuuccuu

SEQ ID NO: 4671 - RNA, 20 nt, Artificial Sequence
  LRRK2 RNA guide
gcauucuuccucaaaggaag

SEQ ID NO: 4672 - RNA, 20 nt, Artificial Sequence
  LRRK2 RNA guide
gccuggaaaacuuccuuuga

SEQ ID NO: 4673 - RNA, 20 nt, Artificial Sequence
  LRRK2 RNA guide
gcucuccaugcugaugcauu

SEQ ID NO: 4674 - RNA, 20 nt, Artificial Sequence
  LRRK2 RNA guide
gcugaugcauucuuccucaa

SEQ ID NO: 4675 - RNA, 20 nt, Artificial Sequence
  LRRK2 RNA guide
ggaaaacuuccuuugaggaa

SEQ ID NO: 4676 - RNA, 20 nt, Artificial Sequence
  LRRK2 RNA guide
uccaugcugaugcauucuuc

SEQ ID NO: 4677 - RNA, 20 nt, Artificial Sequence
  LRRK2 RNA guide
uccucaaaggaaguuuucca

SEQ ID NO: 4678 - RNA, 20 nt, Artificial Sequence
  LRRK2 RNA guide
uccuuugaggaagaaugcau

SEQ ID NO: 4679 - RNA, 20 nt, Artificial Sequence
  LRRK2 RNA guide
ucuccaugcugaugcauucu

SEQ ID NO: 4680 - RNA, 20 nt, Artificial Sequence
  LRRK2 RNA guide
ucuuccucaaaggaaguuuu

SEQ ID NO: 4681 - RNA, 20 nt, Artificial Sequence
  LRRK2 RNA guide
ugaggaagaaugcaucagca

SEQ ID NO: 4682 - RNA, 20 nt, Artificial Sequence
  LRRK2 RNA guide
ugaugcauucuuccucaaag

SEQ ID NO: 4683 - RNA, 20 nt, Artificial Sequence
  LRRK2 RNA guide
ugcauucuuccucaaaggaa

SEQ ID NO: 4684 - RNA, 20 nt, Artificial Sequence
  LRRK2 RNA guide
ugccuggaaaacuuccuuug

SEQ ID NO: 4685 - RNA, 20 nt, Artificial Sequence
  LRRK2 RNA guide
ugcugaugcauucuuccuca

SEQ ID NO: 4686 - RNA, 20 nt, Artificial Sequence
  LRRK2 RNA guide
uggaaaacuuccuuugagga

SEQ ID NO: 4687 - RNA, 20 nt, Artificial Sequence
  LRRK2 RNA guide
uuccucaaaggaaguuuucc

SEQ ID NO: 4688 - RNA, 20 nt, Artificial Sequence
  LRRK2 RNA guide
uuccuuugaggaagaaugca

SEQ ID NO: 4689 - RNA, 20 nt, Artificial Sequence
  LRRK2 RNA guide
uucuuccucaaaggaaguuu

SEQ ID NO: 4690 - RNA, 20 nt, Artificial Sequence
  LRRK2 RNA guide
uugaggaagaaugcaucagc

SEQ ID NO: 4691 - RNA, 20 nt, Artificial Sequence
  LRRK2 RNA guide
uuugaggaagaaugcaucag

SEQ ID NO: 4692 - RNA, 21 nt, Artificial Sequence
  LRRK2 RNA guide
aaaacuuccuuugaggaagaa

SEQ ID NO: 4693 - RNA, 21 nt, Artificial Sequence
  LRRK2 RNA guide
aaacuuccuuugaggaagaau

SEQ ID NO: 4694 - RNA, 21 nt, Artificial Sequence
  LRRK2 RNA guide
aacuuccuuugaggaagaaug

SEQ ID NO: 4695 - RNA, 21 nt, Artificial Sequence
  LRRK2 RNA guide
acuuccuuugaggaagaaugc

SEQ ID NO: 4696 - RNA, 21 nt, Artificial Sequence
  LRRK2 RNA guide
agaugccuggaaaacuuccuu

SEQ ID NO: 4697 - RNA, 21 nt, Artificial Sequence
  LRRK2 RNA guide
aggaagaaugcaucagcaugg

SEQ ID NO: 4698 - RNA, 21 nt, Artificial Sequence
  LRRK2 RNA guide
augcauucuuccucaaaggaa

SEQ ID NO: 4699 - RNA, 21 nt, Artificial Sequence
  LRRK2 RNA guide
augccuggaaaacuuccuuug

SEQ ID NO: 4700 - RNA, 21 nt, Artificial Sequence
  LRRK2 RNA guide
augcugaugcauucuuccuca

SEQ ID NO: 4701 - RNA, 21 nt, Artificial Sequence
  LRRK2 RNA guide
auucuuccucaaaggaaguuu

SEQ ID NO: 4702 - RNA, 21 nt, Artificial Sequence
  LRRK2 RNA guide
cagaugccuggaaaacuuccu

SEQ ID NO: 4703 - RNA, 21 nt, Artificial Sequence
  LRRK2 RNA guide
caugcugaugcauucuuccuc

SEQ ID NO: 4704 - RNA, 21 nt, Artificial Sequence
  LRRK2 RNA guide
cauucuuccucaaaggaaguu

SEQ ID NO: 4705 - RNA, 21 nt, Artificial Sequence
  LRRK2 RNA guide
ccaugcugaugcauucuuccu

SEQ ID NO: 4706 - RNA, 21 nt, Artificial Sequence
  LRRK2 RNA guide
ccucaaaggaaguuuuccagg

SEQ ID NO: 4707 - RNA, 21 nt, Artificial Sequence
  LRRK2 RNA guide
ccuggaaaacuuccuuugagg

SEQ ID NO: 4708 - RNA, 21 nt, Artificial Sequence
  LRRK2 RNA guide
ccuuugaggaagaaugcauca

SEQ ID NO: 4709 - RNA, 21 nt, Artificial Sequence
  LRRK2 RNA guide
cuccaugcugaugcauucuuc

SEQ ID NO: 4710 - RNA, 21 nt, Artificial Sequence
  LRRK2 RNA guide
cucuccaugcugaugcauucu

SEQ ID NO: 4711 - RNA, 21 nt, Artificial Sequence
  LRRK2 RNA guide
cugaugcauucuuccucaaag

SEQ ID NO: 4712 - RNA, 21 nt, Artificial Sequence
  LRRK2 RNA guide
cuggaaaacuuccuuugagga

SEQ ID NO: 4713 - RNA, 21 nt, Artificial Sequence
  LRRK2 RNA guide
cuuccucaaaggaaguuuucc

SEQ ID NO: 4714 - RNA, 21 nt, Artificial Sequence
  LRRK2 RNA guide
cuuccuuugaggaagaaugca

SEQ ID NO: 4715 - RNA, 21 nt, Artificial Sequence
  LRRK2 RNA guide
cuuugaggaagaaugcaucag

SEQ ID NO: 4716 - RNA, 21 nt, Artificial Sequence
  LRRK2 RNA guide
gaaaacuuccuuugaggaaga

SEQ ID NO: 4717 - RNA, 21 nt, Artificial Sequence
  LRRK2 RNA guide
gaggaagaaugcaucagcaug

SEQ ID NO: 4718 - RNA, 21 nt, Artificial Sequence
  LRRK2 RNA guide
gaugcauucuuccucaaagga

SEQ ID NO: 4719 - RNA, 21 nt, Artificial Sequence
  LRRK2 RNA guide
gaugccuggaaaacuuccuuu

SEQ ID NO: 4720 - RNA, 21 nt, Artificial Sequence
  LRRK2 RNA guide
gcauucuuccucaaaggaagu

SEQ ID NO: 4721 - RNA, 21 nt, Artificial Sequence
  LRRK2 RNA guide
gccuggaaaacuuccuuugag

SEQ ID NO: 4722 - RNA, 21 nt, Artificial Sequence
  LRRK2 RNA guide
gcucuccaugcugaugcauuc

SEQ ID NO: 4723 - RNA, 21 nt, Artificial Sequence
  LRRK2 RNA guide
gcugaugcauucuuccucaaa

SEQ ID NO: 4724 - RNA, 21 nt, Artificial Sequence
  LRRK2 RNA guide
ggaaaacuuccuuugaggaag

SEQ ID NO: 4725 - RNA, 21 nt, Artificial Sequence
  LRRK2 RNA guide
uccaugcugaugcauucuucc

SEQ ID NO: 4726 - RNA, 21 nt, Artificial Sequence
  LRRK2 RNA guide
uccucaaaggaaguuuuccag

SEQ ID NO: 4727 - RNA, 21 nt, Artificial Sequence
  LRRK2 RNA guide
uccuuugaggaagaaugcauc

SEQ ID NO: 4728 - RNA, 21 nt, Artificial Sequence
  LRRK2 RNA guide
ucuccaugcugaugcauucuu

SEQ ID NO: 4729 - RNA, 21 nt, Artificial Sequence
  LRRK2 RNA guide
ucuuccucaaaggaaguuuuc

SEQ ID NO: 4730 - RNA, 21 nt, Artificial Sequence
  LRRK2 RNA guide
ugaggaagaaugcaucagcau

SEQ ID NO: 4731 - RNA, 21 nt, Artificial Sequence
  LRRK2 RNA guide
ugaugcauucuuccucaaagg

SEQ ID NO: 4732 - RNA, 21 nt, Artificial Sequence
  LRRK2 RNA guide
ugcauucuuccucaaaggaag

SEQ ID NO: 4733 - RNA, 21 nt, Artificial Sequence
  LRRK2 RNA guide
ugccuggaaaacuuccuuuga

SEQ ID NO: 4734 - RNA, 21 nt, Artificial Sequence
  LRRK2 RNA guide
ugcucuccaugcugaugcauu

SEQ ID NO: 4735 - RNA, 21 nt, Artificial Sequence
  LRRK2 RNA guide
ugcugaugcauucuuccucaa

SEQ ID NO: 4736 - RNA, 21 nt, Artificial Sequence
  LRRK2 RNA guide
uggaaaacuuccuuugaggaa

SEQ ID NO: 4737 - RNA, 21 nt, Artificial Sequence
  LRRK2 RNA guide
uuccucaaaggaaguuuucca

SEQ ID NO: 4738 - RNA, 21 nt, Artificial Sequence
  LRRK2 RNA guide
uuccuuugaggaagaaugcau

SEQ ID NO: 4739 - RNA, 21 nt, Artificial Sequence
  LRRK2 RNA guide
uucuuccucaaaggaaguuuu

SEQ ID NO: 4740 - RNA, 21 nt, Artificial Sequence
  LRRK2 RNA guide
uugaggaagaaugcaucagca

SEQ ID NO: 4741 - RNA, 21 nt, Artificial Sequence
  LRRK2 RNA guide
uuugaggaagaaugcaucagc

SEQ ID NO: 4742 - RNA, 22 nt, Artificial Sequence
  LRRK2 RNA guide
aaaacuuccuuugaggaagaau

SEQ ID NO: 4743 - RNA, 22 nt, Artificial Sequence
  LRRK2 RNA guide
aaacuuccuuugaggaagaaug

SEQ ID NO: 4744 - RNA, 22 nt, Artificial Sequence
  LRRK2 RNA guide
aacuuccuuugaggaagaaugc

SEQ ID NO: 4745 - RNA, 22 nt, Artificial Sequence
  LRRK2 RNA guide
acuuccuuugaggaagaaugca

SEQ ID NO: 4746 - RNA, 22 nt, Artificial Sequence
  LRRK2 RNA guide
agaugccuggaaaacuuccuuu

SEQ ID NO: 4747 - RNA, 22 nt, Artificial Sequence
  LRRK2 RNA guide
aggaagaaugcaucagcaugga

SEQ ID NO: 4748 - RNA, 22 nt, Artificial Sequence
  LRRK2 RNA guide
augcauucuuccucaaaggaag

SEQ ID NO: 4749 - RNA, 22 nt, Artificial Sequence
  LRRK2 RNA guide
augccuggaaaacuuccuuuga

SEQ ID NO: 4750 - RNA, 22 nt, Artificial Sequence
  LRRK2 RNA guide
augcucuccaugcugaugcauu

SEQ ID NO: 4751 - RNA, 22 nt, Artificial Sequence
  LRRK2 RNA guide
augcugaugcauucuuccucaa

SEQ ID NO: 4752 - RNA, 22 nt, Artificial Sequence
  LRRK2 RNA guide
auucuuccucaaaggaaguuuu

SEQ ID NO: 4753 - RNA, 22 nt, Artificial Sequence
  LRRK2 RNA guide
cagaugccuggaaaacuuccuu

SEQ ID NO: 4754 - RNA, 22 nt, Artificial Sequence
  LRRK2 RNA guide
caugcugaugcauucuuccuca

SEQ ID NO: 4755 - RNA, 22 nt, Artificial Sequence
  LRRK2 RNA guide
cauucuuccucaaaggaaguuu

SEQ ID NO: 4756 - RNA, 22 nt, Artificial Sequence
  LRRK2 RNA guide
ccaugcugaugcauucuuccuc

SEQ ID NO: 4757 - RNA, 22 nt, Artificial Sequence
  LRRK2 RNA guide
ccucaaaggaaguuuuccaggc

SEQ ID NO: 4758 - RNA, 22 nt, Artificial Sequence
  LRRK2 RNA guide
ccuggaaaacuuccuuugagga

SEQ ID NO: 4759 - RNA, 22 nt, Artificial Sequence
  LRRK2 RNA guide
ccuuugaggaagaaugcaucag

SEQ ID NO: 4760 - RNA, 22 nt, Artificial Sequence
  LRRK2 RNA guide
cuccaugcugaugcauucuucc

SEQ ID NO: 4761 - RNA, 22 nt, Artificial Sequence
  LRRK2 RNA guide
cucuccaugcugaugcauucuu

SEQ ID NO: 4762 - RNA, 22 nt, Artificial Sequence
  LRRK2 RNA guide
cugaugcauucuuccucaaagg

SEQ ID NO: 4763 - RNA, 22 nt, Artificial Sequence
  LRRK2 RNA guide
cuggaaaacuuccuuugaggaa

SEQ ID NO: 4764 - RNA, 22 nt, Artificial Sequence
  LRRK2 RNA guide
cuuccucaaaggaaguuuucca

SEQ ID NO: 4765 - RNA, 22 nt, Artificial Sequence
  LRRK2 RNA guide
cuuccuuugaggaagaaugcau

SEQ ID NO: 4766 - RNA, 22 nt, Artificial Sequence
  LRRK2 RNA guide
cuuugaggaagaaugcaucagc

SEQ ID NO: 4767 - RNA, 22 nt, Artificial Sequence
  LRRK2 RNA guide
gaaaacuuccuuugaggaagaa

SEQ ID NO: 4768 - RNA, 22 nt, Artificial Sequence
  LRRK2 RNA guide
gaggaagaaugcaucagcaugg

SEQ ID NO: 4769 - RNA, 22 nt, Artificial Sequence
  LRRK2 RNA guide
gaugcauucuuccucaaaggaa

SEQ ID NO: 4770 - RNA, 22 nt, Artificial Sequence
  LRRK2 RNA guide
gaugccuggaaaacuuccuuug

SEQ ID NO: 4771 - RNA, 22 nt, Artificial Sequence
  LRRK2 RNA guide
gcagaugccuggaaaacuuccu

SEQ ID NO: 4772 - RNA, 22 nt, Artificial Sequence
  LRRK2 RNA guide
gcauucuuccucaaaggaaguu

SEQ ID NO: 4773 - RNA, 22 nt, Artificial Sequence
  LRRK2 RNA guide
gccuggaaaacuuccuuugagg

SEQ ID NO: 4774 - RNA, 22 nt, Artificial Sequence
  LRRK2 RNA guide
gcucuccaugcugaugcauucu

SEQ ID NO: 4775 - RNA, 22 nt, Artificial Sequence
  LRRK2 RNA guide
gcugaugcauucuuccucaaag

SEQ ID NO: 4776 - RNA, 22 nt, Artificial Sequence
  LRRK2 RNA guide
ggaaaacuuccuuugaggaaga

SEQ ID NO: 4777 - RNA, 22 nt, Artificial Sequence
  LRRK2 RNA guide
uccaugcugaugcauucuuccu

SEQ ID NO: 4778 - RNA, 22 nt, Artificial Sequence
  LRRK2 RNA guide
uccucaaaggaaguuuuccagg

SEQ ID NO: 4779 - RNA, 22 nt, Artificial Sequence
  LRRK2 RNA guide
uccuuugaggaagaaugcauca

SEQ ID NO: 4780 - RNA, 22 nt, Artificial Sequence
  LRRK2 RNA guide
ucuccaugcugaugcauucuuc

SEQ ID NO: 4781 - RNA, 22 nt, Artificial Sequence
  LRRK2 RNA guide
ucuuccucaaaggaaguuuucc

SEQ ID NO: 4782 - RNA, 22 nt, Artificial Sequence
  LRRK2 RNA guide
ugaggaagaaugcaucagcaug

SEQ ID NO: 4783 - RNA, 22 nt, Artificial Sequence
  LRRK2 RNA guide
ugaugcauucuuccucaaagga

SEQ ID NO: 4784 - RNA, 22 nt, Artificial Sequence
  LRRK2 RNA guide
ugcauucuuccucaaaggaagu

SEQ ID NO: 4785 - RNA, 22 nt, Artificial Sequence
  LRRK2 RNA guide
ugccuggaaaacuuccuuugag

SEQ ID NO: 4786 - RNA, 22 nt, Artificial Sequence
  LRRK2 RNA guide
ugcucuccaugcugaugcauuc

SEQ ID NO: 4787 - RNA, 22 nt, Artificial Sequence
  LRRK2 RNA guide
ugcugaugcauucuuccucaaa

SEQ ID NO: 4788 - RNA, 22 nt, Artificial Sequence
  LRRK2 RNA guide
uggaaaacuuccuuugaggaag

SEQ ID NO: 4789 - RNA, 22 nt, Artificial Sequence
  LRRK2 RNA guide
uuccucaaaggaaguuuuccag

SEQ ID NO: 4790 - RNA, 22 nt, Artificial Sequence
  LRRK2 RNA guide
uuccuuugaggaagaaugcauc

SEQ ID NO: 4791 - RNA, 22 nt, Artificial Sequence
  LRRK2 RNA guide
uucuuccucaaaggaaguuuuc

SEQ ID NO: 4792 - RNA, 22 nt, Artificial Sequence
  LRRK2 RNA guide
uugaggaagaaugcaucagcau

SEQ ID NO: 4793 - RNA, 22 nt, Artificial Sequence
  LRRK2 RNA guide
uuugaggaagaaugcaucagca

SEQ ID NO: 4794 - RNA, 20 nt, Artificial Sequence
  LRRK2 RNA guide
aaaggaaauuuuccaggcau

SEQ ID NO: 4795 - RNA, 20 nt, Artificial Sequence
  LRRK2 RNA guide
aaauuuuccaggcaucugcg

SEQ ID NO: 4796 - RNA, 20 nt, Artificial Sequence
  LRRK2 RNA guide
aaggaaauuuuccaggcauc

SEQ ID NO: 4797 - RNA, 20 nt, Artificial Sequence
  LRRK2 RNA guide
aauuuuccaggcaucugcga

SEQ ID NO: 4798 - RNA, 20 nt, Artificial Sequence
  LRRK2 RNA guide
agaugccuggaaaauuuccu

SEQ ID NO: 4799 - RNA, 20 nt, Artificial Sequence
  LRRK2 RNA guide
aggaaauuuuccaggcaucu

SEQ ID NO: 4800 - RNA, 20 nt, Artificial Sequence
  LRRK2 RNA guide
aucaaaggaaauuuuccagg

SEQ ID NO: 4801 - RNA, 20 nt, Artificial Sequence
  LRRK2 RNA guide
augcauucuucaucaaagga

SEQ ID NO: 4802 - RNA, 20 nt, Artificial Sequence
  LRRK2 RNA guide
augccuggaaaauuuccuuu

SEQ ID NO: 4803 - RNA, 20 nt, Artificial Sequence
  LRRK2 RNA guide
auucgcagaugccuggaaaa

SEQ ID NO: 4804 - RNA, 20 nt, Artificial Sequence
  LRRK2 RNA guide
auuuccuuugaugaagaaug

SEQ ID NO: 4805 - RNA, 20 nt, Artificial Sequence
  LRRK2 RNA guide
caaaggaaauuuuccaggca

SEQ ID NO: 4806 - RNA, 20 nt, Artificial Sequence
  LRRK2 RNA guide
cagaugccuggaaaauuucc

SEQ ID NO: 4807 - RNA, 20 nt, Artificial Sequence
  LRRK2 RNA guide
caucaaaggaaauuuuccag

SEQ ID NO: 4808 - RNA, 20 nt, Artificial Sequence
  LRRK2 RNA guide
cauucgcagaugccuggaaa

SEQ ID NO: 4809 - RNA, 20 nt, Artificial Sequence
  LRRK2 RNA guide
cauucuucaucaaaggaaau

SEQ ID NO: 4810 - RNA, 20 nt, Artificial Sequence
  LRRK2 RNA guide
ccuggaaaauuuccuuugau

SEQ ID NO: 4811 - RNA, 20 nt, Artificial Sequence
  LRRK2 RNA guide
cgcagaugccuggaaaauuu

SEQ ID NO: 4812 - RNA, 20 nt, Artificial Sequence
  LRRK2 RNA guide
cugaugcauucuucaucaaa

SEQ ID NO: 4813 - RNA, 20 nt, Artificial Sequence
  LRRK2 RNA guide
cuggaaaauuuccuuugaug

SEQ ID NO: 4814 - RNA, 20 nt, Artificial Sequence
  LRRK2 RNA guide
cuucaucaaaggaaauuuuc

SEQ ID NO: 4815 - RNA, 20 nt, Artificial Sequence
  LRRK2 RNA guide
gaaaauuuccuuugaugaag

SEQ ID NO: 4816 - RNA, 20 nt, Artificial Sequence
  LRRK2 RNA guide
gaaauuuuccaggcaucugc

SEQ ID NO: 4817 - RNA, 20 nt, Artificial Sequence
  LRRK2 RNA guide
gaugcauucuucaucaaagg

SEQ ID NO: 4818 - RNA, 20 nt, Artificial Sequence
  LRRK2 RNA guide
gaugccuggaaaauuuccuu

SEQ ID NO: 4819 - RNA, 20 nt, Artificial Sequence
  LRRK2 RNA guide
gcagaugccuggaaaauuuc

SEQ ID NO: 4820 - RNA, 20 nt, Artificial Sequence
  LRRK2 RNA guide
gcauucgcagaugccuggaa

SEQ ID NO: 4821 - RNA, 20 nt, Artificial Sequence
  LRRK2 RNA guide
gcauucuucaucaaaggaaa

SEQ ID NO: 4822 - RNA, 20 nt, Artificial Sequence
  LRRK2 RNA guide
gccuggaaaauuuccuuuga

SEQ ID NO: 4823 - RNA, 20 nt, Artificial Sequence
  LRRK2 RNA guide
ggaaaauuuccuuugaugaa

SEQ ID NO: 4824 - RNA, 20 nt, Artificial Sequence
  LRRK2 RNA guide
ggaaauuuuccaggcaucug

SEQ ID NO: 4825 - RNA, 20 nt, Artificial Sequence
  LRRK2 RNA guide
ucaaaggaaauuuuccaggc

SEQ ID NO: 4826 - RNA, 20 nt, Artificial Sequence
  LRRK2 RNA guide
ucaucaaaggaaauuuucca

SEQ ID NO: 4827 - RNA, 20 nt, Artificial Sequence
  LRRK2 RNA guide
ucgcagaugccuggaaaauu

SEQ ID NO: 4828 - RNA, 20 nt, Artificial Sequence
  LRRK2 RNA guide
ugaugcauucuucaucaaag

SEQ ID NO: 4829 - RNA, 20 nt, Artificial Sequence
  LRRK2 RNA guide
ugcauucgcagaugccugga

SEQ ID NO: 4830 - RNA, 20 nt, Artificial Sequence
  LRRK2 RNA guide
ugcauucuucaucaaaggaa

SEQ ID NO: 4831 - RNA, 20 nt, Artificial Sequence
  LRRK2 RNA guide
ugccuggaaaauuuccuuug

SEQ ID NO: 4832 - RNA, 20 nt, Artificial Sequence
  LRRK2 RNA guide
uggaaaauuuccuuugauga

SEQ ID NO: 4833 - RNA, 20 nt, Artificial Sequence
  LRRK2 RNA guide
uucaucaaaggaaauuuucc

SEQ ID NO: 4834 - RNA, 20 nt, Artificial Sequence
  LRRK2 RNA guide
uucgcagaugccuggaaaau

SEQ ID NO: 4835 - RNA, 21 nt, Artificial Sequence
  LRRK2 RNA guide
aaaggaaauuuuccaggcauc

SEQ ID NO: 4836 - RNA, 21 nt, Artificial Sequence
  LRRK2 RNA guide
aaauuuuccaggcaucugcga

SEQ ID NO: 4837 - RNA, 21 nt, Artificial Sequence
  LRRK2 RNA guide
aaggaaauuuuccaggcaucu

SEQ ID NO: 4838 - RNA, 21 nt, Artificial Sequence
  LRRK2 RNA guide
aaugcauucgcagaugccugg

SEQ ID NO: 4839 - RNA, 21 nt, Artificial Sequence
  LRRK2 RNA guide
aauuuuccaggcaucugcgaa

SEQ ID NO: 4840 - RNA, 21 nt, Artificial Sequence
  LRRK2 RNA guide
agaugccuggaaaauuuccuu

SEQ ID NO: 4841 - RNA, 21 nt, Artificial Sequence
  LRRK2 RNA guide
aggaaauuuuccaggcaucug

SEQ ID NO: 4842 - RNA, 21 nt, Artificial Sequence
  LRRK2 RNA guide
aucaaaggaaauuuuccaggc

SEQ ID NO: 4843 - RNA, 21 nt, Artificial Sequence
  LRRK2 RNA guide
augcauucgcagaugccugga

SEQ ID NO: 4844 - RNA, 21 nt, Artificial Sequence
  LRRK2 RNA guide
augcauucuucaucaaaggaa

SEQ ID NO: 4845 - RNA, 21 nt, Artificial Sequence
  LRRK2 RNA guide
augccuggaaaauuuccuuug

SEQ ID NO: 4846 - RNA, 21 nt, Artificial Sequence
  LRRK2 RNA guide
auucgcagaugccuggaaaau

SEQ ID NO: 4847 - RNA, 21 nt, Artificial Sequence
  LRRK2 RNA guide
auuuccuuugaugaagaaugc

SEQ ID NO: 4848 - RNA, 21 nt, Artificial Sequence
  LRRK2 RNA guide
caaaggaaauuuuccaggcau

SEQ ID NO: 4849 - RNA, 21 nt, Artificial Sequence
  LRRK2 RNA guide
cagaugccuggaaaauuuccu

SEQ ID NO: 4850 - RNA, 21 nt, Artificial Sequence
  LRRK2 RNA guide
caucaaaggaaauuuuccagg

SEQ ID NO: 4851 - RNA, 21 nt, Artificial Sequence
  LRRK2 RNA guide
cauucgcagaugccuggaaaa

SEQ ID NO: 4852 - RNA, 21 nt, Artificial Sequence
  LRRK2 RNA guide
ccuggaaaauuuccuuugaug

SEQ ID NO: 4853 - RNA, 21 nt, Artificial Sequence
  LRRK2 RNA guide
cgcagaugccuggaaaauuuc

SEQ ID NO: 4854 - RNA, 21 nt, Artificial Sequence
  LRRK2 RNA guide
cugaugcauucuucaucaaag

SEQ ID NO: 4855 - RNA, 21 nt, Artificial Sequence
  LRRK2 RNA guide
cuggaaaauuuccuuugauga

SEQ ID NO: 4856 - RNA, 21 nt, Artificial Sequence
  LRRK2 RNA guide
cuucaucaaaggaaauuuucc

SEQ ID NO: 4857 - RNA, 21 nt, Artificial Sequence
  LRRK2 RNA guide
gaaauuuuccaggcaucugcg

SEQ ID NO: 4858 - RNA, 21 nt, Artificial Sequence
  LRRK2 RNA guide
gaugcauucuucaucaaagga

SEQ ID NO: 4859 - RNA, 21 nt, Artificial Sequence
  LRRK2 RNA guide
gaugccuggaaaauuuccuuu

SEQ ID NO: 4860 - RNA, 21 nt, Artificial Sequence
  LRRK2 RNA guide
gcagaugccuggaaaauuucc

SEQ ID NO: 4861 - RNA, 21 nt, Artificial Sequence
  LRRK2 RNA guide
gcauucgcagaugccuggaaa

SEQ ID NO: 4862 - RNA, 21 nt, Artificial Sequence
  LRRK2 RNA guide
gcauucuucaucaaaggaaau

SEQ ID NO: 4863 - RNA, 21 nt, Artificial Sequence
  LRRK2 RNA guide
gccuggaaaauuuccuuugau

SEQ ID NO: 4864 - RNA, 21 nt, Artificial Sequence
  LRRK2 RNA guide
gcugaugcauucuucaucaaa

SEQ ID NO: 4865 - RNA, 21 nt, Artificial Sequence
  LRRK2 RNA guide
ggaaaauuuccuuugaugaag

SEQ ID NO: 4866 - RNA, 21 nt, Artificial Sequence
  LRRK2 RNA guide
ggaaauuuuccaggcaucugc

SEQ ID NO: 4867 - RNA, 21 nt, Artificial Sequence
  LRRK2 RNA guide
ucaaaggaaauuuuccaggca

SEQ ID NO: 4868 - RNA, 21 nt, Artificial Sequence
  LRRK2 RNA guide
ucaucaaaggaaauuuuccag

SEQ ID NO: 4869 - RNA, 21 nt, Artificial Sequence
  LRRK2 RNA guide
ucgcagaugccuggaaaauuu

SEQ ID NO: 4870 - RNA, 21 nt, Artificial Sequence
  LRRK2 RNA guide
ugaugcauucuucaucaaagg

SEQ ID NO: 4871 - RNA, 21 nt, Artificial Sequence
  LRRK2 RNA guide
ugcauucgcagaugccuggaa

SEQ ID NO: 4872 - RNA, 21 nt, Artificial Sequence
  LRRK2 RNA guide
ugcauucuucaucaaaggaaa

SEQ ID NO: 4873 - RNA, 21 nt, Artificial Sequence
  LRRK2 RNA guide
ugccuggaaaauuuccuuuga

SEQ ID NO: 4874 - RNA, 21 nt, Artificial Sequence
  LRRK2 RNA guide
uucgcagaugccuggaaaauu

SEQ ID NO: 4875 - RNA, 22 nt, Artificial Sequence
  LRRK2 RNA guide
aaaggaaauuuuccaggcaucu

SEQ ID NO: 4876 - RNA, 22 nt, Artificial Sequence
  LRRK2 RNA guide
aaauuuuccaggcaucugcgaa

SEQ ID NO: 4877 - RNA, 22 nt, Artificial Sequence
  LRRK2 RNA guide
aaggaaauuuuccaggcaucug

SEQ ID NO: 4878 - RNA, 22 nt, Artificial Sequence
  LRRK2 RNA guide
aaugcauucgcagaugccugga

SEQ ID NO: 4879 - RNA, 22 nt, Artificial Sequence
  LRRK2 RNA guide
aauuuccuuugaugaagaaugc

SEQ ID NO: 4880 - RNA, 22 nt, Artificial Sequence
  LRRK2 RNA guide
aauuuuccaggcaucugcgaau

SEQ ID NO: 4881 - RNA, 22 nt, Artificial Sequence
  LRRK2 RNA guide
agaugccuggaaaauuuccuuu

SEQ ID NO: 4882 - RNA, 22 nt, Artificial Sequence
  LRRK2 RNA guide
aggaaauuuuccaggcaucugc

SEQ ID NO: 4883 - RNA, 22 nt, Artificial Sequence
  LRRK2 RNA guide
aucaaaggaaauuuuccaggca

SEQ ID NO: 4884 - RNA, 22 nt, Artificial Sequence
  LRRK2 RNA guide
augcauucgcagaugccuggaa

SEQ ID NO: 4885 - RNA, 22 nt, Artificial Sequence
  LRRK2 RNA guide
augcauucuucaucaaaggaaa

SEQ ID NO: 4886 - RNA, 22 nt, Artificial Sequence
  LRRK2 RNA guide
augccuggaaaauuuccuuuga

SEQ ID NO: 4887 - RNA, 22 nt, Artificial Sequence
  LRRK2 RNA guide
auucgcagaugccuggaaaauu

SEQ ID NO: 4888 - RNA, 22 nt, Artificial Sequence
  LRRK2 RNA guide
auuuccuuugaugaagaaugca

SEQ ID NO: 4889 - RNA, 22 nt, Artificial Sequence
  LRRK2 RNA guide
caaaggaaauuuuccaggcauc

SEQ ID NO: 4890 - RNA, 22 nt, Artificial Sequence
  LRRK2 RNA guide
caaugcauucgcagaugccugg

SEQ ID NO: 4891 - RNA, 22 nt, Artificial Sequence
  LRRK2 RNA guide
cagaugccuggaaaauuuccuu

SEQ ID NO: 4892 - RNA, 22 nt, Artificial Sequence
  LRRK2 RNA guide
caucaaaggaaauuuuccaggc

SEQ ID NO: 4893 - RNA, 22 nt, Artificial Sequence
  LRRK2 RNA guide
cauucgcagaugccuggaaaau

SEQ ID NO: 4894 - RNA, 22 nt, Artificial Sequence
  LRRK2 RNA guide
ccuggaaaauuuccuuugauga

SEQ ID NO: 4895 - RNA, 22 nt, Artificial Sequence
  LRRK2 RNA guide
cgcagaugccuggaaaauuucc

SEQ ID NO: 4896 - RNA, 22 nt, Artificial Sequence
  LRRK2 RNA guide
cugaugcauucuucaucaaagg

SEQ ID NO: 4897 - RNA, 22 nt, Artificial Sequence
  LRRK2 RNA guide
cuggaaaauuuccuuugaugaa

SEQ ID NO: 4898 - RNA, 22 nt, Artificial Sequence
  LRRK2 RNA guide
cuucaucaaaggaaauuuucca

SEQ ID NO: 4899 - RNA, 22 nt, Artificial Sequence
  LRRK2 RNA guide
gaaauuuuccaggcaucugcga

SEQ ID NO: 4900 - RNA, 22 nt, Artificial Sequence
  LRRK2 RNA guide
gaugcauucuucaucaaaggaa

SEQ ID NO: 4901 - RNA, 22 nt, Artificial Sequence
  LRRK2 RNA guide
gaugccuggaaaauuuccuuug

SEQ ID NO: 4902 - RNA, 22 nt, Artificial Sequence
  LRRK2 RNA guide
gcagaugccuggaaaauuuccu

SEQ ID NO: 4903 - RNA, 22 nt, Artificial Sequence
  LRRK2 RNA guide
gcauucgcagaugccuggaaaa

SEQ ID NO: 4904 - RNA, 22 nt, Artificial Sequence
  LRRK2 RNA guide
gcauucuucaucaaaggaaauu

SEQ ID NO: 4905 - RNA, 22 nt, Artificial Sequence
  LRRK2 RNA guide
gccuggaaaauuuccuuugaug

SEQ ID NO: 4906 - RNA, 22 nt, Artificial Sequence
  LRRK2 RNA guide
gcugaugcauucuucaucaaag

SEQ ID NO: 4907 - RNA, 22 nt, Artificial Sequence
  LRRK2 RNA guide
ggaaaauuuccuuugaugaaga

SEQ ID NO: 4908 - RNA, 22 nt, Artificial Sequence
  LRRK2 RNA guide
ggaaauuuuccaggcaucugcg

SEQ ID NO: 4909 - RNA, 22 nt, Artificial Sequence
  LRRK2 RNA guide
ucaaaggaaauuuuccaggcau

SEQ ID NO: 4910 - RNA, 22 nt, Artificial Sequence
  LRRK2 RNA guide
ucaucaaaggaaauuuuccagg

SEQ ID NO: 4911 - RNA, 22 nt, Artificial Sequence
  LRRK2 RNA guide
ucgcagaugccuggaaaauuuc

SEQ ID NO: 4912 - RNA, 22 nt, Artificial Sequence
  LRRK2 RNA guide
ucuucaucaaaggaaauuuucc

SEQ ID NO: 4913 - RNA, 22 nt, Artificial Sequence
  LRRK2 RNA guide
ugaugcauucuucaucaaagga

SEQ ID NO: 4914 - RNA, 22 nt, Artificial Sequence
  LRRK2 RNA guide
ugcauucgcagaugccuggaaa

SEQ ID NO: 4915 - RNA, 22 nt, Artificial Sequence
  LRRK2 RNA guide
ugcauucuucaucaaaggaaau

SEQ ID NO: 4916 - RNA, 22 nt, Artificial Sequence
  LRRK2 RNA guide
ugccuggaaaauuuccuuugau

SEQ ID NO: 4917 - RNA, 22 nt, Artificial Sequence
  LRRK2 RNA guide
ugcugaugcauucuucaucaaa

SEQ ID NO: 4918 - RNA, 22 nt, Artificial Sequence
  LRRK2 RNA guide
uggaaaauuuccuuugaugaag

SEQ ID NO: 4919 - RNA, 22 nt, Artificial Sequence
  LRRK2 RNA guide
uucaucaaaggaaauuuuccag

SEQ ID NO: 4920 - RNA, 22 nt, Artificial Sequence
  LRRK2 RNA guide
uucgcagaugccuggaaaauuu

SEQ ID NO: 4921 - RNA, 20 nt, Artificial Sequence
  LRRK2 RNA guide
aaaggaaguuuucuaggcau

SEQ ID NO: 4922 - RNA, 20 nt, Artificial Sequence
  LRRK2 RNA guide
aaggaaguuuucuaggcauc

SEQ ID NO: 4923 - RNA, 20 nt, Artificial Sequence
  LRRK2 RNA guide
aaguuuucuaggcaucugcg

SEQ ID NO: 4924 - RNA, 20 nt, Artificial Sequence
  LRRK2 RNA guide
aaugcauucgcagaugccua

SEQ ID NO: 4925 - RNA, 20 nt, Artificial Sequence
  LRRK2 RNA guide
acaaugcauucgcagaugcc

SEQ ID NO: 4926 - RNA, 20 nt, Artificial Sequence
  LRRK2 RNA guide
agaugccuagaaaacuuccu

SEQ ID NO: 4927 - RNA, 20 nt, Artificial Sequence
  LRRK2 RNA guide
aggaaguuuucuaggcaucu

SEQ ID NO: 4928 - RNA, 20 nt, Artificial Sequence
  LRRK2 RNA guide
aguuuucuaggcaucugcga

SEQ ID NO: 4929 - RNA, 20 nt, Artificial Sequence
  LRRK2 RNA guide
aucaaaggaaguuuucuagg

SEQ ID NO: 4930 - RNA, 20 nt, Artificial Sequence
  LRRK2 RNA guide
augcauucgcagaugccuag

SEQ ID NO: 4931 - RNA, 20 nt, Artificial Sequence
  LRRK2 RNA guide
augccuagaaaacuuccuuu

SEQ ID NO: 4932 - RNA, 20 nt, Artificial Sequence
  LRRK2 RNA guide
auucgcagaugccuagaaaa

SEQ ID NO: 4933 - RNA, 20 nt, Artificial Sequence
  LRRK2 RNA guide
auucuucaucaaaggaaguu

SEQ ID NO: 4934 - RNA, 20 nt, Artificial Sequence
  LRRK2 RNA guide
caaaggaaguuuucuaggca

SEQ ID NO: 4935 - RNA, 20 nt, Artificial Sequence
  LRRK2 RNA guide
caaugcauucgcagaugccu

SEQ ID NO: 4936 - RNA, 20 nt, Artificial Sequence
  LRRK2 RNA guide
cagaugccuagaaaacuucc

SEQ ID NO: 4937 - RNA, 20 nt, Artificial Sequence
  LRRK2 RNA guide
caucaaaggaaguuuucuag

SEQ ID NO: 4938 - RNA, 20 nt, Artificial Sequence
  LRRK2 RNA guide
cauucgcagaugccuagaaa

SEQ ID NO: 4939 - RNA, 20 nt, Artificial Sequence
  LRRK2 RNA guide
cauucuucaucaaaggaagu

SEQ ID NO: 4940 - RNA, 20 nt, Artificial Sequence
  LRRK2 RNA guide
ccuagaaaacuuccuuugau

SEQ ID NO: 4941 - RNA, 20 nt, Artificial Sequence
  LRRK2 RNA guide
cgcagaugccuagaaaacuu

SEQ ID NO: 4942 - RNA, 20 nt, Artificial Sequence
  LRRK2 RNA guide
cuagaaaacuuccuuugaug

SEQ ID NO: 4943 - RNA, 20 nt, Artificial Sequence
  LRRK2 RNA guide
cuaggcaucugcgaaugcau

SEQ ID NO: 4944 - RNA, 20 nt, Artificial Sequence
  LRRK2 RNA guide
cuucaucaaaggaaguuuuc

SEQ ID NO: 4945 - RNA, 20 nt, Artificial Sequence
  LRRK2 RNA guide
gaaguuuucuaggcaucugc

SEQ ID NO: 4946 - RNA, 20 nt, Artificial Sequence
  LRRK2 RNA guide
gacaaugcauucgcagaugc

SEQ ID NO: 4947 - RNA, 20 nt, Artificial Sequence
  LRRK2 RNA guide
gaugccuagaaaacuuccuu

SEQ ID NO: 4948 - RNA, 20 nt, Artificial Sequence
  LRRK2 RNA guide
gcagaugccuagaaaacuuc

SEQ ID NO: 4949 - RNA, 20 nt, Artificial Sequence
  LRRK2 RNA guide
gcauucgcagaugccuagaa

SEQ ID NO: 4950 - RNA, 20 nt, Artificial Sequence
  LRRK2 RNA guide
gccuagaaaacuuccuuuga

SEQ ID NO: 4951 - RNA, 20 nt, Artificial Sequence
  LRRK2 RNA guide
ggaaguuuucuaggcaucug

SEQ ID NO: 4952 - RNA, 20 nt, Artificial Sequence
  LRRK2 RNA guide
guuuucuaggcaucugcgaa

SEQ ID NO: 4953 - RNA, 20 nt, Artificial Sequence
  LRRK2 RNA guide
uagaaaacuuccuuugauga

SEQ ID NO: 4954 - RNA, 20 nt, Artificial Sequence
  LRRK2 RNA guide
ucaaaggaaguuuucuaggc

SEQ ID NO: 4955 - RNA, 20 nt, Artificial Sequence
  LRRK2 RNA guide
ucgcagaugccuagaaaacu

SEQ ID NO: 4956 - RNA, 20 nt, Artificial Sequence
  LRRK2 RNA guide
ucuaggcaucugcgaaugca

SEQ ID NO: 4957 - RNA, 20 nt, Artificial Sequence
  LRRK2 RNA guide
ucuucaucaaaggaaguuuu

SEQ ID NO: 4958 - RNA, 20 nt, Artificial Sequence
  LRRK2 RNA guide
ugacaaugcauucgcagaug

SEQ ID NO: 4959 - RNA, 20 nt, Artificial Sequence
  LRRK2 RNA guide
ugcauucgcagaugccuaga

SEQ ID NO: 4960 - RNA, 20 nt, Artificial Sequence
  LRRK2 RNA guide
ugccuagaaaacuuccuuug

SEQ ID NO: 4961 - RNA, 20 nt, Artificial Sequence
  LRRK2 RNA guide
uucgcagaugccuagaaaac

SEQ ID NO: 4962 - RNA, 20 nt, Artificial Sequence
  LRRK2 RNA guide
uucuaggcaucugcgaaugc

SEQ ID NO: 4963 - RNA, 20 nt, Artificial Sequence
  LRRK2 RNA guide
uucuucaucaaaggaaguuu

SEQ ID NO: 4964 - RNA, 20 nt, Artificial Sequence
  LRRK2 RNA guide
uugacaaugcauucgcagau

SEQ ID NO: 4965 - RNA, 20 nt, Artificial Sequence
  LRRK2 RNA guide
uuucuaggcaucugcgaaug

SEQ ID NO: 4966 - RNA, 20 nt, Artificial Sequence
  LRRK2 RNA guide
uuuucuaggcaucugcgaau

SEQ ID NO: 4967 - RNA, 21 nt, Artificial Sequence
  LRRK2 RNA guide
aaaggaaguuuucuaggcauc

SEQ ID NO: 4968 - RNA, 21 nt, Artificial Sequence
  LRRK2 RNA guide
aaggaaguuuucuaggcaucu

SEQ ID NO: 4969 - RNA, 21 nt, Artificial Sequence
  LRRK2 RNA guide
aaguuuucuaggcaucugcga

SEQ ID NO: 4970 - RNA, 21 nt, Artificial Sequence
  LRRK2 RNA guide
aaugcauucgcagaugccuag

SEQ ID NO: 4971 - RNA, 21 nt, Artificial Sequence
  LRRK2 RNA guide
acaaugcauucgcagaugccu

SEQ ID NO: 4972 - RNA, 21 nt, Artificial Sequence
  LRRK2 RNA guide
agaugccuagaaaacuuccuu

SEQ ID NO: 4973 - RNA, 21 nt, Artificial Sequence
  LRRK2 RNA guide
aggaaguuuucuaggcaucug

SEQ ID NO: 4974 - RNA, 21 nt, Artificial Sequence
  LRRK2 RNA guide
aguuuucuaggcaucugcgaa

SEQ ID NO: 4975 - RNA, 21 nt, Artificial Sequence
  LRRK2 RNA guide
aucaaaggaaguuuucuaggc

SEQ ID NO: 4976 - RNA, 21 nt, Artificial Sequence
  LRRK2 RNA guide
augcauucgcagaugccuaga

SEQ ID NO: 4977 - RNA, 21 nt, Artificial Sequence
  LRRK2 RNA guide
augccuagaaaacuuccuuug

SEQ ID NO: 4978 - RNA, 21 nt, Artificial Sequence
  LRRK2 RNA guide
auucgcagaugccuagaaaac

SEQ ID NO: 4979 - RNA, 21 nt, Artificial Sequence
  LRRK2 RNA guide
caaaggaaguuuucuaggcau

SEQ ID NO: 4980 - RNA, 21 nt, Artificial Sequence
  LRRK2 RNA guide
caaugcauucgcagaugccua

SEQ ID NO: 4981 - RNA, 21 nt, Artificial Sequence
  LRRK2 RNA guide
cagaugccuagaaaacuuccu

SEQ ID NO: 4982 - RNA, 21 nt, Artificial Sequence
  LRRK2 RNA guide
caucaaaggaaguuuucuagg

SEQ ID NO: 4983 - RNA, 21 nt, Artificial Sequence
  LRRK2 RNA guide
cauucgcagaugccuagaaaa

SEQ ID NO: 4984 - RNA, 21 nt, Artificial Sequence
  LRRK2 RNA guide
cauucuucaucaaaggaaguu

SEQ ID NO: 4985 - RNA, 21 nt, Artificial Sequence
  LRRK2 RNA guide
ccuagaaaacuuccuuugaug

SEQ ID NO: 4986 - RNA, 21 nt, Artificial Sequence
  LRRK2 RNA guide
cgcagaugccuagaaaacuuc

SEQ ID NO: 4987 - RNA, 21 nt, Artificial Sequence
  LRRK2 RNA guide
cuagaaaacuuccuuugauga

SEQ ID NO: 4988 - RNA, 21 nt, Artificial Sequence
  LRRK2 RNA guide
cuaggcaucugcgaaugcauu

SEQ ID NO: 4989 - RNA, 21 nt, Artificial Sequence
  LRRK2 RNA guide
cuucaucaaaggaaguuuucu

SEQ ID NO: 4990 - RNA, 21 nt, Artificial Sequence
  LRRK2 RNA guide
gaaguuuucuaggcaucugcg

SEQ ID NO: 4991 - RNA, 21 nt, Artificial Sequence
  LRRK2 RNA guide
gacaaugcauucgcagaugcc

SEQ ID NO: 4992 - RNA, 21 nt, Artificial Sequence
  LRRK2 RNA guide
gaugccuagaaaacuuccuuu

SEQ ID NO: 4993 - RNA, 21 nt, Artificial Sequence
  LRRK2 RNA guide
gcagaugccuagaaaacuucc

SEQ ID NO: 4994 - RNA, 21 nt, Artificial Sequence
  LRRK2 RNA guide
gcauucgcagaugccuagaaa

SEQ ID NO: 4995 - RNA, 21 nt, Artificial Sequence
  LRRK2 RNA guide
gcauucuucaucaaaggaagu

SEQ ID NO: 4996 - RNA, 21 nt, Artificial Sequence
  LRRK2 RNA guide
gccuagaaaacuuccuuugau

SEQ ID NO: 4997 - RNA, 21 nt, Artificial Sequence
  LRRK2 RNA guide
ggaaguuuucuaggcaucugc

SEQ ID NO: 4998 - RNA, 21 nt, Artificial Sequence
  LRRK2 RNA guide
guugacaaugcauucgcagau

SEQ ID NO: 4999 - RNA, 21 nt, Artificial Sequence
  LRRK2 RNA guide
guuuucuaggcaucugcgaau

SEQ ID NO: 5000 - RNA, 21 nt, Artificial Sequence
  LRRK2 RNA guide
ucaaaggaaguuuucuaggca

SEQ ID NO: 5001 - RNA, 21 nt, Artificial Sequence
  LRRK2 RNA guide
ucaucaaaggaaguuuucuag

SEQ ID NO: 5002 - RNA, 21 nt, Artificial Sequence
  LRRK2 RNA guide
ucgcagaugccuagaaaacuu

SEQ ID NO: 5003 - RNA, 21 nt, Artificial Sequence
  LRRK2 RNA guide
ucuaggcaucugcgaaugcau

SEQ ID NO: 5004 - RNA, 21 nt, Artificial Sequence
  LRRK2 RNA guide
ucuucaucaaaggaaguuuuc

SEQ ID NO: 5005 - RNA, 21 nt, Artificial Sequence
  LRRK2 RNA guide
ugacaaugcauucgcagaugc

SEQ ID NO: 5006 - RNA, 21 nt, Artificial Sequence
  LRRK2 RNA guide
ugcauucgcagaugccuagaa

SEQ ID NO: 5007 - RNA, 21 nt, Artificial Sequence
  LRRK2 RNA guide
ugccuagaaaacuuccuuuga

SEQ ID NO: 5008 - RNA, 21 nt, Artificial Sequence
  LRRK2 RNA guide
uucgcagaugccuagaaaacu

SEQ ID NO: 5009 - RNA, 21 nt, Artificial Sequence
  LRRK2 RNA guide
uucuaggcaucugcgaaugca

SEQ ID NO: 5010 - RNA, 21 nt, Artificial Sequence
  LRRK2 RNA guide
uugacaaugcauucgcagaug

SEQ ID NO: 5011 - RNA, 21 nt, Artificial Sequence
  LRRK2 RNA guide
uuucuaggcaucugcgaaugc

SEQ ID NO: 5012 - RNA, 21 nt, Artificial Sequence
  LRRK2 RNA guide
uuuucuaggcaucugcgaaug

SEQ ID NO: 5013 - RNA, 22 nt, Artificial Sequence
  LRRK2 RNA guide
aaaggaaguuuucuaggcaucu

SEQ ID NO: 5014 - RNA, 22 nt, Artificial Sequence
  LRRK2 RNA guide
aaggaaguuuucuaggcaucug

SEQ ID NO: 5015 - RNA, 22 nt, Artificial Sequence
  LRRK2 RNA guide
aaguuuucuaggcaucugcgaa

SEQ ID NO: 5016 - RNA, 22 nt, Artificial Sequence
  LRRK2 RNA guide
aaugcauucgcagaugccuaga

SEQ ID NO: 5017 - RNA, 22 nt, Artificial Sequence
  LRRK2 RNA guide
acaaugcauucgcagaugccua

SEQ ID NO: 5018 - RNA, 22 nt, Artificial Sequence
  LRRK2 RNA guide
agaugccuagaaaacuuccuuu

SEQ ID NO: 5019 - RNA, 22 nt, Artificial Sequence
  LRRK2 RNA guide
aggaaguuuucuaggcaucugc

SEQ ID NO: 5020 - RNA, 22 nt, Artificial Sequence
  LRRK2 RNA guide
aguugacaaugcauucgcagau

SEQ ID NO: 5021 - RNA, 22 nt, Artificial Sequence
  LRRK2 RNA guide
aguuuucuaggcaucugcgaau

SEQ ID NO: 5022 - RNA, 22 nt, Artificial Sequence
  LRRK2 RNA guide
aucaaaggaaguuuucuaggca

SEQ ID NO: 5023 - RNA, 22 nt, Artificial Sequence
  LRRK2 RNA guide
augcauucgcagaugccuagaa

SEQ ID NO: 5024 - RNA, 22 nt, Artificial Sequence
  LRRK2 RNA guide
augccuagaaaacuuccuuuga

SEQ ID NO: 5025 - RNA, 22 nt, Artificial Sequence
  LRRK2 RNA guide
auucgcagaugccuagaaaacu

SEQ ID NO: 5026 - RNA, 22 nt, Artificial Sequence
  LRRK2 RNA guide
caaaggaaguuuucuaggcauc

SEQ ID NO: 5027 - RNA, 22 nt, Artificial Sequence
  LRRK2 RNA guide
caaugcauucgcagaugccuag

SEQ ID NO: 5028 - RNA, 22 nt, Artificial Sequence
  LRRK2 RNA guide
cagaugccuagaaaacuuccuu

SEQ ID NO: 5029 - RNA, 22 nt, Artificial Sequence
  LRRK2 RNA guide
caucaaaggaaguuuucuaggc

SEQ ID NO: 5030 - RNA, 22 nt, Artificial Sequence
  LRRK2 RNA guide
cauucgcagaugccuagaaaac

SEQ ID NO: 5031 - RNA, 22 nt, Artificial Sequence
  LRRK2 RNA guide
cauucuucaucaaaggaaguuu

SEQ ID NO: 5032 - RNA, 22 nt, Artificial Sequence
  LRRK2 RNA guide
ccuagaaaacuuccuuugauga

SEQ ID NO: 5033 - RNA, 22 nt, Artificial Sequence
  LRRK2 RNA guide
cgcagaugccuagaaaacuucc

SEQ ID NO: 5034 - RNA, 22 nt, Artificial Sequence
  LRRK2 RNA guide
cuagaaaacuuccuuugaugaa

SEQ ID NO: 5035 - RNA, 22 nt, Artificial Sequence
  LRRK2 RNA guide
cuaggcaucugcgaaugcauug

SEQ ID NO: 5036 - RNA, 22 nt, Artificial Sequence
  LRRK2 RNA guide
cuucaucaaaggaaguuuucua

SEQ ID NO: 5037 - RNA, 22 nt, Artificial Sequence
  LRRK2 RNA guide
gaaguuuucuaggcaucugcga

SEQ ID NO: 5038 - RNA, 22 nt, Artificial Sequence
  LRRK2 RNA guide
gacaaugcauucgcagaugccu

SEQ ID NO: 5039 - RNA, 22 nt, Artificial Sequence
  LRRK2 RNA guide
gaugccuagaaaacuuccuuug

SEQ ID NO: 5040 - RNA, 22 nt, Artificial Sequence
  LRRK2 RNA guide
gcagaugccuagaaaacuuccu

SEQ ID NO: 5041 - RNA, 22 nt, Artificial Sequence
  LRRK2 RNA guide
gcauucgcagaugccuagaaaa

SEQ ID NO: 5042 - RNA, 22 nt, Artificial Sequence
  LRRK2 RNA guide
gcauucuucaucaaaggaaguu

SEQ ID NO: 5043 - RNA, 22 nt, Artificial Sequence
  LRRK2 RNA guide
gccuagaaaacuuccuuugaug

SEQ ID NO: 5044 - RNA, 22 nt, Artificial Sequence
  LRRK2 RNA guide
ggaaguuuucuaggcaucugcg

SEQ ID NO: 5045 - RNA, 22 nt, Artificial Sequence
  LRRK2 RNA guide
guugacaaugcauucgcagaug

SEQ ID NO: 5046 - RNA, 22 nt, Artificial Sequence
  LRRK2 RNA guide
guuuucuaggcaucugcgaaug

SEQ ID NO: 5047 - RNA, 22 nt, Artificial Sequence
  LRRK2 RNA guide
uagaaaacuuccuuugaugaag

SEQ ID NO: 5048 - RNA, 22 nt, Artificial Sequence
  LRRK2 RNA guide
ucaaaggaaguuuucuaggcau

SEQ ID NO: 5049 - RNA, 22 nt, Artificial Sequence
  LRRK2 RNA guide
ucaucaaaggaaguuuucuagg

SEQ ID NO: 5050 - RNA, 22 nt, Artificial Sequence
  LRRK2 RNA guide
ucgcagaugccuagaaaacuuc

SEQ ID NO: 5051 - RNA, 22 nt, Artificial Sequence
  LRRK2 RNA guide
ucuaggcaucugcgaaugcauu

SEQ ID NO: 5052 - RNA, 22 nt, Artificial Sequence
  LRRK2 RNA guide
ucuucaucaaaggaaguuuucu

SEQ ID NO: 5053 - RNA, 22 nt, Artificial Sequence
  LRRK2 RNA guide
ugacaaugcauucgcagaugcc

SEQ ID NO: 5054 - RNA, 22 nt, Artificial Sequence
  LRRK2 RNA guide
ugcauucgcagaugccuagaaa

SEQ ID NO: 5055 - RNA, 22 nt, Artificial Sequence
  LRRK2 RNA guide
ugcauucuucaucaaaggaagu

SEQ ID NO: 5056 - RNA, 22 nt, Artificial Sequence
  LRRK2 RNA guide
ugccuagaaaacuuccuuugau

SEQ ID NO: 5057 - RNA, 22 nt, Artificial Sequence
  LRRK2 RNA guide
uucaucaaaggaaguuuucuag

SEQ ID NO: 5058 - RNA, 22 nt, Artificial Sequence
  LRRK2 RNA guide
uucgcagaugccuagaaaacuu

SEQ ID NO: 5059 - RNA, 22 nt, Artificial Sequence
  LRRK2 RNA guide
uucuaggcaucugcgaaugcau

SEQ ID NO: 5060 - RNA, 22 nt, Artificial Sequence
  LRRK2 RNA guide
uucuucaucaaaggaaguuuuc

SEQ ID NO: 5061 - RNA, 22 nt, Artificial Sequence
  LRRK2 RNA guide
uugacaaugcauucgcagaugc

SEQ ID NO: 5062 - RNA, 22 nt, Artificial Sequence
  LRRK2 RNA guide
uuucuaggcaucugcgaaugca

SEQ ID NO: 5063 - RNA, 22 nt, Artificial Sequence
  LRRK2 RNA guide
uuuucuaggcaucugcgaaugc

SEQ ID NO: 5064 - RNA, 20 nt, Artificial Sequence
  LRRK2 RNA guide
aaaggaaguuuuccagguau

SEQ ID NO: 5065 - RNA, 20 nt, Artificial Sequence
  LRRK2 RNA guide
aaggaaguuuuccagguauc

SEQ ID NO: 5066 - RNA, 20 nt, Artificial Sequence
  LRRK2 RNA guide
aaguuuuccagguaucugcg

SEQ ID NO: 5067 - RNA, 20 nt, Artificial Sequence
  LRRK2 RNA guide
aaugcauucgcagauaccug

SEQ ID NO: 5068 - RNA, 20 nt, Artificial Sequence
  LRRK2 RNA guide
acaaugcauucgcagauacc

SEQ ID NO: 5069 - RNA, 20 nt, Artificial Sequence
  LRRK2 RNA guide
agaguugacaaugcauucgc

SEQ ID NO: 5070 - RNA, 20 nt, Artificial Sequence
  LRRK2 RNA guide
agauaccuggaaaacuuccu

SEQ ID NO: 5071 - RNA, 20 nt, Artificial Sequence
  LRRK2 RNA guide
aggaaguuuuccagguaucu

SEQ ID NO: 5072 - RNA, 20 nt, Artificial Sequence
  LRRK2 RNA guide
agguaucugcgaaugcauug

SEQ ID NO: 5073 - RNA, 20 nt, Artificial Sequence
  LRRK2 RNA guide
aguugacaaugcauucgcag

SEQ ID NO: 5074 - RNA, 20 nt, Artificial Sequence
  LRRK2 RNA guide
aguuuuccagguaucugcga

SEQ ID NO: 5075 - RNA, 20 nt, Artificial Sequence
  LRRK2 RNA guide
auaccuggaaaacuuccuuu

SEQ ID NO: 5076 - RNA, 20 nt, Artificial Sequence
  LRRK2 RNA guide
aucaaaggaaguuuuccagg

SEQ ID NO: 5077 - RNA, 20 nt, Artificial Sequence
  LRRK2 RNA guide
augcauucgcagauaccugg

SEQ ID NO: 5078 - RNA, 20 nt, Artificial Sequence
  LRRK2 RNA guide
auucgcagauaccuggaaaa

SEQ ID NO: 5079 - RNA, 20 nt, Artificial Sequence
  LRRK2 RNA guide
caaaggaaguuuuccaggua

SEQ ID NO: 5080 - RNA, 20 nt, Artificial Sequence
  LRRK2 RNA guide
caaugcauucgcagauaccu

SEQ ID NO: 5081 - RNA, 20 nt, Artificial Sequence
  LRRK2 RNA guide
cagauaccuggaaaacuucc

SEQ ID NO: 5082 - RNA, 20 nt, Artificial Sequence
  LRRK2 RNA guide
cagguaucugcgaaugcauu

SEQ ID NO: 5083 - RNA, 20 nt, Artificial Sequence
  LRRK2 RNA guide
caucaaaggaaguuuuccag

SEQ ID NO: 5084 - RNA, 20 nt, Artificial Sequence
  LRRK2 RNA guide
cauucgcagauaccuggaaa

SEQ ID NO: 5085 - RNA, 20 nt, Artificial Sequence
  LRRK2 RNA guide
ccagguaucugcgaaugcau

SEQ ID NO: 5086 - RNA, 20 nt, Artificial Sequence
  LRRK2 RNA guide
cgcagauaccuggaaaacuu

SEQ ID NO: 5087 - RNA, 20 nt, Artificial Sequence
  LRRK2 RNA guide
gaaguuuuccagguaucugc

SEQ ID NO: 5088 - RNA, 20 nt, Artificial Sequence
  LRRK2 RNA guide
gacaaugcauucgcagauac

SEQ ID NO: 5089 - RNA, 20 nt, Artificial Sequence
  LRRK2 RNA guide
gauaccuggaaaacuuccuu

SEQ ID NO: 5090 - RNA, 20 nt, Artificial Sequence
  LRRK2 RNA guide
gcagauaccuggaaaacuuc

SEQ ID NO: 5091 - RNA, 20 nt, Artificial Sequence
  LRRK2 RNA guide
gcauucgcagauaccuggaa

SEQ ID NO: 5092 - RNA, 20 nt, Artificial Sequence
  LRRK2 RNA guide
ggaaguuuuccagguaucug

SEQ ID NO: 5093 - RNA, 20 nt, Artificial Sequence
  LRRK2 RNA guide
gguaucugcgaaugcauugu

SEQ ID NO: 5094 - RNA, 20 nt, Artificial Sequence
  LRRK2 RNA guide
guaucugcgaaugcauuguc

SEQ ID NO: 5095 - RNA, 20 nt, Artificial Sequence
  LRRK2 RNA guide
guugacaaugcauucgcaga

SEQ ID NO: 5096 - RNA, 20 nt, Artificial Sequence
  LRRK2 RNA guide
guuuuccagguaucugcgaa

SEQ ID NO: 5097 - RNA, 20 nt, Artificial Sequence
  LRRK2 RNA guide
uaccuggaaaacuuccuuug

SEQ ID NO: 5098 - RNA, 20 nt, Artificial Sequence
  LRRK2 RNA guide
ucaaaggaaguuuuccaggu

SEQ ID NO: 5099 - RNA, 20 nt, Artificial Sequence
  LRRK2 RNA guide
ucaucaaaggaaguuuucca

SEQ ID NO: 5100 - RNA, 20 nt, Artificial Sequence
  LRRK2 RNA guide
uccagguaucugcgaaugca

SEQ ID NO: 5101 - RNA, 20 nt, Artificial Sequence
  LRRK2 RNA guide
ucgcagauaccuggaaaacu

SEQ ID NO: 5102 - RNA, 20 nt, Artificial Sequence
  LRRK2 RNA guide
ugacaaugcauucgcagaua

SEQ ID NO: 5103 - RNA, 20 nt, Artificial Sequence
  LRRK2 RNA guide
ugcauucgcagauaccugga

SEQ ID NO: 5104 - RNA, 20 nt, Artificial Sequence
  LRRK2 RNA guide
uucaucaaaggaaguuuucc

SEQ ID NO: 5105 - RNA, 20 nt, Artificial Sequence
  LRRK2 RNA guide
uuccagguaucugcgaaugc

SEQ ID NO: 5106 - RNA, 20 nt, Artificial Sequence
  LRRK2 RNA guide
uucgcagauaccuggaaaac

SEQ ID NO: 5107 - RNA, 20 nt, Artificial Sequence
  LRRK2 RNA guide
uuuccagguaucugcgaaug

SEQ ID NO: 5108 - RNA, 20 nt, Artificial Sequence
  LRRK2 RNA guide
uuuuccagguaucugcgaau

SEQ ID NO: 5109 - RNA, 21 nt, Artificial Sequence
  LRRK2 RNA guide
aaaggaaguuuuccagguauc

SEQ ID NO: 5110 - RNA, 21 nt, Artificial Sequence
  LRRK2 RNA guide
aaggaaguuuuccagguaucu

SEQ ID NO: 5111 - RNA, 21 nt, Artificial Sequence
  LRRK2 RNA guide
aaguuuuccagguaucugcga

SEQ ID NO: 5112 - RNA, 21 nt, Artificial Sequence
  LRRK2 RNA guide
aaugcauucgcagauaccugg

SEQ ID NO: 5113 - RNA, 21 nt, Artificial Sequence
  LRRK2 RNA guide
acaaugcauucgcagauaccu

SEQ ID NO: 5114 - RNA, 21 nt, Artificial Sequence
  LRRK2 RNA guide
agaguugacaaugcauucgca

SEQ ID NO: 5115 - RNA, 21 nt, Artificial Sequence
  LRRK2 RNA guide
agauaccuggaaaacuuccuu

SEQ ID NO: 5116 - RNA, 21 nt, Artificial Sequence
  LRRK2 RNA guide
aggaaguuuuccagguaucug

SEQ ID NO: 5117 - RNA, 21 nt, Artificial Sequence
  LRRK2 RNA guide
agguaucugcgaaugcauugu

SEQ ID NO: 5118 - RNA, 21 nt, Artificial Sequence
  LRRK2 RNA guide
aguugacaaugcauucgcaga

SEQ ID NO: 5119 - RNA, 21 nt, Artificial Sequence
  LRRK2 RNA guide
aguuuuccagguaucugcgaa

SEQ ID NO: 5120 - RNA, 21 nt, Artificial Sequence
  LRRK2 RNA guide
auaccuggaaaacuuccuuug

SEQ ID NO: 5121 - RNA, 21 nt, Artificial Sequence
  LRRK2 RNA guide
aucaaaggaaguuuuccaggu

SEQ ID NO: 5122 - RNA, 21 nt, Artificial Sequence
  LRRK2 RNA guide
augcauucgcagauaccugga

SEQ ID NO: 5123 - RNA, 21 nt, Artificial Sequence
  LRRK2 RNA guide
auucgcagauaccuggaaaac

SEQ ID NO: 5124 - RNA, 21 nt, Artificial Sequence
  LRRK2 RNA guide
caaaggaaguuuuccagguau

SEQ ID NO: 5125 - RNA, 21 nt, Artificial Sequence
  LRRK2 RNA guide
caaugcauucgcagauaccug

SEQ ID NO: 5126 - RNA, 21 nt, Artificial Sequence
  LRRK2 RNA guide
cagauaccuggaaaacuuccu

SEQ ID NO: 5127 - RNA, 21 nt, Artificial Sequence
  LRRK2 RNA guide
cagguaucugcgaaugcauug

SEQ ID NO: 5128 - RNA, 21 nt, Artificial Sequence
  LRRK2 RNA guide
caucaaaggaaguuuuccagg

SEQ ID NO: 5129 - RNA, 21 nt, Artificial Sequence
  LRRK2 RNA guide
cauucgcagauaccuggaaaa

SEQ ID NO: 5130 - RNA, 21 nt, Artificial Sequence
  LRRK2 RNA guide
ccagguaucugcgaaugcauu

SEQ ID NO: 5131 - RNA, 21 nt, Artificial Sequence
  LRRK2 RNA guide
cgcagauaccuggaaaacuuc

SEQ ID NO: 5132 - RNA, 21 nt, Artificial Sequence
  LRRK2 RNA guide
cuucaucaaaggaaguuuucc

SEQ ID NO: 5133 - RNA, 21 nt, Artificial Sequence
  LRRK2 RNA guide
gaaguuuuccagguaucugcg

SEQ ID NO: 5134 - RNA, 21 nt, Artificial Sequence
  LRRK2 RNA guide
gacaaugcauucgcagauacc

SEQ ID NO: 5135 - RNA, 21 nt, Artificial Sequence
  LRRK2 RNA guide
gagaguugacaaugcauucgc

SEQ ID NO: 5136 - RNA, 21 nt, Artificial Sequence
  LRRK2 RNA guide
gaguugacaaugcauucgcag

SEQ ID NO: 5137 - RNA, 21 nt, Artificial Sequence
  LRRK2 RNA guide
gauaccuggaaaacuuccuuu

SEQ ID NO: 5138 - RNA, 21 nt, Artificial Sequence
  LRRK2 RNA guide
gcagauaccuggaaaacuucc

SEQ ID NO: 5139 - RNA, 21 nt, Artificial Sequence
  LRRK2 RNA guide
gcauucgcagauaccuggaaa

SEQ ID NO: 5140 - RNA, 21 nt, Artificial Sequence
  LRRK2 RNA guide
ggaaguuuuccagguaucugc

SEQ ID NO: 5141 - RNA, 21 nt, Artificial Sequence
  LRRK2 RNA guide
gguaucugcgaaugcauuguc

SEQ ID NO: 5142 - RNA, 21 nt, Artificial Sequence
  LRRK2 RNA guide
guaucugcgaaugcauuguca

SEQ ID NO: 5143 - RNA, 21 nt, Artificial Sequence
  LRRK2 RNA guide
guuuuccagguaucugcgaau

SEQ ID NO: 5144 - RNA, 21 nt, Artificial Sequence
  LRRK2 RNA guide
uaccuggaaaacuuccuuuga

SEQ ID NO: 5145 - RNA, 21 nt, Artificial Sequence
  LRRK2 RNA guide
ucaaaggaaguuuuccaggua

SEQ ID NO: 5146 - RNA, 21 nt, Artificial Sequence
  LRRK2 RNA guide
ucaucaaaggaaguuuuccag

SEQ ID NO: 5147 - RNA, 21 nt, Artificial Sequence
  LRRK2 RNA guide
uccagguaucugcgaaugcau

SEQ ID NO: 5148 - RNA, 21 nt, Artificial Sequence
  LRRK2 RNA guide
ucgcagauaccuggaaaacuu

SEQ ID NO: 5149 - RNA, 21 nt, Artificial Sequence
  LRRK2 RNA guide
ugacaaugcauucgcagauac

SEQ ID NO: 5150 - RNA, 21 nt, Artificial Sequence
  LRRK2 RNA guide
ugcauucgcagauaccuggaa

SEQ ID NO: 5151 - RNA, 21 nt, Artificial Sequence
  LRRK2 RNA guide
uucaucaaaggaaguuuucca

SEQ ID NO: 5152 - RNA, 21 nt, Artificial Sequence
  LRRK2 RNA guide
uuccagguaucugcgaaugca

SEQ ID NO: 5153 - RNA, 21 nt, Artificial Sequence
  LRRK2 RNA guide
uucgcagauaccuggaaaacu

SEQ ID NO: 5154 - RNA, 21 nt, Artificial Sequence
  LRRK2 RNA guide
uugacaaugcauucgcagaua

SEQ ID NO: 5155 - RNA, 21 nt, Artificial Sequence
  LRRK2 RNA guide
uuuccagguaucugcgaaugc

SEQ ID NO: 5156 - RNA, 21 nt, Artificial Sequence
  LRRK2 RNA guide
uuuuccagguaucugcgaaug

SEQ ID NO: 5157 - RNA, 22 nt, Artificial Sequence
  LRRK2 RNA guide
aaaggaaguuuuccagguaucu

SEQ ID NO: 5158 - RNA, 22 nt, Artificial Sequence
  LRRK2 RNA guide
aaggaaguuuuccagguaucug

SEQ ID NO: 5159 - RNA, 22 nt, Artificial Sequence
  LRRK2 RNA guide
aaguuuuccagguaucugcgaa

SEQ ID NO: 5160 - RNA, 22 nt, Artificial Sequence
  LRRK2 RNA guide
aaugcauucgcagauaccugga

SEQ ID NO: 5161 - RNA, 22 nt, Artificial Sequence
  LRRK2 RNA guide
acaaugcauucgcagauaccug

SEQ ID NO: 5162 - RNA, 22 nt, Artificial Sequence
  LRRK2 RNA guide
agagaguugacaaugcauucgc

SEQ ID NO: 5163 - RNA, 22 nt, Artificial Sequence
  LRRK2 RNA guide
agaguugacaaugcauucgcag

SEQ ID NO: 5164 - RNA, 22 nt, Artificial Sequence
  LRRK2 RNA guide
agauaccuggaaaacuuccuuu

SEQ ID NO: 5165 - RNA, 22 nt, Artificial Sequence
  LRRK2 RNA guide
aggaaguuuuccagguaucugc

SEQ ID NO: 5166 - RNA, 22 nt, Artificial Sequence
  LRRK2 RNA guide
agguaucugcgaaugcauuguc

SEQ ID NO: 5167 - RNA, 22 nt, Artificial Sequence
  LRRK2 RNA guide
aguuuuccagguaucugcgaau

SEQ ID NO: 5168 - RNA, 22 nt, Artificial Sequence
  LRRK2 RNA guide
auaccuggaaaacuuccuuuga

SEQ ID NO: 5169 - RNA, 22 nt, Artificial Sequence
  LRRK2 RNA guide
aucaaaggaaguuuuccaggua

SEQ ID NO: 5170 - RNA, 22 nt, Artificial Sequence
  LRRK2 RNA guide
augcauucgcagauaccuggaa

SEQ ID NO: 5171 - RNA, 22 nt, Artificial Sequence
  LRRK2 RNA guide
auucgcagauaccuggaaaacu

SEQ ID NO: 5172 - RNA, 22 nt, Artificial Sequence
  LRRK2 RNA guide
caaaggaaguuuuccagguauc

SEQ ID NO: 5173 - RNA, 22 nt, Artificial Sequence
  LRRK2 RNA guide
caaugcauucgcagauaccugg

SEQ ID NO: 5174 - RNA, 22 nt, Artificial Sequence
  LRRK2 RNA guide
cagauaccuggaaaacuuccuu

SEQ ID NO: 5175 - RNA, 22 nt, Artificial Sequence
  LRRK2 RNA guide
cagguaucugcgaaugcauugu

SEQ ID NO: 5176 - RNA, 22 nt, Artificial Sequence
  LRRK2 RNA guide
caucaaaggaaguuuuccaggu

SEQ ID NO: 5177 - RNA, 22 nt, Artificial Sequence
  LRRK2 RNA guide
cauucgcagauaccuggaaaac

SEQ ID NO: 5178 - RNA, 22 nt, Artificial Sequence
  LRRK2 RNA guide
ccagguaucugcgaaugcauug

SEQ ID NO: 5179 - RNA, 22 nt, Artificial Sequence
  LRRK2 RNA guide
cgcagauaccuggaaaacuucc

SEQ ID NO: 5180 - RNA, 22 nt, Artificial Sequence
  LRRK2 RNA guide
cuucaucaaaggaaguuuucca

SEQ ID NO: 5181 - RNA, 22 nt, Artificial Sequence
  LRRK2 RNA guide
gaaguuuuccagguaucugcga

SEQ ID NO: 5182 - RNA, 22 nt, Artificial Sequence
  LRRK2 RNA guide
gacaaugcauucgcagauaccu

SEQ ID NO: 5183 - RNA, 22 nt, Artificial Sequence
  LRRK2 RNA guide
gagaguugacaaugcauucgca

SEQ ID NO: 5184 - RNA, 22 nt, Artificial Sequence
  LRRK2 RNA guide
gaguugacaaugcauucgcaga

SEQ ID NO: 5185 - RNA, 22 nt, Artificial Sequence
  LRRK2 RNA guide
gauaccuggaaaacuuccuuug

SEQ ID NO: 5186 - RNA, 22 nt, Artificial Sequence
  LRRK2 RNA guide
gcagauaccuggaaaacuuccu

SEQ ID NO: 5187 - RNA, 22 nt, Artificial Sequence
  LRRK2 RNA guide
gcauucgcagauaccuggaaaa

SEQ ID NO: 5188 - RNA, 22 nt, Artificial Sequence
  LRRK2 RNA guide
ggaaguuuuccagguaucugcg

SEQ ID NO: 5189 - RNA, 22 nt, Artificial Sequence
  LRRK2 RNA guide
gguaucugcgaaugcauuguca

SEQ ID NO: 5190 - RNA, 22 nt, Artificial Sequence
  LRRK2 RNA guide
guaucugcgaaugcauugucaa

SEQ ID NO: 5191 - RNA, 22 nt, Artificial Sequence
  LRRK2 RNA guide
guugacaaugcauucgcagaua

SEQ ID NO: 5192 - RNA, 22 nt, Artificial Sequence
  LRRK2 RNA guide
guuuuccagguaucugcgaaug

SEQ ID NO: 5193 - RNA, 22 nt, Artificial Sequence
  LRRK2 RNA guide
uaccuggaaaacuuccuuugau

SEQ ID NO: 5194 - RNA, 22 nt, Artificial Sequence
  LRRK2 RNA guide
ucaaaggaaguuuuccagguau

SEQ ID NO: 5195 - RNA, 22 nt, Artificial Sequence
  LRRK2 RNA guide
ucaucaaaggaaguuuuccagg

SEQ ID NO: 5196 - RNA, 22 nt, Artificial Sequence
  LRRK2 RNA guide
uccagguaucugcgaaugcauu

SEQ ID NO: 5197 - RNA, 22 nt, Artificial Sequence
  LRRK2 RNA guide
ucgcagauaccuggaaaacuuc

SEQ ID NO: 5198 - RNA, 22 nt, Artificial Sequence
  LRRK2 RNA guide
ucuucaucaaaggaaguuuucc

SEQ ID NO: 5199 - RNA, 22 nt, Artificial Sequence
  LRRK2 RNA guide
ugacaaugcauucgcagauacc

SEQ ID NO: 5200 - RNA, 22 nt, Artificial Sequence
  LRRK2 RNA guide
ugcauucgcagauaccuggaaa

SEQ ID NO: 5201 - RNA, 22 nt, Artificial Sequence
  LRRK2 RNA guide
uucaucaaaggaaguuuuccag

SEQ ID NO: 5202 - RNA, 22 nt, Artificial Sequence
  LRRK2 RNA guide
uuccagguaucugcgaaugcau

SEQ ID NO: 5203 - RNA, 22 nt, Artificial Sequence
  LRRK2 RNA guide
uucgcagauaccuggaaaacuu

SEQ ID NO: 5204 - RNA, 22 nt, Artificial Sequence
  LRRK2 RNA guide
uugacaaugcauucgcagauac

SEQ ID NO: 5205 - RNA, 22 nt, Artificial Sequence
  LRRK2 RNA guide
uuuccagguaucugcgaaugca

SEQ ID NO: 5206 - RNA, 22 nt, Artificial Sequence
  LRRK2 RNA guide
uuuuccagguaucugcgaaugc

SEQ ID NO: 5207 - RNA, 20 nt, Artificial Sequence
  LRRK2 RNA guide
aaaggaaguuuuccaggcau

SEQ ID NO: 5208 - RNA, 20 nt, Artificial Sequence
  LRRK2 RNA guide
aagagaguugacaaugcauu

SEQ ID NO: 5209 - RNA, 20 nt, Artificial Sequence
  LRRK2 RNA guide
aaggaaguuuuccaggcauc

SEQ ID NO: 5210 - RNA, 20 nt, Artificial Sequence
  LRRK2 RNA guide
aaguuuuccaggcaucugug

SEQ ID NO: 5211 - RNA, 20 nt, Artificial Sequence
  LRRK2 RNA guide
aaugcauucacagaugccug

SEQ ID NO: 5212 - RNA, 20 nt, Artificial Sequence
  LRRK2 RNA guide
acaaugcauucacagaugcc

SEQ ID NO: 5213 - RNA, 20 nt, Artificial Sequence
  LRRK2 RNA guide
agaguugacaaugcauucac

SEQ ID NO: 5214 - RNA, 20 nt, Artificial Sequence
  LRRK2 RNA guide
aggaaguuuuccaggcaucu

SEQ ID NO: 5215 - RNA, 20 nt, Artificial Sequence
  LRRK2 RNA guide
aggcaucugugaaugcauug

SEQ ID NO: 5216 - RNA, 20 nt, Artificial Sequence
  LRRK2 RNA guide
aguugacaaugcauucacag

SEQ ID NO: 5217 - RNA, 20 nt, Artificial Sequence
  LRRK2 RNA guide
aguuuuccaggcaucuguga

SEQ ID NO: 5218 - RNA, 20 nt, Artificial Sequence
  LRRK2 RNA guide
aucugugaaugcauugucaa

SEQ ID NO: 5219 - RNA, 20 nt, Artificial Sequence
  LRRK2 RNA guide
augcauucacagaugccugg

SEQ ID NO: 5220 - RNA, 20 nt, Artificial Sequence
  LRRK2 RNA guide
auucacagaugccuggaaaa

SEQ ID NO: 5221 - RNA, 20 nt, Artificial Sequence
  LRRK2 RNA guide
caaaggaaguuuuccaggca

SEQ ID NO: 5222 - RNA, 20 nt, Artificial Sequence
  LRRK2 RNA guide
caaugcauucacagaugccu

SEQ ID NO: 5223 - RNA, 20 nt, Artificial Sequence
  LRRK2 RNA guide
cacagaugccuggaaaacuu

SEQ ID NO: 5224 - RNA, 20 nt, Artificial Sequence
  LRRK2 RNA guide
caggcaucugugaaugcauu

SEQ ID NO: 5225 - RNA, 20 nt, Artificial Sequence
  LRRK2 RNA guide
caucugugaaugcauuguca

SEQ ID NO: 5226 - RNA, 20 nt, Artificial Sequence
  LRRK2 RNA guide
cauucacagaugccuggaaa

SEQ ID NO: 5227 - RNA, 20 nt, Artificial Sequence
  LRRK2 RNA guide
ccaggcaucugugaaugcau

SEQ ID NO: 5228 - RNA, 20 nt, Artificial Sequence
  LRRK2 RNA guide
cuaagagaguugacaaugca

SEQ ID NO: 5229 - RNA, 20 nt, Artificial Sequence
  LRRK2 RNA guide
cugugaaugcauugucaacu

SEQ ID NO: 5230 - RNA, 20 nt, Artificial Sequence
  LRRK2 RNA guide
gaaguuuuccaggcaucugu

SEQ ID NO: 5231 - RNA, 20 nt, Artificial Sequence
  LRRK2 RNA guide
gacaaugcauucacagaugc

SEQ ID NO: 5232 - RNA, 20 nt, Artificial Sequence
  LRRK2 RNA guide
gagaguugacaaugcauuca

SEQ ID NO: 5233 - RNA, 20 nt, Artificial Sequence
  LRRK2 RNA guide
gaguugacaaugcauucaca

SEQ ID NO: 5234 - RNA, 20 nt, Artificial Sequence
  LRRK2 RNA guide
gcaucugugaaugcauuguc

SEQ ID NO: 5235 - RNA, 20 nt, Artificial Sequence
  LRRK2 RNA guide
gcauucacagaugccuggaa

SEQ ID NO: 5236 - RNA, 20 nt, Artificial Sequence
  LRRK2 RNA guide
ggaaguuuuccaggcaucug

SEQ ID NO: 5237 - RNA, 20 nt, Artificial Sequence
  LRRK2 RNA guide
ggcaucugugaaugcauugu

SEQ ID NO: 5238 - RNA, 20 nt, Artificial Sequence
  LRRK2 RNA guide
gugaaugcauugucaacucu

SEQ ID NO: 5239 - RNA, 20 nt, Artificial Sequence
  LRRK2 RNA guide
guugacaaugcauucacaga

SEQ ID NO: 5240 - RNA, 20 nt, Artificial Sequence
  LRRK2 RNA guide
guuuuccaggcaucugugaa

SEQ ID NO: 5241 - RNA, 20 nt, Artificial Sequence
  LRRK2 RNA guide
uaagagaguugacaaugcau

SEQ ID NO: 5242 - RNA, 20 nt, Artificial Sequence
  LRRK2 RNA guide
ucacagaugccuggaaaacu

SEQ ID NO: 5243 - RNA, 20 nt, Artificial Sequence
  LRRK2 RNA guide
uccaggcaucugugaaugca

SEQ ID NO: 5244 - RNA, 20 nt, Artificial Sequence
  LRRK2 RNA guide
ucuaagagaguugacaaugc

SEQ ID NO: 5245 - RNA, 20 nt, Artificial Sequence
  LRRK2 RNA guide
ucugugaaugcauugucaac

SEQ ID NO: 5246 - RNA, 20 nt, Artificial Sequence
  LRRK2 RNA guide
ugacaaugcauucacagaug

SEQ ID NO: 5247 - RNA, 20 nt, Artificial Sequence
  LRRK2 RNA guide
ugcauucacagaugccugga

SEQ ID NO: 5248 - RNA, 20 nt, Artificial Sequence
  LRRK2 RNA guide
ugugaaugcauugucaacuc

SEQ ID NO: 5249 - RNA, 20 nt, Artificial Sequence
  LRRK2 RNA guide
uucacagaugccuggaaaac

SEQ ID NO: 5250 - RNA, 20 nt, Artificial Sequence
  LRRK2 RNA guide
uuccaggcaucugugaaugc

SEQ ID NO: 5251 - RNA, 20 nt, Artificial Sequence
  LRRK2 RNA guide
uugacaaugcauucacagau

SEQ ID NO: 5252 - RNA, 20 nt, Artificial Sequence
  LRRK2 RNA guide
uuuccaggcaucugugaaug

SEQ ID NO: 5253 - RNA, 20 nt, Artificial Sequence
  LRRK2 RNA guide
uuuuccaggcaucugugaau

SEQ ID NO: 5254 - RNA, 21 nt, Artificial Sequence
  LRRK2 RNA guide
aaaggaaguuuuccaggcauc

SEQ ID NO: 5255 - RNA, 21 nt, Artificial Sequence
  LRRK2 RNA guide
aagagaguugacaaugcauuc

SEQ ID NO: 5256 - RNA, 21 nt, Artificial Sequence
  LRRK2 RNA guide
aaggaaguuuuccaggcaucu

SEQ ID NO: 5257 - RNA, 21 nt, Artificial Sequence
  LRRK2 RNA guide
aaguuuuccaggcaucuguga

SEQ ID NO: 5258 - RNA, 21 nt, Artificial Sequence
  LRRK2 RNA guide
aaugcauucacagaugccugg

SEQ ID NO: 5259 - RNA, 21 nt, Artificial Sequence
  LRRK2 RNA guide
acaaugcauucacagaugccu

SEQ ID NO: 5260 - RNA, 21 nt, Artificial Sequence
  LRRK2 RNA guide
agagaguugacaaugcauuca

SEQ ID NO: 5261 - RNA, 21 nt, Artificial Sequence
  LRRK2 RNA guide
agaguugacaaugcauucaca

SEQ ID NO: 5262 - RNA, 21 nt, Artificial Sequence
  LRRK2 RNA guide
aggaaguuuuccaggcaucug

SEQ ID NO: 5263 - RNA, 21 nt, Artificial Sequence
  LRRK2 RNA guide
aggcaucugugaaugcauugu

SEQ ID NO: 5264 - RNA, 21 nt, Artificial Sequence
  LRRK2 RNA guide
aguugacaaugcauucacaga

SEQ ID NO: 5265 - RNA, 21 nt, Artificial Sequence
  LRRK2 RNA guide
aguuuuccaggcaucugugaa

SEQ ID NO: 5266 - RNA, 21 nt, Artificial Sequence
  LRRK2 RNA guide
aucugugaaugcauugucaac

SEQ ID NO: 5267 - RNA, 21 nt, Artificial Sequence
  LRRK2 RNA guide
augcauucacagaugccugga

SEQ ID NO: 5268 - RNA, 21 nt, Artificial Sequence
  LRRK2 RNA guide
auucacagaugccuggaaaac

SEQ ID NO: 5269 - RNA, 21 nt, Artificial Sequence
  LRRK2 RNA guide
caaaggaaguuuuccaggcau

SEQ ID NO: 5270 - RNA, 21 nt, Artificial Sequence
  LRRK2 RNA guide
caaugcauucacagaugccug

SEQ ID NO: 5271 - RNA, 21 nt, Artificial Sequence
  LRRK2 RNA guide
cacagaugccuggaaaacuuc

SEQ ID NO: 5272 - RNA, 21 nt, Artificial Sequence
  LRRK2 RNA guide
caggcaucugugaaugcauug

SEQ ID NO: 5273 - RNA, 21 nt, Artificial Sequence
  LRRK2 RNA guide
caucugugaaugcauugucaa

SEQ ID NO: 5274 - RNA, 21 nt, Artificial Sequence
  LRRK2 RNA guide
cauucacagaugccuggaaaa

SEQ ID NO: 5275 - RNA, 21 nt, Artificial Sequence
  LRRK2 RNA guide
ccaggcaucugugaaugcauu

SEQ ID NO: 5276 - RNA, 21 nt, Artificial Sequence
  LRRK2 RNA guide
cuaagagaguugacaaugcau

SEQ ID NO: 5277 - RNA, 21 nt, Artificial Sequence
  LRRK2 RNA guide
cugugaaugcauugucaacuc

SEQ ID NO: 5278 - RNA, 21 nt, Artificial Sequence
  LRRK2 RNA guide
gaaguuuuccaggcaucugug

SEQ ID NO: 5279 - RNA, 21 nt, Artificial Sequence
  LRRK2 RNA guide
gacaaugcauucacagaugcc

SEQ ID NO: 5280 - RNA, 21 nt, Artificial Sequence
  LRRK2 RNA guide
gagaguugacaaugcauucac

SEQ ID NO: 5281 - RNA, 21 nt, Artificial Sequence
  LRRK2 RNA guide
gaguugacaaugcauucacag

SEQ ID NO: 5282 - RNA, 21 nt, Artificial Sequence
  LRRK2 RNA guide
gcaucugugaaugcauuguca

SEQ ID NO: 5283 - RNA, 21 nt, Artificial Sequence
  LRRK2 RNA guide
gcauucacagaugccuggaaa

SEQ ID NO: 5284 - RNA, 21 nt, Artificial Sequence
  LRRK2 RNA guide
ggaaguuuuccaggcaucugu

SEQ ID NO: 5285 - RNA, 21 nt, Artificial Sequence
  LRRK2 RNA guide
ggcaucugugaaugcauuguc

SEQ ID NO: 5286 - RNA, 21 nt, Artificial Sequence
  LRRK2 RNA guide
gugaaugcauugucaacucuc

SEQ ID NO: 5287 - RNA, 21 nt, Artificial Sequence
  LRRK2 RNA guide
guugacaaugcauucacagau

SEQ ID NO: 5288 - RNA, 21 nt, Artificial Sequence
  LRRK2 RNA guide
guuuuccaggcaucugugaau

SEQ ID NO: 5289 - RNA, 21 nt, Artificial Sequence
  LRRK2 RNA guide
uaagagaguugacaaugcauu

SEQ ID NO: 5290 - RNA, 21 nt, Artificial Sequence
  LRRK2 RNA guide
ucaaaggaaguuuuccaggca

SEQ ID NO: 5291 - RNA, 21 nt, Artificial Sequence
  LRRK2 RNA guide
ucacagaugccuggaaaacuu

SEQ ID NO: 5292 - RNA, 21 nt, Artificial Sequence
  LRRK2 RNA guide
uccaggcaucugugaaugcau

SEQ ID NO: 5293 - RNA, 21 nt, Artificial Sequence
  LRRK2 RNA guide
ucuaagagaguugacaaugca

SEQ ID NO: 5294 - RNA, 21 nt, Artificial Sequence
  LRRK2 RNA guide
ucugugaaugcauugucaacu

SEQ ID NO: 5295 - RNA, 21 nt, Artificial Sequence
  LRRK2 RNA guide
ugacaaugcauucacagaugc

SEQ ID NO: 5296 - RNA, 21 nt, Artificial Sequence
  LRRK2 RNA guide
ugcauucacagaugccuggaa

SEQ ID NO: 5297 - RNA, 21 nt, Artificial Sequence
  LRRK2 RNA guide
ugugaaugcauugucaacucu

SEQ ID NO: 5298 - RNA, 21 nt, Artificial Sequence
  LRRK2 RNA guide
uucacagaugccuggaaaacu

SEQ ID NO: 5299 - RNA, 21 nt, Artificial Sequence
  LRRK2 RNA guide
uuccaggcaucugugaaugca

SEQ ID NO: 5300 - RNA, 21 nt, Artificial Sequence
  LRRK2 RNA guide
uucuaagagaguugacaaugc

SEQ ID NO: 5301 - RNA, 21 nt, Artificial Sequence
  LRRK2 RNA guide
uugacaaugcauucacagaug

SEQ ID NO: 5302 - RNA, 21 nt, Artificial Sequence
  LRRK2 RNA guide
uuuccaggcaucugugaaugc

SEQ ID NO: 5303 - RNA, 21 nt, Artificial Sequence
  LRRK2 RNA guide
uuuuccaggcaucugugaaug

SEQ ID NO: 5304 - RNA, 22 nt, Artificial Sequence
  LRRK2 RNA guide
aaaggaaguuuuccaggcaucu

SEQ ID NO: 5305 - RNA, 22 nt, Artificial Sequence
  LRRK2 RNA guide
aagagaguugacaaugcauuca

SEQ ID NO: 5306 - RNA, 22 nt, Artificial Sequence
  LRRK2 RNA guide
aaggaaguuuuccaggcaucug

SEQ ID NO: 5307 - RNA, 22 nt, Artificial Sequence
  LRRK2 RNA guide
aaguuuuccaggcaucugugaa

SEQ ID NO: 5308 - RNA, 22 nt, Artificial Sequence
  LRRK2 RNA guide
aaugcauucacagaugccugga

SEQ ID NO: 5309 - RNA, 22 nt, Artificial Sequence
  LRRK2 RNA guide
acaaugcauucacagaugccug

SEQ ID NO: 5310 - RNA, 22 nt, Artificial Sequence
  LRRK2 RNA guide
agagaguugacaaugcauucac

SEQ ID NO: 5311 - RNA, 22 nt, Artificial Sequence
  LRRK2 RNA guide
agaguugacaaugcauucacag

SEQ ID NO: 5312 - RNA, 22 nt, Artificial Sequence
  LRRK2 RNA guide
aggaaguuuuccaggcaucugu

SEQ ID NO: 5313 - RNA, 22 nt, Artificial Sequence
  LRRK2 RNA guide
aggcaucugugaaugcauuguc

SEQ ID NO: 5314 - RNA, 22 nt, Artificial Sequence
  LRRK2 RNA guide
aguugacaaugcauucacagau

SEQ ID NO: 5315 - RNA, 22 nt, Artificial Sequence
  LRRK2 RNA guide
aguuuuccaggcaucugugaau

SEQ ID NO: 5316 - RNA, 22 nt, Artificial Sequence
  LRRK2 RNA guide
aucaaaggaaguuuuccaggca

SEQ ID NO: 5317 - RNA, 22 nt, Artificial Sequence
  LRRK2 RNA guide
aucugugaaugcauugucaacu

SEQ ID NO: 5318 - RNA, 22 nt, Artificial Sequence
  LRRK2 RNA guide
augcauucacagaugccuggaa

SEQ ID NO: 5319 - RNA, 22 nt, Artificial Sequence
  LRRK2 RNA guide
auucacagaugccuggaaaacu

SEQ ID NO: 5320 - RNA, 22 nt, Artificial Sequence
  LRRK2 RNA guide
caaaggaaguuuuccaggcauc

SEQ ID NO: 5321 - RNA, 22 nt, Artificial Sequence
  LRRK2 RNA guide
caaugcauucacagaugccugg

SEQ ID NO: 5322 - RNA, 22 nt, Artificial Sequence
  LRRK2 RNA guide
cacagaugccuggaaaacuucc

SEQ ID NO: 5323 - RNA, 22 nt, Artificial Sequence
  LRRK2 RNA guide
caggcaucugugaaugcauugu

SEQ ID NO: 5324 - RNA, 22 nt, Artificial Sequence
  LRRK2 RNA guide
caucugugaaugcauugucaac

SEQ ID NO: 5325 - RNA, 22 nt, Artificial Sequence
  LRRK2 RNA guide
cauucacagaugccuggaaaac

SEQ ID NO: 5326 - RNA, 22 nt, Artificial Sequence
  LRRK2 RNA guide
ccaggcaucugugaaugcauug

SEQ ID NO: 5327 - RNA, 22 nt, Artificial Sequence
  LRRK2 RNA guide
cuaagagaguugacaaugcauu

SEQ ID NO: 5328 - RNA, 22 nt, Artificial Sequence
  LRRK2 RNA guide
cugugaaugcauugucaacucu

SEQ ID NO: 5329 - RNA, 22 nt, Artificial Sequence
  LRRK2 RNA guide
gaaguuuuccaggcaucuguga

SEQ ID NO: 5330 - RNA, 22 nt, Artificial Sequence
  LRRK2 RNA guide
gacaaugcauucacagaugccu

SEQ ID NO: 5331 - RNA, 22 nt, Artificial Sequence
  LRRK2 RNA guide
gagaguugacaaugcauucaca

SEQ ID NO: 5332 - RNA, 22 nt, Artificial Sequence
  LRRK2 RNA guide
gaguugacaaugcauucacaga

SEQ ID NO: 5333 - RNA, 22 nt, Artificial Sequence
  LRRK2 RNA guide
gcaucugugaaugcauugucaa

SEQ ID NO: 5334 - RNA, 22 nt, Artificial Sequence
  LRRK2 RNA guide
gcauucacagaugccuggaaaa

SEQ ID NO: 5335 - RNA, 22 nt, Artificial Sequence
  LRRK2 RNA guide
ggaaguuuuccaggcaucugug

SEQ ID NO: 5336 - RNA, 22 nt, Artificial Sequence
  LRRK2 RNA guide
ggcaucugugaaugcauuguca

SEQ ID NO: 5337 - RNA, 22 nt, Artificial Sequence
  LRRK2 RNA guide
gugaaugcauugucaacucucu

SEQ ID NO: 5338 - RNA, 22 nt, Artificial Sequence
  LRRK2 RNA guide
guucuaagagaguugacaaugc

SEQ ID NO: 5339 - RNA, 22 nt, Artificial Sequence
  LRRK2 RNA guide
guugacaaugcauucacagaug

SEQ ID NO: 5340 - RNA, 22 nt, Artificial Sequence
  LRRK2 RNA guide
guuuuccaggcaucugugaaug

SEQ ID NO: 5341 - RNA, 22 nt, Artificial Sequence
  LRRK2 RNA guide
uaagagaguugacaaugcauuc

SEQ ID NO: 5342 - RNA, 22 nt, Artificial Sequence
  LRRK2 RNA guide
ucaaaggaaguuuuccaggcau

SEQ ID NO: 5343 - RNA, 22 nt, Artificial Sequence
  LRRK2 RNA guide
ucacagaugccuggaaaacuuc

SEQ ID NO: 5344 - RNA, 22 nt, Artificial Sequence
  LRRK2 RNA guide
uccaggcaucugugaaugcauu

SEQ ID NO: 5345 - RNA, 22 nt, Artificial Sequence
  LRRK2 RNA guide
ucuaagagaguugacaaugcau

SEQ ID NO: 5346 - RNA, 22 nt, Artificial Sequence
  LRRK2 RNA guide
ucugugaaugcauugucaacuc

SEQ ID NO: 5347 - RNA, 22 nt, Artificial Sequence
  LRRK2 RNA guide
ugacaaugcauucacagaugcc

SEQ ID NO: 5348 - RNA, 22 nt, Artificial Sequence
  LRRK2 RNA guide
ugcauucacagaugccuggaaa

SEQ ID NO: 5349 - RNA, 22 nt, Artificial Sequence
  LRRK2 RNA guide
ugugaaugcauugucaacucuc

SEQ ID NO: 5350 - RNA, 22 nt, Artificial Sequence
  LRRK2 RNA guide
uucacagaugccuggaaaacuu

SEQ ID NO: 5351 - RNA, 22 nt, Artificial Sequence
  LRRK2 RNA guide
uuccaggcaucugugaaugcau

SEQ ID NO: 5352 - RNA, 22 nt, Artificial Sequence
  LRRK2 RNA guide
uucuaagagaguugacaaugca

SEQ ID NO: 5353 - RNA, 22 nt, Artificial Sequence
  LRRK2 RNA guide
uugacaaugcauucacagaugc

SEQ ID NO: 5354 - RNA, 22 nt, Artificial Sequence
  LRRK2 RNA guide
uuuccaggcaucugugaaugca

SEQ ID NO: 5355 - RNA, 22 nt, Artificial Sequence
  LRRK2 RNA guide
uuuuccaggcaucugugaaugc

SEQ ID NO: 5356 - RNA, 20 nt, Artificial Sequence
  LRRK2 RNA guide
aacgcauugucaacucucuu

SEQ ID NO: 5357 - RNA, 20 nt, Artificial Sequence
  LRRK2 RNA guide
aagagaguugacaaugcguu

SEQ ID NO: 5358 - RNA, 20 nt, Artificial Sequence
  LRRK2 RNA guide
aaguuuuccaggcaucugcg

SEQ ID NO: 5359 - RNA, 20 nt, Artificial Sequence
  LRRK2 RNA guide
aaugcguucgcagaugccug

SEQ ID NO: 5360 - RNA, 20 nt, Artificial Sequence
  LRRK2 RNA guide
acaaugcguucgcagaugcc

SEQ ID NO: 5361 - RNA, 20 nt, Artificial Sequence
  LRRK2 RNA guide
acgcauugucaacucucuua

SEQ ID NO: 5362 - RNA, 20 nt, Artificial Sequence
  LRRK2 RNA guide
agagaguugacaaugcguuc

SEQ ID NO: 5363 - RNA, 20 nt, Artificial Sequence
  LRRK2 RNA guide
agaguugacaaugcguucgc

SEQ ID NO: 5364 - RNA, 20 nt, Artificial Sequence
  LRRK2 RNA guide
aggcaucugcgaacgcauug

SEQ ID NO: 5365 - RNA, 20 nt, Artificial Sequence
  LRRK2 RNA guide
aguugacaaugcguucgcag

SEQ ID NO: 5366 - RNA, 20 nt, Artificial Sequence
  LRRK2 RNA guide
aguuuuccaggcaucugcga

SEQ ID NO: 5367 - RNA, 20 nt, Artificial Sequence
  LRRK2 RNA guide
aucugcgaacgcauugucaa

SEQ ID NO: 5368 - RNA, 20 nt, Artificial Sequence
  LRRK2 RNA guide
augcguucgcagaugccugg

SEQ ID NO: 5369 - RNA, 20 nt, Artificial Sequence
  LRRK2 RNA guide
caaugcguucgcagaugccu

SEQ ID NO: 5370 - RNA, 20 nt, Artificial Sequence
  LRRK2 RNA guide
caggcaucugcgaacgcauu

SEQ ID NO: 5371 - RNA, 20 nt, Artificial Sequence
  LRRK2 RNA guide
caucugcgaacgcauuguca

SEQ ID NO: 5372 - RNA, 20 nt, Artificial Sequence
  LRRK2 RNA guide
ccaggcaucugcgaacgcau

SEQ ID NO: 5373 - RNA, 20 nt, Artificial Sequence
  LRRK2 RNA guide
cgaacgcauugucaacucuc

SEQ ID NO: 5374 - RNA, 20 nt, Artificial Sequence
  LRRK2 RNA guide
cguucgcagaugccuggaaa

SEQ ID NO: 5375 - RNA, 20 nt, Artificial Sequence
  LRRK2 RNA guide
cuaagagaguugacaaugcg

SEQ ID NO: 5376 - RNA, 20 nt, Artificial Sequence
  LRRK2 RNA guide
cugcgaacgcauugucaacu

SEQ ID NO: 5377 - RNA, 20 nt, Artificial Sequence
  LRRK2 RNA guide
gaacgcauugucaacucucu

SEQ ID NO: 5378 - RNA, 20 nt, Artificial Sequence
  LRRK2 RNA guide
gaaguuuuccaggcaucugc

SEQ ID NO: 5379 - RNA, 20 nt, Artificial Sequence
  LRRK2 RNA guide
gacaaugcguucgcagaugc

SEQ ID NO: 5380 - RNA, 20 nt, Artificial Sequence
  LRRK2 RNA guide
gagaguugacaaugcguucg

SEQ ID NO: 5381 - RNA, 20 nt, Artificial Sequence
  LRRK2 RNA guide
gaguugacaaugcguucgca

SEQ ID NO: 5382 - RNA, 20 nt, Artificial Sequence
  LRRK2 RNA guide
gcaucugcgaacgcauuguc

SEQ ID NO: 5383 - RNA, 20 nt, Artificial Sequence
  LRRK2 RNA guide
gcgaacgcauugucaacucu

SEQ ID NO: 5384 - RNA, 20 nt, Artificial Sequence
  LRRK2 RNA guide
gcguucgcagaugccuggaa

SEQ ID NO: 5385 - RNA, 20 nt, Artificial Sequence
  LRRK2 RNA guide
ggcaucugcgaacgcauugu

SEQ ID NO: 5386 - RNA, 20 nt, Artificial Sequence
  LRRK2 RNA guide
guucuaagagaguugacaau

SEQ ID NO: 5387 - RNA, 20 nt, Artificial Sequence
  LRRK2 RNA guide
guugacaaugcguucgcaga

SEQ ID NO: 5388 - RNA, 20 nt, Artificial Sequence
  LRRK2 RNA guide
guuuuccaggcaucugcgaa

SEQ ID NO: 5389 - RNA, 20 nt, Artificial Sequence
  LRRK2 RNA guide
uaagagaguugacaaugcgu

SEQ ID NO: 5390 - RNA, 20 nt, Artificial Sequence
  LRRK2 RNA guide
uccaggcaucugcgaacgca

SEQ ID NO: 5391 - RNA, 20 nt, Artificial Sequence
  LRRK2 RNA guide
ucugcgaacgcauugucaac

SEQ ID NO: 5392 - RNA, 20 nt, Artificial Sequence
  LRRK2 RNA guide
ugacaaugcguucgcagaug

SEQ ID NO: 5393 - RNA, 20 nt, Artificial Sequence
  LRRK2 RNA guide
ugcgaacgcauugucaacuc

SEQ ID NO: 5394 - RNA, 20 nt, Artificial Sequence
  LRRK2 RNA guide
ugcguucgcagaugccugga

SEQ ID NO: 5395 - RNA, 20 nt, Artificial Sequence
  LRRK2 RNA guide
uuccaggcaucugcgaacgc

SEQ ID NO: 5396 - RNA, 20 nt, Artificial Sequence
  LRRK2 RNA guide
uucuaagagaguugacaaug

SEQ ID NO: 5397 - RNA, 20 nt, Artificial Sequence
  LRRK2 RNA guide
uugacaaugcguucgcagau

SEQ ID NO: 5398 - RNA, 20 nt, Artificial Sequence
  LRRK2 RNA guide
uuguucuaagagaguugaca

SEQ ID NO: 5399 - RNA, 20 nt, Artificial Sequence
  LRRK2 RNA guide
uuuccaggcaucugcgaacg

SEQ ID NO: 5400 - RNA, 20 nt, Artificial Sequence
  LRRK2 RNA guide
uuuuccaggcaucugcgaac

SEQ ID NO: 5401 - RNA, 21 nt, Artificial Sequence
  LRRK2 RNA guide
aacgcauugucaacucucuua

SEQ ID NO: 5402 - RNA, 21 nt, Artificial Sequence
  LRRK2 RNA guide
aagagaguugacaaugcguuc

SEQ ID NO: 5403 - RNA, 21 nt, Artificial Sequence
  LRRK2 RNA guide
aaguuuuccaggcaucugcga

SEQ ID NO: 5404 - RNA, 21 nt, Artificial Sequence
  LRRK2 RNA guide
aaugcguucgcagaugccugg

SEQ ID NO: 5405 - RNA, 21 nt, Artificial Sequence
  LRRK2 RNA guide
acaaugcguucgcagaugccu

SEQ ID NO: 5406 - RNA, 21 nt, Artificial Sequence
  LRRK2 RNA guide
acgcauugucaacucucuuag

SEQ ID NO: 5407 - RNA, 21 nt, Artificial Sequence
  LRRK2 RNA guide
agagaguugacaaugcguucg

SEQ ID NO: 5408 - RNA, 21 nt, Artificial Sequence
  LRRK2 RNA guide
agaguugacaaugcguucgca

SEQ ID NO: 5409 - RNA, 21 nt, Artificial Sequence
  LRRK2 RNA guide
aggcaucugcgaacgcauugu

SEQ ID NO: 5410 - RNA, 21 nt, Artificial Sequence
  LRRK2 RNA guide
aguugacaaugcguucgcaga

SEQ ID NO: 5411 - RNA, 21 nt, Artificial Sequence
  LRRK2 RNA guide
aguuuuccaggcaucugcgaa

SEQ ID NO: 5412 - RNA, 21 nt, Artificial Sequence
  LRRK2 RNA guide
aucugcgaacgcauugucaac

SEQ ID NO: 5413 - RNA, 21 nt, Artificial Sequence
  LRRK2 RNA guide
augcguucgcagaugccugga

SEQ ID NO: 5414 - RNA, 21 nt, Artificial Sequence
  LRRK2 RNA guide
caaugcguucgcagaugccug

SEQ ID NO: 5415 - RNA, 21 nt, Artificial Sequence
  LRRK2 RNA guide
caggcaucugcgaacgcauug

SEQ ID NO: 5416 - RNA, 21 nt, Artificial Sequence
  LRRK2 RNA guide
caucugcgaacgcauugucaa

SEQ ID NO: 5417 - RNA, 21 nt, Artificial Sequence
  LRRK2 RNA guide
ccaggcaucugcgaacgcauu

SEQ ID NO: 5418 - RNA, 21 nt, Artificial Sequence
  LRRK2 RNA guide
cgaacgcauugucaacucucu

SEQ ID NO: 5419 - RNA, 21 nt, Artificial Sequence
  LRRK2 RNA guide
cguucgcagaugccuggaaaa

SEQ ID NO: 5420 - RNA, 21 nt, Artificial Sequence
  LRRK2 RNA guide
cuaagagaguugacaaugcgu

SEQ ID NO: 5421 - RNA, 21 nt, Artificial Sequence
  LRRK2 RNA guide
cugcgaacgcauugucaacuc

SEQ ID NO: 5422 - RNA, 21 nt, Artificial Sequence
  LRRK2 RNA guide
gaacgcauugucaacucucuu

SEQ ID NO: 5423 - RNA, 21 nt, Artificial Sequence
  LRRK2 RNA guide
gaaguuuuccaggcaucugcg

SEQ ID NO: 5424 - RNA, 21 nt, Artificial Sequence
  LRRK2 RNA guide
gacaaugcguucgcagaugcc

SEQ ID NO: 5425 - RNA, 21 nt, Artificial Sequence
  LRRK2 RNA guide
gagaguugacaaugcguucgc

SEQ ID NO: 5426 - RNA, 21 nt, Artificial Sequence
  LRRK2 RNA guide
gaguugacaaugcguucgcag

SEQ ID NO: 5427 - RNA, 21 nt, Artificial Sequence
  LRRK2 RNA guide
gcaucugcgaacgcauuguca

SEQ ID NO: 5428 - RNA, 21 nt, Artificial Sequence
  LRRK2 RNA guide
gcgaacgcauugucaacucuc

SEQ ID NO: 5429 - RNA, 21 nt, Artificial Sequence
  LRRK2 RNA guide
gcguucgcagaugccuggaaa

SEQ ID NO: 5430 - RNA, 21 nt, Artificial Sequence
  LRRK2 RNA guide
ggaaguuuuccaggcaucugc

SEQ ID NO: 5431 - RNA, 21 nt, Artificial Sequence
  LRRK2 RNA guide
ggcaucugcgaacgcauuguc

SEQ ID NO: 5432 - RNA, 21 nt, Artificial Sequence
  LRRK2 RNA guide
guucuaagagaguugacaaug

SEQ ID NO: 5433 - RNA, 21 nt, Artificial Sequence
  LRRK2 RNA guide
guugacaaugcguucgcagau

SEQ ID NO: 5434 - RNA, 21 nt, Artificial Sequence
  LRRK2 RNA guide
guuuuccaggcaucugcgaac

SEQ ID NO: 5435 - RNA, 21 nt, Artificial Sequence
  LRRK2 RNA guide
uaagagaguugacaaugcguu

SEQ ID NO: 5436 - RNA, 21 nt, Artificial Sequence
  LRRK2 RNA guide
uccaggcaucugcgaacgcau

SEQ ID NO: 5437 - RNA, 21 nt, Artificial Sequence
  LRRK2 RNA guide
ucuaagagaguugacaaugcg

SEQ ID NO: 5438 - RNA, 21 nt, Artificial Sequence
  LRRK2 RNA guide
ucugcgaacgcauugucaacu

SEQ ID NO: 5439 - RNA, 21 nt, Artificial Sequence
  LRRK2 RNA guide
ugacaaugcguucgcagaugc

SEQ ID NO: 5440 - RNA, 21 nt, Artificial Sequence
  LRRK2 RNA guide
ugcgaacgcauugucaacucu

SEQ ID NO: 5441 - RNA, 21 nt, Artificial Sequence
  LRRK2 RNA guide
ugcguucgcagaugccuggaa

SEQ ID NO: 5442 - RNA, 21 nt, Artificial Sequence
  LRRK2 RNA guide
uguucuaagagaguugacaau

SEQ ID NO: 5443 - RNA, 21 nt, Artificial Sequence
  LRRK2 RNA guide
uuccaggcaucugcgaacgca

SEQ ID NO: 5444 - RNA, 21 nt, Artificial Sequence
  LRRK2 RNA guide
uugacaaugcguucgcagaug

SEQ ID NO: 5445 - RNA, 21 nt, Artificial Sequence
  LRRK2 RNA guide
uuguucuaagagaguugacaa

SEQ ID NO: 5446 - RNA, 21 nt, Artificial Sequence
  LRRK2 RNA guide
uuuccaggcaucugcgaacgc

SEQ ID NO: 5447 - RNA, 21 nt, Artificial Sequence
  LRRK2 RNA guide
uuuguucuaagagaguugaca

SEQ ID NO: 5448 - RNA, 21 nt, Artificial Sequence
  LRRK2 RNA guide
uuuuccaggcaucugcgaacg

SEQ ID NO: 5449 - RNA, 22 nt, Artificial Sequence
  LRRK2 RNA guide
aacgcauugucaacucucuuag

SEQ ID NO: 5450 - RNA, 22 nt, Artificial Sequence
  LRRK2 RNA guide
aagagaguugacaaugcguucg

SEQ ID NO: 5451 - RNA, 22 nt, Artificial Sequence
  LRRK2 RNA guide
aaguuuuccaggcaucugcgaa

SEQ ID NO: 5452 - RNA, 22 nt, Artificial Sequence
  LRRK2 RNA guide
aaugcguucgcagaugccugga

SEQ ID NO: 5453 - RNA, 22 nt, Artificial Sequence
  LRRK2 RNA guide
acaaugcguucgcagaugccug

SEQ ID NO: 5454 - RNA, 22 nt, Artificial Sequence
  LRRK2 RNA guide
acgcauugucaacucucuuaga

SEQ ID NO: 5455 - RNA, 22 nt, Artificial Sequence
  LRRK2 RNA guide
agagaguugacaaugcguucgc

SEQ ID NO: 5456 - RNA, 22 nt, Artificial Sequence
  LRRK2 RNA guide
agaguugacaaugcguucgcag

SEQ ID NO: 5457 - RNA, 22 nt, Artificial Sequence
  LRRK2 RNA guide
aggaaguuuuccaggcaucugc

SEQ ID NO: 5458 - RNA, 22 nt, Artificial Sequence
  LRRK2 RNA guide
aggcaucugcgaacgcauuguc

SEQ ID NO: 5459 - RNA, 22 nt, Artificial Sequence
  LRRK2 RNA guide
aguugacaaugcguucgcagau

SEQ ID NO: 5460 - RNA, 22 nt, Artificial Sequence
  LRRK2 RNA guide
aguuuuccaggcaucugcgaac

SEQ ID NO: 5461 - RNA, 22 nt, Artificial Sequence
  LRRK2 RNA guide
aucugcgaacgcauugucaacu

SEQ ID NO: 5462 - RNA, 22 nt, Artificial Sequence
  LRRK2 RNA guide
augcguucgcagaugccuggaa

SEQ ID NO: 5463 - RNA, 22 nt, Artificial Sequence
  LRRK2 RNA guide
caaugcguucgcagaugccugg

SEQ ID NO: 5464 - RNA, 22 nt, Artificial Sequence
  LRRK2 RNA guide
caggcaucugcgaacgcauugu

SEQ ID NO: 5465 - RNA, 22 nt, Artificial Sequence
  LRRK2 RNA guide
caucugcgaacgcauugucaac

SEQ ID NO: 5466 - RNA, 22 nt, Artificial Sequence
  LRRK2 RNA guide
ccaggcaucugcgaacgcauug

SEQ ID NO: 5467 - RNA, 22 nt, Artificial Sequence
  LRRK2 RNA guide
cgaacgcauugucaacucucuu

SEQ ID NO: 5468 - RNA, 22 nt, Artificial Sequence
  LRRK2 RNA guide
cguucgcagaugccuggaaaac

SEQ ID NO: 5469 - RNA, 22 nt, Artificial Sequence
  LRRK2 RNA guide
cuaagagaguugacaaugcguu

SEQ ID NO: 5470 - RNA, 22 nt, Artificial Sequence
  LRRK2 RNA guide
cugcgaacgcauugucaacucu

SEQ ID NO: 5471 - RNA, 22 nt, Artificial Sequence
  LRRK2 RNA guide
gaacgcauugucaacucucuua

SEQ ID NO: 5472 - RNA, 22 nt, Artificial Sequence
  LRRK2 RNA guide
gaaguuuuccaggcaucugcga

SEQ ID NO: 5473 - RNA, 22 nt, Artificial Sequence
  LRRK2 RNA guide
gacaaugcguucgcagaugccu

SEQ ID NO: 5474 - RNA, 22 nt, Artificial Sequence
  LRRK2 RNA guide
gagaguugacaaugcguucgca

SEQ ID NO: 5475 - RNA, 22 nt, Artificial Sequence
  LRRK2 RNA guide
gaguugacaaugcguucgcaga

SEQ ID NO: 5476 - RNA, 22 nt, Artificial Sequence
  LRRK2 RNA guide
gcaucugcgaacgcauugucaa

SEQ ID NO: 5477 - RNA, 22 nt, Artificial Sequence
  LRRK2 RNA guide
gcgaacgcauugucaacucucu

SEQ ID NO: 5478 - RNA, 22 nt, Artificial Sequence
  LRRK2 RNA guide
gcguucgcagaugccuggaaaa

SEQ ID NO: 5479 - RNA, 22 nt, Artificial Sequence
  LRRK2 RNA guide
ggaaguuuuccaggcaucugcg

SEQ ID NO: 5480 - RNA, 22 nt, Artificial Sequence
  LRRK2 RNA guide
ggcaucugcgaacgcauuguca

SEQ ID NO: 5481 - RNA, 22 nt, Artificial Sequence
  LRRK2 RNA guide
guugacaaugcguucgcagaug

SEQ ID NO: 5482 - RNA, 22 nt, Artificial Sequence
  LRRK2 RNA guide
guuuuccaggcaucugcgaacg

SEQ ID NO: 5483 - RNA, 22 nt, Artificial Sequence
  LRRK2 RNA guide
uaagagaguugacaaugcguuc

SEQ ID NO: 5484 - RNA, 22 nt, Artificial Sequence
  LRRK2 RNA guide
uccaggcaucugcgaacgcauu

SEQ ID NO: 5485 - RNA, 22 nt, Artificial Sequence
  LRRK2 RNA guide
ucuaagagaguugacaaugcgu

SEQ ID NO: 5486 - RNA, 22 nt, Artificial Sequence
  LRRK2 RNA guide
ucugcgaacgcauugucaacuc

SEQ ID NO: 5487 - RNA, 22 nt, Artificial Sequence
  LRRK2 RNA guide
ugacaaugcguucgcagaugcc

SEQ ID NO: 5488 - RNA, 22 nt, Artificial Sequence
  LRRK2 RNA guide
ugcgaacgcauugucaacucuc

SEQ ID NO: 5489 - RNA, 22 nt, Artificial Sequence
  LRRK2 RNA guide
ugcguucgcagaugccuggaaa

SEQ ID NO: 5490 - RNA, 22 nt, Artificial Sequence
  LRRK2 RNA guide
uguucuaagagaguugacaaug

SEQ ID NO: 5491 - RNA, 22 nt, Artificial Sequence
  LRRK2 RNA guide
uuccaggcaucugcgaacgcau

SEQ ID NO: 5492 - RNA, 22 nt, Artificial Sequence
  LRRK2 RNA guide
uucuaagagaguugacaaugcg

SEQ ID NO: 5493 - RNA, 22 nt, Artificial Sequence
  LRRK2 RNA guide
uugacaaugcguucgcagaugc

SEQ ID NO: 5494 - RNA, 22 nt, Artificial Sequence
  LRRK2 RNA guide
uuguucuaagagaguugacaau

SEQ ID NO: 5495 - RNA, 22 nt, Artificial Sequence
  LRRK2 RNA guide
uuuccaggcaucugcgaacgca

SEQ ID NO: 5496 - RNA, 22 nt, Artificial Sequence
  LRRK2 RNA guide
uuuguucuaagagaguugacaa

SEQ ID NO: 5497 - RNA, 22 nt, Artificial Sequence
  LRRK2 RNA guide
uuuuccaggcaucugcgaacgc

SEQ ID NO: 5498 - RNA, 22 nt, Artificial Sequence
  LRRK2 RNA guide
uuuuguucuaagagaguugaca

SEQ ID NO: 5499 - RNA, 20 nt, Artificial Sequence
  LRRK2 RNA guide
aaaacauggcccacugcuua

SEQ ID NO: 5500 - RNA, 20 nt, Artificial Sequence
  LRRK2 RNA guide
aaaauaguaagcagugggcc

SEQ ID NO: 5501 - RNA, 20 nt, Artificial Sequence
  LRRK2 RNA guide
aaacauggcccacugcuuac

SEQ ID NO: 5502 - RNA, 20 nt, Artificial Sequence
  LRRK2 RNA guide
aaauaguaagcagugggcca

SEQ ID NO: 5503 - RNA, 20 nt, Artificial Sequence
  LRRK2 RNA guide
aacaaaauaguaagcagugg

SEQ ID NO: 5504 - RNA, 20 nt, Artificial Sequence
  LRRK2 RNA guide
aacauggcccacugcuuacu

SEQ ID NO: 5505 - RNA, 20 nt, Artificial Sequence
  LRRK2 RNA guide
aauaguaagcagugggccau

SEQ ID NO: 5506 - RNA, 20 nt, Artificial Sequence
  LRRK2 RNA guide
acaaaauaguaagcaguggg

SEQ ID NO: 5507 - RNA, 20 nt, Artificial Sequence
  LRRK2 RNA guide
acauggcccacugcuuacua

SEQ ID NO: 5508 - RNA, 20 nt, Artificial Sequence
  LRRK2 RNA guide
acuauuuuguucuaagagag

SEQ ID NO: 5509 - RNA, 20 nt, Artificial Sequence
  LRRK2 RNA guide
acucucuuagaacaaaauag

SEQ ID NO: 5510 - RNA, 20 nt, Artificial Sequence
  LRRK2 RNA guide
acugcuuacuauuuuguucu

SEQ ID NO: 5511 - RNA, 20 nt, Artificial Sequence
  LRRK2 RNA guide
agaacaaaauaguaagcagu

SEQ ID NO: 5512 - RNA, 20 nt, Artificial Sequence
  LRRK2 RNA guide
auaguaagcagugggccaug

SEQ ID NO: 5513 - RNA, 20 nt, Artificial Sequence
  LRRK2 RNA guide
auggcccacugcuuacuauu

SEQ ID NO: 5514 - RNA, 20 nt, Artificial Sequence
  LRRK2 RNA guide
caaaauaguaagcagugggc

SEQ ID NO: 5515 - RNA, 20 nt, Artificial Sequence
  LRRK2 RNA guide
caacucucuuagaacaaaau

SEQ ID NO: 5516 - RNA, 20 nt, Artificial Sequence
  LRRK2 RNA guide
cacugcuuacuauuuuguuc

SEQ ID NO: 5517 - RNA, 20 nt, Artificial Sequence
  LRRK2 RNA guide
cauggcccacugcuuacuau

SEQ ID NO: 5518 - RNA, 20 nt, Artificial Sequence
  LRRK2 RNA guide
ccacugcuuacuauuuuguu

SEQ ID NO: 5519 - RNA, 20 nt, Artificial Sequence
  LRRK2 RNA guide
cccacugcuuacuauuuugu

SEQ ID NO: 5520 - RNA, 20 nt, Artificial Sequence
  LRRK2 RNA guide
cuauuuuguucuaagagagu

SEQ ID NO: 5521 - RNA, 20 nt, Artificial Sequence
  LRRK2 RNA guide
cucucuuagaacaaaauagu

SEQ ID NO: 5522 - RNA, 20 nt, Artificial Sequence
  LRRK2 RNA guide
cugcuuacuauuuuguucua

SEQ ID NO: 5523 - RNA, 20 nt, Artificial Sequence
  LRRK2 RNA guide
cuuagaacaaaauaguaagc

SEQ ID NO: 5524 - RNA, 20 nt, Artificial Sequence
  LRRK2 RNA guide
gaaaacauggcccacugcuu

SEQ ID NO: 5525 - RNA, 20 nt, Artificial Sequence
  LRRK2 RNA guide
gaacaaaauaguaagcagug

SEQ ID NO: 5526 - RNA, 20 nt, Artificial Sequence
  LRRK2 RNA guide
gcccacugcuuacuauuuug

SEQ ID NO: 5527 - RNA, 20 nt, Artificial Sequence
  LRRK2 RNA guide
gcuuacuauuuuguucuaag

SEQ ID NO: 5528 - RNA, 20 nt, Artificial Sequence
  LRRK2 RNA guide
ggcccacugcuuacuauuuu

SEQ ID NO: 5529 - RNA, 20 nt, Artificial Sequence
  LRRK2 RNA guide
gucaacucucuuagaacaaa

SEQ ID NO: 5530 - RNA, 20 nt, Artificial Sequence
  LRRK2 RNA guide
uagaacaaaauaguaagcag

SEQ ID NO: 5531 - RNA, 20 nt, Artificial Sequence
  LRRK2 RNA guide
uaguaagcagugggccaugu

SEQ ID NO: 5532 - RNA, 20 nt, Artificial Sequence
  LRRK2 RNA guide
ucaacucucuuagaacaaaa

SEQ ID NO: 5533 - RNA, 20 nt, Artificial Sequence
  LRRK2 RNA guide
ugaaaacauggcccacugcu

SEQ ID NO: 5534 - RNA, 20 nt, Artificial Sequence
  LRRK2 RNA guide
uggcccacugcuuacuauuu

SEQ ID NO: 5535 - RNA, 20 nt, Artificial Sequence
  LRRK2 RNA guide
ugucaacucucuuagaacaa

SEQ ID NO: 5536 - RNA, 20 nt, Artificial Sequence
  LRRK2 RNA guide
uugaaaacauggcccacugc

SEQ ID NO: 5537 - RNA, 20 nt, Artificial Sequence
  LRRK2 RNA guide
uugucaacucucuuagaaca

SEQ ID NO: 5538 - RNA, 21 nt, Artificial Sequence
  LRRK2 RNA guide
aaaacauggcccacugcuuac

SEQ ID NO: 5539 - RNA, 21 nt, Artificial Sequence
  LRRK2 RNA guide
aaaauaguaagcagugggcca

SEQ ID NO: 5540 - RNA, 21 nt, Artificial Sequence
  LRRK2 RNA guide
aaacauggcccacugcuuacu

SEQ ID NO: 5541 - RNA, 21 nt, Artificial Sequence
  LRRK2 RNA guide
aaauaguaagcagugggccau

SEQ ID NO: 5542 - RNA, 21 nt, Artificial Sequence
  LRRK2 RNA guide
aacaaaauaguaagcaguggg

SEQ ID NO: 5543 - RNA, 21 nt, Artificial Sequence
  LRRK2 RNA guide
aacauggcccacugcuuacua

SEQ ID NO: 5544 - RNA, 21 nt, Artificial Sequence
  LRRK2 RNA guide
aauaguaagcagugggccaug

SEQ ID NO: 5545 - RNA, 21 nt, Artificial Sequence
  LRRK2 RNA guide
acaaaauaguaagcagugggc

SEQ ID NO: 5546 - RNA, 21 nt, Artificial Sequence
  LRRK2 RNA guide
acauggcccacugcuuacuau

SEQ ID NO: 5547 - RNA, 21 nt, Artificial Sequence
  LRRK2 RNA guide
agaacaaaauaguaagcagug

SEQ ID NO: 5548 - RNA, 21 nt, Artificial Sequence
  LRRK2 RNA guide
auaguaagcagugggccaugu

SEQ ID NO: 5549 - RNA, 21 nt, Artificial Sequence
  LRRK2 RNA guide
auggcccacugcuuacuauuu

SEQ ID NO: 5550 - RNA, 21 nt, Artificial Sequence
  LRRK2 RNA guide
auugucaacucucuuagaaca

SEQ ID NO: 5551 - RNA, 21 nt, Artificial Sequence
  LRRK2 RNA guide
caaaauaguaagcagugggcc

SEQ ID NO: 5552 - RNA, 21 nt, Artificial Sequence
  LRRK2 RNA guide
cacugcuuacuauuuuguucu

SEQ ID NO: 5553 - RNA, 21 nt, Artificial Sequence
  LRRK2 RNA guide
cauggcccacugcuuacuauu

SEQ ID NO: 5554 - RNA, 21 nt, Artificial Sequence
  LRRK2 RNA guide
ccacugcuuacuauuuuguuc

SEQ ID NO: 5555 - RNA, 21 nt, Artificial Sequence
  LRRK2 RNA guide
cccacugcuuacuauuuuguu

SEQ ID NO: 5556 - RNA, 21 nt, Artificial Sequence
  LRRK2 RNA guide
gaaaacauggcccacugcuua

SEQ ID NO: 5557 - RNA, 21 nt, Artificial Sequence
  LRRK2 RNA guide
gaacaaaauaguaagcagugg

SEQ ID NO: 5558 - RNA, 21 nt, Artificial Sequence
  LRRK2 RNA guide
gcccacugcuuacuauuuugu

SEQ ID NO: 5559 - RNA, 21 nt, Artificial Sequence
  LRRK2 RNA guide
ggcccacugcuuacuauuuug

SEQ ID NO: 5560 - RNA, 21 nt, Artificial Sequence
  LRRK2 RNA guide
gucaacucucuuagaacaaaa

SEQ ID NO: 5561 - RNA, 21 nt, Artificial Sequence
  LRRK2 RNA guide
uaguaagcagugggccauguu

SEQ ID NO: 5562 - RNA, 21 nt, Artificial Sequence
  LRRK2 RNA guide
ugaaaacauggcccacugcuu

SEQ ID NO: 5563 - RNA, 21 nt, Artificial Sequence
  LRRK2 RNA guide
uggcccacugcuuacuauuuu

SEQ ID NO: 5564 - RNA, 21 nt, Artificial Sequence
  LRRK2 RNA guide
ugucaacucucuuagaacaaa

SEQ ID NO: 5565 - RNA, 21 nt, Artificial Sequence
  LRRK2 RNA guide
uugaaaacauggcccacugcu

SEQ ID NO: 5566 - RNA, 21 nt, Artificial Sequence
  LRRK2 RNA guide
uugucaacucucuuagaacaa

SEQ ID NO: 5567 - RNA, 21 nt, Artificial Sequence
  LRRK2 RNA guide
uuugaaaacauggcccacugc

SEQ ID NO: 5568 - RNA, 22 nt, Artificial Sequence
  LRRK2 RNA guide
aaaacauggcccacugcuuacu

SEQ ID NO: 5569 - RNA, 22 nt, Artificial Sequence
  LRRK2 RNA guide
aaaauaguaagcagugggccau

SEQ ID NO: 5570 - RNA, 22 nt, Artificial Sequence
  LRRK2 RNA guide
aaacauggcccacugcuuacua

SEQ ID NO: 5571 - RNA, 22 nt, Artificial Sequence
  LRRK2 RNA guide
aaauaguaagcagugggccaug

SEQ ID NO: 5572 - RNA, 22 nt, Artificial Sequence
  LRRK2 RNA guide
aacaaaauaguaagcagugggc

SEQ ID NO: 5573 - RNA, 22 nt, Artificial Sequence
  LRRK2 RNA guide
aacauggcccacugcuuacuau

SEQ ID NO: 5574 - RNA, 22 nt, Artificial Sequence
  LRRK2 RNA guide
aauaguaagcagugggccaugu

SEQ ID NO: 5575 - RNA, 22 nt, Artificial Sequence
  LRRK2 RNA guide
acaaaauaguaagcagugggcc

SEQ ID NO: 5576 - RNA, 22 nt, Artificial Sequence
  LRRK2 RNA guide
acauggcccacugcuuacuauu

SEQ ID NO: 5577 - RNA, 22 nt, Artificial Sequence
  LRRK2 RNA guide
agaacaaaauaguaagcagugg

SEQ ID NO: 5578 - RNA, 22 nt, Artificial Sequence
  LRRK2 RNA guide
auaguaagcagugggccauguu

SEQ ID NO: 5579 - RNA, 22 nt, Artificial Sequence
  LRRK2 RNA guide
auggcccacugcuuacuauuuu

SEQ ID NO: 5580 - RNA, 22 nt, Artificial Sequence
  LRRK2 RNA guide
auugucaacucucuuagaacaa

SEQ ID NO: 5581 - RNA, 22 nt, Artificial Sequence
  LRRK2 RNA guide
auuugaaaacauggcccacugc

SEQ ID NO: 5582 - RNA, 22 nt, Artificial Sequence
  LRRK2 RNA guide
caaaauaguaagcagugggcca

SEQ ID NO: 5583 - RNA, 22 nt, Artificial Sequence
  LRRK2 RNA guide
caacucucuuagaacaaaauag

SEQ ID NO: 5584 - RNA, 22 nt, Artificial Sequence
  LRRK2 RNA guide
cacugcuuacuauuuuguucua

SEQ ID NO: 5585 - RNA, 22 nt, Artificial Sequence
  LRRK2 RNA guide
cauggcccacugcuuacuauuu

SEQ ID NO: 5586 - RNA, 22 nt, Artificial Sequence
  LRRK2 RNA guide
cauugucaacucucuuagaaca

SEQ ID NO: 5587 - RNA, 22 nt, Artificial Sequence
  LRRK2 RNA guide
ccacugcuuacuauuuuguucu

SEQ ID NO: 5588 - RNA, 22 nt, Artificial Sequence
  LRRK2 RNA guide
cccacugcuuacuauuuuguuc

SEQ ID NO: 5589 - RNA, 22 nt, Artificial Sequence
  LRRK2 RNA guide
cuauuuuguucuaagagaguug

SEQ ID NO: 5590 - RNA, 22 nt, Artificial Sequence
  LRRK2 RNA guide
cucuuagaacaaaauaguaagc

SEQ ID NO: 5591 - RNA, 22 nt, Artificial Sequence
  LRRK2 RNA guide
cugcuuacuauuuuguucuaag

SEQ ID NO: 5592 - RNA, 22 nt, Artificial Sequence
  LRRK2 RNA guide
cuuagaacaaaauaguaagcag

SEQ ID NO: 5593 - RNA, 22 nt, Artificial Sequence
  LRRK2 RNA guide
gaaaacauggcccacugcuuac

SEQ ID NO: 5594 - RNA, 22 nt, Artificial Sequence
  LRRK2 RNA guide
gaacaaaauaguaagcaguggg

SEQ ID NO: 5595 - RNA, 22 nt, Artificial Sequence
  LRRK2 RNA guide
gcccacugcuuacuauuuuguu

SEQ ID NO: 5596 - RNA, 22 nt, Artificial Sequence
  LRRK2 RNA guide
gcuuacuauuuuguucuaagag

SEQ ID NO: 5597 - RNA, 22 nt, Artificial Sequence
  LRRK2 RNA guide
ggcccacugcuuacuauuuugu

SEQ ID NO: 5598 - RNA, 22 nt, Artificial Sequence
  LRRK2 RNA guide
gucaacucucuuagaacaaaau

SEQ ID NO: 5599 - RNA, 22 nt, Artificial Sequence
  LRRK2 RNA guide
uagaacaaaauaguaagcagug

SEQ ID NO: 5600 - RNA, 22 nt, Artificial Sequence
  LRRK2 RNA guide
uaguaagcagugggccauguuu

SEQ ID NO: 5601 - RNA, 22 nt, Artificial Sequence
  LRRK2 RNA guide
uggcccacugcuuacuauuuug

SEQ ID NO: 5602 - RNA, 22 nt, Artificial Sequence
  LRRK2 RNA guide
ugucaacucucuuagaacaaaa

SEQ ID NO: 5603 - RNA, 22 nt, Artificial Sequence
  LRRK2 RNA guide
uugaaaacauggcccacugcuu

SEQ ID NO: 5604 - RNA, 22 nt, Artificial Sequence
  LRRK2 RNA guide
uugucaacucucuuagaacaaa

SEQ ID NO: 5605 - RNA, 22 nt, Artificial Sequence
  LRRK2 RNA guide
uuugaaaacauggcccacugcu

SEQ ID NO: 5606 - RNA, 20 nt, Artificial Sequence
  LRRK2 RNA guide
aaugcagaggcauauacauu

SEQ ID NO: 5607 - RNA, 20 nt, Artificial Sequence
  LRRK2 RNA guide
aauguauaugccucugcauu

SEQ ID NO: 5608 - RNA, 20 nt, Artificial Sequence
  LRRK2 RNA guide
aauguuuuggaguuaaugca

SEQ ID NO: 5609 - RNA, 20 nt, Artificial Sequence
  LRRK2 RNA guide
agaauguauaugccucugca

SEQ ID NO: 5610 - RNA, 20 nt, Artificial Sequence
  LRRK2 RNA guide
agaggcauauacauucuccu

SEQ ID NO: 5611 - RNA, 20 nt, Artificial Sequence
  LRRK2 RNA guide
aggagaauguauaugccucu

SEQ ID NO: 5612 - RNA, 20 nt, Artificial Sequence
  LRRK2 RNA guide
aggcauauacauucuccuga

SEQ ID NO: 5613 - RNA, 20 nt, Artificial Sequence
  LRRK2 RNA guide
aguuaaugcagaggcauaua

SEQ ID NO: 5614 - RNA, 20 nt, Artificial Sequence
  LRRK2 RNA guide
auaugccucugcauuaacuc

SEQ ID NO: 5615 - RNA, 20 nt, Artificial Sequence
  LRRK2 RNA guide
augcagaggcauauacauuc

SEQ ID NO: 5616 - RNA, 20 nt, Artificial Sequence
  LRRK2 RNA guide
augccucugcauuaacucca

SEQ ID NO: 5617 - RNA, 20 nt, Artificial Sequence
  LRRK2 RNA guide
auguauaugccucugcauua

SEQ ID NO: 5618 - RNA, 20 nt, Artificial Sequence
  LRRK2 RNA guide
auguuuuggaguuaaugcag

SEQ ID NO: 5619 - RNA, 20 nt, Artificial Sequence
  LRRK2 RNA guide
cagaggcauauacauucucc

SEQ ID NO: 5620 - RNA, 20 nt, Artificial Sequence
  LRRK2 RNA guide
caggagaauguauaugccuc

SEQ ID NO: 5621 - RNA, 20 nt, Artificial Sequence
  LRRK2 RNA guide
ccucugcauuaacuccaaaa

SEQ ID NO: 5622 - RNA, 20 nt, Artificial Sequence
  LRRK2 RNA guide
gaauguauaugccucugcau

SEQ ID NO: 5623 - RNA, 20 nt, Artificial Sequence
  LRRK2 RNA guide
gaauguuuuggaguuaaugc

SEQ ID NO: 5624 - RNA, 20 nt, Artificial Sequence
  LRRK2 RNA guide
gagaauguauaugccucugc

SEQ ID NO: 5625 - RNA, 20 nt, Artificial Sequence
  LRRK2 RNA guide
gaggcauauacauucuccug

SEQ ID NO: 5626 - RNA, 20 nt, Artificial Sequence
  LRRK2 RNA guide
gaguuaaugcagaggcauau

SEQ ID NO: 5627 - RNA, 20 nt, Artificial Sequence
  LRRK2 RNA guide
gcagaggcauauacauucuc

SEQ ID NO: 5628 - RNA, 20 nt, Artificial Sequence
  LRRK2 RNA guide
gccucugcauuaacuccaaa

SEQ ID NO: 5629 - RNA, 20 nt, Artificial Sequence
  LRRK2 RNA guide
ggagaauguauaugccucug

SEQ ID NO: 5630 - RNA, 20 nt, Artificial Sequence
  LRRK2 RNA guide
ggaguuaaugcagaggcaua

SEQ ID NO: 5631 - RNA, 20 nt, Artificial Sequence
  LRRK2 RNA guide
guauaugccucugcauuaac

SEQ ID NO: 5632 - RNA, 20 nt, Artificial Sequence
  LRRK2 RNA guide
guuaaugcagaggcauauac

SEQ ID NO: 5633 - RNA, 20 nt, Artificial Sequence
  LRRK2 RNA guide
guuuuggaguuaaugcagag

SEQ ID NO: 5634 - RNA, 20 nt, Artificial Sequence
  LRRK2 RNA guide
uaaugcagaggcauauacau

SEQ ID NO: 5635 - RNA, 20 nt, Artificial Sequence
  LRRK2 RNA guide
uauaugccucugcauuaacu

SEQ ID NO: 5636 - RNA, 20 nt, Artificial Sequence
  LRRK2 RNA guide
uaugccucugcauuaacucc

SEQ ID NO: 5637 - RNA, 20 nt, Artificial Sequence
  LRRK2 RNA guide
ucaggagaauguauaugccu

SEQ ID NO: 5638 - RNA, 20 nt, Artificial Sequence
  LRRK2 RNA guide
ugaauguuuuggaguuaaug

SEQ ID NO: 5639 - RNA, 20 nt, Artificial Sequence
  LRRK2 RNA guide
ugcagaggcauauacauucu

SEQ ID NO: 5640 - RNA, 20 nt, Artificial Sequence
  LRRK2 RNA guide
ugccucugcauuaacuccaa

SEQ ID NO: 5641 - RNA, 20 nt, Artificial Sequence
  LRRK2 RNA guide
uggaguuaaugcagaggcau

SEQ ID NO: 5642 - RNA, 20 nt, Artificial Sequence
  LRRK2 RNA guide
uguauaugccucugcauuaa

SEQ ID NO: 5643 - RNA, 20 nt, Artificial Sequence
  LRRK2 RNA guide
uguuuuggaguuaaugcaga

SEQ ID NO: 5644 - RNA, 20 nt, Artificial Sequence
  LRRK2 RNA guide
uuaaugcagaggcauauaca

SEQ ID NO: 5645 - RNA, 20 nt, Artificial Sequence
  LRRK2 RNA guide
uucaggagaauguauaugcc

SEQ ID NO: 5646 - RNA, 20 nt, Artificial Sequence
  LRRK2 RNA guide
uuggaguuaaugcagaggca

SEQ ID NO: 5647 - RNA, 20 nt, Artificial Sequence
  LRRK2 RNA guide
uuuggaguuaaugcagaggc

SEQ ID NO: 5648 - RNA, 20 nt, Artificial Sequence
  LRRK2 RNA guide
uuuuggaguuaaugcagagg

SEQ ID NO: 5649 - RNA, 21 nt, Artificial Sequence
  LRRK2 RNA guide
aaugcagaggcauauacauuc

SEQ ID NO: 5650 - RNA, 21 nt, Artificial Sequence
  LRRK2 RNA guide
aauguauaugccucugcauua

SEQ ID NO: 5651 - RNA, 21 nt, Artificial Sequence
  LRRK2 RNA guide
aauguuuuggaguuaaugcag

SEQ ID NO: 5652 - RNA, 21 nt, Artificial Sequence
  LRRK2 RNA guide
acuucaggagaauguauaugc

SEQ ID NO: 5653 - RNA, 21 nt, Artificial Sequence
  LRRK2 RNA guide
agaauguauaugccucugcau

SEQ ID NO: 5654 - RNA, 21 nt, Artificial Sequence
  LRRK2 RNA guide
agaggcauauacauucuccug

SEQ ID NO: 5655 - RNA, 21 nt, Artificial Sequence
  LRRK2 RNA guide
agccacuucaggagaauguau

SEQ ID NO: 5656 - RNA, 21 nt, Artificial Sequence
  LRRK2 RNA guide
aggagaauguauaugccucug

SEQ ID NO: 5657 - RNA, 21 nt, Artificial Sequence
  LRRK2 RNA guide
aggcauauacauucuccugaa

SEQ ID NO: 5658 - RNA, 21 nt, Artificial Sequence
  LRRK2 RNA guide
aguuaaugcagaggcauauac

SEQ ID NO: 5659 - RNA, 21 nt, Artificial Sequence
  LRRK2 RNA guide
auaugccucugcauuaacucc

SEQ ID NO: 5660 - RNA, 21 nt, Artificial Sequence
  LRRK2 RNA guide
augcagaggcauauacauucu

SEQ ID NO: 5661 - RNA, 21 nt, Artificial Sequence
  LRRK2 RNA guide
augccucugcauuaacuccaa

SEQ ID NO: 5662 - RNA, 21 nt, Artificial Sequence
  LRRK2 RNA guide
auguauaugccucugcauuaa

SEQ ID NO: 5663 - RNA, 21 nt, Artificial Sequence
  LRRK2 RNA guide
auguuuuggaguuaaugcaga

SEQ ID NO: 5664 - RNA, 21 nt, Artificial Sequence
  LRRK2 RNA guide
cacuucaggagaauguauaug

SEQ ID NO: 5665 - RNA, 21 nt, Artificial Sequence
  LRRK2 RNA guide
cagaggcauauacauucuccu

SEQ ID NO: 5666 - RNA, 21 nt, Artificial Sequence
  LRRK2 RNA guide
caggagaauguauaugccucu

SEQ ID NO: 5667 - RNA, 21 nt, Artificial Sequence
  LRRK2 RNA guide
ccacuucaggagaauguauau

SEQ ID NO: 5668 - RNA, 21 nt, Artificial Sequence
  LRRK2 RNA guide
ccucugcauuaacuccaaaac

SEQ ID NO: 5669 - RNA, 21 nt, Artificial Sequence
  LRRK2 RNA guide
cugaauguuuuggaguuaaug

SEQ ID NO: 5670 - RNA, 21 nt, Artificial Sequence
  LRRK2 RNA guide
cuucaggagaauguauaugcc

SEQ ID NO: 5671 - RNA, 21 nt, Artificial Sequence
  LRRK2 RNA guide
gaauguauaugccucugcauu

SEQ ID NO: 5672 - RNA, 21 nt, Artificial Sequence
  LRRK2 RNA guide
gaauguuuuggaguuaaugca

SEQ ID NO: 5673 - RNA, 21 nt, Artificial Sequence
  LRRK2 RNA guide
gagaauguauaugccucugca

SEQ ID NO: 5674 - RNA, 21 nt, Artificial Sequence
  LRRK2 RNA guide
gaggcauauacauucuccuga

SEQ ID NO: 5675 - RNA, 21 nt, Artificial Sequence
  LRRK2 RNA guide
gaguuaaugcagaggcauaua

SEQ ID NO: 5676 - RNA, 21 nt, Artificial Sequence
  LRRK2 RNA guide
gcagaggcauauacauucucc

SEQ ID NO: 5677 - RNA, 21 nt, Artificial Sequence
  LRRK2 RNA guide
gccacuucaggagaauguaua

SEQ ID NO: 5678 - RNA, 21 nt, Artificial Sequence
  LRRK2 RNA guide
gccucugcauuaacuccaaaa

SEQ ID NO: 5679 - RNA, 21 nt, Artificial Sequence
  LRRK2 RNA guide
ggagaauguauaugccucugc

SEQ ID NO: 5680 - RNA, 21 nt, Artificial Sequence
  LRRK2 RNA guide
ggaguuaaugcagaggcauau

SEQ ID NO: 5681 - RNA, 21 nt, Artificial Sequence
  LRRK2 RNA guide
guauaugccucugcauuaacu

SEQ ID NO: 5682 - RNA, 21 nt, Artificial Sequence
  LRRK2 RNA guide
guuaaugcagaggcauauaca

SEQ ID NO: 5683 - RNA, 21 nt, Artificial Sequence
  LRRK2 RNA guide
guuuuggaguuaaugcagagg

SEQ ID NO: 5684 - RNA, 21 nt, Artificial Sequence
  LRRK2 RNA guide
uaaugcagaggcauauacauu

SEQ ID NO: 5685 - RNA, 21 nt, Artificial Sequence
  LRRK2 RNA guide
uauaugccucugcauuaacuc

SEQ ID NO: 5686 - RNA, 21 nt, Artificial Sequence
  LRRK2 RNA guide
uaugccucugcauuaacucca

SEQ ID NO: 5687 - RNA, 21 nt, Artificial Sequence
  LRRK2 RNA guide
ucaggagaauguauaugccuc

SEQ ID NO: 5688 - RNA, 21 nt, Artificial Sequence
  LRRK2 RNA guide
ugaauguuuuggaguuaaugc

SEQ ID NO: 5689 - RNA, 21 nt, Artificial Sequence
  LRRK2 RNA guide
ugcagaggcauauacauucuc

SEQ ID NO: 5690 - RNA, 21 nt, Artificial Sequence
  LRRK2 RNA guide
ugccucugcauuaacuccaaa

SEQ ID NO: 5691 - RNA, 21 nt, Artificial Sequence
  LRRK2 RNA guide
uggaguuaaugcagaggcaua

SEQ ID NO: 5692 - RNA, 21 nt, Artificial Sequence
  LRRK2 RNA guide
uguauaugccucugcauuaac

SEQ ID NO: 5693 - RNA, 21 nt, Artificial Sequence
  LRRK2 RNA guide
uguuuuggaguuaaugcagag

SEQ ID NO: 5694 - RNA, 21 nt, Artificial Sequence
  LRRK2 RNA guide
uuaaugcagaggcauauacau

SEQ ID NO: 5695 - RNA, 21 nt, Artificial Sequence
  LRRK2 RNA guide
uucaggagaauguauaugccu

SEQ ID NO: 5696 - RNA, 21 nt, Artificial Sequence
  LRRK2 RNA guide
uuggaguuaaugcagaggcau

SEQ ID NO: 5697 - RNA, 21 nt, Artificial Sequence
  LRRK2 RNA guide
uuuggaguuaaugcagaggca

SEQ ID NO: 5698 - RNA, 21 nt, Artificial Sequence
  LRRK2 RNA guide
uuuuggaguuaaugcagaggc

SEQ ID NO: 5699 - RNA, 22 nt, Artificial Sequence
  LRRK2 RNA guide
aaugcagaggcauauacauucu

SEQ ID NO: 5700 - RNA, 22 nt, Artificial Sequence
  LRRK2 RNA guide
aauguauaugccucugcauuaa

SEQ ID NO: 5701 - RNA, 22 nt, Artificial Sequence
  LRRK2 RNA guide
aauguuuuggaguuaaugcaga

SEQ ID NO: 5702 - RNA, 22 nt, Artificial Sequence
  LRRK2 RNA guide
acuucaggagaauguauaugcc

SEQ ID NO: 5703 - RNA, 22 nt, Artificial Sequence
  LRRK2 RNA guide
agaauguauaugccucugcauu

SEQ ID NO: 5704 - RNA, 22 nt, Artificial Sequence
  LRRK2 RNA guide
agaggcauauacauucuccuga

SEQ ID NO: 5705 - RNA, 22 nt, Artificial Sequence
  LRRK2 RNA guide
agccacuucaggagaauguaua

SEQ ID NO: 5706 - RNA, 22 nt, Artificial Sequence
  LRRK2 RNA guide
aggagaauguauaugccucugc

SEQ ID NO: 5707 - RNA, 22 nt, Artificial Sequence
  LRRK2 RNA guide
aggcauauacauucuccugaag

SEQ ID NO: 5708 - RNA, 22 nt, Artificial Sequence
  LRRK2 RNA guide
aguuaaugcagaggcauauaca

SEQ ID NO: 5709 - RNA, 22 nt, Artificial Sequence
  LRRK2 RNA guide
auaugccucugcauuaacucca

SEQ ID NO: 5710 - RNA, 22 nt, Artificial Sequence
  LRRK2 RNA guide
augcagaggcauauacauucuc

SEQ ID NO: 5711 - RNA, 22 nt, Artificial Sequence
  LRRK2 RNA guide
augccucugcauuaacuccaaa

SEQ ID NO: 5712 - RNA, 22 nt, Artificial Sequence
  LRRK2 RNA guide
auguauaugccucugcauuaac

SEQ ID NO: 5713 - RNA, 22 nt, Artificial Sequence
  LRRK2 RNA guide
auguuuuggaguuaaugcagag

SEQ ID NO: 5714 - RNA, 22 nt, Artificial Sequence
  LRRK2 RNA guide
cacuucaggagaauguauaugc

SEQ ID NO: 5715 - RNA, 22 nt, Artificial Sequence
  LRRK2 RNA guide
cagaggcauauacauucuccug

SEQ ID NO: 5716 - RNA, 22 nt, Artificial Sequence
  LRRK2 RNA guide
cagccacuucaggagaauguau

SEQ ID NO: 5717 - RNA, 22 nt, Artificial Sequence
  LRRK2 RNA guide
caggagaauguauaugccucug

SEQ ID NO: 5718 - RNA, 22 nt, Artificial Sequence
  LRRK2 RNA guide
ccacuucaggagaauguauaug

SEQ ID NO: 5719 - RNA, 22 nt, Artificial Sequence
  LRRK2 RNA guide
ccucugcauuaacuccaaaaca

SEQ ID NO: 5720 - RNA, 22 nt, Artificial Sequence
  LRRK2 RNA guide
ccugaauguuuuggaguuaaug

SEQ ID NO: 5721 - RNA, 22 nt, Artificial Sequence
  LRRK2 RNA guide
cugaauguuuuggaguuaaugc

SEQ ID NO: 5722 - RNA, 22 nt, Artificial Sequence
  LRRK2 RNA guide
cuucaggagaauguauaugccu

SEQ ID NO: 5723 - RNA, 22 nt, Artificial Sequence
  LRRK2 RNA guide
gaauguauaugccucugcauua

SEQ ID NO: 5724 - RNA, 22 nt, Artificial Sequence
  LRRK2 RNA guide
gaauguuuuggaguuaaugcag

SEQ ID NO: 5725 - RNA, 22 nt, Artificial Sequence
  LRRK2 RNA guide
gagaauguauaugccucugcau

SEQ ID NO: 5726 - RNA, 22 nt, Artificial Sequence
  LRRK2 RNA guide
gaggcauauacauucuccugaa

SEQ ID NO: 5727 - RNA, 22 nt, Artificial Sequence
  LRRK2 RNA guide
gaguuaaugcagaggcauauac

SEQ ID NO: 5728 - RNA, 22 nt, Artificial Sequence
  LRRK2 RNA guide
gcagaggcauauacauucuccu

SEQ ID NO: 5729 - RNA, 22 nt, Artificial Sequence
  LRRK2 RNA guide
gccacuucaggagaauguauau

SEQ ID NO: 5730 - RNA, 22 nt, Artificial Sequence
  LRRK2 RNA guide
gccucugcauuaacuccaaaac

SEQ ID NO: 5731 - RNA, 22 nt, Artificial Sequence
  LRRK2 RNA guide
ggagaauguauaugccucugca

SEQ ID NO: 5732 - RNA, 22 nt, Artificial Sequence
  LRRK2 RNA guide
ggaguuaaugcagaggcauaua

SEQ ID NO: 5733 - RNA, 22 nt, Artificial Sequence
  LRRK2 RNA guide
guauaugccucugcauuaacuc

SEQ ID NO: 5734 - RNA, 22 nt, Artificial Sequence
  LRRK2 RNA guide
guuaaugcagaggcauauacau

SEQ ID NO: 5735 - RNA, 22 nt, Artificial Sequence
  LRRK2 RNA guide
guuuuggaguuaaugcagaggc

SEQ ID NO: 5736 - RNA, 22 nt, Artificial Sequence
  LRRK2 RNA guide
uaaugcagaggcauauacauuc

SEQ ID NO: 5737 - RNA, 22 nt, Artificial Sequence
  LRRK2 RNA guide
uauaugccucugcauuaacucc

SEQ ID NO: 5738 - RNA, 22 nt, Artificial Sequence
  LRRK2 RNA guide
uaugccucugcauuaacuccaa

SEQ ID NO: 5739 - RNA, 22 nt, Artificial Sequence
  LRRK2 RNA guide
ucaggagaauguauaugccucu

SEQ ID NO: 5740 - RNA, 22 nt, Artificial Sequence
  LRRK2 RNA guide
ugaauguuuuggaguuaaugca

SEQ ID NO: 5741 - RNA, 22 nt, Artificial Sequence
  LRRK2 RNA guide
ugcagaggcauauacauucucc

SEQ ID NO: 5742 - RNA, 22 nt, Artificial Sequence
  LRRK2 RNA guide
ugccucugcauuaacuccaaaa

SEQ ID NO: 5743 - RNA, 22 nt, Artificial Sequence
  LRRK2 RNA guide
uggaguuaaugcagaggcauau

SEQ ID NO: 5744 - RNA, 22 nt, Artificial Sequence
  LRRK2 RNA guide
uguauaugccucugcauuaacu

SEQ ID NO: 5745 - RNA, 22 nt, Artificial Sequence
  LRRK2 RNA guide
uguuuuggaguuaaugcagagg

SEQ ID NO: 5746 - RNA, 22 nt, Artificial Sequence
  LRRK2 RNA guide
uuaaugcagaggcauauacauu

SEQ ID NO: 5747 - RNA, 22 nt, Artificial Sequence
  LRRK2 RNA guide
uucaggagaauguauaugccuc

SEQ ID NO: 5748 - RNA, 22 nt, Artificial Sequence
  LRRK2 RNA guide
uuggaguuaaugcagaggcaua

SEQ ID NO: 5749 - RNA, 22 nt, Artificial Sequence
  LRRK2 RNA guide
uuuggaguuaaugcagaggcau

SEQ ID NO: 5750 - RNA, 22 nt, Artificial Sequence
  LRRK2 RNA guide
uuuuggaguuaaugcagaggca

SEQ ID NO: 5751 - RNA, 20 nt, Artificial Sequence
  LRRK2 RNA guide
aaauuggcuguaaaaugcua

SEQ ID NO: 5752 - RNA, 20 nt, Artificial Sequence
  LRRK2 RNA guide
aaguggcugaaauuggcugu

SEQ ID NO: 5753 - RNA, 20 nt, Artificial Sequence
  LRRK2 RNA guide
aauuggcuguaaaaugcuaa

SEQ ID NO: 5754 - RNA, 20 nt, Artificial Sequence
  LRRK2 RNA guide
aauuucagccacuucaggag

SEQ ID NO: 5755 - RNA, 20 nt, Artificial Sequence
  LRRK2 RNA guide
acagccaauuucagccacuu

SEQ ID NO: 5756 - RNA, 20 nt, Artificial Sequence
  LRRK2 RNA guide
acauucuccugaaguggcug

SEQ ID NO: 5757 - RNA, 20 nt, Artificial Sequence
  LRRK2 RNA guide
agcauuuuacagccaauuuc

SEQ ID NO: 5758 - RNA, 20 nt, Artificial Sequence
  LRRK2 RNA guide
agccaauuucagccacuuca

SEQ ID NO: 5759 - RNA, 20 nt, Artificial Sequence
  LRRK2 RNA guide
aguggcugaaauuggcugua

SEQ ID NO: 5760 - RNA, 20 nt, Artificial Sequence
  LRRK2 RNA guide
augauuuagcauuuuacagc

SEQ ID NO: 5761 - RNA, 20 nt, Artificial Sequence
  LRRK2 RNA guide
auucuccugaaguggcugaa

SEQ ID NO: 5762 - RNA, 20 nt, Artificial Sequence
  LRRK2 RNA guide
auuggcuguaaaaugcuaaa

SEQ ID NO: 5763 - RNA, 20 nt, Artificial Sequence
  LRRK2 RNA guide
auuuagcauuuuacagccaa

SEQ ID NO: 5764 - RNA, 20 nt, Artificial Sequence
  LRRK2 RNA guide
auuuuacagccaauuucagc

SEQ ID NO: 5765 - RNA, 20 nt, Artificial Sequence
  LRRK2 RNA guide
caauuucagccacuucagga

SEQ ID NO: 5766 - RNA, 20 nt, Artificial Sequence
  LRRK2 RNA guide
cagccaauuucagccacuuc

SEQ ID NO: 5767 - RNA, 20 nt, Artificial Sequence
  LRRK2 RNA guide
cauucuccugaaguggcuga

SEQ ID NO: 5768 - RNA, 20 nt, Artificial Sequence
  LRRK2 RNA guide
cauuuuacagccaauuucag

SEQ ID NO: 5769 - RNA, 20 nt, Artificial Sequence
  LRRK2 RNA guide
ccaauuucagccacuucagg

SEQ ID NO: 5770 - RNA, 20 nt, Artificial Sequence
  LRRK2 RNA guide
ccugaaguggcugaaauugg

SEQ ID NO: 5771 - RNA, 20 nt, Artificial Sequence
  LRRK2 RNA guide
cuccugaaguggcugaaauu

SEQ ID NO: 5772 - RNA, 20 nt, Artificial Sequence
  LRRK2 RNA guide
cugaaauuggcuguaaaaug

SEQ ID NO: 5773 - RNA, 20 nt, Artificial Sequence
  LRRK2 RNA guide
cugaaguggcugaaauuggc

SEQ ID NO: 5774 - RNA, 20 nt, Artificial Sequence
  LRRK2 RNA guide
gaaauuggcuguaaaaugcu

SEQ ID NO: 5775 - RNA, 20 nt, Artificial Sequence
  LRRK2 RNA guide
gaaguggcugaaauuggcug

SEQ ID NO: 5776 - RNA, 20 nt, Artificial Sequence
  LRRK2 RNA guide
gaugauuuagcauuuuacag

SEQ ID NO: 5777 - RNA, 20 nt, Artificial Sequence
  LRRK2 RNA guide
gauuuagcauuuuacagcca

SEQ ID NO: 5778 - RNA, 20 nt, Artificial Sequence
  LRRK2 RNA guide
gcauuuuacagccaauuuca

SEQ ID NO: 5779 - RNA, 20 nt, Artificial Sequence
  LRRK2 RNA guide
gccaauuucagccacuucag

SEQ ID NO: 5780 - RNA, 20 nt, Artificial Sequence
  LRRK2 RNA guide
gcugaaauuggcuguaaaau

SEQ ID NO: 5781 - RNA, 20 nt, Artificial Sequence
  LRRK2 RNA guide
ggcugaaauuggcuguaaaa

SEQ ID NO: 5782 - RNA, 20 nt, Artificial Sequence
  LRRK2 RNA guide
guggcugaaauuggcuguaa

SEQ ID NO: 5783 - RNA, 20 nt, Artificial Sequence
  LRRK2 RNA guide
uacagccaauuucagccacu

SEQ ID NO: 5784 - RNA, 20 nt, Artificial Sequence
  LRRK2 RNA guide
uacauucuccugaaguggcu

SEQ ID NO: 5785 - RNA, 20 nt, Artificial Sequence
  LRRK2 RNA guide
uagcauuuuacagccaauuu

SEQ ID NO: 5786 - RNA, 20 nt, Artificial Sequence
  LRRK2 RNA guide
uccugaaguggcugaaauug

SEQ ID NO: 5787 - RNA, 20 nt, Artificial Sequence
  LRRK2 RNA guide
ucuccugaaguggcugaaau

SEQ ID NO: 5788 - RNA, 20 nt, Artificial Sequence
  LRRK2 RNA guide
ugaaauuggcuguaaaaugc

SEQ ID NO: 5789 - RNA, 20 nt, Artificial Sequence
  LRRK2 RNA guide
ugaaguggcugaaauuggcu

SEQ ID NO: 5790 - RNA, 20 nt, Artificial Sequence
  LRRK2 RNA guide
uggcugaaauuggcuguaaa

SEQ ID NO: 5791 - RNA, 20 nt, Artificial Sequence
  LRRK2 RNA guide
uuacagccaauuucagccac

SEQ ID NO: 5792 - RNA, 20 nt, Artificial Sequence
  LRRK2 RNA guide
uuagcauuuuacagccaauu

SEQ ID NO: 5793 - RNA, 20 nt, Artificial Sequence
  LRRK2 RNA guide
uucuccugaaguggcugaaa

SEQ ID NO: 5794 - RNA, 20 nt, Artificial Sequence
  LRRK2 RNA guide
uuuacagccaauuucagcca

SEQ ID NO: 5795 - RNA, 20 nt, Artificial Sequence
  LRRK2 RNA guide
uuuagcauuuuacagccaau

SEQ ID NO: 5796 - RNA, 20 nt, Artificial Sequence
  LRRK2 RNA guide
uuuuacagccaauuucagcc

SEQ ID NO: 5797 - RNA, 21 nt, Artificial Sequence
  LRRK2 RNA guide
aaguggcugaaauuggcugua

SEQ ID NO: 5798 - RNA, 21 nt, Artificial Sequence
  LRRK2 RNA guide
aauuucagccacuucaggaga

SEQ ID NO: 5799 - RNA, 21 nt, Artificial Sequence
  LRRK2 RNA guide
acagccaauuucagccacuuc

SEQ ID NO: 5800 - RNA, 21 nt, Artificial Sequence
  LRRK2 RNA guide
acauucuccugaaguggcuga

SEQ ID NO: 5801 - RNA, 21 nt, Artificial Sequence
  LRRK2 RNA guide
agcauuuuacagccaauuuca

SEQ ID NO: 5802 - RNA, 21 nt, Artificial Sequence
  LRRK2 RNA guide
agccaauuucagccacuucag

SEQ ID NO: 5803 - RNA, 21 nt, Artificial Sequence
  LRRK2 RNA guide
aguggcugaaauuggcuguaa

SEQ ID NO: 5804 - RNA, 21 nt, Artificial Sequence
  LRRK2 RNA guide
auacauucuccugaaguggcu

SEQ ID NO: 5805 - RNA, 21 nt, Artificial Sequence
  LRRK2 RNA guide
augauuuagcauuuuacagcc

SEQ ID NO: 5806 - RNA, 21 nt, Artificial Sequence
  LRRK2 RNA guide
auucuccugaaguggcugaaa

SEQ ID NO: 5807 - RNA, 21 nt, Artificial Sequence
  LRRK2 RNA guide
auuuuacagccaauuucagcc

SEQ ID NO: 5808 - RNA, 21 nt, Artificial Sequence
  LRRK2 RNA guide
caauuucagccacuucaggag

SEQ ID NO: 5809 - RNA, 21 nt, Artificial Sequence
  LRRK2 RNA guide
cagccaauuucagccacuuca

SEQ ID NO: 5810 - RNA, 21 nt, Artificial Sequence
  LRRK2 RNA guide
cauucuccugaaguggcugaa

SEQ ID NO: 5811 - RNA, 21 nt, Artificial Sequence
  LRRK2 RNA guide
cauuuuacagccaauuucagc

SEQ ID NO: 5812 - RNA, 21 nt, Artificial Sequence
  LRRK2 RNA guide
ccaauuucagccacuucagga

SEQ ID NO: 5813 - RNA, 21 nt, Artificial Sequence
  LRRK2 RNA guide
ccugaaguggcugaaauuggc

SEQ ID NO: 5814 - RNA, 21 nt, Artificial Sequence
  LRRK2 RNA guide
cuccugaaguggcugaaauug

SEQ ID NO: 5815 - RNA, 21 nt, Artificial Sequence
  LRRK2 RNA guide
cugaaauuggcuguaaaaugc

SEQ ID NO: 5816 - RNA, 21 nt, Artificial Sequence
  LRRK2 RNA guide
cugaaguggcugaaauuggcu

SEQ ID NO: 5817 - RNA, 21 nt, Artificial Sequence
  LRRK2 RNA guide
gaaauuggcuguaaaaugcua

SEQ ID NO: 5818 - RNA, 21 nt, Artificial Sequence
  LRRK2 RNA guide
gaaguggcugaaauuggcugu

SEQ ID NO: 5819 - RNA, 21 nt, Artificial Sequence
  LRRK2 RNA guide
gaugauuuagcauuuuacagc

SEQ ID NO: 5820 - RNA, 21 nt, Artificial Sequence
  LRRK2 RNA guide
gauuuagcauuuuacagccaa

SEQ ID NO: 5821 - RNA, 21 nt, Artificial Sequence
  LRRK2 RNA guide
gcauuuuacagccaauuucag

SEQ ID NO: 5822 - RNA, 21 nt, Artificial Sequence
  LRRK2 RNA guide
gccaauuucagccacuucagg

SEQ ID NO: 5823 - RNA, 21 nt, Artificial Sequence
  LRRK2 RNA guide
gcugaaauuggcuguaaaaug

SEQ ID NO: 5824 - RNA, 21 nt, Artificial Sequence
  LRRK2 RNA guide
ggcugaaauuggcuguaaaau

SEQ ID NO: 5825 - RNA, 21 nt, Artificial Sequence
  LRRK2 RNA guide
guggcugaaauuggcuguaaa

SEQ ID NO: 5826 - RNA, 21 nt, Artificial Sequence
  LRRK2 RNA guide
uacagccaauuucagccacuu

SEQ ID NO: 5827 - RNA, 21 nt, Artificial Sequence
  LRRK2 RNA guide
uacauucuccugaaguggcug

SEQ ID NO: 5828 - RNA, 21 nt, Artificial Sequence
  LRRK2 RNA guide
uagcauuuuacagccaauuuc

SEQ ID NO: 5829 - RNA, 21 nt, Artificial Sequence
  LRRK2 RNA guide
uccugaaguggcugaaauugg

SEQ ID NO: 5830 - RNA, 21 nt, Artificial Sequence
  LRRK2 RNA guide
ucuccugaaguggcugaaauu

SEQ ID NO: 5831 - RNA, 21 nt, Artificial Sequence
  LRRK2 RNA guide
ugaaauuggcuguaaaaugcu

SEQ ID NO: 5832 - RNA, 21 nt, Artificial Sequence
  LRRK2 RNA guide
ugaaguggcugaaauuggcug

SEQ ID NO: 5833 - RNA, 21 nt, Artificial Sequence
  LRRK2 RNA guide
ugauuuagcauuuuacagcca

SEQ ID NO: 5834 - RNA, 21 nt, Artificial Sequence
  LRRK2 RNA guide
uggcugaaauuggcuguaaaa

SEQ ID NO: 5835 - RNA, 21 nt, Artificial Sequence
  LRRK2 RNA guide
uuacagccaauuucagccacu

SEQ ID NO: 5836 - RNA, 21 nt, Artificial Sequence
  LRRK2 RNA guide
uucuccugaaguggcugaaau

SEQ ID NO: 5837 - RNA, 21 nt, Artificial Sequence
  LRRK2 RNA guide
uuuacagccaauuucagccac

SEQ ID NO: 5838 - RNA, 21 nt, Artificial Sequence
  LRRK2 RNA guide
uuuuacagccaauuucagcca

SEQ ID NO: 5839 - RNA, 22 nt, Artificial Sequence
  LRRK2 RNA guide
aaguggcugaaauuggcuguaa

SEQ ID NO: 5840 - RNA, 22 nt, Artificial Sequence
  LRRK2 RNA guide
aauuucagccacuucaggagaa

SEQ ID NO: 5841 - RNA, 22 nt, Artificial Sequence
  LRRK2 RNA guide
acagccaauuucagccacuuca

SEQ ID NO: 5842 - RNA, 22 nt, Artificial Sequence
  LRRK2 RNA guide
acauucuccugaaguggcugaa

SEQ ID NO: 5843 - RNA, 22 nt, Artificial Sequence
  LRRK2 RNA guide
agaugauuuagcauuuuacagc

SEQ ID NO: 5844 - RNA, 22 nt, Artificial Sequence
  LRRK2 RNA guide
agcauuuuacagccaauuucag

SEQ ID NO: 5845 - RNA, 22 nt, Artificial Sequence
  LRRK2 RNA guide
agccaauuucagccacuucagg

SEQ ID NO: 5846 - RNA, 22 nt, Artificial Sequence
  LRRK2 RNA guide
aguggcugaaauuggcuguaaa

SEQ ID NO: 5847 - RNA, 22 nt, Artificial Sequence
  LRRK2 RNA guide
auacauucuccugaaguggcug

SEQ ID NO: 5848 - RNA, 22 nt, Artificial Sequence
  LRRK2 RNA guide
augauuuagcauuuuacagcca

SEQ ID NO: 5849 - RNA, 22 nt, Artificial Sequence
  LRRK2 RNA guide
auucuccugaaguggcugaaau

SEQ ID NO: 5850 - RNA, 22 nt, Artificial Sequence
  LRRK2 RNA guide
auuggcuguaaaaugcuaaauc

SEQ ID NO: 5851 - RNA, 22 nt, Artificial Sequence
  LRRK2 RNA guide
auuuuacagccaauuucagcca

SEQ ID NO: 5852 - RNA, 22 nt, Artificial Sequence
  LRRK2 RNA guide
caauuucagccacuucaggaga

SEQ ID NO: 5853 - RNA, 22 nt, Artificial Sequence
  LRRK2 RNA guide
cagccaauuucagccacuucag

SEQ ID NO: 5854 - RNA, 22 nt, Artificial Sequence
  LRRK2 RNA guide
cauucuccugaaguggcugaaa

SEQ ID NO: 5855 - RNA, 22 nt, Artificial Sequence
  LRRK2 RNA guide
cauuuuacagccaauuucagcc

SEQ ID NO: 5856 - RNA, 22 nt, Artificial Sequence
  LRRK2 RNA guide
ccaauuucagccacuucaggag

SEQ ID NO: 5857 - RNA, 22 nt, Artificial Sequence
  LRRK2 RNA guide
ccugaaguggcugaaauuggcu

SEQ ID NO: 5858 - RNA, 22 nt, Artificial Sequence
  LRRK2 RNA guide
cuccugaaguggcugaaauugg

SEQ ID NO: 5859 - RNA, 22 nt, Artificial Sequence
  LRRK2 RNA guide
cugaaauuggcuguaaaaugcu

SEQ ID NO: 5860 - RNA, 22 nt, Artificial Sequence
  LRRK2 RNA guide
cugaaguggcugaaauuggcug

SEQ ID NO: 5861 - RNA, 22 nt, Artificial Sequence
  LRRK2 RNA guide
gaaauuggcuguaaaaugcuaa

SEQ ID NO: 5862 - RNA, 22 nt, Artificial Sequence
  LRRK2 RNA guide
gaaguggcugaaauuggcugua

SEQ ID NO: 5863 - RNA, 22 nt, Artificial Sequence
  LRRK2 RNA guide
gaugauuuagcauuuuacagcc

SEQ ID NO: 5864 - RNA, 22 nt, Artificial Sequence
  LRRK2 RNA guide
gauuuagcauuuuacagccaau

SEQ ID NO: 5865 - RNA, 22 nt, Artificial Sequence
  LRRK2 RNA guide
gcauuuuacagccaauuucagc

SEQ ID NO: 5866 - RNA, 22 nt, Artificial Sequence
  LRRK2 RNA guide
gccaauuucagccacuucagga

SEQ ID NO: 5867 - RNA, 22 nt, Artificial Sequence
  LRRK2 RNA guide
gcugaaauuggcuguaaaaugc

SEQ ID NO: 5868 - RNA, 22 nt, Artificial Sequence
  LRRK2 RNA guide
ggcugaaauuggcuguaaaaug

SEQ ID NO: 5869 - RNA, 22 nt, Artificial Sequence
  LRRK2 RNA guide
guggcugaaauuggcuguaaaa

SEQ ID NO: 5870 - RNA, 22 nt, Artificial Sequence
  LRRK2 RNA guide
uacagccaauuucagccacuuc

SEQ ID NO: 5871 - RNA, 22 nt, Artificial Sequence
  LRRK2 RNA guide
uacauucuccugaaguggcuga

SEQ ID NO: 5872 - RNA, 22 nt, Artificial Sequence
  LRRK2 RNA guide
uagcauuuuacagccaauuuca

SEQ ID NO: 5873 - RNA, 22 nt, Artificial Sequence
  LRRK2 RNA guide
uauacauucuccugaaguggcu

SEQ ID NO: 5874 - RNA, 22 nt, Artificial Sequence
  LRRK2 RNA guide
uccugaaguggcugaaauuggc

SEQ ID NO: 5875 - RNA, 22 nt, Artificial Sequence
  LRRK2 RNA guide
ucuccugaaguggcugaaauug

SEQ ID NO: 5876 - RNA, 22 nt, Artificial Sequence
  LRRK2 RNA guide
ugaaauuggcuguaaaaugcua

SEQ ID NO: 5877 - RNA, 22 nt, Artificial Sequence
  LRRK2 RNA guide
ugaaguggcugaaauuggcugu

SEQ ID NO: 5878 - RNA, 22 nt, Artificial Sequence
  LRRK2 RNA guide
ugauuuagcauuuuacagccaa

SEQ ID NO: 5879 - RNA, 22 nt, Artificial Sequence
  LRRK2 RNA guide
uggcugaaauuggcuguaaaau

SEQ ID NO: 5880 - RNA, 22 nt, Artificial Sequence
  LRRK2 RNA guide
uuacagccaauuucagccacuu

SEQ ID NO: 5881 - RNA, 22 nt, Artificial Sequence
  LRRK2 RNA guide
uuagcauuuuacagccaauuuc

SEQ ID NO: 5882 - RNA, 22 nt, Artificial Sequence
  LRRK2 RNA guide
uucuccugaaguggcugaaauu

SEQ ID NO: 5883 - RNA, 22 nt, Artificial Sequence
  LRRK2 RNA guide
uuuacagccaauuucagccacu

SEQ ID NO: 5884 - RNA, 22 nt, Artificial Sequence
  LRRK2 RNA guide
uuuuacagccaauuucagccac

SEQ ID NO: 5885 - RNA, 20 nt, Artificial Sequence
  LRRK2 RNA guide
aacuguuaguauuuugggga

SEQ ID NO: 5886 - RNA, 20 nt, Artificial Sequence
  LRRK2 RNA guide
aauggcagcgguggucccca

SEQ ID NO: 5887 - RNA, 20 nt, Artificial Sequence
  LRRK2 RNA guide
accaccgcugccauuauauc

SEQ ID NO: 5888 - RNA, 20 nt, Artificial Sequence
  LRRK2 RNA guide
accgcugccauuauauccag

SEQ ID NO: 5889 - RNA, 20 nt, Artificial Sequence
  LRRK2 RNA guide
acuguuaguauuuuggggac

SEQ ID NO: 5890 - RNA, 20 nt, Artificial Sequence
  LRRK2 RNA guide
acuucccuggauauaauggc

SEQ ID NO: 5891 - RNA, 20 nt, Artificial Sequence
  LRRK2 RNA guide
agcggugguccccaaaauac

SEQ ID NO: 5892 - RNA, 20 nt, Artificial Sequence
  LRRK2 RNA guide
aguauuuuggggaccaccgc

SEQ ID NO: 5893 - RNA, 20 nt, Artificial Sequence
  LRRK2 RNA guide
auaauggcagcggugguccc

SEQ ID NO: 5894 - RNA, 20 nt, Artificial Sequence
  LRRK2 RNA guide
auauaauggcagcggugguc

SEQ ID NO: 5895 - RNA, 20 nt, Artificial Sequence
  LRRK2 RNA guide
auggcagcggugguccccaa

SEQ ID NO: 5896 - RNA, 20 nt, Artificial Sequence
  LRRK2 RNA guide
auuuuggggaccaccgcugc

SEQ ID NO: 5897 - RNA, 20 nt, Artificial Sequence
  LRRK2 RNA guide
caccgcugccauuauaucca

SEQ ID NO: 5898 - RNA, 20 nt, Artificial Sequence
  LRRK2 RNA guide
cacuucccuggauauaaugg

SEQ ID NO: 5899 - RNA, 20 nt, Artificial Sequence
  LRRK2 RNA guide
cagcggugguccccaaaaua

SEQ ID NO: 5900 - RNA, 20 nt, Artificial Sequence
  LRRK2 RNA guide
ccaccgcugccauuauaucc

SEQ ID NO: 5901 - RNA, 20 nt, Artificial Sequence
  LRRK2 RNA guide
cccuggauauaauggcagcg

SEQ ID NO: 5902 - RNA, 20 nt, Artificial Sequence
  LRRK2 RNA guide
ccgcugccauuauauccagg

SEQ ID NO: 5903 - RNA, 20 nt, Artificial Sequence
  LRRK2 RNA guide
ccuggauauaauggcagcgg

SEQ ID NO: 5904 - RNA, 20 nt, Artificial Sequence
  LRRK2 RNA guide
cggugguccccaaaauacua

SEQ ID NO: 5905 - RNA, 20 nt, Artificial Sequence
  LRRK2 RNA guide
cuggauauaauggcagcggu

SEQ ID NO: 5906 - RNA, 20 nt, Artificial Sequence
  LRRK2 RNA guide
cuguuaguauuuuggggacc

SEQ ID NO: 5907 - RNA, 20 nt, Artificial Sequence
  LRRK2 RNA guide
cuucccuggauauaauggca

SEQ ID NO: 5908 - RNA, 20 nt, Artificial Sequence
  LRRK2 RNA guide
gaccaccgcugccauuauau

SEQ ID NO: 5909 - RNA, 20 nt, Artificial Sequence
  LRRK2 RNA guide
gauauaauggcagcgguggu

SEQ ID NO: 5910 - RNA, 20 nt, Artificial Sequence
  LRRK2 RNA guide
gcagcggugguccccaaaau

SEQ ID NO: 5911 - RNA, 20 nt, Artificial Sequence
  LRRK2 RNA guide
gcggugguccccaaaauacu

SEQ ID NO: 5912 - RNA, 20 nt, Artificial Sequence
  LRRK2 RNA guide
ggaccaccgcugccauuaua

SEQ ID NO: 5913 - RNA, 20 nt, Artificial Sequence
  LRRK2 RNA guide
ggauauaauggcagcggugg

SEQ ID NO: 5914 - RNA, 20 nt, Artificial Sequence
  LRRK2 RNA guide
ggcagcggugguccccaaaa

SEQ ID NO: 5915 - RNA, 20 nt, Artificial Sequence
  LRRK2 RNA guide
gggaccaccgcugccauuau

SEQ ID NO: 5916 - RNA, 20 nt, Artificial Sequence
  LRRK2 RNA guide
ggggaccaccgcugccauua

SEQ ID NO: 5917 - RNA, 20 nt, Artificial Sequence
  LRRK2 RNA guide
guauuuuggggaccaccgcu

SEQ ID NO: 5918 - RNA, 20 nt, Artificial Sequence
  LRRK2 RNA guide
guuaguauuuuggggaccac

SEQ ID NO: 5919 - RNA, 20 nt, Artificial Sequence
  LRRK2 RNA guide
uaauggcagcgguggucccc

SEQ ID NO: 5920 - RNA, 20 nt, Artificial Sequence
  LRRK2 RNA guide
uaguauuuuggggaccaccg

SEQ ID NO: 5921 - RNA, 20 nt, Artificial Sequence
  LRRK2 RNA guide
uauaauggcagcgguggucc

SEQ ID NO: 5922 - RNA, 20 nt, Artificial Sequence
  LRRK2 RNA guide
uauuuuggggaccaccgcug

SEQ ID NO: 5923 - RNA, 20 nt, Artificial Sequence
  LRRK2 RNA guide
ucccuggauauaauggcagc

SEQ ID NO: 5924 - RNA, 20 nt, Artificial Sequence
  LRRK2 RNA guide
uggauauaauggcagcggug

SEQ ID NO: 5925 - RNA, 20 nt, Artificial Sequence
  LRRK2 RNA guide
uggcagcggugguccccaaa

SEQ ID NO: 5926 - RNA, 20 nt, Artificial Sequence
  LRRK2 RNA guide
uggggaccaccgcugccauu

SEQ ID NO: 5927 - RNA, 20 nt, Artificial Sequence
  LRRK2 RNA guide
uguuaguauuuuggggacca

SEQ ID NO: 5928 - RNA, 20 nt, Artificial Sequence
  LRRK2 RNA guide
uuaguauuuuggggaccacc

SEQ ID NO: 5929 - RNA, 20 nt, Artificial Sequence
  LRRK2 RNA guide
uucccuggauauaauggcag

SEQ ID NO: 5930 - RNA, 20 nt, Artificial Sequence
  LRRK2 RNA guide
uuggggaccaccgcugccau

SEQ ID NO: 5931 - RNA, 20 nt, Artificial Sequence
  LRRK2 RNA guide
uuuggggaccaccgcugcca

SEQ ID NO: 5932 - RNA, 20 nt, Artificial Sequence
  LRRK2 RNA guide
uuuuggggaccaccgcugcc

SEQ ID NO: 5933 - RNA, 21 nt, Artificial Sequence
  LRRK2 RNA guide
aacuguuaguauuuuggggac

SEQ ID NO: 5934 - RNA, 21 nt, Artificial Sequence
  LRRK2 RNA guide
aauggcagcggugguccccaa

SEQ ID NO: 5935 - RNA, 21 nt, Artificial Sequence
  LRRK2 RNA guide
acacuucccuggauauaaugg

SEQ ID NO: 5936 - RNA, 21 nt, Artificial Sequence
  LRRK2 RNA guide
accaccgcugccauuauaucc

SEQ ID NO: 5937 - RNA, 21 nt, Artificial Sequence
  LRRK2 RNA guide
accgcugccauuauauccagg

SEQ ID NO: 5938 - RNA, 21 nt, Artificial Sequence
  LRRK2 RNA guide
acuguuaguauuuuggggacc

SEQ ID NO: 5939 - RNA, 21 nt, Artificial Sequence
  LRRK2 RNA guide
acuucccuggauauaauggca

SEQ ID NO: 5940 - RNA, 21 nt, Artificial Sequence
  LRRK2 RNA guide
agcggugguccccaaaauacu

SEQ ID NO: 5941 - RNA, 21 nt, Artificial Sequence
  LRRK2 RNA guide
aguauuuuggggaccaccgcu

SEQ ID NO: 5942 - RNA, 21 nt, Artificial Sequence
  LRRK2 RNA guide
auaauggcagcgguggucccc

SEQ ID NO: 5943 - RNA, 21 nt, Artificial Sequence
  LRRK2 RNA guide
auauaauggcagcgguggucc

SEQ ID NO: 5944 - RNA, 21 nt, Artificial Sequence
  LRRK2 RNA guide
auggcagcggugguccccaaa

SEQ ID NO: 5945 - RNA, 21 nt, Artificial Sequence
  LRRK2 RNA guide
auuuuggggaccaccgcugcc

SEQ ID NO: 5946 - RNA, 21 nt, Artificial Sequence
  LRRK2 RNA guide
caccgcugccauuauauccag

SEQ ID NO: 5947 - RNA, 21 nt, Artificial Sequence
  LRRK2 RNA guide
cacuucccuggauauaauggc

SEQ ID NO: 5948 - RNA, 21 nt, Artificial Sequence
  LRRK2 RNA guide
cagcggugguccccaaaauac

SEQ ID NO: 5949 - RNA, 21 nt, Artificial Sequence
  LRRK2 RNA guide
ccaccgcugccauuauaucca

SEQ ID NO: 5950 - RNA, 21 nt, Artificial Sequence
  LRRK2 RNA guide
cccuggauauaauggcagcgg

SEQ ID NO: 5951 - RNA, 21 nt, Artificial Sequence
  LRRK2 RNA guide
ccgcugccauuauauccaggg

SEQ ID NO: 5952 - RNA, 21 nt, Artificial Sequence
  LRRK2 RNA guide
ccuggauauaauggcagcggu

SEQ ID NO: 5953 - RNA, 21 nt, Artificial Sequence
  LRRK2 RNA guide
cggugguccccaaaauacuaa

SEQ ID NO: 5954 - RNA, 21 nt, Artificial Sequence
  LRRK2 RNA guide
cuggauauaauggcagcggug

SEQ ID NO: 5955 - RNA, 21 nt, Artificial Sequence
  LRRK2 RNA guide
cuguuaguauuuuggggacca

SEQ ID NO: 5956 - RNA, 21 nt, Artificial Sequence
  LRRK2 RNA guide
cuucccuggauauaauggcag

SEQ ID NO: 5957 - RNA, 21 nt, Artificial Sequence
  LRRK2 RNA guide
gaccaccgcugccauuauauc

SEQ ID NO: 5958 - RNA, 21 nt, Artificial Sequence
  LRRK2 RNA guide
gauauaauggcagcggugguc

SEQ ID NO: 5959 - RNA, 21 nt, Artificial Sequence
  LRRK2 RNA guide
gcagcggugguccccaaaaua

SEQ ID NO: 5960 - RNA, 21 nt, Artificial Sequence
  LRRK2 RNA guide
gcggugguccccaaaauacua

SEQ ID NO: 5961 - RNA, 21 nt, Artificial Sequence
  LRRK2 RNA guide
ggaccaccgcugccauuauau

SEQ ID NO: 5962 - RNA, 21 nt, Artificial Sequence
  LRRK2 RNA guide
ggauauaauggcagcgguggu

SEQ ID NO: 5963 - RNA, 21 nt, Artificial Sequence
  LRRK2 RNA guide
ggcagcggugguccccaaaau

SEQ ID NO: 5964 - RNA, 21 nt, Artificial Sequence
  LRRK2 RNA guide
gggaccaccgcugccauuaua

SEQ ID NO: 5965 - RNA, 21 nt, Artificial Sequence
  LRRK2 RNA guide
ggggaccaccgcugccauuau

SEQ ID NO: 5966 - RNA, 21 nt, Artificial Sequence
  LRRK2 RNA guide
guauuuuggggaccaccgcug

SEQ ID NO: 5967 - RNA, 21 nt, Artificial Sequence
  LRRK2 RNA guide
guuaguauuuuggggaccacc

SEQ ID NO: 5968 - RNA, 21 nt, Artificial Sequence
  LRRK2 RNA guide
uaacuguuaguauuuugggga

SEQ ID NO: 5969 - RNA, 21 nt, Artificial Sequence
  LRRK2 RNA guide
uaauggcagcgguggucccca

SEQ ID NO: 5970 - RNA, 21 nt, Artificial Sequence
  LRRK2 RNA guide
uaguauuuuggggaccaccgc

SEQ ID NO: 5971 - RNA, 21 nt, Artificial Sequence
  LRRK2 RNA guide
uauaauggcagcggugguccc

SEQ ID NO: 5972 - RNA, 21 nt, Artificial Sequence
  LRRK2 RNA guide
uauuuuggggaccaccgcugc

SEQ ID NO: 5973 - RNA, 21 nt, Artificial Sequence
  LRRK2 RNA guide
ucccuggauauaauggcagcg

SEQ ID NO: 5974 - RNA, 21 nt, Artificial Sequence
  LRRK2 RNA guide
uggauauaauggcagcggugg

SEQ ID NO: 5975 - RNA, 21 nt, Artificial Sequence
  LRRK2 RNA guide
uggcagcggugguccccaaaa

SEQ ID NO: 5976 - RNA, 21 nt, Artificial Sequence
  LRRK2 RNA guide
uggggaccaccgcugccauua

SEQ ID NO: 5977 - RNA, 21 nt, Artificial Sequence
  LRRK2 RNA guide
uguuaguauuuuggggaccac

SEQ ID NO: 5978 - RNA, 21 nt, Artificial Sequence
  LRRK2 RNA guide
uuaguauuuuggggaccaccg

SEQ ID NO: 5979 - RNA, 21 nt, Artificial Sequence
  LRRK2 RNA guide
uucccuggauauaauggcagc

SEQ ID NO: 5980 - RNA, 21 nt, Artificial Sequence
  LRRK2 RNA guide
uuggggaccaccgcugccauu

SEQ ID NO: 5981 - RNA, 21 nt, Artificial Sequence
  LRRK2 RNA guide
uuuggggaccaccgcugccau

SEQ ID NO: 5982 - RNA, 21 nt, Artificial Sequence
  LRRK2 RNA guide
uuuuggggaccaccgcugcca

SEQ ID NO: 5983 - RNA, 22 nt, Artificial Sequence
  LRRK2 RNA guide
aacacuucccuggauauaaugg

SEQ ID NO: 5984 - RNA, 22 nt, Artificial Sequence
  LRRK2 RNA guide
aacuguuaguauuuuggggacc

SEQ ID NO: 5985 - RNA, 22 nt, Artificial Sequence
  LRRK2 RNA guide
aauggcagcggugguccccaaa

SEQ ID NO: 5986 - RNA, 22 nt, Artificial Sequence
  LRRK2 RNA guide
acacuucccuggauauaauggc

SEQ ID NO: 5987 - RNA, 22 nt, Artificial Sequence
  LRRK2 RNA guide
accaccgcugccauuauaucca

SEQ ID NO: 5988 - RNA, 22 nt, Artificial Sequence
  LRRK2 RNA guide
accgcugccauuauauccaggg

SEQ ID NO: 5989 - RNA, 22 nt, Artificial Sequence
  LRRK2 RNA guide
acuguuaguauuuuggggacca

SEQ ID NO: 5990 - RNA, 22 nt, Artificial Sequence
  LRRK2 RNA guide
acuucccuggauauaauggcag

SEQ ID NO: 5991 - RNA, 22 nt, Artificial Sequence
  LRRK2 RNA guide
agcggugguccccaaaauacua

SEQ ID NO: 5992 - RNA, 22 nt, Artificial Sequence
  LRRK2 RNA guide
aguauuuuggggaccaccgcug

SEQ ID NO: 5993 - RNA, 22 nt, Artificial Sequence
  LRRK2 RNA guide
auaacuguuaguauuuugggga

SEQ ID NO: 5994 - RNA, 22 nt, Artificial Sequence
  LRRK2 RNA guide
auaauggcagcgguggucccca

SEQ ID NO: 5995 - RNA, 22 nt, Artificial Sequence
  LRRK2 RNA guide
auauaauggcagcggugguccc

SEQ ID NO: 5996 - RNA, 22 nt, Artificial Sequence
  LRRK2 RNA guide
auggcagcggugguccccaaaa

SEQ ID NO: 5997 - RNA, 22 nt, Artificial Sequence
  LRRK2 RNA guide
auuuuggggaccaccgcugcca

SEQ ID NO: 5998 - RNA, 22 nt, Artificial Sequence
  LRRK2 RNA guide
caccgcugccauuauauccagg

SEQ ID NO: 5999 - RNA, 22 nt, Artificial Sequence
  LRRK2 RNA guide
cacuucccuggauauaauggca

SEQ ID NO: 6000 - RNA, 22 nt, Artificial Sequence
  LRRK2 RNA guide
cagcggugguccccaaaauacu

SEQ ID NO: 6001 - RNA, 22 nt, Artificial Sequence
  LRRK2 RNA guide
ccaccgcugccauuauauccag

SEQ ID NO: 6002 - RNA, 22 nt, Artificial Sequence
  LRRK2 RNA guide
cccuggauauaauggcagcggu

SEQ ID NO: 6003 - RNA, 22 nt, Artificial Sequence
  LRRK2 RNA guide
ccgcugccauuauauccaggga

SEQ ID NO: 6004 - RNA, 22 nt, Artificial Sequence
  LRRK2 RNA guide
ccuggauauaauggcagcggug

SEQ ID NO: 6005 - RNA, 22 nt, Artificial Sequence
  LRRK2 RNA guide
cggugguccccaaaauacuaac

SEQ ID NO: 6006 - RNA, 22 nt, Artificial Sequence
  LRRK2 RNA guide
cuggauauaauggcagcggugg

SEQ ID NO: 6007 - RNA, 22 nt, Artificial Sequence
  LRRK2 RNA guide
cuguuaguauuuuggggaccac

SEQ ID NO: 6008 - RNA, 22 nt, Artificial Sequence
  LRRK2 RNA guide
cuucccuggauauaauggcagc

SEQ ID NO: 6009 - RNA, 22 nt, Artificial Sequence
  LRRK2 RNA guide
gaccaccgcugccauuauaucc

SEQ ID NO: 6010 - RNA, 22 nt, Artificial Sequence
  LRRK2 RNA guide
gauauaauggcagcgguggucc

SEQ ID NO: 6011 - RNA, 22 nt, Artificial Sequence
  LRRK2 RNA guide
gcagcggugguccccaaaauac

SEQ ID NO: 6012 - RNA, 22 nt, Artificial Sequence
  LRRK2 RNA guide
gcggugguccccaaaauacuaa

SEQ ID NO: 6013 - RNA, 22 nt, Artificial Sequence
  LRRK2 RNA guide
ggaccaccgcugccauuauauc

SEQ ID NO: 6014 - RNA, 22 nt, Artificial Sequence
  LRRK2 RNA guide
ggauauaauggcagcggugguc

SEQ ID NO: 6015 - RNA, 22 nt, Artificial Sequence
  LRRK2 RNA guide
ggcagcggugguccccaaaaua

SEQ ID NO: 6016 - RNA, 22 nt, Artificial Sequence
  LRRK2 RNA guide
gggaccaccgcugccauuauau

SEQ ID NO: 6017 - RNA, 22 nt, Artificial Sequence
  LRRK2 RNA guide
ggggaccaccgcugccauuaua

SEQ ID NO: 6018 - RNA, 22 nt, Artificial Sequence
  LRRK2 RNA guide
guauuuuggggaccaccgcugc

SEQ ID NO: 6019 - RNA, 22 nt, Artificial Sequence
  LRRK2 RNA guide
guuaguauuuuggggaccaccg

SEQ ID NO: 6020 - RNA, 22 nt, Artificial Sequence
  LRRK2 RNA guide
uaacuguuaguauuuuggggac

SEQ ID NO: 6021 - RNA, 22 nt, Artificial Sequence
  LRRK2 RNA guide
uaauggcagcggugguccccaa

SEQ ID NO: 6022 - RNA, 22 nt, Artificial Sequence
  LRRK2 RNA guide
uaguauuuuggggaccaccgcu

SEQ ID NO: 6023 - RNA, 22 nt, Artificial Sequence
  LRRK2 RNA guide
uauaauggcagcgguggucccc

SEQ ID NO: 6024 - RNA, 22 nt, Artificial Sequence
  LRRK2 RNA guide
uauuuuggggaccaccgcugcc

SEQ ID NO: 6025 - RNA, 22 nt, Artificial Sequence
  LRRK2 RNA guide
ucccuggauauaauggcagcgg

SEQ ID NO: 6026 - RNA, 22 nt, Artificial Sequence
  LRRK2 RNA guide
uggauauaauggcagcgguggu

SEQ ID NO: 6027 - RNA, 22 nt, Artificial Sequence
  LRRK2 RNA guide
uggcagcggugguccccaaaau

SEQ ID NO: 6028 - RNA, 22 nt, Artificial Sequence
  LRRK2 RNA guide
uggggaccaccgcugccauuau

SEQ ID NO: 6029 - RNA, 22 nt, Artificial Sequence
  LRRK2 RNA guide
uguuaguauuuuggggaccacc

SEQ ID NO: 6030 - RNA, 22 nt, Artificial Sequence
  LRRK2 RNA guide
uuaguauuuuggggaccaccgc

SEQ ID NO: 6031 - RNA, 22 nt, Artificial Sequence
  LRRK2 RNA guide
uucccuggauauaauggcagcg

SEQ ID NO: 6032 - RNA, 22 nt, Artificial Sequence
  LRRK2 RNA guide
uuggggaccaccgcugccauua

SEQ ID NO: 6033 - RNA, 22 nt, Artificial Sequence
  LRRK2 RNA guide
uuuggggaccaccgcugccauu

SEQ ID NO: 6034 - RNA, 22 nt, Artificial Sequence
  LRRK2 RNA guide
uuuuggggaccaccgcugccau

SEQ ID NO: 6035 - RNA, 20 nt, Artificial Sequence
  LRRK2 RNA guide
aacuguaaguauuuugggga

SEQ ID NO: 6036 - RNA, 20 nt, Artificial Sequence
  LRRK2 RNA guide
acguuucauaacuguaagua

SEQ ID NO: 6037 - RNA, 20 nt, Artificial Sequence
  LRRK2 RNA guide
acuguaaguauuuuggggac

SEQ ID NO: 6038 - RNA, 20 nt, Artificial Sequence
  LRRK2 RNA guide
acuuacaguuaugaaacguc

SEQ ID NO: 6039 - RNA, 20 nt, Artificial Sequence
  LRRK2 RNA guide
agcagugguccccaaaauac

SEQ ID NO: 6040 - RNA, 20 nt, Artificial Sequence
  LRRK2 RNA guide
agugguccccaaaauacuua

SEQ ID NO: 6041 - RNA, 20 nt, Artificial Sequence
  LRRK2 RNA guide
auaacuguaaguauuuuggg

SEQ ID NO: 6042 - RNA, 20 nt, Artificial Sequence
  LRRK2 RNA guide
auacuuacaguuaugaaacg

SEQ ID NO: 6043 - RNA, 20 nt, Artificial Sequence
  LRRK2 RNA guide
augacguuucauaacuguaa

SEQ ID NO: 6044 - RNA, 20 nt, Artificial Sequence
  LRRK2 RNA guide
cagcagugguccccaaaaua

SEQ ID NO: 6045 - RNA, 20 nt, Artificial Sequence
  LRRK2 RNA guide
cagugguccccaaaauacuu

SEQ ID NO: 6046 - RNA, 20 nt, Artificial Sequence
  LRRK2 RNA guide
cauaacuguaaguauuuugg

SEQ ID NO: 6047 - RNA, 20 nt, Artificial Sequence
  LRRK2 RNA guide
caugacguuucauaacugua

SEQ ID NO: 6048 - RNA, 20 nt, Artificial Sequence
  LRRK2 RNA guide
ccaaaauacuuacaguuaug

SEQ ID NO: 6049 - RNA, 20 nt, Artificial Sequence
  LRRK2 RNA guide
cccaaaauacuuacaguuau

SEQ ID NO: 6050 - RNA, 20 nt, Artificial Sequence
  LRRK2 RNA guide
ccccaaaauacuuacaguua

SEQ ID NO: 6051 - RNA, 20 nt, Artificial Sequence
  LRRK2 RNA guide
cguuucauaacuguaaguau

SEQ ID NO: 6052 - RNA, 20 nt, Artificial Sequence
  LRRK2 RNA guide
cucaugacguuucauaacug

SEQ ID NO: 6053 - RNA, 20 nt, Artificial Sequence
  LRRK2 RNA guide
cuguaaguauuuuggggacc

SEQ ID NO: 6054 - RNA, 20 nt, Artificial Sequence
  LRRK2 RNA guide
cuuacaguuaugaaacguca

SEQ ID NO: 6055 - RNA, 20 nt, Artificial Sequence
  LRRK2 RNA guide
gacguuucauaacuguaagu

SEQ ID NO: 6056 - RNA, 20 nt, Artificial Sequence
  LRRK2 RNA guide
gcagcagugguccccaaaau

SEQ ID NO: 6057 - RNA, 20 nt, Artificial Sequence
  LRRK2 RNA guide
gcagugguccccaaaauacu

SEQ ID NO: 6058 - RNA, 20 nt, Artificial Sequence
  LRRK2 RNA guide
ggcagcagugguccccaaaa

SEQ ID NO: 6059 - RNA, 20 nt, Artificial Sequence
  LRRK2 RNA guide
gguccccaaaauacuuacag

SEQ ID NO: 6060 - RNA, 20 nt, Artificial Sequence
  LRRK2 RNA guide
guaaguauuuuggggaccac

SEQ ID NO: 6061 - RNA, 20 nt, Artificial Sequence
  LRRK2 RNA guide
guccccaaaauacuuacagu

SEQ ID NO: 6062 - RNA, 20 nt, Artificial Sequence
  LRRK2 RNA guide
gucucaugacguuucauaac

SEQ ID NO: 6063 - RNA, 20 nt, Artificial Sequence
  LRRK2 RNA guide
gugguccccaaaauacuuac

SEQ ID NO: 6064 - RNA, 20 nt, Artificial Sequence
  LRRK2 RNA guide
uaacuguaaguauuuugggg

SEQ ID NO: 6065 - RNA, 20 nt, Artificial Sequence
  LRRK2 RNA guide
uaaguauuuuggggaccacu

SEQ ID NO: 6066 - RNA, 20 nt, Artificial Sequence
  LRRK2 RNA guide
uacuuacaguuaugaaacgu

SEQ ID NO: 6067 - RNA, 20 nt, Artificial Sequence
  LRRK2 RNA guide
ucaugacguuucauaacugu

SEQ ID NO: 6068 - RNA, 20 nt, Artificial Sequence
  LRRK2 RNA guide
uccccaaaauacuuacaguu

SEQ ID NO: 6069 - RNA, 20 nt, Artificial Sequence
  LRRK2 RNA guide
ucucaugacguuucauaacu

SEQ ID NO: 6070 - RNA, 20 nt, Artificial Sequence
  LRRK2 RNA guide
ugacguuucauaacuguaag

SEQ ID NO: 6071 - RNA, 20 nt, Artificial Sequence
  LRRK2 RNA guide
ugguccccaaaauacuuaca

SEQ ID NO: 6072 - RNA, 20 nt, Artificial Sequence
  LRRK2 RNA guide
uguaaguauuuuggggacca

SEQ ID NO: 6073 - RNA, 20 nt, Artificial Sequence
  LRRK2 RNA guide
ugucucaugacguuucauaa

SEQ ID NO: 6074 - RNA, 20 nt, Artificial Sequence
  LRRK2 RNA guide
uuacaguuaugaaacgucau

SEQ ID NO: 6075 - RNA, 21 nt, Artificial Sequence
  LRRK2 RNA guide
aacuguaaguauuuuggggac

SEQ ID NO: 6076 - RNA, 21 nt, Artificial Sequence
  LRRK2 RNA guide
acuguaaguauuuuggggacc

SEQ ID NO: 6077 - RNA, 21 nt, Artificial Sequence
  LRRK2 RNA guide
acuuacaguuaugaaacguca

SEQ ID NO: 6078 - RNA, 21 nt, Artificial Sequence
  LRRK2 RNA guide
agcagugguccccaaaauacu

SEQ ID NO: 6079 - RNA, 21 nt, Artificial Sequence
  LRRK2 RNA guide
agugguccccaaaauacuuac

SEQ ID NO: 6080 - RNA, 21 nt, Artificial Sequence
  LRRK2 RNA guide
auaacuguaaguauuuugggg

SEQ ID NO: 6081 - RNA, 21 nt, Artificial Sequence
  LRRK2 RNA guide
augacguuucauaacuguaag

SEQ ID NO: 6082 - RNA, 21 nt, Artificial Sequence
  LRRK2 RNA guide
augucucaugacguuucauaa

SEQ ID NO: 6083 - RNA, 21 nt, Artificial Sequence
  LRRK2 RNA guide
cagcagugguccccaaaauac

SEQ ID NO: 6084 - RNA, 21 nt, Artificial Sequence
  LRRK2 RNA guide
cagugguccccaaaauacuua

SEQ ID NO: 6085 - RNA, 21 nt, Artificial Sequence
  LRRK2 RNA guide
cauaacuguaaguauuuuggg

SEQ ID NO: 6086 - RNA, 21 nt, Artificial Sequence
  LRRK2 RNA guide
caugacguuucauaacuguaa

SEQ ID NO: 6087 - RNA, 21 nt, Artificial Sequence
  LRRK2 RNA guide
cccaaaauacuuacaguuaug

SEQ ID NO: 6088 - RNA, 21 nt, Artificial Sequence
  LRRK2 RNA guide
ccccaaaauacuuacaguuau

SEQ ID NO: 6089 - RNA, 21 nt, Artificial Sequence
  LRRK2 RNA guide
cucaugacguuucauaacugu

SEQ ID NO: 6090 - RNA, 21 nt, Artificial Sequence
  LRRK2 RNA guide
cuguaaguauuuuggggacca

SEQ ID NO: 6091 - RNA, 21 nt, Artificial Sequence
  LRRK2 RNA guide
cuuacaguuaugaaacgucau

SEQ ID NO: 6092 - RNA, 21 nt, Artificial Sequence
  LRRK2 RNA guide
gacguuucauaacuguaagua

SEQ ID NO: 6093 - RNA, 21 nt, Artificial Sequence
  LRRK2 RNA guide
gcagcagugguccccaaaaua

SEQ ID NO: 6094 - RNA, 21 nt, Artificial Sequence
  LRRK2 RNA guide
gcagugguccccaaaauacuu

SEQ ID NO: 6095 - RNA, 21 nt, Artificial Sequence
  LRRK2 RNA guide
ggcagcagugguccccaaaau

SEQ ID NO: 6096 - RNA, 21 nt, Artificial Sequence
  LRRK2 RNA guide
gguccccaaaauacuuacagu

SEQ ID NO: 6097 - RNA, 21 nt, Artificial Sequence
  LRRK2 RNA guide
guaaguauuuuggggaccacu

SEQ ID NO: 6098 - RNA, 21 nt, Artificial Sequence
  LRRK2 RNA guide
guccccaaaauacuuacaguu

SEQ ID NO: 6099 - RNA, 21 nt, Artificial Sequence
  LRRK2 RNA guide
gucucaugacguuucauaacu

SEQ ID NO: 6100 - RNA, 21 nt, Artificial Sequence
  LRRK2 RNA guide
gugguccccaaaauacuuaca

SEQ ID NO: 6101 - RNA, 21 nt, Artificial Sequence
  LRRK2 RNA guide
uaacuguaaguauuuugggga

SEQ ID NO: 6102 - RNA, 21 nt, Artificial Sequence
  LRRK2 RNA guide
uaaguauuuuggggaccacug

SEQ ID NO: 6103 - RNA, 21 nt, Artificial Sequence
  LRRK2 RNA guide
uacuuacaguuaugaaacguc

SEQ ID NO: 6104 - RNA, 21 nt, Artificial Sequence
  LRRK2 RNA guide
ucaugacguuucauaacugua

SEQ ID NO: 6105 - RNA, 21 nt, Artificial Sequence
  LRRK2 RNA guide
uccccaaaauacuuacaguua

SEQ ID NO: 6106 - RNA, 21 nt, Artificial Sequence
  LRRK2 RNA guide
ucucaugacguuucauaacug

SEQ ID NO: 6107 - RNA, 21 nt, Artificial Sequence
  LRRK2 RNA guide
ugacguuucauaacuguaagu

SEQ ID NO: 6108 - RNA, 21 nt, Artificial Sequence
  LRRK2 RNA guide
uggcagcagugguccccaaaa

SEQ ID NO: 6109 - RNA, 21 nt, Artificial Sequence
  LRRK2 RNA guide
ugguccccaaaauacuuacag

SEQ ID NO: 6110 - RNA, 21 nt, Artificial Sequence
  LRRK2 RNA guide
uguaaguauuuuggggaccac

SEQ ID NO: 6111 - RNA, 21 nt, Artificial Sequence
  LRRK2 RNA guide
ugucucaugacguuucauaac

SEQ ID NO: 6112 - RNA, 21 nt, Artificial Sequence
  LRRK2 RNA guide
uuacaguuaugaaacgucaug

SEQ ID NO: 6113 - RNA, 22 nt, Artificial Sequence
  LRRK2 RNA guide
aacuguaaguauuuuggggacc

SEQ ID NO: 6114 - RNA, 22 nt, Artificial Sequence
  LRRK2 RNA guide
acuguaaguauuuuggggacca

SEQ ID NO: 6115 - RNA, 22 nt, Artificial Sequence
  LRRK2 RNA guide
acuuacaguuaugaaacgucau

SEQ ID NO: 6116 - RNA, 22 nt, Artificial Sequence
  LRRK2 RNA guide
agcagugguccccaaaauacuu

SEQ ID NO: 6117 - RNA, 22 nt, Artificial Sequence
  LRRK2 RNA guide
agugguccccaaaauacuuaca

SEQ ID NO: 6118 - RNA, 22 nt, Artificial Sequence
  LRRK2 RNA guide
auaacuguaaguauuuugggga

SEQ ID NO: 6119 - RNA, 22 nt, Artificial Sequence
  LRRK2 RNA guide
auacuuacaguuaugaaacguc

SEQ ID NO: 6120 - RNA, 22 nt, Artificial Sequence
  LRRK2 RNA guide
augacguuucauaacuguaagu

SEQ ID NO: 6121 - RNA, 22 nt, Artificial Sequence
  LRRK2 RNA guide
auggcagcagugguccccaaaa

SEQ ID NO: 6122 - RNA, 22 nt, Artificial Sequence
  LRRK2 RNA guide
augucucaugacguuucauaac

SEQ ID NO: 6123 - RNA, 22 nt, Artificial Sequence
  LRRK2 RNA guide
cagcagugguccccaaaauacu

SEQ ID NO: 6124 - RNA, 22 nt, Artificial Sequence
  LRRK2 RNA guide
cagugguccccaaaauacuuac

SEQ ID NO: 6125 - RNA, 22 nt, Artificial Sequence
  LRRK2 RNA guide
cauaacuguaaguauuuugggg

SEQ ID NO: 6126 - RNA, 22 nt, Artificial Sequence
  LRRK2 RNA guide
caugacguuucauaacuguaag

SEQ ID NO: 6127 - RNA, 22 nt, Artificial Sequence
  LRRK2 RNA guide
cccaaaauacuuacaguuauga

SEQ ID NO: 6128 - RNA, 22 nt, Artificial Sequence
  LRRK2 RNA guide
ccccaaaauacuuacaguuaug

SEQ ID NO: 6129 - RNA, 22 nt, Artificial Sequence
  LRRK2 RNA guide
cucaugacguuucauaacugua

SEQ ID NO: 6130 - RNA, 22 nt, Artificial Sequence
  LRRK2 RNA guide
cuguaaguauuuuggggaccac

SEQ ID NO: 6131 - RNA, 22 nt, Artificial Sequence
  LRRK2 RNA guide
cuuacaguuaugaaacgucaug

SEQ ID NO: 6132 - RNA, 22 nt, Artificial Sequence
  LRRK2 RNA guide
gacguuucauaacuguaaguau

SEQ ID NO: 6133 - RNA, 22 nt, Artificial Sequence
  LRRK2 RNA guide
gaugucucaugacguuucauaa

SEQ ID NO: 6134 - RNA, 22 nt, Artificial Sequence
  LRRK2 RNA guide
gcagcagugguccccaaaauac

SEQ ID NO: 6135 - RNA, 22 nt, Artificial Sequence
  LRRK2 RNA guide
gcagugguccccaaaauacuua

SEQ ID NO: 6136 - RNA, 22 nt, Artificial Sequence
  LRRK2 RNA guide
ggcagcagugguccccaaaaua

SEQ ID NO: 6137 - RNA, 22 nt, Artificial Sequence
  LRRK2 RNA guide
gguccccaaaauacuuacaguu

SEQ ID NO: 6138 - RNA, 22 nt, Artificial Sequence
  LRRK2 RNA guide
guaaguauuuuggggaccacug

SEQ ID NO: 6139 - RNA, 22 nt, Artificial Sequence
  LRRK2 RNA guide
guccccaaaauacuuacaguua

SEQ ID NO: 6140 - RNA, 22 nt, Artificial Sequence
  LRRK2 RNA guide
gucucaugacguuucauaacug

SEQ ID NO: 6141 - RNA, 22 nt, Artificial Sequence
  LRRK2 RNA guide
gugguccccaaaauacuuacag

SEQ ID NO: 6142 - RNA, 22 nt, Artificial Sequence
  LRRK2 RNA guide
uaacuguaaguauuuuggggac

SEQ ID NO: 6143 - RNA, 22 nt, Artificial Sequence
  LRRK2 RNA guide
uaaguauuuuggggaccacugc

SEQ ID NO: 6144 - RNA, 22 nt, Artificial Sequence
  LRRK2 RNA guide
uacuuacaguuaugaaacguca

SEQ ID NO: 6145 - RNA, 22 nt, Artificial Sequence
  LRRK2 RNA guide
ucauaacuguaaguauuuuggg

SEQ ID NO: 6146 - RNA, 22 nt, Artificial Sequence
  LRRK2 RNA guide
ucaugacguuucauaacuguaa

SEQ ID NO: 6147 - RNA, 22 nt, Artificial Sequence
  LRRK2 RNA guide
uccccaaaauacuuacaguuau

SEQ ID NO: 6148 - RNA, 22 nt, Artificial Sequence
  LRRK2 RNA guide
ucucaugacguuucauaacugu

SEQ ID NO: 6149 - RNA, 22 nt, Artificial Sequence
  LRRK2 RNA guide
ugacguuucauaacuguaagua

SEQ ID NO: 6150 - RNA, 22 nt, Artificial Sequence
  LRRK2 RNA guide
uggcagcagugguccccaaaau

SEQ ID NO: 6151 - RNA, 22 nt, Artificial Sequence
  LRRK2 RNA guide
ugguccccaaaauacuuacagu

SEQ ID NO: 6152 - RNA, 22 nt, Artificial Sequence
  LRRK2 RNA guide
uguaaguauuuuggggaccacu

SEQ ID NO: 6153 - RNA, 22 nt, Artificial Sequence
  LRRK2 RNA guide
ugucucaugacguuucauaacu

SEQ ID NO: 6154 - RNA, 22 nt, Artificial Sequence
  LRRK2 RNA guide
uuacaguuaugaaacgucauga

SEQ ID NO: 6155 - RNA, 20 nt, Artificial Sequence
  LRRK2 RNA guide
aacaguuauuaaacgucaug

SEQ ID NO: 6156 - RNA, 20 nt, Artificial Sequence
  LRRK2 RNA guide
aaugaugucucaugacguuu

SEQ ID NO: 6157 - RNA, 20 nt, Artificial Sequence
  LRRK2 RNA guide
acaguuauuaaacgucauga

SEQ ID NO: 6158 - RNA, 20 nt, Artificial Sequence
  LRRK2 RNA guide
acuaacaguuauuaaacguc

SEQ ID NO: 6159 - RNA, 20 nt, Artificial Sequence
  LRRK2 RNA guide
aguuauuaaacgucaugaga

SEQ ID NO: 6160 - RNA, 20 nt, Artificial Sequence
  LRRK2 RNA guide
augaugucucaugacguuua

SEQ ID NO: 6161 - RNA, 20 nt, Artificial Sequence
  LRRK2 RNA guide
augucucaugacguuuaaua

SEQ ID NO: 6162 - RNA, 20 nt, Artificial Sequence
  LRRK2 RNA guide
auuaaacgucaugagacauc

SEQ ID NO: 6163 - RNA, 20 nt, Artificial Sequence
  LRRK2 RNA guide
caguuauuaaacgucaugag

SEQ ID NO: 6164 - RNA, 20 nt, Artificial Sequence
  LRRK2 RNA guide
caugacguuuaauaacuguu

SEQ ID NO: 6165 - RNA, 20 nt, Artificial Sequence
  LRRK2 RNA guide
cccaaaauacuaacaguuau

SEQ ID NO: 6166 - RNA, 20 nt, Artificial Sequence
  LRRK2 RNA guide
ccccaaaauacuaacaguua

SEQ ID NO: 6167 - RNA, 20 nt, Artificial Sequence
  LRRK2 RNA guide
cuaacaguuauuaaacguca

SEQ ID NO: 6168 - RNA, 20 nt, Artificial Sequence
  LRRK2 RNA guide
cucaugacguuuaauaacug

SEQ ID NO: 6169 - RNA, 20 nt, Artificial Sequence
  LRRK2 RNA guide
gacguuuaauaacuguuagu

SEQ ID NO: 6170 - RNA, 20 nt, Artificial Sequence
  LRRK2 RNA guide
gaugucucaugacguuuaau

SEQ ID NO: 6171 - RNA, 20 nt, Artificial Sequence
  LRRK2 RNA guide
gguccccaaaauacuaacag

SEQ ID NO: 6172 - RNA, 20 nt, Artificial Sequence
  LRRK2 RNA guide
guaaugaugucucaugacgu

SEQ ID NO: 6173 - RNA, 20 nt, Artificial Sequence
  LRRK2 RNA guide
guccccaaaauacuaacagu

SEQ ID NO: 6174 - RNA, 20 nt, Artificial Sequence
  LRRK2 RNA guide
gucucaugacguuuaauaac

SEQ ID NO: 6175 - RNA, 20 nt, Artificial Sequence
  LRRK2 RNA guide
guuauuaaacgucaugagac

SEQ ID NO: 6176 - RNA, 20 nt, Artificial Sequence
  LRRK2 RNA guide
uaaugaugucucaugacguu

SEQ ID NO: 6177 - RNA, 20 nt, Artificial Sequence
  LRRK2 RNA guide
uauuaaacgucaugagacau

SEQ ID NO: 6178 - RNA, 20 nt, Artificial Sequence
  LRRK2 RNA guide
ucaugacguuuaauaacugu

SEQ ID NO: 6179 - RNA, 20 nt, Artificial Sequence
  LRRK2 RNA guide
uccccaaaauacuaacaguu

SEQ ID NO: 6180 - RNA, 20 nt, Artificial Sequence
  LRRK2 RNA guide
ucucaugacguuuaauaacu

SEQ ID NO: 6181 - RNA, 20 nt, Artificial Sequence
  LRRK2 RNA guide
ugacguuuaauaacuguuag

SEQ ID NO: 6182 - RNA, 20 nt, Artificial Sequence
  LRRK2 RNA guide
ugaugucucaugacguuuaa

SEQ ID NO: 6183 - RNA, 20 nt, Artificial Sequence
  LRRK2 RNA guide
ugguaaugaugucucaugac

SEQ ID NO: 6184 - RNA, 20 nt, Artificial Sequence
  LRRK2 RNA guide
ugucucaugacguuuaauaa

SEQ ID NO: 6185 - RNA, 20 nt, Artificial Sequence
  LRRK2 RNA guide
uuaaacgucaugagacauca

SEQ ID NO: 6186 - RNA, 20 nt, Artificial Sequence
  LRRK2 RNA guide
uuauuaaacgucaugagaca

SEQ ID NO: 6187 - RNA, 21 nt, Artificial Sequence
  LRRK2 RNA guide
aaugaugucucaugacguuua

SEQ ID NO: 6188 - RNA, 21 nt, Artificial Sequence
  LRRK2 RNA guide
acaguuauuaaacgucaugag

SEQ ID NO: 6189 - RNA, 21 nt, Artificial Sequence
  LRRK2 RNA guide
aguuauuaaacgucaugagac

SEQ ID NO: 6190 - RNA, 21 nt, Artificial Sequence
  LRRK2 RNA guide
augaugucucaugacguuuaa

SEQ ID NO: 6191 - RNA, 21 nt, Artificial Sequence
  LRRK2 RNA guide
auuaaacgucaugagacauca

SEQ ID NO: 6192 - RNA, 21 nt, Artificial Sequence
  LRRK2 RNA guide
caguuauuaaacgucaugaga

SEQ ID NO: 6193 - RNA, 21 nt, Artificial Sequence
  LRRK2 RNA guide
ccccaaaauacuaacaguuau

SEQ ID NO: 6194 - RNA, 21 nt, Artificial Sequence
  LRRK2 RNA guide
cucaugacguuuaauaacugu

SEQ ID NO: 6195 - RNA, 21 nt, Artificial Sequence
  LRRK2 RNA guide
cugguaaugaugucucaugac

SEQ ID NO: 6196 - RNA, 21 nt, Artificial Sequence
  LRRK2 RNA guide
gaugucucaugacguuuaaua

SEQ ID NO: 6197 - RNA, 21 nt, Artificial Sequence
  LRRK2 RNA guide
gguaaugaugucucaugacgu

SEQ ID NO: 6198 - RNA, 21 nt, Artificial Sequence
  LRRK2 RNA guide
gguccccaaaauacuaacagu

SEQ ID NO: 6199 - RNA, 21 nt, Artificial Sequence
  LRRK2 RNA guide
guaaugaugucucaugacguu

SEQ ID NO: 6200 - RNA, 21 nt, Artificial Sequence
  LRRK2 RNA guide
guccccaaaauacuaacaguu

SEQ ID NO: 6201 - RNA, 21 nt, Artificial Sequence
  LRRK2 RNA guide
gucucaugacguuuaauaacu

SEQ ID NO: 6202 - RNA, 21 nt, Artificial Sequence
  LRRK2 RNA guide
guuauuaaacgucaugagaca

SEQ ID NO: 6203 - RNA, 21 nt, Artificial Sequence
  LRRK2 RNA guide
uaaugaugucucaugacguuu

SEQ ID NO: 6204 - RNA, 21 nt, Artificial Sequence
  LRRK2 RNA guide
uauuaaacgucaugagacauc

SEQ ID NO: 6205 - RNA, 21 nt, Artificial Sequence
  LRRK2 RNA guide
uccccaaaauacuaacaguua

SEQ ID NO: 6206 - RNA, 21 nt, Artificial Sequence
  LRRK2 RNA guide
ucucaugacguuuaauaacug

SEQ ID NO: 6207 - RNA, 21 nt, Artificial Sequence
  LRRK2 RNA guide
ugaugucucaugacguuuaau

SEQ ID NO: 6208 - RNA, 21 nt, Artificial Sequence
  LRRK2 RNA guide
ugguaaugaugucucaugacg

SEQ ID NO: 6209 - RNA, 21 nt, Artificial Sequence
  LRRK2 RNA guide
ugguccccaaaauacuaacag

SEQ ID NO: 6210 - RNA, 21 nt, Artificial Sequence
  LRRK2 RNA guide
ugucucaugacguuuaauaac

SEQ ID NO: 6211 - RNA, 21 nt, Artificial Sequence
  LRRK2 RNA guide
uuaaacgucaugagacaucau

SEQ ID NO: 6212 - RNA, 22 nt, Artificial Sequence
  LRRK2 RNA guide
aacaguuauuaaacgucaugag

SEQ ID NO: 6213 - RNA, 22 nt, Artificial Sequence
  LRRK2 RNA guide
aaugaugucucaugacguuuaa

SEQ ID NO: 6214 - RNA, 22 nt, Artificial Sequence
  LRRK2 RNA guide
acaguuauuaaacgucaugaga

SEQ ID NO: 6215 - RNA, 22 nt, Artificial Sequence
  LRRK2 RNA guide
acugguaaugaugucucaugac

SEQ ID NO: 6216 - RNA, 22 nt, Artificial Sequence
  LRRK2 RNA guide
aguuauuaaacgucaugagaca

SEQ ID NO: 6217 - RNA, 22 nt, Artificial Sequence
  LRRK2 RNA guide
augaugucucaugacguuuaau

SEQ ID NO: 6218 - RNA, 22 nt, Artificial Sequence
  LRRK2 RNA guide
augucucaugacguuuaauaac

SEQ ID NO: 6219 - RNA, 22 nt, Artificial Sequence
  LRRK2 RNA guide
auuaaacgucaugagacaucau

SEQ ID NO: 6220 - RNA, 22 nt, Artificial Sequence
  LRRK2 RNA guide
caguuauuaaacgucaugagac

SEQ ID NO: 6221 - RNA, 22 nt, Artificial Sequence
  LRRK2 RNA guide
caugacguuuaauaacuguuag

SEQ ID NO: 6222 - RNA, 22 nt, Artificial Sequence
  LRRK2 RNA guide
ccccaaaauacuaacaguuauu

SEQ ID NO: 6223 - RNA, 22 nt, Artificial Sequence
  LRRK2 RNA guide
cuaacaguuauuaaacgucaug

SEQ ID NO: 6224 - RNA, 22 nt, Artificial Sequence
  LRRK2 RNA guide
cucaugacguuuaauaacuguu

SEQ ID NO: 6225 - RNA, 22 nt, Artificial Sequence
  LRRK2 RNA guide
cugguaaugaugucucaugacg

SEQ ID NO: 6226 - RNA, 22 nt, Artificial Sequence
  LRRK2 RNA guide
gaugucucaugacguuuaauaa

SEQ ID NO: 6227 - RNA, 22 nt, Artificial Sequence
  LRRK2 RNA guide
gguaaugaugucucaugacguu

SEQ ID NO: 6228 - RNA, 22 nt, Artificial Sequence
  LRRK2 RNA guide
gguccccaaaauacuaacaguu

SEQ ID NO: 6229 - RNA, 22 nt, Artificial Sequence
  LRRK2 RNA guide
guaaugaugucucaugacguuu

SEQ ID NO: 6230 - RNA, 22 nt, Artificial Sequence
  LRRK2 RNA guide
guccccaaaauacuaacaguua

SEQ ID NO: 6231 - RNA, 22 nt, Artificial Sequence
  LRRK2 RNA guide
gucucaugacguuuaauaacug

SEQ ID NO: 6232 - RNA, 22 nt, Artificial Sequence
  LRRK2 RNA guide
gugguccccaaaauacuaacag

SEQ ID NO: 6233 - RNA, 22 nt, Artificial Sequence
  LRRK2 RNA guide
guuauuaaacgucaugagacau

SEQ ID NO: 6234 - RNA, 22 nt, Artificial Sequence
  LRRK2 RNA guide
uaaugaugucucaugacguuua

SEQ ID NO: 6235 - RNA, 22 nt, Artificial Sequence
  LRRK2 RNA guide
uauuaaacgucaugagacauca

SEQ ID NO: 6236 - RNA, 22 nt, Artificial Sequence
  LRRK2 RNA guide
uccccaaaauacuaacaguuau

SEQ ID NO: 6237 - RNA, 22 nt, Artificial Sequence
  LRRK2 RNA guide
ucucaugacguuuaauaacugu

SEQ ID NO: 6238 - RNA, 22 nt, Artificial Sequence
  LRRK2 RNA guide
ugaugucucaugacguuuaaua

SEQ ID NO: 6239 - RNA, 22 nt, Artificial Sequence
  LRRK2 RNA guide
ugguaaugaugucucaugacgu

SEQ ID NO: 6240 - RNA, 22 nt, Artificial Sequence
  LRRK2 RNA guide
ugguccccaaaauacuaacagu

SEQ ID NO: 6241 - RNA, 22 nt, Artificial Sequence
  LRRK2 RNA guide
ugucucaugacguuuaauaacu

SEQ ID NO: 6242 - RNA, 22 nt, Artificial Sequence
  LRRK2 RNA guide
uuaaacgucaugagacaucauu

SEQ ID NO: 6243 - RNA, 22 nt, Artificial Sequence
  LRRK2 RNA guide
uuauuaaacgucaugagacauc

SEQ ID NO: 6244 - RNA, 20 nt, Artificial Sequence
  LRRK2 RNA guide
aaaauagcuugaagcgccuc

SEQ ID NO: 6245 - RNA, 20 nt, Artificial Sequence
  LRRK2 RNA guide
aaauagcuugaagcgccucc

SEQ ID NO: 6246 - RNA, 20 nt, Artificial Sequence
  LRRK2 RNA guide
aauagcuugaagcgccucca

SEQ ID NO: 6247 - RNA, 20 nt, Artificial Sequence
  LRRK2 RNA guide
aauguaaaauagcuugaagc

SEQ ID NO: 6248 - RNA, 20 nt, Artificial Sequence
  LRRK2 RNA guide
accagugcagcuggaggcgc

SEQ ID NO: 6249 - RNA, 20 nt, Artificial Sequence
  LRRK2 RNA guide
agcuggaggcgcuucaagcu

SEQ ID NO: 6250 - RNA, 20 nt, Artificial Sequence
  LRRK2 RNA guide
agcuugaagcgccuccagcu

SEQ ID NO: 6251 - RNA, 20 nt, Artificial Sequence
  LRRK2 RNA guide
aggcgcuucaagcuauuuua

SEQ ID NO: 6252 - RNA, 20 nt, Artificial Sequence
  LRRK2 RNA guide
agugcagcuggaggcgcuuc

SEQ ID NO: 6253 - RNA, 20 nt, Artificial Sequence
  LRRK2 RNA guide
auagcuugaagcgccuccag

SEQ ID NO: 6254 - RNA, 20 nt, Artificial Sequence
  LRRK2 RNA guide
auguaaaauagcuugaagcg

SEQ ID NO: 6255 - RNA, 20 nt, Artificial Sequence
  LRRK2 RNA guide
cagcuggaggcgcuucaagc

SEQ ID NO: 6256 - RNA, 20 nt, Artificial Sequence
  LRRK2 RNA guide
cagugcagcuggaggcgcuu

SEQ ID NO: 6257 - RNA, 20 nt, Artificial Sequence
  LRRK2 RNA guide
ccagugcagcuggaggcgcu

SEQ ID NO: 6258 - RNA, 20 nt, Artificial Sequence
  LRRK2 RNA guide
cgcuucaagcuauuuuacau

SEQ ID NO: 6259 - RNA, 20 nt, Artificial Sequence
  LRRK2 RNA guide
cuggaggcgcuucaagcuau

SEQ ID NO: 6260 - RNA, 20 nt, Artificial Sequence
  LRRK2 RNA guide
cuugaagcgccuccagcugc

SEQ ID NO: 6261 - RNA, 20 nt, Artificial Sequence
  LRRK2 RNA guide
gaggcgcuucaagcuauuuu

SEQ ID NO: 6262 - RNA, 20 nt, Artificial Sequence
  LRRK2 RNA guide
gcagcuggaggcgcuucaag

SEQ ID NO: 6263 - RNA, 20 nt, Artificial Sequence
  LRRK2 RNA guide
gcgcuucaagcuauuuuaca

SEQ ID NO: 6264 - RNA, 20 nt, Artificial Sequence
  LRRK2 RNA guide
gcuggaggcgcuucaagcua

SEQ ID NO: 6265 - RNA, 20 nt, Artificial Sequence
  LRRK2 RNA guide
gcuucaagcuauuuuacauu

SEQ ID NO: 6266 - RNA, 20 nt, Artificial Sequence
  LRRK2 RNA guide
gcuugaagcgccuccagcug

SEQ ID NO: 6267 - RNA, 20 nt, Artificial Sequence
  LRRK2 RNA guide
ggaggcgcuucaagcuauuu

SEQ ID NO: 6268 - RNA, 20 nt, Artificial Sequence
  LRRK2 RNA guide
ggcgcuucaagcuauuuuac

SEQ ID NO: 6269 - RNA, 20 nt, Artificial Sequence
  LRRK2 RNA guide
guaaaauagcuugaagcgcc

SEQ ID NO: 6270 - RNA, 20 nt, Artificial Sequence
  LRRK2 RNA guide
gugcagcuggaggcgcuuca

SEQ ID NO: 6271 - RNA, 20 nt, Artificial Sequence
  LRRK2 RNA guide
uaaaauagcuugaagcgccu

SEQ ID NO: 6272 - RNA, 20 nt, Artificial Sequence
  LRRK2 RNA guide
uaccagugcagcuggaggcg

SEQ ID NO: 6273 - RNA, 20 nt, Artificial Sequence
  LRRK2 RNA guide
uagcuugaagcgccuccagc

SEQ ID NO: 6274 - RNA, 20 nt, Artificial Sequence
  LRRK2 RNA guide
ugcagcuggaggcgcuucaa

SEQ ID NO: 6275 - RNA, 20 nt, Artificial Sequence
  LRRK2 RNA guide
uggaggcgcuucaagcuauu

SEQ ID NO: 6276 - RNA, 20 nt, Artificial Sequence
  LRRK2 RNA guide
uguaaaauagcuugaagcgc

SEQ ID NO: 6277 - RNA, 20 nt, Artificial Sequence
  LRRK2 RNA guide
uugaagcgccuccagcugca

SEQ ID NO: 6278 - RNA, 21 nt, Artificial Sequence
  LRRK2 RNA guide
aaaauagcuugaagcgccucc

SEQ ID NO: 6279 - RNA, 21 nt, Artificial Sequence
  LRRK2 RNA guide
aaauagcuugaagcgccucca

SEQ ID NO: 6280 - RNA, 21 nt, Artificial Sequence
  LRRK2 RNA guide
aauagcuugaagcgccuccag

SEQ ID NO: 6281 - RNA, 21 nt, Artificial Sequence
  LRRK2 RNA guide
aauguaaaauagcuugaagcg

SEQ ID NO: 6282 - RNA, 21 nt, Artificial Sequence
  LRRK2 RNA guide
accagugcagcuggaggcgcu

SEQ ID NO: 6283 - RNA, 21 nt, Artificial Sequence
  LRRK2 RNA guide
agcuggaggcgcuucaagcua

SEQ ID NO: 6284 - RNA, 21 nt, Artificial Sequence
  LRRK2 RNA guide
agcuugaagcgccuccagcug

SEQ ID NO: 6285 - RNA, 21 nt, Artificial Sequence
  LRRK2 RNA guide
aggcgcuucaagcuauuuuac

SEQ ID NO: 6286 - RNA, 21 nt, Artificial Sequence
  LRRK2 RNA guide
agugcagcuggaggcgcuuca

SEQ ID NO: 6287 - RNA, 21 nt, Artificial Sequence
  LRRK2 RNA guide
auagcuugaagcgccuccagc

SEQ ID NO: 6288 - RNA, 21 nt, Artificial Sequence
  LRRK2 RNA guide
auguaaaauagcuugaagcgc

SEQ ID NO: 6289 - RNA, 21 nt, Artificial Sequence
  LRRK2 RNA guide
cagcuggaggcgcuucaagcu

SEQ ID NO: 6290 - RNA, 21 nt, Artificial Sequence
  LRRK2 RNA guide
cagugcagcuggaggcgcuuc

SEQ ID NO: 6291 - RNA, 21 nt, Artificial Sequence
  LRRK2 RNA guide
ccagugcagcuggaggcgcuu

SEQ ID NO: 6292 - RNA, 21 nt, Artificial Sequence
  LRRK2 RNA guide
cgcuucaagcuauuuuacauu

SEQ ID NO: 6293 - RNA, 21 nt, Artificial Sequence
  LRRK2 RNA guide
cuggaggcgcuucaagcuauu

SEQ ID NO: 6294 - RNA, 21 nt, Artificial Sequence
  LRRK2 RNA guide
cuugaagcgccuccagcugca

SEQ ID NO: 6295 - RNA, 21 nt, Artificial Sequence
  LRRK2 RNA guide
gaggcgcuucaagcuauuuua

SEQ ID NO: 6296 - RNA, 21 nt, Artificial Sequence
  LRRK2 RNA guide
gcagcuggaggcgcuucaagc

SEQ ID NO: 6297 - RNA, 21 nt, Artificial Sequence
  LRRK2 RNA guide
gcgcuucaagcuauuuuacau

SEQ ID NO: 6298 - RNA, 21 nt, Artificial Sequence
  LRRK2 RNA guide
gcuggaggcgcuucaagcuau

SEQ ID NO: 6299 - RNA, 21 nt, Artificial Sequence
  LRRK2 RNA guide
gcuugaagcgccuccagcugc

SEQ ID NO: 6300 - RNA, 21 nt, Artificial Sequence
  LRRK2 RNA guide
ggaggcgcuucaagcuauuuu

SEQ ID NO: 6301 - RNA, 21 nt, Artificial Sequence
  LRRK2 RNA guide
ggcgcuucaagcuauuuuaca

SEQ ID NO: 6302 - RNA, 21 nt, Artificial Sequence
  LRRK2 RNA guide
guaaaauagcuugaagcgccu

SEQ ID NO: 6303 - RNA, 21 nt, Artificial Sequence
  LRRK2 RNA guide
gugcagcuggaggcgcuucaa

SEQ ID NO: 6304 - RNA, 21 nt, Artificial Sequence
  LRRK2 RNA guide
uaaaauagcuugaagcgccuc

SEQ ID NO: 6305 - RNA, 21 nt, Artificial Sequence
  LRRK2 RNA guide
uaccagugcagcuggaggcgc

SEQ ID NO: 6306 - RNA, 21 nt, Artificial Sequence
  LRRK2 RNA guide
uagcuugaagcgccuccagcu

SEQ ID NO: 6307 - RNA, 21 nt, Artificial Sequence
  LRRK2 RNA guide
ugcagcuggaggcgcuucaag

SEQ ID NO: 6308 - RNA, 21 nt, Artificial Sequence
  LRRK2 RNA guide
uggaggcgcuucaagcuauuu

SEQ ID NO: 6309 - RNA, 21 nt, Artificial Sequence
  LRRK2 RNA guide
uguaaaauagcuugaagcgcc

SEQ ID NO: 6310 - RNA, 21 nt, Artificial Sequence
  LRRK2 RNA guide
uuaccagugcagcuggaggcg

SEQ ID NO: 6311 - RNA, 21 nt, Artificial Sequence
  LRRK2 RNA guide
uugaagcgccuccagcugcac

SEQ ID NO: 6312 - RNA, 22 nt, Artificial Sequence
  LRRK2 RNA guide
aaaauagcuugaagcgccucca

SEQ ID NO: 6313 - RNA, 22 nt, Artificial Sequence
  LRRK2 RNA guide
aaauagcuugaagcgccuccag

SEQ ID NO: 6314 - RNA, 22 nt, Artificial Sequence
  LRRK2 RNA guide
aaauguaaaauagcuugaagcg

SEQ ID NO: 6315 - RNA, 22 nt, Artificial Sequence
  LRRK2 RNA guide
aauagcuugaagcgccuccagc

SEQ ID NO: 6316 - RNA, 22 nt, Artificial Sequence
  LRRK2 RNA guide
aauguaaaauagcuugaagcgc

SEQ ID NO: 6317 - RNA, 22 nt, Artificial Sequence
  LRRK2 RNA guide
accagugcagcuggaggcgcuu

SEQ ID NO: 6318 - RNA, 22 nt, Artificial Sequence
  LRRK2 RNA guide
agcuggaggcgcuucaagcuau

SEQ ID NO: 6319 - RNA, 22 nt, Artificial Sequence
  LRRK2 RNA guide
agcuugaagcgccuccagcugc

SEQ ID NO: 6320 - RNA, 22 nt, Artificial Sequence
  LRRK2 RNA guide
aggcgcuucaagcuauuuuaca

SEQ ID NO: 6321 - RNA, 22 nt, Artificial Sequence
  LRRK2 RNA guide
agugcagcuggaggcgcuucaa

SEQ ID NO: 6322 - RNA, 22 nt, Artificial Sequence
  LRRK2 RNA guide
auagcuugaagcgccuccagcu

SEQ ID NO: 6323 - RNA, 22 nt, Artificial Sequence
  LRRK2 RNA guide
auguaaaauagcuugaagcgcc

SEQ ID NO: 6324 - RNA, 22 nt, Artificial Sequence
  LRRK2 RNA guide
auuaccagugcagcuggaggcg

SEQ ID NO: 6325 - RNA, 22 nt, Artificial Sequence
  LRRK2 RNA guide
cagcuggaggcgcuucaagcua

SEQ ID NO: 6326 - RNA, 22 nt, Artificial Sequence
  LRRK2 RNA guide
cagugcagcuggaggcgcuuca

SEQ ID NO: 6327 - RNA, 22 nt, Artificial Sequence
  LRRK2 RNA guide
ccagugcagcuggaggcgcuuc

SEQ ID NO: 6328 - RNA, 22 nt, Artificial Sequence
  LRRK2 RNA guide
cgcuucaagcuauuuuacauuu

SEQ ID NO: 6329 - RNA, 22 nt, Artificial Sequence
  LRRK2 RNA guide
cuggaggcgcuucaagcuauuu

SEQ ID NO: 6330 - RNA, 22 nt, Artificial Sequence
  LRRK2 RNA guide
cuugaagcgccuccagcugcac

SEQ ID NO: 6331 - RNA, 22 nt, Artificial Sequence
  LRRK2 RNA guide
gaggcgcuucaagcuauuuuac

SEQ ID NO: 6332 - RNA, 22 nt, Artificial Sequence
  LRRK2 RNA guide
gcagcuggaggcgcuucaagcu

SEQ ID NO: 6333 - RNA, 22 nt, Artificial Sequence
  LRRK2 RNA guide
gcgcuucaagcuauuuuacauu

SEQ ID NO: 6334 - RNA, 22 nt, Artificial Sequence
  LRRK2 RNA guide
gcuggaggcgcuucaagcuauu

SEQ ID NO: 6335 - RNA, 22 nt, Artificial Sequence
  LRRK2 RNA guide
gcuugaagcgccuccagcugca

SEQ ID NO: 6336 - RNA, 22 nt, Artificial Sequence
  LRRK2 RNA guide
ggaggcgcuucaagcuauuuua

SEQ ID NO: 6337 - RNA, 22 nt, Artificial Sequence
  LRRK2 RNA guide
ggcgcuucaagcuauuuuacau

SEQ ID NO: 6338 - RNA, 22 nt, Artificial Sequence
  LRRK2 RNA guide
guaaaauagcuugaagcgccuc

SEQ ID NO: 6339 - RNA, 22 nt, Artificial Sequence
  LRRK2 RNA guide
gugcagcuggaggcgcuucaag

SEQ ID NO: 6340 - RNA, 22 nt, Artificial Sequence
  LRRK2 RNA guide
uaaaauagcuugaagcgccucc

SEQ ID NO: 6341 - RNA, 22 nt, Artificial Sequence
  LRRK2 RNA guide
uaccagugcagcuggaggcgcu

SEQ ID NO: 6342 - RNA, 22 nt, Artificial Sequence
  LRRK2 RNA guide
uagcuugaagcgccuccagcug

SEQ ID NO: 6343 - RNA, 22 nt, Artificial Sequence
  LRRK2 RNA guide
ugcagcuggaggcgcuucaagc

SEQ ID NO: 6344 - RNA, 22 nt, Artificial Sequence
  LRRK2 RNA guide
uggaggcgcuucaagcuauuuu

SEQ ID NO: 6345 - RNA, 22 nt, Artificial Sequence
  LRRK2 RNA guide
uguaaaauagcuugaagcgccu

SEQ ID NO: 6346 - RNA, 22 nt, Artificial Sequence
  LRRK2 RNA guide
uuaccagugcagcuggaggcgc

SEQ ID NO: 6347 - RNA, 22 nt, Artificial Sequence
  LRRK2 RNA guide
uugaagcgccuccagcugcacu

SEQ ID NO: 6348 - RNA, 20 nt, Artificial Sequence
  LRRK2 RNA guide
aaauucuguauccuccccgg

SEQ ID NO: 6349 - RNA, 20 nt, Artificial Sequence
  LRRK2 RNA guide
aagaauccggggaggauaca

SEQ ID NO: 6350 - RNA, 20 nt, Artificial Sequence
  LRRK2 RNA guide
aauccggggaggauacagaa

SEQ ID NO: 6351 - RNA, 20 nt, Artificial Sequence
  LRRK2 RNA guide
aauucuguauccuccccgga

SEQ ID NO: 6352 - RNA, 20 nt, Artificial Sequence
  LRRK2 RNA guide
agaagaauccggggaggaua

SEQ ID NO: 6353 - RNA, 20 nt, Artificial Sequence
  LRRK2 RNA guide
agaauccggggaggauacag

SEQ ID NO: 6354 - RNA, 20 nt, Artificial Sequence
  LRRK2 RNA guide
aggcaugccagaagaauccg

SEQ ID NO: 6355 - RNA, 20 nt, Artificial Sequence
  LRRK2 RNA guide
auccggggaggauacagaau

SEQ ID NO: 6356 - RNA, 20 nt, Artificial Sequence
  LRRK2 RNA guide
auccuccccggauucuucug

SEQ ID NO: 6357 - RNA, 20 nt, Artificial Sequence
  LRRK2 RNA guide
augaugaaauucuguauccu

SEQ ID NO: 6358 - RNA, 20 nt, Artificial Sequence
  LRRK2 RNA guide
augccagaagaauccgggga

SEQ ID NO: 6359 - RNA, 20 nt, Artificial Sequence
  LRRK2 RNA guide
auucuguauccuccccggau

SEQ ID NO: 6360 - RNA, 20 nt, Artificial Sequence
  LRRK2 RNA guide
auuuaggcaugccagaagaa

SEQ ID NO: 6361 - RNA, 20 nt, Artificial Sequence
  LRRK2 RNA guide
cagaagaauccggggaggau

SEQ ID NO: 6362 - RNA, 20 nt, Artificial Sequence
  LRRK2 RNA guide
caugccagaagaauccgggg

SEQ ID NO: 6363 - RNA, 20 nt, Artificial Sequence
  LRRK2 RNA guide
cauuuaggcaugccagaaga

SEQ ID NO: 6364 - RNA, 20 nt, Artificial Sequence
  LRRK2 RNA guide
ccagaagaauccggggagga

SEQ ID NO: 6365 - RNA, 20 nt, Artificial Sequence
  LRRK2 RNA guide
ccccggauucuucuggcaug

SEQ ID NO: 6366 - RNA, 20 nt, Artificial Sequence
  LRRK2 RNA guide
cccggauucuucuggcaugc

SEQ ID NO: 6367 - RNA, 20 nt, Artificial Sequence
  LRRK2 RNA guide
ccggauucuucuggcaugcc

SEQ ID NO: 6368 - RNA, 20 nt, Artificial Sequence
  LRRK2 RNA guide
ccggggaggauacagaauuu

SEQ ID NO: 6369 - RNA, 20 nt, Artificial Sequence
  LRRK2 RNA guide
ccuccccggauucuucuggc

SEQ ID NO: 6370 - RNA, 20 nt, Artificial Sequence
  LRRK2 RNA guide
cggggaggauacagaauuuc

SEQ ID NO: 6371 - RNA, 20 nt, Artificial Sequence
  LRRK2 RNA guide
cuccccggauucuucuggca

SEQ ID NO: 6372 - RNA, 20 nt, Artificial Sequence
  LRRK2 RNA guide
cuguauccuccccggauucu

SEQ ID NO: 6373 - RNA, 20 nt, Artificial Sequence
  LRRK2 RNA guide
gaaauucuguauccuccccg

SEQ ID NO: 6374 - RNA, 20 nt, Artificial Sequence
  LRRK2 RNA guide
gaagaauccggggaggauac

SEQ ID NO: 6375 - RNA, 20 nt, Artificial Sequence
  LRRK2 RNA guide
gaauccggggaggauacaga

SEQ ID NO: 6376 - RNA, 20 nt, Artificial Sequence
  LRRK2 RNA guide
gaugaaauucuguauccucc

SEQ ID NO: 6377 - RNA, 20 nt, Artificial Sequence
  LRRK2 RNA guide
gcaugccagaagaauccggg

SEQ ID NO: 6378 - RNA, 20 nt, Artificial Sequence
  LRRK2 RNA guide
gccagaagaauccggggagg

SEQ ID NO: 6379 - RNA, 20 nt, Artificial Sequence
  LRRK2 RNA guide
ggcaugccagaagaauccgg

SEQ ID NO: 6380 - RNA, 20 nt, Artificial Sequence
  LRRK2 RNA guide
guauccuccccggauucuuc

SEQ ID NO: 6381 - RNA, 20 nt, Artificial Sequence
  LRRK2 RNA guide
uaggcaugccagaagaaucc

SEQ ID NO: 6382 - RNA, 20 nt, Artificial Sequence
  LRRK2 RNA guide
uauccuccccggauucuucu

SEQ ID NO: 6383 - RNA, 20 nt, Artificial Sequence
  LRRK2 RNA guide
uaugaugaaauucuguaucc

SEQ ID NO: 6384 - RNA, 20 nt, Artificial Sequence
  LRRK2 RNA guide
uccccggauucuucuggcau

SEQ ID NO: 6385 - RNA, 20 nt, Artificial Sequence
  LRRK2 RNA guide
uccggggaggauacagaauu

SEQ ID NO: 6386 - RNA, 20 nt, Artificial Sequence
  LRRK2 RNA guide
uccuccccggauucuucugg

SEQ ID NO: 6387 - RNA, 20 nt, Artificial Sequence
  LRRK2 RNA guide
ucuguauccuccccggauuc

SEQ ID NO: 6388 - RNA, 20 nt, Artificial Sequence
  LRRK2 RNA guide
ugaaauucuguauccucccc

SEQ ID NO: 6389 - RNA, 20 nt, Artificial Sequence
  LRRK2 RNA guide
ugaugaaauucuguauccuc

SEQ ID NO: 6390 - RNA, 20 nt, Artificial Sequence
  LRRK2 RNA guide
ugccagaagaauccggggag

SEQ ID NO: 6391 - RNA, 20 nt, Artificial Sequence
  LRRK2 RNA guide
uguauccuccccggauucuu

SEQ ID NO: 6392 - RNA, 20 nt, Artificial Sequence
  LRRK2 RNA guide
uuaggcaugccagaagaauc

SEQ ID NO: 6393 - RNA, 20 nt, Artificial Sequence
  LRRK2 RNA guide
uucuguauccuccccggauu

SEQ ID NO: 6394 - RNA, 20 nt, Artificial Sequence
  LRRK2 RNA guide
uuuaggcaugccagaagaau

SEQ ID NO: 6395 - RNA, 21 nt, Artificial Sequence
  LRRK2 RNA guide
aaauucuguauccuccccgga

SEQ ID NO: 6396 - RNA, 21 nt, Artificial Sequence
  LRRK2 RNA guide
aagaauccggggaggauacag

SEQ ID NO: 6397 - RNA, 21 nt, Artificial Sequence
  LRRK2 RNA guide
aauccggggaggauacagaau

SEQ ID NO: 6398 - RNA, 21 nt, Artificial Sequence
  LRRK2 RNA guide
aauucuguauccuccccggau

SEQ ID NO: 6399 - RNA, 21 nt, Artificial Sequence
  LRRK2 RNA guide
agaagaauccggggaggauac

SEQ ID NO: 6400 - RNA, 21 nt, Artificial Sequence
  LRRK2 RNA guide
agaauccggggaggauacaga

SEQ ID NO: 6401 - RNA, 21 nt, Artificial Sequence
  LRRK2 RNA guide
aggcaugccagaagaauccgg

SEQ ID NO: 6402 - RNA, 21 nt, Artificial Sequence
  LRRK2 RNA guide
auccggggaggauacagaauu

SEQ ID NO: 6403 - RNA, 21 nt, Artificial Sequence
  LRRK2 RNA guide
auccuccccggauucuucugg

SEQ ID NO: 6404 - RNA, 21 nt, Artificial Sequence
  LRRK2 RNA guide
augaaauucuguauccucccc

SEQ ID NO: 6405 - RNA, 21 nt, Artificial Sequence
  LRRK2 RNA guide
augaugaaauucuguauccuc

SEQ ID NO: 6406 - RNA, 21 nt, Artificial Sequence
  LRRK2 RNA guide
augccagaagaauccggggag

SEQ ID NO: 6407 - RNA, 21 nt, Artificial Sequence
  LRRK2 RNA guide
auucuguauccuccccggauu

SEQ ID NO: 6408 - RNA, 21 nt, Artificial Sequence
  LRRK2 RNA guide
auuuaggcaugccagaagaau

SEQ ID NO: 6409 - RNA, 21 nt, Artificial Sequence
  LRRK2 RNA guide
cagaagaauccggggaggaua

SEQ ID NO: 6410 - RNA, 21 nt, Artificial Sequence
  LRRK2 RNA guide
caugccagaagaauccgggga

SEQ ID NO: 6411 - RNA, 21 nt, Artificial Sequence
  LRRK2 RNA guide
cauuuaggcaugccagaagaa

SEQ ID NO: 6412 - RNA, 21 nt, Artificial Sequence
  LRRK2 RNA guide
ccagaagaauccggggaggau

SEQ ID NO: 6413 - RNA, 21 nt, Artificial Sequence
  LRRK2 RNA guide
ccccggauucuucuggcaugc

SEQ ID NO: 6414 - RNA, 21 nt, Artificial Sequence
  LRRK2 RNA guide
cccggauucuucuggcaugcc

SEQ ID NO: 6415 - RNA, 21 nt, Artificial Sequence
  LRRK2 RNA guide
ccggauucuucuggcaugccu

SEQ ID NO: 6416 - RNA, 21 nt, Artificial Sequence
  LRRK2 RNA guide
ccggggaggauacagaauuuc

SEQ ID NO: 6417 - RNA, 21 nt, Artificial Sequence
  LRRK2 RNA guide
ccuccccggauucuucuggca

SEQ ID NO: 6418 - RNA, 21 nt, Artificial Sequence
  LRRK2 RNA guide
cggggaggauacagaauuuca

SEQ ID NO: 6419 - RNA, 21 nt, Artificial Sequence
  LRRK2 RNA guide
cuccccggauucuucuggcau

SEQ ID NO: 6420 - RNA, 21 nt, Artificial Sequence
  LRRK2 RNA guide
cuguauccuccccggauucuu

SEQ ID NO: 6421 - RNA, 21 nt, Artificial Sequence
  LRRK2 RNA guide
gaaauucuguauccuccccgg

SEQ ID NO: 6422 - RNA, 21 nt, Artificial Sequence
  LRRK2 RNA guide
gaagaauccggggaggauaca

SEQ ID NO: 6423 - RNA, 21 nt, Artificial Sequence
  LRRK2 RNA guide
gaauccggggaggauacagaa

SEQ ID NO: 6424 - RNA, 21 nt, Artificial Sequence
  LRRK2 RNA guide
gaugaaauucuguauccuccc

SEQ ID NO: 6425 - RNA, 21 nt, Artificial Sequence
  LRRK2 RNA guide
gcaugccagaagaauccgggg

SEQ ID NO: 6426 - RNA, 21 nt, Artificial Sequence
  LRRK2 RNA guide
gcauuuaggcaugccagaaga

SEQ ID NO: 6427 - RNA, 21 nt, Artificial Sequence
  LRRK2 RNA guide
gccagaagaauccggggagga

SEQ ID NO: 6428 - RNA, 21 nt, Artificial Sequence
  LRRK2 RNA guide
ggcaugccagaagaauccggg

SEQ ID NO: 6429 - RNA, 21 nt, Artificial Sequence
  LRRK2 RNA guide
guauccuccccggauucuucu

SEQ ID NO: 6430 - RNA, 21 nt, Artificial Sequence
  LRRK2 RNA guide
uaggcaugccagaagaauccg

SEQ ID NO: 6431 - RNA, 21 nt, Artificial Sequence
  LRRK2 RNA guide
uauccuccccggauucuucug

SEQ ID NO: 6432 - RNA, 21 nt, Artificial Sequence
  LRRK2 RNA guide
uccccggauucuucuggcaug

SEQ ID NO: 6433 - RNA, 21 nt, Artificial Sequence
  LRRK2 RNA guide
uccggggaggauacagaauuu

SEQ ID NO: 6434 - RNA, 21 nt, Artificial Sequence
  LRRK2 RNA guide
uccuccccggauucuucuggc

SEQ ID NO: 6435 - RNA, 21 nt, Artificial Sequence
  LRRK2 RNA guide
ucuguauccuccccggauucu

SEQ ID NO: 6436 - RNA, 21 nt, Artificial Sequence
  LRRK2 RNA guide
ugaaauucuguauccuccccg

SEQ ID NO: 6437 - RNA, 21 nt, Artificial Sequence
  LRRK2 RNA guide
ugaugaaauucuguauccucc

SEQ ID NO: 6438 - RNA, 21 nt, Artificial Sequence
  LRRK2 RNA guide
ugccagaagaauccggggagg

SEQ ID NO: 6439 - RNA, 21 nt, Artificial Sequence
  LRRK2 RNA guide
uguauccuccccggauucuuc

SEQ ID NO: 6440 - RNA, 21 nt, Artificial Sequence
  LRRK2 RNA guide
uuaggcaugccagaagaaucc

SEQ ID NO: 6441 - RNA, 21 nt, Artificial Sequence
  LRRK2 RNA guide
uucuguauccuccccggauuc

SEQ ID NO: 6442 - RNA, 21 nt, Artificial Sequence
  LRRK2 RNA guide
uuuaggcaugccagaagaauc

SEQ ID NO: 6443 - RNA, 22 nt, Artificial Sequence
  LRRK2 RNA guide
aaauucuguauccuccccggau

SEQ ID NO: 6444 - RNA, 22 nt, Artificial Sequence
  LRRK2 RNA guide
aagaauccggggaggauacaga

SEQ ID NO: 6445 - RNA, 22 nt, Artificial Sequence
  LRRK2 RNA guide
aauccggggaggauacagaauu

SEQ ID NO: 6446 - RNA, 22 nt, Artificial Sequence
  LRRK2 RNA guide
aauucuguauccuccccggauu

SEQ ID NO: 6447 - RNA, 22 nt, Artificial Sequence
  LRRK2 RNA guide
agaagaauccggggaggauaca

SEQ ID NO: 6448 - RNA, 22 nt, Artificial Sequence
  LRRK2 RNA guide
agaauccggggaggauacagaa

SEQ ID NO: 6449 - RNA, 22 nt, Artificial Sequence
  LRRK2 RNA guide
aggcaugccagaagaauccggg

SEQ ID NO: 6450 - RNA, 22 nt, Artificial Sequence
  LRRK2 RNA guide
auccggggaggauacagaauuu

SEQ ID NO: 6451 - RNA, 22 nt, Artificial Sequence
  LRRK2 RNA guide
auccuccccggauucuucuggc

SEQ ID NO: 6452 - RNA, 22 nt, Artificial Sequence
  LRRK2 RNA guide
augaaauucuguauccuccccg

SEQ ID NO: 6453 - RNA, 22 nt, Artificial Sequence
  LRRK2 RNA guide
augaugaaauucuguauccucc

SEQ ID NO: 6454 - RNA, 22 nt, Artificial Sequence
  LRRK2 RNA guide
augccagaagaauccggggagg

SEQ ID NO: 6455 - RNA, 22 nt, Artificial Sequence
  LRRK2 RNA guide
auucuguauccuccccggauuc

SEQ ID NO: 6456 - RNA, 22 nt, Artificial Sequence
  LRRK2 RNA guide
auuuaggcaugccagaagaauc

SEQ ID NO: 6457 - RNA, 22 nt, Artificial Sequence
  LRRK2 RNA guide
cagaagaauccggggaggauac

SEQ ID NO: 6458 - RNA, 22 nt, Artificial Sequence
  LRRK2 RNA guide
caugccagaagaauccggggag

SEQ ID NO: 6459 - RNA, 22 nt, Artificial Sequence
  LRRK2 RNA guide
cauuuaggcaugccagaagaau

SEQ ID NO: 6460 - RNA, 22 nt, Artificial Sequence
  LRRK2 RNA guide
ccagaagaauccggggaggaua

SEQ ID NO: 6461 - RNA, 22 nt, Artificial Sequence
  LRRK2 RNA guide
ccccggauucuucuggcaugcc

SEQ ID NO: 6462 - RNA, 22 nt, Artificial Sequence
  LRRK2 RNA guide
cccggauucuucuggcaugccu

SEQ ID NO: 6463 - RNA, 22 nt, Artificial Sequence
  LRRK2 RNA guide
ccggauucuucuggcaugccua

SEQ ID NO: 6464 - RNA, 22 nt, Artificial Sequence
  LRRK2 RNA guide
ccggggaggauacagaauuuca

SEQ ID NO: 6465 - RNA, 22 nt, Artificial Sequence
  LRRK2 RNA guide
ccuccccggauucuucuggcau

SEQ ID NO: 6466 - RNA, 22 nt, Artificial Sequence
  LRRK2 RNA guide
cggggaggauacagaauuucau

SEQ ID NO: 6467 - RNA, 22 nt, Artificial Sequence
  LRRK2 RNA guide
cuccccggauucuucuggcaug

SEQ ID NO: 6468 - RNA, 22 nt, Artificial Sequence
  LRRK2 RNA guide
cuguauccuccccggauucuuc

SEQ ID NO: 6469 - RNA, 22 nt, Artificial Sequence
  LRRK2 RNA guide
cuuaugaugaaauucuguaucc

SEQ ID NO: 6470 - RNA, 22 nt, Artificial Sequence
  LRRK2 RNA guide
gaaauucuguauccuccccgga

SEQ ID NO: 6471 - RNA, 22 nt, Artificial Sequence
  LRRK2 RNA guide
gaagaauccggggaggauacag

SEQ ID NO: 6472 - RNA, 22 nt, Artificial Sequence
  LRRK2 RNA guide
gaauccggggaggauacagaau

SEQ ID NO: 6473 - RNA, 22 nt, Artificial Sequence
  LRRK2 RNA guide
gaugaaauucuguauccucccc

SEQ ID NO: 6474 - RNA, 22 nt, Artificial Sequence
  LRRK2 RNA guide
gcaugccagaagaauccgggga

SEQ ID NO: 6475 - RNA, 22 nt, Artificial Sequence
  LRRK2 RNA guide
gcauuuaggcaugccagaagaa

SEQ ID NO: 6476 - RNA, 22 nt, Artificial Sequence
  LRRK2 RNA guide
gccagaagaauccggggaggau

SEQ ID NO: 6477 - RNA, 22 nt, Artificial Sequence
  LRRK2 RNA guide
ggcaugccagaagaauccgggg

SEQ ID NO: 6478 - RNA, 22 nt, Artificial Sequence
  LRRK2 RNA guide
guauccuccccggauucuucug

SEQ ID NO: 6479 - RNA, 22 nt, Artificial Sequence
  LRRK2 RNA guide
uaggcaugccagaagaauccgg

SEQ ID NO: 6480 - RNA, 22 nt, Artificial Sequence
  LRRK2 RNA guide
uauccuccccggauucuucugg

SEQ ID NO: 6481 - RNA, 22 nt, Artificial Sequence
  LRRK2 RNA guide
uaugaugaaauucuguauccuc

SEQ ID NO: 6482 - RNA, 22 nt, Artificial Sequence
  LRRK2 RNA guide
uccccggauucuucuggcaugc

SEQ ID NO: 6483 - RNA, 22 nt, Artificial Sequence
  LRRK2 RNA guide
uccggggaggauacagaauuuc

SEQ ID NO: 6484 - RNA, 22 nt, Artificial Sequence
  LRRK2 RNA guide
uccuccccggauucuucuggca

SEQ ID NO: 6485 - RNA, 22 nt, Artificial Sequence
  LRRK2 RNA guide
ucuguauccuccccggauucuu

SEQ ID NO: 6486 - RNA, 22 nt, Artificial Sequence
  LRRK2 RNA guide
ugaaauucuguauccuccccgg

SEQ ID NO: 6487 - RNA, 22 nt, Artificial Sequence
  LRRK2 RNA guide
ugaugaaauucuguauccuccc

SEQ ID NO: 6488 - RNA, 22 nt, Artificial Sequence
  LRRK2 RNA guide
ugcauuuaggcaugccagaaga

SEQ ID NO: 6489 - RNA, 22 nt, Artificial Sequence
  LRRK2 RNA guide
ugccagaagaauccggggagga

SEQ ID NO: 6490 - RNA, 22 nt, Artificial Sequence
  LRRK2 RNA guide
uguauccuccccggauucuucu

SEQ ID NO: 6491 - RNA, 22 nt, Artificial Sequence
  LRRK2 RNA guide
uuaggcaugccagaagaauccg

SEQ ID NO: 6492 - RNA, 22 nt, Artificial Sequence
  LRRK2 RNA guide
uucuguauccuccccggauucu

SEQ ID NO: 6493 - RNA, 22 nt, Artificial Sequence
  LRRK2 RNA guide
uuuaggcaugccagaagaaucc

SEQ ID NO: 6494 - RNA, 20 nt, Artificial Sequence
  LRRK2 RNA guide
aaagcugcuaggaccaguuc

SEQ ID NO: 6495 - RNA, 20 nt, Artificial Sequence
  LRRK2 RNA guide
aagaaugauauucacgaacu

SEQ ID NO: 6496 - RNA, 20 nt, Artificial Sequence
  LRRK2 RNA guide
aagcugcuaggaccaguucg

SEQ ID NO: 6497 - RNA, 20 nt, Artificial Sequence
  LRRK2 RNA guide
aaugauauucacgaacuggu

SEQ ID NO: 6498 - RNA, 20 nt, Artificial Sequence
  LRRK2 RNA guide
accaguucgugaauaucauu

SEQ ID NO: 6499 - RNA, 20 nt, Artificial Sequence
  LRRK2 RNA guide
acgaacugguccuagcagcu

SEQ ID NO: 6500 - RNA, 20 nt, Artificial Sequence
  LRRK2 RNA guide
agaaugauauucacgaacug

SEQ ID NO: 6501 - RNA, 20 nt, Artificial Sequence
  LRRK2 RNA guide
agcugcuaggaccaguucgu

SEQ ID NO: 6502 - RNA, 20 nt, Artificial Sequence
  LRRK2 RNA guide
aggaccaguucgugaauauc

SEQ ID NO: 6503 - RNA, 20 nt, Artificial Sequence
  LRRK2 RNA guide
aguucgugaauaucauucuu

SEQ ID NO: 6504 - RNA, 20 nt, Artificial Sequence
  LRRK2 RNA guide
auauucacgaacugguccua

SEQ ID NO: 6505 - RNA, 20 nt, Artificial Sequence
  LRRK2 RNA guide
augauauucacgaacugguc

SEQ ID NO: 6506 - RNA, 20 nt, Artificial Sequence
  LRRK2 RNA guide
auucacgaacugguccuagc

SEQ ID NO: 6507 - RNA, 20 nt, Artificial Sequence
  LRRK2 RNA guide
caagaaugauauucacgaac

SEQ ID NO: 6508 - RNA, 20 nt, Artificial Sequence
  LRRK2 RNA guide
cacgaacugguccuagcagc

SEQ ID NO: 6509 - RNA, 20 nt, Artificial Sequence
  LRRK2 RNA guide
caguguuucaagaaugauau

SEQ ID NO: 6510 - RNA, 20 nt, Artificial Sequence
  LRRK2 RNA guide
caguucgugaauaucauucu

SEQ ID NO: 6511 - RNA, 20 nt, Artificial Sequence
  LRRK2 RNA guide
ccaguucgugaauaucauuc

SEQ ID NO: 6512 - RNA, 20 nt, Artificial Sequence
  LRRK2 RNA guide
cgaacugguccuagcagcuu

SEQ ID NO: 6513 - RNA, 20 nt, Artificial Sequence
  LRRK2 RNA guide
cuaggaccaguucgugaaua

SEQ ID NO: 6514 - RNA, 20 nt, Artificial Sequence
  LRRK2 RNA guide
cugcuaggaccaguucguga

SEQ ID NO: 6515 - RNA, 20 nt, Artificial Sequence
  LRRK2 RNA guide
gaaugauauucacgaacugg

SEQ ID NO: 6516 - RNA, 20 nt, Artificial Sequence
  LRRK2 RNA guide
gaccaguucgugaauaucau

SEQ ID NO: 6517 - RNA, 20 nt, Artificial Sequence
  LRRK2 RNA guide
gauauucacgaacugguccu

SEQ ID NO: 6518 - RNA, 20 nt, Artificial Sequence
  LRRK2 RNA guide
gcuaggaccaguucgugaau

SEQ ID NO: 6519 - RNA, 20 nt, Artificial Sequence
  LRRK2 RNA guide
gcugcuaggaccaguucgug

SEQ ID NO: 6520 - RNA, 20 nt, Artificial Sequence
  LRRK2 RNA guide
ggaccaguucgugaauauca

SEQ ID NO: 6521 - RNA, 20 nt, Artificial Sequence
  LRRK2 RNA guide
guguuucaagaaugauauuc

SEQ ID NO: 6522 - RNA, 20 nt, Artificial Sequence
  LRRK2 RNA guide
guucaaagcugcuaggacca

SEQ ID NO: 6523 - RNA, 20 nt, Artificial Sequence
  LRRK2 RNA guide
guucgugaauaucauucuug

SEQ ID NO: 6524 - RNA, 20 nt, Artificial Sequence
  LRRK2 RNA guide
guuucaagaaugauauucac

SEQ ID NO: 6525 - RNA, 20 nt, Artificial Sequence
  LRRK2 RNA guide
uaggaccaguucgugaauau

SEQ ID NO: 6526 - RNA, 20 nt, Artificial Sequence
  LRRK2 RNA guide
uauucacgaacugguccuag

SEQ ID NO: 6527 - RNA, 20 nt, Artificial Sequence
  LRRK2 RNA guide
ucaaagcugcuaggaccagu

SEQ ID NO: 6528 - RNA, 20 nt, Artificial Sequence
  LRRK2 RNA guide
ucaagaaugauauucacgaa

SEQ ID NO: 6529 - RNA, 20 nt, Artificial Sequence
  LRRK2 RNA guide
ucacgaacugguccuagcag

SEQ ID NO: 6530 - RNA, 20 nt, Artificial Sequence
  LRRK2 RNA guide
ucgugaauaucauucuugaa

SEQ ID NO: 6531 - RNA, 20 nt, Artificial Sequence
  LRRK2 RNA guide
ugauauucacgaacuggucc

SEQ ID NO: 6532 - RNA, 20 nt, Artificial Sequence
  LRRK2 RNA guide
ugcuaggaccaguucgugaa

SEQ ID NO: 6533 - RNA, 20 nt, Artificial Sequence
  LRRK2 RNA guide
uguucaaagcugcuaggacc

SEQ ID NO: 6534 - RNA, 20 nt, Artificial Sequence
  LRRK2 RNA guide
uucaaagcugcuaggaccag

SEQ ID NO: 6535 - RNA, 20 nt, Artificial Sequence
  LRRK2 RNA guide
uucaagaaugauauucacga

SEQ ID NO: 6536 - RNA, 20 nt, Artificial Sequence
  LRRK2 RNA guide
uucacgaacugguccuagca

SEQ ID NO: 6537 - RNA, 20 nt, Artificial Sequence
  LRRK2 RNA guide
uucgugaauaucauucuuga

SEQ ID NO: 6538 - RNA, 20 nt, Artificial Sequence
  LRRK2 RNA guide
uuucaagaaugauauucacg

SEQ ID NO: 6539 - RNA, 21 nt, Artificial Sequence
  LRRK2 RNA guide
aaagcugcuaggaccaguucg

SEQ ID NO: 6540 - RNA, 21 nt, Artificial Sequence
  LRRK2 RNA guide
aagaaugauauucacgaacug

SEQ ID NO: 6541 - RNA, 21 nt, Artificial Sequence
  LRRK2 RNA guide
aagcugcuaggaccaguucgu

SEQ ID NO: 6542 - RNA, 21 nt, Artificial Sequence
  LRRK2 RNA guide
aaugauauucacgaacugguc

SEQ ID NO: 6543 - RNA, 21 nt, Artificial Sequence
  LRRK2 RNA guide
accaguucgugaauaucauuc

SEQ ID NO: 6544 - RNA, 21 nt, Artificial Sequence
  LRRK2 RNA guide
acgaacugguccuagcagcuu

SEQ ID NO: 6545 - RNA, 21 nt, Artificial Sequence
  LRRK2 RNA guide
agaaugauauucacgaacugg

SEQ ID NO: 6546 - RNA, 21 nt, Artificial Sequence
  LRRK2 RNA guide
agcugcuaggaccaguucgug

SEQ ID NO: 6547 - RNA, 21 nt, Artificial Sequence
  LRRK2 RNA guide
aggaccaguucgugaauauca

SEQ ID NO: 6548 - RNA, 21 nt, Artificial Sequence
  LRRK2 RNA guide
aguucgugaauaucauucuug

SEQ ID NO: 6549 - RNA, 21 nt, Artificial Sequence
  LRRK2 RNA guide
auauucacgaacugguccuag

SEQ ID NO: 6550 - RNA, 21 nt, Artificial Sequence
  LRRK2 RNA guide
augauauucacgaacuggucc

SEQ ID NO: 6551 - RNA, 21 nt, Artificial Sequence
  LRRK2 RNA guide
auucacgaacugguccuagca

SEQ ID NO: 6552 - RNA, 21 nt, Artificial Sequence
  LRRK2 RNA guide
caaagcugcuaggaccaguuc

SEQ ID NO: 6553 - RNA, 21 nt, Artificial Sequence
  LRRK2 RNA guide
caagaaugauauucacgaacu

SEQ ID NO: 6554 - RNA, 21 nt, Artificial Sequence
  LRRK2 RNA guide
cacgaacugguccuagcagcu

SEQ ID NO: 6555 - RNA, 21 nt, Artificial Sequence
  LRRK2 RNA guide
caguucgugaauaucauucuu

SEQ ID NO: 6556 - RNA, 21 nt, Artificial Sequence
  LRRK2 RNA guide
ccaguucgugaauaucauucu

SEQ ID NO: 6557 - RNA, 21 nt, Artificial Sequence
  LRRK2 RNA guide
cgaacugguccuagcagcuuu

SEQ ID NO: 6558 - RNA, 21 nt, Artificial Sequence
  LRRK2 RNA guide
cuaggaccaguucgugaauau

SEQ ID NO: 6559 - RNA, 21 nt, Artificial Sequence
  LRRK2 RNA guide
cugcuaggaccaguucgugaa

SEQ ID NO: 6560 - RNA, 21 nt, Artificial Sequence
  LRRK2 RNA guide
cuguucaaagcugcuaggacc

SEQ ID NO: 6561 - RNA, 21 nt, Artificial Sequence
  LRRK2 RNA guide
gaaugauauucacgaacuggu

SEQ ID NO: 6562 - RNA, 21 nt, Artificial Sequence
  LRRK2 RNA guide
gaccaguucgugaauaucauu

SEQ ID NO: 6563 - RNA, 21 nt, Artificial Sequence
  LRRK2 RNA guide
gauauucacgaacugguccua

SEQ ID NO: 6564 - RNA, 21 nt, Artificial Sequence
  LRRK2 RNA guide
gcuaggaccaguucgugaaua

SEQ ID NO: 6565 - RNA, 21 nt, Artificial Sequence
  LRRK2 RNA guide
gcugcuaggaccaguucguga

SEQ ID NO: 6566 - RNA, 21 nt, Artificial Sequence
  LRRK2 RNA guide
ggaccaguucgugaauaucau

SEQ ID NO: 6567 - RNA, 21 nt, Artificial Sequence
  LRRK2 RNA guide
guucaaagcugcuaggaccag

SEQ ID NO: 6568 - RNA, 21 nt, Artificial Sequence
  LRRK2 RNA guide
guucgugaauaucauucuuga

SEQ ID NO: 6569 - RNA, 21 nt, Artificial Sequence
  LRRK2 RNA guide
guuucaagaaugauauucacg

SEQ ID NO: 6570 - RNA, 21 nt, Artificial Sequence
  LRRK2 RNA guide
uaggaccaguucgugaauauc

SEQ ID NO: 6571 - RNA, 21 nt, Artificial Sequence
  LRRK2 RNA guide
uauucacgaacugguccuagc

SEQ ID NO: 6572 - RNA, 21 nt, Artificial Sequence
  LRRK2 RNA guide
ucaaagcugcuaggaccaguu

SEQ ID NO: 6573 - RNA, 21 nt, Artificial Sequence
  LRRK2 RNA guide
ucaagaaugauauucacgaac

SEQ ID NO: 6574 - RNA, 21 nt, Artificial Sequence
  LRRK2 RNA guide
ucacgaacugguccuagcagc

SEQ ID NO: 6575 - RNA, 21 nt, Artificial Sequence
  LRRK2 RNA guide
ugauauucacgaacugguccu

SEQ ID NO: 6576 - RNA, 21 nt, Artificial Sequence
  LRRK2 RNA guide
ugcuaggaccaguucgugaau

SEQ ID NO: 6577 - RNA, 21 nt, Artificial Sequence
  LRRK2 RNA guide
uguucaaagcugcuaggacca

SEQ ID NO: 6578 - RNA, 21 nt, Artificial Sequence
  LRRK2 RNA guide
uucaaagcugcuaggaccagu

SEQ ID NO: 6579 - RNA, 21 nt, Artificial Sequence
  LRRK2 RNA guide
uucacgaacugguccuagcag

SEQ ID NO: 6580 - RNA, 22 nt, Artificial Sequence
  LRRK2 RNA guide
aaagcugcuaggaccaguucgu

SEQ ID NO: 6581 - RNA, 22 nt, Artificial Sequence
  LRRK2 RNA guide
aagaaugauauucacgaacugg

SEQ ID NO: 6582 - RNA, 22 nt, Artificial Sequence
  LRRK2 RNA guide
aagcugcuaggaccaguucgug

SEQ ID NO: 6583 - RNA, 22 nt, Artificial Sequence
  LRRK2 RNA guide
aaugauauucacgaacuggucc

SEQ ID NO: 6584 - RNA, 22 nt, Artificial Sequence
  LRRK2 RNA guide
accaguucgugaauaucauucu

SEQ ID NO: 6585 - RNA, 22 nt, Artificial Sequence
  LRRK2 RNA guide
acgaacugguccuagcagcuuu

SEQ ID NO: 6586 - RNA, 22 nt, Artificial Sequence
  LRRK2 RNA guide
agaaugauauucacgaacuggu

SEQ ID NO: 6587 - RNA, 22 nt, Artificial Sequence
  LRRK2 RNA guide
agcugcuaggaccaguucguga

SEQ ID NO: 6588 - RNA, 22 nt, Artificial Sequence
  LRRK2 RNA guide
aggaccaguucgugaauaucau

SEQ ID NO: 6589 - RNA, 22 nt, Artificial Sequence
  LRRK2 RNA guide
aguucgugaauaucauucuuga

SEQ ID NO: 6590 - RNA, 22 nt, Artificial Sequence
  LRRK2 RNA guide
auauucacgaacugguccuagc

SEQ ID NO: 6591 - RNA, 22 nt, Artificial Sequence
  LRRK2 RNA guide
augauauucacgaacugguccu

SEQ ID NO: 6592 - RNA, 22 nt, Artificial Sequence
  LRRK2 RNA guide
auucacgaacugguccuagcag

SEQ ID NO: 6593 - RNA, 22 nt, Artificial Sequence
  LRRK2 RNA guide
caaagcugcuaggaccaguucg

SEQ ID NO: 6594 - RNA, 22 nt, Artificial Sequence
  LRRK2 RNA guide
caagaaugauauucacgaacug

SEQ ID NO: 6595 - RNA, 22 nt, Artificial Sequence
  LRRK2 RNA guide
cacgaacugguccuagcagcuu

SEQ ID NO: 6596 - RNA, 22 nt, Artificial Sequence
  LRRK2 RNA guide
caguguuucaagaaugauauuc

SEQ ID NO: 6597 - RNA, 22 nt, Artificial Sequence
  LRRK2 RNA guide
caguucgugaauaucauucuug

SEQ ID NO: 6598 - RNA, 22 nt, Artificial Sequence
  LRRK2 RNA guide
ccaguucgugaauaucauucuu

SEQ ID NO: 6599 - RNA, 22 nt, Artificial Sequence
  LRRK2 RNA guide
ccuguucaaagcugcuaggacc

SEQ ID NO: 6600 - RNA, 22 nt, Artificial Sequence
  LRRK2 RNA guide
cgaacugguccuagcagcuuug

SEQ ID NO: 6601 - RNA, 22 nt, Artificial Sequence
  LRRK2 RNA guide
cuaggaccaguucgugaauauc

SEQ ID NO: 6602 - RNA, 22 nt, Artificial Sequence
  LRRK2 RNA guide
cugcuaggaccaguucgugaau

SEQ ID NO: 6603 - RNA, 22 nt, Artificial Sequence
  LRRK2 RNA guide
cuguucaaagcugcuaggacca

SEQ ID NO: 6604 - RNA, 22 nt, Artificial Sequence
  LRRK2 RNA guide
gaaugauauucacgaacugguc

SEQ ID NO: 6605 - RNA, 22 nt, Artificial Sequence
  LRRK2 RNA guide
gaccaguucgugaauaucauuc

SEQ ID NO: 6606 - RNA, 22 nt, Artificial Sequence
  LRRK2 RNA guide
gauauucacgaacugguccuag

SEQ ID NO: 6607 - RNA, 22 nt, Artificial Sequence
  LRRK2 RNA guide
gcuaggaccaguucgugaauau

SEQ ID NO: 6608 - RNA, 22 nt, Artificial Sequence
  LRRK2 RNA guide
gcugcuaggaccaguucgugaa

SEQ ID NO: 6609 - RNA, 22 nt, Artificial Sequence
  LRRK2 RNA guide
ggaccaguucgugaauaucauu

SEQ ID NO: 6610 - RNA, 22 nt, Artificial Sequence
  LRRK2 RNA guide
guguuucaagaaugauauucac

SEQ ID NO: 6611 - RNA, 22 nt, Artificial Sequence
  LRRK2 RNA guide
guucaaagcugcuaggaccagu

SEQ ID NO: 6612 - RNA, 22 nt, Artificial Sequence
  LRRK2 RNA guide
guucgugaauaucauucuugaa

SEQ ID NO: 6613 - RNA, 22 nt, Artificial Sequence
  LRRK2 RNA guide
guuucaagaaugauauucacga

SEQ ID NO: 6614 - RNA, 22 nt, Artificial Sequence
  LRRK2 RNA guide
uaggaccaguucgugaauauca

SEQ ID NO: 6615 - RNA, 22 nt, Artificial Sequence
  LRRK2 RNA guide
uauucacgaacugguccuagca

SEQ ID NO: 6616 - RNA, 22 nt, Artificial Sequence
  LRRK2 RNA guide
ucaaagcugcuaggaccaguuc

SEQ ID NO: 6617 - RNA, 22 nt, Artificial Sequence
  LRRK2 RNA guide
ucaagaaugauauucacgaacu

SEQ ID NO: 6618 - RNA, 22 nt, Artificial Sequence
  LRRK2 RNA guide
ucacgaacugguccuagcagcu

SEQ ID NO: 6619 - RNA, 22 nt, Artificial Sequence
  LRRK2 RNA guide
ucgugaauaucauucuugaaac

SEQ ID NO: 6620 - RNA, 22 nt, Artificial Sequence
  LRRK2 RNA guide
ugauauucacgaacugguccua

SEQ ID NO: 6621 - RNA, 22 nt, Artificial Sequence
  LRRK2 RNA guide
ugcuaggaccaguucgugaaua

SEQ ID NO: 6622 - RNA, 22 nt, Artificial Sequence
  LRRK2 RNA guide
uguucaaagcugcuaggaccag

SEQ ID NO: 6623 - RNA, 22 nt, Artificial Sequence
  LRRK2 RNA guide
uguuucaagaaugauauucacg

SEQ ID NO: 6624 - RNA, 22 nt, Artificial Sequence
  LRRK2 RNA guide
uucaaagcugcuaggaccaguu

SEQ ID NO: 6625 - RNA, 22 nt, Artificial Sequence
  LRRK2 RNA guide
uucaagaaugauauucacgaac

SEQ ID NO: 6626 - RNA, 22 nt, Artificial Sequence
  LRRK2 RNA guide
uucacgaacugguccuagcagc

SEQ ID NO: 6627 - RNA, 20 nt, Artificial Sequence
  LRRK2 RNA guide
aacauaccuuguucaaagcu

SEQ ID NO: 6628 - RNA, 20 nt, Artificial Sequence
  LRRK2 RNA guide
aacugguccuagcagcuuug

SEQ ID NO: 6629 - RNA, 20 nt, Artificial Sequence
  LRRK2 RNA guide
acauaccuuguucaaagcug

SEQ ID NO: 6630 - RNA, 20 nt, Artificial Sequence
  LRRK2 RNA guide
accuuguucaaagcugcuag

SEQ ID NO: 6631 - RNA, 20 nt, Artificial Sequence
  LRRK2 RNA guide
acugguccuagcagcuuuga

SEQ ID NO: 6632 - RNA, 20 nt, Artificial Sequence
  LRRK2 RNA guide
agcagcuuugaacaagguau

SEQ ID NO: 6633 - RNA, 20 nt, Artificial Sequence
  LRRK2 RNA guide
agcuuugaacaagguauguu

SEQ ID NO: 6634 - RNA, 20 nt, Artificial Sequence
  LRRK2 RNA guide
auaccuuguucaaagcugcu

SEQ ID NO: 6635 - RNA, 20 nt, Artificial Sequence
  LRRK2 RNA guide
auauucaacauaccuuguuc

SEQ ID NO: 6636 - RNA, 20 nt, Artificial Sequence
  LRRK2 RNA guide
auucaacauaccuuguucaa

SEQ ID NO: 6637 - RNA, 20 nt, Artificial Sequence
  LRRK2 RNA guide
caacauaccuuguucaaagc

SEQ ID NO: 6638 - RNA, 20 nt, Artificial Sequence
  LRRK2 RNA guide
caagguauguugaauauaag

SEQ ID NO: 6639 - RNA, 20 nt, Artificial Sequence
  LRRK2 RNA guide
cagcuuugaacaagguaugu

SEQ ID NO: 6640 - RNA, 20 nt, Artificial Sequence
  LRRK2 RNA guide
cauaccuuguucaaagcugc

SEQ ID NO: 6641 - RNA, 20 nt, Artificial Sequence
  LRRK2 RNA guide
ccuagcagcuuugaacaagg

SEQ ID NO: 6642 - RNA, 20 nt, Artificial Sequence
  LRRK2 RNA guide
ccuuguucaaagcugcuagg

SEQ ID NO: 6643 - RNA, 20 nt, Artificial Sequence
  LRRK2 RNA guide
cuagcagcuuugaacaaggu

SEQ ID NO: 6644 - RNA, 20 nt, Artificial Sequence
  LRRK2 RNA guide
cugguccuagcagcuuugaa

SEQ ID NO: 6645 - RNA, 20 nt, Artificial Sequence
  LRRK2 RNA guide
cuuauauucaacauaccuug

SEQ ID NO: 6646 - RNA, 20 nt, Artificial Sequence
  LRRK2 RNA guide
cuuguucaaagcugcuagga

SEQ ID NO: 6647 - RNA, 20 nt, Artificial Sequence
  LRRK2 RNA guide
cuuugaacaagguauguuga

SEQ ID NO: 6648 - RNA, 20 nt, Artificial Sequence
  LRRK2 RNA guide
gaacaagguauguugaauau

SEQ ID NO: 6649 - RNA, 20 nt, Artificial Sequence
  LRRK2 RNA guide
gcagcuuugaacaagguaug

SEQ ID NO: 6650 - RNA, 20 nt, Artificial Sequence
  LRRK2 RNA guide
gcuuugaacaagguauguug

SEQ ID NO: 6651 - RNA, 20 nt, Artificial Sequence
  LRRK2 RNA guide
gguccuagcagcuuugaaca

SEQ ID NO: 6652 - RNA, 20 nt, Artificial Sequence
  LRRK2 RNA guide
guccuagcagcuuugaacaa

SEQ ID NO: 6653 - RNA, 20 nt, Artificial Sequence
  LRRK2 RNA guide
uaccuuguucaaagcugcua

SEQ ID NO: 6654 - RNA, 20 nt, Artificial Sequence
  LRRK2 RNA guide
uagcagcuuugaacaaggua

SEQ ID NO: 6655 - RNA, 20 nt, Artificial Sequence
  LRRK2 RNA guide
uauucaacauaccuuguuca

SEQ ID NO: 6656 - RNA, 20 nt, Artificial Sequence
  LRRK2 RNA guide
ucaacauaccuuguucaaag

SEQ ID NO: 6657 - RNA, 20 nt, Artificial Sequence
  LRRK2 RNA guide
uccuagcagcuuugaacaag

SEQ ID NO: 6658 - RNA, 20 nt, Artificial Sequence
  LRRK2 RNA guide
ugaacaagguauguugaaua

SEQ ID NO: 6659 - RNA, 20 nt, Artificial Sequence
  LRRK2 RNA guide
ugguccuagcagcuuugaac

SEQ ID NO: 6660 - RNA, 20 nt, Artificial Sequence
  LRRK2 RNA guide
uucaacauaccuuguucaaa

SEQ ID NO: 6661 - RNA, 20 nt, Artificial Sequence
  LRRK2 RNA guide
uugaacaagguauguugaau

SEQ ID NO: 6662 - RNA, 20 nt, Artificial Sequence
  LRRK2 RNA guide
uuugaacaagguauguugaa

SEQ ID NO: 6663 - RNA, 21 nt, Artificial Sequence
  LRRK2 RNA guide
aaacugguccuagcagcuuug

SEQ ID NO: 6664 - RNA, 21 nt, Artificial Sequence
  LRRK2 RNA guide
aacauaccuuguucaaagcug

SEQ ID NO: 6665 - RNA, 21 nt, Artificial Sequence
  LRRK2 RNA guide
aacugguccuagcagcuuuga

SEQ ID NO: 6666 - RNA, 21 nt, Artificial Sequence
  LRRK2 RNA guide
acauaccuuguucaaagcugc

SEQ ID NO: 6667 - RNA, 21 nt, Artificial Sequence
  LRRK2 RNA guide
accuuguucaaagcugcuagg

SEQ ID NO: 6668 - RNA, 21 nt, Artificial Sequence
  LRRK2 RNA guide
acugguccuagcagcuuugaa

SEQ ID NO: 6669 - RNA, 21 nt, Artificial Sequence
  LRRK2 RNA guide
agcagcuuugaacaagguaug

SEQ ID NO: 6670 - RNA, 21 nt, Artificial Sequence
  LRRK2 RNA guide
agcuuugaacaagguauguug

SEQ ID NO: 6671 - RNA, 21 nt, Artificial Sequence
  LRRK2 RNA guide
auaccuuguucaaagcugcua

SEQ ID NO: 6672 - RNA, 21 nt, Artificial Sequence
  LRRK2 RNA guide
caacauaccuuguucaaagcu

SEQ ID NO: 6673 - RNA, 21 nt, Artificial Sequence
  LRRK2 RNA guide
cagcuuugaacaagguauguu

SEQ ID NO: 6674 - RNA, 21 nt, Artificial Sequence
  LRRK2 RNA guide
cauaccuuguucaaagcugcu

SEQ ID NO: 6675 - RNA, 21 nt, Artificial Sequence
  LRRK2 RNA guide
ccuagcagcuuugaacaaggu

SEQ ID NO: 6676 - RNA, 21 nt, Artificial Sequence
  LRRK2 RNA guide
ccuuguucaaagcugcuagga

SEQ ID NO: 6677 - RNA, 21 nt, Artificial Sequence
  LRRK2 RNA guide
cuagcagcuuugaacaaggua

SEQ ID NO: 6678 - RNA, 21 nt, Artificial Sequence
  LRRK2 RNA guide
cugguccuagcagcuuugaac

SEQ ID NO: 6679 - RNA, 21 nt, Artificial Sequence
  LRRK2 RNA guide
cuuguucaaagcugcuaggac

SEQ ID NO: 6680 - RNA, 21 nt, Artificial Sequence
  LRRK2 RNA guide
cuuugaacaagguauguugaa

SEQ ID NO: 6681 - RNA, 21 nt, Artificial Sequence
  LRRK2 RNA guide
gcagcuuugaacaagguaugu

SEQ ID NO: 6682 - RNA, 21 nt, Artificial Sequence
  LRRK2 RNA guide
gcuuugaacaagguauguuga

SEQ ID NO: 6683 - RNA, 21 nt, Artificial Sequence
  LRRK2 RNA guide
gguccuagcagcuuugaacaa

SEQ ID NO: 6684 - RNA, 21 nt, Artificial Sequence
  LRRK2 RNA guide
guccuagcagcuuugaacaag

SEQ ID NO: 6685 - RNA, 21 nt, Artificial Sequence
  LRRK2 RNA guide
uaccuuguucaaagcugcuag

SEQ ID NO: 6686 - RNA, 21 nt, Artificial Sequence
  LRRK2 RNA guide
uagcagcuuugaacaagguau

SEQ ID NO: 6687 - RNA, 21 nt, Artificial Sequence
  LRRK2 RNA guide
ucaacauaccuuguucaaagc

SEQ ID NO: 6688 - RNA, 21 nt, Artificial Sequence
  LRRK2 RNA guide
uccuagcagcuuugaacaagg

SEQ ID NO: 6689 - RNA, 21 nt, Artificial Sequence
  LRRK2 RNA guide
ugguccuagcagcuuugaaca

SEQ ID NO: 6690 - RNA, 21 nt, Artificial Sequence
  LRRK2 RNA guide
uucaacauaccuuguucaaag

SEQ ID NO: 6691 - RNA, 22 nt, Artificial Sequence
  LRRK2 RNA guide
aaacugguccuagcagcuuuga

SEQ ID NO: 6692 - RNA, 22 nt, Artificial Sequence
  LRRK2 RNA guide
aacauaccuuguucaaagcugc

SEQ ID NO: 6693 - RNA, 22 nt, Artificial Sequence
  LRRK2 RNA guide
aacugguccuagcagcuuugaa

SEQ ID NO: 6694 - RNA, 22 nt, Artificial Sequence
  LRRK2 RNA guide
acauaccuuguucaaagcugcu

SEQ ID NO: 6695 - RNA, 22 nt, Artificial Sequence
  LRRK2 RNA guide
accuuguucaaagcugcuagga

SEQ ID NO: 6696 - RNA, 22 nt, Artificial Sequence
  LRRK2 RNA guide
acugguccuagcagcuuugaac

SEQ ID NO: 6697 - RNA, 22 nt, Artificial Sequence
  LRRK2 RNA guide
agcagcuuugaacaagguaugu

SEQ ID NO: 6698 - RNA, 22 nt, Artificial Sequence
  LRRK2 RNA guide
agcuuugaacaagguauguuga

SEQ ID NO: 6699 - RNA, 22 nt, Artificial Sequence
  LRRK2 RNA guide
auaccuuguucaaagcugcuag

SEQ ID NO: 6700 - RNA, 22 nt, Artificial Sequence
  LRRK2 RNA guide
auucaacauaccuuguucaaag

SEQ ID NO: 6701 - RNA, 22 nt, Artificial Sequence
  LRRK2 RNA guide
caaacugguccuagcagcuuug

SEQ ID NO: 6702 - RNA, 22 nt, Artificial Sequence
  LRRK2 RNA guide
caacauaccuuguucaaagcug

SEQ ID NO: 6703 - RNA, 22 nt, Artificial Sequence
  LRRK2 RNA guide
cagcuuugaacaagguauguug

SEQ ID NO: 6704 - RNA, 22 nt, Artificial Sequence
  LRRK2 RNA guide
cauaccuuguucaaagcugcua

SEQ ID NO: 6705 - RNA, 22 nt, Artificial Sequence
  LRRK2 RNA guide
ccuagcagcuuugaacaaggua

SEQ ID NO: 6706 - RNA, 22 nt, Artificial Sequence
  LRRK2 RNA guide
ccuuguucaaagcugcuaggac

SEQ ID NO: 6707 - RNA, 22 nt, Artificial Sequence
  LRRK2 RNA guide
cuagcagcuuugaacaagguau

SEQ ID NO: 6708 - RNA, 22 nt, Artificial Sequence
  LRRK2 RNA guide
cugguccuagcagcuuugaaca

SEQ ID NO: 6709 - RNA, 22 nt, Artificial Sequence
  LRRK2 RNA guide
cuuguucaaagcugcuaggacc

SEQ ID NO: 6710 - RNA, 22 nt, Artificial Sequence
  LRRK2 RNA guide
cuuugaacaagguauguugaau

SEQ ID NO: 6711 - RNA, 22 nt, Artificial Sequence
  LRRK2 RNA guide
gcagcuuugaacaagguauguu

SEQ ID NO: 6712 - RNA, 22 nt, Artificial Sequence
  LRRK2 RNA guide
gcuuugaacaagguauguugaa

SEQ ID NO: 6713 - RNA, 22 nt, Artificial Sequence
  LRRK2 RNA guide
gguccuagcagcuuugaacaag

SEQ ID NO: 6714 - RNA, 22 nt, Artificial Sequence
  LRRK2 RNA guide
guccuagcagcuuugaacaagg

SEQ ID NO: 6715 - RNA, 22 nt, Artificial Sequence
  LRRK2 RNA guide
uaccuuguucaaagcugcuagg

SEQ ID NO: 6716 - RNA, 22 nt, Artificial Sequence
  LRRK2 RNA guide
uagcagcuuugaacaagguaug

SEQ ID NO: 6717 - RNA, 22 nt, Artificial Sequence
  LRRK2 RNA guide
ucaacauaccuuguucaaagcu

SEQ ID NO: 6718 - RNA, 22 nt, Artificial Sequence
  LRRK2 RNA guide
uccuagcagcuuugaacaaggu

SEQ ID NO: 6719 - RNA, 22 nt, Artificial Sequence
  LRRK2 RNA guide
ugguccuagcagcuuugaacaa

SEQ ID NO: 6720 - RNA, 22 nt, Artificial Sequence
  LRRK2 RNA guide
uucaacauaccuuguucaaagc

SEQ ID NO: 6721 - RNA, 20 nt, Artificial Sequence
  LRRK2 RNA guide
aaacuuauauucagcauacc

SEQ ID NO: 6722 - RNA, 20 nt, Artificial Sequence
  LRRK2 RNA guide
aacaggguaugcugaauaua

SEQ ID NO: 6723 - RNA, 20 nt, Artificial Sequence
  LRRK2 RNA guide
aacuuauauucagcauaccc

SEQ ID NO: 6724 - RNA, 20 nt, Artificial Sequence
  LRRK2 RNA guide
acagaaaacuuauauucagc

SEQ ID NO: 6725 - RNA, 20 nt, Artificial Sequence
  LRRK2 RNA guide
acaggguaugcugaauauaa

SEQ ID NO: 6726 - RNA, 20 nt, Artificial Sequence
  LRRK2 RNA guide
acuuauauucagcauacccu

SEQ ID NO: 6727 - RNA, 20 nt, Artificial Sequence
  LRRK2 RNA guide
agcagcuuugaacaggguau

SEQ ID NO: 6728 - RNA, 20 nt, Artificial Sequence
  LRRK2 RNA guide
agcauacccuguucaaagcu

SEQ ID NO: 6729 - RNA, 20 nt, Artificial Sequence
  LRRK2 RNA guide
agcuuugaacaggguaugcu

SEQ ID NO: 6730 - RNA, 20 nt, Artificial Sequence
  LRRK2 RNA guide
aggguaugcugaauauaagu

SEQ ID NO: 6731 - RNA, 20 nt, Artificial Sequence
  LRRK2 RNA guide
auauucagcauacccuguuc

SEQ ID NO: 6732 - RNA, 20 nt, Artificial Sequence
  LRRK2 RNA guide
auucagcauacccuguucaa

SEQ ID NO: 6733 - RNA, 20 nt, Artificial Sequence
  LRRK2 RNA guide
cagaaaacuuauauucagca

SEQ ID NO: 6734 - RNA, 20 nt, Artificial Sequence
  LRRK2 RNA guide
cagcauacccuguucaaagc

SEQ ID NO: 6735 - RNA, 20 nt, Artificial Sequence
  LRRK2 RNA guide
cagcuuugaacaggguaugc

SEQ ID NO: 6736 - RNA, 20 nt, Artificial Sequence
  LRRK2 RNA guide
caggguaugcugaauauaag

SEQ ID NO: 6737 - RNA, 20 nt, Artificial Sequence
  LRRK2 RNA guide
ccuagcagcuuugaacaggg

SEQ ID NO: 6738 - RNA, 20 nt, Artificial Sequence
  LRRK2 RNA guide
cuagcagcuuugaacagggu

SEQ ID NO: 6739 - RNA, 20 nt, Artificial Sequence
  LRRK2 RNA guide
cuuauauucagcauacccug

SEQ ID NO: 6740 - RNA, 20 nt, Artificial Sequence
  LRRK2 RNA guide
cuuugaacaggguaugcuga

SEQ ID NO: 6741 - RNA, 20 nt, Artificial Sequence
  LRRK2 RNA guide
gaacaggguaugcugaauau

SEQ ID NO: 6742 - RNA, 20 nt, Artificial Sequence
  LRRK2 RNA guide
gcagcuuugaacaggguaug

SEQ ID NO: 6743 - RNA, 20 nt, Artificial Sequence
  LRRK2 RNA guide
gcugaauauaaguuuucugu

SEQ ID NO: 6744 - RNA, 20 nt, Artificial Sequence
  LRRK2 RNA guide
gcuuugaacaggguaugcug

SEQ ID NO: 6745 - RNA, 20 nt, Artificial Sequence
  LRRK2 RNA guide
ggguaugcugaauauaaguu

SEQ ID NO: 6746 - RNA, 20 nt, Artificial Sequence
  LRRK2 RNA guide
gguaugcugaauauaaguuu

SEQ ID NO: 6747 - RNA, 20 nt, Artificial Sequence
  LRRK2 RNA guide
uagcagcuuugaacagggua

SEQ ID NO: 6748 - RNA, 20 nt, Artificial Sequence
  LRRK2 RNA guide
uauauucagcauacccuguu

SEQ ID NO: 6749 - RNA, 20 nt, Artificial Sequence
  LRRK2 RNA guide
uauucagcauacccuguuca

SEQ ID NO: 6750 - RNA, 20 nt, Artificial Sequence
  LRRK2 RNA guide
ucagcauacccuguucaaag

SEQ ID NO: 6751 - RNA, 20 nt, Artificial Sequence
  LRRK2 RNA guide
ugaacaggguaugcugaaua

SEQ ID NO: 6752 - RNA, 20 nt, Artificial Sequence
  LRRK2 RNA guide
ugcugaauauaaguuuucug

SEQ ID NO: 6753 - RNA, 20 nt, Artificial Sequence
  LRRK2 RNA guide
uuauauucagcauacccugu

SEQ ID NO: 6754 - RNA, 20 nt, Artificial Sequence
  LRRK2 RNA guide
uucagcauacccuguucaaa

SEQ ID NO: 6755 - RNA, 20 nt, Artificial Sequence
  LRRK2 RNA guide
uugaacaggguaugcugaau

SEQ ID NO: 6756 - RNA, 20 nt, Artificial Sequence
  LRRK2 RNA guide
uuugaacaggguaugcugaa

SEQ ID NO: 6757 - RNA, 21 nt, Artificial Sequence
  LRRK2 RNA guide
aaacuuauauucagcauaccc

SEQ ID NO: 6758 - RNA, 21 nt, Artificial Sequence
  LRRK2 RNA guide
aacaggguaugcugaauauaa

SEQ ID NO: 6759 - RNA, 21 nt, Artificial Sequence
  LRRK2 RNA guide
aacuuauauucagcauacccu

SEQ ID NO: 6760 - RNA, 21 nt, Artificial Sequence
  LRRK2 RNA guide
acaggguaugcugaauauaag

SEQ ID NO: 6761 - RNA, 21 nt, Artificial Sequence
  LRRK2 RNA guide
acuuauauucagcauacccug

SEQ ID NO: 6762 - RNA, 21 nt, Artificial Sequence
  LRRK2 RNA guide
agcagcuuugaacaggguaug

SEQ ID NO: 6763 - RNA, 21 nt, Artificial Sequence
  LRRK2 RNA guide
agcauacccuguucaaagcug

SEQ ID NO: 6764 - RNA, 21 nt, Artificial Sequence
  LRRK2 RNA guide
agcuuugaacaggguaugcug

SEQ ID NO: 6765 - RNA, 21 nt, Artificial Sequence
  LRRK2 RNA guide
aggguaugcugaauauaaguu

SEQ ID NO: 6766 - RNA, 21 nt, Artificial Sequence
  LRRK2 RNA guide
auauucagcauacccuguuca

SEQ ID NO: 6767 - RNA, 21 nt, Artificial Sequence
  LRRK2 RNA guide
auucagcauacccuguucaaa

SEQ ID NO: 6768 - RNA, 21 nt, Artificial Sequence
  LRRK2 RNA guide
cagcauacccuguucaaagcu

SEQ ID NO: 6769 - RNA, 21 nt, Artificial Sequence
  LRRK2 RNA guide
cagcuuugaacaggguaugcu

SEQ ID NO: 6770 - RNA, 21 nt, Artificial Sequence
  LRRK2 RNA guide
caggguaugcugaauauaagu

SEQ ID NO: 6771 - RNA, 21 nt, Artificial Sequence
  LRRK2 RNA guide
ccuagcagcuuugaacagggu

SEQ ID NO: 6772 - RNA, 21 nt, Artificial Sequence
  LRRK2 RNA guide
cuagcagcuuugaacagggua

SEQ ID NO: 6773 - RNA, 21 nt, Artificial Sequence
  LRRK2 RNA guide
cuuauauucagcauacccugu

SEQ ID NO: 6774 - RNA, 21 nt, Artificial Sequence
  LRRK2 RNA guide
cuuugaacaggguaugcugaa

SEQ ID NO: 6775 - RNA, 21 nt, Artificial Sequence
  LRRK2 RNA guide
gaacaggguaugcugaauaua

SEQ ID NO: 6776 - RNA, 21 nt, Artificial Sequence
  LRRK2 RNA guide
gcagcuuugaacaggguaugc

SEQ ID NO: 6777 - RNA, 21 nt, Artificial Sequence
  LRRK2 RNA guide
gcuuugaacaggguaugcuga

SEQ ID NO: 6778 - RNA, 21 nt, Artificial Sequence
  LRRK2 RNA guide
ggguaugcugaauauaaguuu

SEQ ID NO: 6779 - RNA, 21 nt, Artificial Sequence
  LRRK2 RNA guide
uagcagcuuugaacaggguau

SEQ ID NO: 6780 - RNA, 21 nt, Artificial Sequence
  LRRK2 RNA guide
uauauucagcauacccuguuc

SEQ ID NO: 6781 - RNA, 21 nt, Artificial Sequence
  LRRK2 RNA guide
uauucagcauacccuguucaa

SEQ ID NO: 6782 - RNA, 21 nt, Artificial Sequence
  LRRK2 RNA guide
ucagcauacccuguucaaagc

SEQ ID NO: 6783 - RNA, 21 nt, Artificial Sequence
  LRRK2 RNA guide
uccuagcagcuuugaacaggg

SEQ ID NO: 6784 - RNA, 21 nt, Artificial Sequence
  LRRK2 RNA guide
ugaacaggguaugcugaauau

SEQ ID NO: 6785 - RNA, 21 nt, Artificial Sequence
  LRRK2 RNA guide
uuauauucagcauacccuguu

SEQ ID NO: 6786 - RNA, 21 nt, Artificial Sequence
  LRRK2 RNA guide
uucagcauacccuguucaaag

SEQ ID NO: 6787 - RNA, 21 nt, Artificial Sequence
  LRRK2 RNA guide
uugaacaggguaugcugaaua

SEQ ID NO: 6788 - RNA, 21 nt, Artificial Sequence
  LRRK2 RNA guide
uuugaacaggguaugcugaau

SEQ ID NO: 6789 - RNA, 22 nt, Artificial Sequence
  LRRK2 RNA guide
aaaacuuauauucagcauaccc

SEQ ID NO: 6790 - RNA, 22 nt, Artificial Sequence
  LRRK2 RNA guide
aaacuuauauucagcauacccu

SEQ ID NO: 6791 - RNA, 22 nt, Artificial Sequence
  LRRK2 RNA guide
aacaggguaugcugaauauaag

SEQ ID NO: 6792 - RNA, 22 nt, Artificial Sequence
  LRRK2 RNA guide
aacuuauauucagcauacccug

SEQ ID NO: 6793 - RNA, 22 nt, Artificial Sequence
  LRRK2 RNA guide
acaggguaugcugaauauaagu

SEQ ID NO: 6794 - RNA, 22 nt, Artificial Sequence
  LRRK2 RNA guide
acuuauauucagcauacccugu

SEQ ID NO: 6795 - RNA, 22 nt, Artificial Sequence
  LRRK2 RNA guide
agcagcuuugaacaggguaugc

SEQ ID NO: 6796 - RNA, 22 nt, Artificial Sequence
  LRRK2 RNA guide
agcauacccuguucaaagcugc

SEQ ID NO: 6797 - RNA, 22 nt, Artificial Sequence
  LRRK2 RNA guide
agcuuugaacaggguaugcuga

SEQ ID NO: 6798 - RNA, 22 nt, Artificial Sequence
  LRRK2 RNA guide
aggguaugcugaauauaaguuu

SEQ ID NO: 6799 - RNA, 22 nt, Artificial Sequence
  LRRK2 RNA guide
auauucagcauacccuguucaa

SEQ ID NO: 6800 - RNA, 22 nt, Artificial Sequence
  LRRK2 RNA guide
auucagcauacccuguucaaag

SEQ ID NO: 6801 - RNA, 22 nt, Artificial Sequence
  LRRK2 RNA guide
cagcauacccuguucaaagcug

SEQ ID NO: 6802 - RNA, 22 nt, Artificial Sequence
  LRRK2 RNA guide
cagcuuugaacaggguaugcug

SEQ ID NO: 6803 - RNA, 22 nt, Artificial Sequence
  LRRK2 RNA guide
caggguaugcugaauauaaguu

SEQ ID NO: 6804 - RNA, 22 nt, Artificial Sequence
  LRRK2 RNA guide
ccuagcagcuuugaacagggua

SEQ ID NO: 6805 - RNA, 22 nt, Artificial Sequence
  LRRK2 RNA guide
cuagcagcuuugaacaggguau

SEQ ID NO: 6806 - RNA, 22 nt, Artificial Sequence
  LRRK2 RNA guide
cuuauauucagcauacccuguu

SEQ ID NO: 6807 - RNA, 22 nt, Artificial Sequence
  LRRK2 RNA guide
cuuugaacaggguaugcugaau

SEQ ID NO: 6808 - RNA, 22 nt, Artificial Sequence
  LRRK2 RNA guide
gaaaacuuauauucagcauacc

SEQ ID NO: 6809 - RNA, 22 nt, Artificial Sequence
  LRRK2 RNA guide
gaacaggguaugcugaauauaa

SEQ ID NO: 6810 - RNA, 22 nt, Artificial Sequence
  LRRK2 RNA guide
gcagcuuugaacaggguaugcu

SEQ ID NO: 6811 - RNA, 22 nt, Artificial Sequence
  LRRK2 RNA guide
gcuuugaacaggguaugcugaa

SEQ ID NO: 6812 - RNA, 22 nt, Artificial Sequence
  LRRK2 RNA guide
ggguaugcugaauauaaguuuu

SEQ ID NO: 6813 - RNA, 22 nt, Artificial Sequence
  LRRK2 RNA guide
gguaugcugaauauaaguuuuc

SEQ ID NO: 6814 - RNA, 22 nt, Artificial Sequence
  LRRK2 RNA guide
guccuagcagcuuugaacaggg

SEQ ID NO: 6815 - RNA, 22 nt, Artificial Sequence
  LRRK2 RNA guide
uagcagcuuugaacaggguaug

SEQ ID NO: 6816 - RNA, 22 nt, Artificial Sequence
  LRRK2 RNA guide
uauauucagcauacccuguuca

SEQ ID NO: 6817 - RNA, 22 nt, Artificial Sequence
  LRRK2 RNA guide
uauucagcauacccuguucaaa

SEQ ID NO: 6818 - RNA, 22 nt, Artificial Sequence
  LRRK2 RNA guide
ucagcauacccuguucaaagcu

SEQ ID NO: 6819 - RNA, 22 nt, Artificial Sequence
  LRRK2 RNA guide
uccuagcagcuuugaacagggu

SEQ ID NO: 6820 - RNA, 22 nt, Artificial Sequence
  LRRK2 RNA guide
ugaacaggguaugcugaauaua

SEQ ID NO: 6821 - RNA, 22 nt, Artificial Sequence
  LRRK2 RNA guide
uuauauucagcauacccuguuc

SEQ ID NO: 6822 - RNA, 22 nt, Artificial Sequence
  LRRK2 RNA guide
uucagcauacccuguucaaagc

SEQ ID NO: 6823 - RNA, 22 nt, Artificial Sequence
  LRRK2 RNA guide
uugaacaggguaugcugaauau

SEQ ID NO: 6824 - RNA, 22 nt, Artificial Sequence
  LRRK2 RNA guide
uuugaacaggguaugcugaaua

SEQ ID NO: 6825 - RNA, 20 nt, Artificial Sequence
  LRRK2 RNA guide
aacaucucuaaugcaucaga

SEQ ID NO: 6826 - RNA, 20 nt, Artificial Sequence
  LRRK2 RNA guide
aaugcaucagaaaauguaca

SEQ ID NO: 6827 - RNA, 20 nt, Artificial Sequence
  LRRK2 RNA guide
acaucucuaaugcaucagaa

SEQ ID NO: 6828 - RNA, 20 nt, Artificial Sequence
  LRRK2 RNA guide
acauuuucugaugcauuaga

SEQ ID NO: 6829 - RNA, 20 nt, Artificial Sequence
  LRRK2 RNA guide
auaacaucucuaaugcauca

SEQ ID NO: 6830 - RNA, 20 nt, Artificial Sequence
  LRRK2 RNA guide
aucucuaaugcaucagaaaa

SEQ ID NO: 6831 - RNA, 20 nt, Artificial Sequence
  LRRK2 RNA guide
augcaucagaaaauguacaa

SEQ ID NO: 6832 - RNA, 20 nt, Artificial Sequence
  LRRK2 RNA guide
auuguacauuuucugaugca

SEQ ID NO: 6833 - RNA, 20 nt, Artificial Sequence
  LRRK2 RNA guide
auuuucugaugcauuagaga

SEQ ID NO: 6834 - RNA, 20 nt, Artificial Sequence
  LRRK2 RNA guide
cagaaaauguacaauagaag

SEQ ID NO: 6835 - RNA, 20 nt, Artificial Sequence
  LRRK2 RNA guide
caucagaaaauguacaauag

SEQ ID NO: 6836 - RNA, 20 nt, Artificial Sequence
  LRRK2 RNA guide
caucucuaaugcaucagaaa

SEQ ID NO: 6837 - RNA, 20 nt, Artificial Sequence
  LRRK2 RNA guide
cauuuucugaugcauuagag

SEQ ID NO: 6838 - RNA, 20 nt, Artificial Sequence
  LRRK2 RNA guide
cuaaugcaucagaaaaugua

SEQ ID NO: 6839 - RNA, 20 nt, Artificial Sequence
  LRRK2 RNA guide
cuauuguacauuuucugaug

SEQ ID NO: 6840 - RNA, 20 nt, Artificial Sequence
  LRRK2 RNA guide
cucuaaugcaucagaaaaug

SEQ ID NO: 6841 - RNA, 20 nt, Artificial Sequence
  LRRK2 RNA guide
cuucuauuguacauuuucug

SEQ ID NO: 6842 - RNA, 20 nt, Artificial Sequence
  LRRK2 RNA guide
gcaucagaaaauguacaaua

SEQ ID NO: 6843 - RNA, 20 nt, Artificial Sequence
  LRRK2 RNA guide
ggauaacaucucuaaugcau

SEQ ID NO: 6844 - RNA, 20 nt, Artificial Sequence
  LRRK2 RNA guide
gggauaacaucucuaaugca

SEQ ID NO: 6845 - RNA, 20 nt, Artificial Sequence
  LRRK2 RNA guide
guacauuuucugaugcauua

SEQ ID NO: 6846 - RNA, 20 nt, Artificial Sequence
  LRRK2 RNA guide
uaacaucucuaaugcaucag

SEQ ID NO: 6847 - RNA, 20 nt, Artificial Sequence
  LRRK2 RNA guide
uaaugcaucagaaaauguac

SEQ ID NO: 6848 - RNA, 20 nt, Artificial Sequence
  LRRK2 RNA guide
uacauuuucugaugcauuag

SEQ ID NO: 6849 - RNA, 20 nt, Artificial Sequence
  LRRK2 RNA guide
uauuguacauuuucugaugc

SEQ ID NO: 6850 - RNA, 20 nt, Artificial Sequence
  LRRK2 RNA guide
ucuaaugcaucagaaaaugu

SEQ ID NO: 6851 - RNA, 20 nt, Artificial Sequence
  LRRK2 RNA guide
ucucuaaugcaucagaaaau

SEQ ID NO: 6852 - RNA, 20 nt, Artificial Sequence
  LRRK2 RNA guide
ucugaugcauuagagauguu

SEQ ID NO: 6853 - RNA, 20 nt, Artificial Sequence
  LRRK2 RNA guide
ugcaucagaaaauguacaau

SEQ ID NO: 6854 - RNA, 20 nt, Artificial Sequence
  LRRK2 RNA guide
uguacauuuucugaugcauu

SEQ ID NO: 6855 - RNA, 20 nt, Artificial Sequence
  LRRK2 RNA guide
uucugaugcauuagagaugu

SEQ ID NO: 6856 - RNA, 20 nt, Artificial Sequence
  LRRK2 RNA guide
uuguacauuuucugaugcau

SEQ ID NO: 6857 - RNA, 20 nt, Artificial Sequence
  LRRK2 RNA guide
uuucugaugcauuagagaug

SEQ ID NO: 6858 - RNA, 20 nt, Artificial Sequence
  LRRK2 RNA guide
uuuucugaugcauuagagau

SEQ ID NO: 6859 - RNA, 21 nt, Artificial Sequence
  LRRK2 RNA guide
aacaucucuaaugcaucagaa

SEQ ID NO: 6860 - RNA, 21 nt, Artificial Sequence
  LRRK2 RNA guide
acaucucuaaugcaucagaaa

SEQ ID NO: 6861 - RNA, 21 nt, Artificial Sequence
  LRRK2 RNA guide
acauuuucugaugcauuagag

SEQ ID NO: 6862 - RNA, 21 nt, Artificial Sequence
  LRRK2 RNA guide
agggauaacaucucuaaugca

SEQ ID NO: 6863 - RNA, 21 nt, Artificial Sequence
  LRRK2 RNA guide
auaacaucucuaaugcaucag

SEQ ID NO: 6864 - RNA, 21 nt, Artificial Sequence
  LRRK2 RNA guide
caucucuaaugcaucagaaaa

SEQ ID NO: 6865 - RNA, 21 nt, Artificial Sequence
  LRRK2 RNA guide
cauuuucugaugcauuagaga

SEQ ID NO: 6866 - RNA, 21 nt, Artificial Sequence
  LRRK2 RNA guide
cuaaugcaucagaaaauguac

SEQ ID NO: 6867 - RNA, 21 nt, Artificial Sequence
  LRRK2 RNA guide
cuauuguacauuuucugaugc

SEQ ID NO: 6868 - RNA, 21 nt, Artificial Sequence
  LRRK2 RNA guide
cucuaaugcaucagaaaaugu

SEQ ID NO: 6869 - RNA, 21 nt, Artificial Sequence
  LRRK2 RNA guide
gauaacaucucuaaugcauca

SEQ ID NO: 6870 - RNA, 21 nt, Artificial Sequence
  LRRK2 RNA guide
gcaucagaaaauguacaauag

SEQ ID NO: 6871 - RNA, 21 nt, Artificial Sequence
  LRRK2 RNA guide
ggauaacaucucuaaugcauc

SEQ ID NO: 6872 - RNA, 21 nt, Artificial Sequence
  LRRK2 RNA guide
gggauaacaucucuaaugcau

SEQ ID NO: 6873 - RNA, 21 nt, Artificial Sequence
  LRRK2 RNA guide
guacauuuucugaugcauuag

SEQ ID NO: 6874 - RNA, 21 nt, Artificial Sequence
  LRRK2 RNA guide
uaacaucucuaaugcaucaga

SEQ ID NO: 6875 - RNA, 21 nt, Artificial Sequence
  LRRK2 RNA guide
ucucuaaugcaucagaaaaug

SEQ ID NO: 6876 - RNA, 21 nt, Artificial Sequence
  LRRK2 RNA guide
ucugaugcauuagagauguua

SEQ ID NO: 6877 - RNA, 21 nt, Artificial Sequence
  LRRK2 RNA guide
uucugaugcauuagagauguu

SEQ ID NO: 6878 - RNA, 21 nt, Artificial Sequence
  LRRK2 RNA guide
uuucugaugcauuagagaugu

SEQ ID NO: 6879 - RNA, 21 nt, Artificial Sequence
  LRRK2 RNA guide
uuuucugaugcauuagagaug

SEQ ID NO: 6880 - RNA, 22 nt, Artificial Sequence
  LRRK2 RNA guide
aacaucucuaaugcaucagaaa

SEQ ID NO: 6881 - RNA, 22 nt, Artificial Sequence
  LRRK2 RNA guide
acaucucuaaugcaucagaaaa

SEQ ID NO: 6882 - RNA, 22 nt, Artificial Sequence
  LRRK2 RNA guide
acauuuucugaugcauuagaga

SEQ ID NO: 6883 - RNA, 22 nt, Artificial Sequence
  LRRK2 RNA guide
agggauaacaucucuaaugcau

SEQ ID NO: 6884 - RNA, 22 nt, Artificial Sequence
  LRRK2 RNA guide
auaacaucucuaaugcaucaga

SEQ ID NO: 6885 - RNA, 22 nt, Artificial Sequence
  LRRK2 RNA guide
aucucuaaugcaucagaaaaug

SEQ ID NO: 6886 - RNA, 22 nt, Artificial Sequence
  LRRK2 RNA guide
auuuucugaugcauuagagaug

SEQ ID NO: 6887 - RNA, 22 nt, Artificial Sequence
  LRRK2 RNA guide
cagggauaacaucucuaaugca

SEQ ID NO: 6888 - RNA, 22 nt, Artificial Sequence
  LRRK2 RNA guide
caucucuaaugcaucagaaaau

SEQ ID NO: 6889 - RNA, 22 nt, Artificial Sequence
  LRRK2 RNA guide
cauuuucugaugcauuagagau

SEQ ID NO: 6890 - RNA, 22 nt, Artificial Sequence
  LRRK2 RNA guide
cuaaugcaucagaaaauguaca

SEQ ID NO: 6891 - RNA, 22 nt, Artificial Sequence
  LRRK2 RNA guide
cuauuguacauuuucugaugca

SEQ ID NO: 6892 - RNA, 22 nt, Artificial Sequence
  LRRK2 RNA guide
cucuaaugcaucagaaaaugua

SEQ ID NO: 6893 - RNA, 22 nt, Artificial Sequence
  LRRK2 RNA guide
gauaacaucucuaaugcaucag

SEQ ID NO: 6894 - RNA, 22 nt, Artificial Sequence
  LRRK2 RNA guide
gcaucagaaaauguacaauaga

SEQ ID NO: 6895 - RNA, 22 nt, Artificial Sequence
  LRRK2 RNA guide
ggauaacaucucuaaugcauca

SEQ ID NO: 6896 - RNA, 22 nt, Artificial Sequence
  LRRK2 RNA guide
gggauaacaucucuaaugcauc

SEQ ID NO: 6897 - RNA, 22 nt, Artificial Sequence
  LRRK2 RNA guide
guacauuuucugaugcauuaga

SEQ ID NO: 6898 - RNA, 22 nt, Artificial Sequence
  LRRK2 RNA guide
uaacaucucuaaugcaucagaa

SEQ ID NO: 6899 - RNA, 22 nt, Artificial Sequence
  LRRK2 RNA guide
uacauuuucugaugcauuagag

SEQ ID NO: 6900 - RNA, 22 nt, Artificial Sequence
  LRRK2 RNA guide
ucuaaugcaucagaaaauguac

SEQ ID NO: 6901 - RNA, 22 nt, Artificial Sequence
  LRRK2 RNA guide
ucuauuguacauuuucugaugc

SEQ ID NO: 6902 - RNA, 22 nt, Artificial Sequence
  LRRK2 RNA guide
ucucuaaugcaucagaaaaugu

SEQ ID NO: 6903 - RNA, 22 nt, Artificial Sequence
  LRRK2 RNA guide
ucugaugcauuagagauguuau

SEQ ID NO: 6904 - RNA, 22 nt, Artificial Sequence
  LRRK2 RNA guide
ugcaucagaaaauguacaauag

SEQ ID NO: 6905 - RNA, 22 nt, Artificial Sequence
  LRRK2 RNA guide
uguacauuuucugaugcauuag

SEQ ID NO: 6906 - RNA, 22 nt, Artificial Sequence
  LRRK2 RNA guide
uucugaugcauuagagauguua

SEQ ID NO: 6907 - RNA, 22 nt, Artificial Sequence
  LRRK2 RNA guide
uuucugaugcauuagagauguu

SEQ ID NO: 6908 - RNA, 22 nt, Artificial Sequence
  LRRK2 RNA guide
uuuucugaugcauuagagaugu

SEQ ID NO: 6909 - RNA, 20 nt, Artificial Sequence
  LRRK2 RNA guide
aaguauccuguaagacuuaa

SEQ ID NO: 6910 - RNA, 20 nt, Artificial Sequence
  LRRK2 RNA guide
aagucuuacaggauacuuga

SEQ ID NO: 6911 - RNA, 20 nt, Artificial Sequence
  LRRK2 RNA guide
aaucaaguauccuguaagac

SEQ ID NO: 6912 - RNA, 20 nt, Artificial Sequence
  LRRK2 RNA guide
acaggauacuugauuacaaa

SEQ ID NO: 6913 - RNA, 20 nt, Artificial Sequence
  LRRK2 RNA guide
aguauccuguaagacuuaaa

SEQ ID NO: 6914 - RNA, 20 nt, Artificial Sequence
  LRRK2 RNA guide
agucuuacaggauacuugau

SEQ ID NO: 6915 - RNA, 20 nt, Artificial Sequence
  LRRK2 RNA guide
agugucuggguuuaagucuu

SEQ ID NO: 6916 - RNA, 20 nt, Artificial Sequence
  LRRK2 RNA guide
aucaaguauccuguaagacu

SEQ ID NO: 6917 - RNA, 20 nt, Artificial Sequence
  LRRK2 RNA guide
auccuguaagacuuaaaccc

SEQ ID NO: 6918 - RNA, 20 nt, Artificial Sequence
  LRRK2 RNA guide
caaguauccuguaagacuua

SEQ ID NO: 6919 - RNA, 20 nt, Artificial Sequence
  LRRK2 RNA guide
cagugucuggguuuaagucu

SEQ ID NO: 6920 - RNA, 20 nt, Artificial Sequence
  LRRK2 RNA guide
ccuguaagacuuaaacccag

SEQ ID NO: 6921 - RNA, 20 nt, Artificial Sequence
  LRRK2 RNA guide
cuggguuuaagucuuacagg

SEQ ID NO: 6922 - RNA, 20 nt, Artificial Sequence
  LRRK2 RNA guide
cuguaagacuuaaacccaga

SEQ ID NO: 6923 - RNA, 20 nt, Artificial Sequence
  LRRK2 RNA guide
cuuacaggauacuugauuac

SEQ ID NO: 6924 - RNA, 20 nt, Artificial Sequence
  LRRK2 RNA guide
cuucuuuguaaucaaguauc

SEQ ID NO: 6925 - RNA, 20 nt, Artificial Sequence
  LRRK2 RNA guide
cuuuguaaucaaguauccug

SEQ ID NO: 6926 - RNA, 20 nt, Artificial Sequence
  LRRK2 RNA guide
ggguuuaagucuuacaggau

SEQ ID NO: 6927 - RNA, 20 nt, Artificial Sequence
  LRRK2 RNA guide
gguuuaagucuuacaggaua

SEQ ID NO: 6928 - RNA, 20 nt, Artificial Sequence
  LRRK2 RNA guide
guaaucaaguauccuguaag

SEQ ID NO: 6929 - RNA, 20 nt, Artificial Sequence
  LRRK2 RNA guide
guauccuguaagacuuaaac

SEQ ID NO: 6930 - RNA, 20 nt, Artificial Sequence
  LRRK2 RNA guide
gucuggguuuaagucuuaca

SEQ ID NO: 6931 - RNA, 20 nt, Artificial Sequence
  LRRK2 RNA guide
gucuuacaggauacuugauu

SEQ ID NO: 6932 - RNA, 20 nt, Artificial Sequence
  LRRK2 RNA guide
gugucuggguuuaagucuua

SEQ ID NO: 6933 - RNA, 20 nt, Artificial Sequence
  LRRK2 RNA guide
guuuaagucuuacaggauac

SEQ ID NO: 6934 - RNA, 20 nt, Artificial Sequence
  LRRK2 RNA guide
uaagucuuacaggauacuug

SEQ ID NO: 6935 - RNA, 20 nt, Artificial Sequence
  LRRK2 RNA guide
uaaucaaguauccuguaaga

SEQ ID NO: 6936 - RNA, 20 nt, Artificial Sequence
  LRRK2 RNA guide
uacaggauacuugauuacaa

SEQ ID NO: 6937 - RNA, 20 nt, Artificial Sequence
  LRRK2 RNA guide
uauccuguaagacuuaaacc

SEQ ID NO: 6938 - RNA, 20 nt, Artificial Sequence
  LRRK2 RNA guide
ucaaguauccuguaagacuu

SEQ ID NO: 6939 - RNA, 20 nt, Artificial Sequence
  LRRK2 RNA guide
ucagugucuggguuuaaguc

SEQ ID NO: 6940 - RNA, 20 nt, Artificial Sequence
  LRRK2 RNA guide
uccuguaagacuuaaaccca

SEQ ID NO: 6941 - RNA, 20 nt, Artificial Sequence
  LRRK2 RNA guide
ucuggguuuaagucuuacag

SEQ ID NO: 6942 - RNA, 20 nt, Artificial Sequence
  LRRK2 RNA guide
ucuuacaggauacuugauua

SEQ ID NO: 6943 - RNA, 20 nt, Artificial Sequence
  LRRK2 RNA guide
ucuuuguaaucaaguauccu

SEQ ID NO: 6944 - RNA, 20 nt, Artificial Sequence
  LRRK2 RNA guide
uggguuuaagucuuacagga

SEQ ID NO: 6945 - RNA, 20 nt, Artificial Sequence
  LRRK2 RNA guide
uguaagacuuaaacccagac

SEQ ID NO: 6946 - RNA, 20 nt, Artificial Sequence
  LRRK2 RNA guide
uguaaucaaguauccuguaa

SEQ ID NO: 6947 - RNA, 20 nt, Artificial Sequence
  LRRK2 RNA guide
ugucuggguuuaagucuuac

SEQ ID NO: 6948 - RNA, 20 nt, Artificial Sequence
  LRRK2 RNA guide
uuaagucuuacaggauacuu

SEQ ID NO: 6949 - RNA, 20 nt, Artificial Sequence
  LRRK2 RNA guide
uuacaggauacuugauuaca

SEQ ID NO: 6950 - RNA, 20 nt, Artificial Sequence
  LRRK2 RNA guide
uucagugucuggguuuaagu

SEQ ID NO: 6951 - RNA, 20 nt, Artificial Sequence
  LRRK2 RNA guide
uuguaaucaaguauccugua

SEQ ID NO: 6952 - RNA, 20 nt, Artificial Sequence
  LRRK2 RNA guide
uuuaagucuuacaggauacu

SEQ ID NO: 6953 - RNA, 20 nt, Artificial Sequence
  LRRK2 RNA guide
uuuguaaucaaguauccugu

SEQ ID NO: 6954 - RNA, 21 nt, Artificial Sequence
  LRRK2 RNA guide
aagucuuacaggauacuugau

SEQ ID NO: 6955 - RNA, 21 nt, Artificial Sequence
  LRRK2 RNA guide
aaucaaguauccuguaagacu

SEQ ID NO: 6956 - RNA, 21 nt, Artificial Sequence
  LRRK2 RNA guide
acaggauacuugauuacaaag

SEQ ID NO: 6957 - RNA, 21 nt, Artificial Sequence
  LRRK2 RNA guide
aguauccuguaagacuuaaac

SEQ ID NO: 6958 - RNA, 21 nt, Artificial Sequence
  LRRK2 RNA guide
agucuuacaggauacuugauu

SEQ ID NO: 6959 - RNA, 21 nt, Artificial Sequence
  LRRK2 RNA guide
agugucuggguuuaagucuua

SEQ ID NO: 6960 - RNA, 21 nt, Artificial Sequence
  LRRK2 RNA guide
aucaaguauccuguaagacuu

SEQ ID NO: 6961 - RNA, 21 nt, Artificial Sequence
  LRRK2 RNA guide
auccuguaagacuuaaaccca

SEQ ID NO: 6962 - RNA, 21 nt, Artificial Sequence
  LRRK2 RNA guide
auucagugucuggguuuaagu

SEQ ID NO: 6963 - RNA, 21 nt, Artificial Sequence
  LRRK2 RNA guide
caaguauccuguaagacuuaa

SEQ ID NO: 6964 - RNA, 21 nt, Artificial Sequence
  LRRK2 RNA guide
cagugucuggguuuaagucuu

SEQ ID NO: 6965 - RNA, 21 nt, Artificial Sequence
  LRRK2 RNA guide
ccuguaagacuuaaacccaga

SEQ ID NO: 6966 - RNA, 21 nt, Artificial Sequence
  LRRK2 RNA guide
cuggguuuaagucuuacagga

SEQ ID NO: 6967 - RNA, 21 nt, Artificial Sequence
  LRRK2 RNA guide
cuguaagacuuaaacccagac

SEQ ID NO: 6968 - RNA, 21 nt, Artificial Sequence
  LRRK2 RNA guide
cuuacaggauacuugauuaca

SEQ ID NO: 6969 - RNA, 21 nt, Artificial Sequence
  LRRK2 RNA guide
cuucuuuguaaucaaguaucc

SEQ ID NO: 6970 - RNA, 21 nt, Artificial Sequence
  LRRK2 RNA guide
cuuuguaaucaaguauccugu

SEQ ID NO: 6971 - RNA, 21 nt, Artificial Sequence
  LRRK2 RNA guide
ggguuuaagucuuacaggaua

SEQ ID NO: 6972 - RNA, 21 nt, Artificial Sequence
  LRRK2 RNA guide
gguuuaagucuuacaggauac

SEQ ID NO: 6973 - RNA, 21 nt, Artificial Sequence
  LRRK2 RNA guide
guaaucaaguauccuguaaga

SEQ ID NO: 6974 - RNA, 21 nt, Artificial Sequence
  LRRK2 RNA guide
guauccuguaagacuuaaacc

SEQ ID NO: 6975 - RNA, 21 nt, Artificial Sequence
  LRRK2 RNA guide
gucuggguuuaagucuuacag

SEQ ID NO: 6976 - RNA, 21 nt, Artificial Sequence
  LRRK2 RNA guide
gucuuacaggauacuugauua

SEQ ID NO: 6977 - RNA, 21 nt, Artificial Sequence
  LRRK2 RNA guide
gugucuggguuuaagucuuac

SEQ ID NO: 6978 - RNA, 21 nt, Artificial Sequence
  LRRK2 RNA guide
guuuaagucuuacaggauacu

SEQ ID NO: 6979 - RNA, 21 nt, Artificial Sequence
  LRRK2 RNA guide
uaagucuuacaggauacuuga

SEQ ID NO: 6980 - RNA, 21 nt, Artificial Sequence
  LRRK2 RNA guide
uaaucaaguauccuguaagac

SEQ ID NO: 6981 - RNA, 21 nt, Artificial Sequence
  LRRK2 RNA guide
uauccuguaagacuuaaaccc

SEQ ID NO: 6982 - RNA, 21 nt, Artificial Sequence
  LRRK2 RNA guide
ucaaguauccuguaagacuua

SEQ ID NO: 6983 - RNA, 21 nt, Artificial Sequence
  LRRK2 RNA guide
ucagugucuggguuuaagucu

SEQ ID NO: 6984 - RNA, 21 nt, Artificial Sequence
  LRRK2 RNA guide
uccuguaagacuuaaacccag

SEQ ID NO: 6985 - RNA, 21 nt, Artificial Sequence
  LRRK2 RNA guide
ucuggguuuaagucuuacagg

SEQ ID NO: 6986 - RNA, 21 nt, Artificial Sequence
  LRRK2 RNA guide
ucuuacaggauacuugauuac

SEQ ID NO: 6987 - RNA, 21 nt, Artificial Sequence
  LRRK2 RNA guide
ucuuuguaaucaaguauccug

SEQ ID NO: 6988 - RNA, 21 nt, Artificial Sequence
  LRRK2 RNA guide
uggguuuaagucuuacaggau

SEQ ID NO: 6989 - RNA, 21 nt, Artificial Sequence
  LRRK2 RNA guide
uguaagacuuaaacccagaca

SEQ ID NO: 6990 - RNA, 21 nt, Artificial Sequence
  LRRK2 RNA guide
uguaaucaaguauccuguaag

SEQ ID NO: 6991 - RNA, 21 nt, Artificial Sequence
  LRRK2 RNA guide
ugucuggguuuaagucuuaca

SEQ ID NO: 6992 - RNA, 21 nt, Artificial Sequence
  LRRK2 RNA guide
uuaagucuuacaggauacuug

SEQ ID NO: 6993 - RNA, 21 nt, Artificial Sequence
  LRRK2 RNA guide
uucagugucuggguuuaaguc

SEQ ID NO: 6994 - RNA, 22 nt, Artificial Sequence
  LRRK2 RNA guide
aaguauccuguaagacuuaaac

SEQ ID NO: 6995 - RNA, 22 nt, Artificial Sequence
  LRRK2 RNA guide
aagucuuacaggauacuugauu

SEQ ID NO: 6996 - RNA, 22 nt, Artificial Sequence
  LRRK2 RNA guide
aaucaaguauccuguaagacuu

SEQ ID NO: 6997 - RNA, 22 nt, Artificial Sequence
  LRRK2 RNA guide
aauucagugucuggguuuaagu

SEQ ID NO: 6998 - RNA, 22 nt, Artificial Sequence
  LRRK2 RNA guide
acaggauacuugauuacaaaga

SEQ ID NO: 6999 - RNA, 22 nt, Artificial Sequence
  LRRK2 RNA guide
aguauccuguaagacuuaaacc

SEQ ID NO: 7000 - RNA, 22 nt, Artificial Sequence
  LRRK2 RNA guide
agucuuacaggauacuugauua

SEQ ID NO: 7001 - RNA, 22 nt, Artificial Sequence
  LRRK2 RNA guide
agugucuggguuuaagucuuac

SEQ ID NO: 7002 - RNA, 22 nt, Artificial Sequence
  LRRK2 RNA guide
aucaaguauccuguaagacuua

SEQ ID NO: 7003 - RNA, 22 nt, Artificial Sequence
  LRRK2 RNA guide
auccuguaagacuuaaacccag

SEQ ID NO: 7004 - RNA, 22 nt, Artificial Sequence
  LRRK2 RNA guide
auucagugucuggguuuaaguc

SEQ ID NO: 7005 - RNA, 22 nt, Artificial Sequence
  LRRK2 RNA guide
caaguauccuguaagacuuaaa

SEQ ID NO: 7006 - RNA, 22 nt, Artificial Sequence
  LRRK2 RNA guide
cagugucuggguuuaagucuua

SEQ ID NO: 7007 - RNA, 22 nt, Artificial Sequence
  LRRK2 RNA guide
ccuguaagacuuaaacccagac

SEQ ID NO: 7008 - RNA, 22 nt, Artificial Sequence
  LRRK2 RNA guide
cuggguuuaagucuuacaggau

SEQ ID NO: 7009 - RNA, 22 nt, Artificial Sequence
  LRRK2 RNA guide
cuguaagacuuaaacccagaca

SEQ ID NO: 7010 - RNA, 22 nt, Artificial Sequence
  LRRK2 RNA guide
cuuacaggauacuugauuacaa

SEQ ID NO: 7011 - RNA, 22 nt, Artificial Sequence
  LRRK2 RNA guide
cuucuuuguaaucaaguauccu

SEQ ID NO: 7012 - RNA, 22 nt, Artificial Sequence
  LRRK2 RNA guide
cuuuguaaucaaguauccugua

SEQ ID NO: 7013 - RNA, 22 nt, Artificial Sequence
  LRRK2 RNA guide
ggguuuaagucuuacaggauac

SEQ ID NO: 7014 - RNA, 22 nt, Artificial Sequence
  LRRK2 RNA guide
gguuuaagucuuacaggauacu

SEQ ID NO: 7015 - RNA, 22 nt, Artificial Sequence
  LRRK2 RNA guide
guaaucaaguauccuguaagac

SEQ ID NO: 7016 - RNA, 22 nt, Artificial Sequence
  LRRK2 RNA guide
guauccuguaagacuuaaaccc

SEQ ID NO: 7017 - RNA, 22 nt, Artificial Sequence
  LRRK2 RNA guide
gucuggguuuaagucuuacagg

SEQ ID NO: 7018 - RNA, 22 nt, Artificial Sequence
  LRRK2 RNA guide
gucuuacaggauacuugauuac

SEQ ID NO: 7019 - RNA, 22 nt, Artificial Sequence
  LRRK2 RNA guide
gugucuggguuuaagucuuaca

SEQ ID NO: 7020 - RNA, 22 nt, Artificial Sequence
  LRRK2 RNA guide
guuuaagucuuacaggauacuu

SEQ ID NO: 7021 - RNA, 22 nt, Artificial Sequence
  LRRK2 RNA guide
uaagucuuacaggauacuugau

SEQ ID NO: 7022 - RNA, 22 nt, Artificial Sequence
  LRRK2 RNA guide
uaaucaaguauccuguaagacu

SEQ ID NO: 7023 - RNA, 22 nt, Artificial Sequence
  LRRK2 RNA guide
uacaggauacuugauuacaaag

SEQ ID NO: 7024 - RNA, 22 nt, Artificial Sequence
  LRRK2 RNA guide
uauccuguaagacuuaaaccca

SEQ ID NO: 7025 - RNA, 22 nt, Artificial Sequence
  LRRK2 RNA guide
ucaaguauccuguaagacuuaa

SEQ ID NO: 7026 - RNA, 22 nt, Artificial Sequence
  LRRK2 RNA guide
ucagugucuggguuuaagucuu

SEQ ID NO: 7027 - RNA, 22 nt, Artificial Sequence
  LRRK2 RNA guide
uccuguaagacuuaaacccaga

SEQ ID NO: 7028 - RNA, 22 nt, Artificial Sequence
  LRRK2 RNA guide
ucuggguuuaagucuuacagga

SEQ ID NO: 7029 - RNA, 22 nt, Artificial Sequence
  LRRK2 RNA guide
ucuuacaggauacuugauuaca

SEQ ID NO: 7030 - RNA, 22 nt, Artificial Sequence
  LRRK2 RNA guide
ucuucuuuguaaucaaguaucc

SEQ ID NO: 7031 - RNA, 22 nt, Artificial Sequence
  LRRK2 RNA guide
ucuuuguaaucaaguauccugu

SEQ ID NO: 7032 - RNA, 22 nt, Artificial Sequence
  LRRK2 RNA guide
uggguuuaagucuuacaggaua

SEQ ID NO: 7033 - RNA, 22 nt, Artificial Sequence
  LRRK2 RNA guide
uguaagacuuaaacccagacac

SEQ ID NO: 7034 - RNA, 22 nt, Artificial Sequence
  LRRK2 RNA guide
uguaaucaaguauccuguaaga

SEQ ID NO: 7035 - RNA, 22 nt, Artificial Sequence
  LRRK2 RNA guide
ugucuggguuuaagucuuacag

SEQ ID NO: 7036 - RNA, 22 nt, Artificial Sequence
  LRRK2 RNA guide
uuaagucuuacaggauacuuga

SEQ ID NO: 7037 - RNA, 22 nt, Artificial Sequence
  LRRK2 RNA guide
uucagugucuggguuuaagucu

SEQ ID NO: 7038 - RNA, 22 nt, Artificial Sequence
  LRRK2 RNA guide
uucuuuguaaucaaguauccug

SEQ ID NO: 7039 - RNA, 22 nt, Artificial Sequence
  LRRK2 RNA guide
uuguaaucaaguauccuguaag

SEQ ID NO: 7040 - RNA, 22 nt, Artificial Sequence
  LRRK2 RNA guide
uuuaagucuuacaggauacuug

SEQ ID NO: 7041 - RNA, 20 nt, Artificial Sequence
  LRRK2 RNA guide
aacacauucuuccuuguaau

SEQ ID NO: 7042 - RNA, 20 nt, Artificial Sequence
  LRRK2 RNA guide
aaggaagaauguguucauag

SEQ ID NO: 7043 - RNA, 20 nt, Artificial Sequence
  LRRK2 RNA guide
acaaggaagaauguguucau

SEQ ID NO: 7044 - RNA, 20 nt, Artificial Sequence
  LRRK2 RNA guide
acacauucuuccuuguaauc

SEQ ID NO: 7045 - RNA, 20 nt, Artificial Sequence
  LRRK2 RNA guide
acauucuuccuuguaaucaa

SEQ ID NO: 7046 - RNA, 20 nt, Artificial Sequence
  LRRK2 RNA guide
acuugauuacaaggaagaau

SEQ ID NO: 7047 - RNA, 20 nt, Artificial Sequence
  LRRK2 RNA guide
aggaagaauguguucauagg

SEQ ID NO: 7048 - RNA, 20 nt, Artificial Sequence
  LRRK2 RNA guide
aggauacuugauuacaagga

SEQ ID NO: 7049 - RNA, 20 nt, Artificial Sequence
  LRRK2 RNA guide
aguuccuaugaacacauucu

SEQ ID NO: 7050 - RNA, 20 nt, Artificial Sequence
  LRRK2 RNA guide
auacuugauuacaaggaaga

SEQ ID NO: 7051 - RNA, 20 nt, Artificial Sequence
  LRRK2 RNA guide
auaggauacuugauuacaag

SEQ ID NO: 7052 - RNA, 20 nt, Artificial Sequence
  LRRK2 RNA guide
augaacacauucuuccuugu

SEQ ID NO: 7053 - RNA, 20 nt, Artificial Sequence
  LRRK2 RNA guide
auuacaaggaagaauguguu

SEQ ID NO: 7054 - RNA, 20 nt, Artificial Sequence
  LRRK2 RNA guide
auucuuccuuguaaucaagu

SEQ ID NO: 7055 - RNA, 20 nt, Artificial Sequence
  LRRK2 RNA guide
caaggaagaauguguucaua

SEQ ID NO: 7056 - RNA, 20 nt, Artificial Sequence
  LRRK2 RNA guide
cacauucuuccuuguaauca

SEQ ID NO: 7057 - RNA, 20 nt, Artificial Sequence
  LRRK2 RNA guide
cauucuuccuuguaaucaag

SEQ ID NO: 7058 - RNA, 20 nt, Artificial Sequence
  LRRK2 RNA guide
ccaguuccuaugaacacauu

SEQ ID NO: 7059 - RNA, 20 nt, Artificial Sequence
  LRRK2 RNA guide
ccuaugaacacauucuuccu

SEQ ID NO: 7060 - RNA, 20 nt, Artificial Sequence
  LRRK2 RNA guide
ccuuguaaucaaguauccua

SEQ ID NO: 7061 - RNA, 20 nt, Artificial Sequence
  LRRK2 RNA guide
cuaugaacacauucuuccuu

SEQ ID NO: 7062 - RNA, 20 nt, Artificial Sequence
  LRRK2 RNA guide
cuuauaggauacuugauuac

SEQ ID NO: 7063 - RNA, 20 nt, Artificial Sequence
  LRRK2 RNA guide
cuuccuuguaaucaaguauc

SEQ ID NO: 7064 - RNA, 20 nt, Artificial Sequence
  LRRK2 RNA guide
cuugauuacaaggaagaaug

SEQ ID NO: 7065 - RNA, 20 nt, Artificial Sequence
  LRRK2 RNA guide
gaacacauucuuccuuguaa

SEQ ID NO: 7066 - RNA, 20 nt, Artificial Sequence
  LRRK2 RNA guide
gauacuugauuacaaggaag

SEQ ID NO: 7067 - RNA, 20 nt, Artificial Sequence
  LRRK2 RNA guide
gauuacaaggaagaaugugu

SEQ ID NO: 7068 - RNA, 20 nt, Artificial Sequence
  LRRK2 RNA guide
ggauacuugauuacaaggaa

SEQ ID NO: 7069 - RNA, 20 nt, Artificial Sequence
  LRRK2 RNA guide
gucuuauaggauacuugauu

SEQ ID NO: 7070 - RNA, 20 nt, Artificial Sequence
  LRRK2 RNA guide
guuccuaugaacacauucuu

SEQ ID NO: 7071 - RNA, 20 nt, Artificial Sequence
  LRRK2 RNA guide
uacaaggaagaauguguuca

SEQ ID NO: 7072 - RNA, 20 nt, Artificial Sequence
  LRRK2 RNA guide
uacuugauuacaaggaagaa

SEQ ID NO: 7073 - RNA, 20 nt, Artificial Sequence
  LRRK2 RNA guide
uaggauacuugauuacaagg

SEQ ID NO: 7074 - RNA, 20 nt, Artificial Sequence
  LRRK2 RNA guide
uaugaacacauucuuccuug

SEQ ID NO: 7075 - RNA, 20 nt, Artificial Sequence
  LRRK2 RNA guide
uccuaugaacacauucuucc

SEQ ID NO: 7076 - RNA, 20 nt, Artificial Sequence
  LRRK2 RNA guide
uccuuguaaucaaguauccu

SEQ ID NO: 7077 - RNA, 20 nt, Artificial Sequence
  LRRK2 RNA guide
ucuuccuuguaaucaaguau

SEQ ID NO: 7078 - RNA, 20 nt, Artificial Sequence
  LRRK2 RNA guide
ugaacacauucuuccuugua

SEQ ID NO: 7079 - RNA, 20 nt, Artificial Sequence
  LRRK2 RNA guide
ugauuacaaggaagaaugug

SEQ ID NO: 7080 - RNA, 20 nt, Artificial Sequence
  LRRK2 RNA guide
uuacaaggaagaauguguuc

SEQ ID NO: 7081 - RNA, 20 nt, Artificial Sequence
  LRRK2 RNA guide
uuccuaugaacacauucuuc

SEQ ID NO: 7082 - RNA, 20 nt, Artificial Sequence
  LRRK2 RNA guide
uuccuuguaaucaaguaucc

SEQ ID NO: 7083 - RNA, 20 nt, Artificial Sequence
  LRRK2 RNA guide
uucuuccuuguaaucaagua

SEQ ID NO: 7084 - RNA, 20 nt, Artificial Sequence
  LRRK2 RNA guide
uugauuacaaggaagaaugu

SEQ ID NO: 7085 - RNA, 21 nt, Artificial Sequence
  LRRK2 RNA guide
aacacauucuuccuuguaauc

SEQ ID NO: 7086 - RNA, 21 nt, Artificial Sequence
  LRRK2 RNA guide
aaggaagaauguguucauagg

SEQ ID NO: 7087 - RNA, 21 nt, Artificial Sequence
  LRRK2 RNA guide
acaaggaagaauguguucaua

SEQ ID NO: 7088 - RNA, 21 nt, Artificial Sequence
  LRRK2 RNA guide
acacauucuuccuuguaauca

SEQ ID NO: 7089 - RNA, 21 nt, Artificial Sequence
  LRRK2 RNA guide
acauucuuccuuguaaucaag

SEQ ID NO: 7090 - RNA, 21 nt, Artificial Sequence
  LRRK2 RNA guide
acuugauuacaaggaagaaug

SEQ ID NO: 7091 - RNA, 21 nt, Artificial Sequence
  LRRK2 RNA guide
aggaagaauguguucauagga

SEQ ID NO: 7092 - RNA, 21 nt, Artificial Sequence
  LRRK2 RNA guide
aggauacuugauuacaaggaa

SEQ ID NO: 7093 - RNA, 21 nt, Artificial Sequence
  LRRK2 RNA guide
aguuccuaugaacacauucuu

SEQ ID NO: 7094 - RNA, 21 nt, Artificial Sequence
  LRRK2 RNA guide
auaggauacuugauuacaagg

SEQ ID NO: 7095 - RNA, 21 nt, Artificial Sequence
  LRRK2 RNA guide
augaacacauucuuccuugua

SEQ ID NO: 7096 - RNA, 21 nt, Artificial Sequence
  LRRK2 RNA guide
auuacaaggaagaauguguuc

SEQ ID NO: 7097 - RNA, 21 nt, Artificial Sequence
  LRRK2 RNA guide
caaggaagaauguguucauag

SEQ ID NO: 7098 - RNA, 21 nt, Artificial Sequence
  LRRK2 RNA guide
cacauucuuccuuguaaucaa

SEQ ID NO: 7099 - RNA, 21 nt, Artificial Sequence
  LRRK2 RNA guide
caguuccuaugaacacauucu

SEQ ID NO: 7100 - RNA, 21 nt, Artificial Sequence
  LRRK2 RNA guide
cauucuuccuuguaaucaagu

SEQ ID NO: 7101 - RNA, 21 nt, Artificial Sequence
  LRRK2 RNA guide
ccaguuccuaugaacacauuc

SEQ ID NO: 7102 - RNA, 21 nt, Artificial Sequence
  LRRK2 RNA guide
ccuaugaacacauucuuccuu

SEQ ID NO: 7103 - RNA, 21 nt, Artificial Sequence
  LRRK2 RNA guide
ccuuguaaucaaguauccuau

SEQ ID NO: 7104 - RNA, 21 nt, Artificial Sequence
  LRRK2 RNA guide
cuaugaacacauucuuccuug

SEQ ID NO: 7105 - RNA, 21 nt, Artificial Sequence
  LRRK2 RNA guide
cuuccuuguaaucaaguaucc

SEQ ID NO: 7106 - RNA, 21 nt, Artificial Sequence
  LRRK2 RNA guide
cuugauuacaaggaagaaugu

SEQ ID NO: 7107 - RNA, 21 nt, Artificial Sequence
  LRRK2 RNA guide
gaacacauucuuccuuguaau

SEQ ID NO: 7108 - RNA, 21 nt, Artificial Sequence
  LRRK2 RNA guide
gauacuugauuacaaggaaga

SEQ ID NO: 7109 - RNA, 21 nt, Artificial Sequence
  LRRK2 RNA guide
gauuacaaggaagaauguguu

SEQ ID NO: 7110 - RNA, 21 nt, Artificial Sequence
  LRRK2 RNA guide
ggauacuugauuacaaggaag

SEQ ID NO: 7111 - RNA, 21 nt, Artificial Sequence
  LRRK2 RNA guide
guuccuaugaacacauucuuc

SEQ ID NO: 7112 - RNA, 21 nt, Artificial Sequence
  LRRK2 RNA guide
uacaaggaagaauguguucau

SEQ ID NO: 7113 - RNA, 21 nt, Artificial Sequence
  LRRK2 RNA guide
uaggauacuugauuacaagga

SEQ ID NO: 7114 - RNA, 21 nt, Artificial Sequence
  LRRK2 RNA guide
uaugaacacauucuuccuugu

SEQ ID NO: 7115 - RNA, 21 nt, Artificial Sequence
  LRRK2 RNA guide
uccaguuccuaugaacacauu

SEQ ID NO: 7116 - RNA, 21 nt, Artificial Sequence
  LRRK2 RNA guide
uccuaugaacacauucuuccu

SEQ ID NO: 7117 - RNA, 21 nt, Artificial Sequence
  LRRK2 RNA guide
uccuuguaaucaaguauccua

SEQ ID NO: 7118 - RNA, 21 nt, Artificial Sequence
  LRRK2 RNA guide
ucuuccuuguaaucaaguauc

SEQ ID NO: 7119 - RNA, 21 nt, Artificial Sequence
  LRRK2 RNA guide
ugaacacauucuuccuuguaa

SEQ ID NO: 7120 - RNA, 21 nt, Artificial Sequence
  LRRK2 RNA guide
ugauuacaaggaagaaugugu

SEQ ID NO: 7121 - RNA, 21 nt, Artificial Sequence
  LRRK2 RNA guide
uuacaaggaagaauguguuca

SEQ ID NO: 7122 - RNA, 21 nt, Artificial Sequence
  LRRK2 RNA guide
uuccuaugaacacauucuucc

SEQ ID NO: 7123 - RNA, 21 nt, Artificial Sequence
  LRRK2 RNA guide
uuccuuguaaucaaguauccu

SEQ ID NO: 7124 - RNA, 21 nt, Artificial Sequence
  LRRK2 RNA guide
uugauuacaaggaagaaugug

SEQ ID NO: 7125 - RNA, 22 nt, Artificial Sequence
  LRRK2 RNA guide
aacacauucuuccuuguaauca

SEQ ID NO: 7126 - RNA, 22 nt, Artificial Sequence
  LRRK2 RNA guide
aaggaagaauguguucauagga

SEQ ID NO: 7127 - RNA, 22 nt, Artificial Sequence
  LRRK2 RNA guide
acaaggaagaauguguucauag

SEQ ID NO: 7128 - RNA, 22 nt, Artificial Sequence
  LRRK2 RNA guide
acacauucuuccuuguaaucaa

SEQ ID NO: 7129 - RNA, 22 nt, Artificial Sequence
  LRRK2 RNA guide
acauucuuccuuguaaucaagu

SEQ ID NO: 7130 - RNA, 22 nt, Artificial Sequence
  LRRK2 RNA guide
acuugauuacaaggaagaaugu

SEQ ID NO: 7131 - RNA, 22 nt, Artificial Sequence
  LRRK2 RNA guide
aggaagaauguguucauaggaa

SEQ ID NO: 7132 - RNA, 22 nt, Artificial Sequence
  LRRK2 RNA guide
aggauacuugauuacaaggaag

SEQ ID NO: 7133 - RNA, 22 nt, Artificial Sequence
  LRRK2 RNA guide
aguuccuaugaacacauucuuc

SEQ ID NO: 7134 - RNA, 22 nt, Artificial Sequence
  LRRK2 RNA guide
auaggauacuugauuacaagga

SEQ ID NO: 7135 - RNA, 22 nt, Artificial Sequence
  LRRK2 RNA guide
augaacacauucuuccuuguaa

SEQ ID NO: 7136 - RNA, 22 nt, Artificial Sequence
  LRRK2 RNA guide
auuacaaggaagaauguguuca

SEQ ID NO: 7137 - RNA, 22 nt, Artificial Sequence
  LRRK2 RNA guide
caaggaagaauguguucauagg

SEQ ID NO: 7138 - RNA, 22 nt, Artificial Sequence
  LRRK2 RNA guide
cacauucuuccuuguaaucaag

SEQ ID NO: 7139 - RNA, 22 nt, Artificial Sequence
  LRRK2 RNA guide
caguuccuaugaacacauucuu

SEQ ID NO: 7140 - RNA, 22 nt, Artificial Sequence
  LRRK2 RNA guide
cauucuuccuuguaaucaagua

SEQ ID NO: 7141 - RNA, 22 nt, Artificial Sequence
  LRRK2 RNA guide
ccaguuccuaugaacacauucu

SEQ ID NO: 7142 - RNA, 22 nt, Artificial Sequence
  LRRK2 RNA guide
ccuaugaacacauucuuccuug

SEQ ID NO: 7143 - RNA, 22 nt, Artificial Sequence
  LRRK2 RNA guide
ccuuguaaucaaguauccuaua

SEQ ID NO: 7144 - RNA, 22 nt, Artificial Sequence
  LRRK2 RNA guide
cuaugaacacauucuuccuugu

SEQ ID NO: 7145 - RNA, 22 nt, Artificial Sequence
  LRRK2 RNA guide
cuuccuuguaaucaaguauccu

SEQ ID NO: 7146 - RNA, 22 nt, Artificial Sequence
  LRRK2 RNA guide
cuugauuacaaggaagaaugug

SEQ ID NO: 7147 - RNA, 22 nt, Artificial Sequence
  LRRK2 RNA guide
gaacacauucuuccuuguaauc

SEQ ID NO: 7148 - RNA, 22 nt, Artificial Sequence
  LRRK2 RNA guide
gauacuugauuacaaggaagaa

SEQ ID NO: 7149 - RNA, 22 nt, Artificial Sequence
  LRRK2 RNA guide
gauuacaaggaagaauguguuc

SEQ ID NO: 7150 - RNA, 22 nt, Artificial Sequence
  LRRK2 RNA guide
ggauacuugauuacaaggaaga

SEQ ID NO: 7151 - RNA, 22 nt, Artificial Sequence
  LRRK2 RNA guide
guccaguuccuaugaacacauu

SEQ ID NO: 7152 - RNA, 22 nt, Artificial Sequence
  LRRK2 RNA guide
gucuuauaggauacuugauuac

SEQ ID NO: 7153 - RNA, 22 nt, Artificial Sequence
  LRRK2 RNA guide
guuccuaugaacacauucuucc

SEQ ID NO: 7154 - RNA, 22 nt, Artificial Sequence
  LRRK2 RNA guide
uacaaggaagaauguguucaua

SEQ ID NO: 7155 - RNA, 22 nt, Artificial Sequence
  LRRK2 RNA guide
uacuugauuacaaggaagaaug

SEQ ID NO: 7156 - RNA, 22 nt, Artificial Sequence
  LRRK2 RNA guide
uaggauacuugauuacaaggaa

SEQ ID NO: 7157 - RNA, 22 nt, Artificial Sequence
  LRRK2 RNA guide
uauaggauacuugauuacaagg

SEQ ID NO: 7158 - RNA, 22 nt, Artificial Sequence
  LRRK2 RNA guide
uaugaacacauucuuccuugua

SEQ ID NO: 7159 - RNA, 22 nt, Artificial Sequence
  LRRK2 RNA guide
uccaguuccuaugaacacauuc

SEQ ID NO: 7160 - RNA, 22 nt, Artificial Sequence
  LRRK2 RNA guide
uccuaugaacacauucuuccuu

SEQ ID NO: 7161 - RNA, 22 nt, Artificial Sequence
  LRRK2 RNA guide
uccuuguaaucaaguauccuau

SEQ ID NO: 7162 - RNA, 22 nt, Artificial Sequence
  LRRK2 RNA guide
ucuuccuuguaaucaaguaucc

SEQ ID NO: 7163 - RNA, 22 nt, Artificial Sequence
  LRRK2 RNA guide
ugaacacauucuuccuuguaau

SEQ ID NO: 7164 - RNA, 22 nt, Artificial Sequence
  LRRK2 RNA guide
ugauuacaaggaagaauguguu

SEQ ID NO: 7165 - RNA, 22 nt, Artificial Sequence
  LRRK2 RNA guide
uuacaaggaagaauguguucau

SEQ ID NO: 7166 - RNA, 22 nt, Artificial Sequence
  LRRK2 RNA guide
uuccuaugaacacauucuuccu

SEQ ID NO: 7167 - RNA, 22 nt, Artificial Sequence
  LRRK2 RNA guide
uuccuuguaaucaaguauccua

SEQ ID NO: 7168 - RNA, 22 nt, Artificial Sequence
  LRRK2 RNA guide
uucuuccuuguaaucaaguauc

SEQ ID NO: 7169 - RNA, 22 nt, Artificial Sequence
  LRRK2 RNA guide
uugauuacaaggaagaaugugu

SEQ ID NO: 7170 - RNA, 20 nt, Artificial Sequence
  LRRK2 RNA guide
aaagaagaauguguucauag

SEQ ID NO: 7171 - RNA, 20 nt, Artificial Sequence
  LRRK2 RNA guide
aagaagaauguguucauagc

SEQ ID NO: 7172 - RNA, 20 nt, Artificial Sequence
  LRRK2 RNA guide
aagaauguguucauagcaac

SEQ ID NO: 7173 - RNA, 20 nt, Artificial Sequence
  LRRK2 RNA guide
aauguguucauagcaacugg

SEQ ID NO: 7174 - RNA, 20 nt, Artificial Sequence
  LRRK2 RNA guide
acaaagaagaauguguucau

SEQ ID NO: 7175 - RNA, 20 nt, Artificial Sequence
  LRRK2 RNA guide
agaagaauguguucauagca

SEQ ID NO: 7176 - RNA, 20 nt, Artificial Sequence
  LRRK2 RNA guide
agaauguguucauagcaacu

SEQ ID NO: 7177 - RNA, 20 nt, Artificial Sequence
  LRRK2 RNA guide
agauguccaguugcuaugaa

SEQ ID NO: 7178 - RNA, 20 nt, Artificial Sequence
  LRRK2 RNA guide
agcaacuggacaucugcugg

SEQ ID NO: 7179 - RNA, 20 nt, Artificial Sequence
  LRRK2 RNA guide
agcagauguccaguugcuau

SEQ ID NO: 7180 - RNA, 20 nt, Artificial Sequence
  LRRK2 RNA guide
aguugcuaugaacacauucu

SEQ ID NO: 7181 - RNA, 20 nt, Artificial Sequence
  LRRK2 RNA guide
auagcaacuggacaucugcu

SEQ ID NO: 7182 - RNA, 20 nt, Artificial Sequence
  LRRK2 RNA guide
auguccaguugcuaugaaca

SEQ ID NO: 7183 - RNA, 20 nt, Artificial Sequence
  LRRK2 RNA guide
auguguucauagcaacugga

SEQ ID NO: 7184 - RNA, 20 nt, Artificial Sequence
  LRRK2 RNA guide
auuuuugccagcagaugucc

SEQ ID NO: 7185 - RNA, 20 nt, Artificial Sequence
  LRRK2 RNA guide
caaagaagaauguguucaua

SEQ ID NO: 7186 - RNA, 20 nt, Artificial Sequence
  LRRK2 RNA guide
cagauguccaguugcuauga

SEQ ID NO: 7187 - RNA, 20 nt, Artificial Sequence
  LRRK2 RNA guide
cagcagauguccaguugcua

SEQ ID NO: 7188 - RNA, 20 nt, Artificial Sequence
  LRRK2 RNA guide
caguugcuaugaacacauuc

SEQ ID NO: 7189 - RNA, 20 nt, Artificial Sequence
  LRRK2 RNA guide
cauagcaacuggacaucugc

SEQ ID NO: 7190 - RNA, 20 nt, Artificial Sequence
  LRRK2 RNA guide
ccagcagauguccaguugcu

SEQ ID NO: 7191 - RNA, 20 nt, Artificial Sequence
  LRRK2 RNA guide
ccaguugcuaugaacacauu

SEQ ID NO: 7192 - RNA, 20 nt, Artificial Sequence
  LRRK2 RNA guide
gaagaauguguucauagcaa

SEQ ID NO: 7193 - RNA, 20 nt, Artificial Sequence
  LRRK2 RNA guide
gaauguguucauagcaacug

SEQ ID NO: 7194 - RNA, 20 nt, Artificial Sequence
  LRRK2 RNA guide
gauguccaguugcuaugaac

SEQ ID NO: 7195 - RNA, 20 nt, Artificial Sequence
  LRRK2 RNA guide
gcaacuggacaucugcuggc

SEQ ID NO: 7196 - RNA, 20 nt, Artificial Sequence
  LRRK2 RNA guide
gcagauguccaguugcuaug

SEQ ID NO: 7197 - RNA, 20 nt, Artificial Sequence
  LRRK2 RNA guide
gccagcagauguccaguugc

SEQ ID NO: 7198 - RNA, 20 nt, Artificial Sequence
  LRRK2 RNA guide
guccaguugcuaugaacaca

SEQ ID NO: 7199 - RNA, 20 nt, Artificial Sequence
  LRRK2 RNA guide
guguucauagcaacuggaca

SEQ ID NO: 7200 - RNA, 20 nt, Artificial Sequence
  LRRK2 RNA guide
guucauagcaacuggacauc

SEQ ID NO: 7201 - RNA, 20 nt, Artificial Sequence
  LRRK2 RNA guide
guugcuaugaacacauucuu

SEQ ID NO: 7202 - RNA, 20 nt, Artificial Sequence
  LRRK2 RNA guide
uacaaagaagaauguguuca

SEQ ID NO: 7203 - RNA, 20 nt, Artificial Sequence
  LRRK2 RNA guide
uagcaacuggacaucugcug

SEQ ID NO: 7204 - RNA, 20 nt, Artificial Sequence
  LRRK2 RNA guide
ucauagcaacuggacaucug

SEQ ID NO: 7205 - RNA, 20 nt, Artificial Sequence
  LRRK2 RNA guide
uccaguugcuaugaacacau

SEQ ID NO: 7206 - RNA, 20 nt, Artificial Sequence
  LRRK2 RNA guide
ugccagcagauguccaguug

SEQ ID NO: 7207 - RNA, 20 nt, Artificial Sequence
  LRRK2 RNA guide
ugcuaugaacacauucuucu

SEQ ID NO: 7208 - RNA, 20 nt, Artificial Sequence
  LRRK2 RNA guide
uguccaguugcuaugaacac

SEQ ID NO: 7209 - RNA, 20 nt, Artificial Sequence
  LRRK2 RNA guide
uguguucauagcaacuggac

SEQ ID NO: 7210 - RNA, 20 nt, Artificial Sequence
  LRRK2 RNA guide
uguucauagcaacuggacau

SEQ ID NO: 7211 - RNA, 20 nt, Artificial Sequence
  LRRK2 RNA guide
uuacaaagaagaauguguuc

SEQ ID NO: 7212 - RNA, 20 nt, Artificial Sequence
  LRRK2 RNA guide
uucauagcaacuggacaucu

SEQ ID NO: 7213 - RNA, 20 nt, Artificial Sequence
  LRRK2 RNA guide
uugccagcagauguccaguu

SEQ ID NO: 7214 - RNA, 20 nt, Artificial Sequence
  LRRK2 RNA guide
uugcuaugaacacauucuuc

SEQ ID NO: 7215 - RNA, 20 nt, Artificial Sequence
  LRRK2 RNA guide
uuugccagcagauguccagu

SEQ ID NO: 7216 - RNA, 20 nt, Artificial Sequence
  LRRK2 RNA guide
uuuugccagcagauguccag

SEQ ID NO: 7217 - RNA, 21 nt, Artificial Sequence
  LRRK2 RNA guide
aaagaagaauguguucauagc

SEQ ID NO: 7218 - RNA, 21 nt, Artificial Sequence
  LRRK2 RNA guide
aagaagaauguguucauagca

SEQ ID NO: 7219 - RNA, 21 nt, Artificial Sequence
  LRRK2 RNA guide
aagaauguguucauagcaacu

SEQ ID NO: 7220 - RNA, 21 nt, Artificial Sequence
  LRRK2 RNA guide
aauguguucauagcaacugga

SEQ ID NO: 7221 - RNA, 21 nt, Artificial Sequence
  LRRK2 RNA guide
aauuuuugccagcagaugucc

SEQ ID NO: 7222 - RNA, 21 nt, Artificial Sequence
  LRRK2 RNA guide
agaagaauguguucauagcaa

SEQ ID NO: 7223 - RNA, 21 nt, Artificial Sequence
  LRRK2 RNA guide
agaauguguucauagcaacug

SEQ ID NO: 7224 - RNA, 21 nt, Artificial Sequence
  LRRK2 RNA guide
agauguccaguugcuaugaac

SEQ ID NO: 7225 - RNA, 21 nt, Artificial Sequence
  LRRK2 RNA guide
agcaacuggacaucugcuggc

SEQ ID NO: 7226 - RNA, 21 nt, Artificial Sequence
  LRRK2 RNA guide
agcagauguccaguugcuaug

SEQ ID NO: 7227 - RNA, 21 nt, Artificial Sequence
  LRRK2 RNA guide
aguugcuaugaacacauucuu

SEQ ID NO: 7228 - RNA, 21 nt, Artificial Sequence
  LRRK2 RNA guide
auagcaacuggacaucugcug

SEQ ID NO: 7229 - RNA, 21 nt, Artificial Sequence
  LRRK2 RNA guide
auguccaguugcuaugaacac

SEQ ID NO: 7230 - RNA, 21 nt, Artificial Sequence
  LRRK2 RNA guide
auguguucauagcaacuggac

SEQ ID NO: 7231 - RNA, 21 nt, Artificial Sequence
  LRRK2 RNA guide
auuuuugccagcagaugucca

SEQ ID NO: 7232 - RNA, 21 nt, Artificial Sequence
  LRRK2 RNA guide
caaagaagaauguguucauag

SEQ ID NO: 7233 - RNA, 21 nt, Artificial Sequence
  LRRK2 RNA guide
cagauguccaguugcuaugaa

SEQ ID NO: 7234 - RNA, 21 nt, Artificial Sequence
  LRRK2 RNA guide
cagcagauguccaguugcuau

SEQ ID NO: 7235 - RNA, 21 nt, Artificial Sequence
  LRRK2 RNA guide
caguugcuaugaacacauucu

SEQ ID NO: 7236 - RNA, 21 nt, Artificial Sequence
  LRRK2 RNA guide
cauagcaacuggacaucugcu

SEQ ID NO: 7237 - RNA, 21 nt, Artificial Sequence
  LRRK2 RNA guide
ccagcagauguccaguugcua

SEQ ID NO: 7238 - RNA, 21 nt, Artificial Sequence
  LRRK2 RNA guide
ccaguugcuaugaacacauuc

SEQ ID NO: 7239 - RNA, 21 nt, Artificial Sequence
  LRRK2 RNA guide
gaagaauguguucauagcaac

SEQ ID NO: 7240 - RNA, 21 nt, Artificial Sequence
  LRRK2 RNA guide
gaauguguucauagcaacugg

SEQ ID NO: 7241 - RNA, 21 nt, Artificial Sequence
  LRRK2 RNA guide
gauguccaguugcuaugaaca

SEQ ID NO: 7242 - RNA, 21 nt, Artificial Sequence
  LRRK2 RNA guide
gcaacuggacaucugcuggca

SEQ ID NO: 7243 - RNA, 21 nt, Artificial Sequence
  LRRK2 RNA guide
gcagauguccaguugcuauga

SEQ ID NO: 7244 - RNA, 21 nt, Artificial Sequence
  LRRK2 RNA guide
gccagcagauguccaguugcu

SEQ ID NO: 7245 - RNA, 21 nt, Artificial Sequence
  LRRK2 RNA guide
guccaguugcuaugaacacau

SEQ ID NO: 7246 - RNA, 21 nt, Artificial Sequence
  LRRK2 RNA guide
guguucauagcaacuggacau

SEQ ID NO: 7247 - RNA, 21 nt, Artificial Sequence
  LRRK2 RNA guide
guucauagcaacuggacaucu

SEQ ID NO: 7248 - RNA, 21 nt, Artificial Sequence
  LRRK2 RNA guide
guugcuaugaacacauucuuc

SEQ ID NO: 7249 - RNA, 21 nt, Artificial Sequence
  LRRK2 RNA guide
uagcaacuggacaucugcugg

SEQ ID NO: 7250 - RNA, 21 nt, Artificial Sequence
  LRRK2 RNA guide
ucauagcaacuggacaucugc

SEQ ID NO: 7251 - RNA, 21 nt, Artificial Sequence
  LRRK2 RNA guide
uccaguugcuaugaacacauu

SEQ ID NO: 7252 - RNA, 21 nt, Artificial Sequence
  LRRK2 RNA guide
ugccagcagauguccaguugc

SEQ ID NO: 7253 - RNA, 21 nt, Artificial Sequence
  LRRK2 RNA guide
ugcuaugaacacauucuucuu

SEQ ID NO: 7254 - RNA, 21 nt, Artificial Sequence
  LRRK2 RNA guide
uguccaguugcuaugaacaca

SEQ ID NO: 7255 - RNA, 21 nt, Artificial Sequence
  LRRK2 RNA guide
uguguucauagcaacuggaca

SEQ ID NO: 7256 - RNA, 21 nt, Artificial Sequence
  LRRK2 RNA guide
uguucauagcaacuggacauc

SEQ ID NO: 7257 - RNA, 21 nt, Artificial Sequence
  LRRK2 RNA guide
uucauagcaacuggacaucug

SEQ ID NO: 7258 - RNA, 21 nt, Artificial Sequence
  LRRK2 RNA guide
uugccagcagauguccaguug

SEQ ID NO: 7259 - RNA, 21 nt, Artificial Sequence
  LRRK2 RNA guide
uugcuaugaacacauucuucu

SEQ ID NO: 7260 - RNA, 21 nt, Artificial Sequence
  LRRK2 RNA guide
uuugccagcagauguccaguu

SEQ ID NO: 7261 - RNA, 21 nt, Artificial Sequence
  LRRK2 RNA guide
uuuugccagcagauguccagu

SEQ ID NO: 7262 - RNA, 21 nt, Artificial Sequence
  LRRK2 RNA guide
uuuuugccagcagauguccag

SEQ ID NO: 7263 - RNA, 22 nt, Artificial Sequence
  LRRK2 RNA guide
aaagaagaauguguucauagca

SEQ ID NO: 7264 - RNA, 22 nt, Artificial Sequence
  LRRK2 RNA guide
aagaagaauguguucauagcaa

SEQ ID NO: 7265 - RNA, 22 nt, Artificial Sequence
  LRRK2 RNA guide
aagaauguguucauagcaacug

SEQ ID NO: 7266 - RNA, 22 nt, Artificial Sequence
  LRRK2 RNA guide
aauguguucauagcaacuggac

SEQ ID NO: 7267 - RNA, 22 nt, Artificial Sequence
  LRRK2 RNA guide
aauuuuugccagcagaugucca

SEQ ID NO: 7268 - RNA, 22 nt, Artificial Sequence
  LRRK2 RNA guide
acaaagaagaauguguucauag

SEQ ID NO: 7269 - RNA, 22 nt, Artificial Sequence
  LRRK2 RNA guide
agaagaauguguucauagcaac

SEQ ID NO: 7270 - RNA, 22 nt, Artificial Sequence
  LRRK2 RNA guide
agaauguguucauagcaacugg

SEQ ID NO: 7271 - RNA, 22 nt, Artificial Sequence
  LRRK2 RNA guide
agauguccaguugcuaugaaca

SEQ ID NO: 7272 - RNA, 22 nt, Artificial Sequence
  LRRK2 RNA guide
agcaacuggacaucugcuggca

SEQ ID NO: 7273 - RNA, 22 nt, Artificial Sequence
  LRRK2 RNA guide
agcagauguccaguugcuauga

SEQ ID NO: 7274 - RNA, 22 nt, Artificial Sequence
  LRRK2 RNA guide
aguugcuaugaacacauucuuc

SEQ ID NO: 7275 - RNA, 22 nt, Artificial Sequence
  LRRK2 RNA guide
auagcaacuggacaucugcugg

SEQ ID NO: 7276 - RNA, 22 nt, Artificial Sequence
  LRRK2 RNA guide
auguccaguugcuaugaacaca

SEQ ID NO: 7277 - RNA, 22 nt, Artificial Sequence
  LRRK2 RNA guide
auguguucauagcaacuggaca

SEQ ID NO: 7278 - RNA, 22 nt, Artificial Sequence
  LRRK2 RNA guide
auuuuugccagcagauguccag

SEQ ID NO: 7279 - RNA, 22 nt, Artificial Sequence
  LRRK2 RNA guide
caaagaagaauguguucauagc

SEQ ID NO: 7280 - RNA, 22 nt, Artificial Sequence
  LRRK2 RNA guide
cagauguccaguugcuaugaac

SEQ ID NO: 7281 - RNA, 22 nt, Artificial Sequence
  LRRK2 RNA guide
cagcagauguccaguugcuaug

SEQ ID NO: 7282 - RNA, 22 nt, Artificial Sequence
  LRRK2 RNA guide
caguugcuaugaacacauucuu

SEQ ID NO: 7283 - RNA, 22 nt, Artificial Sequence
  LRRK2 RNA guide
cauagcaacuggacaucugcug

SEQ ID NO: 7284 - RNA, 22 nt, Artificial Sequence
  LRRK2 RNA guide
ccagcagauguccaguugcuau

SEQ ID NO: 7285 - RNA, 22 nt, Artificial Sequence
  LRRK2 RNA guide
ccaguugcuaugaacacauucu

SEQ ID NO: 7286 - RNA, 22 nt, Artificial Sequence
  LRRK2 RNA guide
gaagaauguguucauagcaacu

SEQ ID NO: 7287 - RNA, 22 nt, Artificial Sequence
  LRRK2 RNA guide
gaauguguucauagcaacugga

SEQ ID NO: 7288 - RNA, 22 nt, Artificial Sequence
  LRRK2 RNA guide
gaauuuuugccagcagaugucc

SEQ ID NO: 7289 - RNA, 22 nt, Artificial Sequence
  LRRK2 RNA guide
gauguccaguugcuaugaacac

SEQ ID NO: 7290 - RNA, 22 nt, Artificial Sequence
  LRRK2 RNA guide
gauuacaaagaagaauguguuc

SEQ ID NO: 7291 - RNA, 22 nt, Artificial Sequence
  LRRK2 RNA guide
gcaacuggacaucugcuggcaa

SEQ ID NO: 7292 - RNA, 22 nt, Artificial Sequence
  LRRK2 RNA guide
gcagauguccaguugcuaugaa

SEQ ID NO: 7293 - RNA, 22 nt, Artificial Sequence
  LRRK2 RNA guide
gccagcagauguccaguugcua

SEQ ID NO: 7294 - RNA, 22 nt, Artificial Sequence
  LRRK2 RNA guide
guccaguugcuaugaacacauu

SEQ ID NO: 7295 - RNA, 22 nt, Artificial Sequence
  LRRK2 RNA guide
guguucauagcaacuggacauc

SEQ ID NO: 7296 - RNA, 22 nt, Artificial Sequence
  LRRK2 RNA guide
guucauagcaacuggacaucug

SEQ ID NO: 7297 - RNA, 22 nt, Artificial Sequence
  LRRK2 RNA guide
guugcuaugaacacauucuucu

SEQ ID NO: 7298 - RNA, 22 nt, Artificial Sequence
  LRRK2 RNA guide
uagcaacuggacaucugcuggc

SEQ ID NO: 7299 - RNA, 22 nt, Artificial Sequence
  LRRK2 RNA guide
ucauagcaacuggacaucugcu

SEQ ID NO: 7300 - RNA, 22 nt, Artificial Sequence
  LRRK2 RNA guide
uccaguugcuaugaacacauuc

SEQ ID NO: 7301 - RNA, 22 nt, Artificial Sequence
  LRRK2 RNA guide
ugccagcagauguccaguugcu

SEQ ID NO: 7302 - RNA, 22 nt, Artificial Sequence
  LRRK2 RNA guide
ugcuaugaacacauucuucuuu

SEQ ID NO: 7303 - RNA, 22 nt, Artificial Sequence
  LRRK2 RNA guide
uguccaguugcuaugaacacau

SEQ ID NO: 7304 - RNA, 22 nt, Artificial Sequence
  LRRK2 RNA guide
uguguucauagcaacuggacau

SEQ ID NO: 7305 - RNA, 22 nt, Artificial Sequence
  LRRK2 RNA guide
uguucauagcaacuggacaucu

SEQ ID NO: 7306 - RNA, 22 nt, Artificial Sequence
  LRRK2 RNA guide
uucauagcaacuggacaucugc

SEQ ID NO: 7307 - RNA, 22 nt, Artificial Sequence
  LRRK2 RNA guide
uugccagcagauguccaguugc

SEQ ID NO: 7308 - RNA, 22 nt, Artificial Sequence
  LRRK2 RNA guide
uugcuaugaacacauucuucuu

SEQ ID NO: 7309 - RNA, 22 nt, Artificial Sequence
  LRRK2 RNA guide
uuugccagcagauguccaguug

SEQ ID NO: 7310 - RNA, 22 nt, Artificial Sequence
  LRRK2 RNA guide
uuuugccagcagauguccaguu

SEQ ID NO: 7311 - RNA, 22 nt, Artificial Sequence
  LRRK2 RNA guide
uuuuugccagcagauguccagu

SEQ ID NO: 7312 - RNA, 20 nt, Artificial Sequence
  LRRK2 RNA guide
aaauugucagcaucuuuucc

SEQ ID NO: 7313 - RNA, 20 nt, Artificial Sequence
  LRRK2 RNA guide
aaugaugcaccagcagcuua

SEQ ID NO: 7314 - RNA, 20 nt, Artificial Sequence
  LRRK2 RNA guide
aauugucagcaucuuuuccu

SEQ ID NO: 7315 - RNA, 20 nt, Artificial Sequence
  LRRK2 RNA guide
accagcagcuuaggaaaaga

SEQ ID NO: 7316 - RNA, 20 nt, Artificial Sequence
  LRRK2 RNA guide
agcagcuuaggaaaagaugc

SEQ ID NO: 7317 - RNA, 20 nt, Artificial Sequence
  LRRK2 RNA guide
agcaucuuuuccuaagcugc

SEQ ID NO: 7318 - RNA, 20 nt, Artificial Sequence
  LRRK2 RNA guide
agcuuaggaaaagaugcuga

SEQ ID NO: 7319 - RNA, 20 nt, Artificial Sequence
  LRRK2 RNA guide
aggaaaagaugcugacaauu

SEQ ID NO: 7320 - RNA, 20 nt, Artificial Sequence
  LRRK2 RNA guide
auccucaaauugucagcauc

SEQ ID NO: 7321 - RNA, 20 nt, Artificial Sequence
  LRRK2 RNA guide
aucuuuuccuaagcugcugg

SEQ ID NO: 7322 - RNA, 20 nt, Artificial Sequence
  LRRK2 RNA guide
augaaugaugcaccagcagc

SEQ ID NO: 7323 - RNA, 20 nt, Artificial Sequence
  LRRK2 RNA guide
augaugcaccagcagcuuag

SEQ ID NO: 7324 - RNA, 20 nt, Artificial Sequence
  LRRK2 RNA guide
augcaccagcagcuuaggaa

SEQ ID NO: 7325 - RNA, 20 nt, Artificial Sequence
  LRRK2 RNA guide
auugucagcaucuuuuccua

SEQ ID NO: 7326 - RNA, 20 nt, Artificial Sequence
  LRRK2 RNA guide
caaauugucagcaucuuuuc

SEQ ID NO: 7327 - RNA, 20 nt, Artificial Sequence
  LRRK2 RNA guide
caccagcagcuuaggaaaag

SEQ ID NO: 7328 - RNA, 20 nt, Artificial Sequence
  LRRK2 RNA guide
cagcagcuuaggaaaagaug

SEQ ID NO: 7329 - RNA, 20 nt, Artificial Sequence
  LRRK2 RNA guide
cagcaucuuuuccuaagcug

SEQ ID NO: 7330 - RNA, 20 nt, Artificial Sequence
  LRRK2 RNA guide
cagcuuaggaaaagaugcug

SEQ ID NO: 7331 - RNA, 20 nt, Artificial Sequence
  LRRK2 RNA guide
caucuuuuccuaagcugcug

SEQ ID NO: 7332 - RNA, 20 nt, Artificial Sequence
  LRRK2 RNA guide
ccagcagcuuaggaaaagau

SEQ ID NO: 7333 - RNA, 20 nt, Artificial Sequence
  LRRK2 RNA guide
ccucaaauugucagcaucuu

SEQ ID NO: 7334 - RNA, 20 nt, Artificial Sequence
  LRRK2 RNA guide
cucaaauugucagcaucuuu

SEQ ID NO: 7335 - RNA, 20 nt, Artificial Sequence
  LRRK2 RNA guide
cuuaggaaaagaugcugaca

SEQ ID NO: 7336 - RNA, 20 nt, Artificial Sequence
  LRRK2 RNA guide
cuuuuccuaagcugcuggug

SEQ ID NO: 7337 - RNA, 20 nt, Artificial Sequence
  LRRK2 RNA guide
gaaugaugcaccagcagcuu

SEQ ID NO: 7338 - RNA, 20 nt, Artificial Sequence
  LRRK2 RNA guide
gaugcaccagcagcuuagga

SEQ ID NO: 7339 - RNA, 20 nt, Artificial Sequence
  LRRK2 RNA guide
gcaccagcagcuuaggaaaa

SEQ ID NO: 7340 - RNA, 20 nt, Artificial Sequence
  LRRK2 RNA guide
gcagcuuaggaaaagaugcu

SEQ ID NO: 7341 - RNA, 20 nt, Artificial Sequence
  LRRK2 RNA guide
gcaucuuuuccuaagcugcu

SEQ ID NO: 7342 - RNA, 20 nt, Artificial Sequence
  LRRK2 RNA guide
gcuuaggaaaagaugcugac

SEQ ID NO: 7343 - RNA, 20 nt, Artificial Sequence
  LRRK2 RNA guide
ggaaaagaugcugacaauuu

SEQ ID NO: 7344 - RNA, 20 nt, Artificial Sequence
  LRRK2 RNA guide
gucagcaucuuuuccuaagc

SEQ ID NO: 7345 - RNA, 20 nt, Artificial Sequence
  LRRK2 RNA guide
uaggaaaagaugcugacaau

SEQ ID NO: 7346 - RNA, 20 nt, Artificial Sequence
  LRRK2 RNA guide
ucaaauugucagcaucuuuu

SEQ ID NO: 7347 - RNA, 20 nt, Artificial Sequence
  LRRK2 RNA guide
ucagcaucuuuuccuaagcu

SEQ ID NO: 7348 - RNA, 20 nt, Artificial Sequence
  LRRK2 RNA guide
uccuaagcugcuggugcauc

SEQ ID NO: 7349 - RNA, 20 nt, Artificial Sequence
  LRRK2 RNA guide
uccucaaauugucagcaucu

SEQ ID NO: 7350 - RNA, 20 nt, Artificial Sequence
  LRRK2 RNA guide
ucuuuuccuaagcugcuggu

SEQ ID NO: 7351 - RNA, 20 nt, Artificial Sequence
  LRRK2 RNA guide
ugaaugaugcaccagcagcu

SEQ ID NO: 7352 - RNA, 20 nt, Artificial Sequence
  LRRK2 RNA guide
ugaugcaccagcagcuuagg

SEQ ID NO: 7353 - RNA, 20 nt, Artificial Sequence
  LRRK2 RNA guide
ugcaccagcagcuuaggaaa

SEQ ID NO: 7354 - RNA, 20 nt, Artificial Sequence
  LRRK2 RNA guide
ugucagcaucuuuuccuaag

SEQ ID NO: 7355 - RNA, 20 nt, Artificial Sequence
  LRRK2 RNA guide
uuaggaaaagaugcugacaa

SEQ ID NO: 7356 - RNA, 20 nt, Artificial Sequence
  LRRK2 RNA guide
uuccuaagcugcuggugcau

SEQ ID NO: 7357 - RNA, 20 nt, Artificial Sequence
  LRRK2 RNA guide
uugucagcaucuuuuccuaa

SEQ ID NO: 7358 - RNA, 20 nt, Artificial Sequence
  LRRK2 RNA guide
uuuccuaagcugcuggugca

SEQ ID NO: 7359 - RNA, 20 nt, Artificial Sequence
  LRRK2 RNA guide
uuuuccuaagcugcuggugc

SEQ ID NO: 7360 - RNA, 21 nt, Artificial Sequence
  LRRK2 RNA guide
aaauugucagcaucuuuuccu

SEQ ID NO: 7361 - RNA, 21 nt, Artificial Sequence
  LRRK2 RNA guide
aauccucaaauugucagcauc

SEQ ID NO: 7362 - RNA, 21 nt, Artificial Sequence
  LRRK2 RNA guide
aaugaaugaugcaccagcagc

SEQ ID NO: 7363 - RNA, 21 nt, Artificial Sequence
  LRRK2 RNA guide
aaugaugcaccagcagcuuag

SEQ ID NO: 7364 - RNA, 21 nt, Artificial Sequence
  LRRK2 RNA guide
aauugucagcaucuuuuccua

SEQ ID NO: 7365 - RNA, 21 nt, Artificial Sequence
  LRRK2 RNA guide
accagcagcuuaggaaaagau

SEQ ID NO: 7366 - RNA, 21 nt, Artificial Sequence
  LRRK2 RNA guide
agcagcuuaggaaaagaugcu

SEQ ID NO: 7367 - RNA, 21 nt, Artificial Sequence
  LRRK2 RNA guide
agcaucuuuuccuaagcugcu

SEQ ID NO: 7368 - RNA, 21 nt, Artificial Sequence
  LRRK2 RNA guide
agcuuaggaaaagaugcugac

SEQ ID NO: 7369 - RNA, 21 nt, Artificial Sequence
  LRRK2 RNA guide
aggaaaagaugcugacaauuu

SEQ ID NO: 7370 - RNA, 21 nt, Artificial Sequence
  LRRK2 RNA guide
auccucaaauugucagcaucu

SEQ ID NO: 7371 - RNA, 21 nt, Artificial Sequence
  LRRK2 RNA guide
aucuuuuccuaagcugcuggu

SEQ ID NO: 7372 - RNA, 21 nt, Artificial Sequence
  LRRK2 RNA guide
augaaugaugcaccagcagcu

SEQ ID NO: 7373 - RNA, 21 nt, Artificial Sequence
  LRRK2 RNA guide
augaugcaccagcagcuuagg

SEQ ID NO: 7374 - RNA, 21 nt, Artificial Sequence
  LRRK2 RNA guide
augcaccagcagcuuaggaaa

SEQ ID NO: 7375 - RNA, 21 nt, Artificial Sequence
  LRRK2 RNA guide
auugucagcaucuuuuccuaa

SEQ ID NO: 7376 - RNA, 21 nt, Artificial Sequence
  LRRK2 RNA guide
caaauugucagcaucuuuucc

SEQ ID NO: 7377 - RNA, 21 nt, Artificial Sequence
  LRRK2 RNA guide
caccagcagcuuaggaaaaga

SEQ ID NO: 7378 - RNA, 21 nt, Artificial Sequence
  LRRK2 RNA guide
cagcagcuuaggaaaagaugc

SEQ ID NO: 7379 - RNA, 21 nt, Artificial Sequence
  LRRK2 RNA guide
cagcaucuuuuccuaagcugc

SEQ ID NO: 7380 - RNA, 21 nt, Artificial Sequence
  LRRK2 RNA guide
cagcuuaggaaaagaugcuga

SEQ ID NO: 7381 - RNA, 21 nt, Artificial Sequence
  LRRK2 RNA guide
caucuuuuccuaagcugcugg

SEQ ID NO: 7382 - RNA, 21 nt, Artificial Sequence
  LRRK2 RNA guide
ccagcagcuuaggaaaagaug

SEQ ID NO: 7383 - RNA, 21 nt, Artificial Sequence
  LRRK2 RNA guide
ccucaaauugucagcaucuuu

SEQ ID NO: 7384 - RNA, 21 nt, Artificial Sequence
  LRRK2 RNA guide
cuuaggaaaagaugcugacaa

SEQ ID NO: 7385 - RNA, 21 nt, Artificial Sequence
  LRRK2 RNA guide
cuuuuccuaagcugcuggugc

SEQ ID NO: 7386 - RNA, 21 nt, Artificial Sequence
  LRRK2 RNA guide
gaaugaugcaccagcagcuua

SEQ ID NO: 7387 - RNA, 21 nt, Artificial Sequence
  LRRK2 RNA guide
gaugcaccagcagcuuaggaa

SEQ ID NO: 7388 - RNA, 21 nt, Artificial Sequence
  LRRK2 RNA guide
gcaccagcagcuuaggaaaag

SEQ ID NO: 7389 - RNA, 21 nt, Artificial Sequence
  LRRK2 RNA guide
gcagcuuaggaaaagaugcug

SEQ ID NO: 7390 - RNA, 21 nt, Artificial Sequence
  LRRK2 RNA guide
gcaucuuuuccuaagcugcug

SEQ ID NO: 7391 - RNA, 21 nt, Artificial Sequence
  LRRK2 RNA guide
gcuuaggaaaagaugcugaca

SEQ ID NO: 7392 - RNA, 21 nt, Artificial Sequence
  LRRK2 RNA guide
ggaaaagaugcugacaauuug

SEQ ID NO: 7393 - RNA, 21 nt, Artificial Sequence
  LRRK2 RNA guide
gucagcaucuuuuccuaagcu

SEQ ID NO: 7394 - RNA, 21 nt, Artificial Sequence
  LRRK2 RNA guide
uaggaaaagaugcugacaauu

SEQ ID NO: 7395 - RNA, 21 nt, Artificial Sequence
  LRRK2 RNA guide
ucaaauugucagcaucuuuuc

SEQ ID NO: 7396 - RNA, 21 nt, Artificial Sequence
  LRRK2 RNA guide
ucagcaucuuuuccuaagcug

SEQ ID NO: 7397 - RNA, 21 nt, Artificial Sequence
  LRRK2 RNA guide
uccuaagcugcuggugcauca

SEQ ID NO: 7398 - RNA, 21 nt, Artificial Sequence
  LRRK2 RNA guide
uccucaaauugucagcaucuu

SEQ ID NO: 7399 - RNA, 21 nt, Artificial Sequence
  LRRK2 RNA guide
ucuuuuccuaagcugcuggug

SEQ ID NO: 7400 - RNA, 21 nt, Artificial Sequence
  LRRK2 RNA guide
ugaaugaugcaccagcagcuu

SEQ ID NO: 7401 - RNA, 21 nt, Artificial Sequence
  LRRK2 RNA guide
ugaugcaccagcagcuuagga

SEQ ID NO: 7402 - RNA, 21 nt, Artificial Sequence
  LRRK2 RNA guide
ugcaccagcagcuuaggaaaa

SEQ ID NO: 7403 - RNA, 21 nt, Artificial Sequence
  LRRK2 RNA guide
ugucagcaucuuuuccuaagc

SEQ ID NO: 7404 - RNA, 21 nt, Artificial Sequence
  LRRK2 RNA guide
uuaggaaaagaugcugacaau

SEQ ID NO: 7405 - RNA, 21 nt, Artificial Sequence
  LRRK2 RNA guide
uuccuaagcugcuggugcauc

SEQ ID NO: 7406 - RNA, 21 nt, Artificial Sequence
  LRRK2 RNA guide
uugucagcaucuuuuccuaag

SEQ ID NO: 7407 - RNA, 21 nt, Artificial Sequence
  LRRK2 RNA guide
uuuccuaagcugcuggugcau

SEQ ID NO: 7408 - RNA, 21 nt, Artificial Sequence
  LRRK2 RNA guide
uuuuccuaagcugcuggugca

SEQ ID NO: 7409 - RNA, 22 nt, Artificial Sequence
  LRRK2 RNA guide
aaaugaaugaugcaccagcagc

SEQ ID NO: 7410 - RNA, 22 nt, Artificial Sequence
  LRRK2 RNA guide
aaauugucagcaucuuuuccua

SEQ ID NO: 7411 - RNA, 22 nt, Artificial Sequence
  LRRK2 RNA guide
aauccucaaauugucagcaucu

SEQ ID NO: 7412 - RNA, 22 nt, Artificial Sequence
  LRRK2 RNA guide
aaugaaugaugcaccagcagcu

SEQ ID NO: 7413 - RNA, 22 nt, Artificial Sequence
  LRRK2 RNA guide
aaugaugcaccagcagcuuagg

SEQ ID NO: 7414 - RNA, 22 nt, Artificial Sequence
  LRRK2 RNA guide
aauugucagcaucuuuuccuaa

SEQ ID NO: 7415 - RNA, 22 nt, Artificial Sequence
  LRRK2 RNA guide
accagcagcuuaggaaaagaug

SEQ ID NO: 7416 - RNA, 22 nt, Artificial Sequence
  LRRK2 RNA guide
agcagcuuaggaaaagaugcug

SEQ ID NO: 7417 - RNA, 22 nt, Artificial Sequence
  LRRK2 RNA guide
agcaucuuuuccuaagcugcug

SEQ ID NO: 7418 - RNA, 22 nt, Artificial Sequence
  LRRK2 RNA guide
agcuuaggaaaagaugcugaca

SEQ ID NO: 7419 - RNA, 22 nt, Artificial Sequence
  LRRK2 RNA guide
aggaaaagaugcugacaauuug

SEQ ID NO: 7420 - RNA, 22 nt, Artificial Sequence
  LRRK2 RNA guide
auccucaaauugucagcaucuu

SEQ ID NO: 7421 - RNA, 22 nt, Artificial Sequence
  LRRK2 RNA guide
aucuuuuccuaagcugcuggug

SEQ ID NO: 7422 - RNA, 22 nt, Artificial Sequence
  LRRK2 RNA guide
augaaugaugcaccagcagcuu

SEQ ID NO: 7423 - RNA, 22 nt, Artificial Sequence
  LRRK2 RNA guide
augaugcaccagcagcuuagga

SEQ ID NO: 7424 - RNA, 22 nt, Artificial Sequence
  LRRK2 RNA guide
augcaccagcagcuuaggaaaa

SEQ ID NO: 7425 - RNA, 22 nt, Artificial Sequence
  LRRK2 RNA guide
auugucagcaucuuuuccuaag

SEQ ID NO: 7426 - RNA, 22 nt, Artificial Sequence
  LRRK2 RNA guide
caaauugucagcaucuuuuccu

SEQ ID NO: 7427 - RNA, 22 nt, Artificial Sequence
  LRRK2 RNA guide
caauccucaaauugucagcauc

SEQ ID NO: 7428 - RNA, 22 nt, Artificial Sequence
  LRRK2 RNA guide
caccagcagcuuaggaaaagau

SEQ ID NO: 7429 - RNA, 22 nt, Artificial Sequence
  LRRK2 RNA guide
cagcagcuuaggaaaagaugcu

SEQ ID NO: 7430 - RNA, 22 nt, Artificial Sequence
  LRRK2 RNA guide
cagcaucuuuuccuaagcugcu

SEQ ID NO: 7431 - RNA, 22 nt, Artificial Sequence
  LRRK2 RNA guide
cagcuuaggaaaagaugcugac

SEQ ID NO: 7432 - RNA, 22 nt, Artificial Sequence
  LRRK2 RNA guide
caucuuuuccuaagcugcuggu

SEQ ID NO: 7433 - RNA, 22 nt, Artificial Sequence
  LRRK2 RNA guide
ccagcagcuuaggaaaagaugc

SEQ ID NO: 7434 - RNA, 22 nt, Artificial Sequence
  LRRK2 RNA guide
ccucaaauugucagcaucuuuu

SEQ ID NO: 7435 - RNA, 22 nt, Artificial Sequence
  LRRK2 RNA guide
cucaaauugucagcaucuuuuc

SEQ ID NO: 7436 - RNA, 22 nt, Artificial Sequence
  LRRK2 RNA guide
cuuaggaaaagaugcugacaau

SEQ ID NO: 7437 - RNA, 22 nt, Artificial Sequence
  LRRK2 RNA guide
cuuuuccuaagcugcuggugca

SEQ ID NO: 7438 - RNA, 22 nt, Artificial Sequence
  LRRK2 RNA guide
gaaugaugcaccagcagcuuag

SEQ ID NO: 7439 - RNA, 22 nt, Artificial Sequence
  LRRK2 RNA guide
gaugcaccagcagcuuaggaaa

SEQ ID NO: 7440 - RNA, 22 nt, Artificial Sequence
  LRRK2 RNA guide
gcaccagcagcuuaggaaaaga

SEQ ID NO: 7441 - RNA, 22 nt, Artificial Sequence
  LRRK2 RNA guide
gcagcuuaggaaaagaugcuga

SEQ ID NO: 7442 - RNA, 22 nt, Artificial Sequence
  LRRK2 RNA guide
gcaucuuuuccuaagcugcugg

SEQ ID NO: 7443 - RNA, 22 nt, Artificial Sequence
  LRRK2 RNA guide
gcuuaggaaaagaugcugacaa

SEQ ID NO: 7444 - RNA, 22 nt, Artificial Sequence
  LRRK2 RNA guide
ggaaaagaugcugacaauuuga

SEQ ID NO: 7445 - RNA, 22 nt, Artificial Sequence
  LRRK2 RNA guide
gucagcaucuuuuccuaagcug

SEQ ID NO: 7446 - RNA, 22 nt, Artificial Sequence
  LRRK2 RNA guide
uaggaaaagaugcugacaauuu

SEQ ID NO: 7447 - RNA, 22 nt, Artificial Sequence
  LRRK2 RNA guide
ucaaauugucagcaucuuuucc

SEQ ID NO: 7448 - RNA, 22 nt, Artificial Sequence
  LRRK2 RNA guide
ucagcaucuuuuccuaagcugc

SEQ ID NO: 7449 - RNA, 22 nt, Artificial Sequence
  LRRK2 RNA guide
uccuaagcugcuggugcaucau

SEQ ID NO: 7450 - RNA, 22 nt, Artificial Sequence
  LRRK2 RNA guide
uccucaaauugucagcaucuuu

SEQ ID NO: 7451 - RNA, 22 nt, Artificial Sequence
  LRRK2 RNA guide
ucuuuuccuaagcugcuggugc

SEQ ID NO: 7452 - RNA, 22 nt, Artificial Sequence
  LRRK2 RNA guide
ugaaugaugcaccagcagcuua

SEQ ID NO: 7453 - RNA, 22 nt, Artificial Sequence
  LRRK2 RNA guide
ugaugcaccagcagcuuaggaa

SEQ ID NO: 7454 - RNA, 22 nt, Artificial Sequence
  LRRK2 RNA guide
ugcaccagcagcuuaggaaaag

SEQ ID NO: 7455 - RNA, 22 nt, Artificial Sequence
  LRRK2 RNA guide
ugucagcaucuuuuccuaagcu

SEQ ID NO: 7456 - RNA, 22 nt, Artificial Sequence
  LRRK2 RNA guide
uuaggaaaagaugcugacaauu

SEQ ID NO: 7457 - RNA, 22 nt, Artificial Sequence
  LRRK2 RNA guide
uuccuaagcugcuggugcauca

SEQ ID NO: 7458 - RNA, 22 nt, Artificial Sequence
  LRRK2 RNA guide
uugucagcaucuuuuccuaagc

SEQ ID NO: 7459 - RNA, 22 nt, Artificial Sequence
  LRRK2 RNA guide
uuuccuaagcugcuggugcauc

SEQ ID NO: 7460 - RNA, 22 nt, Artificial Sequence
  LRRK2 RNA guide
uuuuccuaagcugcuggugcau

SEQ ID NO: 7461 - RNA, 20 nt, Artificial Sequence
  LRRK2 RNA guide
aagacauuugauggaauaug

SEQ ID NO: 7462 - RNA, 20 nt, Artificial Sequence
  LRRK2 RNA guide
acauuugauggaauaugacu

SEQ ID NO: 7463 - RNA, 20 nt, Artificial Sequence
  LRRK2 RNA guide
acuuagucauauuccaucaa

SEQ ID NO: 7464 - RNA, 20 nt, Artificial Sequence
  LRRK2 RNA guide
agacauuugauggaauauga

SEQ ID NO: 7465 - RNA, 20 nt, Artificial Sequence
  LRRK2 RNA guide
agucauauuccaucaaaugu

SEQ ID NO: 7466 - RNA, 20 nt, Artificial Sequence
  LRRK2 RNA guide
aucauucauuugacuuaguc

SEQ ID NO: 7467 - RNA, 20 nt, Artificial Sequence
  LRRK2 RNA guide
augacuaagucaaaugaaug

SEQ ID NO: 7468 - RNA, 20 nt, Artificial Sequence
  LRRK2 RNA guide
auggaauaugacuaagucaa

SEQ ID NO: 7469 - RNA, 20 nt, Artificial Sequence
  LRRK2 RNA guide
auuggaagacauuugaugga

SEQ ID NO: 7470 - RNA, 20 nt, Artificial Sequence
  LRRK2 RNA guide
auuugacuuagucauauucc

SEQ ID NO: 7471 - RNA, 20 nt, Artificial Sequence
  LRRK2 RNA guide
caucauucauuugacuuagu

SEQ ID NO: 7472 - RNA, 20 nt, Artificial Sequence
  LRRK2 RNA guide
cauucauuugacuuagucau

SEQ ID NO: 7473 - RNA, 20 nt, Artificial Sequence
  LRRK2 RNA guide
cauuugacuuagucauauuc

SEQ ID NO: 7474 - RNA, 20 nt, Artificial Sequence
  LRRK2 RNA guide
cauuugauggaauaugacua

SEQ ID NO: 7475 - RNA, 20 nt, Artificial Sequence
  LRRK2 RNA guide
cuuagucauauuccaucaaa

SEQ ID NO: 7476 - RNA, 20 nt, Artificial Sequence
  LRRK2 RNA guide
gaagacauuugauggaauau

SEQ ID NO: 7477 - RNA, 20 nt, Artificial Sequence
  LRRK2 RNA guide
gaauaugacuaagucaaaug

SEQ ID NO: 7478 - RNA, 20 nt, Artificial Sequence
  LRRK2 RNA guide
gacauuugauggaauaugac

SEQ ID NO: 7479 - RNA, 20 nt, Artificial Sequence
  LRRK2 RNA guide
gacuuagucauauuccauca

SEQ ID NO: 7480 - RNA, 20 nt, Artificial Sequence
  LRRK2 RNA guide
gauggaauaugacuaaguca

SEQ ID NO: 7481 - RNA, 20 nt, Artificial Sequence
  LRRK2 RNA guide
gcaucauucauuugacuuag

SEQ ID NO: 7482 - RNA, 20 nt, Artificial Sequence
  LRRK2 RNA guide
ggaagacauuugauggaaua

SEQ ID NO: 7483 - RNA, 20 nt, Artificial Sequence
  LRRK2 RNA guide
ggaauaugacuaagucaaau

SEQ ID NO: 7484 - RNA, 20 nt, Artificial Sequence
  LRRK2 RNA guide
ggugcaucauucauuugacu

SEQ ID NO: 7485 - RNA, 20 nt, Artificial Sequence
  LRRK2 RNA guide
gucauauuccaucaaauguc

SEQ ID NO: 7486 - RNA, 20 nt, Artificial Sequence
  LRRK2 RNA guide
gugcaucauucauuugacuu

SEQ ID NO: 7487 - RNA, 20 nt, Artificial Sequence
  LRRK2 RNA guide
uagucauauuccaucaaaug

SEQ ID NO: 7488 - RNA, 20 nt, Artificial Sequence
  LRRK2 RNA guide
ucauauuccaucaaaugucu

SEQ ID NO: 7489 - RNA, 20 nt, Artificial Sequence
  LRRK2 RNA guide
ucauucauuugacuuaguca

SEQ ID NO: 7490 - RNA, 20 nt, Artificial Sequence
  LRRK2 RNA guide
ugacuaagucaaaugaauga

SEQ ID NO: 7491 - RNA, 20 nt, Artificial Sequence
  LRRK2 RNA guide
ugacuuagucauauuccauc

SEQ ID NO: 7492 - RNA, 20 nt, Artificial Sequence
  LRRK2 RNA guide
ugauggaauaugacuaaguc

SEQ ID NO: 7493 - RNA, 20 nt, Artificial Sequence
  LRRK2 RNA guide
ugcaucauucauuugacuua

SEQ ID NO: 7494 - RNA, 20 nt, Artificial Sequence
  LRRK2 RNA guide
uggaagacauuugauggaau

SEQ ID NO: 7495 - RNA, 20 nt, Artificial Sequence
  LRRK2 RNA guide
uggaauaugacuaagucaaa

SEQ ID NO: 7496 - RNA, 20 nt, Artificial Sequence
  LRRK2 RNA guide
uugacuuagucauauuccau

SEQ ID NO: 7497 - RNA, 20 nt, Artificial Sequence
  LRRK2 RNA guide
uugauggaauaugacuaagu

SEQ ID NO: 7498 - RNA, 20 nt, Artificial Sequence
  LRRK2 RNA guide
uuggaagacauuugauggaa

SEQ ID NO: 7499 - RNA, 20 nt, Artificial Sequence
  LRRK2 RNA guide
uuugacuuagucauauucca

SEQ ID NO: 7500 - RNA, 20 nt, Artificial Sequence
  LRRK2 RNA guide
uuugauggaauaugacuaag

SEQ ID NO: 7501 - RNA, 21 nt, Artificial Sequence
  LRRK2 RNA guide
agacauuugauggaauaugac

SEQ ID NO: 7502 - RNA, 21 nt, Artificial Sequence
  LRRK2 RNA guide
agucauauuccaucaaauguc

SEQ ID NO: 7503 - RNA, 21 nt, Artificial Sequence
  LRRK2 RNA guide
auuggaagacauuugauggaa

SEQ ID NO: 7504 - RNA, 21 nt, Artificial Sequence
  LRRK2 RNA guide
caucauucauuugacuuaguc

SEQ ID NO: 7505 - RNA, 21 nt, Artificial Sequence
  LRRK2 RNA guide
cauuugacuuagucauauucc

SEQ ID NO: 7506 - RNA, 21 nt, Artificial Sequence
  LRRK2 RNA guide
gaagacauuugauggaauaug

SEQ ID NO: 7507 - RNA, 21 nt, Artificial Sequence
  LRRK2 RNA guide
gacauuugauggaauaugacu

SEQ ID NO: 7508 - RNA, 21 nt, Artificial Sequence
  LRRK2 RNA guide
gacuuagucauauuccaucaa

SEQ ID NO: 7509 - RNA, 21 nt, Artificial Sequence
  LRRK2 RNA guide
gauggaauaugacuaagucaa

SEQ ID NO: 7510 - RNA, 21 nt, Artificial Sequence
  LRRK2 RNA guide
gcaucauucauuugacuuagu

SEQ ID NO: 7511 - RNA, 21 nt, Artificial Sequence
  LRRK2 RNA guide
ggaauaugacuaagucaaaug

SEQ ID NO: 7512 - RNA, 21 nt, Artificial Sequence
  LRRK2 RNA guide
ggugcaucauucauuugacuu

SEQ ID NO: 7513 - RNA, 21 nt, Artificial Sequence
  LRRK2 RNA guide
gucauauuccaucaaaugucu

SEQ ID NO: 7514 - RNA, 21 nt, Artificial Sequence
  LRRK2 RNA guide
gugcaucauucauuugacuua

SEQ ID NO: 7515 - RNA, 21 nt, Artificial Sequence
  LRRK2 RNA guide
uauuggaagacauuugaugga

SEQ ID NO: 7516 - RNA, 21 nt, Artificial Sequence
  LRRK2 RNA guide
ugacuuagucauauuccauca

SEQ ID NO: 7517 - RNA, 21 nt, Artificial Sequence
  LRRK2 RNA guide
ugauggaauaugacuaaguca

SEQ ID NO: 7518 - RNA, 21 nt, Artificial Sequence
  LRRK2 RNA guide
ugcaucauucauuugacuuag

SEQ ID NO: 7519 - RNA, 21 nt, Artificial Sequence
  LRRK2 RNA guide
uggaagacauuugauggaaua

SEQ ID NO: 7520 - RNA, 21 nt, Artificial Sequence
  LRRK2 RNA guide
uggugcaucauucauuugacu

SEQ ID NO: 7521 - RNA, 21 nt, Artificial Sequence
  LRRK2 RNA guide
uugacuuagucauauuccauc

SEQ ID NO: 7522 - RNA, 21 nt, Artificial Sequence
  LRRK2 RNA guide
uugauggaauaugacuaaguc

SEQ ID NO: 7523 - RNA, 21 nt, Artificial Sequence
  LRRK2 RNA guide
uuggaagacauuugauggaau

SEQ ID NO: 7524 - RNA, 22 nt, Artificial Sequence
  LRRK2 RNA guide
aagacauuugauggaauaugac

SEQ ID NO: 7525 - RNA, 22 nt, Artificial Sequence
  LRRK2 RNA guide
agacauuugauggaauaugacu

SEQ ID NO: 7526 - RNA, 22 nt, Artificial Sequence
  LRRK2 RNA guide
agucauauuccaucaaaugucu

SEQ ID NO: 7527 - RNA, 22 nt, Artificial Sequence
  LRRK2 RNA guide
auauuggaagacauuugaugga

SEQ ID NO: 7528 - RNA, 22 nt, Artificial Sequence
  LRRK2 RNA guide
auuggaagacauuugauggaau

SEQ ID NO: 7529 - RNA, 22 nt, Artificial Sequence
  LRRK2 RNA guide
caucauucauuugacuuaguca

SEQ ID NO: 7530 - RNA, 22 nt, Artificial Sequence
  LRRK2 RNA guide
cauuugacuuagucauauucca

SEQ ID NO: 7531 - RNA, 22 nt, Artificial Sequence
  LRRK2 RNA guide
cauuugauggaauaugacuaag

SEQ ID NO: 7532 - RNA, 22 nt, Artificial Sequence
  LRRK2 RNA guide
cuggugcaucauucauuugacu

SEQ ID NO: 7533 - RNA, 22 nt, Artificial Sequence
  LRRK2 RNA guide
cuuagucauauuccaucaaaug

SEQ ID NO: 7534 - RNA, 22 nt, Artificial Sequence
  LRRK2 RNA guide
gaagacauuugauggaauauga

SEQ ID NO: 7535 - RNA, 22 nt, Artificial Sequence
  LRRK2 RNA guide
gacauuugauggaauaugacua

SEQ ID NO: 7536 - RNA, 22 nt, Artificial Sequence
  LRRK2 RNA guide
gacuuagucauauuccaucaaa

SEQ ID NO: 7537 - RNA, 22 nt, Artificial Sequence
  LRRK2 RNA guide
gauggaauaugacuaagucaaa

SEQ ID NO: 7538 - RNA, 22 nt, Artificial Sequence
  LRRK2 RNA guide
gcaucauucauuugacuuaguc

SEQ ID NO: 7539 - RNA, 22 nt, Artificial Sequence
  LRRK2 RNA guide
ggaagacauuugauggaauaug

SEQ ID NO: 7540 - RNA, 22 nt, Artificial Sequence
  LRRK2 RNA guide
ggaauaugacuaagucaaauga

SEQ ID NO: 7541 - RNA, 22 nt, Artificial Sequence
  LRRK2 RNA guide
ggugcaucauucauuugacuua

SEQ ID NO: 7542 - RNA, 22 nt, Artificial Sequence
  LRRK2 RNA guide
gucauauuccaucaaaugucuu

SEQ ID NO: 7543 - RNA, 22 nt, Artificial Sequence
  LRRK2 RNA guide
gugcaucauucauuugacuuag

SEQ ID NO: 7544 - RNA, 22 nt, Artificial Sequence
  LRRK2 RNA guide
uagucauauuccaucaaauguc

SEQ ID NO: 7545 - RNA, 22 nt, Artificial Sequence
  LRRK2 RNA guide
uauuggaagacauuugauggaa

SEQ ID NO: 7546 - RNA, 22 nt, Artificial Sequence
  LRRK2 RNA guide
ucauauuccaucaaaugucuuc

SEQ ID NO: 7547 - RNA, 22 nt, Artificial Sequence
  LRRK2 RNA guide
ucauuugacuuagucauauucc

SEQ ID NO: 7548 - RNA, 22 nt, Artificial Sequence
  LRRK2 RNA guide
ugacuaagucaaaugaaugaug

SEQ ID NO: 7549 - RNA, 22 nt, Artificial Sequence
  LRRK2 RNA guide
ugacuuagucauauuccaucaa

SEQ ID NO: 7550 - RNA, 22 nt, Artificial Sequence
  LRRK2 RNA guide
ugauggaauaugacuaagucaa

SEQ ID NO: 7551 - RNA, 22 nt, Artificial Sequence
  LRRK2 RNA guide
ugcaucauucauuugacuuagu

SEQ ID NO: 7552 - RNA, 22 nt, Artificial Sequence
  LRRK2 RNA guide
uggaagacauuugauggaauau

SEQ ID NO: 7553 - RNA, 22 nt, Artificial Sequence
  LRRK2 RNA guide
uggaauaugacuaagucaaaug

SEQ ID NO: 7554 - RNA, 22 nt, Artificial Sequence
  LRRK2 RNA guide
uggugcaucauucauuugacuu

SEQ ID NO: 7555 - RNA, 22 nt, Artificial Sequence
  LRRK2 RNA guide
uugacuuagucauauuccauca

SEQ ID NO: 7556 - RNA, 22 nt, Artificial Sequence
  LRRK2 RNA guide
uugauggaauaugacuaaguca

SEQ ID NO: 7557 - RNA, 22 nt, Artificial Sequence
  LRRK2 RNA guide
uuggaagacauuugauggaaua

SEQ ID NO: 7558 - RNA, 22 nt, Artificial Sequence
  LRRK2 RNA guide
uuugacuuagucauauuccauc

SEQ ID NO: 7559 - RNA, 22 nt, Artificial Sequence
  LRRK2 RNA guide
uuugauggaauaugacuaaguc

SEQ ID NO: 7560 - RNA, 20 nt, Artificial Sequence
  LRRK2 RNA guide
aagacauuugauggaacauu

SEQ ID NO: 7561 - RNA, 20 nt, Artificial Sequence
  LRRK2 RNA guide
aauguuccaucaaaugucuu

SEQ ID NO: 7562 - RNA, 20 nt, Artificial Sequence
  LRRK2 RNA guide
acauuugauggaacauuacu

SEQ ID NO: 7563 - RNA, 20 nt, Artificial Sequence
  LRRK2 RNA guide
acuuaguaauguuccaucaa

SEQ ID NO: 7564 - RNA, 20 nt, Artificial Sequence
  LRRK2 RNA guide
agacauuugauggaacauua

SEQ ID NO: 7565 - RNA, 20 nt, Artificial Sequence
  LRRK2 RNA guide
aguaauguuccaucaaaugu

SEQ ID NO: 7566 - RNA, 20 nt, Artificial Sequence
  LRRK2 RNA guide
auauuggaagacauuugaug

SEQ ID NO: 7567 - RNA, 20 nt, Artificial Sequence
  LRRK2 RNA guide
auggaacauuacuaagucaa

SEQ ID NO: 7568 - RNA, 20 nt, Artificial Sequence
  LRRK2 RNA guide
auguuccaucaaaugucuuc

SEQ ID NO: 7569 - RNA, 20 nt, Artificial Sequence
  LRRK2 RNA guide
auuugacuuaguaauguucc

SEQ ID NO: 7570 - RNA, 20 nt, Artificial Sequence
  LRRK2 RNA guide
cauuugacuuaguaauguuc

SEQ ID NO: 7571 - RNA, 20 nt, Artificial Sequence
  LRRK2 RNA guide
cauuugauggaacauuacua

SEQ ID NO: 7572 - RNA, 20 nt, Artificial Sequence
  LRRK2 RNA guide
cuuaguaauguuccaucaaa

SEQ ID NO: 7573 - RNA, 20 nt, Artificial Sequence
  LRRK2 RNA guide
gaacauuacuaagucaaaug

SEQ ID NO: 7574 - RNA, 20 nt, Artificial Sequence
  LRRK2 RNA guide
gaagacauuugauggaacau

SEQ ID NO: 7575 - RNA, 20 nt, Artificial Sequence
  LRRK2 RNA guide
gacauuugauggaacauuac

SEQ ID NO: 7576 - RNA, 20 nt, Artificial Sequence
  LRRK2 RNA guide
gacuuaguaauguuccauca

SEQ ID NO: 7577 - RNA, 20 nt, Artificial Sequence
  LRRK2 RNA guide
gauggaacauuacuaaguca

SEQ ID NO: 7578 - RNA, 20 nt, Artificial Sequence
  LRRK2 RNA guide
ggaacauuacuaagucaaau

SEQ ID NO: 7579 - RNA, 20 nt, Artificial Sequence
  LRRK2 RNA guide
ggaagacauuugauggaaca

SEQ ID NO: 7580 - RNA, 20 nt, Artificial Sequence
  LRRK2 RNA guide
guaauguuccaucaaauguc

SEQ ID NO: 7581 - RNA, 20 nt, Artificial Sequence
  LRRK2 RNA guide
uaauguuccaucaaaugucu

SEQ ID NO: 7582 - RNA, 20 nt, Artificial Sequence
  LRRK2 RNA guide
uaguaauguuccaucaaaug

SEQ ID NO: 7583 - RNA, 20 nt, Artificial Sequence
  LRRK2 RNA guide
uauuggaagacauuugaugg

SEQ ID NO: 7584 - RNA, 20 nt, Artificial Sequence
  LRRK2 RNA guide
ugacuuaguaauguuccauc

SEQ ID NO: 7585 - RNA, 20 nt, Artificial Sequence
  LRRK2 RNA guide
ugauggaacauuacuaaguc

SEQ ID NO: 7586 - RNA, 20 nt, Artificial Sequence
  LRRK2 RNA guide
uggaacauuacuaagucaaa

SEQ ID NO: 7587 - RNA, 20 nt, Artificial Sequence
  LRRK2 RNA guide
uggaagacauuugauggaac

SEQ ID NO: 7588 - RNA, 20 nt, Artificial Sequence
  LRRK2 RNA guide
uguuccaucaaaugucuucc

SEQ ID NO: 7589 - RNA, 20 nt, Artificial Sequence
  LRRK2 RNA guide
uugacuuaguaauguuccau

SEQ ID NO: 7590 - RNA, 20 nt, Artificial Sequence
  LRRK2 RNA guide
uugauggaacauuacuaagu

SEQ ID NO: 7591 - RNA, 20 nt, Artificial Sequence
  LRRK2 RNA guide
uuugacuuaguaauguucca

SEQ ID NO: 7592 - RNA, 20 nt, Artificial Sequence
  LRRK2 RNA guide
uuugauggaacauuacuaag

SEQ ID NO: 7593 - RNA, 21 nt, Artificial Sequence
  LRRK2 RNA guide
aauguuccaucaaaugucuuc

SEQ ID NO: 7594 - RNA, 21 nt, Artificial Sequence
  LRRK2 RNA guide
agacauuugauggaacauuac

SEQ ID NO: 7595 - RNA, 21 nt, Artificial Sequence
  LRRK2 RNA guide
aguaauguuccaucaaauguc

SEQ ID NO: 7596 - RNA, 21 nt, Artificial Sequence
  LRRK2 RNA guide
auauuggaagacauuugaugg

SEQ ID NO: 7597 - RNA, 21 nt, Artificial Sequence
  LRRK2 RNA guide
auguuccaucaaaugucuucc

SEQ ID NO: 7598 - RNA, 21 nt, Artificial Sequence
  LRRK2 RNA guide
cauuugacuuaguaauguucc

SEQ ID NO: 7599 - RNA, 21 nt, Artificial Sequence
  LRRK2 RNA guide
gaagacauuugauggaacauu

SEQ ID NO: 7600 - RNA, 21 nt, Artificial Sequence
  LRRK2 RNA guide
gacauuugauggaacauuacu

SEQ ID NO: 7601 - RNA, 21 nt, Artificial Sequence
  LRRK2 RNA guide
gacuuaguaauguuccaucaa

SEQ ID NO: 7602 - RNA, 21 nt, Artificial Sequence
  LRRK2 RNA guide
gauauuggaagacauuugaug

SEQ ID NO: 7603 - RNA, 21 nt, Artificial Sequence
  LRRK2 RNA guide
gauggaacauuacuaagucaa

SEQ ID NO: 7604 - RNA, 21 nt, Artificial Sequence
  LRRK2 RNA guide
ggaacauuacuaagucaaaug

SEQ ID NO: 7605 - RNA, 21 nt, Artificial Sequence
  LRRK2 RNA guide
ggaagacauuugauggaacau

SEQ ID NO: 7606 - RNA, 21 nt, Artificial Sequence
  LRRK2 RNA guide
guaauguuccaucaaaugucu

SEQ ID NO: 7607 - RNA, 21 nt, Artificial Sequence
  LRRK2 RNA guide
ugacuuaguaauguuccauca

SEQ ID NO: 7608 - RNA, 21 nt, Artificial Sequence
  LRRK2 RNA guide
ugauggaacauuacuaaguca

SEQ ID NO: 7609 - RNA, 21 nt, Artificial Sequence
  LRRK2 RNA guide
uggaagacauuugauggaaca

SEQ ID NO: 7610 - RNA, 21 nt, Artificial Sequence
  LRRK2 RNA guide
uguuccaucaaaugucuucca

SEQ ID NO: 7611 - RNA, 21 nt, Artificial Sequence
  LRRK2 RNA guide
uugacuuaguaauguuccauc

SEQ ID NO: 7612 - RNA, 21 nt, Artificial Sequence
  LRRK2 RNA guide
uugauggaacauuacuaaguc

SEQ ID NO: 7613 - RNA, 21 nt, Artificial Sequence
  LRRK2 RNA guide
uuggaagacauuugauggaac

SEQ ID NO: 7614 - RNA, 22 nt, Artificial Sequence
  LRRK2 RNA guide
aagacauuugauggaacauuac

SEQ ID NO: 7615 - RNA, 22 nt, Artificial Sequence
  LRRK2 RNA guide
aauguuccaucaaaugucuucc

SEQ ID NO: 7616 - RNA, 22 nt, Artificial Sequence
  LRRK2 RNA guide
agacauuugauggaacauuacu

SEQ ID NO: 7617 - RNA, 22 nt, Artificial Sequence
  LRRK2 RNA guide
aguaauguuccaucaaaugucu

SEQ ID NO: 7618 - RNA, 22 nt, Artificial Sequence
  LRRK2 RNA guide
auguuccaucaaaugucuucca

SEQ ID NO: 7619 - RNA, 22 nt, Artificial Sequence
  LRRK2 RNA guide
auuggaagacauuugauggaac

SEQ ID NO: 7620 - RNA, 22 nt, Artificial Sequence
  LRRK2 RNA guide
cauuugacuuaguaauguucca

SEQ ID NO: 7621 - RNA, 22 nt, Artificial Sequence
  LRRK2 RNA guide
cauuugauggaacauuacuaag

SEQ ID NO: 7622 - RNA, 22 nt, Artificial Sequence
  LRRK2 RNA guide
cuuaguaauguuccaucaaaug

SEQ ID NO: 7623 - RNA, 22 nt, Artificial Sequence
  LRRK2 RNA guide
gaagacauuugauggaacauua

SEQ ID NO: 7624 - RNA, 22 nt, Artificial Sequence
  LRRK2 RNA guide
gacauuugauggaacauuacua

SEQ ID NO: 7625 - RNA, 22 nt, Artificial Sequence
  LRRK2 RNA guide
gacuuaguaauguuccaucaaa

SEQ ID NO: 7626 - RNA, 22 nt, Artificial Sequence
  LRRK2 RNA guide
gauauuggaagacauuugaugg

SEQ ID NO: 7627 - RNA, 22 nt, Artificial Sequence
  LRRK2 RNA guide
gauggaacauuacuaagucaaa

SEQ ID NO: 7628 - RNA, 22 nt, Artificial Sequence
  LRRK2 RNA guide
gcaucauucauuugacuuagua

SEQ ID NO: 7629 - RNA, 22 nt, Artificial Sequence
  LRRK2 RNA guide
ggaacauuacuaagucaaauga

SEQ ID NO: 7630 - RNA, 22 nt, Artificial Sequence
  LRRK2 RNA guide
ggaagacauuugauggaacauu

SEQ ID NO: 7631 - RNA, 22 nt, Artificial Sequence
  LRRK2 RNA guide
guaauguuccaucaaaugucuu

SEQ ID NO: 7632 - RNA, 22 nt, Artificial Sequence
  LRRK2 RNA guide
uaauguuccaucaaaugucuuc

SEQ ID NO: 7633 - RNA, 22 nt, Artificial Sequence
  LRRK2 RNA guide
uaguaauguuccaucaaauguc

SEQ ID NO: 7634 - RNA, 22 nt, Artificial Sequence
  LRRK2 RNA guide
ucauuugacuuaguaauguucc

SEQ ID NO: 7635 - RNA, 22 nt, Artificial Sequence
  LRRK2 RNA guide
ugacuuaguaauguuccaucaa

SEQ ID NO: 7636 - RNA, 22 nt, Artificial Sequence
  LRRK2 RNA guide
ugauauuggaagacauuugaug

SEQ ID NO: 7637 - RNA, 22 nt, Artificial Sequence
  LRRK2 RNA guide
ugauggaacauuacuaagucaa

SEQ ID NO: 7638 - RNA, 22 nt, Artificial Sequence
  LRRK2 RNA guide
uggaacauuacuaagucaaaug

SEQ ID NO: 7639 - RNA, 22 nt, Artificial Sequence
  LRRK2 RNA guide
uggaagacauuugauggaacau

SEQ ID NO: 7640 - RNA, 22 nt, Artificial Sequence
  LRRK2 RNA guide
uguuccaucaaaugucuuccaa

SEQ ID NO: 7641 - RNA, 22 nt, Artificial Sequence
  LRRK2 RNA guide
uugacuuaguaauguuccauca

SEQ ID NO: 7642 - RNA, 22 nt, Artificial Sequence
  LRRK2 RNA guide
uugauggaacauuacuaaguca

SEQ ID NO: 7643 - RNA, 22 nt, Artificial Sequence
  LRRK2 RNA guide
uuggaagacauuugauggaaca

SEQ ID NO: 7644 - RNA, 22 nt, Artificial Sequence
  LRRK2 RNA guide
uuugacuuaguaauguuccauc

SEQ ID NO: 7645 - RNA, 22 nt, Artificial Sequence
  LRRK2 RNA guide
uuugauggaacauuacuaaguc

SEQ ID NO: 7646 - RNA, 20 nt, Artificial Sequence
  LRRK2 RNA guide
aaaaggaucaacagguacag

SEQ ID NO: 7647 - RNA, 20 nt, Artificial Sequence
  LRRK2 RNA guide
aaaaucacuguaccuguuga

SEQ ID NO: 7648 - RNA, 20 nt, Artificial Sequence
  LRRK2 RNA guide
aaaggaucaacagguacagu

SEQ ID NO: 7649 - RNA, 20 nt, Artificial Sequence
  LRRK2 RNA guide
aaaucacuguaccuguugau

SEQ ID NO: 7650 - RNA, 20 nt, Artificial Sequence
  LRRK2 RNA guide
aacagguacagugauuuuca

SEQ ID NO: 7651 - RNA, 20 nt, Artificial Sequence
  LRRK2 RNA guide
aacauuuaggaugcaaguga

SEQ ID NO: 7652 - RNA, 20 nt, Artificial Sequence
  LRRK2 RNA guide
aaggaucaacagguacagug

SEQ ID NO: 7653 - RNA, 20 nt, Artificial Sequence
  LRRK2 RNA guide
aagugaaaaucacuguaccu

SEQ ID NO: 7654 - RNA, 20 nt, Artificial Sequence
  LRRK2 RNA guide
aaucacuguaccuguugauc

SEQ ID NO: 7655 - RNA, 20 nt, Artificial Sequence
  LRRK2 RNA guide
acaaaaggaucaacagguac

SEQ ID NO: 7656 - RNA, 20 nt, Artificial Sequence
  LRRK2 RNA guide
acagguacagugauuuucac

SEQ ID NO: 7657 - RNA, 20 nt, Artificial Sequence
  LRRK2 RNA guide
acagugauuuucacuugcau

SEQ ID NO: 7658 - RNA, 20 nt, Artificial Sequence
  LRRK2 RNA guide
acauuuaggaugcaagugaa

SEQ ID NO: 7659 - RNA, 20 nt, Artificial Sequence
  LRRK2 RNA guide
aggaucaacagguacaguga

SEQ ID NO: 7660 - RNA, 20 nt, Artificial Sequence
  LRRK2 RNA guide
aggaugcaagugaaaaucac

SEQ ID NO: 7661 - RNA, 20 nt, Artificial Sequence
  LRRK2 RNA guide
agguacagugauuuucacuu

SEQ ID NO: 7662 - RNA, 20 nt, Artificial Sequence
  LRRK2 RNA guide
agugaaaaucacuguaccug

SEQ ID NO: 7663 - RNA, 20 nt, Artificial Sequence
  LRRK2 RNA guide
agugauuuucacuugcaucc

SEQ ID NO: 7664 - RNA, 20 nt, Artificial Sequence
  LRRK2 RNA guide
aucaacagguacagugauuu

SEQ ID NO: 7665 - RNA, 20 nt, Artificial Sequence
  LRRK2 RNA guide
aucacuguaccuguugaucc

SEQ ID NO: 7666 - RNA, 20 nt, Artificial Sequence
  LRRK2 RNA guide
augcaagugaaaaucacugu

SEQ ID NO: 7667 - RNA, 20 nt, Artificial Sequence
  LRRK2 RNA guide
auuuaggaugcaagugaaaa

SEQ ID NO: 7668 - RNA, 20 nt, Artificial Sequence
  LRRK2 RNA guide
caaaaggaucaacagguaca

SEQ ID NO: 7669 - RNA, 20 nt, Artificial Sequence
  LRRK2 RNA guide
caacagguacagugauuuuc

SEQ ID NO: 7670 - RNA, 20 nt, Artificial Sequence
  LRRK2 RNA guide
caagugaaaaucacuguacc

SEQ ID NO: 7671 - RNA, 20 nt, Artificial Sequence
  LRRK2 RNA guide
cagguacagugauuuucacu

SEQ ID NO: 7672 - RNA, 20 nt, Artificial Sequence
  LRRK2 RNA guide
cagugauuuucacuugcauc

SEQ ID NO: 7673 - RNA, 20 nt, Artificial Sequence
  LRRK2 RNA guide
cauuuaggaugcaagugaaa

SEQ ID NO: 7674 - RNA, 20 nt, Artificial Sequence
  LRRK2 RNA guide
gaaaaucacuguaccuguug

SEQ ID NO: 7675 - RNA, 20 nt, Artificial Sequence
  LRRK2 RNA guide
gaucaacagguacagugauu

SEQ ID NO: 7676 - RNA, 20 nt, Artificial Sequence
  LRRK2 RNA guide
gaugcaagugaaaaucacug

SEQ ID NO: 7677 - RNA, 20 nt, Artificial Sequence
  LRRK2 RNA guide
gauuuucacuugcauccuaa

SEQ ID NO: 7678 - RNA, 20 nt, Artificial Sequence
  LRRK2 RNA guide
gcaagugaaaaucacuguac

SEQ ID NO: 7679 - RNA, 20 nt, Artificial Sequence
  LRRK2 RNA guide
ggaucaacagguacagugau

SEQ ID NO: 7680 - RNA, 20 nt, Artificial Sequence
  LRRK2 RNA guide
ggaugcaagugaaaaucacu

SEQ ID NO: 7681 - RNA, 20 nt, Artificial Sequence
  LRRK2 RNA guide
gguacagugauuuucacuug

SEQ ID NO: 7682 - RNA, 20 nt, Artificial Sequence
  LRRK2 RNA guide
guacagugauuuucacuugc

SEQ ID NO: 7683 - RNA, 20 nt, Artificial Sequence
  LRRK2 RNA guide
gugaaaaucacuguaccugu

SEQ ID NO: 7684 - RNA, 20 nt, Artificial Sequence
  LRRK2 RNA guide
gugauuuucacuugcauccu

SEQ ID NO: 7685 - RNA, 20 nt, Artificial Sequence
  LRRK2 RNA guide
uaacauuuaggaugcaagug

SEQ ID NO: 7686 - RNA, 20 nt, Artificial Sequence
  LRRK2 RNA guide
uacagugauuuucacuugca

SEQ ID NO: 7687 - RNA, 20 nt, Artificial Sequence
  LRRK2 RNA guide
uaggaugcaagugaaaauca

SEQ ID NO: 7688 - RNA, 20 nt, Artificial Sequence
  LRRK2 RNA guide
ucaacagguacagugauuuu

SEQ ID NO: 7689 - RNA, 20 nt, Artificial Sequence
  LRRK2 RNA guide
ugaaaaucacuguaccuguu

SEQ ID NO: 7690 - RNA, 20 nt, Artificial Sequence
  LRRK2 RNA guide
ugauuuucacuugcauccua

SEQ ID NO: 7691 - RNA, 20 nt, Artificial Sequence
  LRRK2 RNA guide
ugcaagugaaaaucacugua

SEQ ID NO: 7692 - RNA, 20 nt, Artificial Sequence
  LRRK2 RNA guide
uuaggaugcaagugaaaauc

SEQ ID NO: 7693 - RNA, 20 nt, Artificial Sequence
  LRRK2 RNA guide
uuuaggaugcaagugaaaau

SEQ ID NO: 7694 - RNA, 21 nt, Artificial Sequence
  LRRK2 RNA guide
aaaaggaucaacagguacagu

SEQ ID NO: 7695 - RNA, 21 nt, Artificial Sequence
  LRRK2 RNA guide
aaaaucacuguaccuguugau

SEQ ID NO: 7696 - RNA, 21 nt, Artificial Sequence
  LRRK2 RNA guide
aaaggaucaacagguacagug

SEQ ID NO: 7697 - RNA, 21 nt, Artificial Sequence
  LRRK2 RNA guide
aaaucacuguaccuguugauc

SEQ ID NO: 7698 - RNA, 21 nt, Artificial Sequence
  LRRK2 RNA guide
aacaaaaggaucaacagguac

SEQ ID NO: 7699 - RNA, 21 nt, Artificial Sequence
  LRRK2 RNA guide
aacagguacagugauuuucac

SEQ ID NO: 7700 - RNA, 21 nt, Artificial Sequence
  LRRK2 RNA guide
aacauuuaggaugcaagugaa

SEQ ID NO: 7701 - RNA, 21 nt, Artificial Sequence
  LRRK2 RNA guide
aaggaucaacagguacaguga

SEQ ID NO: 7702 - RNA, 21 nt, Artificial Sequence
  LRRK2 RNA guide
aagugaaaaucacuguaccug

SEQ ID NO: 7703 - RNA, 21 nt, Artificial Sequence
  LRRK2 RNA guide
aaucacuguaccuguugaucc

SEQ ID NO: 7704 - RNA, 21 nt, Artificial Sequence
  LRRK2 RNA guide
acaaaaggaucaacagguaca

SEQ ID NO: 7705 - RNA, 21 nt, Artificial Sequence
  LRRK2 RNA guide
acagguacagugauuuucacu

SEQ ID NO: 7706 - RNA, 21 nt, Artificial Sequence
  LRRK2 RNA guide
acagugauuuucacuugcauc

SEQ ID NO: 7707 - RNA, 21 nt, Artificial Sequence
  LRRK2 RNA guide
acauuuaggaugcaagugaaa

SEQ ID NO: 7708 - RNA, 21 nt, Artificial Sequence
  LRRK2 RNA guide
aggaucaacagguacagugau

SEQ ID NO: 7709 - RNA, 21 nt, Artificial Sequence
  LRRK2 RNA guide
aggaugcaagugaaaaucacu

SEQ ID NO: 7710 - RNA, 21 nt, Artificial Sequence
  LRRK2 RNA guide
agguacagugauuuucacuug

SEQ ID NO: 7711 - RNA, 21 nt, Artificial Sequence
  LRRK2 RNA guide
agugaaaaucacuguaccugu

SEQ ID NO: 7712 - RNA, 21 nt, Artificial Sequence
  LRRK2 RNA guide
agugauuuucacuugcauccu

SEQ ID NO: 7713 - RNA, 21 nt, Artificial Sequence
  LRRK2 RNA guide
auaacauuuaggaugcaagug

SEQ ID NO: 7714 - RNA, 21 nt, Artificial Sequence
  LRRK2 RNA guide
aucaacagguacagugauuuu

SEQ ID NO: 7715 - RNA, 21 nt, Artificial Sequence
  LRRK2 RNA guide
aucacuguaccuguugauccu

SEQ ID NO: 7716 - RNA, 21 nt, Artificial Sequence
  LRRK2 RNA guide
augcaagugaaaaucacugua

SEQ ID NO: 7717 - RNA, 21 nt, Artificial Sequence
  LRRK2 RNA guide
caaaaggaucaacagguacag

SEQ ID NO: 7718 - RNA, 21 nt, Artificial Sequence
  LRRK2 RNA guide
caacagguacagugauuuuca

SEQ ID NO: 7719 - RNA, 21 nt, Artificial Sequence
  LRRK2 RNA guide
caagugaaaaucacuguaccu

SEQ ID NO: 7720 - RNA, 21 nt, Artificial Sequence
  LRRK2 RNA guide
cagguacagugauuuucacuu

SEQ ID NO: 7721 - RNA, 21 nt, Artificial Sequence
  LRRK2 RNA guide
cagugauuuucacuugcaucc

SEQ ID NO: 7722 - RNA, 21 nt, Artificial Sequence
  LRRK2 RNA guide
cauuuaggaugcaagugaaaa

SEQ ID NO: 7723 - RNA, 21 nt, Artificial Sequence
  LRRK2 RNA guide
gaaaaucacuguaccuguuga

SEQ ID NO: 7724 - RNA, 21 nt, Artificial Sequence
  LRRK2 RNA guide
gaucaacagguacagugauuu

SEQ ID NO: 7725 - RNA, 21 nt, Artificial Sequence
  LRRK2 RNA guide
gaugcaagugaaaaucacugu

SEQ ID NO: 7726 - RNA, 21 nt, Artificial Sequence
  LRRK2 RNA guide
gauuuucacuugcauccuaaa

SEQ ID NO: 7727 - RNA, 21 nt, Artificial Sequence
  LRRK2 RNA guide
gcaagugaaaaucacuguacc

SEQ ID NO: 7728 - RNA, 21 nt, Artificial Sequence
  LRRK2 RNA guide
ggaucaacagguacagugauu

SEQ ID NO: 7729 - RNA, 21 nt, Artificial Sequence
  LRRK2 RNA guide
ggaugcaagugaaaaucacug

SEQ ID NO: 7730 - RNA, 21 nt, Artificial Sequence
  LRRK2 RNA guide
gguacagugauuuucacuugc

SEQ ID NO: 7731 - RNA, 21 nt, Artificial Sequence
  LRRK2 RNA guide
guacagugauuuucacuugca

SEQ ID NO: 7732 - RNA, 21 nt, Artificial Sequence
  LRRK2 RNA guide
gugaaaaucacuguaccuguu

SEQ ID NO: 7733 - RNA, 21 nt, Artificial Sequence
  LRRK2 RNA guide
gugauuuucacuugcauccua

SEQ ID NO: 7734 - RNA, 21 nt, Artificial Sequence
  LRRK2 RNA guide
uaacauuuaggaugcaaguga

SEQ ID NO: 7735 - RNA, 21 nt, Artificial Sequence
  LRRK2 RNA guide
uacagugauuuucacuugcau

SEQ ID NO: 7736 - RNA, 21 nt, Artificial Sequence
  LRRK2 RNA guide
uaggaugcaagugaaaaucac

SEQ ID NO: 7737 - RNA, 21 nt, Artificial Sequence
  LRRK2 RNA guide
ucaacagguacagugauuuuc

SEQ ID NO: 7738 - RNA, 21 nt, Artificial Sequence
  LRRK2 RNA guide
ugaaaaucacuguaccuguug

SEQ ID NO: 7739 - RNA, 21 nt, Artificial Sequence
  LRRK2 RNA guide
ugauuuucacuugcauccuaa

SEQ ID NO: 7740 - RNA, 21 nt, Artificial Sequence
  LRRK2 RNA guide
ugcaagugaaaaucacuguac

SEQ ID NO: 7741 - RNA, 21 nt, Artificial Sequence
  LRRK2 RNA guide
uuaggaugcaagugaaaauca

SEQ ID NO: 7742 - RNA, 21 nt, Artificial Sequence
  LRRK2 RNA guide
uuuaggaugcaagugaaaauc

SEQ ID NO: 7743 - RNA, 22 nt, Artificial Sequence
  LRRK2 RNA guide
aaaaggaucaacagguacagug

SEQ ID NO: 7744 - RNA, 22 nt, Artificial Sequence
  LRRK2 RNA guide
aaaaucacuguaccuguugauc

SEQ ID NO: 7745 - RNA, 22 nt, Artificial Sequence
  LRRK2 RNA guide
aaaggaucaacagguacaguga

SEQ ID NO: 7746 - RNA, 22 nt, Artificial Sequence
  LRRK2 RNA guide
aaaucacuguaccuguugaucc

SEQ ID NO: 7747 - RNA, 22 nt, Artificial Sequence
  LRRK2 RNA guide
aacaaaaggaucaacagguaca

SEQ ID NO: 7748 - RNA, 22 nt, Artificial Sequence
  LRRK2 RNA guide
aacagguacagugauuuucacu

SEQ ID NO: 7749 - RNA, 22 nt, Artificial Sequence
  LRRK2 RNA guide
aacauuuaggaugcaagugaaa

SEQ ID NO: 7750 - RNA, 22 nt, Artificial Sequence
  LRRK2 RNA guide
aaggaucaacagguacagugau

SEQ ID NO: 7751 - RNA, 22 nt, Artificial Sequence
  LRRK2 RNA guide
aagugaaaaucacuguaccugu

SEQ ID NO: 7752 - RNA, 22 nt, Artificial Sequence
  LRRK2 RNA guide
aaucacuguaccuguugauccu

SEQ ID NO: 7753 - RNA, 22 nt, Artificial Sequence
  LRRK2 RNA guide
acaaaaggaucaacagguacag

SEQ ID NO: 7754 - RNA, 22 nt, Artificial Sequence
  LRRK2 RNA guide
acagguacagugauuuucacuu

SEQ ID NO: 7755 - RNA, 22 nt, Artificial Sequence
  LRRK2 RNA guide
acagugauuuucacuugcaucc

SEQ ID NO: 7756 - RNA, 22 nt, Artificial Sequence
  LRRK2 RNA guide
acauuuaggaugcaagugaaaa

SEQ ID NO: 7757 - RNA, 22 nt, Artificial Sequence
  LRRK2 RNA guide
aggaucaacagguacagugauu

SEQ ID NO: 7758 - RNA, 22 nt, Artificial Sequence
  LRRK2 RNA guide
aggaugcaagugaaaaucacug

SEQ ID NO: 7759 - RNA, 22 nt, Artificial Sequence
  LRRK2 RNA guide
agguacagugauuuucacuugc

SEQ ID NO: 7760 - RNA, 22 nt, Artificial Sequence
  LRRK2 RNA guide
agugaaaaucacuguaccuguu

SEQ ID NO: 7761 - RNA, 22 nt, Artificial Sequence
  LRRK2 RNA guide
agugauuuucacuugcauccua

SEQ ID NO: 7762 - RNA, 22 nt, Artificial Sequence
  LRRK2 RNA guide
auaacauuuaggaugcaaguga

SEQ ID NO: 7763 - RNA, 22 nt, Artificial Sequence
  LRRK2 RNA guide
aucaacagguacagugauuuuc

SEQ ID NO: 7764 - RNA, 22 nt, Artificial Sequence
  LRRK2 RNA guide
aucacuguaccuguugauccuu

SEQ ID NO: 7765 - RNA, 22 nt, Artificial Sequence
  LRRK2 RNA guide
augcaagugaaaaucacuguac

SEQ ID NO: 7766 - RNA, 22 nt, Artificial Sequence
  LRRK2 RNA guide
auuuaggaugcaagugaaaauc

SEQ ID NO: 7767 - RNA, 22 nt, Artificial Sequence
  LRRK2 RNA guide
caaaaggaucaacagguacagu

SEQ ID NO: 7768 - RNA, 22 nt, Artificial Sequence
  LRRK2 RNA guide
caacagguacagugauuuucac

SEQ ID NO: 7769 - RNA, 22 nt, Artificial Sequence
  LRRK2 RNA guide
caagugaaaaucacuguaccug

SEQ ID NO: 7770 - RNA, 22 nt, Artificial Sequence
  LRRK2 RNA guide
cagguacagugauuuucacuug

SEQ ID NO: 7771 - RNA, 22 nt, Artificial Sequence
  LRRK2 RNA guide
cagugauuuucacuugcauccu

SEQ ID NO: 7772 - RNA, 22 nt, Artificial Sequence
  LRRK2 RNA guide
cauaacauuuaggaugcaagug

SEQ ID NO: 7773 - RNA, 22 nt, Artificial Sequence
  LRRK2 RNA guide
cauuuaggaugcaagugaaaau

SEQ ID NO: 7774 - RNA, 22 nt, Artificial Sequence
  LRRK2 RNA guide
gaaaaucacuguaccuguugau

SEQ ID NO: 7775 - RNA, 22 nt, Artificial Sequence
  LRRK2 RNA guide
gaacaaaaggaucaacagguac

SEQ ID NO: 7776 - RNA, 22 nt, Artificial Sequence
  LRRK2 RNA guide
gaucaacagguacagugauuuu

SEQ ID NO: 7777 - RNA, 22 nt, Artificial Sequence
  LRRK2 RNA guide
gaugcaagugaaaaucacugua

SEQ ID NO: 7778 - RNA, 22 nt, Artificial Sequence
  LRRK2 RNA guide
gauuuucacuugcauccuaaau

SEQ ID NO: 7779 - RNA, 22 nt, Artificial Sequence
  LRRK2 RNA guide
gcaagugaaaaucacuguaccu

SEQ ID NO: 7780 - RNA, 22 nt, Artificial Sequence
  LRRK2 RNA guide
ggaucaacagguacagugauuu

SEQ ID NO: 7781 - RNA, 22 nt, Artificial Sequence
  LRRK2 RNA guide
ggaugcaagugaaaaucacugu

SEQ ID NO: 7782 - RNA, 22 nt, Artificial Sequence
  LRRK2 RNA guide
gguacagugauuuucacuugca

SEQ ID NO: 7783 - RNA, 22 nt, Artificial Sequence
  LRRK2 RNA guide
guacagugauuuucacuugcau

SEQ ID NO: 7784 - RNA, 22 nt, Artificial Sequence
  LRRK2 RNA guide
gugaaaaucacuguaccuguug

SEQ ID NO: 7785 - RNA, 22 nt, Artificial Sequence
  LRRK2 RNA guide
gugauuuucacuugcauccuaa

SEQ ID NO: 7786 - RNA, 22 nt, Artificial Sequence
  LRRK2 RNA guide
uaacauuuaggaugcaagugaa

SEQ ID NO: 7787 - RNA, 22 nt, Artificial Sequence
  LRRK2 RNA guide
uacagugauuuucacuugcauc

SEQ ID NO: 7788 - RNA, 22 nt, Artificial Sequence
  LRRK2 RNA guide
uaggaugcaagugaaaaucacu

SEQ ID NO: 7789 - RNA, 22 nt, Artificial Sequence
  LRRK2 RNA guide
ucaacagguacagugauuuuca

SEQ ID NO: 7790 - RNA, 22 nt, Artificial Sequence
  LRRK2 RNA guide
ugaaaaucacuguaccuguuga

SEQ ID NO: 7791 - RNA, 22 nt, Artificial Sequence
  LRRK2 RNA guide
ugauuuucacuugcauccuaaa

SEQ ID NO: 7792 - RNA, 22 nt, Artificial Sequence
  LRRK2 RNA guide
ugcaagugaaaaucacuguacc

SEQ ID NO: 7793 - RNA, 22 nt, Artificial Sequence
  LRRK2 RNA guide
uuaggaugcaagugaaaaucac

SEQ ID NO: 7794 - RNA, 22 nt, Artificial Sequence
  LRRK2 RNA guide
uuuaggaugcaagugaaaauca

SEQ ID NO: 7795 - RNA, 20 nt, Artificial Sequence
  LRRK2 RNA guide
aaaaaauguggugcuagaga

SEQ ID NO: 7796 - RNA, 20 nt, Artificial Sequence
  LRRK2 RNA guide
aaaaauguggugcuagagag

SEQ ID NO: 7797 - RNA, 20 nt, Artificial Sequence
  LRRK2 RNA guide
aaaauguggugcuagagaga

SEQ ID NO: 7798 - RNA, 20 nt, Artificial Sequence
  LRRK2 RNA guide
aaauguggugcuagagagag

SEQ ID NO: 7799 - RNA, 20 nt, Artificial Sequence
  LRRK2 RNA guide
aauguggugcuagagagagc

SEQ ID NO: 7800 - RNA, 20 nt, Artificial Sequence
  LRRK2 RNA guide
acacgcucucucuagcacca

SEQ ID NO: 7801 - RNA, 20 nt, Artificial Sequence
  LRRK2 RNA guide
acgcucucucuagcaccaca

SEQ ID NO: 7802 - RNA, 20 nt, Artificial Sequence
  LRRK2 RNA guide
acuuaaaaaauguggugcua

SEQ ID NO: 7803 - RNA, 20 nt, Artificial Sequence
  LRRK2 RNA guide
agcaccacauuuuuuaagua

SEQ ID NO: 7804 - RNA, 20 nt, Artificial Sequence
  LRRK2 RNA guide
auguggugcuagagagagcg

SEQ ID NO: 7805 - RNA, 20 nt, Artificial Sequence
  LRRK2 RNA guide
cacacgcucucucuagcacc

SEQ ID NO: 7806 - RNA, 20 nt, Artificial Sequence
  LRRK2 RNA guide
cacgcucucucuagcaccac

SEQ ID NO: 7807 - RNA, 20 nt, Artificial Sequence
  LRRK2 RNA guide
cgcucucucuagcaccacau

SEQ ID NO: 7808 - RNA, 20 nt, Artificial Sequence
  LRRK2 RNA guide
cuagcaccacauuuuuuaag

SEQ ID NO: 7809 - RNA, 20 nt, Artificial Sequence
  LRRK2 RNA guide
cucuagcaccacauuuuuua

SEQ ID NO: 7810 - RNA, 20 nt, Artificial Sequence
  LRRK2 RNA guide
cucucuagcaccacauuuuu

SEQ ID NO: 7811 - RNA, 20 nt, Artificial Sequence
  LRRK2 RNA guide
cucucucuagcaccacauuu

SEQ ID NO: 7812 - RNA, 20 nt, Artificial Sequence
  LRRK2 RNA guide
cugaucacacgcucucucua

SEQ ID NO: 7813 - RNA, 20 nt, Artificial Sequence
  LRRK2 RNA guide
cuuaaaaaauguggugcuag

SEQ ID NO: 7814 - RNA, 20 nt, Artificial Sequence
  LRRK2 RNA guide
gaucacacgcucucucuagc

SEQ ID NO: 7815 - RNA, 20 nt, Artificial Sequence
  LRRK2 RNA guide
gcaccacauuuuuuaaguaa

SEQ ID NO: 7816 - RNA, 20 nt, Artificial Sequence
  LRRK2 RNA guide
gcucucucuagcaccacauu

SEQ ID NO: 7817 - RNA, 20 nt, Artificial Sequence
  LRRK2 RNA guide
ggugcuagagagagcgugug

SEQ ID NO: 7818 - RNA, 20 nt, Artificial Sequence
  LRRK2 RNA guide
guggugcuagagagagcgug

SEQ ID NO: 7819 - RNA, 20 nt, Artificial Sequence
  LRRK2 RNA guide
uaaaaaauguggugcuagag

SEQ ID NO: 7820 - RNA, 20 nt, Artificial Sequence
  LRRK2 RNA guide
uacuuaaaaaauguggugcu

SEQ ID NO: 7821 - RNA, 20 nt, Artificial Sequence
  LRRK2 RNA guide
uagcaccacauuuuuuaagu

SEQ ID NO: 7822 - RNA, 20 nt, Artificial Sequence
  LRRK2 RNA guide
ucacacgcucucucuagcac

SEQ ID NO: 7823 - RNA, 20 nt, Artificial Sequence
  LRRK2 RNA guide
ucuagcaccacauuuuuuaa

SEQ ID NO: 7824 - RNA, 20 nt, Artificial Sequence
  LRRK2 RNA guide
ucucuagcaccacauuuuuu

SEQ ID NO: 7825 - RNA, 20 nt, Artificial Sequence
  LRRK2 RNA guide
ucucucuagcaccacauuuu

SEQ ID NO: 7826 - RNA, 20 nt, Artificial Sequence
  LRRK2 RNA guide
ucugaucacacgcucucucu

SEQ ID NO: 7827 - RNA, 20 nt, Artificial Sequence
  LRRK2 RNA guide
ugaucacacgcucucucuag

SEQ ID NO: 7828 - RNA, 20 nt, Artificial Sequence
  LRRK2 RNA guide
uggugcuagagagagcgugu

SEQ ID NO: 7829 - RNA, 20 nt, Artificial Sequence
  LRRK2 RNA guide
uguggugcuagagagagcgu

SEQ ID NO: 7830 - RNA, 20 nt, Artificial Sequence
  LRRK2 RNA guide
uuaaaaaauguggugcuaga

SEQ ID NO: 7831 - RNA, 20 nt, Artificial Sequence
  LRRK2 RNA guide
uuacuuaaaaaauguggugc

SEQ ID NO: 7832 - RNA, 21 nt, Artificial Sequence
  LRRK2 RNA guide
aaaaaauguggugcuagagag

SEQ ID NO: 7833 - RNA, 21 nt, Artificial Sequence
  LRRK2 RNA guide
aaaaauguggugcuagagaga

SEQ ID NO: 7834 - RNA, 21 nt, Artificial Sequence
  LRRK2 RNA guide
aaaauguggugcuagagagag

SEQ ID NO: 7835 - RNA, 21 nt, Artificial Sequence
  LRRK2 RNA guide
aaauguggugcuagagagagc

SEQ ID NO: 7836 - RNA, 21 nt, Artificial Sequence
  LRRK2 RNA guide
aauguggugcuagagagagcg

SEQ ID NO: 7837 - RNA, 21 nt, Artificial Sequence
  LRRK2 RNA guide
acacgcucucucuagcaccac

SEQ ID NO: 7838 - RNA, 21 nt, Artificial Sequence
  LRRK2 RNA guide
acgcucucucuagcaccacau

SEQ ID NO: 7839 - RNA, 21 nt, Artificial Sequence
  LRRK2 RNA guide
acuuaaaaaauguggugcuag

SEQ ID NO: 7840 - RNA, 21 nt, Artificial Sequence
  LRRK2 RNA guide
aucacacgcucucucuagcac

SEQ ID NO: 7841 - RNA, 21 nt, Artificial Sequence
  LRRK2 RNA guide
auguggugcuagagagagcgu

SEQ ID NO: 7842 - RNA, 21 nt, Artificial Sequence
  LRRK2 RNA guide
cacacgcucucucuagcacca

SEQ ID NO: 7843 - RNA, 21 nt, Artificial Sequence
  LRRK2 RNA guide
cacgcucucucuagcaccaca

SEQ ID NO: 7844 - RNA, 21 nt, Artificial Sequence
  LRRK2 RNA guide
cgcucucucuagcaccacauu

SEQ ID NO: 7845 - RNA, 21 nt, Artificial Sequence
  LRRK2 RNA guide
cuagcaccacauuuuuuaagu

SEQ ID NO: 7846 - RNA, 21 nt, Artificial Sequence
  LRRK2 RNA guide
cucuagcaccacauuuuuuaa

SEQ ID NO: 7847 - RNA, 21 nt, Artificial Sequence
  LRRK2 RNA guide
cucucuagcaccacauuuuuu

SEQ ID NO: 7848 - RNA, 21 nt, Artificial Sequence
  LRRK2 RNA guide
cucucucuagcaccacauuuu

SEQ ID NO: 7849 - RNA, 21 nt, Artificial Sequence
  LRRK2 RNA guide
cugaucacacgcucucucuag

SEQ ID NO: 7850 - RNA, 21 nt, Artificial Sequence
  LRRK2 RNA guide
cuuaaaaaauguggugcuaga

SEQ ID NO: 7851 - RNA, 21 nt, Artificial Sequence
  LRRK2 RNA guide
gaucacacgcucucucuagca

SEQ ID NO: 7852 - RNA, 21 nt, Artificial Sequence
  LRRK2 RNA guide
gcucucucuagcaccacauuu

SEQ ID NO: 7853 - RNA, 21 nt, Artificial Sequence
  LRRK2 RNA guide
ggugcuagagagagcguguga

SEQ ID NO: 7854 - RNA, 21 nt, Artificial Sequence
  LRRK2 RNA guide
guggugcuagagagagcgugu

SEQ ID NO: 7855 - RNA, 21 nt, Artificial Sequence
  LRRK2 RNA guide
uaaaaaauguggugcuagaga

SEQ ID NO: 7856 - RNA, 21 nt, Artificial Sequence
  LRRK2 RNA guide
ucacacgcucucucuagcacc

SEQ ID NO: 7857 - RNA, 21 nt, Artificial Sequence
  LRRK2 RNA guide
ucuagcaccacauuuuuuaag

SEQ ID NO: 7858 - RNA, 21 nt, Artificial Sequence
  LRRK2 RNA guide
ucucuagcaccacauuuuuua

SEQ ID NO: 7859 - RNA, 21 nt, Artificial Sequence
  LRRK2 RNA guide
ucucucuagcaccacauuuuu

SEQ ID NO: 7860 - RNA, 21 nt, Artificial Sequence
  LRRK2 RNA guide
ucugaucacacgcucucucua

SEQ ID NO: 7861 - RNA, 21 nt, Artificial Sequence
  LRRK2 RNA guide
ugaucacacgcucucucuagc

SEQ ID NO: 7862 - RNA, 21 nt, Artificial Sequence
  LRRK2 RNA guide
uggugcuagagagagcgugug

SEQ ID NO: 7863 - RNA, 21 nt, Artificial Sequence
  LRRK2 RNA guide
uguggugcuagagagagcgug

SEQ ID NO: 7864 - RNA, 21 nt, Artificial Sequence
  LRRK2 RNA guide
uuaaaaaauguggugcuagag

SEQ ID NO: 7865 - RNA, 21 nt, Artificial Sequence
  LRRK2 RNA guide
uucugaucacacgcucucucu

SEQ ID NO: 7866 - RNA, 22 nt, Artificial Sequence
  LRRK2 RNA guide
aaaaaauguggugcuagagaga

SEQ ID NO: 7867 - RNA, 22 nt, Artificial Sequence
  LRRK2 RNA guide
aaaaauguggugcuagagagag

SEQ ID NO: 7868 - RNA, 22 nt, Artificial Sequence
  LRRK2 RNA guide
aaaauguggugcuagagagagc

SEQ ID NO: 7869 - RNA, 22 nt, Artificial Sequence
  LRRK2 RNA guide
aaauguggugcuagagagagcg

SEQ ID NO: 7870 - RNA, 22 nt, Artificial Sequence
  LRRK2 RNA guide
aauguggugcuagagagagcgu

SEQ ID NO: 7871 - RNA, 22 nt, Artificial Sequence
  LRRK2 RNA guide
acacgcucucucuagcaccaca

SEQ ID NO: 7872 - RNA, 22 nt, Artificial Sequence
  LRRK2 RNA guide
acgcucucucuagcaccacauu

SEQ ID NO: 7873 - RNA, 22 nt, Artificial Sequence
  LRRK2 RNA guide
acuuaaaaaauguggugcuaga

SEQ ID NO: 7874 - RNA, 22 nt, Artificial Sequence
  LRRK2 RNA guide
aucacacgcucucucuagcacc

SEQ ID NO: 7875 - RNA, 22 nt, Artificial Sequence
  LRRK2 RNA guide
auguggugcuagagagagcgug

SEQ ID NO: 7876 - RNA, 22 nt, Artificial Sequence
  LRRK2 RNA guide
auucugaucacacgcucucucu

SEQ ID NO: 7877 - RNA, 22 nt, Artificial Sequence
  LRRK2 RNA guide
cacacgcucucucuagcaccac

SEQ ID NO: 7878 - RNA, 22 nt, Artificial Sequence
  LRRK2 RNA guide
cacgcucucucuagcaccacau

SEQ ID NO: 7879 - RNA, 22 nt, Artificial Sequence
  LRRK2 RNA guide
cgcucucucuagcaccacauuu

SEQ ID NO: 7880 - RNA, 22 nt, Artificial Sequence
  LRRK2 RNA guide
cuagcaccacauuuuuuaagua

SEQ ID NO: 7881 - RNA, 22 nt, Artificial Sequence
  LRRK2 RNA guide
cucuagcaccacauuuuuuaag

SEQ ID NO: 7882 - RNA, 22 nt, Artificial Sequence
  LRRK2 RNA guide
cucucuagcaccacauuuuuua

SEQ ID NO: 7883 - RNA, 22 nt, Artificial Sequence
  LRRK2 RNA guide
cucucucuagcaccacauuuuu

SEQ ID NO: 7884 - RNA, 22 nt, Artificial Sequence
  LRRK2 RNA guide
cugaucacacgcucucucuagc

SEQ ID NO: 7885 - RNA, 22 nt, Artificial Sequence
  LRRK2 RNA guide
cuuaaaaaauguggugcuagag

SEQ ID NO: 7886 - RNA, 22 nt, Artificial Sequence
  LRRK2 RNA guide
gaucacacgcucucucuagcac

SEQ ID NO: 7887 - RNA, 22 nt, Artificial Sequence
  LRRK2 RNA guide
gauuacuuaaaaaauguggugc

SEQ ID NO: 7888 - RNA, 22 nt, Artificial Sequence
  LRRK2 RNA guide
gcaccacauuuuuuaaguaauc

SEQ ID NO: 7889 - RNA, 22 nt, Artificial Sequence
  LRRK2 RNA guide
gcucucucuagcaccacauuuu

SEQ ID NO: 7890 - RNA, 22 nt, Artificial Sequence
  LRRK2 RNA guide
ggugcuagagagagcgugugau

SEQ ID NO: 7891 - RNA, 22 nt, Artificial Sequence
  LRRK2 RNA guide
guggugcuagagagagcgugug

SEQ ID NO: 7892 - RNA, 22 nt, Artificial Sequence
  LRRK2 RNA guide
uaaaaaauguggugcuagagag

SEQ ID NO: 7893 - RNA, 22 nt, Artificial Sequence
  LRRK2 RNA guide
uacuuaaaaaauguggugcuag

SEQ ID NO: 7894 - RNA, 22 nt, Artificial Sequence
  LRRK2 RNA guide
ucacacgcucucucuagcacca

SEQ ID NO: 7895 - RNA, 22 nt, Artificial Sequence
  LRRK2 RNA guide
ucuagcaccacauuuuuuaagu

SEQ ID NO: 7896 - RNA, 22 nt, Artificial Sequence
  LRRK2 RNA guide
ucucuagcaccacauuuuuuaa

SEQ ID NO: 7897 - RNA, 22 nt, Artificial Sequence
  LRRK2 RNA guide
ucucucuagcaccacauuuuuu

SEQ ID NO: 7898 - RNA, 22 nt, Artificial Sequence
  LRRK2 RNA guide
ucugaucacacgcucucucuag

SEQ ID NO: 7899 - RNA, 22 nt, Artificial Sequence
  LRRK2 RNA guide
ugaucacacgcucucucuagca

SEQ ID NO: 7900 - RNA, 22 nt, Artificial Sequence
  LRRK2 RNA guide
uggugcuagagagagcguguga

SEQ ID NO: 7901 - RNA, 22 nt, Artificial Sequence
  LRRK2 RNA guide
uguggugcuagagagagcgugu

SEQ ID NO: 7902 - RNA, 22 nt, Artificial Sequence
  LRRK2 RNA guide
uuaaaaaauguggugcuagaga

SEQ ID NO: 7903 - RNA, 22 nt, Artificial Sequence
  LRRK2 RNA guide
uucugaucacacgcucucucua

SEQ ID NO: 7904 - RNA, 20 nt, Artificial Sequence
  LRRK2 RNA guide
aaaaaaugugaugcuagaga

SEQ ID NO: 7905 - RNA, 20 nt, Artificial Sequence
  LRRK2 RNA guide
aaaaaugugaugcuagagag

SEQ ID NO: 7906 - RNA, 20 nt, Artificial Sequence
  LRRK2 RNA guide
aaaaugugaugcuagagaga

SEQ ID NO: 7907 - RNA, 20 nt, Artificial Sequence
  LRRK2 RNA guide
aaaugugaugcuagagagag

SEQ ID NO: 7908 - RNA, 20 nt, Artificial Sequence
  LRRK2 RNA guide
aaugugaugcuagagagagu

SEQ ID NO: 7909 - RNA, 20 nt, Artificial Sequence
  LRRK2 RNA guide
acacacucucucuagcauca

SEQ ID NO: 7910 - RNA, 20 nt, Artificial Sequence
  LRRK2 RNA guide
acacucucucuagcaucaca

SEQ ID NO: 7911 - RNA, 20 nt, Artificial Sequence
  LRRK2 RNA guide
agagagagugugugaucaga

SEQ ID NO: 7912 - RNA, 20 nt, Artificial Sequence
  LRRK2 RNA guide
agagagugugugaucagaau

SEQ ID NO: 7913 - RNA, 20 nt, Artificial Sequence
  LRRK2 RNA guide
agagugugugaucagaauaa

SEQ ID NO: 7914 - RNA, 20 nt, Artificial Sequence
  LRRK2 RNA guide
agugugugaucagaauaaca

SEQ ID NO: 7915 - RNA, 20 nt, Artificial Sequence
  LRRK2 RNA guide
aucacacacucucucuagca

SEQ ID NO: 7916 - RNA, 20 nt, Artificial Sequence
  LRRK2 RNA guide
augcuagagagaguguguga

SEQ ID NO: 7917 - RNA, 20 nt, Artificial Sequence
  LRRK2 RNA guide
augcuguuauucugaucaca

SEQ ID NO: 7918 - RNA, 20 nt, Artificial Sequence
  LRRK2 RNA guide
augugaugcuagagagagug

SEQ ID NO: 7919 - RNA, 20 nt, Artificial Sequence
  LRRK2 RNA guide
auucugaucacacacucucu

SEQ ID NO: 7920 - RNA, 20 nt, Artificial Sequence
  LRRK2 RNA guide
cacacacucucucuagcauc

SEQ ID NO: 7921 - RNA, 20 nt, Artificial Sequence
  LRRK2 RNA guide
cacacucucucuagcaucac

SEQ ID NO: 7922 - RNA, 20 nt, Artificial Sequence
  LRRK2 RNA guide
cacucucucuagcaucacau

SEQ ID NO: 7923 - RNA, 20 nt, Artificial Sequence
  LRRK2 RNA guide
cuagagagagugugugauca

SEQ ID NO: 7924 - RNA, 20 nt, Artificial Sequence
  LRRK2 RNA guide
cugaucacacacucucucua

SEQ ID NO: 7925 - RNA, 20 nt, Artificial Sequence
  LRRK2 RNA guide
cuguuauucugaucacacac

SEQ ID NO: 7926 - RNA, 20 nt, Artificial Sequence
  LRRK2 RNA guide
gagagagugugugaucagaa

SEQ ID NO: 7927 - RNA, 20 nt, Artificial Sequence
  LRRK2 RNA guide
gagagugugugaucagaaua

SEQ ID NO: 7928 - RNA, 20 nt, Artificial Sequence
  LRRK2 RNA guide
gagugugugaucagaauaac

SEQ ID NO: 7929 - RNA, 20 nt, Artificial Sequence
  LRRK2 RNA guide
gaucacacacucucucuagc

SEQ ID NO: 7930 - RNA, 20 nt, Artificial Sequence
  LRRK2 RNA guide
gaugcuagagagagugugug

SEQ ID NO: 7931 - RNA, 20 nt, Artificial Sequence
  LRRK2 RNA guide
gaugcuguuauucugaucac

SEQ ID NO: 7932 - RNA, 20 nt, Artificial Sequence
  LRRK2 RNA guide
gcuagagagagugugugauc

SEQ ID NO: 7933 - RNA, 20 nt, Artificial Sequence
  LRRK2 RNA guide
gcuguuauucugaucacaca

SEQ ID NO: 7934 - RNA, 20 nt, Artificial Sequence
  LRRK2 RNA guide
gugaugcuagagagagugug

SEQ ID NO: 7935 - RNA, 20 nt, Artificial Sequence
  LRRK2 RNA guide
gugugugaucagaauaacag

SEQ ID NO: 7936 - RNA, 20 nt, Artificial Sequence
  LRRK2 RNA guide
guuauucugaucacacacuc

SEQ ID NO: 7937 - RNA, 20 nt, Artificial Sequence
  LRRK2 RNA guide
uaaaaaaugugaugcuagag

SEQ ID NO: 7938 - RNA, 20 nt, Artificial Sequence
  LRRK2 RNA guide
uagagagagugugugaucag

SEQ ID NO: 7939 - RNA, 20 nt, Artificial Sequence
  LRRK2 RNA guide
uauucugaucacacacucuc

SEQ ID NO: 7940 - RNA, 20 nt, Artificial Sequence
  LRRK2 RNA guide
ucacacacucucucuagcau

SEQ ID NO: 7941 - RNA, 20 nt, Artificial Sequence
  LRRK2 RNA guide
ucugaucacacacucucucu

SEQ ID NO: 7942 - RNA, 20 nt, Artificial Sequence
  LRRK2 RNA guide
ugaucacacacucucucuag

SEQ ID NO: 7943 - RNA, 20 nt, Artificial Sequence
  LRRK2 RNA guide
ugaugcuagagagagugugu

SEQ ID NO: 7944 - RNA, 20 nt, Artificial Sequence
  LRRK2 RNA guide
ugaugcuguuauucugauca

SEQ ID NO: 7945 - RNA, 20 nt, Artificial Sequence
  LRRK2 RNA guide
ugcuagagagagugugugau

SEQ ID NO: 7946 - RNA, 20 nt, Artificial Sequence
  LRRK2 RNA guide
ugcuguuauucugaucacac

SEQ ID NO: 7947 - RNA, 20 nt, Artificial Sequence
  LRRK2 RNA guide
ugugaugcuagagagagugu

SEQ ID NO: 7948 - RNA, 20 nt, Artificial Sequence
  LRRK2 RNA guide
uguuauucugaucacacacu

SEQ ID NO: 7949 - RNA, 20 nt, Artificial Sequence
  LRRK2 RNA guide
uuauucugaucacacacucu

SEQ ID NO: 7950 - RNA, 20 nt, Artificial Sequence
  LRRK2 RNA guide
uucugaucacacacucucuc

SEQ ID NO: 7951 - RNA, 21 nt, Artificial Sequence
  LRRK2 RNA guide
aaaaaaugugaugcuagagag

SEQ ID NO: 7952 - RNA, 21 nt, Artificial Sequence
  LRRK2 RNA guide
aaaaaugugaugcuagagaga

SEQ ID NO: 7953 - RNA, 21 nt, Artificial Sequence
  LRRK2 RNA guide
aaaaugugaugcuagagagag

SEQ ID NO: 7954 - RNA, 21 nt, Artificial Sequence
  LRRK2 RNA guide
aaaugugaugcuagagagagu

SEQ ID NO: 7955 - RNA, 21 nt, Artificial Sequence
  LRRK2 RNA guide
aaugugaugcuagagagagug

SEQ ID NO: 7956 - RNA, 21 nt, Artificial Sequence
  LRRK2 RNA guide
acacacucucucuagcaucac

SEQ ID NO: 7957 - RNA, 21 nt, Artificial Sequence
  LRRK2 RNA guide
acacucucucuagcaucacau

SEQ ID NO: 7958 - RNA, 21 nt, Artificial Sequence
  LRRK2 RNA guide
agagagagugugugaucagaa

SEQ ID NO: 7959 - RNA, 21 nt, Artificial Sequence
  LRRK2 RNA guide
agagagugugugaucagaaua

SEQ ID NO: 7960 - RNA, 21 nt, Artificial Sequence
  LRRK2 RNA guide
agagugugugaucagaauaac

SEQ ID NO: 7961 - RNA, 21 nt, Artificial Sequence
  LRRK2 RNA guide
agugugugaucagaauaacag

SEQ ID NO: 7962 - RNA, 21 nt, Artificial Sequence
  LRRK2 RNA guide
aucacacacucucucuagcau

SEQ ID NO: 7963 - RNA, 21 nt, Artificial Sequence
  LRRK2 RNA guide
augaugcuguuauucugauca

SEQ ID NO: 7964 - RNA, 21 nt, Artificial Sequence
  LRRK2 RNA guide
augcuagagagagugugugau

SEQ ID NO: 7965 - RNA, 21 nt, Artificial Sequence
  LRRK2 RNA guide
augcuguuauucugaucacac

SEQ ID NO: 7966 - RNA, 21 nt, Artificial Sequence
  LRRK2 RNA guide
augugaugcuagagagagugu

SEQ ID NO: 7967 - RNA, 21 nt, Artificial Sequence
  LRRK2 RNA guide
auucugaucacacacucucuc

SEQ ID NO: 7968 - RNA, 21 nt, Artificial Sequence
  LRRK2 RNA guide
cacacacucucucuagcauca

SEQ ID NO: 7969 - RNA, 21 nt, Artificial Sequence
  LRRK2 RNA guide
cacacucucucuagcaucaca

SEQ ID NO: 7970 - RNA, 21 nt, Artificial Sequence
  LRRK2 RNA guide
cacucucucuagcaucacauu

SEQ ID NO: 7971 - RNA, 21 nt, Artificial Sequence
  LRRK2 RNA guide
caugaugcuguuauucugauc

SEQ ID NO: 7972 - RNA, 21 nt, Artificial Sequence
  LRRK2 RNA guide
cuagagagagugugugaucag

SEQ ID NO: 7973 - RNA, 21 nt, Artificial Sequence
  LRRK2 RNA guide
cugaucacacacucucucuag

SEQ ID NO: 7974 - RNA, 21 nt, Artificial Sequence
  LRRK2 RNA guide
cuguuauucugaucacacacu

SEQ ID NO: 7975 - RNA, 21 nt, Artificial Sequence
  LRRK2 RNA guide
gagagagugugugaucagaau

SEQ ID NO: 7976 - RNA, 21 nt, Artificial Sequence
  LRRK2 RNA guide
gagagugugugaucagaauaa

SEQ ID NO: 7977 - RNA, 21 nt, Artificial Sequence
  LRRK2 RNA guide
gagugugugaucagaauaaca

SEQ ID NO: 7978 - RNA, 21 nt, Artificial Sequence
  LRRK2 RNA guide
gaucacacacucucucuagca

SEQ ID NO: 7979 - RNA, 21 nt, Artificial Sequence
  LRRK2 RNA guide
gaugcuagagagaguguguga

SEQ ID NO: 7980 - RNA, 21 nt, Artificial Sequence
  LRRK2 RNA guide
gaugcuguuauucugaucaca

SEQ ID NO: 7981 - RNA, 21 nt, Artificial Sequence
  LRRK2 RNA guide
gcuagagagagugugugauca

SEQ ID NO: 7982 - RNA, 21 nt, Artificial Sequence
  LRRK2 RNA guide
gcuguuauucugaucacacac

SEQ ID NO: 7983 - RNA, 21 nt, Artificial Sequence
  LRRK2 RNA guide
gugaugcuagagagagugugu

SEQ ID NO: 7984 - RNA, 21 nt, Artificial Sequence
  LRRK2 RNA guide
gugugugaucagaauaacagc

SEQ ID NO: 7985 - RNA, 21 nt, Artificial Sequence
  LRRK2 RNA guide
guuauucugaucacacacucu

SEQ ID NO: 7986 - RNA, 21 nt, Artificial Sequence
  LRRK2 RNA guide
uagagagagugugugaucaga

SEQ ID NO: 7987 - RNA, 21 nt, Artificial Sequence
  LRRK2 RNA guide
uauucugaucacacacucucu

SEQ ID NO: 7988 - RNA, 21 nt, Artificial Sequence
  LRRK2 RNA guide
ucacacacucucucuagcauc

SEQ ID NO: 7989 - RNA, 21 nt, Artificial Sequence
  LRRK2 RNA guide
ucugaucacacacucucucua

SEQ ID NO: 7990 - RNA, 21 nt, Artificial Sequence
  LRRK2 RNA guide
ugaucacacacucucucuagc

SEQ ID NO: 7991 - RNA, 21 nt, Artificial Sequence
  LRRK2 RNA guide
ugaugcuagagagagugugug

SEQ ID NO: 7992 - RNA, 21 nt, Artificial Sequence
  LRRK2 RNA guide
ugaugcuguuauucugaucac

SEQ ID NO: 7993 - RNA, 21 nt, Artificial Sequence
  LRRK2 RNA guide
ugcuagagagagugugugauc

SEQ ID NO: 7994 - RNA, 21 nt, Artificial Sequence
  LRRK2 RNA guide
ugcuguuauucugaucacaca

SEQ ID NO: 7995 - RNA, 21 nt, Artificial Sequence
  LRRK2 RNA guide
ugugaugcuagagagagugug

SEQ ID NO: 7996 - RNA, 21 nt, Artificial Sequence
  LRRK2 RNA guide
uguuauucugaucacacacuc

SEQ ID NO: 7997 - RNA, 21 nt, Artificial Sequence
  LRRK2 RNA guide
uuauucugaucacacacucuc

SEQ ID NO: 7998 - RNA, 21 nt, Artificial Sequence
  LRRK2 RNA guide
uucugaucacacacucucucu

SEQ ID NO: 7999 - RNA, 22 nt, Artificial Sequence
  LRRK2 RNA guide
aaaaaaugugaugcuagagaga

SEQ ID NO: 8000 - RNA, 22 nt, Artificial Sequence
  LRRK2 RNA guide
aaaaaugugaugcuagagagag

SEQ ID NO: 8001 - RNA, 22 nt, Artificial Sequence
  LRRK2 RNA guide
aaaaugugaugcuagagagagu

SEQ ID NO: 8002 - RNA, 22 nt, Artificial Sequence
  LRRK2 RNA guide
aaaugugaugcuagagagagug

SEQ ID NO: 8003 - RNA, 22 nt, Artificial Sequence
  LRRK2 RNA guide
aaugugaugcuagagagagugu

SEQ ID NO: 8004 - RNA, 22 nt, Artificial Sequence
  LRRK2 RNA guide
acacacucucucuagcaucaca

SEQ ID NO: 8005 - RNA, 22 nt, Artificial Sequence
  LRRK2 RNA guide
acacucucucuagcaucacauu

SEQ ID NO: 8006 - RNA, 22 nt, Artificial Sequence
  LRRK2 RNA guide
agagagagugugugaucagaau

SEQ ID NO: 8007 - RNA, 22 nt, Artificial Sequence
  LRRK2 RNA guide
agagagugugugaucagaauaa

SEQ ID NO: 8008 - RNA, 22 nt, Artificial Sequence
  LRRK2 RNA guide
agagugugugaucagaauaaca

SEQ ID NO: 8009 - RNA, 22 nt, Artificial Sequence
  LRRK2 RNA guide
agugugugaucagaauaacagc

SEQ ID NO: 8010 - RNA, 22 nt, Artificial Sequence
  LRRK2 RNA guide
aucacacacucucucuagcauc

SEQ ID NO: 8011 - RNA, 22 nt, Artificial Sequence
  LRRK2 RNA guide
augaugcuguuauucugaucac

SEQ ID NO: 8012 - RNA, 22 nt, Artificial Sequence
  LRRK2 RNA guide
augcuagagagagugugugauc

SEQ ID NO: 8013 - RNA, 22 nt, Artificial Sequence
  LRRK2 RNA guide
augcuguuauucugaucacaca

SEQ ID NO: 8014 - RNA, 22 nt, Artificial Sequence
  LRRK2 RNA guide
augugaugcuagagagagugug

SEQ ID NO: 8015 - RNA, 22 nt, Artificial Sequence
  LRRK2 RNA guide
auucugaucacacacucucucu

SEQ ID NO: 8016 - RNA, 22 nt, Artificial Sequence
  LRRK2 RNA guide
cacacacucucucuagcaucac

SEQ ID NO: 8017 - RNA, 22 nt, Artificial Sequence
  LRRK2 RNA guide
cacacucucucuagcaucacau

SEQ ID NO: 8018 - RNA, 22 nt, Artificial Sequence
  LRRK2 RNA guide
cacucucucuagcaucacauuu

SEQ ID NO: 8019 - RNA, 22 nt, Artificial Sequence
  LRRK2 RNA guide
caugaugcuguuauucugauca

SEQ ID NO: 8020 - RNA, 22 nt, Artificial Sequence
  LRRK2 RNA guide
ccaugaugcuguuauucugauc

SEQ ID NO: 8021 - RNA, 22 nt, Artificial Sequence
  LRRK2 RNA guide
cuagagagagugugugaucaga

SEQ ID NO: 8022 - RNA, 22 nt, Artificial Sequence
  LRRK2 RNA guide
cugaucacacacucucucuagc

SEQ ID NO: 8023 - RNA, 22 nt, Artificial Sequence
  LRRK2 RNA guide
cuguuauucugaucacacacuc

SEQ ID NO: 8024 - RNA, 22 nt, Artificial Sequence
  LRRK2 RNA guide
cuuaaaaaaugugaugcuagag

SEQ ID NO: 8025 - RNA, 22 nt, Artificial Sequence
  LRRK2 RNA guide
gagagagugugugaucagaaua

SEQ ID NO: 8026 - RNA, 22 nt, Artificial Sequence
  LRRK2 RNA guide
gagagugugugaucagaauaac

SEQ ID NO: 8027 - RNA, 22 nt, Artificial Sequence
  LRRK2 RNA guide
gagugugugaucagaauaacag

SEQ ID NO: 8028 - RNA, 22 nt, Artificial Sequence
  LRRK2 RNA guide
gaucacacacucucucuagcau

SEQ ID NO: 8029 - RNA, 22 nt, Artificial Sequence
  LRRK2 RNA guide
gaugcuagagagagugugugau

SEQ ID NO: 8030 - RNA, 22 nt, Artificial Sequence
  LRRK2 RNA guide
gaugcuguuauucugaucacac

SEQ ID NO: 8031 - RNA, 22 nt, Artificial Sequence
  LRRK2 RNA guide
gcuagagagagugugugaucag

SEQ ID NO: 8032 - RNA, 22 nt, Artificial Sequence
  LRRK2 RNA guide
gcuguuauucugaucacacacu

SEQ ID NO: 8033 - RNA, 22 nt, Artificial Sequence
  LRRK2 RNA guide
gugaugcuagagagagugugug

SEQ ID NO: 8034 - RNA, 22 nt, Artificial Sequence
  LRRK2 RNA guide
gugugugaucagaauaacagca

SEQ ID NO: 8035 - RNA, 22 nt, Artificial Sequence
  LRRK2 RNA guide
guuauucugaucacacacucuc

SEQ ID NO: 8036 - RNA, 22 nt, Artificial Sequence
  LRRK2 RNA guide
uaaaaaaugugaugcuagagag

SEQ ID NO: 8037 - RNA, 22 nt, Artificial Sequence
  LRRK2 RNA guide
uagagagagugugugaucagaa

SEQ ID NO: 8038 - RNA, 22 nt, Artificial Sequence
  LRRK2 RNA guide
uauucugaucacacacucucuc

SEQ ID NO: 8039 - RNA, 22 nt, Artificial Sequence
  LRRK2 RNA guide
ucacacacucucucuagcauca

SEQ ID NO: 8040 - RNA, 22 nt, Artificial Sequence
  LRRK2 RNA guide
ucugaucacacacucucucuag

SEQ ID NO: 8041 - RNA, 22 nt, Artificial Sequence
  LRRK2 RNA guide
ugaucacacacucucucuagca

SEQ ID NO: 8042 - RNA, 22 nt, Artificial Sequence
  LRRK2 RNA guide
ugaugcuagagagaguguguga

SEQ ID NO: 8043 - RNA, 22 nt, Artificial Sequence
  LRRK2 RNA guide
ugaugcuguuauucugaucaca

SEQ ID NO: 8044 - RNA, 22 nt, Artificial Sequence
  LRRK2 RNA guide
ugcuagagagagugugugauca

SEQ ID NO: 8045 - RNA, 22 nt, Artificial Sequence
  LRRK2 RNA guide
ugcuguuauucugaucacacac

SEQ ID NO: 8046 - RNA, 22 nt, Artificial Sequence
  LRRK2 RNA guide
ugugaugcuagagagagugugu

SEQ ID NO: 8047 - RNA, 22 nt, Artificial Sequence
  LRRK2 RNA guide
uguuauucugaucacacacucu

SEQ ID NO: 8048 - RNA, 22 nt, Artificial Sequence
  LRRK2 RNA guide
uuauucugaucacacacucucu

SEQ ID NO: 8049 - RNA, 22 nt, Artificial Sequence
  LRRK2 RNA guide
uucugaucacacacucucucua

SEQ ID NO: 8050 - RNA, 20 nt, Artificial Sequence
  LRRK2 RNA guide
aauagguauguaagaaagag

SEQ ID NO: 8051 - RNA, 20 nt, Artificial Sequence
  LRRK2 RNA guide
acugcucucuuucuuacaua

SEQ ID NO: 8052 - RNA, 20 nt, Artificial Sequence
  LRRK2 RNA guide
agguauguaagaaagagagc

SEQ ID NO: 8053 - RNA, 20 nt, Artificial Sequence
  LRRK2 RNA guide
auagguauguaagaaagaga

SEQ ID NO: 8054 - RNA, 20 nt, Artificial Sequence
  LRRK2 RNA guide
auguaagaaagagagcaguc

SEQ ID NO: 8055 - RNA, 20 nt, Artificial Sequence
  LRRK2 RNA guide
ccaauuugggacugcucucu

SEQ ID NO: 8056 - RNA, 20 nt, Artificial Sequence
  LRRK2 RNA guide
cucucuuucuuacauaccua

SEQ ID NO: 8057 - RNA, 20 nt, Artificial Sequence
  LRRK2 RNA guide
cucuuucuuacauaccuauu

SEQ ID NO: 8058 - RNA, 20 nt, Artificial Sequence
  LRRK2 RNA guide
cugcucucuuucuuacauac

SEQ ID NO: 8059 - RNA, 20 nt, Artificial Sequence
  LRRK2 RNA guide
gacugcucucuuucuuacau

SEQ ID NO: 8060 - RNA, 20 nt, Artificial Sequence
  LRRK2 RNA guide
gcucucuuucuuacauaccu

SEQ ID NO: 8061 - RNA, 20 nt, Artificial Sequence
  LRRK2 RNA guide
ggacugcucucuuucuuaca

SEQ ID NO: 8062 - RNA, 20 nt, Artificial Sequence
  LRRK2 RNA guide
gggacugcucucuuucuuac

SEQ ID NO: 8063 - RNA, 20 nt, Artificial Sequence
  LRRK2 RNA guide
gguauguaagaaagagagca

SEQ ID NO: 8064 - RNA, 20 nt, Artificial Sequence
  LRRK2 RNA guide
guaagaaagagagcaguccc

SEQ ID NO: 8065 - RNA, 20 nt, Artificial Sequence
  LRRK2 RNA guide
guauguaagaaagagagcag

SEQ ID NO: 8066 - RNA, 20 nt, Artificial Sequence
  LRRK2 RNA guide
uaagaaagagagcaguccca

SEQ ID NO: 8067 - RNA, 20 nt, Artificial Sequence
  LRRK2 RNA guide
uagguauguaagaaagagag

SEQ ID NO: 8068 - RNA, 20 nt, Artificial Sequence
  LRRK2 RNA guide
uauguaagaaagagagcagu

SEQ ID NO: 8069 - RNA, 20 nt, Artificial Sequence
  LRRK2 RNA guide
ucucuuucuuacauaccuau

SEQ ID NO: 8070 - RNA, 20 nt, Artificial Sequence
  LRRK2 RNA guide
ugcucucuuucuuacauacc

SEQ ID NO: 8071 - RNA, 20 nt, Artificial Sequence
  LRRK2 RNA guide
ugggacugcucucuuucuua

SEQ ID NO: 8072 - RNA, 20 nt, Artificial Sequence
  LRRK2 RNA guide
uguaagaaagagagcagucc

SEQ ID NO: 8073 - RNA, 20 nt, Artificial Sequence
  LRRK2 RNA guide
uugggacugcucucuuucuu

SEQ ID NO: 8074 - RNA, 21 nt, Artificial Sequence
  LRRK2 RNA guide
aauuugggacugcucucuuuc

SEQ ID NO: 8075 - RNA, 21 nt, Artificial Sequence
  LRRK2 RNA guide
accaauuugggacugcucucu

SEQ ID NO: 8076 - RNA, 21 nt, Artificial Sequence
  LRRK2 RNA guide
acugcucucuuucuuacauac

SEQ ID NO: 8077 - RNA, 21 nt, Artificial Sequence
  LRRK2 RNA guide
agguauguaagaaagagagca

SEQ ID NO: 8078 - RNA, 21 nt, Artificial Sequence
  LRRK2 RNA guide
auagguauguaagaaagagag

SEQ ID NO: 8079 - RNA, 21 nt, Artificial Sequence
  LRRK2 RNA guide
auguaagaaagagagcagucc

SEQ ID NO: 8080 - RNA, 21 nt, Artificial Sequence
  LRRK2 RNA guide
auuugggacugcucucuuucu

SEQ ID NO: 8081 - RNA, 21 nt, Artificial Sequence
  LRRK2 RNA guide
caauuugggacugcucucuuu

SEQ ID NO: 8082 - RNA, 21 nt, Artificial Sequence
  LRRK2 RNA guide
ccaauuugggacugcucucuu

SEQ ID NO: 8083 - RNA, 21 nt, Artificial Sequence
  LRRK2 RNA guide
cucucuuucuuacauaccuau

SEQ ID NO: 8084 - RNA, 21 nt, Artificial Sequence
  LRRK2 RNA guide
cugcucucuuucuuacauacc

SEQ ID NO: 8085 - RNA, 21 nt, Artificial Sequence
  LRRK2 RNA guide
gacugcucucuuucuuacaua

SEQ ID NO: 8086 - RNA, 21 nt, Artificial Sequence
  LRRK2 RNA guide
gcucucuuucuuacauaccua

SEQ ID NO: 8087 - RNA, 21 nt, Artificial Sequence
  LRRK2 RNA guide
ggacugcucucuuucuuacau

SEQ ID NO: 8088 - RNA, 21 nt, Artificial Sequence
  LRRK2 RNA guide
gggacugcucucuuucuuaca

SEQ ID NO: 8089 - RNA, 21 nt, Artificial Sequence
  LRRK2 RNA guide
gguauguaagaaagagagcag

SEQ ID NO: 8090 - RNA, 21 nt, Artificial Sequence
  LRRK2 RNA guide
guaagaaagagagcaguccca

SEQ ID NO: 8091 - RNA, 21 nt, Artificial Sequence
  LRRK2 RNA guide
guauguaagaaagagagcagu

SEQ ID NO: 8092 - RNA, 21 nt, Artificial Sequence
  LRRK2 RNA guide
uaagaaagagagcagucccaa

SEQ ID NO: 8093 - RNA, 21 nt, Artificial Sequence
  LRRK2 RNA guide
uagguauguaagaaagagagc

SEQ ID NO: 8094 - RNA, 21 nt, Artificial Sequence
  LRRK2 RNA guide
uauguaagaaagagagcaguc

SEQ ID NO: 8095 - RNA, 21 nt, Artificial Sequence
  LRRK2 RNA guide
ugcucucuuucuuacauaccu

SEQ ID NO: 8096 - RNA, 21 nt, Artificial Sequence
  LRRK2 RNA guide
ugggacugcucucuuucuuac

SEQ ID NO: 8097 - RNA, 21 nt, Artificial Sequence
  LRRK2 RNA guide
uguaagaaagagagcaguccc

SEQ ID NO: 8098 - RNA, 21 nt, Artificial Sequence
  LRRK2 RNA guide
uugggacugcucucuuucuua

SEQ ID NO: 8099 - RNA, 21 nt, Artificial Sequence
  LRRK2 RNA guide
uuugggacugcucucuuucuu

SEQ ID NO: 8100 - RNA, 22 nt, Artificial Sequence
  LRRK2 RNA guide
aauagguauguaagaaagagag

SEQ ID NO: 8101 - RNA, 22 nt, Artificial Sequence
  LRRK2 RNA guide
aauuugggacugcucucuuucu

SEQ ID NO: 8102 - RNA, 22 nt, Artificial Sequence
  LRRK2 RNA guide
accaauuugggacugcucucuu

SEQ ID NO: 8103 - RNA, 22 nt, Artificial Sequence
  LRRK2 RNA guide
acugcucucuuucuuacauacc

SEQ ID NO: 8104 - RNA, 22 nt, Artificial Sequence
  LRRK2 RNA guide
agguauguaagaaagagagcag

SEQ ID NO: 8105 - RNA, 22 nt, Artificial Sequence
  LRRK2 RNA guide
auagguauguaagaaagagagc

SEQ ID NO: 8106 - RNA, 22 nt, Artificial Sequence
  LRRK2 RNA guide
auguaagaaagagagcaguccc

SEQ ID NO: 8107 - RNA, 22 nt, Artificial Sequence
  LRRK2 RNA guide
auuugggacugcucucuuucuu

SEQ ID NO: 8108 - RNA, 22 nt, Artificial Sequence
  LRRK2 RNA guide
caauuugggacugcucucuuuc

SEQ ID NO: 8109 - RNA, 22 nt, Artificial Sequence
  LRRK2 RNA guide
caccaauuugggacugcucucu

SEQ ID NO: 8110 - RNA, 22 nt, Artificial Sequence
  LRRK2 RNA guide
ccaauuugggacugcucucuuu

SEQ ID NO: 8111 - RNA, 22 nt, Artificial Sequence
  LRRK2 RNA guide
cucucuuucuuacauaccuauu

SEQ ID NO: 8112 - RNA, 22 nt, Artificial Sequence
  LRRK2 RNA guide
cugcucucuuucuuacauaccu

SEQ ID NO: 8113 - RNA, 22 nt, Artificial Sequence
  LRRK2 RNA guide
gacugcucucuuucuuacauac

SEQ ID NO: 8114 - RNA, 22 nt, Artificial Sequence
  LRRK2 RNA guide
gcucucuuucuuacauaccuau

SEQ ID NO: 8115 - RNA, 22 nt, Artificial Sequence
  LRRK2 RNA guide
ggacugcucucuuucuuacaua

SEQ ID NO: 8116 - RNA, 22 nt, Artificial Sequence
  LRRK2 RNA guide
gggacugcucucuuucuuacau

SEQ ID NO: 8117 - RNA, 22 nt, Artificial Sequence
  LRRK2 RNA guide
gguauguaagaaagagagcagu

SEQ ID NO: 8118 - RNA, 22 nt, Artificial Sequence
  LRRK2 RNA guide
guaagaaagagagcagucccaa

SEQ ID NO: 8119 - RNA, 22 nt, Artificial Sequence
  LRRK2 RNA guide
guauguaagaaagagagcaguc

SEQ ID NO: 8120 - RNA, 22 nt, Artificial Sequence
  LRRK2 RNA guide
uaagaaagagagcagucccaaa

SEQ ID NO: 8121 - RNA, 22 nt, Artificial Sequence
  LRRK2 RNA guide
uagguauguaagaaagagagca

SEQ ID NO: 8122 - RNA, 22 nt, Artificial Sequence
  LRRK2 RNA guide
uauguaagaaagagagcagucc

SEQ ID NO: 8123 - RNA, 22 nt, Artificial Sequence
  LRRK2 RNA guide
ugcucucuuucuuacauaccua

SEQ ID NO: 8124 - RNA, 22 nt, Artificial Sequence
  LRRK2 RNA guide
ugggacugcucucuuucuuaca

SEQ ID NO: 8125 - RNA, 22 nt, Artificial Sequence
  LRRK2 RNA guide
uguaagaaagagagcaguccca

SEQ ID NO: 8126 - RNA, 22 nt, Artificial Sequence
  LRRK2 RNA guide
uugggacugcucucuuucuuac

SEQ ID NO: 8127 - RNA, 22 nt, Artificial Sequence
  LRRK2 RNA guide
uuugggacugcucucuuucuua

SEQ ID NO: 8128 - RNA, 20 nt, Artificial Sequence
  LRRK2 RNA guide
aaauugguggaacucucacu

SEQ ID NO: 8129 - RNA, 20 nt, Artificial Sequence
  LRRK2 RNA guide
aacucucacugaauagugga

SEQ ID NO: 8130 - RNA, 20 nt, Artificial Sequence
  LRRK2 RNA guide
aauugguggaacucucacug

SEQ ID NO: 8131 - RNA, 20 nt, Artificial Sequence
  LRRK2 RNA guide
acgagauccacuauucagug

SEQ ID NO: 8132 - RNA, 20 nt, Artificial Sequence
  LRRK2 RNA guide
acuauucagugagaguucca

SEQ ID NO: 8133 - RNA, 20 nt, Artificial Sequence
  LRRK2 RNA guide
acucucacugaauaguggau

SEQ ID NO: 8134 - RNA, 20 nt, Artificial Sequence
  LRRK2 RNA guide
agauccacuauucagugaga

SEQ ID NO: 8135 - RNA, 20 nt, Artificial Sequence
  LRRK2 RNA guide
agucccaaauugguggaacu

SEQ ID NO: 8136 - RNA, 20 nt, Artificial Sequence
  LRRK2 RNA guide
agugagaguuccaccaauuu

SEQ ID NO: 8137 - RNA, 20 nt, Artificial Sequence
  LRRK2 RNA guide
auccacuauucagugagagu

SEQ ID NO: 8138 - RNA, 20 nt, Artificial Sequence
  LRRK2 RNA guide
auucagugagaguuccacca

SEQ ID NO: 8139 - RNA, 20 nt, Artificial Sequence
  LRRK2 RNA guide
auugguggaacucucacuga

SEQ ID NO: 8140 - RNA, 20 nt, Artificial Sequence
  LRRK2 RNA guide
caaauugguggaacucucac

SEQ ID NO: 8141 - RNA, 20 nt, Artificial Sequence
  LRRK2 RNA guide
cacgagauccacuauucagu

SEQ ID NO: 8142 - RNA, 20 nt, Artificial Sequence
  LRRK2 RNA guide
cacuauucagugagaguucc

SEQ ID NO: 8143 - RNA, 20 nt, Artificial Sequence
  LRRK2 RNA guide
cagucccaaauugguggaac

SEQ ID NO: 8144 - RNA, 20 nt, Artificial Sequence
  LRRK2 RNA guide
cagugagaguuccaccaauu

SEQ ID NO: 8145 - RNA, 20 nt, Artificial Sequence
  LRRK2 RNA guide
ccaaauugguggaacucuca

SEQ ID NO: 8146 - RNA, 20 nt, Artificial Sequence
  LRRK2 RNA guide
ccacuauucagugagaguuc

SEQ ID NO: 8147 - RNA, 20 nt, Artificial Sequence
  LRRK2 RNA guide
cccaaauugguggaacucuc

SEQ ID NO: 8148 - RNA, 20 nt, Artificial Sequence
  LRRK2 RNA guide
cgagauccacuauucaguga

SEQ ID NO: 8149 - RNA, 20 nt, Artificial Sequence
  LRRK2 RNA guide
cuauucagugagaguuccac

SEQ ID NO: 8150 - RNA, 20 nt, Artificial Sequence
  LRRK2 RNA guide
cucacugaauaguggaucuc

SEQ ID NO: 8151 - RNA, 20 nt, Artificial Sequence
  LRRK2 RNA guide
cucucacugaauaguggauc

SEQ ID NO: 8152 - RNA, 20 nt, Artificial Sequence
  LRRK2 RNA guide
gaacucucacugaauagugg

SEQ ID NO: 8153 - RNA, 20 nt, Artificial Sequence
  LRRK2 RNA guide
gagauccacuauucagugag

SEQ ID NO: 8154 - RNA, 20 nt, Artificial Sequence
  LRRK2 RNA guide
gauccacuauucagugagag

SEQ ID NO: 8155 - RNA, 20 nt, Artificial Sequence
  LRRK2 RNA guide
gcagucccaaauugguggaa

SEQ ID NO: 8156 - RNA, 20 nt, Artificial Sequence
  LRRK2 RNA guide
ggaacucucacugaauagug

SEQ ID NO: 8157 - RNA, 20 nt, Artificial Sequence
  LRRK2 RNA guide
gguggaacucucacugaaua

SEQ ID NO: 8158 - RNA, 20 nt, Artificial Sequence
  LRRK2 RNA guide
gucccaaauugguggaacuc

SEQ ID NO: 8159 - RNA, 20 nt, Artificial Sequence
  LRRK2 RNA guide
gugagaguuccaccaauuug

SEQ ID NO: 8160 - RNA, 20 nt, Artificial Sequence
  LRRK2 RNA guide
guggaacucucacugaauag

SEQ ID NO: 8161 - RNA, 20 nt, Artificial Sequence
  LRRK2 RNA guide
guucacgagauccacuauuc

SEQ ID NO: 8162 - RNA, 20 nt, Artificial Sequence
  LRRK2 RNA guide
uauucagugagaguuccacc

SEQ ID NO: 8163 - RNA, 20 nt, Artificial Sequence
  LRRK2 RNA guide
ucacgagauccacuauucag

SEQ ID NO: 8164 - RNA, 20 nt, Artificial Sequence
  LRRK2 RNA guide
ucacugaauaguggaucucg

SEQ ID NO: 8165 - RNA, 20 nt, Artificial Sequence
  LRRK2 RNA guide
ucagugagaguuccaccaau

SEQ ID NO: 8166 - RNA, 20 nt, Artificial Sequence
  LRRK2 RNA guide
uccacuauucagugagaguu

SEQ ID NO: 8167 - RNA, 20 nt, Artificial Sequence
  LRRK2 RNA guide
ucccaaauugguggaacucu

SEQ ID NO: 8168 - RNA, 20 nt, Artificial Sequence
  LRRK2 RNA guide
ucucacugaauaguggaucu

SEQ ID NO: 8169 - RNA, 20 nt, Artificial Sequence
  LRRK2 RNA guide
ugagaguuccaccaauuugg

SEQ ID NO: 8170 - RNA, 20 nt, Artificial Sequence
  LRRK2 RNA guide
uggaacucucacugaauagu

SEQ ID NO: 8171 - RNA, 20 nt, Artificial Sequence
  LRRK2 RNA guide
ugguggaacucucacugaau

SEQ ID NO: 8172 - RNA, 20 nt, Artificial Sequence
  LRRK2 RNA guide
uguucacgagauccacuauu

SEQ ID NO: 8173 - RNA, 20 nt, Artificial Sequence
  LRRK2 RNA guide
uucagugagaguuccaccaa

SEQ ID NO: 8174 - RNA, 20 nt, Artificial Sequence
  LRRK2 RNA guide
uugguggaacucucacugaa

SEQ ID NO: 8175 - RNA, 21 nt, Artificial Sequence
  LRRK2 RNA guide
aaauugguggaacucucacug

SEQ ID NO: 8176 - RNA, 21 nt, Artificial Sequence
  LRRK2 RNA guide
aacucucacugaauaguggau

SEQ ID NO: 8177 - RNA, 21 nt, Artificial Sequence
  LRRK2 RNA guide
aauugguggaacucucacuga

SEQ ID NO: 8178 - RNA, 21 nt, Artificial Sequence
  LRRK2 RNA guide
acgagauccacuauucaguga

SEQ ID NO: 8179 - RNA, 21 nt, Artificial Sequence
  LRRK2 RNA guide
acuauucagugagaguuccac

SEQ ID NO: 8180 - RNA, 21 nt, Artificial Sequence
  LRRK2 RNA guide
acucucacugaauaguggauc

SEQ ID NO: 8181 - RNA, 21 nt, Artificial Sequence
  LRRK2 RNA guide
agauccacuauucagugagag

SEQ ID NO: 8182 - RNA, 21 nt, Artificial Sequence
  LRRK2 RNA guide
agcagucccaaauugguggaa

SEQ ID NO: 8183 - RNA, 21 nt, Artificial Sequence
  LRRK2 RNA guide
agucccaaauugguggaacuc

SEQ ID NO: 8184 - RNA, 21 nt, Artificial Sequence
  LRRK2 RNA guide
agugagaguuccaccaauuug

SEQ ID NO: 8185 - RNA, 21 nt, Artificial Sequence
  LRRK2 RNA guide
auccacuauucagugagaguu

SEQ ID NO: 8186 - RNA, 21 nt, Artificial Sequence
  LRRK2 RNA guide
auucagugagaguuccaccaa

SEQ ID NO: 8187 - RNA, 21 nt, Artificial Sequence
  LRRK2 RNA guide
auugguggaacucucacugaa

SEQ ID NO: 8188 - RNA, 21 nt, Artificial Sequence
  LRRK2 RNA guide
caaauugguggaacucucacu

SEQ ID NO: 8189 - RNA, 21 nt, Artificial Sequence
  LRRK2 RNA guide
cacgagauccacuauucagug

SEQ ID NO: 8190 - RNA, 21 nt, Artificial Sequence
  LRRK2 RNA guide
cacuauucagugagaguucca

SEQ ID NO: 8191 - RNA, 21 nt, Artificial Sequence
  LRRK2 RNA guide
cagucccaaauugguggaacu

SEQ ID NO: 8192 - RNA, 21 nt, Artificial Sequence
  LRRK2 RNA guide
cagugagaguuccaccaauuu

SEQ ID NO: 8193 - RNA, 21 nt, Artificial Sequence
  LRRK2 RNA guide
ccaaauugguggaacucucac

SEQ ID NO: 8194 - RNA, 21 nt, Artificial Sequence
  LRRK2 RNA guide
ccacuauucagugagaguucc

SEQ ID NO: 8195 - RNA, 21 nt, Artificial Sequence
  LRRK2 RNA guide
cccaaauugguggaacucuca

SEQ ID NO: 8196 - RNA, 21 nt, Artificial Sequence
  LRRK2 RNA guide
cgagauccacuauucagugag

SEQ ID NO: 8197 - RNA, 21 nt, Artificial Sequence
  LRRK2 RNA guide
cuauucagugagaguuccacc

SEQ ID NO: 8198 - RNA, 21 nt, Artificial Sequence
  LRRK2 RNA guide
cucacugaauaguggaucucg

SEQ ID NO: 8199 - RNA, 21 nt, Artificial Sequence
  LRRK2 RNA guide
cucucacugaauaguggaucu

SEQ ID NO: 8200 - RNA, 21 nt, Artificial Sequence
  LRRK2 RNA guide
gaacucucacugaauagugga

SEQ ID NO: 8201 - RNA, 21 nt, Artificial Sequence
  LRRK2 RNA guide
gagauccacuauucagugaga

SEQ ID NO: 8202 - RNA, 21 nt, Artificial Sequence
  LRRK2 RNA guide
gauccacuauucagugagagu

SEQ ID NO: 8203 - RNA, 21 nt, Artificial Sequence
  LRRK2 RNA guide
gcagucccaaauugguggaac

SEQ ID NO: 8204 - RNA, 21 nt, Artificial Sequence
  LRRK2 RNA guide
ggaacucucacugaauagugg

SEQ ID NO: 8205 - RNA, 21 nt, Artificial Sequence
  LRRK2 RNA guide
gguggaacucucacugaauag

SEQ ID NO: 8206 - RNA, 21 nt, Artificial Sequence
  LRRK2 RNA guide
gucccaaauugguggaacucu

SEQ ID NO: 8207 - RNA, 21 nt, Artificial Sequence
  LRRK2 RNA guide
gugagaguuccaccaauuugg

SEQ ID NO: 8208 - RNA, 21 nt, Artificial Sequence
  LRRK2 RNA guide
guggaacucucacugaauagu

SEQ ID NO: 8209 - RNA, 21 nt, Artificial Sequence
  LRRK2 RNA guide
guucacgagauccacuauuca

SEQ ID NO: 8210 - RNA, 21 nt, Artificial Sequence
  LRRK2 RNA guide
uauucagugagaguuccacca

SEQ ID NO: 8211 - RNA, 21 nt, Artificial Sequence
  LRRK2 RNA guide
ucacgagauccacuauucagu

SEQ ID NO: 8212 - RNA, 21 nt, Artificial Sequence
  LRRK2 RNA guide
ucacugaauaguggaucucgu

SEQ ID NO: 8213 - RNA, 21 nt, Artificial Sequence
  LRRK2 RNA guide
ucagugagaguuccaccaauu

SEQ ID NO: 8214 - RNA, 21 nt, Artificial Sequence
  LRRK2 RNA guide
uccacuauucagugagaguuc

SEQ ID NO: 8215 - RNA, 21 nt, Artificial Sequence
  LRRK2 RNA guide
ucccaaauugguggaacucuc

SEQ ID NO: 8216 - RNA, 21 nt, Artificial Sequence
  LRRK2 RNA guide
ucucacugaauaguggaucuc

SEQ ID NO: 8217 - RNA, 21 nt, Artificial Sequence
  LRRK2 RNA guide
ugagaguuccaccaauuuggg

SEQ ID NO: 8218 - RNA, 21 nt, Artificial Sequence
  LRRK2 RNA guide
uggaacucucacugaauagug

SEQ ID NO: 8219 - RNA, 21 nt, Artificial Sequence
  LRRK2 RNA guide
ugguggaacucucacugaaua

SEQ ID NO: 8220 - RNA, 21 nt, Artificial Sequence
  LRRK2 RNA guide
uguucacgagauccacuauuc

SEQ ID NO: 8221 - RNA, 21 nt, Artificial Sequence
  LRRK2 RNA guide
uucacgagauccacuauucag

SEQ ID NO: 8222 - RNA, 21 nt, Artificial Sequence
  LRRK2 RNA guide
uucagugagaguuccaccaau

SEQ ID NO: 8223 - RNA, 21 nt, Artificial Sequence
  LRRK2 RNA guide
uugguggaacucucacugaau

SEQ ID NO: 8224 - RNA, 21 nt, Artificial Sequence
  LRRK2 RNA guide
uuguucacgagauccacuauu

SEQ ID NO: 8225 - RNA, 22 nt, Artificial Sequence
  LRRK2 RNA guide
aaauugguggaacucucacuga

SEQ ID NO: 8226 - RNA, 22 nt, Artificial Sequence
  LRRK2 RNA guide
aacucucacugaauaguggauc

SEQ ID NO: 8227 - RNA, 22 nt, Artificial Sequence
  LRRK2 RNA guide
aauugguggaacucucacugaa

SEQ ID NO: 8228 - RNA, 22 nt, Artificial Sequence
  LRRK2 RNA guide
acgagauccacuauucagugag

SEQ ID NO: 8229 - RNA, 22 nt, Artificial Sequence
  LRRK2 RNA guide
acuauucagugagaguuccacc

SEQ ID NO: 8230 - RNA, 22 nt, Artificial Sequence
  LRRK2 RNA guide
acucucacugaauaguggaucu

SEQ ID NO: 8231 - RNA, 22 nt, Artificial Sequence
  LRRK2 RNA guide
agauccacuauucagugagagu

SEQ ID NO: 8232 - RNA, 22 nt, Artificial Sequence
  LRRK2 RNA guide
agcagucccaaauugguggaac

SEQ ID NO: 8233 - RNA, 22 nt, Artificial Sequence
  LRRK2 RNA guide
agucccaaauugguggaacucu

SEQ ID NO: 8234 - RNA, 22 nt, Artificial Sequence
  LRRK2 RNA guide
agugagaguuccaccaauuugg

SEQ ID NO: 8235 - RNA, 22 nt, Artificial Sequence
  LRRK2 RNA guide
auccacuauucagugagaguuc

SEQ ID NO: 8236 - RNA, 22 nt, Artificial Sequence
  LRRK2 RNA guide
auucagugagaguuccaccaau

SEQ ID NO: 8237 - RNA, 22 nt, Artificial Sequence
  LRRK2 RNA guide
auugguggaacucucacugaau

SEQ ID NO: 8238 - RNA, 22 nt, Artificial Sequence
  LRRK2 RNA guide
caaauugguggaacucucacug

SEQ ID NO: 8239 - RNA, 22 nt, Artificial Sequence
  LRRK2 RNA guide
cacgagauccacuauucaguga

SEQ ID NO: 8240 - RNA, 22 nt, Artificial Sequence
  LRRK2 RNA guide
cacuauucagugagaguuccac

SEQ ID NO: 8241 - RNA, 22 nt, Artificial Sequence
  LRRK2 RNA guide
cagucccaaauugguggaacuc

SEQ ID NO: 8242 - RNA, 22 nt, Artificial Sequence
  LRRK2 RNA guide
cagugagaguuccaccaauuug

SEQ ID NO: 8243 - RNA, 22 nt, Artificial Sequence
  LRRK2 RNA guide
ccaaauugguggaacucucacu

SEQ ID NO: 8244 - RNA, 22 nt, Artificial Sequence
  LRRK2 RNA guide
ccacuauucagugagaguucca

SEQ ID NO: 8245 - RNA, 22 nt, Artificial Sequence
  LRRK2 RNA guide
cccaaauugguggaacucucac

SEQ ID NO: 8246 - RNA, 22 nt, Artificial Sequence
  LRRK2 RNA guide
cgagauccacuauucagugaga

SEQ ID NO: 8247 - RNA, 22 nt, Artificial Sequence
  LRRK2 RNA guide
cuauucagugagaguuccacca

SEQ ID NO: 8248 - RNA, 22 nt, Artificial Sequence
  LRRK2 RNA guide
cucacugaauaguggaucucgu

SEQ ID NO: 8249 - RNA, 22 nt, Artificial Sequence
  LRRK2 RNA guide
cucucacugaauaguggaucuc

SEQ ID NO: 8250 - RNA, 22 nt, Artificial Sequence
  LRRK2 RNA guide
cuuguucacgagauccacuauu

SEQ ID NO: 8251 - RNA, 22 nt, Artificial Sequence
  LRRK2 RNA guide
gaacucucacugaauaguggau

SEQ ID NO: 8252 - RNA, 22 nt, Artificial Sequence
  LRRK2 RNA guide
gagauccacuauucagugagag

SEQ ID NO: 8253 - RNA, 22 nt, Artificial Sequence
  LRRK2 RNA guide
gagcagucccaaauugguggaa

SEQ ID NO: 8254 - RNA, 22 nt, Artificial Sequence
  LRRK2 RNA guide
gauccacuauucagugagaguu

SEQ ID NO: 8255 - RNA, 22 nt, Artificial Sequence
  LRRK2 RNA guide
gcagucccaaauugguggaacu

SEQ ID NO: 8256 - RNA, 22 nt, Artificial Sequence
  LRRK2 RNA guide
ggaacucucacugaauagugga

SEQ ID NO: 8257 - RNA, 22 nt, Artificial Sequence
  LRRK2 RNA guide
gguggaacucucacugaauagu

SEQ ID NO: 8258 - RNA, 22 nt, Artificial Sequence
  LRRK2 RNA guide
gucccaaauugguggaacucuc

SEQ ID NO: 8259 - RNA, 22 nt, Artificial Sequence
  LRRK2 RNA guide
gugagaguuccaccaauuuggg

SEQ ID NO: 8260 - RNA, 22 nt, Artificial Sequence
  LRRK2 RNA guide
guggaacucucacugaauagug

SEQ ID NO: 8261 - RNA, 22 nt, Artificial Sequence
  LRRK2 RNA guide
guucacgagauccacuauucag

SEQ ID NO: 8262 - RNA, 22 nt, Artificial Sequence
  LRRK2 RNA guide
uauucagugagaguuccaccaa

SEQ ID NO: 8263 - RNA, 22 nt, Artificial Sequence
  LRRK2 RNA guide
ucacgagauccacuauucagug

SEQ ID NO: 8264 - RNA, 22 nt, Artificial Sequence
  LRRK2 RNA guide
ucacugaauaguggaucucgug

SEQ ID NO: 8265 - RNA, 22 nt, Artificial Sequence
  LRRK2 RNA guide
ucagugagaguuccaccaauuu

SEQ ID NO: 8266 - RNA, 22 nt, Artificial Sequence
  LRRK2 RNA guide
uccacuauucagugagaguucc

SEQ ID NO: 8267 - RNA, 22 nt, Artificial Sequence
  LRRK2 RNA guide
ucccaaauugguggaacucuca

SEQ ID NO: 8268 - RNA, 22 nt, Artificial Sequence
  LRRK2 RNA guide
ucucacugaauaguggaucucg

SEQ ID NO: 8269 - RNA, 22 nt, Artificial Sequence
  LRRK2 RNA guide
ugagaguuccaccaauuuggga

SEQ ID NO: 8270 - RNA, 22 nt, Artificial Sequence
  LRRK2 RNA guide
uggaacucucacugaauagugg

SEQ ID NO: 8271 - RNA, 22 nt, Artificial Sequence
  LRRK2 RNA guide
ugguggaacucucacugaauag

SEQ ID NO: 8272 - RNA, 22 nt, Artificial Sequence
  LRRK2 RNA guide
uguucacgagauccacuauuca

SEQ ID NO: 8273 - RNA, 22 nt, Artificial Sequence
  LRRK2 RNA guide
uucacgagauccacuauucagu

SEQ ID NO: 8274 - RNA, 22 nt, Artificial Sequence
  LRRK2 RNA guide
uucagugagaguuccaccaauu

SEQ ID NO: 8275 - RNA, 22 nt, Artificial Sequence
  LRRK2 RNA guide
uugguggaacucucacugaaua

SEQ ID NO: 8276 - RNA, 22 nt, Artificial Sequence
  LRRK2 RNA guide
uuguucacgagauccacuauuc

SEQ ID NO: 8277 - RNA, 20 nt, Artificial Sequence
  LRRK2 RNA guide
aacaagauguaugaaaagcg

SEQ ID NO: 8278 - RNA, 20 nt, Artificial Sequence
  LRRK2 RNA guide
aacgcuuuucauacaucuug

SEQ ID NO: 8279 - RNA, 20 nt, Artificial Sequence
  LRRK2 RNA guide
aagauguaugaaaagcguug

SEQ ID NO: 8280 - RNA, 20 nt, Artificial Sequence
  LRRK2 RNA guide
aaugcuuaucgucaacgcuu

SEQ ID NO: 8281 - RNA, 20 nt, Artificial Sequence
  LRRK2 RNA guide
acaagauguaugaaaagcgu

SEQ ID NO: 8282 - RNA, 20 nt, Artificial Sequence
  LRRK2 RNA guide
acgcuuuucauacaucuugu

SEQ ID NO: 8283 - RNA, 20 nt, Artificial Sequence
  LRRK2 RNA guide
agauguaugaaaagcguuga

SEQ ID NO: 8284 - RNA, 20 nt, Artificial Sequence
  LRRK2 RNA guide
aguggaucucgugaacaaga

SEQ ID NO: 8285 - RNA, 20 nt, Artificial Sequence
  LRRK2 RNA guide
aucgucaacgcuuuucauac

SEQ ID NO: 8286 - RNA, 20 nt, Artificial Sequence
  LRRK2 RNA guide
aucucgugaacaagauguau

SEQ ID NO: 8287 - RNA, 20 nt, Artificial Sequence
  LRRK2 RNA guide
augaaaagcguugacgauaa

SEQ ID NO: 8288 - RNA, 20 nt, Artificial Sequence
  LRRK2 RNA guide
augcuuaucgucaacgcuuu

SEQ ID NO: 8289 - RNA, 20 nt, Artificial Sequence
  LRRK2 RNA guide
auguaugaaaagcguugacg

SEQ ID NO: 8290 - RNA, 20 nt, Artificial Sequence
  LRRK2 RNA guide
caacgcuuuucauacaucuu

SEQ ID NO: 8291 - RNA, 20 nt, Artificial Sequence
  LRRK2 RNA guide
caagauguaugaaaagcguu

SEQ ID NO: 8292 - RNA, 20 nt, Artificial Sequence
  LRRK2 RNA guide
caaugcuuaucgucaacgcu

SEQ ID NO: 8293 - RNA, 20 nt, Artificial Sequence
  LRRK2 RNA guide
cauacaucuuguucacgaga

SEQ ID NO: 8294 - RNA, 20 nt, Artificial Sequence
  LRRK2 RNA guide
cgcuuuucauacaucuuguu

SEQ ID NO: 8295 - RNA, 20 nt, Artificial Sequence
  LRRK2 RNA guide
cgucaacgcuuuucauacau

SEQ ID NO: 8296 - RNA, 20 nt, Artificial Sequence
  LRRK2 RNA guide
cgugaacaagauguaugaaa

SEQ ID NO: 8297 - RNA, 20 nt, Artificial Sequence
  LRRK2 RNA guide
cucgugaacaagauguauga

SEQ ID NO: 8298 - RNA, 20 nt, Artificial Sequence
  LRRK2 RNA guide
cuuaucgucaacgcuuuuca

SEQ ID NO: 8299 - RNA, 20 nt, Artificial Sequence
  LRRK2 RNA guide
cuuuucauacaucuuguuca

SEQ ID NO: 8300 - RNA, 20 nt, Artificial Sequence
  LRRK2 RNA guide
gaacaagauguaugaaaagc

SEQ ID NO: 8301 - RNA, 20 nt, Artificial Sequence
  LRRK2 RNA guide
gaucucgugaacaagaugua

SEQ ID NO: 8302 - RNA, 20 nt, Artificial Sequence
  LRRK2 RNA guide
gauguaugaaaagcguugac

SEQ ID NO: 8303 - RNA, 20 nt, Artificial Sequence
  LRRK2 RNA guide
gcuuaucgucaacgcuuuuc

SEQ ID NO: 8304 - RNA, 20 nt, Artificial Sequence
  LRRK2 RNA guide
gcuuuucauacaucuuguuc

SEQ ID NO: 8305 - RNA, 20 nt, Artificial Sequence
  LRRK2 RNA guide
ggaucucgugaacaagaugu

SEQ ID NO: 8306 - RNA, 20 nt, Artificial Sequence
  LRRK2 RNA guide
guaugaaaagcguugacgau

SEQ ID NO: 8307 - RNA, 20 nt, Artificial Sequence
  LRRK2 RNA guide
gucaacgcuuuucauacauc

SEQ ID NO: 8308 - RNA, 20 nt, Artificial Sequence
  LRRK2 RNA guide
gugaacaagauguaugaaaa

SEQ ID NO: 8309 - RNA, 20 nt, Artificial Sequence
  LRRK2 RNA guide
guggaucucgugaacaagau

SEQ ID NO: 8310 - RNA, 20 nt, Artificial Sequence
  LRRK2 RNA guide
uaucgucaacgcuuuucaua

SEQ ID NO: 8311 - RNA, 20 nt, Artificial Sequence
  LRRK2 RNA guide
uaugaaaagcguugacgaua

SEQ ID NO: 8312 - RNA, 20 nt, Artificial Sequence
  LRRK2 RNA guide
ucaacgcuuuucauacaucu

SEQ ID NO: 8313 - RNA, 20 nt, Artificial Sequence
  LRRK2 RNA guide
ucauacaucuuguucacgag

SEQ ID NO: 8314 - RNA, 20 nt, Artificial Sequence
  LRRK2 RNA guide
ucgucaacgcuuuucauaca

SEQ ID NO: 8315 - RNA, 20 nt, Artificial Sequence
  LRRK2 RNA guide
ucgugaacaagauguaugaa

SEQ ID NO: 8316 - RNA, 20 nt, Artificial Sequence
  LRRK2 RNA guide
ucucgugaacaagauguaug

SEQ ID NO: 8317 - RNA, 20 nt, Artificial Sequence
  LRRK2 RNA guide
ugaacaagauguaugaaaag

SEQ ID NO: 8318 - RNA, 20 nt, Artificial Sequence
  LRRK2 RNA guide
ugcuuaucgucaacgcuuuu

SEQ ID NO: 8319 - RNA, 20 nt, Artificial Sequence
  LRRK2 RNA guide
uggaucucgugaacaagaug

SEQ ID NO: 8320 - RNA, 20 nt, Artificial Sequence
  LRRK2 RNA guide
uguaugaaaagcguugacga

SEQ ID NO: 8321 - RNA, 20 nt, Artificial Sequence
  LRRK2 RNA guide
uuaucgucaacgcuuuucau

SEQ ID NO: 8322 - RNA, 20 nt, Artificial Sequence
  LRRK2 RNA guide
uucauacaucuuguucacga

SEQ ID NO: 8323 - RNA, 20 nt, Artificial Sequence
  LRRK2 RNA guide
uuucauacaucuuguucacg

SEQ ID NO: 8324 - RNA, 20 nt, Artificial Sequence
  LRRK2 RNA guide
uuuucauacaucuuguucac

SEQ ID NO: 8325 - RNA, 21 nt, Artificial Sequence
  LRRK2 RNA guide
aacaagauguaugaaaagcgu

SEQ ID NO: 8326 - RNA, 21 nt, Artificial Sequence
  LRRK2 RNA guide
aacgcuuuucauacaucuugu

SEQ ID NO: 8327 - RNA, 21 nt, Artificial Sequence
  LRRK2 RNA guide
aagauguaugaaaagcguuga

SEQ ID NO: 8328 - RNA, 21 nt, Artificial Sequence
  LRRK2 RNA guide
aaugcuuaucgucaacgcuuu

SEQ ID NO: 8329 - RNA, 21 nt, Artificial Sequence
  LRRK2 RNA guide
acaagauguaugaaaagcguu

SEQ ID NO: 8330 - RNA, 21 nt, Artificial Sequence
  LRRK2 RNA guide
acgcuuuucauacaucuuguu

SEQ ID NO: 8331 - RNA, 21 nt, Artificial Sequence
  LRRK2 RNA guide
agauguaugaaaagcguugac

SEQ ID NO: 8332 - RNA, 21 nt, Artificial Sequence
  LRRK2 RNA guide
aguggaucucgugaacaagau

SEQ ID NO: 8333 - RNA, 21 nt, Artificial Sequence
  LRRK2 RNA guide
aucgucaacgcuuuucauaca

SEQ ID NO: 8334 - RNA, 21 nt, Artificial Sequence
  LRRK2 RNA guide
aucucgugaacaagauguaug

SEQ ID NO: 8335 - RNA, 21 nt, Artificial Sequence
  LRRK2 RNA guide
augaaaagcguugacgauaag

SEQ ID NO: 8336 - RNA, 21 nt, Artificial Sequence
  LRRK2 RNA guide
augcuuaucgucaacgcuuuu

SEQ ID NO: 8337 - RNA, 21 nt, Artificial Sequence
  LRRK2 RNA guide
auguaugaaaagcguugacga

SEQ ID NO: 8338 - RNA, 21 nt, Artificial Sequence
  LRRK2 RNA guide
caacgcuuuucauacaucuug

SEQ ID NO: 8339 - RNA, 21 nt, Artificial Sequence
  LRRK2 RNA guide
caagauguaugaaaagcguug

SEQ ID NO: 8340 - RNA, 21 nt, Artificial Sequence
  LRRK2 RNA guide
caaugcuuaucgucaacgcuu

SEQ ID NO: 8341 - RNA, 21 nt, Artificial Sequence
  LRRK2 RNA guide
cauacaucuuguucacgagau

SEQ ID NO: 8342 - RNA, 21 nt, Artificial Sequence
  LRRK2 RNA guide
ccaaugcuuaucgucaacgcu

SEQ ID NO: 8343 - RNA, 21 nt, Artificial Sequence
  LRRK2 RNA guide
cgcuuuucauacaucuuguuc

SEQ ID NO: 8344 - RNA, 21 nt, Artificial Sequence
  LRRK2 RNA guide
cgucaacgcuuuucauacauc

SEQ ID NO: 8345 - RNA, 21 nt, Artificial Sequence
  LRRK2 RNA guide
cgugaacaagauguaugaaaa

SEQ ID NO: 8346 - RNA, 21 nt, Artificial Sequence
  LRRK2 RNA guide
cucgugaacaagauguaugaa

SEQ ID NO: 8347 - RNA, 21 nt, Artificial Sequence
  LRRK2 RNA guide
cuuaucgucaacgcuuuucau

SEQ ID NO: 8348 - RNA, 21 nt, Artificial Sequence
  LRRK2 RNA guide
cuuuucauacaucuuguucac

SEQ ID NO: 8349 - RNA, 21 nt, Artificial Sequence
  LRRK2 RNA guide
gaacaagauguaugaaaagcg

SEQ ID NO: 8350 - RNA, 21 nt, Artificial Sequence
  LRRK2 RNA guide
gaucucgugaacaagauguau

SEQ ID NO: 8351 - RNA, 21 nt, Artificial Sequence
  LRRK2 RNA guide
gauguaugaaaagcguugacg

SEQ ID NO: 8352 - RNA, 21 nt, Artificial Sequence
  LRRK2 RNA guide
gcuuaucgucaacgcuuuuca

SEQ ID NO: 8353 - RNA, 21 nt, Artificial Sequence
  LRRK2 RNA guide
gcuuuucauacaucuuguuca

SEQ ID NO: 8354 - RNA, 21 nt, Artificial Sequence
  LRRK2 RNA guide
ggaucucgugaacaagaugua

SEQ ID NO: 8355 - RNA, 21 nt, Artificial Sequence
  LRRK2 RNA guide
guaugaaaagcguugacgaua

SEQ ID NO: 8356 - RNA, 21 nt, Artificial Sequence
  LRRK2 RNA guide
gucaacgcuuuucauacaucu

SEQ ID NO: 8357 - RNA, 21 nt, Artificial Sequence
  LRRK2 RNA guide
gugaacaagauguaugaaaag

SEQ ID NO: 8358 - RNA, 21 nt, Artificial Sequence
  LRRK2 RNA guide
guggaucucgugaacaagaug

SEQ ID NO: 8359 - RNA, 21 nt, Artificial Sequence
  LRRK2 RNA guide
uaguggaucucgugaacaaga

SEQ ID NO: 8360 - RNA, 21 nt, Artificial Sequence
  LRRK2 RNA guide
uaucgucaacgcuuuucauac

SEQ ID NO: 8361 - RNA, 21 nt, Artificial Sequence
  LRRK2 RNA guide
uaugaaaagcguugacgauaa

SEQ ID NO: 8362 - RNA, 21 nt, Artificial Sequence
  LRRK2 RNA guide
ucaacgcuuuucauacaucuu

SEQ ID NO: 8363 - RNA, 21 nt, Artificial Sequence
  LRRK2 RNA guide
ucauacaucuuguucacgaga

SEQ ID NO: 8364 - RNA, 21 nt, Artificial Sequence
  LRRK2 RNA guide
ucgucaacgcuuuucauacau

SEQ ID NO: 8365 - RNA, 21 nt, Artificial Sequence
  LRRK2 RNA guide
ucgugaacaagauguaugaaa

SEQ ID NO: 8366 - RNA, 21 nt, Artificial Sequence
  LRRK2 RNA guide
ucucgugaacaagauguauga

SEQ ID NO: 8367 - RNA, 21 nt, Artificial Sequence
  LRRK2 RNA guide
ugaacaagauguaugaaaagc

SEQ ID NO: 8368 - RNA, 21 nt, Artificial Sequence
  LRRK2 RNA guide
ugcuuaucgucaacgcuuuuc

SEQ ID NO: 8369 - RNA, 21 nt, Artificial Sequence
  LRRK2 RNA guide
uggaucucgugaacaagaugu

SEQ ID NO: 8370 - RNA, 21 nt, Artificial Sequence
  LRRK2 RNA guide
uguaugaaaagcguugacgau

SEQ ID NO: 8371 - RNA, 21 nt, Artificial Sequence
  LRRK2 RNA guide
uuaucgucaacgcuuuucaua

SEQ ID NO: 8372 - RNA, 21 nt, Artificial Sequence
  LRRK2 RNA guide
uucauacaucuuguucacgag

SEQ ID NO: 8373 - RNA, 21 nt, Artificial Sequence
  LRRK2 RNA guide
uuucauacaucuuguucacga

SEQ ID NO: 8374 - RNA, 21 nt, Artificial Sequence
  LRRK2 RNA guide
uuuucauacaucuuguucacg

SEQ ID NO: 8375 - RNA, 22 nt, Artificial Sequence
  LRRK2 RNA guide
aacaagauguaugaaaagcguu

SEQ ID NO: 8376 - RNA, 22 nt, Artificial Sequence
  LRRK2 RNA guide
aacgcuuuucauacaucuuguu

SEQ ID NO: 8377 - RNA, 22 nt, Artificial Sequence
  LRRK2 RNA guide
aagauguaugaaaagcguugac

SEQ ID NO: 8378 - RNA, 22 nt, Artificial Sequence
  LRRK2 RNA guide
aaugcuuaucgucaacgcuuuu

SEQ ID NO: 8379 - RNA, 22 nt, Artificial Sequence
  LRRK2 RNA guide
acaagauguaugaaaagcguug

SEQ ID NO: 8380 - RNA, 22 nt, Artificial Sequence
  LRRK2 RNA guide
acgcuuuucauacaucuuguuc

SEQ ID NO: 8381 - RNA, 22 nt, Artificial Sequence
  LRRK2 RNA guide
agauguaugaaaagcguugacg

SEQ ID NO: 8382 - RNA, 22 nt, Artificial Sequence
  LRRK2 RNA guide
aguggaucucgugaacaagaug

SEQ ID NO: 8383 - RNA, 22 nt, Artificial Sequence
  LRRK2 RNA guide
auaguggaucucgugaacaaga

SEQ ID NO: 8384 - RNA, 22 nt, Artificial Sequence
  LRRK2 RNA guide
aucgucaacgcuuuucauacau

SEQ ID NO: 8385 - RNA, 22 nt, Artificial Sequence
  LRRK2 RNA guide
aucucgugaacaagauguauga

SEQ ID NO: 8386 - RNA, 22 nt, Artificial Sequence
  LRRK2 RNA guide
augaaaagcguugacgauaagc

SEQ ID NO: 8387 - RNA, 22 nt, Artificial Sequence
  LRRK2 RNA guide
augcuuaucgucaacgcuuuuc

SEQ ID NO: 8388 - RNA, 22 nt, Artificial Sequence
  LRRK2 RNA guide
auguaugaaaagcguugacgau

SEQ ID NO: 8389 - RNA, 22 nt, Artificial Sequence
  LRRK2 RNA guide
caacgcuuuucauacaucuugu

SEQ ID NO: 8390 - RNA, 22 nt, Artificial Sequence
  LRRK2 RNA guide
caagauguaugaaaagcguuga

SEQ ID NO: 8391 - RNA, 22 nt, Artificial Sequence
  LRRK2 RNA guide
caaugcuuaucgucaacgcuuu

SEQ ID NO: 8392 - RNA, 22 nt, Artificial Sequence
  LRRK2 RNA guide
cauacaucuuguucacgagauc

SEQ ID NO: 8393 - RNA, 22 nt, Artificial Sequence
  LRRK2 RNA guide
ccaaugcuuaucgucaacgcuu

SEQ ID NO: 8394 - RNA, 22 nt, Artificial Sequence
  LRRK2 RNA guide
cccaaugcuuaucgucaacgcu

SEQ ID NO: 8395 - RNA, 22 nt, Artificial Sequence
  LRRK2 RNA guide
cgcuuuucauacaucuuguuca

SEQ ID NO: 8396 - RNA, 22 nt, Artificial Sequence
  LRRK2 RNA guide
cgucaacgcuuuucauacaucu

SEQ ID NO: 8397 - RNA, 22 nt, Artificial Sequence
  LRRK2 RNA guide
cgugaacaagauguaugaaaag

SEQ ID NO: 8398 - RNA, 22 nt, Artificial Sequence
  LRRK2 RNA guide
cucgugaacaagauguaugaaa

SEQ ID NO: 8399 - RNA, 22 nt, Artificial Sequence
  LRRK2 RNA guide
cuuaucgucaacgcuuuucaua

SEQ ID NO: 8400 - RNA, 22 nt, Artificial Sequence
  LRRK2 RNA guide
cuuuucauacaucuuguucacg

SEQ ID NO: 8401 - RNA, 22 nt, Artificial Sequence
  LRRK2 RNA guide
gaacaagauguaugaaaagcgu

SEQ ID NO: 8402 - RNA, 22 nt, Artificial Sequence
  LRRK2 RNA guide
gaucucgugaacaagauguaug

SEQ ID NO: 8403 - RNA, 22 nt, Artificial Sequence
  LRRK2 RNA guide
gauguaugaaaagcguugacga

SEQ ID NO: 8404 - RNA, 22 nt, Artificial Sequence
  LRRK2 RNA guide
gcuuaucgucaacgcuuuucau

SEQ ID NO: 8405 - RNA, 22 nt, Artificial Sequence
  LRRK2 RNA guide
gcuuuucauacaucuuguucac

SEQ ID NO: 8406 - RNA, 22 nt, Artificial Sequence
  LRRK2 RNA guide
ggaucucgugaacaagauguau

SEQ ID NO: 8407 - RNA, 22 nt, Artificial Sequence
  LRRK2 RNA guide
guaugaaaagcguugacgauaa

SEQ ID NO: 8408 - RNA, 22 nt, Artificial Sequence
  LRRK2 RNA guide
gucaacgcuuuucauacaucuu

SEQ ID NO: 8409 - RNA, 22 nt, Artificial Sequence
  LRRK2 RNA guide
gugaacaagauguaugaaaagc

SEQ ID NO: 8410 - RNA, 22 nt, Artificial Sequence
  LRRK2 RNA guide
guggaucucgugaacaagaugu

SEQ ID NO: 8411 - RNA, 22 nt, Artificial Sequence
  LRRK2 RNA guide
uaguggaucucgugaacaagau

SEQ ID NO: 8412 - RNA, 22 nt, Artificial Sequence
  LRRK2 RNA guide
uaucgucaacgcuuuucauaca

SEQ ID NO: 8413 - RNA, 22 nt, Artificial Sequence
  LRRK2 RNA guide
uaugaaaagcguugacgauaag

SEQ ID NO: 8414 - RNA, 22 nt, Artificial Sequence
  LRRK2 RNA guide
ucaacgcuuuucauacaucuug

SEQ ID NO: 8415 - RNA, 22 nt, Artificial Sequence
  LRRK2 RNA guide
ucauacaucuuguucacgagau

SEQ ID NO: 8416 - RNA, 22 nt, Artificial Sequence
  LRRK2 RNA guide
ucgucaacgcuuuucauacauc

SEQ ID NO: 8417 - RNA, 22 nt, Artificial Sequence
  LRRK2 RNA guide
ucgugaacaagauguaugaaaa

SEQ ID NO: 8418 - RNA, 22 nt, Artificial Sequence
  LRRK2 RNA guide
ucucgugaacaagauguaugaa

SEQ ID NO: 8419 - RNA, 22 nt, Artificial Sequence
  LRRK2 RNA guide
ugaacaagauguaugaaaagcg

SEQ ID NO: 8420 - RNA, 22 nt, Artificial Sequence
  LRRK2 RNA guide
ugcuuaucgucaacgcuuuuca

SEQ ID NO: 8421 - RNA, 22 nt, Artificial Sequence
  LRRK2 RNA guide
uggaucucgugaacaagaugua

SEQ ID NO: 8422 - RNA, 22 nt, Artificial Sequence
  LRRK2 RNA guide
uguaugaaaagcguugacgaua

SEQ ID NO: 8423 - RNA, 22 nt, Artificial Sequence
  LRRK2 RNA guide
uuaucgucaacgcuuuucauac

SEQ ID NO: 8424 - RNA, 22 nt, Artificial Sequence
  LRRK2 RNA guide
uucauacaucuuguucacgaga

SEQ ID NO: 8425 - RNA, 22 nt, Artificial Sequence
  LRRK2 RNA guide
uuucauacaucuuguucacgag

SEQ ID NO: 8426 - RNA, 22 nt, Artificial Sequence
  LRRK2 RNA guide
uuuucauacaucuuguucacga

SEQ ID NO: 8427 - RNA, 20 nt, Artificial Sequence
  LRRK2 RNA guide
aaaagcguugacgauaaaca

SEQ ID NO: 8428 - RNA, 20 nt, Artificial Sequence
  LRRK2 RNA guide
aaacauugggaaaggugaca

SEQ ID NO: 8429 - RNA, 20 nt, Artificial Sequence
  LRRK2 RNA guide
aaagcguugacgauaaacau

SEQ ID NO: 8430 - RNA, 20 nt, Artificial Sequence
  LRRK2 RNA guide
aacauugggaaaggugacag

SEQ ID NO: 8431 - RNA, 20 nt, Artificial Sequence
  LRRK2 RNA guide
aagcguugacgauaaacauu

SEQ ID NO: 8432 - RNA, 20 nt, Artificial Sequence
  LRRK2 RNA guide
aauguuuaucgucaacgcuu

SEQ ID NO: 8433 - RNA, 20 nt, Artificial Sequence
  LRRK2 RNA guide
accuuucccaauguuuaucg

SEQ ID NO: 8434 - RNA, 20 nt, Artificial Sequence
  LRRK2 RNA guide
acgaaaagcguugacgauaa

SEQ ID NO: 8435 - RNA, 20 nt, Artificial Sequence
  LRRK2 RNA guide
acgauaaacauugggaaagg

SEQ ID NO: 8436 - RNA, 20 nt, Artificial Sequence
  LRRK2 RNA guide
agcguugacgauaaacauug

SEQ ID NO: 8437 - RNA, 20 nt, Artificial Sequence
  LRRK2 RNA guide
auaaacauugggaaagguga

SEQ ID NO: 8438 - RNA, 20 nt, Artificial Sequence
  LRRK2 RNA guide
aucuggcugucaccuuuccc

SEQ ID NO: 8439 - RNA, 20 nt, Artificial Sequence
  LRRK2 RNA guide
auguacgaaaagcguugacg

SEQ ID NO: 8440 - RNA, 20 nt, Artificial Sequence
  LRRK2 RNA guide
auguuuaucgucaacgcuuu

SEQ ID NO: 8441 - RNA, 20 nt, Artificial Sequence
  LRRK2 RNA guide
caauguuuaucgucaacgcu

SEQ ID NO: 8442 - RNA, 20 nt, Artificial Sequence
  LRRK2 RNA guide
caccuuucccaauguuuauc

SEQ ID NO: 8443 - RNA, 20 nt, Artificial Sequence
  LRRK2 RNA guide
ccaauguuuaucgucaacgc

SEQ ID NO: 8444 - RNA, 20 nt, Artificial Sequence
  LRRK2 RNA guide
cccaauguuuaucgucaacg

SEQ ID NO: 8445 - RNA, 20 nt, Artificial Sequence
  LRRK2 RNA guide
ccuuucccaauguuuaucgu

SEQ ID NO: 8446 - RNA, 20 nt, Artificial Sequence
  LRRK2 RNA guide
cgaaaagcguugacgauaaa

SEQ ID NO: 8447 - RNA, 20 nt, Artificial Sequence
  LRRK2 RNA guide
cgauaaacauugggaaaggu

SEQ ID NO: 8448 - RNA, 20 nt, Artificial Sequence
  LRRK2 RNA guide
cguugacgauaaacauuggg

SEQ ID NO: 8449 - RNA, 20 nt, Artificial Sequence
  LRRK2 RNA guide
cuggcugucaccuuucccaa

SEQ ID NO: 8450 - RNA, 20 nt, Artificial Sequence
  LRRK2 RNA guide
cugucaccuuucccaauguu

SEQ ID NO: 8451 - RNA, 20 nt, Artificial Sequence
  LRRK2 RNA guide
cuuucccaauguuuaucguc

SEQ ID NO: 8452 - RNA, 20 nt, Artificial Sequence
  LRRK2 RNA guide
gaaaagcguugacgauaaac

SEQ ID NO: 8453 - RNA, 20 nt, Artificial Sequence
  LRRK2 RNA guide
gacgauaaacauugggaaag

SEQ ID NO: 8454 - RNA, 20 nt, Artificial Sequence
  LRRK2 RNA guide
gauaaacauugggaaaggug

SEQ ID NO: 8455 - RNA, 20 nt, Artificial Sequence
  LRRK2 RNA guide
gcguugacgauaaacauugg

SEQ ID NO: 8456 - RNA, 20 nt, Artificial Sequence
  LRRK2 RNA guide
gcugucaccuuucccaaugu

SEQ ID NO: 8457 - RNA, 20 nt, Artificial Sequence
  LRRK2 RNA guide
ggcugucaccuuucccaaug

SEQ ID NO: 8458 - RNA, 20 nt, Artificial Sequence
  LRRK2 RNA guide
guacgaaaagcguugacgau

SEQ ID NO: 8459 - RNA, 20 nt, Artificial Sequence
  LRRK2 RNA guide
gucaccuuucccaauguuua

SEQ ID NO: 8460 - RNA, 20 nt, Artificial Sequence
  LRRK2 RNA guide
guugacgauaaacauuggga

SEQ ID NO: 8461 - RNA, 20 nt, Artificial Sequence
  LRRK2 RNA guide
guuuaucgucaacgcuuuuc

SEQ ID NO: 8462 - RNA, 20 nt, Artificial Sequence
  LRRK2 RNA guide
uaaacauugggaaaggugac

SEQ ID NO: 8463 - RNA, 20 nt, Artificial Sequence
  LRRK2 RNA guide
uacgaaaagcguugacgaua

SEQ ID NO: 8464 - RNA, 20 nt, Artificial Sequence
  LRRK2 RNA guide
ucaccuuucccaauguuuau

SEQ ID NO: 8465 - RNA, 20 nt, Artificial Sequence
  LRRK2 RNA guide
ucccaauguuuaucgucaac

SEQ ID NO: 8466 - RNA, 20 nt, Artificial Sequence
  LRRK2 RNA guide
ucuggcugucaccuuuccca

SEQ ID NO: 8467 - RNA, 20 nt, Artificial Sequence
  LRRK2 RNA guide
ugacgauaaacauugggaaa

SEQ ID NO: 8468 - RNA, 20 nt, Artificial Sequence
  LRRK2 RNA guide
uguacgaaaagcguugacga

SEQ ID NO: 8469 - RNA, 20 nt, Artificial Sequence
  LRRK2 RNA guide
ugucaccuuucccaauguuu

SEQ ID NO: 8470 - RNA, 20 nt, Artificial Sequence
  LRRK2 RNA guide
uguuuaucgucaacgcuuuu

SEQ ID NO: 8471 - RNA, 20 nt, Artificial Sequence
  LRRK2 RNA guide
uucccaauguuuaucgucaa

SEQ ID NO: 8472 - RNA, 20 nt, Artificial Sequence
  LRRK2 RNA guide
uugacgauaaacauugggaa

SEQ ID NO: 8473 - RNA, 20 nt, Artificial Sequence
  LRRK2 RNA guide
uuucccaauguuuaucguca

SEQ ID NO: 8474 - RNA, 21 nt, Artificial Sequence
  LRRK2 RNA guide
aaaagcguugacgauaaacau

SEQ ID NO: 8475 - RNA, 21 nt, Artificial Sequence
  LRRK2 RNA guide
aaacauugggaaaggugacag

SEQ ID NO: 8476 - RNA, 21 nt, Artificial Sequence
  LRRK2 RNA guide
aaagcguugacgauaaacauu

SEQ ID NO: 8477 - RNA, 21 nt, Artificial Sequence
  LRRK2 RNA guide
aacauugggaaaggugacagc

SEQ ID NO: 8478 - RNA, 21 nt, Artificial Sequence
  LRRK2 RNA guide
aagcguugacgauaaacauug

SEQ ID NO: 8479 - RNA, 21 nt, Artificial Sequence
  LRRK2 RNA guide
aauguuuaucgucaacgcuuu

SEQ ID NO: 8480 - RNA, 21 nt, Artificial Sequence
  LRRK2 RNA guide
accuuucccaauguuuaucgu

SEQ ID NO: 8481 - RNA, 21 nt, Artificial Sequence
  LRRK2 RNA guide
acgaaaagcguugacgauaaa

SEQ ID NO: 8482 - RNA, 21 nt, Artificial Sequence
  LRRK2 RNA guide
acgauaaacauugggaaaggu

SEQ ID NO: 8483 - RNA, 21 nt, Artificial Sequence
  LRRK2 RNA guide
agcguugacgauaaacauugg

SEQ ID NO: 8484 - RNA, 21 nt, Artificial Sequence
  LRRK2 RNA guide
auaaacauugggaaaggugac

SEQ ID NO: 8485 - RNA, 21 nt, Artificial Sequence
  LRRK2 RNA guide
aucuggcugucaccuuuccca

SEQ ID NO: 8486 - RNA, 21 nt, Artificial Sequence
  LRRK2 RNA guide
auguacgaaaagcguugacga

SEQ ID NO: 8487 - RNA, 21 nt, Artificial Sequence
  LRRK2 RNA guide
auguuuaucgucaacgcuuuu

SEQ ID NO: 8488 - RNA, 21 nt, Artificial Sequence
  LRRK2 RNA guide
caauguuuaucgucaacgcuu

SEQ ID NO: 8489 - RNA, 21 nt, Artificial Sequence
  LRRK2 RNA guide
caccuuucccaauguuuaucg

SEQ ID NO: 8490 - RNA, 21 nt, Artificial Sequence
  LRRK2 RNA guide
ccaauguuuaucgucaacgcu

SEQ ID NO: 8491 - RNA, 21 nt, Artificial Sequence
  LRRK2 RNA guide
cccaauguuuaucgucaacgc

SEQ ID NO: 8492 - RNA, 21 nt, Artificial Sequence
  LRRK2 RNA guide
ccuuucccaauguuuaucguc

SEQ ID NO: 8493 - RNA, 21 nt, Artificial Sequence
  LRRK2 RNA guide
cgaaaagcguugacgauaaac

SEQ ID NO: 8494 - RNA, 21 nt, Artificial Sequence
  LRRK2 RNA guide
cgauaaacauugggaaaggug

SEQ ID NO: 8495 - RNA, 21 nt, Artificial Sequence
  LRRK2 RNA guide
cguugacgauaaacauuggga

SEQ ID NO: 8496 - RNA, 21 nt, Artificial Sequence
  LRRK2 RNA guide
cuggcugucaccuuucccaau

SEQ ID NO: 8497 - RNA, 21 nt, Artificial Sequence
  LRRK2 RNA guide
cugucaccuuucccaauguuu

SEQ ID NO: 8498 - RNA, 21 nt, Artificial Sequence
  LRRK2 RNA guide
cuuucccaauguuuaucguca

SEQ ID NO: 8499 - RNA, 21 nt, Artificial Sequence
  LRRK2 RNA guide
gaaaagcguugacgauaaaca

SEQ ID NO: 8500 - RNA, 21 nt, Artificial Sequence
  LRRK2 RNA guide
gacgauaaacauugggaaagg

SEQ ID NO: 8501 - RNA, 21 nt, Artificial Sequence
  LRRK2 RNA guide
gauaaacauugggaaagguga

SEQ ID NO: 8502 - RNA, 21 nt, Artificial Sequence
  LRRK2 RNA guide
gaucuggcugucaccuuuccc

SEQ ID NO: 8503 - RNA, 21 nt, Artificial Sequence
  LRRK2 RNA guide
gauguacgaaaagcguugacg

SEQ ID NO: 8504 - RNA, 21 nt, Artificial Sequence
  LRRK2 RNA guide
gcguugacgauaaacauuggg

SEQ ID NO: 8505 - RNA, 21 nt, Artificial Sequence
  LRRK2 RNA guide
gcugucaccuuucccaauguu

SEQ ID NO: 8506 - RNA, 21 nt, Artificial Sequence
  LRRK2 RNA guide
ggcugucaccuuucccaaugu

SEQ ID NO: 8507 - RNA, 21 nt, Artificial Sequence
  LRRK2 RNA guide
guacgaaaagcguugacgaua

SEQ ID NO: 8508 - RNA, 21 nt, Artificial Sequence
  LRRK2 RNA guide
gucaccuuucccaauguuuau

SEQ ID NO: 8509 - RNA, 21 nt, Artificial Sequence
  LRRK2 RNA guide
guugacgauaaacauugggaa

SEQ ID NO: 8510 - RNA, 21 nt, Artificial Sequence
  LRRK2 RNA guide
guuuaucgucaacgcuuuucg

SEQ ID NO: 8511 - RNA, 21 nt, Artificial Sequence
  LRRK2 RNA guide
uaaacauugggaaaggugaca

SEQ ID NO: 8512 - RNA, 21 nt, Artificial Sequence
  LRRK2 RNA guide
uacgaaaagcguugacgauaa

SEQ ID NO: 8513 - RNA, 21 nt, Artificial Sequence
  LRRK2 RNA guide
ucaccuuucccaauguuuauc

SEQ ID NO: 8514 - RNA, 21 nt, Artificial Sequence
  LRRK2 RNA guide
ucccaauguuuaucgucaacg

SEQ ID NO: 8515 - RNA, 21 nt, Artificial Sequence
  LRRK2 RNA guide
ucuggcugucaccuuucccaa

SEQ ID NO: 8516 - RNA, 21 nt, Artificial Sequence
  LRRK2 RNA guide
ugacgauaaacauugggaaag

SEQ ID NO: 8517 - RNA, 21 nt, Artificial Sequence
  LRRK2 RNA guide
uggcugucaccuuucccaaug

SEQ ID NO: 8518 - RNA, 21 nt, Artificial Sequence
  LRRK2 RNA guide
uguacgaaaagcguugacgau

SEQ ID NO: 8519 - RNA, 21 nt, Artificial Sequence
  LRRK2 RNA guide
ugucaccuuucccaauguuua

SEQ ID NO: 8520 - RNA, 21 nt, Artificial Sequence
  LRRK2 RNA guide
uguuuaucgucaacgcuuuuc

SEQ ID NO: 8521 - RNA, 21 nt, Artificial Sequence
  LRRK2 RNA guide
uucccaauguuuaucgucaac

SEQ ID NO: 8522 - RNA, 21 nt, Artificial Sequence
  LRRK2 RNA guide
uugacgauaaacauugggaaa

SEQ ID NO: 8523 - RNA, 21 nt, Artificial Sequence
  LRRK2 RNA guide
uuucccaauguuuaucgucaa

SEQ ID NO: 8524 - RNA, 22 nt, Artificial Sequence
  LRRK2 RNA guide
aaaagcguugacgauaaacauu

SEQ ID NO: 8525 - RNA, 22 nt, Artificial Sequence
  LRRK2 RNA guide
aaacauugggaaaggugacagc

SEQ ID NO: 8526 - RNA, 22 nt, Artificial Sequence
  LRRK2 RNA guide
aaagcguugacgauaaacauug

SEQ ID NO: 8527 - RNA, 22 nt, Artificial Sequence
  LRRK2 RNA guide
aacauugggaaaggugacagcc

SEQ ID NO: 8528 - RNA, 22 nt, Artificial Sequence
  LRRK2 RNA guide
aagcguugacgauaaacauugg

SEQ ID NO: 8529 - RNA, 22 nt, Artificial Sequence
  LRRK2 RNA guide
aauguuuaucgucaacgcuuuu

SEQ ID NO: 8530 - RNA, 22 nt, Artificial Sequence
  LRRK2 RNA guide
accuuucccaauguuuaucguc

SEQ ID NO: 8531 - RNA, 22 nt, Artificial Sequence
  LRRK2 RNA guide
acgaaaagcguugacgauaaac

SEQ ID NO: 8532 - RNA, 22 nt, Artificial Sequence
  LRRK2 RNA guide
acgauaaacauugggaaaggug

SEQ ID NO: 8533 - RNA, 22 nt, Artificial Sequence
  LRRK2 RNA guide
agauguacgaaaagcguugacg

SEQ ID NO: 8534 - RNA, 22 nt, Artificial Sequence
  LRRK2 RNA guide
agcguugacgauaaacauuggg

SEQ ID NO: 8535 - RNA, 22 nt, Artificial Sequence
  LRRK2 RNA guide
auaaacauugggaaaggugaca

SEQ ID NO: 8536 - RNA, 22 nt, Artificial Sequence
  LRRK2 RNA guide
aucuggcugucaccuuucccaa

SEQ ID NO: 8537 - RNA, 22 nt, Artificial Sequence
  LRRK2 RNA guide
auguacgaaaagcguugacgau

SEQ ID NO: 8538 - RNA, 22 nt, Artificial Sequence
  LRRK2 RNA guide
auguuuaucgucaacgcuuuuc

SEQ ID NO: 8539 - RNA, 22 nt, Artificial Sequence
  LRRK2 RNA guide
caauguuuaucgucaacgcuuu

SEQ ID NO: 8540 - RNA, 22 nt, Artificial Sequence
  LRRK2 RNA guide
caccuuucccaauguuuaucgu

SEQ ID NO: 8541 - RNA, 22 nt, Artificial Sequence
  LRRK2 RNA guide
ccaauguuuaucgucaacgcuu

SEQ ID NO: 8542 - RNA, 22 nt, Artificial Sequence
  LRRK2 RNA guide
cccaauguuuaucgucaacgcu

SEQ ID NO: 8543 - RNA, 22 nt, Artificial Sequence
  LRRK2 RNA guide
ccuuucccaauguuuaucguca

SEQ ID NO: 8544 - RNA, 22 nt, Artificial Sequence
  LRRK2 RNA guide
cgaaaagcguugacgauaaaca

SEQ ID NO: 8545 - RNA, 22 nt, Artificial Sequence
  LRRK2 RNA guide
cgauaaacauugggaaagguga

SEQ ID NO: 8546 - RNA, 22 nt, Artificial Sequence
  LRRK2 RNA guide
cguugacgauaaacauugggaa

SEQ ID NO: 8547 - RNA, 22 nt, Artificial Sequence
  LRRK2 RNA guide
cuggcugucaccuuucccaaug

SEQ ID NO: 8548 - RNA, 22 nt, Artificial Sequence
  LRRK2 RNA guide
cugucaccuuucccaauguuua

SEQ ID NO: 8549 - RNA, 22 nt, Artificial Sequence
  LRRK2 RNA guide
cuuucccaauguuuaucgucaa

SEQ ID NO: 8550 - RNA, 22 nt, Artificial Sequence
  LRRK2 RNA guide
gaaaagcguugacgauaaacau

SEQ ID NO: 8551 - RNA, 22 nt, Artificial Sequence
  LRRK2 RNA guide
gacgauaaacauugggaaaggu

SEQ ID NO: 8552 - RNA, 22 nt, Artificial Sequence
  LRRK2 RNA guide
gauaaacauugggaaaggugac

SEQ ID NO: 8553 - RNA, 22 nt, Artificial Sequence
  LRRK2 RNA guide
gaucuggcugucaccuuuccca

SEQ ID NO: 8554 - RNA, 22 nt, Artificial Sequence
  LRRK2 RNA guide
gauguacgaaaagcguugacga

SEQ ID NO: 8555 - RNA, 22 nt, Artificial Sequence
  LRRK2 RNA guide
gcguugacgauaaacauuggga

SEQ ID NO: 8556 - RNA, 22 nt, Artificial Sequence
  LRRK2 RNA guide
gcugucaccuuucccaauguuu

SEQ ID NO: 8557 - RNA, 22 nt, Artificial Sequence
  LRRK2 RNA guide
ggcugucaccuuucccaauguu

SEQ ID NO: 8558 - RNA, 22 nt, Artificial Sequence
  LRRK2 RNA guide
guacgaaaagcguugacgauaa

SEQ ID NO: 8559 - RNA, 22 nt, Artificial Sequence
  LRRK2 RNA guide
gucaccuuucccaauguuuauc

SEQ ID NO: 8560 - RNA, 22 nt, Artificial Sequence
  LRRK2 RNA guide
guugacgauaaacauugggaaa

SEQ ID NO: 8561 - RNA, 22 nt, Artificial Sequence
  LRRK2 RNA guide
guuuaucgucaacgcuuuucgu

SEQ ID NO: 8562 - RNA, 22 nt, Artificial Sequence
  LRRK2 RNA guide
uaaacauugggaaaggugacag

SEQ ID NO: 8563 - RNA, 22 nt, Artificial Sequence
  LRRK2 RNA guide
uacgaaaagcguugacgauaaa

SEQ ID NO: 8564 - RNA, 22 nt, Artificial Sequence
  LRRK2 RNA guide
ucaccuuucccaauguuuaucg

SEQ ID NO: 8565 - RNA, 22 nt, Artificial Sequence
  LRRK2 RNA guide
ucccaauguuuaucgucaacgc

SEQ ID NO: 8566 - RNA, 22 nt, Artificial Sequence
  LRRK2 RNA guide
ucuggcugucaccuuucccaau

SEQ ID NO: 8567 - RNA, 22 nt, Artificial Sequence
  LRRK2 RNA guide
ugacgauaaacauugggaaagg

SEQ ID NO: 8568 - RNA, 22 nt, Artificial Sequence
  LRRK2 RNA guide
ugaucuggcugucaccuuuccc

SEQ ID NO: 8569 - RNA, 22 nt, Artificial Sequence
  LRRK2 RNA guide
uggcugucaccuuucccaaugu

SEQ ID NO: 8570 - RNA, 22 nt, Artificial Sequence
  LRRK2 RNA guide
uguacgaaaagcguugacgaua

SEQ ID NO: 8571 - RNA, 22 nt, Artificial Sequence
  LRRK2 RNA guide
ugucaccuuucccaauguuuau

SEQ ID NO: 8572 - RNA, 22 nt, Artificial Sequence
  LRRK2 RNA guide
uguuuaucgucaacgcuuuucg

SEQ ID NO: 8573 - RNA, 22 nt, Artificial Sequence
  LRRK2 RNA guide
uucccaauguuuaucgucaacg

SEQ ID NO: 8574 - RNA, 22 nt, Artificial Sequence
  LRRK2 RNA guide
uugacgauaaacauugggaaag

SEQ ID NO: 8575 - RNA, 22 nt, Artificial Sequence
  LRRK2 RNA guide
uuucccaauguuuaucgucaac

SEQ ID NO: 8576 - RNA, 20 nt, Artificial Sequence
  LRRK2 RNA guide
aaaggugacagacagaucau

SEQ ID NO: 8577 - RNA, 20 nt, Artificial Sequence
  LRRK2 RNA guide
aagagcaagcugaugaucug

SEQ ID NO: 8578 - RNA, 20 nt, Artificial Sequence
  LRRK2 RNA guide
aagcauugggaaaggugaca

SEQ ID NO: 8579 - RNA, 20 nt, Artificial Sequence
  LRRK2 RNA guide
aagcugaugaucugucuguc

SEQ ID NO: 8580 - RNA, 20 nt, Artificial Sequence
  LRRK2 RNA guide
aaggugacagacagaucauc

SEQ ID NO: 8581 - RNA, 20 nt, Artificial Sequence
  LRRK2 RNA guide
acagacagaucaucagcuug

SEQ ID NO: 8582 - RNA, 20 nt, Artificial Sequence
  LRRK2 RNA guide
agacagaucaucagcuugcu

SEQ ID NO: 8583 - RNA, 20 nt, Artificial Sequence
  LRRK2 RNA guide
agagcaagcugaugaucugu

SEQ ID NO: 8584 - RNA, 20 nt, Artificial Sequence
  LRRK2 RNA guide
agcaagcugaugaucugucu

SEQ ID NO: 8585 - RNA, 20 nt, Artificial Sequence
  LRRK2 RNA guide
agcauugggaaaggugacag

SEQ ID NO: 8586 - RNA, 20 nt, Artificial Sequence
  LRRK2 RNA guide
agcugaugaucugucuguca

SEQ ID NO: 8587 - RNA, 20 nt, Artificial Sequence
  LRRK2 RNA guide
aggugacagacagaucauca

SEQ ID NO: 8588 - RNA, 20 nt, Artificial Sequence
  LRRK2 RNA guide
auaagcauugggaaagguga

SEQ ID NO: 8589 - RNA, 20 nt, Artificial Sequence
  LRRK2 RNA guide
aucugucugucaccuuuccc

SEQ ID NO: 8590 - RNA, 20 nt, Artificial Sequence
  LRRK2 RNA guide
augaucugucugucaccuuu

SEQ ID NO: 8591 - RNA, 20 nt, Artificial Sequence
  LRRK2 RNA guide
auugggaaaggugacagaca

SEQ ID NO: 8592 - RNA, 20 nt, Artificial Sequence
  LRRK2 RNA guide
caagcugaugaucugucugu

SEQ ID NO: 8593 - RNA, 20 nt, Artificial Sequence
  LRRK2 RNA guide
cagacagaucaucagcuugc

SEQ ID NO: 8594 - RNA, 20 nt, Artificial Sequence
  LRRK2 RNA guide
cauugggaaaggugacagac

SEQ ID NO: 8595 - RNA, 20 nt, Artificial Sequence
  LRRK2 RNA guide
cugaugaucugucugucacc

SEQ ID NO: 8596 - RNA, 20 nt, Artificial Sequence
  LRRK2 RNA guide
cugucugucaccuuucccaa

SEQ ID NO: 8597 - RNA, 20 nt, Artificial Sequence
  LRRK2 RNA guide
cuuaagagcaagcugaugau

SEQ ID NO: 8598 - RNA, 20 nt, Artificial Sequence
  LRRK2 RNA guide
gaaaggugacagacagauca

SEQ ID NO: 8599 - RNA, 20 nt, Artificial Sequence
  LRRK2 RNA guide
gacagacagaucaucagcuu

SEQ ID NO: 8600 - RNA, 20 nt, Artificial Sequence
  LRRK2 RNA guide
gacagaucaucagcuugcuc

SEQ ID NO: 8601 - RNA, 20 nt, Artificial Sequence
  LRRK2 RNA guide
gagcaagcugaugaucuguc

SEQ ID NO: 8602 - RNA, 20 nt, Artificial Sequence
  LRRK2 RNA guide
gauaagcauugggaaaggug

SEQ ID NO: 8603 - RNA, 20 nt, Artificial Sequence
  LRRK2 RNA guide
gaucugucugucaccuuucc

SEQ ID NO: 8604 - RNA, 20 nt, Artificial Sequence
  LRRK2 RNA guide
gaugaucugucugucaccuu

SEQ ID NO: 8605 - RNA, 20 nt, Artificial Sequence
  LRRK2 RNA guide
gcaagcugaugaucugucug

SEQ ID NO: 8606 - RNA, 20 nt, Artificial Sequence
  LRRK2 RNA guide
gcauugggaaaggugacaga

SEQ ID NO: 8607 - RNA, 20 nt, Artificial Sequence
  LRRK2 RNA guide
gcugaugaucugucugucac

SEQ ID NO: 8608 - RNA, 20 nt, Artificial Sequence
  LRRK2 RNA guide
ggaaaggugacagacagauc

SEQ ID NO: 8609 - RNA, 20 nt, Artificial Sequence
  LRRK2 RNA guide
gggaaaggugacagacagau

SEQ ID NO: 8610 - RNA, 20 nt, Artificial Sequence
  LRRK2 RNA guide
ggugacagacagaucaucag

SEQ ID NO: 8611 - RNA, 20 nt, Artificial Sequence
  LRRK2 RNA guide
gucugucaccuuucccaaug

SEQ ID NO: 8612 - RNA, 20 nt, Artificial Sequence
  LRRK2 RNA guide
gugacagacagaucaucagc

SEQ ID NO: 8613 - RNA, 20 nt, Artificial Sequence
  LRRK2 RNA guide
uaagagcaagcugaugaucu

SEQ ID NO: 8614 - RNA, 20 nt, Artificial Sequence
  LRRK2 RNA guide
uaagcauugggaaaggugac

SEQ ID NO: 8615 - RNA, 20 nt, Artificial Sequence
  LRRK2 RNA guide
ucugucugucaccuuuccca

SEQ ID NO: 8616 - RNA, 20 nt, Artificial Sequence
  LRRK2 RNA guide
ugacagacagaucaucagcu

SEQ ID NO: 8617 - RNA, 20 nt, Artificial Sequence
  LRRK2 RNA guide
ugaucugucugucaccuuuc

SEQ ID NO: 8618 - RNA, 20 nt, Artificial Sequence
  LRRK2 RNA guide
ugaugaucugucugucaccu

SEQ ID NO: 8619 - RNA, 20 nt, Artificial Sequence
  LRRK2 RNA guide
ugggaaaggugacagacaga

SEQ ID NO: 8620 - RNA, 20 nt, Artificial Sequence
  LRRK2 RNA guide
ugucugucaccuuucccaau

SEQ ID NO: 8621 - RNA, 20 nt, Artificial Sequence
  LRRK2 RNA guide
uuaagagcaagcugaugauc

SEQ ID NO: 8622 - RNA, 20 nt, Artificial Sequence
  LRRK2 RNA guide
uugggaaaggugacagacag

SEQ ID NO: 8623 - RNA, 21 nt, Artificial Sequence
  LRRK2 RNA guide
aaaggugacagacagaucauc

SEQ ID NO: 8624 - RNA, 21 nt, Artificial Sequence
  LRRK2 RNA guide
aagagcaagcugaugaucugu

SEQ ID NO: 8625 - RNA, 21 nt, Artificial Sequence
  LRRK2 RNA guide
aagcauugggaaaggugacag

SEQ ID NO: 8626 - RNA, 21 nt, Artificial Sequence
  LRRK2 RNA guide
aagcugaugaucugucuguca

SEQ ID NO: 8627 - RNA, 21 nt, Artificial Sequence
  LRRK2 RNA guide
aaggugacagacagaucauca

SEQ ID NO: 8628 - RNA, 21 nt, Artificial Sequence
  LRRK2 RNA guide
acagacagaucaucagcuugc

SEQ ID NO: 8629 - RNA, 21 nt, Artificial Sequence
  LRRK2 RNA guide
agacagaucaucagcuugcuc

SEQ ID NO: 8630 - RNA, 21 nt, Artificial Sequence
  LRRK2 RNA guide
agagcaagcugaugaucuguc

SEQ ID NO: 8631 - RNA, 21 nt, Artificial Sequence
  LRRK2 RNA guide
agcaagcugaugaucugucug

SEQ ID NO: 8632 - RNA, 21 nt, Artificial Sequence
  LRRK2 RNA guide
agcauugggaaaggugacaga

SEQ ID NO: 8633 - RNA, 21 nt, Artificial Sequence
  LRRK2 RNA guide
agcugaugaucugucugucac

SEQ ID NO: 8634 - RNA, 21 nt, Artificial Sequence
  LRRK2 RNA guide
aggugacagacagaucaucag

SEQ ID NO: 8635 - RNA, 21 nt, Artificial Sequence
  LRRK2 RNA guide
auaagcauugggaaaggugac

SEQ ID NO: 8636 - RNA, 21 nt, Artificial Sequence
  LRRK2 RNA guide
aucugucugucaccuuuccca

SEQ ID NO: 8637 - RNA, 21 nt, Artificial Sequence
  LRRK2 RNA guide
augaucugucugucaccuuuc

SEQ ID NO: 8638 - RNA, 21 nt, Artificial Sequence
  LRRK2 RNA guide
auugggaaaggugacagacag

SEQ ID NO: 8639 - RNA, 21 nt, Artificial Sequence
  LRRK2 RNA guide
caagcugaugaucugucuguc

SEQ ID NO: 8640 - RNA, 21 nt, Artificial Sequence
  LRRK2 RNA guide
cagacagaucaucagcuugcu

SEQ ID NO: 8641 - RNA, 21 nt, Artificial Sequence
  LRRK2 RNA guide
cauugggaaaggugacagaca

SEQ ID NO: 8642 - RNA, 21 nt, Artificial Sequence
  LRRK2 RNA guide
ccuuaagagcaagcugaugau

SEQ ID NO: 8643 - RNA, 21 nt, Artificial Sequence
  LRRK2 RNA guide
cgauaagcauugggaaaggug

SEQ ID NO: 8644 - RNA, 21 nt, Artificial Sequence
  LRRK2 RNA guide
cugaugaucugucugucaccu

SEQ ID NO: 8645 - RNA, 21 nt, Artificial Sequence
  LRRK2 RNA guide
cugucugucaccuuucccaau

SEQ ID NO: 8646 - RNA, 21 nt, Artificial Sequence
  LRRK2 RNA guide
cuuaagagcaagcugaugauc

SEQ ID NO: 8647 - RNA, 21 nt, Artificial Sequence
  LRRK2 RNA guide
gaaaggugacagacagaucau

SEQ ID NO: 8648 - RNA, 21 nt, Artificial Sequence
  LRRK2 RNA guide
gacagacagaucaucagcuug

SEQ ID NO: 8649 - RNA, 21 nt, Artificial Sequence
  LRRK2 RNA guide
gacagaucaucagcuugcucu

SEQ ID NO: 8650 - RNA, 21 nt, Artificial Sequence
  LRRK2 RNA guide
gagcaagcugaugaucugucu

SEQ ID NO: 8651 - RNA, 21 nt, Artificial Sequence
  LRRK2 RNA guide
gauaagcauugggaaagguga

SEQ ID NO: 8652 - RNA, 21 nt, Artificial Sequence
  LRRK2 RNA guide
gaucugucugucaccuuuccc

SEQ ID NO: 8653 - RNA, 21 nt, Artificial Sequence
  LRRK2 RNA guide
gaugaucugucugucaccuuu

SEQ ID NO: 8654 - RNA, 21 nt, Artificial Sequence
  LRRK2 RNA guide
gcaagcugaugaucugucugu

SEQ ID NO: 8655 - RNA, 21 nt, Artificial Sequence
  LRRK2 RNA guide
gcauugggaaaggugacagac

SEQ ID NO: 8656 - RNA, 21 nt, Artificial Sequence
  LRRK2 RNA guide
gcugaugaucugucugucacc

SEQ ID NO: 8657 - RNA, 21 nt, Artificial Sequence
  LRRK2 RNA guide
ggaaaggugacagacagauca

SEQ ID NO: 8658 - RNA, 21 nt, Artificial Sequence
  LRRK2 RNA guide
gggaaaggugacagacagauc

SEQ ID NO: 8659 - RNA, 21 nt, Artificial Sequence
  LRRK2 RNA guide
ggugacagacagaucaucagc

SEQ ID NO: 8660 - RNA, 21 nt, Artificial Sequence
  LRRK2 RNA guide
gucugucaccuuucccaaugc

SEQ ID NO: 8661 - RNA, 21 nt, Artificial Sequence
  LRRK2 RNA guide
gugacagacagaucaucagcu

SEQ ID NO: 8662 - RNA, 21 nt, Artificial Sequence
  LRRK2 RNA guide
uaagagcaagcugaugaucug

SEQ ID NO: 8663 - RNA, 21 nt, Artificial Sequence
  LRRK2 RNA guide
uaagcauugggaaaggugaca

SEQ ID NO: 8664 - RNA, 21 nt, Artificial Sequence
  LRRK2 RNA guide
uccuuaagagcaagcugauga

SEQ ID NO: 8665 - RNA, 21 nt, Artificial Sequence
  LRRK2 RNA guide
ucugucugucaccuuucccaa

SEQ ID NO: 8666 - RNA, 21 nt, Artificial Sequence
  LRRK2 RNA guide
ugacagacagaucaucagcuu

SEQ ID NO: 8667 - RNA, 21 nt, Artificial Sequence
  LRRK2 RNA guide
ugaucugucugucaccuuucc

SEQ ID NO: 8668 - RNA, 21 nt, Artificial Sequence
  LRRK2 RNA guide
ugaugaucugucugucaccuu

SEQ ID NO: 8669 - RNA, 21 nt, Artificial Sequence
  LRRK2 RNA guide
ugggaaaggugacagacagau

SEQ ID NO: 8670 - RNA, 21 nt, Artificial Sequence
  LRRK2 RNA guide
ugucugucaccuuucccaaug

SEQ ID NO: 8671 - RNA, 21 nt, Artificial Sequence
  LRRK2 RNA guide
uuaagagcaagcugaugaucu

SEQ ID NO: 8672 - RNA, 21 nt, Artificial Sequence
  LRRK2 RNA guide
uugggaaaggugacagacaga

SEQ ID NO: 8673 - RNA, 22 nt, Artificial Sequence
  LRRK2 RNA guide
aaaggugacagacagaucauca

SEQ ID NO: 8674 - RNA, 22 nt, Artificial Sequence
  LRRK2 RNA guide
aagagcaagcugaugaucuguc

SEQ ID NO: 8675 - RNA, 22 nt, Artificial Sequence
  LRRK2 RNA guide
aagcauugggaaaggugacaga

SEQ ID NO: 8676 - RNA, 22 nt, Artificial Sequence
  LRRK2 RNA guide
aagcugaugaucugucugucac

SEQ ID NO: 8677 - RNA, 22 nt, Artificial Sequence
  LRRK2 RNA guide
aaggugacagacagaucaucag

SEQ ID NO: 8678 - RNA, 22 nt, Artificial Sequence
  LRRK2 RNA guide
acagacagaucaucagcuugcu

SEQ ID NO: 8679 - RNA, 22 nt, Artificial Sequence
  LRRK2 RNA guide
acgauaagcauugggaaaggug

SEQ ID NO: 8680 - RNA, 22 nt, Artificial Sequence
  LRRK2 RNA guide
agacagaucaucagcuugcucu

SEQ ID NO: 8681 - RNA, 22 nt, Artificial Sequence
  LRRK2 RNA guide
agagcaagcugaugaucugucu

SEQ ID NO: 8682 - RNA, 22 nt, Artificial Sequence
  LRRK2 RNA guide
agcaagcugaugaucugucugu

SEQ ID NO: 8683 - RNA, 22 nt, Artificial Sequence
  LRRK2 RNA guide
agcauugggaaaggugacagac

SEQ ID NO: 8684 - RNA, 22 nt, Artificial Sequence
  LRRK2 RNA guide
agcugaugaucugucugucacc

SEQ ID NO: 8685 - RNA, 22 nt, Artificial Sequence
  LRRK2 RNA guide
aggugacagacagaucaucagc

SEQ ID NO: 8686 - RNA, 22 nt, Artificial Sequence
  LRRK2 RNA guide
auaagcauugggaaaggugaca

SEQ ID NO: 8687 - RNA, 22 nt, Artificial Sequence
  LRRK2 RNA guide
aucugucugucaccuuucccaa

SEQ ID NO: 8688 - RNA, 22 nt, Artificial Sequence
  LRRK2 RNA guide
augaucugucugucaccuuucc

SEQ ID NO: 8689 - RNA, 22 nt, Artificial Sequence
  LRRK2 RNA guide
auugggaaaggugacagacaga

SEQ ID NO: 8690 - RNA, 22 nt, Artificial Sequence
  LRRK2 RNA guide
caagcugaugaucugucuguca

SEQ ID NO: 8691 - RNA, 22 nt, Artificial Sequence
  LRRK2 RNA guide
cagacagaucaucagcuugcuc

SEQ ID NO: 8692 - RNA, 22 nt, Artificial Sequence
  LRRK2 RNA guide
cauugggaaaggugacagacag

SEQ ID NO: 8693 - RNA, 22 nt, Artificial Sequence
  LRRK2 RNA guide
ccuuaagagcaagcugaugauc

SEQ ID NO: 8694 - RNA, 22 nt, Artificial Sequence
  LRRK2 RNA guide
cgauaagcauugggaaagguga

SEQ ID NO: 8695 - RNA, 22 nt, Artificial Sequence
  LRRK2 RNA guide
cuccuuaagagcaagcugauga

SEQ ID NO: 8696 - RNA, 22 nt, Artificial Sequence
  LRRK2 RNA guide
cugaugaucugucugucaccuu

SEQ ID NO: 8697 - RNA, 22 nt, Artificial Sequence
  LRRK2 RNA guide
cugucugucaccuuucccaaug

SEQ ID NO: 8698 - RNA, 22 nt, Artificial Sequence
  LRRK2 RNA guide
cuuaagagcaagcugaugaucu

SEQ ID NO: 8699 - RNA, 22 nt, Artificial Sequence
  LRRK2 RNA guide
gaaaggugacagacagaucauc

SEQ ID NO: 8700 - RNA, 22 nt, Artificial Sequence
  LRRK2 RNA guide
gacagacagaucaucagcuugc

SEQ ID NO: 8701 - RNA, 22 nt, Artificial Sequence
  LRRK2 RNA guide
gacagaucaucagcuugcucuu

SEQ ID NO: 8702 - RNA, 22 nt, Artificial Sequence
  LRRK2 RNA guide
gagcaagcugaugaucugucug

SEQ ID NO: 8703 - RNA, 22 nt, Artificial Sequence
  LRRK2 RNA guide
gauaagcauugggaaaggugac

SEQ ID NO: 8704 - RNA, 22 nt, Artificial Sequence
  LRRK2 RNA guide
gaucugucugucaccuuuccca

SEQ ID NO: 8705 - RNA, 22 nt, Artificial Sequence
  LRRK2 RNA guide
gaugaucugucugucaccuuuc

SEQ ID NO: 8706 - RNA, 22 nt, Artificial Sequence
  LRRK2 RNA guide
gcaagcugaugaucugucuguc

SEQ ID NO: 8707 - RNA, 22 nt, Artificial Sequence
  LRRK2 RNA guide
gcauugggaaaggugacagaca

SEQ ID NO: 8708 - RNA, 22 nt, Artificial Sequence
  LRRK2 RNA guide
gcugaugaucugucugucaccu

SEQ ID NO: 8709 - RNA, 22 nt, Artificial Sequence
  LRRK2 RNA guide
ggaaaggugacagacagaucau

SEQ ID NO: 8710 - RNA, 22 nt, Artificial Sequence
  LRRK2 RNA guide
gggaaaggugacagacagauca

SEQ ID NO: 8711 - RNA, 22 nt, Artificial Sequence
  LRRK2 RNA guide
ggugacagacagaucaucagcu

SEQ ID NO: 8712 - RNA, 22 nt, Artificial Sequence
  LRRK2 RNA guide
gucugucaccuuucccaaugcu

SEQ ID NO: 8713 - RNA, 22 nt, Artificial Sequence
  LRRK2 RNA guide
gugacagacagaucaucagcuu

SEQ ID NO: 8714 - RNA, 22 nt, Artificial Sequence
  LRRK2 RNA guide
uaagagcaagcugaugaucugu

SEQ ID NO: 8715 - RNA, 22 nt, Artificial Sequence
  LRRK2 RNA guide
uaagcauugggaaaggugacag

SEQ ID NO: 8716 - RNA, 22 nt, Artificial Sequence
  LRRK2 RNA guide
uccuuaagagcaagcugaugau

SEQ ID NO: 8717 - RNA, 22 nt, Artificial Sequence
  LRRK2 RNA guide
ucugucugucaccuuucccaau

SEQ ID NO: 8718 - RNA, 22 nt, Artificial Sequence
  LRRK2 RNA guide
ugacagacagaucaucagcuug

SEQ ID NO: 8719 - RNA, 22 nt, Artificial Sequence
  LRRK2 RNA guide
ugaucugucugucaccuuuccc

SEQ ID NO: 8720 - RNA, 22 nt, Artificial Sequence
  LRRK2 RNA guide
ugaugaucugucugucaccuuu

SEQ ID NO: 8721 - RNA, 22 nt, Artificial Sequence
  LRRK2 RNA guide
ugggaaaggugacagacagauc

SEQ ID NO: 8722 - RNA, 22 nt, Artificial Sequence
  LRRK2 RNA guide
ugucugucaccuuucccaaugc

SEQ ID NO: 8723 - RNA, 22 nt, Artificial Sequence
  LRRK2 RNA guide
uuaagagcaagcugaugaucug

SEQ ID NO: 8724 - RNA, 22 nt, Artificial Sequence
  LRRK2 RNA guide
uugggaaaggugacagacagau

SEQ ID NO: 8725 - RNA, 20 nt, Artificial Sequence
  LRRK2 RNA guide
aaaggugacagccagaccau

SEQ ID NO: 8726 - RNA, 20 nt, Artificial Sequence
  LRRK2 RNA guide
aagagcaagcugauggucug

SEQ ID NO: 8727 - RNA, 20 nt, Artificial Sequence
  LRRK2 RNA guide
aagcugauggucuggcuguc

SEQ ID NO: 8728 - RNA, 20 nt, Artificial Sequence
  LRRK2 RNA guide
aaggugacagccagaccauc

SEQ ID NO: 8729 - RNA, 20 nt, Artificial Sequence
  LRRK2 RNA guide
acagccagaccaucagcuug

SEQ ID NO: 8730 - RNA, 20 nt, Artificial Sequence
  LRRK2 RNA guide
accaucagcuugcucuuaag

SEQ ID NO: 8731 - RNA, 20 nt, Artificial Sequence
  LRRK2 RNA guide
agaccaucagcuugcucuua

SEQ ID NO: 8732 - RNA, 20 nt, Artificial Sequence
  LRRK2 RNA guide
agagcaagcugauggucugg

SEQ ID NO: 8733 - RNA, 20 nt, Artificial Sequence
  LRRK2 RNA guide
agcaagcugauggucuggcu

SEQ ID NO: 8734 - RNA, 20 nt, Artificial Sequence
  LRRK2 RNA guide
agccagaccaucagcuugcu

SEQ ID NO: 8735 - RNA, 20 nt, Artificial Sequence
  LRRK2 RNA guide
agccuccuuaagagcaagcu

SEQ ID NO: 8736 - RNA, 20 nt, Artificial Sequence
  LRRK2 RNA guide
agcugauggucuggcuguca

SEQ ID NO: 8737 - RNA, 20 nt, Artificial Sequence
  LRRK2 RNA guide
aggugacagccagaccauca

SEQ ID NO: 8738 - RNA, 20 nt, Artificial Sequence
  LRRK2 RNA guide
auggucuggcugucaccuuu

SEQ ID NO: 8739 - RNA, 20 nt, Artificial Sequence
  LRRK2 RNA guide
auugggaaaggugacagcca

SEQ ID NO: 8740 - RNA, 20 nt, Artificial Sequence
  LRRK2 RNA guide
caagcugauggucuggcugu

SEQ ID NO: 8741 - RNA, 20 nt, Artificial Sequence
  LRRK2 RNA guide
cagaccaucagcuugcucuu

SEQ ID NO: 8742 - RNA, 20 nt, Artificial Sequence
  LRRK2 RNA guide
cagccagaccaucagcuugc

SEQ ID NO: 8743 - RNA, 20 nt, Artificial Sequence
  LRRK2 RNA guide
cauugggaaaggugacagcc

SEQ ID NO: 8744 - RNA, 20 nt, Artificial Sequence
  LRRK2 RNA guide
ccagaccaucagcuugcucu

SEQ ID NO: 8745 - RNA, 20 nt, Artificial Sequence
  LRRK2 RNA guide
ccuccuuaagagcaagcuga

SEQ ID NO: 8746 - RNA, 20 nt, Artificial Sequence
  LRRK2 RNA guide
ccuuaagagcaagcugaugg

SEQ ID NO: 8747 - RNA, 20 nt, Artificial Sequence
  LRRK2 RNA guide
cuccuuaagagcaagcugau

SEQ ID NO: 8748 - RNA, 20 nt, Artificial Sequence
  LRRK2 RNA guide
cugauggucuggcugucacc

SEQ ID NO: 8749 - RNA, 20 nt, Artificial Sequence
  LRRK2 RNA guide
cuuaagagcaagcugauggu

SEQ ID NO: 8750 - RNA, 20 nt, Artificial Sequence
  LRRK2 RNA guide
gaaaggugacagccagacca

SEQ ID NO: 8751 - RNA, 20 nt, Artificial Sequence
  LRRK2 RNA guide
gacagccagaccaucagcuu

SEQ ID NO: 8752 - RNA, 20 nt, Artificial Sequence
  LRRK2 RNA guide
gaccaucagcuugcucuuaa

SEQ ID NO: 8753 - RNA, 20 nt, Artificial Sequence
  LRRK2 RNA guide
gagcaagcugauggucuggc

SEQ ID NO: 8754 - RNA, 20 nt, Artificial Sequence
  LRRK2 RNA guide
gauggucuggcugucaccuu

SEQ ID NO: 8755 - RNA, 20 nt, Artificial Sequence
  LRRK2 RNA guide
gcaagcugauggucuggcug

SEQ ID NO: 8756 - RNA, 20 nt, Artificial Sequence
  LRRK2 RNA guide
gcauugggaaaggugacagc

SEQ ID NO: 8757 - RNA, 20 nt, Artificial Sequence
  LRRK2 RNA guide
gccagaccaucagcuugcuc

SEQ ID NO: 8758 - RNA, 20 nt, Artificial Sequence
  LRRK2 RNA guide
gccuccuuaagagcaagcug

SEQ ID NO: 8759 - RNA, 20 nt, Artificial Sequence
  LRRK2 RNA guide
gcugauggucuggcugucac

SEQ ID NO: 8760 - RNA, 20 nt, Artificial Sequence
  LRRK2 RNA guide
ggaaaggugacagccagacc

SEQ ID NO: 8761 - RNA, 20 nt, Artificial Sequence
  LRRK2 RNA guide
gggaaaggugacagccagac

SEQ ID NO: 8762 - RNA, 20 nt, Artificial Sequence
  LRRK2 RNA guide
ggucuggcugucaccuuucc

SEQ ID NO: 8763 - RNA, 20 nt, Artificial Sequence
  LRRK2 RNA guide
ggugacagccagaccaucag

SEQ ID NO: 8764 - RNA, 20 nt, Artificial Sequence
  LRRK2 RNA guide
gugacagccagaccaucagc

SEQ ID NO: 8765 - RNA, 20 nt, Artificial Sequence
  LRRK2 RNA guide
uaagagcaagcugauggucu

SEQ ID NO: 8766 - RNA, 20 nt, Artificial Sequence
  LRRK2 RNA guide
uccuuaagagcaagcugaug

SEQ ID NO: 8767 - RNA, 20 nt, Artificial Sequence
  LRRK2 RNA guide
ugacagccagaccaucagcu

SEQ ID NO: 8768 - RNA, 20 nt, Artificial Sequence
  LRRK2 RNA guide
ugauggucuggcugucaccu

SEQ ID NO: 8769 - RNA, 20 nt, Artificial Sequence
  LRRK2 RNA guide
ugggaaaggugacagccaga

SEQ ID NO: 8770 - RNA, 20 nt, Artificial Sequence
  LRRK2 RNA guide
uggucuggcugucaccuuuc

SEQ ID NO: 8771 - RNA, 20 nt, Artificial Sequence
  LRRK2 RNA guide
uuaagagcaagcugaugguc

SEQ ID NO: 8772 - RNA, 20 nt, Artificial Sequence
  LRRK2 RNA guide
uugggaaaggugacagccag

SEQ ID NO: 8773 - RNA, 21 nt, Artificial Sequence
  LRRK2 RNA guide
aaaggugacagccagaccauc

SEQ ID NO: 8774 - RNA, 21 nt, Artificial Sequence
  LRRK2 RNA guide
aagagcaagcugauggucugg

SEQ ID NO: 8775 - RNA, 21 nt, Artificial Sequence
  LRRK2 RNA guide
aagcugauggucuggcuguca

SEQ ID NO: 8776 - RNA, 21 nt, Artificial Sequence
  LRRK2 RNA guide
aaggugacagccagaccauca

SEQ ID NO: 8777 - RNA, 21 nt, Artificial Sequence
  LRRK2 RNA guide
acagccagaccaucagcuugc

SEQ ID NO: 8778 - RNA, 21 nt, Artificial Sequence
  LRRK2 RNA guide
accaucagcuugcucuuaagg

SEQ ID NO: 8779 - RNA, 21 nt, Artificial Sequence
  LRRK2 RNA guide
agaccaucagcuugcucuuaa

SEQ ID NO: 8780 - RNA, 21 nt, Artificial Sequence
  LRRK2 RNA guide
agagcaagcugauggucuggc

SEQ ID NO: 8781 - RNA, 21 nt, Artificial Sequence
  LRRK2 RNA guide
agcaagcugauggucuggcug

SEQ ID NO: 8782 - RNA, 21 nt, Artificial Sequence
  LRRK2 RNA guide
agcauugggaaaggugacagc

SEQ ID NO: 8783 - RNA, 21 nt, Artificial Sequence
  LRRK2 RNA guide
agccagaccaucagcuugcuc

SEQ ID NO: 8784 - RNA, 21 nt, Artificial Sequence
  LRRK2 RNA guide
agccuccuuaagagcaagcug

SEQ ID NO: 8785 - RNA, 21 nt, Artificial Sequence
  LRRK2 RNA guide
agcugauggucuggcugucac

SEQ ID NO: 8786 - RNA, 21 nt, Artificial Sequence
  LRRK2 RNA guide
aggugacagccagaccaucag

SEQ ID NO: 8787 - RNA, 21 nt, Artificial Sequence
  LRRK2 RNA guide
auggucuggcugucaccuuuc

SEQ ID NO: 8788 - RNA, 21 nt, Artificial Sequence
  LRRK2 RNA guide
auugggaaaggugacagccag

SEQ ID NO: 8789 - RNA, 21 nt, Artificial Sequence
  LRRK2 RNA guide
caagcugauggucuggcuguc

SEQ ID NO: 8790 - RNA, 21 nt, Artificial Sequence
  LRRK2 RNA guide
cagaccaucagcuugcucuua

SEQ ID NO: 8791 - RNA, 21 nt, Artificial Sequence
  LRRK2 RNA guide
cagccagaccaucagcuugcu

SEQ ID NO: 8792 - RNA, 21 nt, Artificial Sequence
  LRRK2 RNA guide
cagccuccuuaagagcaagcu

SEQ ID NO: 8793 - RNA, 21 nt, Artificial Sequence
  LRRK2 RNA guide
cauugggaaaggugacagcca

SEQ ID NO: 8794 - RNA, 21 nt, Artificial Sequence
  LRRK2 RNA guide
ccagaccaucagcuugcucuu

SEQ ID NO: 8795 - RNA, 21 nt, Artificial Sequence
  LRRK2 RNA guide
ccuccuuaagagcaagcugau

SEQ ID NO: 8796 - RNA, 21 nt, Artificial Sequence
  LRRK2 RNA guide
ccuuaagagcaagcugauggu

SEQ ID NO: 8797 - RNA, 21 nt, Artificial Sequence
  LRRK2 RNA guide
cuccuuaagagcaagcugaug

SEQ ID NO: 8798 - RNA, 21 nt, Artificial Sequence
  LRRK2 RNA guide
cugauggucuggcugucaccu

SEQ ID NO: 8799 - RNA, 21 nt, Artificial Sequence
  LRRK2 RNA guide
cuuaagagcaagcugaugguc

SEQ ID NO: 8800 - RNA, 21 nt, Artificial Sequence
  LRRK2 RNA guide
gaaaggugacagccagaccau

SEQ ID NO: 8801 - RNA, 21 nt, Artificial Sequence
  LRRK2 RNA guide
gacagccagaccaucagcuug

SEQ ID NO: 8802 - RNA, 21 nt, Artificial Sequence
  LRRK2 RNA guide
gaccaucagcuugcucuuaag

SEQ ID NO: 8803 - RNA, 21 nt, Artificial Sequence
  LRRK2 RNA guide
gagcaagcugauggucuggcu

SEQ ID NO: 8804 - RNA, 21 nt, Artificial Sequence
  LRRK2 RNA guide
gauggucuggcugucaccuuu

SEQ ID NO: 8805 - RNA, 21 nt, Artificial Sequence
  LRRK2 RNA guide
gcaagcugauggucuggcugu

SEQ ID NO: 8806 - RNA, 21 nt, Artificial Sequence
  LRRK2 RNA guide
gcauugggaaaggugacagcc

SEQ ID NO: 8807 - RNA, 21 nt, Artificial Sequence
  LRRK2 RNA guide
gccagaccaucagcuugcucu

SEQ ID NO: 8808 - RNA, 21 nt, Artificial Sequence
  LRRK2 RNA guide
gccuccuuaagagcaagcuga

SEQ ID NO: 8809 - RNA, 21 nt, Artificial Sequence
  LRRK2 RNA guide
gcugauggucuggcugucacc

SEQ ID NO: 8810 - RNA, 21 nt, Artificial Sequence
  LRRK2 RNA guide
ggaaaggugacagccagacca

SEQ ID NO: 8811 - RNA, 21 nt, Artificial Sequence
  LRRK2 RNA guide
gggaaaggugacagccagacc

SEQ ID NO: 8812 - RNA, 21 nt, Artificial Sequence
  LRRK2 RNA guide
ggucuggcugucaccuuuccc

SEQ ID NO: 8813 - RNA, 21 nt, Artificial Sequence
  LRRK2 RNA guide
ggugacagccagaccaucagc

SEQ ID NO: 8814 - RNA, 21 nt, Artificial Sequence
  LRRK2 RNA guide
gugacagccagaccaucagcu

SEQ ID NO: 8815 - RNA, 21 nt, Artificial Sequence
  LRRK2 RNA guide
uaagagcaagcugauggucug

SEQ ID NO: 8816 - RNA, 21 nt, Artificial Sequence
  LRRK2 RNA guide
uccuuaagagcaagcugaugg

SEQ ID NO: 8817 - RNA, 21 nt, Artificial Sequence
  LRRK2 RNA guide
ugacagccagaccaucagcuu

SEQ ID NO: 8818 - RNA, 21 nt, Artificial Sequence
  LRRK2 RNA guide
ugauggucuggcugucaccuu

SEQ ID NO: 8819 - RNA, 21 nt, Artificial Sequence
  LRRK2 RNA guide
ugggaaaggugacagccagac

SEQ ID NO: 8820 - RNA, 21 nt, Artificial Sequence
  LRRK2 RNA guide
uggucuggcugucaccuuucc

SEQ ID NO: 8821 - RNA, 21 nt, Artificial Sequence
  LRRK2 RNA guide
uuaagagcaagcugauggucu

SEQ ID NO: 8822 - RNA, 21 nt, Artificial Sequence
  LRRK2 RNA guide
uugggaaaggugacagccaga

SEQ ID NO: 8823 - RNA, 22 nt, Artificial Sequence
  LRRK2 RNA guide
aaaggugacagccagaccauca

SEQ ID NO: 8824 - RNA, 22 nt, Artificial Sequence
  LRRK2 RNA guide
aagagcaagcugauggucuggc

SEQ ID NO: 8825 - RNA, 22 nt, Artificial Sequence
  LRRK2 RNA guide
aagcauugggaaaggugacagc

SEQ ID NO: 8826 - RNA, 22 nt, Artificial Sequence
  LRRK2 RNA guide
aagcugauggucuggcugucac

SEQ ID NO: 8827 - RNA, 22 nt, Artificial Sequence
  LRRK2 RNA guide
aaggugacagccagaccaucag

SEQ ID NO: 8828 - RNA, 22 nt, Artificial Sequence
  LRRK2 RNA guide
acagccagaccaucagcuugcu

SEQ ID NO: 8829 - RNA, 22 nt, Artificial Sequence
  LRRK2 RNA guide
accaucagcuugcucuuaagga

SEQ ID NO: 8830 - RNA, 22 nt, Artificial Sequence
  LRRK2 RNA guide
agaccaucagcuugcucuuaag

SEQ ID NO: 8831 - RNA, 22 nt, Artificial Sequence
  LRRK2 RNA guide
agagcaagcugauggucuggcu

SEQ ID NO: 8832 - RNA, 22 nt, Artificial Sequence
  LRRK2 RNA guide
agcaagcugauggucuggcugu

SEQ ID NO: 8833 - RNA, 22 nt, Artificial Sequence
  LRRK2 RNA guide
agcauugggaaaggugacagcc

SEQ ID NO: 8834 - RNA, 22 nt, Artificial Sequence
  LRRK2 RNA guide
agccagaccaucagcuugcucu

SEQ ID NO: 8835 - RNA, 22 nt, Artificial Sequence
  LRRK2 RNA guide
agccuccuuaagagcaagcuga

SEQ ID NO: 8836 - RNA, 22 nt, Artificial Sequence
  LRRK2 RNA guide
agcugauggucuggcugucacc

SEQ ID NO: 8837 - RNA, 22 nt, Artificial Sequence
  LRRK2 RNA guide
aggugacagccagaccaucagc

SEQ ID NO: 8838 - RNA, 22 nt, Artificial Sequence
  LRRK2 RNA guide
auggucuggcugucaccuuucc

SEQ ID NO: 8839 - RNA, 22 nt, Artificial Sequence
  LRRK2 RNA guide
auugggaaaggugacagccaga

SEQ ID NO: 8840 - RNA, 22 nt, Artificial Sequence
  LRRK2 RNA guide
caagcugauggucuggcuguca

SEQ ID NO: 8841 - RNA, 22 nt, Artificial Sequence
  LRRK2 RNA guide
cagaccaucagcuugcucuuaa

SEQ ID NO: 8842 - RNA, 22 nt, Artificial Sequence
  LRRK2 RNA guide
cagccagaccaucagcuugcuc

SEQ ID NO: 8843 - RNA, 22 nt, Artificial Sequence
  LRRK2 RNA guide
cagccuccuuaagagcaagcug

SEQ ID NO: 8844 - RNA, 22 nt, Artificial Sequence
  LRRK2 RNA guide
cauugggaaaggugacagccag

SEQ ID NO: 8845 - RNA, 22 nt, Artificial Sequence
  LRRK2 RNA guide
ccagaccaucagcuugcucuua

SEQ ID NO: 8846 - RNA, 22 nt, Artificial Sequence
  LRRK2 RNA guide
ccagccuccuuaagagcaagcu

SEQ ID NO: 8847 - RNA, 22 nt, Artificial Sequence
  LRRK2 RNA guide
ccuccuuaagagcaagcugaug

SEQ ID NO: 8848 - RNA, 22 nt, Artificial Sequence
  LRRK2 RNA guide
ccuuaagagcaagcugaugguc

SEQ ID NO: 8849 - RNA, 22 nt, Artificial Sequence
  LRRK2 RNA guide
cuccuuaagagcaagcugaugg

SEQ ID NO: 8850 - RNA, 22 nt, Artificial Sequence
  LRRK2 RNA guide
cugauggucuggcugucaccuu

SEQ ID NO: 8851 - RNA, 22 nt, Artificial Sequence
  LRRK2 RNA guide
cuuaagagcaagcugauggucu

SEQ ID NO: 8852 - RNA, 22 nt, Artificial Sequence
  LRRK2 RNA guide
gaaaggugacagccagaccauc

SEQ ID NO: 8853 - RNA, 22 nt, Artificial Sequence
  LRRK2 RNA guide
gacagccagaccaucagcuugc

SEQ ID NO: 8854 - RNA, 22 nt, Artificial Sequence
  LRRK2 RNA guide
gaccaucagcuugcucuuaagg

SEQ ID NO: 8855 - RNA, 22 nt, Artificial Sequence
  LRRK2 RNA guide
gagcaagcugauggucuggcug

SEQ ID NO: 8856 - RNA, 22 nt, Artificial Sequence
  LRRK2 RNA guide
gauggucuggcugucaccuuuc

SEQ ID NO: 8857 - RNA, 22 nt, Artificial Sequence
  LRRK2 RNA guide
gcaagcugauggucuggcuguc

SEQ ID NO: 8858 - RNA, 22 nt, Artificial Sequence
  LRRK2 RNA guide
gcauugggaaaggugacagcca

SEQ ID NO: 8859 - RNA, 22 nt, Artificial Sequence
  LRRK2 RNA guide
gccagaccaucagcuugcucuu

SEQ ID NO: 8860 - RNA, 22 nt, Artificial Sequence
  LRRK2 RNA guide
gccuccuuaagagcaagcugau

SEQ ID NO: 8861 - RNA, 22 nt, Artificial Sequence
  LRRK2 RNA guide
gcugauggucuggcugucaccu

SEQ ID NO: 8862 - RNA, 22 nt, Artificial Sequence
  LRRK2 RNA guide
ggaaaggugacagccagaccau

SEQ ID NO: 8863 - RNA, 22 nt, Artificial Sequence
  LRRK2 RNA guide
gggaaaggugacagccagacca

SEQ ID NO: 8864 - RNA, 22 nt, Artificial Sequence
  LRRK2 RNA guide
ggucuggcugucaccuuuccca

SEQ ID NO: 8865 - RNA, 22 nt, Artificial Sequence
  LRRK2 RNA guide
ggugacagccagaccaucagcu

SEQ ID NO: 8866 - RNA, 22 nt, Artificial Sequence
  LRRK2 RNA guide
gugacagccagaccaucagcuu

SEQ ID NO: 8867 - RNA, 22 nt, Artificial Sequence
  LRRK2 RNA guide
uaagagcaagcugauggucugg

SEQ ID NO: 8868 - RNA, 22 nt, Artificial Sequence
  LRRK2 RNA guide
uccuuaagagcaagcugauggu

SEQ ID NO: 8869 - RNA, 22 nt, Artificial Sequence
  LRRK2 RNA guide
ugacagccagaccaucagcuug

SEQ ID NO: 8870 - RNA, 22 nt, Artificial Sequence
  LRRK2 RNA guide
ugauggucuggcugucaccuuu

SEQ ID NO: 8871 - RNA, 22 nt, Artificial Sequence
  LRRK2 RNA guide
ugggaaaggugacagccagacc

SEQ ID NO: 8872 - RNA, 22 nt, Artificial Sequence
  LRRK2 RNA guide
uggucuggcugucaccuuuccc

SEQ ID NO: 8873 - RNA, 22 nt, Artificial Sequence
  LRRK2 RNA guide
uuaagagcaagcugauggucug

SEQ ID NO: 8874 - RNA, 22 nt, Artificial Sequence
  LRRK2 RNA guide
uugggaaaggugacagccagac

SEQ ID NO: 8875 - RNA, 20 nt, Artificial Sequence
  LRRK2 RNA guide
aacuuuuccuacacaaaauc

SEQ ID NO: 8876 - RNA, 20 nt, Artificial Sequence
  LRRK2 RNA guide
aagaagguucaacuuuuccu

SEQ ID NO: 8877 - RNA, 20 nt, Artificial Sequence
  LRRK2 RNA guide
aagguucaacuuuuccuaca

SEQ ID NO: 8878 - RNA, 20 nt, Artificial Sequence
  LRRK2 RNA guide
acacaaaauccuccaaggca

SEQ ID NO: 8879 - RNA, 20 nt, Artificial Sequence
  LRRK2 RNA guide
acuuuuccuacacaaaaucc

SEQ ID NO: 8880 - RNA, 20 nt, Artificial Sequence
  LRRK2 RNA guide
agaagguucaacuuuuccua

SEQ ID NO: 8881 - RNA, 20 nt, Artificial Sequence
  LRRK2 RNA guide
agcauuugccuuggaggauu

SEQ ID NO: 8882 - RNA, 20 nt, Artificial Sequence
  LRRK2 RNA guide
aggauuuuguguaggaaaag

SEQ ID NO: 8883 - RNA, 20 nt, Artificial Sequence
  LRRK2 RNA guide
agguucaacuuuuccuacac

SEQ ID NO: 8884 - RNA, 20 nt, Artificial Sequence
  LRRK2 RNA guide
auuugccuuggaggauuuug

SEQ ID NO: 8885 - RNA, 20 nt, Artificial Sequence
  LRRK2 RNA guide
auuuuguguaggaaaaguug

SEQ ID NO: 8886 - RNA, 20 nt, Artificial Sequence
  LRRK2 RNA guide
caacuuuuccuacacaaaau

SEQ ID NO: 8887 - RNA, 20 nt, Artificial Sequence
  LRRK2 RNA guide
cauuugccuuggaggauuuu

SEQ ID NO: 8888 - RNA, 20 nt, Artificial Sequence
  LRRK2 RNA guide
ccaagaagguucaacuuuuc

SEQ ID NO: 8889 - RNA, 20 nt, Artificial Sequence
  LRRK2 RNA guide
ccuacacaaaauccuccaag

SEQ ID NO: 8890 - RNA, 20 nt, Artificial Sequence
  LRRK2 RNA guide
ccuuggaggauuuuguguag

SEQ ID NO: 8891 - RNA, 20 nt, Artificial Sequence
  LRRK2 RNA guide
cuacacaaaauccuccaagg

SEQ ID NO: 8892 - RNA, 20 nt, Artificial Sequence
  LRRK2 RNA guide
cuuggaggauuuuguguagg

SEQ ID NO: 8893 - RNA, 20 nt, Artificial Sequence
  LRRK2 RNA guide
cuuuuccuacacaaaauccu

SEQ ID NO: 8894 - RNA, 20 nt, Artificial Sequence
  LRRK2 RNA guide
gaagguucaacuuuuccuac

SEQ ID NO: 8895 - RNA, 20 nt, Artificial Sequence
  LRRK2 RNA guide
gaggauuuuguguaggaaaa

SEQ ID NO: 8896 - RNA, 20 nt, Artificial Sequence
  LRRK2 RNA guide
gauuuuguguaggaaaaguu

SEQ ID NO: 8897 - RNA, 20 nt, Artificial Sequence
  LRRK2 RNA guide
gcauuugccuuggaggauuu

SEQ ID NO: 8898 - RNA, 20 nt, Artificial Sequence
  LRRK2 RNA guide
gccaagaagguucaacuuuu

SEQ ID NO: 8899 - RNA, 20 nt, Artificial Sequence
  LRRK2 RNA guide
gccuuggaggauuuugugua

SEQ ID NO: 8900 - RNA, 20 nt, Artificial Sequence
  LRRK2 RNA guide
ggaggauuuuguguaggaaa

SEQ ID NO: 8901 - RNA, 20 nt, Artificial Sequence
  LRRK2 RNA guide
ggauuuuguguaggaaaagu

SEQ ID NO: 8902 - RNA, 20 nt, Artificial Sequence
  LRRK2 RNA guide
gguucaacuuuuccuacaca

SEQ ID NO: 8903 - RNA, 20 nt, Artificial Sequence
  LRRK2 RNA guide
guguaggaaaaguugaaccu

SEQ ID NO: 8904 - RNA, 20 nt, Artificial Sequence
  LRRK2 RNA guide
guucaacuuuuccuacacaa

SEQ ID NO: 8905 - RNA, 20 nt, Artificial Sequence
  LRRK2 RNA guide
uacacaaaauccuccaaggc

SEQ ID NO: 8906 - RNA, 20 nt, Artificial Sequence
  LRRK2 RNA guide
ucaacuuuuccuacacaaaa

SEQ ID NO: 8907 - RNA, 20 nt, Artificial Sequence
  LRRK2 RNA guide
uccuacacaaaauccuccaa

SEQ ID NO: 8908 - RNA, 20 nt, Artificial Sequence
  LRRK2 RNA guide
ugccuuggaggauuuugugu

SEQ ID NO: 8909 - RNA, 20 nt, Artificial Sequence
  LRRK2 RNA guide
uggaggauuuuguguaggaa

SEQ ID NO: 8910 - RNA, 20 nt, Artificial Sequence
  LRRK2 RNA guide
uguaggaaaaguugaaccuu

SEQ ID NO: 8911 - RNA, 20 nt, Artificial Sequence
  LRRK2 RNA guide
uguguaggaaaaguugaacc

SEQ ID NO: 8912 - RNA, 20 nt, Artificial Sequence
  LRRK2 RNA guide
uucaacuuuuccuacacaaa

SEQ ID NO: 8913 - RNA, 20 nt, Artificial Sequence
  LRRK2 RNA guide
uuccuacacaaaauccucca

SEQ ID NO: 8914 - RNA, 20 nt, Artificial Sequence
  LRRK2 RNA guide
uugccuuggaggauuuugug

SEQ ID NO: 8915 - RNA, 20 nt, Artificial Sequence
  LRRK2 RNA guide
uuggaggauuuuguguagga

SEQ ID NO: 8916 - RNA, 20 nt, Artificial Sequence
  LRRK2 RNA guide
uuguguaggaaaaguugaac

SEQ ID NO: 8917 - RNA, 20 nt, Artificial Sequence
  LRRK2 RNA guide
uuuccuacacaaaauccucc

SEQ ID NO: 8918 - RNA, 20 nt, Artificial Sequence
  LRRK2 RNA guide
uuugccuuggaggauuuugu

SEQ ID NO: 8919 - RNA, 20 nt, Artificial Sequence
  LRRK2 RNA guide
uuuguguaggaaaaguugaa

SEQ ID NO: 8920 - RNA, 20 nt, Artificial Sequence
  LRRK2 RNA guide
uuuuccuacacaaaauccuc

SEQ ID NO: 8921 - RNA, 20 nt, Artificial Sequence
  LRRK2 RNA guide
uuuuguguaggaaaaguuga

SEQ ID NO: 8922 - RNA, 21 nt, Artificial Sequence
  LRRK2 RNA guide
aacuuuuccuacacaaaaucc

SEQ ID NO: 8923 - RNA, 21 nt, Artificial Sequence
  LRRK2 RNA guide
aagaagguucaacuuuuccua

SEQ ID NO: 8924 - RNA, 21 nt, Artificial Sequence
  LRRK2 RNA guide
aagguucaacuuuuccuacac

SEQ ID NO: 8925 - RNA, 21 nt, Artificial Sequence
  LRRK2 RNA guide
acacaaaauccuccaaggcaa

SEQ ID NO: 8926 - RNA, 21 nt, Artificial Sequence
  LRRK2 RNA guide
acuuuuccuacacaaaauccu

SEQ ID NO: 8927 - RNA, 21 nt, Artificial Sequence
  LRRK2 RNA guide
agaagguucaacuuuuccuac

SEQ ID NO: 8928 - RNA, 21 nt, Artificial Sequence
  LRRK2 RNA guide
agcauuugccuuggaggauuu

SEQ ID NO: 8929 - RNA, 21 nt, Artificial Sequence
  LRRK2 RNA guide
agccaagaagguucaacuuuu

SEQ ID NO: 8930 - RNA, 21 nt, Artificial Sequence
  LRRK2 RNA guide
aggauuuuguguaggaaaagu

SEQ ID NO: 8931 - RNA, 21 nt, Artificial Sequence
  LRRK2 RNA guide
agguucaacuuuuccuacaca

SEQ ID NO: 8932 - RNA, 21 nt, Artificial Sequence
  LRRK2 RNA guide
auuugccuuggaggauuuugu

SEQ ID NO: 8933 - RNA, 21 nt, Artificial Sequence
  LRRK2 RNA guide
caacuuuuccuacacaaaauc

SEQ ID NO: 8934 - RNA, 21 nt, Artificial Sequence
  LRRK2 RNA guide
caagaagguucaacuuuuccu

SEQ ID NO: 8935 - RNA, 21 nt, Artificial Sequence
  LRRK2 RNA guide
cauuugccuuggaggauuuug

SEQ ID NO: 8936 - RNA, 21 nt, Artificial Sequence
  LRRK2 RNA guide
ccaagaagguucaacuuuucc

SEQ ID NO: 8937 - RNA, 21 nt, Artificial Sequence
  LRRK2 RNA guide
ccuacacaaaauccuccaagg

SEQ ID NO: 8938 - RNA, 21 nt, Artificial Sequence
  LRRK2 RNA guide
ccuuggaggauuuuguguagg

SEQ ID NO: 8939 - RNA, 21 nt, Artificial Sequence
  LRRK2 RNA guide
cuacacaaaauccuccaaggc

SEQ ID NO: 8940 - RNA, 21 nt, Artificial Sequence
  LRRK2 RNA guide
cuuggaggauuuuguguagga

SEQ ID NO: 8941 - RNA, 21 nt, Artificial Sequence
  LRRK2 RNA guide
cuuuuccuacacaaaauccuc

SEQ ID NO: 8942 - RNA, 21 nt, Artificial Sequence
  LRRK2 RNA guide
gaagguucaacuuuuccuaca

SEQ ID NO: 8943 - RNA, 21 nt, Artificial Sequence
  LRRK2 RNA guide
gaggauuuuguguaggaaaag

SEQ ID NO: 8944 - RNA, 21 nt, Artificial Sequence
  LRRK2 RNA guide
gauuuuguguaggaaaaguug

SEQ ID NO: 8945 - RNA, 21 nt, Artificial Sequence
  LRRK2 RNA guide
gcauuugccuuggaggauuuu

SEQ ID NO: 8946 - RNA, 21 nt, Artificial Sequence
  LRRK2 RNA guide
gccaagaagguucaacuuuuc

SEQ ID NO: 8947 - RNA, 21 nt, Artificial Sequence
  LRRK2 RNA guide
gccuuggaggauuuuguguag

SEQ ID NO: 8948 - RNA, 21 nt, Artificial Sequence
  LRRK2 RNA guide
ggaggauuuuguguaggaaaa

SEQ ID NO: 8949 - RNA, 21 nt, Artificial Sequence
  LRRK2 RNA guide
ggauuuuguguaggaaaaguu

SEQ ID NO: 8950 - RNA, 21 nt, Artificial Sequence
  LRRK2 RNA guide
gguucaacuuuuccuacacaa

SEQ ID NO: 8951 - RNA, 21 nt, Artificial Sequence
  LRRK2 RNA guide
guguaggaaaaguugaaccuu

SEQ ID NO: 8952 - RNA, 21 nt, Artificial Sequence
  LRRK2 RNA guide
guucaacuuuuccuacacaaa

SEQ ID NO: 8953 - RNA, 21 nt, Artificial Sequence
  LRRK2 RNA guide
uacacaaaauccuccaaggca

SEQ ID NO: 8954 - RNA, 21 nt, Artificial Sequence
  LRRK2 RNA guide
uagcauuugccuuggaggauu

SEQ ID NO: 8955 - RNA, 21 nt, Artificial Sequence
  LRRK2 RNA guide
uccuacacaaaauccuccaag

SEQ ID NO: 8956 - RNA, 21 nt, Artificial Sequence
  LRRK2 RNA guide
ugccuuggaggauuuugugua

SEQ ID NO: 8957 - RNA, 21 nt, Artificial Sequence
  LRRK2 RNA guide
uggaggauuuuguguaggaaa

SEQ ID NO: 8958 - RNA, 21 nt, Artificial Sequence
  LRRK2 RNA guide
uguaggaaaaguugaaccuuc

SEQ ID NO: 8959 - RNA, 21 nt, Artificial Sequence
  LRRK2 RNA guide
uguguaggaaaaguugaaccu

SEQ ID NO: 8960 - RNA, 21 nt, Artificial Sequence
  LRRK2 RNA guide
uuccuacacaaaauccuccaa

SEQ ID NO: 8961 - RNA, 21 nt, Artificial Sequence
  LRRK2 RNA guide
uugccuuggaggauuuugugu

SEQ ID NO: 8962 - RNA, 21 nt, Artificial Sequence
  LRRK2 RNA guide
uuggaggauuuuguguaggaa

SEQ ID NO: 8963 - RNA, 21 nt, Artificial Sequence
  LRRK2 RNA guide
uuguguaggaaaaguugaacc

SEQ ID NO: 8964 - RNA, 21 nt, Artificial Sequence
  LRRK2 RNA guide
uuuccuacacaaaauccucca

SEQ ID NO: 8965 - RNA, 21 nt, Artificial Sequence
  LRRK2 RNA guide
uuugccuuggaggauuuugug

SEQ ID NO: 8966 - RNA, 21 nt, Artificial Sequence
  LRRK2 RNA guide
uuuguguaggaaaaguugaac

SEQ ID NO: 8967 - RNA, 21 nt, Artificial Sequence
  LRRK2 RNA guide
uuuuccuacacaaaauccucc

SEQ ID NO: 8968 - RNA, 22 nt, Artificial Sequence
  LRRK2 RNA guide
aacuuuuccuacacaaaauccu

SEQ ID NO: 8969 - RNA, 22 nt, Artificial Sequence
  LRRK2 RNA guide
aagaagguucaacuuuuccuac

SEQ ID NO: 8970 - RNA, 22 nt, Artificial Sequence
  LRRK2 RNA guide
aagccaagaagguucaacuuuu

SEQ ID NO: 8971 - RNA, 22 nt, Artificial Sequence
  LRRK2 RNA guide
aagguucaacuuuuccuacaca

SEQ ID NO: 8972 - RNA, 22 nt, Artificial Sequence
  LRRK2 RNA guide
acacaaaauccuccaaggcaaa

SEQ ID NO: 8973 - RNA, 22 nt, Artificial Sequence
  LRRK2 RNA guide
acuuuuccuacacaaaauccuc

SEQ ID NO: 8974 - RNA, 22 nt, Artificial Sequence
  LRRK2 RNA guide
agaagguucaacuuuuccuaca

SEQ ID NO: 8975 - RNA, 22 nt, Artificial Sequence
  LRRK2 RNA guide
agcauuugccuuggaggauuuu

SEQ ID NO: 8976 - RNA, 22 nt, Artificial Sequence
  LRRK2 RNA guide
agccaagaagguucaacuuuuc

SEQ ID NO: 8977 - RNA, 22 nt, Artificial Sequence
  LRRK2 RNA guide
aggauuuuguguaggaaaaguu

SEQ ID NO: 8978 - RNA, 22 nt, Artificial Sequence
  LRRK2 RNA guide
agguucaacuuuuccuacacaa

SEQ ID NO: 8979 - RNA, 22 nt, Artificial Sequence
  LRRK2 RNA guide
auagcauuugccuuggaggauu

SEQ ID NO: 8980 - RNA, 22 nt, Artificial Sequence
  LRRK2 RNA guide
auuugccuuggaggauuuugug

SEQ ID NO: 8981 - RNA, 22 nt, Artificial Sequence
  LRRK2 RNA guide
caacuuuuccuacacaaaaucc

SEQ ID NO: 8982 - RNA, 22 nt, Artificial Sequence
  LRRK2 RNA guide
caagaagguucaacuuuuccua

SEQ ID NO: 8983 - RNA, 22 nt, Artificial Sequence
  LRRK2 RNA guide
cauuugccuuggaggauuuugu

SEQ ID NO: 8984 - RNA, 22 nt, Artificial Sequence
  LRRK2 RNA guide
ccaagaagguucaacuuuuccu

SEQ ID NO: 8985 - RNA, 22 nt, Artificial Sequence
  LRRK2 RNA guide
ccuacacaaaauccuccaaggc

SEQ ID NO: 8986 - RNA, 22 nt, Artificial Sequence
  LRRK2 RNA guide
ccuuggaggauuuuguguagga

SEQ ID NO: 8987 - RNA, 22 nt, Artificial Sequence
  LRRK2 RNA guide
cuacacaaaauccuccaaggca

SEQ ID NO: 8988 - RNA, 22 nt, Artificial Sequence
  LRRK2 RNA guide
cuuggaggauuuuguguaggaa

SEQ ID NO: 8989 - RNA, 22 nt, Artificial Sequence
  LRRK2 RNA guide
cuuuuccuacacaaaauccucc

SEQ ID NO: 8990 - RNA, 22 nt, Artificial Sequence
  LRRK2 RNA guide
gaagguucaacuuuuccuacac

SEQ ID NO: 8991 - RNA, 22 nt, Artificial Sequence
  LRRK2 RNA guide
gaggauuuuguguaggaaaagu

SEQ ID NO: 8992 - RNA, 22 nt, Artificial Sequence
  LRRK2 RNA guide
gauuuuguguaggaaaaguuga

SEQ ID NO: 8993 - RNA, 22 nt, Artificial Sequence
  LRRK2 RNA guide
gcauuugccuuggaggauuuug

SEQ ID NO: 8994 - RNA, 22 nt, Artificial Sequence
  LRRK2 RNA guide
gccaagaagguucaacuuuucc

SEQ ID NO: 8995 - RNA, 22 nt, Artificial Sequence
  LRRK2 RNA guide
gccuuggaggauuuuguguagg

SEQ ID NO: 8996 - RNA, 22 nt, Artificial Sequence
  LRRK2 RNA guide
ggaggauuuuguguaggaaaag

SEQ ID NO: 8997 - RNA, 22 nt, Artificial Sequence
  LRRK2 RNA guide
ggauuuuguguaggaaaaguug

SEQ ID NO: 8998 - RNA, 22 nt, Artificial Sequence
  LRRK2 RNA guide
gguucaacuuuuccuacacaaa

SEQ ID NO: 8999 - RNA, 22 nt, Artificial Sequence
  LRRK2 RNA guide
guguaggaaaaguugaaccuuc

SEQ ID NO: 9000 - RNA, 22 nt, Artificial Sequence
  LRRK2 RNA guide
guucaacuuuuccuacacaaaa

SEQ ID NO: 9001 - RNA, 22 nt, Artificial Sequence
  LRRK2 RNA guide
uacacaaaauccuccaaggcaa

SEQ ID NO: 9002 - RNA, 22 nt, Artificial Sequence
  LRRK2 RNA guide
uagcauuugccuuggaggauuu

SEQ ID NO: 9003 - RNA, 22 nt, Artificial Sequence
  LRRK2 RNA guide
ucaacuuuuccuacacaaaauc

SEQ ID NO: 9004 - RNA, 22 nt, Artificial Sequence
  LRRK2 RNA guide
uccuacacaaaauccuccaagg

SEQ ID NO: 9005 - RNA, 22 nt, Artificial Sequence
  LRRK2 RNA guide
ugccuuggaggauuuuguguag

SEQ ID NO: 9006 - RNA, 22 nt, Artificial Sequence
  LRRK2 RNA guide
uggaggauuuuguguaggaaaa

SEQ ID NO: 9007 - RNA, 22 nt, Artificial Sequence
  LRRK2 RNA guide
uguaggaaaaguugaaccuucu

SEQ ID NO: 9008 - RNA, 22 nt, Artificial Sequence
  LRRK2 RNA guide
uguguaggaaaaguugaaccuu

SEQ ID NO: 9009 - RNA, 22 nt, Artificial Sequence
  LRRK2 RNA guide
uuccuacacaaaauccuccaag

SEQ ID NO: 9010 - RNA, 22 nt, Artificial Sequence
  LRRK2 RNA guide
uugccuuggaggauuuugugua

SEQ ID NO: 9011 - RNA, 22 nt, Artificial Sequence
  LRRK2 RNA guide
uuggaggauuuuguguaggaaa

SEQ ID NO: 9012 - RNA, 22 nt, Artificial Sequence
  LRRK2 RNA guide
uuguguaggaaaaguugaaccu

SEQ ID NO: 9013 - RNA, 22 nt, Artificial Sequence
  LRRK2 RNA guide
uuuccuacacaaaauccuccaa

SEQ ID NO: 9014 - RNA, 22 nt, Artificial Sequence
  LRRK2 RNA guide
uuugccuuggaggauuuugugu

SEQ ID NO: 9015 - RNA, 22 nt, Artificial Sequence
  LRRK2 RNA guide
uuuguguaggaaaaguugaacc

SEQ ID NO: 9016 - RNA, 22 nt, Artificial Sequence
  LRRK2 RNA guide
uuuuccuacacaaaauccucca

SEQ ID NO: 9017 - RNA, 22 nt, Artificial Sequence
  LRRK2 RNA guide
uuuuguguaggaaaaguugaac

SEQ ID NO: 9018 - RNA, 20 nt, Artificial Sequence
  LRRK2 RNA guide
aaaaguugaaacuucuuggc

SEQ ID NO: 9019 - RNA, 20 nt, Artificial Sequence
  LRRK2 RNA guide
aaacuucuuggcuugguccu

SEQ ID NO: 9020 - RNA, 20 nt, Artificial Sequence
  LRRK2 RNA guide
aaaggaccaagccaagaagu

SEQ ID NO: 9021 - RNA, 20 nt, Artificial Sequence
  LRRK2 RNA guide
aaaguugaaacuucuuggcu

SEQ ID NO: 9022 - RNA, 20 nt, Artificial Sequence
  LRRK2 RNA guide
aaauaaaggaccaagccaag

SEQ ID NO: 9023 - RNA, 20 nt, Artificial Sequence
  LRRK2 RNA guide
aacuucuuggcuugguccuu

SEQ ID NO: 9024 - RNA, 20 nt, Artificial Sequence
  LRRK2 RNA guide
aagaaguuucaacuuuuccu

SEQ ID NO: 9025 - RNA, 20 nt, Artificial Sequence
  LRRK2 RNA guide
aagccaagaaguuucaacuu

SEQ ID NO: 9026 - RNA, 20 nt, Artificial Sequence
  LRRK2 RNA guide
aaggaccaagccaagaaguu

SEQ ID NO: 9027 - RNA, 20 nt, Artificial Sequence
  LRRK2 RNA guide
aaguugaaacuucuuggcuu

SEQ ID NO: 9028 - RNA, 20 nt, Artificial Sequence
  LRRK2 RNA guide
aauaaaggaccaagccaaga

SEQ ID NO: 9029 - RNA, 20 nt, Artificial Sequence
  LRRK2 RNA guide
accaagccaagaaguuucaa

SEQ ID NO: 9030 - RNA, 20 nt, Artificial Sequence
  LRRK2 RNA guide
agaaguuucaacuuuuccua

SEQ ID NO: 9031 - RNA, 20 nt, Artificial Sequence
  LRRK2 RNA guide
agccaagaaguuucaacuuu

SEQ ID NO: 9032 - RNA, 20 nt, Artificial Sequence
  LRRK2 RNA guide
aggaaaaguugaaacuucuu

SEQ ID NO: 9033 - RNA, 20 nt, Artificial Sequence
  LRRK2 RNA guide
aggaccaagccaagaaguuu

SEQ ID NO: 9034 - RNA, 20 nt, Artificial Sequence
  LRRK2 RNA guide
aguugaaacuucuuggcuug

SEQ ID NO: 9035 - RNA, 20 nt, Artificial Sequence
  LRRK2 RNA guide
aguuucaacuuuuccuauac

SEQ ID NO: 9036 - RNA, 20 nt, Artificial Sequence
  LRRK2 RNA guide
auaggaaaaguugaaacuuc

SEQ ID NO: 9037 - RNA, 20 nt, Artificial Sequence
  LRRK2 RNA guide
caagaaguuucaacuuuucc

SEQ ID NO: 9038 - RNA, 20 nt, Artificial Sequence
  LRRK2 RNA guide
caagccaagaaguuucaacu

SEQ ID NO: 9039 - RNA, 20 nt, Artificial Sequence
  LRRK2 RNA guide
ccaagaaguuucaacuuuuc

SEQ ID NO: 9040 - RNA, 20 nt, Artificial Sequence
  LRRK2 RNA guide
ccaagccaagaaguuucaac

SEQ ID NO: 9041 - RNA, 20 nt, Artificial Sequence
  LRRK2 RNA guide
gaaaaguugaaacuucuugg

SEQ ID NO: 9042 - RNA, 20 nt, Artificial Sequence
  LRRK2 RNA guide
gaaacuucuuggcuuggucc

SEQ ID NO: 9043 - RNA, 20 nt, Artificial Sequence
  LRRK2 RNA guide
gaaguuucaacuuuuccuau

SEQ ID NO: 9044 - RNA, 20 nt, Artificial Sequence
  LRRK2 RNA guide
gaccaagccaagaaguuuca

SEQ ID NO: 9045 - RNA, 20 nt, Artificial Sequence
  LRRK2 RNA guide
gccaagaaguuucaacuuuu

SEQ ID NO: 9046 - RNA, 20 nt, Artificial Sequence
  LRRK2 RNA guide
ggaaaaguugaaacuucuug

SEQ ID NO: 9047 - RNA, 20 nt, Artificial Sequence
  LRRK2 RNA guide
ggaccaagccaagaaguuuc

SEQ ID NO: 9048 - RNA, 20 nt, Artificial Sequence
  LRRK2 RNA guide
ggauuuuguauaggaaaagu

SEQ ID NO: 9049 - RNA, 20 nt, Artificial Sequence
  LRRK2 RNA guide
guauaggaaaaguugaaacu

SEQ ID NO: 9050 - RNA, 20 nt, Artificial Sequence
  LRRK2 RNA guide
guugaaacuucuuggcuugg

SEQ ID NO: 9051 - RNA, 20 nt, Artificial Sequence
  LRRK2 RNA guide
guuucaacuuuuccuauaca

SEQ ID NO: 9052 - RNA, 20 nt, Artificial Sequence
  LRRK2 RNA guide
uaaaggaccaagccaagaag

SEQ ID NO: 9053 - RNA, 20 nt, Artificial Sequence
  LRRK2 RNA guide
uaggaaaaguugaaacuucu

SEQ ID NO: 9054 - RNA, 20 nt, Artificial Sequence
  LRRK2 RNA guide
ugaaacuucuuggcuugguc

SEQ ID NO: 9055 - RNA, 20 nt, Artificial Sequence
  LRRK2 RNA guide
uguauaggaaaaguugaaac

SEQ ID NO: 9056 - RNA, 20 nt, Artificial Sequence
  LRRK2 RNA guide
uugaaacuucuuggcuuggu

SEQ ID NO: 9057 - RNA, 21 nt, Artificial Sequence
  LRRK2 RNA guide
aaaaguugaaacuucuuggcu

SEQ ID NO: 9058 - RNA, 21 nt, Artificial Sequence
  LRRK2 RNA guide
aaacuucuuggcuugguccuu

SEQ ID NO: 9059 - RNA, 21 nt, Artificial Sequence
  LRRK2 RNA guide
aaaggaccaagccaagaaguu

SEQ ID NO: 9060 - RNA, 21 nt, Artificial Sequence
  LRRK2 RNA guide
aaaguugaaacuucuuggcuu

SEQ ID NO: 9061 - RNA, 21 nt, Artificial Sequence
  LRRK2 RNA guide
aaauaaaggaccaagccaaga

SEQ ID NO: 9062 - RNA, 21 nt, Artificial Sequence
  LRRK2 RNA guide
aacuucuuggcuugguccuuu

SEQ ID NO: 9063 - RNA, 21 nt, Artificial Sequence
  LRRK2 RNA guide
aagccaagaaguuucaacuuu

SEQ ID NO: 9064 - RNA, 21 nt, Artificial Sequence
  LRRK2 RNA guide
aaggaccaagccaagaaguuu

SEQ ID NO: 9065 - RNA, 21 nt, Artificial Sequence
  LRRK2 RNA guide
aaguugaaacuucuuggcuug

SEQ ID NO: 9066 - RNA, 21 nt, Artificial Sequence
  LRRK2 RNA guide
aauaaaggaccaagccaagaa

SEQ ID NO: 9067 - RNA, 21 nt, Artificial Sequence
  LRRK2 RNA guide
accaagccaagaaguuucaac

SEQ ID NO: 9068 - RNA, 21 nt, Artificial Sequence
  LRRK2 RNA guide
agccaagaaguuucaacuuuu

SEQ ID NO: 9069 - RNA, 21 nt, Artificial Sequence
  LRRK2 RNA guide
aggaaaaguugaaacuucuug

SEQ ID NO: 9070 - RNA, 21 nt, Artificial Sequence
  LRRK2 RNA guide
aggaccaagccaagaaguuuc

SEQ ID NO: 9071 - RNA, 21 nt, Artificial Sequence
  LRRK2 RNA guide
aguugaaacuucuuggcuugg

SEQ ID NO: 9072 - RNA, 21 nt, Artificial Sequence
  LRRK2 RNA guide
auaaaggaccaagccaagaag

SEQ ID NO: 9073 - RNA, 21 nt, Artificial Sequence
  LRRK2 RNA guide
caagaaguuucaacuuuuccu

SEQ ID NO: 9074 - RNA, 21 nt, Artificial Sequence
  LRRK2 RNA guide
caagccaagaaguuucaacuu

SEQ ID NO: 9075 - RNA, 21 nt, Artificial Sequence
  LRRK2 RNA guide
ccaagaaguuucaacuuuucc

SEQ ID NO: 9076 - RNA, 21 nt, Artificial Sequence
  LRRK2 RNA guide
ccaagccaagaaguuucaacu

SEQ ID NO: 9077 - RNA, 21 nt, Artificial Sequence
  LRRK2 RNA guide
gaaaaguugaaacuucuuggc

SEQ ID NO: 9078 - RNA, 21 nt, Artificial Sequence
  LRRK2 RNA guide
gaaacuucuuggcuugguccu

SEQ ID NO: 9079 - RNA, 21 nt, Artificial Sequence
  LRRK2 RNA guide
gaaauaaaggaccaagccaag

SEQ ID NO: 9080 - RNA, 21 nt, Artificial Sequence
  LRRK2 RNA guide
gaccaagccaagaaguuucaa

SEQ ID NO: 9081 - RNA, 21 nt, Artificial Sequence
  LRRK2 RNA guide
gccaagaaguuucaacuuuuc

SEQ ID NO: 9082 - RNA, 21 nt, Artificial Sequence
  LRRK2 RNA guide
ggaaaaguugaaacuucuugg

SEQ ID NO: 9083 - RNA, 21 nt, Artificial Sequence
  LRRK2 RNA guide
ggaaauaaaggaccaagccaa

SEQ ID NO: 9084 - RNA, 21 nt, Artificial Sequence
  LRRK2 RNA guide
ggaccaagccaagaaguuuca

SEQ ID NO: 9085 - RNA, 21 nt, Artificial Sequence
  LRRK2 RNA guide
guugaaacuucuuggcuuggu

SEQ ID NO: 9086 - RNA, 21 nt, Artificial Sequence
  LRRK2 RNA guide
uaaaggaccaagccaagaagu

SEQ ID NO: 9087 - RNA, 21 nt, Artificial Sequence
  LRRK2 RNA guide
ugaaacuucuuggcuuggucc

SEQ ID NO: 9088 - RNA, 21 nt, Artificial Sequence
  LRRK2 RNA guide
uugaaacuucuuggcuugguc

SEQ ID NO: 9089 - RNA, 22 nt, Artificial Sequence
  LRRK2 RNA guide
aaaaguugaaacuucuuggcuu

SEQ ID NO: 9090 - RNA, 22 nt, Artificial Sequence
  LRRK2 RNA guide
aaacuucuuggcuugguccuuu

SEQ ID NO: 9091 - RNA, 22 nt, Artificial Sequence
  LRRK2 RNA guide
aaaggaccaagccaagaaguuu

SEQ ID NO: 9092 - RNA, 22 nt, Artificial Sequence
  LRRK2 RNA guide
aaaguugaaacuucuuggcuug

SEQ ID NO: 9093 - RNA, 22 nt, Artificial Sequence
  LRRK2 RNA guide
aaauaaaggaccaagccaagaa

SEQ ID NO: 9094 - RNA, 22 nt, Artificial Sequence
  LRRK2 RNA guide
aacuucuuggcuugguccuuua

SEQ ID NO: 9095 - RNA, 22 nt, Artificial Sequence
  LRRK2 RNA guide
aagccaagaaguuucaacuuuu

SEQ ID NO: 9096 - RNA, 22 nt, Artificial Sequence
  LRRK2 RNA guide
aaggaccaagccaagaaguuuc

SEQ ID NO: 9097 - RNA, 22 nt, Artificial Sequence
  LRRK2 RNA guide
aaguugaaacuucuuggcuugg

SEQ ID NO: 9098 - RNA, 22 nt, Artificial Sequence
  LRRK2 RNA guide
aauaaaggaccaagccaagaag

SEQ ID NO: 9099 - RNA, 22 nt, Artificial Sequence
  LRRK2 RNA guide
accaagccaagaaguuucaacu

SEQ ID NO: 9100 - RNA, 22 nt, Artificial Sequence
  LRRK2 RNA guide
agccaagaaguuucaacuuuuc

SEQ ID NO: 9101 - RNA, 22 nt, Artificial Sequence
  LRRK2 RNA guide
aggaaaaguugaaacuucuugg

SEQ ID NO: 9102 - RNA, 22 nt, Artificial Sequence
  LRRK2 RNA guide
aggaccaagccaagaaguuuca

SEQ ID NO: 9103 - RNA, 22 nt, Artificial Sequence
  LRRK2 RNA guide
aguugaaacuucuuggcuuggu

SEQ ID NO: 9104 - RNA, 22 nt, Artificial Sequence
  LRRK2 RNA guide
auaaaggaccaagccaagaagu

SEQ ID NO: 9105 - RNA, 22 nt, Artificial Sequence
  LRRK2 RNA guide
caagaaguuucaacuuuuccua

SEQ ID NO: 9106 - RNA, 22 nt, Artificial Sequence
  LRRK2 RNA guide
caagccaagaaguuucaacuuu

SEQ ID NO: 9107 - RNA, 22 nt, Artificial Sequence
  LRRK2 RNA guide
ccaagaaguuucaacuuuuccu

SEQ ID NO: 9108 - RNA, 22 nt, Artificial Sequence
  LRRK2 RNA guide
ccaagccaagaaguuucaacuu

SEQ ID NO: 9109 - RNA, 22 nt, Artificial Sequence
  LRRK2 RNA guide
gaaaaguugaaacuucuuggcu

SEQ ID NO: 9110 - RNA, 22 nt, Artificial Sequence
  LRRK2 RNA guide
gaaacuucuuggcuugguccuu

SEQ ID NO: 9111 - RNA, 22 nt, Artificial Sequence
  LRRK2 RNA guide
gaaauaaaggaccaagccaaga

SEQ ID NO: 9112 - RNA, 22 nt, Artificial Sequence
  LRRK2 RNA guide
gaaguuucaacuuuuccuauac

SEQ ID NO: 9113 - RNA, 22 nt, Artificial Sequence
  LRRK2 RNA guide
gaccaagccaagaaguuucaac

SEQ ID NO: 9114 - RNA, 22 nt, Artificial Sequence
  LRRK2 RNA guide
gaggauuuuguauaggaaaagu

SEQ ID NO: 9115 - RNA, 22 nt, Artificial Sequence
  LRRK2 RNA guide
gccaagaaguuucaacuuuucc

SEQ ID NO: 9116 - RNA, 22 nt, Artificial Sequence
  LRRK2 RNA guide
ggaaaaguugaaacuucuuggc

SEQ ID NO: 9117 - RNA, 22 nt, Artificial Sequence
  LRRK2 RNA guide
ggaaauaaaggaccaagccaag

SEQ ID NO: 9118 - RNA, 22 nt, Artificial Sequence
  LRRK2 RNA guide
ggaccaagccaagaaguuucaa

SEQ ID NO: 9119 - RNA, 22 nt, Artificial Sequence
  LRRK2 RNA guide
ggauuuuguauaggaaaaguug

SEQ ID NO: 9120 - RNA, 22 nt, Artificial Sequence
  LRRK2 RNA guide
guauaggaaaaguugaaacuuc

SEQ ID NO: 9121 - RNA, 22 nt, Artificial Sequence
  LRRK2 RNA guide
guugaaacuucuuggcuugguc

SEQ ID NO: 9122 - RNA, 22 nt, Artificial Sequence
  LRRK2 RNA guide
uaaaggaccaagccaagaaguu

SEQ ID NO: 9123 - RNA, 22 nt, Artificial Sequence
  LRRK2 RNA guide
uaggaaaaguugaaacuucuug

SEQ ID NO: 9124 - RNA, 22 nt, Artificial Sequence
  LRRK2 RNA guide
ugaaacuucuuggcuugguccu

SEQ ID NO: 9125 - RNA, 22 nt, Artificial Sequence
  LRRK2 RNA guide
uggaaauaaaggaccaagccaa

SEQ ID NO: 9126 - RNA, 22 nt, Artificial Sequence
  LRRK2 RNA guide
uugaaacuucuuggcuuggucc

SEQ ID NO: 9127 - RNA, 20 nt, Artificial Sequence
  LRRK2 RNA guide
aaaaauauucuccuuguugc

SEQ ID NO: 9128 - RNA, 20 nt, Artificial Sequence
  LRRK2 RNA guide
aaaauauucuccuuguugcu

SEQ ID NO: 9129 - RNA, 20 nt, Artificial Sequence
  LRRK2 RNA guide
aaacaaacaaguaagcaaca

SEQ ID NO: 9130 - RNA, 20 nt, Artificial Sequence
  LRRK2 RNA guide
aaacaaguaagcaacaagga

SEQ ID NO: 9131 - RNA, 20 nt, Artificial Sequence
  LRRK2 RNA guide
aaauauucuccuuguugcuu

SEQ ID NO: 9132 - RNA, 20 nt, Artificial Sequence
  LRRK2 RNA guide
aacaaacaaguaagcaacaa

SEQ ID NO: 9133 - RNA, 20 nt, Artificial Sequence
  LRRK2 RNA guide
aacaaguaagcaacaaggag

SEQ ID NO: 9134 - RNA, 20 nt, Artificial Sequence
  LRRK2 RNA guide
aagcaacaaggagaauauuu

SEQ ID NO: 9135 - RNA, 20 nt, Artificial Sequence
  LRRK2 RNA guide
aaggaaacaaacaaguaagc

SEQ ID NO: 9136 - RNA, 20 nt, Artificial Sequence
  LRRK2 RNA guide
aaguaagcaacaaggagaau

SEQ ID NO: 9137 - RNA, 20 nt, Artificial Sequence
  LRRK2 RNA guide
aauauucuccuuguugcuua

SEQ ID NO: 9138 - RNA, 20 nt, Artificial Sequence
  LRRK2 RNA guide
acaaacaaguaagcaacaag

SEQ ID NO: 9139 - RNA, 20 nt, Artificial Sequence
  LRRK2 RNA guide
acaaguaagcaacaaggaga

SEQ ID NO: 9140 - RNA, 20 nt, Artificial Sequence
  LRRK2 RNA guide
agcaacaaggagaauauuuu

SEQ ID NO: 9141 - RNA, 20 nt, Artificial Sequence
  LRRK2 RNA guide
aggaaacaaacaaguaagca

SEQ ID NO: 9142 - RNA, 20 nt, Artificial Sequence
  LRRK2 RNA guide
aguaagcaacaaggagaaua

SEQ ID NO: 9143 - RNA, 20 nt, Artificial Sequence
  LRRK2 RNA guide
auauucuccuuguugcuuac

SEQ ID NO: 9144 - RNA, 20 nt, Artificial Sequence
  LRRK2 RNA guide
auucuccuuguugcuuacuu

SEQ ID NO: 9145 - RNA, 20 nt, Artificial Sequence
  LRRK2 RNA guide
caaacaaguaagcaacaagg

SEQ ID NO: 9146 - RNA, 20 nt, Artificial Sequence
  LRRK2 RNA guide
caaguaagcaacaaggagaa

SEQ ID NO: 9147 - RNA, 20 nt, Artificial Sequence
  LRRK2 RNA guide
ccuuguugcuuacuuguuug

SEQ ID NO: 9148 - RNA, 20 nt, Artificial Sequence
  LRRK2 RNA guide
cuccuuguugcuuacuuguu

SEQ ID NO: 9149 - RNA, 20 nt, Artificial Sequence
  LRRK2 RNA guide
cuuguugcuuacuuguuugu

SEQ ID NO: 9150 - RNA, 20 nt, Artificial Sequence
  LRRK2 RNA guide
gaaacaaacaaguaagcaac

SEQ ID NO: 9151 - RNA, 20 nt, Artificial Sequence
  LRRK2 RNA guide
gcaacaaggagaauauuuuu

SEQ ID NO: 9152 - RNA, 20 nt, Artificial Sequence
  LRRK2 RNA guide
ggaaacaaacaaguaagcaa

SEQ ID NO: 9153 - RNA, 20 nt, Artificial Sequence
  LRRK2 RNA guide
guaagcaacaaggagaauau

SEQ ID NO: 9154 - RNA, 20 nt, Artificial Sequence
  LRRK2 RNA guide
guugcuuacuuguuuguuuc

SEQ ID NO: 9155 - RNA, 20 nt, Artificial Sequence
  LRRK2 RNA guide
uaagcaacaaggagaauauu

SEQ ID NO: 9156 - RNA, 20 nt, Artificial Sequence
  LRRK2 RNA guide
uaaggaaacaaacaaguaag

SEQ ID NO: 9157 - RNA, 20 nt, Artificial Sequence
  LRRK2 RNA guide
uauucuccuuguugcuuacu

SEQ ID NO: 9158 - RNA, 20 nt, Artificial Sequence
  LRRK2 RNA guide
uccuuguugcuuacuuguuu

SEQ ID NO: 9159 - RNA, 20 nt, Artificial Sequence
  LRRK2 RNA guide
ucuccuuguugcuuacuugu

SEQ ID NO: 9160 - RNA, 20 nt, Artificial Sequence
  LRRK2 RNA guide
ugcuuacuuguuuguuuccu

SEQ ID NO: 9161 - RNA, 20 nt, Artificial Sequence
  LRRK2 RNA guide
uguugcuuacuuguuuguuu

SEQ ID NO: 9162 - RNA, 20 nt, Artificial Sequence
  LRRK2 RNA guide
uucuccuuguugcuuacuug

SEQ ID NO: 9163 - RNA, 20 nt, Artificial Sequence
  LRRK2 RNA guide
uugcuuacuuguuuguuucc

SEQ ID NO: 9164 - RNA, 20 nt, Artificial Sequence
  LRRK2 RNA guide
uuguugcuuacuuguuuguu

SEQ ID NO: 9165 - RNA, 21 nt, Artificial Sequence
  LRRK2 RNA guide
aaacaaguaagcaacaaggag

SEQ ID NO: 9166 - RNA, 21 nt, Artificial Sequence
  LRRK2 RNA guide
aacaaacaaguaagcaacaag

SEQ ID NO: 9167 - RNA, 21 nt, Artificial Sequence
  LRRK2 RNA guide
aacaaguaagcaacaaggaga

SEQ ID NO: 9168 - RNA, 21 nt, Artificial Sequence
  LRRK2 RNA guide
aaggaaacaaacaaguaagca

SEQ ID NO: 9169 - RNA, 21 nt, Artificial Sequence
  LRRK2 RNA guide
aaguaagcaacaaggagaaua

SEQ ID NO: 9170 - RNA, 21 nt, Artificial Sequence
  LRRK2 RNA guide
aauauucuccuuguugcuuac

SEQ ID NO: 9171 - RNA, 21 nt, Artificial Sequence
  LRRK2 RNA guide
acaaacaaguaagcaacaagg

SEQ ID NO: 9172 - RNA, 21 nt, Artificial Sequence
  LRRK2 RNA guide
acaaguaagcaacaaggagaa

SEQ ID NO: 9173 - RNA, 21 nt, Artificial Sequence
  LRRK2 RNA guide
aggaaacaaacaaguaagcaa

SEQ ID NO: 9174 - RNA, 21 nt, Artificial Sequence
  LRRK2 RNA guide
aguaagcaacaaggagaauau

SEQ ID NO: 9175 - RNA, 21 nt, Artificial Sequence
  LRRK2 RNA guide
auauucuccuuguugcuuacu

SEQ ID NO: 9176 - RNA, 21 nt, Artificial Sequence
  LRRK2 RNA guide
auucuccuuguugcuuacuug

SEQ ID NO: 9177 - RNA, 21 nt, Artificial Sequence
  LRRK2 RNA guide
caaacaaguaagcaacaagga

SEQ ID NO: 9178 - RNA, 21 nt, Artificial Sequence
  LRRK2 RNA guide
caaguaagcaacaaggagaau

SEQ ID NO: 9179 - RNA, 21 nt, Artificial Sequence
  LRRK2 RNA guide
ccuuguugcuuacuuguuugu

SEQ ID NO: 9180 - RNA, 21 nt, Artificial Sequence
  LRRK2 RNA guide
cuccuuguugcuuacuuguuu

SEQ ID NO: 9181 - RNA, 21 nt, Artificial Sequence
  LRRK2 RNA guide
cuuguugcuuacuuguuuguu

SEQ ID NO: 9182 - RNA, 21 nt, Artificial Sequence
  LRRK2 RNA guide
gaaacaaacaaguaagcaaca

SEQ ID NO: 9183 - RNA, 21 nt, Artificial Sequence
  LRRK2 RNA guide
ggaaacaaacaaguaagcaac

SEQ ID NO: 9184 - RNA, 21 nt, Artificial Sequence
  LRRK2 RNA guide
guaagcaacaaggagaauauu

SEQ ID NO: 9185 - RNA, 21 nt, Artificial Sequence
  LRRK2 RNA guide
guugcuuacuuguuuguuucc

SEQ ID NO: 9186 - RNA, 21 nt, Artificial Sequence
  LRRK2 RNA guide
uaaggaaacaaacaaguaagc

SEQ ID NO: 9187 - RNA, 21 nt, Artificial Sequence
  LRRK2 RNA guide
uauucuccuuguugcuuacuu

SEQ ID NO: 9188 - RNA, 21 nt, Artificial Sequence
  LRRK2 RNA guide
uccuuguugcuuacuuguuug

SEQ ID NO: 9189 - RNA, 21 nt, Artificial Sequence
  LRRK2 RNA guide
ucuccuuguugcuuacuuguu

SEQ ID NO: 9190 - RNA, 21 nt, Artificial Sequence
  LRRK2 RNA guide
ugcuuacuuguuuguuuccuu

SEQ ID NO: 9191 - RNA, 21 nt, Artificial Sequence
  LRRK2 RNA guide
uguugcuuacuuguuuguuuc

SEQ ID NO: 9192 - RNA, 21 nt, Artificial Sequence
  LRRK2 RNA guide
uucuccuuguugcuuacuugu

SEQ ID NO: 9193 - RNA, 21 nt, Artificial Sequence
  LRRK2 RNA guide
uugcuuacuuguuuguuuccu

SEQ ID NO: 9194 - RNA, 22 nt, Artificial Sequence
  LRRK2 RNA guide
aaacaaacaaguaagcaacaag

SEQ ID NO: 9195 - RNA, 22 nt, Artificial Sequence
  LRRK2 RNA guide
aaacaaguaagcaacaaggaga

SEQ ID NO: 9196 - RNA, 22 nt, Artificial Sequence
  LRRK2 RNA guide
aaauauucuccuuguugcuuac

SEQ ID NO: 9197 - RNA, 22 nt, Artificial Sequence
  LRRK2 RNA guide
aacaaacaaguaagcaacaagg

SEQ ID NO: 9198 - RNA, 22 nt, Artificial Sequence
  LRRK2 RNA guide
aacaaguaagcaacaaggagaa

SEQ ID NO: 9199 - RNA, 22 nt, Artificial Sequence
  LRRK2 RNA guide
aaggaaacaaacaaguaagcaa

SEQ ID NO: 9200 - RNA, 22 nt, Artificial Sequence
  LRRK2 RNA guide
aaguaagcaacaaggagaauau

SEQ ID NO: 9201 - RNA, 22 nt, Artificial Sequence
  LRRK2 RNA guide
aauauucuccuuguugcuuacu

SEQ ID NO: 9202 - RNA, 22 nt, Artificial Sequence
  LRRK2 RNA guide
acaaacaaguaagcaacaagga

SEQ ID NO: 9203 - RNA, 22 nt, Artificial Sequence
  LRRK2 RNA guide
acaaguaagcaacaaggagaau

SEQ ID NO: 9204 - RNA, 22 nt, Artificial Sequence
  LRRK2 RNA guide
aggaaacaaacaaguaagcaac

SEQ ID NO: 9205 - RNA, 22 nt, Artificial Sequence
  LRRK2 RNA guide
aguaagcaacaaggagaauauu

SEQ ID NO: 9206 - RNA, 22 nt, Artificial Sequence
  LRRK2 RNA guide
auauucuccuuguugcuuacuu

SEQ ID NO: 9207 - RNA, 22 nt, Artificial Sequence
  LRRK2 RNA guide
auucuccuuguugcuuacuugu

SEQ ID NO: 9208 - RNA, 22 nt, Artificial Sequence
  LRRK2 RNA guide
caaacaaguaagcaacaaggag

SEQ ID NO: 9209 - RNA, 22 nt, Artificial Sequence
  LRRK2 RNA guide
caaguaagcaacaaggagaaua

SEQ ID NO: 9210 - RNA, 22 nt, Artificial Sequence
  LRRK2 RNA guide
ccuuguugcuuacuuguuuguu

SEQ ID NO: 9211 - RNA, 22 nt, Artificial Sequence
  LRRK2 RNA guide
cuccuuguugcuuacuuguuug

SEQ ID NO: 9212 - RNA, 22 nt, Artificial Sequence
  LRRK2 RNA guide
cuuguugcuuacuuguuuguuu

SEQ ID NO: 9213 - RNA, 22 nt, Artificial Sequence
  LRRK2 RNA guide
gaaacaaacaaguaagcaacaa

SEQ ID NO: 9214 - RNA, 22 nt, Artificial Sequence
  LRRK2 RNA guide
ggaaacaaacaaguaagcaaca

SEQ ID NO: 9215 - RNA, 22 nt, Artificial Sequence
  LRRK2 RNA guide
guaagcaacaaggagaauauuu

SEQ ID NO: 9216 - RNA, 22 nt, Artificial Sequence
  LRRK2 RNA guide
guugcuuacuuguuuguuuccu

SEQ ID NO: 9217 - RNA, 22 nt, Artificial Sequence
  LRRK2 RNA guide
uaaggaaacaaacaaguaagca

SEQ ID NO: 9218 - RNA, 22 nt, Artificial Sequence
  LRRK2 RNA guide
uauucuccuuguugcuuacuug

SEQ ID NO: 9219 - RNA, 22 nt, Artificial Sequence
  LRRK2 RNA guide
uccuuguugcuuacuuguuugu

SEQ ID NO: 9220 - RNA, 22 nt, Artificial Sequence
  LRRK2 RNA guide
ucuccuuguugcuuacuuguuu

SEQ ID NO: 9221 - RNA, 22 nt, Artificial Sequence
  LRRK2 RNA guide
ugcuuacuuguuuguuuccuua

SEQ ID NO: 9222 - RNA, 22 nt, Artificial Sequence
  LRRK2 RNA guide
uguugcuuacuuguuuguuucc

SEQ ID NO: 9223 - RNA, 22 nt, Artificial Sequence
  LRRK2 RNA guide
uuaaggaaacaaacaaguaagc

SEQ ID NO: 9224 - RNA, 22 nt, Artificial Sequence
  LRRK2 RNA guide
uucuccuuguugcuuacuuguu

SEQ ID NO: 9225 - RNA, 22 nt, Artificial Sequence
  LRRK2 RNA guide
uugcuuacuuguuuguuuccuu

SEQ ID NO: 9226 - RNA, 22 nt, Artificial Sequence
  LRRK2 RNA guide
uuguugcuuacuuguuuguuuc

SEQ ID NO: 9227 - RNA, 20 nt, Artificial Sequence
  LRRK2 RNA guide
aaacuagcaagaauggugau

SEQ ID NO: 9228 - RNA, 20 nt, Artificial Sequence
  LRRK2 RNA guide
accauucuugcuaguuuaga

SEQ ID NO: 9229 - RNA, 20 nt, Artificial Sequence
  LRRK2 RNA guide
agauauagcaucuaaacuag

SEQ ID NO: 9230 - RNA, 20 nt, Artificial Sequence
  LRRK2 RNA guide
agcaucuaaacuagcaagaa

SEQ ID NO: 9231 - RNA, 20 nt, Artificial Sequence
  LRRK2 RNA guide
aguuuagaugcuauaucuga

SEQ ID NO: 9232 - RNA, 20 nt, Artificial Sequence
  LRRK2 RNA guide
auagcaucuaaacuagcaag

SEQ ID NO: 9233 - RNA, 20 nt, Artificial Sequence
  LRRK2 RNA guide
auauagcaucuaaacuagca

SEQ ID NO: 9234 - RNA, 20 nt, Artificial Sequence
  LRRK2 RNA guide
aucaccauucuugcuaguuu

SEQ ID NO: 9235 - RNA, 20 nt, Artificial Sequence
  LRRK2 RNA guide
aucuaaacuagcaagaaugg

SEQ ID NO: 9236 - RNA, 20 nt, Artificial Sequence
  LRRK2 RNA guide
aucugaucaccauucuugcu

SEQ ID NO: 9237 - RNA, 20 nt, Artificial Sequence
  LRRK2 RNA guide
auucuugcuaguuuagaugc

SEQ ID NO: 9238 - RNA, 20 nt, Artificial Sequence
  LRRK2 RNA guide
caccauucuugcuaguuuag

SEQ ID NO: 9239 - RNA, 20 nt, Artificial Sequence
  LRRK2 RNA guide
cagauauagcaucuaaacua

SEQ ID NO: 9240 - RNA, 20 nt, Artificial Sequence
  LRRK2 RNA guide
caucuaaacuagcaagaaug

SEQ ID NO: 9241 - RNA, 20 nt, Artificial Sequence
  LRRK2 RNA guide
cauucuugcuaguuuagaug

SEQ ID NO: 9242 - RNA, 20 nt, Artificial Sequence
  LRRK2 RNA guide
ccauucuugcuaguuuagau

SEQ ID NO: 9243 - RNA, 20 nt, Artificial Sequence
  LRRK2 RNA guide
cuaaacuagcaagaauggug

SEQ ID NO: 9244 - RNA, 20 nt, Artificial Sequence
  LRRK2 RNA guide
cuaguuuagaugcuauaucu

SEQ ID NO: 9245 - RNA, 20 nt, Artificial Sequence
  LRRK2 RNA guide
cugaucaccauucuugcuag

SEQ ID NO: 9246 - RNA, 20 nt, Artificial Sequence
  LRRK2 RNA guide
cuugcuaguuuagaugcuau

SEQ ID NO: 9247 - RNA, 20 nt, Artificial Sequence
  LRRK2 RNA guide
gauauagcaucuaaacuagc

SEQ ID NO: 9248 - RNA, 20 nt, Artificial Sequence
  LRRK2 RNA guide
gaucaccauucuugcuaguu

SEQ ID NO: 9249 - RNA, 20 nt, Artificial Sequence
  LRRK2 RNA guide
gcaucuaaacuagcaagaau

SEQ ID NO: 9250 - RNA, 20 nt, Artificial Sequence
  LRRK2 RNA guide
gcuaguuuagaugcuauauc

SEQ ID NO: 9251 - RNA, 20 nt, Artificial Sequence
  LRRK2 RNA guide
guuuagaugcuauaucugaa

SEQ ID NO: 9252 - RNA, 20 nt, Artificial Sequence
  LRRK2 RNA guide
uaaacuagcaagaaugguga

SEQ ID NO: 9253 - RNA, 20 nt, Artificial Sequence
  LRRK2 RNA guide
uagcaucuaaacuagcaaga

SEQ ID NO: 9254 - RNA, 20 nt, Artificial Sequence
  LRRK2 RNA guide
uaguuuagaugcuauaucug

SEQ ID NO: 9255 - RNA, 20 nt, Artificial Sequence
  LRRK2 RNA guide
uauagcaucuaaacuagcaa

SEQ ID NO: 9256 - RNA, 20 nt, Artificial Sequence
  LRRK2 RNA guide
uaucugaucaccauucuugc

SEQ ID NO: 9257 - RNA, 20 nt, Artificial Sequence
  LRRK2 RNA guide
ucaccauucuugcuaguuua

SEQ ID NO: 9258 - RNA, 20 nt, Artificial Sequence
  LRRK2 RNA guide
ucagauauagcaucuaaacu

SEQ ID NO: 9259 - RNA, 20 nt, Artificial Sequence
  LRRK2 RNA guide
ucuaaacuagcaagaauggu

SEQ ID NO: 9260 - RNA, 20 nt, Artificial Sequence
  LRRK2 RNA guide
ucugaucaccauucuugcua

SEQ ID NO: 9261 - RNA, 20 nt, Artificial Sequence
  LRRK2 RNA guide
ucuugcuaguuuagaugcua

SEQ ID NO: 9262 - RNA, 20 nt, Artificial Sequence
  LRRK2 RNA guide
ugaucaccauucuugcuagu

SEQ ID NO: 9263 - RNA, 20 nt, Artificial Sequence
  LRRK2 RNA guide
ugcuaguuuagaugcuauau

SEQ ID NO: 9264 - RNA, 20 nt, Artificial Sequence
  LRRK2 RNA guide
uucagauauagcaucuaaac

SEQ ID NO: 9265 - RNA, 20 nt, Artificial Sequence
  LRRK2 RNA guide
uucuugcuaguuuagaugcu

SEQ ID NO: 9266 - RNA, 20 nt, Artificial Sequence
  LRRK2 RNA guide
uugcuaguuuagaugcuaua

SEQ ID NO: 9267 - RNA, 21 nt, Artificial Sequence
  LRRK2 RNA guide
aaacuagcaagaauggugauc

SEQ ID NO: 9268 - RNA, 21 nt, Artificial Sequence
  LRRK2 RNA guide
accauucuugcuaguuuagau

SEQ ID NO: 9269 - RNA, 21 nt, Artificial Sequence
  LRRK2 RNA guide
agauauagcaucuaaacuagc

SEQ ID NO: 9270 - RNA, 21 nt, Artificial Sequence
  LRRK2 RNA guide
agcaucuaaacuagcaagaau

SEQ ID NO: 9271 - RNA, 21 nt, Artificial Sequence
  LRRK2 RNA guide
auagcaucuaaacuagcaaga

SEQ ID NO: 9272 - RNA, 21 nt, Artificial Sequence
  LRRK2 RNA guide
auaucugaucaccauucuugc

SEQ ID NO: 9273 - RNA, 21 nt, Artificial Sequence
  LRRK2 RNA guide
aucaccauucuugcuaguuua

SEQ ID NO: 9274 - RNA, 21 nt, Artificial Sequence
  LRRK2 RNA guide
aucuaaacuagcaagaauggu

SEQ ID NO: 9275 - RNA, 21 nt, Artificial Sequence
  LRRK2 RNA guide
aucugaucaccauucuugcua

SEQ ID NO: 9276 - RNA, 21 nt, Artificial Sequence
  LRRK2 RNA guide
auucuugcuaguuuagaugcu

SEQ ID NO: 9277 - RNA, 21 nt, Artificial Sequence
  LRRK2 RNA guide
caccauucuugcuaguuuaga

SEQ ID NO: 9278 - RNA, 21 nt, Artificial Sequence
  LRRK2 RNA guide
cagauauagcaucuaaacuag

SEQ ID NO: 9279 - RNA, 21 nt, Artificial Sequence
  LRRK2 RNA guide
caucuaaacuagcaagaaugg

SEQ ID NO: 9280 - RNA, 21 nt, Artificial Sequence
  LRRK2 RNA guide
cauucuugcuaguuuagaugc

SEQ ID NO: 9281 - RNA, 21 nt, Artificial Sequence
  LRRK2 RNA guide
ccauucuugcuaguuuagaug

SEQ ID NO: 9282 - RNA, 21 nt, Artificial Sequence
  LRRK2 RNA guide
cuaaacuagcaagaaugguga

SEQ ID NO: 9283 - RNA, 21 nt, Artificial Sequence
  LRRK2 RNA guide
cuaguuuagaugcuauaucug

SEQ ID NO: 9284 - RNA, 21 nt, Artificial Sequence
  LRRK2 RNA guide
cugaucaccauucuugcuagu

SEQ ID NO: 9285 - RNA, 21 nt, Artificial Sequence
  LRRK2 RNA guide
cuugcuaguuuagaugcuaua

SEQ ID NO: 9286 - RNA, 21 nt, Artificial Sequence
  LRRK2 RNA guide
gauauagcaucuaaacuagca

SEQ ID NO: 9287 - RNA, 21 nt, Artificial Sequence
  LRRK2 RNA guide
gaucaccauucuugcuaguuu

SEQ ID NO: 9288 - RNA, 21 nt, Artificial Sequence
  LRRK2 RNA guide
gcaucuaaacuagcaagaaug

SEQ ID NO: 9289 - RNA, 21 nt, Artificial Sequence
  LRRK2 RNA guide
gcuaguuuagaugcuauaucu

SEQ ID NO: 9290 - RNA, 21 nt, Artificial Sequence
  LRRK2 RNA guide
uaaacuagcaagaauggugau

SEQ ID NO: 9291 - RNA, 21 nt, Artificial Sequence
  LRRK2 RNA guide
uagcaucuaaacuagcaagaa

SEQ ID NO: 9292 - RNA, 21 nt, Artificial Sequence
  LRRK2 RNA guide
uauagcaucuaaacuagcaag

SEQ ID NO: 9293 - RNA, 21 nt, Artificial Sequence
  LRRK2 RNA guide
uaucugaucaccauucuugcu

SEQ ID NO: 9294 - RNA, 21 nt, Artificial Sequence
  LRRK2 RNA guide
ucaccauucuugcuaguuuag

SEQ ID NO: 9295 - RNA, 21 nt, Artificial Sequence
  LRRK2 RNA guide
ucuaaacuagcaagaauggug

SEQ ID NO: 9296 - RNA, 21 nt, Artificial Sequence
  LRRK2 RNA guide
ucugaucaccauucuugcuag

SEQ ID NO: 9297 - RNA, 21 nt, Artificial Sequence
  LRRK2 RNA guide
ucuugcuaguuuagaugcuau

SEQ ID NO: 9298 - RNA, 21 nt, Artificial Sequence
  LRRK2 RNA guide
ugaucaccauucuugcuaguu

SEQ ID NO: 9299 - RNA, 21 nt, Artificial Sequence
  LRRK2 RNA guide
ugcuaguuuagaugcuauauc

SEQ ID NO: 9300 - RNA, 21 nt, Artificial Sequence
  LRRK2 RNA guide
uucuugcuaguuuagaugcua

SEQ ID NO: 9301 - RNA, 22 nt, Artificial Sequence
  LRRK2 RNA guide
aaacuagcaagaauggugauca

SEQ ID NO: 9302 - RNA, 22 nt, Artificial Sequence
  LRRK2 RNA guide
accauucuugcuaguuuagaug

SEQ ID NO: 9303 - RNA, 22 nt, Artificial Sequence
  LRRK2 RNA guide
agauauagcaucuaaacuagca

SEQ ID NO: 9304 - RNA, 22 nt, Artificial Sequence
  LRRK2 RNA guide
agcaucuaaacuagcaagaaug

SEQ ID NO: 9305 - RNA, 22 nt, Artificial Sequence
  LRRK2 RNA guide
auagcaucuaaacuagcaagaa

SEQ ID NO: 9306 - RNA, 22 nt, Artificial Sequence
  LRRK2 RNA guide
auauagcaucuaaacuagcaag

SEQ ID NO: 9307 - RNA, 22 nt, Artificial Sequence
  LRRK2 RNA guide
auaucugaucaccauucuugcu

SEQ ID NO: 9308 - RNA, 22 nt, Artificial Sequence
  LRRK2 RNA guide
aucaccauucuugcuaguuuag

SEQ ID NO: 9309 - RNA, 22 nt, Artificial Sequence
  LRRK2 RNA guide
aucuaaacuagcaagaauggug

SEQ ID NO: 9310 - RNA, 22 nt, Artificial Sequence
  LRRK2 RNA guide
aucugaucaccauucuugcuag

SEQ ID NO: 9311 - RNA, 22 nt, Artificial Sequence
  LRRK2 RNA guide
auucuugcuaguuuagaugcua

SEQ ID NO: 9312 - RNA, 22 nt, Artificial Sequence
  LRRK2 RNA guide
caccauucuugcuaguuuagau

SEQ ID NO: 9313 - RNA, 22 nt, Artificial Sequence
  LRRK2 RNA guide
cagauauagcaucuaaacuagc

SEQ ID NO: 9314 - RNA, 22 nt, Artificial Sequence
  LRRK2 RNA guide
caucuaaacuagcaagaauggu

SEQ ID NO: 9315 - RNA, 22 nt, Artificial Sequence
  LRRK2 RNA guide
cauucuugcuaguuuagaugcu

SEQ ID NO: 9316 - RNA, 22 nt, Artificial Sequence
  LRRK2 RNA guide
ccauucuugcuaguuuagaugc

SEQ ID NO: 9317 - RNA, 22 nt, Artificial Sequence
  LRRK2 RNA guide
cuaaacuagcaagaauggugau

SEQ ID NO: 9318 - RNA, 22 nt, Artificial Sequence
  LRRK2 RNA guide
cuaguuuagaugcuauaucuga

SEQ ID NO: 9319 - RNA, 22 nt, Artificial Sequence
  LRRK2 RNA guide
cugaucaccauucuugcuaguu

SEQ ID NO: 9320 - RNA, 22 nt, Artificial Sequence
  LRRK2 RNA guide
cuugcuaguuuagaugcuauau

SEQ ID NO: 9321 - RNA, 22 nt, Artificial Sequence
  LRRK2 RNA guide
gauauagcaucuaaacuagcaa

SEQ ID NO: 9322 - RNA, 22 nt, Artificial Sequence
  LRRK2 RNA guide
gauaucugaucaccauucuugc

SEQ ID NO: 9323 - RNA, 22 nt, Artificial Sequence
  LRRK2 RNA guide
gaucaccauucuugcuaguuua

SEQ ID NO: 9324 - RNA, 22 nt, Artificial Sequence
  LRRK2 RNA guide
gcaucuaaacuagcaagaaugg

SEQ ID NO: 9325 - RNA, 22 nt, Artificial Sequence
  LRRK2 RNA guide
gcuaguuuagaugcuauaucug

SEQ ID NO: 9326 - RNA, 22 nt, Artificial Sequence
  LRRK2 RNA guide
uaaacuagcaagaauggugauc

SEQ ID NO: 9327 - RNA, 22 nt, Artificial Sequence
  LRRK2 RNA guide
uagcaucuaaacuagcaagaau

SEQ ID NO: 9328 - RNA, 22 nt, Artificial Sequence
  LRRK2 RNA guide
uauagcaucuaaacuagcaaga

SEQ ID NO: 9329 - RNA, 22 nt, Artificial Sequence
  LRRK2 RNA guide
uaucugaucaccauucuugcua

SEQ ID NO: 9330 - RNA, 22 nt, Artificial Sequence
  LRRK2 RNA guide
ucaccauucuugcuaguuuaga

SEQ ID NO: 9331 - RNA, 22 nt, Artificial Sequence
  LRRK2 RNA guide
ucagauauagcaucuaaacuag

SEQ ID NO: 9332 - RNA, 22 nt, Artificial Sequence
  LRRK2 RNA guide
ucuaaacuagcaagaaugguga

SEQ ID NO: 9333 - RNA, 22 nt, Artificial Sequence
  LRRK2 RNA guide
ucugaucaccauucuugcuagu

SEQ ID NO: 9334 - RNA, 22 nt, Artificial Sequence
  LRRK2 RNA guide
ucuugcuaguuuagaugcuaua

SEQ ID NO: 9335 - RNA, 22 nt, Artificial Sequence
  LRRK2 RNA guide
ugaucaccauucuugcuaguuu

SEQ ID NO: 9336 - RNA, 22 nt, Artificial Sequence
  LRRK2 RNA guide
ugcuaguuuagaugcuauaucu

SEQ ID NO: 9337 - RNA, 22 nt, Artificial Sequence
  LRRK2 RNA guide
uucuugcuaguuuagaugcuau

SEQ ID NO: 9338 - RNA, 22 nt, Artificial Sequence
  LRRK2 RNA guide
uugcuaguuuagaugcuauauc

SEQ ID NO: 9339 - RNA, 20 nt, Artificial Sequence
  LRRK2 RNA guide
aaaaacuuccaucgcugccu

SEQ ID NO: 9340 - RNA, 20 nt, Artificial Sequence
  LRRK2 RNA guide
aaaacuuccaucgcugccug

SEQ ID NO: 9341 - RNA, 20 nt, Artificial Sequence
  LRRK2 RNA guide
aaacuuccaucgcugccuga

SEQ ID NO: 9342 - RNA, 20 nt, Artificial Sequence
  LRRK2 RNA guide
aacagccucaggcagcgaug

SEQ ID NO: 9343 - RNA, 20 nt, Artificial Sequence
  LRRK2 RNA guide
aacuuccaucgcugccugag

SEQ ID NO: 9344 - RNA, 20 nt, Artificial Sequence
  LRRK2 RNA guide
aaguuuuucugaagaugugc

SEQ ID NO: 9345 - RNA, 20 nt, Artificial Sequence
  LRRK2 RNA guide
acagcacaucuucagaaaaa

SEQ ID NO: 9346 - RNA, 20 nt, Artificial Sequence
  LRRK2 RNA guide
acagccucaggcagcgaugg

SEQ ID NO: 9347 - RNA, 20 nt, Artificial Sequence
  LRRK2 RNA guide
acaucuucagaaaaacuucc

SEQ ID NO: 9348 - RNA, 20 nt, Artificial Sequence
  LRRK2 RNA guide
acuuccaucgcugccugagg

SEQ ID NO: 9349 - RNA, 20 nt, Artificial Sequence
  LRRK2 RNA guide
agaaaaacuuccaucgcugc

SEQ ID NO: 9350 - RNA, 20 nt, Artificial Sequence
  LRRK2 RNA guide
agacagcacaucuucagaaa

SEQ ID NO: 9351 - RNA, 20 nt, Artificial Sequence
  LRRK2 RNA guide
agcacaucuucagaaaaacu

SEQ ID NO: 9352 - RNA, 20 nt, Artificial Sequence
  LRRK2 RNA guide
agccucaggcagcgauggaa

SEQ ID NO: 9353 - RNA, 20 nt, Artificial Sequence
  LRRK2 RNA guide
agcgauggaaguuuuucuga

SEQ ID NO: 9354 - RNA, 20 nt, Artificial Sequence
  LRRK2 RNA guide
aggcagcgauggaaguuuuu

SEQ ID NO: 9355 - RNA, 20 nt, Artificial Sequence
  LRRK2 RNA guide
aguuuuucugaagaugugcu

SEQ ID NO: 9356 - RNA, 20 nt, Artificial Sequence
  LRRK2 RNA guide
aucuucagaaaaacuuccau

SEQ ID NO: 9357 - RNA, 20 nt, Artificial Sequence
  LRRK2 RNA guide
auggaaguuuuucugaagau

SEQ ID NO: 9358 - RNA, 20 nt, Artificial Sequence
  LRRK2 RNA guide
cacaucuucagaaaaacuuc

SEQ ID NO: 9359 - RNA, 20 nt, Artificial Sequence
  LRRK2 RNA guide
cagaaaaacuuccaucgcug

SEQ ID NO: 9360 - RNA, 20 nt, Artificial Sequence
  LRRK2 RNA guide
cagcacaucuucagaaaaac

SEQ ID NO: 9361 - RNA, 20 nt, Artificial Sequence
  LRRK2 RNA guide
cagccucaggcagcgaugga

SEQ ID NO: 9362 - RNA, 20 nt, Artificial Sequence
  LRRK2 RNA guide
cagcgauggaaguuuuucug

SEQ ID NO: 9363 - RNA, 20 nt, Artificial Sequence
  LRRK2 RNA guide
caggcagcgauggaaguuuu

SEQ ID NO: 9364 - RNA, 20 nt, Artificial Sequence
  LRRK2 RNA guide
caucuucagaaaaacuucca

SEQ ID NO: 9365 - RNA, 20 nt, Artificial Sequence
  LRRK2 RNA guide
ccucaggcagcgauggaagu

SEQ ID NO: 9366 - RNA, 20 nt, Artificial Sequence
  LRRK2 RNA guide
cgauggaaguuuuucugaag

SEQ ID NO: 9367 - RNA, 20 nt, Artificial Sequence
  LRRK2 RNA guide
cucaggcagcgauggaaguu

SEQ ID NO: 9368 - RNA, 20 nt, Artificial Sequence
  LRRK2 RNA guide
cuucagaaaaacuuccaucg

SEQ ID NO: 9369 - RNA, 20 nt, Artificial Sequence
  LRRK2 RNA guide
gaaaaacuuccaucgcugcc

SEQ ID NO: 9370 - RNA, 20 nt, Artificial Sequence
  LRRK2 RNA guide
gaacagccucaggcagcgau

SEQ ID NO: 9371 - RNA, 20 nt, Artificial Sequence
  LRRK2 RNA guide
gaaguuuuucugaagaugug

SEQ ID NO: 9372 - RNA, 20 nt, Artificial Sequence
  LRRK2 RNA guide
gauggaaguuuuucugaaga

SEQ ID NO: 9373 - RNA, 20 nt, Artificial Sequence
  LRRK2 RNA guide
gcacaucuucagaaaaacuu

SEQ ID NO: 9374 - RNA, 20 nt, Artificial Sequence
  LRRK2 RNA guide
gcagcgauggaaguuuuucu

SEQ ID NO: 9375 - RNA, 20 nt, Artificial Sequence
  LRRK2 RNA guide
gccucaggcagcgauggaag

SEQ ID NO: 9376 - RNA, 20 nt, Artificial Sequence
  LRRK2 RNA guide
gcgauggaaguuuuucugaa

SEQ ID NO: 9377 - RNA, 20 nt, Artificial Sequence
  LRRK2 RNA guide
ggaaguuuuucugaagaugu

SEQ ID NO: 9378 - RNA, 20 nt, Artificial Sequence
  LRRK2 RNA guide
ggcagcgauggaaguuuuuc

SEQ ID NO: 9379 - RNA, 20 nt, Artificial Sequence
  LRRK2 RNA guide
uagacagcacaucuucagaa

SEQ ID NO: 9380 - RNA, 20 nt, Artificial Sequence
  LRRK2 RNA guide
ucagaaaaacuuccaucgcu

SEQ ID NO: 9381 - RNA, 20 nt, Artificial Sequence
  LRRK2 RNA guide
ucaggcagcgauggaaguuu

SEQ ID NO: 9382 - RNA, 20 nt, Artificial Sequence
  LRRK2 RNA guide
ucuucagaaaaacuuccauc

SEQ ID NO: 9383 - RNA, 20 nt, Artificial Sequence
  LRRK2 RNA guide
uggaaguuuuucugaagaug

SEQ ID NO: 9384 - RNA, 20 nt, Artificial Sequence
  LRRK2 RNA guide
uuagacagcacaucuucaga

SEQ ID NO: 9385 - RNA, 20 nt, Artificial Sequence
  LRRK2 RNA guide
uucagaaaaacuuccaucgc

SEQ ID NO: 9386 - RNA, 21 nt, Artificial Sequence
  LRRK2 RNA guide
aaaaacuuccaucgcugccug

SEQ ID NO: 9387 - RNA, 21 nt, Artificial Sequence
  LRRK2 RNA guide
aaaacuuccaucgcugccuga

SEQ ID NO: 9388 - RNA, 21 nt, Artificial Sequence
  LRRK2 RNA guide
aaacuuccaucgcugccugag

SEQ ID NO: 9389 - RNA, 21 nt, Artificial Sequence
  LRRK2 RNA guide
aacagccucaggcagcgaugg

SEQ ID NO: 9390 - RNA, 21 nt, Artificial Sequence
  LRRK2 RNA guide
aacuuccaucgcugccugagg

SEQ ID NO: 9391 - RNA, 21 nt, Artificial Sequence
  LRRK2 RNA guide
aaguuuuucugaagaugugcu

SEQ ID NO: 9392 - RNA, 21 nt, Artificial Sequence
  LRRK2 RNA guide
acagcacaucuucagaaaaac

SEQ ID NO: 9393 - RNA, 21 nt, Artificial Sequence
  LRRK2 RNA guide
acagccucaggcagcgaugga

SEQ ID NO: 9394 - RNA, 21 nt, Artificial Sequence
  LRRK2 RNA guide
acaucuucagaaaaacuucca

SEQ ID NO: 9395 - RNA, 21 nt, Artificial Sequence
  LRRK2 RNA guide
acuuccaucgcugccugaggc

SEQ ID NO: 9396 - RNA, 21 nt, Artificial Sequence
  LRRK2 RNA guide
agaaaaacuuccaucgcugcc

SEQ ID NO: 9397 - RNA, 21 nt, Artificial Sequence
  LRRK2 RNA guide
agacagcacaucuucagaaaa

SEQ ID NO: 9398 - RNA, 21 nt, Artificial Sequence
  LRRK2 RNA guide
agcacaucuucagaaaaacuu

SEQ ID NO: 9399 - RNA, 21 nt, Artificial Sequence
  LRRK2 RNA guide
agccucaggcagcgauggaag

SEQ ID NO: 9400 - RNA, 21 nt, Artificial Sequence
  LRRK2 RNA guide
agcgauggaaguuuuucugaa

SEQ ID NO: 9401 - RNA, 21 nt, Artificial Sequence
  LRRK2 RNA guide
aggcagcgauggaaguuuuuc

SEQ ID NO: 9402 - RNA, 21 nt, Artificial Sequence
  LRRK2 RNA guide
aguuuuucugaagaugugcug

SEQ ID NO: 9403 - RNA, 21 nt, Artificial Sequence
  LRRK2 RNA guide
aucuucagaaaaacuuccauc

SEQ ID NO: 9404 - RNA, 21 nt, Artificial Sequence
  LRRK2 RNA guide
auggaaguuuuucugaagaug

SEQ ID NO: 9405 - RNA, 21 nt, Artificial Sequence
  LRRK2 RNA guide
cacaucuucagaaaaacuucc

SEQ ID NO: 9406 - RNA, 21 nt, Artificial Sequence
  LRRK2 RNA guide
cagaaaaacuuccaucgcugc

SEQ ID NO: 9407 - RNA, 21 nt, Artificial Sequence
  LRRK2 RNA guide
cagcacaucuucagaaaaacu

SEQ ID NO: 9408 - RNA, 21 nt, Artificial Sequence
  LRRK2 RNA guide
cagccucaggcagcgauggaa

SEQ ID NO: 9409 - RNA, 21 nt, Artificial Sequence
  LRRK2 RNA guide
cagcgauggaaguuuuucuga

SEQ ID NO: 9410 - RNA, 21 nt, Artificial Sequence
  LRRK2 RNA guide
caggcagcgauggaaguuuuu

SEQ ID NO: 9411 - RNA, 21 nt, Artificial Sequence
  LRRK2 RNA guide
caucuucagaaaaacuuccau

SEQ ID NO: 9412 - RNA, 21 nt, Artificial Sequence
  LRRK2 RNA guide
ccucaggcagcgauggaaguu

SEQ ID NO: 9413 - RNA, 21 nt, Artificial Sequence
  LRRK2 RNA guide
cgauggaaguuuuucugaaga

SEQ ID NO: 9414 - RNA, 21 nt, Artificial Sequence
  LRRK2 RNA guide
cucaggcagcgauggaaguuu

SEQ ID NO: 9415 - RNA, 21 nt, Artificial Sequence
  LRRK2 RNA guide
cuucagaaaaacuuccaucgc

SEQ ID NO: 9416 - RNA, 21 nt, Artificial Sequence
  LRRK2 RNA guide
gaaaaacuuccaucgcugccu

SEQ ID NO: 9417 - RNA, 21 nt, Artificial Sequence
  LRRK2 RNA guide
gaacagccucaggcagcgaug

SEQ ID NO: 9418 - RNA, 21 nt, Artificial Sequence
  LRRK2 RNA guide
gaaguuuuucugaagaugugc

SEQ ID NO: 9419 - RNA, 21 nt, Artificial Sequence
  LRRK2 RNA guide
gacagcacaucuucagaaaaa

SEQ ID NO: 9420 - RNA, 21 nt, Artificial Sequence
  LRRK2 RNA guide
gauggaaguuuuucugaagau

SEQ ID NO: 9421 - RNA, 21 nt, Artificial Sequence
  LRRK2 RNA guide
gcacaucuucagaaaaacuuc

SEQ ID NO: 9422 - RNA, 21 nt, Artificial Sequence
  LRRK2 RNA guide
gcagcgauggaaguuuuucug

SEQ ID NO: 9423 - RNA, 21 nt, Artificial Sequence
  LRRK2 RNA guide
gccucaggcagcgauggaagu

SEQ ID NO: 9424 - RNA, 21 nt, Artificial Sequence
  LRRK2 RNA guide
gcgauggaaguuuuucugaag

SEQ ID NO: 9425 - RNA, 21 nt, Artificial Sequence
  LRRK2 RNA guide
ggaacagccucaggcagcgau

SEQ ID NO: 9426 - RNA, 21 nt, Artificial Sequence
  LRRK2 RNA guide
ggaaguuuuucugaagaugug

SEQ ID NO: 9427 - RNA, 21 nt, Artificial Sequence
  LRRK2 RNA guide
ggcagcgauggaaguuuuucu

SEQ ID NO: 9428 - RNA, 21 nt, Artificial Sequence
  LRRK2 RNA guide
uagacagcacaucuucagaaa

SEQ ID NO: 9429 - RNA, 21 nt, Artificial Sequence
  LRRK2 RNA guide
ucagaaaaacuuccaucgcug

SEQ ID NO: 9430 - RNA, 21 nt, Artificial Sequence
  LRRK2 RNA guide
ucaggcagcgauggaaguuuu

SEQ ID NO: 9431 - RNA, 21 nt, Artificial Sequence
  LRRK2 RNA guide
ucuucagaaaaacuuccaucg

SEQ ID NO: 9432 - RNA, 21 nt, Artificial Sequence
  LRRK2 RNA guide
uggaaguuuuucugaagaugu

SEQ ID NO: 9433 - RNA, 21 nt, Artificial Sequence
  LRRK2 RNA guide
uuagacagcacaucuucagaa

SEQ ID NO: 9434 - RNA, 21 nt, Artificial Sequence
  LRRK2 RNA guide
uucagaaaaacuuccaucgcu

SEQ ID NO: 9435 - RNA, 21 nt, Artificial Sequence
  LRRK2 RNA guide
uuuagacagcacaucuucaga

SEQ ID NO: 9436 - RNA, 22 nt, Artificial Sequence
  LRRK2 RNA guide
aaaaacuuccaucgcugccuga

SEQ ID NO: 9437 - RNA, 22 nt, Artificial Sequence
  LRRK2 RNA guide
aaaacuuccaucgcugccugag

SEQ ID NO: 9438 - RNA, 22 nt, Artificial Sequence
  LRRK2 RNA guide
aaacuuccaucgcugccugagg

SEQ ID NO: 9439 - RNA, 22 nt, Artificial Sequence
  LRRK2 RNA guide
aacagccucaggcagcgaugga

SEQ ID NO: 9440 - RNA, 22 nt, Artificial Sequence
  LRRK2 RNA guide
aacuuccaucgcugccugaggc

SEQ ID NO: 9441 - RNA, 22 nt, Artificial Sequence
  LRRK2 RNA guide
aaguuuuucugaagaugugcug

SEQ ID NO: 9442 - RNA, 22 nt, Artificial Sequence
  LRRK2 RNA guide
acagcacaucuucagaaaaacu

SEQ ID NO: 9443 - RNA, 22 nt, Artificial Sequence
  LRRK2 RNA guide
acagccucaggcagcgauggaa

SEQ ID NO: 9444 - RNA, 22 nt, Artificial Sequence
  LRRK2 RNA guide
acaucuucagaaaaacuuccau

SEQ ID NO: 9445 - RNA, 22 nt, Artificial Sequence
  LRRK2 RNA guide
acuuccaucgcugccugaggcu

SEQ ID NO: 9446 - RNA, 22 nt, Artificial Sequence
  LRRK2 RNA guide
agaaaaacuuccaucgcugccu

SEQ ID NO: 9447 - RNA, 22 nt, Artificial Sequence
  LRRK2 RNA guide
agacagcacaucuucagaaaaa

SEQ ID NO: 9448 - RNA, 22 nt, Artificial Sequence
  LRRK2 RNA guide
agcacaucuucagaaaaacuuc

SEQ ID NO: 9449 - RNA, 22 nt, Artificial Sequence
  LRRK2 RNA guide
agccucaggcagcgauggaagu

SEQ ID NO: 9450 - RNA, 22 nt, Artificial Sequence
  LRRK2 RNA guide
agcgauggaaguuuuucugaag

SEQ ID NO: 9451 - RNA, 22 nt, Artificial Sequence
  LRRK2 RNA guide
aggaacagccucaggcagcgau

SEQ ID NO: 9452 - RNA, 22 nt, Artificial Sequence
  LRRK2 RNA guide
aggcagcgauggaaguuuuucu

SEQ ID NO: 9453 - RNA, 22 nt, Artificial Sequence
  LRRK2 RNA guide
aguuuuucugaagaugugcugu

SEQ ID NO: 9454 - RNA, 22 nt, Artificial Sequence
  LRRK2 RNA guide
aucuucagaaaaacuuccaucg

SEQ ID NO: 9455 - RNA, 22 nt, Artificial Sequence
  LRRK2 RNA guide
auggaaguuuuucugaagaugu

SEQ ID NO: 9456 - RNA, 22 nt, Artificial Sequence
  LRRK2 RNA guide
auuuagacagcacaucuucaga

SEQ ID NO: 9457 - RNA, 22 nt, Artificial Sequence
  LRRK2 RNA guide
cacaucuucagaaaaacuucca

SEQ ID NO: 9458 - RNA, 22 nt, Artificial Sequence
  LRRK2 RNA guide
cagaaaaacuuccaucgcugcc

SEQ ID NO: 9459 - RNA, 22 nt, Artificial Sequence
  LRRK2 RNA guide
cagcacaucuucagaaaaacuu

SEQ ID NO: 9460 - RNA, 22 nt, Artificial Sequence
  LRRK2 RNA guide
cagccucaggcagcgauggaag

SEQ ID NO: 9461 - RNA, 22 nt, Artificial Sequence
  LRRK2 RNA guide
cagcgauggaaguuuuucugaa

SEQ ID NO: 9462 - RNA, 22 nt, Artificial Sequence
  LRRK2 RNA guide
caggcagcgauggaaguuuuuc

SEQ ID NO: 9463 - RNA, 22 nt, Artificial Sequence
  LRRK2 RNA guide
caucuucagaaaaacuuccauc

SEQ ID NO: 9464 - RNA, 22 nt, Artificial Sequence
  LRRK2 RNA guide
ccucaggcagcgauggaaguuu

SEQ ID NO: 9465 - RNA, 22 nt, Artificial Sequence
  LRRK2 RNA guide
cgauggaaguuuuucugaagau

SEQ ID NO: 9466 - RNA, 22 nt, Artificial Sequence
  LRRK2 RNA guide
cucaggcagcgauggaaguuuu

SEQ ID NO: 9467 - RNA, 22 nt, Artificial Sequence
  LRRK2 RNA guide
cuucagaaaaacuuccaucgcu

SEQ ID NO: 9468 - RNA, 22 nt, Artificial Sequence
  LRRK2 RNA guide
gaaaaacuuccaucgcugccug

SEQ ID NO: 9469 - RNA, 22 nt, Artificial Sequence
  LRRK2 RNA guide
gaacagccucaggcagcgaugg

SEQ ID NO: 9470 - RNA, 22 nt, Artificial Sequence
  LRRK2 RNA guide
gaaguuuuucugaagaugugcu

SEQ ID NO: 9471 - RNA, 22 nt, Artificial Sequence
  LRRK2 RNA guide
gacagcacaucuucagaaaaac

SEQ ID NO: 9472 - RNA, 22 nt, Artificial Sequence
  LRRK2 RNA guide
gauggaaguuuuucugaagaug

SEQ ID NO: 9473 - RNA, 22 nt, Artificial Sequence
  LRRK2 RNA guide
gcacaucuucagaaaaacuucc

SEQ ID NO: 9474 - RNA, 22 nt, Artificial Sequence
  LRRK2 RNA guide
gcagcgauggaaguuuuucuga

SEQ ID NO: 9475 - RNA, 22 nt, Artificial Sequence
  LRRK2 RNA guide
gccucaggcagcgauggaaguu

SEQ ID NO: 9476 - RNA, 22 nt, Artificial Sequence
  LRRK2 RNA guide
gcgauggaaguuuuucugaaga

SEQ ID NO: 9477 - RNA, 22 nt, Artificial Sequence
  LRRK2 RNA guide
ggaacagccucaggcagcgaug

SEQ ID NO: 9478 - RNA, 22 nt, Artificial Sequence
  LRRK2 RNA guide
ggaaguuuuucugaagaugugc

SEQ ID NO: 9479 - RNA, 22 nt, Artificial Sequence
  LRRK2 RNA guide
ggcagcgauggaaguuuuucug

SEQ ID NO: 9480 - RNA, 22 nt, Artificial Sequence
  LRRK2 RNA guide
uagacagcacaucuucagaaaa

SEQ ID NO: 9481 - RNA, 22 nt, Artificial Sequence
  LRRK2 RNA guide
ucagaaaaacuuccaucgcugc

SEQ ID NO: 9482 - RNA, 22 nt, Artificial Sequence
  LRRK2 RNA guide
ucaggcagcgauggaaguuuuu

SEQ ID NO: 9483 - RNA, 22 nt, Artificial Sequence
  LRRK2 RNA guide
ucuucagaaaaacuuccaucgc

SEQ ID NO: 9484 - RNA, 22 nt, Artificial Sequence
  LRRK2 RNA guide
uggaaguuuuucugaagaugug

SEQ ID NO: 9485 - RNA, 22 nt, Artificial Sequence
  LRRK2 RNA guide
uuagacagcacaucuucagaaa

SEQ ID NO: 9486 - RNA, 22 nt, Artificial Sequence
  LRRK2 RNA guide
uucagaaaaacuuccaucgcug

SEQ ID NO: 9487 - RNA, 22 nt, Artificial Sequence
  LRRK2 RNA guide
uuuagacagcacaucuucagaa

SEQ ID NO: 9488 - RNA, 20 nt, Artificial Sequence
  LRRK2 RNA guide
aaagguccauucaucaaauu

SEQ ID NO: 9489 - RNA, 20 nt, Artificial Sequence
  LRRK2 RNA guide
aaauucagacagcacaucuu

SEQ ID NO: 9490 - RNA, 20 nt, Artificial Sequence
  LRRK2 RNA guide
aagaugugcugucugaauuu

SEQ ID NO: 9491 - RNA, 20 nt, Artificial Sequence
  LRRK2 RNA guide
aagguccauucaucaaauuc

SEQ ID NO: 9492 - RNA, 20 nt, Artificial Sequence
  LRRK2 RNA guide
aauaaagguccauucaucaa

SEQ ID NO: 9493 - RNA, 20 nt, Artificial Sequence
  LRRK2 RNA guide
aauucagacagcacaucuuc

SEQ ID NO: 9494 - RNA, 20 nt, Artificial Sequence
  LRRK2 RNA guide
aauuuuucugaagaugugcu

SEQ ID NO: 9495 - RNA, 20 nt, Artificial Sequence
  LRRK2 RNA guide
agaugugcugucugaauuug

SEQ ID NO: 9496 - RNA, 20 nt, Artificial Sequence
  LRRK2 RNA guide
agguccauucaucaaauuca

SEQ ID NO: 9497 - RNA, 20 nt, Artificial Sequence
  LRRK2 RNA guide
auaaagguccauucaucaaa

SEQ ID NO: 9498 - RNA, 20 nt, Artificial Sequence
  LRRK2 RNA guide
aucaaauucagacagcacau

SEQ ID NO: 9499 - RNA, 20 nt, Artificial Sequence
  LRRK2 RNA guide
augugcugucugaauuugau

SEQ ID NO: 9500 - RNA, 20 nt, Artificial Sequence
  LRRK2 RNA guide
auucagacagcacaucuuca

SEQ ID NO: 9501 - RNA, 20 nt, Artificial Sequence
  LRRK2 RNA guide
auucaucaaauucagacagc

SEQ ID NO: 9502 - RNA, 20 nt, Artificial Sequence
  LRRK2 RNA guide
auuuuucugaagaugugcug

SEQ ID NO: 9503 - RNA, 20 nt, Artificial Sequence
  LRRK2 RNA guide
caaauucagacagcacaucu

SEQ ID NO: 9504 - RNA, 20 nt, Artificial Sequence
  LRRK2 RNA guide
caucaaauucagacagcaca

SEQ ID NO: 9505 - RNA, 20 nt, Artificial Sequence
  LRRK2 RNA guide
cauucaucaaauucagacag

SEQ ID NO: 9506 - RNA, 20 nt, Artificial Sequence
  LRRK2 RNA guide
ccauucaucaaauucagaca

SEQ ID NO: 9507 - RNA, 20 nt, Artificial Sequence
  LRRK2 RNA guide
cugaagaugugcugucugaa

SEQ ID NO: 9508 - RNA, 20 nt, Artificial Sequence
  LRRK2 RNA guide
cugaauuugaugaauggacc

SEQ ID NO: 9509 - RNA, 20 nt, Artificial Sequence
  LRRK2 RNA guide
cugucugaauuugaugaaug

SEQ ID NO: 9510 - RNA, 20 nt, Artificial Sequence
  LRRK2 RNA guide
gaagaugugcugucugaauu

SEQ ID NO: 9511 - RNA, 20 nt, Artificial Sequence
  LRRK2 RNA guide
gaauaaagguccauucauca

SEQ ID NO: 9512 - RNA, 20 nt, Artificial Sequence
  LRRK2 RNA guide
gaugugcugucugaauuuga

SEQ ID NO: 9513 - RNA, 20 nt, Artificial Sequence
  LRRK2 RNA guide
gcugucugaauuugaugaau

SEQ ID NO: 9514 - RNA, 20 nt, Artificial Sequence
  LRRK2 RNA guide
gguccauucaucaaauucag

SEQ ID NO: 9515 - RNA, 20 nt, Artificial Sequence
  LRRK2 RNA guide
guccauucaucaaauucaga

SEQ ID NO: 9516 - RNA, 20 nt, Artificial Sequence
  LRRK2 RNA guide
gucugaauuugaugaaugga

SEQ ID NO: 9517 - RNA, 20 nt, Artificial Sequence
  LRRK2 RNA guide
gugcugucugaauuugauga

SEQ ID NO: 9518 - RNA, 20 nt, Artificial Sequence
  LRRK2 RNA guide
uaaagguccauucaucaaau

SEQ ID NO: 9519 - RNA, 20 nt, Artificial Sequence
  LRRK2 RNA guide
ucaaauucagacagcacauc

SEQ ID NO: 9520 - RNA, 20 nt, Artificial Sequence
  LRRK2 RNA guide
ucagacagcacaucuucaga

SEQ ID NO: 9521 - RNA, 20 nt, Artificial Sequence
  LRRK2 RNA guide
ucaucaaauucagacagcac

SEQ ID NO: 9522 - RNA, 20 nt, Artificial Sequence
  LRRK2 RNA guide
uccauucaucaaauucagac

SEQ ID NO: 9523 - RNA, 20 nt, Artificial Sequence
  LRRK2 RNA guide
ucugaagaugugcugucuga

SEQ ID NO: 9524 - RNA, 20 nt, Artificial Sequence
  LRRK2 RNA guide
ucugaauuugaugaauggac

SEQ ID NO: 9525 - RNA, 20 nt, Artificial Sequence
  LRRK2 RNA guide
ugaagaugugcugucugaau

SEQ ID NO: 9526 - RNA, 20 nt, Artificial Sequence
  LRRK2 RNA guide
ugaauuugaugaauggaccu

SEQ ID NO: 9527 - RNA, 20 nt, Artificial Sequence
  LRRK2 RNA guide
ugcugucugaauuugaugaa

SEQ ID NO: 9528 - RNA, 20 nt, Artificial Sequence
  LRRK2 RNA guide
ugucugaauuugaugaaugg

SEQ ID NO: 9529 - RNA, 20 nt, Artificial Sequence
  LRRK2 RNA guide
ugugcugucugaauuugaug

SEQ ID NO: 9530 - RNA, 20 nt, Artificial Sequence
  LRRK2 RNA guide
uucagacagcacaucuucag

SEQ ID NO: 9531 - RNA, 20 nt, Artificial Sequence
  LRRK2 RNA guide
uucaucaaauucagacagca

SEQ ID NO: 9532 - RNA, 20 nt, Artificial Sequence
  LRRK2 RNA guide
uucugaagaugugcugucug

SEQ ID NO: 9533 - RNA, 20 nt, Artificial Sequence
  LRRK2 RNA guide
uuucugaagaugugcugucu

SEQ ID NO: 9534 - RNA, 20 nt, Artificial Sequence
  LRRK2 RNA guide
uuuucugaagaugugcuguc

SEQ ID NO: 9535 - RNA, 20 nt, Artificial Sequence
  LRRK2 RNA guide
uuuuucugaagaugugcugu

SEQ ID NO: 9536 - RNA, 21 nt, Artificial Sequence
  LRRK2 RNA guide
aaagguccauucaucaaauuc

SEQ ID NO: 9537 - RNA, 21 nt, Artificial Sequence
  LRRK2 RNA guide
aaauucagacagcacaucuuc

SEQ ID NO: 9538 - RNA, 21 nt, Artificial Sequence
  LRRK2 RNA guide
aagaugugcugucugaauuug

SEQ ID NO: 9539 - RNA, 21 nt, Artificial Sequence
  LRRK2 RNA guide
aagguccauucaucaaauuca

SEQ ID NO: 9540 - RNA, 21 nt, Artificial Sequence
  LRRK2 RNA guide
aauucagacagcacaucuuca

SEQ ID NO: 9541 - RNA, 21 nt, Artificial Sequence
  LRRK2 RNA guide
aauuuuucugaagaugugcug

SEQ ID NO: 9542 - RNA, 21 nt, Artificial Sequence
  LRRK2 RNA guide
agaugugcugucugaauuuga

SEQ ID NO: 9543 - RNA, 21 nt, Artificial Sequence
  LRRK2 RNA guide
agguccauucaucaaauucag

SEQ ID NO: 9544 - RNA, 21 nt, Artificial Sequence
  LRRK2 RNA guide
aucaaauucagacagcacauc

SEQ ID NO: 9545 - RNA, 21 nt, Artificial Sequence
  LRRK2 RNA guide
augugcugucugaauuugaug

SEQ ID NO: 9546 - RNA, 21 nt, Artificial Sequence
  LRRK2 RNA guide
auucagacagcacaucuucag

SEQ ID NO: 9547 - RNA, 21 nt, Artificial Sequence
  LRRK2 RNA guide
auucaucaaauucagacagca

SEQ ID NO: 9548 - RNA, 21 nt, Artificial Sequence
  LRRK2 RNA guide
auuuuucugaagaugugcugu

SEQ ID NO: 9549 - RNA, 21 nt, Artificial Sequence
  LRRK2 RNA guide
caaauucagacagcacaucuu

SEQ ID NO: 9550 - RNA, 21 nt, Artificial Sequence
  LRRK2 RNA guide
caucaaauucagacagcacau

SEQ ID NO: 9551 - RNA, 21 nt, Artificial Sequence
  LRRK2 RNA guide
cauucaucaaauucagacagc

SEQ ID NO: 9552 - RNA, 21 nt, Artificial Sequence
  LRRK2 RNA guide
ccauucaucaaauucagacag

SEQ ID NO: 9553 - RNA, 21 nt, Artificial Sequence
  LRRK2 RNA guide
cugaagaugugcugucugaau

SEQ ID NO: 9554 - RNA, 21 nt, Artificial Sequence
  LRRK2 RNA guide
cugaauuugaugaauggaccu

SEQ ID NO: 9555 - RNA, 21 nt, Artificial Sequence
  LRRK2 RNA guide
cugucugaauuugaugaaugg

SEQ ID NO: 9556 - RNA, 21 nt, Artificial Sequence
  LRRK2 RNA guide
gaagaugugcugucugaauuu

SEQ ID NO: 9557 - RNA, 21 nt, Artificial Sequence
  LRRK2 RNA guide
gaauaaagguccauucaucaa

SEQ ID NO: 9558 - RNA, 21 nt, Artificial Sequence
  LRRK2 RNA guide
gaugugcugucugaauuugau

SEQ ID NO: 9559 - RNA, 21 nt, Artificial Sequence
  LRRK2 RNA guide
gcugucugaauuugaugaaug

SEQ ID NO: 9560 - RNA, 21 nt, Artificial Sequence
  LRRK2 RNA guide
ggaauaaagguccauucauca

SEQ ID NO: 9561 - RNA, 21 nt, Artificial Sequence
  LRRK2 RNA guide
gguccauucaucaaauucaga

SEQ ID NO: 9562 - RNA, 21 nt, Artificial Sequence
  LRRK2 RNA guide
guccauucaucaaauucagac

SEQ ID NO: 9563 - RNA, 21 nt, Artificial Sequence
  LRRK2 RNA guide
gucugaauuugaugaauggac

SEQ ID NO: 9564 - RNA, 21 nt, Artificial Sequence
  LRRK2 RNA guide
gugcugucugaauuugaugaa

SEQ ID NO: 9565 - RNA, 21 nt, Artificial Sequence
  LRRK2 RNA guide
ucaaauucagacagcacaucu

SEQ ID NO: 9566 - RNA, 21 nt, Artificial Sequence
  LRRK2 RNA guide
ucagacagcacaucuucagaa

SEQ ID NO: 9567 - RNA, 21 nt, Artificial Sequence
  LRRK2 RNA guide
ucaucaaauucagacagcaca

SEQ ID NO: 9568 - RNA, 21 nt, Artificial Sequence
  LRRK2 RNA guide
uccauucaucaaauucagaca

SEQ ID NO: 9569 - RNA, 21 nt, Artificial Sequence
  LRRK2 RNA guide
ucugaagaugugcugucugaa

SEQ ID NO: 9570 - RNA, 21 nt, Artificial Sequence
  LRRK2 RNA guide
ucugaauuugaugaauggacc

SEQ ID NO: 9571 - RNA, 21 nt, Artificial Sequence
  LRRK2 RNA guide
ugaagaugugcugucugaauu

SEQ ID NO: 9572 - RNA, 21 nt, Artificial Sequence
  LRRK2 RNA guide
ugaauuugaugaauggaccuu

SEQ ID NO: 9573 - RNA, 21 nt, Artificial Sequence
  LRRK2 RNA guide
ugcugucugaauuugaugaau

SEQ ID NO: 9574 - RNA, 21 nt, Artificial Sequence
  LRRK2 RNA guide
ugucugaauuugaugaaugga

SEQ ID NO: 9575 - RNA, 21 nt, Artificial Sequence
  LRRK2 RNA guide
ugugcugucugaauuugauga

SEQ ID NO: 9576 - RNA, 21 nt, Artificial Sequence
  LRRK2 RNA guide
uucagacagcacaucuucaga

SEQ ID NO: 9577 - RNA, 21 nt, Artificial Sequence
  LRRK2 RNA guide
uucaucaaauucagacagcac

SEQ ID NO: 9578 - RNA, 21 nt, Artificial Sequence
  LRRK2 RNA guide
uucugaagaugugcugucuga

SEQ ID NO: 9579 - RNA, 21 nt, Artificial Sequence
  LRRK2 RNA guide
uuucugaagaugugcugucug

SEQ ID NO: 9580 - RNA, 21 nt, Artificial Sequence
  LRRK2 RNA guide
uuuucugaagaugugcugucu

SEQ ID NO: 9581 - RNA, 21 nt, Artificial Sequence
  LRRK2 RNA guide
uuuuucugaagaugugcuguc

SEQ ID NO: 9582 - RNA, 22 nt, Artificial Sequence
  LRRK2 RNA guide
aaagguccauucaucaaauuca

SEQ ID NO: 9583 - RNA, 22 nt, Artificial Sequence
  LRRK2 RNA guide
aaauucagacagcacaucuuca

SEQ ID NO: 9584 - RNA, 22 nt, Artificial Sequence
  LRRK2 RNA guide
aaauuuuucugaagaugugcug

SEQ ID NO: 9585 - RNA, 22 nt, Artificial Sequence
  LRRK2 RNA guide
aagaugugcugucugaauuuga

SEQ ID NO: 9586 - RNA, 22 nt, Artificial Sequence
  LRRK2 RNA guide
aagguccauucaucaaauucag

SEQ ID NO: 9587 - RNA, 22 nt, Artificial Sequence
  LRRK2 RNA guide
aauucagacagcacaucuucag

SEQ ID NO: 9588 - RNA, 22 nt, Artificial Sequence
  LRRK2 RNA guide
aauuuuucugaagaugugcugu

SEQ ID NO: 9589 - RNA, 22 nt, Artificial Sequence
  LRRK2 RNA guide
agaugugcugucugaauuugau

SEQ ID NO: 9590 - RNA, 22 nt, Artificial Sequence
  LRRK2 RNA guide
aggaauaaagguccauucauca

SEQ ID NO: 9591 - RNA, 22 nt, Artificial Sequence
  LRRK2 RNA guide
agguccauucaucaaauucaga

SEQ ID NO: 9592 - RNA, 22 nt, Artificial Sequence
  LRRK2 RNA guide
aucaaauucagacagcacaucu

SEQ ID NO: 9593 - RNA, 22 nt, Artificial Sequence
  LRRK2 RNA guide
augugcugucugaauuugauga

SEQ ID NO: 9594 - RNA, 22 nt, Artificial Sequence
  LRRK2 RNA guide
auucagacagcacaucuucaga

SEQ ID NO: 9595 - RNA, 22 nt, Artificial Sequence
  LRRK2 RNA guide
auucaucaaauucagacagcac

SEQ ID NO: 9596 - RNA, 22 nt, Artificial Sequence
  LRRK2 RNA guide
auuuuucugaagaugugcuguc

SEQ ID NO: 9597 - RNA, 22 nt, Artificial Sequence
  LRRK2 RNA guide
caaauucagacagcacaucuuc

SEQ ID NO: 9598 - RNA, 22 nt, Artificial Sequence
  LRRK2 RNA guide
caucaaauucagacagcacauc

SEQ ID NO: 9599 - RNA, 22 nt, Artificial Sequence
  LRRK2 RNA guide
cauucaucaaauucagacagca

SEQ ID NO: 9600 - RNA, 22 nt, Artificial Sequence
  LRRK2 RNA guide
ccauucaucaaauucagacagc

SEQ ID NO: 9601 - RNA, 22 nt, Artificial Sequence
  LRRK2 RNA guide
cugaagaugugcugucugaauu

SEQ ID NO: 9602 - RNA, 22 nt, Artificial Sequence
  LRRK2 RNA guide
cugaauuugaugaauggaccuu

SEQ ID NO: 9603 - RNA, 22 nt, Artificial Sequence
  LRRK2 RNA guide
cugucugaauuugaugaaugga

SEQ ID NO: 9604 - RNA, 22 nt, Artificial Sequence
  LRRK2 RNA guide
gaaauuuuucugaagaugugcu

SEQ ID NO: 9605 - RNA, 22 nt, Artificial Sequence
  LRRK2 RNA guide
gaagaugugcugucugaauuug

SEQ ID NO: 9606 - RNA, 22 nt, Artificial Sequence
  LRRK2 RNA guide
gaauaaagguccauucaucaaa

SEQ ID NO: 9607 - RNA, 22 nt, Artificial Sequence
  LRRK2 RNA guide
gaugugcugucugaauuugaug

SEQ ID NO: 9608 - RNA, 22 nt, Artificial Sequence
  LRRK2 RNA guide
gcugucugaauuugaugaaugg

SEQ ID NO: 9609 - RNA, 22 nt, Artificial Sequence
  LRRK2 RNA guide
ggaauaaagguccauucaucaa

SEQ ID NO: 9610 - RNA, 22 nt, Artificial Sequence
  LRRK2 RNA guide
gguccauucaucaaauucagac

SEQ ID NO: 9611 - RNA, 22 nt, Artificial Sequence
  LRRK2 RNA guide
guccauucaucaaauucagaca

SEQ ID NO: 9612 - RNA, 22 nt, Artificial Sequence
  LRRK2 RNA guide
gucugaauuugaugaauggacc

SEQ ID NO: 9613 - RNA, 22 nt, Artificial Sequence
  LRRK2 RNA guide
gugcugucugaauuugaugaau

SEQ ID NO: 9614 - RNA, 22 nt, Artificial Sequence
  LRRK2 RNA guide
uaaagguccauucaucaaauuc

SEQ ID NO: 9615 - RNA, 22 nt, Artificial Sequence
  LRRK2 RNA guide
ucaaauucagacagcacaucuu

SEQ ID NO: 9616 - RNA, 22 nt, Artificial Sequence
  LRRK2 RNA guide
ucagacagcacaucuucagaaa

SEQ ID NO: 9617 - RNA, 22 nt, Artificial Sequence
  LRRK2 RNA guide
ucaucaaauucagacagcacau

SEQ ID NO: 9618 - RNA, 22 nt, Artificial Sequence
  LRRK2 RNA guide
uccauucaucaaauucagacag

SEQ ID NO: 9619 - RNA, 22 nt, Artificial Sequence
  LRRK2 RNA guide
ucugaagaugugcugucugaau

SEQ ID NO: 9620 - RNA, 22 nt, Artificial Sequence
  LRRK2 RNA guide
ucugaauuugaugaauggaccu

SEQ ID NO: 9621 - RNA, 22 nt, Artificial Sequence
  LRRK2 RNA guide
ugaagaugugcugucugaauuu

SEQ ID NO: 9622 - RNA, 22 nt, Artificial Sequence
  LRRK2 RNA guide
ugaauuugaugaauggaccuuu

SEQ ID NO: 9623 - RNA, 22 nt, Artificial Sequence
  LRRK2 RNA guide
ugcugucugaauuugaugaaug

SEQ ID NO: 9624 - RNA, 22 nt, Artificial Sequence
  LRRK2 RNA guide
ugucugaauuugaugaauggac

SEQ ID NO: 9625 - RNA, 22 nt, Artificial Sequence
  LRRK2 RNA guide
ugugcugucugaauuugaugaa

SEQ ID NO: 9626 - RNA, 22 nt, Artificial Sequence
  LRRK2 RNA guide
uucagacagcacaucuucagaa

SEQ ID NO: 9627 - RNA, 22 nt, Artificial Sequence
  LRRK2 RNA guide
uucaucaaauucagacagcaca

SEQ ID NO: 9628 - RNA, 22 nt, Artificial Sequence
  LRRK2 RNA guide
uucugaagaugugcugucugaa

SEQ ID NO: 9629 - RNA, 22 nt, Artificial Sequence
  LRRK2 RNA guide
uuucugaagaugugcugucuga

SEQ ID NO: 9630 - RNA, 22 nt, Artificial Sequence
  LRRK2 RNA guide
uuuucugaagaugugcugucug

SEQ ID NO: 9631 - RNA, 22 nt, Artificial Sequence
  LRRK2 RNA guide
uuuuucugaagaugugcugucu

SEQ ID NO: 9632 - RNA, 20 nt, Artificial Sequence
  LRRK2 RNA guide
aaaauaggaagugaaggccu

SEQ ID NO: 9633 - RNA, 20 nt, Artificial Sequence
  LRRK2 RNA guide
aaauaggaagugaaggccua

SEQ ID NO: 9634 - RNA, 20 nt, Artificial Sequence
  LRRK2 RNA guide
aaauaggccuucacuuccua

SEQ ID NO: 9635 - RNA, 20 nt, Artificial Sequence
  LRRK2 RNA guide
aagaaauaggccuucacuuc

SEQ ID NO: 9636 - RNA, 20 nt, Artificial Sequence
  LRRK2 RNA guide
aaggccuauuucuugugaaa

SEQ ID NO: 9637 - RNA, 20 nt, Artificial Sequence
  LRRK2 RNA guide
aagugaaggccuauuucuug

SEQ ID NO: 9638 - RNA, 20 nt, Artificial Sequence
  LRRK2 RNA guide
aauaggaagugaaggccuau

SEQ ID NO: 9639 - RNA, 20 nt, Artificial Sequence
  LRRK2 RNA guide
aauaggccuucacuuccuau

SEQ ID NO: 9640 - RNA, 20 nt, Artificial Sequence
  LRRK2 RNA guide
acaagaaauaggccuucacu

SEQ ID NO: 9641 - RNA, 20 nt, Artificial Sequence
  LRRK2 RNA guide
agaaauaggccuucacuucc

SEQ ID NO: 9642 - RNA, 20 nt, Artificial Sequence
  LRRK2 RNA guide
aggaagugaaggccuauuuc

SEQ ID NO: 9643 - RNA, 20 nt, Artificial Sequence
  LRRK2 RNA guide
aggccuauuucuugugaaaa

SEQ ID NO: 9644 - RNA, 20 nt, Artificial Sequence
  LRRK2 RNA guide
aggccuucacuuccuauuuu

SEQ ID NO: 9645 - RNA, 20 nt, Artificial Sequence
  LRRK2 RNA guide
agugaaggccuauuucuugu

SEQ ID NO: 9646 - RNA, 20 nt, Artificial Sequence
  LRRK2 RNA guide
auaggaagugaaggccuauu

SEQ ID NO: 9647 - RNA, 20 nt, Artificial Sequence
  LRRK2 RNA guide
auaggccuucacuuccuauu

SEQ ID NO: 9648 - RNA, 20 nt, Artificial Sequence
  LRRK2 RNA guide
caaaauaggaagugaaggcc

SEQ ID NO: 9649 - RNA, 20 nt, Artificial Sequence
  LRRK2 RNA guide
caagaaauaggccuucacuu

SEQ ID NO: 9650 - RNA, 20 nt, Artificial Sequence
  LRRK2 RNA guide
cacaagaaauaggccuucac

SEQ ID NO: 9651 - RNA, 20 nt, Artificial Sequence
  LRRK2 RNA guide
cuuuuucacaagaaauaggc

SEQ ID NO: 9652 - RNA, 20 nt, Artificial Sequence
  LRRK2 RNA guide
gaaauaggccuucacuuccu

SEQ ID NO: 9653 - RNA, 20 nt, Artificial Sequence
  LRRK2 RNA guide
gaaggccuauuucuugugaa

SEQ ID NO: 9654 - RNA, 20 nt, Artificial Sequence
  LRRK2 RNA guide
gaagugaaggccuauuucuu

SEQ ID NO: 9655 - RNA, 20 nt, Artificial Sequence
  LRRK2 RNA guide
gccuauuucuugugaaaaag

SEQ ID NO: 9656 - RNA, 20 nt, Artificial Sequence
  LRRK2 RNA guide
ggaagugaaggccuauuucu

SEQ ID NO: 9657 - RNA, 20 nt, Artificial Sequence
  LRRK2 RNA guide
ggccuauuucuugugaaaaa

SEQ ID NO: 9658 - RNA, 20 nt, Artificial Sequence
  LRRK2 RNA guide
ggccuucacuuccuauuuug

SEQ ID NO: 9659 - RNA, 20 nt, Artificial Sequence
  LRRK2 RNA guide
gugaaggccuauuucuugug

SEQ ID NO: 9660 - RNA, 20 nt, Artificial Sequence
  LRRK2 RNA guide
uaggaagugaaggccuauuu

SEQ ID NO: 9661 - RNA, 20 nt, Artificial Sequence
  LRRK2 RNA guide
uaggccuucacuuccuauuu

SEQ ID NO: 9662 - RNA, 20 nt, Artificial Sequence
  LRRK2 RNA guide
ucaaaauaggaagugaaggc

SEQ ID NO: 9663 - RNA, 20 nt, Artificial Sequence
  LRRK2 RNA guide
ucacaagaaauaggccuuca

SEQ ID NO: 9664 - RNA, 20 nt, Artificial Sequence
  LRRK2 RNA guide
ucuuuuucacaagaaauagg

SEQ ID NO: 9665 - RNA, 20 nt, Artificial Sequence
  LRRK2 RNA guide
ugaaggccuauuucuuguga

SEQ ID NO: 9666 - RNA, 20 nt, Artificial Sequence
  LRRK2 RNA guide
uucaaaauaggaagugaagg

SEQ ID NO: 9667 - RNA, 20 nt, Artificial Sequence
  LRRK2 RNA guide
uucacaagaaauaggccuuc

SEQ ID NO: 9668 - RNA, 20 nt, Artificial Sequence
  LRRK2 RNA guide
uuucaaaauaggaagugaag

SEQ ID NO: 9669 - RNA, 20 nt, Artificial Sequence
  LRRK2 RNA guide
uuucacaagaaauaggccuu

SEQ ID NO: 9670 - RNA, 20 nt, Artificial Sequence
  LRRK2 RNA guide
uuuucacaagaaauaggccu

SEQ ID NO: 9671 - RNA, 20 nt, Artificial Sequence
  LRRK2 RNA guide
uuuuucacaagaaauaggcc

SEQ ID NO: 9672 - RNA, 21 nt, Artificial Sequence
  LRRK2 RNA guide
aaaauaggaagugaaggccua

SEQ ID NO: 9673 - RNA, 21 nt, Artificial Sequence
  LRRK2 RNA guide
aaauaggaagugaaggccuau

SEQ ID NO: 9674 - RNA, 21 nt, Artificial Sequence
  LRRK2 RNA guide
aaauaggccuucacuuccuau

SEQ ID NO: 9675 - RNA, 21 nt, Artificial Sequence
  LRRK2 RNA guide
aagaaauaggccuucacuucc

SEQ ID NO: 9676 - RNA, 21 nt, Artificial Sequence
  LRRK2 RNA guide
aaggccuauuucuugugaaaa

SEQ ID NO: 9677 - RNA, 21 nt, Artificial Sequence
  LRRK2 RNA guide
aagugaaggccuauuucuugu

SEQ ID NO: 9678 - RNA, 21 nt, Artificial Sequence
  LRRK2 RNA guide
aauaggaagugaaggccuauu

SEQ ID NO: 9679 - RNA, 21 nt, Artificial Sequence
  LRRK2 RNA guide
aauaggccuucacuuccuauu

SEQ ID NO: 9680 - RNA, 21 nt, Artificial Sequence
  LRRK2 RNA guide
acaagaaauaggccuucacuu

SEQ ID NO: 9681 - RNA, 21 nt, Artificial Sequence
  LRRK2 RNA guide
agaaauaggccuucacuuccu

SEQ ID NO: 9682 - RNA, 21 nt, Artificial Sequence
  LRRK2 RNA guide
aggaagugaaggccuauuucu

SEQ ID NO: 9683 - RNA, 21 nt, Artificial Sequence
  LRRK2 RNA guide
aggccuauuucuugugaaaaa

SEQ ID NO: 9684 - RNA, 21 nt, Artificial Sequence
  LRRK2 RNA guide
aggccuucacuuccuauuuug

SEQ ID NO: 9685 - RNA, 21 nt, Artificial Sequence
  LRRK2 RNA guide
agugaaggccuauuucuugug

SEQ ID NO: 9686 - RNA, 21 nt, Artificial Sequence
  LRRK2 RNA guide
auaggaagugaaggccuauuu

SEQ ID NO: 9687 - RNA, 21 nt, Artificial Sequence
  LRRK2 RNA guide
auaggccuucacuuccuauuu

SEQ ID NO: 9688 - RNA, 21 nt, Artificial Sequence
  LRRK2 RNA guide
caaaauaggaagugaaggccu

SEQ ID NO: 9689 - RNA, 21 nt, Artificial Sequence
  LRRK2 RNA guide
caagaaauaggccuucacuuc

SEQ ID NO: 9690 - RNA, 21 nt, Artificial Sequence
  LRRK2 RNA guide
cacaagaaauaggccuucacu

SEQ ID NO: 9691 - RNA, 21 nt, Artificial Sequence
  LRRK2 RNA guide
cuuuuucacaagaaauaggcc

SEQ ID NO: 9692 - RNA, 21 nt, Artificial Sequence
  LRRK2 RNA guide
gaaauaggccuucacuuccua

SEQ ID NO: 9693 - RNA, 21 nt, Artificial Sequence
  LRRK2 RNA guide
gaaggccuauuucuugugaaa

SEQ ID NO: 9694 - RNA, 21 nt, Artificial Sequence
  LRRK2 RNA guide
gaagugaaggccuauuucuug

SEQ ID NO: 9695 - RNA, 21 nt, Artificial Sequence
  LRRK2 RNA guide
gccuauuucuugugaaaaaga

SEQ ID NO: 9696 - RNA, 21 nt, Artificial Sequence
  LRRK2 RNA guide
ggaagugaaggccuauuucuu

SEQ ID NO: 9697 - RNA, 21 nt, Artificial Sequence
  LRRK2 RNA guide
ggccuauuucuugugaaaaag

SEQ ID NO: 9698 - RNA, 21 nt, Artificial Sequence
  LRRK2 RNA guide
ggccuucacuuccuauuuuga

SEQ ID NO: 9699 - RNA, 21 nt, Artificial Sequence
  LRRK2 RNA guide
gugaaggccuauuucuuguga

SEQ ID NO: 9700 - RNA, 21 nt, Artificial Sequence
  LRRK2 RNA guide
uaggaagugaaggccuauuuc

SEQ ID NO: 9701 - RNA, 21 nt, Artificial Sequence
  LRRK2 RNA guide
uaggccuucacuuccuauuuu

SEQ ID NO: 9702 - RNA, 21 nt, Artificial Sequence
  LRRK2 RNA guide
ucaaaauaggaagugaaggcc

SEQ ID NO: 9703 - RNA, 21 nt, Artificial Sequence
  LRRK2 RNA guide
ucacaagaaauaggccuucac

SEQ ID NO: 9704 - RNA, 21 nt, Artificial Sequence
  LRRK2 RNA guide
ucuuuuucacaagaaauaggc

SEQ ID NO: 9705 - RNA, 21 nt, Artificial Sequence
  LRRK2 RNA guide
ugaaggccuauuucuugugaa

SEQ ID NO: 9706 - RNA, 21 nt, Artificial Sequence
  LRRK2 RNA guide
uucaaaauaggaagugaaggc

SEQ ID NO: 9707 - RNA, 21 nt, Artificial Sequence
  LRRK2 RNA guide
uucacaagaaauaggccuuca

SEQ ID NO: 9708 - RNA, 21 nt, Artificial Sequence
  LRRK2 RNA guide
uuucaaaauaggaagugaagg

SEQ ID NO: 9709 - RNA, 21 nt, Artificial Sequence
  LRRK2 RNA guide
uuucacaagaaauaggccuuc

SEQ ID NO: 9710 - RNA, 21 nt, Artificial Sequence
  LRRK2 RNA guide
uuuucacaagaaauaggccuu

SEQ ID NO: 9711 - RNA, 21 nt, Artificial Sequence
  LRRK2 RNA guide
uuuuucacaagaaauaggccu

SEQ ID NO: 9712 - RNA, 22 nt, Artificial Sequence
  LRRK2 RNA guide
aaaauaggaagugaaggccuau

SEQ ID NO: 9713 - RNA, 22 nt, Artificial Sequence
  LRRK2 RNA guide
aaauaggaagugaaggccuauu

SEQ ID NO: 9714 - RNA, 22 nt, Artificial Sequence
  LRRK2 RNA guide
aaauaggccuucacuuccuauu

SEQ ID NO: 9715 - RNA, 22 nt, Artificial Sequence
  LRRK2 RNA guide
aagaaauaggccuucacuuccu

SEQ ID NO: 9716 - RNA, 22 nt, Artificial Sequence
  LRRK2 RNA guide
aaggccuauuucuugugaaaaa

SEQ ID NO: 9717 - RNA, 22 nt, Artificial Sequence
  LRRK2 RNA guide
aagugaaggccuauuucuugug

SEQ ID NO: 9718 - RNA, 22 nt, Artificial Sequence
  LRRK2 RNA guide
aauaggaagugaaggccuauuu

SEQ ID NO: 9719 - RNA, 22 nt, Artificial Sequence
  LRRK2 RNA guide
aauaggccuucacuuccuauuu

SEQ ID NO: 9720 - RNA, 22 nt, Artificial Sequence
  LRRK2 RNA guide
acaagaaauaggccuucacuuc

SEQ ID NO: 9721 - RNA, 22 nt, Artificial Sequence
  LRRK2 RNA guide
agaaauaggccuucacuuccua

SEQ ID NO: 9722 - RNA, 22 nt, Artificial Sequence
  LRRK2 RNA guide
aggaagugaaggccuauuucuu

SEQ ID NO: 9723 - RNA, 22 nt, Artificial Sequence
  LRRK2 RNA guide
aggccuauuucuugugaaaaag

SEQ ID NO: 9724 - RNA, 22 nt, Artificial Sequence
  LRRK2 RNA guide
aggccuucacuuccuauuuuga

SEQ ID NO: 9725 - RNA, 22 nt, Artificial Sequence
  LRRK2 RNA guide
agugaaggccuauuucuuguga

SEQ ID NO: 9726 - RNA, 22 nt, Artificial Sequence
  LRRK2 RNA guide
auaggaagugaaggccuauuuc

SEQ ID NO: 9727 - RNA, 22 nt, Artificial Sequence
  LRRK2 RNA guide
auaggccuucacuuccuauuuu

SEQ ID NO: 9728 - RNA, 22 nt, Artificial Sequence
  LRRK2 RNA guide
caaaauaggaagugaaggccua

SEQ ID NO: 9729 - RNA, 22 nt, Artificial Sequence
  LRRK2 RNA guide
caagaaauaggccuucacuucc

SEQ ID NO: 9730 - RNA, 22 nt, Artificial Sequence
  LRRK2 RNA guide
cacaagaaauaggccuucacuu

SEQ ID NO: 9731 - RNA, 22 nt, Artificial Sequence
  LRRK2 RNA guide
cuuuuucacaagaaauaggccu

SEQ ID NO: 9732 - RNA, 22 nt, Artificial Sequence
  LRRK2 RNA guide
gaaauaggccuucacuuccuau

SEQ ID NO: 9733 - RNA, 22 nt, Artificial Sequence
  LRRK2 RNA guide
gaaggccuauuucuugugaaaa

SEQ ID NO: 9734 - RNA, 22 nt, Artificial Sequence
  LRRK2 RNA guide
gaagugaaggccuauuucuugu

SEQ ID NO: 9735 - RNA, 22 nt, Artificial Sequence
  LRRK2 RNA guide
gccuauuucuugugaaaaagaa

SEQ ID NO: 9736 - RNA, 22 nt, Artificial Sequence
  LRRK2 RNA guide
ggaagugaaggccuauuucuug

SEQ ID NO: 9737 - RNA, 22 nt, Artificial Sequence
  LRRK2 RNA guide
ggccuauuucuugugaaaaaga

SEQ ID NO: 9738 - RNA, 22 nt, Artificial Sequence
  LRRK2 RNA guide
ggccuucacuuccuauuuugaa

SEQ ID NO: 9739 - RNA, 22 nt, Artificial Sequence
  LRRK2 RNA guide
gugaaggccuauuucuugugaa

SEQ ID NO: 9740 - RNA, 22 nt, Artificial Sequence
  LRRK2 RNA guide
uaggaagugaaggccuauuucu

SEQ ID NO: 9741 - RNA, 22 nt, Artificial Sequence
  LRRK2 RNA guide
uaggccuucacuuccuauuuug

SEQ ID NO: 9742 - RNA, 22 nt, Artificial Sequence
  LRRK2 RNA guide
ucaaaauaggaagugaaggccu

SEQ ID NO: 9743 - RNA, 22 nt, Artificial Sequence
  LRRK2 RNA guide
ucacaagaaauaggccuucacu

SEQ ID NO: 9744 - RNA, 22 nt, Artificial Sequence
  LRRK2 RNA guide
ucuuuuucacaagaaauaggcc

SEQ ID NO: 9745 - RNA, 22 nt, Artificial Sequence
  LRRK2 RNA guide
ugaaggccuauuucuugugaaa

SEQ ID NO: 9746 - RNA, 22 nt, Artificial Sequence
  LRRK2 RNA guide
uucaaaauaggaagugaaggcc

SEQ ID NO: 9747 - RNA, 22 nt, Artificial Sequence
  LRRK2 RNA guide
uucacaagaaauaggccuucac

SEQ ID NO: 9748 - RNA, 22 nt, Artificial Sequence
  LRRK2 RNA guide
uucuuuuucacaagaaauaggc

SEQ ID NO: 9749 - RNA, 22 nt, Artificial Sequence
  LRRK2 RNA guide
uuucaaaauaggaagugaaggc

SEQ ID NO: 9750 - RNA, 22 nt, Artificial Sequence
  LRRK2 RNA guide
uuucacaagaaauaggccuuca

SEQ ID NO: 9751 - RNA, 22 nt, Artificial Sequence
  LRRK2 RNA guide
uuuucaaaauaggaagugaagg

SEQ ID NO: 9752 - RNA, 22 nt, Artificial Sequence
  LRRK2 RNA guide
uuuucacaagaaauaggccuuc

SEQ ID NO: 9753 - RNA, 22 nt, Artificial Sequence
  LRRK2 RNA guide
uuuuucacaagaaauaggccuu

SEQ ID NO: 9754 - RNA, 20 nt, Artificial Sequence
  LRRK2 RNA guide
aacgcuguaauacggcaucu

SEQ ID NO: 9755 - RNA, 20 nt, Artificial Sequence
  LRRK2 RNA guide
aauacggcaucucaguaaaa

SEQ ID NO: 9756 - RNA, 20 nt, Artificial Sequence
  LRRK2 RNA guide
aauuuuacugagaugccgua

SEQ ID NO: 9757 - RNA, 20 nt, Artificial Sequence
  LRRK2 RNA guide
acggcaucucaguaaaauuc

SEQ ID NO: 9758 - RNA, 20 nt, Artificial Sequence
  LRRK2 RNA guide
acugagaugccguauuacag

SEQ ID NO: 9759 - RNA, 20 nt, Artificial Sequence
  LRRK2 RNA guide
agaauuuuacugagaugccg

SEQ ID NO: 9760 - RNA, 20 nt, Artificial Sequence
  LRRK2 RNA guide
agcaacgcuguaauacggca

SEQ ID NO: 9761 - RNA, 20 nt, Artificial Sequence
  LRRK2 RNA guide
aggagaauuuuacugagaug

SEQ ID NO: 9762 - RNA, 20 nt, Artificial Sequence
  LRRK2 RNA guide
aguguaggagaauuuuacug

SEQ ID NO: 9763 - RNA, 20 nt, Artificial Sequence
  LRRK2 RNA guide
auacggcaucucaguaaaau

SEQ ID NO: 9764 - RNA, 20 nt, Artificial Sequence
  LRRK2 RNA guide
aucucaguaaaauucuccua

SEQ ID NO: 9765 - RNA, 20 nt, Artificial Sequence
  LRRK2 RNA guide
auuuuacugagaugccguau

SEQ ID NO: 9766 - RNA, 20 nt, Artificial Sequence
  LRRK2 RNA guide
caacgcuguaauacggcauc

SEQ ID NO: 9767 - RNA, 20 nt, Artificial Sequence
  LRRK2 RNA guide
caauuaguguaggagaauuu

SEQ ID NO: 9768 - RNA, 20 nt, Artificial Sequence
  LRRK2 RNA guide
caguaaaauucuccuacacu

SEQ ID NO: 9769 - RNA, 20 nt, Artificial Sequence
  LRRK2 RNA guide
caucucaguaaaauucuccu

SEQ ID NO: 9770 - RNA, 20 nt, Artificial Sequence
  LRRK2 RNA guide
cgcuguaauacggcaucuca

SEQ ID NO: 9771 - RNA, 20 nt, Artificial Sequence
  LRRK2 RNA guide
cggcaucucaguaaaauucu

SEQ ID NO: 9772 - RNA, 20 nt, Artificial Sequence
  LRRK2 RNA guide
cucaguaaaauucuccuaca

SEQ ID NO: 9773 - RNA, 20 nt, Artificial Sequence
  LRRK2 RNA guide
cugagaugccguauuacagc

SEQ ID NO: 9774 - RNA, 20 nt, Artificial Sequence
  LRRK2 RNA guide
cuguaauacggcaucucagu

SEQ ID NO: 9775 - RNA, 20 nt, Artificial Sequence
  LRRK2 RNA guide
gaauuuuacugagaugccgu

SEQ ID NO: 9776 - RNA, 20 nt, Artificial Sequence
  LRRK2 RNA guide
gagaauuuuacugagaugcc

SEQ ID NO: 9777 - RNA, 20 nt, Artificial Sequence
  LRRK2 RNA guide
gcaacgcuguaauacggcau

SEQ ID NO: 9778 - RNA, 20 nt, Artificial Sequence
  LRRK2 RNA guide
gcaucucaguaaaauucucc

SEQ ID NO: 9779 - RNA, 20 nt, Artificial Sequence
  LRRK2 RNA guide
gcuguaauacggcaucucag

SEQ ID NO: 9780 - RNA, 20 nt, Artificial Sequence
  LRRK2 RNA guide
ggagaauuuuacugagaugc

SEQ ID NO: 9781 - RNA, 20 nt, Artificial Sequence
  LRRK2 RNA guide
ggcaucucaguaaaauucuc

SEQ ID NO: 9782 - RNA, 20 nt, Artificial Sequence
  LRRK2 RNA guide
guaauacggcaucucaguaa

SEQ ID NO: 9783 - RNA, 20 nt, Artificial Sequence
  LRRK2 RNA guide
guaggagaauuuuacugaga

SEQ ID NO: 9784 - RNA, 20 nt, Artificial Sequence
  LRRK2 RNA guide
guguaggagaauuuuacuga

SEQ ID NO: 9785 - RNA, 20 nt, Artificial Sequence
  LRRK2 RNA guide
uaauacggcaucucaguaaa

SEQ ID NO: 9786 - RNA, 20 nt, Artificial Sequence
  LRRK2 RNA guide
uacggcaucucaguaaaauu

SEQ ID NO: 9787 - RNA, 20 nt, Artificial Sequence
  LRRK2 RNA guide
uacugagaugccguauuaca

SEQ ID NO: 9788 - RNA, 20 nt, Artificial Sequence
  LRRK2 RNA guide
uaggagaauuuuacugagau

SEQ ID NO: 9789 - RNA, 20 nt, Artificial Sequence
  LRRK2 RNA guide
uaguguaggagaauuuuacu

SEQ ID NO: 9790 - RNA, 20 nt, Artificial Sequence
  LRRK2 RNA guide
ucaauuaguguaggagaauu

SEQ ID NO: 9791 - RNA, 20 nt, Artificial Sequence
  LRRK2 RNA guide
ucaguaaaauucuccuacac

SEQ ID NO: 9792 - RNA, 20 nt, Artificial Sequence
  LRRK2 RNA guide
ucucaguaaaauucuccuac

SEQ ID NO: 9793 - RNA, 20 nt, Artificial Sequence
  LRRK2 RNA guide
uguaauacggcaucucagua

SEQ ID NO: 9794 - RNA, 20 nt, Artificial Sequence
  LRRK2 RNA guide
uguaggagaauuuuacugag

SEQ ID NO: 9795 - RNA, 20 nt, Artificial Sequence
  LRRK2 RNA guide
uuacugagaugccguauuac

SEQ ID NO: 9796 - RNA, 20 nt, Artificial Sequence
  LRRK2 RNA guide
uuaguguaggagaauuuuac

SEQ ID NO: 9797 - RNA, 20 nt, Artificial Sequence
  LRRK2 RNA guide
uuuacugagaugccguauua

SEQ ID NO: 9798 - RNA, 20 nt, Artificial Sequence
  LRRK2 RNA guide
uuuuacugagaugccguauu

SEQ ID NO: 9799 - RNA, 21 nt, Artificial Sequence
  LRRK2 RNA guide
aacgcuguaauacggcaucuc

SEQ ID NO: 9800 - RNA, 21 nt, Artificial Sequence
  LRRK2 RNA guide
aauacggcaucucaguaaaau

SEQ ID NO: 9801 - RNA, 21 nt, Artificial Sequence
  LRRK2 RNA guide
aauuuuacugagaugccguau

SEQ ID NO: 9802 - RNA, 21 nt, Artificial Sequence
  LRRK2 RNA guide
acgcuguaauacggcaucuca

SEQ ID NO: 9803 - RNA, 21 nt, Artificial Sequence
  LRRK2 RNA guide
acggcaucucaguaaaauucu

SEQ ID NO: 9804 - RNA, 21 nt, Artificial Sequence
  LRRK2 RNA guide
acugagaugccguauuacagc

SEQ ID NO: 9805 - RNA, 21 nt, Artificial Sequence
  LRRK2 RNA guide
agaauuuuacugagaugccgu

SEQ ID NO: 9806 - RNA, 21 nt, Artificial Sequence
  LRRK2 RNA guide
agcaacgcuguaauacggcau

SEQ ID NO: 9807 - RNA, 21 nt, Artificial Sequence
  LRRK2 RNA guide
aggagaauuuuacugagaugc

SEQ ID NO: 9808 - RNA, 21 nt, Artificial Sequence
  LRRK2 RNA guide
aguguaggagaauuuuacuga

SEQ ID NO: 9809 - RNA, 21 nt, Artificial Sequence
  LRRK2 RNA guide
auacggcaucucaguaaaauu

SEQ ID NO: 9810 - RNA, 21 nt, Artificial Sequence
  LRRK2 RNA guide
aucucaguaaaauucuccuac

SEQ ID NO: 9811 - RNA, 21 nt, Artificial Sequence
  LRRK2 RNA guide
auuuuacugagaugccguauu

SEQ ID NO: 9812 - RNA, 21 nt, Artificial Sequence
  LRRK2 RNA guide
caacgcuguaauacggcaucu

SEQ ID NO: 9813 - RNA, 21 nt, Artificial Sequence
  LRRK2 RNA guide
caguaaaauucuccuacacua

SEQ ID NO: 9814 - RNA, 21 nt, Artificial Sequence
  LRRK2 RNA guide
caucucaguaaaauucuccua

SEQ ID NO: 9815 - RNA, 21 nt, Artificial Sequence
  LRRK2 RNA guide
cgcuguaauacggcaucucag

SEQ ID NO: 9816 - RNA, 21 nt, Artificial Sequence
  LRRK2 RNA guide
cggcaucucaguaaaauucuc

SEQ ID NO: 9817 - RNA, 21 nt, Artificial Sequence
  LRRK2 RNA guide
cucaguaaaauucuccuacac

SEQ ID NO: 9818 - RNA, 21 nt, Artificial Sequence
  LRRK2 RNA guide
cugagaugccguauuacagcg

SEQ ID NO: 9819 - RNA, 21 nt, Artificial Sequence
  LRRK2 RNA guide
cuguaauacggcaucucagua

SEQ ID NO: 9820 - RNA, 21 nt, Artificial Sequence
  LRRK2 RNA guide
gaauuuuacugagaugccgua

SEQ ID NO: 9821 - RNA, 21 nt, Artificial Sequence
  LRRK2 RNA guide
gagaauuuuacugagaugccg

SEQ ID NO: 9822 - RNA, 21 nt, Artificial Sequence
  LRRK2 RNA guide
gagcaacgcuguaauacggca

SEQ ID NO: 9823 - RNA, 21 nt, Artificial Sequence
  LRRK2 RNA guide
gcaacgcuguaauacggcauc

SEQ ID NO: 9824 - RNA, 21 nt, Artificial Sequence
  LRRK2 RNA guide
gcaucucaguaaaauucuccu

SEQ ID NO: 9825 - RNA, 21 nt, Artificial Sequence
  LRRK2 RNA guide
gcuguaauacggcaucucagu

SEQ ID NO: 9826 - RNA, 21 nt, Artificial Sequence
  LRRK2 RNA guide
ggagaauuuuacugagaugcc

SEQ ID NO: 9827 - RNA, 21 nt, Artificial Sequence
  LRRK2 RNA guide
ggcaucucaguaaaauucucc

SEQ ID NO: 9828 - RNA, 21 nt, Artificial Sequence
  LRRK2 RNA guide
guaauacggcaucucaguaaa

SEQ ID NO: 9829 - RNA, 21 nt, Artificial Sequence
  LRRK2 RNA guide
guaggagaauuuuacugagau

SEQ ID NO: 9830 - RNA, 21 nt, Artificial Sequence
  LRRK2 RNA guide
guguaggagaauuuuacugag

SEQ ID NO: 9831 - RNA, 21 nt, Artificial Sequence
  LRRK2 RNA guide
uaauacggcaucucaguaaaa

SEQ ID NO: 9832 - RNA, 21 nt, Artificial Sequence
  LRRK2 RNA guide
uacggcaucucaguaaaauuc

SEQ ID NO: 9833 - RNA, 21 nt, Artificial Sequence
  LRRK2 RNA guide
uacugagaugccguauuacag

SEQ ID NO: 9834 - RNA, 21 nt, Artificial Sequence
  LRRK2 RNA guide
uaggagaauuuuacugagaug

SEQ ID NO: 9835 - RNA, 21 nt, Artificial Sequence
  LRRK2 RNA guide
uaguguaggagaauuuuacug

SEQ ID NO: 9836 - RNA, 21 nt, Artificial Sequence
  LRRK2 RNA guide
ucaguaaaauucuccuacacu

SEQ ID NO: 9837 - RNA, 21 nt, Artificial Sequence
  LRRK2 RNA guide
ucucaguaaaauucuccuaca

SEQ ID NO: 9838 - RNA, 21 nt, Artificial Sequence
  LRRK2 RNA guide
uguaauacggcaucucaguaa

SEQ ID NO: 9839 - RNA, 21 nt, Artificial Sequence
  LRRK2 RNA guide
uguaggagaauuuuacugaga

SEQ ID NO: 9840 - RNA, 21 nt, Artificial Sequence
  LRRK2 RNA guide
uuacugagaugccguauuaca

SEQ ID NO: 9841 - RNA, 21 nt, Artificial Sequence
  LRRK2 RNA guide
uuuacugagaugccguauuac

SEQ ID NO: 9842 - RNA, 21 nt, Artificial Sequence
  LRRK2 RNA guide
uuuuacugagaugccguauua

SEQ ID NO: 9843 - RNA, 22 nt, Artificial Sequence
  LRRK2 RNA guide
aacgcuguaauacggcaucuca

SEQ ID NO: 9844 - RNA, 22 nt, Artificial Sequence
  LRRK2 RNA guide
aauacggcaucucaguaaaauu

SEQ ID NO: 9845 - RNA, 22 nt, Artificial Sequence
  LRRK2 RNA guide
aauuuuacugagaugccguauu

SEQ ID NO: 9846 - RNA, 22 nt, Artificial Sequence
  LRRK2 RNA guide
acgcuguaauacggcaucucag

SEQ ID NO: 9847 - RNA, 22 nt, Artificial Sequence
  LRRK2 RNA guide
acggcaucucaguaaaauucuc

SEQ ID NO: 9848 - RNA, 22 nt, Artificial Sequence
  LRRK2 RNA guide
acugagaugccguauuacagcg

SEQ ID NO: 9849 - RNA, 22 nt, Artificial Sequence
  LRRK2 RNA guide
agaauuuuacugagaugccgua

SEQ ID NO: 9850 - RNA, 22 nt, Artificial Sequence
  LRRK2 RNA guide
agcaacgcuguaauacggcauc

SEQ ID NO: 9851 - RNA, 22 nt, Artificial Sequence
  LRRK2 RNA guide
aggagaauuuuacugagaugcc

SEQ ID NO: 9852 - RNA, 22 nt, Artificial Sequence
  LRRK2 RNA guide
aguguaggagaauuuuacugag

SEQ ID NO: 9853 - RNA, 22 nt, Artificial Sequence
  LRRK2 RNA guide
auacggcaucucaguaaaauuc

SEQ ID NO: 9854 - RNA, 22 nt, Artificial Sequence
  LRRK2 RNA guide
aucucaguaaaauucuccuaca

SEQ ID NO: 9855 - RNA, 22 nt, Artificial Sequence
  LRRK2 RNA guide
auuuuacugagaugccguauua

SEQ ID NO: 9856 - RNA, 22 nt, Artificial Sequence
  LRRK2 RNA guide
caacgcuguaauacggcaucuc

SEQ ID NO: 9857 - RNA, 22 nt, Artificial Sequence
  LRRK2 RNA guide
caguaaaauucuccuacacuaa

SEQ ID NO: 9858 - RNA, 22 nt, Artificial Sequence
  LRRK2 RNA guide
caucucaguaaaauucuccuac

SEQ ID NO: 9859 - RNA, 22 nt, Artificial Sequence
  LRRK2 RNA guide
cgcuguaauacggcaucucagu

SEQ ID NO: 9860 - RNA, 22 nt, Artificial Sequence
  LRRK2 RNA guide
cggcaucucaguaaaauucucc

SEQ ID NO: 9861 - RNA, 22 nt, Artificial Sequence
  LRRK2 RNA guide
cucaguaaaauucuccuacacu

SEQ ID NO: 9862 - RNA, 22 nt, Artificial Sequence
  LRRK2 RNA guide
cugagaugccguauuacagcgu

SEQ ID NO: 9863 - RNA, 22 nt, Artificial Sequence
  LRRK2 RNA guide
cuguaauacggcaucucaguaa

SEQ ID NO: 9864 - RNA, 22 nt, Artificial Sequence
  LRRK2 RNA guide
gaauuuuacugagaugccguau

SEQ ID NO: 9865 - RNA, 22 nt, Artificial Sequence
  LRRK2 RNA guide
gagaauuuuacugagaugccgu

SEQ ID NO: 9866 - RNA, 22 nt, Artificial Sequence
  LRRK2 RNA guide
gagcaacgcuguaauacggcau

SEQ ID NO: 9867 - RNA, 22 nt, Artificial Sequence
  LRRK2 RNA guide
gcaacgcuguaauacggcaucu

SEQ ID NO: 9868 - RNA, 22 nt, Artificial Sequence
  LRRK2 RNA guide
gcaucucaguaaaauucuccua

SEQ ID NO: 9869 - RNA, 22 nt, Artificial Sequence
  LRRK2 RNA guide
gcuguaauacggcaucucagua

SEQ ID NO: 9870 - RNA, 22 nt, Artificial Sequence
  LRRK2 RNA guide
ggagaauuuuacugagaugccg

SEQ ID NO: 9871 - RNA, 22 nt, Artificial Sequence
  LRRK2 RNA guide
ggcaucucaguaaaauucuccu

SEQ ID NO: 9872 - RNA, 22 nt, Artificial Sequence
  LRRK2 RNA guide
guaauacggcaucucaguaaaa

SEQ ID NO: 9873 - RNA, 22 nt, Artificial Sequence
  LRRK2 RNA guide
guaggagaauuuuacugagaug

SEQ ID NO: 9874 - RNA, 22 nt, Artificial Sequence
  LRRK2 RNA guide
guguaggagaauuuuacugaga

SEQ ID NO: 9875 - RNA, 22 nt, Artificial Sequence
  LRRK2 RNA guide
uaauacggcaucucaguaaaau

SEQ ID NO: 9876 - RNA, 22 nt, Artificial Sequence
  LRRK2 RNA guide
uacggcaucucaguaaaauucu

SEQ ID NO: 9877 - RNA, 22 nt, Artificial Sequence
  LRRK2 RNA guide
uacugagaugccguauuacagc

SEQ ID NO: 9878 - RNA, 22 nt, Artificial Sequence
  LRRK2 RNA guide
uaggagaauuuuacugagaugc

SEQ ID NO: 9879 - RNA, 22 nt, Artificial Sequence
  LRRK2 RNA guide
uaguguaggagaauuuuacuga

SEQ ID NO: 9880 - RNA, 22 nt, Artificial Sequence
  LRRK2 RNA guide
ucaguaaaauucuccuacacua

SEQ ID NO: 9881 - RNA, 22 nt, Artificial Sequence
  LRRK2 RNA guide
ucucaguaaaauucuccuacac

SEQ ID NO: 9882 - RNA, 22 nt, Artificial Sequence
  LRRK2 RNA guide
ugagcaacgcuguaauacggca

SEQ ID NO: 9883 - RNA, 22 nt, Artificial Sequence
  LRRK2 RNA guide
uguaauacggcaucucaguaaa

SEQ ID NO: 9884 - RNA, 22 nt, Artificial Sequence
  LRRK2 RNA guide
uguaggagaauuuuacugagau

SEQ ID NO: 9885 - RNA, 22 nt, Artificial Sequence
  LRRK2 RNA guide
uuacugagaugccguauuacag

SEQ ID NO: 9886 - RNA, 22 nt, Artificial Sequence
  LRRK2 RNA guide
uuaguguaggagaauuuuacug

SEQ ID NO: 9887 - RNA, 22 nt, Artificial Sequence
  LRRK2 RNA guide
uuuacugagaugccguauuaca

SEQ ID NO: 9888 - RNA, 22 nt, Artificial Sequence
  LRRK2 RNA guide
uuuuacugagaugccguauuac

SEQ ID NO: 9889 - RNA, 20 nt, Artificial Sequence
  LRRK2 RNA guide
aacgcuguaauacgguaucu

SEQ ID NO: 9890 - RNA, 20 nt, Artificial Sequence
  LRRK2 RNA guide
aauacgguaucucgguaaaa

SEQ ID NO: 9891 - RNA, 20 nt, Artificial Sequence
  LRRK2 RNA guide
aauuuuaccgagauaccgua

SEQ ID NO: 9892 - RNA, 20 nt, Artificial Sequence
  LRRK2 RNA guide
accgagauaccguauuacag

SEQ ID NO: 9893 - RNA, 20 nt, Artificial Sequence
  LRRK2 RNA guide
acgcuguaauacgguaucuc

SEQ ID NO: 9894 - RNA, 20 nt, Artificial Sequence
  LRRK2 RNA guide
acgguaucucgguaaaauuc

SEQ ID NO: 9895 - RNA, 20 nt, Artificial Sequence
  LRRK2 RNA guide
agaauuuuaccgagauaccg

SEQ ID NO: 9896 - RNA, 20 nt, Artificial Sequence
  LRRK2 RNA guide
agauaccguauuacagcguu

SEQ ID NO: 9897 - RNA, 20 nt, Artificial Sequence
  LRRK2 RNA guide
agcaacgcuguaauacggua

SEQ ID NO: 9898 - RNA, 20 nt, Artificial Sequence
  LRRK2 RNA guide
aggagaauuuuaccgagaua

SEQ ID NO: 9899 - RNA, 20 nt, Artificial Sequence
  LRRK2 RNA guide
aguguaggagaauuuuaccg

SEQ ID NO: 9900 - RNA, 20 nt, Artificial Sequence
  LRRK2 RNA guide
auaccguauuacagcguugc

SEQ ID NO: 9901 - RNA, 20 nt, Artificial Sequence
  LRRK2 RNA guide
auacgguaucucgguaaaau

SEQ ID NO: 9902 - RNA, 20 nt, Artificial Sequence
  LRRK2 RNA guide
auuuuaccgagauaccguau

SEQ ID NO: 9903 - RNA, 20 nt, Artificial Sequence
  LRRK2 RNA guide
caacgcuguaauacgguauc

SEQ ID NO: 9904 - RNA, 20 nt, Artificial Sequence
  LRRK2 RNA guide
ccgagauaccguauuacagc

SEQ ID NO: 9905 - RNA, 20 nt, Artificial Sequence
  LRRK2 RNA guide
cgagauaccguauuacagcg

SEQ ID NO: 9906 - RNA, 20 nt, Artificial Sequence
  LRRK2 RNA guide
cgcuguaauacgguaucucg

SEQ ID NO: 9907 - RNA, 20 nt, Artificial Sequence
  LRRK2 RNA guide
cgguaucucgguaaaauucu

SEQ ID NO: 9908 - RNA, 20 nt, Artificial Sequence
  LRRK2 RNA guide
cuguaauacgguaucucggu

SEQ ID NO: 9909 - RNA, 20 nt, Artificial Sequence
  LRRK2 RNA guide
gaauuuuaccgagauaccgu

SEQ ID NO: 9910 - RNA, 20 nt, Artificial Sequence
  LRRK2 RNA guide
gagaauuuuaccgagauacc

SEQ ID NO: 9911 - RNA, 20 nt, Artificial Sequence
  LRRK2 RNA guide
gagauaccguauuacagcgu

SEQ ID NO: 9912 - RNA, 20 nt, Artificial Sequence
  LRRK2 RNA guide
gagcaacgcuguaauacggu

SEQ ID NO: 9913 - RNA, 20 nt, Artificial Sequence
  LRRK2 RNA guide
gauaccguauuacagcguug

SEQ ID NO: 9914 - RNA, 20 nt, Artificial Sequence
  LRRK2 RNA guide
gcaacgcuguaauacgguau

SEQ ID NO: 9915 - RNA, 20 nt, Artificial Sequence
  LRRK2 RNA guide
gcuguaauacgguaucucgg

SEQ ID NO: 9916 - RNA, 20 nt, Artificial Sequence
  LRRK2 RNA guide
ggagaauuuuaccgagauac

SEQ ID NO: 9917 - RNA, 20 nt, Artificial Sequence
  LRRK2 RNA guide
gguaucucgguaaaauucuc

SEQ ID NO: 9918 - RNA, 20 nt, Artificial Sequence
  LRRK2 RNA guide
ggugagcaacgcuguaauac

SEQ ID NO: 9919 - RNA, 20 nt, Artificial Sequence
  LRRK2 RNA guide
guaauacgguaucucgguaa

SEQ ID NO: 9920 - RNA, 20 nt, Artificial Sequence
  LRRK2 RNA guide
guaggagaauuuuaccgaga

SEQ ID NO: 9921 - RNA, 20 nt, Artificial Sequence
  LRRK2 RNA guide
guaucucgguaaaauucucc

SEQ ID NO: 9922 - RNA, 20 nt, Artificial Sequence
  LRRK2 RNA guide
gugagcaacgcuguaauacg

SEQ ID NO: 9923 - RNA, 20 nt, Artificial Sequence
  LRRK2 RNA guide
guguaggagaauuuuaccga

SEQ ID NO: 9924 - RNA, 20 nt, Artificial Sequence
  LRRK2 RNA guide
uaauacgguaucucgguaaa

SEQ ID NO: 9925 - RNA, 20 nt, Artificial Sequence
  LRRK2 RNA guide
uaccgagauaccguauuaca

SEQ ID NO: 9926 - RNA, 20 nt, Artificial Sequence
  LRRK2 RNA guide
uaccguauuacagcguugcu

SEQ ID NO: 9927 - RNA, 20 nt, Artificial Sequence
  LRRK2 RNA guide
uacgguaucucgguaaaauu

SEQ ID NO: 9928 - RNA, 20 nt, Artificial Sequence
  LRRK2 RNA guide
uaggagaauuuuaccgagau

SEQ ID NO: 9929 - RNA, 20 nt, Artificial Sequence
  LRRK2 RNA guide
ugagcaacgcuguaauacgg

SEQ ID NO: 9930 - RNA, 20 nt, Artificial Sequence
  LRRK2 RNA guide
uggugagcaacgcuguaaua

SEQ ID NO: 9931 - RNA, 20 nt, Artificial Sequence
  LRRK2 RNA guide
uguaauacgguaucucggua

SEQ ID NO: 9932 - RNA, 20 nt, Artificial Sequence
  LRRK2 RNA guide
uguaggagaauuuuaccgag

SEQ ID NO: 9933 - RNA, 20 nt, Artificial Sequence
  LRRK2 RNA guide
uuaccgagauaccguauuac

SEQ ID NO: 9934 - RNA, 20 nt, Artificial Sequence
  LRRK2 RNA guide
uuggugagcaacgcuguaau

SEQ ID NO: 9935 - RNA, 20 nt, Artificial Sequence
  LRRK2 RNA guide
uuuaccgagauaccguauua

SEQ ID NO: 9936 - RNA, 20 nt, Artificial Sequence
  LRRK2 RNA guide
uuuuaccgagauaccguauu

SEQ ID NO: 9937 - RNA, 21 nt, Artificial Sequence
  LRRK2 RNA guide
aacgcuguaauacgguaucuc

SEQ ID NO: 9938 - RNA, 21 nt, Artificial Sequence
  LRRK2 RNA guide
aauacgguaucucgguaaaau

SEQ ID NO: 9939 - RNA, 21 nt, Artificial Sequence
  LRRK2 RNA guide
aauuuuaccgagauaccguau

SEQ ID NO: 9940 - RNA, 21 nt, Artificial Sequence
  LRRK2 RNA guide
accgagauaccguauuacagc

SEQ ID NO: 9941 - RNA, 21 nt, Artificial Sequence
  LRRK2 RNA guide
acgcuguaauacgguaucucg

SEQ ID NO: 9942 - RNA, 21 nt, Artificial Sequence
  LRRK2 RNA guide
acgguaucucgguaaaauucu

SEQ ID NO: 9943 - RNA, 21 nt, Artificial Sequence
  LRRK2 RNA guide
agaauuuuaccgagauaccgu

SEQ ID NO: 9944 - RNA, 21 nt, Artificial Sequence
  LRRK2 RNA guide
agauaccguauuacagcguug

SEQ ID NO: 9945 - RNA, 21 nt, Artificial Sequence
  LRRK2 RNA guide
agcaacgcuguaauacgguau

SEQ ID NO: 9946 - RNA, 21 nt, Artificial Sequence
  LRRK2 RNA guide
aggagaauuuuaccgagauac

SEQ ID NO: 9947 - RNA, 21 nt, Artificial Sequence
  LRRK2 RNA guide
aguguaggagaauuuuaccga

SEQ ID NO: 9948 - RNA, 21 nt, Artificial Sequence
  LRRK2 RNA guide
auaccguauuacagcguugcu

SEQ ID NO: 9949 - RNA, 21 nt, Artificial Sequence
  LRRK2 RNA guide
auacgguaucucgguaaaauu

SEQ ID NO: 9950 - RNA, 21 nt, Artificial Sequence
  LRRK2 RNA guide
auuuuaccgagauaccguauu

SEQ ID NO: 9951 - RNA, 21 nt, Artificial Sequence
  LRRK2 RNA guide
caacgcuguaauacgguaucu

SEQ ID NO: 9952 - RNA, 21 nt, Artificial Sequence
  LRRK2 RNA guide
ccgagauaccguauuacagcg

SEQ ID NO: 9953 - RNA, 21 nt, Artificial Sequence
  LRRK2 RNA guide
cgagauaccguauuacagcgu

SEQ ID NO: 9954 - RNA, 21 nt, Artificial Sequence
  LRRK2 RNA guide
cgcuguaauacgguaucucgg

SEQ ID NO: 9955 - RNA, 21 nt, Artificial Sequence
  LRRK2 RNA guide
cgguaucucgguaaaauucuc

SEQ ID NO: 9956 - RNA, 21 nt, Artificial Sequence
  LRRK2 RNA guide
cuguaauacgguaucucggua

SEQ ID NO: 9957 - RNA, 21 nt, Artificial Sequence
  LRRK2 RNA guide
gaauuuuaccgagauaccgua

SEQ ID NO: 9958 - RNA, 21 nt, Artificial Sequence
  LRRK2 RNA guide
gagaauuuuaccgagauaccg

SEQ ID NO: 9959 - RNA, 21 nt, Artificial Sequence
  LRRK2 RNA guide
gagauaccguauuacagcguu

SEQ ID NO: 9960 - RNA, 21 nt, Artificial Sequence
  LRRK2 RNA guide
gagcaacgcuguaauacggua

SEQ ID NO: 9961 - RNA, 21 nt, Artificial Sequence
  LRRK2 RNA guide
gauaccguauuacagcguugc

SEQ ID NO: 9962 - RNA, 21 nt, Artificial Sequence
  LRRK2 RNA guide
gcaacgcuguaauacgguauc

SEQ ID NO: 9963 - RNA, 21 nt, Artificial Sequence
  LRRK2 RNA guide
gcuguaauacgguaucucggu

SEQ ID NO: 9964 - RNA, 21 nt, Artificial Sequence
  LRRK2 RNA guide
ggagaauuuuaccgagauacc

SEQ ID NO: 9965 - RNA, 21 nt, Artificial Sequence
  LRRK2 RNA guide
gguaucucgguaaaauucucc

SEQ ID NO: 9966 - RNA, 21 nt, Artificial Sequence
  LRRK2 RNA guide
ggugagcaacgcuguaauacg

SEQ ID NO: 9967 - RNA, 21 nt, Artificial Sequence
  LRRK2 RNA guide
guaauacgguaucucgguaaa

SEQ ID NO: 9968 - RNA, 21 nt, Artificial Sequence
  LRRK2 RNA guide
guaggagaauuuuaccgagau

SEQ ID NO: 9969 - RNA, 21 nt, Artificial Sequence
  LRRK2 RNA guide
guaucucgguaaaauucuccu

SEQ ID NO: 9970 - RNA, 21 nt, Artificial Sequence
  LRRK2 RNA guide
gugagcaacgcuguaauacgg

SEQ ID NO: 9971 - RNA, 21 nt, Artificial Sequence
  LRRK2 RNA guide
guguaggagaauuuuaccgag

SEQ ID NO: 9972 - RNA, 21 nt, Artificial Sequence
  LRRK2 RNA guide
uaauacgguaucucgguaaaa

SEQ ID NO: 9973 - RNA, 21 nt, Artificial Sequence
  LRRK2 RNA guide
uaccgagauaccguauuacag

SEQ ID NO: 9974 - RNA, 21 nt, Artificial Sequence
  LRRK2 RNA guide
uaccguauuacagcguugcuc

SEQ ID NO: 9975 - RNA, 21 nt, Artificial Sequence
  LRRK2 RNA guide
uacgguaucucgguaaaauuc

SEQ ID NO: 9976 - RNA, 21 nt, Artificial Sequence
  LRRK2 RNA guide
uaggagaauuuuaccgagaua

SEQ ID NO: 9977 - RNA, 21 nt, Artificial Sequence
  LRRK2 RNA guide
uaguguaggagaauuuuaccg

SEQ ID NO: 9978 - RNA, 21 nt, Artificial Sequence
  LRRK2 RNA guide
ugagcaacgcuguaauacggu

SEQ ID NO: 9979 - RNA, 21 nt, Artificial Sequence
  LRRK2 RNA guide
uggugagcaacgcuguaauac

SEQ ID NO: 9980 - RNA, 21 nt, Artificial Sequence
  LRRK2 RNA guide
uguaauacgguaucucgguaa

SEQ ID NO: 9981 - RNA, 21 nt, Artificial Sequence
  LRRK2 RNA guide
uguaggagaauuuuaccgaga

SEQ ID NO: 9982 - RNA, 21 nt, Artificial Sequence
  LRRK2 RNA guide
uuaccgagauaccguauuaca

SEQ ID NO: 9983 - RNA, 21 nt, Artificial Sequence
  LRRK2 RNA guide
uuggugagcaacgcuguaaua

SEQ ID NO: 9984 - RNA, 21 nt, Artificial Sequence
  LRRK2 RNA guide
uuuaccgagauaccguauuac

SEQ ID NO: 9985 - RNA, 21 nt, Artificial Sequence
  LRRK2 RNA guide
uuuggugagcaacgcuguaau

SEQ ID NO: 9986 - RNA, 21 nt, Artificial Sequence
  LRRK2 RNA guide
uuuuaccgagauaccguauua

SEQ ID NO: 9987 - RNA, 22 nt, Artificial Sequence
  LRRK2 RNA guide
aacgcuguaauacgguaucucg

SEQ ID NO: 9988 - RNA, 22 nt, Artificial Sequence
  LRRK2 RNA guide
aauacgguaucucgguaaaauu

SEQ ID NO: 9989 - RNA, 22 nt, Artificial Sequence
  LRRK2 RNA guide
aauuuuaccgagauaccguauu

SEQ ID NO: 9990 - RNA, 22 nt, Artificial Sequence
  LRRK2 RNA guide
accgagauaccguauuacagcg

SEQ ID NO: 9991 - RNA, 22 nt, Artificial Sequence
  LRRK2 RNA guide
acgcuguaauacgguaucucgg

SEQ ID NO: 9992 - RNA, 22 nt, Artificial Sequence
  LRRK2 RNA guide
acgguaucucgguaaaauucuc

SEQ ID NO: 9993 - RNA, 22 nt, Artificial Sequence
  LRRK2 RNA guide
agaauuuuaccgagauaccgua

SEQ ID NO: 9994 - RNA, 22 nt, Artificial Sequence
  LRRK2 RNA guide
agauaccguauuacagcguugc

SEQ ID NO: 9995 - RNA, 22 nt, Artificial Sequence
  LRRK2 RNA guide
agcaacgcuguaauacgguauc

SEQ ID NO: 9996 - RNA, 22 nt, Artificial Sequence
  LRRK2 RNA guide
aggagaauuuuaccgagauacc

SEQ ID NO: 9997 - RNA, 22 nt, Artificial Sequence
  LRRK2 RNA guide
aguguaggagaauuuuaccgag

SEQ ID NO: 9998 - RNA, 22 nt, Artificial Sequence
  LRRK2 RNA guide
auaccguauuacagcguugcuc

SEQ ID NO: 9999 - RNA, 22 nt, Artificial Sequence
  LRRK2 RNA guide
auacgguaucucgguaaaauuc

SEQ ID NO: 10000 - RNA, 22 nt, Artificial Sequence
  LRRK2 RNA guide
auuuggugagcaacgcuguaau

SEQ ID NO: 10001 - RNA, 22 nt, Artificial Sequence
  LRRK2 RNA guide
auuuuaccgagauaccguauua

SEQ ID NO: 10002 - RNA, 22 nt, Artificial Sequence
  LRRK2 RNA guide
caacgcuguaauacgguaucuc

SEQ ID NO: 10003 - RNA, 22 nt, Artificial Sequence
  LRRK2 RNA guide
ccgagauaccguauuacagcgu

SEQ ID NO: 10004 - RNA, 22 nt, Artificial Sequence
  LRRK2 RNA guide
cgagauaccguauuacagcguu

SEQ ID NO: 10005 - RNA, 22 nt, Artificial Sequence
  LRRK2 RNA guide
cgcuguaauacgguaucucggu

SEQ ID NO: 10006 - RNA, 22 nt, Artificial Sequence
  LRRK2 RNA guide
cgguaucucgguaaaauucucc

SEQ ID NO: 10007 - RNA, 22 nt, Artificial Sequence
  LRRK2 RNA guide
cuguaauacgguaucucgguaa

SEQ ID NO: 10008 - RNA, 22 nt, Artificial Sequence
  LRRK2 RNA guide
gaauuuuaccgagauaccguau

SEQ ID NO: 10009 - RNA, 22 nt, Artificial Sequence
  LRRK2 RNA guide
gagaauuuuaccgagauaccgu

SEQ ID NO: 10010 - RNA, 22 nt, Artificial Sequence
  LRRK2 RNA guide
gagauaccguauuacagcguug

SEQ ID NO: 10011 - RNA, 22 nt, Artificial Sequence
  LRRK2 RNA guide
gagcaacgcuguaauacgguau

SEQ ID NO: 10012 - RNA, 22 nt, Artificial Sequence
  LRRK2 RNA guide
gauaccguauuacagcguugcu

SEQ ID NO: 10013 - RNA, 22 nt, Artificial Sequence
  LRRK2 RNA guide
gcaacgcuguaauacgguaucu

SEQ ID NO: 10014 - RNA, 22 nt, Artificial Sequence
  LRRK2 RNA guide
gcuguaauacgguaucucggua

SEQ ID NO: 10015 - RNA, 22 nt, Artificial Sequence
  LRRK2 RNA guide
ggagaauuuuaccgagauaccg

SEQ ID NO: 10016 - RNA, 22 nt, Artificial Sequence
  LRRK2 RNA guide
gguaucucgguaaaauucuccu

SEQ ID NO: 10017 - RNA, 22 nt, Artificial Sequence
  LRRK2 RNA guide
ggugagcaacgcuguaauacgg

SEQ ID NO: 10018 - RNA, 22 nt, Artificial Sequence
  LRRK2 RNA guide
guaauacgguaucucgguaaaa

SEQ ID NO: 10019 - RNA, 22 nt, Artificial Sequence
  LRRK2 RNA guide
guaggagaauuuuaccgagaua

SEQ ID NO: 10020 - RNA, 22 nt, Artificial Sequence
  LRRK2 RNA guide
guaucucgguaaaauucuccua

SEQ ID NO: 10021 - RNA, 22 nt, Artificial Sequence
  LRRK2 RNA guide
gugagcaacgcuguaauacggu

SEQ ID NO: 10022 - RNA, 22 nt, Artificial Sequence
  LRRK2 RNA guide
guguaggagaauuuuaccgaga

SEQ ID NO: 10023 - RNA, 22 nt, Artificial Sequence
  LRRK2 RNA guide
uaauacgguaucucgguaaaau

SEQ ID NO: 10024 - RNA, 22 nt, Artificial Sequence
  LRRK2 RNA guide
uaccgagauaccguauuacagc

SEQ ID NO: 10025 - RNA, 22 nt, Artificial Sequence
  LRRK2 RNA guide
uaccguauuacagcguugcuca

SEQ ID NO: 10026 - RNA, 22 nt, Artificial Sequence
  LRRK2 RNA guide
uacgguaucucgguaaaauucu

SEQ ID NO: 10027 - RNA, 22 nt, Artificial Sequence
  LRRK2 RNA guide
uaggagaauuuuaccgagauac

SEQ ID NO: 10028 - RNA, 22 nt, Artificial Sequence
  LRRK2 RNA guide
uaguguaggagaauuuuaccga

SEQ ID NO: 10029 - RNA, 22 nt, Artificial Sequence
  LRRK2 RNA guide
ugagcaacgcuguaauacggua

SEQ ID NO: 10030 - RNA, 22 nt, Artificial Sequence
  LRRK2 RNA guide
uggugagcaacgcuguaauacg

SEQ ID NO: 10031 - RNA, 22 nt, Artificial Sequence
  LRRK2 RNA guide
uguaauacgguaucucgguaaa

SEQ ID NO: 10032 - RNA, 22 nt, Artificial Sequence
  LRRK2 RNA guide
uguaggagaauuuuaccgagau

SEQ ID NO: 10033 - RNA, 22 nt, Artificial Sequence
  LRRK2 RNA guide
uuaccgagauaccguauuacag

SEQ ID NO: 10034 - RNA, 22 nt, Artificial Sequence
  LRRK2 RNA guide
uuaguguaggagaauuuuaccg

SEQ ID NO: 10035 - RNA, 22 nt, Artificial Sequence
  LRRK2 RNA guide
uuggugagcaacgcuguaauac

SEQ ID NO: 10036 - RNA, 22 nt, Artificial Sequence
  LRRK2 RNA guide
uuuaccgagauaccguauuaca

SEQ ID NO: 10037 - RNA, 22 nt, Artificial Sequence
  LRRK2 RNA guide
uuuggugagcaacgcuguaaua

SEQ ID NO: 10038 - RNA, 22 nt, Artificial Sequence
  LRRK2 RNA guide
uuuuaccgagauaccguauuac

SEQ ID NO: 10039 - RNA, 20 nt, Artificial Sequence
  LRRK2 RNA guide
aaauuuggugagcaacggug

SEQ ID NO: 10040 - RNA, 20 nt, Artificial Sequence
  LRRK2 RNA guide
aacgguguaauacggcaucu

SEQ ID NO: 10041 - RNA, 20 nt, Artificial Sequence
  LRRK2 RNA guide
aauuuggugagcaacggugu

SEQ ID NO: 10042 - RNA, 20 nt, Artificial Sequence
  LRRK2 RNA guide
acaccguugcucaccaaauu

SEQ ID NO: 10043 - RNA, 20 nt, Artificial Sequence
  LRRK2 RNA guide
accgagaugccguauuacac

SEQ ID NO: 10044 - RNA, 20 nt, Artificial Sequence
  LRRK2 RNA guide
accguugcucaccaaauuug

SEQ ID NO: 10045 - RNA, 20 nt, Artificial Sequence
  LRRK2 RNA guide
acgguguaauacggcaucuc

SEQ ID NO: 10046 - RNA, 20 nt, Artificial Sequence
  LRRK2 RNA guide
agaugccguauuacaccguu

SEQ ID NO: 10047 - RNA, 20 nt, Artificial Sequence
  LRRK2 RNA guide
agcaacgguguaauacggca

SEQ ID NO: 10048 - RNA, 20 nt, Artificial Sequence
  LRRK2 RNA guide
augccguauuacaccguugc

SEQ ID NO: 10049 - RNA, 20 nt, Artificial Sequence
  LRRK2 RNA guide
auuacaccguugcucaccaa

SEQ ID NO: 10050 - RNA, 20 nt, Artificial Sequence
  LRRK2 RNA guide
auuuggugagcaacggugua

SEQ ID NO: 10051 - RNA, 20 nt, Artificial Sequence
  LRRK2 RNA guide
auuuuaccgagaugccguau

SEQ ID NO: 10052 - RNA, 20 nt, Artificial Sequence
  LRRK2 RNA guide
caaauuuggugagcaacggu

SEQ ID NO: 10053 - RNA, 20 nt, Artificial Sequence
  LRRK2 RNA guide
caacgguguaauacggcauc

SEQ ID NO: 10054 - RNA, 20 nt, Artificial Sequence
  LRRK2 RNA guide
caccguugcucaccaaauuu

SEQ ID NO: 10055 - RNA, 20 nt, Artificial Sequence
  LRRK2 RNA guide
ccgagaugccguauuacacc

SEQ ID NO: 10056 - RNA, 20 nt, Artificial Sequence
  LRRK2 RNA guide
ccguauuacaccguugcuca

SEQ ID NO: 10057 - RNA, 20 nt, Artificial Sequence
  LRRK2 RNA guide
cgagaugccguauuacaccg

SEQ ID NO: 10058 - RNA, 20 nt, Artificial Sequence
  LRRK2 RNA guide
cgguguaauacggcaucucg

SEQ ID NO: 10059 - RNA, 20 nt, Artificial Sequence
  LRRK2 RNA guide
cguauuacaccguugcucac

SEQ ID NO: 10060 - RNA, 20 nt, Artificial Sequence
  LRRK2 RNA guide
cuuugcaaauuuggugagca

SEQ ID NO: 10061 - RNA, 20 nt, Artificial Sequence
  LRRK2 RNA guide
gagaugccguauuacaccgu

SEQ ID NO: 10062 - RNA, 20 nt, Artificial Sequence
  LRRK2 RNA guide
gagcaacgguguaauacggc

SEQ ID NO: 10063 - RNA, 20 nt, Artificial Sequence
  LRRK2 RNA guide
gaugccguauuacaccguug

SEQ ID NO: 10064 - RNA, 20 nt, Artificial Sequence
  LRRK2 RNA guide
gcaaauuuggugagcaacgg

SEQ ID NO: 10065 - RNA, 20 nt, Artificial Sequence
  LRRK2 RNA guide
gcaacgguguaauacggcau

SEQ ID NO: 10066 - RNA, 20 nt, Artificial Sequence
  LRRK2 RNA guide
gccguauuacaccguugcuc

SEQ ID NO: 10067 - RNA, 20 nt, Artificial Sequence
  LRRK2 RNA guide
ggugagcaacgguguaauac

SEQ ID NO: 10068 - RNA, 20 nt, Artificial Sequence
  LRRK2 RNA guide
gguguaauacggcaucucgg

SEQ ID NO: 10069 - RNA, 20 nt, Artificial Sequence
  LRRK2 RNA guide
guauuacaccguugcucacc

SEQ ID NO: 10070 - RNA, 20 nt, Artificial Sequence
  LRRK2 RNA guide
gugagcaacgguguaauacg

SEQ ID NO: 10071 - RNA, 20 nt, Artificial Sequence
  LRRK2 RNA guide
uacaccguugcucaccaaau

SEQ ID NO: 10072 - RNA, 20 nt, Artificial Sequence
  LRRK2 RNA guide
uaccgagaugccguauuaca

SEQ ID NO: 10073 - RNA, 20 nt, Artificial Sequence
  LRRK2 RNA guide
uauuacaccguugcucacca

SEQ ID NO: 10074 - RNA, 20 nt, Artificial Sequence
  LRRK2 RNA guide
ucuuugcaaauuuggugagc

SEQ ID NO: 10075 - RNA, 20 nt, Artificial Sequence
  LRRK2 RNA guide
ugagcaacgguguaauacgg

SEQ ID NO: 10076 - RNA, 20 nt, Artificial Sequence
  LRRK2 RNA guide
ugcaaauuuggugagcaacg

SEQ ID NO: 10077 - RNA, 20 nt, Artificial Sequence
  LRRK2 RNA guide
ugccguauuacaccguugcu

SEQ ID NO: 10078 - RNA, 20 nt, Artificial Sequence
  LRRK2 RNA guide
uggugagcaacgguguaaua

SEQ ID NO: 10079 - RNA, 20 nt, Artificial Sequence
  LRRK2 RNA guide
uuacaccguugcucaccaaa

SEQ ID NO: 10080 - RNA, 20 nt, Artificial Sequence
  LRRK2 RNA guide
uuaccgagaugccguauuac

SEQ ID NO: 10081 - RNA, 20 nt, Artificial Sequence
  LRRK2 RNA guide
uugcaaauuuggugagcaac

SEQ ID NO: 10082 - RNA, 20 nt, Artificial Sequence
  LRRK2 RNA guide
uuggugagcaacgguguaau

SEQ ID NO: 10083 - RNA, 20 nt, Artificial Sequence
  LRRK2 RNA guide
uuuaccgagaugccguauua

SEQ ID NO: 10084 - RNA, 20 nt, Artificial Sequence
  LRRK2 RNA guide
uuugcaaauuuggugagcaa

SEQ ID NO: 10085 - RNA, 20 nt, Artificial Sequence
  LRRK2 RNA guide
uuuggugagcaacgguguaa

SEQ ID NO: 10086 - RNA, 20 nt, Artificial Sequence
  LRRK2 RNA guide
uuuuaccgagaugccguauu

SEQ ID NO: 10087 - RNA, 21 nt, Artificial Sequence
  LRRK2 RNA guide
aaauuuggugagcaacggugu

SEQ ID NO: 10088 - RNA, 21 nt, Artificial Sequence
  LRRK2 RNA guide
aacgguguaauacggcaucuc

SEQ ID NO: 10089 - RNA, 21 nt, Artificial Sequence
  LRRK2 RNA guide
aauuuggugagcaacggugua

SEQ ID NO: 10090 - RNA, 21 nt, Artificial Sequence
  LRRK2 RNA guide
aauuuuaccgagaugccguau

SEQ ID NO: 10091 - RNA, 21 nt, Artificial Sequence
  LRRK2 RNA guide
acaccguugcucaccaaauuu

SEQ ID NO: 10092 - RNA, 21 nt, Artificial Sequence
  LRRK2 RNA guide
accgagaugccguauuacacc

SEQ ID NO: 10093 - RNA, 21 nt, Artificial Sequence
  LRRK2 RNA guide
accguugcucaccaaauuugc

SEQ ID NO: 10094 - RNA, 21 nt, Artificial Sequence
  LRRK2 RNA guide
acgguguaauacggcaucucg

SEQ ID NO: 10095 - RNA, 21 nt, Artificial Sequence
  LRRK2 RNA guide
agaugccguauuacaccguug

SEQ ID NO: 10096 - RNA, 21 nt, Artificial Sequence
  LRRK2 RNA guide
agcaacgguguaauacggcau

SEQ ID NO: 10097 - RNA, 21 nt, Artificial Sequence
  LRRK2 RNA guide
augccguauuacaccguugcu

SEQ ID NO: 10098 - RNA, 21 nt, Artificial Sequence
  LRRK2 RNA guide
auuacaccguugcucaccaaa

SEQ ID NO: 10099 - RNA, 21 nt, Artificial Sequence
  LRRK2 RNA guide
auuuggugagcaacgguguaa

SEQ ID NO: 10100 - RNA, 21 nt, Artificial Sequence
  LRRK2 RNA guide
auuuuaccgagaugccguauu

SEQ ID NO: 10101 - RNA, 21 nt, Artificial Sequence
  LRRK2 RNA guide
caaauuuggugagcaacggug

SEQ ID NO: 10102 - RNA, 21 nt, Artificial Sequence
  LRRK2 RNA guide
caacgguguaauacggcaucu

SEQ ID NO: 10103 - RNA, 21 nt, Artificial Sequence
  LRRK2 RNA guide
caccguugcucaccaaauuug

SEQ ID NO: 10104 - RNA, 21 nt, Artificial Sequence
  LRRK2 RNA guide
ccgagaugccguauuacaccg

SEQ ID NO: 10105 - RNA, 21 nt, Artificial Sequence
  LRRK2 RNA guide
ccguauuacaccguugcucac

SEQ ID NO: 10106 - RNA, 21 nt, Artificial Sequence
  LRRK2 RNA guide
cgagaugccguauuacaccgu

SEQ ID NO: 10107 - RNA, 21 nt, Artificial Sequence
  LRRK2 RNA guide
cgguguaauacggcaucucgg

SEQ ID NO: 10108 - RNA, 21 nt, Artificial Sequence
  LRRK2 RNA guide
cguauuacaccguugcucacc

SEQ ID NO: 10109 - RNA, 21 nt, Artificial Sequence
  LRRK2 RNA guide
cuuugcaaauuuggugagcaa

SEQ ID NO: 10110 - RNA, 21 nt, Artificial Sequence
  LRRK2 RNA guide
gagaugccguauuacaccguu

SEQ ID NO: 10111 - RNA, 21 nt, Artificial Sequence
  LRRK2 RNA guide
gagcaacgguguaauacggca

SEQ ID NO: 10112 - RNA, 21 nt, Artificial Sequence
  LRRK2 RNA guide
gaugccguauuacaccguugc

SEQ ID NO: 10113 - RNA, 21 nt, Artificial Sequence
  LRRK2 RNA guide
gcaaauuuggugagcaacggu

SEQ ID NO: 10114 - RNA, 21 nt, Artificial Sequence
  LRRK2 RNA guide
gcaacgguguaauacggcauc

SEQ ID NO: 10115 - RNA, 21 nt, Artificial Sequence
  LRRK2 RNA guide
gccguauuacaccguugcuca

SEQ ID NO: 10116 - RNA, 21 nt, Artificial Sequence
  LRRK2 RNA guide
ggugagcaacgguguaauacg

SEQ ID NO: 10117 - RNA, 21 nt, Artificial Sequence
  LRRK2 RNA guide
gguguaauacggcaucucggu

SEQ ID NO: 10118 - RNA, 21 nt, Artificial Sequence
  LRRK2 RNA guide
guauuacaccguugcucacca

SEQ ID NO: 10119 - RNA, 21 nt, Artificial Sequence
  LRRK2 RNA guide
gucuuugcaaauuuggugagc

SEQ ID NO: 10120 - RNA, 21 nt, Artificial Sequence
  LRRK2 RNA guide
gugagcaacgguguaauacgg

SEQ ID NO: 10121 - RNA, 21 nt, Artificial Sequence
  LRRK2 RNA guide
uacaccguugcucaccaaauu

SEQ ID NO: 10122 - RNA, 21 nt, Artificial Sequence
  LRRK2 RNA guide
uaccgagaugccguauuacac

SEQ ID NO: 10123 - RNA, 21 nt, Artificial Sequence
  LRRK2 RNA guide
uauuacaccguugcucaccaa

SEQ ID NO: 10124 - RNA, 21 nt, Artificial Sequence
  LRRK2 RNA guide
ucuuugcaaauuuggugagca

SEQ ID NO: 10125 - RNA, 21 nt, Artificial Sequence
  LRRK2 RNA guide
ugagcaacgguguaauacggc

SEQ ID NO: 10126 - RNA, 21 nt, Artificial Sequence
  LRRK2 RNA guide
ugcaaauuuggugagcaacgg

SEQ ID NO: 10127 - RNA, 21 nt, Artificial Sequence
  LRRK2 RNA guide
ugccguauuacaccguugcuc

SEQ ID NO: 10128 - RNA, 21 nt, Artificial Sequence
  LRRK2 RNA guide
uggugagcaacgguguaauac

SEQ ID NO: 10129 - RNA, 21 nt, Artificial Sequence
  LRRK2 RNA guide
uuacaccguugcucaccaaau

SEQ ID NO: 10130 - RNA, 21 nt, Artificial Sequence
  LRRK2 RNA guide
uuaccgagaugccguauuaca

SEQ ID NO: 10131 - RNA, 21 nt, Artificial Sequence
  LRRK2 RNA guide
uugcaaauuuggugagcaacg

SEQ ID NO: 10132 - RNA, 21 nt, Artificial Sequence
  LRRK2 RNA guide
uuggugagcaacgguguaaua

SEQ ID NO: 10133 - RNA, 21 nt, Artificial Sequence
  LRRK2 RNA guide
uuuaccgagaugccguauuac

SEQ ID NO: 10134 - RNA, 21 nt, Artificial Sequence
  LRRK2 RNA guide
uuugcaaauuuggugagcaac

SEQ ID NO: 10135 - RNA, 21 nt, Artificial Sequence
  LRRK2 RNA guide
uuuggugagcaacgguguaau

SEQ ID NO: 10136 - RNA, 21 nt, Artificial Sequence
  LRRK2 RNA guide
uuuuaccgagaugccguauua

SEQ ID NO: 10137 - RNA, 22 nt, Artificial Sequence
  LRRK2 RNA guide
aaauuuggugagcaacggugua

SEQ ID NO: 10138 - RNA, 22 nt, Artificial Sequence
  LRRK2 RNA guide
aacgguguaauacggcaucucg

SEQ ID NO: 10139 - RNA, 22 nt, Artificial Sequence
  LRRK2 RNA guide
aauuuggugagcaacgguguaa

SEQ ID NO: 10140 - RNA, 22 nt, Artificial Sequence
  LRRK2 RNA guide
aauuuuaccgagaugccguauu

SEQ ID NO: 10141 - RNA, 22 nt, Artificial Sequence
  LRRK2 RNA guide
acaccguugcucaccaaauuug

SEQ ID NO: 10142 - RNA, 22 nt, Artificial Sequence
  LRRK2 RNA guide
accgagaugccguauuacaccg

SEQ ID NO: 10143 - RNA, 22 nt, Artificial Sequence
  LRRK2 RNA guide
accguugcucaccaaauuugca

SEQ ID NO: 10144 - RNA, 22 nt, Artificial Sequence
  LRRK2 RNA guide
acgguguaauacggcaucucgg

SEQ ID NO: 10145 - RNA, 22 nt, Artificial Sequence
  LRRK2 RNA guide
agaugccguauuacaccguugc

SEQ ID NO: 10146 - RNA, 22 nt, Artificial Sequence
  LRRK2 RNA guide
agcaacgguguaauacggcauc

SEQ ID NO: 10147 - RNA, 22 nt, Artificial Sequence
  LRRK2 RNA guide
augccguauuacaccguugcuc

SEQ ID NO: 10148 - RNA, 22 nt, Artificial Sequence
  LRRK2 RNA guide
auuacaccguugcucaccaaau

SEQ ID NO: 10149 - RNA, 22 nt, Artificial Sequence
  LRRK2 RNA guide
auuuggugagcaacgguguaau

SEQ ID NO: 10150 - RNA, 22 nt, Artificial Sequence
  LRRK2 RNA guide
auuuuaccgagaugccguauua

SEQ ID NO: 10151 - RNA, 22 nt, Artificial Sequence
  LRRK2 RNA guide
caaauuuggugagcaacggugu

SEQ ID NO: 10152 - RNA, 22 nt, Artificial Sequence
  LRRK2 RNA guide
caacgguguaauacggcaucuc

SEQ ID NO: 10153 - RNA, 22 nt, Artificial Sequence
  LRRK2 RNA guide
caccguugcucaccaaauuugc

SEQ ID NO: 10154 - RNA, 22 nt, Artificial Sequence
  LRRK2 RNA guide
ccgagaugccguauuacaccgu

SEQ ID NO: 10155 - RNA, 22 nt, Artificial Sequence
  LRRK2 RNA guide
ccguauuacaccguugcucacc

SEQ ID NO: 10156 - RNA, 22 nt, Artificial Sequence
  LRRK2 RNA guide
cgagaugccguauuacaccguu

SEQ ID NO: 10157 - RNA, 22 nt, Artificial Sequence
  LRRK2 RNA guide
cgguguaauacggcaucucggu

SEQ ID NO: 10158 - RNA, 22 nt, Artificial Sequence
  LRRK2 RNA guide
cguauuacaccguugcucacca

SEQ ID NO: 10159 - RNA, 22 nt, Artificial Sequence
  LRRK2 RNA guide
cuuugcaaauuuggugagcaac

SEQ ID NO: 10160 - RNA, 22 nt, Artificial Sequence
  LRRK2 RNA guide
gaauuuuaccgagaugccguau

SEQ ID NO: 10161 - RNA, 22 nt, Artificial Sequence
  LRRK2 RNA guide
gagaugccguauuacaccguug

SEQ ID NO: 10162 - RNA, 22 nt, Artificial Sequence
  LRRK2 RNA guide
gagcaacgguguaauacggcau

SEQ ID NO: 10163 - RNA, 22 nt, Artificial Sequence
  LRRK2 RNA guide
gaugccguauuacaccguugcu

SEQ ID NO: 10164 - RNA, 22 nt, Artificial Sequence
  LRRK2 RNA guide
gcaaauuuggugagcaacggug

SEQ ID NO: 10165 - RNA, 22 nt, Artificial Sequence
  LRRK2 RNA guide
gcaacgguguaauacggcaucu

SEQ ID NO: 10166 - RNA, 22 nt, Artificial Sequence
  LRRK2 RNA guide
gccguauuacaccguugcucac

SEQ ID NO: 10167 - RNA, 22 nt, Artificial Sequence
  LRRK2 RNA guide
ggugagcaacgguguaauacgg

SEQ ID NO: 10168 - RNA, 22 nt, Artificial Sequence
  LRRK2 RNA guide
gguguaauacggcaucucggua

SEQ ID NO: 10169 - RNA, 22 nt, Artificial Sequence
  LRRK2 RNA guide
guauuacaccguugcucaccaa

SEQ ID NO: 10170 - RNA, 22 nt, Artificial Sequence
  LRRK2 RNA guide
gucuuugcaaauuuggugagca

SEQ ID NO: 10171 - RNA, 22 nt, Artificial Sequence
  LRRK2 RNA guide
gugagcaacgguguaauacggc

SEQ ID NO: 10172 - RNA, 22 nt, Artificial Sequence
  LRRK2 RNA guide
uacaccguugcucaccaaauuu

SEQ ID NO: 10173 - RNA, 22 nt, Artificial Sequence
  LRRK2 RNA guide
uaccgagaugccguauuacacc

SEQ ID NO: 10174 - RNA, 22 nt, Artificial Sequence
  LRRK2 RNA guide
uauuacaccguugcucaccaaa

SEQ ID NO: 10175 - RNA, 22 nt, Artificial Sequence
  LRRK2 RNA guide
ucuuugcaaauuuggugagcaa

SEQ ID NO: 10176 - RNA, 22 nt, Artificial Sequence
  LRRK2 RNA guide
ugagcaacgguguaauacggca

SEQ ID NO: 10177 - RNA, 22 nt, Artificial Sequence
  LRRK2 RNA guide
ugcaaauuuggugagcaacggu

SEQ ID NO: 10178 - RNA, 22 nt, Artificial Sequence
  LRRK2 RNA guide
ugccguauuacaccguugcuca

SEQ ID NO: 10179 - RNA, 22 nt, Artificial Sequence
  LRRK2 RNA guide
uggugagcaacgguguaauacg

SEQ ID NO: 10180 - RNA, 22 nt, Artificial Sequence
  LRRK2 RNA guide
ugucuuugcaaauuuggugagc

SEQ ID NO: 10181 - RNA, 22 nt, Artificial Sequence
  LRRK2 RNA guide
uuacaccguugcucaccaaauu

SEQ ID NO: 10182 - RNA, 22 nt, Artificial Sequence
  LRRK2 RNA guide
uuaccgagaugccguauuacac

SEQ ID NO: 10183 - RNA, 22 nt, Artificial Sequence
  LRRK2 RNA guide
uugcaaauuuggugagcaacgg

SEQ ID NO: 10184 - RNA, 22 nt, Artificial Sequence
  LRRK2 RNA guide
uuggugagcaacgguguaauac

SEQ ID NO: 10185 - RNA, 22 nt, Artificial Sequence
  LRRK2 RNA guide
uuuaccgagaugccguauuaca

SEQ ID NO: 10186 - RNA, 22 nt, Artificial Sequence
  LRRK2 RNA guide
uuugcaaauuuggugagcaacg

SEQ ID NO: 10187 - RNA, 22 nt, Artificial Sequence
  LRRK2 RNA guide
uuuggugagcaacgguguaaua

SEQ ID NO: 10188 - RNA, 22 nt, Artificial Sequence
  LRRK2 RNA guide
uuuuaccgagaugccguauuac

SEQ ID NO: 10189 - RNA, 20 nt, Artificial Sequence
  LRRK2 RNA guide
aaauuuggugagcaaugcug

SEQ ID NO: 10190 - RNA, 20 nt, Artificial Sequence
  LRRK2 RNA guide
aaugcuguaauacggcaucu

SEQ ID NO: 10191 - RNA, 20 nt, Artificial Sequence
  LRRK2 RNA guide
aauuuggugagcaaugcugu

SEQ ID NO: 10192 - RNA, 20 nt, Artificial Sequence
  LRRK2 RNA guide
acagcauugcucaccaaauu

SEQ ID NO: 10193 - RNA, 20 nt, Artificial Sequence
  LRRK2 RNA guide
accgagaugccguauuacag

SEQ ID NO: 10194 - RNA, 20 nt, Artificial Sequence
  LRRK2 RNA guide
agaugccguauuacagcauu

SEQ ID NO: 10195 - RNA, 20 nt, Artificial Sequence
  LRRK2 RNA guide
agcaaugcuguaauacggca

SEQ ID NO: 10196 - RNA, 20 nt, Artificial Sequence
  LRRK2 RNA guide
agcauugcucaccaaauuug

SEQ ID NO: 10197 - RNA, 20 nt, Artificial Sequence
  LRRK2 RNA guide
augccguauuacagcauugc

SEQ ID NO: 10198 - RNA, 20 nt, Artificial Sequence
  LRRK2 RNA guide
augcuguaauacggcaucuc

SEQ ID NO: 10199 - RNA, 20 nt, Artificial Sequence
  LRRK2 RNA guide
auuacagcauugcucaccaa

SEQ ID NO: 10200 - RNA, 20 nt, Artificial Sequence
  LRRK2 RNA guide
auuuggugagcaaugcugua

SEQ ID NO: 10201 - RNA, 20 nt, Artificial Sequence
  LRRK2 RNA guide
caaauuuggugagcaaugcu

SEQ ID NO: 10202 - RNA, 20 nt, Artificial Sequence
  LRRK2 RNA guide
caaugcuguaauacggcauc

SEQ ID NO: 10203 - RNA, 20 nt, Artificial Sequence
  LRRK2 RNA guide
cagcauugcucaccaaauuu

SEQ ID NO: 10204 - RNA, 20 nt, Artificial Sequence
  LRRK2 RNA guide
cauugcucaccaaauuugca

SEQ ID NO: 10205 - RNA, 20 nt, Artificial Sequence
  LRRK2 RNA guide
ccgagaugccguauuacagc

SEQ ID NO: 10206 - RNA, 20 nt, Artificial Sequence
  LRRK2 RNA guide
ccguauuacagcauugcuca

SEQ ID NO: 10207 - RNA, 20 nt, Artificial Sequence
  LRRK2 RNA guide
cgagaugccguauuacagca

SEQ ID NO: 10208 - RNA, 20 nt, Artificial Sequence
  LRRK2 RNA guide
cguauuacagcauugcucac

SEQ ID NO: 10209 - RNA, 20 nt, Artificial Sequence
  LRRK2 RNA guide
gagaugccguauuacagcau

SEQ ID NO: 10210 - RNA, 20 nt, Artificial Sequence
  LRRK2 RNA guide
gagcaaugcuguaauacggc

SEQ ID NO: 10211 - RNA, 20 nt, Artificial Sequence
  LRRK2 RNA guide
gaugccguauuacagcauug

SEQ ID NO: 10212 - RNA, 20 nt, Artificial Sequence
  LRRK2 RNA guide
gcaaauuuggugagcaaugc

SEQ ID NO: 10213 - RNA, 20 nt, Artificial Sequence
  LRRK2 RNA guide
gcaaugcuguaauacggcau

SEQ ID NO: 10214 - RNA, 20 nt, Artificial Sequence
  LRRK2 RNA guide
gcauugcucaccaaauuugc

SEQ ID NO: 10215 - RNA, 20 nt, Artificial Sequence
  LRRK2 RNA guide
gccguauuacagcauugcuc

SEQ ID NO: 10216 - RNA, 20 nt, Artificial Sequence
  LRRK2 RNA guide
ggugagcaaugcuguaauac

SEQ ID NO: 10217 - RNA, 20 nt, Artificial Sequence
  LRRK2 RNA guide
guauuacagcauugcucacc

SEQ ID NO: 10218 - RNA, 20 nt, Artificial Sequence
  LRRK2 RNA guide
gucuuugcaaauuuggugag

SEQ ID NO: 10219 - RNA, 20 nt, Artificial Sequence
  LRRK2 RNA guide
gugagcaaugcuguaauacg

SEQ ID NO: 10220 - RNA, 20 nt, Artificial Sequence
  LRRK2 RNA guide
uacagcauugcucaccaaau

SEQ ID NO: 10221 - RNA, 20 nt, Artificial Sequence
  LRRK2 RNA guide
uauuacagcauugcucacca

SEQ ID NO: 10222 - RNA, 20 nt, Artificial Sequence
  LRRK2 RNA guide
ugagcaaugcuguaauacgg

SEQ ID NO: 10223 - RNA, 20 nt, Artificial Sequence
  LRRK2 RNA guide
ugcaaauuuggugagcaaug

SEQ ID NO: 10224 - RNA, 20 nt, Artificial Sequence
  LRRK2 RNA guide
ugccguauuacagcauugcu

SEQ ID NO: 10225 - RNA, 20 nt, Artificial Sequence
  LRRK2 RNA guide
uggugagcaaugcuguaaua

SEQ ID NO: 10226 - RNA, 20 nt, Artificial Sequence
  LRRK2 RNA guide
ugucuuugcaaauuugguga

SEQ ID NO: 10227 - RNA, 20 nt, Artificial Sequence
  LRRK2 RNA guide
uuacagcauugcucaccaaa

SEQ ID NO: 10228 - RNA, 20 nt, Artificial Sequence
  LRRK2 RNA guide
uugcaaauuuggugagcaau

SEQ ID NO: 10229 - RNA, 20 nt, Artificial Sequence
  LRRK2 RNA guide
uuggugagcaaugcuguaau

SEQ ID NO: 10230 - RNA, 20 nt, Artificial Sequence
  LRRK2 RNA guide
uuuggugagcaaugcuguaa

SEQ ID NO: 10231 - RNA, 21 nt, Artificial Sequence
  LRRK2 RNA guide
aaauuuggugagcaaugcugu

SEQ ID NO: 10232 - RNA, 21 nt, Artificial Sequence
  LRRK2 RNA guide
aaugcuguaauacggcaucuc

SEQ ID NO: 10233 - RNA, 21 nt, Artificial Sequence
  LRRK2 RNA guide
aauuuggugagcaaugcugua

SEQ ID NO: 10234 - RNA, 21 nt, Artificial Sequence
  LRRK2 RNA guide
acagcauugcucaccaaauuu

SEQ ID NO: 10235 - RNA, 21 nt, Artificial Sequence
  LRRK2 RNA guide
accgagaugccguauuacagc

SEQ ID NO: 10236 - RNA, 21 nt, Artificial Sequence
  LRRK2 RNA guide
agaugccguauuacagcauug

SEQ ID NO: 10237 - RNA, 21 nt, Artificial Sequence
  LRRK2 RNA guide
agcaaugcuguaauacggcau

SEQ ID NO: 10238 - RNA, 21 nt, Artificial Sequence
  LRRK2 RNA guide
agcauugcucaccaaauuugc

SEQ ID NO: 10239 - RNA, 21 nt, Artificial Sequence
  LRRK2 RNA guide
augccguauuacagcauugcu

SEQ ID NO: 10240 - RNA, 21 nt, Artificial Sequence
  LRRK2 RNA guide
augcuguaauacggcaucucg

SEQ ID NO: 10241 - RNA, 21 nt, Artificial Sequence
  LRRK2 RNA guide
augucuuugcaaauuugguga

SEQ ID NO: 10242 - RNA, 21 nt, Artificial Sequence
  LRRK2 RNA guide
auuacagcauugcucaccaaa

SEQ ID NO: 10243 - RNA, 21 nt, Artificial Sequence
  LRRK2 RNA guide
auuuggugagcaaugcuguaa

SEQ ID NO: 10244 - RNA, 21 nt, Artificial Sequence
  LRRK2 RNA guide
caaauuuggugagcaaugcug

SEQ ID NO: 10245 - RNA, 21 nt, Artificial Sequence
  LRRK2 RNA guide
caaugcuguaauacggcaucu

SEQ ID NO: 10246 - RNA, 21 nt, Artificial Sequence
  LRRK2 RNA guide
cagcauugcucaccaaauuug

SEQ ID NO: 10247 - RNA, 21 nt, Artificial Sequence
  LRRK2 RNA guide
cauugcucaccaaauuugcaa

SEQ ID NO: 10248 - RNA, 21 nt, Artificial Sequence
  LRRK2 RNA guide
ccgagaugccguauuacagca

SEQ ID NO: 10249 - RNA, 21 nt, Artificial Sequence
  LRRK2 RNA guide
ccguauuacagcauugcucac

SEQ ID NO: 10250 - RNA, 21 nt, Artificial Sequence
  LRRK2 RNA guide
cgagaugccguauuacagcau

SEQ ID NO: 10251 - RNA, 21 nt, Artificial Sequence
  LRRK2 RNA guide
cguauuacagcauugcucacc

SEQ ID NO: 10252 - RNA, 21 nt, Artificial Sequence
  LRRK2 RNA guide
gagaugccguauuacagcauu

SEQ ID NO: 10253 - RNA, 21 nt, Artificial Sequence
  LRRK2 RNA guide
gagcaaugcuguaauacggca

SEQ ID NO: 10254 - RNA, 21 nt, Artificial Sequence
  LRRK2 RNA guide
gaugccguauuacagcauugc

SEQ ID NO: 10255 - RNA, 21 nt, Artificial Sequence
  LRRK2 RNA guide
gcaaauuuggugagcaaugcu

SEQ ID NO: 10256 - RNA, 21 nt, Artificial Sequence
  LRRK2 RNA guide
gcaaugcuguaauacggcauc

SEQ ID NO: 10257 - RNA, 21 nt, Artificial Sequence
  LRRK2 RNA guide
gcauugcucaccaaauuugca

SEQ ID NO: 10258 - RNA, 21 nt, Artificial Sequence
  LRRK2 RNA guide
gccguauuacagcauugcuca

SEQ ID NO: 10259 - RNA, 21 nt, Artificial Sequence
  LRRK2 RNA guide
ggugagcaaugcuguaauacg

SEQ ID NO: 10260 - RNA, 21 nt, Artificial Sequence
  LRRK2 RNA guide
guauuacagcauugcucacca

SEQ ID NO: 10261 - RNA, 21 nt, Artificial Sequence
  LRRK2 RNA guide
gugagcaaugcuguaauacgg

SEQ ID NO: 10262 - RNA, 21 nt, Artificial Sequence
  LRRK2 RNA guide
uacagcauugcucaccaaauu

SEQ ID NO: 10263 - RNA, 21 nt, Artificial Sequence
  LRRK2 RNA guide
uaccgagaugccguauuacag

SEQ ID NO: 10264 - RNA, 21 nt, Artificial Sequence
  LRRK2 RNA guide
uauuacagcauugcucaccaa

SEQ ID NO: 10265 - RNA, 21 nt, Artificial Sequence
  LRRK2 RNA guide
ugagcaaugcuguaauacggc

SEQ ID NO: 10266 - RNA, 21 nt, Artificial Sequence
  LRRK2 RNA guide
ugcaaauuuggugagcaaugc

SEQ ID NO: 10267 - RNA, 21 nt, Artificial Sequence
  LRRK2 RNA guide
ugccguauuacagcauugcuc

SEQ ID NO: 10268 - RNA, 21 nt, Artificial Sequence
  LRRK2 RNA guide
uggugagcaaugcuguaauac

SEQ ID NO: 10269 - RNA, 21 nt, Artificial Sequence
  LRRK2 RNA guide
ugucuuugcaaauuuggugag

SEQ ID NO: 10270 - RNA, 21 nt, Artificial Sequence
  LRRK2 RNA guide
uuacagcauugcucaccaaau

SEQ ID NO: 10271 - RNA, 21 nt, Artificial Sequence
  LRRK2 RNA guide
uugcaaauuuggugagcaaug

SEQ ID NO: 10272 - RNA, 21 nt, Artificial Sequence
  LRRK2 RNA guide
uuggugagcaaugcuguaaua

SEQ ID NO: 10273 - RNA, 21 nt, Artificial Sequence
  LRRK2 RNA guide
uuugcaaauuuggugagcaau

SEQ ID NO: 10274 - RNA, 21 nt, Artificial Sequence
  LRRK2 RNA guide
uuuggugagcaaugcuguaau

SEQ ID NO: 10275 - RNA, 22 nt, Artificial Sequence
  LRRK2 RNA guide
aaauuuggugagcaaugcugua

SEQ ID NO: 10276 - RNA, 22 nt, Artificial Sequence
  LRRK2 RNA guide
aaugcuguaauacggcaucucg

SEQ ID NO: 10277 - RNA, 22 nt, Artificial Sequence
  LRRK2 RNA guide
aaugucuuugcaaauuugguga

SEQ ID NO: 10278 - RNA, 22 nt, Artificial Sequence
  LRRK2 RNA guide
aauuuggugagcaaugcuguaa

SEQ ID NO: 10279 - RNA, 22 nt, Artificial Sequence
  LRRK2 RNA guide
acagcauugcucaccaaauuug

SEQ ID NO: 10280 - RNA, 22 nt, Artificial Sequence
  LRRK2 RNA guide
accgagaugccguauuacagca

SEQ ID NO: 10281 - RNA, 22 nt, Artificial Sequence
  LRRK2 RNA guide
agaugccguauuacagcauugc

SEQ ID NO: 10282 - RNA, 22 nt, Artificial Sequence
  LRRK2 RNA guide
agcaaugcuguaauacggcauc

SEQ ID NO: 10283 - RNA, 22 nt, Artificial Sequence
  LRRK2 RNA guide
agcauugcucaccaaauuugca

SEQ ID NO: 10284 - RNA, 22 nt, Artificial Sequence
  LRRK2 RNA guide
augccguauuacagcauugcuc

SEQ ID NO: 10285 - RNA, 22 nt, Artificial Sequence
  LRRK2 RNA guide
augcuguaauacggcaucucgg

SEQ ID NO: 10286 - RNA, 22 nt, Artificial Sequence
  LRRK2 RNA guide
augucuuugcaaauuuggugag

SEQ ID NO: 10287 - RNA, 22 nt, Artificial Sequence
  LRRK2 RNA guide
auuacagcauugcucaccaaau

SEQ ID NO: 10288 - RNA, 22 nt, Artificial Sequence
  LRRK2 RNA guide
auuuggugagcaaugcuguaau

SEQ ID NO: 10289 - RNA, 22 nt, Artificial Sequence
  LRRK2 RNA guide
caaauuuggugagcaaugcugu

SEQ ID NO: 10290 - RNA, 22 nt, Artificial Sequence
  LRRK2 RNA guide
caaugcuguaauacggcaucuc

SEQ ID NO: 10291 - RNA, 22 nt, Artificial Sequence
  LRRK2 RNA guide
cagcauugcucaccaaauuugc

SEQ ID NO: 10292 - RNA, 22 nt, Artificial Sequence
  LRRK2 RNA guide
cauugcucaccaaauuugcaaa

SEQ ID NO: 10293 - RNA, 22 nt, Artificial Sequence
  LRRK2 RNA guide
ccgagaugccguauuacagcau

SEQ ID NO: 10294 - RNA, 22 nt, Artificial Sequence
  LRRK2 RNA guide
ccguauuacagcauugcucacc

SEQ ID NO: 10295 - RNA, 22 nt, Artificial Sequence
  LRRK2 RNA guide
cgagaugccguauuacagcauu

SEQ ID NO: 10296 - RNA, 22 nt, Artificial Sequence
  LRRK2 RNA guide
cguauuacagcauugcucacca

SEQ ID NO: 10297 - RNA, 22 nt, Artificial Sequence
  LRRK2 RNA guide
cuuugcaaauuuggugagcaau

SEQ ID NO: 10298 - RNA, 22 nt, Artificial Sequence
  LRRK2 RNA guide
gagaugccguauuacagcauug

SEQ ID NO: 10299 - RNA, 22 nt, Artificial Sequence
  LRRK2 RNA guide
gagcaaugcuguaauacggcau

SEQ ID NO: 10300 - RNA, 22 nt, Artificial Sequence
  LRRK2 RNA guide
gaugccguauuacagcauugcu

SEQ ID NO: 10301 - RNA, 22 nt, Artificial Sequence
  LRRK2 RNA guide
gcaaauuuggugagcaaugcug

SEQ ID NO: 10302 - RNA, 22 nt, Artificial Sequence
  LRRK2 RNA guide
gcaaugcuguaauacggcaucu

SEQ ID NO: 10303 - RNA, 22 nt, Artificial Sequence
  LRRK2 RNA guide
gcauugcucaccaaauuugcaa

SEQ ID NO: 10304 - RNA, 22 nt, Artificial Sequence
  LRRK2 RNA guide
gccguauuacagcauugcucac

SEQ ID NO: 10305 - RNA, 22 nt, Artificial Sequence
  LRRK2 RNA guide
ggugagcaaugcuguaauacgg

SEQ ID NO: 10306 - RNA, 22 nt, Artificial Sequence
  LRRK2 RNA guide
guauuacagcauugcucaccaa

SEQ ID NO: 10307 - RNA, 22 nt, Artificial Sequence
  LRRK2 RNA guide
gugagcaaugcuguaauacggc

SEQ ID NO: 10308 - RNA, 22 nt, Artificial Sequence
  LRRK2 RNA guide
uacagcauugcucaccaaauuu

SEQ ID NO: 10309 - RNA, 22 nt, Artificial Sequence
  LRRK2 RNA guide
uaccgagaugccguauuacagc

SEQ ID NO: 10310 - RNA, 22 nt, Artificial Sequence
  LRRK2 RNA guide
uauuacagcauugcucaccaaa

SEQ ID NO: 10311 - RNA, 22 nt, Artificial Sequence
  LRRK2 RNA guide
ugagcaaugcuguaauacggca

SEQ ID NO: 10312 - RNA, 22 nt, Artificial Sequence
  LRRK2 RNA guide
ugcaaauuuggugagcaaugcu

SEQ ID NO: 10313 - RNA, 22 nt, Artificial Sequence
  LRRK2 RNA guide
ugccguauuacagcauugcuca

SEQ ID NO: 10314 - RNA, 22 nt, Artificial Sequence
  LRRK2 RNA guide
uggugagcaaugcuguaauacg

SEQ ID NO: 10315 - RNA, 22 nt, Artificial Sequence
  LRRK2 RNA guide
uuacagcauugcucaccaaauu

SEQ ID NO: 10316 - RNA, 22 nt, Artificial Sequence
  LRRK2 RNA guide
uuaccgagaugccguauuacag

SEQ ID NO: 10317 - RNA, 22 nt, Artificial Sequence
  LRRK2 RNA guide
uugcaaauuuggugagcaaugc

SEQ ID NO: 10318 - RNA, 22 nt, Artificial Sequence
  LRRK2 RNA guide
uuggugagcaaugcuguaauac

SEQ ID NO: 10319 - RNA, 22 nt, Artificial Sequence
  LRRK2 RNA guide
uuugcaaauuuggugagcaaug

SEQ ID NO: 10320 - RNA, 22 nt, Artificial Sequence
  LRRK2 RNA guide
uuuggugagcaaugcuguaaua

SEQ ID NO: 10321 - RNA, 20 nt, Artificial Sequence
  LRRK2 RNA guide
aaauuugcgaagacauucca

SEQ ID NO: 10322 - RNA, 20 nt, Artificial Sequence
  LRRK2 RNA guide
aaggaauuggaaugucuucg

SEQ ID NO: 10323 - RNA, 20 nt, Artificial Sequence
  LRRK2 RNA guide
aaugucuucgcaaauuuggu

SEQ ID NO: 10324 - RNA, 20 nt, Artificial Sequence
  LRRK2 RNA guide
aauuggaaugucuucgcaaa

SEQ ID NO: 10325 - RNA, 20 nt, Artificial Sequence
  LRRK2 RNA guide
aauuugcgaagacauuccaa

SEQ ID NO: 10326 - RNA, 20 nt, Artificial Sequence
  LRRK2 RNA guide
acagcguugcucaccaaauu

SEQ ID NO: 10327 - RNA, 20 nt, Artificial Sequence
  LRRK2 RNA guide
accaaauuugcgaagacauu

SEQ ID NO: 10328 - RNA, 20 nt, Artificial Sequence
  LRRK2 RNA guide
accaaggaauuggaaugucu

SEQ ID NO: 10329 - RNA, 20 nt, Artificial Sequence
  LRRK2 RNA guide
agcguugcucaccaaauuug

SEQ ID NO: 10330 - RNA, 20 nt, Artificial Sequence
  LRRK2 RNA guide
aggaauuggaaugucuucgc

SEQ ID NO: 10331 - RNA, 20 nt, Artificial Sequence
  LRRK2 RNA guide
augucuucgcaaauuuggug

SEQ ID NO: 10332 - RNA, 20 nt, Artificial Sequence
  LRRK2 RNA guide
auuggaaugucuucgcaaau

SEQ ID NO: 10333 - RNA, 20 nt, Artificial Sequence
  LRRK2 RNA guide
auuugcgaagacauuccaau

SEQ ID NO: 10334 - RNA, 20 nt, Artificial Sequence
  LRRK2 RNA guide
caaauuugcgaagacauucc

SEQ ID NO: 10335 - RNA, 20 nt, Artificial Sequence
  LRRK2 RNA guide
caaggaauuggaaugucuuc

SEQ ID NO: 10336 - RNA, 20 nt, Artificial Sequence
  LRRK2 RNA guide
caccaaauuugcgaagacau

SEQ ID NO: 10337 - RNA, 20 nt, Artificial Sequence
  LRRK2 RNA guide
cagcguugcucaccaaauuu

SEQ ID NO: 10338 - RNA, 20 nt, Artificial Sequence
  LRRK2 RNA guide
ccaaauuugcgaagacauuc

SEQ ID NO: 10339 - RNA, 20 nt, Artificial Sequence
  LRRK2 RNA guide
ccaaggaauuggaaugucuu

SEQ ID NO: 10340 - RNA, 20 nt, Artificial Sequence
  LRRK2 RNA guide
cgaagacauuccaauuccuu

SEQ ID NO: 10341 - RNA, 20 nt, Artificial Sequence
  LRRK2 RNA guide
cguugcucaccaaauuugcg

SEQ ID NO: 10342 - RNA, 20 nt, Artificial Sequence
  LRRK2 RNA guide
cucaccaaauuugcgaagac

SEQ ID NO: 10343 - RNA, 20 nt, Artificial Sequence
  LRRK2 RNA guide
cuuaccaaggaauuggaaug

SEQ ID NO: 10344 - RNA, 20 nt, Artificial Sequence
  LRRK2 RNA guide
cuucgcaaauuuggugagca

SEQ ID NO: 10345 - RNA, 20 nt, Artificial Sequence
  LRRK2 RNA guide
gaaugucuucgcaaauuugg

SEQ ID NO: 10346 - RNA, 20 nt, Artificial Sequence
  LRRK2 RNA guide
gaauuggaaugucuucgcaa

SEQ ID NO: 10347 - RNA, 20 nt, Artificial Sequence
  LRRK2 RNA guide
gcgaagacauuccaauuccu

SEQ ID NO: 10348 - RNA, 20 nt, Artificial Sequence
  LRRK2 RNA guide
gcguugcucaccaaauuugc

SEQ ID NO: 10349 - RNA, 20 nt, Artificial Sequence
  LRRK2 RNA guide
gcucaccaaauuugcgaaga

SEQ ID NO: 10350 - RNA, 20 nt, Artificial Sequence
  LRRK2 RNA guide
ggaaugucuucgcaaauuug

SEQ ID NO: 10351 - RNA, 20 nt, Artificial Sequence
  LRRK2 RNA guide
ggaauuggaaugucuucgca

SEQ ID NO: 10352 - RNA, 20 nt, Artificial Sequence
  LRRK2 RNA guide
gucuucgcaaauuuggugag

SEQ ID NO: 10353 - RNA, 20 nt, Artificial Sequence
  LRRK2 RNA guide
guugcucaccaaauuugcga

SEQ ID NO: 10354 - RNA, 20 nt, Artificial Sequence
  LRRK2 RNA guide
uacagcguugcucaccaaau

SEQ ID NO: 10355 - RNA, 20 nt, Artificial Sequence
  LRRK2 RNA guide
uaccaaggaauuggaauguc

SEQ ID NO: 10356 - RNA, 20 nt, Artificial Sequence
  LRRK2 RNA guide
ucaccaaauuugcgaagaca

SEQ ID NO: 10357 - RNA, 20 nt, Artificial Sequence
  LRRK2 RNA guide
ucgcaaauuuggugagcaac

SEQ ID NO: 10358 - RNA, 20 nt, Artificial Sequence
  LRRK2 RNA guide
ucuucgcaaauuuggugagc

SEQ ID NO: 10359 - RNA, 20 nt, Artificial Sequence
  LRRK2 RNA guide
ugcgaagacauuccaauucc

SEQ ID NO: 10360 - RNA, 20 nt, Artificial Sequence
  LRRK2 RNA guide
ugcucaccaaauuugcgaag

SEQ ID NO: 10361 - RNA, 20 nt, Artificial Sequence
  LRRK2 RNA guide
uggaaugucuucgcaaauuu

SEQ ID NO: 10362 - RNA, 20 nt, Artificial Sequence
  LRRK2 RNA guide
ugucuucgcaaauuugguga

SEQ ID NO: 10363 - RNA, 20 nt, Artificial Sequence
  LRRK2 RNA guide
uuaccaaggaauuggaaugu

SEQ ID NO: 10364 - RNA, 20 nt, Artificial Sequence
  LRRK2 RNA guide
uucgcaaauuuggugagcaa

SEQ ID NO: 10365 - RNA, 20 nt, Artificial Sequence
  LRRK2 RNA guide
uugcgaagacauuccaauuc

SEQ ID NO: 10366 - RNA, 20 nt, Artificial Sequence
  LRRK2 RNA guide
uugcucaccaaauuugcgaa

SEQ ID NO: 10367 - RNA, 20 nt, Artificial Sequence
  LRRK2 RNA guide
uuggaaugucuucgcaaauu

SEQ ID NO: 10368 - RNA, 20 nt, Artificial Sequence
  LRRK2 RNA guide
uuugcgaagacauuccaauu

SEQ ID NO: 10369 - RNA, 21 nt, Artificial Sequence
  LRRK2 RNA guide
aaauuugcgaagacauuccaa

SEQ ID NO: 10370 - RNA, 21 nt, Artificial Sequence
  LRRK2 RNA guide
aaggaauuggaaugucuucgc

SEQ ID NO: 10371 - RNA, 21 nt, Artificial Sequence
  LRRK2 RNA guide
aaugucuucgcaaauuuggug

SEQ ID NO: 10372 - RNA, 21 nt, Artificial Sequence
  LRRK2 RNA guide
aauuggaaugucuucgcaaau

SEQ ID NO: 10373 - RNA, 21 nt, Artificial Sequence
  LRRK2 RNA guide
aauuugcgaagacauuccaau

SEQ ID NO: 10374 - RNA, 21 nt, Artificial Sequence
  LRRK2 RNA guide
acagcguugcucaccaaauuu

SEQ ID NO: 10375 - RNA, 21 nt, Artificial Sequence
  LRRK2 RNA guide
accaaauuugcgaagacauuc

SEQ ID NO: 10376 - RNA, 21 nt, Artificial Sequence
  LRRK2 RNA guide
accaaggaauuggaaugucuu

SEQ ID NO: 10377 - RNA, 21 nt, Artificial Sequence
  LRRK2 RNA guide
acuuaccaaggaauuggaaug

SEQ ID NO: 10378 - RNA, 21 nt, Artificial Sequence
  LRRK2 RNA guide
agcguugcucaccaaauuugc

SEQ ID NO: 10379 - RNA, 21 nt, Artificial Sequence
  LRRK2 RNA guide
aggaauuggaaugucuucgca

SEQ ID NO: 10380 - RNA, 21 nt, Artificial Sequence
  LRRK2 RNA guide
augucuucgcaaauuugguga

SEQ ID NO: 10381 - RNA, 21 nt, Artificial Sequence
  LRRK2 RNA guide
auuggaaugucuucgcaaauu

SEQ ID NO: 10382 - RNA, 21 nt, Artificial Sequence
  LRRK2 RNA guide
auuugcgaagacauuccaauu

SEQ ID NO: 10383 - RNA, 21 nt, Artificial Sequence
  LRRK2 RNA guide
caaauuugcgaagacauucca

SEQ ID NO: 10384 - RNA, 21 nt, Artificial Sequence
  LRRK2 RNA guide
caaggaauuggaaugucuucg

SEQ ID NO: 10385 - RNA, 21 nt, Artificial Sequence
  LRRK2 RNA guide
caccaaauuugcgaagacauu

SEQ ID NO: 10386 - RNA, 21 nt, Artificial Sequence
  LRRK2 RNA guide
cagcguugcucaccaaauuug

SEQ ID NO: 10387 - RNA, 21 nt, Artificial Sequence
  LRRK2 RNA guide
ccaaauuugcgaagacauucc

SEQ ID NO: 10388 - RNA, 21 nt, Artificial Sequence
  LRRK2 RNA guide
ccaaggaauuggaaugucuuc

SEQ ID NO: 10389 - RNA, 21 nt, Artificial Sequence
  LRRK2 RNA guide
cgaagacauuccaauuccuug

SEQ ID NO: 10390 - RNA, 21 nt, Artificial Sequence
  LRRK2 RNA guide
cguugcucaccaaauuugcga

SEQ ID NO: 10391 - RNA, 21 nt, Artificial Sequence
  LRRK2 RNA guide
cucaccaaauuugcgaagaca

SEQ ID NO: 10392 - RNA, 21 nt, Artificial Sequence
  LRRK2 RNA guide
cuuaccaaggaauuggaaugu

SEQ ID NO: 10393 - RNA, 21 nt, Artificial Sequence
  LRRK2 RNA guide
cuucgcaaauuuggugagcaa

SEQ ID NO: 10394 - RNA, 21 nt, Artificial Sequence
  LRRK2 RNA guide
gaaugucuucgcaaauuuggu

SEQ ID NO: 10395 - RNA, 21 nt, Artificial Sequence
  LRRK2 RNA guide
gaauuggaaugucuucgcaaa

SEQ ID NO: 10396 - RNA, 21 nt, Artificial Sequence
  LRRK2 RNA guide
gcgaagacauuccaauuccuu

SEQ ID NO: 10397 - RNA, 21 nt, Artificial Sequence
  LRRK2 RNA guide
gcguugcucaccaaauuugcg

SEQ ID NO: 10398 - RNA, 21 nt, Artificial Sequence
  LRRK2 RNA guide
gcucaccaaauuugcgaagac

SEQ ID NO: 10399 - RNA, 21 nt, Artificial Sequence
  LRRK2 RNA guide
ggaaugucuucgcaaauuugg

SEQ ID NO: 10400 - RNA, 21 nt, Artificial Sequence
  LRRK2 RNA guide
ggaauuggaaugucuucgcaa

SEQ ID NO: 10401 - RNA, 21 nt, Artificial Sequence
  LRRK2 RNA guide
gucuucgcaaauuuggugagc

SEQ ID NO: 10402 - RNA, 21 nt, Artificial Sequence
  LRRK2 RNA guide
guugcucaccaaauuugcgaa

SEQ ID NO: 10403 - RNA, 21 nt, Artificial Sequence
  LRRK2 RNA guide
uacagcguugcucaccaaauu

SEQ ID NO: 10404 - RNA, 21 nt, Artificial Sequence
  LRRK2 RNA guide
uaccaaggaauuggaaugucu

SEQ ID NO: 10405 - RNA, 21 nt, Artificial Sequence
  LRRK2 RNA guide
ucaccaaauuugcgaagacau

SEQ ID NO: 10406 - RNA, 21 nt, Artificial Sequence
  LRRK2 RNA guide
ucgcaaauuuggugagcaacg

SEQ ID NO: 10407 - RNA, 21 nt, Artificial Sequence
  LRRK2 RNA guide
ucuucgcaaauuuggugagca

SEQ ID NO: 10408 - RNA, 21 nt, Artificial Sequence
  LRRK2 RNA guide
ugcgaagacauuccaauuccu

SEQ ID NO: 10409 - RNA, 21 nt, Artificial Sequence
  LRRK2 RNA guide
ugcucaccaaauuugcgaaga

SEQ ID NO: 10410 - RNA, 21 nt, Artificial Sequence
  LRRK2 RNA guide
uggaaugucuucgcaaauuug

SEQ ID NO: 10411 - RNA, 21 nt, Artificial Sequence
  LRRK2 RNA guide
ugucuucgcaaauuuggugag

SEQ ID NO: 10412 - RNA, 21 nt, Artificial Sequence
  LRRK2 RNA guide
uuacagcguugcucaccaaau

SEQ ID NO: 10413 - RNA, 21 nt, Artificial Sequence
  LRRK2 RNA guide
uuaccaaggaauuggaauguc

SEQ ID NO: 10414 - RNA, 21 nt, Artificial Sequence
  LRRK2 RNA guide
uucgcaaauuuggugagcaac

SEQ ID NO: 10415 - RNA, 21 nt, Artificial Sequence
  LRRK2 RNA guide
uugcgaagacauuccaauucc

SEQ ID NO: 10416 - RNA, 21 nt, Artificial Sequence
  LRRK2 RNA guide
uugcucaccaaauuugcgaag

SEQ ID NO: 10417 - RNA, 21 nt, Artificial Sequence
  LRRK2 RNA guide
uuggaaugucuucgcaaauuu

SEQ ID NO: 10418 - RNA, 21 nt, Artificial Sequence
  LRRK2 RNA guide
uuugcgaagacauuccaauuc

SEQ ID NO: 10419 - RNA, 22 nt, Artificial Sequence
  LRRK2 RNA guide
aaauuugcgaagacauuccaau

SEQ ID NO: 10420 - RNA, 22 nt, Artificial Sequence
  LRRK2 RNA guide
aacuuaccaaggaauuggaaug

SEQ ID NO: 10421 - RNA, 22 nt, Artificial Sequence
  LRRK2 RNA guide
aaggaauuggaaugucuucgca

SEQ ID NO: 10422 - RNA, 22 nt, Artificial Sequence
  LRRK2 RNA guide
aaugucuucgcaaauuugguga

SEQ ID NO: 10423 - RNA, 22 nt, Artificial Sequence
  LRRK2 RNA guide
aauuggaaugucuucgcaaauu

SEQ ID NO: 10424 - RNA, 22 nt, Artificial Sequence
  LRRK2 RNA guide
aauuugcgaagacauuccaauu

SEQ ID NO: 10425 - RNA, 22 nt, Artificial Sequence
  LRRK2 RNA guide
acagcguugcucaccaaauuug

SEQ ID NO: 10426 - RNA, 22 nt, Artificial Sequence
  LRRK2 RNA guide
accaaauuugcgaagacauucc

SEQ ID NO: 10427 - RNA, 22 nt, Artificial Sequence
  LRRK2 RNA guide
accaaggaauuggaaugucuuc

SEQ ID NO: 10428 - RNA, 22 nt, Artificial Sequence
  LRRK2 RNA guide
acuuaccaaggaauuggaaugu

SEQ ID NO: 10429 - RNA, 22 nt, Artificial Sequence
  LRRK2 RNA guide
agcguugcucaccaaauuugcg

SEQ ID NO: 10430 - RNA, 22 nt, Artificial Sequence
  LRRK2 RNA guide
aggaauuggaaugucuucgcaa

SEQ ID NO: 10431 - RNA, 22 nt, Artificial Sequence
  LRRK2 RNA guide
augucuucgcaaauuuggugag

SEQ ID NO: 10432 - RNA, 22 nt, Artificial Sequence
  LRRK2 RNA guide
auuacagcguugcucaccaaau

SEQ ID NO: 10433 - RNA, 22 nt, Artificial Sequence
  LRRK2 RNA guide
auuggaaugucuucgcaaauuu

SEQ ID NO: 10434 - RNA, 22 nt, Artificial Sequence
  LRRK2 RNA guide
auuugcgaagacauuccaauuc

SEQ ID NO: 10435 - RNA, 22 nt, Artificial Sequence
  LRRK2 RNA guide
caaauuugcgaagacauuccaa

SEQ ID NO: 10436 - RNA, 22 nt, Artificial Sequence
  LRRK2 RNA guide
caaggaauuggaaugucuucgc

SEQ ID NO: 10437 - RNA, 22 nt, Artificial Sequence
  LRRK2 RNA guide
caccaaauuugcgaagacauuc

SEQ ID NO: 10438 - RNA, 22 nt, Artificial Sequence
  LRRK2 RNA guide
cagcguugcucaccaaauuugc

SEQ ID NO: 10439 - RNA, 22 nt, Artificial Sequence
  LRRK2 RNA guide
ccaaauuugcgaagacauucca

SEQ ID NO: 10440 - RNA, 22 nt, Artificial Sequence
  LRRK2 RNA guide
ccaaggaauuggaaugucuucg

SEQ ID NO: 10441 - RNA, 22 nt, Artificial Sequence
  LRRK2 RNA guide
cgaagacauuccaauuccuugg

SEQ ID NO: 10442 - RNA, 22 nt, Artificial Sequence
  LRRK2 RNA guide
cguugcucaccaaauuugcgaa

SEQ ID NO: 10443 - RNA, 22 nt, Artificial Sequence
  LRRK2 RNA guide
cucaccaaauuugcgaagacau

SEQ ID NO: 10444 - RNA, 22 nt, Artificial Sequence
  LRRK2 RNA guide
cuuaccaaggaauuggaauguc

SEQ ID NO: 10445 - RNA, 22 nt, Artificial Sequence
  LRRK2 RNA guide
cuucgcaaauuuggugagcaac

SEQ ID NO: 10446 - RNA, 22 nt, Artificial Sequence
  LRRK2 RNA guide
gaaugucuucgcaaauuuggug

SEQ ID NO: 10447 - RNA, 22 nt, Artificial Sequence
  LRRK2 RNA guide
gaauuggaaugucuucgcaaau

SEQ ID NO: 10448 - RNA, 22 nt, Artificial Sequence
  LRRK2 RNA guide
gcgaagacauuccaauuccuug

SEQ ID NO: 10449 - RNA, 22 nt, Artificial Sequence
  LRRK2 RNA guide
gcguugcucaccaaauuugcga

SEQ ID NO: 10450 - RNA, 22 nt, Artificial Sequence
  LRRK2 RNA guide
gcucaccaaauuugcgaagaca

SEQ ID NO: 10451 - RNA, 22 nt, Artificial Sequence
  LRRK2 RNA guide
ggaaugucuucgcaaauuuggu

SEQ ID NO: 10452 - RNA, 22 nt, Artificial Sequence
  LRRK2 RNA guide
ggaauuggaaugucuucgcaaa

SEQ ID NO: 10453 - RNA, 22 nt, Artificial Sequence
  LRRK2 RNA guide
gucuucgcaaauuuggugagca

SEQ ID NO: 10454 - RNA, 22 nt, Artificial Sequence
  LRRK2 RNA guide
guugcucaccaaauuugcgaag

SEQ ID NO: 10455 - RNA, 22 nt, Artificial Sequence
  LRRK2 RNA guide
uacagcguugcucaccaaauuu

SEQ ID NO: 10456 - RNA, 22 nt, Artificial Sequence
  LRRK2 RNA guide
uaccaaggaauuggaaugucuu

SEQ ID NO: 10457 - RNA, 22 nt, Artificial Sequence
  LRRK2 RNA guide
ucaccaaauuugcgaagacauu

SEQ ID NO: 10458 - RNA, 22 nt, Artificial Sequence
  LRRK2 RNA guide
ucgcaaauuuggugagcaacgc

SEQ ID NO: 10459 - RNA, 22 nt, Artificial Sequence
  LRRK2 RNA guide
ucuucgcaaauuuggugagcaa

SEQ ID NO: 10460 - RNA, 22 nt, Artificial Sequence
  LRRK2 RNA guide
ugcgaagacauuccaauuccuu

SEQ ID NO: 10461 - RNA, 22 nt, Artificial Sequence
  LRRK2 RNA guide
ugcucaccaaauuugcgaagac

SEQ ID NO: 10462 - RNA, 22 nt, Artificial Sequence
  LRRK2 RNA guide
uggaaugucuucgcaaauuugg

SEQ ID NO: 10463 - RNA, 22 nt, Artificial Sequence
  LRRK2 RNA guide
ugucuucgcaaauuuggugagc

SEQ ID NO: 10464 - RNA, 22 nt, Artificial Sequence
  LRRK2 RNA guide
uuacagcguugcucaccaaauu

SEQ ID NO: 10465 - RNA, 22 nt, Artificial Sequence
  LRRK2 RNA guide
uuaccaaggaauuggaaugucu

SEQ ID NO: 10466 - RNA, 22 nt, Artificial Sequence
  LRRK2 RNA guide
uucgcaaauuuggugagcaacg

SEQ ID NO: 10467 - RNA, 22 nt, Artificial Sequence
  LRRK2 RNA guide
uugcgaagacauuccaauuccu

SEQ ID NO: 10468 - RNA, 22 nt, Artificial Sequence
  LRRK2 RNA guide
uugcucaccaaauuugcgaaga

SEQ ID NO: 10469 - RNA, 22 nt, Artificial Sequence
  LRRK2 RNA guide
uuggaaugucuucgcaaauuug

SEQ ID NO: 10470 - RNA, 22 nt, Artificial Sequence
  LRRK2 RNA guide
uuugcgaagacauuccaauucc

SEQ ID NO: 10471 - RNA, 20 nt, Artificial Sequence
  LRRK2 RNA guide
aacaaugggccccuauuaaa

SEQ ID NO: 10472 - RNA, 20 nt, Artificial Sequence
  LRRK2 RNA guide
aauaggggcccauuguugau

SEQ ID NO: 10473 - RNA, 20 nt, Artificial Sequence
  LRRK2 RNA guide
aaucuucaugaucaacaaug

SEQ ID NO: 10474 - RNA, 20 nt, Artificial Sequence
  LRRK2 RNA guide
acaaugggccccuauuaaaa

SEQ ID NO: 10475 - RNA, 20 nt, Artificial Sequence
  LRRK2 RNA guide
aggggcccauuguugaucau

SEQ ID NO: 10476 - RNA, 20 nt, Artificial Sequence
  LRRK2 RNA guide
aguaaaucuucaugaucaac

SEQ ID NO: 10477 - RNA, 20 nt, Artificial Sequence
  LRRK2 RNA guide
auaggggcccauuguugauc

SEQ ID NO: 10478 - RNA, 20 nt, Artificial Sequence
  LRRK2 RNA guide
aucaacaaugggccccuauu

SEQ ID NO: 10479 - RNA, 20 nt, Artificial Sequence
  LRRK2 RNA guide
aucuucaugaucaacaaugg

SEQ ID NO: 10480 - RNA, 20 nt, Artificial Sequence
  LRRK2 RNA guide
augaucaacaaugggccccu

SEQ ID NO: 10481 - RNA, 20 nt, Artificial Sequence
  LRRK2 RNA guide
auuauuuuuuaauaggggcc

SEQ ID NO: 10482 - RNA, 20 nt, Artificial Sequence
  LRRK2 RNA guide
auuuuuuaauaggggcccau

SEQ ID NO: 10483 - RNA, 20 nt, Artificial Sequence
  LRRK2 RNA guide
caacaaugggccccuauuaa

SEQ ID NO: 10484 - RNA, 20 nt, Artificial Sequence
  LRRK2 RNA guide
caguaaaucuucaugaucaa

SEQ ID NO: 10485 - RNA, 20 nt, Artificial Sequence
  LRRK2 RNA guide
caugaucaacaaugggcccc

SEQ ID NO: 10486 - RNA, 20 nt, Artificial Sequence
  LRRK2 RNA guide
cauuguugaucaugaagauu

SEQ ID NO: 10487 - RNA, 20 nt, Artificial Sequence
  LRRK2 RNA guide
ccauuguugaucaugaagau

SEQ ID NO: 10488 - RNA, 20 nt, Artificial Sequence
  LRRK2 RNA guide
cccauuguugaucaugaaga

SEQ ID NO: 10489 - RNA, 20 nt, Artificial Sequence
  LRRK2 RNA guide
cuucaguaaaucuucaugau

SEQ ID NO: 10490 - RNA, 20 nt, Artificial Sequence
  LRRK2 RNA guide
cuucaugaucaacaaugggc

SEQ ID NO: 10491 - RNA, 20 nt, Artificial Sequence
  LRRK2 RNA guide
gaucaacaaugggccccuau

SEQ ID NO: 10492 - RNA, 20 nt, Artificial Sequence
  LRRK2 RNA guide
gcccauuguugaucaugaag

SEQ ID NO: 10493 - RNA, 20 nt, Artificial Sequence
  LRRK2 RNA guide
gcuucaguaaaucuucauga

SEQ ID NO: 10494 - RNA, 20 nt, Artificial Sequence
  LRRK2 RNA guide
ggcccauuguugaucaugaa

SEQ ID NO: 10495 - RNA, 20 nt, Artificial Sequence
  LRRK2 RNA guide
gggcccauuguugaucauga

SEQ ID NO: 10496 - RNA, 20 nt, Artificial Sequence
  LRRK2 RNA guide
ggggcccauuguugaucaug

SEQ ID NO: 10497 - RNA, 20 nt, Artificial Sequence
  LRRK2 RNA guide
guaaaucuucaugaucaaca

SEQ ID NO: 10498 - RNA, 20 nt, Artificial Sequence
  LRRK2 RNA guide
uaauaggggcccauuguuga

SEQ ID NO: 10499 - RNA, 20 nt, Artificial Sequence
  LRRK2 RNA guide
uaggggcccauuguugauca

SEQ ID NO: 10500 - RNA, 20 nt, Artificial Sequence
  LRRK2 RNA guide
uauuuuuuaauaggggccca

SEQ ID NO: 10501 - RNA, 20 nt, Artificial Sequence
  LRRK2 RNA guide
ucaacaaugggccccuauua

SEQ ID NO: 10502 - RNA, 20 nt, Artificial Sequence
  LRRK2 RNA guide
ucaguaaaucuucaugauca

SEQ ID NO: 10503 - RNA, 20 nt, Artificial Sequence
  LRRK2 RNA guide
ucaugaucaacaaugggccc

SEQ ID NO: 10504 - RNA, 20 nt, Artificial Sequence
  LRRK2 RNA guide
ucuucaugaucaacaauggg

SEQ ID NO: 10505 - RNA, 20 nt, Artificial Sequence
  LRRK2 RNA guide
ugaucaacaaugggccccua

SEQ ID NO: 10506 - RNA, 20 nt, Artificial Sequence
  LRRK2 RNA guide
uguugaucaugaagauuuac

SEQ ID NO: 10507 - RNA, 20 nt, Artificial Sequence
  LRRK2 RNA guide
uuaauaggggcccauuguug

SEQ ID NO: 10508 - RNA, 20 nt, Artificial Sequence
  LRRK2 RNA guide
uuauuuuuuaauaggggccc

SEQ ID NO: 10509 - RNA, 20 nt, Artificial Sequence
  LRRK2 RNA guide
uucaugaucaacaaugggcc

SEQ ID NO: 10510 - RNA, 20 nt, Artificial Sequence
  LRRK2 RNA guide
uuuaauaggggcccauuguu

SEQ ID NO: 10511 - RNA, 20 nt, Artificial Sequence
  LRRK2 RNA guide
uuuuaauaggggcccauugu

SEQ ID NO: 10512 - RNA, 20 nt, Artificial Sequence
  LRRK2 RNA guide
uuuuuaauaggggcccauug

SEQ ID NO: 10513 - RNA, 20 nt, Artificial Sequence
  LRRK2 RNA guide
uuuuuuaauaggggcccauu

SEQ ID NO: 10514 - RNA, 21 nt, Artificial Sequence
  LRRK2 RNA guide
aacaaugggccccuauuaaaa

SEQ ID NO: 10515 - RNA, 21 nt, Artificial Sequence
  LRRK2 RNA guide
aauaggggcccauuguugauc

SEQ ID NO: 10516 - RNA, 21 nt, Artificial Sequence
  LRRK2 RNA guide
aaucuucaugaucaacaaugg

SEQ ID NO: 10517 - RNA, 21 nt, Artificial Sequence
  LRRK2 RNA guide
acaaugggccccuauuaaaaa

SEQ ID NO: 10518 - RNA, 21 nt, Artificial Sequence
  LRRK2 RNA guide
aggggcccauuguugaucaug

SEQ ID NO: 10519 - RNA, 21 nt, Artificial Sequence
  LRRK2 RNA guide
auaggggcccauuguugauca

SEQ ID NO: 10520 - RNA, 21 nt, Artificial Sequence
  LRRK2 RNA guide
aucaacaaugggccccuauua

SEQ ID NO: 10521 - RNA, 21 nt, Artificial Sequence
  LRRK2 RNA guide
aucuucaugaucaacaauggg

SEQ ID NO: 10522 - RNA, 21 nt, Artificial Sequence
  LRRK2 RNA guide
augaucaacaaugggccccua

SEQ ID NO: 10523 - RNA, 21 nt, Artificial Sequence
  LRRK2 RNA guide
auuauuuuuuaauaggggccc

SEQ ID NO: 10524 - RNA, 21 nt, Artificial Sequence
  LRRK2 RNA guide
auuuuuuaauaggggcccauu

SEQ ID NO: 10525 - RNA, 21 nt, Artificial Sequence
  LRRK2 RNA guide
caacaaugggccccuauuaaa

SEQ ID NO: 10526 - RNA, 21 nt, Artificial Sequence
  LRRK2 RNA guide
caguaaaucuucaugaucaac

SEQ ID NO: 10527 - RNA, 21 nt, Artificial Sequence
  LRRK2 RNA guide
caugaucaacaaugggccccu

SEQ ID NO: 10528 - RNA, 21 nt, Artificial Sequence
  LRRK2 RNA guide
ccauuguugaucaugaagauu

SEQ ID NO: 10529 - RNA, 21 nt, Artificial Sequence
  LRRK2 RNA guide
cccauuguugaucaugaagau

SEQ ID NO: 10530 - RNA, 21 nt, Artificial Sequence
  LRRK2 RNA guide
cgcuucaguaaaucuucauga

SEQ ID NO: 10531 - RNA, 21 nt, Artificial Sequence
  LRRK2 RNA guide
cuucaguaaaucuucaugauc

SEQ ID NO: 10532 - RNA, 21 nt, Artificial Sequence
  LRRK2 RNA guide
cuucaugaucaacaaugggcc

SEQ ID NO: 10533 - RNA, 21 nt, Artificial Sequence
  LRRK2 RNA guide
gaucaacaaugggccccuauu

SEQ ID NO: 10534 - RNA, 21 nt, Artificial Sequence
  LRRK2 RNA guide
gcccauuguugaucaugaaga

SEQ ID NO: 10535 - RNA, 21 nt, Artificial Sequence
  LRRK2 RNA guide
gcuucaguaaaucuucaugau

SEQ ID NO: 10536 - RNA, 21 nt, Artificial Sequence
  LRRK2 RNA guide
ggcccauuguugaucaugaag

SEQ ID NO: 10537 - RNA, 21 nt, Artificial Sequence
  LRRK2 RNA guide
gggcccauuguugaucaugaa

SEQ ID NO: 10538 - RNA, 21 nt, Artificial Sequence
  LRRK2 RNA guide
ggggcccauuguugaucauga

SEQ ID NO: 10539 - RNA, 21 nt, Artificial Sequence
  LRRK2 RNA guide
uaauaggggcccauuguugau

SEQ ID NO: 10540 - RNA, 21 nt, Artificial Sequence
  LRRK2 RNA guide
uaggggcccauuguugaucau

SEQ ID NO: 10541 - RNA, 21 nt, Artificial Sequence
  LRRK2 RNA guide
uauuuuuuaauaggggcccau

SEQ ID NO: 10542 - RNA, 21 nt, Artificial Sequence
  LRRK2 RNA guide
ucaacaaugggccccuauuaa

SEQ ID NO: 10543 - RNA, 21 nt, Artificial Sequence
  LRRK2 RNA guide
ucaugaucaacaaugggcccc

SEQ ID NO: 10544 - RNA, 21 nt, Artificial Sequence
  LRRK2 RNA guide
ucuucaugaucaacaaugggc

SEQ ID NO: 10545 - RNA, 21 nt, Artificial Sequence
  LRRK2 RNA guide
ugaucaacaaugggccccuau

SEQ ID NO: 10546 - RNA, 21 nt, Artificial Sequence
  LRRK2 RNA guide
uuaauaggggcccauuguuga

SEQ ID NO: 10547 - RNA, 21 nt, Artificial Sequence
  LRRK2 RNA guide
uuauuuuuuaauaggggccca

SEQ ID NO: 10548 - RNA, 21 nt, Artificial Sequence
  LRRK2 RNA guide
uucaugaucaacaaugggccc

SEQ ID NO: 10549 - RNA, 21 nt, Artificial Sequence
  LRRK2 RNA guide
uuuaauaggggcccauuguug

SEQ ID NO: 10550 - RNA, 21 nt, Artificial Sequence
  LRRK2 RNA guide
uuuuaauaggggcccauuguu

SEQ ID NO: 10551 - RNA, 21 nt, Artificial Sequence
  LRRK2 RNA guide
uuuuuaauaggggcccauugu

SEQ ID NO: 10552 - RNA, 21 nt, Artificial Sequence
  LRRK2 RNA guide
uuuuuuaauaggggcccauug

SEQ ID NO: 10553 - RNA, 22 nt, Artificial Sequence
  LRRK2 RNA guide
aaaucuucaugaucaacaaugg

SEQ ID NO: 10554 - RNA, 22 nt, Artificial Sequence
  LRRK2 RNA guide
aacaaugggccccuauuaaaaa

SEQ ID NO: 10555 - RNA, 22 nt, Artificial Sequence
  LRRK2 RNA guide
aauaggggcccauuguugauca

SEQ ID NO: 10556 - RNA, 22 nt, Artificial Sequence
  LRRK2 RNA guide
aaucuucaugaucaacaauggg

SEQ ID NO: 10557 - RNA, 22 nt, Artificial Sequence
  LRRK2 RNA guide
aauuauuuuuuaauaggggccc

SEQ ID NO: 10558 - RNA, 22 nt, Artificial Sequence
  LRRK2 RNA guide
acaaugggccccuauuaaaaaa

SEQ ID NO: 10559 - RNA, 22 nt, Artificial Sequence
  LRRK2 RNA guide
aggggcccauuguugaucauga

SEQ ID NO: 10560 - RNA, 22 nt, Artificial Sequence
  LRRK2 RNA guide
auaggggcccauuguugaucau

SEQ ID NO: 10561 - RNA, 22 nt, Artificial Sequence
  LRRK2 RNA guide
aucaacaaugggccccuauuaa

SEQ ID NO: 10562 - RNA, 22 nt, Artificial Sequence
  LRRK2 RNA guide
aucuucaugaucaacaaugggc

SEQ ID NO: 10563 - RNA, 22 nt, Artificial Sequence
  LRRK2 RNA guide
augaucaacaaugggccccuau

SEQ ID NO: 10564 - RNA, 22 nt, Artificial Sequence
  LRRK2 RNA guide
auuauuuuuuaauaggggccca

SEQ ID NO: 10565 - RNA, 22 nt, Artificial Sequence
  LRRK2 RNA guide
auuuuuuaauaggggcccauug

SEQ ID NO: 10566 - RNA, 22 nt, Artificial Sequence
  LRRK2 RNA guide
caacaaugggccccuauuaaaa

SEQ ID NO: 10567 - RNA, 22 nt, Artificial Sequence
  LRRK2 RNA guide
caguaaaucuucaugaucaaca

SEQ ID NO: 10568 - RNA, 22 nt, Artificial Sequence
  LRRK2 RNA guide
caugaucaacaaugggccccua

SEQ ID NO: 10569 - RNA, 22 nt, Artificial Sequence
  LRRK2 RNA guide
ccauuguugaucaugaagauuu

SEQ ID NO: 10570 - RNA, 22 nt, Artificial Sequence
  LRRK2 RNA guide
cccauuguugaucaugaagauu

SEQ ID NO: 10571 - RNA, 22 nt, Artificial Sequence
  LRRK2 RNA guide
cgcuucaguaaaucuucaugau

SEQ ID NO: 10572 - RNA, 22 nt, Artificial Sequence
  LRRK2 RNA guide
cuucaguaaaucuucaugauca

SEQ ID NO: 10573 - RNA, 22 nt, Artificial Sequence
  LRRK2 RNA guide
cuucaugaucaacaaugggccc

SEQ ID NO: 10574 - RNA, 22 nt, Artificial Sequence
  LRRK2 RNA guide
gaucaacaaugggccccuauua

SEQ ID NO: 10575 - RNA, 22 nt, Artificial Sequence
  LRRK2 RNA guide
gcccauuguugaucaugaagau

SEQ ID NO: 10576 - RNA, 22 nt, Artificial Sequence
  LRRK2 RNA guide
gcuucaguaaaucuucaugauc

SEQ ID NO: 10577 - RNA, 22 nt, Artificial Sequence
  LRRK2 RNA guide
ggcccauuguugaucaugaaga

SEQ ID NO: 10578 - RNA, 22 nt, Artificial Sequence
  LRRK2 RNA guide
gggcccauuguugaucaugaag

SEQ ID NO: 10579 - RNA, 22 nt, Artificial Sequence
  LRRK2 RNA guide
ggggcccauuguugaucaugaa

SEQ ID NO: 10580 - RNA, 22 nt, Artificial Sequence
  LRRK2 RNA guide
uaauaggggcccauuguugauc

SEQ ID NO: 10581 - RNA, 22 nt, Artificial Sequence
  LRRK2 RNA guide
uaggggcccauuguugaucaug

SEQ ID NO: 10582 - RNA, 22 nt, Artificial Sequence
  LRRK2 RNA guide
uauuuuuuaauaggggcccauu

SEQ ID NO: 10583 - RNA, 22 nt, Artificial Sequence
  LRRK2 RNA guide
ucaacaaugggccccuauuaaa

SEQ ID NO: 10584 - RNA, 22 nt, Artificial Sequence
  LRRK2 RNA guide
ucaguaaaucuucaugaucaac

SEQ ID NO: 10585 - RNA, 22 nt, Artificial Sequence
  LRRK2 RNA guide
ucaugaucaacaaugggccccu

SEQ ID NO: 10586 - RNA, 22 nt, Artificial Sequence
  LRRK2 RNA guide
ucgcuucaguaaaucuucauga

SEQ ID NO: 10587 - RNA, 22 nt, Artificial Sequence
  LRRK2 RNA guide
ucuucaugaucaacaaugggcc

SEQ ID NO: 10588 - RNA, 22 nt, Artificial Sequence
  LRRK2 RNA guide
ugaucaacaaugggccccuauu

SEQ ID NO: 10589 - RNA, 22 nt, Artificial Sequence
  LRRK2 RNA guide
uguugaucaugaagauuuacug

SEQ ID NO: 10590 - RNA, 22 nt, Artificial Sequence
  LRRK2 RNA guide
uuaauaggggcccauuguugau

SEQ ID NO: 10591 - RNA, 22 nt, Artificial Sequence
  LRRK2 RNA guide
uuauuuuuuaauaggggcccau

SEQ ID NO: 10592 - RNA, 22 nt, Artificial Sequence
  LRRK2 RNA guide
uucaugaucaacaaugggcccc

SEQ ID NO: 10593 - RNA, 22 nt, Artificial Sequence
  LRRK2 RNA guide
uuuaauaggggcccauuguuga

SEQ ID NO: 10594 - RNA, 22 nt, Artificial Sequence
  LRRK2 RNA guide
uuuuaauaggggcccauuguug

SEQ ID NO: 10595 - RNA, 22 nt, Artificial Sequence
  LRRK2 RNA guide
uuuuuaauaggggcccauuguu

SEQ ID NO: 10596 - RNA, 22 nt, Artificial Sequence
  LRRK2 RNA guide
uuuuuuaauaggggcccauugu

SEQ ID NO: 10597 - RNA, 20 nt, Artificial Sequence
  LRRK2 RNA guide
aauaggggcccauuuuugau

SEQ ID NO: 10598 - RNA, 20 nt, Artificial Sequence
  LRRK2 RNA guide
aaucuucgugaucaaaaaug

SEQ ID NO: 10599 - RNA, 20 nt, Artificial Sequence
  LRRK2 RNA guide
acgaagauuuacugaagcga

SEQ ID NO: 10600 - RNA, 20 nt, Artificial Sequence
  LRRK2 RNA guide
aggggcccauuuuugaucac

SEQ ID NO: 10601 - RNA, 20 nt, Artificial Sequence
  LRRK2 RNA guide
aguaaaucuucgugaucaaa

SEQ ID NO: 10602 - RNA, 20 nt, Artificial Sequence
  LRRK2 RNA guide
auaggggcccauuuuugauc

SEQ ID NO: 10603 - RNA, 20 nt, Artificial Sequence
  LRRK2 RNA guide
aucacgaagauuuacugaag

SEQ ID NO: 10604 - RNA, 20 nt, Artificial Sequence
  LRRK2 RNA guide
aucuucgugaucaaaaaugg

SEQ ID NO: 10605 - RNA, 20 nt, Artificial Sequence
  LRRK2 RNA guide
cacgaagauuuacugaagcg

SEQ ID NO: 10606 - RNA, 20 nt, Artificial Sequence
  LRRK2 RNA guide
caguaaaucuucgugaucaa

SEQ ID NO: 10607 - RNA, 20 nt, Artificial Sequence
  LRRK2 RNA guide
cauuuuugaucacgaagauu

SEQ ID NO: 10608 - RNA, 20 nt, Artificial Sequence
  LRRK2 RNA guide
ccauuuuugaucacgaagau

SEQ ID NO: 10609 - RNA, 20 nt, Artificial Sequence
  LRRK2 RNA guide
cccauuuuugaucacgaaga

SEQ ID NO: 10610 - RNA, 20 nt, Artificial Sequence
  LRRK2 RNA guide
cgcuucaguaaaucuucgug

SEQ ID NO: 10611 - RNA, 20 nt, Artificial Sequence
  LRRK2 RNA guide
cgugaucaaaaaugggcccc

SEQ ID NO: 10612 - RNA, 20 nt, Artificial Sequence
  LRRK2 RNA guide
cuucaguaaaucuucgugau

SEQ ID NO: 10613 - RNA, 20 nt, Artificial Sequence
  LRRK2 RNA guide
cuucgugaucaaaaaugggc

SEQ ID NO: 10614 - RNA, 20 nt, Artificial Sequence
  LRRK2 RNA guide
gaucacgaagauuuacugaa

SEQ ID NO: 10615 - RNA, 20 nt, Artificial Sequence
  LRRK2 RNA guide
gcccauuuuugaucacgaag

SEQ ID NO: 10616 - RNA, 20 nt, Artificial Sequence
  LRRK2 RNA guide
gcuucaguaaaucuucguga

SEQ ID NO: 10617 - RNA, 20 nt, Artificial Sequence
  LRRK2 RNA guide
ggcccauuuuugaucacgaa

SEQ ID NO: 10618 - RNA, 20 nt, Artificial Sequence
  LRRK2 RNA guide
gggcccauuuuugaucacga

SEQ ID NO: 10619 - RNA, 20 nt, Artificial Sequence
  LRRK2 RNA guide
ggggcccauuuuugaucacg

SEQ ID NO: 10620 - RNA, 20 nt, Artificial Sequence
  LRRK2 RNA guide
guaaaucuucgugaucaaaa

SEQ ID NO: 10621 - RNA, 20 nt, Artificial Sequence
  LRRK2 RNA guide
uaauaggggcccauuuuuga

SEQ ID NO: 10622 - RNA, 20 nt, Artificial Sequence
  LRRK2 RNA guide
uaggggcccauuuuugauca

SEQ ID NO: 10623 - RNA, 20 nt, Artificial Sequence
  LRRK2 RNA guide
ucacgaagauuuacugaagc

SEQ ID NO: 10624 - RNA, 20 nt, Artificial Sequence
  LRRK2 RNA guide
ucaguaaaucuucgugauca

SEQ ID NO: 10625 - RNA, 20 nt, Artificial Sequence
  LRRK2 RNA guide
ucgcuucaguaaaucuucgu

SEQ ID NO: 10626 - RNA, 20 nt, Artificial Sequence
  LRRK2 RNA guide
ucgugaucaaaaaugggccc

SEQ ID NO: 10627 - RNA, 20 nt, Artificial Sequence
  LRRK2 RNA guide
ucuucgugaucaaaaauggg

SEQ ID NO: 10628 - RNA, 20 nt, Artificial Sequence
  LRRK2 RNA guide
ucuuuuucgcuucaguaaau

SEQ ID NO: 10629 - RNA, 20 nt, Artificial Sequence
  LRRK2 RNA guide
ugaucacgaagauuuacuga

SEQ ID NO: 10630 - RNA, 20 nt, Artificial Sequence
  LRRK2 RNA guide
uuaauaggggcccauuuuug

SEQ ID NO: 10631 - RNA, 20 nt, Artificial Sequence
  LRRK2 RNA guide
uucaguaaaucuucgugauc

SEQ ID NO: 10632 - RNA, 20 nt, Artificial Sequence
  LRRK2 RNA guide
uucgcuucaguaaaucuucg

SEQ ID NO: 10633 - RNA, 20 nt, Artificial Sequence
  LRRK2 RNA guide
uucgugaucaaaaaugggcc

SEQ ID NO: 10634 - RNA, 20 nt, Artificial Sequence
  LRRK2 RNA guide
uugaucacgaagauuuacug

SEQ ID NO: 10635 - RNA, 20 nt, Artificial Sequence
  LRRK2 RNA guide
uuucgcuucaguaaaucuuc

SEQ ID NO: 10636 - RNA, 20 nt, Artificial Sequence
  LRRK2 RNA guide
uuugaucacgaagauuuacu

SEQ ID NO: 10637 - RNA, 20 nt, Artificial Sequence
  LRRK2 RNA guide
uuuucgcuucaguaaaucuu

SEQ ID NO: 10638 - RNA, 20 nt, Artificial Sequence
  LRRK2 RNA guide
uuuugaucacgaagauuuac

SEQ ID NO: 10639 - RNA, 20 nt, Artificial Sequence
  LRRK2 RNA guide
uuuuucgcuucaguaaaucu

SEQ ID NO: 10640 - RNA, 21 nt, Artificial Sequence
  LRRK2 RNA guide
aauaggggcccauuuuugauc

SEQ ID NO: 10641 - RNA, 21 nt, Artificial Sequence
  LRRK2 RNA guide
aaucuucgugaucaaaaaugg

SEQ ID NO: 10642 - RNA, 21 nt, Artificial Sequence
  LRRK2 RNA guide
acgaagauuuacugaagcgaa

SEQ ID NO: 10643 - RNA, 21 nt, Artificial Sequence
  LRRK2 RNA guide
aggggcccauuuuugaucacg

SEQ ID NO: 10644 - RNA, 21 nt, Artificial Sequence
  LRRK2 RNA guide
auaggggcccauuuuugauca

SEQ ID NO: 10645 - RNA, 21 nt, Artificial Sequence
  LRRK2 RNA guide
aucacgaagauuuacugaagc

SEQ ID NO: 10646 - RNA, 21 nt, Artificial Sequence
  LRRK2 RNA guide
aucuucgugaucaaaaauggg

SEQ ID NO: 10647 - RNA, 21 nt, Artificial Sequence
  LRRK2 RNA guide
cacgaagauuuacugaagcga

SEQ ID NO: 10648 - RNA, 21 nt, Artificial Sequence
  LRRK2 RNA guide
caguaaaucuucgugaucaaa

SEQ ID NO: 10649 - RNA, 21 nt, Artificial Sequence
  LRRK2 RNA guide
ccauuuuugaucacgaagauu

SEQ ID NO: 10650 - RNA, 21 nt, Artificial Sequence
  LRRK2 RNA guide
cccauuuuugaucacgaagau

SEQ ID NO: 10651 - RNA, 21 nt, Artificial Sequence
  LRRK2 RNA guide
cgcuucaguaaaucuucguga

SEQ ID NO: 10652 - RNA, 21 nt, Artificial Sequence
  LRRK2 RNA guide
cgugaucaaaaaugggccccu

SEQ ID NO: 10653 - RNA, 21 nt, Artificial Sequence
  LRRK2 RNA guide
cuucaguaaaucuucgugauc

SEQ ID NO: 10654 - RNA, 21 nt, Artificial Sequence
  LRRK2 RNA guide
cuucgugaucaaaaaugggcc

SEQ ID NO: 10655 - RNA, 21 nt, Artificial Sequence
  LRRK2 RNA guide
cuuuuucgcuucaguaaaucu

SEQ ID NO: 10656 - RNA, 21 nt, Artificial Sequence
  LRRK2 RNA guide
gaucacgaagauuuacugaag

SEQ ID NO: 10657 - RNA, 21 nt, Artificial Sequence
  LRRK2 RNA guide
gcccauuuuugaucacgaaga

SEQ ID NO: 10658 - RNA, 21 nt, Artificial Sequence
  LRRK2 RNA guide
gcuucaguaaaucuucgugau

SEQ ID NO: 10659 - RNA, 21 nt, Artificial Sequence
  LRRK2 RNA guide
ggcccauuuuugaucacgaag

SEQ ID NO: 10660 - RNA, 21 nt, Artificial Sequence
  LRRK2 RNA guide
gggcccauuuuugaucacgaa

SEQ ID NO: 10661 - RNA, 21 nt, Artificial Sequence
  LRRK2 RNA guide
ggggcccauuuuugaucacga

SEQ ID NO: 10662 - RNA, 21 nt, Artificial Sequence
  LRRK2 RNA guide
uaauaggggcccauuuuugau

SEQ ID NO: 10663 - RNA, 21 nt, Artificial Sequence
  LRRK2 RNA guide
uaggggcccauuuuugaucac

SEQ ID NO: 10664 - RNA, 21 nt, Artificial Sequence
  LRRK2 RNA guide
ucacgaagauuuacugaagcg

SEQ ID NO: 10665 - RNA, 21 nt, Artificial Sequence
  LRRK2 RNA guide
ucaguaaaucuucgugaucaa

SEQ ID NO: 10666 - RNA, 21 nt, Artificial Sequence
  LRRK2 RNA guide
ucgcuucaguaaaucuucgug

SEQ ID NO: 10667 - RNA, 21 nt, Artificial Sequence
  LRRK2 RNA guide
ucgugaucaaaaaugggcccc

SEQ ID NO: 10668 - RNA, 21 nt, Artificial Sequence
  LRRK2 RNA guide
ucuucgugaucaaaaaugggc

SEQ ID NO: 10669 - RNA, 21 nt, Artificial Sequence
  LRRK2 RNA guide
ucuuuuucgcuucaguaaauc

SEQ ID NO: 10670 - RNA, 21 nt, Artificial Sequence
  LRRK2 RNA guide
ugaucacgaagauuuacugaa

SEQ ID NO: 10671 - RNA, 21 nt, Artificial Sequence
  LRRK2 RNA guide
uuaauaggggcccauuuuuga

SEQ ID NO: 10672 - RNA, 21 nt, Artificial Sequence
  LRRK2 RNA guide
uucaguaaaucuucgugauca

SEQ ID NO: 10673 - RNA, 21 nt, Artificial Sequence
  LRRK2 RNA guide
uucgcuucaguaaaucuucgu

SEQ ID NO: 10674 - RNA, 21 nt, Artificial Sequence
  LRRK2 RNA guide
uucgugaucaaaaaugggccc

SEQ ID NO: 10675 - RNA, 21 nt, Artificial Sequence
  LRRK2 RNA guide
uugaucacgaagauuuacuga

SEQ ID NO: 10676 - RNA, 21 nt, Artificial Sequence
  LRRK2 RNA guide
uuuaauaggggcccauuuuug

SEQ ID NO: 10677 - RNA, 21 nt, Artificial Sequence
  LRRK2 RNA guide
uuucgcuucaguaaaucuucg

SEQ ID NO: 10678 - RNA, 21 nt, Artificial Sequence
  LRRK2 RNA guide
uuugaucacgaagauuuacug

SEQ ID NO: 10679 - RNA, 21 nt, Artificial Sequence
  LRRK2 RNA guide
uuuucgcuucaguaaaucuuc

SEQ ID NO: 10680 - RNA, 22 nt, Artificial Sequence
  LRRK2 RNA guide
aaaucuucgugaucaaaaaugg

SEQ ID NO: 10681 - RNA, 22 nt, Artificial Sequence
  LRRK2 RNA guide
aauaggggcccauuuuugauca

SEQ ID NO: 10682 - RNA, 22 nt, Artificial Sequence
  LRRK2 RNA guide
aaucuucgugaucaaaaauggg

SEQ ID NO: 10683 - RNA, 22 nt, Artificial Sequence
  LRRK2 RNA guide
acgaagauuuacugaagcgaaa

SEQ ID NO: 10684 - RNA, 22 nt, Artificial Sequence
  LRRK2 RNA guide
aggggcccauuuuugaucacga

SEQ ID NO: 10685 - RNA, 22 nt, Artificial Sequence
  LRRK2 RNA guide
auaggggcccauuuuugaucac

SEQ ID NO: 10686 - RNA, 22 nt, Artificial Sequence
  LRRK2 RNA guide
aucacgaagauuuacugaagcg

SEQ ID NO: 10687 - RNA, 22 nt, Artificial Sequence
  LRRK2 RNA guide
aucuucgugaucaaaaaugggc

SEQ ID NO: 10688 - RNA, 22 nt, Artificial Sequence
  LRRK2 RNA guide
cacgaagauuuacugaagcgaa

SEQ ID NO: 10689 - RNA, 22 nt, Artificial Sequence
  LRRK2 RNA guide
caguaaaucuucgugaucaaaa

SEQ ID NO: 10690 - RNA, 22 nt, Artificial Sequence
  LRRK2 RNA guide
ccauuuuugaucacgaagauuu

SEQ ID NO: 10691 - RNA, 22 nt, Artificial Sequence
  LRRK2 RNA guide
cccauuuuugaucacgaagauu

SEQ ID NO: 10692 - RNA, 22 nt, Artificial Sequence
  LRRK2 RNA guide
cgcuucaguaaaucuucgugau

SEQ ID NO: 10693 - RNA, 22 nt, Artificial Sequence
  LRRK2 RNA guide
cgugaucaaaaaugggccccua

SEQ ID NO: 10694 - RNA, 22 nt, Artificial Sequence
  LRRK2 RNA guide
cuucaguaaaucuucgugauca

SEQ ID NO: 10695 - RNA, 22 nt, Artificial Sequence
  LRRK2 RNA guide
cuucgugaucaaaaaugggccc

SEQ ID NO: 10696 - RNA, 22 nt, Artificial Sequence
  LRRK2 RNA guide
cuuuuucgcuucaguaaaucuu

SEQ ID NO: 10697 - RNA, 22 nt, Artificial Sequence
  LRRK2 RNA guide
gaucacgaagauuuacugaagc

SEQ ID NO: 10698 - RNA, 22 nt, Artificial Sequence
  LRRK2 RNA guide
gcccauuuuugaucacgaagau

SEQ ID NO: 10699 - RNA, 22 nt, Artificial Sequence
  LRRK2 RNA guide
gcuucaguaaaucuucgugauc

SEQ ID NO: 10700 - RNA, 22 nt, Artificial Sequence
  LRRK2 RNA guide
ggcccauuuuugaucacgaaga

SEQ ID NO: 10701 - RNA, 22 nt, Artificial Sequence
  LRRK2 RNA guide
gggcccauuuuugaucacgaag

SEQ ID NO: 10702 - RNA, 22 nt, Artificial Sequence
  LRRK2 RNA guide
ggggcccauuuuugaucacgaa

SEQ ID NO: 10703 - RNA, 22 nt, Artificial Sequence
  LRRK2 RNA guide
uaauaggggcccauuuuugauc

SEQ ID NO: 10704 - RNA, 22 nt, Artificial Sequence
  LRRK2 RNA guide
uaggggcccauuuuugaucacg

SEQ ID NO: 10705 - RNA, 22 nt, Artificial Sequence
  LRRK2 RNA guide
ucacgaagauuuacugaagcga

SEQ ID NO: 10706 - RNA, 22 nt, Artificial Sequence
  LRRK2 RNA guide
ucaguaaaucuucgugaucaaa

SEQ ID NO: 10707 - RNA, 22 nt, Artificial Sequence
  LRRK2 RNA guide
ucgcuucaguaaaucuucguga

SEQ ID NO: 10708 - RNA, 22 nt, Artificial Sequence
  LRRK2 RNA guide
ucgugaucaaaaaugggccccu

SEQ ID NO: 10709 - RNA, 22 nt, Artificial Sequence
  LRRK2 RNA guide
ucuucgugaucaaaaaugggcc

SEQ ID NO: 10710 - RNA, 22 nt, Artificial Sequence
  LRRK2 RNA guide
ucuuuuucgcuucaguaaaucu

SEQ ID NO: 10711 - RNA, 22 nt, Artificial Sequence
  LRRK2 RNA guide
ugaucacgaagauuuacugaag

SEQ ID NO: 10712 - RNA, 22 nt, Artificial Sequence
  LRRK2 RNA guide
uuaauaggggcccauuuuugau

SEQ ID NO: 10713 - RNA, 22 nt, Artificial Sequence
  LRRK2 RNA guide
uucaguaaaucuucgugaucaa

SEQ ID NO: 10714 - RNA, 22 nt, Artificial Sequence
  LRRK2 RNA guide
uucgcuucaguaaaucuucgug

SEQ ID NO: 10715 - RNA, 22 nt, Artificial Sequence
  LRRK2 RNA guide
uucgugaucaaaaaugggcccc

SEQ ID NO: 10716 - RNA, 22 nt, Artificial Sequence
  LRRK2 RNA guide
uucuuuuucgcuucaguaaauc

SEQ ID NO: 10717 - RNA, 22 nt, Artificial Sequence
  LRRK2 RNA guide
uugaucacgaagauuuacugaa

SEQ ID NO: 10718 - RNA, 22 nt, Artificial Sequence
  LRRK2 RNA guide
uuuaauaggggcccauuuuuga

SEQ ID NO: 10719 - RNA, 22 nt, Artificial Sequence
  LRRK2 RNA guide
uuucgcuucaguaaaucuucgu

SEQ ID NO: 10720 - RNA, 22 nt, Artificial Sequence
  LRRK2 RNA guide
uuugaucacgaagauuuacuga

SEQ ID NO: 10721 - RNA, 22 nt, Artificial Sequence
  LRRK2 RNA guide
uuuuaauaggggcccauuuuug

SEQ ID NO: 10722 - RNA, 22 nt, Artificial Sequence
  LRRK2 RNA guide
uuuucgcuucaguaaaucuucg

SEQ ID NO: 10723 - RNA, 22 nt, Artificial Sequence
  LRRK2 RNA guide
uuuugaucacgaagauuuacug

SEQ ID NO: 10724 - RNA, 22 nt, Artificial Sequence
  LRRK2 RNA guide
uuuuucgcuucaguaaaucuuc

SEQ ID NO: 10725 - RNA, 20 nt, Artificial Sequence
  LRRK2 RNA guide
aggggcccauuuuugaucau

SEQ ID NO: 10726 - RNA, 20 nt, Artificial Sequence
  LRRK2 RNA guide
augaauauuuacugaagcga

SEQ ID NO: 10727 - RNA, 20 nt, Artificial Sequence
  LRRK2 RNA guide
caugaauauuuacugaagcg

SEQ ID NO: 10728 - RNA, 20 nt, Artificial Sequence
  LRRK2 RNA guide
cccauuuuugaucaugaaua

SEQ ID NO: 10729 - RNA, 20 nt, Artificial Sequence
  LRRK2 RNA guide
cgcuucaguaaauauucaug

SEQ ID NO: 10730 - RNA, 20 nt, Artificial Sequence
  LRRK2 RNA guide
cuuuuucgcuucaguaaaua

SEQ ID NO: 10731 - RNA, 20 nt, Artificial Sequence
  LRRK2 RNA guide
gaauauuuacugaagcgaaa

SEQ ID NO: 10732 - RNA, 20 nt, Artificial Sequence
  LRRK2 RNA guide
gcccauuuuugaucaugaau

SEQ ID NO: 10733 - RNA, 20 nt, Artificial Sequence
  LRRK2 RNA guide
gcuucaguaaauauucauga

SEQ ID NO: 10734 - RNA, 20 nt, Artificial Sequence
  LRRK2 RNA guide
ggcccauuuuugaucaugaa

SEQ ID NO: 10735 - RNA, 20 nt, Artificial Sequence
  LRRK2 RNA guide
gggcccauuuuugaucauga

SEQ ID NO: 10736 - RNA, 20 nt, Artificial Sequence
  LRRK2 RNA guide
ggggcccauuuuugaucaug

SEQ ID NO: 10737 - RNA, 20 nt, Artificial Sequence
  LRRK2 RNA guide
uauucaugaucaaaaauggg

SEQ ID NO: 10738 - RNA, 20 nt, Artificial Sequence
  LRRK2 RNA guide
ucaugaauauuuacugaagc

SEQ ID NO: 10739 - RNA, 20 nt, Artificial Sequence
  LRRK2 RNA guide
ucgcuucaguaaauauucau

SEQ ID NO: 10740 - RNA, 20 nt, Artificial Sequence
  LRRK2 RNA guide
ugaauauuuacugaagcgaa

SEQ ID NO: 10741 - RNA, 20 nt, Artificial Sequence
  LRRK2 RNA guide
uucgcuucaguaaauauuca

SEQ ID NO: 10742 - RNA, 20 nt, Artificial Sequence
  LRRK2 RNA guide
uucuuuuucgcuucaguaaa

SEQ ID NO: 10743 - RNA, 20 nt, Artificial Sequence
  LRRK2 RNA guide
uuucgcuucaguaaauauuc

SEQ ID NO: 10744 - RNA, 20 nt, Artificial Sequence
  LRRK2 RNA guide
uuucuuuuucgcuucaguaa

SEQ ID NO: 10745 - RNA, 20 nt, Artificial Sequence
  LRRK2 RNA guide
uuuucuuuuucgcuucagua

SEQ ID NO: 10746 - RNA, 20 nt, Artificial Sequence
  LRRK2 RNA guide
uuuuucuuuuucgcuucagu

SEQ ID NO: 10747 - RNA, 21 nt, Artificial Sequence
  LRRK2 RNA guide
aggggcccauuuuugaucaug

SEQ ID NO: 10748 - RNA, 21 nt, Artificial Sequence
  LRRK2 RNA guide
caugaauauuuacugaagcga

SEQ ID NO: 10749 - RNA, 21 nt, Artificial Sequence
  LRRK2 RNA guide
cgcuucaguaaauauucauga

SEQ ID NO: 10750 - RNA, 21 nt, Artificial Sequence
  LRRK2 RNA guide
gcccauuuuugaucaugaaua

SEQ ID NO: 10751 - RNA, 21 nt, Artificial Sequence
  LRRK2 RNA guide
ggcccauuuuugaucaugaau

SEQ ID NO: 10752 - RNA, 21 nt, Artificial Sequence
  LRRK2 RNA guide
gggcccauuuuugaucaugaa

SEQ ID NO: 10753 - RNA, 21 nt, Artificial Sequence
  LRRK2 RNA guide
ggggcccauuuuugaucauga

SEQ ID NO: 10754 - RNA, 21 nt, Artificial Sequence
  LRRK2 RNA guide
uaggggcccauuuuugaucau

SEQ ID NO: 10755 - RNA, 21 nt, Artificial Sequence
  LRRK2 RNA guide
uauucaugaucaaaaaugggc

SEQ ID NO: 10756 - RNA, 21 nt, Artificial Sequence
  LRRK2 RNA guide
ucaugaauauuuacugaagcg

SEQ ID NO: 10757 - RNA, 21 nt, Artificial Sequence
  LRRK2 RNA guide
ucgcuucaguaaauauucaug

SEQ ID NO: 10758 - RNA, 22 nt, Artificial Sequence
  LRRK2 RNA guide
aggggcccauuuuugaucauga

SEQ ID NO: 10759 - RNA, 22 nt, Artificial Sequence
  LRRK2 RNA guide
auaggggcccauuuuugaucau

SEQ ID NO: 10760 - RNA, 22 nt, Artificial Sequence
  LRRK2 RNA guide
auauucaugaucaaaaaugggc

SEQ ID NO: 10761 - RNA, 22 nt, Artificial Sequence
  LRRK2 RNA guide
aucaugaauauuuacugaagcg

SEQ ID NO: 10762 - RNA, 22 nt, Artificial Sequence
  LRRK2 RNA guide
caugaauauuuacugaagcgaa

SEQ ID NO: 10763 - RNA, 22 nt, Artificial Sequence
  LRRK2 RNA guide
cgcuucaguaaauauucaugau

SEQ ID NO: 10764 - RNA, 22 nt, Artificial Sequence
  LRRK2 RNA guide
gaucaugaauauuuacugaagc

SEQ ID NO: 10765 - RNA, 22 nt, Artificial Sequence
  LRRK2 RNA guide
gcccauuuuugaucaugaauau

SEQ ID NO: 10766 - RNA, 22 nt, Artificial Sequence
  LRRK2 RNA guide
gcuucaguaaauauucaugauc

SEQ ID NO: 10767 - RNA, 22 nt, Artificial Sequence
  LRRK2 RNA guide
ggcccauuuuugaucaugaaua

SEQ ID NO: 10768 - RNA, 22 nt, Artificial Sequence
  LRRK2 RNA guide
gggcccauuuuugaucaugaau

SEQ ID NO: 10769 - RNA, 22 nt, Artificial Sequence
  LRRK2 RNA guide
ggggcccauuuuugaucaugaa

SEQ ID NO: 10770 - RNA, 22 nt, Artificial Sequence
  LRRK2 RNA guide
uaggggcccauuuuugaucaug

SEQ ID NO: 10771 - RNA, 22 nt, Artificial Sequence
  LRRK2 RNA guide
uauucaugaucaaaaaugggcc

SEQ ID NO: 10772 - RNA, 22 nt, Artificial Sequence
  LRRK2 RNA guide
ucaugaauauuuacugaagcga

SEQ ID NO: 10773 - RNA, 22 nt, Artificial Sequence
  LRRK2 RNA guide
ucgcuucaguaaauauucauga

SEQ ID NO: 10774 - RNA, 22 nt, Artificial Sequence
  LRRK2 RNA guide
uucgcuucaguaaauauucaug

SEQ ID NO: 10775 - RNA, 20 nt, Artificial Sequence
  LRRK2 RNA guide
aucaugaagauuuacugaag

SEQ ID NO: 10776 - RNA, 20 nt, Artificial Sequence
  LRRK2 RNA guide
augaagauuuacugaaguga

SEQ ID NO: 10777 - RNA, 20 nt, Artificial Sequence
  LRRK2 RNA guide
cacuucaguaaaucuucaug

SEQ ID NO: 10778 - RNA, 20 nt, Artificial Sequence
  LRRK2 RNA guide
caugaagauuuacugaagug

SEQ ID NO: 10779 - RNA, 20 nt, Artificial Sequence
  LRRK2 RNA guide
cuuuuucacuucaguaaauc

SEQ ID NO: 10780 - RNA, 20 nt, Artificial Sequence
  LRRK2 RNA guide
gaagauuuacugaagugaaa

SEQ ID NO: 10781 - RNA, 20 nt, Artificial Sequence
  LRRK2 RNA guide
gaucaugaagauuuacugaa

SEQ ID NO: 10782 - RNA, 20 nt, Artificial Sequence
  LRRK2 RNA guide
gauuuacugaagugaaaaag

SEQ ID NO: 10783 - RNA, 20 nt, Artificial Sequence
  LRRK2 RNA guide
ucacuucaguaaaucuucau

SEQ ID NO: 10784 - RNA, 20 nt, Artificial Sequence
  LRRK2 RNA guide
ucaugaagauuuacugaagu

SEQ ID NO: 10785 - RNA, 20 nt, Artificial Sequence
  LRRK2 RNA guide
ugaagauuuacugaagugaa

SEQ ID NO: 10786 - RNA, 20 nt, Artificial Sequence
  LRRK2 RNA guide
ugaucaugaagauuuacuga

SEQ ID NO: 10787 - RNA, 20 nt, Artificial Sequence
  LRRK2 RNA guide
uucacuucaguaaaucuuca

SEQ ID NO: 10788 - RNA, 20 nt, Artificial Sequence
  LRRK2 RNA guide
uugaucaugaagauuuacug

SEQ ID NO: 10789 - RNA, 20 nt, Artificial Sequence
  LRRK2 RNA guide
uuucacuucaguaaaucuuc

SEQ ID NO: 10790 - RNA, 21 nt, Artificial Sequence
  LRRK2 RNA guide
cacuucaguaaaucuucauga

SEQ ID NO: 10791 - RNA, 21 nt, Artificial Sequence
  LRRK2 RNA guide
caugaagauuuacugaaguga

SEQ ID NO: 10792 - RNA, 21 nt, Artificial Sequence
  LRRK2 RNA guide
gaucaugaagauuuacugaag

SEQ ID NO: 10793 - RNA, 21 nt, Artificial Sequence
  LRRK2 RNA guide
ucacuucaguaaaucuucaug

SEQ ID NO: 10794 - RNA, 21 nt, Artificial Sequence
  LRRK2 RNA guide
ucaugaagauuuacugaagug

SEQ ID NO: 10795 - RNA, 22 nt, Artificial Sequence
  LRRK2 RNA guide
aucaugaagauuuacugaagug

SEQ ID NO: 10796 - RNA, 22 nt, Artificial Sequence
  LRRK2 RNA guide
cacuucaguaaaucuucaugau

SEQ ID NO: 10797 - RNA, 22 nt, Artificial Sequence
  LRRK2 RNA guide
caugaagauuuacugaagugaa

SEQ ID NO: 10798 - RNA, 22 nt, Artificial Sequence
  LRRK2 RNA guide
gaucaugaagauuuacugaagu

SEQ ID NO: 10799 - RNA, 22 nt, Artificial Sequence
  LRRK2 RNA guide
ucacuucaguaaaucuucauga

SEQ ID NO: 10800 - RNA, 22 nt, Artificial Sequence
  LRRK2 RNA guide
ucaugaagauuuacugaaguga

SEQ ID NO: 10801 - RNA, 22 nt, Artificial Sequence
  LRRK2 RNA guide
ugaucaugaagauuuacugaag

SEQ ID NO: 10802 - RNA, 22 nt, Artificial Sequence
  LRRK2 RNA guide
uucacuucaguaaaucuucaug

SEQ ID NO: 10803 - RNA, 20 nt, Artificial Sequence
  LRRK2 RNA guide
aaaacuucaaucccguauga

SEQ ID NO: 10804 - RNA, 20 nt, Artificial Sequence
  LRRK2 RNA guide
aaacuucaaucccguaugag

SEQ ID NO: 10805 - RNA, 20 nt, Artificial Sequence
  LRRK2 RNA guide
aaaugcugucugaaugccuc

SEQ ID NO: 10806 - RNA, 20 nt, Artificial Sequence
  LRRK2 RNA guide
aacuucaaucccguaugagg

SEQ ID NO: 10807 - RNA, 20 nt, Artificial Sequence
  LRRK2 RNA guide
aagggucaucaaaacuucaa

SEQ ID NO: 10808 - RNA, 20 nt, Artificial Sequence
  LRRK2 RNA guide
aaucccguaugaggcauuca

SEQ ID NO: 10809 - RNA, 20 nt, Artificial Sequence
  LRRK2 RNA guide
aaugccucauacgggauuga

SEQ ID NO: 10810 - RNA, 20 nt, Artificial Sequence
  LRRK2 RNA guide
aaugcugucugaaugccuca

SEQ ID NO: 10811 - RNA, 20 nt, Artificial Sequence
  LRRK2 RNA guide
acgggauugaaguuuugaug

SEQ ID NO: 10812 - RNA, 20 nt, Artificial Sequence
  LRRK2 RNA guide
acuucaaucccguaugaggc

SEQ ID NO: 10813 - RNA, 20 nt, Artificial Sequence
  LRRK2 RNA guide
agggucaucaaaacuucaau

SEQ ID NO: 10814 - RNA, 20 nt, Artificial Sequence
  LRRK2 RNA guide
auacgggauugaaguuuuga

SEQ ID NO: 10815 - RNA, 20 nt, Artificial Sequence
  LRRK2 RNA guide
aucaaaacuucaaucccgua

SEQ ID NO: 10816 - RNA, 20 nt, Artificial Sequence
  LRRK2 RNA guide
aucccguaugaggcauucag

SEQ ID NO: 10817 - RNA, 20 nt, Artificial Sequence
  LRRK2 RNA guide
augccucauacgggauugaa

SEQ ID NO: 10818 - RNA, 20 nt, Artificial Sequence
  LRRK2 RNA guide
augcugucugaaugccucau

SEQ ID NO: 10819 - RNA, 20 nt, Artificial Sequence
  LRRK2 RNA guide
caaaacuucaaucccguaug

SEQ ID NO: 10820 - RNA, 20 nt, Artificial Sequence
  LRRK2 RNA guide
caaucccguaugaggcauuc

SEQ ID NO: 10821 - RNA, 20 nt, Artificial Sequence
  LRRK2 RNA guide
cauacgggauugaaguuuug

SEQ ID NO: 10822 - RNA, 20 nt, Artificial Sequence
  LRRK2 RNA guide
caucaaaacuucaaucccgu

SEQ ID NO: 10823 - RNA, 20 nt, Artificial Sequence
  LRRK2 RNA guide
cccguaugaggcauucagac

SEQ ID NO: 10824 - RNA, 20 nt, Artificial Sequence
  LRRK2 RNA guide
ccguaugaggcauucagaca

SEQ ID NO: 10825 - RNA, 20 nt, Artificial Sequence
  LRRK2 RNA guide
ccucauacgggauugaaguu

SEQ ID NO: 10826 - RNA, 20 nt, Artificial Sequence
  LRRK2 RNA guide
cguaugaggcauucagacag

SEQ ID NO: 10827 - RNA, 20 nt, Artificial Sequence
  LRRK2 RNA guide
cucauacgggauugaaguuu

SEQ ID NO: 10828 - RNA, 20 nt, Artificial Sequence
  LRRK2 RNA guide
cugaaugccucauacgggau

SEQ ID NO: 10829 - RNA, 20 nt, Artificial Sequence
  LRRK2 RNA guide
cugucugaaugccucauacg

SEQ ID NO: 10830 - RNA, 20 nt, Artificial Sequence
  LRRK2 RNA guide
cuucaaucccguaugaggca

SEQ ID NO: 10831 - RNA, 20 nt, Artificial Sequence
  LRRK2 RNA guide
gaaaugcugucugaaugccu

SEQ ID NO: 10832 - RNA, 20 nt, Artificial Sequence
  LRRK2 RNA guide
gaaugccucauacgggauug

SEQ ID NO: 10833 - RNA, 20 nt, Artificial Sequence
  LRRK2 RNA guide
gccucauacgggauugaagu

SEQ ID NO: 10834 - RNA, 20 nt, Artificial Sequence
  LRRK2 RNA guide
gcugucugaaugccucauac

SEQ ID NO: 10835 - RNA, 20 nt, Artificial Sequence
  LRRK2 RNA guide
gggucaucaaaacuucaauc

SEQ ID NO: 10836 - RNA, 20 nt, Artificial Sequence
  LRRK2 RNA guide
ggucaucaaaacuucaaucc

SEQ ID NO: 10837 - RNA, 20 nt, Artificial Sequence
  LRRK2 RNA guide
gucaucaaaacuucaauccc

SEQ ID NO: 10838 - RNA, 20 nt, Artificial Sequence
  LRRK2 RNA guide
gucugaaugccucauacggg

SEQ ID NO: 10839 - RNA, 20 nt, Artificial Sequence
  LRRK2 RNA guide
uacgggauugaaguuuugau

SEQ ID NO: 10840 - RNA, 20 nt, Artificial Sequence
  LRRK2 RNA guide
ucaaaacuucaaucccguau

SEQ ID NO: 10841 - RNA, 20 nt, Artificial Sequence
  LRRK2 RNA guide
ucaaucccguaugaggcauu

SEQ ID NO: 10842 - RNA, 20 nt, Artificial Sequence
  LRRK2 RNA guide
ucauacgggauugaaguuuu

SEQ ID NO: 10843 - RNA, 20 nt, Artificial Sequence
  LRRK2 RNA guide
ucaucaaaacuucaaucccg

SEQ ID NO: 10844 - RNA, 20 nt, Artificial Sequence
  LRRK2 RNA guide
ucccguaugaggcauucaga

SEQ ID NO: 10845 - RNA, 20 nt, Artificial Sequence
  LRRK2 RNA guide
ucugaaugccucauacggga

SEQ ID NO: 10846 - RNA, 20 nt, Artificial Sequence
  LRRK2 RNA guide
ugaaugccucauacgggauu

SEQ ID NO: 10847 - RNA, 20 nt, Artificial Sequence
  LRRK2 RNA guide
ugccucauacgggauugaag

SEQ ID NO: 10848 - RNA, 20 nt, Artificial Sequence
  LRRK2 RNA guide
ugucugaaugccucauacgg

SEQ ID NO: 10849 - RNA, 20 nt, Artificial Sequence
  LRRK2 RNA guide
uucaaucccguaugaggcau

SEQ ID NO: 10850 - RNA, 21 nt, Artificial Sequence
  LRRK2 RNA guide
aaaacuucaaucccguaugag

SEQ ID NO: 10851 - RNA, 21 nt, Artificial Sequence
  LRRK2 RNA guide
aaacuucaaucccguaugagg

SEQ ID NO: 10852 - RNA, 21 nt, Artificial Sequence
  LRRK2 RNA guide
aaagggucaucaaaacuucaa

SEQ ID NO: 10853 - RNA, 21 nt, Artificial Sequence
  LRRK2 RNA guide
aaaugcugucugaaugccuca

SEQ ID NO: 10854 - RNA, 21 nt, Artificial Sequence
  LRRK2 RNA guide
aacuucaaucccguaugaggc

SEQ ID NO: 10855 - RNA, 21 nt, Artificial Sequence
  LRRK2 RNA guide
aagggucaucaaaacuucaau

SEQ ID NO: 10856 - RNA, 21 nt, Artificial Sequence
  LRRK2 RNA guide
aaucccguaugaggcauucag

SEQ ID NO: 10857 - RNA, 21 nt, Artificial Sequence
  LRRK2 RNA guide
aaugccucauacgggauugaa

SEQ ID NO: 10858 - RNA, 21 nt, Artificial Sequence
  LRRK2 RNA guide
aaugcugucugaaugccucau

SEQ ID NO: 10859 - RNA, 21 nt, Artificial Sequence
  LRRK2 RNA guide
acgggauugaaguuuugauga

SEQ ID NO: 10860 - RNA, 21 nt, Artificial Sequence
  LRRK2 RNA guide
acuucaaucccguaugaggca

SEQ ID NO: 10861 - RNA, 21 nt, Artificial Sequence
  LRRK2 RNA guide
agaaaugcugucugaaugccu

SEQ ID NO: 10862 - RNA, 21 nt, Artificial Sequence
  LRRK2 RNA guide
agggucaucaaaacuucaauc

SEQ ID NO: 10863 - RNA, 21 nt, Artificial Sequence
  LRRK2 RNA guide
auacgggauugaaguuuugau

SEQ ID NO: 10864 - RNA, 21 nt, Artificial Sequence
  LRRK2 RNA guide
aucaaaacuucaaucccguau

SEQ ID NO: 10865 - RNA, 21 nt, Artificial Sequence
  LRRK2 RNA guide
aucccguaugaggcauucaga

SEQ ID NO: 10866 - RNA, 21 nt, Artificial Sequence
  LRRK2 RNA guide
augccucauacgggauugaag

SEQ ID NO: 10867 - RNA, 21 nt, Artificial Sequence
  LRRK2 RNA guide
augcugucugaaugccucaua

SEQ ID NO: 10868 - RNA, 21 nt, Artificial Sequence
  LRRK2 RNA guide
caaaacuucaaucccguauga

SEQ ID NO: 10869 - RNA, 21 nt, Artificial Sequence
  LRRK2 RNA guide
caaucccguaugaggcauuca

SEQ ID NO: 10870 - RNA, 21 nt, Artificial Sequence
  LRRK2 RNA guide
cauacgggauugaaguuuuga

SEQ ID NO: 10871 - RNA, 21 nt, Artificial Sequence
  LRRK2 RNA guide
caucaaaacuucaaucccgua

SEQ ID NO: 10872 - RNA, 21 nt, Artificial Sequence
  LRRK2 RNA guide
cccguaugaggcauucagaca

SEQ ID NO: 10873 - RNA, 21 nt, Artificial Sequence
  LRRK2 RNA guide
ccguaugaggcauucagacag

SEQ ID NO: 10874 - RNA, 21 nt, Artificial Sequence
  LRRK2 RNA guide
ccucauacgggauugaaguuu

SEQ ID NO: 10875 - RNA, 21 nt, Artificial Sequence
  LRRK2 RNA guide
cguaugaggcauucagacagc

SEQ ID NO: 10876 - RNA, 21 nt, Artificial Sequence
  LRRK2 RNA guide
cucauacgggauugaaguuuu

SEQ ID NO: 10877 - RNA, 21 nt, Artificial Sequence
  LRRK2 RNA guide
cugaaugccucauacgggauu

SEQ ID NO: 10878 - RNA, 21 nt, Artificial Sequence
  LRRK2 RNA guide
cugucugaaugccucauacgg

SEQ ID NO: 10879 - RNA, 21 nt, Artificial Sequence
  LRRK2 RNA guide
cuucaaucccguaugaggcau

SEQ ID NO: 10880 - RNA, 21 nt, Artificial Sequence
  LRRK2 RNA guide
gaaaugcugucugaaugccuc

SEQ ID NO: 10881 - RNA, 21 nt, Artificial Sequence
  LRRK2 RNA guide
gaaugccucauacgggauuga

SEQ ID NO: 10882 - RNA, 21 nt, Artificial Sequence
  LRRK2 RNA guide
gccucauacgggauugaaguu

SEQ ID NO: 10883 - RNA, 21 nt, Artificial Sequence
  LRRK2 RNA guide
gcugucugaaugccucauacg

SEQ ID NO: 10884 - RNA, 21 nt, Artificial Sequence
  LRRK2 RNA guide
gggucaucaaaacuucaaucc

SEQ ID NO: 10885 - RNA, 21 nt, Artificial Sequence
  LRRK2 RNA guide
ggucaucaaaacuucaauccc

SEQ ID NO: 10886 - RNA, 21 nt, Artificial Sequence
  LRRK2 RNA guide
gucaucaaaacuucaaucccg

SEQ ID NO: 10887 - RNA, 21 nt, Artificial Sequence
  LRRK2 RNA guide
gucugaaugccucauacggga

SEQ ID NO: 10888 - RNA, 21 nt, Artificial Sequence
  LRRK2 RNA guide
uacgggauugaaguuuugaug

SEQ ID NO: 10889 - RNA, 21 nt, Artificial Sequence
  LRRK2 RNA guide
ucaaaacuucaaucccguaug

SEQ ID NO: 10890 - RNA, 21 nt, Artificial Sequence
  LRRK2 RNA guide
ucaaucccguaugaggcauuc

SEQ ID NO: 10891 - RNA, 21 nt, Artificial Sequence
  LRRK2 RNA guide
ucauacgggauugaaguuuug

SEQ ID NO: 10892 - RNA, 21 nt, Artificial Sequence
  LRRK2 RNA guide
ucaucaaaacuucaaucccgu

SEQ ID NO: 10893 - RNA, 21 nt, Artificial Sequence
  LRRK2 RNA guide
ucccguaugaggcauucagac

SEQ ID NO: 10894 - RNA, 21 nt, Artificial Sequence
  LRRK2 RNA guide
ucugaaugccucauacgggau

SEQ ID NO: 10895 - RNA, 21 nt, Artificial Sequence
  LRRK2 RNA guide
ugaaugccucauacgggauug

SEQ ID NO: 10896 - RNA, 21 nt, Artificial Sequence
  LRRK2 RNA guide
ugccucauacgggauugaagu

SEQ ID NO: 10897 - RNA, 21 nt, Artificial Sequence
  LRRK2 RNA guide
ugcugucugaaugccucauac

SEQ ID NO: 10898 - RNA, 21 nt, Artificial Sequence
  LRRK2 RNA guide
ugucugaaugccucauacggg

SEQ ID NO: 10899 - RNA, 21 nt, Artificial Sequence
  LRRK2 RNA guide
uucaaucccguaugaggcauu

SEQ ID NO: 10900 - RNA, 22 nt, Artificial Sequence
  LRRK2 RNA guide
aaaacuucaaucccguaugagg

SEQ ID NO: 10901 - RNA, 22 nt, Artificial Sequence
  LRRK2 RNA guide
aaaagggucaucaaaacuucaa

SEQ ID NO: 10902 - RNA, 22 nt, Artificial Sequence
  LRRK2 RNA guide
aaacuucaaucccguaugaggc

SEQ ID NO: 10903 - RNA, 22 nt, Artificial Sequence
  LRRK2 RNA guide
aaagggucaucaaaacuucaau

SEQ ID NO: 10904 - RNA, 22 nt, Artificial Sequence
  LRRK2 RNA guide
aaaugcugucugaaugccucau

SEQ ID NO: 10905 - RNA, 22 nt, Artificial Sequence
  LRRK2 RNA guide
aacuucaaucccguaugaggca

SEQ ID NO: 10906 - RNA, 22 nt, Artificial Sequence
  LRRK2 RNA guide
aagaaaugcugucugaaugccu

SEQ ID NO: 10907 - RNA, 22 nt, Artificial Sequence
  LRRK2 RNA guide
aagggucaucaaaacuucaauc

SEQ ID NO: 10908 - RNA, 22 nt, Artificial Sequence
  LRRK2 RNA guide
aaucccguaugaggcauucaga

SEQ ID NO: 10909 - RNA, 22 nt, Artificial Sequence
  LRRK2 RNA guide
aaugccucauacgggauugaag

SEQ ID NO: 10910 - RNA, 22 nt, Artificial Sequence
  LRRK2 RNA guide
aaugcugucugaaugccucaua

SEQ ID NO: 10911 - RNA, 22 nt, Artificial Sequence
  LRRK2 RNA guide
acgggauugaaguuuugaugac

SEQ ID NO: 10912 - RNA, 22 nt, Artificial Sequence
  LRRK2 RNA guide
acuucaaucccguaugaggcau

SEQ ID NO: 10913 - RNA, 22 nt, Artificial Sequence
  LRRK2 RNA guide
agaaaugcugucugaaugccuc

SEQ ID NO: 10914 - RNA, 22 nt, Artificial Sequence
  LRRK2 RNA guide
agggucaucaaaacuucaaucc

SEQ ID NO: 10915 - RNA, 22 nt, Artificial Sequence
  LRRK2 RNA guide
auacgggauugaaguuuugaug

SEQ ID NO: 10916 - RNA, 22 nt, Artificial Sequence
  LRRK2 RNA guide
aucaaaacuucaaucccguaug

SEQ ID NO: 10917 - RNA, 22 nt, Artificial Sequence
  LRRK2 RNA guide
aucccguaugaggcauucagac

SEQ ID NO: 10918 - RNA, 22 nt, Artificial Sequence
  LRRK2 RNA guide
augccucauacgggauugaagu

SEQ ID NO: 10919 - RNA, 22 nt, Artificial Sequence
  LRRK2 RNA guide
augcugucugaaugccucauac

SEQ ID NO: 10920 - RNA, 22 nt, Artificial Sequence
  LRRK2 RNA guide
caaaacuucaaucccguaugag

SEQ ID NO: 10921 - RNA, 22 nt, Artificial Sequence
  LRRK2 RNA guide
caaucccguaugaggcauucag

SEQ ID NO: 10922 - RNA, 22 nt, Artificial Sequence
  LRRK2 RNA guide
cauacgggauugaaguuuugau

SEQ ID NO: 10923 - RNA, 22 nt, Artificial Sequence
  LRRK2 RNA guide
caucaaaacuucaaucccguau

SEQ ID NO: 10924 - RNA, 22 nt, Artificial Sequence
  LRRK2 RNA guide
cccguaugaggcauucagacag

SEQ ID NO: 10925 - RNA, 22 nt, Artificial Sequence
  LRRK2 RNA guide
ccguaugaggcauucagacagc

SEQ ID NO: 10926 - RNA, 22 nt, Artificial Sequence
  LRRK2 RNA guide
ccucauacgggauugaaguuuu

SEQ ID NO: 10927 - RNA, 22 nt, Artificial Sequence
  LRRK2 RNA guide
cguaugaggcauucagacagca

SEQ ID NO: 10928 - RNA, 22 nt, Artificial Sequence
  LRRK2 RNA guide
cucauacgggauugaaguuuug

SEQ ID NO: 10929 - RNA, 22 nt, Artificial Sequence
  LRRK2 RNA guide
cugaaugccucauacgggauug

SEQ ID NO: 10930 - RNA, 22 nt, Artificial Sequence
  LRRK2 RNA guide
cugucugaaugccucauacggg

SEQ ID NO: 10931 - RNA, 22 nt, Artificial Sequence
  LRRK2 RNA guide
cuucaaucccguaugaggcauu

SEQ ID NO: 10932 - RNA, 22 nt, Artificial Sequence
  LRRK2 RNA guide
gaaaugcugucugaaugccuca

SEQ ID NO: 10933 - RNA, 22 nt, Artificial Sequence
  LRRK2 RNA guide
gaaugccucauacgggauugaa

SEQ ID NO: 10934 - RNA, 22 nt, Artificial Sequence
  LRRK2 RNA guide
gccucauacgggauugaaguuu

SEQ ID NO: 10935 - RNA, 22 nt, Artificial Sequence
  LRRK2 RNA guide
gcugucugaaugccucauacgg

SEQ ID NO: 10936 - RNA, 22 nt, Artificial Sequence
  LRRK2 RNA guide
gggucaucaaaacuucaauccc

SEQ ID NO: 10937 - RNA, 22 nt, Artificial Sequence
  LRRK2 RNA guide
ggucaucaaaacuucaaucccg

SEQ ID NO: 10938 - RNA, 22 nt, Artificial Sequence
  LRRK2 RNA guide
gucaucaaaacuucaaucccgu

SEQ ID NO: 10939 - RNA, 22 nt, Artificial Sequence
  LRRK2 RNA guide
gucugaaugccucauacgggau

SEQ ID NO: 10940 - RNA, 22 nt, Artificial Sequence
  LRRK2 RNA guide
uacgggauugaaguuuugauga

SEQ ID NO: 10941 - RNA, 22 nt, Artificial Sequence
  LRRK2 RNA guide
ucaaaacuucaaucccguauga

SEQ ID NO: 10942 - RNA, 22 nt, Artificial Sequence
  LRRK2 RNA guide
ucaaucccguaugaggcauuca

SEQ ID NO: 10943 - RNA, 22 nt, Artificial Sequence
  LRRK2 RNA guide
ucauacgggauugaaguuuuga

SEQ ID NO: 10944 - RNA, 22 nt, Artificial Sequence
  LRRK2 RNA guide
ucaucaaaacuucaaucccgua

SEQ ID NO: 10945 - RNA, 22 nt, Artificial Sequence
  LRRK2 RNA guide
ucccguaugaggcauucagaca

SEQ ID NO: 10946 - RNA, 22 nt, Artificial Sequence
  LRRK2 RNA guide
ucugaaugccucauacgggauu

SEQ ID NO: 10947 - RNA, 22 nt, Artificial Sequence
  LRRK2 RNA guide
ugaaugccucauacgggauuga

SEQ ID NO: 10948 - RNA, 22 nt, Artificial Sequence
  LRRK2 RNA guide
ugccucauacgggauugaaguu

SEQ ID NO: 10949 - RNA, 22 nt, Artificial Sequence
  LRRK2 RNA guide
ugcugucugaaugccucauacg

SEQ ID NO: 10950 - RNA, 22 nt, Artificial Sequence
  LRRK2 RNA guide
ugucugaaugccucauacggga

SEQ ID NO: 10951 - RNA, 22 nt, Artificial Sequence
  LRRK2 RNA guide
uucaaucccguaugaggcauuc

SEQ ID NO: 10952 - RNA, 20 nt, Artificial Sequence
  LRRK2 RNA guide
aaaugcugccugaaugccuc

SEQ ID NO: 10953 - RNA, 20 nt, Artificial Sequence
  LRRK2 RNA guide
aagaaaugcugccugaaugc

SEQ ID NO: 10954 - RNA, 20 nt, Artificial Sequence
  LRRK2 RNA guide
aagccagagaagaaaugcug

SEQ ID NO: 10955 - RNA, 20 nt, Artificial Sequence
  LRRK2 RNA guide
aaucccauaugaggcauuca

SEQ ID NO: 10956 - RNA, 20 nt, Artificial Sequence
  LRRK2 RNA guide
aaugcugccugaaugccuca

SEQ ID NO: 10957 - RNA, 20 nt, Artificial Sequence
  LRRK2 RNA guide
agaaaugcugccugaaugcc

SEQ ID NO: 10958 - RNA, 20 nt, Artificial Sequence
  LRRK2 RNA guide
agaagaaaugcugccugaau

SEQ ID NO: 10959 - RNA, 20 nt, Artificial Sequence
  LRRK2 RNA guide
agaagccagagaagaaaugc

SEQ ID NO: 10960 - RNA, 20 nt, Artificial Sequence
  LRRK2 RNA guide
agagaagaaaugcugccuga

SEQ ID NO: 10961 - RNA, 20 nt, Artificial Sequence
  LRRK2 RNA guide
agccagagaagaaaugcugc

SEQ ID NO: 10962 - RNA, 20 nt, Artificial Sequence
  LRRK2 RNA guide
aggcagcauuucuucucugg

SEQ ID NO: 10963 - RNA, 20 nt, Artificial Sequence
  LRRK2 RNA guide
aggcauucaggcagcauuuc

SEQ ID NO: 10964 - RNA, 20 nt, Artificial Sequence
  LRRK2 RNA guide
auaugaggcauucaggcagc

SEQ ID NO: 10965 - RNA, 20 nt, Artificial Sequence
  LRRK2 RNA guide
aucccauaugaggcauucag

SEQ ID NO: 10966 - RNA, 20 nt, Artificial Sequence
  LRRK2 RNA guide
augaggcauucaggcagcau

SEQ ID NO: 10967 - RNA, 20 nt, Artificial Sequence
  LRRK2 RNA guide
augcugccugaaugccucau

SEQ ID NO: 10968 - RNA, 20 nt, Artificial Sequence
  LRRK2 RNA guide
auucaggcagcauuucuucu

SEQ ID NO: 10969 - RNA, 20 nt, Artificial Sequence
  LRRK2 RNA guide
caaucccauaugaggcauuc

SEQ ID NO: 10970 - RNA, 20 nt, Artificial Sequence
  LRRK2 RNA guide
cagagaagaaaugcugccug

SEQ ID NO: 10971 - RNA, 20 nt, Artificial Sequence
  LRRK2 RNA guide
caggcagcauuucuucucug

SEQ ID NO: 10972 - RNA, 20 nt, Artificial Sequence
  LRRK2 RNA guide
cauaugaggcauucaggcag

SEQ ID NO: 10973 - RNA, 20 nt, Artificial Sequence
  LRRK2 RNA guide
cauucaggcagcauuucuuc

SEQ ID NO: 10974 - RNA, 20 nt, Artificial Sequence
  LRRK2 RNA guide
ccagagaagaaaugcugccu

SEQ ID NO: 10975 - RNA, 20 nt, Artificial Sequence
  LRRK2 RNA guide
ccauaugaggcauucaggca

SEQ ID NO: 10976 - RNA, 20 nt, Artificial Sequence
  LRRK2 RNA guide
cccauaugaggcauucaggc

SEQ ID NO: 10977 - RNA, 20 nt, Artificial Sequence
  LRRK2 RNA guide
cugccugaaugccucauaug

SEQ ID NO: 10978 - RNA, 20 nt, Artificial Sequence
  LRRK2 RNA guide
gaaaugcugccugaaugccu

SEQ ID NO: 10979 - RNA, 20 nt, Artificial Sequence
  LRRK2 RNA guide
gaagaaaugcugccugaaug

SEQ ID NO: 10980 - RNA, 20 nt, Artificial Sequence
  LRRK2 RNA guide
gaagccagagaagaaaugcu

SEQ ID NO: 10981 - RNA, 20 nt, Artificial Sequence
  LRRK2 RNA guide
gagaagaaaugcugccugaa

SEQ ID NO: 10982 - RNA, 20 nt, Artificial Sequence
  LRRK2 RNA guide
gaggcauucaggcagcauuu

SEQ ID NO: 10983 - RNA, 20 nt, Artificial Sequence
  LRRK2 RNA guide
gcauucaggcagcauuucuu

SEQ ID NO: 10984 - RNA, 20 nt, Artificial Sequence
  LRRK2 RNA guide
gccagagaagaaaugcugcc

SEQ ID NO: 10985 - RNA, 20 nt, Artificial Sequence
  LRRK2 RNA guide
gccugaaugccucauauggg

SEQ ID NO: 10986 - RNA, 20 nt, Artificial Sequence
  LRRK2 RNA guide
gcugccugaaugccucauau

SEQ ID NO: 10987 - RNA, 20 nt, Artificial Sequence
  LRRK2 RNA guide
ggcagcauuucuucucuggc

SEQ ID NO: 10988 - RNA, 20 nt, Artificial Sequence
  LRRK2 RNA guide
ggcauucaggcagcauuucu

SEQ ID NO: 10989 - RNA, 20 nt, Artificial Sequence
  LRRK2 RNA guide
uaugaggcauucaggcagca

SEQ ID NO: 10990 - RNA, 20 nt, Artificial Sequence
  LRRK2 RNA guide
ucaaucccauaugaggcauu

SEQ ID NO: 10991 - RNA, 20 nt, Artificial Sequence
  LRRK2 RNA guide
ucagaagccagagaagaaau

SEQ ID NO: 10992 - RNA, 20 nt, Artificial Sequence
  LRRK2 RNA guide
ucaggcagcauuucuucucu

SEQ ID NO: 10993 - RNA, 20 nt, Artificial Sequence
  LRRK2 RNA guide
ucccauaugaggcauucagg

SEQ ID NO: 10994 - RNA, 20 nt, Artificial Sequence
  LRRK2 RNA guide
ugaggcauucaggcagcauu

SEQ ID NO: 10995 - RNA, 20 nt, Artificial Sequence
  LRRK2 RNA guide
ugccugaaugccucauaugg

SEQ ID NO: 10996 - RNA, 20 nt, Artificial Sequence
  LRRK2 RNA guide
ugcugccugaaugccucaua

SEQ ID NO: 10997 - RNA, 20 nt, Artificial Sequence
  LRRK2 RNA guide
uucaaucccauaugaggcau

SEQ ID NO: 10998 - RNA, 20 nt, Artificial Sequence
  LRRK2 RNA guide
uucaggcagcauuucuucuc

SEQ ID NO: 10999 - RNA, 21 nt, Artificial Sequence
  LRRK2 RNA guide
aaaugcugccugaaugccuca

SEQ ID NO: 11000 - RNA, 21 nt, Artificial Sequence
  LRRK2 RNA guide
aagaaaugcugccugaaugcc

SEQ ID NO: 11001 - RNA, 21 nt, Artificial Sequence
  LRRK2 RNA guide
aagccagagaagaaaugcugc

SEQ ID NO: 11002 - RNA, 21 nt, Artificial Sequence
  LRRK2 RNA guide
aaucccauaugaggcauucag

SEQ ID NO: 11003 - RNA, 21 nt, Artificial Sequence
  LRRK2 RNA guide
aaugcugccugaaugccucau

SEQ ID NO: 11004 - RNA, 21 nt, Artificial Sequence
  LRRK2 RNA guide
agaaaugcugccugaaugccu

SEQ ID NO: 11005 - RNA, 21 nt, Artificial Sequence
  LRRK2 RNA guide
agaagaaaugcugccugaaug

SEQ ID NO: 11006 - RNA, 21 nt, Artificial Sequence
  LRRK2 RNA guide
agaagccagagaagaaaugcu

SEQ ID NO: 11007 - RNA, 21 nt, Artificial Sequence
  LRRK2 RNA guide
agagaagaaaugcugccugaa

SEQ ID NO: 11008 - RNA, 21 nt, Artificial Sequence
  LRRK2 RNA guide
agccagagaagaaaugcugcc

SEQ ID NO: 11009 - RNA, 21 nt, Artificial Sequence
  LRRK2 RNA guide
aggcagcauuucuucucuggc

SEQ ID NO: 11010 - RNA, 21 nt, Artificial Sequence
  LRRK2 RNA guide
aggcauucaggcagcauuucu

SEQ ID NO: 11011 - RNA, 21 nt, Artificial Sequence
  LRRK2 RNA guide
auaugaggcauucaggcagca

SEQ ID NO: 11012 - RNA, 21 nt, Artificial Sequence
  LRRK2 RNA guide
aucccauaugaggcauucagg

SEQ ID NO: 11013 - RNA, 21 nt, Artificial Sequence
  LRRK2 RNA guide
augaggcauucaggcagcauu

SEQ ID NO: 11014 - RNA, 21 nt, Artificial Sequence
  LRRK2 RNA guide
augcugccugaaugccucaua

SEQ ID NO: 11015 - RNA, 21 nt, Artificial Sequence
  LRRK2 RNA guide
auucaggcagcauuucuucuc

SEQ ID NO: 11016 - RNA, 21 nt, Artificial Sequence
  LRRK2 RNA guide
caaucccauaugaggcauuca

SEQ ID NO: 11017 - RNA, 21 nt, Artificial Sequence
  LRRK2 RNA guide
cagaagccagagaagaaaugc

SEQ ID NO: 11018 - RNA, 21 nt, Artificial Sequence
  LRRK2 RNA guide
cagagaagaaaugcugccuga

SEQ ID NO: 11019 - RNA, 21 nt, Artificial Sequence
  LRRK2 RNA guide
caggcagcauuucuucucugg

SEQ ID NO: 11020 - RNA, 21 nt, Artificial Sequence
  LRRK2 RNA guide
cauaugaggcauucaggcagc

SEQ ID NO: 11021 - RNA, 21 nt, Artificial Sequence
  LRRK2 RNA guide
cauucaggcagcauuucuucu

SEQ ID NO: 11022 - RNA, 21 nt, Artificial Sequence
  LRRK2 RNA guide
ccagagaagaaaugcugccug

SEQ ID NO: 11023 - RNA, 21 nt, Artificial Sequence
  LRRK2 RNA guide
ccauaugaggcauucaggcag

SEQ ID NO: 11024 - RNA, 21 nt, Artificial Sequence
  LRRK2 RNA guide
cccauaugaggcauucaggca

SEQ ID NO: 11025 - RNA, 21 nt, Artificial Sequence
  LRRK2 RNA guide
cucagaagccagagaagaaau

SEQ ID NO: 11026 - RNA, 21 nt, Artificial Sequence
  LRRK2 RNA guide
cugccugaaugccucauaugg

SEQ ID NO: 11027 - RNA, 21 nt, Artificial Sequence
  LRRK2 RNA guide
cuucaaucccauaugaggcau

SEQ ID NO: 11028 - RNA, 21 nt, Artificial Sequence
  LRRK2 RNA guide
gaaaugcugccugaaugccuc

SEQ ID NO: 11029 - RNA, 21 nt, Artificial Sequence
  LRRK2 RNA guide
gaagaaaugcugccugaaugc

SEQ ID NO: 11030 - RNA, 21 nt, Artificial Sequence
  LRRK2 RNA guide
gaagccagagaagaaaugcug

SEQ ID NO: 11031 - RNA, 21 nt, Artificial Sequence
  LRRK2 RNA guide
gagaagaaaugcugccugaau

SEQ ID NO: 11032 - RNA, 21 nt, Artificial Sequence
  LRRK2 RNA guide
gaggcauucaggcagcauuuc

SEQ ID NO: 11033 - RNA, 21 nt, Artificial Sequence
  LRRK2 RNA guide
gcauucaggcagcauuucuuc

SEQ ID NO: 11034 - RNA, 21 nt, Artificial Sequence
  LRRK2 RNA guide
gccagagaagaaaugcugccu

SEQ ID NO: 11035 - RNA, 21 nt, Artificial Sequence
  LRRK2 RNA guide
gccugaaugccucauauggga

SEQ ID NO: 11036 - RNA, 21 nt, Artificial Sequence
  LRRK2 RNA guide
gcugccugaaugccucauaug

SEQ ID NO: 11037 - RNA, 21 nt, Artificial Sequence
  LRRK2 RNA guide
ggcagcauuucuucucuggcu

SEQ ID NO: 11038 - RNA, 21 nt, Artificial Sequence
  LRRK2 RNA guide
ggcauucaggcagcauuucuu

SEQ ID NO: 11039 - RNA, 21 nt, Artificial Sequence
  LRRK2 RNA guide
uaugaggcauucaggcagcau

SEQ ID NO: 11040 - RNA, 21 nt, Artificial Sequence
  LRRK2 RNA guide
ucaaucccauaugaggcauuc

SEQ ID NO: 11041 - RNA, 21 nt, Artificial Sequence
  LRRK2 RNA guide
ucagaagccagagaagaaaug

SEQ ID NO: 11042 - RNA, 21 nt, Artificial Sequence
  LRRK2 RNA guide
ucaggcagcauuucuucucug

SEQ ID NO: 11043 - RNA, 21 nt, Artificial Sequence
  LRRK2 RNA guide
ucccauaugaggcauucaggc

SEQ ID NO: 11044 - RNA, 21 nt, Artificial Sequence
  LRRK2 RNA guide
ugaggcauucaggcagcauuu

SEQ ID NO: 11045 - RNA, 21 nt, Artificial Sequence
  LRRK2 RNA guide
ugccugaaugccucauauggg

SEQ ID NO: 11046 - RNA, 21 nt, Artificial Sequence
  LRRK2 RNA guide
ugcugccugaaugccucauau

SEQ ID NO: 11047 - RNA, 21 nt, Artificial Sequence
  LRRK2 RNA guide
uucaaucccauaugaggcauu

SEQ ID NO: 11048 - RNA, 21 nt, Artificial Sequence
  LRRK2 RNA guide
uucaggcagcauuucuucucu

SEQ ID NO: 11049 - RNA, 22 nt, Artificial Sequence
  LRRK2 RNA guide
aaaugcugccugaaugccucau

SEQ ID NO: 11050 - RNA, 22 nt, Artificial Sequence
  LRRK2 RNA guide
aagaaaugcugccugaaugccu

SEQ ID NO: 11051 - RNA, 22 nt, Artificial Sequence
  LRRK2 RNA guide
aagccagagaagaaaugcugcc

SEQ ID NO: 11052 - RNA, 22 nt, Artificial Sequence
  LRRK2 RNA guide
aaucccauaugaggcauucagg

SEQ ID NO: 11053 - RNA, 22 nt, Artificial Sequence
  LRRK2 RNA guide
aaugcugccugaaugccucaua

SEQ ID NO: 11054 - RNA, 22 nt, Artificial Sequence
  LRRK2 RNA guide
acuucaaucccauaugaggcau

SEQ ID NO: 11055 - RNA, 22 nt, Artificial Sequence
  LRRK2 RNA guide
agaaaugcugccugaaugccuc

SEQ ID NO: 11056 - RNA, 22 nt, Artificial Sequence
  LRRK2 RNA guide
agaagaaaugcugccugaaugc

SEQ ID NO: 11057 - RNA, 22 nt, Artificial Sequence
  LRRK2 RNA guide
agaagccagagaagaaaugcug

SEQ ID NO: 11058 - RNA, 22 nt, Artificial Sequence
  LRRK2 RNA guide
agagaagaaaugcugccugaau

SEQ ID NO: 11059 - RNA, 22 nt, Artificial Sequence
  LRRK2 RNA guide
agccagagaagaaaugcugccu

SEQ ID NO: 11060 - RNA, 22 nt, Artificial Sequence
  LRRK2 RNA guide
aggcagcauuucuucucuggcu

SEQ ID NO: 11061 - RNA, 22 nt, Artificial Sequence
  LRRK2 RNA guide
aggcauucaggcagcauuucuu

SEQ ID NO: 11062 - RNA, 22 nt, Artificial Sequence
  LRRK2 RNA guide
auaugaggcauucaggcagcau

SEQ ID NO: 11063 - RNA, 22 nt, Artificial Sequence
  LRRK2 RNA guide
aucccauaugaggcauucaggc

SEQ ID NO: 11064 - RNA, 22 nt, Artificial Sequence
  LRRK2 RNA guide
augaggcauucaggcagcauuu

SEQ ID NO: 11065 - RNA, 22 nt, Artificial Sequence
  LRRK2 RNA guide
augcugccugaaugccucauau

SEQ ID NO: 11066 - RNA, 22 nt, Artificial Sequence
  LRRK2 RNA guide
auucaggcagcauuucuucucu

SEQ ID NO: 11067 - RNA, 22 nt, Artificial Sequence
  LRRK2 RNA guide
caaucccauaugaggcauucag

SEQ ID NO: 11068 - RNA, 22 nt, Artificial Sequence
  LRRK2 RNA guide
cagaagccagagaagaaaugcu

SEQ ID NO: 11069 - RNA, 22 nt, Artificial Sequence
  LRRK2 RNA guide
cagagaagaaaugcugccugaa

SEQ ID NO: 11070 - RNA, 22 nt, Artificial Sequence
  LRRK2 RNA guide
caggcagcauuucuucucuggc

SEQ ID NO: 11071 - RNA, 22 nt, Artificial Sequence
  LRRK2 RNA guide
cauaugaggcauucaggcagca

SEQ ID NO: 11072 - RNA, 22 nt, Artificial Sequence
  LRRK2 RNA guide
cauucaggcagcauuucuucuc

SEQ ID NO: 11073 - RNA, 22 nt, Artificial Sequence
  LRRK2 RNA guide
ccagagaagaaaugcugccuga

SEQ ID NO: 11074 - RNA, 22 nt, Artificial Sequence
  LRRK2 RNA guide
ccauaugaggcauucaggcagc

SEQ ID NO: 11075 - RNA, 22 nt, Artificial Sequence
  LRRK2 RNA guide
cccauaugaggcauucaggcag

SEQ ID NO: 11076 - RNA, 22 nt, Artificial Sequence
  LRRK2 RNA guide
cucagaagccagagaagaaaug

SEQ ID NO: 11077 - RNA, 22 nt, Artificial Sequence
  LRRK2 RNA guide
cugccugaaugccucauauggg

SEQ ID NO: 11078 - RNA, 22 nt, Artificial Sequence
  LRRK2 RNA guide
cuucaaucccauaugaggcauu

SEQ ID NO: 11079 - RNA, 22 nt, Artificial Sequence
  LRRK2 RNA guide
gaaaugcugccugaaugccuca

SEQ ID NO: 11080 - RNA, 22 nt, Artificial Sequence
  LRRK2 RNA guide
gaagaaaugcugccugaaugcc

SEQ ID NO: 11081 - RNA, 22 nt, Artificial Sequence
  LRRK2 RNA guide
gaagccagagaagaaaugcugc

SEQ ID NO: 11082 - RNA, 22 nt, Artificial Sequence
  LRRK2 RNA guide
gagaagaaaugcugccugaaug

SEQ ID NO: 11083 - RNA, 22 nt, Artificial Sequence
  LRRK2 RNA guide
gaggcauucaggcagcauuucu

SEQ ID NO: 11084 - RNA, 22 nt, Artificial Sequence
  LRRK2 RNA guide
gcauucaggcagcauuucuucu

SEQ ID NO: 11085 - RNA, 22 nt, Artificial Sequence
  LRRK2 RNA guide
gccagagaagaaaugcugccug

SEQ ID NO: 11086 - RNA, 22 nt, Artificial Sequence
  LRRK2 RNA guide
gccugaaugccucauaugggau

SEQ ID NO: 11087 - RNA, 22 nt, Artificial Sequence
  LRRK2 RNA guide
gcugccugaaugccucauaugg

SEQ ID NO: 11088 - RNA, 22 nt, Artificial Sequence
  LRRK2 RNA guide
ggcagcauuucuucucuggcuu

SEQ ID NO: 11089 - RNA, 22 nt, Artificial Sequence
  LRRK2 RNA guide
ggcauucaggcagcauuucuuc

SEQ ID NO: 11090 - RNA, 22 nt, Artificial Sequence
  LRRK2 RNA guide
uaugaggcauucaggcagcauu

SEQ ID NO: 11091 - RNA, 22 nt, Artificial Sequence
  LRRK2 RNA guide
ucaaucccauaugaggcauuca

SEQ ID NO: 11092 - RNA, 22 nt, Artificial Sequence
  LRRK2 RNA guide
ucagaagccagagaagaaaugc

SEQ ID NO: 11093 - RNA, 22 nt, Artificial Sequence
  LRRK2 RNA guide
ucaggcagcauuucuucucugg

SEQ ID NO: 11094 - RNA, 22 nt, Artificial Sequence
  LRRK2 RNA guide
ucccauaugaggcauucaggca

SEQ ID NO: 11095 - RNA, 22 nt, Artificial Sequence
  LRRK2 RNA guide
ucucagaagccagagaagaaau

SEQ ID NO: 11096 - RNA, 22 nt, Artificial Sequence
  LRRK2 RNA guide
ugaggcauucaggcagcauuuc

SEQ ID NO: 11097 - RNA, 22 nt, Artificial Sequence
  LRRK2 RNA guide
ugccugaaugccucauauggga

SEQ ID NO: 11098 - RNA, 22 nt, Artificial Sequence
  LRRK2 RNA guide
ugcugccugaaugccucauaug

SEQ ID NO: 11099 - RNA, 22 nt, Artificial Sequence
  LRRK2 RNA guide
uucaaucccauaugaggcauuc

SEQ ID NO: 11100 - RNA, 22 nt, Artificial Sequence
  LRRK2 RNA guide
uucaggcagcauuucuucucug

SEQ ID NO: 11101 - RNA, 20 nt, Artificial Sequence
  LRRK2 RNA guide
aaauguugucugaaugccuc

SEQ ID NO: 11102 - RNA, 20 nt, Artificial Sequence
  LRRK2 RNA guide
aacauuucuucucuggcuuc

SEQ ID NO: 11103 - RNA, 20 nt, Artificial Sequence
  LRRK2 RNA guide
aagaaauguugucugaaugc

SEQ ID NO: 11104 - RNA, 20 nt, Artificial Sequence
  LRRK2 RNA guide
aagccagagaagaaauguug

SEQ ID NO: 11105 - RNA, 20 nt, Artificial Sequence
  LRRK2 RNA guide
aauguugucugaaugccuca

SEQ ID NO: 11106 - RNA, 20 nt, Artificial Sequence
  LRRK2 RNA guide
acaacauuucuucucuggcu

SEQ ID NO: 11107 - RNA, 20 nt, Artificial Sequence
  LRRK2 RNA guide
agaaauguugucugaaugcc

SEQ ID NO: 11108 - RNA, 20 nt, Artificial Sequence
  LRRK2 RNA guide
agaagaaauguugucugaau

SEQ ID NO: 11109 - RNA, 20 nt, Artificial Sequence
  LRRK2 RNA guide
agaagccagagaagaaaugu

SEQ ID NO: 11110 - RNA, 20 nt, Artificial Sequence
  LRRK2 RNA guide
agacaacauuucuucucugg

SEQ ID NO: 11111 - RNA, 20 nt, Artificial Sequence
  LRRK2 RNA guide
agagaagaaauguugucuga

SEQ ID NO: 11112 - RNA, 20 nt, Artificial Sequence
  LRRK2 RNA guide
agccagagaagaaauguugu

SEQ ID NO: 11113 - RNA, 20 nt, Artificial Sequence
  LRRK2 RNA guide
aggcauucagacaacauuuc

SEQ ID NO: 11114 - RNA, 20 nt, Artificial Sequence
  LRRK2 RNA guide
auaugaggcauucagacaac

SEQ ID NO: 11115 - RNA, 20 nt, Artificial Sequence
  LRRK2 RNA guide
augaggcauucagacaacau

SEQ ID NO: 11116 - RNA, 20 nt, Artificial Sequence
  LRRK2 RNA guide
auguugucugaaugccucau

SEQ ID NO: 11117 - RNA, 20 nt, Artificial Sequence
  LRRK2 RNA guide
auucagacaacauuucuucu

SEQ ID NO: 11118 - RNA, 20 nt, Artificial Sequence
  LRRK2 RNA guide
caacauuucuucucuggcuu

SEQ ID NO: 11119 - RNA, 20 nt, Artificial Sequence
  LRRK2 RNA guide
cagacaacauuucuucucug

SEQ ID NO: 11120 - RNA, 20 nt, Artificial Sequence
  LRRK2 RNA guide
cagagaagaaauguugucug

SEQ ID NO: 11121 - RNA, 20 nt, Artificial Sequence
  LRRK2 RNA guide
cauaugaggcauucagacaa

SEQ ID NO: 11122 - RNA, 20 nt, Artificial Sequence
  LRRK2 RNA guide
cauucagacaacauuucuuc

SEQ ID NO: 11123 - RNA, 20 nt, Artificial Sequence
  LRRK2 RNA guide
ccagagaagaaauguugucu

SEQ ID NO: 11124 - RNA, 20 nt, Artificial Sequence
  LRRK2 RNA guide
ccauaugaggcauucagaca

SEQ ID NO: 11125 - RNA, 20 nt, Artificial Sequence
  LRRK2 RNA guide
cccauaugaggcauucagac

SEQ ID NO: 11126 - RNA, 20 nt, Artificial Sequence
  LRRK2 RNA guide
cucagaagccagagaagaaa

SEQ ID NO: 11127 - RNA, 20 nt, Artificial Sequence
  LRRK2 RNA guide
cucucagaagccagagaaga

SEQ ID NO: 11128 - RNA, 20 nt, Artificial Sequence
  LRRK2 RNA guide
gaaauguugucugaaugccu

SEQ ID NO: 11129 - RNA, 20 nt, Artificial Sequence
  LRRK2 RNA guide
gaagaaauguugucugaaug

SEQ ID NO: 11130 - RNA, 20 nt, Artificial Sequence
  LRRK2 RNA guide
gaagccagagaagaaauguu

SEQ ID NO: 11131 - RNA, 20 nt, Artificial Sequence
  LRRK2 RNA guide
gacaacauuucuucucuggc

SEQ ID NO: 11132 - RNA, 20 nt, Artificial Sequence
  LRRK2 RNA guide
gagaagaaauguugucugaa

SEQ ID NO: 11133 - RNA, 20 nt, Artificial Sequence
  LRRK2 RNA guide
gaggcauucagacaacauuu

SEQ ID NO: 11134 - RNA, 20 nt, Artificial Sequence
  LRRK2 RNA guide
gcauucagacaacauuucuu

SEQ ID NO: 11135 - RNA, 20 nt, Artificial Sequence
  LRRK2 RNA guide
gccagagaagaaauguuguc

SEQ ID NO: 11136 - RNA, 20 nt, Artificial Sequence
  LRRK2 RNA guide
ggcauucagacaacauuucu

SEQ ID NO: 11137 - RNA, 20 nt, Artificial Sequence
  LRRK2 RNA guide
guugucugaaugccucauau

SEQ ID NO: 11138 - RNA, 20 nt, Artificial Sequence
  LRRK2 RNA guide
uaugaggcauucagacaaca

SEQ ID NO: 11139 - RNA, 20 nt, Artificial Sequence
  LRRK2 RNA guide
ucagacaacauuucuucucu

SEQ ID NO: 11140 - RNA, 20 nt, Artificial Sequence
  LRRK2 RNA guide
ucccauaugaggcauucaga

SEQ ID NO: 11141 - RNA, 20 nt, Artificial Sequence
  LRRK2 RNA guide
ucucagaagccagagaagaa

SEQ ID NO: 11142 - RNA, 20 nt, Artificial Sequence
  LRRK2 RNA guide
ugaggcauucagacaacauu

SEQ ID NO: 11143 - RNA, 20 nt, Artificial Sequence
  LRRK2 RNA guide
uguugucugaaugccucaua

SEQ ID NO: 11144 - RNA, 20 nt, Artificial Sequence
  LRRK2 RNA guide
uucagacaacauuucuucuc

SEQ ID NO: 11145 - RNA, 21 nt, Artificial Sequence
  LRRK2 RNA guide
aaauguugucugaaugccuca

SEQ ID NO: 11146 - RNA, 21 nt, Artificial Sequence
  LRRK2 RNA guide
aacauuucuucucuggcuucu

SEQ ID NO: 11147 - RNA, 21 nt, Artificial Sequence
  LRRK2 RNA guide
aagaaauguugucugaaugcc

SEQ ID NO: 11148 - RNA, 21 nt, Artificial Sequence
  LRRK2 RNA guide
aagccagagaagaaauguugu

SEQ ID NO: 11149 - RNA, 21 nt, Artificial Sequence
  LRRK2 RNA guide
aauguugucugaaugccucau

SEQ ID NO: 11150 - RNA, 21 nt, Artificial Sequence
  LRRK2 RNA guide
acaacauuucuucucuggcuu

SEQ ID NO: 11151 - RNA, 21 nt, Artificial Sequence
  LRRK2 RNA guide
agaaauguugucugaaugccu

SEQ ID NO: 11152 - RNA, 21 nt, Artificial Sequence
  LRRK2 RNA guide
agaagaaauguugucugaaug

SEQ ID NO: 11153 - RNA, 21 nt, Artificial Sequence
  LRRK2 RNA guide
agaagccagagaagaaauguu

SEQ ID NO: 11154 - RNA, 21 nt, Artificial Sequence
  LRRK2 RNA guide
agacaacauuucuucucuggc

SEQ ID NO: 11155 - RNA, 21 nt, Artificial Sequence
  LRRK2 RNA guide
agagaagaaauguugucugaa

SEQ ID NO: 11156 - RNA, 21 nt, Artificial Sequence
  LRRK2 RNA guide
agccagagaagaaauguuguc

SEQ ID NO: 11157 - RNA, 21 nt, Artificial Sequence
  LRRK2 RNA guide
aggcauucagacaacauuucu

SEQ ID NO: 11158 - RNA, 21 nt, Artificial Sequence
  LRRK2 RNA guide
auaugaggcauucagacaaca

SEQ ID NO: 11159 - RNA, 21 nt, Artificial Sequence
  LRRK2 RNA guide
aucccauaugaggcauucaga

SEQ ID NO: 11160 - RNA, 21 nt, Artificial Sequence
  LRRK2 RNA guide
augaggcauucagacaacauu

SEQ ID NO: 11161 - RNA, 21 nt, Artificial Sequence
  LRRK2 RNA guide
auguugucugaaugccucaua

SEQ ID NO: 11162 - RNA, 21 nt, Artificial Sequence
  LRRK2 RNA guide
auucagacaacauuucuucuc

SEQ ID NO: 11163 - RNA, 21 nt, Artificial Sequence
  LRRK2 RNA guide
caacauuucuucucuggcuuc

SEQ ID NO: 11164 - RNA, 21 nt, Artificial Sequence
  LRRK2 RNA guide
cagaagccagagaagaaaugu

SEQ ID NO: 11165 - RNA, 21 nt, Artificial Sequence
  LRRK2 RNA guide
cagacaacauuucuucucugg

SEQ ID NO: 11166 - RNA, 21 nt, Artificial Sequence
  LRRK2 RNA guide
cagagaagaaauguugucuga

SEQ ID NO: 11167 - RNA, 21 nt, Artificial Sequence
  LRRK2 RNA guide
cauaugaggcauucagacaac

SEQ ID NO: 11168 - RNA, 21 nt, Artificial Sequence
  LRRK2 RNA guide
cauucagacaacauuucuucu

SEQ ID NO: 11169 - RNA, 21 nt, Artificial Sequence
  LRRK2 RNA guide
ccagagaagaaauguugucug

SEQ ID NO: 11170 - RNA, 21 nt, Artificial Sequence
  LRRK2 RNA guide
ccauaugaggcauucagacaa

SEQ ID NO: 11171 - RNA, 21 nt, Artificial Sequence
  LRRK2 RNA guide
cccauaugaggcauucagaca

SEQ ID NO: 11172 - RNA, 21 nt, Artificial Sequence
  LRRK2 RNA guide
cucucagaagccagagaagaa

SEQ ID NO: 11173 - RNA, 21 nt, Artificial Sequence
  LRRK2 RNA guide
gaaauguugucugaaugccuc

SEQ ID NO: 11174 - RNA, 21 nt, Artificial Sequence
  LRRK2 RNA guide
gaagaaauguugucugaaugc

SEQ ID NO: 11175 - RNA, 21 nt, Artificial Sequence
  LRRK2 RNA guide
gaagccagagaagaaauguug

SEQ ID NO: 11176 - RNA, 21 nt, Artificial Sequence
  LRRK2 RNA guide
gacaacauuucuucucuggcu

SEQ ID NO: 11177 - RNA, 21 nt, Artificial Sequence
  LRRK2 RNA guide
gagaagaaauguugucugaau

SEQ ID NO: 11178 - RNA, 21 nt, Artificial Sequence
  LRRK2 RNA guide
gaggcauucagacaacauuuc

SEQ ID NO: 11179 - RNA, 21 nt, Artificial Sequence
  LRRK2 RNA guide
gcauucagacaacauuucuuc

SEQ ID NO: 11180 - RNA, 21 nt, Artificial Sequence
  LRRK2 RNA guide
gccagagaagaaauguugucu

SEQ ID NO: 11181 - RNA, 21 nt, Artificial Sequence
  LRRK2 RNA guide
ggcauucagacaacauuucuu

SEQ ID NO: 11182 - RNA, 21 nt, Artificial Sequence
  LRRK2 RNA guide
guugucugaaugccucauaug

SEQ ID NO: 11183 - RNA, 21 nt, Artificial Sequence
  LRRK2 RNA guide
uaugaggcauucagacaacau

SEQ ID NO: 11184 - RNA, 21 nt, Artificial Sequence
  LRRK2 RNA guide
ucagacaacauuucuucucug

SEQ ID NO: 11185 - RNA, 21 nt, Artificial Sequence
  LRRK2 RNA guide
ucccauaugaggcauucagac

SEQ ID NO: 11186 - RNA, 21 nt, Artificial Sequence
  LRRK2 RNA guide
ucucagaagccagagaagaaa

SEQ ID NO: 11187 - RNA, 21 nt, Artificial Sequence
  LRRK2 RNA guide
ucucucagaagccagagaaga

SEQ ID NO: 11188 - RNA, 21 nt, Artificial Sequence
  LRRK2 RNA guide
ugaggcauucagacaacauuu

SEQ ID NO: 11189 - RNA, 21 nt, Artificial Sequence
  LRRK2 RNA guide
uguugucugaaugccucauau

SEQ ID NO: 11190 - RNA, 21 nt, Artificial Sequence
  LRRK2 RNA guide
uucagacaacauuucuucucu

SEQ ID NO: 11191 - RNA, 22 nt, Artificial Sequence
  LRRK2 RNA guide
aaauguugucugaaugccucau

SEQ ID NO: 11192 - RNA, 22 nt, Artificial Sequence
  LRRK2 RNA guide
aacauuucuucucuggcuucug

SEQ ID NO: 11193 - RNA, 22 nt, Artificial Sequence
  LRRK2 RNA guide
aagaaauguugucugaaugccu

SEQ ID NO: 11194 - RNA, 22 nt, Artificial Sequence
  LRRK2 RNA guide
aagccagagaagaaauguuguc

SEQ ID NO: 11195 - RNA, 22 nt, Artificial Sequence
  LRRK2 RNA guide
aaucccauaugaggcauucaga

SEQ ID NO: 11196 - RNA, 22 nt, Artificial Sequence
  LRRK2 RNA guide
aauguugucugaaugccucaua

SEQ ID NO: 11197 - RNA, 22 nt, Artificial Sequence
  LRRK2 RNA guide
acaacauuucuucucuggcuuc

SEQ ID NO: 11198 - RNA, 22 nt, Artificial Sequence
  LRRK2 RNA guide
agaaauguugucugaaugccuc

SEQ ID NO: 11199 - RNA, 22 nt, Artificial Sequence
  LRRK2 RNA guide
agaagaaauguugucugaaugc

SEQ ID NO: 11200 - RNA, 22 nt, Artificial Sequence
  LRRK2 RNA guide
agaagccagagaagaaauguug

SEQ ID NO: 11201 - RNA, 22 nt, Artificial Sequence
  LRRK2 RNA guide
agacaacauuucuucucuggcu

SEQ ID NO: 11202 - RNA, 22 nt, Artificial Sequence
  LRRK2 RNA guide
agagaagaaauguugucugaau

SEQ ID NO: 11203 - RNA, 22 nt, Artificial Sequence
  LRRK2 RNA guide
agccagagaagaaauguugucu

SEQ ID NO: 11204 - RNA, 22 nt, Artificial Sequence
  LRRK2 RNA guide
aggcauucagacaacauuucuu

SEQ ID NO: 11205 - RNA, 22 nt, Artificial Sequence
  LRRK2 RNA guide
auaugaggcauucagacaacau

SEQ ID NO: 11206 - RNA, 22 nt, Artificial Sequence
  LRRK2 RNA guide
aucccauaugaggcauucagac

SEQ ID NO: 11207 - RNA, 22 nt, Artificial Sequence
  LRRK2 RNA guide
augaggcauucagacaacauuu

SEQ ID NO: 11208 - RNA, 22 nt, Artificial Sequence
  LRRK2 RNA guide
auguugucugaaugccucauau

SEQ ID NO: 11209 - RNA, 22 nt, Artificial Sequence
  LRRK2 RNA guide
auucagacaacauuucuucucu

SEQ ID NO: 11210 - RNA, 22 nt, Artificial Sequence
  LRRK2 RNA guide
caacauuucuucucuggcuucu

SEQ ID NO: 11211 - RNA, 22 nt, Artificial Sequence
  LRRK2 RNA guide
cagaagccagagaagaaauguu

SEQ ID NO: 11212 - RNA, 22 nt, Artificial Sequence
  LRRK2 RNA guide
cagacaacauuucuucucuggc

SEQ ID NO: 11213 - RNA, 22 nt, Artificial Sequence
  LRRK2 RNA guide
cagagaagaaauguugucugaa

SEQ ID NO: 11214 - RNA, 22 nt, Artificial Sequence
  LRRK2 RNA guide
cauaugaggcauucagacaaca

SEQ ID NO: 11215 - RNA, 22 nt, Artificial Sequence
  LRRK2 RNA guide
cauucagacaacauuucuucuc

SEQ ID NO: 11216 - RNA, 22 nt, Artificial Sequence
  LRRK2 RNA guide
ccagagaagaaauguugucuga

SEQ ID NO: 11217 - RNA, 22 nt, Artificial Sequence
  LRRK2 RNA guide
ccauaugaggcauucagacaac

SEQ ID NO: 11218 - RNA, 22 nt, Artificial Sequence
  LRRK2 RNA guide
cccauaugaggcauucagacaa

SEQ ID NO: 11219 - RNA, 22 nt, Artificial Sequence
  LRRK2 RNA guide
cucucagaagccagagaagaaa

SEQ ID NO: 11220 - RNA, 22 nt, Artificial Sequence
  LRRK2 RNA guide
cucucucagaagccagagaaga

SEQ ID NO: 11221 - RNA, 22 nt, Artificial Sequence
  LRRK2 RNA guide
gaaauguugucugaaugccuca

SEQ ID NO: 11222 - RNA, 22 nt, Artificial Sequence
  LRRK2 RNA guide
gaagaaauguugucugaaugcc

SEQ ID NO: 11223 - RNA, 22 nt, Artificial Sequence
  LRRK2 RNA guide
gaagccagagaagaaauguugu

SEQ ID NO: 11224 - RNA, 22 nt, Artificial Sequence
  LRRK2 RNA guide
gacaacauuucuucucuggcuu

SEQ ID NO: 11225 - RNA, 22 nt, Artificial Sequence
  LRRK2 RNA guide
gagaagaaauguugucugaaug

SEQ ID NO: 11226 - RNA, 22 nt, Artificial Sequence
  LRRK2 RNA guide
gaggcauucagacaacauuucu

SEQ ID NO: 11227 - RNA, 22 nt, Artificial Sequence
  LRRK2 RNA guide
gcauucagacaacauuucuucu

SEQ ID NO: 11228 - RNA, 22 nt, Artificial Sequence
  LRRK2 RNA guide
gccagagaagaaauguugucug

SEQ ID NO: 11229 - RNA, 22 nt, Artificial Sequence
  LRRK2 RNA guide
ggcauucagacaacauuucuuc

SEQ ID NO: 11230 - RNA, 22 nt, Artificial Sequence
  LRRK2 RNA guide
guugucugaaugccucauaugg

SEQ ID NO: 11231 - RNA, 22 nt, Artificial Sequence
  LRRK2 RNA guide
uaugaggcauucagacaacauu

SEQ ID NO: 11232 - RNA, 22 nt, Artificial Sequence
  LRRK2 RNA guide
ucagaagccagagaagaaaugu

SEQ ID NO: 11233 - RNA, 22 nt, Artificial Sequence
  LRRK2 RNA guide
ucagacaacauuucuucucugg

SEQ ID NO: 11234 - RNA, 22 nt, Artificial Sequence
  LRRK2 RNA guide
ucccauaugaggcauucagaca

SEQ ID NO: 11235 - RNA, 22 nt, Artificial Sequence
  LRRK2 RNA guide
ucucucagaagccagagaagaa

SEQ ID NO: 11236 - RNA, 22 nt, Artificial Sequence
  LRRK2 RNA guide
ugaggcauucagacaacauuuc

SEQ ID NO: 11237 - RNA, 22 nt, Artificial Sequence
  LRRK2 RNA guide
uguugucugaaugccucauaug

SEQ ID NO: 11238 - RNA, 22 nt, Artificial Sequence
  LRRK2 RNA guide
uucagacaacauuucuucucug

SEQ ID NO: 11239 - RNA, 20 nt, Artificial Sequence
  LRRK2 RNA guide
aacuaagaguuauugaugcc

SEQ ID NO: 11240 - RNA, 20 nt, Artificial Sequence
  LRRK2 RNA guide
aacucuuaguucauuugcug

SEQ ID NO: 11241 - RNA, 20 nt, Artificial Sequence
  LRRK2 RNA guide
aagaguuauugaugcccuaa

SEQ ID NO: 11242 - RNA, 20 nt, Artificial Sequence
  LRRK2 RNA guide
accuuucagcaaaugaacua

SEQ ID NO: 11243 - RNA, 20 nt, Artificial Sequence
  LRRK2 RNA guide
acuaagaguuauugaugccc

SEQ ID NO: 11244 - RNA, 20 nt, Artificial Sequence
  LRRK2 RNA guide
agaguuauugaugcccuaag

SEQ ID NO: 11245 - RNA, 20 nt, Artificial Sequence
  LRRK2 RNA guide
agcaaaugaacuaagaguua

SEQ ID NO: 11246 - RNA, 20 nt, Artificial Sequence
  LRRK2 RNA guide
agggcaucaauaacucuuag

SEQ ID NO: 11247 - RNA, 20 nt, Artificial Sequence
  LRRK2 RNA guide
aguuauugaugcccuaagcc

SEQ ID NO: 11248 - RNA, 20 nt, Artificial Sequence
  LRRK2 RNA guide
auaacucuuaguucauuugc

SEQ ID NO: 11249 - RNA, 20 nt, Artificial Sequence
  LRRK2 RNA guide
auuucuggcuuagggcauca

SEQ ID NO: 11250 - RNA, 20 nt, Artificial Sequence
  LRRK2 RNA guide
cagcaaaugaacuaagaguu

SEQ ID NO: 11251 - RNA, 20 nt, Artificial Sequence
  LRRK2 RNA guide
caucaauaacucuuaguuca

SEQ ID NO: 11252 - RNA, 20 nt, Artificial Sequence
  LRRK2 RNA guide
cauuucuggcuuagggcauc

SEQ ID NO: 11253 - RNA, 20 nt, Artificial Sequence
  LRRK2 RNA guide
ccuuucagcaaaugaacuaa

SEQ ID NO: 11254 - RNA, 20 nt, Artificial Sequence
  LRRK2 RNA guide
cuaagaguuauugaugcccu

SEQ ID NO: 11255 - RNA, 20 nt, Artificial Sequence
  LRRK2 RNA guide
cuggcuuagggcaucaauaa

SEQ ID NO: 11256 - RNA, 20 nt, Artificial Sequence
  LRRK2 RNA guide
cuuagggcaucaauaacucu

SEQ ID NO: 11257 - RNA, 20 nt, Artificial Sequence
  LRRK2 RNA guide
cuuucagcaaaugaacuaag

SEQ ID NO: 11258 - RNA, 20 nt, Artificial Sequence
  LRRK2 RNA guide
gaacuaagaguuauugaugc

SEQ ID NO: 11259 - RNA, 20 nt, Artificial Sequence
  LRRK2 RNA guide
gaguuauugaugcccuaagc

SEQ ID NO: 11260 - RNA, 20 nt, Artificial Sequence
  LRRK2 RNA guide
gcaaaugaacuaagaguuau

SEQ ID NO: 11261 - RNA, 20 nt, Artificial Sequence
  LRRK2 RNA guide
gcaucaauaacucuuaguuc

SEQ ID NO: 11262 - RNA, 20 nt, Artificial Sequence
  LRRK2 RNA guide
gcuuagggcaucaauaacuc

SEQ ID NO: 11263 - RNA, 20 nt, Artificial Sequence
  LRRK2 RNA guide
ggcaucaauaacucuuaguu

SEQ ID NO: 11264 - RNA, 20 nt, Artificial Sequence
  LRRK2 RNA guide
ggcuuagggcaucaauaacu

SEQ ID NO: 11265 - RNA, 20 nt, Artificial Sequence
  LRRK2 RNA guide
gggcaucaauaacucuuagu

SEQ ID NO: 11266 - RNA, 20 nt, Artificial Sequence
  LRRK2 RNA guide
guuauugaugcccuaagcca

SEQ ID NO: 11267 - RNA, 20 nt, Artificial Sequence
  LRRK2 RNA guide
uaacucuuaguucauuugcu

SEQ ID NO: 11268 - RNA, 20 nt, Artificial Sequence
  LRRK2 RNA guide
uaagaguuauugaugcccua

SEQ ID NO: 11269 - RNA, 20 nt, Artificial Sequence
  LRRK2 RNA guide
uagggcaucaauaacucuua

SEQ ID NO: 11270 - RNA, 20 nt, Artificial Sequence
  LRRK2 RNA guide
ucagcaaaugaacuaagagu

SEQ ID NO: 11271 - RNA, 20 nt, Artificial Sequence
  LRRK2 RNA guide
ucuggcuuagggcaucaaua

SEQ ID NO: 11272 - RNA, 20 nt, Artificial Sequence
  LRRK2 RNA guide
ugaacuaagaguuauugaug

SEQ ID NO: 11273 - RNA, 20 nt, Artificial Sequence
  LRRK2 RNA guide
uggcuuagggcaucaauaac

SEQ ID NO: 11274 - RNA, 20 nt, Artificial Sequence
  LRRK2 RNA guide
uuagggcaucaauaacucuu

SEQ ID NO: 11275 - RNA, 20 nt, Artificial Sequence
  LRRK2 RNA guide
uucagcaaaugaacuaagag

SEQ ID NO: 11276 - RNA, 20 nt, Artificial Sequence
  LRRK2 RNA guide
uucuggcuuagggcaucaau

SEQ ID NO: 11277 - RNA, 20 nt, Artificial Sequence
  LRRK2 RNA guide
uuucagcaaaugaacuaaga

SEQ ID NO: 11278 - RNA, 21 nt, Artificial Sequence
  LRRK2 RNA guide
aacuaagaguuauugaugccc

SEQ ID NO: 11279 - RNA, 21 nt, Artificial Sequence
  LRRK2 RNA guide
aacucuuaguucauuugcuga

SEQ ID NO: 11280 - RNA, 21 nt, Artificial Sequence
  LRRK2 RNA guide
aagaguuauugaugcccuaag

SEQ ID NO: 11281 - RNA, 21 nt, Artificial Sequence
  LRRK2 RNA guide
accuuucagcaaaugaacuaa

SEQ ID NO: 11282 - RNA, 21 nt, Artificial Sequence
  LRRK2 RNA guide
acuaagaguuauugaugcccu

SEQ ID NO: 11283 - RNA, 21 nt, Artificial Sequence
  LRRK2 RNA guide
agaguuauugaugcccuaagc

SEQ ID NO: 11284 - RNA, 21 nt, Artificial Sequence
  LRRK2 RNA guide
agggcaucaauaacucuuagu

SEQ ID NO: 11285 - RNA, 21 nt, Artificial Sequence
  LRRK2 RNA guide
aguuauugaugcccuaagcca

SEQ ID NO: 11286 - RNA, 21 nt, Artificial Sequence
  LRRK2 RNA guide
auuucuggcuuagggcaucaa

SEQ ID NO: 11287 - RNA, 21 nt, Artificial Sequence
  LRRK2 RNA guide
cagcaaaugaacuaagaguua

SEQ ID NO: 11288 - RNA, 21 nt, Artificial Sequence
  LRRK2 RNA guide
cauuucuggcuuagggcauca

SEQ ID NO: 11289 - RNA, 21 nt, Artificial Sequence
  LRRK2 RNA guide
ccuuucagcaaaugaacuaag

SEQ ID NO: 11290 - RNA, 21 nt, Artificial Sequence
  LRRK2 RNA guide
cuaagaguuauugaugcccua

SEQ ID NO: 11291 - RNA, 21 nt, Artificial Sequence
  LRRK2 RNA guide
cuggcuuagggcaucaauaac

SEQ ID NO: 11292 - RNA, 21 nt, Artificial Sequence
  LRRK2 RNA guide
cuuagggcaucaauaacucuu

SEQ ID NO: 11293 - RNA, 21 nt, Artificial Sequence
  LRRK2 RNA guide
cuuucagcaaaugaacuaaga

SEQ ID NO: 11294 - RNA, 21 nt, Artificial Sequence
  LRRK2 RNA guide
gaacuaagaguuauugaugcc

SEQ ID NO: 11295 - RNA, 21 nt, Artificial Sequence
  LRRK2 RNA guide
gaccuuucagcaaaugaacua

SEQ ID NO: 11296 - RNA, 21 nt, Artificial Sequence
  LRRK2 RNA guide
gaguuauugaugcccuaagcc

SEQ ID NO: 11297 - RNA, 21 nt, Artificial Sequence
  LRRK2 RNA guide
gcaucaauaacucuuaguuca

SEQ ID NO: 11298 - RNA, 21 nt, Artificial Sequence
  LRRK2 RNA guide
gcauuucuggcuuagggcauc

SEQ ID NO: 11299 - RNA, 21 nt, Artificial Sequence
  LRRK2 RNA guide
gcuuagggcaucaauaacucu

SEQ ID NO: 11300 - RNA, 21 nt, Artificial Sequence
  LRRK2 RNA guide
ggcaucaauaacucuuaguuc

SEQ ID NO: 11301 - RNA, 21 nt, Artificial Sequence
  LRRK2 RNA guide
ggcuuagggcaucaauaacuc

SEQ ID NO: 11302 - RNA, 21 nt, Artificial Sequence
  LRRK2 RNA guide
gggcaucaauaacucuuaguu

SEQ ID NO: 11303 - RNA, 21 nt, Artificial Sequence
  LRRK2 RNA guide
guuauugaugcccuaagccag

SEQ ID NO: 11304 - RNA, 21 nt, Artificial Sequence
  LRRK2 RNA guide
uaacucuuaguucauuugcug

SEQ ID NO: 11305 - RNA, 21 nt, Artificial Sequence
  LRRK2 RNA guide
uaagaguuauugaugcccuaa

SEQ ID NO: 11306 - RNA, 21 nt, Artificial Sequence
  LRRK2 RNA guide
uagggcaucaauaacucuuag

SEQ ID NO: 11307 - RNA, 21 nt, Artificial Sequence
  LRRK2 RNA guide
ucagcaaaugaacuaagaguu

SEQ ID NO: 11308 - RNA, 21 nt, Artificial Sequence
  LRRK2 RNA guide
ucuggcuuagggcaucaauaa

SEQ ID NO: 11309 - RNA, 21 nt, Artificial Sequence
  LRRK2 RNA guide
ugaacuaagaguuauugaugc

SEQ ID NO: 11310 - RNA, 21 nt, Artificial Sequence
  LRRK2 RNA guide
uggcuuagggcaucaauaacu

SEQ ID NO: 11311 - RNA, 21 nt, Artificial Sequence
  LRRK2 RNA guide
uuagggcaucaauaacucuua

SEQ ID NO: 11312 - RNA, 21 nt, Artificial Sequence
  LRRK2 RNA guide
uucagcaaaugaacuaagagu

SEQ ID NO: 11313 - RNA, 21 nt, Artificial Sequence
  LRRK2 RNA guide
uucuggcuuagggcaucaaua

SEQ ID NO: 11314 - RNA, 21 nt, Artificial Sequence
  LRRK2 RNA guide
uuucagcaaaugaacuaagag

SEQ ID NO: 11315 - RNA, 21 nt, Artificial Sequence
  LRRK2 RNA guide
uuucuggcuuagggcaucaau

SEQ ID NO: 11316 - RNA, 22 nt, Artificial Sequence
  LRRK2 RNA guide
aacuaagaguuauugaugcccu

SEQ ID NO: 11317 - RNA, 22 nt, Artificial Sequence
  LRRK2 RNA guide
aacucuuaguucauuugcugaa

SEQ ID NO: 11318 - RNA, 22 nt, Artificial Sequence
  LRRK2 RNA guide
aagaguuauugaugcccuaagc

SEQ ID NO: 11319 - RNA, 22 nt, Artificial Sequence
  LRRK2 RNA guide
accuuucagcaaaugaacuaag

SEQ ID NO: 11320 - RNA, 22 nt, Artificial Sequence
  LRRK2 RNA guide
acuaagaguuauugaugcccua

SEQ ID NO: 11321 - RNA, 22 nt, Artificial Sequence
  LRRK2 RNA guide
agaccuuucagcaaaugaacua

SEQ ID NO: 11322 - RNA, 22 nt, Artificial Sequence
  LRRK2 RNA guide
agaguuauugaugcccuaagcc

SEQ ID NO: 11323 - RNA, 22 nt, Artificial Sequence
  LRRK2 RNA guide
agcauuucuggcuuagggcauc

SEQ ID NO: 11324 - RNA, 22 nt, Artificial Sequence
  LRRK2 RNA guide
agggcaucaauaacucuuaguu

SEQ ID NO: 11325 - RNA, 22 nt, Artificial Sequence
  LRRK2 RNA guide
aguuauugaugcccuaagccag

SEQ ID NO: 11326 - RNA, 22 nt, Artificial Sequence
  LRRK2 RNA guide
auaacucuuaguucauuugcug

SEQ ID NO: 11327 - RNA, 22 nt, Artificial Sequence
  LRRK2 RNA guide
augaacuaagaguuauugaugc

SEQ ID NO: 11328 - RNA, 22 nt, Artificial Sequence
  LRRK2 RNA guide
auuucuggcuuagggcaucaau

SEQ ID NO: 11329 - RNA, 22 nt, Artificial Sequence
  LRRK2 RNA guide
caauaacucuuaguucauuugc

SEQ ID NO: 11330 - RNA, 22 nt, Artificial Sequence
  LRRK2 RNA guide
cagcaaaugaacuaagaguuau

SEQ ID NO: 11331 - RNA, 22 nt, Artificial Sequence
  LRRK2 RNA guide
cauuucuggcuuagggcaucaa

SEQ ID NO: 11332 - RNA, 22 nt, Artificial Sequence
  LRRK2 RNA guide
ccuuucagcaaaugaacuaaga

SEQ ID NO: 11333 - RNA, 22 nt, Artificial Sequence
  LRRK2 RNA guide
cuaagaguuauugaugcccuaa

SEQ ID NO: 11334 - RNA, 22 nt, Artificial Sequence
  LRRK2 RNA guide
cuggcuuagggcaucaauaacu

SEQ ID NO: 11335 - RNA, 22 nt, Artificial Sequence
  LRRK2 RNA guide
cuuagggcaucaauaacucuua

SEQ ID NO: 11336 - RNA, 22 nt, Artificial Sequence
  LRRK2 RNA guide
cuuucagcaaaugaacuaagag

SEQ ID NO: 11337 - RNA, 22 nt, Artificial Sequence
  LRRK2 RNA guide
gaacuaagaguuauugaugccc

SEQ ID NO: 11338 - RNA, 22 nt, Artificial Sequence
  LRRK2 RNA guide
gaccuuucagcaaaugaacuaa

SEQ ID NO: 11339 - RNA, 22 nt, Artificial Sequence
  LRRK2 RNA guide
gaguuauugaugcccuaagcca

SEQ ID NO: 11340 - RNA, 22 nt, Artificial Sequence
  LRRK2 RNA guide
gcaaaugaacuaagaguuauug

SEQ ID NO: 11341 - RNA, 22 nt, Artificial Sequence
  LRRK2 RNA guide
gcaucaauaacucuuaguucau

SEQ ID NO: 11342 - RNA, 22 nt, Artificial Sequence
  LRRK2 RNA guide
gcauuucuggcuuagggcauca

SEQ ID NO: 11343 - RNA, 22 nt, Artificial Sequence
  LRRK2 RNA guide
gcuuagggcaucaauaacucuu

SEQ ID NO: 11344 - RNA, 22 nt, Artificial Sequence
  LRRK2 RNA guide
ggcaucaauaacucuuaguuca

SEQ ID NO: 11345 - RNA, 22 nt, Artificial Sequence
  LRRK2 RNA guide
ggcuuagggcaucaauaacucu

SEQ ID NO: 11346 - RNA, 22 nt, Artificial Sequence
  LRRK2 RNA guide
gggcaucaauaacucuuaguuc

SEQ ID NO: 11347 - RNA, 22 nt, Artificial Sequence
  LRRK2 RNA guide
guuauugaugcccuaagccaga

SEQ ID NO: 11348 - RNA, 22 nt, Artificial Sequence
  LRRK2 RNA guide
uaacucuuaguucauuugcuga

SEQ ID NO: 11349 - RNA, 22 nt, Artificial Sequence
  LRRK2 RNA guide
uaagaguuauugaugcccuaag

SEQ ID NO: 11350 - RNA, 22 nt, Artificial Sequence
  LRRK2 RNA guide
uagggcaucaauaacucuuagu

SEQ ID NO: 11351 - RNA, 22 nt, Artificial Sequence
  LRRK2 RNA guide
ucagcaaaugaacuaagaguua

SEQ ID NO: 11352 - RNA, 22 nt, Artificial Sequence
  LRRK2 RNA guide
ucuggcuuagggcaucaauaac

SEQ ID NO: 11353 - RNA, 22 nt, Artificial Sequence
  LRRK2 RNA guide
ugaacuaagaguuauugaugcc

SEQ ID NO: 11354 - RNA, 22 nt, Artificial Sequence
  LRRK2 RNA guide
uggcuuagggcaucaauaacuc

SEQ ID NO: 11355 - RNA, 22 nt, Artificial Sequence
  LRRK2 RNA guide
uuagggcaucaauaacucuuag

SEQ ID NO: 11356 - RNA, 22 nt, Artificial Sequence
  LRRK2 RNA guide
uucagcaaaugaacuaagaguu

SEQ ID NO: 11357 - RNA, 22 nt, Artificial Sequence
  LRRK2 RNA guide
uucuggcuuagggcaucaauaa

SEQ ID NO: 11358 - RNA, 22 nt, Artificial Sequence
  LRRK2 RNA guide
uuucagcaaaugaacuaagagu

SEQ ID NO: 11359 - RNA, 22 nt, Artificial Sequence
  LRRK2 RNA guide
uuucuggcuuagggcaucaaua

SEQ ID NO: 11360 - RNA, 20 nt, Artificial Sequence
  LRRK2 RNA guide
aaaugaacacucauacagca

SEQ ID NO: 11361 - RNA, 20 nt, Artificial Sequence
  LRRK2 RNA guide
aaaugcuguaugaguguuca

SEQ ID NO: 11362 - RNA, 20 nt, Artificial Sequence
  LRRK2 RNA guide
aacacucauacagcauuucu

SEQ ID NO: 11363 - RNA, 20 nt, Artificial Sequence
  LRRK2 RNA guide
aagaugcuccaaaugaacac

SEQ ID NO: 11364 - RNA, 20 nt, Artificial Sequence
  LRRK2 RNA guide
aagccagaaaugcuguauga

SEQ ID NO: 11365 - RNA, 20 nt, Artificial Sequence
  LRRK2 RNA guide
aaugaacacucauacagcau

SEQ ID NO: 11366 - RNA, 20 nt, Artificial Sequence
  LRRK2 RNA guide
aaugcuguaugaguguucau

SEQ ID NO: 11367 - RNA, 20 nt, Artificial Sequence
  LRRK2 RNA guide
acacucauacagcauuucug

SEQ ID NO: 11368 - RNA, 20 nt, Artificial Sequence
  LRRK2 RNA guide
acucauacagcauuucuggc

SEQ ID NO: 11369 - RNA, 20 nt, Artificial Sequence
  LRRK2 RNA guide
agaaaugcuguaugaguguu

SEQ ID NO: 11370 - RNA, 20 nt, Artificial Sequence
  LRRK2 RNA guide
agaugcuccaaaugaacacu

SEQ ID NO: 11371 - RNA, 20 nt, Artificial Sequence
  LRRK2 RNA guide
agccagaaaugcuguaugag

SEQ ID NO: 11372 - RNA, 20 nt, Artificial Sequence
  LRRK2 RNA guide
augaacacucauacagcauu

SEQ ID NO: 11373 - RNA, 20 nt, Artificial Sequence
  LRRK2 RNA guide
augaguguucauuuggagca

SEQ ID NO: 11374 - RNA, 20 nt, Artificial Sequence
  LRRK2 RNA guide
augcuccaaaugaacacuca

SEQ ID NO: 11375 - RNA, 20 nt, Artificial Sequence
  LRRK2 RNA guide
augcuguaugaguguucauu

SEQ ID NO: 11376 - RNA, 20 nt, Artificial Sequence
  LRRK2 RNA guide
caaaugaacacucauacagc

SEQ ID NO: 11377 - RNA, 20 nt, Artificial Sequence
  LRRK2 RNA guide
caagaugcuccaaaugaaca

SEQ ID NO: 11378 - RNA, 20 nt, Artificial Sequence
  LRRK2 RNA guide
cacucauacagcauuucugg

SEQ ID NO: 11379 - RNA, 20 nt, Artificial Sequence
  LRRK2 RNA guide
cagaaaugcuguaugagugu

SEQ ID NO: 11380 - RNA, 20 nt, Artificial Sequence
  LRRK2 RNA guide
ccaaaugaacacucauacag

SEQ ID NO: 11381 - RNA, 20 nt, Artificial Sequence
  LRRK2 RNA guide
ccagaaaugcuguaugagug

SEQ ID NO: 11382 - RNA, 20 nt, Artificial Sequence
  LRRK2 RNA guide
cccuaagccagaaaugcugu

SEQ ID NO: 11383 - RNA, 20 nt, Artificial Sequence
  LRRK2 RNA guide
ccuaagccagaaaugcugua

SEQ ID NO: 11384 - RNA, 20 nt, Artificial Sequence
  LRRK2 RNA guide
cuaagccagaaaugcuguau

SEQ ID NO: 11385 - RNA, 20 nt, Artificial Sequence
  LRRK2 RNA guide
cucauacagcauuucuggcu

SEQ ID NO: 11386 - RNA, 20 nt, Artificial Sequence
  LRRK2 RNA guide
cuccaaaugaacacucauac

SEQ ID NO: 11387 - RNA, 20 nt, Artificial Sequence
  LRRK2 RNA guide
cuguaugaguguucauuugg

SEQ ID NO: 11388 - RNA, 20 nt, Artificial Sequence
  LRRK2 RNA guide
gaaaugcuguaugaguguuc

SEQ ID NO: 11389 - RNA, 20 nt, Artificial Sequence
  LRRK2 RNA guide
gaacacucauacagcauuuc

SEQ ID NO: 11390 - RNA, 20 nt, Artificial Sequence
  LRRK2 RNA guide
gaugcuccaaaugaacacuc

SEQ ID NO: 11391 - RNA, 20 nt, Artificial Sequence
  LRRK2 RNA guide
gccagaaaugcuguaugagu

SEQ ID NO: 11392 - RNA, 20 nt, Artificial Sequence
  LRRK2 RNA guide
gcccuaagccagaaaugcug

SEQ ID NO: 11393 - RNA, 20 nt, Artificial Sequence
  LRRK2 RNA guide
gcuccaaaugaacacucaua

SEQ ID NO: 11394 - RNA, 20 nt, Artificial Sequence
  LRRK2 RNA guide
gcuguaugaguguucauuug

SEQ ID NO: 11395 - RNA, 20 nt, Artificial Sequence
  LRRK2 RNA guide
guaugaguguucauuuggag

SEQ ID NO: 11396 - RNA, 20 nt, Artificial Sequence
  LRRK2 RNA guide
uaagccagaaaugcuguaug

SEQ ID NO: 11397 - RNA, 20 nt, Artificial Sequence
  LRRK2 RNA guide
uaugaguguucauuuggagc

SEQ ID NO: 11398 - RNA, 20 nt, Artificial Sequence
  LRRK2 RNA guide
ucaagaugcuccaaaugaac

SEQ ID NO: 11399 - RNA, 20 nt, Artificial Sequence
  LRRK2 RNA guide
ucauacagcauuucuggcuu

SEQ ID NO: 11400 - RNA, 20 nt, Artificial Sequence
  LRRK2 RNA guide
uccaaaugaacacucauaca

SEQ ID NO: 11401 - RNA, 20 nt, Artificial Sequence
  LRRK2 RNA guide
ugaacacucauacagcauuu

SEQ ID NO: 11402 - RNA, 20 nt, Artificial Sequence
  LRRK2 RNA guide
ugaguguucauuuggagcau

SEQ ID NO: 11403 - RNA, 20 nt, Artificial Sequence
  LRRK2 RNA guide
ugcccuaagccagaaaugcu

SEQ ID NO: 11404 - RNA, 20 nt, Artificial Sequence
  LRRK2 RNA guide
ugcuccaaaugaacacucau

SEQ ID NO: 11405 - RNA, 20 nt, Artificial Sequence
  LRRK2 RNA guide
ugcuguaugaguguucauuu

SEQ ID NO: 11406 - RNA, 20 nt, Artificial Sequence
  LRRK2 RNA guide
uguaugaguguucauuugga

SEQ ID NO: 11407 - RNA, 20 nt, Artificial Sequence
  LRRK2 RNA guide
uucaagaugcuccaaaugaa

SEQ ID NO: 11408 - RNA, 21 nt, Artificial Sequence
  LRRK2 RNA guide
aaaugaacacucauacagcau

SEQ ID NO: 11409 - RNA, 21 nt, Artificial Sequence
  LRRK2 RNA guide
aaaugcuguaugaguguucau

SEQ ID NO: 11410 - RNA, 21 nt, Artificial Sequence
  LRRK2 RNA guide
aacacucauacagcauuucug

SEQ ID NO: 11411 - RNA, 21 nt, Artificial Sequence
  LRRK2 RNA guide
aagaugcuccaaaugaacacu

SEQ ID NO: 11412 - RNA, 21 nt, Artificial Sequence
  LRRK2 RNA guide
aagccagaaaugcuguaugag

SEQ ID NO: 11413 - RNA, 21 nt, Artificial Sequence
  LRRK2 RNA guide
aaugaacacucauacagcauu

SEQ ID NO: 11414 - RNA, 21 nt, Artificial Sequence
  LRRK2 RNA guide
aaugcuguaugaguguucauu

SEQ ID NO: 11415 - RNA, 21 nt, Artificial Sequence
  LRRK2 RNA guide
acacucauacagcauuucugg

SEQ ID NO: 11416 - RNA, 21 nt, Artificial Sequence
  LRRK2 RNA guide
acucauacagcauuucuggcu

SEQ ID NO: 11417 - RNA, 21 nt, Artificial Sequence
  LRRK2 RNA guide
agaaaugcuguaugaguguuc

SEQ ID NO: 11418 - RNA, 21 nt, Artificial Sequence
  LRRK2 RNA guide
agaugcuccaaaugaacacuc

SEQ ID NO: 11419 - RNA, 21 nt, Artificial Sequence
  LRRK2 RNA guide
agccagaaaugcuguaugagu

SEQ ID NO: 11420 - RNA, 21 nt, Artificial Sequence
  LRRK2 RNA guide
augaacacucauacagcauuu

SEQ ID NO: 11421 - RNA, 21 nt, Artificial Sequence
  LRRK2 RNA guide
augaguguucauuuggagcau

SEQ ID NO: 11422 - RNA, 21 nt, Artificial Sequence
  LRRK2 RNA guide
augcccuaagccagaaaugcu

SEQ ID NO: 11423 - RNA, 21 nt, Artificial Sequence
  LRRK2 RNA guide
augcuccaaaugaacacucau

SEQ ID NO: 11424 - RNA, 21 nt, Artificial Sequence
  LRRK2 RNA guide
augcuguaugaguguucauuu

SEQ ID NO: 11425 - RNA, 21 nt, Artificial Sequence
  LRRK2 RNA guide
caaaugaacacucauacagca

SEQ ID NO: 11426 - RNA, 21 nt, Artificial Sequence
  LRRK2 RNA guide
caagaugcuccaaaugaacac

SEQ ID NO: 11427 - RNA, 21 nt, Artificial Sequence
  LRRK2 RNA guide
cacucauacagcauuucuggc

SEQ ID NO: 11428 - RNA, 21 nt, Artificial Sequence
  LRRK2 RNA guide
cagaaaugcuguaugaguguu

SEQ ID NO: 11429 - RNA, 21 nt, Artificial Sequence
  LRRK2 RNA guide
ccaaaugaacacucauacagc

SEQ ID NO: 11430 - RNA, 21 nt, Artificial Sequence
  LRRK2 RNA guide
ccagaaaugcuguaugagugu

SEQ ID NO: 11431 - RNA, 21 nt, Artificial Sequence
  LRRK2 RNA guide
cccuaagccagaaaugcugua

SEQ ID NO: 11432 - RNA, 21 nt, Artificial Sequence
  LRRK2 RNA guide
ccuaagccagaaaugcuguau

SEQ ID NO: 11433 - RNA, 21 nt, Artificial Sequence
  LRRK2 RNA guide
cuaagccagaaaugcuguaug

SEQ ID NO: 11434 - RNA, 21 nt, Artificial Sequence
  LRRK2 RNA guide
cucauacagcauuucuggcuu

SEQ ID NO: 11435 - RNA, 21 nt, Artificial Sequence
  LRRK2 RNA guide
cuccaaaugaacacucauaca

SEQ ID NO: 11436 - RNA, 21 nt, Artificial Sequence
  LRRK2 RNA guide
cuguaugaguguucauuugga

SEQ ID NO: 11437 - RNA, 21 nt, Artificial Sequence
  LRRK2 RNA guide
gaaaugcuguaugaguguuca

SEQ ID NO: 11438 - RNA, 21 nt, Artificial Sequence
  LRRK2 RNA guide
gaacacucauacagcauuucu

SEQ ID NO: 11439 - RNA, 21 nt, Artificial Sequence
  LRRK2 RNA guide
gaugcuccaaaugaacacuca

SEQ ID NO: 11440 - RNA, 21 nt, Artificial Sequence
  LRRK2 RNA guide
gccagaaaugcuguaugagug

SEQ ID NO: 11441 - RNA, 21 nt, Artificial Sequence
  LRRK2 RNA guide
gcccuaagccagaaaugcugu

SEQ ID NO: 11442 - RNA, 21 nt, Artificial Sequence
  LRRK2 RNA guide
gcuccaaaugaacacucauac

SEQ ID NO: 11443 - RNA, 21 nt, Artificial Sequence
  LRRK2 RNA guide
gcuguaugaguguucauuugg

SEQ ID NO: 11444 - RNA, 21 nt, Artificial Sequence
  LRRK2 RNA guide
guaugaguguucauuuggagc

SEQ ID NO: 11445 - RNA, 21 nt, Artificial Sequence
  LRRK2 RNA guide
uaagccagaaaugcuguauga

SEQ ID NO: 11446 - RNA, 21 nt, Artificial Sequence
  LRRK2 RNA guide
uaugaguguucauuuggagca

SEQ ID NO: 11447 - RNA, 21 nt, Artificial Sequence
  LRRK2 RNA guide
ucaagaugcuccaaaugaaca

SEQ ID NO: 11448 - RNA, 21 nt, Artificial Sequence
  LRRK2 RNA guide
ucauacagcauuucuggcuua

SEQ ID NO: 11449 - RNA, 21 nt, Artificial Sequence
  LRRK2 RNA guide
uccaaaugaacacucauacag

SEQ ID NO: 11450 - RNA, 21 nt, Artificial Sequence
  LRRK2 RNA guide
ugaacacucauacagcauuuc

SEQ ID NO: 11451 - RNA, 21 nt, Artificial Sequence
  LRRK2 RNA guide
ugaguguucauuuggagcauc

SEQ ID NO: 11452 - RNA, 21 nt, Artificial Sequence
  LRRK2 RNA guide
ugcccuaagccagaaaugcug

SEQ ID NO: 11453 - RNA, 21 nt, Artificial Sequence
  LRRK2 RNA guide
ugcuccaaaugaacacucaua

SEQ ID NO: 11454 - RNA, 21 nt, Artificial Sequence
  LRRK2 RNA guide
ugcuguaugaguguucauuug

SEQ ID NO: 11455 - RNA, 21 nt, Artificial Sequence
  LRRK2 RNA guide
uguaugaguguucauuuggag

SEQ ID NO: 11456 - RNA, 21 nt, Artificial Sequence
  LRRK2 RNA guide
uucaagaugcuccaaaugaac

SEQ ID NO: 11457 - RNA, 21 nt, Artificial Sequence
  LRRK2 RNA guide
uuucaagaugcuccaaaugaa

SEQ ID NO: 11458 - RNA, 22 nt, Artificial Sequence
  LRRK2 RNA guide
aaaugaacacucauacagcauu

SEQ ID NO: 11459 - RNA, 22 nt, Artificial Sequence
  LRRK2 RNA guide
aaaugcuguaugaguguucauu

SEQ ID NO: 11460 - RNA, 22 nt, Artificial Sequence
  LRRK2 RNA guide
aacacucauacagcauuucugg

SEQ ID NO: 11461 - RNA, 22 nt, Artificial Sequence
  LRRK2 RNA guide
aagaugcuccaaaugaacacuc

SEQ ID NO: 11462 - RNA, 22 nt, Artificial Sequence
  LRRK2 RNA guide
aagccagaaaugcuguaugagu

SEQ ID NO: 11463 - RNA, 22 nt, Artificial Sequence
  LRRK2 RNA guide
aaugaacacucauacagcauuu

SEQ ID NO: 11464 - RNA, 22 nt, Artificial Sequence
  LRRK2 RNA guide
aaugcuguaugaguguucauuu

SEQ ID NO: 11465 - RNA, 22 nt, Artificial Sequence
  LRRK2 RNA guide
acacucauacagcauuucuggc

SEQ ID NO: 11466 - RNA, 22 nt, Artificial Sequence
  LRRK2 RNA guide
acucauacagcauuucuggcuu

SEQ ID NO: 11467 - RNA, 22 nt, Artificial Sequence
  LRRK2 RNA guide
agaaaugcuguaugaguguuca

SEQ ID NO: 11468 - RNA, 22 nt, Artificial Sequence
  LRRK2 RNA guide
agaugcuccaaaugaacacuca

SEQ ID NO: 11469 - RNA, 22 nt, Artificial Sequence
  LRRK2 RNA guide
agccagaaaugcuguaugagug

SEQ ID NO: 11470 - RNA, 22 nt, Artificial Sequence
  LRRK2 RNA guide
augaacacucauacagcauuuc

SEQ ID NO: 11471 - RNA, 22 nt, Artificial Sequence
  LRRK2 RNA guide
augaguguucauuuggagcauc

SEQ ID NO: 11472 - RNA, 22 nt, Artificial Sequence
  LRRK2 RNA guide
augcccuaagccagaaaugcug

SEQ ID NO: 11473 - RNA, 22 nt, Artificial Sequence
  LRRK2 RNA guide
augcuccaaaugaacacucaua

SEQ ID NO: 11474 - RNA, 22 nt, Artificial Sequence
  LRRK2 RNA guide
augcuguaugaguguucauuug

SEQ ID NO: 11475 - RNA, 22 nt, Artificial Sequence
  LRRK2 RNA guide
caaaugaacacucauacagcau

SEQ ID NO: 11476 - RNA, 22 nt, Artificial Sequence
  LRRK2 RNA guide
caagaugcuccaaaugaacacu

SEQ ID NO: 11477 - RNA, 22 nt, Artificial Sequence
  LRRK2 RNA guide
cacucauacagcauuucuggcu

SEQ ID NO: 11478 - RNA, 22 nt, Artificial Sequence
  LRRK2 RNA guide
cagaaaugcuguaugaguguuc

SEQ ID NO: 11479 - RNA, 22 nt, Artificial Sequence
  LRRK2 RNA guide
ccaaaugaacacucauacagca

SEQ ID NO: 11480 - RNA, 22 nt, Artificial Sequence
  LRRK2 RNA guide
ccagaaaugcuguaugaguguu

SEQ ID NO: 11481 - RNA, 22 nt, Artificial Sequence
  LRRK2 RNA guide
cccuaagccagaaaugcuguau

SEQ ID NO: 11482 - RNA, 22 nt, Artificial Sequence
  LRRK2 RNA guide
ccuaagccagaaaugcuguaug

SEQ ID NO: 11483 - RNA, 22 nt, Artificial Sequence
  LRRK2 RNA guide
cuaagccagaaaugcuguauga

SEQ ID NO: 11484 - RNA, 22 nt, Artificial Sequence
  LRRK2 RNA guide
cucauacagcauuucuggcuua

SEQ ID NO: 11485 - RNA, 22 nt, Artificial Sequence
  LRRK2 RNA guide
cuccaaaugaacacucauacag

SEQ ID NO: 11486 - RNA, 22 nt, Artificial Sequence
  LRRK2 RNA guide
cuguaugaguguucauuuggag

SEQ ID NO: 11487 - RNA, 22 nt, Artificial Sequence
  LRRK2 RNA guide
gaaaugcuguaugaguguucau

SEQ ID NO: 11488 - RNA, 22 nt, Artificial Sequence
  LRRK2 RNA guide
gaacacucauacagcauuucug

SEQ ID NO: 11489 - RNA, 22 nt, Artificial Sequence
  LRRK2 RNA guide
gaugcccuaagccagaaaugcu

SEQ ID NO: 11490 - RNA, 22 nt, Artificial Sequence
  LRRK2 RNA guide
gaugcuccaaaugaacacucau

SEQ ID NO: 11491 - RNA, 22 nt, Artificial Sequence
  LRRK2 RNA guide
gccagaaaugcuguaugagugu

SEQ ID NO: 11492 - RNA, 22 nt, Artificial Sequence
  LRRK2 RNA guide
gcccuaagccagaaaugcugua

SEQ ID NO: 11493 - RNA, 22 nt, Artificial Sequence
  LRRK2 RNA guide
gcuccaaaugaacacucauaca

SEQ ID NO: 11494 - RNA, 22 nt, Artificial Sequence
  LRRK2 RNA guide
gcuguaugaguguucauuugga

SEQ ID NO: 11495 - RNA, 22 nt, Artificial Sequence
  LRRK2 RNA guide
guaugaguguucauuuggagca

SEQ ID NO: 11496 - RNA, 22 nt, Artificial Sequence
  LRRK2 RNA guide
uaagccagaaaugcuguaugag

SEQ ID NO: 11497 - RNA, 22 nt, Artificial Sequence
  LRRK2 RNA guide
uaugaguguucauuuggagcau

SEQ ID NO: 11498 - RNA, 22 nt, Artificial Sequence
  LRRK2 RNA guide
ucaagaugcuccaaaugaacac

SEQ ID NO: 11499 - RNA, 22 nt, Artificial Sequence
  LRRK2 RNA guide
ucauacagcauuucuggcuuag

SEQ ID NO: 11500 - RNA, 22 nt, Artificial Sequence
  LRRK2 RNA guide
uccaaaugaacacucauacagc

SEQ ID NO: 11501 - RNA, 22 nt, Artificial Sequence
  LRRK2 RNA guide
ugaacacucauacagcauuucu

SEQ ID NO: 11502 - RNA, 22 nt, Artificial Sequence
  LRRK2 RNA guide
ugaguguucauuuggagcaucu

SEQ ID NO: 11503 - RNA, 22 nt, Artificial Sequence
  LRRK2 RNA guide
ugcccuaagccagaaaugcugu

SEQ ID NO: 11504 - RNA, 22 nt, Artificial Sequence
  LRRK2 RNA guide
ugcuccaaaugaacacucauac

SEQ ID NO: 11505 - RNA, 22 nt, Artificial Sequence
  LRRK2 RNA guide
ugcuguaugaguguucauuugg

SEQ ID NO: 11506 - RNA, 22 nt, Artificial Sequence
  LRRK2 RNA guide
uguaugaguguucauuuggagc

SEQ ID NO: 11507 - RNA, 22 nt, Artificial Sequence
  LRRK2 RNA guide
uucaagaugcuccaaaugaaca

SEQ ID NO: 11508 - RNA, 22 nt, Artificial Sequence
  LRRK2 RNA guide
uuucaagaugcuccaaaugaac

SEQ ID NO: 11509 - RNA, 22 nt, Artificial Sequence
  LRRK2 RNA guide
uuuucaagaugcuccaaaugaa

SEQ ID NO: 11510 - RNA, 20 nt, Artificial Sequence
  LRRK2 RNA guide
aaaggaacacuuauacagca

SEQ ID NO: 11511 - RNA, 20 nt, Artificial Sequence
  LRRK2 RNA guide
aaaugcuguauaaguguucc

SEQ ID NO: 11512 - RNA, 20 nt, Artificial Sequence
  LRRK2 RNA guide
aagaugcuccaaaggaacac

SEQ ID NO: 11513 - RNA, 20 nt, Artificial Sequence
  LRRK2 RNA guide
aaggaacacuuauacagcau

SEQ ID NO: 11514 - RNA, 20 nt, Artificial Sequence
  LRRK2 RNA guide
aaguguuccuuuggagcauc

SEQ ID NO: 11515 - RNA, 20 nt, Artificial Sequence
  LRRK2 RNA guide
aaugcuguauaaguguuccu

SEQ ID NO: 11516 - RNA, 20 nt, Artificial Sequence
  LRRK2 RNA guide
agaaaugcuguauaaguguu

SEQ ID NO: 11517 - RNA, 20 nt, Artificial Sequence
  LRRK2 RNA guide
agaugcuccaaaggaacacu

SEQ ID NO: 11518 - RNA, 20 nt, Artificial Sequence
  LRRK2 RNA guide
agcuuuucaagaugcuccaa

SEQ ID NO: 11519 - RNA, 20 nt, Artificial Sequence
  LRRK2 RNA guide
aggaacacuuauacagcauu

SEQ ID NO: 11520 - RNA, 20 nt, Artificial Sequence
  LRRK2 RNA guide
aguguuccuuuggagcaucu

SEQ ID NO: 11521 - RNA, 20 nt, Artificial Sequence
  LRRK2 RNA guide
auaaguguuccuuuggagca

SEQ ID NO: 11522 - RNA, 20 nt, Artificial Sequence
  LRRK2 RNA guide
augcuccaaaggaacacuua

SEQ ID NO: 11523 - RNA, 20 nt, Artificial Sequence
  LRRK2 RNA guide
augcuguauaaguguuccuu

SEQ ID NO: 11524 - RNA, 20 nt, Artificial Sequence
  LRRK2 RNA guide
caaaggaacacuuauacagc

SEQ ID NO: 11525 - RNA, 20 nt, Artificial Sequence
  LRRK2 RNA guide
caagaugcuccaaaggaaca

SEQ ID NO: 11526 - RNA, 20 nt, Artificial Sequence
  LRRK2 RNA guide
cagaaaugcuguauaagugu

SEQ ID NO: 11527 - RNA, 20 nt, Artificial Sequence
  LRRK2 RNA guide
cagcuuuucaagaugcucca

SEQ ID NO: 11528 - RNA, 20 nt, Artificial Sequence
  LRRK2 RNA guide
ccaaaggaacacuuauacag

SEQ ID NO: 11529 - RNA, 20 nt, Artificial Sequence
  LRRK2 RNA guide
ccagaaaugcuguauaagug

SEQ ID NO: 11530 - RNA, 20 nt, Artificial Sequence
  LRRK2 RNA guide
ccagcuuuucaagaugcucc

SEQ ID NO: 11531 - RNA, 20 nt, Artificial Sequence
  LRRK2 RNA guide
ccuuuggagcaucuugaaaa

SEQ ID NO: 11532 - RNA, 20 nt, Artificial Sequence
  LRRK2 RNA guide
cuccaaaggaacacuuauac

SEQ ID NO: 11533 - RNA, 20 nt, Artificial Sequence
  LRRK2 RNA guide
cuguauaaguguuccuuugg

SEQ ID NO: 11534 - RNA, 20 nt, Artificial Sequence
  LRRK2 RNA guide
cuuuucaagaugcuccaaag

SEQ ID NO: 11535 - RNA, 20 nt, Artificial Sequence
  LRRK2 RNA guide
gaaaugcuguauaaguguuc

SEQ ID NO: 11536 - RNA, 20 nt, Artificial Sequence
  LRRK2 RNA guide
gaugcuccaaaggaacacuu

SEQ ID NO: 11537 - RNA, 20 nt, Artificial Sequence
  LRRK2 RNA guide
gccagaaaugcuguauaagu

SEQ ID NO: 11538 - RNA, 20 nt, Artificial Sequence
  LRRK2 RNA guide
gcuccaaaggaacacuuaua

SEQ ID NO: 11539 - RNA, 20 nt, Artificial Sequence
  LRRK2 RNA guide
gcuguauaaguguuccuuug

SEQ ID NO: 11540 - RNA, 20 nt, Artificial Sequence
  LRRK2 RNA guide
gcuuuucaagaugcuccaaa

SEQ ID NO: 11541 - RNA, 20 nt, Artificial Sequence
  LRRK2 RNA guide
guauaaguguuccuuuggag

SEQ ID NO: 11542 - RNA, 20 nt, Artificial Sequence
  LRRK2 RNA guide
guguuccuuuggagcaucuu

SEQ ID NO: 11543 - RNA, 20 nt, Artificial Sequence
  LRRK2 RNA guide
guuccuuuggagcaucuuga

SEQ ID NO: 11544 - RNA, 20 nt, Artificial Sequence
  LRRK2 RNA guide
uaaguguuccuuuggagcau

SEQ ID NO: 11545 - RNA, 20 nt, Artificial Sequence
  LRRK2 RNA guide
uauaaguguuccuuuggagc

SEQ ID NO: 11546 - RNA, 20 nt, Artificial Sequence
  LRRK2 RNA guide
ucaagaugcuccaaaggaac

SEQ ID NO: 11547 - RNA, 20 nt, Artificial Sequence
  LRRK2 RNA guide
uccaaaggaacacuuauaca

SEQ ID NO: 11548 - RNA, 20 nt, Artificial Sequence
  LRRK2 RNA guide
uccagcuuuucaagaugcuc

SEQ ID NO: 11549 - RNA, 20 nt, Artificial Sequence
  LRRK2 RNA guide
uccuuuggagcaucuugaaa

SEQ ID NO: 11550 - RNA, 20 nt, Artificial Sequence
  LRRK2 RNA guide
ugcuccaaaggaacacuuau

SEQ ID NO: 11551 - RNA, 20 nt, Artificial Sequence
  LRRK2 RNA guide
ugcuguauaaguguuccuuu

SEQ ID NO: 11552 - RNA, 20 nt, Artificial Sequence
  LRRK2 RNA guide
uguauaaguguuccuuugga

SEQ ID NO: 11553 - RNA, 20 nt, Artificial Sequence
  LRRK2 RNA guide
uguuccuuuggagcaucuug

SEQ ID NO: 11554 - RNA, 20 nt, Artificial Sequence
  LRRK2 RNA guide
uucaagaugcuccaaaggaa

SEQ ID NO: 11555 - RNA, 20 nt, Artificial Sequence
  LRRK2 RNA guide
uuccuuuggagcaucuugaa

SEQ ID NO: 11556 - RNA, 20 nt, Artificial Sequence
  LRRK2 RNA guide
uuucaagaugcuccaaagga

SEQ ID NO: 11557 - RNA, 20 nt, Artificial Sequence
  LRRK2 RNA guide
uuuucaagaugcuccaaagg

SEQ ID NO: 11558 - RNA, 21 nt, Artificial Sequence
  LRRK2 RNA guide
aaaggaacacuuauacagcau

SEQ ID NO: 11559 - RNA, 21 nt, Artificial Sequence
  LRRK2 RNA guide
aaaugcuguauaaguguuccu

SEQ ID NO: 11560 - RNA, 21 nt, Artificial Sequence
  LRRK2 RNA guide
aagaugcuccaaaggaacacu

SEQ ID NO: 11561 - RNA, 21 nt, Artificial Sequence
  LRRK2 RNA guide
aaggaacacuuauacagcauu

SEQ ID NO: 11562 - RNA, 21 nt, Artificial Sequence
  LRRK2 RNA guide
aaguguuccuuuggagcaucu

SEQ ID NO: 11563 - RNA, 21 nt, Artificial Sequence
  LRRK2 RNA guide
aaugcuguauaaguguuccuu

SEQ ID NO: 11564 - RNA, 21 nt, Artificial Sequence
  LRRK2 RNA guide
agaaaugcuguauaaguguuc

SEQ ID NO: 11565 - RNA, 21 nt, Artificial Sequence
  LRRK2 RNA guide
agaugcuccaaaggaacacuu

SEQ ID NO: 11566 - RNA, 21 nt, Artificial Sequence
  LRRK2 RNA guide
agccagaaaugcuguauaagu

SEQ ID NO: 11567 - RNA, 21 nt, Artificial Sequence
  LRRK2 RNA guide
agcuuuucaagaugcuccaaa

SEQ ID NO: 11568 - RNA, 21 nt, Artificial Sequence
  LRRK2 RNA guide
aggaacacuuauacagcauuu

SEQ ID NO: 11569 - RNA, 21 nt, Artificial Sequence
  LRRK2 RNA guide
aguguuccuuuggagcaucuu

SEQ ID NO: 11570 - RNA, 21 nt, Artificial Sequence
  LRRK2 RNA guide
auaaguguuccuuuggagcau

SEQ ID NO: 11571 - RNA, 21 nt, Artificial Sequence
  LRRK2 RNA guide
augcuccaaaggaacacuuau

SEQ ID NO: 11572 - RNA, 21 nt, Artificial Sequence
  LRRK2 RNA guide
augcuguauaaguguuccuuu

SEQ ID NO: 11573 - RNA, 21 nt, Artificial Sequence
  LRRK2 RNA guide
caaaggaacacuuauacagca

SEQ ID NO: 11574 - RNA, 21 nt, Artificial Sequence
  LRRK2 RNA guide
caagaugcuccaaaggaacac

SEQ ID NO: 11575 - RNA, 21 nt, Artificial Sequence
  LRRK2 RNA guide
cagaaaugcuguauaaguguu

SEQ ID NO: 11576 - RNA, 21 nt, Artificial Sequence
  LRRK2 RNA guide
cagcuuuucaagaugcuccaa

SEQ ID NO: 11577 - RNA, 21 nt, Artificial Sequence
  LRRK2 RNA guide
ccaaaggaacacuuauacagc

SEQ ID NO: 11578 - RNA, 21 nt, Artificial Sequence
  LRRK2 RNA guide
ccagaaaugcuguauaagugu

SEQ ID NO: 11579 - RNA, 21 nt, Artificial Sequence
  LRRK2 RNA guide
ccagcuuuucaagaugcucca

SEQ ID NO: 11580 - RNA, 21 nt, Artificial Sequence
  LRRK2 RNA guide
ccuuuggagcaucuugaaaag

SEQ ID NO: 11581 - RNA, 21 nt, Artificial Sequence
  LRRK2 RNA guide
cuccaaaggaacacuuauaca

SEQ ID NO: 11582 - RNA, 21 nt, Artificial Sequence
  LRRK2 RNA guide
cuccagcuuuucaagaugcuc

SEQ ID NO: 11583 - RNA, 21 nt, Artificial Sequence
  LRRK2 RNA guide
cuguauaaguguuccuuugga

SEQ ID NO: 11584 - RNA, 21 nt, Artificial Sequence
  LRRK2 RNA guide
cuuuucaagaugcuccaaagg

SEQ ID NO: 11585 - RNA, 21 nt, Artificial Sequence
  LRRK2 RNA guide
gaaaugcuguauaaguguucc

SEQ ID NO: 11586 - RNA, 21 nt, Artificial Sequence
  LRRK2 RNA guide
gaugcuccaaaggaacacuua

SEQ ID NO: 11587 - RNA, 21 nt, Artificial Sequence
  LRRK2 RNA guide
gccagaaaugcuguauaagug

SEQ ID NO: 11588 - RNA, 21 nt, Artificial Sequence
  LRRK2 RNA guide
gcuccaaaggaacacuuauac

SEQ ID NO: 11589 - RNA, 21 nt, Artificial Sequence
  LRRK2 RNA guide
gcuguauaaguguuccuuugg

SEQ ID NO: 11590 - RNA, 21 nt, Artificial Sequence
  LRRK2 RNA guide
gcuuuucaagaugcuccaaag

SEQ ID NO: 11591 - RNA, 21 nt, Artificial Sequence
  LRRK2 RNA guide
guauaaguguuccuuuggagc

SEQ ID NO: 11592 - RNA, 21 nt, Artificial Sequence
  LRRK2 RNA guide
guguuccuuuggagcaucuug

SEQ ID NO: 11593 - RNA, 21 nt, Artificial Sequence
  LRRK2 RNA guide
guuccuuuggagcaucuugaa

SEQ ID NO: 11594 - RNA, 21 nt, Artificial Sequence
  LRRK2 RNA guide
uaaguguuccuuuggagcauc

SEQ ID NO: 11595 - RNA, 21 nt, Artificial Sequence
  LRRK2 RNA guide
uauaaguguuccuuuggagca

SEQ ID NO: 11596 - RNA, 21 nt, Artificial Sequence
  LRRK2 RNA guide
ucaagaugcuccaaaggaaca

SEQ ID NO: 11597 - RNA, 21 nt, Artificial Sequence
  LRRK2 RNA guide
uccaaaggaacacuuauacag

SEQ ID NO: 11598 - RNA, 21 nt, Artificial Sequence
  LRRK2 RNA guide
uccagcuuuucaagaugcucc

SEQ ID NO: 11599 - RNA, 21 nt, Artificial Sequence
  LRRK2 RNA guide
uccuuuggagcaucuugaaaa

SEQ ID NO: 11600 - RNA, 21 nt, Artificial Sequence
  LRRK2 RNA guide
ugcuccaaaggaacacuuaua

SEQ ID NO: 11601 - RNA, 21 nt, Artificial Sequence
  LRRK2 RNA guide
ugcuguauaaguguuccuuug

SEQ ID NO: 11602 - RNA, 21 nt, Artificial Sequence
  LRRK2 RNA guide
uguauaaguguuccuuuggag

SEQ ID NO: 11603 - RNA, 21 nt, Artificial Sequence
  LRRK2 RNA guide
uguuccuuuggagcaucuuga

SEQ ID NO: 11604 - RNA, 21 nt, Artificial Sequence
  LRRK2 RNA guide
uucaagaugcuccaaaggaac

SEQ ID NO: 11605 - RNA, 21 nt, Artificial Sequence
  LRRK2 RNA guide
uuccuuuggagcaucuugaaa

SEQ ID NO: 11606 - RNA, 21 nt, Artificial Sequence
  LRRK2 RNA guide
uuucaagaugcuccaaaggaa

SEQ ID NO: 11607 - RNA, 21 nt, Artificial Sequence
  LRRK2 RNA guide
uuuucaagaugcuccaaagga

SEQ ID NO: 11608 - RNA, 22 nt, Artificial Sequence
  LRRK2 RNA guide
aaaggaacacuuauacagcauu

SEQ ID NO: 11609 - RNA, 22 nt, Artificial Sequence
  LRRK2 RNA guide
aaaugcuguauaaguguuccuu

SEQ ID NO: 11610 - RNA, 22 nt, Artificial Sequence
  LRRK2 RNA guide
aagaugcuccaaaggaacacuu

SEQ ID NO: 11611 - RNA, 22 nt, Artificial Sequence
  LRRK2 RNA guide
aagccagaaaugcuguauaagu

SEQ ID NO: 11612 - RNA, 22 nt, Artificial Sequence
  LRRK2 RNA guide
aaggaacacuuauacagcauuu

SEQ ID NO: 11613 - RNA, 22 nt, Artificial Sequence
  LRRK2 RNA guide
aaguguuccuuuggagcaucuu

SEQ ID NO: 11614 - RNA, 22 nt, Artificial Sequence
  LRRK2 RNA guide
aaugcuguauaaguguuccuuu

SEQ ID NO: 11615 - RNA, 22 nt, Artificial Sequence
  LRRK2 RNA guide
agaaaugcuguauaaguguucc

SEQ ID NO: 11616 - RNA, 22 nt, Artificial Sequence
  LRRK2 RNA guide
agaugcuccaaaggaacacuua

SEQ ID NO: 11617 - RNA, 22 nt, Artificial Sequence
  LRRK2 RNA guide
agccagaaaugcuguauaagug

SEQ ID NO: 11618 - RNA, 22 nt, Artificial Sequence
  LRRK2 RNA guide
agcuuuucaagaugcuccaaag

SEQ ID NO: 11619 - RNA, 22 nt, Artificial Sequence
  LRRK2 RNA guide
aggaacacuuauacagcauuuc

SEQ ID NO: 11620 - RNA, 22 nt, Artificial Sequence
  LRRK2 RNA guide
aguguuccuuuggagcaucuug

SEQ ID NO: 11621 - RNA, 22 nt, Artificial Sequence
  LRRK2 RNA guide
auaaguguuccuuuggagcauc

SEQ ID NO: 11622 - RNA, 22 nt, Artificial Sequence
  LRRK2 RNA guide
augcuccaaaggaacacuuaua

SEQ ID NO: 11623 - RNA, 22 nt, Artificial Sequence
  LRRK2 RNA guide
augcuguauaaguguuccuuug

SEQ ID NO: 11624 - RNA, 22 nt, Artificial Sequence
  LRRK2 RNA guide
caaaggaacacuuauacagcau

SEQ ID NO: 11625 - RNA, 22 nt, Artificial Sequence
  LRRK2 RNA guide
caagaugcuccaaaggaacacu

SEQ ID NO: 11626 - RNA, 22 nt, Artificial Sequence
  LRRK2 RNA guide
cagaaaugcuguauaaguguuc

SEQ ID NO: 11627 - RNA, 22 nt, Artificial Sequence
  LRRK2 RNA guide
cagcuuuucaagaugcuccaaa

SEQ ID NO: 11628 - RNA, 22 nt, Artificial Sequence
  LRRK2 RNA guide
ccaaaggaacacuuauacagca

SEQ ID NO: 11629 - RNA, 22 nt, Artificial Sequence
  LRRK2 RNA guide
ccagaaaugcuguauaaguguu

SEQ ID NO: 11630 - RNA, 22 nt, Artificial Sequence
  LRRK2 RNA guide
ccagcuuuucaagaugcuccaa

SEQ ID NO: 11631 - RNA, 22 nt, Artificial Sequence
  LRRK2 RNA guide
ccuuuggagcaucuugaaaagc

SEQ ID NO: 11632 - RNA, 22 nt, Artificial Sequence
  LRRK2 RNA guide
cuccaaaggaacacuuauacag

SEQ ID NO: 11633 - RNA, 22 nt, Artificial Sequence
  LRRK2 RNA guide
cuccagcuuuucaagaugcucc

SEQ ID NO: 11634 - RNA, 22 nt, Artificial Sequence
  LRRK2 RNA guide
cuguauaaguguuccuuuggag

SEQ ID NO: 11635 - RNA, 22 nt, Artificial Sequence
  LRRK2 RNA guide
cuuuucaagaugcuccaaagga

SEQ ID NO: 11636 - RNA, 22 nt, Artificial Sequence
  LRRK2 RNA guide
gaaaugcuguauaaguguuccu

SEQ ID NO: 11637 - RNA, 22 nt, Artificial Sequence
  LRRK2 RNA guide
gaugcuccaaaggaacacuuau

SEQ ID NO: 11638 - RNA, 22 nt, Artificial Sequence
  LRRK2 RNA guide
gccagaaaugcuguauaagugu

SEQ ID NO: 11639 - RNA, 22 nt, Artificial Sequence
  LRRK2 RNA guide
gcuccaaaggaacacuuauaca

SEQ ID NO: 11640 - RNA, 22 nt, Artificial Sequence
  LRRK2 RNA guide
gcuccagcuuuucaagaugcuc

SEQ ID NO: 11641 - RNA, 22 nt, Artificial Sequence
  LRRK2 RNA guide
gcuguauaaguguuccuuugga

SEQ ID NO: 11642 - RNA, 22 nt, Artificial Sequence
  LRRK2 RNA guide
gcuuuucaagaugcuccaaagg

SEQ ID NO: 11643 - RNA, 22 nt, Artificial Sequence
  LRRK2 RNA guide
guauaaguguuccuuuggagca

SEQ ID NO: 11644 - RNA, 22 nt, Artificial Sequence
  LRRK2 RNA guide
guguuccuuuggagcaucuuga

SEQ ID NO: 11645 - RNA, 22 nt, Artificial Sequence
  LRRK2 RNA guide
guuccuuuggagcaucuugaaa

SEQ ID NO: 11646 - RNA, 22 nt, Artificial Sequence
  LRRK2 RNA guide
uaaguguuccuuuggagcaucu

SEQ ID NO: 11647 - RNA, 22 nt, Artificial Sequence
  LRRK2 RNA guide
uauaaguguuccuuuggagcau

SEQ ID NO: 11648 - RNA, 22 nt, Artificial Sequence
  LRRK2 RNA guide
ucaagaugcuccaaaggaacac

SEQ ID NO: 11649 - RNA, 22 nt, Artificial Sequence
  LRRK2 RNA guide
uccaaaggaacacuuauacagc

SEQ ID NO: 11650 - RNA, 22 nt, Artificial Sequence
  LRRK2 RNA guide
uccagcuuuucaagaugcucca

SEQ ID NO: 11651 - RNA, 22 nt, Artificial Sequence
  LRRK2 RNA guide
uccuuuggagcaucuugaaaag

SEQ ID NO: 11652 - RNA, 22 nt, Artificial Sequence
  LRRK2 RNA guide
ugcuccaaaggaacacuuauac

SEQ ID NO: 11653 - RNA, 22 nt, Artificial Sequence
  LRRK2 RNA guide
ugcuguauaaguguuccuuugg

SEQ ID NO: 11654 - RNA, 22 nt, Artificial Sequence
  LRRK2 RNA guide
uguauaaguguuccuuuggagc

SEQ ID NO: 11655 - RNA, 22 nt, Artificial Sequence
  LRRK2 RNA guide
uguuccuuuggagcaucuugaa

SEQ ID NO: 11656 - RNA, 22 nt, Artificial Sequence
  LRRK2 RNA guide
uucaagaugcuccaaaggaaca

SEQ ID NO: 11657 - RNA, 22 nt, Artificial Sequence
  LRRK2 RNA guide
uuccuuuggagcaucuugaaaa

SEQ ID NO: 11658 - RNA, 22 nt, Artificial Sequence
  LRRK2 RNA guide
uuucaagaugcuccaaaggaac

SEQ ID NO: 11659 - RNA, 22 nt, Artificial Sequence
  LRRK2 RNA guide
uuuucaagaugcuccaaaggaa

SEQ ID NO: 11660 - RNA, 20 nt, Artificial Sequence
  LRRK2 RNA guide
aagaugauccaaaugaacac

SEQ ID NO: 11661 - RNA, 20 nt, Artificial Sequence
  LRRK2 RNA guide
aagcuccagcuuuucaagau

SEQ ID NO: 11662 - RNA, 20 nt, Artificial Sequence
  LRRK2 RNA guide
aaguguucauuuggaucauc

SEQ ID NO: 11663 - RNA, 20 nt, Artificial Sequence
  LRRK2 RNA guide
agaugauccaaaugaacacu

SEQ ID NO: 11664 - RNA, 20 nt, Artificial Sequence
  LRRK2 RNA guide
agcuccagcuuuucaagaug

SEQ ID NO: 11665 - RNA, 20 nt, Artificial Sequence
  LRRK2 RNA guide
agcuuuucaagaugauccaa

SEQ ID NO: 11666 - RNA, 20 nt, Artificial Sequence
  LRRK2 RNA guide
aguguucauuuggaucaucu

SEQ ID NO: 11667 - RNA, 20 nt, Artificial Sequence
  LRRK2 RNA guide
auaaguguucauuuggauca

SEQ ID NO: 11668 - RNA, 20 nt, Artificial Sequence
  LRRK2 RNA guide
aucaucuugaaaagcuggag

SEQ ID NO: 11669 - RNA, 20 nt, Artificial Sequence
  LRRK2 RNA guide
augauccaaaugaacacuua

SEQ ID NO: 11670 - RNA, 20 nt, Artificial Sequence
  LRRK2 RNA guide
augcuguauaaguguucauu

SEQ ID NO: 11671 - RNA, 20 nt, Artificial Sequence
  LRRK2 RNA guide
auuuggaucaucuugaaaag

SEQ ID NO: 11672 - RNA, 20 nt, Artificial Sequence
  LRRK2 RNA guide
caagaugauccaaaugaaca

SEQ ID NO: 11673 - RNA, 20 nt, Artificial Sequence
  LRRK2 RNA guide
cagcuuuucaagaugaucca

SEQ ID NO: 11674 - RNA, 20 nt, Artificial Sequence
  LRRK2 RNA guide
cauuuggaucaucuugaaaa

SEQ ID NO: 11675 - RNA, 20 nt, Artificial Sequence
  LRRK2 RNA guide
ccagcuuuucaagaugaucc

SEQ ID NO: 11676 - RNA, 20 nt, Artificial Sequence
  LRRK2 RNA guide
cuccagcuuuucaagaugau

SEQ ID NO: 11677 - RNA, 20 nt, Artificial Sequence
  LRRK2 RNA guide
cuguauaaguguucauuugg

SEQ ID NO: 11678 - RNA, 20 nt, Artificial Sequence
  LRRK2 RNA guide
cuuuucaagaugauccaaau

SEQ ID NO: 11679 - RNA, 20 nt, Artificial Sequence
  LRRK2 RNA guide
gaagcuccagcuuuucaaga

SEQ ID NO: 11680 - RNA, 20 nt, Artificial Sequence
  LRRK2 RNA guide
gaucaucuugaaaagcugga

SEQ ID NO: 11681 - RNA, 20 nt, Artificial Sequence
  LRRK2 RNA guide
gauccaaaugaacacuuaua

SEQ ID NO: 11682 - RNA, 20 nt, Artificial Sequence
  LRRK2 RNA guide
gaugauccaaaugaacacuu

SEQ ID NO: 11683 - RNA, 20 nt, Artificial Sequence
  LRRK2 RNA guide
gcuccagcuuuucaagauga

SEQ ID NO: 11684 - RNA, 20 nt, Artificial Sequence
  LRRK2 RNA guide
gcuguauaaguguucauuug

SEQ ID NO: 11685 - RNA, 20 nt, Artificial Sequence
  LRRK2 RNA guide
gcuuuucaagaugauccaaa

SEQ ID NO: 11686 - RNA, 20 nt, Artificial Sequence
  LRRK2 RNA guide
ggaucaucuugaaaagcugg

SEQ ID NO: 11687 - RNA, 20 nt, Artificial Sequence
  LRRK2 RNA guide
guauaaguguucauuuggau

SEQ ID NO: 11688 - RNA, 20 nt, Artificial Sequence
  LRRK2 RNA guide
gugaagcuccagcuuuucaa

SEQ ID NO: 11689 - RNA, 20 nt, Artificial Sequence
  LRRK2 RNA guide
guguucauuuggaucaucuu

SEQ ID NO: 11690 - RNA, 20 nt, Artificial Sequence
  LRRK2 RNA guide
guucauuuggaucaucuuga

SEQ ID NO: 11691 - RNA, 20 nt, Artificial Sequence
  LRRK2 RNA guide
uaaguguucauuuggaucau

SEQ ID NO: 11692 - RNA, 20 nt, Artificial Sequence
  LRRK2 RNA guide
uauaaguguucauuuggauc

SEQ ID NO: 11693 - RNA, 20 nt, Artificial Sequence
  LRRK2 RNA guide
ucaagaugauccaaaugaac

SEQ ID NO: 11694 - RNA, 20 nt, Artificial Sequence
  LRRK2 RNA guide
ucauuuggaucaucuugaaa

SEQ ID NO: 11695 - RNA, 20 nt, Artificial Sequence
  LRRK2 RNA guide
uccagcuuuucaagaugauc

SEQ ID NO: 11696 - RNA, 20 nt, Artificial Sequence
  LRRK2 RNA guide
ugauccaaaugaacacuuau

SEQ ID NO: 11697 - RNA, 20 nt, Artificial Sequence
  LRRK2 RNA guide
ugcuguauaaguguucauuu

SEQ ID NO: 11698 - RNA, 20 nt, Artificial Sequence
  LRRK2 RNA guide
uggaucaucuugaaaagcug

SEQ ID NO: 11699 - RNA, 20 nt, Artificial Sequence
  LRRK2 RNA guide
uguauaaguguucauuugga

SEQ ID NO: 11700 - RNA, 20 nt, Artificial Sequence
  LRRK2 RNA guide
uguucauuuggaucaucuug

SEQ ID NO: 11701 - RNA, 20 nt, Artificial Sequence
  LRRK2 RNA guide
uucaagaugauccaaaugaa

SEQ ID NO: 11702 - RNA, 20 nt, Artificial Sequence
  LRRK2 RNA guide
uucauuuggaucaucuugaa

SEQ ID NO: 11703 - RNA, 20 nt, Artificial Sequence
  LRRK2 RNA guide
uuggaucaucuugaaaagcu

SEQ ID NO: 11704 - RNA, 20 nt, Artificial Sequence
  LRRK2 RNA guide
uuucaagaugauccaaauga

SEQ ID NO: 11705 - RNA, 20 nt, Artificial Sequence
  LRRK2 RNA guide
uuuggaucaucuugaaaagc

SEQ ID NO: 11706 - RNA, 20 nt, Artificial Sequence
  LRRK2 RNA guide
uuuucaagaugauccaaaug

SEQ ID NO: 11707 - RNA, 21 nt, Artificial Sequence
  LRRK2 RNA guide
aagaugauccaaaugaacacu

SEQ ID NO: 11708 - RNA, 21 nt, Artificial Sequence
  LRRK2 RNA guide
aagcuccagcuuuucaagaug

SEQ ID NO: 11709 - RNA, 21 nt, Artificial Sequence
  LRRK2 RNA guide
aaguguucauuuggaucaucu

SEQ ID NO: 11710 - RNA, 21 nt, Artificial Sequence
  LRRK2 RNA guide
agaugauccaaaugaacacuu

SEQ ID NO: 11711 - RNA, 21 nt, Artificial Sequence
  LRRK2 RNA guide
agcuccagcuuuucaagauga

SEQ ID NO: 11712 - RNA, 21 nt, Artificial Sequence
  LRRK2 RNA guide
agcuuuucaagaugauccaaa

SEQ ID NO: 11713 - RNA, 21 nt, Artificial Sequence
  LRRK2 RNA guide
aguguucauuuggaucaucuu

SEQ ID NO: 11714 - RNA, 21 nt, Artificial Sequence
  LRRK2 RNA guide
aucaucuugaaaagcuggagc

SEQ ID NO: 11715 - RNA, 21 nt, Artificial Sequence
  LRRK2 RNA guide
auuuggaucaucuugaaaagc

SEQ ID NO: 11716 - RNA, 21 nt, Artificial Sequence
  LRRK2 RNA guide
caagaugauccaaaugaacac

SEQ ID NO: 11717 - RNA, 21 nt, Artificial Sequence
  LRRK2 RNA guide
cagcuuuucaagaugauccaa

SEQ ID NO: 11718 - RNA, 21 nt, Artificial Sequence
  LRRK2 RNA guide
cauuuggaucaucuugaaaag

SEQ ID NO: 11719 - RNA, 21 nt, Artificial Sequence
  LRRK2 RNA guide
ccagcuuuucaagaugaucca

SEQ ID NO: 11720 - RNA, 21 nt, Artificial Sequence
  LRRK2 RNA guide
cuccagcuuuucaagaugauc

SEQ ID NO: 11721 - RNA, 21 nt, Artificial Sequence
  LRRK2 RNA guide
cuguauaaguguucauuugga

SEQ ID NO: 11722 - RNA, 21 nt, Artificial Sequence
  LRRK2 RNA guide
cuuuucaagaugauccaaaug

SEQ ID NO: 11723 - RNA, 21 nt, Artificial Sequence
  LRRK2 RNA guide
gaagcuccagcuuuucaagau

SEQ ID NO: 11724 - RNA, 21 nt, Artificial Sequence
  LRRK2 RNA guide
gaucaucuugaaaagcuggag

SEQ ID NO: 11725 - RNA, 21 nt, Artificial Sequence
  LRRK2 RNA guide
gauccaaaugaacacuuauac

SEQ ID NO: 11726 - RNA, 21 nt, Artificial Sequence
  LRRK2 RNA guide
gaugauccaaaugaacacuua

SEQ ID NO: 11727 - RNA, 21 nt, Artificial Sequence
  LRRK2 RNA guide
gcuccagcuuuucaagaugau

SEQ ID NO: 11728 - RNA, 21 nt, Artificial Sequence
  LRRK2 RNA guide
gcuguauaaguguucauuugg

SEQ ID NO: 11729 - RNA, 21 nt, Artificial Sequence
  LRRK2 RNA guide
gcuuuucaagaugauccaaau

SEQ ID NO: 11730 - RNA, 21 nt, Artificial Sequence
  LRRK2 RNA guide
ggaucaucuugaaaagcugga

SEQ ID NO: 11731 - RNA, 21 nt, Artificial Sequence
  LRRK2 RNA guide
ggugaagcuccagcuuuucaa

SEQ ID NO: 11732 - RNA, 21 nt, Artificial Sequence
  LRRK2 RNA guide
guauaaguguucauuuggauc

SEQ ID NO: 11733 - RNA, 21 nt, Artificial Sequence
  LRRK2 RNA guide
gugaagcuccagcuuuucaag

SEQ ID NO: 11734 - RNA, 21 nt, Artificial Sequence
  LRRK2 RNA guide
guguucauuuggaucaucuug

SEQ ID NO: 11735 - RNA, 21 nt, Artificial Sequence
  LRRK2 RNA guide
guucauuuggaucaucuugaa

SEQ ID NO: 11736 - RNA, 21 nt, Artificial Sequence
  LRRK2 RNA guide
uaaguguucauuuggaucauc

SEQ ID NO: 11737 - RNA, 21 nt, Artificial Sequence
  LRRK2 RNA guide
ucaagaugauccaaaugaaca

SEQ ID NO: 11738 - RNA, 21 nt, Artificial Sequence
  LRRK2 RNA guide
uccagcuuuucaagaugaucc

SEQ ID NO: 11739 - RNA, 21 nt, Artificial Sequence
  LRRK2 RNA guide
ugaagcuccagcuuuucaaga

SEQ ID NO: 11740 - RNA, 21 nt, Artificial Sequence
  LRRK2 RNA guide
ugcuguauaaguguucauuug

SEQ ID NO: 11741 - RNA, 21 nt, Artificial Sequence
  LRRK2 RNA guide
uggaucaucuugaaaagcugg

SEQ ID NO: 11742 - RNA, 21 nt, Artificial Sequence
  LRRK2 RNA guide
uguucauuuggaucaucuuga

SEQ ID NO: 11743 - RNA, 21 nt, Artificial Sequence
  LRRK2 RNA guide
uucaagaugauccaaaugaac

SEQ ID NO: 11744 - RNA, 21 nt, Artificial Sequence
  LRRK2 RNA guide
uuggaucaucuugaaaagcug

SEQ ID NO: 11745 - RNA, 21 nt, Artificial Sequence
  LRRK2 RNA guide
uuuggaucaucuugaaaagcu

SEQ ID NO: 11746 - RNA, 22 nt, Artificial Sequence
  LRRK2 RNA guide
aagaugauccaaaugaacacuu

SEQ ID NO: 11747 - RNA, 22 nt, Artificial Sequence
  LRRK2 RNA guide
aagcuccagcuuuucaagauga

SEQ ID NO: 11748 - RNA, 22 nt, Artificial Sequence
  LRRK2 RNA guide
aaguguucauuuggaucaucuu

SEQ ID NO: 11749 - RNA, 22 nt, Artificial Sequence
  LRRK2 RNA guide
agaugauccaaaugaacacuua

SEQ ID NO: 11750 - RNA, 22 nt, Artificial Sequence
  LRRK2 RNA guide
agcuccagcuuuucaagaugau

SEQ ID NO: 11751 - RNA, 22 nt, Artificial Sequence
  LRRK2 RNA guide
agcuuuucaagaugauccaaau

SEQ ID NO: 11752 - RNA, 22 nt, Artificial Sequence
  LRRK2 RNA guide
aguguucauuuggaucaucuug

SEQ ID NO: 11753 - RNA, 22 nt, Artificial Sequence
  LRRK2 RNA guide
auaaguguucauuuggaucauc

SEQ ID NO: 11754 - RNA, 22 nt, Artificial Sequence
  LRRK2 RNA guide
aucaucuugaaaagcuggagcu

SEQ ID NO: 11755 - RNA, 22 nt, Artificial Sequence
  LRRK2 RNA guide
augcuguauaaguguucauuug

SEQ ID NO: 11756 - RNA, 22 nt, Artificial Sequence
  LRRK2 RNA guide
auuuggaucaucuugaaaagcu

SEQ ID NO: 11757 - RNA, 22 nt, Artificial Sequence
  LRRK2 RNA guide
caagaugauccaaaugaacacu

SEQ ID NO: 11758 - RNA, 22 nt, Artificial Sequence
  LRRK2 RNA guide
cagcuuuucaagaugauccaaa

SEQ ID NO: 11759 - RNA, 22 nt, Artificial Sequence
  LRRK2 RNA guide
cauuuggaucaucuugaaaagc

SEQ ID NO: 11760 - RNA, 22 nt, Artificial Sequence
  LRRK2 RNA guide
ccagcuuuucaagaugauccaa

SEQ ID NO: 11761 - RNA, 22 nt, Artificial Sequence
  LRRK2 RNA guide
cuccagcuuuucaagaugaucc

SEQ ID NO: 11762 - RNA, 22 nt, Artificial Sequence
  LRRK2 RNA guide
cuguauaaguguucauuuggau

SEQ ID NO: 11763 - RNA, 22 nt, Artificial Sequence
  LRRK2 RNA guide
cuuuucaagaugauccaaauga

SEQ ID NO: 11764 - RNA, 22 nt, Artificial Sequence
  LRRK2 RNA guide
gaagcuccagcuuuucaagaug

SEQ ID NO: 11765 - RNA, 22 nt, Artificial Sequence
  LRRK2 RNA guide
gaucaucuugaaaagcuggagc

SEQ ID NO: 11766 - RNA, 22 nt, Artificial Sequence
  LRRK2 RNA guide
gauccaaaugaacacuuauaca

SEQ ID NO: 11767 - RNA, 22 nt, Artificial Sequence
  LRRK2 RNA guide
gaugauccaaaugaacacuuau

SEQ ID NO: 11768 - RNA, 22 nt, Artificial Sequence
  LRRK2 RNA guide
gcuccagcuuuucaagaugauc

SEQ ID NO: 11769 - RNA, 22 nt, Artificial Sequence
  LRRK2 RNA guide
gcuguauaaguguucauuugga

SEQ ID NO: 11770 - RNA, 22 nt, Artificial Sequence
  LRRK2 RNA guide
gcuuuucaagaugauccaaaug

SEQ ID NO: 11771 - RNA, 22 nt, Artificial Sequence
  LRRK2 RNA guide
ggaucaucuugaaaagcuggag

SEQ ID NO: 11772 - RNA, 22 nt, Artificial Sequence
  LRRK2 RNA guide
ggugaagcuccagcuuuucaag

SEQ ID NO: 11773 - RNA, 22 nt, Artificial Sequence
  LRRK2 RNA guide
guauaaguguucauuuggauca

SEQ ID NO: 11774 - RNA, 22 nt, Artificial Sequence
  LRRK2 RNA guide
gugaagcuccagcuuuucaaga

SEQ ID NO: 11775 - RNA, 22 nt, Artificial Sequence
  LRRK2 RNA guide
guguucauuuggaucaucuuga

SEQ ID NO: 11776 - RNA, 22 nt, Artificial Sequence
  LRRK2 RNA guide
guucauuuggaucaucuugaaa

SEQ ID NO: 11777 - RNA, 22 nt, Artificial Sequence
  LRRK2 RNA guide
uaaguguucauuuggaucaucu

SEQ ID NO: 11778 - RNA, 22 nt, Artificial Sequence
  LRRK2 RNA guide
ucaagaugauccaaaugaacac

SEQ ID NO: 11779 - RNA, 22 nt, Artificial Sequence
  LRRK2 RNA guide
ucauuuggaucaucuugaaaag

SEQ ID NO: 11780 - RNA, 22 nt, Artificial Sequence
  LRRK2 RNA guide
uccagcuuuucaagaugaucca

SEQ ID NO: 11781 - RNA, 22 nt, Artificial Sequence
  LRRK2 RNA guide
ugaagcuccagcuuuucaagau

SEQ ID NO: 11782 - RNA, 22 nt, Artificial Sequence
  LRRK2 RNA guide
ugauccaaaugaacacuuauac

SEQ ID NO: 11783 - RNA, 22 nt, Artificial Sequence
  LRRK2 RNA guide
ugcuguauaaguguucauuugg

SEQ ID NO: 11784 - RNA, 22 nt, Artificial Sequence
  LRRK2 RNA guide
uggaucaucuugaaaagcugga

SEQ ID NO: 11785 - RNA, 22 nt, Artificial Sequence
  LRRK2 RNA guide
uggugaagcuccagcuuuucaa

SEQ ID NO: 11786 - RNA, 22 nt, Artificial Sequence
  LRRK2 RNA guide
uguauaaguguucauuuggauc

SEQ ID NO: 11787 - RNA, 22 nt, Artificial Sequence
  LRRK2 RNA guide
uguucauuuggaucaucuugaa

SEQ ID NO: 11788 - RNA, 22 nt, Artificial Sequence
  LRRK2 RNA guide
uucaagaugauccaaaugaaca

SEQ ID NO: 11789 - RNA, 22 nt, Artificial Sequence
  LRRK2 RNA guide
uuggaucaucuugaaaagcugg

SEQ ID NO: 11790 - RNA, 22 nt, Artificial Sequence
  LRRK2 RNA guide
uuucaagaugauccaaaugaac

SEQ ID NO: 11791 - RNA, 22 nt, Artificial Sequence
  LRRK2 RNA guide
uuuggaucaucuugaaaagcug

SEQ ID NO: 11792 - RNA, 20 nt, Artificial Sequence
  LRRK2 RNA guide
aaaaugaguuguauugcuga

SEQ ID NO: 11793 - RNA, 20 nt, Artificial Sequence
  LRRK2 RNA guide
aaaugaguuguauugcugau

SEQ ID NO: 11794 - RNA, 20 nt, Artificial Sequence
  LRRK2 RNA guide
aagaucagcaauacaacuca

SEQ ID NO: 11795 - RNA, 20 nt, Artificial Sequence
  LRRK2 RNA guide
aaugaguuguauugcugauc

SEQ ID NO: 11796 - RNA, 20 nt, Artificial Sequence
  LRRK2 RNA guide
acaucaagaucagcaauaca

SEQ ID NO: 11797 - RNA, 20 nt, Artificial Sequence
  LRRK2 RNA guide
agacaucaagaucagcaaua

SEQ ID NO: 11798 - RNA, 20 nt, Artificial Sequence
  LRRK2 RNA guide
agagacaucaagaucagcaa

SEQ ID NO: 11799 - RNA, 20 nt, Artificial Sequence
  LRRK2 RNA guide
agaucagcaauacaacucau

SEQ ID NO: 11800 - RNA, 20 nt, Artificial Sequence
  LRRK2 RNA guide
aguuguauugcugaucuuga

SEQ ID NO: 11801 - RNA, 20 nt, Artificial Sequence
  LRRK2 RNA guide
aucaagaucagcaauacaac

SEQ ID NO: 11802 - RNA, 20 nt, Artificial Sequence
  LRRK2 RNA guide
aucagcaauacaacucauuu

SEQ ID NO: 11803 - RNA, 20 nt, Artificial Sequence
  LRRK2 RNA guide
augaguuguauugcugaucu

SEQ ID NO: 11804 - RNA, 20 nt, Artificial Sequence
  LRRK2 RNA guide
auugcugaucuugaugucuc

SEQ ID NO: 11805 - RNA, 20 nt, Artificial Sequence
  LRRK2 RNA guide
auuucgagagacaucaagau

SEQ ID NO: 11806 - RNA, 20 nt, Artificial Sequence
  LRRK2 RNA guide
caagaucagcaauacaacuc

SEQ ID NO: 11807 - RNA, 20 nt, Artificial Sequence
  LRRK2 RNA guide
caucaagaucagcaauacaa

SEQ ID NO: 11808 - RNA, 20 nt, Artificial Sequence
  LRRK2 RNA guide
cauuucgagagacaucaaga

SEQ ID NO: 11809 - RNA, 20 nt, Artificial Sequence
  LRRK2 RNA guide
cgagagacaucaagaucagc

SEQ ID NO: 11810 - RNA, 20 nt, Artificial Sequence
  LRRK2 RNA guide
cugaucuugaugucucucga

SEQ ID NO: 11811 - RNA, 20 nt, Artificial Sequence
  LRRK2 RNA guide
gaaaaugaguuguauugcug

SEQ ID NO: 11812 - RNA, 20 nt, Artificial Sequence
  LRRK2 RNA guide
gacaucaagaucagcaauac

SEQ ID NO: 11813 - RNA, 20 nt, Artificial Sequence
  LRRK2 RNA guide
gagacaucaagaucagcaau

SEQ ID NO: 11814 - RNA, 20 nt, Artificial Sequence
  LRRK2 RNA guide
gagagacaucaagaucagca

SEQ ID NO: 11815 - RNA, 20 nt, Artificial Sequence
  LRRK2 RNA guide
gaguuguauugcugaucuug

SEQ ID NO: 11816 - RNA, 20 nt, Artificial Sequence
  LRRK2 RNA guide
gaucagcaauacaacucauu

SEQ ID NO: 11817 - RNA, 20 nt, Artificial Sequence
  LRRK2 RNA guide
gcugaucuugaugucucucg

SEQ ID NO: 11818 - RNA, 20 nt, Artificial Sequence
  LRRK2 RNA guide
guauugcugaucuugauguc

SEQ ID NO: 11819 - RNA, 20 nt, Artificial Sequence
  LRRK2 RNA guide
guugaaaaugaguuguauug

SEQ ID NO: 11820 - RNA, 20 nt, Artificial Sequence
  LRRK2 RNA guide
guuguauugcugaucuugau

SEQ ID NO: 11821 - RNA, 20 nt, Artificial Sequence
  LRRK2 RNA guide
uauugcugaucuugaugucu

SEQ ID NO: 11822 - RNA, 20 nt, Artificial Sequence
  LRRK2 RNA guide
ucaagaucagcaauacaacu

SEQ ID NO: 11823 - RNA, 20 nt, Artificial Sequence
  LRRK2 RNA guide
ucagcaauacaacucauuuu

SEQ ID NO: 11824 - RNA, 20 nt, Artificial Sequence
  LRRK2 RNA guide
ucauuucgagagacaucaag

SEQ ID NO: 11825 - RNA, 20 nt, Artificial Sequence
  LRRK2 RNA guide
ucgagagacaucaagaucag

SEQ ID NO: 11826 - RNA, 20 nt, Artificial Sequence
  LRRK2 RNA guide
ugaaaaugaguuguauugcu

SEQ ID NO: 11827 - RNA, 20 nt, Artificial Sequence
  LRRK2 RNA guide
ugaguuguauugcugaucuu

SEQ ID NO: 11828 - RNA, 20 nt, Artificial Sequence
  LRRK2 RNA guide
ugaucuugaugucucucgaa

SEQ ID NO: 11829 - RNA, 20 nt, Artificial Sequence
  LRRK2 RNA guide
ugcugaucuugaugucucuc

SEQ ID NO: 11830 - RNA, 20 nt, Artificial Sequence
  LRRK2 RNA guide
uguauugcugaucuugaugu

SEQ ID NO: 11831 - RNA, 20 nt, Artificial Sequence
  LRRK2 RNA guide
ugucauuucgagagacauca

SEQ ID NO: 11832 - RNA, 20 nt, Artificial Sequence
  LRRK2 RNA guide
uucgagagacaucaagauca

SEQ ID NO: 11833 - RNA, 20 nt, Artificial Sequence
  LRRK2 RNA guide
uugaaaaugaguuguauugc

SEQ ID NO: 11834 - RNA, 20 nt, Artificial Sequence
  LRRK2 RNA guide
uugcugaucuugaugucucu

SEQ ID NO: 11835 - RNA, 20 nt, Artificial Sequence
  LRRK2 RNA guide
uuguauugcugaucuugaug

SEQ ID NO: 11836 - RNA, 20 nt, Artificial Sequence
  LRRK2 RNA guide
uuucgagagacaucaagauc

SEQ ID NO: 11837 - RNA, 21 nt, Artificial Sequence
  LRRK2 RNA guide
aaaugaguuguauugcugauc

SEQ ID NO: 11838 - RNA, 21 nt, Artificial Sequence
  LRRK2 RNA guide
aagaucagcaauacaacucau

SEQ ID NO: 11839 - RNA, 21 nt, Artificial Sequence
  LRRK2 RNA guide
aaugaguuguauugcugaucu

SEQ ID NO: 11840 - RNA, 21 nt, Artificial Sequence
  LRRK2 RNA guide
acaucaagaucagcaauacaa

SEQ ID NO: 11841 - RNA, 21 nt, Artificial Sequence
  LRRK2 RNA guide
agacaucaagaucagcaauac

SEQ ID NO: 11842 - RNA, 21 nt, Artificial Sequence
  LRRK2 RNA guide
agagacaucaagaucagcaau

SEQ ID NO: 11843 - RNA, 21 nt, Artificial Sequence
  LRRK2 RNA guide
agaucagcaauacaacucauu

SEQ ID NO: 11844 - RNA, 21 nt, Artificial Sequence
  LRRK2 RNA guide
aguuguauugcugaucuugau

SEQ ID NO: 11845 - RNA, 21 nt, Artificial Sequence
  LRRK2 RNA guide
aucaagaucagcaauacaacu

SEQ ID NO: 11846 - RNA, 21 nt, Artificial Sequence
  LRRK2 RNA guide
augaguuguauugcugaucuu

SEQ ID NO: 11847 - RNA, 21 nt, Artificial Sequence
  LRRK2 RNA guide
augucauuucgagagacauca

SEQ ID NO: 11848 - RNA, 21 nt, Artificial Sequence
  LRRK2 RNA guide
auugcugaucuugaugucucu

SEQ ID NO: 11849 - RNA, 21 nt, Artificial Sequence
  LRRK2 RNA guide
auuucgagagacaucaagauc

SEQ ID NO: 11850 - RNA, 21 nt, Artificial Sequence
  LRRK2 RNA guide
caagaucagcaauacaacuca

SEQ ID NO: 11851 - RNA, 21 nt, Artificial Sequence
  LRRK2 RNA guide
caucaagaucagcaauacaac

SEQ ID NO: 11852 - RNA, 21 nt, Artificial Sequence
  LRRK2 RNA guide
cauuucgagagacaucaagau

SEQ ID NO: 11853 - RNA, 21 nt, Artificial Sequence
  LRRK2 RNA guide
cgagagacaucaagaucagca

SEQ ID NO: 11854 - RNA, 21 nt, Artificial Sequence
  LRRK2 RNA guide
cugaucuugaugucucucgaa

SEQ ID NO: 11855 - RNA, 21 nt, Artificial Sequence
  LRRK2 RNA guide
gaaaaugaguuguauugcuga

SEQ ID NO: 11856 - RNA, 21 nt, Artificial Sequence
  LRRK2 RNA guide
gacaucaagaucagcaauaca

SEQ ID NO: 11857 - RNA, 21 nt, Artificial Sequence
  LRRK2 RNA guide
gagacaucaagaucagcaaua

SEQ ID NO: 11858 - RNA, 21 nt, Artificial Sequence
  LRRK2 RNA guide
gagagacaucaagaucagcaa

SEQ ID NO: 11859 - RNA, 21 nt, Artificial Sequence
  LRRK2 RNA guide
gaguuguauugcugaucuuga

SEQ ID NO: 11860 - RNA, 21 nt, Artificial Sequence
  LRRK2 RNA guide
gaucagcaauacaacucauuu

SEQ ID NO: 11861 - RNA, 21 nt, Artificial Sequence
  LRRK2 RNA guide
gcugaucuugaugucucucga

SEQ ID NO: 11862 - RNA, 21 nt, Artificial Sequence
  LRRK2 RNA guide
guauugcugaucuugaugucu

SEQ ID NO: 11863 - RNA, 21 nt, Artificial Sequence
  LRRK2 RNA guide
gucauuucgagagacaucaag

SEQ ID NO: 11864 - RNA, 21 nt, Artificial Sequence
  LRRK2 RNA guide
guugaaaaugaguuguauugc

SEQ ID NO: 11865 - RNA, 21 nt, Artificial Sequence
  LRRK2 RNA guide
guuguauugcugaucuugaug

SEQ ID NO: 11866 - RNA, 21 nt, Artificial Sequence
  LRRK2 RNA guide
uauugcugaucuugaugucuc

SEQ ID NO: 11867 - RNA, 21 nt, Artificial Sequence
  LRRK2 RNA guide
ucaagaucagcaauacaacuc

SEQ ID NO: 11868 - RNA, 21 nt, Artificial Sequence
  LRRK2 RNA guide
ucagcaauacaacucauuuuc

SEQ ID NO: 11869 - RNA, 21 nt, Artificial Sequence
  LRRK2 RNA guide
ucauuucgagagacaucaaga

SEQ ID NO: 11870 - RNA, 21 nt, Artificial Sequence
  LRRK2 RNA guide
ucgagagacaucaagaucagc

SEQ ID NO: 11871 - RNA, 21 nt, Artificial Sequence
  LRRK2 RNA guide
ugaaaaugaguuguauugcug

SEQ ID NO: 11872 - RNA, 21 nt, Artificial Sequence
  LRRK2 RNA guide
ugaguuguauugcugaucuug

SEQ ID NO: 11873 - RNA, 21 nt, Artificial Sequence
  LRRK2 RNA guide
ugaucuugaugucucucgaaa

SEQ ID NO: 11874 - RNA, 21 nt, Artificial Sequence
  LRRK2 RNA guide
ugcugaucuugaugucucucg

SEQ ID NO: 11875 - RNA, 21 nt, Artificial Sequence
  LRRK2 RNA guide
uguauugcugaucuugauguc

SEQ ID NO: 11876 - RNA, 21 nt, Artificial Sequence
  LRRK2 RNA guide
ugucauuucgagagacaucaa

SEQ ID NO: 11877 - RNA, 21 nt, Artificial Sequence
  LRRK2 RNA guide
uucgagagacaucaagaucag

SEQ ID NO: 11878 - RNA, 21 nt, Artificial Sequence
  LRRK2 RNA guide
uugcugaucuugaugucucuc

SEQ ID NO: 11879 - RNA, 21 nt, Artificial Sequence
  LRRK2 RNA guide
uuguauugcugaucuugaugu

SEQ ID NO: 11880 - RNA, 21 nt, Artificial Sequence
  LRRK2 RNA guide
uuucgagagacaucaagauca

SEQ ID NO: 11881 - RNA, 22 nt, Artificial Sequence
  LRRK2 RNA guide
aaaaugaguuguauugcugauc

SEQ ID NO: 11882 - RNA, 22 nt, Artificial Sequence
  LRRK2 RNA guide
aaaugaguuguauugcugaucu

SEQ ID NO: 11883 - RNA, 22 nt, Artificial Sequence
  LRRK2 RNA guide
aagaucagcaauacaacucauu

SEQ ID NO: 11884 - RNA, 22 nt, Artificial Sequence
  LRRK2 RNA guide
aaugaguuguauugcugaucuu

SEQ ID NO: 11885 - RNA, 22 nt, Artificial Sequence
  LRRK2 RNA guide
aaugucauuucgagagacauca

SEQ ID NO: 11886 - RNA, 22 nt, Artificial Sequence
  LRRK2 RNA guide
acaucaagaucagcaauacaac

SEQ ID NO: 11887 - RNA, 22 nt, Artificial Sequence
  LRRK2 RNA guide
agacaucaagaucagcaauaca

SEQ ID NO: 11888 - RNA, 22 nt, Artificial Sequence
  LRRK2 RNA guide
agagacaucaagaucagcaaua

SEQ ID NO: 11889 - RNA, 22 nt, Artificial Sequence
  LRRK2 RNA guide
agaucagcaauacaacucauuu

SEQ ID NO: 11890 - RNA, 22 nt, Artificial Sequence
  LRRK2 RNA guide
aguuguauugcugaucuugaug

SEQ ID NO: 11891 - RNA, 22 nt, Artificial Sequence
  LRRK2 RNA guide
aucaagaucagcaauacaacuc

SEQ ID NO: 11892 - RNA, 22 nt, Artificial Sequence
  LRRK2 RNA guide
aucagcaauacaacucauuuuc

SEQ ID NO: 11893 - RNA, 22 nt, Artificial Sequence
  LRRK2 RNA guide
augaguuguauugcugaucuug

SEQ ID NO: 11894 - RNA, 22 nt, Artificial Sequence
  LRRK2 RNA guide
augucauuucgagagacaucaa

SEQ ID NO: 11895 - RNA, 22 nt, Artificial Sequence
  LRRK2 RNA guide
auugcugaucuugaugucucuc

SEQ ID NO: 11896 - RNA, 22 nt, Artificial Sequence
  LRRK2 RNA guide
auuucgagagacaucaagauca

SEQ ID NO: 11897 - RNA, 22 nt, Artificial Sequence
  LRRK2 RNA guide
caagaucagcaauacaacucau

SEQ ID NO: 11898 - RNA, 22 nt, Artificial Sequence
  LRRK2 RNA guide
caucaagaucagcaauacaacu

SEQ ID NO: 11899 - RNA, 22 nt, Artificial Sequence
  LRRK2 RNA guide
cauuucgagagacaucaagauc

SEQ ID NO: 11900 - RNA, 22 nt, Artificial Sequence
  LRRK2 RNA guide
cgagagacaucaagaucagcaa

SEQ ID NO: 11901 - RNA, 22 nt, Artificial Sequence
  LRRK2 RNA guide
cugaucuugaugucucucgaaa

SEQ ID NO: 11902 - RNA, 22 nt, Artificial Sequence
  LRRK2 RNA guide
gaaaaugaguuguauugcugau

SEQ ID NO: 11903 - RNA, 22 nt, Artificial Sequence
  LRRK2 RNA guide
gacaucaagaucagcaauacaa

SEQ ID NO: 11904 - RNA, 22 nt, Artificial Sequence
  LRRK2 RNA guide
gagacaucaagaucagcaauac

SEQ ID NO: 11905 - RNA, 22 nt, Artificial Sequence
  LRRK2 RNA guide
gagagacaucaagaucagcaau

SEQ ID NO: 11906 - RNA, 22 nt, Artificial Sequence
  LRRK2 RNA guide
gaguuguauugcugaucuugau

SEQ ID NO: 11907 - RNA, 22 nt, Artificial Sequence
  LRRK2 RNA guide
gaucagcaauacaacucauuuu

SEQ ID NO: 11908 - RNA, 22 nt, Artificial Sequence
  LRRK2 RNA guide
gcugaucuugaugucucucgaa

SEQ ID NO: 11909 - RNA, 22 nt, Artificial Sequence
  LRRK2 RNA guide
guauugcugaucuugaugucuc

SEQ ID NO: 11910 - RNA, 22 nt, Artificial Sequence
  LRRK2 RNA guide
gucauuucgagagacaucaaga

SEQ ID NO: 11911 - RNA, 22 nt, Artificial Sequence
  LRRK2 RNA guide
guugaaaaugaguuguauugcu

SEQ ID NO: 11912 - RNA, 22 nt, Artificial Sequence
  LRRK2 RNA guide
guuguauugcugaucuugaugu

SEQ ID NO: 11913 - RNA, 22 nt, Artificial Sequence
  LRRK2 RNA guide
uauugcugaucuugaugucucu

SEQ ID NO: 11914 - RNA, 22 nt, Artificial Sequence
  LRRK2 RNA guide
ucaagaucagcaauacaacuca

SEQ ID NO: 11915 - RNA, 22 nt, Artificial Sequence
  LRRK2 RNA guide
ucagcaauacaacucauuuuca

SEQ ID NO: 11916 - RNA, 22 nt, Artificial Sequence
  LRRK2 RNA guide
ucauuucgagagacaucaagau

SEQ ID NO: 11917 - RNA, 22 nt, Artificial Sequence
  LRRK2 RNA guide
ucgagagacaucaagaucagca

SEQ ID NO: 11918 - RNA, 22 nt, Artificial Sequence
  LRRK2 RNA guide
ugaaaaugaguuguauugcuga

SEQ ID NO: 11919 - RNA, 22 nt, Artificial Sequence
  LRRK2 RNA guide
ugaguuguauugcugaucuuga

SEQ ID NO: 11920 - RNA, 22 nt, Artificial Sequence
  LRRK2 RNA guide
ugaucuugaugucucucgaaau

SEQ ID NO: 11921 - RNA, 22 nt, Artificial Sequence
  LRRK2 RNA guide
ugcugaucuugaugucucucga

SEQ ID NO: 11922 - RNA, 22 nt, Artificial Sequence
  LRRK2 RNA guide
uguauugcugaucuugaugucu

SEQ ID NO: 11923 - RNA, 22 nt, Artificial Sequence
  LRRK2 RNA guide
ugucauuucgagagacaucaag

SEQ ID NO: 11924 - RNA, 22 nt, Artificial Sequence
  LRRK2 RNA guide
uguugaaaaugaguuguauugc

SEQ ID NO: 11925 - RNA, 22 nt, Artificial Sequence
  LRRK2 RNA guide
uucgagagacaucaagaucagc

SEQ ID NO: 11926 - RNA, 22 nt, Artificial Sequence
  LRRK2 RNA guide
uugaaaaugaguuguauugcug

SEQ ID NO: 11927 - RNA, 22 nt, Artificial Sequence
  LRRK2 RNA guide
uugcugaucuugaugucucucg

SEQ ID NO: 11928 - RNA, 22 nt, Artificial Sequence
  LRRK2 RNA guide
uuguauugcugaucuugauguc

SEQ ID NO: 11929 - RNA, 22 nt, Artificial Sequence
  LRRK2 RNA guide
uuucgagagacaucaagaucag

SEQ ID NO: 11930 - RNA, 20 nt, Artificial Sequence
  LRRK2 RNA guide
aaugucauuucgagagacau

SEQ ID NO: 11931 - RNA, 20 nt, Artificial Sequence
  LRRK2 RNA guide
aauuuugaugucucucgaaa

SEQ ID NO: 11932 - RNA, 20 nt, Artificial Sequence
  LRRK2 RNA guide
agagacaucaaaauuagcaa

SEQ ID NO: 11933 - RNA, 20 nt, Artificial Sequence
  LRRK2 RNA guide
augucauuucgagagacauc

SEQ ID NO: 11934 - RNA, 20 nt, Artificial Sequence
  LRRK2 RNA guide
auugcuaauuuugaugucuc

SEQ ID NO: 11935 - RNA, 20 nt, Artificial Sequence
  LRRK2 RNA guide
auuucgagagacaucaaaau

SEQ ID NO: 11936 - RNA, 20 nt, Artificial Sequence
  LRRK2 RNA guide
auuuugaugucucucgaaau

SEQ ID NO: 11937 - RNA, 20 nt, Artificial Sequence
  LRRK2 RNA guide
caaaauuagcaauacaacuc

SEQ ID NO: 11938 - RNA, 20 nt, Artificial Sequence
  LRRK2 RNA guide
caaugucauuucgagagaca

SEQ ID NO: 11939 - RNA, 20 nt, Artificial Sequence
  LRRK2 RNA guide
cauuucgagagacaucaaaa

SEQ ID NO: 11940 - RNA, 20 nt, Artificial Sequence
  LRRK2 RNA guide
cgagagacaucaaaauuagc

SEQ ID NO: 11941 - RNA, 20 nt, Artificial Sequence
  LRRK2 RNA guide
cuaauuuugaugucucucga

SEQ ID NO: 11942 - RNA, 20 nt, Artificial Sequence
  LRRK2 RNA guide
gaaaaugaguuguauugcua

SEQ ID NO: 11943 - RNA, 20 nt, Artificial Sequence
  LRRK2 RNA guide
gacaucaaaauuagcaauac

SEQ ID NO: 11944 - RNA, 20 nt, Artificial Sequence
  LRRK2 RNA guide
gagacaucaaaauuagcaau

SEQ ID NO: 11945 - RNA, 20 nt, Artificial Sequence
  LRRK2 RNA guide
gagagacaucaaaauuagca

SEQ ID NO: 11946 - RNA, 20 nt, Artificial Sequence
  LRRK2 RNA guide
gaguuguauugcuaauuuug

SEQ ID NO: 11947 - RNA, 20 nt, Artificial Sequence
  LRRK2 RNA guide
gcuaauuuugaugucucucg

SEQ ID NO: 11948 - RNA, 20 nt, Artificial Sequence
  LRRK2 RNA guide
guauugcuaauuuugauguc

SEQ ID NO: 11949 - RNA, 20 nt, Artificial Sequence
  LRRK2 RNA guide
uaauuuugaugucucucgaa

SEQ ID NO: 11950 - RNA, 20 nt, Artificial Sequence
  LRRK2 RNA guide
ucauuucgagagacaucaaa

SEQ ID NO: 11951 - RNA, 20 nt, Artificial Sequence
  LRRK2 RNA guide
ucgagagacaucaaaauuag

SEQ ID NO: 11952 - RNA, 20 nt, Artificial Sequence
  LRRK2 RNA guide
ugcuaauuuugaugucucuc

SEQ ID NO: 11953 - RNA, 20 nt, Artificial Sequence
  LRRK2 RNA guide
uucgagagacaucaaaauua

SEQ ID NO: 11954 - RNA, 20 nt, Artificial Sequence
  LRRK2 RNA guide
uugcuaauuuugaugucucu

SEQ ID NO: 11955 - RNA, 20 nt, Artificial Sequence
  LRRK2 RNA guide
uuucgagagacaucaaaauu

SEQ ID NO: 11956 - RNA, 20 nt, Artificial Sequence
  LRRK2 RNA guide
uuuugaugucucucgaaaug

SEQ ID NO: 11957 - RNA, 21 nt, Artificial Sequence
  LRRK2 RNA guide
aaugucauuucgagagacauc

SEQ ID NO: 11958 - RNA, 21 nt, Artificial Sequence
  LRRK2 RNA guide
auuuugaugucucucgaaaug

SEQ ID NO: 11959 - RNA, 21 nt, Artificial Sequence
  LRRK2 RNA guide
caaugucauuucgagagacau

SEQ ID NO: 11960 - RNA, 21 nt, Artificial Sequence
  LRRK2 RNA guide
cauuucgagagacaucaaaau

SEQ ID NO: 11961 - RNA, 21 nt, Artificial Sequence
  LRRK2 RNA guide
ccaaugucauuucgagagaca

SEQ ID NO: 11962 - RNA, 21 nt, Artificial Sequence
  LRRK2 RNA guide
cgagagacaucaaaauuagca

SEQ ID NO: 11963 - RNA, 21 nt, Artificial Sequence
  LRRK2 RNA guide
cuaauuuugaugucucucgaa

SEQ ID NO: 11964 - RNA, 21 nt, Artificial Sequence
  LRRK2 RNA guide
gagagacaucaaaauuagcaa

SEQ ID NO: 11965 - RNA, 21 nt, Artificial Sequence
  LRRK2 RNA guide
gcuaauuuugaugucucucga

SEQ ID NO: 11966 - RNA, 21 nt, Artificial Sequence
  LRRK2 RNA guide
gucauuucgagagacaucaaa

SEQ ID NO: 11967 - RNA, 21 nt, Artificial Sequence
  LRRK2 RNA guide
ucauuucgagagacaucaaaa

SEQ ID NO: 11968 - RNA, 21 nt, Artificial Sequence
  LRRK2 RNA guide
ucgagagacaucaaaauuagc

SEQ ID NO: 11969 - RNA, 21 nt, Artificial Sequence
  LRRK2 RNA guide
ugcuaauuuugaugucucucg

SEQ ID NO: 11970 - RNA, 21 nt, Artificial Sequence
  LRRK2 RNA guide
uucgagagacaucaaaauuag

SEQ ID NO: 11971 - RNA, 21 nt, Artificial Sequence
  LRRK2 RNA guide
uugcuaauuuugaugucucuc

SEQ ID NO: 11972 - RNA, 21 nt, Artificial Sequence
  LRRK2 RNA guide
uuuugaugucucucgaaauga

SEQ ID NO: 11973 - RNA, 22 nt, Artificial Sequence
  LRRK2 RNA guide
aauuuugaugucucucgaaaug

SEQ ID NO: 11974 - RNA, 22 nt, Artificial Sequence
  LRRK2 RNA guide
auugcuaauuuugaugucucuc

SEQ ID NO: 11975 - RNA, 22 nt, Artificial Sequence
  LRRK2 RNA guide
auuuugaugucucucgaaauga

SEQ ID NO: 11976 - RNA, 22 nt, Artificial Sequence
  LRRK2 RNA guide
caaugucauuucgagagacauc

SEQ ID NO: 11977 - RNA, 22 nt, Artificial Sequence
  LRRK2 RNA guide
cauuucgagagacaucaaaauu

SEQ ID NO: 11978 - RNA, 22 nt, Artificial Sequence
  LRRK2 RNA guide
ccaaugucauuucgagagacau

SEQ ID NO: 11979 - RNA, 22 nt, Artificial Sequence
  LRRK2 RNA guide
cgagagacaucaaaauuagcaa

SEQ ID NO: 11980 - RNA, 22 nt, Artificial Sequence
  LRRK2 RNA guide
cuaauuuugaugucucucgaaa

SEQ ID NO: 11981 - RNA, 22 nt, Artificial Sequence
  LRRK2 RNA guide
gagacaucaaaauuagcaauac

SEQ ID NO: 11982 - RNA, 22 nt, Artificial Sequence
  LRRK2 RNA guide
gagagacaucaaaauuagcaau

SEQ ID NO: 11983 - RNA, 22 nt, Artificial Sequence
  LRRK2 RNA guide
gcuaauuuugaugucucucgaa

SEQ ID NO: 11984 - RNA, 22 nt, Artificial Sequence
  LRRK2 RNA guide
guauugcuaauuuugaugucuc

SEQ ID NO: 11985 - RNA, 22 nt, Artificial Sequence
  LRRK2 RNA guide
gucauuucgagagacaucaaaa

SEQ ID NO: 11986 - RNA, 22 nt, Artificial Sequence
  LRRK2 RNA guide
ucauuucgagagacaucaaaau

SEQ ID NO: 11987 - RNA, 22 nt, Artificial Sequence
  LRRK2 RNA guide
uccaaugucauuucgagagaca

SEQ ID NO: 11988 - RNA, 22 nt, Artificial Sequence
  LRRK2 RNA guide
ucgagagacaucaaaauuagca

SEQ ID NO: 11989 - RNA, 22 nt, Artificial Sequence
  LRRK2 RNA guide
ugcuaauuuugaugucucucga

SEQ ID NO: 11990 - RNA, 22 nt, Artificial Sequence
  LRRK2 RNA guide
ugucauuucgagagacaucaaa

SEQ ID NO: 11991 - RNA, 22 nt, Artificial Sequence
  LRRK2 RNA guide
uucgagagacaucaaaauuagc

SEQ ID NO: 11992 - RNA, 22 nt, Artificial Sequence
  LRRK2 RNA guide
uugcuaauuuugaugucucucg

SEQ ID NO: 11993 - RNA, 22 nt, Artificial Sequence
  LRRK2 RNA guide
uuucgagagacaucaaaauuag

SEQ ID NO: 11994 - RNA, 22 nt, Artificial Sequence
  LRRK2 RNA guide
uuuugaugucucucgaaaugac

SEQ ID NO: 11995 - RNA, 20 nt, Artificial Sequence
  LRRK2 RNA guide
aaucuugaugucucucaaaa

SEQ ID NO: 11996 - RNA, 20 nt, Artificial Sequence
  LRRK2 RNA guide
aaugucauuuugagagacau

SEQ ID NO: 11997 - RNA, 20 nt, Artificial Sequence
  LRRK2 RNA guide
accacugaggguccaauguc

SEQ ID NO: 11998 - RNA, 20 nt, Artificial Sequence
  LRRK2 RNA guide
acugaggguccaaugucauu

SEQ ID NO: 11999 - RNA, 20 nt, Artificial Sequence
  LRRK2 RNA guide
aggguccaaugucauuuuga

SEQ ID NO: 12000 - RNA, 20 nt, Artificial Sequence
  LRRK2 RNA guide
aucuugaugucucucaaaau

SEQ ID NO: 12001 - RNA, 20 nt, Artificial Sequence
  LRRK2 RNA guide
augucauuuugagagacauc

SEQ ID NO: 12002 - RNA, 20 nt, Artificial Sequence
  LRRK2 RNA guide
augucucucaaaaugacauu

SEQ ID NO: 12003 - RNA, 20 nt, Artificial Sequence
  LRRK2 RNA guide
auugcuaaucuugaugucuc

SEQ ID NO: 12004 - RNA, 20 nt, Artificial Sequence
  LRRK2 RNA guide
auuuugagagacaucaagau

SEQ ID NO: 12005 - RNA, 20 nt, Artificial Sequence
  LRRK2 RNA guide
caaaaugacauuggacccuc

SEQ ID NO: 12006 - RNA, 20 nt, Artificial Sequence
  LRRK2 RNA guide
caaugucauuuugagagaca

SEQ ID NO: 12007 - RNA, 20 nt, Artificial Sequence
  LRRK2 RNA guide
cacugaggguccaaugucau

SEQ ID NO: 12008 - RNA, 20 nt, Artificial Sequence
  LRRK2 RNA guide
cauuuugagagacaucaaga

SEQ ID NO: 12009 - RNA, 20 nt, Artificial Sequence
  LRRK2 RNA guide
ccaaugucauuuugagagac

SEQ ID NO: 12010 - RNA, 20 nt, Artificial Sequence
  LRRK2 RNA guide
ccacugaggguccaauguca

SEQ ID NO: 12011 - RNA, 20 nt, Artificial Sequence
  LRRK2 RNA guide
cuaaucuugaugucucucaa

SEQ ID NO: 12012 - RNA, 20 nt, Artificial Sequence
  LRRK2 RNA guide
cucaaaaugacauuggaccc

SEQ ID NO: 12013 - RNA, 20 nt, Artificial Sequence
  LRRK2 RNA guide
cucucaaaaugacauuggac

SEQ ID NO: 12014 - RNA, 20 nt, Artificial Sequence
  LRRK2 RNA guide
cugaggguccaaugucauuu

SEQ ID NO: 12015 - RNA, 20 nt, Artificial Sequence
  LRRK2 RNA guide
cuugaugucucucaaaauga

SEQ ID NO: 12016 - RNA, 20 nt, Artificial Sequence
  LRRK2 RNA guide
gaggguccaaugucauuuug

SEQ ID NO: 12017 - RNA, 20 nt, Artificial Sequence
  LRRK2 RNA guide
gaugucucucaaaaugacau

SEQ ID NO: 12018 - RNA, 20 nt, Artificial Sequence
  LRRK2 RNA guide
gcuaaucuugaugucucuca

SEQ ID NO: 12019 - RNA, 20 nt, Artificial Sequence
  LRRK2 RNA guide
ggguccaaugucauuuugag

SEQ ID NO: 12020 - RNA, 20 nt, Artificial Sequence
  LRRK2 RNA guide
gguccaaugucauuuugaga

SEQ ID NO: 12021 - RNA, 20 nt, Artificial Sequence
  LRRK2 RNA guide
guauugcuaaucuugauguc

SEQ ID NO: 12022 - RNA, 20 nt, Artificial Sequence
  LRRK2 RNA guide
gucauuuugagagacaucaa

SEQ ID NO: 12023 - RNA, 20 nt, Artificial Sequence
  LRRK2 RNA guide
guccaaugucauuuugagag

SEQ ID NO: 12024 - RNA, 20 nt, Artificial Sequence
  LRRK2 RNA guide
gucucucaaaaugacauugg

SEQ ID NO: 12025 - RNA, 20 nt, Artificial Sequence
  LRRK2 RNA guide
uaaucuugaugucucucaaa

SEQ ID NO: 12026 - RNA, 20 nt, Artificial Sequence
  LRRK2 RNA guide
uauugcuaaucuugaugucu

SEQ ID NO: 12027 - RNA, 20 nt, Artificial Sequence
  LRRK2 RNA guide
ucaaaaugacauuggacccu

SEQ ID NO: 12028 - RNA, 20 nt, Artificial Sequence
  LRRK2 RNA guide
ucauuuugagagacaucaag

SEQ ID NO: 12029 - RNA, 20 nt, Artificial Sequence
  LRRK2 RNA guide
uccaaugucauuuugagaga

SEQ ID NO: 12030 - RNA, 20 nt, Artificial Sequence
  LRRK2 RNA guide
ucucaaaaugacauuggacc

SEQ ID NO: 12031 - RNA, 20 nt, Artificial Sequence
  LRRK2 RNA guide
ucucucaaaaugacauugga

SEQ ID NO: 12032 - RNA, 20 nt, Artificial Sequence
  LRRK2 RNA guide
ucuugaugucucucaaaaug

SEQ ID NO: 12033 - RNA, 20 nt, Artificial Sequence
  LRRK2 RNA guide
ugaggguccaaugucauuuu

SEQ ID NO: 12034 - RNA, 20 nt, Artificial Sequence
  LRRK2 RNA guide
ugaugucucucaaaaugaca

SEQ ID NO: 12035 - RNA, 20 nt, Artificial Sequence
  LRRK2 RNA guide
ugcuaaucuugaugucucuc

SEQ ID NO: 12036 - RNA, 20 nt, Artificial Sequence
  LRRK2 RNA guide
ugucauuuugagagacauca

SEQ ID NO: 12037 - RNA, 20 nt, Artificial Sequence
  LRRK2 RNA guide
ugucucucaaaaugacauug

SEQ ID NO: 12038 - RNA, 20 nt, Artificial Sequence
  LRRK2 RNA guide
uugagagacaucaagauuag

SEQ ID NO: 12039 - RNA, 20 nt, Artificial Sequence
  LRRK2 RNA guide
uugaugucucucaaaaugac

SEQ ID NO: 12040 - RNA, 20 nt, Artificial Sequence
  LRRK2 RNA guide
uugcuaaucuugaugucucu

SEQ ID NO: 12041 - RNA, 20 nt, Artificial Sequence
  LRRK2 RNA guide
uuugagagacaucaagauua

SEQ ID NO: 12042 - RNA, 20 nt, Artificial Sequence
  LRRK2 RNA guide
uuuugagagacaucaagauu

SEQ ID NO: 12043 - RNA, 21 nt, Artificial Sequence
  LRRK2 RNA guide
aaccacugaggguccaauguc

SEQ ID NO: 12044 - RNA, 21 nt, Artificial Sequence
  LRRK2 RNA guide
aaugucauuuugagagacauc

SEQ ID NO: 12045 - RNA, 21 nt, Artificial Sequence
  LRRK2 RNA guide
accacugaggguccaauguca

SEQ ID NO: 12046 - RNA, 21 nt, Artificial Sequence
  LRRK2 RNA guide
acugaggguccaaugucauuu

SEQ ID NO: 12047 - RNA, 21 nt, Artificial Sequence
  LRRK2 RNA guide
aggguccaaugucauuuugag

SEQ ID NO: 12048 - RNA, 21 nt, Artificial Sequence
  LRRK2 RNA guide
aucuugaugucucucaaaaug

SEQ ID NO: 12049 - RNA, 21 nt, Artificial Sequence
  LRRK2 RNA guide
augucauuuugagagacauca

SEQ ID NO: 12050 - RNA, 21 nt, Artificial Sequence
  LRRK2 RNA guide
augucucucaaaaugacauug

SEQ ID NO: 12051 - RNA, 21 nt, Artificial Sequence
  LRRK2 RNA guide
auugcuaaucuugaugucucu

SEQ ID NO: 12052 - RNA, 21 nt, Artificial Sequence
  LRRK2 RNA guide
caaaaugacauuggacccuca

SEQ ID NO: 12053 - RNA, 21 nt, Artificial Sequence
  LRRK2 RNA guide
caaugucauuuugagagacau

SEQ ID NO: 12054 - RNA, 21 nt, Artificial Sequence
  LRRK2 RNA guide
cacugaggguccaaugucauu

SEQ ID NO: 12055 - RNA, 21 nt, Artificial Sequence
  LRRK2 RNA guide
cauuuugagagacaucaagau

SEQ ID NO: 12056 - RNA, 21 nt, Artificial Sequence
  LRRK2 RNA guide
ccaaugucauuuugagagaca

SEQ ID NO: 12057 - RNA, 21 nt, Artificial Sequence
  LRRK2 RNA guide
ccacugaggguccaaugucau

SEQ ID NO: 12058 - RNA, 21 nt, Artificial Sequence
  LRRK2 RNA guide
cuaaucuugaugucucucaaa

SEQ ID NO: 12059 - RNA, 21 nt, Artificial Sequence
  LRRK2 RNA guide
cucaaaaugacauuggacccu

SEQ ID NO: 12060 - RNA, 21 nt, Artificial Sequence
  LRRK2 RNA guide
cucucaaaaugacauuggacc

SEQ ID NO: 12061 - RNA, 21 nt, Artificial Sequence
  LRRK2 RNA guide
cugaggguccaaugucauuuu

SEQ ID NO: 12062 - RNA, 21 nt, Artificial Sequence
  LRRK2 RNA guide
cuugaugucucucaaaaugac

SEQ ID NO: 12063 - RNA, 21 nt, Artificial Sequence
  LRRK2 RNA guide
gaggguccaaugucauuuuga

SEQ ID NO: 12064 - RNA, 21 nt, Artificial Sequence
  LRRK2 RNA guide
gaugucucucaaaaugacauu

SEQ ID NO: 12065 - RNA, 21 nt, Artificial Sequence
  LRRK2 RNA guide
gcuaaucuugaugucucucaa

SEQ ID NO: 12066 - RNA, 21 nt, Artificial Sequence
  LRRK2 RNA guide
ggguccaaugucauuuugaga

SEQ ID NO: 12067 - RNA, 21 nt, Artificial Sequence
  LRRK2 RNA guide
gguccaaugucauuuugagag

SEQ ID NO: 12068 - RNA, 21 nt, Artificial Sequence
  LRRK2 RNA guide
guauugcuaaucuugaugucu

SEQ ID NO: 12069 - RNA, 21 nt, Artificial Sequence
  LRRK2 RNA guide
gucauuuugagagacaucaag

SEQ ID NO: 12070 - RNA, 21 nt, Artificial Sequence
  LRRK2 RNA guide
guccaaugucauuuugagaga

SEQ ID NO: 12071 - RNA, 21 nt, Artificial Sequence
  LRRK2 RNA guide
gucucucaaaaugacauugga

SEQ ID NO: 12072 - RNA, 21 nt, Artificial Sequence
  LRRK2 RNA guide
uauugcuaaucuugaugucuc

SEQ ID NO: 12073 - RNA, 21 nt, Artificial Sequence
  LRRK2 RNA guide
ucaaaaugacauuggacccuc

SEQ ID NO: 12074 - RNA, 21 nt, Artificial Sequence
  LRRK2 RNA guide
ucauuuugagagacaucaaga

SEQ ID NO: 12075 - RNA, 21 nt, Artificial Sequence
  LRRK2 RNA guide
uccaaugucauuuugagagac

SEQ ID NO: 12076 - RNA, 21 nt, Artificial Sequence
  LRRK2 RNA guide
ucucaaaaugacauuggaccc

SEQ ID NO: 12077 - RNA, 21 nt, Artificial Sequence
  LRRK2 RNA guide
ucucucaaaaugacauuggac

SEQ ID NO: 12078 - RNA, 21 nt, Artificial Sequence
  LRRK2 RNA guide
ucuugaugucucucaaaauga

SEQ ID NO: 12079 - RNA, 21 nt, Artificial Sequence
  LRRK2 RNA guide
ugaggguccaaugucauuuug

SEQ ID NO: 12080 - RNA, 21 nt, Artificial Sequence
  LRRK2 RNA guide
ugaugucucucaaaaugacau

SEQ ID NO: 12081 - RNA, 21 nt, Artificial Sequence
  LRRK2 RNA guide
ugcuaaucuugaugucucuca

SEQ ID NO: 12082 - RNA, 21 nt, Artificial Sequence
  LRRK2 RNA guide
uguauugcuaaucuugauguc

SEQ ID NO: 12083 - RNA, 21 nt, Artificial Sequence
  LRRK2 RNA guide
ugucauuuugagagacaucaa

SEQ ID NO: 12084 - RNA, 21 nt, Artificial Sequence
  LRRK2 RNA guide
ugucucucaaaaugacauugg

SEQ ID NO: 12085 - RNA, 21 nt, Artificial Sequence
  LRRK2 RNA guide
uugagagacaucaagauuagc

SEQ ID NO: 12086 - RNA, 21 nt, Artificial Sequence
  LRRK2 RNA guide
uugaugucucucaaaaugaca

SEQ ID NO: 12087 - RNA, 21 nt, Artificial Sequence
  LRRK2 RNA guide
uugcuaaucuugaugucucuc

SEQ ID NO: 12088 - RNA, 21 nt, Artificial Sequence
  LRRK2 RNA guide
uuugagagacaucaagauuag

SEQ ID NO: 12089 - RNA, 22 nt, Artificial Sequence
  LRRK2 RNA guide
aaaccacugaggguccaauguc

SEQ ID NO: 12090 - RNA, 22 nt, Artificial Sequence
  LRRK2 RNA guide
aaccacugaggguccaauguca

SEQ ID NO: 12091 - RNA, 22 nt, Artificial Sequence
  LRRK2 RNA guide
aaucuugaugucucucaaaaug

SEQ ID NO: 12092 - RNA, 22 nt, Artificial Sequence
  LRRK2 RNA guide
aaugucauuuugagagacauca

SEQ ID NO: 12093 - RNA, 22 nt, Artificial Sequence
  LRRK2 RNA guide
accacugaggguccaaugucau

SEQ ID NO: 12094 - RNA, 22 nt, Artificial Sequence
  LRRK2 RNA guide
acugaggguccaaugucauuuu

SEQ ID NO: 12095 - RNA, 22 nt, Artificial Sequence
  LRRK2 RNA guide
aggguccaaugucauuuugaga

SEQ ID NO: 12096 - RNA, 22 nt, Artificial Sequence
  LRRK2 RNA guide
aucuugaugucucucaaaauga

SEQ ID NO: 12097 - RNA, 22 nt, Artificial Sequence
  LRRK2 RNA guide
augucauuuugagagacaucaa

SEQ ID NO: 12098 - RNA, 22 nt, Artificial Sequence
  LRRK2 RNA guide
augucucucaaaaugacauugg

SEQ ID NO: 12099 - RNA, 22 nt, Artificial Sequence
  LRRK2 RNA guide
auugcuaaucuugaugucucuc

SEQ ID NO: 12100 - RNA, 22 nt, Artificial Sequence
  LRRK2 RNA guide
caaaaugacauuggacccucag

SEQ ID NO: 12101 - RNA, 22 nt, Artificial Sequence
  LRRK2 RNA guide
caaugucauuuugagagacauc

SEQ ID NO: 12102 - RNA, 22 nt, Artificial Sequence
  LRRK2 RNA guide
cacugaggguccaaugucauuu

SEQ ID NO: 12103 - RNA, 22 nt, Artificial Sequence
  LRRK2 RNA guide
cauuuugagagacaucaagauu

SEQ ID NO: 12104 - RNA, 22 nt, Artificial Sequence
  LRRK2 RNA guide
ccaaugucauuuugagagacau

SEQ ID NO: 12105 - RNA, 22 nt, Artificial Sequence
  LRRK2 RNA guide
ccacugaggguccaaugucauu

SEQ ID NO: 12106 - RNA, 22 nt, Artificial Sequence
  LRRK2 RNA guide
cuaaucuugaugucucucaaaa

SEQ ID NO: 12107 - RNA, 22 nt, Artificial Sequence
  LRRK2 RNA guide
cucaaaaugacauuggacccuc

SEQ ID NO: 12108 - RNA, 22 nt, Artificial Sequence
  LRRK2 RNA guide
cucucaaaaugacauuggaccc

SEQ ID NO: 12109 - RNA, 22 nt, Artificial Sequence
  LRRK2 RNA guide
cugaggguccaaugucauuuug

SEQ ID NO: 12110 - RNA, 22 nt, Artificial Sequence
  LRRK2 RNA guide
cuugaugucucucaaaaugaca

SEQ ID NO: 12111 - RNA, 22 nt, Artificial Sequence
  LRRK2 RNA guide
gaggguccaaugucauuuugag

SEQ ID NO: 12112 - RNA, 22 nt, Artificial Sequence
  LRRK2 RNA guide
gaugucucucaaaaugacauug

SEQ ID NO: 12113 - RNA, 22 nt, Artificial Sequence
  LRRK2 RNA guide
gcuaaucuugaugucucucaaa

SEQ ID NO: 12114 - RNA, 22 nt, Artificial Sequence
  LRRK2 RNA guide
ggguccaaugucauuuugagag

SEQ ID NO: 12115 - RNA, 22 nt, Artificial Sequence
  LRRK2 RNA guide
gguccaaugucauuuugagaga

SEQ ID NO: 12116 - RNA, 22 nt, Artificial Sequence
  LRRK2 RNA guide
guauugcuaaucuugaugucuc

SEQ ID NO: 12117 - RNA, 22 nt, Artificial Sequence
  LRRK2 RNA guide
gucauuuugagagacaucaaga

SEQ ID NO: 12118 - RNA, 22 nt, Artificial Sequence
  LRRK2 RNA guide
guccaaugucauuuugagagac

SEQ ID NO: 12119 - RNA, 22 nt, Artificial Sequence
  LRRK2 RNA guide
gucucucaaaaugacauuggac

SEQ ID NO: 12120 - RNA, 22 nt, Artificial Sequence
  LRRK2 RNA guide
uauugcuaaucuugaugucucu

SEQ ID NO: 12121 - RNA, 22 nt, Artificial Sequence
  LRRK2 RNA guide
ucaaaaugacauuggacccuca

SEQ ID NO: 12122 - RNA, 22 nt, Artificial Sequence
  LRRK2 RNA guide
ucauuuugagagacaucaagau

SEQ ID NO: 12123 - RNA, 22 nt, Artificial Sequence
  LRRK2 RNA guide
uccaaugucauuuugagagaca

SEQ ID NO: 12124 - RNA, 22 nt, Artificial Sequence
  LRRK2 RNA guide
ucucaaaaugacauuggacccu

SEQ ID NO: 12125 - RNA, 22 nt, Artificial Sequence
  LRRK2 RNA guide
ucucucaaaaugacauuggacc

SEQ ID NO: 12126 - RNA, 22 nt, Artificial Sequence
  LRRK2 RNA guide
ucuugaugucucucaaaaugac

SEQ ID NO: 12127 - RNA, 22 nt, Artificial Sequence
  LRRK2 RNA guide
ugaggguccaaugucauuuuga

SEQ ID NO: 12128 - RNA, 22 nt, Artificial Sequence
  LRRK2 RNA guide
ugaugucucucaaaaugacauu

SEQ ID NO: 12129 - RNA, 22 nt, Artificial Sequence
  LRRK2 RNA guide
ugcuaaucuugaugucucucaa

SEQ ID NO: 12130 - RNA, 22 nt, Artificial Sequence
  LRRK2 RNA guide
uguauugcuaaucuugaugucu

SEQ ID NO: 12131 - RNA, 22 nt, Artificial Sequence
  LRRK2 RNA guide
ugucauuuugagagacaucaag

SEQ ID NO: 12132 - RNA, 22 nt, Artificial Sequence
  LRRK2 RNA guide
ugucucucaaaaugacauugga

SEQ ID NO: 12133 - RNA, 22 nt, Artificial Sequence
  LRRK2 RNA guide
uugagagacaucaagauuagca

SEQ ID NO: 12134 - RNA, 22 nt, Artificial Sequence
  LRRK2 RNA guide
uugaugucucucaaaaugacau

SEQ ID NO: 12135 - RNA, 22 nt, Artificial Sequence
  LRRK2 RNA guide
uugcuaaucuugaugucucuca

SEQ ID NO: 12136 - RNA, 22 nt, Artificial Sequence
  LRRK2 RNA guide
uuguauugcuaaucuugauguc

SEQ ID NO: 12137 - RNA, 22 nt, Artificial Sequence
  LRRK2 RNA guide
uuugagagacaucaagauuagc

SEQ ID NO: 12138 - RNA, 22 nt, Artificial Sequence
  LRRK2 RNA guide
uuuugagagacaucaagauuag

SEQ ID NO: 12139 - RNA, 20 nt, Artificial Sequence
  LRRK2 RNA guide
aaaacacagcugguuauaug

SEQ ID NO: 12140 - RNA, 20 nt, Artificial Sequence
  LRRK2 RNA guide
aaacacagcugguuauauga

SEQ ID NO: 12141 - RNA, 20 nt, Artificial Sequence
  LRRK2 RNA guide
aacacagcugguuauaugac

SEQ ID NO: 12142 - RNA, 20 nt, Artificial Sequence
  LRRK2 RNA guide
aaccagcuguguuuuguacc

SEQ ID NO: 12143 - RNA, 20 nt, Artificial Sequence
  LRRK2 RNA guide
aaccugucauauaaccagcu

SEQ ID NO: 12144 - RNA, 20 nt, Artificial Sequence
  LRRK2 RNA guide
acaaaacacagcugguuaua

SEQ ID NO: 12145 - RNA, 20 nt, Artificial Sequence
  LRRK2 RNA guide
acacagcugguuauaugaca

SEQ ID NO: 12146 - RNA, 20 nt, Artificial Sequence
  LRRK2 RNA guide
accagcuguguuuuguaccu

SEQ ID NO: 12147 - RNA, 20 nt, Artificial Sequence
  LRRK2 RNA guide
accugucauauaaccagcug

SEQ ID NO: 12148 - RNA, 20 nt, Artificial Sequence
  LRRK2 RNA guide
agcuguguuuuguaccugag

SEQ ID NO: 12149 - RNA, 20 nt, Artificial Sequence
  LRRK2 RNA guide
agguacaaaacacagcuggu

SEQ ID NO: 12150 - RNA, 20 nt, Artificial Sequence
  LRRK2 RNA guide
agguucucagguacaaaaca

SEQ ID NO: 12151 - RNA, 20 nt, Artificial Sequence
  LRRK2 RNA guide
agugagguucucagguacaa

SEQ ID NO: 12152 - RNA, 20 nt, Artificial Sequence
  LRRK2 RNA guide
auaaccagcuguguuuugua

SEQ ID NO: 12153 - RNA, 20 nt, Artificial Sequence
  LRRK2 RNA guide
auauaaccagcuguguuuug

SEQ ID NO: 12154 - RNA, 20 nt, Artificial Sequence
  LRRK2 RNA guide
caaaacacagcugguuauau

SEQ ID NO: 12155 - RNA, 20 nt, Artificial Sequence
  LRRK2 RNA guide
cagcuguguuuuguaccuga

SEQ ID NO: 12156 - RNA, 20 nt, Artificial Sequence
  LRRK2 RNA guide
cagguacaaaacacagcugg

SEQ ID NO: 12157 - RNA, 20 nt, Artificial Sequence
  LRRK2 RNA guide
cagugagguucucagguaca

SEQ ID NO: 12158 - RNA, 20 nt, Artificial Sequence
  LRRK2 RNA guide
cauauaaccagcuguguuuu

SEQ ID NO: 12159 - RNA, 20 nt, Artificial Sequence
  LRRK2 RNA guide
ccagcuguguuuuguaccug

SEQ ID NO: 12160 - RNA, 20 nt, Artificial Sequence
  LRRK2 RNA guide
ccugucauauaaccagcugu

SEQ ID NO: 12161 - RNA, 20 nt, Artificial Sequence
  LRRK2 RNA guide
cucagguacaaaacacagcu

SEQ ID NO: 12162 - RNA, 20 nt, Artificial Sequence
  LRRK2 RNA guide
cugucauauaaccagcugug

SEQ ID NO: 12163 - RNA, 20 nt, Artificial Sequence
  LRRK2 RNA guide
cuguguuuuguaccugagaa

SEQ ID NO: 12164 - RNA, 20 nt, Artificial Sequence
  LRRK2 RNA guide
gagguucucagguacaaaac

SEQ ID NO: 12165 - RNA, 20 nt, Artificial Sequence
  LRRK2 RNA guide
gcuguguuuuguaccugaga

SEQ ID NO: 12166 - RNA, 20 nt, Artificial Sequence
  LRRK2 RNA guide
gguacaaaacacagcugguu

SEQ ID NO: 12167 - RNA, 20 nt, Artificial Sequence
  LRRK2 RNA guide
gguucucagguacaaaacac

SEQ ID NO: 12168 - RNA, 20 nt, Artificial Sequence
  LRRK2 RNA guide
guacaaaacacagcugguua

SEQ ID NO: 12169 - RNA, 20 nt, Artificial Sequence
  LRRK2 RNA guide
gucauauaaccagcuguguu

SEQ ID NO: 12170 - RNA, 20 nt, Artificial Sequence
  LRRK2 RNA guide
gugagguucucagguacaaa

SEQ ID NO: 12171 - RNA, 20 nt, Artificial Sequence
  LRRK2 RNA guide
guguuuuguaccugagaacc

SEQ ID NO: 12172 - RNA, 20 nt, Artificial Sequence
  LRRK2 RNA guide
guucucagguacaaaacaca

SEQ ID NO: 12173 - RNA, 20 nt, Artificial Sequence
  LRRK2 RNA guide
uaaccagcuguguuuuguac

SEQ ID NO: 12174 - RNA, 20 nt, Artificial Sequence
  LRRK2 RNA guide
uaaccugucauauaaccagc

SEQ ID NO: 12175 - RNA, 20 nt, Artificial Sequence
  LRRK2 RNA guide
uacaaaacacagcugguuau

SEQ ID NO: 12176 - RNA, 20 nt, Artificial Sequence
  LRRK2 RNA guide
uauaaccagcuguguuuugu

SEQ ID NO: 12177 - RNA, 20 nt, Artificial Sequence
  LRRK2 RNA guide
ucagguacaaaacacagcug

SEQ ID NO: 12178 - RNA, 20 nt, Artificial Sequence
  LRRK2 RNA guide
ucagugagguucucagguac

SEQ ID NO: 12179 - RNA, 20 nt, Artificial Sequence
  LRRK2 RNA guide
ucauauaaccagcuguguuu

SEQ ID NO: 12180 - RNA, 20 nt, Artificial Sequence
  LRRK2 RNA guide
ucucagguacaaaacacagc

SEQ ID NO: 12181 - RNA, 20 nt, Artificial Sequence
  LRRK2 RNA guide
ugagguucucagguacaaaa

SEQ ID NO: 12182 - RNA, 20 nt, Artificial Sequence
  LRRK2 RNA guide
ugucauauaaccagcugugu

SEQ ID NO: 12183 - RNA, 20 nt, Artificial Sequence
  LRRK2 RNA guide
uguguuuuguaccugagaac

SEQ ID NO: 12184 - RNA, 20 nt, Artificial Sequence
  LRRK2 RNA guide
uguuuuguaccugagaaccu

SEQ ID NO: 12185 - RNA, 20 nt, Artificial Sequence
  LRRK2 RNA guide
uuaaccugucauauaaccag

SEQ ID NO: 12186 - RNA, 20 nt, Artificial Sequence
  LRRK2 RNA guide
uucucagguacaaaacacag

SEQ ID NO: 12187 - RNA, 21 nt, Artificial Sequence
  LRRK2 RNA guide
aaaacacagcugguuauauga

SEQ ID NO: 12188 - RNA, 21 nt, Artificial Sequence
  LRRK2 RNA guide
aaacacagcugguuauaugac

SEQ ID NO: 12189 - RNA, 21 nt, Artificial Sequence
  LRRK2 RNA guide
aacacagcugguuauaugaca

SEQ ID NO: 12190 - RNA, 21 nt, Artificial Sequence
  LRRK2 RNA guide
aaccagcuguguuuuguaccu

SEQ ID NO: 12191 - RNA, 21 nt, Artificial Sequence
  LRRK2 RNA guide
aaccugucauauaaccagcug

SEQ ID NO: 12192 - RNA, 21 nt, Artificial Sequence
  LRRK2 RNA guide
acaaaacacagcugguuauau

SEQ ID NO: 12193 - RNA, 21 nt, Artificial Sequence
  LRRK2 RNA guide
acacagcugguuauaugacag

SEQ ID NO: 12194 - RNA, 21 nt, Artificial Sequence
  LRRK2 RNA guide
accagcuguguuuuguaccug

SEQ ID NO: 12195 - RNA, 21 nt, Artificial Sequence
  LRRK2 RNA guide
accugucauauaaccagcugu

SEQ ID NO: 12196 - RNA, 21 nt, Artificial Sequence
  LRRK2 RNA guide
agcuguguuuuguaccugaga

SEQ ID NO: 12197 - RNA, 21 nt, Artificial Sequence
  LRRK2 RNA guide
agguacaaaacacagcugguu

SEQ ID NO: 12198 - RNA, 21 nt, Artificial Sequence
  LRRK2 RNA guide
agguucucagguacaaaacac

SEQ ID NO: 12199 - RNA, 21 nt, Artificial Sequence
  LRRK2 RNA guide
agugagguucucagguacaaa

SEQ ID NO: 12200 - RNA, 21 nt, Artificial Sequence
  LRRK2 RNA guide
auaaccagcuguguuuuguac

SEQ ID NO: 12201 - RNA, 21 nt, Artificial Sequence
  LRRK2 RNA guide
auauaaccagcuguguuuugu

SEQ ID NO: 12202 - RNA, 21 nt, Artificial Sequence
  LRRK2 RNA guide
aucagugagguucucagguac

SEQ ID NO: 12203 - RNA, 21 nt, Artificial Sequence
  LRRK2 RNA guide
caaaacacagcugguuauaug

SEQ ID NO: 12204 - RNA, 21 nt, Artificial Sequence
  LRRK2 RNA guide
cagcuguguuuuguaccugag

SEQ ID NO: 12205 - RNA, 21 nt, Artificial Sequence
  LRRK2 RNA guide
cagguacaaaacacagcuggu

SEQ ID NO: 12206 - RNA, 21 nt, Artificial Sequence
  LRRK2 RNA guide
cagugagguucucagguacaa

SEQ ID NO: 12207 - RNA, 21 nt, Artificial Sequence
  LRRK2 RNA guide
cauauaaccagcuguguuuug

SEQ ID NO: 12208 - RNA, 21 nt, Artificial Sequence
  LRRK2 RNA guide
ccagcuguguuuuguaccuga

SEQ ID NO: 12209 - RNA, 21 nt, Artificial Sequence
  LRRK2 RNA guide
ccugucauauaaccagcugug

SEQ ID NO: 12210 - RNA, 21 nt, Artificial Sequence
  LRRK2 RNA guide
cucagguacaaaacacagcug

SEQ ID NO: 12211 - RNA, 21 nt, Artificial Sequence
  LRRK2 RNA guide
cugucauauaaccagcugugu

SEQ ID NO: 12212 - RNA, 21 nt, Artificial Sequence
  LRRK2 RNA guide
cuguguuuuguaccugagaac

SEQ ID NO: 12213 - RNA, 21 nt, Artificial Sequence
  LRRK2 RNA guide
gagguucucagguacaaaaca

SEQ ID NO: 12214 - RNA, 21 nt, Artificial Sequence
  LRRK2 RNA guide
gcuguguuuuguaccugagaa

SEQ ID NO: 12215 - RNA, 21 nt, Artificial Sequence
  LRRK2 RNA guide
gguacaaaacacagcugguua

SEQ ID NO: 12216 - RNA, 21 nt, Artificial Sequence
  LRRK2 RNA guide
gguucucagguacaaaacaca

SEQ ID NO: 12217 - RNA, 21 nt, Artificial Sequence
  LRRK2 RNA guide
guacaaaacacagcugguuau

SEQ ID NO: 12218 - RNA, 21 nt, Artificial Sequence
  LRRK2 RNA guide
gucauauaaccagcuguguuu

SEQ ID NO: 12219 - RNA, 21 nt, Artificial Sequence
  LRRK2 RNA guide
gugagguucucagguacaaaa

SEQ ID NO: 12220 - RNA, 21 nt, Artificial Sequence
  LRRK2 RNA guide
guguuuuguaccugagaaccu

SEQ ID NO: 12221 - RNA, 21 nt, Artificial Sequence
  LRRK2 RNA guide
guucucagguacaaaacacag

SEQ ID NO: 12222 - RNA, 21 nt, Artificial Sequence
  LRRK2 RNA guide
uaaccagcuguguuuuguacc

SEQ ID NO: 12223 - RNA, 21 nt, Artificial Sequence
  LRRK2 RNA guide
uaaccugucauauaaccagcu

SEQ ID NO: 12224 - RNA, 21 nt, Artificial Sequence
  LRRK2 RNA guide
uacaaaacacagcugguuaua

SEQ ID NO: 12225 - RNA, 21 nt, Artificial Sequence
  LRRK2 RNA guide
uauaaccagcuguguuuugua

SEQ ID NO: 12226 - RNA, 21 nt, Artificial Sequence
  LRRK2 RNA guide
ucagguacaaaacacagcugg

SEQ ID NO: 12227 - RNA, 21 nt, Artificial Sequence
  LRRK2 RNA guide
ucagugagguucucagguaca

SEQ ID NO: 12228 - RNA, 21 nt, Artificial Sequence
  LRRK2 RNA guide
ucauauaaccagcuguguuuu

SEQ ID NO: 12229 - RNA, 21 nt, Artificial Sequence
  LRRK2 RNA guide
ucucagguacaaaacacagcu

SEQ ID NO: 12230 - RNA, 21 nt, Artificial Sequence
  LRRK2 RNA guide
ugagguucucagguacaaaac

SEQ ID NO: 12231 - RNA, 21 nt, Artificial Sequence
  LRRK2 RNA guide
ugucauauaaccagcuguguu

SEQ ID NO: 12232 - RNA, 21 nt, Artificial Sequence
  LRRK2 RNA guide
uguguuuuguaccugagaacc

SEQ ID NO: 12233 - RNA, 21 nt, Artificial Sequence
  LRRK2 RNA guide
uguuuuguaccugagaaccuc

SEQ ID NO: 12234 - RNA, 21 nt, Artificial Sequence
  LRRK2 RNA guide
uuaaccugucauauaaccagc

SEQ ID NO: 12235 - RNA, 21 nt, Artificial Sequence
  LRRK2 RNA guide
uucucagguacaaaacacagc

SEQ ID NO: 12236 - RNA, 21 nt, Artificial Sequence
  LRRK2 RNA guide
uuuaaccugucauauaaccag

SEQ ID NO: 12237 - RNA, 22 nt, Artificial Sequence
  LRRK2 RNA guide
aaaacacagcugguuauaugac

SEQ ID NO: 12238 - RNA, 22 nt, Artificial Sequence
  LRRK2 RNA guide
aaacacagcugguuauaugaca

SEQ ID NO: 12239 - RNA, 22 nt, Artificial Sequence
  LRRK2 RNA guide
aacacagcugguuauaugacag

SEQ ID NO: 12240 - RNA, 22 nt, Artificial Sequence
  LRRK2 RNA guide
aaccagcuguguuuuguaccug

SEQ ID NO: 12241 - RNA, 22 nt, Artificial Sequence
  LRRK2 RNA guide
aaccugucauauaaccagcugu

SEQ ID NO: 12242 - RNA, 22 nt, Artificial Sequence
  LRRK2 RNA guide
acaaaacacagcugguuauaug

SEQ ID NO: 12243 - RNA, 22 nt, Artificial Sequence
  LRRK2 RNA guide
acacagcugguuauaugacagg

SEQ ID NO: 12244 - RNA, 22 nt, Artificial Sequence
  LRRK2 RNA guide
accagcuguguuuuguaccuga

SEQ ID NO: 12245 - RNA, 22 nt, Artificial Sequence
  LRRK2 RNA guide
accugucauauaaccagcugug

SEQ ID NO: 12246 - RNA, 22 nt, Artificial Sequence
  LRRK2 RNA guide
agcuguguuuuguaccugagaa

SEQ ID NO: 12247 - RNA, 22 nt, Artificial Sequence
  LRRK2 RNA guide
agguacaaaacacagcugguua

SEQ ID NO: 12248 - RNA, 22 nt, Artificial Sequence
  LRRK2 RNA guide
agguucucagguacaaaacaca

SEQ ID NO: 12249 - RNA, 22 nt, Artificial Sequence
  LRRK2 RNA guide
agugagguucucagguacaaaa

SEQ ID NO: 12250 - RNA, 22 nt, Artificial Sequence
  LRRK2 RNA guide
auaaccagcuguguuuuguacc

SEQ ID NO: 12251 - RNA, 22 nt, Artificial Sequence
  LRRK2 RNA guide
auauaaccagcuguguuuugua

SEQ ID NO: 12252 - RNA, 22 nt, Artificial Sequence
  LRRK2 RNA guide
aucagugagguucucagguaca

SEQ ID NO: 12253 - RNA, 22 nt, Artificial Sequence
  LRRK2 RNA guide
caaaacacagcugguuauauga

SEQ ID NO: 12254 - RNA, 22 nt, Artificial Sequence
  LRRK2 RNA guide
cagcuguguuuuguaccugaga

SEQ ID NO: 12255 - RNA, 22 nt, Artificial Sequence
  LRRK2 RNA guide
cagguacaaaacacagcugguu

SEQ ID NO: 12256 - RNA, 22 nt, Artificial Sequence
  LRRK2 RNA guide
cagugagguucucagguacaaa

SEQ ID NO: 12257 - RNA, 22 nt, Artificial Sequence
  LRRK2 RNA guide
cauauaaccagcuguguuuugu

SEQ ID NO: 12258 - RNA, 22 nt, Artificial Sequence
  LRRK2 RNA guide
caucagugagguucucagguac

SEQ ID NO: 12259 - RNA, 22 nt, Artificial Sequence
  LRRK2 RNA guide
ccagcuguguuuuguaccugag

SEQ ID NO: 12260 - RNA, 22 nt, Artificial Sequence
  LRRK2 RNA guide
ccugucauauaaccagcugugu

SEQ ID NO: 12261 - RNA, 22 nt, Artificial Sequence
  LRRK2 RNA guide
cucagguacaaaacacagcugg

SEQ ID NO: 12262 - RNA, 22 nt, Artificial Sequence
  LRRK2 RNA guide
cugucauauaaccagcuguguu

SEQ ID NO: 12263 - RNA, 22 nt, Artificial Sequence
  LRRK2 RNA guide
cuguguuuuguaccugagaacc

SEQ ID NO: 12264 - RNA, 22 nt, Artificial Sequence
  LRRK2 RNA guide
gagguucucagguacaaaacac

SEQ ID NO: 12265 - RNA, 22 nt, Artificial Sequence
  LRRK2 RNA guide
gcuguguuuuguaccugagaac

SEQ ID NO: 12266 - RNA, 22 nt, Artificial Sequence
  LRRK2 RNA guide
gguacaaaacacagcugguuau

SEQ ID NO: 12267 - RNA, 22 nt, Artificial Sequence
  LRRK2 RNA guide
gguucucagguacaaaacacag

SEQ ID NO: 12268 - RNA, 22 nt, Artificial Sequence
  LRRK2 RNA guide
guacaaaacacagcugguuaua

SEQ ID NO: 12269 - RNA, 22 nt, Artificial Sequence
  LRRK2 RNA guide
gucauauaaccagcuguguuuu

SEQ ID NO: 12270 - RNA, 22 nt, Artificial Sequence
  LRRK2 RNA guide
gugagguucucagguacaaaac

SEQ ID NO: 12271 - RNA, 22 nt, Artificial Sequence
  LRRK2 RNA guide
guguuuuguaccugagaaccuc

SEQ ID NO: 12272 - RNA, 22 nt, Artificial Sequence
  LRRK2 RNA guide
guucucagguacaaaacacagc

SEQ ID NO: 12273 - RNA, 22 nt, Artificial Sequence
  LRRK2 RNA guide
guuuaaccugucauauaaccag

SEQ ID NO: 12274 - RNA, 22 nt, Artificial Sequence
  LRRK2 RNA guide
uaaccagcuguguuuuguaccu

SEQ ID NO: 12275 - RNA, 22 nt, Artificial Sequence
  LRRK2 RNA guide
uaaccugucauauaaccagcug

SEQ ID NO: 12276 - RNA, 22 nt, Artificial Sequence
  LRRK2 RNA guide
uacaaaacacagcugguuauau

SEQ ID NO: 12277 - RNA, 22 nt, Artificial Sequence
  LRRK2 RNA guide
uauaaccagcuguguuuuguac

SEQ ID NO: 12278 - RNA, 22 nt, Artificial Sequence
  LRRK2 RNA guide
ucagguacaaaacacagcuggu

SEQ ID NO: 12279 - RNA, 22 nt, Artificial Sequence
  LRRK2 RNA guide
ucagugagguucucagguacaa

SEQ ID NO: 12280 - RNA, 22 nt, Artificial Sequence
  LRRK2 RNA guide
ucauauaaccagcuguguuuug

SEQ ID NO: 12281 - RNA, 22 nt, Artificial Sequence
  LRRK2 RNA guide
ucucagguacaaaacacagcug

SEQ ID NO: 12282 - RNA, 22 nt, Artificial Sequence
  LRRK2 RNA guide
ugagguucucagguacaaaaca

SEQ ID NO: 12283 - RNA, 22 nt, Artificial Sequence
  LRRK2 RNA guide
ugucauauaaccagcuguguuu

SEQ ID NO: 12284 - RNA, 22 nt, Artificial Sequence
  LRRK2 RNA guide
uguguuuuguaccugagaaccu

SEQ ID NO: 12285 - RNA, 22 nt, Artificial Sequence
  LRRK2 RNA guide
uguuuuguaccugagaaccuca

SEQ ID NO: 12286 - RNA, 22 nt, Artificial Sequence
  LRRK2 RNA guide
uuaaccugucauauaaccagcu

SEQ ID NO: 12287 - RNA, 22 nt, Artificial Sequence
  LRRK2 RNA guide
uucucagguacaaaacacagcu

SEQ ID NO: 12288 - RNA, 22 nt, Artificial Sequence
  LRRK2 RNA guide
uuuaaccugucauauaaccagc

SEQ ID NO: 12289 - RNA, 20 nt, Artificial Sequence
  LRRK2 RNA guide
aaaaugagaugcuccaguuu

SEQ ID NO: 12290 - RNA, 20 nt, Artificial Sequence
  LRRK2 RNA guide
aaacuggagcaucucauuuu

SEQ ID NO: 12291 - RNA, 20 nt, Artificial Sequence
  LRRK2 RNA guide
aaaugagaugcuccaguuuc

SEQ ID NO: 12292 - RNA, 20 nt, Artificial Sequence
  LRRK2 RNA guide
aacuggagcaucucauuuua

SEQ ID NO: 12293 - RNA, 20 nt, Artificial Sequence
  LRRK2 RNA guide
aaugagaugcuccaguuucu

SEQ ID NO: 12294 - RNA, 20 nt, Artificial Sequence
  LRRK2 RNA guide
acccuucuaaaaugagaugc

SEQ ID NO: 12295 - RNA, 20 nt, Artificial Sequence
  LRRK2 RNA guide
acuggagcaucucauuuuag

SEQ ID NO: 12296 - RNA, 20 nt, Artificial Sequence
  LRRK2 RNA guide
agaaacuggagcaucucauu

SEQ ID NO: 12297 - RNA, 20 nt, Artificial Sequence
  LRRK2 RNA guide
agagaaacuggagcaucuca

SEQ ID NO: 12298 - RNA, 20 nt, Artificial Sequence
  LRRK2 RNA guide
agaugcuccaguuucucuac

SEQ ID NO: 12299 - RNA, 20 nt, Artificial Sequence
  LRRK2 RNA guide
agcaucucauuuuagaaggg

SEQ ID NO: 12300 - RNA, 20 nt, Artificial Sequence
  LRRK2 RNA guide
aucucauuuuagaaggguaa

SEQ ID NO: 12301 - RNA, 20 nt, Artificial Sequence
  LRRK2 RNA guide
augagaugcuccaguuucuc

SEQ ID NO: 12302 - RNA, 20 nt, Artificial Sequence
  LRRK2 RNA guide
augugguagagaaacuggag

SEQ ID NO: 12303 - RNA, 20 nt, Artificial Sequence
  LRRK2 RNA guide
caucucauuuuagaagggua

SEQ ID NO: 12304 - RNA, 20 nt, Artificial Sequence
  LRRK2 RNA guide
cccuucuaaaaugagaugcu

SEQ ID NO: 12305 - RNA, 20 nt, Artificial Sequence
  LRRK2 RNA guide
ccuucuaaaaugagaugcuc

SEQ ID NO: 12306 - RNA, 20 nt, Artificial Sequence
  LRRK2 RNA guide
cuaaaaugagaugcuccagu

SEQ ID NO: 12307 - RNA, 20 nt, Artificial Sequence
  LRRK2 RNA guide
cuggagcaucucauuuuaga

SEQ ID NO: 12308 - RNA, 20 nt, Artificial Sequence
  LRRK2 RNA guide
cuuacccuucuaaaaugaga

SEQ ID NO: 12309 - RNA, 20 nt, Artificial Sequence
  LRRK2 RNA guide
cuucuaaaaugagaugcucc

SEQ ID NO: 12310 - RNA, 20 nt, Artificial Sequence
  LRRK2 RNA guide
gaaacuggagcaucucauuu

SEQ ID NO: 12311 - RNA, 20 nt, Artificial Sequence
  LRRK2 RNA guide
gagaaacuggagcaucucau

SEQ ID NO: 12312 - RNA, 20 nt, Artificial Sequence
  LRRK2 RNA guide
gagaugcuccaguuucucua

SEQ ID NO: 12313 - RNA, 20 nt, Artificial Sequence
  LRRK2 RNA guide
gagcaucucauuuuagaagg

SEQ ID NO: 12314 - RNA, 20 nt, Artificial Sequence
  LRRK2 RNA guide
gaugcuccaguuucucuacc

SEQ ID NO: 12315 - RNA, 20 nt, Artificial Sequence
  LRRK2 RNA guide
gaugugguagagaaacugga

SEQ ID NO: 12316 - RNA, 20 nt, Artificial Sequence
  LRRK2 RNA guide
gcaucucauuuuagaagggu

SEQ ID NO: 12317 - RNA, 20 nt, Artificial Sequence
  LRRK2 RNA guide
ggagcaucucauuuuagaag

SEQ ID NO: 12318 - RNA, 20 nt, Artificial Sequence
  LRRK2 RNA guide
gguagagaaacuggagcauc

SEQ ID NO: 12319 - RNA, 20 nt, Artificial Sequence
  LRRK2 RNA guide
guagagaaacuggagcaucu

SEQ ID NO: 12320 - RNA, 20 nt, Artificial Sequence
  LRRK2 RNA guide
gugguagagaaacuggagca

SEQ ID NO: 12321 - RNA, 20 nt, Artificial Sequence
  LRRK2 RNA guide
uaaaaugagaugcuccaguu

SEQ ID NO: 12322 - RNA, 20 nt, Artificial Sequence
  LRRK2 RNA guide
uacccuucuaaaaugagaug

SEQ ID NO: 12323 - RNA, 20 nt, Artificial Sequence
  LRRK2 RNA guide
uagagaaacuggagcaucuc

SEQ ID NO: 12324 - RNA, 20 nt, Artificial Sequence
  LRRK2 RNA guide
ucuaaaaugagaugcuccag

SEQ ID NO: 12325 - RNA, 20 nt, Artificial Sequence
  LRRK2 RNA guide
ucuuacccuucuaaaaugag

SEQ ID NO: 12326 - RNA, 20 nt, Artificial Sequence
  LRRK2 RNA guide
ucuuucuuacccuucuaaaa

SEQ ID NO: 12327 - RNA, 20 nt, Artificial Sequence
  LRRK2 RNA guide
ugagaugcuccaguuucucu

SEQ ID NO: 12328 - RNA, 20 nt, Artificial Sequence
  LRRK2 RNA guide
ugaugugguagagaaacugg

SEQ ID NO: 12329 - RNA, 20 nt, Artificial Sequence
  LRRK2 RNA guide
uggagcaucucauuuuagaa

SEQ ID NO: 12330 - RNA, 20 nt, Artificial Sequence
  LRRK2 RNA guide
ugguagagaaacuggagcau

SEQ ID NO: 12331 - RNA, 20 nt, Artificial Sequence
  LRRK2 RNA guide
ugugguagagaaacuggagc

SEQ ID NO: 12332 - RNA, 20 nt, Artificial Sequence
  LRRK2 RNA guide
uuacccuucuaaaaugagau

SEQ ID NO: 12333 - RNA, 20 nt, Artificial Sequence
  LRRK2 RNA guide
uucuaaaaugagaugcucca

SEQ ID NO: 12334 - RNA, 20 nt, Artificial Sequence
  LRRK2 RNA guide
uucuuacccuucuaaaauga

SEQ ID NO: 12335 - RNA, 20 nt, Artificial Sequence
  LRRK2 RNA guide
uuucuuacccuucuaaaaug

SEQ ID NO: 12336 - RNA, 21 nt, Artificial Sequence
  LRRK2 RNA guide
aaaaugagaugcuccaguuuc

SEQ ID NO: 12337 - RNA, 21 nt, Artificial Sequence
  LRRK2 RNA guide
aaacuggagcaucucauuuua

SEQ ID NO: 12338 - RNA, 21 nt, Artificial Sequence
  LRRK2 RNA guide
aaaugagaugcuccaguuucu

SEQ ID NO: 12339 - RNA, 21 nt, Artificial Sequence
  LRRK2 RNA guide
aacuggagcaucucauuuuag

SEQ ID NO: 12340 - RNA, 21 nt, Artificial Sequence
  LRRK2 RNA guide
aaugagaugcuccaguuucuc

SEQ ID NO: 12341 - RNA, 21 nt, Artificial Sequence
  LRRK2 RNA guide
acccuucuaaaaugagaugcu

SEQ ID NO: 12342 - RNA, 21 nt, Artificial Sequence
  LRRK2 RNA guide
acuggagcaucucauuuuaga

SEQ ID NO: 12343 - RNA, 21 nt, Artificial Sequence
  LRRK2 RNA guide
agaaacuggagcaucucauuu

SEQ ID NO: 12344 - RNA, 21 nt, Artificial Sequence
  LRRK2 RNA guide
agagaaacuggagcaucucau

SEQ ID NO: 12345 - RNA, 21 nt, Artificial Sequence
  LRRK2 RNA guide
agaugcuccaguuucucuacc

SEQ ID NO: 12346 - RNA, 21 nt, Artificial Sequence
  LRRK2 RNA guide
agcaucucauuuuagaagggu

SEQ ID NO: 12347 - RNA, 21 nt, Artificial Sequence
  LRRK2 RNA guide
aucucauuuuagaaggguaag

SEQ ID NO: 12348 - RNA, 21 nt, Artificial Sequence
  LRRK2 RNA guide
augagaugcuccaguuucucu

SEQ ID NO: 12349 - RNA, 21 nt, Artificial Sequence
  LRRK2 RNA guide
augugguagagaaacuggagc

SEQ ID NO: 12350 - RNA, 21 nt, Artificial Sequence
  LRRK2 RNA guide
caucucauuuuagaaggguaa

SEQ ID NO: 12351 - RNA, 21 nt, Artificial Sequence
  LRRK2 RNA guide
cccuucuaaaaugagaugcuc

SEQ ID NO: 12352 - RNA, 21 nt, Artificial Sequence
  LRRK2 RNA guide
ccuucuaaaaugagaugcucc

SEQ ID NO: 12353 - RNA, 21 nt, Artificial Sequence
  LRRK2 RNA guide
cuaaaaugagaugcuccaguu

SEQ ID NO: 12354 - RNA, 21 nt, Artificial Sequence
  LRRK2 RNA guide
cucuuucuuacccuucuaaaa

SEQ ID NO: 12355 - RNA, 21 nt, Artificial Sequence
  LRRK2 RNA guide
cugaugugguagagaaacugg

SEQ ID NO: 12356 - RNA, 21 nt, Artificial Sequence
  LRRK2 RNA guide
cuggagcaucucauuuuagaa

SEQ ID NO: 12357 - RNA, 21 nt, Artificial Sequence
  LRRK2 RNA guide
cuuacccuucuaaaaugagau

SEQ ID NO: 12358 - RNA, 21 nt, Artificial Sequence
  LRRK2 RNA guide
cuucuaaaaugagaugcucca

SEQ ID NO: 12359 - RNA, 21 nt, Artificial Sequence
  LRRK2 RNA guide
cuuucuuacccuucuaaaaug

SEQ ID NO: 12360 - RNA, 21 nt, Artificial Sequence
  LRRK2 RNA guide
gaaacuggagcaucucauuuu

SEQ ID NO: 12361 - RNA, 21 nt, Artificial Sequence
  LRRK2 RNA guide
gagaaacuggagcaucucauu

SEQ ID NO: 12362 - RNA, 21 nt, Artificial Sequence
  LRRK2 RNA guide
gagaugcuccaguuucucuac

SEQ ID NO: 12363 - RNA, 21 nt, Artificial Sequence
  LRRK2 RNA guide
gagcaucucauuuuagaaggg

SEQ ID NO: 12364 - RNA, 21 nt, Artificial Sequence
  LRRK2 RNA guide
gaugcuccaguuucucuacca

SEQ ID NO: 12365 - RNA, 21 nt, Artificial Sequence
  LRRK2 RNA guide
gaugugguagagaaacuggag

SEQ ID NO: 12366 - RNA, 21 nt, Artificial Sequence
  LRRK2 RNA guide
gcaucucauuuuagaagggua

SEQ ID NO: 12367 - RNA, 21 nt, Artificial Sequence
  LRRK2 RNA guide
ggagcaucucauuuuagaagg

SEQ ID NO: 12368 - RNA, 21 nt, Artificial Sequence
  LRRK2 RNA guide
gguagagaaacuggagcaucu

SEQ ID NO: 12369 - RNA, 21 nt, Artificial Sequence
  LRRK2 RNA guide
guagagaaacuggagcaucuc

SEQ ID NO: 12370 - RNA, 21 nt, Artificial Sequence
  LRRK2 RNA guide
gugguagagaaacuggagcau

SEQ ID NO: 12371 - RNA, 21 nt, Artificial Sequence
  LRRK2 RNA guide
uaaaaugagaugcuccaguuu

SEQ ID NO: 12372 - RNA, 21 nt, Artificial Sequence
  LRRK2 RNA guide
uacccuucuaaaaugagaugc

SEQ ID NO: 12373 - RNA, 21 nt, Artificial Sequence
  LRRK2 RNA guide
uagagaaacuggagcaucuca

SEQ ID NO: 12374 - RNA, 21 nt, Artificial Sequence
  LRRK2 RNA guide
ucuaaaaugagaugcuccagu

SEQ ID NO: 12375 - RNA, 21 nt, Artificial Sequence
  LRRK2 RNA guide
ucuuacccuucuaaaaugaga

SEQ ID NO: 12376 - RNA, 21 nt, Artificial Sequence
  LRRK2 RNA guide
ugagaugcuccaguuucucua

SEQ ID NO: 12377 - RNA, 21 nt, Artificial Sequence
  LRRK2 RNA guide
ugaugugguagagaaacugga

SEQ ID NO: 12378 - RNA, 21 nt, Artificial Sequence
  LRRK2 RNA guide
uggagcaucucauuuuagaag

SEQ ID NO: 12379 - RNA, 21 nt, Artificial Sequence
  LRRK2 RNA guide
ugguagagaaacuggagcauc

SEQ ID NO: 12380 - RNA, 21 nt, Artificial Sequence
  LRRK2 RNA guide
uuacccuucuaaaaugagaug

SEQ ID NO: 12381 - RNA, 21 nt, Artificial Sequence
  LRRK2 RNA guide
uucuaaaaugagaugcuccag

SEQ ID NO: 12382 - RNA, 21 nt, Artificial Sequence
  LRRK2 RNA guide
uucuuacccuucuaaaaugag

SEQ ID NO: 12383 - RNA, 22 nt, Artificial Sequence
  LRRK2 RNA guide
aaaaugagaugcuccaguuucu

SEQ ID NO: 12384 - RNA, 22 nt, Artificial Sequence
  LRRK2 RNA guide
aaacuggagcaucucauuuuag

SEQ ID NO: 12385 - RNA, 22 nt, Artificial Sequence
  LRRK2 RNA guide
aaaugagaugcuccaguuucuc

SEQ ID NO: 12386 - RNA, 22 nt, Artificial Sequence
  LRRK2 RNA guide
aacuggagcaucucauuuuaga

SEQ ID NO: 12387 - RNA, 22 nt, Artificial Sequence
  LRRK2 RNA guide
aaugagaugcuccaguuucucu

SEQ ID NO: 12388 - RNA, 22 nt, Artificial Sequence
  LRRK2 RNA guide
acccuucuaaaaugagaugcuc

SEQ ID NO: 12389 - RNA, 22 nt, Artificial Sequence
  LRRK2 RNA guide
acugaugugguagagaaacugg

SEQ ID NO: 12390 - RNA, 22 nt, Artificial Sequence
  LRRK2 RNA guide
acuggagcaucucauuuuagaa

SEQ ID NO: 12391 - RNA, 22 nt, Artificial Sequence
  LRRK2 RNA guide
agaaacuggagcaucucauuuu

SEQ ID NO: 12392 - RNA, 22 nt, Artificial Sequence
  LRRK2 RNA guide
agagaaacuggagcaucucauu

SEQ ID NO: 12393 - RNA, 22 nt, Artificial Sequence
  LRRK2 RNA guide
agaugcuccaguuucucuacca

SEQ ID NO: 12394 - RNA, 22 nt, Artificial Sequence
  LRRK2 RNA guide
agcaucucauuuuagaagggua

SEQ ID NO: 12395 - RNA, 22 nt, Artificial Sequence
  LRRK2 RNA guide
aucucauuuuagaaggguaaga

SEQ ID NO: 12396 - RNA, 22 nt, Artificial Sequence
  LRRK2 RNA guide
augagaugcuccaguuucucua

SEQ ID NO: 12397 - RNA, 22 nt, Artificial Sequence
  LRRK2 RNA guide
augugguagagaaacuggagca

SEQ ID NO: 12398 - RNA, 22 nt, Artificial Sequence
  LRRK2 RNA guide
caucucauuuuagaaggguaag

SEQ ID NO: 12399 - RNA, 22 nt, Artificial Sequence
  LRRK2 RNA guide
cccuucuaaaaugagaugcucc

SEQ ID NO: 12400 - RNA, 22 nt, Artificial Sequence
  LRRK2 RNA guide
ccuucuaaaaugagaugcucca

SEQ ID NO: 12401 - RNA, 22 nt, Artificial Sequence
  LRRK2 RNA guide
cuaaaaugagaugcuccaguuu

SEQ ID NO: 12402 - RNA, 22 nt, Artificial Sequence
  LRRK2 RNA guide
cucuuucuuacccuucuaaaau

SEQ ID NO: 12403 - RNA, 22 nt, Artificial Sequence
  LRRK2 RNA guide
cugaugugguagagaaacugga

SEQ ID NO: 12404 - RNA, 22 nt, Artificial Sequence
  LRRK2 RNA guide
cuggagcaucucauuuuagaag

SEQ ID NO: 12405 - RNA, 22 nt, Artificial Sequence
  LRRK2 RNA guide
cuuacccuucuaaaaugagaug

SEQ ID NO: 12406 - RNA, 22 nt, Artificial Sequence
  LRRK2 RNA guide
cuucuaaaaugagaugcuccag

SEQ ID NO: 12407 - RNA, 22 nt, Artificial Sequence
  LRRK2 RNA guide
cuuucuuacccuucuaaaauga

SEQ ID NO: 12408 - RNA, 22 nt, Artificial Sequence
  LRRK2 RNA guide
gaaacuggagcaucucauuuua

SEQ ID NO: 12409 - RNA, 22 nt, Artificial Sequence
  LRRK2 RNA guide
gagaaacuggagcaucucauuu

SEQ ID NO: 12410 - RNA, 22 nt, Artificial Sequence
  LRRK2 RNA guide
gagaugcuccaguuucucuacc

SEQ ID NO: 12411 - RNA, 22 nt, Artificial Sequence
  LRRK2 RNA guide
gagcaucucauuuuagaagggu

SEQ ID NO: 12412 - RNA, 22 nt, Artificial Sequence
  LRRK2 RNA guide
gaugcuccaguuucucuaccac

SEQ ID NO: 12413 - RNA, 22 nt, Artificial Sequence
  LRRK2 RNA guide
gaugugguagagaaacuggagc

SEQ ID NO: 12414 - RNA, 22 nt, Artificial Sequence
  LRRK2 RNA guide
gcaucucauuuuagaaggguaa

SEQ ID NO: 12415 - RNA, 22 nt, Artificial Sequence
  LRRK2 RNA guide
gcucuuucuuacccuucuaaaa

SEQ ID NO: 12416 - RNA, 22 nt, Artificial Sequence
  LRRK2 RNA guide
ggagcaucucauuuuagaaggg

SEQ ID NO: 12417 - RNA, 22 nt, Artificial Sequence
  LRRK2 RNA guide
gguagagaaacuggagcaucuc

SEQ ID NO: 12418 - RNA, 22 nt, Artificial Sequence
  LRRK2 RNA guide
guagagaaacuggagcaucuca

SEQ ID NO: 12419 - RNA, 22 nt, Artificial Sequence
  LRRK2 RNA guide
gugguagagaaacuggagcauc

SEQ ID NO: 12420 - RNA, 22 nt, Artificial Sequence
  LRRK2 RNA guide
uaaaaugagaugcuccaguuuc

SEQ ID NO: 12421 - RNA, 22 nt, Artificial Sequence
  LRRK2 RNA guide
uacccuucuaaaaugagaugcu

SEQ ID NO: 12422 - RNA, 22 nt, Artificial Sequence
  LRRK2 RNA guide
uagagaaacuggagcaucucau

SEQ ID NO: 12423 - RNA, 22 nt, Artificial Sequence
  LRRK2 RNA guide
ucuaaaaugagaugcuccaguu

SEQ ID NO: 12424 - RNA, 22 nt, Artificial Sequence
  LRRK2 RNA guide
ucuuacccuucuaaaaugagau

SEQ ID NO: 12425 - RNA, 22 nt, Artificial Sequence
  LRRK2 RNA guide
ucuuucuuacccuucuaaaaug

SEQ ID NO: 12426 - RNA, 22 nt, Artificial Sequence
  LRRK2 RNA guide
ugagaugcuccaguuucucuac

SEQ ID NO: 12427 - RNA, 22 nt, Artificial Sequence
  LRRK2 RNA guide
ugaugugguagagaaacuggag

SEQ ID NO: 12428 - RNA, 22 nt, Artificial Sequence
  LRRK2 RNA guide
uggagcaucucauuuuagaagg

SEQ ID NO: 12429 - RNA, 22 nt, Artificial Sequence
  LRRK2 RNA guide
ugguagagaaacuggagcaucu

SEQ ID NO: 12430 - RNA, 22 nt, Artificial Sequence
  LRRK2 RNA guide
ugugguagagaaacuggagcau

SEQ ID NO: 12431 - RNA, 22 nt, Artificial Sequence
  LRRK2 RNA guide
uuacccuucuaaaaugagaugc

SEQ ID NO: 12432 - RNA, 22 nt, Artificial Sequence
  LRRK2 RNA guide
uucuaaaaugagaugcuccagu

SEQ ID NO: 12433 - RNA, 22 nt, Artificial Sequence
  LRRK2 RNA guide
uucuuacccuucuaaaaugaga

SEQ ID NO: 12434 - RNA, 22 nt, Artificial Sequence
  LRRK2 RNA guide
uuucuuacccuucuaaaaugag

SEQ ID NO: 12435 - RNA, 20 nt, Artificial Sequence
  LRRK2 RNA guide
aaacuggagcagcucauuuu

SEQ ID NO: 12436 - RNA, 20 nt, Artificial Sequence
  LRRK2 RNA guide
aacuggagcagcucauuuug

SEQ ID NO: 12437 - RNA, 20 nt, Artificial Sequence
  LRRK2 RNA guide
aaugagcucuuucuuacccu

SEQ ID NO: 12438 - RNA, 20 nt, Artificial Sequence
  LRRK2 RNA guide
acccuuccaaaaugagcugc

SEQ ID NO: 12439 - RNA, 20 nt, Artificial Sequence
  LRRK2 RNA guide
acuggagcagcucauuuugg

SEQ ID NO: 12440 - RNA, 20 nt, Artificial Sequence
  LRRK2 RNA guide
agaaacuggagcagcucauu

SEQ ID NO: 12441 - RNA, 20 nt, Artificial Sequence
  LRRK2 RNA guide
agagaaacuggagcagcuca

SEQ ID NO: 12442 - RNA, 20 nt, Artificial Sequence
  LRRK2 RNA guide
agcagcucauuuuggaaggg

SEQ ID NO: 12443 - RNA, 20 nt, Artificial Sequence
  LRRK2 RNA guide
agcucauuuuggaaggguaa

SEQ ID NO: 12444 - RNA, 20 nt, Artificial Sequence
  LRRK2 RNA guide
agcucuuucuuacccuucca

SEQ ID NO: 12445 - RNA, 20 nt, Artificial Sequence
  LRRK2 RNA guide
augagcucuuucuuacccuu

SEQ ID NO: 12446 - RNA, 20 nt, Artificial Sequence
  LRRK2 RNA guide
auuuuggaaggguaagaaag

SEQ ID NO: 12447 - RNA, 20 nt, Artificial Sequence
  LRRK2 RNA guide
cagcucauuuuggaagggua

SEQ ID NO: 12448 - RNA, 20 nt, Artificial Sequence
  LRRK2 RNA guide
cauuuuggaaggguaagaaa

SEQ ID NO: 12449 - RNA, 20 nt, Artificial Sequence
  LRRK2 RNA guide
ccaaaaugagcugcuccagu

SEQ ID NO: 12450 - RNA, 20 nt, Artificial Sequence
  LRRK2 RNA guide
cccuuccaaaaugagcugcu

SEQ ID NO: 12451 - RNA, 20 nt, Artificial Sequence
  LRRK2 RNA guide
ccuuccaaaaugagcugcuc

SEQ ID NO: 12452 - RNA, 20 nt, Artificial Sequence
  LRRK2 RNA guide
cucauuuuggaaggguaaga

SEQ ID NO: 12453 - RNA, 20 nt, Artificial Sequence
  LRRK2 RNA guide
cucuuucuuacccuuccaaa

SEQ ID NO: 12454 - RNA, 20 nt, Artificial Sequence
  LRRK2 RNA guide
cuggagcagcucauuuugga

SEQ ID NO: 12455 - RNA, 20 nt, Artificial Sequence
  LRRK2 RNA guide
cuuacccuuccaaaaugagc

SEQ ID NO: 12456 - RNA, 20 nt, Artificial Sequence
  LRRK2 RNA guide
cuuccaaaaugagcugcucc

SEQ ID NO: 12457 - RNA, 20 nt, Artificial Sequence
  LRRK2 RNA guide
cuuucuuacccuuccaaaau

SEQ ID NO: 12458 - RNA, 20 nt, Artificial Sequence
  LRRK2 RNA guide
gagaaacuggagcagcucau

SEQ ID NO: 12459 - RNA, 20 nt, Artificial Sequence
  LRRK2 RNA guide
gagcagcucauuuuggaagg

SEQ ID NO: 12460 - RNA, 20 nt, Artificial Sequence
  LRRK2 RNA guide
gagcucuuucuuacccuucc

SEQ ID NO: 12461 - RNA, 20 nt, Artificial Sequence
  LRRK2 RNA guide
gcagcucauuuuggaagggu

SEQ ID NO: 12462 - RNA, 20 nt, Artificial Sequence
  LRRK2 RNA guide
gcucauuuuggaaggguaag

SEQ ID NO: 12463 - RNA, 20 nt, Artificial Sequence
  LRRK2 RNA guide
gcucuuucuuacccuuccaa

SEQ ID NO: 12464 - RNA, 20 nt, Artificial Sequence
  LRRK2 RNA guide
ggagcagcucauuuuggaag

SEQ ID NO: 12465 - RNA, 20 nt, Artificial Sequence
  LRRK2 RNA guide
uaaugagcucuuucuuaccc

SEQ ID NO: 12466 - RNA, 20 nt, Artificial Sequence
  LRRK2 RNA guide
uacccuuccaaaaugagcug

SEQ ID NO: 12467 - RNA, 20 nt, Artificial Sequence
  LRRK2 RNA guide
ucauuuuggaaggguaagaa

SEQ ID NO: 12468 - RNA, 20 nt, Artificial Sequence
  LRRK2 RNA guide
uccaaaaugagcugcuccag

SEQ ID NO: 12469 - RNA, 20 nt, Artificial Sequence
  LRRK2 RNA guide
ucuuacccuuccaaaaugag

SEQ ID NO: 12470 - RNA, 20 nt, Artificial Sequence
  LRRK2 RNA guide
ucuuucuuacccuuccaaaa

SEQ ID NO: 12471 - RNA, 20 nt, Artificial Sequence
  LRRK2 RNA guide
ugagcucuuucuuacccuuc

SEQ ID NO: 12472 - RNA, 20 nt, Artificial Sequence
  LRRK2 RNA guide
uggaaggguaagaaagagcu

SEQ ID NO: 12473 - RNA, 20 nt, Artificial Sequence
  LRRK2 RNA guide
uggagcagcucauuuuggaa

SEQ ID NO: 12474 - RNA, 20 nt, Artificial Sequence
  LRRK2 RNA guide
uuaaugagcucuuucuuacc

SEQ ID NO: 12475 - RNA, 20 nt, Artificial Sequence
  LRRK2 RNA guide
uuacccuuccaaaaugagcu

SEQ ID NO: 12476 - RNA, 20 nt, Artificial Sequence
  LRRK2 RNA guide
uuccaaaaugagcugcucca

SEQ ID NO: 12477 - RNA, 20 nt, Artificial Sequence
  LRRK2 RNA guide
uucuuacccuuccaaaauga

SEQ ID NO: 12478 - RNA, 20 nt, Artificial Sequence
  LRRK2 RNA guide
uuggaaggguaagaaagagc

SEQ ID NO: 12479 - RNA, 20 nt, Artificial Sequence
  LRRK2 RNA guide
uuucuuacccuuccaaaaug

SEQ ID NO: 12480 - RNA, 20 nt, Artificial Sequence
  LRRK2 RNA guide
uuuggaaggguaagaaagag

SEQ ID NO: 12481 - RNA, 20 nt, Artificial Sequence
  LRRK2 RNA guide
uuuuggaaggguaagaaaga

SEQ ID NO: 12482 - RNA, 21 nt, Artificial Sequence
  LRRK2 RNA guide
aaacuggagcagcucauuuug

SEQ ID NO: 12483 - RNA, 21 nt, Artificial Sequence
  LRRK2 RNA guide
aacuggagcagcucauuuugg

SEQ ID NO: 12484 - RNA, 21 nt, Artificial Sequence
  LRRK2 RNA guide
aaugagcucuuucuuacccuu

SEQ ID NO: 12485 - RNA, 21 nt, Artificial Sequence
  LRRK2 RNA guide
acccuuccaaaaugagcugcu

SEQ ID NO: 12486 - RNA, 21 nt, Artificial Sequence
  LRRK2 RNA guide
acuggagcagcucauuuugga

SEQ ID NO: 12487 - RNA, 21 nt, Artificial Sequence
  LRRK2 RNA guide
agaaacuggagcagcucauuu

SEQ ID NO: 12488 - RNA, 21 nt, Artificial Sequence
  LRRK2 RNA guide
agagaaacuggagcagcucau

SEQ ID NO: 12489 - RNA, 21 nt, Artificial Sequence
  LRRK2 RNA guide
agcagcucauuuuggaagggu

SEQ ID NO: 12490 - RNA, 21 nt, Artificial Sequence
  LRRK2 RNA guide
agcucauuuuggaaggguaag

SEQ ID NO: 12491 - RNA, 21 nt, Artificial Sequence
  LRRK2 RNA guide
agcucuuucuuacccuuccaa

SEQ ID NO: 12492 - RNA, 21 nt, Artificial Sequence
  LRRK2 RNA guide
augagcucuuucuuacccuuc

SEQ ID NO: 12493 - RNA, 21 nt, Artificial Sequence
  LRRK2 RNA guide
auuuuggaaggguaagaaaga

SEQ ID NO: 12494 - RNA, 21 nt, Artificial Sequence
  LRRK2 RNA guide
cagcucauuuuggaaggguaa

SEQ ID NO: 12495 - RNA, 21 nt, Artificial Sequence
  LRRK2 RNA guide
cauuuuggaaggguaagaaag

SEQ ID NO: 12496 - RNA, 21 nt, Artificial Sequence
  LRRK2 RNA guide
ccaaaaugagcugcuccaguu

SEQ ID NO: 12497 - RNA, 21 nt, Artificial Sequence
  LRRK2 RNA guide
cccuuccaaaaugagcugcuc

SEQ ID NO: 12498 - RNA, 21 nt, Artificial Sequence
  LRRK2 RNA guide
ccuuccaaaaugagcugcucc

SEQ ID NO: 12499 - RNA, 21 nt, Artificial Sequence
  LRRK2 RNA guide
cucauuuuggaaggguaagaa

SEQ ID NO: 12500 - RNA, 21 nt, Artificial Sequence
  LRRK2 RNA guide
cucuuucuuacccuuccaaaa

SEQ ID NO: 12501 - RNA, 21 nt, Artificial Sequence
  LRRK2 RNA guide
cuggagcagcucauuuuggaa

SEQ ID NO: 12502 - RNA, 21 nt, Artificial Sequence
  LRRK2 RNA guide
cuuacccuuccaaaaugagcu

SEQ ID NO: 12503 - RNA, 21 nt, Artificial Sequence
  LRRK2 RNA guide
cuuccaaaaugagcugcucca

SEQ ID NO: 12504 - RNA, 21 nt, Artificial Sequence
  LRRK2 RNA guide
cuuucuuacccuuccaaaaug

SEQ ID NO: 12505 - RNA, 21 nt, Artificial Sequence
  LRRK2 RNA guide
gaaacuggagcagcucauuuu

SEQ ID NO: 12506 - RNA, 21 nt, Artificial Sequence
  LRRK2 RNA guide
gagcagcucauuuuggaaggg

SEQ ID NO: 12507 - RNA, 21 nt, Artificial Sequence
  LRRK2 RNA guide
gagcucuuucuuacccuucca

SEQ ID NO: 12508 - RNA, 21 nt, Artificial Sequence
  LRRK2 RNA guide
gcagcucauuuuggaagggua

SEQ ID NO: 12509 - RNA, 21 nt, Artificial Sequence
  LRRK2 RNA guide
gcucauuuuggaaggguaaga

SEQ ID NO: 12510 - RNA, 21 nt, Artificial Sequence
  LRRK2 RNA guide
gcucuuucuuacccuuccaaa

SEQ ID NO: 12511 - RNA, 21 nt, Artificial Sequence
  LRRK2 RNA guide
ggagcagcucauuuuggaagg

SEQ ID NO: 12512 - RNA, 21 nt, Artificial Sequence
  LRRK2 RNA guide
uaaugagcucuuucuuacccu

SEQ ID NO: 12513 - RNA, 21 nt, Artificial Sequence
  LRRK2 RNA guide
uacccuuccaaaaugagcugc

SEQ ID NO: 12514 - RNA, 21 nt, Artificial Sequence
  LRRK2 RNA guide
uagagaaacuggagcagcuca

SEQ ID NO: 12515 - RNA, 21 nt, Artificial Sequence
  LRRK2 RNA guide
ucauuuuggaaggguaagaaa

SEQ ID NO: 12516 - RNA, 21 nt, Artificial Sequence
  LRRK2 RNA guide
uccaaaaugagcugcuccagu

SEQ ID NO: 12517 - RNA, 21 nt, Artificial Sequence
  LRRK2 RNA guide
ucuuacccuuccaaaaugagc

SEQ ID NO: 12518 - RNA, 21 nt, Artificial Sequence
  LRRK2 RNA guide
ucuuucuuacccuuccaaaau

SEQ ID NO: 12519 - RNA, 21 nt, Artificial Sequence
  LRRK2 RNA guide
ugagcucuuucuuacccuucc

SEQ ID NO: 12520 - RNA, 21 nt, Artificial Sequence
  LRRK2 RNA guide
uggaaggguaagaaagagcuc

SEQ ID NO: 12521 - RNA, 21 nt, Artificial Sequence
  LRRK2 RNA guide
uggagcagcucauuuuggaag

SEQ ID NO: 12522 - RNA, 21 nt, Artificial Sequence
  LRRK2 RNA guide
uuaaugagcucuuucuuaccc

SEQ ID NO: 12523 - RNA, 21 nt, Artificial Sequence
  LRRK2 RNA guide
uuacccuuccaaaaugagcug

SEQ ID NO: 12524 - RNA, 21 nt, Artificial Sequence
  LRRK2 RNA guide
uuccaaaaugagcugcuccag

SEQ ID NO: 12525 - RNA, 21 nt, Artificial Sequence
  LRRK2 RNA guide
uucuuacccuuccaaaaugag

SEQ ID NO: 12526 - RNA, 21 nt, Artificial Sequence
  LRRK2 RNA guide
uuggaaggguaagaaagagcu

SEQ ID NO: 12527 - RNA, 21 nt, Artificial Sequence
  LRRK2 RNA guide
uuuaaugagcucuuucuuacc

SEQ ID NO: 12528 - RNA, 21 nt, Artificial Sequence
  LRRK2 RNA guide
uuucuuacccuuccaaaauga

SEQ ID NO: 12529 - RNA, 21 nt, Artificial Sequence
  LRRK2 RNA guide
uuuggaaggguaagaaagagc

SEQ ID NO: 12530 - RNA, 21 nt, Artificial Sequence
  LRRK2 RNA guide
uuuuggaaggguaagaaagag

SEQ ID NO: 12531 - RNA, 22 nt, Artificial Sequence
  LRRK2 RNA guide
aaacuggagcagcucauuuugg

SEQ ID NO: 12532 - RNA, 22 nt, Artificial Sequence
  LRRK2 RNA guide
aacuggagcagcucauuuugga

SEQ ID NO: 12533 - RNA, 22 nt, Artificial Sequence
  LRRK2 RNA guide
aaugagcucuuucuuacccuuc

SEQ ID NO: 12534 - RNA, 22 nt, Artificial Sequence
  LRRK2 RNA guide
acccuuccaaaaugagcugcuc

SEQ ID NO: 12535 - RNA, 22 nt, Artificial Sequence
  LRRK2 RNA guide
acuggagcagcucauuuuggaa

SEQ ID NO: 12536 - RNA, 22 nt, Artificial Sequence
  LRRK2 RNA guide
agaaacuggagcagcucauuuu

SEQ ID NO: 12537 - RNA, 22 nt, Artificial Sequence
  LRRK2 RNA guide
agagaaacuggagcagcucauu

SEQ ID NO: 12538 - RNA, 22 nt, Artificial Sequence
  LRRK2 RNA guide
agcagcucauuuuggaagggua

SEQ ID NO: 12539 - RNA, 22 nt, Artificial Sequence
  LRRK2 RNA guide
agcucauuuuggaaggguaaga

SEQ ID NO: 12540 - RNA, 22 nt, Artificial Sequence
  LRRK2 RNA guide
agcucuuucuuacccuuccaaa

SEQ ID NO: 12541 - RNA, 22 nt, Artificial Sequence
  LRRK2 RNA guide
augagcucuuucuuacccuucc

SEQ ID NO: 12542 - RNA, 22 nt, Artificial Sequence
  LRRK2 RNA guide
auuuuggaaggguaagaaagag

SEQ ID NO: 12543 - RNA, 22 nt, Artificial Sequence
  LRRK2 RNA guide
cagcucauuuuggaaggguaag

SEQ ID NO: 12544 - RNA, 22 nt, Artificial Sequence
  LRRK2 RNA guide
cauuuuggaaggguaagaaaga

SEQ ID NO: 12545 - RNA, 22 nt, Artificial Sequence
  LRRK2 RNA guide
ccaaaaugagcugcuccaguuu

SEQ ID NO: 12546 - RNA, 22 nt, Artificial Sequence
  LRRK2 RNA guide
cccuuccaaaaugagcugcucc

SEQ ID NO: 12547 - RNA, 22 nt, Artificial Sequence
  LRRK2 RNA guide
ccuuccaaaaugagcugcucca

SEQ ID NO: 12548 - RNA, 22 nt, Artificial Sequence
  LRRK2 RNA guide
cucauuuuggaaggguaagaaa

SEQ ID NO: 12549 - RNA, 22 nt, Artificial Sequence
  LRRK2 RNA guide
cucuuucuuacccuuccaaaau

SEQ ID NO: 12550 - RNA, 22 nt, Artificial Sequence
  LRRK2 RNA guide
cuggagcagcucauuuuggaag

SEQ ID NO: 12551 - RNA, 22 nt, Artificial Sequence
  LRRK2 RNA guide
cuuacccuuccaaaaugagcug

SEQ ID NO: 12552 - RNA, 22 nt, Artificial Sequence
  LRRK2 RNA guide
cuuccaaaaugagcugcuccag

SEQ ID NO: 12553 - RNA, 22 nt, Artificial Sequence
  LRRK2 RNA guide
cuuucuuacccuuccaaaauga

SEQ ID NO: 12554 - RNA, 22 nt, Artificial Sequence
  LRRK2 RNA guide
gaaacuggagcagcucauuuug

SEQ ID NO: 12555 - RNA, 22 nt, Artificial Sequence
  LRRK2 RNA guide
gagaaacuggagcagcucauuu

SEQ ID NO: 12556 - RNA, 22 nt, Artificial Sequence
  LRRK2 RNA guide
gagcagcucauuuuggaagggu

SEQ ID NO: 12557 - RNA, 22 nt, Artificial Sequence
  LRRK2 RNA guide
gagcucuuucuuacccuuccaa

SEQ ID NO: 12558 - RNA, 22 nt, Artificial Sequence
  LRRK2 RNA guide
gcagcucauuuuggaaggguaa

SEQ ID NO: 12559 - RNA, 22 nt, Artificial Sequence
  LRRK2 RNA guide
gcucauuuuggaaggguaagaa

SEQ ID NO: 12560 - RNA, 22 nt, Artificial Sequence
  LRRK2 RNA guide
gcucuuucuuacccuuccaaaa

SEQ ID NO: 12561 - RNA, 22 nt, Artificial Sequence
  LRRK2 RNA guide
ggagcagcucauuuuggaaggg

SEQ ID NO: 12562 - RNA, 22 nt, Artificial Sequence
  LRRK2 RNA guide
guagagaaacuggagcagcuca

SEQ ID NO: 12563 - RNA, 22 nt, Artificial Sequence
  LRRK2 RNA guide
uaaugagcucuuucuuacccuu

SEQ ID NO: 12564 - RNA, 22 nt, Artificial Sequence
  LRRK2 RNA guide
uacccuuccaaaaugagcugcu

SEQ ID NO: 12565 - RNA, 22 nt, Artificial Sequence
  LRRK2 RNA guide
uagagaaacuggagcagcucau

SEQ ID NO: 12566 - RNA, 22 nt, Artificial Sequence
  LRRK2 RNA guide
ucauuuuggaaggguaagaaag

SEQ ID NO: 12567 - RNA, 22 nt, Artificial Sequence
  LRRK2 RNA guide
uccaaaaugagcugcuccaguu

SEQ ID NO: 12568 - RNA, 22 nt, Artificial Sequence
  LRRK2 RNA guide
ucuuacccuuccaaaaugagcu

SEQ ID NO: 12569 - RNA, 22 nt, Artificial Sequence
  LRRK2 RNA guide
ucuuucuuacccuuccaaaaug

SEQ ID NO: 12570 - RNA, 22 nt, Artificial Sequence
  LRRK2 RNA guide
ugagcucuuucuuacccuucca

SEQ ID NO: 12571 - RNA, 22 nt, Artificial Sequence
  LRRK2 RNA guide
uggaaggguaagaaagagcuca

SEQ ID NO: 12572 - RNA, 22 nt, Artificial Sequence
  LRRK2 RNA guide
uggagcagcucauuuuggaagg

SEQ ID NO: 12573 - RNA, 22 nt, Artificial Sequence
  LRRK2 RNA guide
uuaaugagcucuuucuuacccu

SEQ ID NO: 12574 - RNA, 22 nt, Artificial Sequence
  LRRK2 RNA guide
uuacccuuccaaaaugagcugc

SEQ ID NO: 12575 - RNA, 22 nt, Artificial Sequence
  LRRK2 RNA guide
uuccaaaaugagcugcuccagu

SEQ ID NO: 12576 - RNA, 22 nt, Artificial Sequence
  LRRK2 RNA guide
uucuuacccuuccaaaaugagc

SEQ ID NO: 12577 - RNA, 22 nt, Artificial Sequence
  LRRK2 RNA guide
uuggaaggguaagaaagagcuc

SEQ ID NO: 12578 - RNA, 22 nt, Artificial Sequence
  LRRK2 RNA guide
uuuaaugagcucuuucuuaccc

SEQ ID NO: 12579 - RNA, 22 nt, Artificial Sequence
  LRRK2 RNA guide
uuucuuacccuuccaaaaugag

SEQ ID NO: 12580 - RNA, 22 nt, Artificial Sequence
  LRRK2 RNA guide
uuuggaaggguaagaaagagcu

SEQ ID NO: 12581 - RNA, 22 nt, Artificial Sequence
  LRRK2 RNA guide
uuuuaaugagcucuuucuuacc

SEQ ID NO: 12582 - RNA, 22 nt, Artificial Sequence
  LRRK2 RNA guide
uuuuggaaggguaagaaagagc

SEQ ID NO: 12583 - RNA, 20 nt, Artificial Sequence
  LRRK2 RNA guide
aaaauaucagggguaugcuc

SEQ ID NO: 12584 - RNA, 20 nt, Artificial Sequence
  LRRK2 RNA guide
aaauaucagggguaugcucc

SEQ ID NO: 12585 - RNA, 20 nt, Artificial Sequence
  LRRK2 RNA guide
aagggggagcauaccccuga

SEQ ID NO: 12586 - RNA, 20 nt, Artificial Sequence
  LRRK2 RNA guide
aauaaaauaucagggguaug

SEQ ID NO: 12587 - RNA, 20 nt, Artificial Sequence
  LRRK2 RNA guide
aauaucagggguaugcuccc

SEQ ID NO: 12588 - RNA, 20 nt, Artificial Sequence
  LRRK2 RNA guide
accccugauauuuuauuucu

SEQ ID NO: 12589 - RNA, 20 nt, Artificial Sequence
  LRRK2 RNA guide
agaaauaaaauaucaggggu

SEQ ID NO: 12590 - RNA, 20 nt, Artificial Sequence
  LRRK2 RNA guide
agcauaccccugauauuuua

SEQ ID NO: 12591 - RNA, 20 nt, Artificial Sequence
  LRRK2 RNA guide
agggggagcauaccccugau

SEQ ID NO: 12592 - RNA, 20 nt, Artificial Sequence
  LRRK2 RNA guide
agggguaugcucccccuuga

SEQ ID NO: 12593 - RNA, 20 nt, Artificial Sequence
  LRRK2 RNA guide
agucucaagggggagcauac

SEQ ID NO: 12594 - RNA, 20 nt, Artificial Sequence
  LRRK2 RNA guide
auaaaauaucagggguaugc

SEQ ID NO: 12595 - RNA, 20 nt, Artificial Sequence
  LRRK2 RNA guide
auaucagggguaugcucccc

SEQ ID NO: 12596 - RNA, 20 nt, Artificial Sequence
  LRRK2 RNA guide
aucagggguaugcucccccu

SEQ ID NO: 12597 - RNA, 20 nt, Artificial Sequence
  LRRK2 RNA guide
caagggggagcauaccccug

SEQ ID NO: 12598 - RNA, 20 nt, Artificial Sequence
  LRRK2 RNA guide
cagggguaugcucccccuug

SEQ ID NO: 12599 - RNA, 20 nt, Artificial Sequence
  LRRK2 RNA guide
cagucucaagggggagcaua

SEQ ID NO: 12600 - RNA, 20 nt, Artificial Sequence
  LRRK2 RNA guide
cauaccccugauauuuuauu

SEQ ID NO: 12601 - RNA, 20 nt, Artificial Sequence
  LRRK2 RNA guide
ccuucagucucaagggggag

SEQ ID NO: 12602 - RNA, 20 nt, Artificial Sequence
  LRRK2 RNA guide
cuagaaauaaaauaucaggg

SEQ ID NO: 12603 - RNA, 20 nt, Artificial Sequence
  LRRK2 RNA guide
cucaagggggagcauacccc

SEQ ID NO: 12604 - RNA, 20 nt, Artificial Sequence
  LRRK2 RNA guide
cuucagucucaagggggagc

SEQ ID NO: 12605 - RNA, 20 nt, Artificial Sequence
  LRRK2 RNA guide
gagcauaccccugauauuuu

SEQ ID NO: 12606 - RNA, 20 nt, Artificial Sequence
  LRRK2 RNA guide
gcauaccccugauauuuuau

SEQ ID NO: 12607 - RNA, 20 nt, Artificial Sequence
  LRRK2 RNA guide
ggagcauaccccugauauuu

SEQ ID NO: 12608 - RNA, 20 nt, Artificial Sequence
  LRRK2 RNA guide
gggagcauaccccugauauu

SEQ ID NO: 12609 - RNA, 20 nt, Artificial Sequence
  LRRK2 RNA guide
ggggagcauaccccugauau

SEQ ID NO: 12610 - RNA, 20 nt, Artificial Sequence
  LRRK2 RNA guide
gggggagcauaccccugaua

SEQ ID NO: 12611 - RNA, 20 nt, Artificial Sequence
  LRRK2 RNA guide
gggguaugcucccccuugag

SEQ ID NO: 12612 - RNA, 20 nt, Artificial Sequence
  LRRK2 RNA guide
ggguaugcucccccuugaga

SEQ ID NO: 12613 - RNA, 20 nt, Artificial Sequence
  LRRK2 RNA guide
gguaugcucccccuugagac

SEQ ID NO: 12614 - RNA, 20 nt, Artificial Sequence
  LRRK2 RNA guide
uaaaauaucagggguaugcu

SEQ ID NO: 12615 - RNA, 20 nt, Artificial Sequence
  LRRK2 RNA guide
uaccccugauauuuuauuuc

SEQ ID NO: 12616 - RNA, 20 nt, Artificial Sequence
  LRRK2 RNA guide
uagaaauaaaauaucagggg

SEQ ID NO: 12617 - RNA, 20 nt, Artificial Sequence
  LRRK2 RNA guide
uaucagggguaugcuccccc

SEQ ID NO: 12618 - RNA, 20 nt, Artificial Sequence
  LRRK2 RNA guide
ucaagggggagcauaccccu

SEQ ID NO: 12619 - RNA, 20 nt, Artificial Sequence
  LRRK2 RNA guide
ucagggguaugcucccccuu

SEQ ID NO: 12620 - RNA, 20 nt, Artificial Sequence
  LRRK2 RNA guide
ucagucucaagggggagcau

SEQ ID NO: 12621 - RNA, 20 nt, Artificial Sequence
  LRRK2 RNA guide
ucucaagggggagcauaccc

SEQ ID NO: 12622 - RNA, 20 nt, Artificial Sequence
  LRRK2 RNA guide
uucagucucaagggggagca

SEQ ID NO: 12623 - RNA, 21 nt, Artificial Sequence
  LRRK2 RNA guide
aaaauaucagggguaugcucc

SEQ ID NO: 12624 - RNA, 21 nt, Artificial Sequence
  LRRK2 RNA guide
aaauaucagggguaugcuccc

SEQ ID NO: 12625 - RNA, 21 nt, Artificial Sequence
  LRRK2 RNA guide
aagggggagcauaccccugau

SEQ ID NO: 12626 - RNA, 21 nt, Artificial Sequence
  LRRK2 RNA guide
aauaaaauaucagggguaugc

SEQ ID NO: 12627 - RNA, 21 nt, Artificial Sequence
  LRRK2 RNA guide
aauaucagggguaugcucccc

SEQ ID NO: 12628 - RNA, 21 nt, Artificial Sequence
  LRRK2 RNA guide
agcauaccccugauauuuuau

SEQ ID NO: 12629 - RNA, 21 nt, Artificial Sequence
  LRRK2 RNA guide
agggggagcauaccccugaua

SEQ ID NO: 12630 - RNA, 21 nt, Artificial Sequence
  LRRK2 RNA guide
agggguaugcucccccuugag

SEQ ID NO: 12631 - RNA, 21 nt, Artificial Sequence
  LRRK2 RNA guide
agucucaagggggagcauacc

SEQ ID NO: 12632 - RNA, 21 nt, Artificial Sequence
  LRRK2 RNA guide
auaaaauaucagggguaugcu

SEQ ID NO: 12633 - RNA, 21 nt, Artificial Sequence
  LRRK2 RNA guide
auaucagggguaugcuccccc

SEQ ID NO: 12634 - RNA, 21 nt, Artificial Sequence
  LRRK2 RNA guide
aucagggguaugcucccccuu

SEQ ID NO: 12635 - RNA, 21 nt, Artificial Sequence
  LRRK2 RNA guide
caagggggagcauaccccuga

SEQ ID NO: 12636 - RNA, 21 nt, Artificial Sequence
  LRRK2 RNA guide
cagggguaugcucccccuuga

SEQ ID NO: 12637 - RNA, 21 nt, Artificial Sequence
  LRRK2 RNA guide
cagucucaagggggagcauac

SEQ ID NO: 12638 - RNA, 21 nt, Artificial Sequence
  LRRK2 RNA guide
ccuucagucucaagggggagc

SEQ ID NO: 12639 - RNA, 21 nt, Artificial Sequence
  LRRK2 RNA guide
cuagaaauaaaauaucagggg

SEQ ID NO: 12640 - RNA, 21 nt, Artificial Sequence
  LRRK2 RNA guide
cucaagggggagcauaccccu

SEQ ID NO: 12641 - RNA, 21 nt, Artificial Sequence
  LRRK2 RNA guide
cuucagucucaagggggagca

SEQ ID NO: 12642 - RNA, 21 nt, Artificial Sequence
  LRRK2 RNA guide
gagcauaccccugauauuuua

SEQ ID NO: 12643 - RNA, 21 nt, Artificial Sequence
  LRRK2 RNA guide
gcauaccccugauauuuuauu

SEQ ID NO: 12644 - RNA, 21 nt, Artificial Sequence
  LRRK2 RNA guide
ggagcauaccccugauauuuu

SEQ ID NO: 12645 - RNA, 21 nt, Artificial Sequence
  LRRK2 RNA guide
gggagcauaccccugauauuu

SEQ ID NO: 12646 - RNA, 21 nt, Artificial Sequence
  LRRK2 RNA guide
ggggagcauaccccugauauu

SEQ ID NO: 12647 - RNA, 21 nt, Artificial Sequence
  LRRK2 RNA guide
gggggagcauaccccugauau

SEQ ID NO: 12648 - RNA, 21 nt, Artificial Sequence
  LRRK2 RNA guide
gggguaugcucccccuugaga

SEQ ID NO: 12649 - RNA, 21 nt, Artificial Sequence
  LRRK2 RNA guide
ggguaugcucccccuugagac

SEQ ID NO: 12650 - RNA, 21 nt, Artificial Sequence
  LRRK2 RNA guide
gguaugcucccccuugagacu

SEQ ID NO: 12651 - RNA, 21 nt, Artificial Sequence
  LRRK2 RNA guide
gucucaagggggagcauaccc

SEQ ID NO: 12652 - RNA, 21 nt, Artificial Sequence
  LRRK2 RNA guide
uaaaauaucagggguaugcuc

SEQ ID NO: 12653 - RNA, 21 nt, Artificial Sequence
  LRRK2 RNA guide
uaucagggguaugcucccccu

SEQ ID NO: 12654 - RNA, 21 nt, Artificial Sequence
  LRRK2 RNA guide
ucaagggggagcauaccccug

SEQ ID NO: 12655 - RNA, 21 nt, Artificial Sequence
  LRRK2 RNA guide
ucagggguaugcucccccuug

SEQ ID NO: 12656 - RNA, 21 nt, Artificial Sequence
  LRRK2 RNA guide
ucagucucaagggggagcaua

SEQ ID NO: 12657 - RNA, 21 nt, Artificial Sequence
  LRRK2 RNA guide
uccuucagucucaagggggag

SEQ ID NO: 12658 - RNA, 21 nt, Artificial Sequence
  LRRK2 RNA guide
ucucaagggggagcauacccc

SEQ ID NO: 12659 - RNA, 21 nt, Artificial Sequence
  LRRK2 RNA guide
uucagucucaagggggagcau

SEQ ID NO: 12660 - RNA, 22 nt, Artificial Sequence
  LRRK2 RNA guide
aaaauaucagggguaugcuccc

SEQ ID NO: 12661 - RNA, 22 nt, Artificial Sequence
  LRRK2 RNA guide
aaauaaaauaucagggguaugc

SEQ ID NO: 12662 - RNA, 22 nt, Artificial Sequence
  LRRK2 RNA guide
aaauaucagggguaugcucccc

SEQ ID NO: 12663 - RNA, 22 nt, Artificial Sequence
  LRRK2 RNA guide
aagggggagcauaccccugaua

SEQ ID NO: 12664 - RNA, 22 nt, Artificial Sequence
  LRRK2 RNA guide
aauaaaauaucagggguaugcu

SEQ ID NO: 12665 - RNA, 22 nt, Artificial Sequence
  LRRK2 RNA guide
aauaucagggguaugcuccccc

SEQ ID NO: 12666 - RNA, 22 nt, Artificial Sequence
  LRRK2 RNA guide
accccugauauuuuauuucuag

SEQ ID NO: 12667 - RNA, 22 nt, Artificial Sequence
  LRRK2 RNA guide
acuagaaauaaaauaucagggg

SEQ ID NO: 12668 - RNA, 22 nt, Artificial Sequence
  LRRK2 RNA guide
agcauaccccugauauuuuauu

SEQ ID NO: 12669 - RNA, 22 nt, Artificial Sequence
  LRRK2 RNA guide
agggggagcauaccccugauau

SEQ ID NO: 12670 - RNA, 22 nt, Artificial Sequence
  LRRK2 RNA guide
agggguaugcucccccuugaga

SEQ ID NO: 12671 - RNA, 22 nt, Artificial Sequence
  LRRK2 RNA guide
agucucaagggggagcauaccc

SEQ ID NO: 12672 - RNA, 22 nt, Artificial Sequence
  LRRK2 RNA guide
auaaaauaucagggguaugcuc

SEQ ID NO: 12673 - RNA, 22 nt, Artificial Sequence
  LRRK2 RNA guide
auaucagggguaugcucccccu

SEQ ID NO: 12674 - RNA, 22 nt, Artificial Sequence
  LRRK2 RNA guide
aucagggguaugcucccccuug

SEQ ID NO: 12675 - RNA, 22 nt, Artificial Sequence
  LRRK2 RNA guide
caagggggagcauaccccugau

SEQ ID NO: 12676 - RNA, 22 nt, Artificial Sequence
  LRRK2 RNA guide
cagggguaugcucccccuugag

SEQ ID NO: 12677 - RNA, 22 nt, Artificial Sequence
  LRRK2 RNA guide
cagucucaagggggagcauacc

SEQ ID NO: 12678 - RNA, 22 nt, Artificial Sequence
  LRRK2 RNA guide
cauaccccugauauuuuauuuc

SEQ ID NO: 12679 - RNA, 22 nt, Artificial Sequence
  LRRK2 RNA guide
ccuucagucucaagggggagca

SEQ ID NO: 12680 - RNA, 22 nt, Artificial Sequence
  LRRK2 RNA guide
cuagaaauaaaauaucaggggu

SEQ ID NO: 12681 - RNA, 22 nt, Artificial Sequence
  LRRK2 RNA guide
cucaagggggagcauaccccug

SEQ ID NO: 12682 - RNA, 22 nt, Artificial Sequence
  LRRK2 RNA guide
cuucagucucaagggggagcau

SEQ ID NO: 12683 - RNA, 22 nt, Artificial Sequence
  LRRK2 RNA guide
gaaauaaaauaucagggguaug

SEQ ID NO: 12684 - RNA, 22 nt, Artificial Sequence
  LRRK2 RNA guide
gacuagaaauaaaauaucaggg

SEQ ID NO: 12685 - RNA, 22 nt, Artificial Sequence
  LRRK2 RNA guide
gagcauaccccugauauuuuau

SEQ ID NO: 12686 - RNA, 22 nt, Artificial Sequence
  LRRK2 RNA guide
gcauaccccugauauuuuauuu

SEQ ID NO: 12687 - RNA, 22 nt, Artificial Sequence
  LRRK2 RNA guide
ggagcauaccccugauauuuua

SEQ ID NO: 12688 - RNA, 22 nt, Artificial Sequence
  LRRK2 RNA guide
gggagcauaccccugauauuuu

SEQ ID NO: 12689 - RNA, 22 nt, Artificial Sequence
  LRRK2 RNA guide
ggggagcauaccccugauauuu

SEQ ID NO: 12690 - RNA, 22 nt, Artificial Sequence
  LRRK2 RNA guide
gggggagcauaccccugauauu

SEQ ID NO: 12691 - RNA, 22 nt, Artificial Sequence
  LRRK2 RNA guide
gggguaugcucccccuugagac

SEQ ID NO: 12692 - RNA, 22 nt, Artificial Sequence
  LRRK2 RNA guide
ggguaugcucccccuugagacu

SEQ ID NO: 12693 - RNA, 22 nt, Artificial Sequence
  LRRK2 RNA guide
gguaugcucccccuugagacug

SEQ ID NO: 12694 - RNA, 22 nt, Artificial Sequence
  LRRK2 RNA guide
gucucaagggggagcauacccc

SEQ ID NO: 12695 - RNA, 22 nt, Artificial Sequence
  LRRK2 RNA guide
uaaaauaucagggguaugcucc

SEQ ID NO: 12696 - RNA, 22 nt, Artificial Sequence
  LRRK2 RNA guide
uaucagggguaugcucccccuu

SEQ ID NO: 12697 - RNA, 22 nt, Artificial Sequence
  LRRK2 RNA guide
ucaagggggagcauaccccuga

SEQ ID NO: 12698 - RNA, 22 nt, Artificial Sequence
  LRRK2 RNA guide
ucagggguaugcucccccuuga

SEQ ID NO: 12699 - RNA, 22 nt, Artificial Sequence
  LRRK2 RNA guide
ucagucucaagggggagcauac

SEQ ID NO: 12700 - RNA, 22 nt, Artificial Sequence
  LRRK2 RNA guide
uccuucagucucaagggggagc

SEQ ID NO: 12701 - RNA, 22 nt, Artificial Sequence
  LRRK2 RNA guide
ucucaagggggagcauaccccu

SEQ ID NO: 12702 - RNA, 22 nt, Artificial Sequence
  LRRK2 RNA guide
uucagucucaagggggagcaua

SEQ ID NO: 12703 - RNA, 22 nt, Artificial Sequence
  LRRK2 RNA guide
uuccuucagucucaagggggag

SEQ ID NO: 12704 - RNA, 20 nt, Artificial Sequence
  LRRK2 RNA guide
aaaguucucugauagagaug

SEQ ID NO: 12705 - RNA, 20 nt, Artificial Sequence
  LRRK2 RNA guide
aaccacauuucaucucuauc

SEQ ID NO: 12706 - RNA, 20 nt, Artificial Sequence
  LRRK2 RNA guide
aagaaaguucucugauagag

SEQ ID NO: 12707 - RNA, 20 nt, Artificial Sequence
  LRRK2 RNA guide
aagaaccacauuucaucucu

SEQ ID NO: 12708 - RNA, 20 nt, Artificial Sequence
  LRRK2 RNA guide
aaguucucugauagagauga

SEQ ID NO: 12709 - RNA, 20 nt, Artificial Sequence
  LRRK2 RNA guide
acauuucaucucuaucagag

SEQ ID NO: 12710 - RNA, 20 nt, Artificial Sequence
  LRRK2 RNA guide
accacauuucaucucuauca

SEQ ID NO: 12711 - RNA, 20 nt, Artificial Sequence
  LRRK2 RNA guide
agaaaguucucugauagaga

SEQ ID NO: 12712 - RNA, 20 nt, Artificial Sequence
  LRRK2 RNA guide
agaaccacauuucaucucua

SEQ ID NO: 12713 - RNA, 20 nt, Artificial Sequence
  LRRK2 RNA guide
agagaugaaaugugguucuu

SEQ ID NO: 12714 - RNA, 20 nt, Artificial Sequence
  LRRK2 RNA guide
agccucaagaaaguucucug

SEQ ID NO: 12715 - RNA, 20 nt, Artificial Sequence
  LRRK2 RNA guide
aguaagaaccacauuucauc

SEQ ID NO: 12716 - RNA, 20 nt, Artificial Sequence
  LRRK2 RNA guide
aguucucugauagagaugaa

SEQ ID NO: 12717 - RNA, 20 nt, Artificial Sequence
  LRRK2 RNA guide
auagagaugaaaugugguuc

SEQ ID NO: 12718 - RNA, 20 nt, Artificial Sequence
  LRRK2 RNA guide
aucucuaucagagaacuuuc

SEQ ID NO: 12719 - RNA, 20 nt, Artificial Sequence
  LRRK2 RNA guide
auuucaucucuaucagagaa

SEQ ID NO: 12720 - RNA, 20 nt, Artificial Sequence
  LRRK2 RNA guide
caagaaaguucucugauaga

SEQ ID NO: 12721 - RNA, 20 nt, Artificial Sequence
  LRRK2 RNA guide
cacauuucaucucuaucaga

SEQ ID NO: 12722 - RNA, 20 nt, Artificial Sequence
  LRRK2 RNA guide
caucucuaucagagaacuuu

SEQ ID NO: 12723 - RNA, 20 nt, Artificial Sequence
  LRRK2 RNA guide
cauuucaucucuaucagaga

SEQ ID NO: 12724 - RNA, 20 nt, Artificial Sequence
  LRRK2 RNA guide
ccacauuucaucucuaucag

SEQ ID NO: 12725 - RNA, 20 nt, Artificial Sequence
  LRRK2 RNA guide
ccucaagaaaguucucugau

SEQ ID NO: 12726 - RNA, 20 nt, Artificial Sequence
  LRRK2 RNA guide
ccuuaguaagaaccacauuu

SEQ ID NO: 12727 - RNA, 20 nt, Artificial Sequence
  LRRK2 RNA guide
cucaagaaaguucucugaua

SEQ ID NO: 12728 - RNA, 20 nt, Artificial Sequence
  LRRK2 RNA guide
cucuaucagagaacuuucuu

SEQ ID NO: 12729 - RNA, 20 nt, Artificial Sequence
  LRRK2 RNA guide
cucugauagagaugaaaugu

SEQ ID NO: 12730 - RNA, 20 nt, Artificial Sequence
  LRRK2 RNA guide
cugauagagaugaaaugugg

SEQ ID NO: 12731 - RNA, 20 nt, Artificial Sequence
  LRRK2 RNA guide
cuuaguaagaaccacauuuc

SEQ ID NO: 12732 - RNA, 20 nt, Artificial Sequence
  LRRK2 RNA guide
gaaaguucucugauagagau

SEQ ID NO: 12733 - RNA, 20 nt, Artificial Sequence
  LRRK2 RNA guide
gaaccacauuucaucucuau

SEQ ID NO: 12734 - RNA, 20 nt, Artificial Sequence
  LRRK2 RNA guide
gagaugaaaugugguucuua

SEQ ID NO: 12735 - RNA, 20 nt, Artificial Sequence
  LRRK2 RNA guide
gauagagaugaaaugugguu

SEQ ID NO: 12736 - RNA, 20 nt, Artificial Sequence
  LRRK2 RNA guide
gccucaagaaaguucucuga

SEQ ID NO: 12737 - RNA, 20 nt, Artificial Sequence
  LRRK2 RNA guide
guaagaaccacauuucaucu

SEQ ID NO: 12738 - RNA, 20 nt, Artificial Sequence
  LRRK2 RNA guide
guucucugauagagaugaaa

SEQ ID NO: 12739 - RNA, 20 nt, Artificial Sequence
  LRRK2 RNA guide
uaagaaccacauuucaucuc

SEQ ID NO: 12740 - RNA, 20 nt, Artificial Sequence
  LRRK2 RNA guide
uagagaugaaaugugguucu

SEQ ID NO: 12741 - RNA, 20 nt, Artificial Sequence
  LRRK2 RNA guide
uaguaagaaccacauuucau

SEQ ID NO: 12742 - RNA, 20 nt, Artificial Sequence
  LRRK2 RNA guide
ucaagaaaguucucugauag

SEQ ID NO: 12743 - RNA, 20 nt, Artificial Sequence
  LRRK2 RNA guide
ucaucucuaucagagaacuu

SEQ ID NO: 12744 - RNA, 20 nt, Artificial Sequence
  LRRK2 RNA guide
ucucuaucagagaacuuucu

SEQ ID NO: 12745 - RNA, 20 nt, Artificial Sequence
  LRRK2 RNA guide
ucucugauagagaugaaaug

SEQ ID NO: 12746 - RNA, 20 nt, Artificial Sequence
  LRRK2 RNA guide
ucugauagagaugaaaugug

SEQ ID NO: 12747 - RNA, 20 nt, Artificial Sequence
  LRRK2 RNA guide
ugauagagaugaaauguggu

SEQ ID NO: 12748 - RNA, 20 nt, Artificial Sequence
  LRRK2 RNA guide
uuaguaagaaccacauuuca

SEQ ID NO: 12749 - RNA, 20 nt, Artificial Sequence
  LRRK2 RNA guide
uucaucucuaucagagaacu

SEQ ID NO: 12750 - RNA, 20 nt, Artificial Sequence
  LRRK2 RNA guide
uucucugauagagaugaaau

SEQ ID NO: 12751 - RNA, 20 nt, Artificial Sequence
  LRRK2 RNA guide
uuucaucucuaucagagaac

SEQ ID NO: 12752 - RNA, 21 nt, Artificial Sequence
  LRRK2 RNA guide
aaaguucucugauagagauga

SEQ ID NO: 12753 - RNA, 21 nt, Artificial Sequence
  LRRK2 RNA guide
aaccacauuucaucucuauca

SEQ ID NO: 12754 - RNA, 21 nt, Artificial Sequence
  LRRK2 RNA guide
aagaaaguucucugauagaga

SEQ ID NO: 12755 - RNA, 21 nt, Artificial Sequence
  LRRK2 RNA guide
aagaaccacauuucaucucua

SEQ ID NO: 12756 - RNA, 21 nt, Artificial Sequence
  LRRK2 RNA guide
aagccucaagaaaguucucug

SEQ ID NO: 12757 - RNA, 21 nt, Artificial Sequence
  LRRK2 RNA guide
aaguucucugauagagaugaa

SEQ ID NO: 12758 - RNA, 21 nt, Artificial Sequence
  LRRK2 RNA guide
acauuucaucucuaucagaga

SEQ ID NO: 12759 - RNA, 21 nt, Artificial Sequence
  LRRK2 RNA guide
accacauuucaucucuaucag

SEQ ID NO: 12760 - RNA, 21 nt, Artificial Sequence
  LRRK2 RNA guide
accuuaguaagaaccacauuu

SEQ ID NO: 12761 - RNA, 21 nt, Artificial Sequence
  LRRK2 RNA guide
agaaaguucucugauagagau

SEQ ID NO: 12762 - RNA, 21 nt, Artificial Sequence
  LRRK2 RNA guide
agaaccacauuucaucucuau

SEQ ID NO: 12763 - RNA, 21 nt, Artificial Sequence
  LRRK2 RNA guide
agagaugaaaugugguucuua

SEQ ID NO: 12764 - RNA, 21 nt, Artificial Sequence
  LRRK2 RNA guide
agccucaagaaaguucucuga

SEQ ID NO: 12765 - RNA, 21 nt, Artificial Sequence
  LRRK2 RNA guide
aguaagaaccacauuucaucu

SEQ ID NO: 12766 - RNA, 21 nt, Artificial Sequence
  LRRK2 RNA guide
aguucucugauagagaugaaa

SEQ ID NO: 12767 - RNA, 21 nt, Artificial Sequence
  LRRK2 RNA guide
auagagaugaaaugugguucu

SEQ ID NO: 12768 - RNA, 21 nt, Artificial Sequence
  LRRK2 RNA guide
aucucuaucagagaacuuucu

SEQ ID NO: 12769 - RNA, 21 nt, Artificial Sequence
  LRRK2 RNA guide
auuucaucucuaucagagaac

SEQ ID NO: 12770 - RNA, 21 nt, Artificial Sequence
  LRRK2 RNA guide
caagaaaguucucugauagag

SEQ ID NO: 12771 - RNA, 21 nt, Artificial Sequence
  LRRK2 RNA guide
cacauuucaucucuaucagag

SEQ ID NO: 12772 - RNA, 21 nt, Artificial Sequence
  LRRK2 RNA guide
caucucuaucagagaacuuuc

SEQ ID NO: 12773 - RNA, 21 nt, Artificial Sequence
  LRRK2 RNA guide
cauuucaucucuaucagagaa

SEQ ID NO: 12774 - RNA, 21 nt, Artificial Sequence
  LRRK2 RNA guide
ccacauuucaucucuaucaga

SEQ ID NO: 12775 - RNA, 21 nt, Artificial Sequence
  LRRK2 RNA guide
ccucaagaaaguucucugaua

SEQ ID NO: 12776 - RNA, 21 nt, Artificial Sequence
  LRRK2 RNA guide
ccuuaguaagaaccacauuuc

SEQ ID NO: 12777 - RNA, 21 nt, Artificial Sequence
  LRRK2 RNA guide
cucaagaaaguucucugauag

SEQ ID NO: 12778 - RNA, 21 nt, Artificial Sequence
  LRRK2 RNA guide
cucuaucagagaacuuucuug

SEQ ID NO: 12779 - RNA, 21 nt, Artificial Sequence
  LRRK2 RNA guide
cucugauagagaugaaaugug

SEQ ID NO: 12780 - RNA, 21 nt, Artificial Sequence
  LRRK2 RNA guide
cugauagagaugaaauguggu

SEQ ID NO: 12781 - RNA, 21 nt, Artificial Sequence
  LRRK2 RNA guide
cuuaguaagaaccacauuuca

SEQ ID NO: 12782 - RNA, 21 nt, Artificial Sequence
  LRRK2 RNA guide
gaaaguucucugauagagaug

SEQ ID NO: 12783 - RNA, 21 nt, Artificial Sequence
  LRRK2 RNA guide
gaaccacauuucaucucuauc

SEQ ID NO: 12784 - RNA, 21 nt, Artificial Sequence
  LRRK2 RNA guide
gagaugaaaugugguucuuac

SEQ ID NO: 12785 - RNA, 21 nt, Artificial Sequence
  LRRK2 RNA guide
gauagagaugaaaugugguuc

SEQ ID NO: 12786 - RNA, 21 nt, Artificial Sequence
  LRRK2 RNA guide
gccucaagaaaguucucugau

SEQ ID NO: 12787 - RNA, 21 nt, Artificial Sequence
  LRRK2 RNA guide
guaagaaccacauuucaucuc

SEQ ID NO: 12788 - RNA, 21 nt, Artificial Sequence
  LRRK2 RNA guide
guucucugauagagaugaaau

SEQ ID NO: 12789 - RNA, 21 nt, Artificial Sequence
  LRRK2 RNA guide
uaagaaccacauuucaucucu

SEQ ID NO: 12790 - RNA, 21 nt, Artificial Sequence
  LRRK2 RNA guide
uagagaugaaaugugguucuu

SEQ ID NO: 12791 - RNA, 21 nt, Artificial Sequence
  LRRK2 RNA guide
uaguaagaaccacauuucauc

SEQ ID NO: 12792 - RNA, 21 nt, Artificial Sequence
  LRRK2 RNA guide
ucaagaaaguucucugauaga

SEQ ID NO: 12793 - RNA, 21 nt, Artificial Sequence
  LRRK2 RNA guide
ucaucucuaucagagaacuuu

SEQ ID NO: 12794 - RNA, 21 nt, Artificial Sequence
  LRRK2 RNA guide
ucucuaucagagaacuuucuu

SEQ ID NO: 12795 - RNA, 21 nt, Artificial Sequence
  LRRK2 RNA guide
ucucugauagagaugaaaugu

SEQ ID NO: 12796 - RNA, 21 nt, Artificial Sequence
  LRRK2 RNA guide
ucugauagagaugaaaugugg

SEQ ID NO: 12797 - RNA, 21 nt, Artificial Sequence
  LRRK2 RNA guide
ugauagagaugaaaugugguu

SEQ ID NO: 12798 - RNA, 21 nt, Artificial Sequence
  LRRK2 RNA guide
uucaucucuaucagagaacuu

SEQ ID NO: 12799 - RNA, 21 nt, Artificial Sequence
  LRRK2 RNA guide
uucucugauagagaugaaaug

SEQ ID NO: 12800 - RNA, 21 nt, Artificial Sequence
  LRRK2 RNA guide
uuucaucucuaucagagaacu

SEQ ID NO: 12801 - RNA, 22 nt, Artificial Sequence
  LRRK2 RNA guide
aaaguucucugauagagaugaa

SEQ ID NO: 12802 - RNA, 22 nt, Artificial Sequence
  LRRK2 RNA guide
aaccacauuucaucucuaucag

SEQ ID NO: 12803 - RNA, 22 nt, Artificial Sequence
  LRRK2 RNA guide
aaccuuaguaagaaccacauuu

SEQ ID NO: 12804 - RNA, 22 nt, Artificial Sequence
  LRRK2 RNA guide
aagaaaguucucugauagagau

SEQ ID NO: 12805 - RNA, 22 nt, Artificial Sequence
  LRRK2 RNA guide
aagaaccacauuucaucucuau

SEQ ID NO: 12806 - RNA, 22 nt, Artificial Sequence
  LRRK2 RNA guide
aagccucaagaaaguucucuga

SEQ ID NO: 12807 - RNA, 22 nt, Artificial Sequence
  LRRK2 RNA guide
aaguucucugauagagaugaaa

SEQ ID NO: 12808 - RNA, 22 nt, Artificial Sequence
  LRRK2 RNA guide
acauuucaucucuaucagagaa

SEQ ID NO: 12809 - RNA, 22 nt, Artificial Sequence
  LRRK2 RNA guide
accacauuucaucucuaucaga

SEQ ID NO: 12810 - RNA, 22 nt, Artificial Sequence
  LRRK2 RNA guide
accuuaguaagaaccacauuuc

SEQ ID NO: 12811 - RNA, 22 nt, Artificial Sequence
  LRRK2 RNA guide
agaaaguucucugauagagaug

SEQ ID NO: 12812 - RNA, 22 nt, Artificial Sequence
  LRRK2 RNA guide
agaaccacauuucaucucuauc

SEQ ID NO: 12813 - RNA, 22 nt, Artificial Sequence
  LRRK2 RNA guide
agagaugaaaugugguucuuac

SEQ ID NO: 12814 - RNA, 22 nt, Artificial Sequence
  LRRK2 RNA guide
agccucaagaaaguucucugau

SEQ ID NO: 12815 - RNA, 22 nt, Artificial Sequence
  LRRK2 RNA guide
aguaagaaccacauuucaucuc

SEQ ID NO: 12816 - RNA, 22 nt, Artificial Sequence
  LRRK2 RNA guide
aguucucugauagagaugaaau

SEQ ID NO: 12817 - RNA, 22 nt, Artificial Sequence
  LRRK2 RNA guide
auagagaugaaaugugguucuu

SEQ ID NO: 12818 - RNA, 22 nt, Artificial Sequence
  LRRK2 RNA guide
aucucuaucagagaacuuucuu

SEQ ID NO: 12819 - RNA, 22 nt, Artificial Sequence
  LRRK2 RNA guide
auuucaucucuaucagagaacu

SEQ ID NO: 12820 - RNA, 22 nt, Artificial Sequence
  LRRK2 RNA guide
caagaaaguucucugauagaga

SEQ ID NO: 12821 - RNA, 22 nt, Artificial Sequence
  LRRK2 RNA guide
caagccucaagaaaguucucug

SEQ ID NO: 12822 - RNA, 22 nt, Artificial Sequence
  LRRK2 RNA guide
cacauuucaucucuaucagaga

SEQ ID NO: 12823 - RNA, 22 nt, Artificial Sequence
  LRRK2 RNA guide
caucucuaucagagaacuuucu

SEQ ID NO: 12824 - RNA, 22 nt, Artificial Sequence
  LRRK2 RNA guide
cauuucaucucuaucagagaac

SEQ ID NO: 12825 - RNA, 22 nt, Artificial Sequence
  LRRK2 RNA guide
ccacauuucaucucuaucagag

SEQ ID NO: 12826 - RNA, 22 nt, Artificial Sequence
  LRRK2 RNA guide
ccucaagaaaguucucugauag

SEQ ID NO: 12827 - RNA, 22 nt, Artificial Sequence
  LRRK2 RNA guide
ccuuaguaagaaccacauuuca

SEQ ID NO: 12828 - RNA, 22 nt, Artificial Sequence
  LRRK2 RNA guide
cucaagaaaguucucugauaga

SEQ ID NO: 12829 - RNA, 22 nt, Artificial Sequence
  LRRK2 RNA guide
cucuaucagagaacuuucuuga

SEQ ID NO: 12830 - RNA, 22 nt, Artificial Sequence
  LRRK2 RNA guide
cucugauagagaugaaaugugg

SEQ ID NO: 12831 - RNA, 22 nt, Artificial Sequence
  LRRK2 RNA guide
cugauagagaugaaaugugguu

SEQ ID NO: 12832 - RNA, 22 nt, Artificial Sequence
  LRRK2 RNA guide
cuuaguaagaaccacauuucau

SEQ ID NO: 12833 - RNA, 22 nt, Artificial Sequence
  LRRK2 RNA guide
gaaaguucucugauagagauga

SEQ ID NO: 12834 - RNA, 22 nt, Artificial Sequence
  LRRK2 RNA guide
gaaccacauuucaucucuauca

SEQ ID NO: 12835 - RNA, 22 nt, Artificial Sequence
  LRRK2 RNA guide
gagaugaaaugugguucuuacu

SEQ ID NO: 12836 - RNA, 22 nt, Artificial Sequence
  LRRK2 RNA guide
gauagagaugaaaugugguucu

SEQ ID NO: 12837 - RNA, 22 nt, Artificial Sequence
  LRRK2 RNA guide
gccucaagaaaguucucugaua

SEQ ID NO: 12838 - RNA, 22 nt, Artificial Sequence
  LRRK2 RNA guide
guaagaaccacauuucaucucu

SEQ ID NO: 12839 - RNA, 22 nt, Artificial Sequence
  LRRK2 RNA guide
guucucugauagagaugaaaug

SEQ ID NO: 12840 - RNA, 22 nt, Artificial Sequence
  LRRK2 RNA guide
uaagaaccacauuucaucucua

SEQ ID NO: 12841 - RNA, 22 nt, Artificial Sequence
  LRRK2 RNA guide
uagagaugaaaugugguucuua

SEQ ID NO: 12842 - RNA, 22 nt, Artificial Sequence
  LRRK2 RNA guide
uaguaagaaccacauuucaucu

SEQ ID NO: 12843 - RNA, 22 nt, Artificial Sequence
  LRRK2 RNA guide
ucaagaaaguucucugauagag

SEQ ID NO: 12844 - RNA, 22 nt, Artificial Sequence
  LRRK2 RNA guide
ucaucucuaucagagaacuuuc

SEQ ID NO: 12845 - RNA, 22 nt, Artificial Sequence
  LRRK2 RNA guide
ucucuaucagagaacuuucuug

SEQ ID NO: 12846 - RNA, 22 nt, Artificial Sequence
  LRRK2 RNA guide
ucucugauagagaugaaaugug

SEQ ID NO: 12847 - RNA, 22 nt, Artificial Sequence
  LRRK2 RNA guide
ucugauagagaugaaauguggu

SEQ ID NO: 12848 - RNA, 22 nt, Artificial Sequence
  LRRK2 RNA guide
ugauagagaugaaaugugguuc

SEQ ID NO: 12849 - RNA, 22 nt, Artificial Sequence
  LRRK2 RNA guide
uuaguaagaaccacauuucauc

SEQ ID NO: 12850 - RNA, 22 nt, Artificial Sequence
  LRRK2 RNA guide
uucaucucuaucagagaacuuu

SEQ ID NO: 12851 - RNA, 22 nt, Artificial Sequence
  LRRK2 RNA guide
uucucugauagagaugaaaugu

SEQ ID NO: 12852 - RNA, 22 nt, Artificial Sequence
  LRRK2 RNA guide
uuucaucucuaucagagaacuu

SEQ ID NO: 12853 - RNA, 20 nt, Artificial Sequence
  LRRK2 RNA guide
aaaguucucggauagggaug

SEQ ID NO: 12854 - RNA, 20 nt, Artificial Sequence
  LRRK2 RNA guide
aaccacauuucaucccuauc

SEQ ID NO: 12855 - RNA, 20 nt, Artificial Sequence
  LRRK2 RNA guide
aagaaaguucucggauaggg

SEQ ID NO: 12856 - RNA, 20 nt, Artificial Sequence
  LRRK2 RNA guide
aagaaccacauuucaucccu

SEQ ID NO: 12857 - RNA, 20 nt, Artificial Sequence
  LRRK2 RNA guide
aagccucaagaaaguucucg

SEQ ID NO: 12858 - RNA, 20 nt, Artificial Sequence
  LRRK2 RNA guide
aaguucucggauagggauga

SEQ ID NO: 12859 - RNA, 20 nt, Artificial Sequence
  LRRK2 RNA guide
acaagccucaagaaaguucu

SEQ ID NO: 12860 - RNA, 20 nt, Artificial Sequence
  LRRK2 RNA guide
acauuucaucccuauccgag

SEQ ID NO: 12861 - RNA, 20 nt, Artificial Sequence
  LRRK2 RNA guide
accacauuucaucccuaucc

SEQ ID NO: 12862 - RNA, 20 nt, Artificial Sequence
  LRRK2 RNA guide
agaaaguucucggauaggga

SEQ ID NO: 12863 - RNA, 20 nt, Artificial Sequence
  LRRK2 RNA guide
agaaccacauuucaucccua

SEQ ID NO: 12864 - RNA, 20 nt, Artificial Sequence
  LRRK2 RNA guide
agccucaagaaaguucucgg

SEQ ID NO: 12865 - RNA, 20 nt, Artificial Sequence
  LRRK2 RNA guide
aggacaagccucaagaaagu

SEQ ID NO: 12866 - RNA, 20 nt, Artificial Sequence
  LRRK2 RNA guide
aguucucggauagggaugaa

SEQ ID NO: 12867 - RNA, 20 nt, Artificial Sequence
  LRRK2 RNA guide
aucccuauccgagaacuuuc

SEQ ID NO: 12868 - RNA, 20 nt, Artificial Sequence
  LRRK2 RNA guide
auccgagaacuuucuugagg

SEQ ID NO: 12869 - RNA, 20 nt, Artificial Sequence
  LRRK2 RNA guide
auuucaucccuauccgagaa

SEQ ID NO: 12870 - RNA, 20 nt, Artificial Sequence
  LRRK2 RNA guide
caagaaaguucucggauagg

SEQ ID NO: 12871 - RNA, 20 nt, Artificial Sequence
  LRRK2 RNA guide
caagccucaagaaaguucuc

SEQ ID NO: 12872 - RNA, 20 nt, Artificial Sequence
  LRRK2 RNA guide
cacauuucaucccuauccga

SEQ ID NO: 12873 - RNA, 20 nt, Artificial Sequence
  LRRK2 RNA guide
caucccuauccgagaacuuu

SEQ ID NO: 12874 - RNA, 20 nt, Artificial Sequence
  LRRK2 RNA guide
cauuucaucccuauccgaga

SEQ ID NO: 12875 - RNA, 20 nt, Artificial Sequence
  LRRK2 RNA guide
ccacauuucaucccuauccg

SEQ ID NO: 12876 - RNA, 20 nt, Artificial Sequence
  LRRK2 RNA guide
cccuauccgagaacuuucuu

SEQ ID NO: 12877 - RNA, 20 nt, Artificial Sequence
  LRRK2 RNA guide
ccgagaacuuucuugaggcu

SEQ ID NO: 12878 - RNA, 20 nt, Artificial Sequence
  LRRK2 RNA guide
ccuauccgagaacuuucuug

SEQ ID NO: 12879 - RNA, 20 nt, Artificial Sequence
  LRRK2 RNA guide
ccucaagaaaguucucggau

SEQ ID NO: 12880 - RNA, 20 nt, Artificial Sequence
  LRRK2 RNA guide
cggauagggaugaaaugugg

SEQ ID NO: 12881 - RNA, 20 nt, Artificial Sequence
  LRRK2 RNA guide
cuauccgagaacuuucuuga

SEQ ID NO: 12882 - RNA, 20 nt, Artificial Sequence
  LRRK2 RNA guide
cucaagaaaguucucggaua

SEQ ID NO: 12883 - RNA, 20 nt, Artificial Sequence
  LRRK2 RNA guide
cucggauagggaugaaaugu

SEQ ID NO: 12884 - RNA, 20 nt, Artificial Sequence
  LRRK2 RNA guide
gaaaguucucggauagggau

SEQ ID NO: 12885 - RNA, 20 nt, Artificial Sequence
  LRRK2 RNA guide
gaaccacauuucaucccuau

SEQ ID NO: 12886 - RNA, 20 nt, Artificial Sequence
  LRRK2 RNA guide
gacaagccucaagaaaguuc

SEQ ID NO: 12887 - RNA, 20 nt, Artificial Sequence
  LRRK2 RNA guide
gccucaagaaaguucucgga

SEQ ID NO: 12888 - RNA, 20 nt, Artificial Sequence
  LRRK2 RNA guide
ggacaagccucaagaaaguu

SEQ ID NO: 12889 - RNA, 20 nt, Artificial Sequence
  LRRK2 RNA guide
guucucggauagggaugaaa

SEQ ID NO: 12890 - RNA, 20 nt, Artificial Sequence
  LRRK2 RNA guide
uaagaaccacauuucauccc

SEQ ID NO: 12891 - RNA, 20 nt, Artificial Sequence
  LRRK2 RNA guide
uauccgagaacuuucuugag

SEQ ID NO: 12892 - RNA, 20 nt, Artificial Sequence
  LRRK2 RNA guide
ucaagaaaguucucggauag

SEQ ID NO: 12893 - RNA, 20 nt, Artificial Sequence
  LRRK2 RNA guide
ucaucccuauccgagaacuu

SEQ ID NO: 12894 - RNA, 20 nt, Artificial Sequence
  LRRK2 RNA guide
ucccuauccgagaacuuucu

SEQ ID NO: 12895 - RNA, 20 nt, Artificial Sequence
  LRRK2 RNA guide
uccgagaacuuucuugaggc

SEQ ID NO: 12896 - RNA, 20 nt, Artificial Sequence
  LRRK2 RNA guide
ucggauagggaugaaaugug

SEQ ID NO: 12897 - RNA, 20 nt, Artificial Sequence
  LRRK2 RNA guide
ucucggauagggaugaaaug

SEQ ID NO: 12898 - RNA, 20 nt, Artificial Sequence
  LRRK2 RNA guide
uucaucccuauccgagaacu

SEQ ID NO: 12899 - RNA, 20 nt, Artificial Sequence
  LRRK2 RNA guide
uucucggauagggaugaaau

SEQ ID NO: 12900 - RNA, 20 nt, Artificial Sequence
  LRRK2 RNA guide
uuucaucccuauccgagaac

SEQ ID NO: 12901 - RNA, 21 nt, Artificial Sequence
  LRRK2 RNA guide
aaaguucucggauagggauga

SEQ ID NO: 12902 - RNA, 21 nt, Artificial Sequence
  LRRK2 RNA guide
aaccacauuucaucccuaucc

SEQ ID NO: 12903 - RNA, 21 nt, Artificial Sequence
  LRRK2 RNA guide
aagaaaguucucggauaggga

SEQ ID NO: 12904 - RNA, 21 nt, Artificial Sequence
  LRRK2 RNA guide
aagaaccacauuucaucccua

SEQ ID NO: 12905 - RNA, 21 nt, Artificial Sequence
  LRRK2 RNA guide
aagccucaagaaaguucucgg

SEQ ID NO: 12906 - RNA, 21 nt, Artificial Sequence
  LRRK2 RNA guide
aaguucucggauagggaugaa

SEQ ID NO: 12907 - RNA, 21 nt, Artificial Sequence
  LRRK2 RNA guide
acaagccucaagaaaguucuc

SEQ ID NO: 12908 - RNA, 21 nt, Artificial Sequence
  LRRK2 RNA guide
acauuucaucccuauccgaga

SEQ ID NO: 12909 - RNA, 21 nt, Artificial Sequence
  LRRK2 RNA guide
accacauuucaucccuauccg

SEQ ID NO: 12910 - RNA, 21 nt, Artificial Sequence
  LRRK2 RNA guide
agaaaguucucggauagggau

SEQ ID NO: 12911 - RNA, 21 nt, Artificial Sequence
  LRRK2 RNA guide
agaaccacauuucaucccuau

SEQ ID NO: 12912 - RNA, 21 nt, Artificial Sequence
  LRRK2 RNA guide
agccucaagaaaguucucgga

SEQ ID NO: 12913 - RNA, 21 nt, Artificial Sequence
  LRRK2 RNA guide
aggacaagccucaagaaaguu

SEQ ID NO: 12914 - RNA, 21 nt, Artificial Sequence
  LRRK2 RNA guide
aguucucggauagggaugaaa

SEQ ID NO: 12915 - RNA, 21 nt, Artificial Sequence
  LRRK2 RNA guide
aucccuauccgagaacuuucu

SEQ ID NO: 12916 - RNA, 21 nt, Artificial Sequence
  LRRK2 RNA guide
auccgagaacuuucuugaggc

SEQ ID NO: 12917 - RNA, 21 nt, Artificial Sequence
  LRRK2 RNA guide
auuucaucccuauccgagaac

SEQ ID NO: 12918 - RNA, 21 nt, Artificial Sequence
  LRRK2 RNA guide
caagaaaguucucggauaggg

SEQ ID NO: 12919 - RNA, 21 nt, Artificial Sequence
  LRRK2 RNA guide
caagccucaagaaaguucucg

SEQ ID NO: 12920 - RNA, 21 nt, Artificial Sequence
  LRRK2 RNA guide
cacauuucaucccuauccgag

SEQ ID NO: 12921 - RNA, 21 nt, Artificial Sequence
  LRRK2 RNA guide
caucccuauccgagaacuuuc

SEQ ID NO: 12922 - RNA, 21 nt, Artificial Sequence
  LRRK2 RNA guide
cauuucaucccuauccgagaa

SEQ ID NO: 12923 - RNA, 21 nt, Artificial Sequence
  LRRK2 RNA guide
ccacauuucaucccuauccga

SEQ ID NO: 12924 - RNA, 21 nt, Artificial Sequence
  LRRK2 RNA guide
cccuauccgagaacuuucuug

SEQ ID NO: 12925 - RNA, 21 nt, Artificial Sequence
  LRRK2 RNA guide
ccgagaacuuucuugaggcuu

SEQ ID NO: 12926 - RNA, 21 nt, Artificial Sequence
  LRRK2 RNA guide
ccuauccgagaacuuucuuga

SEQ ID NO: 12927 - RNA, 21 nt, Artificial Sequence
  LRRK2 RNA guide
ccucaagaaaguucucggaua

SEQ ID NO: 12928 - RNA, 21 nt, Artificial Sequence
  LRRK2 RNA guide
cggauagggaugaaauguggu

SEQ ID NO: 12929 - RNA, 21 nt, Artificial Sequence
  LRRK2 RNA guide
cuauccgagaacuuucuugag

SEQ ID NO: 12930 - RNA, 21 nt, Artificial Sequence
  LRRK2 RNA guide
cucaagaaaguucucggauag

SEQ ID NO: 12931 - RNA, 21 nt, Artificial Sequence
  LRRK2 RNA guide
cucggauagggaugaaaugug

SEQ ID NO: 12932 - RNA, 21 nt, Artificial Sequence
  LRRK2 RNA guide
gaaaguucucggauagggaug

SEQ ID NO: 12933 - RNA, 21 nt, Artificial Sequence
  LRRK2 RNA guide
gaaccacauuucaucccuauc

SEQ ID NO: 12934 - RNA, 21 nt, Artificial Sequence
  LRRK2 RNA guide
gacaagccucaagaaaguucu

SEQ ID NO: 12935 - RNA, 21 nt, Artificial Sequence
  LRRK2 RNA guide
gccucaagaaaguucucggau

SEQ ID NO: 12936 - RNA, 21 nt, Artificial Sequence
  LRRK2 RNA guide
ggacaagccucaagaaaguuc

SEQ ID NO: 12937 - RNA, 21 nt, Artificial Sequence
  LRRK2 RNA guide
guaagaaccacauuucauccc

SEQ ID NO: 12938 - RNA, 21 nt, Artificial Sequence
  LRRK2 RNA guide
guucucggauagggaugaaau

SEQ ID NO: 12939 - RNA, 21 nt, Artificial Sequence
  LRRK2 RNA guide
uaagaaccacauuucaucccu

SEQ ID NO: 12940 - RNA, 21 nt, Artificial Sequence
  LRRK2 RNA guide
uaggacaagccucaagaaagu

SEQ ID NO: 12941 - RNA, 21 nt, Artificial Sequence
  LRRK2 RNA guide
uauccgagaacuuucuugagg

SEQ ID NO: 12942 - RNA, 21 nt, Artificial Sequence
  LRRK2 RNA guide
ucaagaaaguucucggauagg

SEQ ID NO: 12943 - RNA, 21 nt, Artificial Sequence
  LRRK2 RNA guide
ucaucccuauccgagaacuuu

SEQ ID NO: 12944 - RNA, 21 nt, Artificial Sequence
  LRRK2 RNA guide
ucccuauccgagaacuuucuu

SEQ ID NO: 12945 - RNA, 21 nt, Artificial Sequence
  LRRK2 RNA guide
uccgagaacuuucuugaggcu

SEQ ID NO: 12946 - RNA, 21 nt, Artificial Sequence
  LRRK2 RNA guide
ucggauagggaugaaaugugg

SEQ ID NO: 12947 - RNA, 21 nt, Artificial Sequence
  LRRK2 RNA guide
ucucggauagggaugaaaugu

SEQ ID NO: 12948 - RNA, 21 nt, Artificial Sequence
  LRRK2 RNA guide
uucaucccuauccgagaacuu

SEQ ID NO: 12949 - RNA, 21 nt, Artificial Sequence
  LRRK2 RNA guide
uucucggauagggaugaaaug

SEQ ID NO: 12950 - RNA, 21 nt, Artificial Sequence
  LRRK2 RNA guide
uuucaucccuauccgagaacu

SEQ ID NO: 12951 - RNA, 22 nt, Artificial Sequence
  LRRK2 RNA guide
aaaguucucggauagggaugaa

SEQ ID NO: 12952 - RNA, 22 nt, Artificial Sequence
  LRRK2 RNA guide
aaccacauuucaucccuauccg

SEQ ID NO: 12953 - RNA, 22 nt, Artificial Sequence
  LRRK2 RNA guide
aagaaaguucucggauagggau

SEQ ID NO: 12954 - RNA, 22 nt, Artificial Sequence
  LRRK2 RNA guide
aagaaccacauuucaucccuau

SEQ ID NO: 12955 - RNA, 22 nt, Artificial Sequence
  LRRK2 RNA guide
aagccucaagaaaguucucgga

SEQ ID NO: 12956 - RNA, 22 nt, Artificial Sequence
  LRRK2 RNA guide
aaguucucggauagggaugaaa

SEQ ID NO: 12957 - RNA, 22 nt, Artificial Sequence
  LRRK2 RNA guide
acaagccucaagaaaguucucg

SEQ ID NO: 12958 - RNA, 22 nt, Artificial Sequence
  LRRK2 RNA guide
acauuucaucccuauccgagaa

SEQ ID NO: 12959 - RNA, 22 nt, Artificial Sequence
  LRRK2 RNA guide
accacauuucaucccuauccga

SEQ ID NO: 12960 - RNA, 22 nt, Artificial Sequence
  LRRK2 RNA guide
agaaaguucucggauagggaug

SEQ ID NO: 12961 - RNA, 22 nt, Artificial Sequence
  LRRK2 RNA guide
agaaccacauuucaucccuauc

SEQ ID NO: 12962 - RNA, 22 nt, Artificial Sequence
  LRRK2 RNA guide
agccucaagaaaguucucggau

SEQ ID NO: 12963 - RNA, 22 nt, Artificial Sequence
  LRRK2 RNA guide
aggacaagccucaagaaaguuc

SEQ ID NO: 12964 - RNA, 22 nt, Artificial Sequence
  LRRK2 RNA guide
aguaagaaccacauuucauccc

SEQ ID NO: 12965 - RNA, 22 nt, Artificial Sequence
  LRRK2 RNA guide
aguucucggauagggaugaaau

SEQ ID NO: 12966 - RNA, 22 nt, Artificial Sequence
  LRRK2 RNA guide
aucccuauccgagaacuuucuu

SEQ ID NO: 12967 - RNA, 22 nt, Artificial Sequence
  LRRK2 RNA guide
auccgagaacuuucuugaggcu

SEQ ID NO: 12968 - RNA, 22 nt, Artificial Sequence
  LRRK2 RNA guide
auuucaucccuauccgagaacu

SEQ ID NO: 12969 - RNA, 22 nt, Artificial Sequence
  LRRK2 RNA guide
caagaaaguucucggauaggga

SEQ ID NO: 12970 - RNA, 22 nt, Artificial Sequence
  LRRK2 RNA guide
caagccucaagaaaguucucgg

SEQ ID NO: 12971 - RNA, 22 nt, Artificial Sequence
  LRRK2 RNA guide
cacauuucaucccuauccgaga

SEQ ID NO: 12972 - RNA, 22 nt, Artificial Sequence
  LRRK2 RNA guide
caucccuauccgagaacuuucu

SEQ ID NO: 12973 - RNA, 22 nt, Artificial Sequence
  LRRK2 RNA guide
cauuucaucccuauccgagaac

SEQ ID NO: 12974 - RNA, 22 nt, Artificial Sequence
  LRRK2 RNA guide
ccacauuucaucccuauccgag

SEQ ID NO: 12975 - RNA, 22 nt, Artificial Sequence
  LRRK2 RNA guide
cccuauccgagaacuuucuuga

SEQ ID NO: 12976 - RNA, 22 nt, Artificial Sequence
  LRRK2 RNA guide
ccgagaacuuucuugaggcuug

SEQ ID NO: 12977 - RNA, 22 nt, Artificial Sequence
  LRRK2 RNA guide
ccuauccgagaacuuucuugag

SEQ ID NO: 12978 - RNA, 22 nt, Artificial Sequence
  LRRK2 RNA guide
ccucaagaaaguucucggauag

SEQ ID NO: 12979 - RNA, 22 nt, Artificial Sequence
  LRRK2 RNA guide
cggauagggaugaaaugugguu

SEQ ID NO: 12980 - RNA, 22 nt, Artificial Sequence
  LRRK2 RNA guide
cuauccgagaacuuucuugagg

SEQ ID NO: 12981 - RNA, 22 nt, Artificial Sequence
  LRRK2 RNA guide
cucaagaaaguucucggauagg

SEQ ID NO: 12982 - RNA, 22 nt, Artificial Sequence
  LRRK2 RNA guide
cucggauagggaugaaaugugg

SEQ ID NO: 12983 - RNA, 22 nt, Artificial Sequence
  LRRK2 RNA guide
gaaaguucucggauagggauga

SEQ ID NO: 12984 - RNA, 22 nt, Artificial Sequence
  LRRK2 RNA guide
gaaccacauuucaucccuaucc

SEQ ID NO: 12985 - RNA, 22 nt, Artificial Sequence
  LRRK2 RNA guide
gacaagccucaagaaaguucuc

SEQ ID NO: 12986 - RNA, 22 nt, Artificial Sequence
  LRRK2 RNA guide
gccucaagaaaguucucggaua

SEQ ID NO: 12987 - RNA, 22 nt, Artificial Sequence
  LRRK2 RNA guide
ggacaagccucaagaaaguucu

SEQ ID NO: 12988 - RNA, 22 nt, Artificial Sequence
  LRRK2 RNA guide
guaagaaccacauuucaucccu

SEQ ID NO: 12989 - RNA, 22 nt, Artificial Sequence
  LRRK2 RNA guide
guucucggauagggaugaaaug

SEQ ID NO: 12990 - RNA, 22 nt, Artificial Sequence
  LRRK2 RNA guide
uaagaaccacauuucaucccua

SEQ ID NO: 12991 - RNA, 22 nt, Artificial Sequence
  LRRK2 RNA guide
uaggacaagccucaagaaaguu

SEQ ID NO: 12992 - RNA, 22 nt, Artificial Sequence
  LRRK2 RNA guide
uauccgagaacuuucuugaggc

SEQ ID NO: 12993 - RNA, 22 nt, Artificial Sequence
  LRRK2 RNA guide
ucaagaaaguucucggauaggg

SEQ ID NO: 12994 - RNA, 22 nt, Artificial Sequence
  LRRK2 RNA guide
ucaucccuauccgagaacuuuc

SEQ ID NO: 12995 - RNA, 22 nt, Artificial Sequence
  LRRK2 RNA guide
ucccuauccgagaacuuucuug

SEQ ID NO: 12996 - RNA, 22 nt, Artificial Sequence
  LRRK2 RNA guide
uccgagaacuuucuugaggcuu

SEQ ID NO: 12997 - RNA, 22 nt, Artificial Sequence
  LRRK2 RNA guide
ucggauagggaugaaauguggu

SEQ ID NO: 12998 - RNA, 22 nt, Artificial Sequence
  LRRK2 RNA guide
ucucggauagggaugaaaugug

SEQ ID NO: 12999 - RNA, 22 nt, Artificial Sequence
  LRRK2 RNA guide
uuaggacaagccucaagaaagu

SEQ ID NO: 13000 - RNA, 22 nt, Artificial Sequence
  LRRK2 RNA guide
uucaucccuauccgagaacuuu

SEQ ID NO: 13001 - RNA, 22 nt, Artificial Sequence
  LRRK2 RNA guide
uucucggauagggaugaaaugu

SEQ ID NO: 13002 - RNA, 22 nt, Artificial Sequence
  LRRK2 RNA guide
uuucaucccuauccgagaacuu

SEQ ID NO: 13003 - RNA, 20 nt, Artificial Sequence
  LRRK2 RNA guide
aaacucuccacuuuaggaca

SEQ ID NO: 13004 - RNA, 20 nt, Artificial Sequence
  LRRK2 RNA guide
aacucuccacuuuaggacaa

SEQ ID NO: 13005 - RNA, 20 nt, Artificial Sequence
  LRRK2 RNA guide
aacuuucuugagacuugucc

SEQ ID NO: 13006 - RNA, 20 nt, Artificial Sequence
  LRRK2 RNA guide
aagucucaagaaaguucucu

SEQ ID NO: 13007 - RNA, 20 nt, Artificial Sequence
  LRRK2 RNA guide
acaagucucaagaaaguucu

SEQ ID NO: 13008 - RNA, 20 nt, Artificial Sequence
  LRRK2 RNA guide
acucuccacuuuaggacaag

SEQ ID NO: 13009 - RNA, 20 nt, Artificial Sequence
  LRRK2 RNA guide
acuuuaggacaagucucaag

SEQ ID NO: 13010 - RNA, 20 nt, Artificial Sequence
  LRRK2 RNA guide
acuuucuugagacuuguccu

SEQ ID NO: 13011 - RNA, 20 nt, Artificial Sequence
  LRRK2 RNA guide
agaacuuucuugagacuugu

SEQ ID NO: 13012 - RNA, 20 nt, Artificial Sequence
  LRRK2 RNA guide
agacuuguccuaaaguggag

SEQ ID NO: 13013 - RNA, 20 nt, Artificial Sequence
  LRRK2 RNA guide
agagaacuuucuugagacuu

SEQ ID NO: 13014 - RNA, 20 nt, Artificial Sequence
  LRRK2 RNA guide
aggacaagucucaagaaagu

SEQ ID NO: 13015 - RNA, 20 nt, Artificial Sequence
  LRRK2 RNA guide
agucucaagaaaguucucug

SEQ ID NO: 13016 - RNA, 20 nt, Artificial Sequence
  LRRK2 RNA guide
aucagagaacuuucuugaga

SEQ ID NO: 13017 - RNA, 20 nt, Artificial Sequence
  LRRK2 RNA guide
caagucucaagaaaguucuc

SEQ ID NO: 13018 - RNA, 20 nt, Artificial Sequence
  LRRK2 RNA guide
cacuuuaggacaagucucaa

SEQ ID NO: 13019 - RNA, 20 nt, Artificial Sequence
  LRRK2 RNA guide
cagagaacuuucuugagacu

SEQ ID NO: 13020 - RNA, 20 nt, Artificial Sequence
  LRRK2 RNA guide
ccacuuuaggacaagucuca

SEQ ID NO: 13021 - RNA, 20 nt, Artificial Sequence
  LRRK2 RNA guide
cccuaucagagaacuuucuu

SEQ ID NO: 13022 - RNA, 20 nt, Artificial Sequence
  LRRK2 RNA guide
ccuaucagagaacuuucuug

SEQ ID NO: 13023 - RNA, 20 nt, Artificial Sequence
  LRRK2 RNA guide
cuaucagagaacuuucuuga

SEQ ID NO: 13024 - RNA, 20 nt, Artificial Sequence
  LRRK2 RNA guide
cuccacuuuaggacaagucu

SEQ ID NO: 13025 - RNA, 20 nt, Artificial Sequence
  LRRK2 RNA guide
cucuccacuuuaggacaagu

SEQ ID NO: 13026 - RNA, 20 nt, Artificial Sequence
  LRRK2 RNA guide
cuugagacuuguccuaaagu

SEQ ID NO: 13027 - RNA, 20 nt, Artificial Sequence
  LRRK2 RNA guide
cuuuaggacaagucucaaga

SEQ ID NO: 13028 - RNA, 20 nt, Artificial Sequence
  LRRK2 RNA guide
cuuucuugagacuuguccua

SEQ ID NO: 13029 - RNA, 20 nt, Artificial Sequence
  LRRK2 RNA guide
gaacuuucuugagacuuguc

SEQ ID NO: 13030 - RNA, 20 nt, Artificial Sequence
  LRRK2 RNA guide
gacaagucucaagaaaguuc

SEQ ID NO: 13031 - RNA, 20 nt, Artificial Sequence
  LRRK2 RNA guide
gacuuguccuaaaguggaga

SEQ ID NO: 13032 - RNA, 20 nt, Artificial Sequence
  LRRK2 RNA guide
gagaacuuucuugagacuug

SEQ ID NO: 13033 - RNA, 20 nt, Artificial Sequence
  LRRK2 RNA guide
gagacuuguccuaaagugga

SEQ ID NO: 13034 - RNA, 20 nt, Artificial Sequence
  LRRK2 RNA guide
ggacaagucucaagaaaguu

SEQ ID NO: 13035 - RNA, 20 nt, Artificial Sequence
  LRRK2 RNA guide
gucucaagaaaguucucuga

SEQ ID NO: 13036 - RNA, 20 nt, Artificial Sequence
  LRRK2 RNA guide
uaggacaagucucaagaaag

SEQ ID NO: 13037 - RNA, 20 nt, Artificial Sequence
  LRRK2 RNA guide
uaucagagaacuuucuugag

SEQ ID NO: 13038 - RNA, 20 nt, Artificial Sequence
  LRRK2 RNA guide
ucagagaacuuucuugagac

SEQ ID NO: 13039 - RNA, 20 nt, Artificial Sequence
  LRRK2 RNA guide
uccacuuuaggacaagucuc

SEQ ID NO: 13040 - RNA, 20 nt, Artificial Sequence
  LRRK2 RNA guide
ucccuaucagagaacuuucu

SEQ ID NO: 13041 - RNA, 20 nt, Artificial Sequence
  LRRK2 RNA guide
ucuccacuuuaggacaaguc

SEQ ID NO: 13042 - RNA, 20 nt, Artificial Sequence
  LRRK2 RNA guide
ucuugagacuuguccuaaag

SEQ ID NO: 13043 - RNA, 20 nt, Artificial Sequence
  LRRK2 RNA guide
ugaaacucuccacuuuagga

SEQ ID NO: 13044 - RNA, 20 nt, Artificial Sequence
  LRRK2 RNA guide
ugagacuuguccuaaagugg

SEQ ID NO: 13045 - RNA, 20 nt, Artificial Sequence
  LRRK2 RNA guide
uuaggacaagucucaagaaa

SEQ ID NO: 13046 - RNA, 20 nt, Artificial Sequence
  LRRK2 RNA guide
uucuugagacuuguccuaaa

SEQ ID NO: 13047 - RNA, 20 nt, Artificial Sequence
  LRRK2 RNA guide
uugagacuuguccuaaagug

SEQ ID NO: 13048 - RNA, 20 nt, Artificial Sequence
  LRRK2 RNA guide
uuuaggacaagucucaagaa

SEQ ID NO: 13049 - RNA, 20 nt, Artificial Sequence
  LRRK2 RNA guide
uuucuugagacuuguccuaa

SEQ ID NO: 13050 - RNA, 21 nt, Artificial Sequence
  LRRK2 RNA guide
aaacucuccacuuuaggacaa

SEQ ID NO: 13051 - RNA, 21 nt, Artificial Sequence
  LRRK2 RNA guide
aacucuccacuuuaggacaag

SEQ ID NO: 13052 - RNA, 21 nt, Artificial Sequence
  LRRK2 RNA guide
aacuuucuugagacuuguccu

SEQ ID NO: 13053 - RNA, 21 nt, Artificial Sequence
  LRRK2 RNA guide
aagucucaagaaaguucucug

SEQ ID NO: 13054 - RNA, 21 nt, Artificial Sequence
  LRRK2 RNA guide
acaagucucaagaaaguucuc

SEQ ID NO: 13055 - RNA, 21 nt, Artificial Sequence
  LRRK2 RNA guide
acucuccacuuuaggacaagu

SEQ ID NO: 13056 - RNA, 21 nt, Artificial Sequence
  LRRK2 RNA guide
acuuuaggacaagucucaaga

SEQ ID NO: 13057 - RNA, 21 nt, Artificial Sequence
  LRRK2 RNA guide
acuuucuugagacuuguccua

SEQ ID NO: 13058 - RNA, 21 nt, Artificial Sequence
  LRRK2 RNA guide
agaacuuucuugagacuuguc

SEQ ID NO: 13059 - RNA, 21 nt, Artificial Sequence
  LRRK2 RNA guide
agacuuguccuaaaguggaga

SEQ ID NO: 13060 - RNA, 21 nt, Artificial Sequence
  LRRK2 RNA guide
agagaacuuucuugagacuug

SEQ ID NO: 13061 - RNA, 21 nt, Artificial Sequence
  LRRK2 RNA guide
aggacaagucucaagaaaguu

SEQ ID NO: 13062 - RNA, 21 nt, Artificial Sequence
  LRRK2 RNA guide
agucucaagaaaguucucuga

SEQ ID NO: 13063 - RNA, 21 nt, Artificial Sequence
  LRRK2 RNA guide
aucagagaacuuucuugagac

SEQ ID NO: 13064 - RNA, 21 nt, Artificial Sequence
  LRRK2 RNA guide
aucccuaucagagaacuuucu

SEQ ID NO: 13065 - RNA, 21 nt, Artificial Sequence
  LRRK2 RNA guide
caagucucaagaaaguucucu

SEQ ID NO: 13066 - RNA, 21 nt, Artificial Sequence
  LRRK2 RNA guide
cacuuuaggacaagucucaag

SEQ ID NO: 13067 - RNA, 21 nt, Artificial Sequence
  LRRK2 RNA guide
cagagaacuuucuugagacuu

SEQ ID NO: 13068 - RNA, 21 nt, Artificial Sequence
  LRRK2 RNA guide
ccacuuuaggacaagucucaa

SEQ ID NO: 13069 - RNA, 21 nt, Artificial Sequence
  LRRK2 RNA guide
cccuaucagagaacuuucuug

SEQ ID NO: 13070 - RNA, 21 nt, Artificial Sequence
  LRRK2 RNA guide
ccuaucagagaacuuucuuga

SEQ ID NO: 13071 - RNA, 21 nt, Artificial Sequence
  LRRK2 RNA guide
cuaucagagaacuuucuugag

SEQ ID NO: 13072 - RNA, 21 nt, Artificial Sequence
  LRRK2 RNA guide
cuccacuuuaggacaagucuc

SEQ ID NO: 13073 - RNA, 21 nt, Artificial Sequence
  LRRK2 RNA guide
cucuccacuuuaggacaaguc

SEQ ID NO: 13074 - RNA, 21 nt, Artificial Sequence
  LRRK2 RNA guide
cugaaacucuccacuuuagga

SEQ ID NO: 13075 - RNA, 21 nt, Artificial Sequence
  LRRK2 RNA guide
cuugagacuuguccuaaagug

SEQ ID NO: 13076 - RNA, 21 nt, Artificial Sequence
  LRRK2 RNA guide
cuuuaggacaagucucaagaa

SEQ ID NO: 13077 - RNA, 21 nt, Artificial Sequence
  LRRK2 RNA guide
cuuucuugagacuuguccuaa

SEQ ID NO: 13078 - RNA, 21 nt, Artificial Sequence
  LRRK2 RNA guide
gaaacucuccacuuuaggaca

SEQ ID NO: 13079 - RNA, 21 nt, Artificial Sequence
  LRRK2 RNA guide
gaacuuucuugagacuugucc

SEQ ID NO: 13080 - RNA, 21 nt, Artificial Sequence
  LRRK2 RNA guide
gacaagucucaagaaaguucu

SEQ ID NO: 13081 - RNA, 21 nt, Artificial Sequence
  LRRK2 RNA guide
gacuuguccuaaaguggagag

SEQ ID NO: 13082 - RNA, 21 nt, Artificial Sequence
  LRRK2 RNA guide
gagaacuuucuugagacuugu

SEQ ID NO: 13083 - RNA, 21 nt, Artificial Sequence
  LRRK2 RNA guide
gagacuuguccuaaaguggag

SEQ ID NO: 13084 - RNA, 21 nt, Artificial Sequence
  LRRK2 RNA guide
ggacaagucucaagaaaguuc

SEQ ID NO: 13085 - RNA, 21 nt, Artificial Sequence
  LRRK2 RNA guide
gucucaagaaaguucucugau

SEQ ID NO: 13086 - RNA, 21 nt, Artificial Sequence
  LRRK2 RNA guide
uaggacaagucucaagaaagu

SEQ ID NO: 13087 - RNA, 21 nt, Artificial Sequence
  LRRK2 RNA guide
uaucagagaacuuucuugaga

SEQ ID NO: 13088 - RNA, 21 nt, Artificial Sequence
  LRRK2 RNA guide
ucagagaacuuucuugagacu

SEQ ID NO: 13089 - RNA, 21 nt, Artificial Sequence
  LRRK2 RNA guide
uccacuuuaggacaagucuca

SEQ ID NO: 13090 - RNA, 21 nt, Artificial Sequence
  LRRK2 RNA guide
ucccuaucagagaacuuucuu

SEQ ID NO: 13091 - RNA, 21 nt, Artificial Sequence
  LRRK2 RNA guide
ucuccacuuuaggacaagucu

SEQ ID NO: 13092 - RNA, 21 nt, Artificial Sequence
  LRRK2 RNA guide
ucuugagacuuguccuaaagu

SEQ ID NO: 13093 - RNA, 21 nt, Artificial Sequence
  LRRK2 RNA guide
ugaaacucuccacuuuaggac

SEQ ID NO: 13094 - RNA, 21 nt, Artificial Sequence
  LRRK2 RNA guide
ugagacuuguccuaaagugga

SEQ ID NO: 13095 - RNA, 21 nt, Artificial Sequence
  LRRK2 RNA guide
uuaggacaagucucaagaaag

SEQ ID NO: 13096 - RNA, 21 nt, Artificial Sequence
  LRRK2 RNA guide
uucuugagacuuguccuaaag

SEQ ID NO: 13097 - RNA, 21 nt, Artificial Sequence
  LRRK2 RNA guide
uugagacuuguccuaaagugg

SEQ ID NO: 13098 - RNA, 21 nt, Artificial Sequence
  LRRK2 RNA guide
uuuaggacaagucucaagaaa

SEQ ID NO: 13099 - RNA, 21 nt, Artificial Sequence
  LRRK2 RNA guide
uuucuugagacuuguccuaaa

SEQ ID NO: 13100 - RNA, 22 nt, Artificial Sequence
  LRRK2 RNA guide
aaacucuccacuuuaggacaag

SEQ ID NO: 13101 - RNA, 22 nt, Artificial Sequence
  LRRK2 RNA guide
aacucuccacuuuaggacaagu

SEQ ID NO: 13102 - RNA, 22 nt, Artificial Sequence
  LRRK2 RNA guide
aacuuucuugagacuuguccua

SEQ ID NO: 13103 - RNA, 22 nt, Artificial Sequence
  LRRK2 RNA guide
aagucucaagaaaguucucuga

SEQ ID NO: 13104 - RNA, 22 nt, Artificial Sequence
  LRRK2 RNA guide
acaagucucaagaaaguucucu

SEQ ID NO: 13105 - RNA, 22 nt, Artificial Sequence
  LRRK2 RNA guide
acucuccacuuuaggacaaguc

SEQ ID NO: 13106 - RNA, 22 nt, Artificial Sequence
  LRRK2 RNA guide
acugaaacucuccacuuuagga

SEQ ID NO: 13107 - RNA, 22 nt, Artificial Sequence
  LRRK2 RNA guide
acuuuaggacaagucucaagaa

SEQ ID NO: 13108 - RNA, 22 nt, Artificial Sequence
  LRRK2 RNA guide
acuuucuugagacuuguccuaa

SEQ ID NO: 13109 - RNA, 22 nt, Artificial Sequence
  LRRK2 RNA guide
agaacuuucuugagacuugucc

SEQ ID NO: 13110 - RNA, 22 nt, Artificial Sequence
  LRRK2 RNA guide
agacuuguccuaaaguggagag

SEQ ID NO: 13111 - RNA, 22 nt, Artificial Sequence
  LRRK2 RNA guide
agagaacuuucuugagacuugu

SEQ ID NO: 13112 - RNA, 22 nt, Artificial Sequence
  LRRK2 RNA guide
aggacaagucucaagaaaguuc

SEQ ID NO: 13113 - RNA, 22 nt, Artificial Sequence
  LRRK2 RNA guide
agucucaagaaaguucucugau

SEQ ID NO: 13114 - RNA, 22 nt, Artificial Sequence
  LRRK2 RNA guide
aucagagaacuuucuugagacu

SEQ ID NO: 13115 - RNA, 22 nt, Artificial Sequence
  LRRK2 RNA guide
aucccuaucagagaacuuucuu

SEQ ID NO: 13116 - RNA, 22 nt, Artificial Sequence
  LRRK2 RNA guide
caagucucaagaaaguucucug

SEQ ID NO: 13117 - RNA, 22 nt, Artificial Sequence
  LRRK2 RNA guide
cacuuuaggacaagucucaaga

SEQ ID NO: 13118 - RNA, 22 nt, Artificial Sequence
  LRRK2 RNA guide
cagagaacuuucuugagacuug

SEQ ID NO: 13119 - RNA, 22 nt, Artificial Sequence
  LRRK2 RNA guide
caucccuaucagagaacuuucu

SEQ ID NO: 13120 - RNA, 22 nt, Artificial Sequence
  LRRK2 RNA guide
ccacuuuaggacaagucucaag

SEQ ID NO: 13121 - RNA, 22 nt, Artificial Sequence
  LRRK2 RNA guide
cccuaucagagaacuuucuuga

SEQ ID NO: 13122 - RNA, 22 nt, Artificial Sequence
  LRRK2 RNA guide
ccuaucagagaacuuucuugag

SEQ ID NO: 13123 - RNA, 22 nt, Artificial Sequence
  LRRK2 RNA guide
cuaucagagaacuuucuugaga

SEQ ID NO: 13124 - RNA, 22 nt, Artificial Sequence
  LRRK2 RNA guide
cuccacuuuaggacaagucuca

SEQ ID NO: 13125 - RNA, 22 nt, Artificial Sequence
  LRRK2 RNA guide
cucuccacuuuaggacaagucu

SEQ ID NO: 13126 - RNA, 22 nt, Artificial Sequence
  LRRK2 RNA guide
cugaaacucuccacuuuaggac

SEQ ID NO: 13127 - RNA, 22 nt, Artificial Sequence
  LRRK2 RNA guide
cuugagacuuguccuaaagugg

SEQ ID NO: 13128 - RNA, 22 nt, Artificial Sequence
  LRRK2 RNA guide
cuuuaggacaagucucaagaaa

SEQ ID NO: 13129 - RNA, 22 nt, Artificial Sequence
  LRRK2 RNA guide
cuuucuugagacuuguccuaaa

SEQ ID NO: 13130 - RNA, 22 nt, Artificial Sequence
  LRRK2 RNA guide
gaaacucuccacuuuaggacaa

SEQ ID NO: 13131 - RNA, 22 nt, Artificial Sequence
  LRRK2 RNA guide
gaacuuucuugagacuuguccu

SEQ ID NO: 13132 - RNA, 22 nt, Artificial Sequence
  LRRK2 RNA guide
gacaagucucaagaaaguucuc

SEQ ID NO: 13133 - RNA, 22 nt, Artificial Sequence
  LRRK2 RNA guide
gacuuguccuaaaguggagagu

SEQ ID NO: 13134 - RNA, 22 nt, Artificial Sequence
  LRRK2 RNA guide
gagaacuuucuugagacuuguc

SEQ ID NO: 13135 - RNA, 22 nt, Artificial Sequence
  LRRK2 RNA guide
gagacuuguccuaaaguggaga

SEQ ID NO: 13136 - RNA, 22 nt, Artificial Sequence
  LRRK2 RNA guide
ggacaagucucaagaaaguucu

SEQ ID NO: 13137 - RNA, 22 nt, Artificial Sequence
  LRRK2 RNA guide
gucucaagaaaguucucugaua

SEQ ID NO: 13138 - RNA, 22 nt, Artificial Sequence
  LRRK2 RNA guide
uaggacaagucucaagaaaguu

SEQ ID NO: 13139 - RNA, 22 nt, Artificial Sequence
  LRRK2 RNA guide
uaucagagaacuuucuugagac

SEQ ID NO: 13140 - RNA, 22 nt, Artificial Sequence
  LRRK2 RNA guide
ucagagaacuuucuugagacuu

SEQ ID NO: 13141 - RNA, 22 nt, Artificial Sequence
  LRRK2 RNA guide
uccacuuuaggacaagucucaa

SEQ ID NO: 13142 - RNA, 22 nt, Artificial Sequence
  LRRK2 RNA guide
ucccuaucagagaacuuucuug

SEQ ID NO: 13143 - RNA, 22 nt, Artificial Sequence
  LRRK2 RNA guide
ucuccacuuuaggacaagucuc

SEQ ID NO: 13144 - RNA, 22 nt, Artificial Sequence
  LRRK2 RNA guide
ucuugagacuuguccuaaagug

SEQ ID NO: 13145 - RNA, 22 nt, Artificial Sequence
  LRRK2 RNA guide
ugaaacucuccacuuuaggaca

SEQ ID NO: 13146 - RNA, 22 nt, Artificial Sequence
  LRRK2 RNA guide
ugagacuuguccuaaaguggag

SEQ ID NO: 13147 - RNA, 22 nt, Artificial Sequence
  LRRK2 RNA guide
uuaggacaagucucaagaaagu

SEQ ID NO: 13148 - RNA, 22 nt, Artificial Sequence
  LRRK2 RNA guide
uucuugagacuuguccuaaagu

SEQ ID NO: 13149 - RNA, 22 nt, Artificial Sequence
  LRRK2 RNA guide
uugagacuuguccuaaagugga

SEQ ID NO: 13150 - RNA, 22 nt, Artificial Sequence
  LRRK2 RNA guide
uuuaggacaagucucaagaaag

SEQ ID NO: 13151 - RNA, 22 nt, Artificial Sequence
  LRRK2 RNA guide
uuucuugagacuuguccuaaag

SEQ ID NO: 13152 - RNA, 20 nt, Artificial Sequence
  LRRK2 RNA guide
aacacuuaccaggaaaauuc

SEQ ID NO: 13153 - RNA, 20 nt, Artificial Sequence
  LRRK2 RNA guide
aaugaauuuuccugguaagu

SEQ ID NO: 13154 - RNA, 20 nt, Artificial Sequence
  LRRK2 RNA guide
aauuuuccugguaaguguuc

SEQ ID NO: 13155 - RNA, 20 nt, Artificial Sequence
  LRRK2 RNA guide
acacagaacacuuaccagga

SEQ ID NO: 13156 - RNA, 20 nt, Artificial Sequence
  LRRK2 RNA guide
acacuuaccaggaaaauuca

SEQ ID NO: 13157 - RNA, 20 nt, Artificial Sequence
  LRRK2 RNA guide
acagaacacuuaccaggaaa

SEQ ID NO: 13158 - RNA, 20 nt, Artificial Sequence
  LRRK2 RNA guide
accaggaaaauucauucugg

SEQ ID NO: 13159 - RNA, 20 nt, Artificial Sequence
  LRRK2 RNA guide
acccacacagaacacuuacc

SEQ ID NO: 13160 - RNA, 20 nt, Artificial Sequence
  LRRK2 RNA guide
acuuaccaggaaaauucauu

SEQ ID NO: 13161 - RNA, 20 nt, Artificial Sequence
  LRRK2 RNA guide
agaacacuuaccaggaaaau

SEQ ID NO: 13162 - RNA, 20 nt, Artificial Sequence
  LRRK2 RNA guide
agaaugaauuuuccugguaa

SEQ ID NO: 13163 - RNA, 20 nt, Artificial Sequence
  LRRK2 RNA guide
agacccacacagaacacuua

SEQ ID NO: 13164 - RNA, 20 nt, Artificial Sequence
  LRRK2 RNA guide
aggaaaauucauucuggcac

SEQ ID NO: 13165 - RNA, 20 nt, Artificial Sequence
  LRRK2 RNA guide
agugccagaaugaauuuucc

SEQ ID NO: 13166 - RNA, 20 nt, Artificial Sequence
  LRRK2 RNA guide
augaauuuuccugguaagug

SEQ ID NO: 13167 - RNA, 20 nt, Artificial Sequence
  LRRK2 RNA guide
auuuuccugguaaguguucu

SEQ ID NO: 13168 - RNA, 20 nt, Artificial Sequence
  LRRK2 RNA guide
cacacagaacacuuaccagg

SEQ ID NO: 13169 - RNA, 20 nt, Artificial Sequence
  LRRK2 RNA guide
cacagaacacuuaccaggaa

SEQ ID NO: 13170 - RNA, 20 nt, Artificial Sequence
  LRRK2 RNA guide
cacuuaccaggaaaauucau

SEQ ID NO: 13171 - RNA, 20 nt, Artificial Sequence
  LRRK2 RNA guide
cagaacacuuaccaggaaaa

SEQ ID NO: 13172 - RNA, 20 nt, Artificial Sequence
  LRRK2 RNA guide
cagaaugaauuuuccuggua

SEQ ID NO: 13173 - RNA, 20 nt, Artificial Sequence
  LRRK2 RNA guide
caggaaaauucauucuggca

SEQ ID NO: 13174 - RNA, 20 nt, Artificial Sequence
  LRRK2 RNA guide
cagugccagaaugaauuuuc

SEQ ID NO: 13175 - RNA, 20 nt, Artificial Sequence
  LRRK2 RNA guide
ccacacagaacacuuaccag

SEQ ID NO: 13176 - RNA, 20 nt, Artificial Sequence
  LRRK2 RNA guide
ccagaaugaauuuuccuggu

SEQ ID NO: 13177 - RNA, 20 nt, Artificial Sequence
  LRRK2 RNA guide
ccaggaaaauucauucuggc

SEQ ID NO: 13178 - RNA, 20 nt, Artificial Sequence
  LRRK2 RNA guide
cccacacagaacacuuacca

SEQ ID NO: 13179 - RNA, 20 nt, Artificial Sequence
  LRRK2 RNA guide
ccugguaaguguucugugug

SEQ ID NO: 13180 - RNA, 20 nt, Artificial Sequence
  LRRK2 RNA guide
cuuaccaggaaaauucauuc

SEQ ID NO: 13181 - RNA, 20 nt, Artificial Sequence
  LRRK2 RNA guide
gaacacuuaccaggaaaauu

SEQ ID NO: 13182 - RNA, 20 nt, Artificial Sequence
  LRRK2 RNA guide
gaaugaauuuuccugguaag

SEQ ID NO: 13183 - RNA, 20 nt, Artificial Sequence
  LRRK2 RNA guide
gaauuuuccugguaaguguu

SEQ ID NO: 13184 - RNA, 20 nt, Artificial Sequence
  LRRK2 RNA guide
gacccacacagaacacuuac

SEQ ID NO: 13185 - RNA, 20 nt, Artificial Sequence
  LRRK2 RNA guide
gagacccacacagaacacuu

SEQ ID NO: 13186 - RNA, 20 nt, Artificial Sequence
  LRRK2 RNA guide
gccagaaugaauuuuccugg

SEQ ID NO: 13187 - RNA, 20 nt, Artificial Sequence
  LRRK2 RNA guide
gugccagaaugaauuuuccu

SEQ ID NO: 13188 - RNA, 20 nt, Artificial Sequence
  LRRK2 RNA guide
guuucagugccagaaugaau

SEQ ID NO: 13189 - RNA, 20 nt, Artificial Sequence
  LRRK2 RNA guide
uaccaggaaaauucauucug

SEQ ID NO: 13190 - RNA, 20 nt, Artificial Sequence
  LRRK2 RNA guide
ucagugccagaaugaauuuu

SEQ ID NO: 13191 - RNA, 20 nt, Artificial Sequence
  LRRK2 RNA guide
uccugguaaguguucugugu

SEQ ID NO: 13192 - RNA, 20 nt, Artificial Sequence
  LRRK2 RNA guide
ugaauuuuccugguaagugu

SEQ ID NO: 13193 - RNA, 20 nt, Artificial Sequence
  LRRK2 RNA guide
ugccagaaugaauuuuccug

SEQ ID NO: 13194 - RNA, 20 nt, Artificial Sequence
  LRRK2 RNA guide
uuaccaggaaaauucauucu

SEQ ID NO: 13195 - RNA, 20 nt, Artificial Sequence
  LRRK2 RNA guide
uucagugccagaaugaauuu

SEQ ID NO: 13196 - RNA, 20 nt, Artificial Sequence
  LRRK2 RNA guide
uuccugguaaguguucugug

SEQ ID NO: 13197 - RNA, 20 nt, Artificial Sequence
  LRRK2 RNA guide
uuucagugccagaaugaauu

SEQ ID NO: 13198 - RNA, 20 nt, Artificial Sequence
  LRRK2 RNA guide
uuuccugguaaguguucugu

SEQ ID NO: 13199 - RNA, 20 nt, Artificial Sequence
  LRRK2 RNA guide
uuuuccugguaaguguucug

SEQ ID NO: 13200 - RNA, 21 nt, Artificial Sequence
  LRRK2 RNA guide
aacacuuaccaggaaaauuca

SEQ ID NO: 13201 - RNA, 21 nt, Artificial Sequence
  LRRK2 RNA guide
aaugaauuuuccugguaagug

SEQ ID NO: 13202 - RNA, 21 nt, Artificial Sequence
  LRRK2 RNA guide
aauuuuccugguaaguguucu

SEQ ID NO: 13203 - RNA, 21 nt, Artificial Sequence
  LRRK2 RNA guide
acacagaacacuuaccaggaa

SEQ ID NO: 13204 - RNA, 21 nt, Artificial Sequence
  LRRK2 RNA guide
acacuuaccaggaaaauucau

SEQ ID NO: 13205 - RNA, 21 nt, Artificial Sequence
  LRRK2 RNA guide
acagaacacuuaccaggaaaa

SEQ ID NO: 13206 - RNA, 21 nt, Artificial Sequence
  LRRK2 RNA guide
accaggaaaauucauucuggc

SEQ ID NO: 13207 - RNA, 21 nt, Artificial Sequence
  LRRK2 RNA guide
acccacacagaacacuuacca

SEQ ID NO: 13208 - RNA, 21 nt, Artificial Sequence
  LRRK2 RNA guide
acuuaccaggaaaauucauuc

SEQ ID NO: 13209 - RNA, 21 nt, Artificial Sequence
  LRRK2 RNA guide
agaacacuuaccaggaaaauu

SEQ ID NO: 13210 - RNA, 21 nt, Artificial Sequence
  LRRK2 RNA guide
agaaugaauuuuccugguaag

SEQ ID NO: 13211 - RNA, 21 nt, Artificial Sequence
  LRRK2 RNA guide
agacccacacagaacacuuac

SEQ ID NO: 13212 - RNA, 21 nt, Artificial Sequence
  LRRK2 RNA guide
aggaaaauucauucuggcacu

SEQ ID NO: 13213 - RNA, 21 nt, Artificial Sequence
  LRRK2 RNA guide
agugccagaaugaauuuuccu

SEQ ID NO: 13214 - RNA, 21 nt, Artificial Sequence
  LRRK2 RNA guide
aguuucagugccagaaugaau

SEQ ID NO: 13215 - RNA, 21 nt, Artificial Sequence
  LRRK2 RNA guide
augaauuuuccugguaagugu

SEQ ID NO: 13216 - RNA, 21 nt, Artificial Sequence
  LRRK2 RNA guide
auuuuccugguaaguguucug

SEQ ID NO: 13217 - RNA, 21 nt, Artificial Sequence
  LRRK2 RNA guide
cacacagaacacuuaccagga

SEQ ID NO: 13218 - RNA, 21 nt, Artificial Sequence
  LRRK2 RNA guide
cacagaacacuuaccaggaaa

SEQ ID NO: 13219 - RNA, 21 nt, Artificial Sequence
  LRRK2 RNA guide
cacuuaccaggaaaauucauu

SEQ ID NO: 13220 - RNA, 21 nt, Artificial Sequence
  LRRK2 RNA guide
cagaacacuuaccaggaaaau

SEQ ID NO: 13221 - RNA, 21 nt, Artificial Sequence
  LRRK2 RNA guide
cagaaugaauuuuccugguaa

SEQ ID NO: 13222 - RNA, 21 nt, Artificial Sequence
  LRRK2 RNA guide
caggaaaauucauucuggcac

SEQ ID NO: 13223 - RNA, 21 nt, Artificial Sequence
  LRRK2 RNA guide
cagugccagaaugaauuuucc

SEQ ID NO: 13224 - RNA, 21 nt, Artificial Sequence
  LRRK2 RNA guide
ccacacagaacacuuaccagg

SEQ ID NO: 13225 - RNA, 21 nt, Artificial Sequence
  LRRK2 RNA guide
ccagaaugaauuuuccuggua

SEQ ID NO: 13226 - RNA, 21 nt, Artificial Sequence
  LRRK2 RNA guide
ccaggaaaauucauucuggca

SEQ ID NO: 13227 - RNA, 21 nt, Artificial Sequence
  LRRK2 RNA guide
cccacacagaacacuuaccag

SEQ ID NO: 13228 - RNA, 21 nt, Artificial Sequence
  LRRK2 RNA guide
ccugguaaguguucugugugg

SEQ ID NO: 13229 - RNA, 21 nt, Artificial Sequence
  LRRK2 RNA guide
cuuaccaggaaaauucauucu

SEQ ID NO: 13230 - RNA, 21 nt, Artificial Sequence
  LRRK2 RNA guide
gaacacuuaccaggaaaauuc

SEQ ID NO: 13231 - RNA, 21 nt, Artificial Sequence
  LRRK2 RNA guide
gaaugaauuuuccugguaagu

SEQ ID NO: 13232 - RNA, 21 nt, Artificial Sequence
  LRRK2 RNA guide
gaauuuuccugguaaguguuc

SEQ ID NO: 13233 - RNA, 21 nt, Artificial Sequence
  LRRK2 RNA guide
gacccacacagaacacuuacc

SEQ ID NO: 13234 - RNA, 21 nt, Artificial Sequence
  LRRK2 RNA guide
gagacccacacagaacacuua

SEQ ID NO: 13235 - RNA, 21 nt, Artificial Sequence
  LRRK2 RNA guide
gccagaaugaauuuuccuggu

SEQ ID NO: 13236 - RNA, 21 nt, Artificial Sequence
  LRRK2 RNA guide
ggagacccacacagaacacuu

SEQ ID NO: 13237 - RNA, 21 nt, Artificial Sequence
  LRRK2 RNA guide
gugccagaaugaauuuuccug

SEQ ID NO: 13238 - RNA, 21 nt, Artificial Sequence
  LRRK2 RNA guide
guuucagugccagaaugaauu

SEQ ID NO: 13239 - RNA, 21 nt, Artificial Sequence
  LRRK2 RNA guide
uaccaggaaaauucauucugg

SEQ ID NO: 13240 - RNA, 21 nt, Artificial Sequence
  LRRK2 RNA guide
ucagugccagaaugaauuuuc

SEQ ID NO: 13241 - RNA, 21 nt, Artificial Sequence
  LRRK2 RNA guide
uccugguaaguguucugugug

SEQ ID NO: 13242 - RNA, 21 nt, Artificial Sequence
  LRRK2 RNA guide
ugaauuuuccugguaaguguu

SEQ ID NO: 13243 - RNA, 21 nt, Artificial Sequence
  LRRK2 RNA guide
ugccagaaugaauuuuccugg

SEQ ID NO: 13244 - RNA, 21 nt, Artificial Sequence
  LRRK2 RNA guide
uuaccaggaaaauucauucug

SEQ ID NO: 13245 - RNA, 21 nt, Artificial Sequence
  LRRK2 RNA guide
uucagugccagaaugaauuuu

SEQ ID NO: 13246 - RNA, 21 nt, Artificial Sequence
  LRRK2 RNA guide
uuccugguaaguguucugugu

SEQ ID NO: 13247 - RNA, 21 nt, Artificial Sequence
  LRRK2 RNA guide
uuucagugccagaaugaauuu

SEQ ID NO: 13248 - RNA, 21 nt, Artificial Sequence
  LRRK2 RNA guide
uuuccugguaaguguucugug

SEQ ID NO: 13249 - RNA, 21 nt, Artificial Sequence
  LRRK2 RNA guide
uuuuccugguaaguguucugu

SEQ ID NO: 13250 - RNA, 22 nt, Artificial Sequence
  LRRK2 RNA guide
aacacuuaccaggaaaauucau

SEQ ID NO: 13251 - RNA, 22 nt, Artificial Sequence
  LRRK2 RNA guide
aaugaauuuuccugguaagugu

SEQ ID NO: 13252 - RNA, 22 nt, Artificial Sequence
  LRRK2 RNA guide
aauuuuccugguaaguguucug

SEQ ID NO: 13253 - RNA, 22 nt, Artificial Sequence
  LRRK2 RNA guide
acacagaacacuuaccaggaaa

SEQ ID NO: 13254 - RNA, 22 nt, Artificial Sequence
  LRRK2 RNA guide
acacuuaccaggaaaauucauu

SEQ ID NO: 13255 - RNA, 22 nt, Artificial Sequence
  LRRK2 RNA guide
acagaacacuuaccaggaaaau

SEQ ID NO: 13256 - RNA, 22 nt, Artificial Sequence
  LRRK2 RNA guide
accaggaaaauucauucuggca

SEQ ID NO: 13257 - RNA, 22 nt, Artificial Sequence
  LRRK2 RNA guide
acccacacagaacacuuaccag

SEQ ID NO: 13258 - RNA, 22 nt, Artificial Sequence
  LRRK2 RNA guide
acuuaccaggaaaauucauucu

SEQ ID NO: 13259 - RNA, 22 nt, Artificial Sequence
  LRRK2 RNA guide
agaacacuuaccaggaaaauuc

SEQ ID NO: 13260 - RNA, 22 nt, Artificial Sequence
  LRRK2 RNA guide
agaaugaauuuuccugguaagu

SEQ ID NO: 13261 - RNA, 22 nt, Artificial Sequence
  LRRK2 RNA guide
agacccacacagaacacuuacc

SEQ ID NO: 13262 - RNA, 22 nt, Artificial Sequence
  LRRK2 RNA guide
aggaaaauucauucuggcacug

SEQ ID NO: 13263 - RNA, 22 nt, Artificial Sequence
  LRRK2 RNA guide
aggagacccacacagaacacuu

SEQ ID NO: 13264 - RNA, 22 nt, Artificial Sequence
  LRRK2 RNA guide
agugccagaaugaauuuuccug

SEQ ID NO: 13265 - RNA, 22 nt, Artificial Sequence
  LRRK2 RNA guide
aguuucagugccagaaugaauu

SEQ ID NO: 13266 - RNA, 22 nt, Artificial Sequence
  LRRK2 RNA guide
augaauuuuccugguaaguguu

SEQ ID NO: 13267 - RNA, 22 nt, Artificial Sequence
  LRRK2 RNA guide
auuuuccugguaaguguucugu

SEQ ID NO: 13268 - RNA, 22 nt, Artificial Sequence
  LRRK2 RNA guide
cacacagaacacuuaccaggaa

SEQ ID NO: 13269 - RNA, 22 nt, Artificial Sequence
  LRRK2 RNA guide
cacagaacacuuaccaggaaaa

SEQ ID NO: 13270 - RNA, 22 nt, Artificial Sequence
  LRRK2 RNA guide
cacuuaccaggaaaauucauuc

SEQ ID NO: 13271 - RNA, 22 nt, Artificial Sequence
  LRRK2 RNA guide
cagaacacuuaccaggaaaauu

SEQ ID NO: 13272 - RNA, 22 nt, Artificial Sequence
  LRRK2 RNA guide
cagaaugaauuuuccugguaag

SEQ ID NO: 13273 - RNA, 22 nt, Artificial Sequence
  LRRK2 RNA guide
caggaaaauucauucuggcacu

SEQ ID NO: 13274 - RNA, 22 nt, Artificial Sequence
  LRRK2 RNA guide
cagugccagaaugaauuuuccu

SEQ ID NO: 13275 - RNA, 22 nt, Artificial Sequence
  LRRK2 RNA guide
ccacacagaacacuuaccagga

SEQ ID NO: 13276 - RNA, 22 nt, Artificial Sequence
  LRRK2 RNA guide
ccagaaugaauuuuccugguaa

SEQ ID NO: 13277 - RNA, 22 nt, Artificial Sequence
  LRRK2 RNA guide
ccaggaaaauucauucuggcac

SEQ ID NO: 13278 - RNA, 22 nt, Artificial Sequence
  LRRK2 RNA guide
cccacacagaacacuuaccagg

SEQ ID NO: 13279 - RNA, 22 nt, Artificial Sequence
  LRRK2 RNA guide
ccugguaaguguucuguguggg

SEQ ID NO: 13280 - RNA, 22 nt, Artificial Sequence
  LRRK2 RNA guide
cuuaccaggaaaauucauucug

SEQ ID NO: 13281 - RNA, 22 nt, Artificial Sequence
  LRRK2 RNA guide
gaacacuuaccaggaaaauuca

SEQ ID NO: 13282 - RNA, 22 nt, Artificial Sequence
  LRRK2 RNA guide
gaaugaauuuuccugguaagug

SEQ ID NO: 13283 - RNA, 22 nt, Artificial Sequence
  LRRK2 RNA guide
gaauuuuccugguaaguguucu

SEQ ID NO: 13284 - RNA, 22 nt, Artificial Sequence
  LRRK2 RNA guide
gacccacacagaacacuuacca

SEQ ID NO: 13285 - RNA, 22 nt, Artificial Sequence
  LRRK2 RNA guide
gagacccacacagaacacuuac

SEQ ID NO: 13286 - RNA, 22 nt, Artificial Sequence
  LRRK2 RNA guide
gaguuucagugccagaaugaau

SEQ ID NO: 13287 - RNA, 22 nt, Artificial Sequence
  LRRK2 RNA guide
gccagaaugaauuuuccuggua

SEQ ID NO: 13288 - RNA, 22 nt, Artificial Sequence
  LRRK2 RNA guide
ggagacccacacagaacacuua

SEQ ID NO: 13289 - RNA, 22 nt, Artificial Sequence
  LRRK2 RNA guide
gugccagaaugaauuuuccugg

SEQ ID NO: 13290 - RNA, 22 nt, Artificial Sequence
  LRRK2 RNA guide
guuucagugccagaaugaauuu

SEQ ID NO: 13291 - RNA, 22 nt, Artificial Sequence
  LRRK2 RNA guide
uaccaggaaaauucauucuggc

SEQ ID NO: 13292 - RNA, 22 nt, Artificial Sequence
  LRRK2 RNA guide
ucagugccagaaugaauuuucc

SEQ ID NO: 13293 - RNA, 22 nt, Artificial Sequence
  LRRK2 RNA guide
uccugguaaguguucugugugg

SEQ ID NO: 13294 - RNA, 22 nt, Artificial Sequence
  LRRK2 RNA guide
ugaauuuuccugguaaguguuc

SEQ ID NO: 13295 - RNA, 22 nt, Artificial Sequence
  LRRK2 RNA guide
ugccagaaugaauuuuccuggu

SEQ ID NO: 13296 - RNA, 22 nt, Artificial Sequence
  LRRK2 RNA guide
uuaccaggaaaauucauucugg

SEQ ID NO: 13297 - RNA, 22 nt, Artificial Sequence
  LRRK2 RNA guide
uuccugguaaguguucugugug

SEQ ID NO: 13298 - RNA, 22 nt, Artificial Sequence
  LRRK2 RNA guide
uuucagugccagaaugaauuuu

SEQ ID NO: 13299 - RNA, 22 nt, Artificial Sequence
  LRRK2 RNA guide
uuuccugguaaguguucugugu

SEQ ID NO: 13300 - RNA, 22 nt, Artificial Sequence
  LRRK2 RNA guide
uuuuccugguaaguguucugug

SEQ ID NO: 13301 - RNA, 20 nt, Artificial Sequence
  LRRK2 RNA guide
aaaacugcuucuggaauaca

SEQ ID NO: 13302 - RNA, 20 nt, Artificial Sequence
  LRRK2 RNA guide
aaacugcuucuggaauacag

SEQ ID NO: 13303 - RNA, 20 nt, Artificial Sequence
  LRRK2 RNA guide
aaacuuacuguggaagauuu

SEQ ID NO: 13304 - RNA, 20 nt, Artificial Sequence
  LRRK2 RNA guide
aaauuuuccuguauuccaga

SEQ ID NO: 13305 - RNA, 20 nt, Artificial Sequence
  LRRK2 RNA guide
aacugcuucuggaauacagg

SEQ ID NO: 13306 - RNA, 20 nt, Artificial Sequence
  LRRK2 RNA guide
aacuuacuguggaagauuua

SEQ ID NO: 13307 - RNA, 20 nt, Artificial Sequence
  LRRK2 RNA guide
aagauuuaaaacugcuucug

SEQ ID NO: 13308 - RNA, 20 nt, Artificial Sequence
  LRRK2 RNA guide
aagcaguuuuaaaucuucca

SEQ ID NO: 13309 - RNA, 20 nt, Artificial Sequence
  LRRK2 RNA guide
aauuuuccuguauuccagaa

SEQ ID NO: 13310 - RNA, 20 nt, Artificial Sequence
  LRRK2 RNA guide
acugcuucuggaauacagga

SEQ ID NO: 13311 - RNA, 20 nt, Artificial Sequence
  LRRK2 RNA guide
acuguggaagauuuaaaacu

SEQ ID NO: 13312 - RNA, 20 nt, Artificial Sequence
  LRRK2 RNA guide
acuuacuguggaagauuuaa

SEQ ID NO: 13313 - RNA, 20 nt, Artificial Sequence
  LRRK2 RNA guide
agaagcaguuuuaaaucuuc

SEQ ID NO: 13314 - RNA, 20 nt, Artificial Sequence
  LRRK2 RNA guide
agauuuaaaacugcuucugg

SEQ ID NO: 13315 - RNA, 20 nt, Artificial Sequence
  LRRK2 RNA guide
agcaguuuuaaaucuuccac

SEQ ID NO: 13316 - RNA, 20 nt, Artificial Sequence
  LRRK2 RNA guide
aguuuuaaaucuuccacagu

SEQ ID NO: 13317 - RNA, 20 nt, Artificial Sequence
  LRRK2 RNA guide
auuccagaagcaguuuuaaa

SEQ ID NO: 13318 - RNA, 20 nt, Artificial Sequence
  LRRK2 RNA guide
auuuaaaacugcuucuggaa

SEQ ID NO: 13319 - RNA, 20 nt, Artificial Sequence
  LRRK2 RNA guide
auuuuccuguauuccagaag

SEQ ID NO: 13320 - RNA, 20 nt, Artificial Sequence
  LRRK2 RNA guide
cagaagcaguuuuaaaucuu

SEQ ID NO: 13321 - RNA, 20 nt, Artificial Sequence
  LRRK2 RNA guide
caguuuuaaaucuuccacag

SEQ ID NO: 13322 - RNA, 20 nt, Artificial Sequence
  LRRK2 RNA guide
ccagaagcaguuuuaaaucu

SEQ ID NO: 13323 - RNA, 20 nt, Artificial Sequence
  LRRK2 RNA guide
ccuguauuccagaagcaguu

SEQ ID NO: 13324 - RNA, 20 nt, Artificial Sequence
  LRRK2 RNA guide
cuguauuccagaagcaguuu

SEQ ID NO: 13325 - RNA, 20 nt, Artificial Sequence
  LRRK2 RNA guide
cuguggaagauuuaaaacug

SEQ ID NO: 13326 - RNA, 20 nt, Artificial Sequence
  LRRK2 RNA guide
cuuacuguggaagauuuaaa

SEQ ID NO: 13327 - RNA, 20 nt, Artificial Sequence
  LRRK2 RNA guide
gaagauuuaaaacugcuucu

SEQ ID NO: 13328 - RNA, 20 nt, Artificial Sequence
  LRRK2 RNA guide
gaagcaguuuuaaaucuucc

SEQ ID NO: 13329 - RNA, 20 nt, Artificial Sequence
  LRRK2 RNA guide
gauuuaaaacugcuucugga

SEQ ID NO: 13330 - RNA, 20 nt, Artificial Sequence
  LRRK2 RNA guide
gcaguuuuaaaucuuccaca

SEQ ID NO: 13331 - RNA, 20 nt, Artificial Sequence
  LRRK2 RNA guide
ggaagauuuaaaacugcuuc

SEQ ID NO: 13332 - RNA, 20 nt, Artificial Sequence
  LRRK2 RNA guide
guauuccagaagcaguuuua

SEQ ID NO: 13333 - RNA, 20 nt, Artificial Sequence
  LRRK2 RNA guide
guggaagauuuaaaacugcu

SEQ ID NO: 13334 - RNA, 20 nt, Artificial Sequence
  LRRK2 RNA guide
uaaaacugcuucuggaauac

SEQ ID NO: 13335 - RNA, 20 nt, Artificial Sequence
  LRRK2 RNA guide
uacuguggaagauuuaaaac

SEQ ID NO: 13336 - RNA, 20 nt, Artificial Sequence
  LRRK2 RNA guide
uauuccagaagcaguuuuaa

SEQ ID NO: 13337 - RNA, 20 nt, Artificial Sequence
  LRRK2 RNA guide
uccagaagcaguuuuaaauc

SEQ ID NO: 13338 - RNA, 20 nt, Artificial Sequence
  LRRK2 RNA guide
uccuguauuccagaagcagu

SEQ ID NO: 13339 - RNA, 20 nt, Artificial Sequence
  LRRK2 RNA guide
uggaagauuuaaaacugcuu

SEQ ID NO: 13340 - RNA, 20 nt, Artificial Sequence
  LRRK2 RNA guide
uguauuccagaagcaguuuu

SEQ ID NO: 13341 - RNA, 20 nt, Artificial Sequence
  LRRK2 RNA guide
uguggaagauuuaaaacugc

SEQ ID NO: 13342 - RNA, 20 nt, Artificial Sequence
  LRRK2 RNA guide
uuaaaacugcuucuggaaua

SEQ ID NO: 13343 - RNA, 20 nt, Artificial Sequence
  LRRK2 RNA guide
uuccagaagcaguuuuaaau

SEQ ID NO: 13344 - RNA, 20 nt, Artificial Sequence
  LRRK2 RNA guide
uuccuguauuccagaagcag

SEQ ID NO: 13345 - RNA, 20 nt, Artificial Sequence
  LRRK2 RNA guide
uuuaaaacugcuucuggaau

SEQ ID NO: 13346 - RNA, 20 nt, Artificial Sequence
  LRRK2 RNA guide
uuuccuguauuccagaagca

SEQ ID NO: 13347 - RNA, 20 nt, Artificial Sequence
  LRRK2 RNA guide
uuuuccuguauuccagaagc

SEQ ID NO: 13348 - RNA, 21 nt, Artificial Sequence
  LRRK2 RNA guide
aaaacugcuucuggaauacag

SEQ ID NO: 13349 - RNA, 21 nt, Artificial Sequence
  LRRK2 RNA guide
aaacugcuucuggaauacagg

SEQ ID NO: 13350 - RNA, 21 nt, Artificial Sequence
  LRRK2 RNA guide
aacugcuucuggaauacagga

SEQ ID NO: 13351 - RNA, 21 nt, Artificial Sequence
  LRRK2 RNA guide
aagauuuaaaacugcuucugg

SEQ ID NO: 13352 - RNA, 21 nt, Artificial Sequence
  LRRK2 RNA guide
aagcaguuuuaaaucuuccac

SEQ ID NO: 13353 - RNA, 21 nt, Artificial Sequence
  LRRK2 RNA guide
aauuuuccuguauuccagaag

SEQ ID NO: 13354 - RNA, 21 nt, Artificial Sequence
  LRRK2 RNA guide
acugcuucuggaauacaggaa

SEQ ID NO: 13355 - RNA, 21 nt, Artificial Sequence
  LRRK2 RNA guide
acuguggaagauuuaaaacug

SEQ ID NO: 13356 - RNA, 21 nt, Artificial Sequence
  LRRK2 RNA guide
agaagcaguuuuaaaucuucc

SEQ ID NO: 13357 - RNA, 21 nt, Artificial Sequence
  LRRK2 RNA guide
agauuuaaaacugcuucugga

SEQ ID NO: 13358 - RNA, 21 nt, Artificial Sequence
  LRRK2 RNA guide
agcaguuuuaaaucuuccaca

SEQ ID NO: 13359 - RNA, 21 nt, Artificial Sequence
  LRRK2 RNA guide
auuuuccuguauuccagaagc

SEQ ID NO: 13360 - RNA, 21 nt, Artificial Sequence
  LRRK2 RNA guide
caaauuuuccuguauuccaga

SEQ ID NO: 13361 - RNA, 21 nt, Artificial Sequence
  LRRK2 RNA guide
cagaagcaguuuuaaaucuuc

SEQ ID NO: 13362 - RNA, 21 nt, Artificial Sequence
  LRRK2 RNA guide
caguuuuaaaucuuccacagu

SEQ ID NO: 13363 - RNA, 21 nt, Artificial Sequence
  LRRK2 RNA guide
ccagaagcaguuuuaaaucuu

SEQ ID NO: 13364 - RNA, 21 nt, Artificial Sequence
  LRRK2 RNA guide
ccuguauuccagaagcaguuu

SEQ ID NO: 13365 - RNA, 21 nt, Artificial Sequence
  LRRK2 RNA guide
cuguauuccagaagcaguuuu

SEQ ID NO: 13366 - RNA, 21 nt, Artificial Sequence
  LRRK2 RNA guide
cuguggaagauuuaaaacugc

SEQ ID NO: 13367 - RNA, 21 nt, Artificial Sequence
  LRRK2 RNA guide
gaagauuuaaaacugcuucug

SEQ ID NO: 13368 - RNA, 21 nt, Artificial Sequence
  LRRK2 RNA guide
gaagcaguuuuaaaucuucca

SEQ ID NO: 13369 - RNA, 21 nt, Artificial Sequence
  LRRK2 RNA guide
gauuuaaaacugcuucuggaa

SEQ ID NO: 13370 - RNA, 21 nt, Artificial Sequence
  LRRK2 RNA guide
gcaguuuuaaaucuuccacag

SEQ ID NO: 13371 - RNA, 21 nt, Artificial Sequence
  LRRK2 RNA guide
ggaagauuuaaaacugcuucu

SEQ ID NO: 13372 - RNA, 21 nt, Artificial Sequence
  LRRK2 RNA guide
guauuccagaagcaguuuuaa

SEQ ID NO: 13373 - RNA, 21 nt, Artificial Sequence
  LRRK2 RNA guide
guggaagauuuaaaacugcuu

SEQ ID NO: 13374 - RNA, 21 nt, Artificial Sequence
  LRRK2 RNA guide
uaaaacugcuucuggaauaca

SEQ ID NO: 13375 - RNA, 21 nt, Artificial Sequence
  LRRK2 RNA guide
uccagaagcaguuuuaaaucu

SEQ ID NO: 13376 - RNA, 21 nt, Artificial Sequence
  LRRK2 RNA guide
uccuguauuccagaagcaguu

SEQ ID NO: 13377 - RNA, 21 nt, Artificial Sequence
  LRRK2 RNA guide
uggaagauuuaaaacugcuuc

SEQ ID NO: 13378 - RNA, 21 nt, Artificial Sequence
  LRRK2 RNA guide
uguauuccagaagcaguuuua

SEQ ID NO: 13379 - RNA, 21 nt, Artificial Sequence
  LRRK2 RNA guide
uguggaagauuuaaaacugcu

SEQ ID NO: 13380 - RNA, 21 nt, Artificial Sequence
  LRRK2 RNA guide
uuaaaacugcuucuggaauac

SEQ ID NO: 13381 - RNA, 21 nt, Artificial Sequence
  LRRK2 RNA guide
uuccagaagcaguuuuaaauc

SEQ ID NO: 13382 - RNA, 21 nt, Artificial Sequence
  LRRK2 RNA guide
uuccuguauuccagaagcagu

SEQ ID NO: 13383 - RNA, 21 nt, Artificial Sequence
  LRRK2 RNA guide
uuuccuguauuccagaagcag

SEQ ID NO: 13384 - RNA, 21 nt, Artificial Sequence
  LRRK2 RNA guide
uuuuccuguauuccagaagca

SEQ ID NO: 13385 - RNA, 22 nt, Artificial Sequence
  LRRK2 RNA guide
aaaacugcuucuggaauacagg

SEQ ID NO: 13386 - RNA, 22 nt, Artificial Sequence
  LRRK2 RNA guide
aaacugcuucuggaauacagga

SEQ ID NO: 13387 - RNA, 22 nt, Artificial Sequence
  LRRK2 RNA guide
aaauuuuccuguauuccagaag

SEQ ID NO: 13388 - RNA, 22 nt, Artificial Sequence
  LRRK2 RNA guide
aacugcuucuggaauacaggaa

SEQ ID NO: 13389 - RNA, 22 nt, Artificial Sequence
  LRRK2 RNA guide
aagauuuaaaacugcuucugga

SEQ ID NO: 13390 - RNA, 22 nt, Artificial Sequence
  LRRK2 RNA guide
aagcaguuuuaaaucuuccaca

SEQ ID NO: 13391 - RNA, 22 nt, Artificial Sequence
  LRRK2 RNA guide
aauuuuccuguauuccagaagc

SEQ ID NO: 13392 - RNA, 22 nt, Artificial Sequence
  LRRK2 RNA guide
acaaauuuuccuguauuccaga

SEQ ID NO: 13393 - RNA, 22 nt, Artificial Sequence
  LRRK2 RNA guide
acugcuucuggaauacaggaaa

SEQ ID NO: 13394 - RNA, 22 nt, Artificial Sequence
  LRRK2 RNA guide
acuguggaagauuuaaaacugc

SEQ ID NO: 13395 - RNA, 22 nt, Artificial Sequence
  LRRK2 RNA guide
agaagcaguuuuaaaucuucca

SEQ ID NO: 13396 - RNA, 22 nt, Artificial Sequence
  LRRK2 RNA guide
agauuuaaaacugcuucuggaa

SEQ ID NO: 13397 - RNA, 22 nt, Artificial Sequence
  LRRK2 RNA guide
agcaguuuuaaaucuuccacag

SEQ ID NO: 13398 - RNA, 22 nt, Artificial Sequence
  LRRK2 RNA guide
auuccagaagcaguuuuaaauc

SEQ ID NO: 13399 - RNA, 22 nt, Artificial Sequence
  LRRK2 RNA guide
auuuuccuguauuccagaagca

SEQ ID NO: 13400 - RNA, 22 nt, Artificial Sequence
  LRRK2 RNA guide
caaauuuuccuguauuccagaa

SEQ ID NO: 13401 - RNA, 22 nt, Artificial Sequence
  LRRK2 RNA guide
cagaagcaguuuuaaaucuucc

SEQ ID NO: 13402 - RNA, 22 nt, Artificial Sequence
  LRRK2 RNA guide
caguuuuaaaucuuccacagua

SEQ ID NO: 13403 - RNA, 22 nt, Artificial Sequence
  LRRK2 RNA guide
ccagaagcaguuuuaaaucuuc

SEQ ID NO: 13404 - RNA, 22 nt, Artificial Sequence
  LRRK2 RNA guide
ccuguauuccagaagcaguuuu

SEQ ID NO: 13405 - RNA, 22 nt, Artificial Sequence
  LRRK2 RNA guide
cuguauuccagaagcaguuuua

SEQ ID NO: 13406 - RNA, 22 nt, Artificial Sequence
  LRRK2 RNA guide
cuguggaagauuuaaaacugcu

SEQ ID NO: 13407 - RNA, 22 nt, Artificial Sequence
  LRRK2 RNA guide
cuuacuguggaagauuuaaaac

SEQ ID NO: 13408 - RNA, 22 nt, Artificial Sequence
  LRRK2 RNA guide
gaagauuuaaaacugcuucugg

SEQ ID NO: 13409 - RNA, 22 nt, Artificial Sequence
  LRRK2 RNA guide
gaagcaguuuuaaaucuuccac

SEQ ID NO: 13410 - RNA, 22 nt, Artificial Sequence
  LRRK2 RNA guide
gauuuaaaacugcuucuggaau

SEQ ID NO: 13411 - RNA, 22 nt, Artificial Sequence
  LRRK2 RNA guide
gcaguuuuaaaucuuccacagu

SEQ ID NO: 13412 - RNA, 22 nt, Artificial Sequence
  LRRK2 RNA guide
ggaagauuuaaaacugcuucug

SEQ ID NO: 13413 - RNA, 22 nt, Artificial Sequence
  LRRK2 RNA guide
guauuccagaagcaguuuuaaa

SEQ ID NO: 13414 - RNA, 22 nt, Artificial Sequence
  LRRK2 RNA guide
guggaagauuuaaaacugcuuc

SEQ ID NO: 13415 - RNA, 22 nt, Artificial Sequence
  LRRK2 RNA guide
uaaaacugcuucuggaauacag

SEQ ID NO: 13416 - RNA, 22 nt, Artificial Sequence
  LRRK2 RNA guide
uacuguggaagauuuaaaacug

SEQ ID NO: 13417 - RNA, 22 nt, Artificial Sequence
  LRRK2 RNA guide
uccagaagcaguuuuaaaucuu

SEQ ID NO: 13418 - RNA, 22 nt, Artificial Sequence
  LRRK2 RNA guide
uccuguauuccagaagcaguuu

SEQ ID NO: 13419 - RNA, 22 nt, Artificial Sequence
  LRRK2 RNA guide
uggaagauuuaaaacugcuucu

SEQ ID NO: 13420 - RNA, 22 nt, Artificial Sequence
  LRRK2 RNA guide
uguauuccagaagcaguuuuaa

SEQ ID NO: 13421 - RNA, 22 nt, Artificial Sequence
  LRRK2 RNA guide
uguggaagauuuaaaacugcuu

SEQ ID NO: 13422 - RNA, 22 nt, Artificial Sequence
  LRRK2 RNA guide
uuaaaacugcuucuggaauaca

SEQ ID NO: 13423 - RNA, 22 nt, Artificial Sequence
  LRRK2 RNA guide
uuccagaagcaguuuuaaaucu

SEQ ID NO: 13424 - RNA, 22 nt, Artificial Sequence
  LRRK2 RNA guide
uuccuguauuccagaagcaguu

SEQ ID NO: 13425 - RNA, 22 nt, Artificial Sequence
  LRRK2 RNA guide
uuuaaaacugcuucuggaauac

SEQ ID NO: 13426 - RNA, 22 nt, Artificial Sequence
  LRRK2 RNA guide
uuuccuguauuccagaagcagu

SEQ ID NO: 13427 - RNA, 22 nt, Artificial Sequence
  LRRK2 RNA guide
uuuuccuguauuccagaagcag

SEQ ID NO: 13428 - RNA, 20 nt, Artificial Sequence
  LRRK2 RNA guide
aaagaccucaagcuaaaaca

SEQ ID NO: 13429 - RNA, 20 nt, Artificial Sequence
  LRRK2 RNA guide
aagaccucaagcuaaaacaa

SEQ ID NO: 13430 - RNA, 20 nt, Artificial Sequence
  LRRK2 RNA guide
accucaagcuaaaacaauac

SEQ ID NO: 13431 - RNA, 20 nt, Artificial Sequence
  LRRK2 RNA guide
agaccucaagcuaaaacaau

SEQ ID NO: 13432 - RNA, 20 nt, Artificial Sequence
  LRRK2 RNA guide
agcuugaggucuuuagauau

SEQ ID NO: 13433 - RNA, 20 nt, Artificial Sequence
  LRRK2 RNA guide
auaucuaaagaccucaagcu

SEQ ID NO: 13434 - RNA, 20 nt, Artificial Sequence
  LRRK2 RNA guide
aucuaaagaccucaagcuaa

SEQ ID NO: 13435 - RNA, 20 nt, Artificial Sequence
  LRRK2 RNA guide
auugcugcucauaucuaaag

SEQ ID NO: 13436 - RNA, 20 nt, Artificial Sequence
  LRRK2 RNA guide
auuguuuuagcuugaggucu

SEQ ID NO: 13437 - RNA, 20 nt, Artificial Sequence
  LRRK2 RNA guide
cauaucuaaagaccucaagc

SEQ ID NO: 13438 - RNA, 20 nt, Artificial Sequence
  LRRK2 RNA guide
cauugcugcucauaucuaaa

SEQ ID NO: 13439 - RNA, 20 nt, Artificial Sequence
  LRRK2 RNA guide
ccucaagcuaaaacaauaca

SEQ ID NO: 13440 - RNA, 20 nt, Artificial Sequence
  LRRK2 RNA guide
cuaaagaccucaagcuaaaa

SEQ ID NO: 13441 - RNA, 20 nt, Artificial Sequence
  LRRK2 RNA guide
cucaagcuaaaacaauacac

SEQ ID NO: 13442 - RNA, 20 nt, Artificial Sequence
  LRRK2 RNA guide
cucauaucuaaagaccucaa

SEQ ID NO: 13443 - RNA, 20 nt, Artificial Sequence
  LRRK2 RNA guide
cugcucauaucuaaagaccu

SEQ ID NO: 13444 - RNA, 20 nt, Artificial Sequence
  LRRK2 RNA guide
cuguguauuguuuuagcuug

SEQ ID NO: 13445 - RNA, 20 nt, Artificial Sequence
  LRRK2 RNA guide
cuugaggucuuuagauauga

SEQ ID NO: 13446 - RNA, 20 nt, Artificial Sequence
  LRRK2 RNA guide
gaccucaagcuaaaacaaua

SEQ ID NO: 13447 - RNA, 20 nt, Artificial Sequence
  LRRK2 RNA guide
gaggucuuuagauaugagca

SEQ ID NO: 13448 - RNA, 20 nt, Artificial Sequence
  LRRK2 RNA guide
gcucauaucuaaagaccuca

SEQ ID NO: 13449 - RNA, 20 nt, Artificial Sequence
  LRRK2 RNA guide
gcuugaggucuuuagauaug

SEQ ID NO: 13450 - RNA, 20 nt, Artificial Sequence
  LRRK2 RNA guide
guauuguuuuagcuugaggu

SEQ ID NO: 13451 - RNA, 20 nt, Artificial Sequence
  LRRK2 RNA guide
guguauuguuuuagcuugag

SEQ ID NO: 13452 - RNA, 20 nt, Artificial Sequence
  LRRK2 RNA guide
guuuuagcuugaggucuuua

SEQ ID NO: 13453 - RNA, 20 nt, Artificial Sequence
  LRRK2 RNA guide
uaaagaccucaagcuaaaac

SEQ ID NO: 13454 - RNA, 20 nt, Artificial Sequence
  LRRK2 RNA guide
uagcuugaggucuuuagaua

SEQ ID NO: 13455 - RNA, 20 nt, Artificial Sequence
  LRRK2 RNA guide
uaucuaaagaccucaagcua

SEQ ID NO: 13456 - RNA, 20 nt, Artificial Sequence
  LRRK2 RNA guide
uauuguuuuagcuugagguc

SEQ ID NO: 13457 - RNA, 20 nt, Artificial Sequence
  LRRK2 RNA guide
ucauaucuaaagaccucaag

SEQ ID NO: 13458 - RNA, 20 nt, Artificial Sequence
  LRRK2 RNA guide
ucuaaagaccucaagcuaaa

SEQ ID NO: 13459 - RNA, 20 nt, Artificial Sequence
  LRRK2 RNA guide
ucuguguauuguuuuagcuu

SEQ ID NO: 13460 - RNA, 20 nt, Artificial Sequence
  LRRK2 RNA guide
ugaggucuuuagauaugagc

SEQ ID NO: 13461 - RNA, 20 nt, Artificial Sequence
  LRRK2 RNA guide
ugcucauaucuaaagaccuc

SEQ ID NO: 13462 - RNA, 20 nt, Artificial Sequence
  LRRK2 RNA guide
uguauuguuuuagcuugagg

SEQ ID NO: 13463 - RNA, 20 nt, Artificial Sequence
  LRRK2 RNA guide
uguguauuguuuuagcuuga

SEQ ID NO: 13464 - RNA, 20 nt, Artificial Sequence
  LRRK2 RNA guide
uguuuuagcuugaggucuuu

SEQ ID NO: 13465 - RNA, 20 nt, Artificial Sequence
  LRRK2 RNA guide
uuagcuugaggucuuuagau

SEQ ID NO: 13466 - RNA, 20 nt, Artificial Sequence
  LRRK2 RNA guide
uucuguguauuguuuuagcu

SEQ ID NO: 13467 - RNA, 20 nt, Artificial Sequence
  LRRK2 RNA guide
uugaggucuuuagauaugag

SEQ ID NO: 13468 - RNA, 20 nt, Artificial Sequence
  LRRK2 RNA guide
uuguuuuagcuugaggucuu

SEQ ID NO: 13469 - RNA, 20 nt, Artificial Sequence
  LRRK2 RNA guide
uuuagcuugaggucuuuaga

SEQ ID NO: 13470 - RNA, 20 nt, Artificial Sequence
  LRRK2 RNA guide
uuucuguguauuguuuuagc

SEQ ID NO: 13471 - RNA, 20 nt, Artificial Sequence
  LRRK2 RNA guide
uuuuagcuugaggucuuuag

SEQ ID NO: 13472 - RNA, 21 nt, Artificial Sequence
  LRRK2 RNA guide
aaagaccucaagcuaaaacaa

SEQ ID NO: 13473 - RNA, 21 nt, Artificial Sequence
  LRRK2 RNA guide
aagaccucaagcuaaaacaau

SEQ ID NO: 13474 - RNA, 21 nt, Artificial Sequence
  LRRK2 RNA guide
accucaagcuaaaacaauaca

SEQ ID NO: 13475 - RNA, 21 nt, Artificial Sequence
  LRRK2 RNA guide
agaccucaagcuaaaacaaua

SEQ ID NO: 13476 - RNA, 21 nt, Artificial Sequence
  LRRK2 RNA guide
agcuugaggucuuuagauaug

SEQ ID NO: 13477 - RNA, 21 nt, Artificial Sequence
  LRRK2 RNA guide
auaucuaaagaccucaagcua

SEQ ID NO: 13478 - RNA, 21 nt, Artificial Sequence
  LRRK2 RNA guide
aucuaaagaccucaagcuaaa

SEQ ID NO: 13479 - RNA, 21 nt, Artificial Sequence
  LRRK2 RNA guide
auugcugcucauaucuaaaga

SEQ ID NO: 13480 - RNA, 21 nt, Artificial Sequence
  LRRK2 RNA guide
auuguuuuagcuugaggucuu

SEQ ID NO: 13481 - RNA, 21 nt, Artificial Sequence
  LRRK2 RNA guide
cauaucuaaagaccucaagcu

SEQ ID NO: 13482 - RNA, 21 nt, Artificial Sequence
  LRRK2 RNA guide
cauugcugcucauaucuaaag

SEQ ID NO: 13483 - RNA, 21 nt, Artificial Sequence
  LRRK2 RNA guide
ccucaagcuaaaacaauacac

SEQ ID NO: 13484 - RNA, 21 nt, Artificial Sequence
  LRRK2 RNA guide
cuaaagaccucaagcuaaaac

SEQ ID NO: 13485 - RNA, 21 nt, Artificial Sequence
  LRRK2 RNA guide
cucaagcuaaaacaauacaca

SEQ ID NO: 13486 - RNA, 21 nt, Artificial Sequence
  LRRK2 RNA guide
cucauaucuaaagaccucaag

SEQ ID NO: 13487 - RNA, 21 nt, Artificial Sequence
  LRRK2 RNA guide
cugcucauaucuaaagaccuc

SEQ ID NO: 13488 - RNA, 21 nt, Artificial Sequence
  LRRK2 RNA guide
cuguguauuguuuuagcuuga

SEQ ID NO: 13489 - RNA, 21 nt, Artificial Sequence
  LRRK2 RNA guide
cuugaggucuuuagauaugag

SEQ ID NO: 13490 - RNA, 21 nt, Artificial Sequence
  LRRK2 RNA guide
gaccucaagcuaaaacaauac

SEQ ID NO: 13491 - RNA, 21 nt, Artificial Sequence
  LRRK2 RNA guide
gaggucuuuagauaugagcag

SEQ ID NO: 13492 - RNA, 21 nt, Artificial Sequence
  LRRK2 RNA guide
gcucauaucuaaagaccucaa

SEQ ID NO: 13493 - RNA, 21 nt, Artificial Sequence
  LRRK2 RNA guide
gcugcucauaucuaaagaccu

SEQ ID NO: 13494 - RNA, 21 nt, Artificial Sequence
  LRRK2 RNA guide
gcuugaggucuuuagauauga

SEQ ID NO: 13495 - RNA, 21 nt, Artificial Sequence
  LRRK2 RNA guide
guauuguuuuagcuugagguc

SEQ ID NO: 13496 - RNA, 21 nt, Artificial Sequence
  LRRK2 RNA guide
guguauuguuuuagcuugagg

SEQ ID NO: 13497 - RNA, 21 nt, Artificial Sequence
  LRRK2 RNA guide
guuuuagcuugaggucuuuag

SEQ ID NO: 13498 - RNA, 21 nt, Artificial Sequence
  LRRK2 RNA guide
uaaagaccucaagcuaaaaca

SEQ ID NO: 13499 - RNA, 21 nt, Artificial Sequence
  LRRK2 RNA guide
uagcuugaggucuuuagauau

SEQ ID NO: 13500 - RNA, 21 nt, Artificial Sequence
  LRRK2 RNA guide
uaucuaaagaccucaagcuaa

SEQ ID NO: 13501 - RNA, 21 nt, Artificial Sequence
  LRRK2 RNA guide
uauuguuuuagcuugaggucu

SEQ ID NO: 13502 - RNA, 21 nt, Artificial Sequence
  LRRK2 RNA guide
ucauaucuaaagaccucaagc

SEQ ID NO: 13503 - RNA, 21 nt, Artificial Sequence
  LRRK2 RNA guide
ucauugcugcucauaucuaaa

SEQ ID NO: 13504 - RNA, 21 nt, Artificial Sequence
  LRRK2 RNA guide
ucuaaagaccucaagcuaaaa

SEQ ID NO: 13505 - RNA, 21 nt, Artificial Sequence
  LRRK2 RNA guide
ucuguguauuguuuuagcuug

SEQ ID NO: 13506 - RNA, 21 nt, Artificial Sequence
  LRRK2 RNA guide
ugaggucuuuagauaugagca

SEQ ID NO: 13507 - RNA, 21 nt, Artificial Sequence
  LRRK2 RNA guide
ugcucauaucuaaagaccuca

SEQ ID NO: 13508 - RNA, 21 nt, Artificial Sequence
  LRRK2 RNA guide
ugcugcucauaucuaaagacc

SEQ ID NO: 13509 - RNA, 21 nt, Artificial Sequence
  LRRK2 RNA guide
uguauuguuuuagcuugaggu

SEQ ID NO: 13510 - RNA, 21 nt, Artificial Sequence
  LRRK2 RNA guide
uguguauuguuuuagcuugag

SEQ ID NO: 13511 - RNA, 21 nt, Artificial Sequence
  LRRK2 RNA guide
uguuuuagcuugaggucuuua

SEQ ID NO: 13512 - RNA, 21 nt, Artificial Sequence
  LRRK2 RNA guide
uuagcuugaggucuuuagaua

SEQ ID NO: 13513 - RNA, 21 nt, Artificial Sequence
  LRRK2 RNA guide
uugaggucuuuagauaugagc

SEQ ID NO: 13514 - RNA, 21 nt, Artificial Sequence
  LRRK2 RNA guide
uugcugcucauaucuaaagac

SEQ ID NO: 13515 - RNA, 21 nt, Artificial Sequence
  LRRK2 RNA guide
uuguuuuagcuugaggucuuu

SEQ ID NO: 13516 - RNA, 21 nt, Artificial Sequence
  LRRK2 RNA guide
uuuagcuugaggucuuuagau

SEQ ID NO: 13517 - RNA, 21 nt, Artificial Sequence
  LRRK2 RNA guide
uuuuagcuugaggucuuuaga

SEQ ID NO: 13518 - RNA, 22 nt, Artificial Sequence
  LRRK2 RNA guide
aaagaccucaagcuaaaacaau

SEQ ID NO: 13519 - RNA, 22 nt, Artificial Sequence
  LRRK2 RNA guide
aagaccucaagcuaaaacaaua

SEQ ID NO: 13520 - RNA, 22 nt, Artificial Sequence
  LRRK2 RNA guide
accucaagcuaaaacaauacac

SEQ ID NO: 13521 - RNA, 22 nt, Artificial Sequence
  LRRK2 RNA guide
agaccucaagcuaaaacaauac

SEQ ID NO: 13522 - RNA, 22 nt, Artificial Sequence
  LRRK2 RNA guide
agcuugaggucuuuagauauga

SEQ ID NO: 13523 - RNA, 22 nt, Artificial Sequence
  LRRK2 RNA guide
auaucuaaagaccucaagcuaa

SEQ ID NO: 13524 - RNA, 22 nt, Artificial Sequence
  LRRK2 RNA guide
aucauugcugcucauaucuaaa

SEQ ID NO: 13525 - RNA, 22 nt, Artificial Sequence
  LRRK2 RNA guide
aucuaaagaccucaagcuaaaa

SEQ ID NO: 13526 - RNA, 22 nt, Artificial Sequence
  LRRK2 RNA guide
auugcugcucauaucuaaagac

SEQ ID NO: 13527 - RNA, 22 nt, Artificial Sequence
  LRRK2 RNA guide
auuguuuuagcuugaggucuuu

SEQ ID NO: 13528 - RNA, 22 nt, Artificial Sequence
  LRRK2 RNA guide
cauaucuaaagaccucaagcua

SEQ ID NO: 13529 - RNA, 22 nt, Artificial Sequence
  LRRK2 RNA guide
cauugcugcucauaucuaaaga

SEQ ID NO: 13530 - RNA, 22 nt, Artificial Sequence
  LRRK2 RNA guide
ccucaagcuaaaacaauacaca

SEQ ID NO: 13531 - RNA, 22 nt, Artificial Sequence
  LRRK2 RNA guide
cuaaagaccucaagcuaaaaca

SEQ ID NO: 13532 - RNA, 22 nt, Artificial Sequence
  LRRK2 RNA guide
cucaagcuaaaacaauacacag

SEQ ID NO: 13533 - RNA, 22 nt, Artificial Sequence
  LRRK2 RNA guide
cucauaucuaaagaccucaagc

SEQ ID NO: 13534 - RNA, 22 nt, Artificial Sequence
  LRRK2 RNA guide
cugcucauaucuaaagaccuca

SEQ ID NO: 13535 - RNA, 22 nt, Artificial Sequence
  LRRK2 RNA guide
cuguguauuguuuuagcuugag

SEQ ID NO: 13536 - RNA, 22 nt, Artificial Sequence
  LRRK2 RNA guide
cuugaggucuuuagauaugagc

SEQ ID NO: 13537 - RNA, 22 nt, Artificial Sequence
  LRRK2 RNA guide
cuuuucuguguauuguuuuagc

SEQ ID NO: 13538 - RNA, 22 nt, Artificial Sequence
  LRRK2 RNA guide
gaccucaagcuaaaacaauaca

SEQ ID NO: 13539 - RNA, 22 nt, Artificial Sequence
  LRRK2 RNA guide
gaggucuuuagauaugagcagc

SEQ ID NO: 13540 - RNA, 22 nt, Artificial Sequence
  LRRK2 RNA guide
gcucauaucuaaagaccucaag

SEQ ID NO: 13541 - RNA, 22 nt, Artificial Sequence
  LRRK2 RNA guide
gcugcucauaucuaaagaccuc

SEQ ID NO: 13542 - RNA, 22 nt, Artificial Sequence
  LRRK2 RNA guide
gcuugaggucuuuagauaugag

SEQ ID NO: 13543 - RNA, 22 nt, Artificial Sequence
  LRRK2 RNA guide
guauuguuuuagcuugaggucu

SEQ ID NO: 13544 - RNA, 22 nt, Artificial Sequence
  LRRK2 RNA guide
guguauuguuuuagcuugaggu

SEQ ID NO: 13545 - RNA, 22 nt, Artificial Sequence
  LRRK2 RNA guide
guuuuagcuugaggucuuuaga

SEQ ID NO: 13546 - RNA, 22 nt, Artificial Sequence
  LRRK2 RNA guide
uaaagaccucaagcuaaaacaa

SEQ ID NO: 13547 - RNA, 22 nt, Artificial Sequence
  LRRK2 RNA guide
uagcuugaggucuuuagauaug

SEQ ID NO: 13548 - RNA, 22 nt, Artificial Sequence
  LRRK2 RNA guide
uaucuaaagaccucaagcuaaa

SEQ ID NO: 13549 - RNA, 22 nt, Artificial Sequence
  LRRK2 RNA guide
uauuguuuuagcuugaggucuu

SEQ ID NO: 13550 - RNA, 22 nt, Artificial Sequence
  LRRK2 RNA guide
ucauaucuaaagaccucaagcu

SEQ ID NO: 13551 - RNA, 22 nt, Artificial Sequence
  LRRK2 RNA guide
ucauugcugcucauaucuaaag

SEQ ID NO: 13552 - RNA, 22 nt, Artificial Sequence
  LRRK2 RNA guide
ucuaaagaccucaagcuaaaac

SEQ ID NO: 13553 - RNA, 22 nt, Artificial Sequence
  LRRK2 RNA guide
ucuguguauuguuuuagcuuga

SEQ ID NO: 13554 - RNA, 22 nt, Artificial Sequence
  LRRK2 RNA guide
ugaggucuuuagauaugagcag

SEQ ID NO: 13555 - RNA, 22 nt, Artificial Sequence
  LRRK2 RNA guide
ugcucauaucuaaagaccucaa

SEQ ID NO: 13556 - RNA, 22 nt, Artificial Sequence
  LRRK2 RNA guide
ugcugcucauaucuaaagaccu

SEQ ID NO: 13557 - RNA, 22 nt, Artificial Sequence
  LRRK2 RNA guide
uguauuguuuuagcuugagguc

SEQ ID NO: 13558 - RNA, 22 nt, Artificial Sequence
  LRRK2 RNA guide
uguguauuguuuuagcuugagg

SEQ ID NO: 13559 - RNA, 22 nt, Artificial Sequence
  LRRK2 RNA guide
uguuuuagcuugaggucuuuag

SEQ ID NO: 13560 - RNA, 22 nt, Artificial Sequence
  LRRK2 RNA guide
uuagcuugaggucuuuagauau

SEQ ID NO: 13561 - RNA, 22 nt, Artificial Sequence
  LRRK2 RNA guide
uucuguguauuguuuuagcuug

SEQ ID NO: 13562 - RNA, 22 nt, Artificial Sequence
  LRRK2 RNA guide
uugaggucuuuagauaugagca

SEQ ID NO: 13563 - RNA, 22 nt, Artificial Sequence
  LRRK2 RNA guide
uugcugcucauaucuaaagacc

SEQ ID NO: 13564 - RNA, 22 nt, Artificial Sequence
  LRRK2 RNA guide
uuguuuuagcuugaggucuuua

SEQ ID NO: 13565 - RNA, 22 nt, Artificial Sequence
  LRRK2 RNA guide
uuuagcuugaggucuuuagaua

SEQ ID NO: 13566 - RNA, 22 nt, Artificial Sequence
  LRRK2 RNA guide
uuuuagcuugaggucuuuagau

SEQ ID NO: 13567 - RNA, 20 nt, Artificial Sequence
  LRRK2 RNA guide
aauaucauuccugcucauau

SEQ ID NO: 13568 - RNA, 20 nt, Artificial Sequence
  LRRK2 RNA guide
acugaauaucauuccugcuc

SEQ ID NO: 13569 - RNA, 20 nt, Artificial Sequence
  LRRK2 RNA guide
agauaugagcaggaaugaua

SEQ ID NO: 13570 - RNA, 20 nt, Artificial Sequence
  LRRK2 RNA guide
agcaggaaugauauucagua

SEQ ID NO: 13571 - RNA, 20 nt, Artificial Sequence
  LRRK2 RNA guide
aggaaugauauucaguaccu

SEQ ID NO: 13572 - RNA, 20 nt, Artificial Sequence
  LRRK2 RNA guide
agguacugaauaucauuccu

SEQ ID NO: 13573 - RNA, 20 nt, Artificial Sequence
  LRRK2 RNA guide
auaucauuccugcucauauc

SEQ ID NO: 13574 - RNA, 20 nt, Artificial Sequence
  LRRK2 RNA guide
auaugagcaggaaugauauu

SEQ ID NO: 13575 - RNA, 20 nt, Artificial Sequence
  LRRK2 RNA guide
aucauuccugcucauaucua

SEQ ID NO: 13576 - RNA, 20 nt, Artificial Sequence
  LRRK2 RNA guide
augagcaggaaugauauuca

SEQ ID NO: 13577 - RNA, 20 nt, Artificial Sequence
  LRRK2 RNA guide
auuccugcucauaucuaaag

SEQ ID NO: 13578 - RNA, 20 nt, Artificial Sequence
  LRRK2 RNA guide
caggaaugauauucaguacc

SEQ ID NO: 13579 - RNA, 20 nt, Artificial Sequence
  LRRK2 RNA guide
cauuccugcucauaucuaaa

SEQ ID NO: 13580 - RNA, 20 nt, Artificial Sequence
  LRRK2 RNA guide
ccugguagguacugaauauc

SEQ ID NO: 13581 - RNA, 20 nt, Artificial Sequence
  LRRK2 RNA guide
cggucuuuagauaugagcag

SEQ ID NO: 13582 - RNA, 20 nt, Artificial Sequence
  LRRK2 RNA guide
cugaauaucauuccugcuca

SEQ ID NO: 13583 - RNA, 20 nt, Artificial Sequence
  LRRK2 RNA guide
cugguagguacugaauauca

SEQ ID NO: 13584 - RNA, 20 nt, Artificial Sequence
  LRRK2 RNA guide
cuugcggucuuuagauauga

SEQ ID NO: 13585 - RNA, 20 nt, Artificial Sequence
  LRRK2 RNA guide
cuuuagauaugagcaggaau

SEQ ID NO: 13586 - RNA, 20 nt, Artificial Sequence
  LRRK2 RNA guide
gaauaucauuccugcucaua

SEQ ID NO: 13587 - RNA, 20 nt, Artificial Sequence
  LRRK2 RNA guide
gagcaggaaugauauucagu

SEQ ID NO: 13588 - RNA, 20 nt, Artificial Sequence
  LRRK2 RNA guide
gauaugagcaggaaugauau

SEQ ID NO: 13589 - RNA, 20 nt, Artificial Sequence
  LRRK2 RNA guide
gcaggaaugauauucaguac

SEQ ID NO: 13590 - RNA, 20 nt, Artificial Sequence
  LRRK2 RNA guide
gcggucuuuagauaugagca

SEQ ID NO: 13591 - RNA, 20 nt, Artificial Sequence
  LRRK2 RNA guide
ggaaugauauucaguaccua

SEQ ID NO: 13592 - RNA, 20 nt, Artificial Sequence
  LRRK2 RNA guide
gguacugaauaucauuccug

SEQ ID NO: 13593 - RNA, 20 nt, Artificial Sequence
  LRRK2 RNA guide
gguagguacugaauaucauu

SEQ ID NO: 13594 - RNA, 20 nt, Artificial Sequence
  LRRK2 RNA guide
ggucuuuagauaugagcagg

SEQ ID NO: 13595 - RNA, 20 nt, Artificial Sequence
  LRRK2 RNA guide
guacugaauaucauuccugc

SEQ ID NO: 13596 - RNA, 20 nt, Artificial Sequence
  LRRK2 RNA guide
guagguacugaauaucauuc

SEQ ID NO: 13597 - RNA, 20 nt, Artificial Sequence
  LRRK2 RNA guide
gucuuuagauaugagcagga

SEQ ID NO: 13598 - RNA, 20 nt, Artificial Sequence
  LRRK2 RNA guide
uacugaauaucauuccugcu

SEQ ID NO: 13599 - RNA, 20 nt, Artificial Sequence
  LRRK2 RNA guide
uagauaugagcaggaaugau

SEQ ID NO: 13600 - RNA, 20 nt, Artificial Sequence
  LRRK2 RNA guide
uagguacugaauaucauucc

SEQ ID NO: 13601 - RNA, 20 nt, Artificial Sequence
  LRRK2 RNA guide
uaucauuccugcucauaucu

SEQ ID NO: 13602 - RNA, 20 nt, Artificial Sequence
  LRRK2 RNA guide
uaugagcaggaaugauauuc

SEQ ID NO: 13603 - RNA, 20 nt, Artificial Sequence
  LRRK2 RNA guide
ucauuccugcucauaucuaa

SEQ ID NO: 13604 - RNA, 20 nt, Artificial Sequence
  LRRK2 RNA guide
uccugcucauaucuaaagac

SEQ ID NO: 13605 - RNA, 20 nt, Artificial Sequence
  LRRK2 RNA guide
ucuuuagauaugagcaggaa

SEQ ID NO: 13606 - RNA, 20 nt, Artificial Sequence
  LRRK2 RNA guide
ugaauaucauuccugcucau

SEQ ID NO: 13607 - RNA, 20 nt, Artificial Sequence
  LRRK2 RNA guide
ugagcaggaaugauauucag

SEQ ID NO: 13608 - RNA, 20 nt, Artificial Sequence
  LRRK2 RNA guide
ugcggucuuuagauaugagc

SEQ ID NO: 13609 - RNA, 20 nt, Artificial Sequence
  LRRK2 RNA guide
ugguagguacugaauaucau

SEQ ID NO: 13610 - RNA, 20 nt, Artificial Sequence
  LRRK2 RNA guide
uuagauaugagcaggaauga

SEQ ID NO: 13611 - RNA, 20 nt, Artificial Sequence
  LRRK2 RNA guide
uuccugcucauaucuaaaga

SEQ ID NO: 13612 - RNA, 20 nt, Artificial Sequence
  LRRK2 RNA guide
uugcggucuuuagauaugag

SEQ ID NO: 13613 - RNA, 20 nt, Artificial Sequence
  LRRK2 RNA guide
uuuagauaugagcaggaaug

SEQ ID NO: 13614 - RNA, 21 nt, Artificial Sequence
  LRRK2 RNA guide
aauaucauuccugcucauauc

SEQ ID NO: 13615 - RNA, 21 nt, Artificial Sequence
  LRRK2 RNA guide
accugguagguacugaauauc

SEQ ID NO: 13616 - RNA, 21 nt, Artificial Sequence
  LRRK2 RNA guide
acugaauaucauuccugcuca

SEQ ID NO: 13617 - RNA, 21 nt, Artificial Sequence
  LRRK2 RNA guide
agauaugagcaggaaugauau

SEQ ID NO: 13618 - RNA, 21 nt, Artificial Sequence
  LRRK2 RNA guide
agcaggaaugauauucaguac

SEQ ID NO: 13619 - RNA, 21 nt, Artificial Sequence
  LRRK2 RNA guide
aggaaugauauucaguaccua

SEQ ID NO: 13620 - RNA, 21 nt, Artificial Sequence
  LRRK2 RNA guide
agguacugaauaucauuccug

SEQ ID NO: 13621 - RNA, 21 nt, Artificial Sequence
  LRRK2 RNA guide
auaucauuccugcucauaucu

SEQ ID NO: 13622 - RNA, 21 nt, Artificial Sequence
  LRRK2 RNA guide
auaugagcaggaaugauauuc

SEQ ID NO: 13623 - RNA, 21 nt, Artificial Sequence
  LRRK2 RNA guide
aucauuccugcucauaucuaa

SEQ ID NO: 13624 - RNA, 21 nt, Artificial Sequence
  LRRK2 RNA guide
augagcaggaaugauauucag

SEQ ID NO: 13625 - RNA, 21 nt, Artificial Sequence
  LRRK2 RNA guide
auuccugcucauaucuaaaga

SEQ ID NO: 13626 - RNA, 21 nt, Artificial Sequence
  LRRK2 RNA guide
caggaaugauauucaguaccu

SEQ ID NO: 13627 - RNA, 21 nt, Artificial Sequence
  LRRK2 RNA guide
cauuccugcucauaucuaaag

SEQ ID NO: 13628 - RNA, 21 nt, Artificial Sequence
  LRRK2 RNA guide
ccugguagguacugaauauca

SEQ ID NO: 13629 - RNA, 21 nt, Artificial Sequence
  LRRK2 RNA guide
cggucuuuagauaugagcagg

SEQ ID NO: 13630 - RNA, 21 nt, Artificial Sequence
  LRRK2 RNA guide
cugaauaucauuccugcucau

SEQ ID NO: 13631 - RNA, 21 nt, Artificial Sequence
  LRRK2 RNA guide
cugguagguacugaauaucau

SEQ ID NO: 13632 - RNA, 21 nt, Artificial Sequence
  LRRK2 RNA guide
cuugcggucuuuagauaugag

SEQ ID NO: 13633 - RNA, 21 nt, Artificial Sequence
  LRRK2 RNA guide
cuuuagauaugagcaggaaug

SEQ ID NO: 13634 - RNA, 21 nt, Artificial Sequence
  LRRK2 RNA guide
gaauaucauuccugcucauau

SEQ ID NO: 13635 - RNA, 21 nt, Artificial Sequence
  LRRK2 RNA guide
gaccugguagguacugaauau

SEQ ID NO: 13636 - RNA, 21 nt, Artificial Sequence
  LRRK2 RNA guide
gagcaggaaugauauucagua

SEQ ID NO: 13637 - RNA, 21 nt, Artificial Sequence
  LRRK2 RNA guide
gauaugagcaggaaugauauu

SEQ ID NO: 13638 - RNA, 21 nt, Artificial Sequence
  LRRK2 RNA guide
gcaggaaugauauucaguacc

SEQ ID NO: 13639 - RNA, 21 nt, Artificial Sequence
  LRRK2 RNA guide
gcggucuuuagauaugagcag

SEQ ID NO: 13640 - RNA, 21 nt, Artificial Sequence
  LRRK2 RNA guide
gcuugcggucuuuagauauga

SEQ ID NO: 13641 - RNA, 21 nt, Artificial Sequence
  LRRK2 RNA guide
ggaaugauauucaguaccuac

SEQ ID NO: 13642 - RNA, 21 nt, Artificial Sequence
  LRRK2 RNA guide
gguacugaauaucauuccugc

SEQ ID NO: 13643 - RNA, 21 nt, Artificial Sequence
  LRRK2 RNA guide
gguagguacugaauaucauuc

SEQ ID NO: 13644 - RNA, 21 nt, Artificial Sequence
  LRRK2 RNA guide
ggucuuuagauaugagcagga

SEQ ID NO: 13645 - RNA, 21 nt, Artificial Sequence
  LRRK2 RNA guide
guacugaauaucauuccugcu

SEQ ID NO: 13646 - RNA, 21 nt, Artificial Sequence
  LRRK2 RNA guide
guagguacugaauaucauucc

SEQ ID NO: 13647 - RNA, 21 nt, Artificial Sequence
  LRRK2 RNA guide
gucuuuagauaugagcaggaa

SEQ ID NO: 13648 - RNA, 21 nt, Artificial Sequence
  LRRK2 RNA guide
uacugaauaucauuccugcuc

SEQ ID NO: 13649 - RNA, 21 nt, Artificial Sequence
  LRRK2 RNA guide
uagauaugagcaggaaugaua

SEQ ID NO: 13650 - RNA, 21 nt, Artificial Sequence
  LRRK2 RNA guide
uagguacugaauaucauuccu

SEQ ID NO: 13651 - RNA, 21 nt, Artificial Sequence
  LRRK2 RNA guide
uaucauuccugcucauaucua

SEQ ID NO: 13652 - RNA, 21 nt, Artificial Sequence
  LRRK2 RNA guide
uaugagcaggaaugauauuca

SEQ ID NO: 13653 - RNA, 21 nt, Artificial Sequence
  LRRK2 RNA guide
ucauuccugcucauaucuaaa

SEQ ID NO: 13654 - RNA, 21 nt, Artificial Sequence
  LRRK2 RNA guide
uccugcucauaucuaaagacc

SEQ ID NO: 13655 - RNA, 21 nt, Artificial Sequence
  LRRK2 RNA guide
ucuuuagauaugagcaggaau

SEQ ID NO: 13656 - RNA, 21 nt, Artificial Sequence
  LRRK2 RNA guide
ugaauaucauuccugcucaua

SEQ ID NO: 13657 - RNA, 21 nt, Artificial Sequence
  LRRK2 RNA guide
ugagcaggaaugauauucagu

SEQ ID NO: 13658 - RNA, 21 nt, Artificial Sequence
  LRRK2 RNA guide
ugcggucuuuagauaugagca

SEQ ID NO: 13659 - RNA, 21 nt, Artificial Sequence
  LRRK2 RNA guide
ugguagguacugaauaucauu

SEQ ID NO: 13660 - RNA, 21 nt, Artificial Sequence
  LRRK2 RNA guide
uuagauaugagcaggaaugau

SEQ ID NO: 13661 - RNA, 21 nt, Artificial Sequence
  LRRK2 RNA guide
uuccugcucauaucuaaagac

SEQ ID NO: 13662 - RNA, 21 nt, Artificial Sequence
  LRRK2 RNA guide
uugcggucuuuagauaugagc

SEQ ID NO: 13663 - RNA, 21 nt, Artificial Sequence
  LRRK2 RNA guide
uuuagauaugagcaggaauga

SEQ ID NO: 13664 - RNA, 22 nt, Artificial Sequence
  LRRK2 RNA guide
aauaucauuccugcucauaucu

SEQ ID NO: 13665 - RNA, 22 nt, Artificial Sequence
  LRRK2 RNA guide
accugguagguacugaauauca

SEQ ID NO: 13666 - RNA, 22 nt, Artificial Sequence
  LRRK2 RNA guide
acugaauaucauuccugcucau

SEQ ID NO: 13667 - RNA, 22 nt, Artificial Sequence
  LRRK2 RNA guide
agauaugagcaggaaugauauu

SEQ ID NO: 13668 - RNA, 22 nt, Artificial Sequence
  LRRK2 RNA guide
agcaggaaugauauucaguacc

SEQ ID NO: 13669 - RNA, 22 nt, Artificial Sequence
  LRRK2 RNA guide
agcuugcggucuuuagauauga

SEQ ID NO: 13670 - RNA, 22 nt, Artificial Sequence
  LRRK2 RNA guide
aggaaugauauucaguaccuac

SEQ ID NO: 13671 - RNA, 22 nt, Artificial Sequence
  LRRK2 RNA guide
agguacugaauaucauuccugc

SEQ ID NO: 13672 - RNA, 22 nt, Artificial Sequence
  LRRK2 RNA guide
auaucauuccugcucauaucua

SEQ ID NO: 13673 - RNA, 22 nt, Artificial Sequence
  LRRK2 RNA guide
auaugagcaggaaugauauuca

SEQ ID NO: 13674 - RNA, 22 nt, Artificial Sequence
  LRRK2 RNA guide
aucauuccugcucauaucuaaa

SEQ ID NO: 13675 - RNA, 22 nt, Artificial Sequence
  LRRK2 RNA guide
augagcaggaaugauauucagu

SEQ ID NO: 13676 - RNA, 22 nt, Artificial Sequence
  LRRK2 RNA guide
auuccugcucauaucuaaagac

SEQ ID NO: 13677 - RNA, 22 nt, Artificial Sequence
  LRRK2 RNA guide
caggaaugauauucaguaccua

SEQ ID NO: 13678 - RNA, 22 nt, Artificial Sequence
  LRRK2 RNA guide
cauuccugcucauaucuaaaga

SEQ ID NO: 13679 - RNA, 22 nt, Artificial Sequence
  LRRK2 RNA guide
ccugguagguacugaauaucau

SEQ ID NO: 13680 - RNA, 22 nt, Artificial Sequence
  LRRK2 RNA guide
cggucuuuagauaugagcagga

SEQ ID NO: 13681 - RNA, 22 nt, Artificial Sequence
  LRRK2 RNA guide
cugaauaucauuccugcucaua

SEQ ID NO: 13682 - RNA, 22 nt, Artificial Sequence
  LRRK2 RNA guide
cugguagguacugaauaucauu

SEQ ID NO: 13683 - RNA, 22 nt, Artificial Sequence
  LRRK2 RNA guide
cuugcggucuuuagauaugagc

SEQ ID NO: 13684 - RNA, 22 nt, Artificial Sequence
  LRRK2 RNA guide
cuuuagauaugagcaggaauga

SEQ ID NO: 13685 - RNA, 22 nt, Artificial Sequence
  LRRK2 RNA guide
gaauaucauuccugcucauauc

SEQ ID NO: 13686 - RNA, 22 nt, Artificial Sequence
  LRRK2 RNA guide
gaccugguagguacugaauauc

SEQ ID NO: 13687 - RNA, 22 nt, Artificial Sequence
  LRRK2 RNA guide
gagcaggaaugauauucaguac

SEQ ID NO: 13688 - RNA, 22 nt, Artificial Sequence
  LRRK2 RNA guide
gauaugagcaggaaugauauuc

SEQ ID NO: 13689 - RNA, 22 nt, Artificial Sequence
  LRRK2 RNA guide
gcaggaaugauauucaguaccu

SEQ ID NO: 13690 - RNA, 22 nt, Artificial Sequence
  LRRK2 RNA guide
gcggucuuuagauaugagcagg

SEQ ID NO: 13691 - RNA, 22 nt, Artificial Sequence
  LRRK2 RNA guide
gcuugcggucuuuagauaugag

SEQ ID NO: 13692 - RNA, 22 nt, Artificial Sequence
  LRRK2 RNA guide
ggaaugauauucaguaccuacc

SEQ ID NO: 13693 - RNA, 22 nt, Artificial Sequence
  LRRK2 RNA guide
ggaccugguagguacugaauau

SEQ ID NO: 13694 - RNA, 22 nt, Artificial Sequence
  LRRK2 RNA guide
gguacugaauaucauuccugcu

SEQ ID NO: 13695 - RNA, 22 nt, Artificial Sequence
  LRRK2 RNA guide
gguagguacugaauaucauucc

SEQ ID NO: 13696 - RNA, 22 nt, Artificial Sequence
  LRRK2 RNA guide
ggucuuuagauaugagcaggaa

SEQ ID NO: 13697 - RNA, 22 nt, Artificial Sequence
  LRRK2 RNA guide
guacugaauaucauuccugcuc

SEQ ID NO: 13698 - RNA, 22 nt, Artificial Sequence
  LRRK2 RNA guide
guagguacugaauaucauuccu

SEQ ID NO: 13699 - RNA, 22 nt, Artificial Sequence
  LRRK2 RNA guide
gucuuuagauaugagcaggaau

SEQ ID NO: 13700 - RNA, 22 nt, Artificial Sequence
  LRRK2 RNA guide
uacugaauaucauuccugcuca

SEQ ID NO: 13701 - RNA, 22 nt, Artificial Sequence
  LRRK2 RNA guide
uagauaugagcaggaaugauau

SEQ ID NO: 13702 - RNA, 22 nt, Artificial Sequence
  LRRK2 RNA guide
uagguacugaauaucauuccug

SEQ ID NO: 13703 - RNA, 22 nt, Artificial Sequence
  LRRK2 RNA guide
uaucauuccugcucauaucuaa

SEQ ID NO: 13704 - RNA, 22 nt, Artificial Sequence
  LRRK2 RNA guide
uaugagcaggaaugauauucag

SEQ ID NO: 13705 - RNA, 22 nt, Artificial Sequence
  LRRK2 RNA guide
ucauuccugcucauaucuaaag

SEQ ID NO: 13706 - RNA, 22 nt, Artificial Sequence
  LRRK2 RNA guide
uccugcucauaucuaaagaccg

SEQ ID NO: 13707 - RNA, 22 nt, Artificial Sequence
  LRRK2 RNA guide
ucuuuagauaugagcaggaaug

SEQ ID NO: 13708 - RNA, 22 nt, Artificial Sequence
  LRRK2 RNA guide
ugaauaucauuccugcucauau

SEQ ID NO: 13709 - RNA, 22 nt, Artificial Sequence
  LRRK2 RNA guide
ugagcaggaaugauauucagua

SEQ ID NO: 13710 - RNA, 22 nt, Artificial Sequence
  LRRK2 RNA guide
ugcggucuuuagauaugagcag

SEQ ID NO: 13711 - RNA, 22 nt, Artificial Sequence
  LRRK2 RNA guide
ugguagguacugaauaucauuc

SEQ ID NO: 13712 - RNA, 22 nt, Artificial Sequence
  LRRK2 RNA guide
uuagauaugagcaggaaugaua

SEQ ID NO: 13713 - RNA, 22 nt, Artificial Sequence
  LRRK2 RNA guide
uuccugcucauaucuaaagacc

SEQ ID NO: 13714 - RNA, 22 nt, Artificial Sequence
  LRRK2 RNA guide
uugcggucuuuagauaugagca

SEQ ID NO: 13715 - RNA, 22 nt, Artificial Sequence
  LRRK2 RNA guide
uuuagauaugagcaggaaugau

SEQ ID NO: 13716 - RNA, 20 nt, Artificial Sequence
  LRRK2 RNA guide
aaagauuuccaguguguggg

SEQ ID NO: 13717 - RNA, 20 nt, Artificial Sequence
  LRRK2 RNA guide
aagauuuccaguguguggga

SEQ ID NO: 13718 - RNA, 20 nt, Artificial Sequence
  LRRK2 RNA guide
accaggucccacacacugga

SEQ ID NO: 13719 - RNA, 20 nt, Artificial Sequence
  LRRK2 RNA guide
accuaccaggucccacacac

SEQ ID NO: 13720 - RNA, 20 nt, Artificial Sequence
  LRRK2 RNA guide
agauuuccagugugugggac

SEQ ID NO: 13721 - RNA, 20 nt, Artificial Sequence
  LRRK2 RNA guide
aggucccacacacuggaaau

SEQ ID NO: 13722 - RNA, 20 nt, Artificial Sequence
  LRRK2 RNA guide
aguaccuaccaggucccaca

SEQ ID NO: 13723 - RNA, 20 nt, Artificial Sequence
  LRRK2 RNA guide
agugugugggaccugguagg

SEQ ID NO: 13724 - RNA, 20 nt, Artificial Sequence
  LRRK2 RNA guide
aguucaaagauuuccagugu

SEQ ID NO: 13725 - RNA, 20 nt, Artificial Sequence
  LRRK2 RNA guide
auauucaguaccuaccaggu

SEQ ID NO: 13726 - RNA, 20 nt, Artificial Sequence
  LRRK2 RNA guide
auucaguaccuaccaggucc

SEQ ID NO: 13727 - RNA, 20 nt, Artificial Sequence
  LRRK2 RNA guide
auuuccagugugugggaccu

SEQ ID NO: 13728 - RNA, 20 nt, Artificial Sequence
  LRRK2 RNA guide
caaagauuuccagugugugg

SEQ ID NO: 13729 - RNA, 20 nt, Artificial Sequence
  LRRK2 RNA guide
cacacacuggaaaucuuuga

SEQ ID NO: 13730 - RNA, 20 nt, Artificial Sequence
  LRRK2 RNA guide
caggucccacacacuggaaa

SEQ ID NO: 13731 - RNA, 20 nt, Artificial Sequence
  LRRK2 RNA guide
caguaccuaccaggucccac

SEQ ID NO: 13732 - RNA, 20 nt, Artificial Sequence
  LRRK2 RNA guide
cagugugugggaccugguag

SEQ ID NO: 13733 - RNA, 20 nt, Artificial Sequence
  LRRK2 RNA guide
ccacacacuggaaaucuuug

SEQ ID NO: 13734 - RNA, 20 nt, Artificial Sequence
  LRRK2 RNA guide
ccaggucccacacacuggaa

SEQ ID NO: 13735 - RNA, 20 nt, Artificial Sequence
  LRRK2 RNA guide
ccagugugugggaccuggua

SEQ ID NO: 13736 - RNA, 20 nt, Artificial Sequence
  LRRK2 RNA guide
cccacacacuggaaaucuuu

SEQ ID NO: 13737 - RNA, 20 nt, Artificial Sequence
  LRRK2 RNA guide
ccuaccaggucccacacacu

SEQ ID NO: 13738 - RNA, 20 nt, Artificial Sequence
  LRRK2 RNA guide
cuaccaggucccacacacug

SEQ ID NO: 13739 - RNA, 20 nt, Artificial Sequence
  LRRK2 RNA guide
gauauucaguaccuaccagg

SEQ ID NO: 13740 - RNA, 20 nt, Artificial Sequence
  LRRK2 RNA guide
gauuuccagugugugggacc

SEQ ID NO: 13741 - RNA, 20 nt, Artificial Sequence
  LRRK2 RNA guide
ggucccacacacuggaaauc

SEQ ID NO: 13742 - RNA, 20 nt, Artificial Sequence
  LRRK2 RNA guide
guaccuaccaggucccacac

SEQ ID NO: 13743 - RNA, 20 nt, Artificial Sequence
  LRRK2 RNA guide
gucccacacacuggaaaucu

SEQ ID NO: 13744 - RNA, 20 nt, Artificial Sequence
  LRRK2 RNA guide
gugggaccugguagguacug

SEQ ID NO: 13745 - RNA, 20 nt, Artificial Sequence
  LRRK2 RNA guide
gugugggaccugguagguac

SEQ ID NO: 13746 - RNA, 20 nt, Artificial Sequence
  LRRK2 RNA guide
gugugugggaccugguaggu

SEQ ID NO: 13747 - RNA, 20 nt, Artificial Sequence
  LRRK2 RNA guide
guucaaagauuuccagugug

SEQ ID NO: 13748 - RNA, 20 nt, Artificial Sequence
  LRRK2 RNA guide
uaaguucaaagauuuccagu

SEQ ID NO: 13749 - RNA, 20 nt, Artificial Sequence
  LRRK2 RNA guide
uaccaggucccacacacugg

SEQ ID NO: 13750 - RNA, 20 nt, Artificial Sequence
  LRRK2 RNA guide
uaccuaccaggucccacaca

SEQ ID NO: 13751 - RNA, 20 nt, Artificial Sequence
  LRRK2 RNA guide
uauucaguaccuaccagguc

SEQ ID NO: 13752 - RNA, 20 nt, Artificial Sequence
  LRRK2 RNA guide
ucaaagauuuccagugugug

SEQ ID NO: 13753 - RNA, 20 nt, Artificial Sequence
  LRRK2 RNA guide
ucaguaccuaccagguccca

SEQ ID NO: 13754 - RNA, 20 nt, Artificial Sequence
  LRRK2 RNA guide
uccagugugugggaccuggu

SEQ ID NO: 13755 - RNA, 20 nt, Artificial Sequence
  LRRK2 RNA guide
ucccacacacuggaaaucuu

SEQ ID NO: 13756 - RNA, 20 nt, Artificial Sequence
  LRRK2 RNA guide
ugugggaccugguagguacu

SEQ ID NO: 13757 - RNA, 20 nt, Artificial Sequence
  LRRK2 RNA guide
ugugugggaccugguaggua

SEQ ID NO: 13758 - RNA, 20 nt, Artificial Sequence
  LRRK2 RNA guide
uuaaguucaaagauuuccag

SEQ ID NO: 13759 - RNA, 20 nt, Artificial Sequence
  LRRK2 RNA guide
uucaaagauuuccagugugu

SEQ ID NO: 13760 - RNA, 20 nt, Artificial Sequence
  LRRK2 RNA guide
uucaguaccuaccagguccc

SEQ ID NO: 13761 - RNA, 20 nt, Artificial Sequence
  LRRK2 RNA guide
uuccagugugugggaccugg

SEQ ID NO: 13762 - RNA, 20 nt, Artificial Sequence
  LRRK2 RNA guide
uuuccagugugugggaccug

SEQ ID NO: 13763 - RNA, 21 nt, Artificial Sequence
  LRRK2 RNA guide
aaagauuuccaguguguggga

SEQ ID NO: 13764 - RNA, 21 nt, Artificial Sequence
  LRRK2 RNA guide
aagauuuccagugugugggac

SEQ ID NO: 13765 - RNA, 21 nt, Artificial Sequence
  LRRK2 RNA guide
aaguucaaagauuuccagugu

SEQ ID NO: 13766 - RNA, 21 nt, Artificial Sequence
  LRRK2 RNA guide
accaggucccacacacuggaa

SEQ ID NO: 13767 - RNA, 21 nt, Artificial Sequence
  LRRK2 RNA guide
accuaccaggucccacacacu

SEQ ID NO: 13768 - RNA, 21 nt, Artificial Sequence
  LRRK2 RNA guide
agauuuccagugugugggacc

SEQ ID NO: 13769 - RNA, 21 nt, Artificial Sequence
  LRRK2 RNA guide
aggucccacacacuggaaauc

SEQ ID NO: 13770 - RNA, 21 nt, Artificial Sequence
  LRRK2 RNA guide
aguaccuaccaggucccacac

SEQ ID NO: 13771 - RNA, 21 nt, Artificial Sequence
  LRRK2 RNA guide
agugugugggaccugguaggu

SEQ ID NO: 13772 - RNA, 21 nt, Artificial Sequence
  LRRK2 RNA guide
aguucaaagauuuccagugug

SEQ ID NO: 13773 - RNA, 21 nt, Artificial Sequence
  LRRK2 RNA guide
auauucaguaccuaccagguc

SEQ ID NO: 13774 - RNA, 21 nt, Artificial Sequence
  LRRK2 RNA guide
auucaguaccuaccagguccc

SEQ ID NO: 13775 - RNA, 21 nt, Artificial Sequence
  LRRK2 RNA guide
auuuccagugugugggaccug

SEQ ID NO: 13776 - RNA, 21 nt, Artificial Sequence
  LRRK2 RNA guide
caaagauuuccaguguguggg

SEQ ID NO: 13777 - RNA, 21 nt, Artificial Sequence
  LRRK2 RNA guide
cacacacuggaaaucuuugaa

SEQ ID NO: 13778 - RNA, 21 nt, Artificial Sequence
  LRRK2 RNA guide
caggucccacacacuggaaau

SEQ ID NO: 13779 - RNA, 21 nt, Artificial Sequence
  LRRK2 RNA guide
caguaccuaccaggucccaca

SEQ ID NO: 13780 - RNA, 21 nt, Artificial Sequence
  LRRK2 RNA guide
cagugugugggaccugguagg

SEQ ID NO: 13781 - RNA, 21 nt, Artificial Sequence
  LRRK2 RNA guide
ccacacacuggaaaucuuuga

SEQ ID NO: 13782 - RNA, 21 nt, Artificial Sequence
  LRRK2 RNA guide
ccaggucccacacacuggaaa

SEQ ID NO: 13783 - RNA, 21 nt, Artificial Sequence
  LRRK2 RNA guide
ccagugugugggaccugguag

SEQ ID NO: 13784 - RNA, 21 nt, Artificial Sequence
  LRRK2 RNA guide
cccacacacuggaaaucuuug

SEQ ID NO: 13785 - RNA, 21 nt, Artificial Sequence
  LRRK2 RNA guide
ccuaccaggucccacacacug

SEQ ID NO: 13786 - RNA, 21 nt, Artificial Sequence
  LRRK2 RNA guide
cuaccaggucccacacacugg

SEQ ID NO: 13787 - RNA, 21 nt, Artificial Sequence
  LRRK2 RNA guide
cuuaaguucaaagauuuccag

SEQ ID NO: 13788 - RNA, 21 nt, Artificial Sequence
  LRRK2 RNA guide
gauauucaguaccuaccaggu

SEQ ID NO: 13789 - RNA, 21 nt, Artificial Sequence
  LRRK2 RNA guide
gauuuccagugugugggaccu

SEQ ID NO: 13790 - RNA, 21 nt, Artificial Sequence
  LRRK2 RNA guide
ggucccacacacuggaaaucu

SEQ ID NO: 13791 - RNA, 21 nt, Artificial Sequence
  LRRK2 RNA guide
guaccuaccaggucccacaca

SEQ ID NO: 13792 - RNA, 21 nt, Artificial Sequence
  LRRK2 RNA guide
gucccacacacuggaaaucuu

SEQ ID NO: 13793 - RNA, 21 nt, Artificial Sequence
  LRRK2 RNA guide
gugggaccugguagguacuga

SEQ ID NO: 13794 - RNA, 21 nt, Artificial Sequence
  LRRK2 RNA guide
gugugggaccugguagguacu

SEQ ID NO: 13795 - RNA, 21 nt, Artificial Sequence
  LRRK2 RNA guide
gugugugggaccugguaggua

SEQ ID NO: 13796 - RNA, 21 nt, Artificial Sequence
  LRRK2 RNA guide
guucaaagauuuccagugugu

SEQ ID NO: 13797 - RNA, 21 nt, Artificial Sequence
  LRRK2 RNA guide
uaaguucaaagauuuccagug

SEQ ID NO: 13798 - RNA, 21 nt, Artificial Sequence
  LRRK2 RNA guide
uaccaggucccacacacugga

SEQ ID NO: 13799 - RNA, 21 nt, Artificial Sequence
  LRRK2 RNA guide
uaccuaccaggucccacacac

SEQ ID NO: 13800 - RNA, 21 nt, Artificial Sequence
  LRRK2 RNA guide
uauucaguaccuaccaggucc

SEQ ID NO: 13801 - RNA, 21 nt, Artificial Sequence
  LRRK2 RNA guide
ucaaagauuuccagugugugg

SEQ ID NO: 13802 - RNA, 21 nt, Artificial Sequence
  LRRK2 RNA guide
ucaguaccuaccaggucccac

SEQ ID NO: 13803 - RNA, 21 nt, Artificial Sequence
  LRRK2 RNA guide
uccagugugugggaccuggua

SEQ ID NO: 13804 - RNA, 21 nt, Artificial Sequence
  LRRK2 RNA guide
ucccacacacuggaaaucuuu

SEQ ID NO: 13805 - RNA, 21 nt, Artificial Sequence
  LRRK2 RNA guide
ugauauucaguaccuaccagg

SEQ ID NO: 13806 - RNA, 21 nt, Artificial Sequence
  LRRK2 RNA guide
ugugggaccugguagguacug

SEQ ID NO: 13807 - RNA, 21 nt, Artificial Sequence
  LRRK2 RNA guide
ugugugggaccugguagguac

SEQ ID NO: 13808 - RNA, 21 nt, Artificial Sequence
  LRRK2 RNA guide
uucaaagauuuccagugugug

SEQ ID NO: 13809 - RNA, 21 nt, Artificial Sequence
  LRRK2 RNA guide
uucaguaccuaccagguccca

SEQ ID NO: 13810 - RNA, 21 nt, Artificial Sequence
  LRRK2 RNA guide
uuccagugugugggaccuggu

SEQ ID NO: 13811 - RNA, 21 nt, Artificial Sequence
  LRRK2 RNA guide
uuuccagugugugggaccugg

SEQ ID NO: 13812 - RNA, 22 nt, Artificial Sequence
  LRRK2 RNA guide
aaagauuuccagugugugggac

SEQ ID NO: 13813 - RNA, 22 nt, Artificial Sequence
  LRRK2 RNA guide
aagauuuccagugugugggacc

SEQ ID NO: 13814 - RNA, 22 nt, Artificial Sequence
  LRRK2 RNA guide
aaguucaaagauuuccagugug

SEQ ID NO: 13815 - RNA, 22 nt, Artificial Sequence
  LRRK2 RNA guide
accaggucccacacacuggaaa

SEQ ID NO: 13816 - RNA, 22 nt, Artificial Sequence
  LRRK2 RNA guide
accuaccaggucccacacacug

SEQ ID NO: 13817 - RNA, 22 nt, Artificial Sequence
  LRRK2 RNA guide
agauuuccagugugugggaccu

SEQ ID NO: 13818 - RNA, 22 nt, Artificial Sequence
  LRRK2 RNA guide
aggucccacacacuggaaaucu

SEQ ID NO: 13819 - RNA, 22 nt, Artificial Sequence
  LRRK2 RNA guide
aguaccuaccaggucccacaca

SEQ ID NO: 13820 - RNA, 22 nt, Artificial Sequence
  LRRK2 RNA guide
agugugugggaccugguaggua

SEQ ID NO: 13821 - RNA, 22 nt, Artificial Sequence
  LRRK2 RNA guide
aguucaaagauuuccagugugu

SEQ ID NO: 13822 - RNA, 22 nt, Artificial Sequence
  LRRK2 RNA guide
auauucaguaccuaccaggucc

SEQ ID NO: 13823 - RNA, 22 nt, Artificial Sequence
  LRRK2 RNA guide
augauauucaguaccuaccagg

SEQ ID NO: 13824 - RNA, 22 nt, Artificial Sequence
  LRRK2 RNA guide
auucaguaccuaccagguccca

SEQ ID NO: 13825 - RNA, 22 nt, Artificial Sequence
  LRRK2 RNA guide
auuuccagugugugggaccugg

SEQ ID NO: 13826 - RNA, 22 nt, Artificial Sequence
  LRRK2 RNA guide
caaagauuuccaguguguggga

SEQ ID NO: 13827 - RNA, 22 nt, Artificial Sequence
  LRRK2 RNA guide
cacacacuggaaaucuuugaac

SEQ ID NO: 13828 - RNA, 22 nt, Artificial Sequence
  LRRK2 RNA guide
caggucccacacacuggaaauc

SEQ ID NO: 13829 - RNA, 22 nt, Artificial Sequence
  LRRK2 RNA guide
caguaccuaccaggucccacac

SEQ ID NO: 13830 - RNA, 22 nt, Artificial Sequence
  LRRK2 RNA guide
cagugugugggaccugguaggu

SEQ ID NO: 13831 - RNA, 22 nt, Artificial Sequence
  LRRK2 RNA guide
ccacacacuggaaaucuuugaa

SEQ ID NO: 13832 - RNA, 22 nt, Artificial Sequence
  LRRK2 RNA guide
ccaggucccacacacuggaaau

SEQ ID NO: 13833 - RNA, 22 nt, Artificial Sequence
  LRRK2 RNA guide
ccagugugugggaccugguagg

SEQ ID NO: 13834 - RNA, 22 nt, Artificial Sequence
  LRRK2 RNA guide
cccacacacuggaaaucuuuga

SEQ ID NO: 13835 - RNA, 22 nt, Artificial Sequence
  LRRK2 RNA guide
ccuaccaggucccacacacugg

SEQ ID NO: 13836 - RNA, 22 nt, Artificial Sequence
  LRRK2 RNA guide
ccuuaaguucaaagauuuccag

SEQ ID NO: 13837 - RNA, 22 nt, Artificial Sequence
  LRRK2 RNA guide
cuaccaggucccacacacugga

SEQ ID NO: 13838 - RNA, 22 nt, Artificial Sequence
  LRRK2 RNA guide
cuuaaguucaaagauuuccagu

SEQ ID NO: 13839 - RNA, 22 nt, Artificial Sequence
  LRRK2 RNA guide
gauauucaguaccuaccagguc

SEQ ID NO: 13840 - RNA, 22 nt, Artificial Sequence
  LRRK2 RNA guide
gauuuccagugugugggaccug

SEQ ID NO: 13841 - RNA, 22 nt, Artificial Sequence
  LRRK2 RNA guide
ggucccacacacuggaaaucuu

SEQ ID NO: 13842 - RNA, 22 nt, Artificial Sequence
  LRRK2 RNA guide
guaccuaccaggucccacacac

SEQ ID NO: 13843 - RNA, 22 nt, Artificial Sequence
  LRRK2 RNA guide
gucccacacacuggaaaucuuu

SEQ ID NO: 13844 - RNA, 22 nt, Artificial Sequence
  LRRK2 RNA guide
gugggaccugguagguacugaa

SEQ ID NO: 13845 - RNA, 22 nt, Artificial Sequence
  LRRK2 RNA guide
gugugggaccugguagguacug

SEQ ID NO: 13846 - RNA, 22 nt, Artificial Sequence
  LRRK2 RNA guide
gugugugggaccugguagguac

SEQ ID NO: 13847 - RNA, 22 nt, Artificial Sequence
  LRRK2 RNA guide
guucaaagauuuccagugugug

SEQ ID NO: 13848 - RNA, 22 nt, Artificial Sequence
  LRRK2 RNA guide
uaaguucaaagauuuccagugu

SEQ ID NO: 13849 - RNA, 22 nt, Artificial Sequence
  LRRK2 RNA guide
uaccaggucccacacacuggaa

SEQ ID NO: 13850 - RNA, 22 nt, Artificial Sequence
  LRRK2 RNA guide
uaccuaccaggucccacacacu

SEQ ID NO: 13851 - RNA, 22 nt, Artificial Sequence
  LRRK2 RNA guide
uauucaguaccuaccagguccc

SEQ ID NO: 13852 - RNA, 22 nt, Artificial Sequence
  LRRK2 RNA guide
ucaaagauuuccaguguguggg

SEQ ID NO: 13853 - RNA, 22 nt, Artificial Sequence
  LRRK2 RNA guide
ucaguaccuaccaggucccaca

SEQ ID NO: 13854 - RNA, 22 nt, Artificial Sequence
  LRRK2 RNA guide
uccagugugugggaccugguag

SEQ ID NO: 13855 - RNA, 22 nt, Artificial Sequence
  LRRK2 RNA guide
ucccacacacuggaaaucuuug

SEQ ID NO: 13856 - RNA, 22 nt, Artificial Sequence
  LRRK2 RNA guide
ugauauucaguaccuaccaggu

SEQ ID NO: 13857 - RNA, 22 nt, Artificial Sequence
  LRRK2 RNA guide
ugugggaccugguagguacuga

SEQ ID NO: 13858 - RNA, 22 nt, Artificial Sequence
  LRRK2 RNA guide
ugugugggaccugguagguacu

SEQ ID NO: 13859 - RNA, 22 nt, Artificial Sequence
  LRRK2 RNA guide
uuaaguucaaagauuuccagug

SEQ ID NO: 13860 - RNA, 22 nt, Artificial Sequence
  LRRK2 RNA guide
uucaaagauuuccagugugugg

SEQ ID NO: 13861 - RNA, 22 nt, Artificial Sequence
  LRRK2 RNA guide
uucaguaccuaccaggucccac

SEQ ID NO: 13862 - RNA, 22 nt, Artificial Sequence
  LRRK2 RNA guide
uuccagugugugggaccuggua

SEQ ID NO: 13863 - RNA, 22 nt, Artificial Sequence
  LRRK2 RNA guide
uuuccagugugugggaccuggu

SEQ ID NO: 13864 - RNA, 20 nt, Artificial Sequence
  LRRK2 RNA guide
aaagauuuccagcgugcggg

SEQ ID NO: 13865 - RNA, 20 nt, Artificial Sequence
  LRRK2 RNA guide
aagauuuccagcgugcggga

SEQ ID NO: 13866 - RNA, 20 nt, Artificial Sequence
  LRRK2 RNA guide
aaguucaaagauuuccagcg

SEQ ID NO: 13867 - RNA, 20 nt, Artificial Sequence
  LRRK2 RNA guide
accaggucccgcacgcugga

SEQ ID NO: 13868 - RNA, 20 nt, Artificial Sequence
  LRRK2 RNA guide
accuaccaggucccgcacgc

SEQ ID NO: 13869 - RNA, 20 nt, Artificial Sequence
  LRRK2 RNA guide
acgcuggaaaucuuugaacu

SEQ ID NO: 13870 - RNA, 20 nt, Artificial Sequence
  LRRK2 RNA guide
agauuuccagcgugcgggac

SEQ ID NO: 13871 - RNA, 20 nt, Artificial Sequence
  LRRK2 RNA guide
agcgugcgggaccugguagg

SEQ ID NO: 13872 - RNA, 20 nt, Artificial Sequence
  LRRK2 RNA guide
aggucccgcacgcuggaaau

SEQ ID NO: 13873 - RNA, 20 nt, Artificial Sequence
  LRRK2 RNA guide
aguaccuaccaggucccgca

SEQ ID NO: 13874 - RNA, 20 nt, Artificial Sequence
  LRRK2 RNA guide
aguucaaagauuuccagcgu

SEQ ID NO: 13875 - RNA, 20 nt, Artificial Sequence
  LRRK2 RNA guide
auuuccagcgugcgggaccu

SEQ ID NO: 13876 - RNA, 20 nt, Artificial Sequence
  LRRK2 RNA guide
caaagauuuccagcgugcgg

SEQ ID NO: 13877 - RNA, 20 nt, Artificial Sequence
  LRRK2 RNA guide
cacgcuggaaaucuuugaac

SEQ ID NO: 13878 - RNA, 20 nt, Artificial Sequence
  LRRK2 RNA guide
cagcgugcgggaccugguag

SEQ ID NO: 13879 - RNA, 20 nt, Artificial Sequence
  LRRK2 RNA guide
caggucccgcacgcuggaaa

SEQ ID NO: 13880 - RNA, 20 nt, Artificial Sequence
  LRRK2 RNA guide
caguaccuaccaggucccgc

SEQ ID NO: 13881 - RNA, 20 nt, Artificial Sequence
  LRRK2 RNA guide
ccagcgugcgggaccuggua

SEQ ID NO: 13882 - RNA, 20 nt, Artificial Sequence
  LRRK2 RNA guide
ccaggucccgcacgcuggaa

SEQ ID NO: 13883 - RNA, 20 nt, Artificial Sequence
  LRRK2 RNA guide
cccgcacgcuggaaaucuuu

SEQ ID NO: 13884 - RNA, 20 nt, Artificial Sequence
  LRRK2 RNA guide
cccuuaaguucaaagauuuc

SEQ ID NO: 13885 - RNA, 20 nt, Artificial Sequence
  LRRK2 RNA guide
ccgcacgcuggaaaucuuug

SEQ ID NO: 13886 - RNA, 20 nt, Artificial Sequence
  LRRK2 RNA guide
ccuaccaggucccgcacgcu

SEQ ID NO: 13887 - RNA, 20 nt, Artificial Sequence
  LRRK2 RNA guide
ccuuaaguucaaagauuucc

SEQ ID NO: 13888 - RNA, 20 nt, Artificial Sequence
  LRRK2 RNA guide
cgcacgcuggaaaucuuuga

SEQ ID NO: 13889 - RNA, 20 nt, Artificial Sequence
  LRRK2 RNA guide
cgcuggaaaucuuugaacuu

SEQ ID NO: 13890 - RNA, 20 nt, Artificial Sequence
  LRRK2 RNA guide
cuaccaggucccgcacgcug

SEQ ID NO: 13891 - RNA, 20 nt, Artificial Sequence
  LRRK2 RNA guide
cuuaaguucaaagauuucca

SEQ ID NO: 13892 - RNA, 20 nt, Artificial Sequence
  LRRK2 RNA guide
gauuuccagcgugcgggacc

SEQ ID NO: 13893 - RNA, 20 nt, Artificial Sequence
  LRRK2 RNA guide
gcacgcuggaaaucuuugaa

SEQ ID NO: 13894 - RNA, 20 nt, Artificial Sequence
  LRRK2 RNA guide
gcgugcgggaccugguaggu

SEQ ID NO: 13895 - RNA, 20 nt, Artificial Sequence
  LRRK2 RNA guide
ggucccgcacgcuggaaauc

SEQ ID NO: 13896 - RNA, 20 nt, Artificial Sequence
  LRRK2 RNA guide
guaccuaccaggucccgcac

SEQ ID NO: 13897 - RNA, 20 nt, Artificial Sequence
  LRRK2 RNA guide
gucccgcacgcuggaaaucu

SEQ ID NO: 13898 - RNA, 20 nt, Artificial Sequence
  LRRK2 RNA guide
guucaaagauuuccagcgug

SEQ ID NO: 13899 - RNA, 20 nt, Artificial Sequence
  LRRK2 RNA guide
uaaguucaaagauuuccagc

SEQ ID NO: 13900 - RNA, 20 nt, Artificial Sequence
  LRRK2 RNA guide
uaccaggucccgcacgcugg

SEQ ID NO: 13901 - RNA, 20 nt, Artificial Sequence
  LRRK2 RNA guide
uaccuaccaggucccgcacg

SEQ ID NO: 13902 - RNA, 20 nt, Artificial Sequence
  LRRK2 RNA guide
ucaaagauuuccagcgugcg

SEQ ID NO: 13903 - RNA, 20 nt, Artificial Sequence
  LRRK2 RNA guide
ucaguaccuaccaggucccg

SEQ ID NO: 13904 - RNA, 20 nt, Artificial Sequence
  LRRK2 RNA guide
uccagcgugcgggaccuggu

SEQ ID NO: 13905 - RNA, 20 nt, Artificial Sequence
  LRRK2 RNA guide
ucccgcacgcuggaaaucuu

SEQ ID NO: 13906 - RNA, 20 nt, Artificial Sequence
  LRRK2 RNA guide
ucccuuaaguucaaagauuu

SEQ ID NO: 13907 - RNA, 20 nt, Artificial Sequence
  LRRK2 RNA guide
uucaaagauuuccagcgugc

SEQ ID NO: 13908 - RNA, 20 nt, Artificial Sequence
  LRRK2 RNA guide
uuccagcgugcgggaccugg

SEQ ID NO: 13909 - RNA, 20 nt, Artificial Sequence
  LRRK2 RNA guide
uuuccagcgugcgggaccug

SEQ ID NO: 13910 - RNA, 21 nt, Artificial Sequence
  LRRK2 RNA guide
aaagauuuccagcgugcggga

SEQ ID NO: 13911 - RNA, 21 nt, Artificial Sequence
  LRRK2 RNA guide
aagauuuccagcgugcgggac

SEQ ID NO: 13912 - RNA, 21 nt, Artificial Sequence
  LRRK2 RNA guide
aaguucaaagauuuccagcgu

SEQ ID NO: 13913 - RNA, 21 nt, Artificial Sequence
  LRRK2 RNA guide
accaggucccgcacgcuggaa

SEQ ID NO: 13914 - RNA, 21 nt, Artificial Sequence
  LRRK2 RNA guide
accuaccaggucccgcacgcu

SEQ ID NO: 13915 - RNA, 21 nt, Artificial Sequence
  LRRK2 RNA guide
acgcuggaaaucuuugaacuu

SEQ ID NO: 13916 - RNA, 21 nt, Artificial Sequence
  LRRK2 RNA guide
agauuuccagcgugcgggacc

SEQ ID NO: 13917 - RNA, 21 nt, Artificial Sequence
  LRRK2 RNA guide
agcgugcgggaccugguaggu

SEQ ID NO: 13918 - RNA, 21 nt, Artificial Sequence
  LRRK2 RNA guide
aggucccgcacgcuggaaauc

SEQ ID NO: 13919 - RNA, 21 nt, Artificial Sequence
  LRRK2 RNA guide
aguaccuaccaggucccgcac

SEQ ID NO: 13920 - RNA, 21 nt, Artificial Sequence
  LRRK2 RNA guide
aguucaaagauuuccagcgug

SEQ ID NO: 13921 - RNA, 21 nt, Artificial Sequence
  LRRK2 RNA guide
auuuccagcgugcgggaccug

SEQ ID NO: 13922 - RNA, 21 nt, Artificial Sequence
  LRRK2 RNA guide
caaagauuuccagcgugcggg

SEQ ID NO: 13923 - RNA, 21 nt, Artificial Sequence
  LRRK2 RNA guide
cacgcuggaaaucuuugaacu

SEQ ID NO: 13924 - RNA, 21 nt, Artificial Sequence
  LRRK2 RNA guide
cagcgugcgggaccugguagg

SEQ ID NO: 13925 - RNA, 21 nt, Artificial Sequence
  LRRK2 RNA guide
caggucccgcacgcuggaaau

SEQ ID NO: 13926 - RNA, 21 nt, Artificial Sequence
  LRRK2 RNA guide
caguaccuaccaggucccgca

SEQ ID NO: 13927 - RNA, 21 nt, Artificial Sequence
  LRRK2 RNA guide
ccagcgugcgggaccugguag

SEQ ID NO: 13928 - RNA, 21 nt, Artificial Sequence
  LRRK2 RNA guide
ccaggucccgcacgcuggaaa

SEQ ID NO: 13929 - RNA, 21 nt, Artificial Sequence
  LRRK2 RNA guide
cccgcacgcuggaaaucuuug

SEQ ID NO: 13930 - RNA, 21 nt, Artificial Sequence
  LRRK2 RNA guide
cccuuaaguucaaagauuucc

SEQ ID NO: 13931 - RNA, 21 nt, Artificial Sequence
  LRRK2 RNA guide
ccgcacgcuggaaaucuuuga

SEQ ID NO: 13932 - RNA, 21 nt, Artificial Sequence
  LRRK2 RNA guide
ccuaccaggucccgcacgcug

SEQ ID NO: 13933 - RNA, 21 nt, Artificial Sequence
  LRRK2 RNA guide
ccuuaaguucaaagauuucca

SEQ ID NO: 13934 - RNA, 21 nt, Artificial Sequence
  LRRK2 RNA guide
cgcacgcuggaaaucuuugaa

SEQ ID NO: 13935 - RNA, 21 nt, Artificial Sequence
  LRRK2 RNA guide
cgcuggaaaucuuugaacuua

SEQ ID NO: 13936 - RNA, 21 nt, Artificial Sequence
  LRRK2 RNA guide
cuaccaggucccgcacgcugg

SEQ ID NO: 13937 - RNA, 21 nt, Artificial Sequence
  LRRK2 RNA guide
gauuuccagcgugcgggaccu

SEQ ID NO: 13938 - RNA, 21 nt, Artificial Sequence
  LRRK2 RNA guide
gcacgcuggaaaucuuugaac

SEQ ID NO: 13939 - RNA, 21 nt, Artificial Sequence
  LRRK2 RNA guide
gcgugcgggaccugguaggua

SEQ ID NO: 13940 - RNA, 21 nt, Artificial Sequence
  LRRK2 RNA guide
ggucccgcacgcuggaaaucu

SEQ ID NO: 13941 - RNA, 21 nt, Artificial Sequence
  LRRK2 RNA guide
guaccuaccaggucccgcacg

SEQ ID NO: 13942 - RNA, 21 nt, Artificial Sequence
  LRRK2 RNA guide
gucccgcacgcuggaaaucuu

SEQ ID NO: 13943 - RNA, 21 nt, Artificial Sequence
  LRRK2 RNA guide
guucaaagauuuccagcgugc

SEQ ID NO: 13944 - RNA, 21 nt, Artificial Sequence
  LRRK2 RNA guide
uaaguucaaagauuuccagcg

SEQ ID NO: 13945 - RNA, 21 nt, Artificial Sequence
  LRRK2 RNA guide
uaccaggucccgcacgcugga

SEQ ID NO: 13946 - RNA, 21 nt, Artificial Sequence
  LRRK2 RNA guide
uaccuaccaggucccgcacgc

SEQ ID NO: 13947 - RNA, 21 nt, Artificial Sequence
  LRRK2 RNA guide
ucaaagauuuccagcgugcgg

SEQ ID NO: 13948 - RNA, 21 nt, Artificial Sequence
  LRRK2 RNA guide
ucaguaccuaccaggucccgc

SEQ ID NO: 13949 - RNA, 21 nt, Artificial Sequence
  LRRK2 RNA guide
uccagcgugcgggaccuggua

SEQ ID NO: 13950 - RNA, 21 nt, Artificial Sequence
  LRRK2 RNA guide
ucccgcacgcuggaaaucuuu

SEQ ID NO: 13951 - RNA, 21 nt, Artificial Sequence
  LRRK2 RNA guide
ucccuuaaguucaaagauuuc

SEQ ID NO: 13952 - RNA, 21 nt, Artificial Sequence
  LRRK2 RNA guide
uuaaguucaaagauuuccagc

SEQ ID NO: 13953 - RNA, 21 nt, Artificial Sequence
  LRRK2 RNA guide
uucaaagauuuccagcgugcg

SEQ ID NO: 13954 - RNA, 21 nt, Artificial Sequence
  LRRK2 RNA guide
uucaguaccuaccaggucccg

SEQ ID NO: 13955 - RNA, 21 nt, Artificial Sequence
  LRRK2 RNA guide
uuccagcgugcgggaccuggu

SEQ ID NO: 13956 - RNA, 21 nt, Artificial Sequence
  LRRK2 RNA guide
uuuccagcgugcgggaccugg

SEQ ID NO: 13957 - RNA, 22 nt, Artificial Sequence
  LRRK2 RNA guide
aaagauuuccagcgugcgggac

SEQ ID NO: 13958 - RNA, 22 nt, Artificial Sequence
  LRRK2 RNA guide
aagauuuccagcgugcgggacc

SEQ ID NO: 13959 - RNA, 22 nt, Artificial Sequence
  LRRK2 RNA guide
aaguucaaagauuuccagcgug

SEQ ID NO: 13960 - RNA, 22 nt, Artificial Sequence
  LRRK2 RNA guide
accaggucccgcacgcuggaaa

SEQ ID NO: 13961 - RNA, 22 nt, Artificial Sequence
  LRRK2 RNA guide
accuaccaggucccgcacgcug

SEQ ID NO: 13962 - RNA, 22 nt, Artificial Sequence
  LRRK2 RNA guide
acgcuggaaaucuuugaacuua

SEQ ID NO: 13963 - RNA, 22 nt, Artificial Sequence
  LRRK2 RNA guide
agauuuccagcgugcgggaccu

SEQ ID NO: 13964 - RNA, 22 nt, Artificial Sequence
  LRRK2 RNA guide
agcgugcgggaccugguaggua

SEQ ID NO: 13965 - RNA, 22 nt, Artificial Sequence
  LRRK2 RNA guide
aggucccgcacgcuggaaaucu

SEQ ID NO: 13966 - RNA, 22 nt, Artificial Sequence
  LRRK2 RNA guide
aguaccuaccaggucccgcacg

SEQ ID NO: 13967 - RNA, 22 nt, Artificial Sequence
  LRRK2 RNA guide
aguucaaagauuuccagcgugc

SEQ ID NO: 13968 - RNA, 22 nt, Artificial Sequence
  LRRK2 RNA guide
auucaguaccuaccaggucccg

SEQ ID NO: 13969 - RNA, 22 nt, Artificial Sequence
  LRRK2 RNA guide
auuuccagcgugcgggaccugg

SEQ ID NO: 13970 - RNA, 22 nt, Artificial Sequence
  LRRK2 RNA guide
caaagauuuccagcgugcggga

SEQ ID NO: 13971 - RNA, 22 nt, Artificial Sequence
  LRRK2 RNA guide
cacgcuggaaaucuuugaacuu

SEQ ID NO: 13972 - RNA, 22 nt, Artificial Sequence
  LRRK2 RNA guide
cagcgugcgggaccugguaggu

SEQ ID NO: 13973 - RNA, 22 nt, Artificial Sequence
  LRRK2 RNA guide
caggucccgcacgcuggaaauc

SEQ ID NO: 13974 - RNA, 22 nt, Artificial Sequence
  LRRK2 RNA guide
caguaccuaccaggucccgcac

SEQ ID NO: 13975 - RNA, 22 nt, Artificial Sequence
  LRRK2 RNA guide
ccagcgugcgggaccugguagg

SEQ ID NO: 13976 - RNA, 22 nt, Artificial Sequence
  LRRK2 RNA guide
ccaggucccgcacgcuggaaau

SEQ ID NO: 13977 - RNA, 22 nt, Artificial Sequence
  LRRK2 RNA guide
cccgcacgcuggaaaucuuuga

SEQ ID NO: 13978 - RNA, 22 nt, Artificial Sequence
  LRRK2 RNA guide
cccuuaaguucaaagauuucca

SEQ ID NO: 13979 - RNA, 22 nt, Artificial Sequence
  LRRK2 RNA guide
ccgcacgcuggaaaucuuugaa

SEQ ID NO: 13980 - RNA, 22 nt, Artificial Sequence
  LRRK2 RNA guide
ccuaccaggucccgcacgcugg

SEQ ID NO: 13981 - RNA, 22 nt, Artificial Sequence
  LRRK2 RNA guide
cgcacgcuggaaaucuuugaac

SEQ ID NO: 13982 - RNA, 22 nt, Artificial Sequence
  LRRK2 RNA guide
cgcuggaaaucuuugaacuuaa

SEQ ID NO: 13983 - RNA, 22 nt, Artificial Sequence
  LRRK2 RNA guide
cuaccaggucccgcacgcugga

SEQ ID NO: 13984 - RNA, 22 nt, Artificial Sequence
  LRRK2 RNA guide
cuuaaguucaaagauuuccagc

SEQ ID NO: 13985 - RNA, 22 nt, Artificial Sequence
  LRRK2 RNA guide
gauuuccagcgugcgggaccug

SEQ ID NO: 13986 - RNA, 22 nt, Artificial Sequence
  LRRK2 RNA guide
gcacgcuggaaaucuuugaacu

SEQ ID NO: 13987 - RNA, 22 nt, Artificial Sequence
  LRRK2 RNA guide
gcgugcgggaccugguagguac

SEQ ID NO: 13988 - RNA, 22 nt, Artificial Sequence
  LRRK2 RNA guide
ggucccgcacgcuggaaaucuu

SEQ ID NO: 13989 - RNA, 22 nt, Artificial Sequence
  LRRK2 RNA guide
guaccuaccaggucccgcacgc

SEQ ID NO: 13990 - RNA, 22 nt, Artificial Sequence
  LRRK2 RNA guide
gucccgcacgcuggaaaucuuu

SEQ ID NO: 13991 - RNA, 22 nt, Artificial Sequence
  LRRK2 RNA guide
guucaaagauuuccagcgugcg

SEQ ID NO: 13992 - RNA, 22 nt, Artificial Sequence
  LRRK2 RNA guide
guucccuuaaguucaaagauuu

SEQ ID NO: 13993 - RNA, 22 nt, Artificial Sequence
  LRRK2 RNA guide
uaaguucaaagauuuccagcgu

SEQ ID NO: 13994 - RNA, 22 nt, Artificial Sequence
  LRRK2 RNA guide
uaccaggucccgcacgcuggaa

SEQ ID NO: 13995 - RNA, 22 nt, Artificial Sequence
  LRRK2 RNA guide
uaccuaccaggucccgcacgcu

SEQ ID NO: 13996 - RNA, 22 nt, Artificial Sequence
  LRRK2 RNA guide
ucaaagauuuccagcgugcggg

SEQ ID NO: 13997 - RNA, 22 nt, Artificial Sequence
  LRRK2 RNA guide
ucaguaccuaccaggucccgca

SEQ ID NO: 13998 - RNA, 22 nt, Artificial Sequence
  LRRK2 RNA guide
uccagcgugcgggaccugguag

SEQ ID NO: 13999 - RNA, 22 nt, Artificial Sequence
  LRRK2 RNA guide
ucccgcacgcuggaaaucuuug

SEQ ID NO: 14000 - RNA, 22 nt, Artificial Sequence
  LRRK2 RNA guide
ucccuuaaguucaaagauuucc

SEQ ID NO: 14001 - RNA, 22 nt, Artificial Sequence
  LRRK2 RNA guide
uuaaguucaaagauuuccagcg

SEQ ID NO: 14002 - RNA, 22 nt, Artificial Sequence
  LRRK2 RNA guide
uucaaagauuuccagcgugcgg

SEQ ID NO: 14003 - RNA, 22 nt, Artificial Sequence
  LRRK2 RNA guide
uucaguaccuaccaggucccgc

SEQ ID NO: 14004 - RNA, 22 nt, Artificial Sequence
  LRRK2 RNA guide
uuccagcgugcgggaccuggua

SEQ ID NO: 14005 - RNA, 22 nt, Artificial Sequence
  LRRK2 RNA guide
uucccuuaaguucaaagauuuc

SEQ ID NO: 14006 - RNA, 22 nt, Artificial Sequence
  LRRK2 RNA guide
uuuccagcgugcgggaccuggu

SEQ ID NO: 14007 - RNA, 20 nt, Artificial Sequence
  LRRK2 RNA guide
aaagaagaguucccuuaagu

SEQ ID NO: 14008 - RNA, 20 nt, Artificial Sequence
  LRRK2 RNA guide
aacucuucuuuagccauaau

SEQ ID NO: 14009 - RNA, 20 nt, Artificial Sequence
  LRRK2 RNA guide
aacuuaagggaacucuucuu

SEQ ID NO: 14010 - RNA, 20 nt, Artificial Sequence
  LRRK2 RNA guide
aagaagaguucccuuaaguu

SEQ ID NO: 14011 - RNA, 20 nt, Artificial Sequence
  LRRK2 RNA guide
aagggaacucuucuuuagcc

SEQ ID NO: 14012 - RNA, 20 nt, Artificial Sequence
  LRRK2 RNA guide
acucuucuuuagccauaauc

SEQ ID NO: 14013 - RNA, 20 nt, Artificial Sequence
  LRRK2 RNA guide
acuuaagggaacucuucuuu

SEQ ID NO: 14014 - RNA, 20 nt, Artificial Sequence
  LRRK2 RNA guide
agaagaguucccuuaaguuc

SEQ ID NO: 14015 - RNA, 20 nt, Artificial Sequence
  LRRK2 RNA guide
agggaacucuucuuuagcca

SEQ ID NO: 14016 - RNA, 20 nt, Artificial Sequence
  LRRK2 RNA guide
aucugauuauggcuaaagaa

SEQ ID NO: 14017 - RNA, 20 nt, Artificial Sequence
  LRRK2 RNA guide
aucuuugaacuuaagggaac

SEQ ID NO: 14018 - RNA, 20 nt, Artificial Sequence
  LRRK2 RNA guide
auggcuaaagaagaguuccc

SEQ ID NO: 14019 - RNA, 20 nt, Artificial Sequence
  LRRK2 RNA guide
auuauggcuaaagaagaguu

SEQ ID NO: 14020 - RNA, 20 nt, Artificial Sequence
  LRRK2 RNA guide
cuaaagaagaguucccuuaa

SEQ ID NO: 14021 - RNA, 20 nt, Artificial Sequence
  LRRK2 RNA guide
cucuucuuuagccauaauca

SEQ ID NO: 14022 - RNA, 20 nt, Artificial Sequence
  LRRK2 RNA guide
cugauuauggcuaaagaaga

SEQ ID NO: 14023 - RNA, 20 nt, Artificial Sequence
  LRRK2 RNA guide
cuuaagggaacucuucuuua

SEQ ID NO: 14024 - RNA, 20 nt, Artificial Sequence
  LRRK2 RNA guide
cuucuuuagccauaaucaga

SEQ ID NO: 14025 - RNA, 20 nt, Artificial Sequence
  LRRK2 RNA guide
cuuugaacuuaagggaacuc

SEQ ID NO: 14026 - RNA, 20 nt, Artificial Sequence
  LRRK2 RNA guide
gaacucuucuuuagccauaa

SEQ ID NO: 14027 - RNA, 20 nt, Artificial Sequence
  LRRK2 RNA guide
gaacuuaagggaacucuucu

SEQ ID NO: 14028 - RNA, 20 nt, Artificial Sequence
  LRRK2 RNA guide
gaucugauuauggcuaaaga

SEQ ID NO: 14029 - RNA, 20 nt, Artificial Sequence
  LRRK2 RNA guide
gauuauggcuaaagaagagu

SEQ ID NO: 14030 - RNA, 20 nt, Artificial Sequence
  LRRK2 RNA guide
gcuaaagaagaguucccuua

SEQ ID NO: 14031 - RNA, 20 nt, Artificial Sequence
  LRRK2 RNA guide
ggaacucuucuuuagccaua

SEQ ID NO: 14032 - RNA, 20 nt, Artificial Sequence
  LRRK2 RNA guide
ggcuaaagaagaguucccuu

SEQ ID NO: 14033 - RNA, 20 nt, Artificial Sequence
  LRRK2 RNA guide
gggaacucuucuuuagccau

SEQ ID NO: 14034 - RNA, 20 nt, Artificial Sequence
  LRRK2 RNA guide
uaaagaagaguucccuuaag

SEQ ID NO: 14035 - RNA, 20 nt, Artificial Sequence
  LRRK2 RNA guide
uaagggaacucuucuuuagc

SEQ ID NO: 14036 - RNA, 20 nt, Artificial Sequence
  LRRK2 RNA guide
uauggcuaaagaagaguucc

SEQ ID NO: 14037 - RNA, 20 nt, Artificial Sequence
  LRRK2 RNA guide
ucugauuauggcuaaagaag

SEQ ID NO: 14038 - RNA, 20 nt, Artificial Sequence
  LRRK2 RNA guide
ucuucuuuagccauaaucag

SEQ ID NO: 14039 - RNA, 20 nt, Artificial Sequence
  LRRK2 RNA guide
ucuuuagccauaaucagauc

SEQ ID NO: 14040 - RNA, 20 nt, Artificial Sequence
  LRRK2 RNA guide
ucuuugaacuuaagggaacu

SEQ ID NO: 14041 - RNA, 20 nt, Artificial Sequence
  LRRK2 RNA guide
ugaacuuaagggaacucuuc

SEQ ID NO: 14042 - RNA, 20 nt, Artificial Sequence
  LRRK2 RNA guide
ugaucugauuauggcuaaag

SEQ ID NO: 14043 - RNA, 20 nt, Artificial Sequence
  LRRK2 RNA guide
ugauuauggcuaaagaagag

SEQ ID NO: 14044 - RNA, 20 nt, Artificial Sequence
  LRRK2 RNA guide
uggcuaaagaagaguucccu

SEQ ID NO: 14045 - RNA, 20 nt, Artificial Sequence
  LRRK2 RNA guide
uuaagggaacucuucuuuag

SEQ ID NO: 14046 - RNA, 20 nt, Artificial Sequence
  LRRK2 RNA guide
uuauggcuaaagaagaguuc

SEQ ID NO: 14047 - RNA, 20 nt, Artificial Sequence
  LRRK2 RNA guide
uucuuuagccauaaucagau

SEQ ID NO: 14048 - RNA, 20 nt, Artificial Sequence
  LRRK2 RNA guide
uugaacuuaagggaacucuu

SEQ ID NO: 14049 - RNA, 20 nt, Artificial Sequence
  LRRK2 RNA guide
uuugaacuuaagggaacucu

SEQ ID NO: 14050 - RNA, 21 nt, Artificial Sequence
  LRRK2 RNA guide
aaagaagaguucccuuaaguu

SEQ ID NO: 14051 - RNA, 21 nt, Artificial Sequence
  LRRK2 RNA guide
aacucuucuuuagccauaauc

SEQ ID NO: 14052 - RNA, 21 nt, Artificial Sequence
  LRRK2 RNA guide
aacuuaagggaacucuucuuu

SEQ ID NO: 14053 - RNA, 21 nt, Artificial Sequence
  LRRK2 RNA guide
aagaagaguucccuuaaguuc

SEQ ID NO: 14054 - RNA, 21 nt, Artificial Sequence
  LRRK2 RNA guide
aagggaacucuucuuuagcca

SEQ ID NO: 14055 - RNA, 21 nt, Artificial Sequence
  LRRK2 RNA guide
aaucuuugaacuuaagggaac

SEQ ID NO: 14056 - RNA, 21 nt, Artificial Sequence
  LRRK2 RNA guide
acucuucuuuagccauaauca

SEQ ID NO: 14057 - RNA, 21 nt, Artificial Sequence
  LRRK2 RNA guide
acuuaagggaacucuucuuua

SEQ ID NO: 14058 - RNA, 21 nt, Artificial Sequence
  LRRK2 RNA guide
agaagaguucccuuaaguuca

SEQ ID NO: 14059 - RNA, 21 nt, Artificial Sequence
  LRRK2 RNA guide
agaugcugaucugauuauggc

SEQ ID NO: 14060 - RNA, 21 nt, Artificial Sequence
  LRRK2 RNA guide
agggaacucuucuuuagccau

SEQ ID NO: 14061 - RNA, 21 nt, Artificial Sequence
  LRRK2 RNA guide
aucugauuauggcuaaagaag

SEQ ID NO: 14062 - RNA, 21 nt, Artificial Sequence
  LRRK2 RNA guide
aucuuugaacuuaagggaacu

SEQ ID NO: 14063 - RNA, 21 nt, Artificial Sequence
  LRRK2 RNA guide
augcugaucugauuauggcua

SEQ ID NO: 14064 - RNA, 21 nt, Artificial Sequence
  LRRK2 RNA guide
auggcuaaagaagaguucccu

SEQ ID NO: 14065 - RNA, 21 nt, Artificial Sequence
  LRRK2 RNA guide
auuauggcuaaagaagaguuc

SEQ ID NO: 14066 - RNA, 21 nt, Artificial Sequence
  LRRK2 RNA guide
cuaaagaagaguucccuuaag

SEQ ID NO: 14067 - RNA, 21 nt, Artificial Sequence
  LRRK2 RNA guide
cucuucuuuagccauaaucag

SEQ ID NO: 14068 - RNA, 21 nt, Artificial Sequence
  LRRK2 RNA guide
cugaucugauuauggcuaaag

SEQ ID NO: 14069 - RNA, 21 nt, Artificial Sequence
  LRRK2 RNA guide
cugauuauggcuaaagaagag

SEQ ID NO: 14070 - RNA, 21 nt, Artificial Sequence
  LRRK2 RNA guide
cuuaagggaacucuucuuuag

SEQ ID NO: 14071 - RNA, 21 nt, Artificial Sequence
  LRRK2 RNA guide
cuucuuuagccauaaucagau

SEQ ID NO: 14072 - RNA, 21 nt, Artificial Sequence
  LRRK2 RNA guide
cuuugaacuuaagggaacucu

SEQ ID NO: 14073 - RNA, 21 nt, Artificial Sequence
  LRRK2 RNA guide
gaacucuucuuuagccauaau

SEQ ID NO: 14074 - RNA, 21 nt, Artificial Sequence
  LRRK2 RNA guide
gaacuuaagggaacucuucuu

SEQ ID NO: 14075 - RNA, 21 nt, Artificial Sequence
  LRRK2 RNA guide
gaucugauuauggcuaaagaa

SEQ ID NO: 14076 - RNA, 21 nt, Artificial Sequence
  LRRK2 RNA guide
gaugcugaucugauuauggcu

SEQ ID NO: 14077 - RNA, 21 nt, Artificial Sequence
  LRRK2 RNA guide
gauuauggcuaaagaagaguu

SEQ ID NO: 14078 - RNA, 21 nt, Artificial Sequence
  LRRK2 RNA guide
gcuaaagaagaguucccuuaa

SEQ ID NO: 14079 - RNA, 21 nt, Artificial Sequence
  LRRK2 RNA guide
gcugaucugauuauggcuaaa

SEQ ID NO: 14080 - RNA, 21 nt, Artificial Sequence
  LRRK2 RNA guide
ggaacucuucuuuagccauaa

SEQ ID NO: 14081 - RNA, 21 nt, Artificial Sequence
  LRRK2 RNA guide
ggcuaaagaagaguucccuua

SEQ ID NO: 14082 - RNA, 21 nt, Artificial Sequence
  LRRK2 RNA guide
gggaacucuucuuuagccaua

SEQ ID NO: 14083 - RNA, 21 nt, Artificial Sequence
  LRRK2 RNA guide
uaaagaagaguucccuuaagu

SEQ ID NO: 14084 - RNA, 21 nt, Artificial Sequence
  LRRK2 RNA guide
uaagggaacucuucuuuagcc

SEQ ID NO: 14085 - RNA, 21 nt, Artificial Sequence
  LRRK2 RNA guide
uauggcuaaagaagaguuccc

SEQ ID NO: 14086 - RNA, 21 nt, Artificial Sequence
  LRRK2 RNA guide
ucugauuauggcuaaagaaga

SEQ ID NO: 14087 - RNA, 21 nt, Artificial Sequence
  LRRK2 RNA guide
ucuucuuuagccauaaucaga

SEQ ID NO: 14088 - RNA, 21 nt, Artificial Sequence
  LRRK2 RNA guide
ucuuuagccauaaucagauca

SEQ ID NO: 14089 - RNA, 21 nt, Artificial Sequence
  LRRK2 RNA guide
ucuuugaacuuaagggaacuc

SEQ ID NO: 14090 - RNA, 21 nt, Artificial Sequence
  LRRK2 RNA guide
ugaacuuaagggaacucuucu

SEQ ID NO: 14091 - RNA, 21 nt, Artificial Sequence
  LRRK2 RNA guide
ugaucugauuauggcuaaaga

SEQ ID NO: 14092 - RNA, 21 nt, Artificial Sequence
  LRRK2 RNA guide
ugauuauggcuaaagaagagu

SEQ ID NO: 14093 - RNA, 21 nt, Artificial Sequence
  LRRK2 RNA guide
ugcugaucugauuauggcuaa

SEQ ID NO: 14094 - RNA, 21 nt, Artificial Sequence
  LRRK2 RNA guide
uggcuaaagaagaguucccuu

SEQ ID NO: 14095 - RNA, 21 nt, Artificial Sequence
  LRRK2 RNA guide
uuaagggaacucuucuuuagc

SEQ ID NO: 14096 - RNA, 21 nt, Artificial Sequence
  LRRK2 RNA guide
uuauggcuaaagaagaguucc

SEQ ID NO: 14097 - RNA, 21 nt, Artificial Sequence
  LRRK2 RNA guide
uucuuuagccauaaucagauc

SEQ ID NO: 14098 - RNA, 21 nt, Artificial Sequence
  LRRK2 RNA guide
uugaacuuaagggaacucuuc

SEQ ID NO: 14099 - RNA, 21 nt, Artificial Sequence
  LRRK2 RNA guide
uuugaacuuaagggaacucuu

SEQ ID NO: 14100 - RNA, 22 nt, Artificial Sequence
  LRRK2 RNA guide
aaagaagaguucccuuaaguuc

SEQ ID NO: 14101 - RNA, 22 nt, Artificial Sequence
  LRRK2 RNA guide
aaaucuuugaacuuaagggaac

SEQ ID NO: 14102 - RNA, 22 nt, Artificial Sequence
  LRRK2 RNA guide
aacucuucuuuagccauaauca

SEQ ID NO: 14103 - RNA, 22 nt, Artificial Sequence
  LRRK2 RNA guide
aacuuaagggaacucuucuuua

SEQ ID NO: 14104 - RNA, 22 nt, Artificial Sequence
  LRRK2 RNA guide
aagaagaguucccuuaaguuca

SEQ ID NO: 14105 - RNA, 22 nt, Artificial Sequence
  LRRK2 RNA guide
aagaugcugaucugauuauggc

SEQ ID NO: 14106 - RNA, 22 nt, Artificial Sequence
  LRRK2 RNA guide
aagggaacucuucuuuagccau

SEQ ID NO: 14107 - RNA, 22 nt, Artificial Sequence
  LRRK2 RNA guide
aaucuuugaacuuaagggaacu

SEQ ID NO: 14108 - RNA, 22 nt, Artificial Sequence
  LRRK2 RNA guide
acucuucuuuagccauaaucag

SEQ ID NO: 14109 - RNA, 22 nt, Artificial Sequence
  LRRK2 RNA guide
acuuaagggaacucuucuuuag

SEQ ID NO: 14110 - RNA, 22 nt, Artificial Sequence
  LRRK2 RNA guide
agaagaguucccuuaaguucaa

SEQ ID NO: 14111 - RNA, 22 nt, Artificial Sequence
  LRRK2 RNA guide
agaugcugaucugauuauggcu

SEQ ID NO: 14112 - RNA, 22 nt, Artificial Sequence
  LRRK2 RNA guide
agggaacucuucuuuagccaua

SEQ ID NO: 14113 - RNA, 22 nt, Artificial Sequence
  LRRK2 RNA guide
aucugauuauggcuaaagaaga

SEQ ID NO: 14114 - RNA, 22 nt, Artificial Sequence
  LRRK2 RNA guide
aucuuugaacuuaagggaacuc

SEQ ID NO: 14115 - RNA, 22 nt, Artificial Sequence
  LRRK2 RNA guide
augcugaucugauuauggcuaa

SEQ ID NO: 14116 - RNA, 22 nt, Artificial Sequence
  LRRK2 RNA guide
auggcuaaagaagaguucccuu

SEQ ID NO: 14117 - RNA, 22 nt, Artificial Sequence
  LRRK2 RNA guide
auuauggcuaaagaagaguucc

SEQ ID NO: 14118 - RNA, 22 nt, Artificial Sequence
  LRRK2 RNA guide
cuaaagaagaguucccuuaagu

SEQ ID NO: 14119 - RNA, 22 nt, Artificial Sequence
  LRRK2 RNA guide
cucuucuuuagccauaaucaga

SEQ ID NO: 14120 - RNA, 22 nt, Artificial Sequence
  LRRK2 RNA guide
cugaucugauuauggcuaaaga

SEQ ID NO: 14121 - RNA, 22 nt, Artificial Sequence
  LRRK2 RNA guide
cugauuauggcuaaagaagagu

SEQ ID NO: 14122 - RNA, 22 nt, Artificial Sequence
  LRRK2 RNA guide
cuuaagggaacucuucuuuagc

SEQ ID NO: 14123 - RNA, 22 nt, Artificial Sequence
  LRRK2 RNA guide
cuucuuuagccauaaucagauc

SEQ ID NO: 14124 - RNA, 22 nt, Artificial Sequence
  LRRK2 RNA guide
cuuugaacuuaagggaacucuu

SEQ ID NO: 14125 - RNA, 22 nt, Artificial Sequence
  LRRK2 RNA guide
gaacucuucuuuagccauaauc

SEQ ID NO: 14126 - RNA, 22 nt, Artificial Sequence
  LRRK2 RNA guide
gaacuuaagggaacucuucuuu

SEQ ID NO: 14127 - RNA, 22 nt, Artificial Sequence
  LRRK2 RNA guide
gaucugauuauggcuaaagaag

SEQ ID NO: 14128 - RNA, 22 nt, Artificial Sequence
  LRRK2 RNA guide
gaugcugaucugauuauggcua

SEQ ID NO: 14129 - RNA, 22 nt, Artificial Sequence
  LRRK2 RNA guide
gauuauggcuaaagaagaguuc

SEQ ID NO: 14130 - RNA, 22 nt, Artificial Sequence
  LRRK2 RNA guide
gcuaaagaagaguucccuuaag

SEQ ID NO: 14131 - RNA, 22 nt, Artificial Sequence
  LRRK2 RNA guide
gcugaucugauuauggcuaaag

SEQ ID NO: 14132 - RNA, 22 nt, Artificial Sequence
  LRRK2 RNA guide
ggaacucuucuuuagccauaau

SEQ ID NO: 14133 - RNA, 22 nt, Artificial Sequence
  LRRK2 RNA guide
ggcuaaagaagaguucccuuaa

SEQ ID NO: 14134 - RNA, 22 nt, Artificial Sequence
  LRRK2 RNA guide
gggaacucuucuuuagccauaa

SEQ ID NO: 14135 - RNA, 22 nt, Artificial Sequence
  LRRK2 RNA guide
uaaagaagaguucccuuaaguu

SEQ ID NO: 14136 - RNA, 22 nt, Artificial Sequence
  LRRK2 RNA guide
uaagggaacucuucuuuagcca

SEQ ID NO: 14137 - RNA, 22 nt, Artificial Sequence
  LRRK2 RNA guide
uauggcuaaagaagaguucccu

SEQ ID NO: 14138 - RNA, 22 nt, Artificial Sequence
  LRRK2 RNA guide
ucugauuauggcuaaagaagag

SEQ ID NO: 14139 - RNA, 22 nt, Artificial Sequence
  LRRK2 RNA guide
ucuucuuuagccauaaucagau

SEQ ID NO: 14140 - RNA, 22 nt, Artificial Sequence
  LRRK2 RNA guide
ucuuuagccauaaucagaucag

SEQ ID NO: 14141 - RNA, 22 nt, Artificial Sequence
  LRRK2 RNA guide
ucuuugaacuuaagggaacucu

SEQ ID NO: 14142 - RNA, 22 nt, Artificial Sequence
  LRRK2 RNA guide
ugaacuuaagggaacucuucuu

SEQ ID NO: 14143 - RNA, 22 nt, Artificial Sequence
  LRRK2 RNA guide
ugaucugauuauggcuaaagaa

SEQ ID NO: 14144 - RNA, 22 nt, Artificial Sequence
  LRRK2 RNA guide
ugauuauggcuaaagaagaguu

SEQ ID NO: 14145 - RNA, 22 nt, Artificial Sequence
  LRRK2 RNA guide
ugcugaucugauuauggcuaaa

SEQ ID NO: 14146 - RNA, 22 nt, Artificial Sequence
  LRRK2 RNA guide
uggcuaaagaagaguucccuua

SEQ ID NO: 14147 - RNA, 22 nt, Artificial Sequence
  LRRK2 RNA guide
uuaagggaacucuucuuuagcc

SEQ ID NO: 14148 - RNA, 22 nt, Artificial Sequence
  LRRK2 RNA guide
uuauggcuaaagaagaguuccc

SEQ ID NO: 14149 - RNA, 22 nt, Artificial Sequence
  LRRK2 RNA guide
uucuuuagccauaaucagauca

SEQ ID NO: 14150 - RNA, 22 nt, Artificial Sequence
  LRRK2 RNA guide
uugaacuuaagggaacucuucu

SEQ ID NO: 14151 - RNA, 22 nt, Artificial Sequence
  LRRK2 RNA guide
uuugaacuuaagggaacucuuc

SEQ ID NO: 14152 - RNA, 20 nt, Artificial Sequence
  LRRK2 RNA guide
aacuuaagggaacucuuauu

SEQ ID NO: 14153 - RNA, 20 nt, Artificial Sequence
  LRRK2 RNA guide
aagaugcugaucugauuaug

SEQ ID NO: 14154 - RNA, 20 nt, Artificial Sequence
  LRRK2 RNA guide
aagggaacucuuauuuaccc

SEQ ID NO: 14155 - RNA, 20 nt, Artificial Sequence
  LRRK2 RNA guide
acccauaaucagaucagcau

SEQ ID NO: 14156 - RNA, 20 nt, Artificial Sequence
  LRRK2 RNA guide
acucuuauuuacccauaauc

SEQ ID NO: 14157 - RNA, 20 nt, Artificial Sequence
  LRRK2 RNA guide
acuuaagggaacucuuauuu

SEQ ID NO: 14158 - RNA, 20 nt, Artificial Sequence
  LRRK2 RNA guide
agggaacucuuauuuaccca

SEQ ID NO: 14159 - RNA, 20 nt, Artificial Sequence
  LRRK2 RNA guide
augcugaucugauuaugggu

SEQ ID NO: 14160 - RNA, 20 nt, Artificial Sequence
  LRRK2 RNA guide
auggguaaauaagaguuccc

SEQ ID NO: 14161 - RNA, 20 nt, Artificial Sequence
  LRRK2 RNA guide
auuuacccauaaucagauca

SEQ ID NO: 14162 - RNA, 20 nt, Artificial Sequence
  LRRK2 RNA guide
ccaagaugcugaucugauua

SEQ ID NO: 14163 - RNA, 20 nt, Artificial Sequence
  LRRK2 RNA guide
cucuuauuuacccauaauca

SEQ ID NO: 14164 - RNA, 20 nt, Artificial Sequence
  LRRK2 RNA guide
cugaucugauuauggguaaa

SEQ ID NO: 14165 - RNA, 20 nt, Artificial Sequence
  LRRK2 RNA guide
cugauuauggguaaauaaga

SEQ ID NO: 14166 - RNA, 20 nt, Artificial Sequence
  LRRK2 RNA guide
cuuaagggaacucuuauuua

SEQ ID NO: 14167 - RNA, 20 nt, Artificial Sequence
  LRRK2 RNA guide
cuuauuuacccauaaucaga

SEQ ID NO: 14168 - RNA, 20 nt, Artificial Sequence
  LRRK2 RNA guide
gaacucuuauuuacccauaa

SEQ ID NO: 14169 - RNA, 20 nt, Artificial Sequence
  LRRK2 RNA guide
gaacuuaagggaacucuuau

SEQ ID NO: 14170 - RNA, 20 nt, Artificial Sequence
  LRRK2 RNA guide
gaucugauuauggguaaaua

SEQ ID NO: 14171 - RNA, 20 nt, Artificial Sequence
  LRRK2 RNA guide
gaugcugaucugauuauggg

SEQ ID NO: 14172 - RNA, 20 nt, Artificial Sequence
  LRRK2 RNA guide
gauuauggguaaauaagagu

SEQ ID NO: 14173 - RNA, 20 nt, Artificial Sequence
  LRRK2 RNA guide
gcugaucugauuauggguaa

SEQ ID NO: 14174 - RNA, 20 nt, Artificial Sequence
  LRRK2 RNA guide
ggaacucuuauuuacccaua

SEQ ID NO: 14175 - RNA, 20 nt, Artificial Sequence
  LRRK2 RNA guide
gggaacucuuauuuacccau

SEQ ID NO: 14176 - RNA, 20 nt, Artificial Sequence
  LRRK2 RNA guide
ggguaaauaagaguucccuu

SEQ ID NO: 14177 - RNA, 20 nt, Artificial Sequence
  LRRK2 RNA guide
gguaaauaagaguucccuua

SEQ ID NO: 14178 - RNA, 20 nt, Artificial Sequence
  LRRK2 RNA guide
uaagggaacucuuauuuacc

SEQ ID NO: 14179 - RNA, 20 nt, Artificial Sequence
  LRRK2 RNA guide
uacccauaaucagaucagca

SEQ ID NO: 14180 - RNA, 20 nt, Artificial Sequence
  LRRK2 RNA guide
uauggguaaauaagaguucc

SEQ ID NO: 14181 - RNA, 20 nt, Artificial Sequence
  LRRK2 RNA guide
uauuuacccauaaucagauc

SEQ ID NO: 14182 - RNA, 20 nt, Artificial Sequence
  LRRK2 RNA guide
uccaagaugcugaucugauu

SEQ ID NO: 14183 - RNA, 20 nt, Artificial Sequence
  LRRK2 RNA guide
ucugauuauggguaaauaag

SEQ ID NO: 14184 - RNA, 20 nt, Artificial Sequence
  LRRK2 RNA guide
ucuuauuuacccauaaucag

SEQ ID NO: 14185 - RNA, 20 nt, Artificial Sequence
  LRRK2 RNA guide
ugaacuuaagggaacucuua

SEQ ID NO: 14186 - RNA, 20 nt, Artificial Sequence
  LRRK2 RNA guide
ugaucugauuauggguaaau

SEQ ID NO: 14187 - RNA, 20 nt, Artificial Sequence
  LRRK2 RNA guide
ugauuauggguaaauaagag

SEQ ID NO: 14188 - RNA, 20 nt, Artificial Sequence
  LRRK2 RNA guide
ugcugaucugauuaugggua

SEQ ID NO: 14189 - RNA, 20 nt, Artificial Sequence
  LRRK2 RNA guide
uggguaaauaagaguucccu

SEQ ID NO: 14190 - RNA, 20 nt, Artificial Sequence
  LRRK2 RNA guide
uuaagggaacucuuauuuac

SEQ ID NO: 14191 - RNA, 20 nt, Artificial Sequence
  LRRK2 RNA guide
uuacccauaaucagaucagc

SEQ ID NO: 14192 - RNA, 20 nt, Artificial Sequence
  LRRK2 RNA guide
uuauggguaaauaagaguuc

SEQ ID NO: 14193 - RNA, 20 nt, Artificial Sequence
  LRRK2 RNA guide
uuuacccauaaucagaucag

SEQ ID NO: 14194 - RNA, 21 nt, Artificial Sequence
  LRRK2 RNA guide
aagaugcugaucugauuaugg

SEQ ID NO: 14195 - RNA, 21 nt, Artificial Sequence
  LRRK2 RNA guide
aagggaacucuuauuuaccca

SEQ ID NO: 14196 - RNA, 21 nt, Artificial Sequence
  LRRK2 RNA guide
acccauaaucagaucagcauc

SEQ ID NO: 14197 - RNA, 21 nt, Artificial Sequence
  LRRK2 RNA guide
agaugcugaucugauuauggg

SEQ ID NO: 14198 - RNA, 21 nt, Artificial Sequence
  LRRK2 RNA guide
agggaacucuuauuuacccau

SEQ ID NO: 14199 - RNA, 21 nt, Artificial Sequence
  LRRK2 RNA guide
augcugaucugauuaugggua

SEQ ID NO: 14200 - RNA, 21 nt, Artificial Sequence
  LRRK2 RNA guide
auggguaaauaagaguucccu

SEQ ID NO: 14201 - RNA, 21 nt, Artificial Sequence
  LRRK2 RNA guide
auuuacccauaaucagaucag

SEQ ID NO: 14202 - RNA, 21 nt, Artificial Sequence
  LRRK2 RNA guide
caagaugcugaucugauuaug

SEQ ID NO: 14203 - RNA, 21 nt, Artificial Sequence
  LRRK2 RNA guide
ccaagaugcugaucugauuau

SEQ ID NO: 14204 - RNA, 21 nt, Artificial Sequence
  LRRK2 RNA guide
cucuuauuuacccauaaucag

SEQ ID NO: 14205 - RNA, 21 nt, Artificial Sequence
  LRRK2 RNA guide
cugaucugauuauggguaaau

SEQ ID NO: 14206 - RNA, 21 nt, Artificial Sequence
  LRRK2 RNA guide
cugauuauggguaaauaagag

SEQ ID NO: 14207 - RNA, 21 nt, Artificial Sequence
  LRRK2 RNA guide
cuuaagggaacucuuauuuac

SEQ ID NO: 14208 - RNA, 21 nt, Artificial Sequence
  LRRK2 RNA guide
gaacuuaagggaacucuuauu

SEQ ID NO: 14209 - RNA, 21 nt, Artificial Sequence
  LRRK2 RNA guide
gaugcugaucugauuaugggu

SEQ ID NO: 14210 - RNA, 21 nt, Artificial Sequence
  LRRK2 RNA guide
gcugaucugauuauggguaaa

SEQ ID NO: 14211 - RNA, 21 nt, Artificial Sequence
  LRRK2 RNA guide
ggaacucuuauuuacccauaa

SEQ ID NO: 14212 - RNA, 21 nt, Artificial Sequence
  LRRK2 RNA guide
gggaacucuuauuuacccaua

SEQ ID NO: 14213 - RNA, 21 nt, Artificial Sequence
  LRRK2 RNA guide
ggguaaauaagaguucccuua

SEQ ID NO: 14214 - RNA, 21 nt, Artificial Sequence
  LRRK2 RNA guide
gguaaauaagaguucccuuaa

SEQ ID NO: 14215 - RNA, 21 nt, Artificial Sequence
  LRRK2 RNA guide
guccaagaugcugaucugauu

SEQ ID NO: 14216 - RNA, 21 nt, Artificial Sequence
  LRRK2 RNA guide
uaagggaacucuuauuuaccc

SEQ ID NO: 14217 - RNA, 21 nt, Artificial Sequence
  LRRK2 RNA guide
uacccauaaucagaucagcau

SEQ ID NO: 14218 - RNA, 21 nt, Artificial Sequence
  LRRK2 RNA guide
uauggguaaauaagaguuccc

SEQ ID NO: 14219 - RNA, 21 nt, Artificial Sequence
  LRRK2 RNA guide
uccaagaugcugaucugauua

SEQ ID NO: 14220 - RNA, 21 nt, Artificial Sequence
  LRRK2 RNA guide
ugaacuuaagggaacucuuau

SEQ ID NO: 14221 - RNA, 21 nt, Artificial Sequence
  LRRK2 RNA guide
ugcugaucugauuauggguaa

SEQ ID NO: 14222 - RNA, 21 nt, Artificial Sequence
  LRRK2 RNA guide
uggguaaauaagaguucccuu

SEQ ID NO: 14223 - RNA, 21 nt, Artificial Sequence
  LRRK2 RNA guide
uuaagggaacucuuauuuacc

SEQ ID NO: 14224 - RNA, 21 nt, Artificial Sequence
  LRRK2 RNA guide
uuacccauaaucagaucagca

SEQ ID NO: 14225 - RNA, 21 nt, Artificial Sequence
  LRRK2 RNA guide
uuauggguaaauaagaguucc

SEQ ID NO: 14226 - RNA, 21 nt, Artificial Sequence
  LRRK2 RNA guide
uugaacuuaagggaacucuua

SEQ ID NO: 14227 - RNA, 21 nt, Artificial Sequence
  LRRK2 RNA guide
uuuacccauaaucagaucagc

SEQ ID NO: 14228 - RNA, 22 nt, Artificial Sequence
  LRRK2 RNA guide
aagaugcugaucugauuauggg

SEQ ID NO: 14229 - RNA, 22 nt, Artificial Sequence
  LRRK2 RNA guide
aagggaacucuuauuuacccau

SEQ ID NO: 14230 - RNA, 22 nt, Artificial Sequence
  LRRK2 RNA guide
acccauaaucagaucagcaucu

SEQ ID NO: 14231 - RNA, 22 nt, Artificial Sequence
  LRRK2 RNA guide
acucuuauuuacccauaaucag

SEQ ID NO: 14232 - RNA, 22 nt, Artificial Sequence
  LRRK2 RNA guide
acuuaagggaacucuuauuuac

SEQ ID NO: 14233 - RNA, 22 nt, Artificial Sequence
  LRRK2 RNA guide
agaugcugaucugauuaugggu

SEQ ID NO: 14234 - RNA, 22 nt, Artificial Sequence
  LRRK2 RNA guide
agggaacucuuauuuacccaua

SEQ ID NO: 14235 - RNA, 22 nt, Artificial Sequence
  LRRK2 RNA guide
aguccaagaugcugaucugauu

SEQ ID NO: 14236 - RNA, 22 nt, Artificial Sequence
  LRRK2 RNA guide
augcugaucugauuauggguaa

SEQ ID NO: 14237 - RNA, 22 nt, Artificial Sequence
  LRRK2 RNA guide
auggguaaauaagaguucccuu

SEQ ID NO: 14238 - RNA, 22 nt, Artificial Sequence
  LRRK2 RNA guide
auuauggguaaauaagaguucc

SEQ ID NO: 14239 - RNA, 22 nt, Artificial Sequence
  LRRK2 RNA guide
auuuacccauaaucagaucagc

SEQ ID NO: 14240 - RNA, 22 nt, Artificial Sequence
  LRRK2 RNA guide
caagaugcugaucugauuaugg

SEQ ID NO: 14241 - RNA, 22 nt, Artificial Sequence
  LRRK2 RNA guide
ccaagaugcugaucugauuaug

SEQ ID NO: 14242 - RNA, 22 nt, Artificial Sequence
  LRRK2 RNA guide
cucuuauuuacccauaaucaga

SEQ ID NO: 14243 - RNA, 22 nt, Artificial Sequence
  LRRK2 RNA guide
cugaucugauuauggguaaaua

SEQ ID NO: 14244 - RNA, 22 nt, Artificial Sequence
  LRRK2 RNA guide
cugauuauggguaaauaagagu

SEQ ID NO: 14245 - RNA, 22 nt, Artificial Sequence
  LRRK2 RNA guide
cuuaagggaacucuuauuuacc

SEQ ID NO: 14246 - RNA, 22 nt, Artificial Sequence
  LRRK2 RNA guide
cuuauuuacccauaaucagauc

SEQ ID NO: 14247 - RNA, 22 nt, Artificial Sequence
  LRRK2 RNA guide
gaacucuuauuuacccauaauc

SEQ ID NO: 14248 - RNA, 22 nt, Artificial Sequence
  LRRK2 RNA guide
gaacuuaagggaacucuuauuu

SEQ ID NO: 14249 - RNA, 22 nt, Artificial Sequence
  LRRK2 RNA guide
gaucugauuauggguaaauaag

SEQ ID NO: 14250 - RNA, 22 nt, Artificial Sequence
  LRRK2 RNA guide
gaugcugaucugauuaugggua

SEQ ID NO: 14251 - RNA, 22 nt, Artificial Sequence
  LRRK2 RNA guide
gauuauggguaaauaagaguuc

SEQ ID NO: 14252 - RNA, 22 nt, Artificial Sequence
  LRRK2 RNA guide
gcugaucugauuauggguaaau

SEQ ID NO: 14253 - RNA, 22 nt, Artificial Sequence
  LRRK2 RNA guide
ggaacucuuauuuacccauaau

SEQ ID NO: 14254 - RNA, 22 nt, Artificial Sequence
  LRRK2 RNA guide
gggaacucuuauuuacccauaa

SEQ ID NO: 14255 - RNA, 22 nt, Artificial Sequence
  LRRK2 RNA guide
ggguaaauaagaguucccuuaa

SEQ ID NO: 14256 - RNA, 22 nt, Artificial Sequence
  LRRK2 RNA guide
gguaaauaagaguucccuuaag

SEQ ID NO: 14257 - RNA, 22 nt, Artificial Sequence
  LRRK2 RNA guide
guccaagaugcugaucugauua

SEQ ID NO: 14258 - RNA, 22 nt, Artificial Sequence
  LRRK2 RNA guide
uaagggaacucuuauuuaccca

SEQ ID NO: 14259 - RNA, 22 nt, Artificial Sequence
  LRRK2 RNA guide
uacccauaaucagaucagcauc

SEQ ID NO: 14260 - RNA, 22 nt, Artificial Sequence
  LRRK2 RNA guide
uauggguaaauaagaguucccu

SEQ ID NO: 14261 - RNA, 22 nt, Artificial Sequence
  LRRK2 RNA guide
uauuuacccauaaucagaucag

SEQ ID NO: 14262 - RNA, 22 nt, Artificial Sequence
  LRRK2 RNA guide
uccaagaugcugaucugauuau

SEQ ID NO: 14263 - RNA, 22 nt, Artificial Sequence
  LRRK2 RNA guide
ucugauuauggguaaauaagag

SEQ ID NO: 14264 - RNA, 22 nt, Artificial Sequence
  LRRK2 RNA guide
ugaacuuaagggaacucuuauu

SEQ ID NO: 14265 - RNA, 22 nt, Artificial Sequence
  LRRK2 RNA guide
ugcugaucugauuauggguaaa

SEQ ID NO: 14266 - RNA, 22 nt, Artificial Sequence
  LRRK2 RNA guide
uggguaaauaagaguucccuua

SEQ ID NO: 14267 - RNA, 22 nt, Artificial Sequence
  LRRK2 RNA guide
uuaagggaacucuuauuuaccc

SEQ ID NO: 14268 - RNA, 22 nt, Artificial Sequence
  LRRK2 RNA guide
uuacccauaaucagaucagcau

SEQ ID NO: 14269 - RNA, 22 nt, Artificial Sequence
  LRRK2 RNA guide
uuauggguaaauaagaguuccc

SEQ ID NO: 14270 - RNA, 22 nt, Artificial Sequence
  LRRK2 RNA guide
uugaacuuaagggaacucuuau

SEQ ID NO: 14271 - RNA, 22 nt, Artificial Sequence
  LRRK2 RNA guide
uuuacccauaaucagaucagca

SEQ ID NO: 14272 - RNA, 22 nt, Artificial Sequence
  LRRK2 RNA guide
uuugaacuuaagggaacucuua

SEQ ID NO: 14273 - RNA, 20 nt, Artificial Sequence
  LRRK2 RNA guide
aagggaacucuuauuuaucc

SEQ ID NO: 14274 - RNA, 20 nt, Artificial Sequence
  LRRK2 RNA guide
agggaacucuuauuuaucca

SEQ ID NO: 14275 - RNA, 20 nt, Artificial Sequence
  LRRK2 RNA guide
auccauaaucagaucagcau

SEQ ID NO: 14276 - RNA, 20 nt, Artificial Sequence
  LRRK2 RNA guide
augcugaucugauuauggau

SEQ ID NO: 14277 - RNA, 20 nt, Artificial Sequence
  LRRK2 RNA guide
auggauaaauaagaguuccc

SEQ ID NO: 14278 - RNA, 20 nt, Artificial Sequence
  LRRK2 RNA guide
cugaucugauuauggauaaa

SEQ ID NO: 14279 - RNA, 20 nt, Artificial Sequence
  LRRK2 RNA guide
gauaaauaagaguucccuua

SEQ ID NO: 14280 - RNA, 20 nt, Artificial Sequence
  LRRK2 RNA guide
gaugcugaucugauuaugga

SEQ ID NO: 14281 - RNA, 20 nt, Artificial Sequence
  LRRK2 RNA guide
gcugaucugauuauggauaa

SEQ ID NO: 14282 - RNA, 20 nt, Artificial Sequence
  LRRK2 RNA guide
ggaacucuuauuuauccaua

SEQ ID NO: 14283 - RNA, 20 nt, Artificial Sequence
  LRRK2 RNA guide
ggauaaauaagaguucccuu

SEQ ID NO: 14284 - RNA, 20 nt, Artificial Sequence
  LRRK2 RNA guide
gggaacucuuauuuauccau

SEQ ID NO: 14285 - RNA, 20 nt, Artificial Sequence
  LRRK2 RNA guide
uaagggaacucuuauuuauc

SEQ ID NO: 14286 - RNA, 20 nt, Artificial Sequence
  LRRK2 RNA guide
uauccauaaucagaucagca

SEQ ID NO: 14287 - RNA, 20 nt, Artificial Sequence
  LRRK2 RNA guide
uauggauaaauaagaguucc

SEQ ID NO: 14288 - RNA, 20 nt, Artificial Sequence
  LRRK2 RNA guide
ugcugaucugauuauggaua

SEQ ID NO: 14289 - RNA, 20 nt, Artificial Sequence
  LRRK2 RNA guide
uggauaaauaagaguucccu

SEQ ID NO: 14290 - RNA, 20 nt, Artificial Sequence
  LRRK2 RNA guide
uuauccauaaucagaucagc

SEQ ID NO: 14291 - RNA, 20 nt, Artificial Sequence
  LRRK2 RNA guide
uuuauccauaaucagaucag

SEQ ID NO: 14292 - RNA, 21 nt, Artificial Sequence
  LRRK2 RNA guide
aagggaacucuuauuuaucca

SEQ ID NO: 14293 - RNA, 21 nt, Artificial Sequence
  LRRK2 RNA guide
agaugcugaucugauuaugga

SEQ ID NO: 14294 - RNA, 21 nt, Artificial Sequence
  LRRK2 RNA guide
agggaacucuuauuuauccau

SEQ ID NO: 14295 - RNA, 21 nt, Artificial Sequence
  LRRK2 RNA guide
auccauaaucagaucagcauc

SEQ ID NO: 14296 - RNA, 21 nt, Artificial Sequence
  LRRK2 RNA guide
augcugaucugauuauggaua

SEQ ID NO: 14297 - RNA, 21 nt, Artificial Sequence
  LRRK2 RNA guide
auggauaaauaagaguucccu

SEQ ID NO: 14298 - RNA, 21 nt, Artificial Sequence
  LRRK2 RNA guide
gaugcugaucugauuauggau

SEQ ID NO: 14299 - RNA, 21 nt, Artificial Sequence
  LRRK2 RNA guide
gcugaucugauuauggauaaa

SEQ ID NO: 14300 - RNA, 21 nt, Artificial Sequence
  LRRK2 RNA guide
ggauaaauaagaguucccuua

SEQ ID NO: 14301 - RNA, 21 nt, Artificial Sequence
  LRRK2 RNA guide
gggaacucuuauuuauccaua

SEQ ID NO: 14302 - RNA, 21 nt, Artificial Sequence
  LRRK2 RNA guide
uaagggaacucuuauuuaucc

SEQ ID NO: 14303 - RNA, 21 nt, Artificial Sequence
  LRRK2 RNA guide
uauccauaaucagaucagcau

SEQ ID NO: 14304 - RNA, 21 nt, Artificial Sequence
  LRRK2 RNA guide
uauggauaaauaagaguuccc

SEQ ID NO: 14305 - RNA, 21 nt, Artificial Sequence
  LRRK2 RNA guide
ugcugaucugauuauggauaa

SEQ ID NO: 14306 - RNA, 21 nt, Artificial Sequence
  LRRK2 RNA guide
uggauaaauaagaguucccuu

SEQ ID NO: 14307 - RNA, 21 nt, Artificial Sequence
  LRRK2 RNA guide
uuauccauaaucagaucagca

SEQ ID NO: 14308 - RNA, 21 nt, Artificial Sequence
  LRRK2 RNA guide
uuuauccauaaucagaucagc

SEQ ID NO: 14309 - RNA, 22 nt, Artificial Sequence
  LRRK2 RNA guide
aagaugcugaucugauuaugga

SEQ ID NO: 14310 - RNA, 22 nt, Artificial Sequence
  LRRK2 RNA guide
aagggaacucuuauuuauccau

SEQ ID NO: 14311 - RNA, 22 nt, Artificial Sequence
  LRRK2 RNA guide
agaugcugaucugauuauggau

SEQ ID NO: 14312 - RNA, 22 nt, Artificial Sequence
  LRRK2 RNA guide
agggaacucuuauuuauccaua

SEQ ID NO: 14313 - RNA, 22 nt, Artificial Sequence
  LRRK2 RNA guide
auccauaaucagaucagcaucu

SEQ ID NO: 14314 - RNA, 22 nt, Artificial Sequence
  LRRK2 RNA guide
augcugaucugauuauggauaa

SEQ ID NO: 14315 - RNA, 22 nt, Artificial Sequence
  LRRK2 RNA guide
auggauaaauaagaguucccuu

SEQ ID NO: 14316 - RNA, 22 nt, Artificial Sequence
  LRRK2 RNA guide
auuuauccauaaucagaucagc

SEQ ID NO: 14317 - RNA, 22 nt, Artificial Sequence
  LRRK2 RNA guide
cuuaagggaacucuuauuuauc

SEQ ID NO: 14318 - RNA, 22 nt, Artificial Sequence
  LRRK2 RNA guide
gauaaauaagaguucccuuaag

SEQ ID NO: 14319 - RNA, 22 nt, Artificial Sequence
  LRRK2 RNA guide
gaugcugaucugauuauggaua

SEQ ID NO: 14320 - RNA, 22 nt, Artificial Sequence
  LRRK2 RNA guide
gcugaucugauuauggauaaau

SEQ ID NO: 14321 - RNA, 22 nt, Artificial Sequence
  LRRK2 RNA guide
ggauaaauaagaguucccuuaa

SEQ ID NO: 14322 - RNA, 22 nt, Artificial Sequence
  LRRK2 RNA guide
gggaacucuuauuuauccauaa

SEQ ID NO: 14323 - RNA, 22 nt, Artificial Sequence
  LRRK2 RNA guide
uaagggaacucuuauuuaucca

SEQ ID NO: 14324 - RNA, 22 nt, Artificial Sequence
  LRRK2 RNA guide
uauccauaaucagaucagcauc

SEQ ID NO: 14325 - RNA, 22 nt, Artificial Sequence
  LRRK2 RNA guide
uauggauaaauaagaguucccu

SEQ ID NO: 14326 - RNA, 22 nt, Artificial Sequence
  LRRK2 RNA guide
ugcugaucugauuauggauaaa

SEQ ID NO: 14327 - RNA, 22 nt, Artificial Sequence
  LRRK2 RNA guide
uggauaaauaagaguucccuua

SEQ ID NO: 14328 - RNA, 22 nt, Artificial Sequence
  LRRK2 RNA guide
uuaagggaacucuuauuuaucc

SEQ ID NO: 14329 - RNA, 22 nt, Artificial Sequence
  LRRK2 RNA guide
uuauccauaaucagaucagcau

SEQ ID NO: 14330 - RNA, 22 nt, Artificial Sequence
  LRRK2 RNA guide
uuauggauaaauaagaguuccc

SEQ ID NO: 14331 - RNA, 22 nt, Artificial Sequence
  LRRK2 RNA guide
uuuauccauaaucagaucagca

SEQ ID NO: 14332 - RNA, 20 nt, Artificial Sequence
  LRRK2 RNA guide
aacauauuuauggucuagag

SEQ ID NO: 14333 - RNA, 20 nt, Artificial Sequence
  LRRK2 RNA guide
acucuagaccauaaauaugu

SEQ ID NO: 14334 - RNA, 20 nt, Artificial Sequence
  LRRK2 RNA guide
agcaucuuggacuugaguga

SEQ ID NO: 14335 - RNA, 20 nt, Artificial Sequence
  LRRK2 RNA guide
aucuuggacuugagugaaaa

SEQ ID NO: 14336 - RNA, 20 nt, Artificial Sequence
  LRRK2 RNA guide
auguuuuuucacucaagucc

SEQ ID NO: 14337 - RNA, 20 nt, Artificial Sequence
  LRRK2 RNA guide
caucuuggacuugagugaaa

SEQ ID NO: 14338 - RNA, 20 nt, Artificial Sequence
  LRRK2 RNA guide
cuacucuagaccauaaauau

SEQ ID NO: 14339 - RNA, 20 nt, Artificial Sequence
  LRRK2 RNA guide
cucuagaccauaaauauguu

SEQ ID NO: 14340 - RNA, 20 nt, Artificial Sequence
  LRRK2 RNA guide
cuuggacuugagugaaaaaa

SEQ ID NO: 14341 - RNA, 20 nt, Artificial Sequence
  LRRK2 RNA guide
gacuugagugaaaaaacaua

SEQ ID NO: 14342 - RNA, 20 nt, Artificial Sequence
  LRRK2 RNA guide
gcaucuuggacuugagugaa

SEQ ID NO: 14343 - RNA, 20 nt, Artificial Sequence
  LRRK2 RNA guide
ggacuugagugaaaaaacau

SEQ ID NO: 14344 - RNA, 20 nt, Artificial Sequence
  LRRK2 RNA guide
guuuuuucacucaaguccaa

SEQ ID NO: 14345 - RNA, 20 nt, Artificial Sequence
  LRRK2 RNA guide
uacucuagaccauaaauaug

SEQ ID NO: 14346 - RNA, 20 nt, Artificial Sequence
  LRRK2 RNA guide
uauguuuuuucacucaaguc

SEQ ID NO: 14347 - RNA, 20 nt, Artificial Sequence
  LRRK2 RNA guide
ucuacucuagaccauaaaua

SEQ ID NO: 14348 - RNA, 20 nt, Artificial Sequence
  LRRK2 RNA guide
ucucuacucuagaccauaaa

SEQ ID NO: 14349 - RNA, 20 nt, Artificial Sequence
  LRRK2 RNA guide
ucuuggacuugagugaaaaa

SEQ ID NO: 14350 - RNA, 20 nt, Artificial Sequence
  LRRK2 RNA guide
uggacuugagugaaaaaaca

SEQ ID NO: 14351 - RNA, 20 nt, Artificial Sequence
  LRRK2 RNA guide
uguuuuuucacucaagucca

SEQ ID NO: 14352 - RNA, 20 nt, Artificial Sequence
  LRRK2 RNA guide
uuggacuugagugaaaaaac

SEQ ID NO: 14353 - RNA, 21 nt, Artificial Sequence
  LRRK2 RNA guide
agcaucuuggacuugagugaa

SEQ ID NO: 14354 - RNA, 21 nt, Artificial Sequence
  LRRK2 RNA guide
aucuuggacuugagugaaaaa

SEQ ID NO: 14355 - RNA, 21 nt, Artificial Sequence
  LRRK2 RNA guide
auguuuuuucacucaagucca

SEQ ID NO: 14356 - RNA, 21 nt, Artificial Sequence
  LRRK2 RNA guide
cagcaucuuggacuugaguga

SEQ ID NO: 14357 - RNA, 21 nt, Artificial Sequence
  LRRK2 RNA guide
caucuuggacuugagugaaaa

SEQ ID NO: 14358 - RNA, 21 nt, Artificial Sequence
  LRRK2 RNA guide
cuacucuagaccauaaauaug

SEQ ID NO: 14359 - RNA, 21 nt, Artificial Sequence
  LRRK2 RNA guide
cucuacucuagaccauaaaua

SEQ ID NO: 14360 - RNA, 21 nt, Artificial Sequence
  LRRK2 RNA guide
cuuggacuugagugaaaaaac

SEQ ID NO: 14361 - RNA, 21 nt, Artificial Sequence
  LRRK2 RNA guide
gcaucuuggacuugagugaaa

SEQ ID NO: 14362 - RNA, 21 nt, Artificial Sequence
  LRRK2 RNA guide
ggacuugagugaaaaaacaua

SEQ ID NO: 14363 - RNA, 21 nt, Artificial Sequence
  LRRK2 RNA guide
guuuuuucacucaaguccaag

SEQ ID NO: 14364 - RNA, 21 nt, Artificial Sequence
  LRRK2 RNA guide
uauguuuuuucacucaagucc

SEQ ID NO: 14365 - RNA, 21 nt, Artificial Sequence
  LRRK2 RNA guide
ucucuacucuagaccauaaau

SEQ ID NO: 14366 - RNA, 21 nt, Artificial Sequence
  LRRK2 RNA guide
ucuuggacuugagugaaaaaa

SEQ ID NO: 14367 - RNA, 21 nt, Artificial Sequence
  LRRK2 RNA guide
uggacuugagugaaaaaacau

SEQ ID NO: 14368 - RNA, 21 nt, Artificial Sequence
  LRRK2 RNA guide
uguuuuuucacucaaguccaa

SEQ ID NO: 14369 - RNA, 21 nt, Artificial Sequence
  LRRK2 RNA guide
uucucuacucuagaccauaaa

SEQ ID NO: 14370 - RNA, 21 nt, Artificial Sequence
  LRRK2 RNA guide
uuggacuugagugaaaaaaca

SEQ ID NO: 14371 - RNA, 22 nt, Artificial Sequence
  LRRK2 RNA guide
agcaucuuggacuugagugaaa

SEQ ID NO: 14372 - RNA, 22 nt, Artificial Sequence
  LRRK2 RNA guide
auauguuuuuucacucaagucc

SEQ ID NO: 14373 - RNA, 22 nt, Artificial Sequence
  LRRK2 RNA guide
aucuuggacuugagugaaaaaa

SEQ ID NO: 14374 - RNA, 22 nt, Artificial Sequence
  LRRK2 RNA guide
auguuuuuucacucaaguccaa

SEQ ID NO: 14375 - RNA, 22 nt, Artificial Sequence
  LRRK2 RNA guide
cagcaucuuggacuugagugaa

SEQ ID NO: 14376 - RNA, 22 nt, Artificial Sequence
  LRRK2 RNA guide
caucuuggacuugagugaaaaa

SEQ ID NO: 14377 - RNA, 22 nt, Artificial Sequence
  LRRK2 RNA guide
cuacucuagaccauaaauaugu

SEQ ID NO: 14378 - RNA, 22 nt, Artificial Sequence
  LRRK2 RNA guide
cucuacucuagaccauaaauau

SEQ ID NO: 14379 - RNA, 22 nt, Artificial Sequence
  LRRK2 RNA guide
cuuggacuugagugaaaaaaca

SEQ ID NO: 14380 - RNA, 22 nt, Artificial Sequence
  LRRK2 RNA guide
gcaucuuggacuugagugaaaa

SEQ ID NO: 14381 - RNA, 22 nt, Artificial Sequence
  LRRK2 RNA guide
ggacuugagugaaaaaacauau

SEQ ID NO: 14382 - RNA, 22 nt, Artificial Sequence
  LRRK2 RNA guide
guuuuuucacucaaguccaaga

SEQ ID NO: 14383 - RNA, 22 nt, Artificial Sequence
  LRRK2 RNA guide
uauguuuuuucacucaagucca

SEQ ID NO: 14384 - RNA, 22 nt, Artificial Sequence
  LRRK2 RNA guide
ucagcaucuuggacuugaguga

SEQ ID NO: 14385 - RNA, 22 nt, Artificial Sequence
  LRRK2 RNA guide
ucuacucuagaccauaaauaug

SEQ ID NO: 14386 - RNA, 22 nt, Artificial Sequence
  LRRK2 RNA guide
ucucuacucuagaccauaaaua

SEQ ID NO: 14387 - RNA, 22 nt, Artificial Sequence
  LRRK2 RNA guide
ucuuggacuugagugaaaaaac

SEQ ID NO: 14388 - RNA, 22 nt, Artificial Sequence
  LRRK2 RNA guide
uggacuugagugaaaaaacaua

SEQ ID NO: 14389 - RNA, 22 nt, Artificial Sequence
  LRRK2 RNA guide
uguuuuuucacucaaguccaag

SEQ ID NO: 14390 - RNA, 22 nt, Artificial Sequence
  LRRK2 RNA guide
uucucuacucuagaccauaaau

SEQ ID NO: 14391 - RNA, 22 nt, Artificial Sequence
  LRRK2 RNA guide
uuggacuugagugaaaaaacau

SEQ ID NO: 14392 - RNA, 22 nt, Artificial Sequence
  LRRK2 RNA guide
uuucucuacucuagaccauaaa

SEQ ID NO: 14393 - RNA, 20 nt, Artificial Sequence
  LRRK2 RNA guide
aaacugaaagagguaagaug

SEQ ID NO: 14394 - RNA, 20 nt, Artificial Sequence
  LRRK2 RNA guide
aacugaaagagguaagauga

SEQ ID NO: 14395 - RNA, 20 nt, Artificial Sequence
  LRRK2 RNA guide
aagagguaagaugauuauug

SEQ ID NO: 14396 - RNA, 20 nt, Artificial Sequence
  LRRK2 RNA guide
aagaugauuauugccacuua

SEQ ID NO: 14397 - RNA, 20 nt, Artificial Sequence
  LRRK2 RNA guide
aaguggcaauaaucaucuua

SEQ ID NO: 14398 - RNA, 20 nt, Artificial Sequence
  LRRK2 RNA guide
aauaaacugaaagagguaag

SEQ ID NO: 14399 - RNA, 20 nt, Artificial Sequence
  LRRK2 RNA guide
aaucaucuuaccucuuucag

SEQ ID NO: 14400 - RNA, 20 nt, Artificial Sequence
  LRRK2 RNA guide
acaauaaacugaaagaggua

SEQ ID NO: 14401 - RNA, 20 nt, Artificial Sequence
  LRRK2 RNA guide
acugaaagagguaagaugau

SEQ ID NO: 14402 - RNA, 20 nt, Artificial Sequence
  LRRK2 RNA guide
agagguaagaugauuauugc

SEQ ID NO: 14403 - RNA, 20 nt, Artificial Sequence
  LRRK2 RNA guide
agaugauuauugccacuuaa

SEQ ID NO: 14404 - RNA, 20 nt, Artificial Sequence
  LRRK2 RNA guide
agguaagaugauuauugcca

SEQ ID NO: 14405 - RNA, 20 nt, Artificial Sequence
  LRRK2 RNA guide
aguggcaauaaucaucuuac

SEQ ID NO: 14406 - RNA, 20 nt, Artificial Sequence
  LRRK2 RNA guide
auaaacugaaagagguaaga

SEQ ID NO: 14407 - RNA, 20 nt, Artificial Sequence
  LRRK2 RNA guide
auaaucaucuuaccucuuuc

SEQ ID NO: 14408 - RNA, 20 nt, Artificial Sequence
  LRRK2 RNA guide
aucaucuuaccucuuucagu

SEQ ID NO: 14409 - RNA, 20 nt, Artificial Sequence
  LRRK2 RNA guide
caauaaacugaaagagguaa

SEQ ID NO: 14410 - RNA, 20 nt, Artificial Sequence
  LRRK2 RNA guide
caauaaucaucuuaccucuu

SEQ ID NO: 14411 - RNA, 20 nt, Artificial Sequence
  LRRK2 RNA guide
cacaauaaacugaaagaggu

SEQ ID NO: 14412 - RNA, 20 nt, Artificial Sequence
  LRRK2 RNA guide
caucuuaccucuuucaguuu

SEQ ID NO: 14413 - RNA, 20 nt, Artificial Sequence
  LRRK2 RNA guide
cugaaagagguaagaugauu

SEQ ID NO: 14414 - RNA, 20 nt, Artificial Sequence
  LRRK2 RNA guide
gaaagagguaagaugauuau

SEQ ID NO: 14415 - RNA, 20 nt, Artificial Sequence
  LRRK2 RNA guide
gagguaagaugauuauugcc

SEQ ID NO: 14416 - RNA, 20 nt, Artificial Sequence
  LRRK2 RNA guide
gaugauuauugccacuuaaa

SEQ ID NO: 14417 - RNA, 20 nt, Artificial Sequence
  LRRK2 RNA guide
gcaauaaucaucuuaccucu

SEQ ID NO: 14418 - RNA, 20 nt, Artificial Sequence
  LRRK2 RNA guide
ggcaauaaucaucuuaccuc

SEQ ID NO: 14419 - RNA, 20 nt, Artificial Sequence
  LRRK2 RNA guide
gguaagaugauuauugccac

SEQ ID NO: 14420 - RNA, 20 nt, Artificial Sequence
  LRRK2 RNA guide
guaagaugauuauugccacu

SEQ ID NO: 14421 - RNA, 20 nt, Artificial Sequence
  LRRK2 RNA guide
guggcaauaaucaucuuacc

SEQ ID NO: 14422 - RNA, 20 nt, Artificial Sequence
  LRRK2 RNA guide
uaaacugaaagagguaagau

SEQ ID NO: 14423 - RNA, 20 nt, Artificial Sequence
  LRRK2 RNA guide
uaagaugauuauugccacuu

SEQ ID NO: 14424 - RNA, 20 nt, Artificial Sequence
  LRRK2 RNA guide
uaaguggcaauaaucaucuu

SEQ ID NO: 14425 - RNA, 20 nt, Artificial Sequence
  LRRK2 RNA guide
uaaucaucuuaccucuuuca

SEQ ID NO: 14426 - RNA, 20 nt, Artificial Sequence
  LRRK2 RNA guide
ucaucuuaccucuuucaguu

SEQ ID NO: 14427 - RNA, 20 nt, Artificial Sequence
  LRRK2 RNA guide
ugaaagagguaagaugauua

SEQ ID NO: 14428 - RNA, 20 nt, Artificial Sequence
  LRRK2 RNA guide
uggcaauaaucaucuuaccu

SEQ ID NO: 14429 - RNA, 20 nt, Artificial Sequence
  LRRK2 RNA guide
uuaaguggcaauaaucaucu

SEQ ID NO: 14430 - RNA, 20 nt, Artificial Sequence
  LRRK2 RNA guide
uuuaaguggcaauaaucauc

SEQ ID NO: 14431 - RNA, 21 nt, Artificial Sequence
  LRRK2 RNA guide
aaacugaaagagguaagauga

SEQ ID NO: 14432 - RNA, 21 nt, Artificial Sequence
  LRRK2 RNA guide
aacugaaagagguaagaugau

SEQ ID NO: 14433 - RNA, 21 nt, Artificial Sequence
  LRRK2 RNA guide
aagagguaagaugauuauugc

SEQ ID NO: 14434 - RNA, 21 nt, Artificial Sequence
  LRRK2 RNA guide
aaguggcaauaaucaucuuac

SEQ ID NO: 14435 - RNA, 21 nt, Artificial Sequence
  LRRK2 RNA guide
aaucaucuuaccucuuucagu

SEQ ID NO: 14436 - RNA, 21 nt, Artificial Sequence
  LRRK2 RNA guide
acugaaagagguaagaugauu

SEQ ID NO: 14437 - RNA, 21 nt, Artificial Sequence
  LRRK2 RNA guide
agagguaagaugauuauugcc

SEQ ID NO: 14438 - RNA, 21 nt, Artificial Sequence
  LRRK2 RNA guide
agguaagaugauuauugccac

SEQ ID NO: 14439 - RNA, 21 nt, Artificial Sequence
  LRRK2 RNA guide
aguggcaauaaucaucuuacc

SEQ ID NO: 14440 - RNA, 21 nt, Artificial Sequence
  LRRK2 RNA guide
aucaucuuaccucuuucaguu

SEQ ID NO: 14441 - RNA, 21 nt, Artificial Sequence
  LRRK2 RNA guide
caauaaacugaaagagguaag

SEQ ID NO: 14442 - RNA, 21 nt, Artificial Sequence
  LRRK2 RNA guide
cacaauaaacugaaagaggua

SEQ ID NO: 14443 - RNA, 21 nt, Artificial Sequence
  LRRK2 RNA guide
caucuuaccucuuucaguuua

SEQ ID NO: 14444 - RNA, 21 nt, Artificial Sequence
  LRRK2 RNA guide
cugaaagagguaagaugauua

SEQ ID NO: 14445 - RNA, 21 nt, Artificial Sequence
  LRRK2 RNA guide
gagguaagaugauuauugcca

SEQ ID NO: 14446 - RNA, 21 nt, Artificial Sequence
  LRRK2 RNA guide
gcaauaaucaucuuaccucuu

SEQ ID NO: 14447 - RNA, 21 nt, Artificial Sequence
  LRRK2 RNA guide
ggcaauaaucaucuuaccucu

SEQ ID NO: 14448 - RNA, 21 nt, Artificial Sequence
  LRRK2 RNA guide
gguaagaugauuauugccacu

SEQ ID NO: 14449 - RNA, 21 nt, Artificial Sequence
  LRRK2 RNA guide
guaagaugauuauugccacuu

SEQ ID NO: 14450 - RNA, 21 nt, Artificial Sequence
  LRRK2 RNA guide
guggcaauaaucaucuuaccu

SEQ ID NO: 14451 - RNA, 21 nt, Artificial Sequence
  LRRK2 RNA guide
uaaacugaaagagguaagaug

SEQ ID NO: 14452 - RNA, 21 nt, Artificial Sequence
  LRRK2 RNA guide
uaaucaucuuaccucuuucag

SEQ ID NO: 14453 - RNA, 21 nt, Artificial Sequence
  LRRK2 RNA guide
ucacaauaaacugaaagaggu

SEQ ID NO: 14454 - RNA, 21 nt, Artificial Sequence
  LRRK2 RNA guide
ucaucuuaccucuuucaguuu

SEQ ID NO: 14455 - RNA, 21 nt, Artificial Sequence
  LRRK2 RNA guide
uggcaauaaucaucuuaccuc

SEQ ID NO: 14456 - RNA, 22 nt, Artificial Sequence
  LRRK2 RNA guide
aaacugaaagagguaagaugau

SEQ ID NO: 14457 - RNA, 22 nt, Artificial Sequence
  LRRK2 RNA guide
aaagagguaagaugauuauugc

SEQ ID NO: 14458 - RNA, 22 nt, Artificial Sequence
  LRRK2 RNA guide
aacugaaagagguaagaugauu

SEQ ID NO: 14459 - RNA, 22 nt, Artificial Sequence
  LRRK2 RNA guide
aagagguaagaugauuauugcc

SEQ ID NO: 14460 - RNA, 22 nt, Artificial Sequence
  LRRK2 RNA guide
aaguggcaauaaucaucuuacc

SEQ ID NO: 14461 - RNA, 22 nt, Artificial Sequence
  LRRK2 RNA guide
aaucaucuuaccucuuucaguu

SEQ ID NO: 14462 - RNA, 22 nt, Artificial Sequence
  LRRK2 RNA guide
acaauaaacugaaagagguaag

SEQ ID NO: 14463 - RNA, 22 nt, Artificial Sequence
  LRRK2 RNA guide
acugaaagagguaagaugauua

SEQ ID NO: 14464 - RNA, 22 nt, Artificial Sequence
  LRRK2 RNA guide
agagguaagaugauuauugcca

SEQ ID NO: 14465 - RNA, 22 nt, Artificial Sequence
  LRRK2 RNA guide
agguaagaugauuauugccacu

SEQ ID NO: 14466 - RNA, 22 nt, Artificial Sequence
  LRRK2 RNA guide
aguggcaauaaucaucuuaccu

SEQ ID NO: 14467 - RNA, 22 nt, Artificial Sequence
  LRRK2 RNA guide
auaaacugaaagagguaagaug

SEQ ID NO: 14468 - RNA, 22 nt, Artificial Sequence
  LRRK2 RNA guide
auaaucaucuuaccucuuucag

SEQ ID NO: 14469 - RNA, 22 nt, Artificial Sequence
  LRRK2 RNA guide
aucaucuuaccucuuucaguuu

SEQ ID NO: 14470 - RNA, 22 nt, Artificial Sequence
  LRRK2 RNA guide
caauaaacugaaagagguaaga

SEQ ID NO: 14471 - RNA, 22 nt, Artificial Sequence
  LRRK2 RNA guide
caauaaucaucuuaccucuuuc

SEQ ID NO: 14472 - RNA, 22 nt, Artificial Sequence
  LRRK2 RNA guide
cacaauaaacugaaagagguaa

SEQ ID NO: 14473 - RNA, 22 nt, Artificial Sequence
  LRRK2 RNA guide
caucuuaccucuuucaguuuau

SEQ ID NO: 14474 - RNA, 22 nt, Artificial Sequence
  LRRK2 RNA guide
cucacaauaaacugaaagaggu

SEQ ID NO: 14475 - RNA, 22 nt, Artificial Sequence
  LRRK2 RNA guide
cugaaagagguaagaugauuau

SEQ ID NO: 14476 - RNA, 22 nt, Artificial Sequence
  LRRK2 RNA guide
gaaagagguaagaugauuauug

SEQ ID NO: 14477 - RNA, 22 nt, Artificial Sequence
  LRRK2 RNA guide
gagguaagaugauuauugccac

SEQ ID NO: 14478 - RNA, 22 nt, Artificial Sequence
  LRRK2 RNA guide
gcaauaaucaucuuaccucuuu

SEQ ID NO: 14479 - RNA, 22 nt, Artificial Sequence
  LRRK2 RNA guide
ggcaauaaucaucuuaccucuu

SEQ ID NO: 14480 - RNA, 22 nt, Artificial Sequence
  LRRK2 RNA guide
gguaagaugauuauugccacuu

SEQ ID NO: 14481 - RNA, 22 nt, Artificial Sequence
  LRRK2 RNA guide
guaagaugauuauugccacuua

SEQ ID NO: 14482 - RNA, 22 nt, Artificial Sequence
  LRRK2 RNA guide
guggcaauaaucaucuuaccuc

SEQ ID NO: 14483 - RNA, 22 nt, Artificial Sequence
  LRRK2 RNA guide
uaaacugaaagagguaagauga

SEQ ID NO: 14484 - RNA, 22 nt, Artificial Sequence
  LRRK2 RNA guide
uaaguggcaauaaucaucuuac

SEQ ID NO: 14485 - RNA, 22 nt, Artificial Sequence
  LRRK2 RNA guide
uaaucaucuuaccucuuucagu

SEQ ID NO: 14486 - RNA, 22 nt, Artificial Sequence
  LRRK2 RNA guide
ucacaauaaacugaaagaggua

SEQ ID NO: 14487 - RNA, 22 nt, Artificial Sequence
  LRRK2 RNA guide
ucaucuuaccucuuucaguuua

SEQ ID NO: 14488 - RNA, 22 nt, Artificial Sequence
  LRRK2 RNA guide
uggcaauaaucaucuuaccucu

SEQ ID NO: 14489 - RNA, 20 nt, Artificial Sequence
  LRRK2 RNA guide
aacagguuuugcccuuuuuu

SEQ ID NO: 14490 - RNA, 20 nt, Artificial Sequence
  LRRK2 RNA guide
aaucucaggaggaaucuuaa

SEQ ID NO: 14491 - RNA, 20 nt, Artificial Sequence
  LRRK2 RNA guide
aggaggaaucuuaauggaaa

SEQ ID NO: 14492 - RNA, 20 nt, Artificial Sequence
  LRRK2 RNA guide
aucucaggaggaaucuuaau

SEQ ID NO: 14493 - RNA, 20 nt, Artificial Sequence
  LRRK2 RNA guide
caacagguuuugcccuuuuu

SEQ ID NO: 14494 - RNA, 20 nt, Artificial Sequence
  LRRK2 RNA guide
caaucucaggaggaaucuua

SEQ ID NO: 14495 - RNA, 20 nt, Artificial Sequence
  LRRK2 RNA guide
caggaggaaucuuaauggaa

SEQ ID NO: 14496 - RNA, 20 nt, Artificial Sequence
  LRRK2 RNA guide
ccaacagguuuugcccuuuu

SEQ ID NO: 14497 - RNA, 20 nt, Artificial Sequence
  LRRK2 RNA guide
cucaggaggaaucuuaaugg

SEQ ID NO: 14498 - RNA, 20 nt, Artificial Sequence
  LRRK2 RNA guide
gaggaaucuuaauggaaaaa

SEQ ID NO: 14499 - RNA, 20 nt, Artificial Sequence
  LRRK2 RNA guide
ggaggaaucuuaauggaaaa

SEQ ID NO: 14500 - RNA, 20 nt, Artificial Sequence
  LRRK2 RNA guide
ucaggaggaaucuuaaugga

SEQ ID NO: 14501 - RNA, 20 nt, Artificial Sequence
  LRRK2 RNA guide
ucucaggaggaaucuuaaug

SEQ ID NO: 14502 - RNA, 20 nt, Artificial Sequence
  LRRK2 RNA guide
uuccauuaagauuccuccug

SEQ ID NO: 14503 - RNA, 20 nt, Artificial Sequence
  LRRK2 RNA guide
uuuccauuaagauuccuccu

SEQ ID NO: 14504 - RNA, 20 nt, Artificial Sequence
  LRRK2 RNA guide
uuuuccauuaagauuccucc

SEQ ID NO: 14505 - RNA, 20 nt, Artificial Sequence
  LRRK2 RNA guide
uuuuuccauuaagauuccuc

SEQ ID NO: 14506 - RNA, 21 nt, Artificial Sequence
  LRRK2 RNA guide
aaucucaggaggaaucuuaau

SEQ ID NO: 14507 - RNA, 21 nt, Artificial Sequence
  LRRK2 RNA guide
accaacagguuuugcccuuuu

SEQ ID NO: 14508 - RNA, 21 nt, Artificial Sequence
  LRRK2 RNA guide
aggaggaaucuuaauggaaaa

SEQ ID NO: 14509 - RNA, 21 nt, Artificial Sequence
  LRRK2 RNA guide
aucucaggaggaaucuuaaug

SEQ ID NO: 14510 - RNA, 21 nt, Artificial Sequence
  LRRK2 RNA guide
caacagguuuugcccuuuuuu

SEQ ID NO: 14511 - RNA, 21 nt, Artificial Sequence
  LRRK2 RNA guide
caaucucaggaggaaucuuaa

SEQ ID NO: 14512 - RNA, 21 nt, Artificial Sequence
  LRRK2 RNA guide
caggaggaaucuuaauggaaa

SEQ ID NO: 14513 - RNA, 21 nt, Artificial Sequence
  LRRK2 RNA guide
ccaacagguuuugcccuuuuu

SEQ ID NO: 14514 - RNA, 21 nt, Artificial Sequence
  LRRK2 RNA guide
ccaaucucaggaggaaucuua

SEQ ID NO: 14515 - RNA, 21 nt, Artificial Sequence
  LRRK2 RNA guide
cucaggaggaaucuuaaugga

SEQ ID NO: 14516 - RNA, 21 nt, Artificial Sequence
  LRRK2 RNA guide
ggaggaaucuuaauggaaaaa

SEQ ID NO: 14517 - RNA, 21 nt, Artificial Sequence
  LRRK2 RNA guide
ucaggaggaaucuuaauggaa

SEQ ID NO: 14518 - RNA, 21 nt, Artificial Sequence
  LRRK2 RNA guide
ucucaggaggaaucuuaaugg

SEQ ID NO: 14519 - RNA, 21 nt, Artificial Sequence
  LRRK2 RNA guide
uuccauuaagauuccuccuga

SEQ ID NO: 14520 - RNA, 21 nt, Artificial Sequence
  LRRK2 RNA guide
uuuccauuaagauuccuccug

SEQ ID NO: 14521 - RNA, 21 nt, Artificial Sequence
  LRRK2 RNA guide
uuuuccauuaagauuccuccu

SEQ ID NO: 14522 - RNA, 21 nt, Artificial Sequence
  LRRK2 RNA guide
uuuuuccauuaagauuccucc

SEQ ID NO: 14523 - RNA, 22 nt, Artificial Sequence
  LRRK2 RNA guide
aaucucaggaggaaucuuaaug

SEQ ID NO: 14524 - RNA, 22 nt, Artificial Sequence
  LRRK2 RNA guide
accaacagguuuugcccuuuuu

SEQ ID NO: 14525 - RNA, 22 nt, Artificial Sequence
  LRRK2 RNA guide
aggaggaaucuuaauggaaaaa

SEQ ID NO: 14526 - RNA, 22 nt, Artificial Sequence
  LRRK2 RNA guide
aucucaggaggaaucuuaaugg

SEQ ID NO: 14527 - RNA, 22 nt, Artificial Sequence
  LRRK2 RNA guide
caaucucaggaggaaucuuaau

SEQ ID NO: 14528 - RNA, 22 nt, Artificial Sequence
  LRRK2 RNA guide
caccaacagguuuugcccuuuu

SEQ ID NO: 14529 - RNA, 22 nt, Artificial Sequence
  LRRK2 RNA guide
caggaggaaucuuaauggaaaa

SEQ ID NO: 14530 - RNA, 22 nt, Artificial Sequence
  LRRK2 RNA guide
ccaacagguuuugcccuuuuuu

SEQ ID NO: 14531 - RNA, 22 nt, Artificial Sequence
  LRRK2 RNA guide
ccaaucucaggaggaaucuuaa

SEQ ID NO: 14532 - RNA, 22 nt, Artificial Sequence
  LRRK2 RNA guide
cucaggaggaaucuuaauggaa

SEQ ID NO: 14533 - RNA, 22 nt, Artificial Sequence
  LRRK2 RNA guide
gccaaucucaggaggaaucuua

SEQ ID NO: 14534 - RNA, 22 nt, Artificial Sequence
  LRRK2 RNA guide
ggaggaaucuuaauggaaaaaa

SEQ ID NO: 14535 - RNA, 22 nt, Artificial Sequence
  LRRK2 RNA guide
ucaggaggaaucuuaauggaaa

SEQ ID NO: 14536 - RNA, 22 nt, Artificial Sequence
  LRRK2 RNA guide
ucucaggaggaaucuuaaugga

SEQ ID NO: 14537 - RNA, 22 nt, Artificial Sequence
  LRRK2 RNA guide
uuccauuaagauuccuccugag

SEQ ID NO: 14538 - RNA, 22 nt, Artificial Sequence
  LRRK2 RNA guide
uuuccauuaagauuccuccuga

SEQ ID NO: 14539 - RNA, 22 nt, Artificial Sequence
  LRRK2 RNA guide
uuuuccauuaagauuccuccug

SEQ ID NO: 14540 - RNA, 22 nt, Artificial Sequence
  LRRK2 RNA guide
uuuuuccauuaagauuccuccu

SEQ ID NO: 14541 - RNA, 22 nt, Artificial Sequence
  LRRK2 RNA guide
uuuuuuccauuaagauuccucc

SEQ ID NO: 14542 - RNA, 20 nt, Artificial Sequence
  LRRK2 RNA guide
aaucucaggaggaaucuuua

SEQ ID NO: 14543 - RNA, 20 nt, Artificial Sequence
  LRRK2 RNA guide
agccaaucucaggaggaauc

SEQ ID NO: 14544 - RNA, 20 nt, Artificial Sequence
  LRRK2 RNA guide
aggaaucuuuaugggaaaaa

SEQ ID NO: 14545 - RNA, 20 nt, Artificial Sequence
  LRRK2 RNA guide
aggaggaaucuuuaugggaa

SEQ ID NO: 14546 - RNA, 20 nt, Artificial Sequence
  LRRK2 RNA guide
auaaagauuccuccugagau

SEQ ID NO: 14547 - RNA, 20 nt, Artificial Sequence
  LRRK2 RNA guide
aucucaggaggaaucuuuau

SEQ ID NO: 14548 - RNA, 20 nt, Artificial Sequence
  LRRK2 RNA guide
caaucucaggaggaaucuuu

SEQ ID NO: 14549 - RNA, 20 nt, Artificial Sequence
  LRRK2 RNA guide
cagccaaucucaggaggaau

SEQ ID NO: 14550 - RNA, 20 nt, Artificial Sequence
  LRRK2 RNA guide
caggaggaaucuuuauggga

SEQ ID NO: 14551 - RNA, 20 nt, Artificial Sequence
  LRRK2 RNA guide
cauaaagauuccuccugaga

SEQ ID NO: 14552 - RNA, 20 nt, Artificial Sequence
  LRRK2 RNA guide
ccaaucucaggaggaaucuu

SEQ ID NO: 14553 - RNA, 20 nt, Artificial Sequence
  LRRK2 RNA guide
ccauaaagauuccuccugag

SEQ ID NO: 14554 - RNA, 20 nt, Artificial Sequence
  LRRK2 RNA guide
cccauaaagauuccuccuga

SEQ ID NO: 14555 - RNA, 20 nt, Artificial Sequence
  LRRK2 RNA guide
cucaggaggaaucuuuaugg

SEQ ID NO: 14556 - RNA, 20 nt, Artificial Sequence
  LRRK2 RNA guide
gaggaaucuuuaugggaaaa

SEQ ID NO: 14557 - RNA, 20 nt, Artificial Sequence
  LRRK2 RNA guide
gccaaucucaggaggaaucu

SEQ ID NO: 14558 - RNA, 20 nt, Artificial Sequence
  LRRK2 RNA guide
ggaaucuuuaugggaaaaaa

SEQ ID NO: 14559 - RNA, 20 nt, Artificial Sequence
  LRRK2 RNA guide
ggaggaaucuuuaugggaaa

SEQ ID NO: 14560 - RNA, 20 nt, Artificial Sequence
  LRRK2 RNA guide
uaaagauuccuccugagauu

SEQ ID NO: 14561 - RNA, 20 nt, Artificial Sequence
  LRRK2 RNA guide
ucaggaggaaucuuuauggg

SEQ ID NO: 14562 - RNA, 20 nt, Artificial Sequence
  LRRK2 RNA guide
ucccauaaagauuccuccug

SEQ ID NO: 14563 - RNA, 20 nt, Artificial Sequence
  LRRK2 RNA guide
ucucaggaggaaucuuuaug

SEQ ID NO: 14564 - RNA, 20 nt, Artificial Sequence
  LRRK2 RNA guide
uucccauaaagauuccuccu

SEQ ID NO: 14565 - RNA, 20 nt, Artificial Sequence
  LRRK2 RNA guide
uuucccauaaagauuccucc

SEQ ID NO: 14566 - RNA, 20 nt, Artificial Sequence
  LRRK2 RNA guide
uuuucccauaaagauuccuc

SEQ ID NO: 14567 - RNA, 20 nt, Artificial Sequence
  LRRK2 RNA guide
uuuuucccauaaagauuccu

SEQ ID NO: 14568 - RNA, 20 nt, Artificial Sequence
  LRRK2 RNA guide
uuuuuucccauaaagauucc

SEQ ID NO: 14569 - RNA, 21 nt, Artificial Sequence
  LRRK2 RNA guide
aaucucaggaggaaucuuuau

SEQ ID NO: 14570 - RNA, 21 nt, Artificial Sequence
  LRRK2 RNA guide
acagccaaucucaggaggaau

SEQ ID NO: 14571 - RNA, 21 nt, Artificial Sequence
  LRRK2 RNA guide
agccaaucucaggaggaaucu

SEQ ID NO: 14572 - RNA, 21 nt, Artificial Sequence
  LRRK2 RNA guide
aggaggaaucuuuaugggaaa

SEQ ID NO: 14573 - RNA, 21 nt, Artificial Sequence
  LRRK2 RNA guide
auaaagauuccuccugagauu

SEQ ID NO: 14574 - RNA, 21 nt, Artificial Sequence
  LRRK2 RNA guide
aucucaggaggaaucuuuaug

SEQ ID NO: 14575 - RNA, 21 nt, Artificial Sequence
  LRRK2 RNA guide
caaucucaggaggaaucuuua

SEQ ID NO: 14576 - RNA, 21 nt, Artificial Sequence
  LRRK2 RNA guide
cagccaaucucaggaggaauc

SEQ ID NO: 14577 - RNA, 21 nt, Artificial Sequence
  LRRK2 RNA guide
caggaggaaucuuuaugggaa

SEQ ID NO: 14578 - RNA, 21 nt, Artificial Sequence
  LRRK2 RNA guide
cauaaagauuccuccugagau

SEQ ID NO: 14579 - RNA, 21 nt, Artificial Sequence
  LRRK2 RNA guide
ccaaucucaggaggaaucuuu

SEQ ID NO: 14580 - RNA, 21 nt, Artificial Sequence
  LRRK2 RNA guide
ccauaaagauuccuccugaga

SEQ ID NO: 14581 - RNA, 21 nt, Artificial Sequence
  LRRK2 RNA guide
cccauaaagauuccuccugag

SEQ ID NO: 14582 - RNA, 21 nt, Artificial Sequence
  LRRK2 RNA guide
cucaggaggaaucuuuauggg

SEQ ID NO: 14583 - RNA, 21 nt, Artificial Sequence
  LRRK2 RNA guide
gacagccaaucucaggaggaa

SEQ ID NO: 14584 - RNA, 21 nt, Artificial Sequence
  LRRK2 RNA guide
gaggaaucuuuaugggaaaaa

SEQ ID NO: 14585 - RNA, 21 nt, Artificial Sequence
  LRRK2 RNA guide
gccaaucucaggaggaaucuu

SEQ ID NO: 14586 - RNA, 21 nt, Artificial Sequence
  LRRK2 RNA guide
ggaggaaucuuuaugggaaaa

SEQ ID NO: 14587 - RNA, 21 nt, Artificial Sequence
  LRRK2 RNA guide
uaaagauuccuccugagauug

SEQ ID NO: 14588 - RNA, 21 nt, Artificial Sequence
  LRRK2 RNA guide
ucaggaggaaucuuuauggga

SEQ ID NO: 14589 - RNA, 21 nt, Artificial Sequence
  LRRK2 RNA guide
ucccauaaagauuccuccuga

SEQ ID NO: 14590 - RNA, 21 nt, Artificial Sequence
  LRRK2 RNA guide
ucucaggaggaaucuuuaugg

SEQ ID NO: 14591 - RNA, 21 nt, Artificial Sequence
  LRRK2 RNA guide
uucccauaaagauuccuccug

SEQ ID NO: 14592 - RNA, 21 nt, Artificial Sequence
  LRRK2 RNA guide
uuucccauaaagauuccuccu

SEQ ID NO: 14593 - RNA, 21 nt, Artificial Sequence
  LRRK2 RNA guide
uuuucccauaaagauuccucc

SEQ ID NO: 14594 - RNA, 21 nt, Artificial Sequence
  LRRK2 RNA guide
uuuuucccauaaagauuccuc

SEQ ID NO: 14595 - RNA, 22 nt, Artificial Sequence
  LRRK2 RNA guide
aaucucaggaggaaucuuuaug

SEQ ID NO: 14596 - RNA, 22 nt, Artificial Sequence
  LRRK2 RNA guide
acagccaaucucaggaggaauc

SEQ ID NO: 14597 - RNA, 22 nt, Artificial Sequence
  LRRK2 RNA guide
agacagccaaucucaggaggaa

SEQ ID NO: 14598 - RNA, 22 nt, Artificial Sequence
  LRRK2 RNA guide
agccaaucucaggaggaaucuu

SEQ ID NO: 14599 - RNA, 22 nt, Artificial Sequence
  LRRK2 RNA guide
aggaggaaucuuuaugggaaaa

SEQ ID NO: 14600 - RNA, 22 nt, Artificial Sequence
  LRRK2 RNA guide
auaaagauuccuccugagauug

SEQ ID NO: 14601 - RNA, 22 nt, Artificial Sequence
  LRRK2 RNA guide
aucucaggaggaaucuuuaugg

SEQ ID NO: 14602 - RNA, 22 nt, Artificial Sequence
  LRRK2 RNA guide
caaucucaggaggaaucuuuau

SEQ ID NO: 14603 - RNA, 22 nt, Artificial Sequence
  LRRK2 RNA guide
cagccaaucucaggaggaaucu

SEQ ID NO: 14604 - RNA, 22 nt, Artificial Sequence
  LRRK2 RNA guide
caggaggaaucuuuaugggaaa

SEQ ID NO: 14605 - RNA, 22 nt, Artificial Sequence
  LRRK2 RNA guide
cauaaagauuccuccugagauu

SEQ ID NO: 14606 - RNA, 22 nt, Artificial Sequence
  LRRK2 RNA guide
ccaaucucaggaggaaucuuua

SEQ ID NO: 14607 - RNA, 22 nt, Artificial Sequence
  LRRK2 RNA guide
ccauaaagauuccuccugagau

SEQ ID NO: 14608 - RNA, 22 nt, Artificial Sequence
  LRRK2 RNA guide
cccauaaagauuccuccugaga

SEQ ID NO: 14609 - RNA, 22 nt, Artificial Sequence
  LRRK2 RNA guide
cucaggaggaaucuuuauggga

SEQ ID NO: 14610 - RNA, 22 nt, Artificial Sequence
  LRRK2 RNA guide
gacagccaaucucaggaggaau

SEQ ID NO: 14611 - RNA, 22 nt, Artificial Sequence
  LRRK2 RNA guide
gaggaaucuuuaugggaaaaaa

SEQ ID NO: 14612 - RNA, 22 nt, Artificial Sequence
  LRRK2 RNA guide
gccaaucucaggaggaaucuuu

SEQ ID NO: 14613 - RNA, 22 nt, Artificial Sequence
  LRRK2 RNA guide
ggaggaaucuuuaugggaaaaa

SEQ ID NO: 14614 - RNA, 22 nt, Artificial Sequence
  LRRK2 RNA guide
uaaagauuccuccugagauugg

SEQ ID NO: 14615 - RNA, 22 nt, Artificial Sequence
  LRRK2 RNA guide
ucaggaggaaucuuuaugggaa

SEQ ID NO: 14616 - RNA, 22 nt, Artificial Sequence
  LRRK2 RNA guide
ucccauaaagauuccuccugag

SEQ ID NO: 14617 - RNA, 22 nt, Artificial Sequence
  LRRK2 RNA guide
ucucaggaggaaucuuuauggg

SEQ ID NO: 14618 - RNA, 22 nt, Artificial Sequence
  LRRK2 RNA guide
uucccauaaagauuccuccuga

SEQ ID NO: 14619 - RNA, 22 nt, Artificial Sequence
  LRRK2 RNA guide
uuucccauaaagauuccuccug

SEQ ID NO: 14620 - RNA, 22 nt, Artificial Sequence
  LRRK2 RNA guide
uuuucccauaaagauuccuccu

SEQ ID NO: 14621 - RNA, 22 nt, Artificial Sequence
  LRRK2 RNA guide
uuuuucccauaaagauuccucc

SEQ ID NO: 14622 - RNA, 22 nt, Artificial Sequence
  LRRK2 RNA guide
uuuuuucccauaaagauuccuc

SEQ ID NO: 14623 - RNA, 20 nt, Artificial Sequence
  LRRK2 RNA guide
aagacagccaaucucagcag

SEQ ID NO: 14624 - RNA, 20 nt, Artificial Sequence
  LRRK2 RNA guide
aagauuccugcugagauugg

SEQ ID NO: 14625 - RNA, 20 nt, Artificial Sequence
  LRRK2 RNA guide
aaucucagcaggaaucuuaa

SEQ ID NO: 14626 - RNA, 20 nt, Artificial Sequence
  LRRK2 RNA guide
acagccaaucucagcaggaa

SEQ ID NO: 14627 - RNA, 20 nt, Artificial Sequence
  LRRK2 RNA guide
agacagccaaucucagcagg

SEQ ID NO: 14628 - RNA, 20 nt, Artificial Sequence
  LRRK2 RNA guide
agauuccugcugagauuggc

SEQ ID NO: 14629 - RNA, 20 nt, Artificial Sequence
  LRRK2 RNA guide
agcaggaaucuuaaugggaa

SEQ ID NO: 14630 - RNA, 20 nt, Artificial Sequence
  LRRK2 RNA guide
agccaaucucagcaggaauc

SEQ ID NO: 14631 - RNA, 20 nt, Artificial Sequence
  LRRK2 RNA guide
aucucagcaggaaucuuaau

SEQ ID NO: 14632 - RNA, 20 nt, Artificial Sequence
  LRRK2 RNA guide
auuaagauuccugcugagau

SEQ ID NO: 14633 - RNA, 20 nt, Artificial Sequence
  LRRK2 RNA guide
auuccugcugagauuggcug

SEQ ID NO: 14634 - RNA, 20 nt, Artificial Sequence
  LRRK2 RNA guide
caagacagccaaucucagca

SEQ ID NO: 14635 - RNA, 20 nt, Artificial Sequence
  LRRK2 RNA guide
caaucucagcaggaaucuua

SEQ ID NO: 14636 - RNA, 20 nt, Artificial Sequence
  LRRK2 RNA guide
cagcaggaaucuuaauggga

SEQ ID NO: 14637 - RNA, 20 nt, Artificial Sequence
  LRRK2 RNA guide
cagccaaucucagcaggaau

SEQ ID NO: 14638 - RNA, 20 nt, Artificial Sequence
  LRRK2 RNA guide
cauuaagauuccugcugaga

SEQ ID NO: 14639 - RNA, 20 nt, Artificial Sequence
  LRRK2 RNA guide
ccaaucucagcaggaaucuu

SEQ ID NO: 14640 - RNA, 20 nt, Artificial Sequence
  LRRK2 RNA guide
ccauuaagauuccugcugag

SEQ ID NO: 14641 - RNA, 20 nt, Artificial Sequence
  LRRK2 RNA guide
cccauuaagauuccugcuga

SEQ ID NO: 14642 - RNA, 20 nt, Artificial Sequence
  LRRK2 RNA guide
ccugcugagauuggcugucu

SEQ ID NO: 14643 - RNA, 20 nt, Artificial Sequence
  LRRK2 RNA guide
cucagcaggaaucuuaaugg

SEQ ID NO: 14644 - RNA, 20 nt, Artificial Sequence
  LRRK2 RNA guide
cugcugagauuggcugucuu

SEQ ID NO: 14645 - RNA, 20 nt, Artificial Sequence
  LRRK2 RNA guide
gacagccaaucucagcagga

SEQ ID NO: 14646 - RNA, 20 nt, Artificial Sequence
  LRRK2 RNA guide
gauuccugcugagauuggcu

SEQ ID NO: 14647 - RNA, 20 nt, Artificial Sequence
  LRRK2 RNA guide
gauuuucaagacagccaauc

SEQ ID NO: 14648 - RNA, 20 nt, Artificial Sequence
  LRRK2 RNA guide
gcaggaaucuuaaugggaaa

SEQ ID NO: 14649 - RNA, 20 nt, Artificial Sequence
  LRRK2 RNA guide
gccaaucucagcaggaaucu

SEQ ID NO: 14650 - RNA, 20 nt, Artificial Sequence
  LRRK2 RNA guide
uaagauuccugcugagauug

SEQ ID NO: 14651 - RNA, 20 nt, Artificial Sequence
  LRRK2 RNA guide
ucaagacagccaaucucagc

SEQ ID NO: 14652 - RNA, 20 nt, Artificial Sequence
  LRRK2 RNA guide
ucagcaggaaucuuaauggg

SEQ ID NO: 14653 - RNA, 20 nt, Artificial Sequence
  LRRK2 RNA guide
ucccauuaagauuccugcug

SEQ ID NO: 14654 - RNA, 20 nt, Artificial Sequence
  LRRK2 RNA guide
uccugcugagauuggcuguc

SEQ ID NO: 14655 - RNA, 20 nt, Artificial Sequence
  LRRK2 RNA guide
ucucagcaggaaucuuaaug

SEQ ID NO: 14656 - RNA, 20 nt, Artificial Sequence
  LRRK2 RNA guide
ugcugagauuggcugucuug

SEQ ID NO: 14657 - RNA, 20 nt, Artificial Sequence
  LRRK2 RNA guide
uuaagauuccugcugagauu

SEQ ID NO: 14658 - RNA, 20 nt, Artificial Sequence
  LRRK2 RNA guide
uucaagacagccaaucucag

SEQ ID NO: 14659 - RNA, 20 nt, Artificial Sequence
  LRRK2 RNA guide
uucccauuaagauuccugcu

SEQ ID NO: 14660 - RNA, 20 nt, Artificial Sequence
  LRRK2 RNA guide
uuccugcugagauuggcugu

SEQ ID NO: 14661 - RNA, 20 nt, Artificial Sequence
  LRRK2 RNA guide
uuucaagacagccaaucuca

SEQ ID NO: 14662 - RNA, 20 nt, Artificial Sequence
  LRRK2 RNA guide
uuucccauuaagauuccugc

SEQ ID NO: 14663 - RNA, 20 nt, Artificial Sequence
  LRRK2 RNA guide
uuuucaagacagccaaucuc

SEQ ID NO: 14664 - RNA, 20 nt, Artificial Sequence
  LRRK2 RNA guide
uuuucccauuaagauuccug

SEQ ID NO: 14665 - RNA, 20 nt, Artificial Sequence
  LRRK2 RNA guide
uuuuucccauuaagauuccu

SEQ ID NO: 14666 - RNA, 20 nt, Artificial Sequence
  LRRK2 RNA guide
uuuuuucccauuaagauucc

SEQ ID NO: 14667 - RNA, 21 nt, Artificial Sequence
  LRRK2 RNA guide
aagacagccaaucucagcagg

SEQ ID NO: 14668 - RNA, 21 nt, Artificial Sequence
  LRRK2 RNA guide
aagauuccugcugagauuggc

SEQ ID NO: 14669 - RNA, 21 nt, Artificial Sequence
  LRRK2 RNA guide
aaucucagcaggaaucuuaau

SEQ ID NO: 14670 - RNA, 21 nt, Artificial Sequence
  LRRK2 RNA guide
acagccaaucucagcaggaau

SEQ ID NO: 14671 - RNA, 21 nt, Artificial Sequence
  LRRK2 RNA guide
agacagccaaucucagcagga

SEQ ID NO: 14672 - RNA, 21 nt, Artificial Sequence
  LRRK2 RNA guide
agauuccugcugagauuggcu

SEQ ID NO: 14673 - RNA, 21 nt, Artificial Sequence
  LRRK2 RNA guide
agauuuucaagacagccaauc

SEQ ID NO: 14674 - RNA, 21 nt, Artificial Sequence
  LRRK2 RNA guide
agcaggaaucuuaaugggaaa

SEQ ID NO: 14675 - RNA, 21 nt, Artificial Sequence
  LRRK2 RNA guide
agccaaucucagcaggaaucu

SEQ ID NO: 14676 - RNA, 21 nt, Artificial Sequence
  LRRK2 RNA guide
aucucagcaggaaucuuaaug

SEQ ID NO: 14677 - RNA, 21 nt, Artificial Sequence
  LRRK2 RNA guide
auuaagauuccugcugagauu

SEQ ID NO: 14678 - RNA, 21 nt, Artificial Sequence
  LRRK2 RNA guide
auuccugcugagauuggcugu

SEQ ID NO: 14679 - RNA, 21 nt, Artificial Sequence
  LRRK2 RNA guide
auuuucaagacagccaaucuc

SEQ ID NO: 14680 - RNA, 21 nt, Artificial Sequence
  LRRK2 RNA guide
caagacagccaaucucagcag

SEQ ID NO: 14681 - RNA, 21 nt, Artificial Sequence
  LRRK2 RNA guide
caaucucagcaggaaucuuaa

SEQ ID NO: 14682 - RNA, 21 nt, Artificial Sequence
  LRRK2 RNA guide
cagcaggaaucuuaaugggaa

SEQ ID NO: 14683 - RNA, 21 nt, Artificial Sequence
  LRRK2 RNA guide
cagccaaucucagcaggaauc

SEQ ID NO: 14684 - RNA, 21 nt, Artificial Sequence
  LRRK2 RNA guide
cauuaagauuccugcugagau

SEQ ID NO: 14685 - RNA, 21 nt, Artificial Sequence
  LRRK2 RNA guide
ccaaucucagcaggaaucuua

SEQ ID NO: 14686 - RNA, 21 nt, Artificial Sequence
  LRRK2 RNA guide
ccauuaagauuccugcugaga

SEQ ID NO: 14687 - RNA, 21 nt, Artificial Sequence
  LRRK2 RNA guide
cccauuaagauuccugcugag

SEQ ID NO: 14688 - RNA, 21 nt, Artificial Sequence
  LRRK2 RNA guide
ccugcugagauuggcugucuu

SEQ ID NO: 14689 - RNA, 21 nt, Artificial Sequence
  LRRK2 RNA guide
cucagcaggaaucuuaauggg

SEQ ID NO: 14690 - RNA, 21 nt, Artificial Sequence
  LRRK2 RNA guide
cugcugagauuggcugucuug

SEQ ID NO: 14691 - RNA, 21 nt, Artificial Sequence
  LRRK2 RNA guide
gacagccaaucucagcaggaa

SEQ ID NO: 14692 - RNA, 21 nt, Artificial Sequence
  LRRK2 RNA guide
gauuccugcugagauuggcug

SEQ ID NO: 14693 - RNA, 21 nt, Artificial Sequence
  LRRK2 RNA guide
gauuuucaagacagccaaucu

SEQ ID NO: 14694 - RNA, 21 nt, Artificial Sequence
  LRRK2 RNA guide
gcaggaaucuuaaugggaaaa

SEQ ID NO: 14695 - RNA, 21 nt, Artificial Sequence
  LRRK2 RNA guide
gccaaucucagcaggaaucuu

SEQ ID NO: 14696 - RNA, 21 nt, Artificial Sequence
  LRRK2 RNA guide
uaagauuccugcugagauugg

SEQ ID NO: 14697 - RNA, 21 nt, Artificial Sequence
  LRRK2 RNA guide
ucaagacagccaaucucagca

SEQ ID NO: 14698 - RNA, 21 nt, Artificial Sequence
  LRRK2 RNA guide
ucagcaggaaucuuaauggga

SEQ ID NO: 14699 - RNA, 21 nt, Artificial Sequence
  LRRK2 RNA guide
ucccauuaagauuccugcuga

SEQ ID NO: 14700 - RNA, 21 nt, Artificial Sequence
  LRRK2 RNA guide
uccugcugagauuggcugucu

SEQ ID NO: 14701 - RNA, 21 nt, Artificial Sequence
  LRRK2 RNA guide
ucucagcaggaaucuuaaugg

SEQ ID NO: 14702 - RNA, 21 nt, Artificial Sequence
  LRRK2 RNA guide
ugcugagauuggcugucuuga

SEQ ID NO: 14703 - RNA, 21 nt, Artificial Sequence
  LRRK2 RNA guide
uuaagauuccugcugagauug

SEQ ID NO: 14704 - RNA, 21 nt, Artificial Sequence
  LRRK2 RNA guide
uucaagacagccaaucucagc

SEQ ID NO: 14705 - RNA, 21 nt, Artificial Sequence
  LRRK2 RNA guide
uucccauuaagauuccugcug

SEQ ID NO: 14706 - RNA, 21 nt, Artificial Sequence
  LRRK2 RNA guide
uuccugcugagauuggcuguc

SEQ ID NO: 14707 - RNA, 21 nt, Artificial Sequence
  LRRK2 RNA guide
uuucaagacagccaaucucag

SEQ ID NO: 14708 - RNA, 21 nt, Artificial Sequence
  LRRK2 RNA guide
uuucccauuaagauuccugcu

SEQ ID NO: 14709 - RNA, 21 nt, Artificial Sequence
  LRRK2 RNA guide
uuuucaagacagccaaucuca

SEQ ID NO: 14710 - RNA, 21 nt, Artificial Sequence
  LRRK2 RNA guide
uuuucccauuaagauuccugc

SEQ ID NO: 14711 - RNA, 21 nt, Artificial Sequence
  LRRK2 RNA guide
uuuuucccauuaagauuccug

SEQ ID NO: 14712 - RNA, 22 nt, Artificial Sequence
  LRRK2 RNA guide
aagacagccaaucucagcagga

SEQ ID NO: 14713 - RNA, 22 nt, Artificial Sequence
  LRRK2 RNA guide
aagauuccugcugagauuggcu

SEQ ID NO: 14714 - RNA, 22 nt, Artificial Sequence
  LRRK2 RNA guide
aaucucagcaggaaucuuaaug

SEQ ID NO: 14715 - RNA, 22 nt, Artificial Sequence
  LRRK2 RNA guide
acagccaaucucagcaggaauc

SEQ ID NO: 14716 - RNA, 22 nt, Artificial Sequence
  LRRK2 RNA guide
agacagccaaucucagcaggaa

SEQ ID NO: 14717 - RNA, 22 nt, Artificial Sequence
  LRRK2 RNA guide
agauuccugcugagauuggcug

SEQ ID NO: 14718 - RNA, 22 nt, Artificial Sequence
  LRRK2 RNA guide
agauuuucaagacagccaaucu

SEQ ID NO: 14719 - RNA, 22 nt, Artificial Sequence
  LRRK2 RNA guide
agcaggaaucuuaaugggaaaa

SEQ ID NO: 14720 - RNA, 22 nt, Artificial Sequence
  LRRK2 RNA guide
agccaaucucagcaggaaucuu

SEQ ID NO: 14721 - RNA, 22 nt, Artificial Sequence
  LRRK2 RNA guide
aucucagcaggaaucuuaaugg

SEQ ID NO: 14722 - RNA, 22 nt, Artificial Sequence
  LRRK2 RNA guide
auuaagauuccugcugagauug

SEQ ID NO: 14723 - RNA, 22 nt, Artificial Sequence
  LRRK2 RNA guide
auuccugcugagauuggcuguc

SEQ ID NO: 14724 - RNA, 22 nt, Artificial Sequence
  LRRK2 RNA guide
auuuucaagacagccaaucuca

SEQ ID NO: 14725 - RNA, 22 nt, Artificial Sequence
  LRRK2 RNA guide
caagacagccaaucucagcagg

SEQ ID NO: 14726 - RNA, 22 nt, Artificial Sequence
  LRRK2 RNA guide
caaucucagcaggaaucuuaau

SEQ ID NO: 14727 - RNA, 22 nt, Artificial Sequence
  LRRK2 RNA guide
cagauuuucaagacagccaauc

SEQ ID NO: 14728 - RNA, 22 nt, Artificial Sequence
  LRRK2 RNA guide
cagcaggaaucuuaaugggaaa

SEQ ID NO: 14729 - RNA, 22 nt, Artificial Sequence
  LRRK2 RNA guide
cagccaaucucagcaggaaucu

SEQ ID NO: 14730 - RNA, 22 nt, Artificial Sequence
  LRRK2 RNA guide
cauuaagauuccugcugagauu

SEQ ID NO: 14731 - RNA, 22 nt, Artificial Sequence
  LRRK2 RNA guide
ccaaucucagcaggaaucuuaa

SEQ ID NO: 14732 - RNA, 22 nt, Artificial Sequence
  LRRK2 RNA guide
ccauuaagauuccugcugagau

SEQ ID NO: 14733 - RNA, 22 nt, Artificial Sequence
  LRRK2 RNA guide
cccauuaagauuccugcugaga

SEQ ID NO: 14734 - RNA, 22 nt, Artificial Sequence
  LRRK2 RNA guide
ccugcugagauuggcugucuug

SEQ ID NO: 14735 - RNA, 22 nt, Artificial Sequence
  LRRK2 RNA guide
cucagcaggaaucuuaauggga

SEQ ID NO: 14736 - RNA, 22 nt, Artificial Sequence
  LRRK2 RNA guide
cugcugagauuggcugucuuga

SEQ ID NO: 14737 - RNA, 22 nt, Artificial Sequence
  LRRK2 RNA guide
gacagccaaucucagcaggaau

SEQ ID NO: 14738 - RNA, 22 nt, Artificial Sequence
  LRRK2 RNA guide
gauuccugcugagauuggcugu

SEQ ID NO: 14739 - RNA, 22 nt, Artificial Sequence
  LRRK2 RNA guide
gauuuucaagacagccaaucuc

SEQ ID NO: 14740 - RNA, 22 nt, Artificial Sequence
  LRRK2 RNA guide
gcaggaaucuuaaugggaaaaa

SEQ ID NO: 14741 - RNA, 22 nt, Artificial Sequence
  LRRK2 RNA guide
gccaaucucagcaggaaucuua

SEQ ID NO: 14742 - RNA, 22 nt, Artificial Sequence
  LRRK2 RNA guide
uaagauuccugcugagauuggc

SEQ ID NO: 14743 - RNA, 22 nt, Artificial Sequence
  LRRK2 RNA guide
ucaagacagccaaucucagcag

SEQ ID NO: 14744 - RNA, 22 nt, Artificial Sequence
  LRRK2 RNA guide
ucagcaggaaucuuaaugggaa

SEQ ID NO: 14745 - RNA, 22 nt, Artificial Sequence
  LRRK2 RNA guide
ucccauuaagauuccugcugag

SEQ ID NO: 14746 - RNA, 22 nt, Artificial Sequence
  LRRK2 RNA guide
uccugcugagauuggcugucuu

SEQ ID NO: 14747 - RNA, 22 nt, Artificial Sequence
  LRRK2 RNA guide
ucucagcaggaaucuuaauggg

SEQ ID NO: 14748 - RNA, 22 nt, Artificial Sequence
  LRRK2 RNA guide
ugcugagauuggcugucuugaa

SEQ ID NO: 14749 - RNA, 22 nt, Artificial Sequence
  LRRK2 RNA guide
uuaagauuccugcugagauugg

SEQ ID NO: 14750 - RNA, 22 nt, Artificial Sequence
  LRRK2 RNA guide
uucaagacagccaaucucagca

SEQ ID NO: 14751 - RNA, 22 nt, Artificial Sequence
  LRRK2 RNA guide
uucccauuaagauuccugcuga

SEQ ID NO: 14752 - RNA, 22 nt, Artificial Sequence
  LRRK2 RNA guide
uuccugcugagauuggcugucu

SEQ ID NO: 14753 - RNA, 22 nt, Artificial Sequence
  LRRK2 RNA guide
uuucaagacagccaaucucagc

SEQ ID NO: 14754 - RNA, 22 nt, Artificial Sequence
  LRRK2 RNA guide
uuucccauuaagauuccugcug

SEQ ID NO: 14755 - RNA, 22 nt, Artificial Sequence
  LRRK2 RNA guide
uuuucaagacagccaaucucag

SEQ ID NO: 14756 - RNA, 22 nt, Artificial Sequence
  LRRK2 RNA guide
uuuucccauuaagauuccugcu

SEQ ID NO: 14757 - RNA, 22 nt, Artificial Sequence
  LRRK2 RNA guide
uuuuucccauuaagauuccugc

SEQ ID NO: 14758 - RNA, 22 nt, Artificial Sequence
  LRRK2 RNA guide
uuuuuucccauuaagauuccug

SEQ ID NO: 14759 - RNA, 20 nt, Artificial Sequence
  LRRK2 RNA guide
aagauccuuucccaaugaaa

SEQ ID NO: 14760 - RNA, 20 nt, Artificial Sequence
  LRRK2 RNA guide
aauuucccuauuucauuggg

SEQ ID NO: 14761 - RNA, 20 nt, Artificial Sequence
  LRRK2 RNA guide
acuaagauccuuucccaaug

SEQ ID NO: 14762 - RNA, 20 nt, Artificial Sequence
  LRRK2 RNA guide
agauccuuucccaaugaaau

SEQ ID NO: 14763 - RNA, 20 nt, Artificial Sequence
  LRRK2 RNA guide
auccuuucccaaugaaauag

SEQ ID NO: 14764 - RNA, 20 nt, Artificial Sequence
  LRRK2 RNA guide
augaaauagggaaauuaagc

SEQ ID NO: 14765 - RNA, 20 nt, Artificial Sequence
  LRRK2 RNA guide
auuucccuauuucauuggga

SEQ ID NO: 14766 - RNA, 20 nt, Artificial Sequence
  LRRK2 RNA guide
cauauuuugcuuaauuuccc

SEQ ID NO: 14767 - RNA, 20 nt, Artificial Sequence
  LRRK2 RNA guide
ccaaugaaauagggaaauua

SEQ ID NO: 14768 - RNA, 20 nt, Artificial Sequence
  LRRK2 RNA guide
ccauauuuugcuuaauuucc

SEQ ID NO: 14769 - RNA, 20 nt, Artificial Sequence
  LRRK2 RNA guide
cccaaugaaauagggaaauu

SEQ ID NO: 14770 - RNA, 20 nt, Artificial Sequence
  LRRK2 RNA guide
cccuauuucauugggaaagg

SEQ ID NO: 14771 - RNA, 20 nt, Artificial Sequence
  LRRK2 RNA guide
ccuauuucauugggaaagga

SEQ ID NO: 14772 - RNA, 20 nt, Artificial Sequence
  LRRK2 RNA guide
ccuuucccaaugaaauaggg

SEQ ID NO: 14773 - RNA, 20 nt, Artificial Sequence
  LRRK2 RNA guide
cuaagauccuuucccaauga

SEQ ID NO: 14774 - RNA, 20 nt, Artificial Sequence
  LRRK2 RNA guide
cuauuucauugggaaaggau

SEQ ID NO: 14775 - RNA, 20 nt, Artificial Sequence
  LRRK2 RNA guide
cuuucccaaugaaauaggga

SEQ ID NO: 14776 - RNA, 20 nt, Artificial Sequence
  LRRK2 RNA guide
gaaauagggaaauuaagcaa

SEQ ID NO: 14777 - RNA, 20 nt, Artificial Sequence
  LRRK2 RNA guide
gauccuuucccaaugaaaua

SEQ ID NO: 14778 - RNA, 20 nt, Artificial Sequence
  LRRK2 RNA guide
gcuuaauuucccuauuucau

SEQ ID NO: 14779 - RNA, 20 nt, Artificial Sequence
  LRRK2 RNA guide
uaagauccuuucccaaugaa

SEQ ID NO: 14780 - RNA, 20 nt, Artificial Sequence
  LRRK2 RNA guide
uaauuucccuauuucauugg

SEQ ID NO: 14781 - RNA, 20 nt, Artificial Sequence
  LRRK2 RNA guide
ucccaaugaaauagggaaau

SEQ ID NO: 14782 - RNA, 20 nt, Artificial Sequence
  LRRK2 RNA guide
ucccuauuucauugggaaag

SEQ ID NO: 14783 - RNA, 20 nt, Artificial Sequence
  LRRK2 RNA guide
uccuuucccaaugaaauagg

SEQ ID NO: 14784 - RNA, 20 nt, Artificial Sequence
  LRRK2 RNA guide
ugaaauagggaaauuaagca

SEQ ID NO: 14785 - RNA, 20 nt, Artificial Sequence
  LRRK2 RNA guide
ugcuuaauuucccuauuuca

SEQ ID NO: 14786 - RNA, 20 nt, Artificial Sequence
  LRRK2 RNA guide
uucccaaugaaauagggaaa

SEQ ID NO: 14787 - RNA, 20 nt, Artificial Sequence
  LRRK2 RNA guide
uucccuauuucauugggaaa

SEQ ID NO: 14788 - RNA, 20 nt, Artificial Sequence
  LRRK2 RNA guide
uugcuuaauuucccuauuuc

SEQ ID NO: 14789 - RNA, 20 nt, Artificial Sequence
  LRRK2 RNA guide
uuucccaaugaaauagggaa

SEQ ID NO: 14790 - RNA, 20 nt, Artificial Sequence
  LRRK2 RNA guide
uuucccuauuucauugggaa

SEQ ID NO: 14791 - RNA, 21 nt, Artificial Sequence
  LRRK2 RNA guide
aacuaagauccuuucccaaug

SEQ ID NO: 14792 - RNA, 21 nt, Artificial Sequence
  LRRK2 RNA guide
aagauccuuucccaaugaaau

SEQ ID NO: 14793 - RNA, 21 nt, Artificial Sequence
  LRRK2 RNA guide
aauuucccuauuucauuggga

SEQ ID NO: 14794 - RNA, 21 nt, Artificial Sequence
  LRRK2 RNA guide
acuaagauccuuucccaauga

SEQ ID NO: 14795 - RNA, 21 nt, Artificial Sequence
  LRRK2 RNA guide
agauccuuucccaaugaaaua

SEQ ID NO: 14796 - RNA, 21 nt, Artificial Sequence
  LRRK2 RNA guide
auccuuucccaaugaaauagg

SEQ ID NO: 14797 - RNA, 21 nt, Artificial Sequence
  LRRK2 RNA guide
auuucccuauuucauugggaa

SEQ ID NO: 14798 - RNA, 21 nt, Artificial Sequence
  LRRK2 RNA guide
ccauauuuugcuuaauuuccc

SEQ ID NO: 14799 - RNA, 21 nt, Artificial Sequence
  LRRK2 RNA guide
cccaaugaaauagggaaauua

SEQ ID NO: 14800 - RNA, 21 nt, Artificial Sequence
  LRRK2 RNA guide
cccauauuuugcuuaauuucc

SEQ ID NO: 14801 - RNA, 21 nt, Artificial Sequence
  LRRK2 RNA guide
cccuauuucauugggaaagga

SEQ ID NO: 14802 - RNA, 21 nt, Artificial Sequence
  LRRK2 RNA guide
ccuauuucauugggaaaggau

SEQ ID NO: 14803 - RNA, 21 nt, Artificial Sequence
  LRRK2 RNA guide
ccuuucccaaugaaauaggga

SEQ ID NO: 14804 - RNA, 21 nt, Artificial Sequence
  LRRK2 RNA guide
cuaagauccuuucccaaugaa

SEQ ID NO: 14805 - RNA, 21 nt, Artificial Sequence
  LRRK2 RNA guide
cuauuucauugggaaaggauc

SEQ ID NO: 14806 - RNA, 21 nt, Artificial Sequence
  LRRK2 RNA guide
cuuucccaaugaaauagggaa

SEQ ID NO: 14807 - RNA, 21 nt, Artificial Sequence
  LRRK2 RNA guide
gauccuuucccaaugaaauag

SEQ ID NO: 14808 - RNA, 21 nt, Artificial Sequence
  LRRK2 RNA guide
uaagauccuuucccaaugaaa

SEQ ID NO: 14809 - RNA, 21 nt, Artificial Sequence
  LRRK2 RNA guide
uaauuucccuauuucauuggg

SEQ ID NO: 14810 - RNA, 21 nt, Artificial Sequence
  LRRK2 RNA guide
ucccaaugaaauagggaaauu

SEQ ID NO: 14811 - RNA, 21 nt, Artificial Sequence
  LRRK2 RNA guide
ucccuauuucauugggaaagg

SEQ ID NO: 14812 - RNA, 21 nt, Artificial Sequence
  LRRK2 RNA guide
uccuuucccaaugaaauaggg

SEQ ID NO: 14813 - RNA, 21 nt, Artificial Sequence
  LRRK2 RNA guide
uucccaaugaaauagggaaau

SEQ ID NO: 14814 - RNA, 21 nt, Artificial Sequence
  LRRK2 RNA guide
uucccuauuucauugggaaag

SEQ ID NO: 14815 - RNA, 21 nt, Artificial Sequence
  LRRK2 RNA guide
uuucccaaugaaauagggaaa

SEQ ID NO: 14816 - RNA, 21 nt, Artificial Sequence
  LRRK2 RNA guide
uuucccuauuucauugggaaa

SEQ ID NO: 14817 - RNA, 22 nt, Artificial Sequence
  LRRK2 RNA guide
aacuaagauccuuucccaauga

SEQ ID NO: 14818 - RNA, 22 nt, Artificial Sequence
  LRRK2 RNA guide
aagauccuuucccaaugaaaua

SEQ ID NO: 14819 - RNA, 22 nt, Artificial Sequence
  LRRK2 RNA guide
aauuucccuauuucauugggaa

SEQ ID NO: 14820 - RNA, 22 nt, Artificial Sequence
  LRRK2 RNA guide
acuaagauccuuucccaaugaa

SEQ ID NO: 14821 - RNA, 22 nt, Artificial Sequence
  LRRK2 RNA guide
agauccuuucccaaugaaauag

SEQ ID NO: 14822 - RNA, 22 nt, Artificial Sequence
  LRRK2 RNA guide
auccuuucccaaugaaauaggg

SEQ ID NO: 14823 - RNA, 22 nt, Artificial Sequence
  LRRK2 RNA guide
auuucccuauuucauugggaaa

SEQ ID NO: 14824 - RNA, 22 nt, Artificial Sequence
  LRRK2 RNA guide
caaugaaauagggaaauuaagc

SEQ ID NO: 14825 - RNA, 22 nt, Artificial Sequence
  LRRK2 RNA guide
ccaaugaaauagggaaauuaag

SEQ ID NO: 14826 - RNA, 22 nt, Artificial Sequence
  LRRK2 RNA guide
ccauauuuugcuuaauuucccu

SEQ ID NO: 14827 - RNA, 22 nt, Artificial Sequence
  LRRK2 RNA guide
cccaaugaaauagggaaauuaa

SEQ ID NO: 14828 - RNA, 22 nt, Artificial Sequence
  LRRK2 RNA guide
cccauauuuugcuuaauuuccc

SEQ ID NO: 14829 - RNA, 22 nt, Artificial Sequence
  LRRK2 RNA guide
cccuauuucauugggaaaggau

SEQ ID NO: 14830 - RNA, 22 nt, Artificial Sequence
  LRRK2 RNA guide
ccuauuucauugggaaaggauc

SEQ ID NO: 14831 - RNA, 22 nt, Artificial Sequence
  LRRK2 RNA guide
ccuuucccaaugaaauagggaa

SEQ ID NO: 14832 - RNA, 22 nt, Artificial Sequence
  LRRK2 RNA guide
cuaagauccuuucccaaugaaa

SEQ ID NO: 14833 - RNA, 22 nt, Artificial Sequence
  LRRK2 RNA guide
cuauuucauugggaaaggaucu

SEQ ID NO: 14834 - RNA, 22 nt, Artificial Sequence
  LRRK2 RNA guide
cuuaauuucccuauuucauugg

SEQ ID NO: 14835 - RNA, 22 nt, Artificial Sequence
  LRRK2 RNA guide
cuuucccaaugaaauagggaaa

SEQ ID NO: 14836 - RNA, 22 nt, Artificial Sequence
  LRRK2 RNA guide
gaacuaagauccuuucccaaug

SEQ ID NO: 14837 - RNA, 22 nt, Artificial Sequence
  LRRK2 RNA guide
gauccuuucccaaugaaauagg

SEQ ID NO: 14838 - RNA, 22 nt, Artificial Sequence
  LRRK2 RNA guide
gcuuaauuucccuauuucauug

SEQ ID NO: 14839 - RNA, 22 nt, Artificial Sequence
  LRRK2 RNA guide
uaagauccuuucccaaugaaau

SEQ ID NO: 14840 - RNA, 22 nt, Artificial Sequence
  LRRK2 RNA guide
uaauuucccuauuucauuggga

SEQ ID NO: 14841 - RNA, 22 nt, Artificial Sequence
  LRRK2 RNA guide
ucccaaugaaauagggaaauua

SEQ ID NO: 14842 - RNA, 22 nt, Artificial Sequence
  LRRK2 RNA guide
ucccauauuuugcuuaauuucc

SEQ ID NO: 14843 - RNA, 22 nt, Artificial Sequence
  LRRK2 RNA guide
ucccuauuucauugggaaagga

SEQ ID NO: 14844 - RNA, 22 nt, Artificial Sequence
  LRRK2 RNA guide
uccuuucccaaugaaauaggga

SEQ ID NO: 14845 - RNA, 22 nt, Artificial Sequence
  LRRK2 RNA guide
uuaauuucccuauuucauuggg

SEQ ID NO: 14846 - RNA, 22 nt, Artificial Sequence
  LRRK2 RNA guide
uucccaaugaaauagggaaauu

SEQ ID NO: 14847 - RNA, 22 nt, Artificial Sequence
  LRRK2 RNA guide
uucccuauuucauugggaaagg

SEQ ID NO: 14848 - RNA, 22 nt, Artificial Sequence
  LRRK2 RNA guide
uuucccaaugaaauagggaaau

SEQ ID NO: 14849 - RNA, 22 nt, Artificial Sequence
  LRRK2 RNA guide
uuucccuauuucauugggaaag

SEQ ID NO: 14850 - RNA, 20 nt, Artificial Sequence
  LRRK2 RNA guide
aacauauagaauguaaagcc

SEQ ID NO: 14851 - RNA, 20 nt, Artificial Sequence
  LRRK2 RNA guide
acauauagaauguaaagcca

SEQ ID NO: 14852 - RNA, 20 nt, Artificial Sequence
  LRRK2 RNA guide
agaauguaaagccaaagaca

SEQ ID NO: 14853 - RNA, 20 nt, Artificial Sequence
  LRRK2 RNA guide
auagaauguaaagccaaaga

SEQ ID NO: 14854 - RNA, 20 nt, Artificial Sequence
  LRRK2 RNA guide
augaugucuuuggcuuuaca

SEQ ID NO: 14855 - RNA, 20 nt, Artificial Sequence
  LRRK2 RNA guide
augucuuuggcuuuacauuc

SEQ ID NO: 14856 - RNA, 20 nt, Artificial Sequence
  LRRK2 RNA guide
cauauagaauguaaagccaa

SEQ ID NO: 14857 - RNA, 20 nt, Artificial Sequence
  LRRK2 RNA guide
cuuuggcuuuacauucuaua

SEQ ID NO: 14858 - RNA, 20 nt, Artificial Sequence
  LRRK2 RNA guide
gaauguaaagccaaagacau

SEQ ID NO: 14859 - RNA, 20 nt, Artificial Sequence
  LRRK2 RNA guide
gaugucuuuggcuuuacauu

SEQ ID NO: 14860 - RNA, 20 nt, Artificial Sequence
  LRRK2 RNA guide
ggcuuuacauucuauauguu

SEQ ID NO: 14861 - RNA, 20 nt, Artificial Sequence
  LRRK2 RNA guide
gucuuuggcuuuacauucua

SEQ ID NO: 14862 - RNA, 20 nt, Artificial Sequence
  LRRK2 RNA guide
uagaauguaaagccaaagac

SEQ ID NO: 14863 - RNA, 20 nt, Artificial Sequence
  LRRK2 RNA guide
uauagaauguaaagccaaag

SEQ ID NO: 14864 - RNA, 20 nt, Artificial Sequence
  LRRK2 RNA guide
ucuuuggcuuuacauucuau

SEQ ID NO: 14865 - RNA, 20 nt, Artificial Sequence
  LRRK2 RNA guide
ugaugucuuuggcuuuacau

SEQ ID NO: 14866 - RNA, 20 nt, Artificial Sequence
  LRRK2 RNA guide
uggcuuuacauucuauaugu

SEQ ID NO: 14867 - RNA, 20 nt, Artificial Sequence
  LRRK2 RNA guide
ugucuuuggcuuuacauucu

SEQ ID NO: 14868 - RNA, 20 nt, Artificial Sequence
  LRRK2 RNA guide
uuggcuuuacauucuauaug

SEQ ID NO: 14869 - RNA, 21 nt, Artificial Sequence
  LRRK2 RNA guide
agaauguaaagccaaagacau

SEQ ID NO: 14870 - RNA, 21 nt, Artificial Sequence
  LRRK2 RNA guide
auagaauguaaagccaaagac

SEQ ID NO: 14871 - RNA, 21 nt, Artificial Sequence
  LRRK2 RNA guide
augaugucuuuggcuuuacau

SEQ ID NO: 14872 - RNA, 21 nt, Artificial Sequence
  LRRK2 RNA guide
augucuuuggcuuuacauucu

SEQ ID NO: 14873 - RNA, 21 nt, Artificial Sequence
  LRRK2 RNA guide
ccuuaugaugucuuuggcuuu

SEQ ID NO: 14874 - RNA, 21 nt, Artificial Sequence
  LRRK2 RNA guide
cuuaugaugucuuuggcuuua

SEQ ID NO: 14875 - RNA, 21 nt, Artificial Sequence
  LRRK2 RNA guide
gaauguaaagccaaagacauc

SEQ ID NO: 14876 - RNA, 21 nt, Artificial Sequence
  LRRK2 RNA guide
gaugucuuuggcuuuacauuc

SEQ ID NO: 14877 - RNA, 21 nt, Artificial Sequence
  LRRK2 RNA guide
gucuuuggcuuuacauucuau

SEQ ID NO: 14878 - RNA, 21 nt, Artificial Sequence
  LRRK2 RNA guide
uagaauguaaagccaaagaca

SEQ ID NO: 14879 - RNA, 21 nt, Artificial Sequence
  LRRK2 RNA guide
uaugaugucuuuggcuuuaca

SEQ ID NO: 14880 - RNA, 21 nt, Artificial Sequence
  LRRK2 RNA guide
ugaugucuuuggcuuuacauu

SEQ ID NO: 14881 - RNA, 21 nt, Artificial Sequence
  LRRK2 RNA guide
ugucuuuggcuuuacauucua

SEQ ID NO: 14882 - RNA, 21 nt, Artificial Sequence
  LRRK2 RNA guide
uuaugaugucuuuggcuuuac

SEQ ID NO: 14883 - RNA, 22 nt, Artificial Sequence
  LRRK2 RNA guide
accuuaugaugucuuuggcuuu

SEQ ID NO: 14884 - RNA, 22 nt, Artificial Sequence
  LRRK2 RNA guide
agaauguaaagccaaagacauc

SEQ ID NO: 14885 - RNA, 22 nt, Artificial Sequence
  LRRK2 RNA guide
auagaauguaaagccaaagaca

SEQ ID NO: 14886 - RNA, 22 nt, Artificial Sequence
  LRRK2 RNA guide
augaugucuuuggcuuuacauu

SEQ ID NO: 14887 - RNA, 22 nt, Artificial Sequence
  LRRK2 RNA guide
augucuuuggcuuuacauucua

SEQ ID NO: 14888 - RNA, 22 nt, Artificial Sequence
  LRRK2 RNA guide
cauauagaauguaaagccaaag

SEQ ID NO: 14889 - RNA, 22 nt, Artificial Sequence
  LRRK2 RNA guide
ccuuaugaugucuuuggcuuua

SEQ ID NO: 14890 - RNA, 22 nt, Artificial Sequence
  LRRK2 RNA guide
cuuaugaugucuuuggcuuuac

SEQ ID NO: 14891 - RNA, 22 nt, Artificial Sequence
  LRRK2 RNA guide
cuuuggcuuuacauucuauaug

SEQ ID NO: 14892 - RNA, 22 nt, Artificial Sequence
  LRRK2 RNA guide
gaauguaaagccaaagacauca

SEQ ID NO: 14893 - RNA, 22 nt, Artificial Sequence
  LRRK2 RNA guide
gaugucuuuggcuuuacauucu

SEQ ID NO: 14894 - RNA, 22 nt, Artificial Sequence
  LRRK2 RNA guide
gucuuuggcuuuacauucuaua

SEQ ID NO: 14895 - RNA, 22 nt, Artificial Sequence
  LRRK2 RNA guide
uagaauguaaagccaaagacau

SEQ ID NO: 14896 - RNA, 22 nt, Artificial Sequence
  LRRK2 RNA guide
uauagaauguaaagccaaagac

SEQ ID NO: 14897 - RNA, 22 nt, Artificial Sequence
  LRRK2 RNA guide
uaugaugucuuuggcuuuacau

SEQ ID NO: 14898 - RNA, 22 nt, Artificial Sequence
  LRRK2 RNA guide
ugaugucuuuggcuuuacauuc

SEQ ID NO: 14899 - RNA, 22 nt, Artificial Sequence
  LRRK2 RNA guide
ugucuuuggcuuuacauucuau

SEQ ID NO: 14900 - RNA, 22 nt, Artificial Sequence
  LRRK2 RNA guide
uuaugaugucuuuggcuuuaca

SEQ ID NO: 14901 - RNA, 20 nt, Artificial Sequence
  LRRK2 RNA guide
aaacauauaggaugaaaagc

SEQ ID NO: 14902 - RNA, 20 nt, Artificial Sequence
  LRRK2 RNA guide
aacauauaggaugaaaagcc

SEQ ID NO: 14903 - RNA, 20 nt, Artificial Sequence
  LRRK2 RNA guide
acauauaggaugaaaagcca

SEQ ID NO: 14904 - RNA, 20 nt, Artificial Sequence
  LRRK2 RNA guide
aggaugaaaagccaaagaca

SEQ ID NO: 14905 - RNA, 20 nt, Artificial Sequence
  LRRK2 RNA guide
auaggaugaaaagccaaaga

SEQ ID NO: 14906 - RNA, 20 nt, Artificial Sequence
  LRRK2 RNA guide
auauaggaugaaaagccaaa

SEQ ID NO: 14907 - RNA, 20 nt, Artificial Sequence
  LRRK2 RNA guide
augaaaagccaaagacauca

SEQ ID NO: 14908 - RNA, 20 nt, Artificial Sequence
  LRRK2 RNA guide
augaugucuuuggcuuuuca

SEQ ID NO: 14909 - RNA, 20 nt, Artificial Sequence
  LRRK2 RNA guide
augucuuuggcuuuucaucc

SEQ ID NO: 14910 - RNA, 20 nt, Artificial Sequence
  LRRK2 RNA guide
cauauaggaugaaaagccaa

SEQ ID NO: 14911 - RNA, 20 nt, Artificial Sequence
  LRRK2 RNA guide
cuuuggcuuuucauccuaua

SEQ ID NO: 14912 - RNA, 20 nt, Artificial Sequence
  LRRK2 RNA guide
gaaaagccaaagacaucaua

SEQ ID NO: 14913 - RNA, 20 nt, Artificial Sequence
  LRRK2 RNA guide
gaugaaaagccaaagacauc

SEQ ID NO: 14914 - RNA, 20 nt, Artificial Sequence
  LRRK2 RNA guide
gaugucuuuggcuuuucauc

SEQ ID NO: 14915 - RNA, 20 nt, Artificial Sequence
  LRRK2 RNA guide
gcuuuucauccuauauguuu

SEQ ID NO: 14916 - RNA, 20 nt, Artificial Sequence
  LRRK2 RNA guide
ggaugaaaagccaaagacau

SEQ ID NO: 14917 - RNA, 20 nt, Artificial Sequence
  LRRK2 RNA guide
ggcuuuucauccuauauguu

SEQ ID NO: 14918 - RNA, 20 nt, Artificial Sequence
  LRRK2 RNA guide
gucuuuggcuuuucauccua

SEQ ID NO: 14919 - RNA, 20 nt, Artificial Sequence
  LRRK2 RNA guide
uaaccuuaugaugucuuugg

SEQ ID NO: 14920 - RNA, 20 nt, Artificial Sequence
  LRRK2 RNA guide
uaggaugaaaagccaaagac

SEQ ID NO: 14921 - RNA, 20 nt, Artificial Sequence
  LRRK2 RNA guide
uauaggaugaaaagccaaag

SEQ ID NO: 14922 - RNA, 20 nt, Artificial Sequence
  LRRK2 RNA guide
uaugaugucuuuggcuuuuc

SEQ ID NO: 14923 - RNA, 20 nt, Artificial Sequence
  LRRK2 RNA guide
ucuuuggcuuuucauccuau

SEQ ID NO: 14924 - RNA, 20 nt, Artificial Sequence
  LRRK2 RNA guide
ugaaaagccaaagacaucau

SEQ ID NO: 14925 - RNA, 20 nt, Artificial Sequence
  LRRK2 RNA guide
ugaugucuuuggcuuuucau

SEQ ID NO: 14926 - RNA, 20 nt, Artificial Sequence
  LRRK2 RNA guide
uggcuuuucauccuauaugu

SEQ ID NO: 14927 - RNA, 20 nt, Artificial Sequence
  LRRK2 RNA guide
ugucuuuggcuuuucauccu

SEQ ID NO: 14928 - RNA, 20 nt, Artificial Sequence
  LRRK2 RNA guide
uuaugaugucuuuggcuuuu

SEQ ID NO: 14929 - RNA, 20 nt, Artificial Sequence
  LRRK2 RNA guide
uuggcuuuucauccuauaug

SEQ ID NO: 14930 - RNA, 20 nt, Artificial Sequence
  LRRK2 RNA guide
uuuggcuuuucauccuauau

SEQ ID NO: 14931 - RNA, 21 nt, Artificial Sequence
  LRRK2 RNA guide
aaacauauaggaugaaaagcc

SEQ ID NO: 14932 - RNA, 21 nt, Artificial Sequence
  LRRK2 RNA guide
aacauauaggaugaaaagcca

SEQ ID NO: 14933 - RNA, 21 nt, Artificial Sequence
  LRRK2 RNA guide
aaccuuaugaugucuuuggcu

SEQ ID NO: 14934 - RNA, 21 nt, Artificial Sequence
  LRRK2 RNA guide
acauauaggaugaaaagccaa

SEQ ID NO: 14935 - RNA, 21 nt, Artificial Sequence
  LRRK2 RNA guide
accuuaugaugucuuuggcuu

SEQ ID NO: 14936 - RNA, 21 nt, Artificial Sequence
  LRRK2 RNA guide
aggaugaaaagccaaagacau

SEQ ID NO: 14937 - RNA, 21 nt, Artificial Sequence
  LRRK2 RNA guide
auaggaugaaaagccaaagac

SEQ ID NO: 14938 - RNA, 21 nt, Artificial Sequence
  LRRK2 RNA guide
auauaggaugaaaagccaaag

SEQ ID NO: 14939 - RNA, 21 nt, Artificial Sequence
  LRRK2 RNA guide
augaaaagccaaagacaucau

SEQ ID NO: 14940 - RNA, 21 nt, Artificial Sequence
  LRRK2 RNA guide
augaugucuuuggcuuuucau

SEQ ID NO: 14941 - RNA, 21 nt, Artificial Sequence
  LRRK2 RNA guide
augucuuuggcuuuucauccu

SEQ ID NO: 14942 - RNA, 21 nt, Artificial Sequence
  LRRK2 RNA guide
cauauaggaugaaaagccaaa

SEQ ID NO: 14943 - RNA, 21 nt, Artificial Sequence
  LRRK2 RNA guide
cuaaccuuaugaugucuuugg

SEQ ID NO: 14944 - RNA, 21 nt, Artificial Sequence
  LRRK2 RNA guide
cuuaugaugucuuuggcuuuu

SEQ ID NO: 14945 - RNA, 21 nt, Artificial Sequence
  LRRK2 RNA guide
cuuuggcuuuucauccuauau

SEQ ID NO: 14946 - RNA, 21 nt, Artificial Sequence
  LRRK2 RNA guide
gaaaagccaaagacaucauaa

SEQ ID NO: 14947 - RNA, 21 nt, Artificial Sequence
  LRRK2 RNA guide
gaugaaaagccaaagacauca

SEQ ID NO: 14948 - RNA, 21 nt, Artificial Sequence
  LRRK2 RNA guide
gaugucuuuggcuuuucaucc

SEQ ID NO: 14949 - RNA, 21 nt, Artificial Sequence
  LRRK2 RNA guide
ggaugaaaagccaaagacauc

SEQ ID NO: 14950 - RNA, 21 nt, Artificial Sequence
  LRRK2 RNA guide
ggcuuuucauccuauauguuu

SEQ ID NO: 14951 - RNA, 21 nt, Artificial Sequence
  LRRK2 RNA guide
gucuuuggcuuuucauccuau

SEQ ID NO: 14952 - RNA, 21 nt, Artificial Sequence
  LRRK2 RNA guide
uaaccuuaugaugucuuuggc

SEQ ID NO: 14953 - RNA, 21 nt, Artificial Sequence
  LRRK2 RNA guide
uaggaugaaaagccaaagaca

SEQ ID NO: 14954 - RNA, 21 nt, Artificial Sequence
  LRRK2 RNA guide
uauaggaugaaaagccaaaga

SEQ ID NO: 14955 - RNA, 21 nt, Artificial Sequence
  LRRK2 RNA guide
uaugaugucuuuggcuuuuca

SEQ ID NO: 14956 - RNA, 21 nt, Artificial Sequence
  LRRK2 RNA guide
ucuuuggcuuuucauccuaua

SEQ ID NO: 14957 - RNA, 21 nt, Artificial Sequence
  LRRK2 RNA guide
ugaaaagccaaagacaucaua

SEQ ID NO: 14958 - RNA, 21 nt, Artificial Sequence
  LRRK2 RNA guide
ugaugucuuuggcuuuucauc

SEQ ID NO: 14959 - RNA, 21 nt, Artificial Sequence
  LRRK2 RNA guide
uggcuuuucauccuauauguu

SEQ ID NO: 14960 - RNA, 21 nt, Artificial Sequence
  LRRK2 RNA guide
ugucuuuggcuuuucauccua

SEQ ID NO: 14961 - RNA, 21 nt, Artificial Sequence
  LRRK2 RNA guide
uuaugaugucuuuggcuuuuc

SEQ ID NO: 14962 - RNA, 21 nt, Artificial Sequence
  LRRK2 RNA guide
uuggcuuuucauccuauaugu

SEQ ID NO: 14963 - RNA, 21 nt, Artificial Sequence
  LRRK2 RNA guide
uuuggcuuuucauccuauaug

SEQ ID NO: 14964 - RNA, 22 nt, Artificial Sequence
  LRRK2 RNA guide
aaacauauaggaugaaaagcca

SEQ ID NO: 14965 - RNA, 22 nt, Artificial Sequence
  LRRK2 RNA guide
aacauauaggaugaaaagccaa

SEQ ID NO: 14966 - RNA, 22 nt, Artificial Sequence
  LRRK2 RNA guide
aaccuuaugaugucuuuggcuu

SEQ ID NO: 14967 - RNA, 22 nt, Artificial Sequence
  LRRK2 RNA guide
acauauaggaugaaaagccaaa

SEQ ID NO: 14968 - RNA, 22 nt, Artificial Sequence
  LRRK2 RNA guide
aggaugaaaagccaaagacauc

SEQ ID NO: 14969 - RNA, 22 nt, Artificial Sequence
  LRRK2 RNA guide
auaggaugaaaagccaaagaca

SEQ ID NO: 14970 - RNA, 22 nt, Artificial Sequence
  LRRK2 RNA guide
auauaggaugaaaagccaaaga

SEQ ID NO: 14971 - RNA, 22 nt, Artificial Sequence
  LRRK2 RNA guide
augaaaagccaaagacaucaua

SEQ ID NO: 14972 - RNA, 22 nt, Artificial Sequence
  LRRK2 RNA guide
augaugucuuuggcuuuucauc

SEQ ID NO: 14973 - RNA, 22 nt, Artificial Sequence
  LRRK2 RNA guide
augucuuuggcuuuucauccua

SEQ ID NO: 14974 - RNA, 22 nt, Artificial Sequence
  LRRK2 RNA guide
cauauaggaugaaaagccaaag

SEQ ID NO: 14975 - RNA, 22 nt, Artificial Sequence
  LRRK2 RNA guide
ccuuaugaugucuuuggcuuuu

SEQ ID NO: 14976 - RNA, 22 nt, Artificial Sequence
  LRRK2 RNA guide
cuaaccuuaugaugucuuuggc

SEQ ID NO: 14977 - RNA, 22 nt, Artificial Sequence
  LRRK2 RNA guide
cuuaugaugucuuuggcuuuuc

SEQ ID NO: 14978 - RNA, 22 nt, Artificial Sequence
  LRRK2 RNA guide
cuuuggcuuuucauccuauaug

SEQ ID NO: 14979 - RNA, 22 nt, Artificial Sequence
  LRRK2 RNA guide
gaaaagccaaagacaucauaag

SEQ ID NO: 14980 - RNA, 22 nt, Artificial Sequence
  LRRK2 RNA guide
gaugaaaagccaaagacaucau

SEQ ID NO: 14981 - RNA, 22 nt, Artificial Sequence
  LRRK2 RNA guide
gaugucuuuggcuuuucauccu

SEQ ID NO: 14982 - RNA, 22 nt, Artificial Sequence
  LRRK2 RNA guide
ggaugaaaagccaaagacauca

SEQ ID NO: 14983 - RNA, 22 nt, Artificial Sequence
  LRRK2 RNA guide
ggcuuuucauccuauauguuua

SEQ ID NO: 14984 - RNA, 22 nt, Artificial Sequence
  LRRK2 RNA guide
gucuuuggcuuuucauccuaua

SEQ ID NO: 14985 - RNA, 22 nt, Artificial Sequence
  LRRK2 RNA guide
uaaacauauaggaugaaaagcc

SEQ ID NO: 14986 - RNA, 22 nt, Artificial Sequence
  LRRK2 RNA guide
uaaccuuaugaugucuuuggcu

SEQ ID NO: 14987 - RNA, 22 nt, Artificial Sequence
  LRRK2 RNA guide
uaggaugaaaagccaaagacau

SEQ ID NO: 14988 - RNA, 22 nt, Artificial Sequence
  LRRK2 RNA guide
uauaggaugaaaagccaaagac

SEQ ID NO: 14989 - RNA, 22 nt, Artificial Sequence
  LRRK2 RNA guide
uaugaugucuuuggcuuuucau

SEQ ID NO: 14990 - RNA, 22 nt, Artificial Sequence
  LRRK2 RNA guide
ucuaaccuuaugaugucuuugg

SEQ ID NO: 14991 - RNA, 22 nt, Artificial Sequence
  LRRK2 RNA guide
ucuuuggcuuuucauccuauau

SEQ ID NO: 14992 - RNA, 22 nt, Artificial Sequence
  LRRK2 RNA guide
ugaaaagccaaagacaucauaa

SEQ ID NO: 14993 - RNA, 22 nt, Artificial Sequence
  LRRK2 RNA guide
ugaugucuuuggcuuuucaucc

SEQ ID NO: 14994 - RNA, 22 nt, Artificial Sequence
  LRRK2 RNA guide
uggcuuuucauccuauauguuu

SEQ ID NO: 14995 - RNA, 22 nt, Artificial Sequence
  LRRK2 RNA guide
ugucuuuggcuuuucauccuau

SEQ ID NO: 14996 - RNA, 22 nt, Artificial Sequence
  LRRK2 RNA guide
uuaugaugucuuuggcuuuuca

SEQ ID NO: 14997 - RNA, 22 nt, Artificial Sequence
  LRRK2 RNA guide
uuggcuuuucauccuauauguu

SEQ ID NO: 14998 - RNA, 22 nt, Artificial Sequence
  LRRK2 RNA guide
uuuggcuuuucauccuauaugu

SEQ ID NO: 14999 - RNA, 20 nt, Artificial Sequence
  LRRK2 RNA guide
aaucgcuguugaagaaaacu

SEQ ID NO: 15000 - RNA, 20 nt, Artificial Sequence
  LRRK2 RNA guide
acuaguuuucuucaacagcg

SEQ ID NO: 15001 - RNA, 20 nt, Artificial Sequence
  LRRK2 RNA guide
aguuuucuucaacagcgauu

SEQ ID NO: 15002 - RNA, 20 nt, Artificial Sequence
  LRRK2 RNA guide
auacuaguuuucuucaacag

SEQ ID NO: 15003 - RNA, 20 nt, Artificial Sequence
  LRRK2 RNA guide
aucgcuguugaagaaaacua

SEQ ID NO: 15004 - RNA, 20 nt, Artificial Sequence
  LRRK2 RNA guide
cgcuguugaagaaaacuagu

SEQ ID NO: 15005 - RNA, 20 nt, Artificial Sequence
  LRRK2 RNA guide
cuaguuuucuucaacagcga

SEQ ID NO: 15006 - RNA, 20 nt, Artificial Sequence
  LRRK2 RNA guide
cuguugaagaaaacuaguau

SEQ ID NO: 15007 - RNA, 20 nt, Artificial Sequence
  LRRK2 RNA guide
cuuuuuuaaucgcuguugaa

SEQ ID NO: 15008 - RNA, 20 nt, Artificial Sequence
  LRRK2 RNA guide
gcuguugaagaaaacuagua

SEQ ID NO: 15009 - RNA, 20 nt, Artificial Sequence
  LRRK2 RNA guide
guuuucuucaacagcgauua

SEQ ID NO: 15010 - RNA, 20 nt, Artificial Sequence
  LRRK2 RNA guide
uaaucgcuguugaagaaaac

SEQ ID NO: 15011 - RNA, 20 nt, Artificial Sequence
  LRRK2 RNA guide
uacuaguuuucuucaacagc

SEQ ID NO: 15012 - RNA, 20 nt, Artificial Sequence
  LRRK2 RNA guide
uaguuuucuucaacagcgau

SEQ ID NO: 15013 - RNA, 20 nt, Artificial Sequence
  LRRK2 RNA guide
ucgcuguugaagaaaacuag

SEQ ID NO: 15014 - RNA, 20 nt, Artificial Sequence
  LRRK2 RNA guide
uuaaucgcuguugaagaaaa

SEQ ID NO: 15015 - RNA, 20 nt, Artificial Sequence
  LRRK2 RNA guide
uuuaaucgcuguugaagaaa

SEQ ID NO: 15016 - RNA, 20 nt, Artificial Sequence
  LRRK2 RNA guide
uuuuaaucgcuguugaagaa

SEQ ID NO: 15017 - RNA, 20 nt, Artificial Sequence
  LRRK2 RNA guide
uuuuuaaucgcuguugaaga

SEQ ID NO: 15018 - RNA, 20 nt, Artificial Sequence
  LRRK2 RNA guide
uuuuuuaaucgcuguugaag

SEQ ID NO: 15019 - RNA, 21 nt, Artificial Sequence
  LRRK2 RNA guide
aaucgcuguugaagaaaacua

SEQ ID NO: 15020 - RNA, 21 nt, Artificial Sequence
  LRRK2 RNA guide
acuaguuuucuucaacagcga

SEQ ID NO: 15021 - RNA, 21 nt, Artificial Sequence
  LRRK2 RNA guide
aguuuucuucaacagcgauua

SEQ ID NO: 15022 - RNA, 21 nt, Artificial Sequence
  LRRK2 RNA guide
auacuaguuuucuucaacagc

SEQ ID NO: 15023 - RNA, 21 nt, Artificial Sequence
  LRRK2 RNA guide
aucgcuguugaagaaaacuag

SEQ ID NO: 15024 - RNA, 21 nt, Artificial Sequence
  LRRK2 RNA guide
ccuuuuuuaaucgcuguugaa

SEQ ID NO: 15025 - RNA, 21 nt, Artificial Sequence
  LRRK2 RNA guide
cgcuguugaagaaaacuagua

SEQ ID NO: 15026 - RNA, 21 nt, Artificial Sequence
  LRRK2 RNA guide
cuaguuuucuucaacagcgau

SEQ ID NO: 15027 - RNA, 21 nt, Artificial Sequence
  LRRK2 RNA guide
cuuuuuuaaucgcuguugaag

SEQ ID NO: 15028 - RNA, 21 nt, Artificial Sequence
  LRRK2 RNA guide
gcuguugaagaaaacuaguau

SEQ ID NO: 15029 - RNA, 21 nt, Artificial Sequence
  LRRK2 RNA guide
guuuucuucaacagcgauuaa

SEQ ID NO: 15030 - RNA, 21 nt, Artificial Sequence
  LRRK2 RNA guide
uaaucgcuguugaagaaaacu

SEQ ID NO: 15031 - RNA, 21 nt, Artificial Sequence
  LRRK2 RNA guide
uacuaguuuucuucaacagcg

SEQ ID NO: 15032 - RNA, 21 nt, Artificial Sequence
  LRRK2 RNA guide
uaguuuucuucaacagcgauu

SEQ ID NO: 15033 - RNA, 21 nt, Artificial Sequence
  LRRK2 RNA guide
ucgcuguugaagaaaacuagu

SEQ ID NO: 15034 - RNA, 21 nt, Artificial Sequence
  LRRK2 RNA guide
uuaaucgcuguugaagaaaac

SEQ ID NO: 15035 - RNA, 22 nt, Artificial Sequence
  LRRK2 RNA guide
aauacuaguuuucuucaacagc

SEQ ID NO: 15036 - RNA, 22 nt, Artificial Sequence
  LRRK2 RNA guide
aaucgcuguugaagaaaacuag

SEQ ID NO: 15037 - RNA, 22 nt, Artificial Sequence
  LRRK2 RNA guide
acuaguuuucuucaacagcgau

SEQ ID NO: 15038 - RNA, 22 nt, Artificial Sequence
  LRRK2 RNA guide
aguuuucuucaacagcgauuaa

SEQ ID NO: 15039 - RNA, 22 nt, Artificial Sequence
  LRRK2 RNA guide
auacuaguuuucuucaacagcg

SEQ ID NO: 15040 - RNA, 22 nt, Artificial Sequence
  LRRK2 RNA guide
aucgcuguugaagaaaacuagu

SEQ ID NO: 15041 - RNA, 22 nt, Artificial Sequence
  LRRK2 RNA guide
ccuuuuuuaaucgcuguugaag

SEQ ID NO: 15042 - RNA, 22 nt, Artificial Sequence
  LRRK2 RNA guide
cgcuguugaagaaaacuaguau

SEQ ID NO: 15043 - RNA, 22 nt, Artificial Sequence
  LRRK2 RNA guide
cuaguuuucuucaacagcgauu

SEQ ID NO: 15044 - RNA, 22 nt, Artificial Sequence
  LRRK2 RNA guide
cuuuuuuaaucgcuguugaaga

SEQ ID NO: 15045 - RNA, 22 nt, Artificial Sequence
  LRRK2 RNA guide
gccuuuuuuaaucgcuguugaa

SEQ ID NO: 15046 - RNA, 22 nt, Artificial Sequence
  LRRK2 RNA guide
gcuguugaagaaaacuaguauu

SEQ ID NO: 15047 - RNA, 22 nt, Artificial Sequence
  LRRK2 RNA guide
guuuucuucaacagcgauuaaa

SEQ ID NO: 15048 - RNA, 22 nt, Artificial Sequence
  LRRK2 RNA guide
uaaucgcuguugaagaaaacua

SEQ ID NO: 15049 - RNA, 22 nt, Artificial Sequence
  LRRK2 RNA guide
uacuaguuuucuucaacagcga

SEQ ID NO: 15050 - RNA, 22 nt, Artificial Sequence
  LRRK2 RNA guide
uaguuuucuucaacagcgauua

SEQ ID NO: 15051 - RNA, 22 nt, Artificial Sequence
  LRRK2 RNA guide
ucgcuguugaagaaaacuagua

SEQ ID NO: 15052 - RNA, 22 nt, Artificial Sequence
  LRRK2 RNA guide
uuaaucgcuguugaagaaaacu

SEQ ID NO: 15053 - RNA, 22 nt, Artificial Sequence
  LRRK2 RNA guide
uuuaaucgcuguugaagaaaac

SEQ ID NO: 15054 - RNA, 20 nt, Artificial Sequence
  LRRK2 RNA guide
aaauacuagguuucuucagc

SEQ ID NO: 15055 - RNA, 20 nt, Artificial Sequence
  LRRK2 RNA guide
aauacuagguuucuucagca

SEQ ID NO: 15056 - RNA, 20 nt, Artificial Sequence
  LRRK2 RNA guide
aaucgcugcugaagaaaccu

SEQ ID NO: 15057 - RNA, 20 nt, Artificial Sequence
  LRRK2 RNA guide
acagccuuuuuuaaucgcug

SEQ ID NO: 15058 - RNA, 20 nt, Artificial Sequence
  LRRK2 RNA guide
acuagguuucuucagcagcg

SEQ ID NO: 15059 - RNA, 20 nt, Artificial Sequence
  LRRK2 RNA guide
agcagcgauuaaaaaaggcu

SEQ ID NO: 15060 - RNA, 20 nt, Artificial Sequence
  LRRK2 RNA guide
agccuuuuuuaaucgcugcu

SEQ ID NO: 15061 - RNA, 20 nt, Artificial Sequence
  LRRK2 RNA guide
aggcacagccuuuuuuaauc

SEQ ID NO: 15062 - RNA, 20 nt, Artificial Sequence
  LRRK2 RNA guide
agguuucuucagcagcgauu

SEQ ID NO: 15063 - RNA, 20 nt, Artificial Sequence
  LRRK2 RNA guide
auacuagguuucuucagcag

SEQ ID NO: 15064 - RNA, 20 nt, Artificial Sequence
  LRRK2 RNA guide
aucgcugcugaagaaaccua

SEQ ID NO: 15065 - RNA, 20 nt, Artificial Sequence
  LRRK2 RNA guide
caaauacuagguuucuucag

SEQ ID NO: 15066 - RNA, 20 nt, Artificial Sequence
  LRRK2 RNA guide
cacagccuuuuuuaaucgcu

SEQ ID NO: 15067 - RNA, 20 nt, Artificial Sequence
  LRRK2 RNA guide
cagcagcgauuaaaaaaggc

SEQ ID NO: 15068 - RNA, 20 nt, Artificial Sequence
  LRRK2 RNA guide
cagccuuuuuuaaucgcugc

SEQ ID NO: 15069 - RNA, 20 nt, Artificial Sequence
  LRRK2 RNA guide
ccuuuuuuaaucgcugcuga

SEQ ID NO: 15070 - RNA, 20 nt, Artificial Sequence
  LRRK2 RNA guide
cgcugcugaagaaaccuagu

SEQ ID NO: 15071 - RNA, 20 nt, Artificial Sequence
  LRRK2 RNA guide
cuagguuucuucagcagcga

SEQ ID NO: 15072 - RNA, 20 nt, Artificial Sequence
  LRRK2 RNA guide
cugcugaagaaaccuaguau

SEQ ID NO: 15073 - RNA, 20 nt, Artificial Sequence
  LRRK2 RNA guide
cuucagcagcgauuaaaaaa

SEQ ID NO: 15074 - RNA, 20 nt, Artificial Sequence
  LRRK2 RNA guide
cuuucaaauacuagguuucu

SEQ ID NO: 15075 - RNA, 20 nt, Artificial Sequence
  LRRK2 RNA guide
cuuuuuuaaucgcugcugaa

SEQ ID NO: 15076 - RNA, 20 nt, Artificial Sequence
  LRRK2 RNA guide
gcacagccuuuuuuaaucgc

SEQ ID NO: 15077 - RNA, 20 nt, Artificial Sequence
  LRRK2 RNA guide
gccuuuuuuaaucgcugcug

SEQ ID NO: 15078 - RNA, 20 nt, Artificial Sequence
  LRRK2 RNA guide
gcugaagaaaccuaguauuu

SEQ ID NO: 15079 - RNA, 20 nt, Artificial Sequence
  LRRK2 RNA guide
gcugcugaagaaaccuagua

SEQ ID NO: 15080 - RNA, 20 nt, Artificial Sequence
  LRRK2 RNA guide
ggcacagccuuuuuuaaucg

SEQ ID NO: 15081 - RNA, 20 nt, Artificial Sequence
  LRRK2 RNA guide
gguuucuucagcagcgauua

SEQ ID NO: 15082 - RNA, 20 nt, Artificial Sequence
  LRRK2 RNA guide
guuucuucagcagcgauuaa

SEQ ID NO: 15083 - RNA, 20 nt, Artificial Sequence
  LRRK2 RNA guide
uaaucgcugcugaagaaacc

SEQ ID NO: 15084 - RNA, 20 nt, Artificial Sequence
  LRRK2 RNA guide
uacuagguuucuucagcagc

SEQ ID NO: 15085 - RNA, 20 nt, Artificial Sequence
  LRRK2 RNA guide
uagguuucuucagcagcgau

SEQ ID NO: 15086 - RNA, 20 nt, Artificial Sequence
  LRRK2 RNA guide
ucaaauacuagguuucuuca

SEQ ID NO: 15087 - RNA, 20 nt, Artificial Sequence
  LRRK2 RNA guide
ucagcagcgauuaaaaaagg

SEQ ID NO: 15088 - RNA, 20 nt, Artificial Sequence
  LRRK2 RNA guide
ucgcugcugaagaaaccuag

SEQ ID NO: 15089 - RNA, 20 nt, Artificial Sequence
  LRRK2 RNA guide
ucuucagcagcgauuaaaaa

SEQ ID NO: 15090 - RNA, 20 nt, Artificial Sequence
  LRRK2 RNA guide
ucuuucaaauacuagguuuc

SEQ ID NO: 15091 - RNA, 20 nt, Artificial Sequence
  LRRK2 RNA guide
ugcugaagaaaccuaguauu

SEQ ID NO: 15092 - RNA, 20 nt, Artificial Sequence
  LRRK2 RNA guide
uuaaucgcugcugaagaaac

SEQ ID NO: 15093 - RNA, 20 nt, Artificial Sequence
  LRRK2 RNA guide
uucaaauacuagguuucuuc

SEQ ID NO: 15094 - RNA, 20 nt, Artificial Sequence
  LRRK2 RNA guide
uucagcagcgauuaaaaaag

SEQ ID NO: 15095 - RNA, 20 nt, Artificial Sequence
  LRRK2 RNA guide
uucuucagcagcgauuaaaa

SEQ ID NO: 15096 - RNA, 20 nt, Artificial Sequence
  LRRK2 RNA guide
uuuaaucgcugcugaagaaa

SEQ ID NO: 15097 - RNA, 20 nt, Artificial Sequence
  LRRK2 RNA guide
uuucuucagcagcgauuaaa

SEQ ID NO: 15098 - RNA, 20 nt, Artificial Sequence
  LRRK2 RNA guide
uuuuaaucgcugcugaagaa

SEQ ID NO: 15099 - RNA, 20 nt, Artificial Sequence
  LRRK2 RNA guide
uuuuuaaucgcugcugaaga

SEQ ID NO: 15100 - RNA, 20 nt, Artificial Sequence
  LRRK2 RNA guide
uuuuuuaaucgcugcugaag

SEQ ID NO: 15101 - RNA, 21 nt, Artificial Sequence
  LRRK2 RNA guide
aaauacuagguuucuucagca

SEQ ID NO: 15102 - RNA, 21 nt, Artificial Sequence
  LRRK2 RNA guide
aaggcacagccuuuuuuaauc

SEQ ID NO: 15103 - RNA, 21 nt, Artificial Sequence
  LRRK2 RNA guide
aauacuagguuucuucagcag

SEQ ID NO: 15104 - RNA, 21 nt, Artificial Sequence
  LRRK2 RNA guide
aaucgcugcugaagaaaccua

SEQ ID NO: 15105 - RNA, 21 nt, Artificial Sequence
  LRRK2 RNA guide
acagccuuuuuuaaucgcugc

SEQ ID NO: 15106 - RNA, 21 nt, Artificial Sequence
  LRRK2 RNA guide
acuagguuucuucagcagcga

SEQ ID NO: 15107 - RNA, 21 nt, Artificial Sequence
  LRRK2 RNA guide
agcagcgauuaaaaaaggcug

SEQ ID NO: 15108 - RNA, 21 nt, Artificial Sequence
  LRRK2 RNA guide
agccuuuuuuaaucgcugcug

SEQ ID NO: 15109 - RNA, 21 nt, Artificial Sequence
  LRRK2 RNA guide
aggcacagccuuuuuuaaucg

SEQ ID NO: 15110 - RNA, 21 nt, Artificial Sequence
  LRRK2 RNA guide
agguuucuucagcagcgauua

SEQ ID NO: 15111 - RNA, 21 nt, Artificial Sequence
  LRRK2 RNA guide
auacuagguuucuucagcagc

SEQ ID NO: 15112 - RNA, 21 nt, Artificial Sequence
  LRRK2 RNA guide
aucgcugcugaagaaaccuag

SEQ ID NO: 15113 - RNA, 21 nt, Artificial Sequence
  LRRK2 RNA guide
caaauacuagguuucuucagc

SEQ ID NO: 15114 - RNA, 21 nt, Artificial Sequence
  LRRK2 RNA guide
cacagccuuuuuuaaucgcug

SEQ ID NO: 15115 - RNA, 21 nt, Artificial Sequence
  LRRK2 RNA guide
cagcagcgauuaaaaaaggcu

SEQ ID NO: 15116 - RNA, 21 nt, Artificial Sequence
  LRRK2 RNA guide
cagccuuuuuuaaucgcugcu

SEQ ID NO: 15117 - RNA, 21 nt, Artificial Sequence
  LRRK2 RNA guide
ccuuuuuuaaucgcugcugaa

SEQ ID NO: 15118 - RNA, 21 nt, Artificial Sequence
  LRRK2 RNA guide
cgcugcugaagaaaccuagua

SEQ ID NO: 15119 - RNA, 21 nt, Artificial Sequence
  LRRK2 RNA guide
cuagguuucuucagcagcgau

SEQ ID NO: 15120 - RNA, 21 nt, Artificial Sequence
  LRRK2 RNA guide
cugcugaagaaaccuaguauu

SEQ ID NO: 15121 - RNA, 21 nt, Artificial Sequence
  LRRK2 RNA guide
cuucagcagcgauuaaaaaag

SEQ ID NO: 15122 - RNA, 21 nt, Artificial Sequence
  LRRK2 RNA guide
cuuuuuuaaucgcugcugaag

SEQ ID NO: 15123 - RNA, 21 nt, Artificial Sequence
  LRRK2 RNA guide
gcacagccuuuuuuaaucgcu

SEQ ID NO: 15124 - RNA, 21 nt, Artificial Sequence
  LRRK2 RNA guide
gccuuuuuuaaucgcugcuga

SEQ ID NO: 15125 - RNA, 21 nt, Artificial Sequence
  LRRK2 RNA guide
gcugaagaaaccuaguauuug

SEQ ID NO: 15126 - RNA, 21 nt, Artificial Sequence
  LRRK2 RNA guide
gcugcugaagaaaccuaguau

SEQ ID NO: 15127 - RNA, 21 nt, Artificial Sequence
  LRRK2 RNA guide
ggcacagccuuuuuuaaucgc

SEQ ID NO: 15128 - RNA, 21 nt, Artificial Sequence
  LRRK2 RNA guide
gguuucuucagcagcgauuaa

SEQ ID NO: 15129 - RNA, 21 nt, Artificial Sequence
  LRRK2 RNA guide
guuucuucagcagcgauuaaa

SEQ ID NO: 15130 - RNA, 21 nt, Artificial Sequence
  LRRK2 RNA guide
uaaucgcugcugaagaaaccu

SEQ ID NO: 15131 - RNA, 21 nt, Artificial Sequence
  LRRK2 RNA guide
uacuagguuucuucagcagcg

SEQ ID NO: 15132 - RNA, 21 nt, Artificial Sequence
  LRRK2 RNA guide
uagguuucuucagcagcgauu

SEQ ID NO: 15133 - RNA, 21 nt, Artificial Sequence
  LRRK2 RNA guide
ucaaauacuagguuucuucag

SEQ ID NO: 15134 - RNA, 21 nt, Artificial Sequence
  LRRK2 RNA guide
ucagcagcgauuaaaaaaggc

SEQ ID NO: 15135 - RNA, 21 nt, Artificial Sequence
  LRRK2 RNA guide
ucgcugcugaagaaaccuagu

SEQ ID NO: 15136 - RNA, 21 nt, Artificial Sequence
  LRRK2 RNA guide
ucuucagcagcgauuaaaaaa

SEQ ID NO: 15137 - RNA, 21 nt, Artificial Sequence
  LRRK2 RNA guide
ugcugaagaaaccuaguauuu

SEQ ID NO: 15138 - RNA, 21 nt, Artificial Sequence
  LRRK2 RNA guide
uuaaucgcugcugaagaaacc

SEQ ID NO: 15139 - RNA, 21 nt, Artificial Sequence
  LRRK2 RNA guide
uucagcagcgauuaaaaaagg

SEQ ID NO: 15140 - RNA, 21 nt, Artificial Sequence
  LRRK2 RNA guide
uucuucagcagcgauuaaaaa

SEQ ID NO: 15141 - RNA, 21 nt, Artificial Sequence
  LRRK2 RNA guide
uuuaaucgcugcugaagaaac

SEQ ID NO: 15142 - RNA, 21 nt, Artificial Sequence
  LRRK2 RNA guide
uuucuucagcagcgauuaaaa

SEQ ID NO: 15143 - RNA, 21 nt, Artificial Sequence
  LRRK2 RNA guide
uuuuaaucgcugcugaagaaa

SEQ ID NO: 15144 - RNA, 21 nt, Artificial Sequence
  LRRK2 RNA guide
uuuuuaaucgcugcugaagaa

SEQ ID NO: 15145 - RNA, 21 nt, Artificial Sequence
  LRRK2 RNA guide
uuuuuuaaucgcugcugaaga

SEQ ID NO: 15146 - RNA, 22 nt, Artificial Sequence
  LRRK2 RNA guide
aaauacuagguuucuucagcag

SEQ ID NO: 15147 - RNA, 22 nt, Artificial Sequence
  LRRK2 RNA guide
aaggcacagccuuuuuuaaucg

SEQ ID NO: 15148 - RNA, 22 nt, Artificial Sequence
  LRRK2 RNA guide
aauacuagguuucuucagcagc

SEQ ID NO: 15149 - RNA, 22 nt, Artificial Sequence
  LRRK2 RNA guide
aaucgcugcugaagaaaccuag

SEQ ID NO: 15150 - RNA, 22 nt, Artificial Sequence
  LRRK2 RNA guide
acagccuuuuuuaaucgcugcu

SEQ ID NO: 15151 - RNA, 22 nt, Artificial Sequence
  LRRK2 RNA guide
acuagguuucuucagcagcgau

SEQ ID NO: 15152 - RNA, 22 nt, Artificial Sequence
  LRRK2 RNA guide
agcagcgauuaaaaaaggcugu

SEQ ID NO: 15153 - RNA, 22 nt, Artificial Sequence
  LRRK2 RNA guide
agccuuuuuuaaucgcugcuga

SEQ ID NO: 15154 - RNA, 22 nt, Artificial Sequence
  LRRK2 RNA guide
aggcacagccuuuuuuaaucgc

SEQ ID NO: 15155 - RNA, 22 nt, Artificial Sequence
  LRRK2 RNA guide
agguuucuucagcagcgauuaa

SEQ ID NO: 15156 - RNA, 22 nt, Artificial Sequence
  LRRK2 RNA guide
auacuagguuucuucagcagcg

SEQ ID NO: 15157 - RNA, 22 nt, Artificial Sequence
  LRRK2 RNA guide
aucgcugcugaagaaaccuagu

SEQ ID NO: 15158 - RNA, 22 nt, Artificial Sequence
  LRRK2 RNA guide
caaauacuagguuucuucagca

SEQ ID NO: 15159 - RNA, 22 nt, Artificial Sequence
  LRRK2 RNA guide
cacagccuuuuuuaaucgcugc

SEQ ID NO: 15160 - RNA, 22 nt, Artificial Sequence
  LRRK2 RNA guide
cagcagcgauuaaaaaaggcug

SEQ ID NO: 15161 - RNA, 22 nt, Artificial Sequence
  LRRK2 RNA guide
cagccuuuuuuaaucgcugcug

SEQ ID NO: 15162 - RNA, 22 nt, Artificial Sequence
  LRRK2 RNA guide
ccuuuuuuaaucgcugcugaag

SEQ ID NO: 15163 - RNA, 22 nt, Artificial Sequence
  LRRK2 RNA guide
cgcugcugaagaaaccuaguau

SEQ ID NO: 15164 - RNA, 22 nt, Artificial Sequence
  LRRK2 RNA guide
cuagguuucuucagcagcgauu

SEQ ID NO: 15165 - RNA, 22 nt, Artificial Sequence
  LRRK2 RNA guide
cugcugaagaaaccuaguauuu

SEQ ID NO: 15166 - RNA, 22 nt, Artificial Sequence
  LRRK2 RNA guide
cuucagcagcgauuaaaaaagg

SEQ ID NO: 15167 - RNA, 22 nt, Artificial Sequence
  LRRK2 RNA guide
cuuucaaauacuagguuucuuc

SEQ ID NO: 15168 - RNA, 22 nt, Artificial Sequence
  LRRK2 RNA guide
cuuuuuuaaucgcugcugaaga

SEQ ID NO: 15169 - RNA, 22 nt, Artificial Sequence
  LRRK2 RNA guide
gcacagccuuuuuuaaucgcug

SEQ ID NO: 15170 - RNA, 22 nt, Artificial Sequence
  LRRK2 RNA guide
gccuuuuuuaaucgcugcugaa

SEQ ID NO: 15171 - RNA, 22 nt, Artificial Sequence
  LRRK2 RNA guide
gcugaagaaaccuaguauuuga

SEQ ID NO: 15172 - RNA, 22 nt, Artificial Sequence
  LRRK2 RNA guide
gcugcugaagaaaccuaguauu

SEQ ID NO: 15173 - RNA, 22 nt, Artificial Sequence
  LRRK2 RNA guide
ggcacagccuuuuuuaaucgcu

SEQ ID NO: 15174 - RNA, 22 nt, Artificial Sequence
  LRRK2 RNA guide
gguuucuucagcagcgauuaaa

SEQ ID NO: 15175 - RNA, 22 nt, Artificial Sequence
  LRRK2 RNA guide
guuucuucagcagcgauuaaaa

SEQ ID NO: 15176 - RNA, 22 nt, Artificial Sequence
  LRRK2 RNA guide
uaaggcacagccuuuuuuaauc

SEQ ID NO: 15177 - RNA, 22 nt, Artificial Sequence
  LRRK2 RNA guide
uaaucgcugcugaagaaaccua

SEQ ID NO: 15178 - RNA, 22 nt, Artificial Sequence
  LRRK2 RNA guide
uacuagguuucuucagcagcga

SEQ ID NO: 15179 - RNA, 22 nt, Artificial Sequence
  LRRK2 RNA guide
uagguuucuucagcagcgauua

SEQ ID NO: 15180 - RNA, 22 nt, Artificial Sequence
  LRRK2 RNA guide
ucaaauacuagguuucuucagc

SEQ ID NO: 15181 - RNA, 22 nt, Artificial Sequence
  LRRK2 RNA guide
ucagcagcgauuaaaaaaggcu

SEQ ID NO: 15182 - RNA, 22 nt, Artificial Sequence
  LRRK2 RNA guide
ucgcugcugaagaaaccuagua

SEQ ID NO: 15183 - RNA, 22 nt, Artificial Sequence
  LRRK2 RNA guide
ucuucagcagcgauuaaaaaag

SEQ ID NO: 15184 - RNA, 22 nt, Artificial Sequence
  LRRK2 RNA guide
ugcugaagaaaccuaguauuug

SEQ ID NO: 15185 - RNA, 22 nt, Artificial Sequence
  LRRK2 RNA guide
uuaaucgcugcugaagaaaccu

SEQ ID NO: 15186 - RNA, 22 nt, Artificial Sequence
  LRRK2 RNA guide
uucaaauacuagguuucuucag

SEQ ID NO: 15187 - RNA, 22 nt, Artificial Sequence
  LRRK2 RNA guide
uucagcagcgauuaaaaaaggc

SEQ ID NO: 15188 - RNA, 22 nt, Artificial Sequence
  LRRK2 RNA guide
uucuucagcagcgauuaaaaaa

SEQ ID NO: 15189 - RNA, 22 nt, Artificial Sequence
  LRRK2 RNA guide
uuuaaucgcugcugaagaaacc

SEQ ID NO: 15190 - RNA, 22 nt, Artificial Sequence
  LRRK2 RNA guide
uuucuucagcagcgauuaaaaa

SEQ ID NO: 15191 - RNA, 22 nt, Artificial Sequence
  LRRK2 RNA guide
uuuuaaucgcugcugaagaaac

SEQ ID NO: 15192 - RNA, 22 nt, Artificial Sequence
  LRRK2 RNA guide
uuuuuaaucgcugcugaagaaa

SEQ ID NO: 15193 - RNA, 22 nt, Artificial Sequence
  LRRK2 RNA guide
uuuuuuaaucgcugcugaagaa

SEQ ID NO: 15194 - RNA, 20 nt, Artificial Sequence
  LRRK2 RNA guide
aaauacuagguuucuucaac

SEQ ID NO: 15195 - RNA, 20 nt, Artificial Sequence
  LRRK2 RNA guide
aacagcaauuaaaaaaggcu

SEQ ID NO: 15196 - RNA, 20 nt, Artificial Sequence
  LRRK2 RNA guide
aauacuagguuucuucaaca

SEQ ID NO: 15197 - RNA, 20 nt, Artificial Sequence
  LRRK2 RNA guide
aauugcuguugaagaaaccu

SEQ ID NO: 15198 - RNA, 20 nt, Artificial Sequence
  LRRK2 RNA guide
acagcaauuaaaaaaggcug

SEQ ID NO: 15199 - RNA, 20 nt, Artificial Sequence
  LRRK2 RNA guide
acagccuuuuuuaauugcug

SEQ ID NO: 15200 - RNA, 20 nt, Artificial Sequence
  LRRK2 RNA guide
acuagguuucuucaacagca

SEQ ID NO: 15201 - RNA, 20 nt, Artificial Sequence
  LRRK2 RNA guide
agcaauuaaaaaaggcugug

SEQ ID NO: 15202 - RNA, 20 nt, Artificial Sequence
  LRRK2 RNA guide
agccuuuuuuaauugcuguu

SEQ ID NO: 15203 - RNA, 20 nt, Artificial Sequence
  LRRK2 RNA guide
aggcacagccuuuuuuaauu

SEQ ID NO: 15204 - RNA, 20 nt, Artificial Sequence
  LRRK2 RNA guide
agguuucuucaacagcaauu

SEQ ID NO: 15205 - RNA, 20 nt, Artificial Sequence
  LRRK2 RNA guide
auaaggcacagccuuuuuua

SEQ ID NO: 15206 - RNA, 20 nt, Artificial Sequence
  LRRK2 RNA guide
auacuagguuucuucaacag

SEQ ID NO: 15207 - RNA, 20 nt, Artificial Sequence
  LRRK2 RNA guide
auugcuguugaagaaaccua

SEQ ID NO: 15208 - RNA, 20 nt, Artificial Sequence
  LRRK2 RNA guide
caaauacuagguuucuucaa

SEQ ID NO: 15209 - RNA, 20 nt, Artificial Sequence
  LRRK2 RNA guide
caacagcaauuaaaaaaggc

SEQ ID NO: 15210 - RNA, 20 nt, Artificial Sequence
  LRRK2 RNA guide
caauuaaaaaaggcugugcc

SEQ ID NO: 15211 - RNA, 20 nt, Artificial Sequence
  LRRK2 RNA guide
cacagccuuuuuuaauugcu

SEQ ID NO: 15212 - RNA, 20 nt, Artificial Sequence
  LRRK2 RNA guide
cagcaauuaaaaaaggcugu

SEQ ID NO: 15213 - RNA, 20 nt, Artificial Sequence
  LRRK2 RNA guide
cagccuuuuuuaauugcugu

SEQ ID NO: 15214 - RNA, 20 nt, Artificial Sequence
  LRRK2 RNA guide
ccuuuuuuaauugcuguuga

SEQ ID NO: 15215 - RNA, 20 nt, Artificial Sequence
  LRRK2 RNA guide
cuagguuucuucaacagcaa

SEQ ID NO: 15216 - RNA, 20 nt, Artificial Sequence
  LRRK2 RNA guide
gcaauuaaaaaaggcugugc

SEQ ID NO: 15217 - RNA, 20 nt, Artificial Sequence
  LRRK2 RNA guide
gcacagccuuuuuuaauugc

SEQ ID NO: 15218 - RNA, 20 nt, Artificial Sequence
  LRRK2 RNA guide
gccuuuuuuaauugcuguug

SEQ ID NO: 15219 - RNA, 20 nt, Artificial Sequence
  LRRK2 RNA guide
ggcacagccuuuuuuaauug

SEQ ID NO: 15220 - RNA, 20 nt, Artificial Sequence
  LRRK2 RNA guide
gguuucuucaacagcaauua

SEQ ID NO: 15221 - RNA, 20 nt, Artificial Sequence
  LRRK2 RNA guide
guuucuucaacagcaauuaa

SEQ ID NO: 15222 - RNA, 20 nt, Artificial Sequence
  LRRK2 RNA guide
uaaggcacagccuuuuuuaa

SEQ ID NO: 15223 - RNA, 20 nt, Artificial Sequence
  LRRK2 RNA guide
uaauugcuguugaagaaacc

SEQ ID NO: 15224 - RNA, 20 nt, Artificial Sequence
  LRRK2 RNA guide
uacuagguuucuucaacagc

SEQ ID NO: 15225 - RNA, 20 nt, Artificial Sequence
  LRRK2 RNA guide
uagguuucuucaacagcaau

SEQ ID NO: 15226 - RNA, 20 nt, Artificial Sequence
  LRRK2 RNA guide
uauaaggcacagccuuuuuu

SEQ ID NO: 15227 - RNA, 20 nt, Artificial Sequence
  LRRK2 RNA guide
ucaacagcaauuaaaaaagg

SEQ ID NO: 15228 - RNA, 20 nt, Artificial Sequence
  LRRK2 RNA guide
uuaauugcuguugaagaaac

SEQ ID NO: 15229 - RNA, 20 nt, Artificial Sequence
  LRRK2 RNA guide
uuauaaggcacagccuuuuu

SEQ ID NO: 15230 - RNA, 20 nt, Artificial Sequence
  LRRK2 RNA guide
uugcuguugaagaaaccuag

SEQ ID NO: 15231 - RNA, 21 nt, Artificial Sequence
  LRRK2 RNA guide
aacagcaauuaaaaaaggcug

SEQ ID NO: 15232 - RNA, 21 nt, Artificial Sequence
  LRRK2 RNA guide
aaggcacagccuuuuuuaauu

SEQ ID NO: 15233 - RNA, 21 nt, Artificial Sequence
  LRRK2 RNA guide
aauacuagguuucuucaacag

SEQ ID NO: 15234 - RNA, 21 nt, Artificial Sequence
  LRRK2 RNA guide
aauugcuguugaagaaaccua

SEQ ID NO: 15235 - RNA, 21 nt, Artificial Sequence
  LRRK2 RNA guide
acagcaauuaaaaaaggcugu

SEQ ID NO: 15236 - RNA, 21 nt, Artificial Sequence
  LRRK2 RNA guide
acagccuuuuuuaauugcugu

SEQ ID NO: 15237 - RNA, 21 nt, Artificial Sequence
  LRRK2 RNA guide
acuagguuucuucaacagcaa

SEQ ID NO: 15238 - RNA, 21 nt, Artificial Sequence
  LRRK2 RNA guide
agcaauuaaaaaaggcugugc

SEQ ID NO: 15239 - RNA, 21 nt, Artificial Sequence
  LRRK2 RNA guide
agccuuuuuuaauugcuguug

SEQ ID NO: 15240 - RNA, 21 nt, Artificial Sequence
  LRRK2 RNA guide
aggcacagccuuuuuuaauug

SEQ ID NO: 15241 - RNA, 21 nt, Artificial Sequence
  LRRK2 RNA guide
agguuucuucaacagcaauua

SEQ ID NO: 15242 - RNA, 21 nt, Artificial Sequence
  LRRK2 RNA guide
auaaggcacagccuuuuuuaa

SEQ ID NO: 15243 - RNA, 21 nt, Artificial Sequence
  LRRK2 RNA guide
auacuagguuucuucaacagc

SEQ ID NO: 15244 - RNA, 21 nt, Artificial Sequence
  LRRK2 RNA guide
auugcuguugaagaaaccuag

SEQ ID NO: 15245 - RNA, 21 nt, Artificial Sequence
  LRRK2 RNA guide
caaauacuagguuucuucaac

SEQ ID NO: 15246 - RNA, 21 nt, Artificial Sequence
  LRRK2 RNA guide
caacagcaauuaaaaaaggcu

SEQ ID NO: 15247 - RNA, 21 nt, Artificial Sequence
  LRRK2 RNA guide
caauuaaaaaaggcugugccu

SEQ ID NO: 15248 - RNA, 21 nt, Artificial Sequence
  LRRK2 RNA guide
cacagccuuuuuuaauugcug

SEQ ID NO: 15249 - RNA, 21 nt, Artificial Sequence
  LRRK2 RNA guide
cagcaauuaaaaaaggcugug

SEQ ID NO: 15250 - RNA, 21 nt, Artificial Sequence
  LRRK2 RNA guide
cagccuuuuuuaauugcuguu

SEQ ID NO: 15251 - RNA, 21 nt, Artificial Sequence
  LRRK2 RNA guide
cuagguuucuucaacagcaau

SEQ ID NO: 15252 - RNA, 21 nt, Artificial Sequence
  LRRK2 RNA guide
gcaauuaaaaaaggcugugcc

SEQ ID NO: 15253 - RNA, 21 nt, Artificial Sequence
  LRRK2 RNA guide
gcacagccuuuuuuaauugcu

SEQ ID NO: 15254 - RNA, 21 nt, Artificial Sequence
  LRRK2 RNA guide
gccuuuuuuaauugcuguuga

SEQ ID NO: 15255 - RNA, 21 nt, Artificial Sequence
  LRRK2 RNA guide
ggcacagccuuuuuuaauugc

SEQ ID NO: 15256 - RNA, 21 nt, Artificial Sequence
  LRRK2 RNA guide
gguuucuucaacagcaauuaa

SEQ ID NO: 15257 - RNA, 21 nt, Artificial Sequence
  LRRK2 RNA guide
guuauaaggcacagccuuuuu

SEQ ID NO: 15258 - RNA, 21 nt, Artificial Sequence
  LRRK2 RNA guide
uaaggcacagccuuuuuuaau

SEQ ID NO: 15259 - RNA, 21 nt, Artificial Sequence
  LRRK2 RNA guide
uaauugcuguugaagaaaccu

SEQ ID NO: 15260 - RNA, 21 nt, Artificial Sequence
  LRRK2 RNA guide
uacuagguuucuucaacagca

SEQ ID NO: 15261 - RNA, 21 nt, Artificial Sequence
  LRRK2 RNA guide
uagguuucuucaacagcaauu

SEQ ID NO: 15262 - RNA, 21 nt, Artificial Sequence
  LRRK2 RNA guide
uauaaggcacagccuuuuuua

SEQ ID NO: 15263 - RNA, 21 nt, Artificial Sequence
  LRRK2 RNA guide
ucaacagcaauuaaaaaaggc

SEQ ID NO: 15264 - RNA, 21 nt, Artificial Sequence
  LRRK2 RNA guide
uuaauugcuguugaagaaacc

SEQ ID NO: 15265 - RNA, 21 nt, Artificial Sequence
  LRRK2 RNA guide
uuauaaggcacagccuuuuuu

SEQ ID NO: 15266 - RNA, 21 nt, Artificial Sequence
  LRRK2 RNA guide
uugcuguugaagaaaccuagu

SEQ ID NO: 15267 - RNA, 22 nt, Artificial Sequence
  LRRK2 RNA guide
aaauacuagguuucuucaacag

SEQ ID NO: 15268 - RNA, 22 nt, Artificial Sequence
  LRRK2 RNA guide
aacagcaauuaaaaaaggcugu

SEQ ID NO: 15269 - RNA, 22 nt, Artificial Sequence
  LRRK2 RNA guide
aaggcacagccuuuuuuaauug

SEQ ID NO: 15270 - RNA, 22 nt, Artificial Sequence
  LRRK2 RNA guide
aauacuagguuucuucaacagc

SEQ ID NO: 15271 - RNA, 22 nt, Artificial Sequence
  LRRK2 RNA guide
aauugcuguugaagaaaccuag

SEQ ID NO: 15272 - RNA, 22 nt, Artificial Sequence
  LRRK2 RNA guide
acagcaauuaaaaaaggcugug

SEQ ID NO: 15273 - RNA, 22 nt, Artificial Sequence
  LRRK2 RNA guide
acagccuuuuuuaauugcuguu

SEQ ID NO: 15274 - RNA, 22 nt, Artificial Sequence
  LRRK2 RNA guide
acuagguuucuucaacagcaau

SEQ ID NO: 15275 - RNA, 22 nt, Artificial Sequence
  LRRK2 RNA guide
agcaauuaaaaaaggcugugcc

SEQ ID NO: 15276 - RNA, 22 nt, Artificial Sequence
  LRRK2 RNA guide
agccuuuuuuaauugcuguuga

SEQ ID NO: 15277 - RNA, 22 nt, Artificial Sequence
  LRRK2 RNA guide
aggcacagccuuuuuuaauugc

SEQ ID NO: 15278 - RNA, 22 nt, Artificial Sequence
  LRRK2 RNA guide
agguuucuucaacagcaauuaa

SEQ ID NO: 15279 - RNA, 22 nt, Artificial Sequence
  LRRK2 RNA guide
auaaggcacagccuuuuuuaau

SEQ ID NO: 15280 - RNA, 22 nt, Artificial Sequence
  LRRK2 RNA guide
auacuagguuucuucaacagca

SEQ ID NO: 15281 - RNA, 22 nt, Artificial Sequence
  LRRK2 RNA guide
auugcuguugaagaaaccuagu

SEQ ID NO: 15282 - RNA, 22 nt, Artificial Sequence
  LRRK2 RNA guide
caaauacuagguuucuucaaca

SEQ ID NO: 15283 - RNA, 22 nt, Artificial Sequence
  LRRK2 RNA guide
caacagcaauuaaaaaaggcug

SEQ ID NO: 15284 - RNA, 22 nt, Artificial Sequence
  LRRK2 RNA guide
caauuaaaaaaggcugugccuu

SEQ ID NO: 15285 - RNA, 22 nt, Artificial Sequence
  LRRK2 RNA guide
cacagccuuuuuuaauugcugu

SEQ ID NO: 15286 - RNA, 22 nt, Artificial Sequence
  LRRK2 RNA guide
cagcaauuaaaaaaggcugugc

SEQ ID NO: 15287 - RNA, 22 nt, Artificial Sequence
  LRRK2 RNA guide
cagccuuuuuuaauugcuguug

SEQ ID NO: 15288 - RNA, 22 nt, Artificial Sequence
  LRRK2 RNA guide
ccuuuuuuaauugcuguugaag

SEQ ID NO: 15289 - RNA, 22 nt, Artificial Sequence
  LRRK2 RNA guide
cuagguuucuucaacagcaauu

SEQ ID NO: 15290 - RNA, 22 nt, Artificial Sequence
  LRRK2 RNA guide
cuucaacagcaauuaaaaaagg

SEQ ID NO: 15291 - RNA, 22 nt, Artificial Sequence
  LRRK2 RNA guide
gcaauuaaaaaaggcugugccu

SEQ ID NO: 15292 - RNA, 22 nt, Artificial Sequence
  LRRK2 RNA guide
gcacagccuuuuuuaauugcug

SEQ ID NO: 15293 - RNA, 22 nt, Artificial Sequence
  LRRK2 RNA guide
gccuuuuuuaauugcuguugaa

SEQ ID NO: 15294 - RNA, 22 nt, Artificial Sequence
  LRRK2 RNA guide
ggcacagccuuuuuuaauugcu

SEQ ID NO: 15295 - RNA, 22 nt, Artificial Sequence
  LRRK2 RNA guide
gguuauaaggcacagccuuuuu

SEQ ID NO: 15296 - RNA, 22 nt, Artificial Sequence
  LRRK2 RNA guide
gguuucuucaacagcaauuaaa

SEQ ID NO: 15297 - RNA, 22 nt, Artificial Sequence
  LRRK2 RNA guide
guuauaaggcacagccuuuuuu

SEQ ID NO: 15298 - RNA, 22 nt, Artificial Sequence
  LRRK2 RNA guide
uaaggcacagccuuuuuuaauu

SEQ ID NO: 15299 - RNA, 22 nt, Artificial Sequence
  LRRK2 RNA guide
uaauugcuguugaagaaaccua

SEQ ID NO: 15300 - RNA, 22 nt, Artificial Sequence
  LRRK2 RNA guide
uacuagguuucuucaacagcaa

SEQ ID NO: 15301 - RNA, 22 nt, Artificial Sequence
  LRRK2 RNA guide
uagguuucuucaacagcaauua

SEQ ID NO: 15302 - RNA, 22 nt, Artificial Sequence
  LRRK2 RNA guide
uauaaggcacagccuuuuuuaa

SEQ ID NO: 15303 - RNA, 22 nt, Artificial Sequence
  LRRK2 RNA guide
ucaaauacuagguuucuucaac

SEQ ID NO: 15304 - RNA, 22 nt, Artificial Sequence
  LRRK2 RNA guide
ucaacagcaauuaaaaaaggcu

SEQ ID NO: 15305 - RNA, 22 nt, Artificial Sequence
  LRRK2 RNA guide
uuaauugcuguugaagaaaccu

SEQ ID NO: 15306 - RNA, 22 nt, Artificial Sequence
  LRRK2 RNA guide
uuauaaggcacagccuuuuuua

SEQ ID NO: 15307 - RNA, 22 nt, Artificial Sequence
  LRRK2 RNA guide
uucaacagcaauuaaaaaaggc

SEQ ID NO: 15308 - RNA, 22 nt, Artificial Sequence
  LRRK2 RNA guide
uugcuguugaagaaaccuagua

SEQ ID NO: 15309 - RNA, 22 nt, Artificial Sequence
  LRRK2 RNA guide
uuuaauugcuguugaagaaacc

SEQ ID NO: 15310 - RNA, 20 nt, Artificial Sequence
  LRRK2 RNA guide
aaauacugggaguguaaaac

SEQ ID NO: 15311 - RNA, 20 nt, Artificial Sequence
  LRRK2 RNA guide
aaggugguuuuacacuccca

SEQ ID NO: 15312 - RNA, 20 nt, Artificial Sequence
  LRRK2 RNA guide
aauaaggugguuuuacacuc

SEQ ID NO: 15313 - RNA, 20 nt, Artificial Sequence
  LRRK2 RNA guide
aauacugggaguguaaaacc

SEQ ID NO: 15314 - RNA, 20 nt, Artificial Sequence
  LRRK2 RNA guide
acacucccaguauuucccac

SEQ ID NO: 15315 - RNA, 20 nt, Artificial Sequence
  LRRK2 RNA guide
acugggaguguaaaaccacc

SEQ ID NO: 15316 - RNA, 20 nt, Artificial Sequence
  LRRK2 RNA guide
aggugguuuuacacucccag

SEQ ID NO: 15317 - RNA, 20 nt, Artificial Sequence
  LRRK2 RNA guide
aguguaaaaccaccuuauug

SEQ ID NO: 15318 - RNA, 20 nt, Artificial Sequence
  LRRK2 RNA guide
auaaggugguuuuacacucc

SEQ ID NO: 15319 - RNA, 20 nt, Artificial Sequence
  LRRK2 RNA guide
auacugggaguguaaaacca

SEQ ID NO: 15320 - RNA, 20 nt, Artificial Sequence
  LRRK2 RNA guide
auugcugcaauaaggugguu

SEQ ID NO: 15321 - RNA, 20 nt, Artificial Sequence
  LRRK2 RNA guide
auugugggaaauacugggag

SEQ ID NO: 15322 - RNA, 20 nt, Artificial Sequence
  LRRK2 RNA guide
caauaaggugguuuuacacu

SEQ ID NO: 15323 - RNA, 20 nt, Artificial Sequence
  LRRK2 RNA guide
cugcaauaaggugguuuuac

SEQ ID NO: 15324 - RNA, 20 nt, Artificial Sequence
  LRRK2 RNA guide
cugggaguguaaaaccaccu

SEQ ID NO: 15325 - RNA, 20 nt, Artificial Sequence
  LRRK2 RNA guide
gaaauacugggaguguaaaa

SEQ ID NO: 15326 - RNA, 20 nt, Artificial Sequence
  LRRK2 RNA guide
gaguguaaaaccaccuuauu

SEQ ID NO: 15327 - RNA, 20 nt, Artificial Sequence
  LRRK2 RNA guide
gauugugggaaauacuggga

SEQ ID NO: 15328 - RNA, 20 nt, Artificial Sequence
  LRRK2 RNA guide
gcaauaaggugguuuuacac

SEQ ID NO: 15329 - RNA, 20 nt, Artificial Sequence
  LRRK2 RNA guide
gcugcaauaaggugguuuua

SEQ ID NO: 15330 - RNA, 20 nt, Artificial Sequence
  LRRK2 RNA guide
ggaaauacugggaguguaaa

SEQ ID NO: 15331 - RNA, 20 nt, Artificial Sequence
  LRRK2 RNA guide
ggaguguaaaaccaccuuau

SEQ ID NO: 15332 - RNA, 20 nt, Artificial Sequence
  LRRK2 RNA guide
gggaaauacugggaguguaa

SEQ ID NO: 15333 - RNA, 20 nt, Artificial Sequence
  LRRK2 RNA guide
gggaguguaaaaccaccuua

SEQ ID NO: 15334 - RNA, 20 nt, Artificial Sequence
  LRRK2 RNA guide
ggugguuuuacacucccagu

SEQ ID NO: 15335 - RNA, 20 nt, Artificial Sequence
  LRRK2 RNA guide
gguuuuacacucccaguauu

SEQ ID NO: 15336 - RNA, 20 nt, Artificial Sequence
  LRRK2 RNA guide
gugggaaauacugggagugu

SEQ ID NO: 15337 - RNA, 20 nt, Artificial Sequence
  LRRK2 RNA guide
gugguuuuacacucccagua

SEQ ID NO: 15338 - RNA, 20 nt, Artificial Sequence
  LRRK2 RNA guide
guguaaaaccaccuuauugc

SEQ ID NO: 15339 - RNA, 20 nt, Artificial Sequence
  LRRK2 RNA guide
guuuuacacucccaguauuu

SEQ ID NO: 15340 - RNA, 20 nt, Artificial Sequence
  LRRK2 RNA guide
uaaggugguuuuacacuccc

SEQ ID NO: 15341 - RNA, 20 nt, Artificial Sequence
  LRRK2 RNA guide
uacacucccaguauuuccca

SEQ ID NO: 15342 - RNA, 20 nt, Artificial Sequence
  LRRK2 RNA guide
uacugggaguguaaaaccac

SEQ ID NO: 15343 - RNA, 20 nt, Artificial Sequence
  LRRK2 RNA guide
ugauugugggaaauacuggg

SEQ ID NO: 15344 - RNA, 20 nt, Artificial Sequence
  LRRK2 RNA guide
ugcaauaaggugguuuuaca

SEQ ID NO: 15345 - RNA, 20 nt, Artificial Sequence
  LRRK2 RNA guide
ugcugcaauaaggugguuuu

SEQ ID NO: 15346 - RNA, 20 nt, Artificial Sequence
  LRRK2 RNA guide
ugggaaauacugggagugua

SEQ ID NO: 15347 - RNA, 20 nt, Artificial Sequence
  LRRK2 RNA guide
ugggaguguaaaaccaccuu

SEQ ID NO: 15348 - RNA, 20 nt, Artificial Sequence
  LRRK2 RNA guide
ugguuuuacacucccaguau

SEQ ID NO: 15349 - RNA, 20 nt, Artificial Sequence
  LRRK2 RNA guide
uguaaaaccaccuuauugca

SEQ ID NO: 15350 - RNA, 20 nt, Artificial Sequence
  LRRK2 RNA guide
ugugggaaauacugggagug

SEQ ID NO: 15351 - RNA, 20 nt, Artificial Sequence
  LRRK2 RNA guide
uuacacucccaguauuuccc

SEQ ID NO: 15352 - RNA, 20 nt, Artificial Sequence
  LRRK2 RNA guide
uugcugcaauaaggugguuu

SEQ ID NO: 15353 - RNA, 20 nt, Artificial Sequence
  LRRK2 RNA guide
uugugggaaauacugggagu

SEQ ID NO: 15354 - RNA, 20 nt, Artificial Sequence
  LRRK2 RNA guide
uuuacacucccaguauuucc

SEQ ID NO: 15355 - RNA, 20 nt, Artificial Sequence
  LRRK2 RNA guide
uuuuacacucccaguauuuc

SEQ ID NO: 15356 - RNA, 21 nt, Artificial Sequence
  LRRK2 RNA guide
aaauacugggaguguaaaacc

SEQ ID NO: 15357 - RNA, 21 nt, Artificial Sequence
  LRRK2 RNA guide
aaggugguuuuacacucccag

SEQ ID NO: 15358 - RNA, 21 nt, Artificial Sequence
  LRRK2 RNA guide
aauaaggugguuuuacacucc

SEQ ID NO: 15359 - RNA, 21 nt, Artificial Sequence
  LRRK2 RNA guide
aauacugggaguguaaaacca

SEQ ID NO: 15360 - RNA, 21 nt, Artificial Sequence
  LRRK2 RNA guide
aauugcugcaauaaggugguu

SEQ ID NO: 15361 - RNA, 21 nt, Artificial Sequence
  LRRK2 RNA guide
acacucccaguauuucccaca

SEQ ID NO: 15362 - RNA, 21 nt, Artificial Sequence
  LRRK2 RNA guide
acugggaguguaaaaccaccu

SEQ ID NO: 15363 - RNA, 21 nt, Artificial Sequence
  LRRK2 RNA guide
aggugguuuuacacucccagu

SEQ ID NO: 15364 - RNA, 21 nt, Artificial Sequence
  LRRK2 RNA guide
aguguaaaaccaccuuauugc

SEQ ID NO: 15365 - RNA, 21 nt, Artificial Sequence
  LRRK2 RNA guide
auaaggugguuuuacacuccc

SEQ ID NO: 15366 - RNA, 21 nt, Artificial Sequence
  LRRK2 RNA guide
auacugggaguguaaaaccac

SEQ ID NO: 15367 - RNA, 21 nt, Artificial Sequence
  LRRK2 RNA guide
augauugugggaaauacuggg

SEQ ID NO: 15368 - RNA, 21 nt, Artificial Sequence
  LRRK2 RNA guide
auugcugcaauaaggugguuu

SEQ ID NO: 15369 - RNA, 21 nt, Artificial Sequence
  LRRK2 RNA guide
auugugggaaauacugggagu

SEQ ID NO: 15370 - RNA, 21 nt, Artificial Sequence
  LRRK2 RNA guide
caauaaggugguuuuacacuc

SEQ ID NO: 15371 - RNA, 21 nt, Artificial Sequence
  LRRK2 RNA guide
cugcaauaaggugguuuuaca

SEQ ID NO: 15372 - RNA, 21 nt, Artificial Sequence
  LRRK2 RNA guide
cugggaguguaaaaccaccuu

SEQ ID NO: 15373 - RNA, 21 nt, Artificial Sequence
  LRRK2 RNA guide
gaaauacugggaguguaaaac

SEQ ID NO: 15374 - RNA, 21 nt, Artificial Sequence
  LRRK2 RNA guide
gaguguaaaaccaccuuauug

SEQ ID NO: 15375 - RNA, 21 nt, Artificial Sequence
  LRRK2 RNA guide
gauugugggaaauacugggag

SEQ ID NO: 15376 - RNA, 21 nt, Artificial Sequence
  LRRK2 RNA guide
gcaauaaggugguuuuacacu

SEQ ID NO: 15377 - RNA, 21 nt, Artificial Sequence
  LRRK2 RNA guide
gcugcaauaaggugguuuuac

SEQ ID NO: 15378 - RNA, 21 nt, Artificial Sequence
  LRRK2 RNA guide
ggaaauacugggaguguaaaa

SEQ ID NO: 15379 - RNA, 21 nt, Artificial Sequence
  LRRK2 RNA guide
ggaguguaaaaccaccuuauu

SEQ ID NO: 15380 - RNA, 21 nt, Artificial Sequence
  LRRK2 RNA guide
gggaaauacugggaguguaaa

SEQ ID NO: 15381 - RNA, 21 nt, Artificial Sequence
  LRRK2 RNA guide
gggaguguaaaaccaccuuau

SEQ ID NO: 15382 - RNA, 21 nt, Artificial Sequence
  LRRK2 RNA guide
ggugguuuuacacucccagua

SEQ ID NO: 15383 - RNA, 21 nt, Artificial Sequence
  LRRK2 RNA guide
gguuuuacacucccaguauuu

SEQ ID NO: 15384 - RNA, 21 nt, Artificial Sequence
  LRRK2 RNA guide
gugggaaauacugggagugua

SEQ ID NO: 15385 - RNA, 21 nt, Artificial Sequence
  LRRK2 RNA guide
gugguuuuacacucccaguau

SEQ ID NO: 15386 - RNA, 21 nt, Artificial Sequence
  LRRK2 RNA guide
guguaaaaccaccuuauugca

SEQ ID NO: 15387 - RNA, 21 nt, Artificial Sequence
  LRRK2 RNA guide
guuuuacacucccaguauuuc

SEQ ID NO: 15388 - RNA, 21 nt, Artificial Sequence
  LRRK2 RNA guide
uaaggugguuuuacacuccca

SEQ ID NO: 15389 - RNA, 21 nt, Artificial Sequence
  LRRK2 RNA guide
uacacucccaguauuucccac

SEQ ID NO: 15390 - RNA, 21 nt, Artificial Sequence
  LRRK2 RNA guide
uacugggaguguaaaaccacc

SEQ ID NO: 15391 - RNA, 21 nt, Artificial Sequence
  LRRK2 RNA guide
ugauugugggaaauacuggga

SEQ ID NO: 15392 - RNA, 21 nt, Artificial Sequence
  LRRK2 RNA guide
ugcaauaaggugguuuuacac

SEQ ID NO: 15393 - RNA, 21 nt, Artificial Sequence
  LRRK2 RNA guide
ugcugcaauaaggugguuuua

SEQ ID NO: 15394 - RNA, 21 nt, Artificial Sequence
  LRRK2 RNA guide
ugggaaauacugggaguguaa

SEQ ID NO: 15395 - RNA, 21 nt, Artificial Sequence
  LRRK2 RNA guide
ugggaguguaaaaccaccuua

SEQ ID NO: 15396 - RNA, 21 nt, Artificial Sequence
  LRRK2 RNA guide
ugguuuuacacucccaguauu

SEQ ID NO: 15397 - RNA, 21 nt, Artificial Sequence
  LRRK2 RNA guide
uguaaaaccaccuuauugcag

SEQ ID NO: 15398 - RNA, 21 nt, Artificial Sequence
  LRRK2 RNA guide
ugugggaaauacugggagugu

SEQ ID NO: 15399 - RNA, 21 nt, Artificial Sequence
  LRRK2 RNA guide
uuacacucccaguauuuccca

SEQ ID NO: 15400 - RNA, 21 nt, Artificial Sequence
  LRRK2 RNA guide
uugcugcaauaaggugguuuu

SEQ ID NO: 15401 - RNA, 21 nt, Artificial Sequence
  LRRK2 RNA guide
uugugggaaauacugggagug

SEQ ID NO: 15402 - RNA, 21 nt, Artificial Sequence
  LRRK2 RNA guide
uuuacacucccaguauuuccc

SEQ ID NO: 15403 - RNA, 21 nt, Artificial Sequence
  LRRK2 RNA guide
uuuuacacucccaguauuucc

SEQ ID NO: 15404 - RNA, 22 nt, Artificial Sequence
  LRRK2 RNA guide
aaauacugggaguguaaaacca

SEQ ID NO: 15405 - RNA, 22 nt, Artificial Sequence
  LRRK2 RNA guide
aaggugguuuuacacucccagu

SEQ ID NO: 15406 - RNA, 22 nt, Artificial Sequence
  LRRK2 RNA guide
aauaaggugguuuuacacuccc

SEQ ID NO: 15407 - RNA, 22 nt, Artificial Sequence
  LRRK2 RNA guide
aauacugggaguguaaaaccac

SEQ ID NO: 15408 - RNA, 22 nt, Artificial Sequence
  LRRK2 RNA guide
aauugcugcaauaaggugguuu

SEQ ID NO: 15409 - RNA, 22 nt, Artificial Sequence
  LRRK2 RNA guide
acacucccaguauuucccacaa

SEQ ID NO: 15410 - RNA, 22 nt, Artificial Sequence
  LRRK2 RNA guide
acugggaguguaaaaccaccuu

SEQ ID NO: 15411 - RNA, 22 nt, Artificial Sequence
  LRRK2 RNA guide
aggugguuuuacacucccagua

SEQ ID NO: 15412 - RNA, 22 nt, Artificial Sequence
  LRRK2 RNA guide
aguguaaaaccaccuuauugca

SEQ ID NO: 15413 - RNA, 22 nt, Artificial Sequence
  LRRK2 RNA guide
auaaggugguuuuacacuccca

SEQ ID NO: 15414 - RNA, 22 nt, Artificial Sequence
  LRRK2 RNA guide
auacugggaguguaaaaccacc

SEQ ID NO: 15415 - RNA, 22 nt, Artificial Sequence
  LRRK2 RNA guide
augauugugggaaauacuggga

SEQ ID NO: 15416 - RNA, 22 nt, Artificial Sequence
  LRRK2 RNA guide
auugcugcaauaaggugguuuu

SEQ ID NO: 15417 - RNA, 22 nt, Artificial Sequence
  LRRK2 RNA guide
auugugggaaauacugggagug

SEQ ID NO: 15418 - RNA, 22 nt, Artificial Sequence
  LRRK2 RNA guide
caauaaggugguuuuacacucc

SEQ ID NO: 15419 - RNA, 22 nt, Artificial Sequence
  LRRK2 RNA guide
cugcaauaaggugguuuuacac

SEQ ID NO: 15420 - RNA, 22 nt, Artificial Sequence
  LRRK2 RNA guide
cugggaguguaaaaccaccuua

SEQ ID NO: 15421 - RNA, 22 nt, Artificial Sequence
  LRRK2 RNA guide
gaaauacugggaguguaaaacc

SEQ ID NO: 15422 - RNA, 22 nt, Artificial Sequence
  LRRK2 RNA guide
gaguguaaaaccaccuuauugc

SEQ ID NO: 15423 - RNA, 22 nt, Artificial Sequence
  LRRK2 RNA guide
gauugugggaaauacugggagu

SEQ ID NO: 15424 - RNA, 22 nt, Artificial Sequence
  LRRK2 RNA guide
gcaauaaggugguuuuacacuc

SEQ ID NO: 15425 - RNA, 22 nt, Artificial Sequence
  LRRK2 RNA guide
gcugcaauaaggugguuuuaca

SEQ ID NO: 15426 - RNA, 22 nt, Artificial Sequence
  LRRK2 RNA guide
ggaaauacugggaguguaaaac

SEQ ID NO: 15427 - RNA, 22 nt, Artificial Sequence
  LRRK2 RNA guide
ggaguguaaaaccaccuuauug

SEQ ID NO: 15428 - RNA, 22 nt, Artificial Sequence
  LRRK2 RNA guide
gggaaauacugggaguguaaaa

SEQ ID NO: 15429 - RNA, 22 nt, Artificial Sequence
  LRRK2 RNA guide
gggaguguaaaaccaccuuauu

SEQ ID NO: 15430 - RNA, 22 nt, Artificial Sequence
  LRRK2 RNA guide
ggugguuuuacacucccaguau

SEQ ID NO: 15431 - RNA, 22 nt, Artificial Sequence
  LRRK2 RNA guide
gguuuuacacucccaguauuuc

SEQ ID NO: 15432 - RNA, 22 nt, Artificial Sequence
  LRRK2 RNA guide
gugggaaauacugggaguguaa

SEQ ID NO: 15433 - RNA, 22 nt, Artificial Sequence
  LRRK2 RNA guide
gugguuuuacacucccaguauu

SEQ ID NO: 15434 - RNA, 22 nt, Artificial Sequence
  LRRK2 RNA guide
guguaaaaccaccuuauugcag

SEQ ID NO: 15435 - RNA, 22 nt, Artificial Sequence
  LRRK2 RNA guide
guuuuacacucccaguauuucc

SEQ ID NO: 15436 - RNA, 22 nt, Artificial Sequence
  LRRK2 RNA guide
uaaggugguuuuacacucccag

SEQ ID NO: 15437 - RNA, 22 nt, Artificial Sequence
  LRRK2 RNA guide
uaauugcugcaauaaggugguu

SEQ ID NO: 15438 - RNA, 22 nt, Artificial Sequence
  LRRK2 RNA guide
uacacucccaguauuucccaca

SEQ ID NO: 15439 - RNA, 22 nt, Artificial Sequence
  LRRK2 RNA guide
uacugggaguguaaaaccaccu

SEQ ID NO: 15440 - RNA, 22 nt, Artificial Sequence
  LRRK2 RNA guide
uaugauugugggaaauacuggg

SEQ ID NO: 15441 - RNA, 22 nt, Artificial Sequence
  LRRK2 RNA guide
ugauugugggaaauacugggag

SEQ ID NO: 15442 - RNA, 22 nt, Artificial Sequence
  LRRK2 RNA guide
ugcaauaaggugguuuuacacu

SEQ ID NO: 15443 - RNA, 22 nt, Artificial Sequence
  LRRK2 RNA guide
ugcugcaauaaggugguuuuac

SEQ ID NO: 15444 - RNA, 22 nt, Artificial Sequence
  LRRK2 RNA guide
ugggaaauacugggaguguaaa

SEQ ID NO: 15445 - RNA, 22 nt, Artificial Sequence
  LRRK2 RNA guide
ugggaguguaaaaccaccuuau

SEQ ID NO: 15446 - RNA, 22 nt, Artificial Sequence
  LRRK2 RNA guide
ugguuuuacacucccaguauuu

SEQ ID NO: 15447 - RNA, 22 nt, Artificial Sequence
  LRRK2 RNA guide
uguaaaaccaccuuauugcagc

SEQ ID NO: 15448 - RNA, 22 nt, Artificial Sequence
  LRRK2 RNA guide
ugugggaaauacugggagugua

SEQ ID NO: 15449 - RNA, 22 nt, Artificial Sequence
  LRRK2 RNA guide
uuacacucccaguauuucccac

SEQ ID NO: 15450 - RNA, 22 nt, Artificial Sequence
  LRRK2 RNA guide
uugcugcaauaaggugguuuua

SEQ ID NO: 15451 - RNA, 22 nt, Artificial Sequence
  LRRK2 RNA guide
uugugggaaauacugggagugu

SEQ ID NO: 15452 - RNA, 22 nt, Artificial Sequence
  LRRK2 RNA guide
uuuacacucccaguauuuccca

SEQ ID NO: 15453 - RNA, 22 nt, Artificial Sequence
  LRRK2 RNA guide
uuuuacacucccaguauuuccc

SEQ ID NO: 15454 - RNA, 20 nt, Artificial Sequence
  LRRK2 RNA guide
aaagaauggccuauccaaau

SEQ ID NO: 15455 - RNA, 20 nt, Artificial Sequence
  LRRK2 RNA guide
aagaauggccuauccaaaua

SEQ ID NO: 15456 - RNA, 20 nt, Artificial Sequence
  LRRK2 RNA guide
aauggccuauccaaauaaga

SEQ ID NO: 15457 - RNA, 20 nt, Artificial Sequence
  LRRK2 RNA guide
acaguuggcauagaugugaa

SEQ ID NO: 15458 - RNA, 20 nt, Artificial Sequence
  LRRK2 RNA guide
agaauggccuauccaaauaa

SEQ ID NO: 15459 - RNA, 20 nt, Artificial Sequence
  LRRK2 RNA guide
agaugugaaagaauggccua

SEQ ID NO: 15460 - RNA, 20 nt, Artificial Sequence
  LRRK2 RNA guide
aggccauucuuucacaucua

SEQ ID NO: 15461 - RNA, 20 nt, Artificial Sequence
  LRRK2 RNA guide
aguuggcauagaugugaaag

SEQ ID NO: 15462 - RNA, 20 nt, Artificial Sequence
  LRRK2 RNA guide
auagaugugaaagaauggcc

SEQ ID NO: 15463 - RNA, 20 nt, Artificial Sequence
  LRRK2 RNA guide
auaggccauucuuucacauc

SEQ ID NO: 15464 - RNA, 20 nt, Artificial Sequence
  LRRK2 RNA guide
augugaaagaauggccuauc

SEQ ID NO: 15465 - RNA, 20 nt, Artificial Sequence
  LRRK2 RNA guide
auucuuucacaucuaugcca

SEQ ID NO: 15466 - RNA, 20 nt, Artificial Sequence
  LRRK2 RNA guide
auuuggauaggccauucuuu

SEQ ID NO: 15467 - RNA, 20 nt, Artificial Sequence
  LRRK2 RNA guide
cacaguuggcauagauguga

SEQ ID NO: 15468 - RNA, 20 nt, Artificial Sequence
  LRRK2 RNA guide
caguuggcauagaugugaaa

SEQ ID NO: 15469 - RNA, 20 nt, Artificial Sequence
  LRRK2 RNA guide
cauagaugugaaagaauggc

SEQ ID NO: 15470 - RNA, 20 nt, Artificial Sequence
  LRRK2 RNA guide
cauucuuucacaucuaugcc

SEQ ID NO: 15471 - RNA, 20 nt, Artificial Sequence
  LRRK2 RNA guide
ccauucuuucacaucuaugc

SEQ ID NO: 15472 - RNA, 20 nt, Artificial Sequence
  LRRK2 RNA guide
cucuuauuuggauaggccau

SEQ ID NO: 15473 - RNA, 20 nt, Artificial Sequence
  LRRK2 RNA guide
cuuauuuggauaggccauuc

SEQ ID NO: 15474 - RNA, 20 nt, Artificial Sequence
  LRRK2 RNA guide
gaaagaauggccuauccaaa

SEQ ID NO: 15475 - RNA, 20 nt, Artificial Sequence
  LRRK2 RNA guide
gaauggccuauccaaauaag

SEQ ID NO: 15476 - RNA, 20 nt, Artificial Sequence
  LRRK2 RNA guide
gauaggccauucuuucacau

SEQ ID NO: 15477 - RNA, 20 nt, Artificial Sequence
  LRRK2 RNA guide
gaugugaaagaauggccuau

SEQ ID NO: 15478 - RNA, 20 nt, Artificial Sequence
  LRRK2 RNA guide
gcauagaugugaaagaaugg

SEQ ID NO: 15479 - RNA, 20 nt, Artificial Sequence
  LRRK2 RNA guide
gccauucuuucacaucuaug

SEQ ID NO: 15480 - RNA, 20 nt, Artificial Sequence
  LRRK2 RNA guide
ggauaggccauucuuucaca

SEQ ID NO: 15481 - RNA, 20 nt, Artificial Sequence
  LRRK2 RNA guide
ggcauagaugugaaagaaug

SEQ ID NO: 15482 - RNA, 20 nt, Artificial Sequence
  LRRK2 RNA guide
ggccauucuuucacaucuau

SEQ ID NO: 15483 - RNA, 20 nt, Artificial Sequence
  LRRK2 RNA guide
gucucuuauuuggauaggcc

SEQ ID NO: 15484 - RNA, 20 nt, Artificial Sequence
  LRRK2 RNA guide
gugaaagaauggccuaucca

SEQ ID NO: 15485 - RNA, 20 nt, Artificial Sequence
  LRRK2 RNA guide
guuggcauagaugugaaaga

SEQ ID NO: 15486 - RNA, 20 nt, Artificial Sequence
  LRRK2 RNA guide
uagaugugaaagaauggccu

SEQ ID NO: 15487 - RNA, 20 nt, Artificial Sequence
  LRRK2 RNA guide
uaggccauucuuucacaucu

SEQ ID NO: 15488 - RNA, 20 nt, Artificial Sequence
  LRRK2 RNA guide
uauuuggauaggccauucuu

SEQ ID NO: 15489 - RNA, 20 nt, Artificial Sequence
  LRRK2 RNA guide
ucucuuauuuggauaggcca

SEQ ID NO: 15490 - RNA, 20 nt, Artificial Sequence
  LRRK2 RNA guide
ucuuauuuggauaggccauu

SEQ ID NO: 15491 - RNA, 20 nt, Artificial Sequence
  LRRK2 RNA guide
ugaaagaauggccuauccaa

SEQ ID NO: 15492 - RNA, 20 nt, Artificial Sequence
  LRRK2 RNA guide
uggauaggccauucuuucac

SEQ ID NO: 15493 - RNA, 20 nt, Artificial Sequence
  LRRK2 RNA guide
uggcauagaugugaaagaau

SEQ ID NO: 15494 - RNA, 20 nt, Artificial Sequence
  LRRK2 RNA guide
ugucucuuauuuggauaggc

SEQ ID NO: 15495 - RNA, 20 nt, Artificial Sequence
  LRRK2 RNA guide
ugugaaagaauggccuaucc

SEQ ID NO: 15496 - RNA, 20 nt, Artificial Sequence
  LRRK2 RNA guide
uuauuuggauaggccauucu

SEQ ID NO: 15497 - RNA, 20 nt, Artificial Sequence
  LRRK2 RNA guide
uuggauaggccauucuuuca

SEQ ID NO: 15498 - RNA, 20 nt, Artificial Sequence
  LRRK2 RNA guide
uuggcauagaugugaaagaa

SEQ ID NO: 15499 - RNA, 20 nt, Artificial Sequence
  LRRK2 RNA guide
uugucucuuauuuggauagg

SEQ ID NO: 15500 - RNA, 20 nt, Artificial Sequence
  LRRK2 RNA guide
uuuggauaggccauucuuuc

SEQ ID NO: 15501 - RNA, 20 nt, Artificial Sequence
  LRRK2 RNA guide
uuugucucuuauuuggauag

SEQ ID NO: 15502 - RNA, 21 nt, Artificial Sequence
  LRRK2 RNA guide
aaagaauggccuauccaaaua

SEQ ID NO: 15503 - RNA, 21 nt, Artificial Sequence
  LRRK2 RNA guide
aagaauggccuauccaaauaa

SEQ ID NO: 15504 - RNA, 21 nt, Artificial Sequence
  LRRK2 RNA guide
aauggccuauccaaauaagag

SEQ ID NO: 15505 - RNA, 21 nt, Artificial Sequence
  LRRK2 RNA guide
acaguuggcauagaugugaaa

SEQ ID NO: 15506 - RNA, 21 nt, Artificial Sequence
  LRRK2 RNA guide
agaauggccuauccaaauaag

SEQ ID NO: 15507 - RNA, 21 nt, Artificial Sequence
  LRRK2 RNA guide
agaugugaaagaauggccuau

SEQ ID NO: 15508 - RNA, 21 nt, Artificial Sequence
  LRRK2 RNA guide
aggccauucuuucacaucuau

SEQ ID NO: 15509 - RNA, 21 nt, Artificial Sequence
  LRRK2 RNA guide
aguuggcauagaugugaaaga

SEQ ID NO: 15510 - RNA, 21 nt, Artificial Sequence
  LRRK2 RNA guide
auagaugugaaagaauggccu

SEQ ID NO: 15511 - RNA, 21 nt, Artificial Sequence
  LRRK2 RNA guide
auaggccauucuuucacaucu

SEQ ID NO: 15512 - RNA, 21 nt, Artificial Sequence
  LRRK2 RNA guide
augugaaagaauggccuaucc

SEQ ID NO: 15513 - RNA, 21 nt, Artificial Sequence
  LRRK2 RNA guide
auucuuucacaucuaugccaa

SEQ ID NO: 15514 - RNA, 21 nt, Artificial Sequence
  LRRK2 RNA guide
auuuggauaggccauucuuuc

SEQ ID NO: 15515 - RNA, 21 nt, Artificial Sequence
  LRRK2 RNA guide
cacaguuggcauagaugugaa

SEQ ID NO: 15516 - RNA, 21 nt, Artificial Sequence
  LRRK2 RNA guide
caguuggcauagaugugaaag

SEQ ID NO: 15517 - RNA, 21 nt, Artificial Sequence
  LRRK2 RNA guide
cauagaugugaaagaauggcc

SEQ ID NO: 15518 - RNA, 21 nt, Artificial Sequence
  LRRK2 RNA guide
cauucuuucacaucuaugcca

SEQ ID NO: 15519 - RNA, 21 nt, Artificial Sequence
  LRRK2 RNA guide
ccacaguuggcauagauguga

SEQ ID NO: 15520 - RNA, 21 nt, Artificial Sequence
  LRRK2 RNA guide
ccauucuuucacaucuaugcc

SEQ ID NO: 15521 - RNA, 21 nt, Artificial Sequence
  LRRK2 RNA guide
cucuuauuuggauaggccauu

SEQ ID NO: 15522 - RNA, 21 nt, Artificial Sequence
  LRRK2 RNA guide
cuuauuuggauaggccauucu

SEQ ID NO: 15523 - RNA, 21 nt, Artificial Sequence
  LRRK2 RNA guide
gaaagaauggccuauccaaau

SEQ ID NO: 15524 - RNA, 21 nt, Artificial Sequence
  LRRK2 RNA guide
gaauggccuauccaaauaaga

SEQ ID NO: 15525 - RNA, 21 nt, Artificial Sequence
  LRRK2 RNA guide
gauaggccauucuuucacauc

SEQ ID NO: 15526 - RNA, 21 nt, Artificial Sequence
  LRRK2 RNA guide
gaugugaaagaauggccuauc

SEQ ID NO: 15527 - RNA, 21 nt, Artificial Sequence
  LRRK2 RNA guide
gcauagaugugaaagaauggc

SEQ ID NO: 15528 - RNA, 21 nt, Artificial Sequence
  LRRK2 RNA guide
gccauucuuucacaucuaugc

SEQ ID NO: 15529 - RNA, 21 nt, Artificial Sequence
  LRRK2 RNA guide
ggauaggccauucuuucacau

SEQ ID NO: 15530 - RNA, 21 nt, Artificial Sequence
  LRRK2 RNA guide
ggcauagaugugaaagaaugg

SEQ ID NO: 15531 - RNA, 21 nt, Artificial Sequence
  LRRK2 RNA guide
ggccauucuuucacaucuaug

SEQ ID NO: 15532 - RNA, 21 nt, Artificial Sequence
  LRRK2 RNA guide
gucucuuauuuggauaggcca

SEQ ID NO: 15533 - RNA, 21 nt, Artificial Sequence
  LRRK2 RNA guide
gugaaagaauggccuauccaa

SEQ ID NO: 15534 - RNA, 21 nt, Artificial Sequence
  LRRK2 RNA guide
guuggcauagaugugaaagaa

SEQ ID NO: 15535 - RNA, 21 nt, Artificial Sequence
  LRRK2 RNA guide
uagaugugaaagaauggccua

SEQ ID NO: 15536 - RNA, 21 nt, Artificial Sequence
  LRRK2 RNA guide
uaggccauucuuucacaucua

SEQ ID NO: 15537 - RNA, 21 nt, Artificial Sequence
  LRRK2 RNA guide
uauuuggauaggccauucuuu

SEQ ID NO: 15538 - RNA, 21 nt, Artificial Sequence
  LRRK2 RNA guide
ucucuuauuuggauaggccau

SEQ ID NO: 15539 - RNA, 21 nt, Artificial Sequence
  LRRK2 RNA guide
ucuuauuuggauaggccauuc

SEQ ID NO: 15540 - RNA, 21 nt, Artificial Sequence
  LRRK2 RNA guide
ugaaagaauggccuauccaaa

SEQ ID NO: 15541 - RNA, 21 nt, Artificial Sequence
  LRRK2 RNA guide
uggauaggccauucuuucaca

SEQ ID NO: 15542 - RNA, 21 nt, Artificial Sequence
  LRRK2 RNA guide
uggcauagaugugaaagaaug

SEQ ID NO: 15543 - RNA, 21 nt, Artificial Sequence
  LRRK2 RNA guide
ugucucuuauuuggauaggcc

SEQ ID NO: 15544 - RNA, 21 nt, Artificial Sequence
  LRRK2 RNA guide
ugugaaagaauggccuaucca

SEQ ID NO: 15545 - RNA, 21 nt, Artificial Sequence
  LRRK2 RNA guide
uuauuuggauaggccauucuu

SEQ ID NO: 15546 - RNA, 21 nt, Artificial Sequence
  LRRK2 RNA guide
uuggauaggccauucuuucac

SEQ ID NO: 15547 - RNA, 21 nt, Artificial Sequence
  LRRK2 RNA guide
uuggcauagaugugaaagaau

SEQ ID NO: 15548 - RNA, 21 nt, Artificial Sequence
  LRRK2 RNA guide
uugucucuuauuuggauaggc

SEQ ID NO: 15549 - RNA, 21 nt, Artificial Sequence
  LRRK2 RNA guide
uuuggauaggccauucuuuca

SEQ ID NO: 15550 - RNA, 21 nt, Artificial Sequence
  LRRK2 RNA guide
uuugucucuuauuuggauagg

SEQ ID NO: 15551 - RNA, 22 nt, Artificial Sequence
  LRRK2 RNA guide
aaagaauggccuauccaaauaa

SEQ ID NO: 15552 - RNA, 22 nt, Artificial Sequence
  LRRK2 RNA guide
aagaauggccuauccaaauaag

SEQ ID NO: 15553 - RNA, 22 nt, Artificial Sequence
  LRRK2 RNA guide
aauggccuauccaaauaagaga

SEQ ID NO: 15554 - RNA, 22 nt, Artificial Sequence
  LRRK2 RNA guide
acaguuggcauagaugugaaag

SEQ ID NO: 15555 - RNA, 22 nt, Artificial Sequence
  LRRK2 RNA guide
agaauggccuauccaaauaaga

SEQ ID NO: 15556 - RNA, 22 nt, Artificial Sequence
  LRRK2 RNA guide
agaugugaaagaauggccuauc

SEQ ID NO: 15557 - RNA, 22 nt, Artificial Sequence
  LRRK2 RNA guide
aggccauucuuucacaucuaug

SEQ ID NO: 15558 - RNA, 22 nt, Artificial Sequence
  LRRK2 RNA guide
aguuggcauagaugugaaagaa

SEQ ID NO: 15559 - RNA, 22 nt, Artificial Sequence
  LRRK2 RNA guide
auagaugugaaagaauggccua

SEQ ID NO: 15560 - RNA, 22 nt, Artificial Sequence
  LRRK2 RNA guide
auaggccauucuuucacaucua

SEQ ID NO: 15561 - RNA, 22 nt, Artificial Sequence
  LRRK2 RNA guide
augugaaagaauggccuaucca

SEQ ID NO: 15562 - RNA, 22 nt, Artificial Sequence
  LRRK2 RNA guide
auucuuucacaucuaugccaac

SEQ ID NO: 15563 - RNA, 22 nt, Artificial Sequence
  LRRK2 RNA guide
auuuggauaggccauucuuuca

SEQ ID NO: 15564 - RNA, 22 nt, Artificial Sequence
  LRRK2 RNA guide
cacaguuggcauagaugugaaa

SEQ ID NO: 15565 - RNA, 22 nt, Artificial Sequence
  LRRK2 RNA guide
caguuggcauagaugugaaaga

SEQ ID NO: 15566 - RNA, 22 nt, Artificial Sequence
  LRRK2 RNA guide
cauagaugugaaagaauggccu

SEQ ID NO: 15567 - RNA, 22 nt, Artificial Sequence
  LRRK2 RNA guide
cauucuuucacaucuaugccaa

SEQ ID NO: 15568 - RNA, 22 nt, Artificial Sequence
  LRRK2 RNA guide
ccacaguuggcauagaugugaa

SEQ ID NO: 15569 - RNA, 22 nt, Artificial Sequence
  LRRK2 RNA guide
ccauucuuucacaucuaugcca

SEQ ID NO: 15570 - RNA, 22 nt, Artificial Sequence
  LRRK2 RNA guide
cucuuauuuggauaggccauuc

SEQ ID NO: 15571 - RNA, 22 nt, Artificial Sequence
  LRRK2 RNA guide
cuuauuuggauaggccauucuu

SEQ ID NO: 15572 - RNA, 22 nt, Artificial Sequence
  LRRK2 RNA guide
cuuuugucucuuauuuggauag

SEQ ID NO: 15573 - RNA, 22 nt, Artificial Sequence
  LRRK2 RNA guide
gaaagaauggccuauccaaaua

SEQ ID NO: 15574 - RNA, 22 nt, Artificial Sequence
  LRRK2 RNA guide
gaauggccuauccaaauaagag

SEQ ID NO: 15575 - RNA, 22 nt, Artificial Sequence
  LRRK2 RNA guide
gauaggccauucuuucacaucu

SEQ ID NO: 15576 - RNA, 22 nt, Artificial Sequence
  LRRK2 RNA guide
gaugugaaagaauggccuaucc

SEQ ID NO: 15577 - RNA, 22 nt, Artificial Sequence
  LRRK2 RNA guide
gcauagaugugaaagaauggcc

SEQ ID NO: 15578 - RNA, 22 nt, Artificial Sequence
  LRRK2 RNA guide
gccacaguuggcauagauguga

SEQ ID NO: 15579 - RNA, 22 nt, Artificial Sequence
  LRRK2 RNA guide
gccauucuuucacaucuaugcc

SEQ ID NO: 15580 - RNA, 22 nt, Artificial Sequence
  LRRK2 RNA guide
ggauaggccauucuuucacauc

SEQ ID NO: 15581 - RNA, 22 nt, Artificial Sequence
  LRRK2 RNA guide
ggcauagaugugaaagaauggc

SEQ ID NO: 15582 - RNA, 22 nt, Artificial Sequence
  LRRK2 RNA guide
ggccauucuuucacaucuaugc

SEQ ID NO: 15583 - RNA, 22 nt, Artificial Sequence
  LRRK2 RNA guide
gucucuuauuuggauaggccau

SEQ ID NO: 15584 - RNA, 22 nt, Artificial Sequence
  LRRK2 RNA guide
gugaaagaauggccuauccaaa

SEQ ID NO: 15585 - RNA, 22 nt, Artificial Sequence
  LRRK2 RNA guide
guuggcauagaugugaaagaau

SEQ ID NO: 15586 - RNA, 22 nt, Artificial Sequence
  LRRK2 RNA guide
uagaugugaaagaauggccuau

SEQ ID NO: 15587 - RNA, 22 nt, Artificial Sequence
  LRRK2 RNA guide
uaggccauucuuucacaucuau

SEQ ID NO: 15588 - RNA, 22 nt, Artificial Sequence
  LRRK2 RNA guide
uauuuggauaggccauucuuuc

SEQ ID NO: 15589 - RNA, 22 nt, Artificial Sequence
  LRRK2 RNA guide
ucucuuauuuggauaggccauu

SEQ ID NO: 15590 - RNA, 22 nt, Artificial Sequence
  LRRK2 RNA guide
ucuuauuuggauaggccauucu

SEQ ID NO: 15591 - RNA, 22 nt, Artificial Sequence
  LRRK2 RNA guide
ugaaagaauggccuauccaaau

SEQ ID NO: 15592 - RNA, 22 nt, Artificial Sequence
  LRRK2 RNA guide
uggauaggccauucuuucacau

SEQ ID NO: 15593 - RNA, 22 nt, Artificial Sequence
  LRRK2 RNA guide
uggcauagaugugaaagaaugg

SEQ ID NO: 15594 - RNA, 22 nt, Artificial Sequence
  LRRK2 RNA guide
ugucucuuauuuggauaggcca

SEQ ID NO: 15595 - RNA, 22 nt, Artificial Sequence
  LRRK2 RNA guide
ugugaaagaauggccuauccaa

SEQ ID NO: 15596 - RNA, 22 nt, Artificial Sequence
  LRRK2 RNA guide
uuauuuggauaggccauucuuu

SEQ ID NO: 15597 - RNA, 22 nt, Artificial Sequence
  LRRK2 RNA guide
uuggauaggccauucuuucaca

SEQ ID NO: 15598 - RNA, 22 nt, Artificial Sequence
  LRRK2 RNA guide
uuggcauagaugugaaagaaug

SEQ ID NO: 15599 - RNA, 22 nt, Artificial Sequence
  LRRK2 RNA guide
uugucucuuauuuggauaggcc

SEQ ID NO: 15600 - RNA, 22 nt, Artificial Sequence
  LRRK2 RNA guide
uuuggauaggccauucuuucac

SEQ ID NO: 15601 - RNA, 22 nt, Artificial Sequence
  LRRK2 RNA guide
uuugucucuuauuuggauaggc

SEQ ID NO: 15602 - RNA, 22 nt, Artificial Sequence
  LRRK2 RNA guide
uuuugucucuuauuuggauagg

SEQ ID NO: 15603 - RNA, 20 nt, Artificial Sequence
  LRRK2 RNA guide
aaaagaaagagagaucucau

SEQ ID NO: 15604 - RNA, 20 nt, Artificial Sequence
  LRRK2 RNA guide
aaagaaagagagaucucauc

SEQ ID NO: 15605 - RNA, 20 nt, Artificial Sequence
  LRRK2 RNA guide
aaagagagaucucauccuaa

SEQ ID NO: 15606 - RNA, 20 nt, Artificial Sequence
  LRRK2 RNA guide
aaaucccacacauuuaggau

SEQ ID NO: 15607 - RNA, 20 nt, Artificial Sequence
  LRRK2 RNA guide
aagaaagagagaucucaucc

SEQ ID NO: 15608 - RNA, 20 nt, Artificial Sequence
  LRRK2 RNA guide
aagagagaucucauccuaaa

SEQ ID NO: 15609 - RNA, 20 nt, Artificial Sequence
  LRRK2 RNA guide
aaucccacacauuuaggaug

SEQ ID NO: 15610 - RNA, 20 nt, Artificial Sequence
  LRRK2 RNA guide
acaaaagaaagagagaucuc

SEQ ID NO: 15611 - RNA, 20 nt, Artificial Sequence
  LRRK2 RNA guide
acacauuuaggaugagaucu

SEQ ID NO: 15612 - RNA, 20 nt, Artificial Sequence
  LRRK2 RNA guide
acauuuaggaugagaucucu

SEQ ID NO: 15613 - RNA, 20 nt, Artificial Sequence
  LRRK2 RNA guide
agaaagagagaucucauccu

SEQ ID NO: 15614 - RNA, 20 nt, Artificial Sequence
  LRRK2 RNA guide
agacaaaagaaagagagauc

SEQ ID NO: 15615 - RNA, 20 nt, Artificial Sequence
  LRRK2 RNA guide
agagacaaaagaaagagaga

SEQ ID NO: 15616 - RNA, 20 nt, Artificial Sequence
  LRRK2 RNA guide
agagagaucucauccuaaau

SEQ ID NO: 15617 - RNA, 20 nt, Artificial Sequence
  LRRK2 RNA guide
agagaucucauccuaaaugu

SEQ ID NO: 15618 - RNA, 20 nt, Artificial Sequence
  LRRK2 RNA guide
agaucucauccuaaaugugu

SEQ ID NO: 15619 - RNA, 20 nt, Artificial Sequence
  LRRK2 RNA guide
aggaugagaucucucuuucu

SEQ ID NO: 15620 - RNA, 20 nt, Artificial Sequence
  LRRK2 RNA guide
aucccacacauuuaggauga

SEQ ID NO: 15621 - RNA, 20 nt, Artificial Sequence
  LRRK2 RNA guide
aucucauccuaaaugugugg

SEQ ID NO: 15622 - RNA, 20 nt, Artificial Sequence
  LRRK2 RNA guide
augagaucucucuuucuuuu

SEQ ID NO: 15623 - RNA, 20 nt, Artificial Sequence
  LRRK2 RNA guide
auuuaggaugagaucucucu

SEQ ID NO: 15624 - RNA, 20 nt, Artificial Sequence
  LRRK2 RNA guide
caaaagaaagagagaucuca

SEQ ID NO: 15625 - RNA, 20 nt, Artificial Sequence
  LRRK2 RNA guide
caaaaucccacacauuuagg

SEQ ID NO: 15626 - RNA, 20 nt, Artificial Sequence
  LRRK2 RNA guide
cacacauuuaggaugagauc

SEQ ID NO: 15627 - RNA, 20 nt, Artificial Sequence
  LRRK2 RNA guide
cacauuuaggaugagaucuc

SEQ ID NO: 15628 - RNA, 20 nt, Artificial Sequence
  LRRK2 RNA guide
cauccuaaaugugugggauu

SEQ ID NO: 15629 - RNA, 20 nt, Artificial Sequence
  LRRK2 RNA guide
cauuuaggaugagaucucuc

SEQ ID NO: 15630 - RNA, 20 nt, Artificial Sequence
  LRRK2 RNA guide
ccacacauuuaggaugagau

SEQ ID NO: 15631 - RNA, 20 nt, Artificial Sequence
  LRRK2 RNA guide
cccacacauuuaggaugaga

SEQ ID NO: 15632 - RNA, 20 nt, Artificial Sequence
  LRRK2 RNA guide
cucauccuaaauguguggga

SEQ ID NO: 15633 - RNA, 20 nt, Artificial Sequence
  LRRK2 RNA guide
cugcaaaaucccacacauuu

SEQ ID NO: 15634 - RNA, 20 nt, Artificial Sequence
  LRRK2 RNA guide
gaaagagagaucucauccua

SEQ ID NO: 15635 - RNA, 20 nt, Artificial Sequence
  LRRK2 RNA guide
gacaaaagaaagagagaucu

SEQ ID NO: 15636 - RNA, 20 nt, Artificial Sequence
  LRRK2 RNA guide
gagacaaaagaaagagagau

SEQ ID NO: 15637 - RNA, 20 nt, Artificial Sequence
  LRRK2 RNA guide
gagagaucucauccuaaaug

SEQ ID NO: 15638 - RNA, 20 nt, Artificial Sequence
  LRRK2 RNA guide
gagaucucauccuaaaugug

SEQ ID NO: 15639 - RNA, 20 nt, Artificial Sequence
  LRRK2 RNA guide
gaucucauccuaaaugugug

SEQ ID NO: 15640 - RNA, 20 nt, Artificial Sequence
  LRRK2 RNA guide
gaugagaucucucuuucuuu

SEQ ID NO: 15641 - RNA, 20 nt, Artificial Sequence
  LRRK2 RNA guide
gcaaaaucccacacauuuag

SEQ ID NO: 15642 - RNA, 20 nt, Artificial Sequence
  LRRK2 RNA guide
ggaugagaucucucuuucuu

SEQ ID NO: 15643 - RNA, 20 nt, Artificial Sequence
  LRRK2 RNA guide
uaggaugagaucucucuuuc

SEQ ID NO: 15644 - RNA, 20 nt, Artificial Sequence
  LRRK2 RNA guide
ucauccuaaaugugugggau

SEQ ID NO: 15645 - RNA, 20 nt, Artificial Sequence
  LRRK2 RNA guide
ucccacacauuuaggaugag

SEQ ID NO: 15646 - RNA, 20 nt, Artificial Sequence
  LRRK2 RNA guide
ucucauccuaaauguguggg

SEQ ID NO: 15647 - RNA, 20 nt, Artificial Sequence
  LRRK2 RNA guide
ugcaaaaucccacacauuua

SEQ ID NO: 15648 - RNA, 20 nt, Artificial Sequence
  LRRK2 RNA guide
uuaggaugagaucucucuuu

SEQ ID NO: 15649 - RNA, 20 nt, Artificial Sequence
  LRRK2 RNA guide
uuuaggaugagaucucucuu

SEQ ID NO: 15650 - RNA, 21 nt, Artificial Sequence
  LRRK2 RNA guide
aaaagaaagagagaucucauc

SEQ ID NO: 15651 - RNA, 21 nt, Artificial Sequence
  LRRK2 RNA guide
aaaaucccacacauuuaggau

SEQ ID NO: 15652 - RNA, 21 nt, Artificial Sequence
  LRRK2 RNA guide
aaagaaagagagaucucaucc

SEQ ID NO: 15653 - RNA, 21 nt, Artificial Sequence
  LRRK2 RNA guide
aaagagagaucucauccuaaa

SEQ ID NO: 15654 - RNA, 21 nt, Artificial Sequence
  LRRK2 RNA guide
aaaucccacacauuuaggaug

SEQ ID NO: 15655 - RNA, 21 nt, Artificial Sequence
  LRRK2 RNA guide
aagaaagagagaucucauccu

SEQ ID NO: 15656 - RNA, 21 nt, Artificial Sequence
  LRRK2 RNA guide
aagagacaaaagaaagagaga

SEQ ID NO: 15657 - RNA, 21 nt, Artificial Sequence
  LRRK2 RNA guide
aagagagaucucauccuaaau

SEQ ID NO: 15658 - RNA, 21 nt, Artificial Sequence
  LRRK2 RNA guide
aaucccacacauuuaggauga

SEQ ID NO: 15659 - RNA, 21 nt, Artificial Sequence
  LRRK2 RNA guide
acaaaagaaagagagaucuca

SEQ ID NO: 15660 - RNA, 21 nt, Artificial Sequence
  LRRK2 RNA guide
acacauuuaggaugagaucuc

SEQ ID NO: 15661 - RNA, 21 nt, Artificial Sequence
  LRRK2 RNA guide
acauuuaggaugagaucucuc

SEQ ID NO: 15662 - RNA, 21 nt, Artificial Sequence
  LRRK2 RNA guide
agaaagagagaucucauccua

SEQ ID NO: 15663 - RNA, 21 nt, Artificial Sequence
  LRRK2 RNA guide
agacaaaagaaagagagaucu

SEQ ID NO: 15664 - RNA, 21 nt, Artificial Sequence
  LRRK2 RNA guide
agagacaaaagaaagagagau

SEQ ID NO: 15665 - RNA, 21 nt, Artificial Sequence
  LRRK2 RNA guide
agagagaucucauccuaaaug

SEQ ID NO: 15666 - RNA, 21 nt, Artificial Sequence
  LRRK2 RNA guide
agagaucucauccuaaaugug

SEQ ID NO: 15667 - RNA, 21 nt, Artificial Sequence
  LRRK2 RNA guide
agaucucauccuaaaugugug

SEQ ID NO: 15668 - RNA, 21 nt, Artificial Sequence
  LRRK2 RNA guide
aggaugagaucucucuuucuu

SEQ ID NO: 15669 - RNA, 21 nt, Artificial Sequence
  LRRK2 RNA guide
aucccacacauuuaggaugag

SEQ ID NO: 15670 - RNA, 21 nt, Artificial Sequence
  LRRK2 RNA guide
aucucauccuaaauguguggg

SEQ ID NO: 15671 - RNA, 21 nt, Artificial Sequence
  LRRK2 RNA guide
augagaucucucuuucuuuug

SEQ ID NO: 15672 - RNA, 21 nt, Artificial Sequence
  LRRK2 RNA guide
auuuaggaugagaucucucuu

SEQ ID NO: 15673 - RNA, 21 nt, Artificial Sequence
  LRRK2 RNA guide
caaaagaaagagagaucucau

SEQ ID NO: 15674 - RNA, 21 nt, Artificial Sequence
  LRRK2 RNA guide
caaaaucccacacauuuagga

SEQ ID NO: 15675 - RNA, 21 nt, Artificial Sequence
  LRRK2 RNA guide
cacacauuuaggaugagaucu

SEQ ID NO: 15676 - RNA, 21 nt, Artificial Sequence
  LRRK2 RNA guide
cacauuuaggaugagaucucu

SEQ ID NO: 15677 - RNA, 21 nt, Artificial Sequence
  LRRK2 RNA guide
cauccuaaaugugugggauuu

SEQ ID NO: 15678 - RNA, 21 nt, Artificial Sequence
  LRRK2 RNA guide
cauuuaggaugagaucucucu

SEQ ID NO: 15679 - RNA, 21 nt, Artificial Sequence
  LRRK2 RNA guide
ccacacauuuaggaugagauc

SEQ ID NO: 15680 - RNA, 21 nt, Artificial Sequence
  LRRK2 RNA guide
cccacacauuuaggaugagau

SEQ ID NO: 15681 - RNA, 21 nt, Artificial Sequence
  LRRK2 RNA guide
ccugcaaaaucccacacauuu

SEQ ID NO: 15682 - RNA, 21 nt, Artificial Sequence
  LRRK2 RNA guide
cucauccuaaaugugugggau

SEQ ID NO: 15683 - RNA, 21 nt, Artificial Sequence
  LRRK2 RNA guide
cugcaaaaucccacacauuua

SEQ ID NO: 15684 - RNA, 21 nt, Artificial Sequence
  LRRK2 RNA guide
gaaagagagaucucauccuaa

SEQ ID NO: 15685 - RNA, 21 nt, Artificial Sequence
  LRRK2 RNA guide
gacaaaagaaagagagaucuc

SEQ ID NO: 15686 - RNA, 21 nt, Artificial Sequence
  LRRK2 RNA guide
gagacaaaagaaagagagauc

SEQ ID NO: 15687 - RNA, 21 nt, Artificial Sequence
  LRRK2 RNA guide
gagagaucucauccuaaaugu

SEQ ID NO: 15688 - RNA, 21 nt, Artificial Sequence
  LRRK2 RNA guide
gagaucucauccuaaaugugu

SEQ ID NO: 15689 - RNA, 21 nt, Artificial Sequence
  LRRK2 RNA guide
gaucucauccuaaaugugugg

SEQ ID NO: 15690 - RNA, 21 nt, Artificial Sequence
  LRRK2 RNA guide
gaugagaucucucuuucuuuu

SEQ ID NO: 15691 - RNA, 21 nt, Artificial Sequence
  LRRK2 RNA guide
gcaaaaucccacacauuuagg

SEQ ID NO: 15692 - RNA, 21 nt, Artificial Sequence
  LRRK2 RNA guide
ggaugagaucucucuuucuuu

SEQ ID NO: 15693 - RNA, 21 nt, Artificial Sequence
  LRRK2 RNA guide
uaggaugagaucucucuuucu

SEQ ID NO: 15694 - RNA, 21 nt, Artificial Sequence
  LRRK2 RNA guide
ucauccuaaaugugugggauu

SEQ ID NO: 15695 - RNA, 21 nt, Artificial Sequence
  LRRK2 RNA guide
ucccacacauuuaggaugaga

SEQ ID NO: 15696 - RNA, 21 nt, Artificial Sequence
  LRRK2 RNA guide
ucucauccuaaauguguggga

SEQ ID NO: 15697 - RNA, 21 nt, Artificial Sequence
  LRRK2 RNA guide
ugcaaaaucccacacauuuag

SEQ ID NO: 15698 - RNA, 21 nt, Artificial Sequence
  LRRK2 RNA guide
uuaggaugagaucucucuuuc

SEQ ID NO: 15699 - RNA, 21 nt, Artificial Sequence
  LRRK2 RNA guide
uuuaggaugagaucucucuuu

SEQ ID NO: 15700 - RNA, 22 nt, Artificial Sequence
  LRRK2 RNA guide
aaaagaaagagagaucucaucc

SEQ ID NO: 15701 - RNA, 22 nt, Artificial Sequence
  LRRK2 RNA guide
aaaaucccacacauuuaggaug

SEQ ID NO: 15702 - RNA, 22 nt, Artificial Sequence
  LRRK2 RNA guide
aaagaaagagagaucucauccu

SEQ ID NO: 15703 - RNA, 22 nt, Artificial Sequence
  LRRK2 RNA guide
aaagagagaucucauccuaaau

SEQ ID NO: 15704 - RNA, 22 nt, Artificial Sequence
  LRRK2 RNA guide
aaaucccacacauuuaggauga

SEQ ID NO: 15705 - RNA, 22 nt, Artificial Sequence
  LRRK2 RNA guide
aagaaagagagaucucauccua

SEQ ID NO: 15706 - RNA, 22 nt, Artificial Sequence
  LRRK2 RNA guide
aagagacaaaagaaagagagau

SEQ ID NO: 15707 - RNA, 22 nt, Artificial Sequence
  LRRK2 RNA guide
aagagagaucucauccuaaaug

SEQ ID NO: 15708 - RNA, 22 nt, Artificial Sequence
  LRRK2 RNA guide
aaucccacacauuuaggaugag

SEQ ID NO: 15709 - RNA, 22 nt, Artificial Sequence
  LRRK2 RNA guide
acaaaagaaagagagaucucau

SEQ ID NO: 15710 - RNA, 22 nt, Artificial Sequence
  LRRK2 RNA guide
acacauuuaggaugagaucucu

SEQ ID NO: 15711 - RNA, 22 nt, Artificial Sequence
  LRRK2 RNA guide
acauuuaggaugagaucucucu

SEQ ID NO: 15712 - RNA, 22 nt, Artificial Sequence
  LRRK2 RNA guide
accugcaaaaucccacacauuu

SEQ ID NO: 15713 - RNA, 22 nt, Artificial Sequence
  LRRK2 RNA guide
agaaagagagaucucauccuaa

SEQ ID NO: 15714 - RNA, 22 nt, Artificial Sequence
  LRRK2 RNA guide
agacaaaagaaagagagaucuc

SEQ ID NO: 15715 - RNA, 22 nt, Artificial Sequence
  LRRK2 RNA guide
agagacaaaagaaagagagauc

SEQ ID NO: 15716 - RNA, 22 nt, Artificial Sequence
  LRRK2 RNA guide
agagagaucucauccuaaaugu

SEQ ID NO: 15717 - RNA, 22 nt, Artificial Sequence
  LRRK2 RNA guide
agagaucucauccuaaaugugu

SEQ ID NO: 15718 - RNA, 22 nt, Artificial Sequence
  LRRK2 RNA guide
agaucucauccuaaaugugugg

SEQ ID NO: 15719 - RNA, 22 nt, Artificial Sequence
  LRRK2 RNA guide
aggaugagaucucucuuucuuu

SEQ ID NO: 15720 - RNA, 22 nt, Artificial Sequence
  LRRK2 RNA guide
aucccacacauuuaggaugaga

SEQ ID NO: 15721 - RNA, 22 nt, Artificial Sequence
  LRRK2 RNA guide
aucucauccuaaauguguggga

SEQ ID NO: 15722 - RNA, 22 nt, Artificial Sequence
  LRRK2 RNA guide
augagaucucucuuucuuuugu

SEQ ID NO: 15723 - RNA, 22 nt, Artificial Sequence
  LRRK2 RNA guide
auuuaggaugagaucucucuuu

SEQ ID NO: 15724 - RNA, 22 nt, Artificial Sequence
  LRRK2 RNA guide
caaaagaaagagagaucucauc

SEQ ID NO: 15725 - RNA, 22 nt, Artificial Sequence
  LRRK2 RNA guide
caaaaucccacacauuuaggau

SEQ ID NO: 15726 - RNA, 22 nt, Artificial Sequence
  LRRK2 RNA guide
cacacauuuaggaugagaucuc

SEQ ID NO: 15727 - RNA, 22 nt, Artificial Sequence
  LRRK2 RNA guide
cacauuuaggaugagaucucuc

SEQ ID NO: 15728 - RNA, 22 nt, Artificial Sequence
  LRRK2 RNA guide
cauccuaaaugugugggauuuu

SEQ ID NO: 15729 - RNA, 22 nt, Artificial Sequence
  LRRK2 RNA guide
cauuuaggaugagaucucucuu

SEQ ID NO: 15730 - RNA, 22 nt, Artificial Sequence
  LRRK2 RNA guide
ccacacauuuaggaugagaucu

SEQ ID NO: 15731 - RNA, 22 nt, Artificial Sequence
  LRRK2 RNA guide
cccacacauuuaggaugagauc

SEQ ID NO: 15732 - RNA, 22 nt, Artificial Sequence
  LRRK2 RNA guide
ccugcaaaaucccacacauuua

SEQ ID NO: 15733 - RNA, 22 nt, Artificial Sequence
  LRRK2 RNA guide
cucauccuaaaugugugggauu

SEQ ID NO: 15734 - RNA, 22 nt, Artificial Sequence
  LRRK2 RNA guide
cugcaaaaucccacacauuuag

SEQ ID NO: 15735 - RNA, 22 nt, Artificial Sequence
  LRRK2 RNA guide
gaaagagagaucucauccuaaa

SEQ ID NO: 15736 - RNA, 22 nt, Artificial Sequence
  LRRK2 RNA guide
gacaaaagaaagagagaucuca

SEQ ID NO: 15737 - RNA, 22 nt, Artificial Sequence
  LRRK2 RNA guide
gagacaaaagaaagagagaucu

SEQ ID NO: 15738 - RNA, 22 nt, Artificial Sequence
  LRRK2 RNA guide
gagagaucucauccuaaaugug

SEQ ID NO: 15739 - RNA, 22 nt, Artificial Sequence
  LRRK2 RNA guide
gagaucucauccuaaaugugug

SEQ ID NO: 15740 - RNA, 22 nt, Artificial Sequence
  LRRK2 RNA guide
gaucucauccuaaauguguggg

SEQ ID NO: 15741 - RNA, 22 nt, Artificial Sequence
  LRRK2 RNA guide
gaugagaucucucuuucuuuug

SEQ ID NO: 15742 - RNA, 22 nt, Artificial Sequence
  LRRK2 RNA guide
gcaaaaucccacacauuuagga

SEQ ID NO: 15743 - RNA, 22 nt, Artificial Sequence
  LRRK2 RNA guide
ggaugagaucucucuuucuuuu

SEQ ID NO: 15744 - RNA, 22 nt, Artificial Sequence
  LRRK2 RNA guide
uaagagacaaaagaaagagaga

SEQ ID NO: 15745 - RNA, 22 nt, Artificial Sequence
  LRRK2 RNA guide
uaggaugagaucucucuuucuu

SEQ ID NO: 15746 - RNA, 22 nt, Artificial Sequence
  LRRK2 RNA guide
ucauccuaaaugugugggauuu

SEQ ID NO: 15747 - RNA, 22 nt, Artificial Sequence
  LRRK2 RNA guide
ucccacacauuuaggaugagau

SEQ ID NO: 15748 - RNA, 22 nt, Artificial Sequence
  LRRK2 RNA guide
ucucauccuaaaugugugggau

SEQ ID NO: 15749 - RNA, 22 nt, Artificial Sequence
  LRRK2 RNA guide
ugcaaaaucccacacauuuagg

SEQ ID NO: 15750 - RNA, 22 nt, Artificial Sequence
  LRRK2 RNA guide
uuaggaugagaucucucuuucu

SEQ ID NO: 15751 - RNA, 22 nt, Artificial Sequence
  LRRK2 RNA guide
uuuaggaugagaucucucuuuc

SEQ ID NO: 15752 - RNA, 20 nt, Artificial Sequence
  LRRK2 RNA guide
accuugcugucuauaaccuc

SEQ ID NO: 15753 - RNA, 20 nt, Artificial Sequence
  LRRK2 RNA guide
agcauuguaccuugcugucu

SEQ ID NO: 15754 - RNA, 20 nt, Artificial Sequence
  LRRK2 RNA guide
agccugucccuugcugaggu

SEQ ID NO: 15755 - RNA, 20 nt, Artificial Sequence
  LRRK2 RNA guide
agguuauagacagcaaggua

SEQ ID NO: 15756 - RNA, 20 nt, Artificial Sequence
  LRRK2 RNA guide
auaaccucagcaagggacag

SEQ ID NO: 15757 - RNA, 20 nt, Artificial Sequence
  LRRK2 RNA guide
auuguaccuugcugucuaua

SEQ ID NO: 15758 - RNA, 20 nt, Artificial Sequence
  LRRK2 RNA guide
cagccugucccuugcugagg

SEQ ID NO: 15759 - RNA, 20 nt, Artificial Sequence
  LRRK2 RNA guide
cauuguaccuugcugucuau

SEQ ID NO: 15760 - RNA, 20 nt, Artificial Sequence
  LRRK2 RNA guide
cccuugcugagguuauagac

SEQ ID NO: 15761 - RNA, 20 nt, Artificial Sequence
  LRRK2 RNA guide
ccugucccuugcugagguua

SEQ ID NO: 15762 - RNA, 20 nt, Artificial Sequence
  LRRK2 RNA guide
ccuugcugagguuauagaca

SEQ ID NO: 15763 - RNA, 20 nt, Artificial Sequence
  LRRK2 RNA guide
ccuugcugucuauaaccuca

SEQ ID NO: 15764 - RNA, 20 nt, Artificial Sequence
  LRRK2 RNA guide
cgagcauuguaccuugcugu

SEQ ID NO: 15765 - RNA, 20 nt, Artificial Sequence
  LRRK2 RNA guide
cuauaaccucagcaagggac

SEQ ID NO: 15766 - RNA, 20 nt, Artificial Sequence
  LRRK2 RNA guide
cugagguuauagacagcaag

SEQ ID NO: 15767 - RNA, 20 nt, Artificial Sequence
  LRRK2 RNA guide
cugucccuugcugagguuau

SEQ ID NO: 15768 - RNA, 20 nt, Artificial Sequence
  LRRK2 RNA guide
cugucuauaaccucagcaag

SEQ ID NO: 15769 - RNA, 20 nt, Artificial Sequence
  LRRK2 RNA guide
cuucagccugucccuugcug

SEQ ID NO: 15770 - RNA, 20 nt, Artificial Sequence
  LRRK2 RNA guide
cuugcugagguuauagacag

SEQ ID NO: 15771 - RNA, 20 nt, Artificial Sequence
  LRRK2 RNA guide
cuugcugucuauaaccucag

SEQ ID NO: 15772 - RNA, 20 nt, Artificial Sequence
  LRRK2 RNA guide
gagcauuguaccuugcuguc

SEQ ID NO: 15773 - RNA, 20 nt, Artificial Sequence
  LRRK2 RNA guide
gagguuauagacagcaaggu

SEQ ID NO: 15774 - RNA, 20 nt, Artificial Sequence
  LRRK2 RNA guide
gcauuguaccuugcugucua

SEQ ID NO: 15775 - RNA, 20 nt, Artificial Sequence
  LRRK2 RNA guide
gccugucccuugcugagguu

SEQ ID NO: 15776 - RNA, 20 nt, Artificial Sequence
  LRRK2 RNA guide
gcugagguuauagacagcaa

SEQ ID NO: 15777 - RNA, 20 nt, Artificial Sequence
  LRRK2 RNA guide
gcugucuauaaccucagcaa

SEQ ID NO: 15778 - RNA, 20 nt, Artificial Sequence
  LRRK2 RNA guide
gguuauagacagcaagguac

SEQ ID NO: 15779 - RNA, 20 nt, Artificial Sequence
  LRRK2 RNA guide
guaccuugcugucuauaacc

SEQ ID NO: 15780 - RNA, 20 nt, Artificial Sequence
  LRRK2 RNA guide
gucccuugcugagguuauag

SEQ ID NO: 15781 - RNA, 20 nt, Artificial Sequence
  LRRK2 RNA guide
gucuauaaccucagcaaggg

SEQ ID NO: 15782 - RNA, 20 nt, Artificial Sequence
  LRRK2 RNA guide
guuauagacagcaagguaca

SEQ ID NO: 15783 - RNA, 20 nt, Artificial Sequence
  LRRK2 RNA guide
uaaccucagcaagggacagg

SEQ ID NO: 15784 - RNA, 20 nt, Artificial Sequence
  LRRK2 RNA guide
uaccuugcugucuauaaccu

SEQ ID NO: 15785 - RNA, 20 nt, Artificial Sequence
  LRRK2 RNA guide
uauaaccucagcaagggaca

SEQ ID NO: 15786 - RNA, 20 nt, Artificial Sequence
  LRRK2 RNA guide
ucagccugucccuugcugag

SEQ ID NO: 15787 - RNA, 20 nt, Artificial Sequence
  LRRK2 RNA guide
ucccuugcugagguuauaga

SEQ ID NO: 15788 - RNA, 20 nt, Artificial Sequence
  LRRK2 RNA guide
ucuauaaccucagcaaggga

SEQ ID NO: 15789 - RNA, 20 nt, Artificial Sequence
  LRRK2 RNA guide
ugagguuauagacagcaagg

SEQ ID NO: 15790 - RNA, 20 nt, Artificial Sequence
  LRRK2 RNA guide
ugcugagguuauagacagca

SEQ ID NO: 15791 - RNA, 20 nt, Artificial Sequence
  LRRK2 RNA guide
ugcugucuauaaccucagca

SEQ ID NO: 15792 - RNA, 20 nt, Artificial Sequence
  LRRK2 RNA guide
uguaccuugcugucuauaac

SEQ ID NO: 15793 - RNA, 20 nt, Artificial Sequence
  LRRK2 RNA guide
ugucccuugcugagguuaua

SEQ ID NO: 15794 - RNA, 20 nt, Artificial Sequence
  LRRK2 RNA guide
ugucuauaaccucagcaagg

SEQ ID NO: 15795 - RNA, 20 nt, Artificial Sequence
  LRRK2 RNA guide
uuauagacagcaagguacaa

SEQ ID NO: 15796 - RNA, 20 nt, Artificial Sequence
  LRRK2 RNA guide
uugcugagguuauagacagc

SEQ ID NO: 15797 - RNA, 20 nt, Artificial Sequence
  LRRK2 RNA guide
uugcugucuauaaccucagc

SEQ ID NO: 15798 - RNA, 20 nt, Artificial Sequence
  LRRK2 RNA guide
uuguaccuugcugucuauaa

SEQ ID NO: 15799 - RNA, 21 nt, Artificial Sequence
  LRRK2 RNA guide
accuugcugucuauaaccuca

SEQ ID NO: 15800 - RNA, 21 nt, Artificial Sequence
  LRRK2 RNA guide
acuucagccugucccuugcug

SEQ ID NO: 15801 - RNA, 21 nt, Artificial Sequence
  LRRK2 RNA guide
agcauuguaccuugcugucua

SEQ ID NO: 15802 - RNA, 21 nt, Artificial Sequence
  LRRK2 RNA guide
agccugucccuugcugagguu

SEQ ID NO: 15803 - RNA, 21 nt, Artificial Sequence
  LRRK2 RNA guide
agguuauagacagcaagguac

SEQ ID NO: 15804 - RNA, 21 nt, Artificial Sequence
  LRRK2 RNA guide
auaaccucagcaagggacagg

SEQ ID NO: 15805 - RNA, 21 nt, Artificial Sequence
  LRRK2 RNA guide
auuguaccuugcugucuauaa

SEQ ID NO: 15806 - RNA, 21 nt, Artificial Sequence
  LRRK2 RNA guide
cagccugucccuugcugaggu

SEQ ID NO: 15807 - RNA, 21 nt, Artificial Sequence
  LRRK2 RNA guide
cauuguaccuugcugucuaua

SEQ ID NO: 15808 - RNA, 21 nt, Artificial Sequence
  LRRK2 RNA guide
cccuugcugagguuauagaca

SEQ ID NO: 15809 - RNA, 21 nt, Artificial Sequence
  LRRK2 RNA guide
ccugucccuugcugagguuau

SEQ ID NO: 15810 - RNA, 21 nt, Artificial Sequence
  LRRK2 RNA guide
ccuugcugagguuauagacag

SEQ ID NO: 15811 - RNA, 21 nt, Artificial Sequence
  LRRK2 RNA guide
ccuugcugucuauaaccucag

SEQ ID NO: 15812 - RNA, 21 nt, Artificial Sequence
  LRRK2 RNA guide
cgagcauuguaccuugcuguc

SEQ ID NO: 15813 - RNA, 21 nt, Artificial Sequence
  LRRK2 RNA guide
cuauaaccucagcaagggaca

SEQ ID NO: 15814 - RNA, 21 nt, Artificial Sequence
  LRRK2 RNA guide
cugagguuauagacagcaagg

SEQ ID NO: 15815 - RNA, 21 nt, Artificial Sequence
  LRRK2 RNA guide
cugucccuugcugagguuaua

SEQ ID NO: 15816 - RNA, 21 nt, Artificial Sequence
  LRRK2 RNA guide
cugucuauaaccucagcaagg

SEQ ID NO: 15817 - RNA, 21 nt, Artificial Sequence
  LRRK2 RNA guide
cuucagccugucccuugcuga

SEQ ID NO: 15818 - RNA, 21 nt, Artificial Sequence
  LRRK2 RNA guide
cuugcugagguuauagacagc

SEQ ID NO: 15819 - RNA, 21 nt, Artificial Sequence
  LRRK2 RNA guide
cuugcugucuauaaccucagc

SEQ ID NO: 15820 - RNA, 21 nt, Artificial Sequence
  LRRK2 RNA guide
gagcauuguaccuugcugucu

SEQ ID NO: 15821 - RNA, 21 nt, Artificial Sequence
  LRRK2 RNA guide
gagguuauagacagcaaggua

SEQ ID NO: 15822 - RNA, 21 nt, Artificial Sequence
  LRRK2 RNA guide
gcauuguaccuugcugucuau

SEQ ID NO: 15823 - RNA, 21 nt, Artificial Sequence
  LRRK2 RNA guide
gccugucccuugcugagguua

SEQ ID NO: 15824 - RNA, 21 nt, Artificial Sequence
  LRRK2 RNA guide
gcgagcauuguaccuugcugu

SEQ ID NO: 15825 - RNA, 21 nt, Artificial Sequence
  LRRK2 RNA guide
gcugagguuauagacagcaag

SEQ ID NO: 15826 - RNA, 21 nt, Artificial Sequence
  LRRK2 RNA guide
gcugucuauaaccucagcaag

SEQ ID NO: 15827 - RNA, 21 nt, Artificial Sequence
  LRRK2 RNA guide
gguuauagacagcaagguaca

SEQ ID NO: 15828 - RNA, 21 nt, Artificial Sequence
  LRRK2 RNA guide
guaccuugcugucuauaaccu

SEQ ID NO: 15829 - RNA, 21 nt, Artificial Sequence
  LRRK2 RNA guide
gucccuugcugagguuauaga

SEQ ID NO: 15830 - RNA, 21 nt, Artificial Sequence
  LRRK2 RNA guide
gucuauaaccucagcaaggga

SEQ ID NO: 15831 - RNA, 21 nt, Artificial Sequence
  LRRK2 RNA guide
guuauagacagcaagguacaa

SEQ ID NO: 15832 - RNA, 21 nt, Artificial Sequence
  LRRK2 RNA guide
uaaccucagcaagggacaggc

SEQ ID NO: 15833 - RNA, 21 nt, Artificial Sequence
  LRRK2 RNA guide
uaccuugcugucuauaaccuc

SEQ ID NO: 15834 - RNA, 21 nt, Artificial Sequence
  LRRK2 RNA guide
uauaaccucagcaagggacag

SEQ ID NO: 15835 - RNA, 21 nt, Artificial Sequence
  LRRK2 RNA guide
ucagccugucccuugcugagg

SEQ ID NO: 15836 - RNA, 21 nt, Artificial Sequence
  LRRK2 RNA guide
ucccuugcugagguuauagac

SEQ ID NO: 15837 - RNA, 21 nt, Artificial Sequence
  LRRK2 RNA guide
ucuauaaccucagcaagggac

SEQ ID NO: 15838 - RNA, 21 nt, Artificial Sequence
  LRRK2 RNA guide
ugagguuauagacagcaaggu

SEQ ID NO: 15839 - RNA, 21 nt, Artificial Sequence
  LRRK2 RNA guide
ugcugagguuauagacagcaa

SEQ ID NO: 15840 - RNA, 21 nt, Artificial Sequence
  LRRK2 RNA guide
ugcugucuauaaccucagcaa

SEQ ID NO: 15841 - RNA, 21 nt, Artificial Sequence
  LRRK2 RNA guide
uguaccuugcugucuauaacc

SEQ ID NO: 15842 - RNA, 21 nt, Artificial Sequence
  LRRK2 RNA guide
ugucccuugcugagguuauag

SEQ ID NO: 15843 - RNA, 21 nt, Artificial Sequence
  LRRK2 RNA guide
ugucuauaaccucagcaaggg

SEQ ID NO: 15844 - RNA, 21 nt, Artificial Sequence
  LRRK2 RNA guide
uuauagacagcaagguacaau

SEQ ID NO: 15845 - RNA, 21 nt, Artificial Sequence
  LRRK2 RNA guide
uucagccugucccuugcugag

SEQ ID NO: 15846 - RNA, 21 nt, Artificial Sequence
  LRRK2 RNA guide
uugcugagguuauagacagca

SEQ ID NO: 15847 - RNA, 21 nt, Artificial Sequence
  LRRK2 RNA guide
uugcugucuauaaccucagca

SEQ ID NO: 15848 - RNA, 21 nt, Artificial Sequence
  LRRK2 RNA guide
uuguaccuugcugucuauaac

SEQ ID NO: 15849 - RNA, 22 nt, Artificial Sequence
  LRRK2 RNA guide
aacuucagccugucccuugcug

SEQ ID NO: 15850 - RNA, 22 nt, Artificial Sequence
  LRRK2 RNA guide
accuugcugucuauaaccucag

SEQ ID NO: 15851 - RNA, 22 nt, Artificial Sequence
  LRRK2 RNA guide
acuucagccugucccuugcuga

SEQ ID NO: 15852 - RNA, 22 nt, Artificial Sequence
  LRRK2 RNA guide
agcauuguaccuugcugucuau

SEQ ID NO: 15853 - RNA, 22 nt, Artificial Sequence
  LRRK2 RNA guide
agccugucccuugcugagguua

SEQ ID NO: 15854 - RNA, 22 nt, Artificial Sequence
  LRRK2 RNA guide
agcgagcauuguaccuugcugu

SEQ ID NO: 15855 - RNA, 22 nt, Artificial Sequence
  LRRK2 RNA guide
agguuauagacagcaagguaca

SEQ ID NO: 15856 - RNA, 22 nt, Artificial Sequence
  LRRK2 RNA guide
auaaccucagcaagggacaggc

SEQ ID NO: 15857 - RNA, 22 nt, Artificial Sequence
  LRRK2 RNA guide
auuguaccuugcugucuauaac

SEQ ID NO: 15858 - RNA, 22 nt, Artificial Sequence
  LRRK2 RNA guide
cagccugucccuugcugagguu

SEQ ID NO: 15859 - RNA, 22 nt, Artificial Sequence
  LRRK2 RNA guide
cauuguaccuugcugucuauaa

SEQ ID NO: 15860 - RNA, 22 nt, Artificial Sequence
  LRRK2 RNA guide
cccuugcugagguuauagacag

SEQ ID NO: 15861 - RNA, 22 nt, Artificial Sequence
  LRRK2 RNA guide
ccugucccuugcugagguuaua

SEQ ID NO: 15862 - RNA, 22 nt, Artificial Sequence
  LRRK2 RNA guide
ccuugcugagguuauagacagc

SEQ ID NO: 15863 - RNA, 22 nt, Artificial Sequence
  LRRK2 RNA guide
ccuugcugucuauaaccucagc

SEQ ID NO: 15864 - RNA, 22 nt, Artificial Sequence
  LRRK2 RNA guide
cgagcauuguaccuugcugucu

SEQ ID NO: 15865 - RNA, 22 nt, Artificial Sequence
  LRRK2 RNA guide
cuauaaccucagcaagggacag

SEQ ID NO: 15866 - RNA, 22 nt, Artificial Sequence
  LRRK2 RNA guide
cugagguuauagacagcaaggu

SEQ ID NO: 15867 - RNA, 22 nt, Artificial Sequence
  LRRK2 RNA guide
cugucccuugcugagguuauag

SEQ ID NO: 15868 - RNA, 22 nt, Artificial Sequence
  LRRK2 RNA guide
cugucuauaaccucagcaaggg

SEQ ID NO: 15869 - RNA, 22 nt, Artificial Sequence
  LRRK2 RNA guide
cuucagccugucccuugcugag

SEQ ID NO: 15870 - RNA, 22 nt, Artificial Sequence
  LRRK2 RNA guide
cuugcugagguuauagacagca

SEQ ID NO: 15871 - RNA, 22 nt, Artificial Sequence
  LRRK2 RNA guide
cuugcugucuauaaccucagca

SEQ ID NO: 15872 - RNA, 22 nt, Artificial Sequence
  LRRK2 RNA guide
gagcauuguaccuugcugucua

SEQ ID NO: 15873 - RNA, 22 nt, Artificial Sequence
  LRRK2 RNA guide
gagguuauagacagcaagguac

SEQ ID NO: 15874 - RNA, 22 nt, Artificial Sequence
  LRRK2 RNA guide
gcauuguaccuugcugucuaua

SEQ ID NO: 15875 - RNA, 22 nt, Artificial Sequence
  LRRK2 RNA guide
gccugucccuugcugagguuau

SEQ ID NO: 15876 - RNA, 22 nt, Artificial Sequence
  LRRK2 RNA guide
gcgagcauuguaccuugcuguc

SEQ ID NO: 15877 - RNA, 22 nt, Artificial Sequence
  LRRK2 RNA guide
gcugagguuauagacagcaagg

SEQ ID NO: 15878 - RNA, 22 nt, Artificial Sequence
  LRRK2 RNA guide
gcugucuauaaccucagcaagg

SEQ ID NO: 15879 - RNA, 22 nt, Artificial Sequence
  LRRK2 RNA guide
gguuauagacagcaagguacaa

SEQ ID NO: 15880 - RNA, 22 nt, Artificial Sequence
  LRRK2 RNA guide
guaccuugcugucuauaaccuc

SEQ ID NO: 15881 - RNA, 22 nt, Artificial Sequence
  LRRK2 RNA guide
gucccuugcugagguuauagac

SEQ ID NO: 15882 - RNA, 22 nt, Artificial Sequence
  LRRK2 RNA guide
gucuauaaccucagcaagggac

SEQ ID NO: 15883 - RNA, 22 nt, Artificial Sequence
  LRRK2 RNA guide
guuauagacagcaagguacaau

SEQ ID NO: 15884 - RNA, 22 nt, Artificial Sequence
  LRRK2 RNA guide
uaaccucagcaagggacaggcu

SEQ ID NO: 15885 - RNA, 22 nt, Artificial Sequence
  LRRK2 RNA guide
uaccuugcugucuauaaccuca

SEQ ID NO: 15886 - RNA, 22 nt, Artificial Sequence
  LRRK2 RNA guide
uauaaccucagcaagggacagg

SEQ ID NO: 15887 - RNA, 22 nt, Artificial Sequence
  LRRK2 RNA guide
ucagccugucccuugcugaggu

SEQ ID NO: 15888 - RNA, 22 nt, Artificial Sequence
  LRRK2 RNA guide
ucccuugcugagguuauagaca

SEQ ID NO: 15889 - RNA, 22 nt, Artificial Sequence
  LRRK2 RNA guide
ucuauaaccucagcaagggaca

SEQ ID NO: 15890 - RNA, 22 nt, Artificial Sequence
  LRRK2 RNA guide
ugagguuauagacagcaaggua

SEQ ID NO: 15891 - RNA, 22 nt, Artificial Sequence
  LRRK2 RNA guide
ugcugagguuauagacagcaag

SEQ ID NO: 15892 - RNA, 22 nt, Artificial Sequence
  LRRK2 RNA guide
ugcugucuauaaccucagcaag

SEQ ID NO: 15893 - RNA, 22 nt, Artificial Sequence
  LRRK2 RNA guide
uguaccuugcugucuauaaccu

SEQ ID NO: 15894 - RNA, 22 nt, Artificial Sequence
  LRRK2 RNA guide
ugucccuugcugagguuauaga

SEQ ID NO: 15895 - RNA, 22 nt, Artificial Sequence
  LRRK2 RNA guide
ugucuauaaccucagcaaggga

SEQ ID NO: 15896 - RNA, 22 nt, Artificial Sequence
  LRRK2 RNA guide
uuauagacagcaagguacaaug

SEQ ID NO: 15897 - RNA, 22 nt, Artificial Sequence
  LRRK2 RNA guide
uucagccugucccuugcugagg

SEQ ID NO: 15898 - RNA, 22 nt, Artificial Sequence
  LRRK2 RNA guide
uugcugagguuauagacagcaa

SEQ ID NO: 15899 - RNA, 22 nt, Artificial Sequence
  LRRK2 RNA guide
uugcugucuauaaccucagcaa

SEQ ID NO: 15900 - RNA, 22 nt, Artificial Sequence
  LRRK2 RNA guide
uuguaccuugcugucuauaacc

SEQ ID NO: 15901 - RNA, 20 nt, Artificial Sequence
  LRRK2 RNA guide
aagagccaaggcuucauagc

SEQ ID NO: 15902 - RNA, 20 nt, Artificial Sequence
  LRRK2 RNA guide
aaggcuucauagcaucaacu

SEQ ID NO: 15903 - RNA, 20 nt, Artificial Sequence
  LRRK2 RNA guide
aagggacaggcugaaguuga

SEQ ID NO: 15904 - RNA, 20 nt, Artificial Sequence
  LRRK2 RNA guide
aaguugaugcuaugaagccu

SEQ ID NO: 15905 - RNA, 20 nt, Artificial Sequence
  LRRK2 RNA guide
acaggcugaaguugaugcua

SEQ ID NO: 15906 - RNA, 20 nt, Artificial Sequence
  LRRK2 RNA guide
agagccaaggcuucauagca

SEQ ID NO: 15907 - RNA, 20 nt, Artificial Sequence
  LRRK2 RNA guide
agccaaggcuucauagcauc

SEQ ID NO: 15908 - RNA, 20 nt, Artificial Sequence
  LRRK2 RNA guide
aggcugaaguugaugcuaug

SEQ ID NO: 15909 - RNA, 20 nt, Artificial Sequence
  LRRK2 RNA guide
aggcuucauagcaucaacuu

SEQ ID NO: 15910 - RNA, 20 nt, Artificial Sequence
  LRRK2 RNA guide
agggacaggcugaaguugau

SEQ ID NO: 15911 - RNA, 20 nt, Artificial Sequence
  LRRK2 RNA guide
aguugaugcuaugaagccuu

SEQ ID NO: 15912 - RNA, 20 nt, Artificial Sequence
  LRRK2 RNA guide
auagcaucaacuucagccug

SEQ ID NO: 15913 - RNA, 20 nt, Artificial Sequence
  LRRK2 RNA guide
auauugaagagccaaggcuu

SEQ ID NO: 15914 - RNA, 20 nt, Artificial Sequence
  LRRK2 RNA guide
augcuaugaagccuuggcuc

SEQ ID NO: 15915 - RNA, 20 nt, Artificial Sequence
  LRRK2 RNA guide
caaggcuucauagcaucaac

SEQ ID NO: 15916 - RNA, 20 nt, Artificial Sequence
  LRRK2 RNA guide
caagggacaggcugaaguug

SEQ ID NO: 15917 - RNA, 20 nt, Artificial Sequence
  LRRK2 RNA guide
caggcugaaguugaugcuau

SEQ ID NO: 15918 - RNA, 20 nt, Artificial Sequence
  LRRK2 RNA guide
cauagcaucaacuucagccu

SEQ ID NO: 15919 - RNA, 20 nt, Artificial Sequence
  LRRK2 RNA guide
ccaaggcuucauagcaucaa

SEQ ID NO: 15920 - RNA, 20 nt, Artificial Sequence
  LRRK2 RNA guide
cuaugaagccuuggcucuuc

SEQ ID NO: 15921 - RNA, 20 nt, Artificial Sequence
  LRRK2 RNA guide
cugaaguugaugcuaugaag

SEQ ID NO: 15922 - RNA, 20 nt, Artificial Sequence
  LRRK2 RNA guide
cuucauagcaucaacuucag

SEQ ID NO: 15923 - RNA, 20 nt, Artificial Sequence
  LRRK2 RNA guide
gaagagccaaggcuucauag

SEQ ID NO: 15924 - RNA, 20 nt, Artificial Sequence
  LRRK2 RNA guide
gaaguugaugcuaugaagcc

SEQ ID NO: 15925 - RNA, 20 nt, Artificial Sequence
  LRRK2 RNA guide
gacaggcugaaguugaugcu

SEQ ID NO: 15926 - RNA, 20 nt, Artificial Sequence
  LRRK2 RNA guide
gagccaaggcuucauagcau

SEQ ID NO: 15927 - RNA, 20 nt, Artificial Sequence
  LRRK2 RNA guide
gaugcuaugaagccuuggcu

SEQ ID NO: 15928 - RNA, 20 nt, Artificial Sequence
  LRRK2 RNA guide
gccaaggcuucauagcauca

SEQ ID NO: 15929 - RNA, 20 nt, Artificial Sequence
  LRRK2 RNA guide
gcuaugaagccuuggcucuu

SEQ ID NO: 15930 - RNA, 20 nt, Artificial Sequence
  LRRK2 RNA guide
gcugaaguugaugcuaugaa

SEQ ID NO: 15931 - RNA, 20 nt, Artificial Sequence
  LRRK2 RNA guide
gcuucauagcaucaacuuca

SEQ ID NO: 15932 - RNA, 20 nt, Artificial Sequence
  LRRK2 RNA guide
ggacaggcugaaguugaugc

SEQ ID NO: 15933 - RNA, 20 nt, Artificial Sequence
  LRRK2 RNA guide
ggcugaaguugaugcuauga

SEQ ID NO: 15934 - RNA, 20 nt, Artificial Sequence
  LRRK2 RNA guide
ggcuucauagcaucaacuuc

SEQ ID NO: 15935 - RNA, 20 nt, Artificial Sequence
  LRRK2 RNA guide
gggacaggcugaaguugaug

SEQ ID NO: 15936 - RNA, 20 nt, Artificial Sequence
  LRRK2 RNA guide
guugaugcuaugaagccuug

SEQ ID NO: 15937 - RNA, 20 nt, Artificial Sequence
  LRRK2 RNA guide
uagcaucaacuucagccugu

SEQ ID NO: 15938 - RNA, 20 nt, Artificial Sequence
  LRRK2 RNA guide
uauauugaagagccaaggcu

SEQ ID NO: 15939 - RNA, 20 nt, Artificial Sequence
  LRRK2 RNA guide
uauugaagagccaaggcuuc

SEQ ID NO: 15940 - RNA, 20 nt, Artificial Sequence
  LRRK2 RNA guide
ucauagcaucaacuucagcc

SEQ ID NO: 15941 - RNA, 20 nt, Artificial Sequence
  LRRK2 RNA guide
ugaagagccaaggcuucaua

SEQ ID NO: 15942 - RNA, 20 nt, Artificial Sequence
  LRRK2 RNA guide
ugaaguugaugcuaugaagc

SEQ ID NO: 15943 - RNA, 20 nt, Artificial Sequence
  LRRK2 RNA guide
ugaugcuaugaagccuuggc

SEQ ID NO: 15944 - RNA, 20 nt, Artificial Sequence
  LRRK2 RNA guide
ugcuaugaagccuuggcucu

SEQ ID NO: 15945 - RNA, 20 nt, Artificial Sequence
  LRRK2 RNA guide
uucauagcaucaacuucagc

SEQ ID NO: 15946 - RNA, 20 nt, Artificial Sequence
  LRRK2 RNA guide
uugaugcuaugaagccuugg

SEQ ID NO: 15947 - RNA, 21 nt, Artificial Sequence
  LRRK2 RNA guide
aagagccaaggcuucauagca

SEQ ID NO: 15948 - RNA, 21 nt, Artificial Sequence
  LRRK2 RNA guide
aaggcuucauagcaucaacuu

SEQ ID NO: 15949 - RNA, 21 nt, Artificial Sequence
  LRRK2 RNA guide
aagggacaggcugaaguugau

SEQ ID NO: 15950 - RNA, 21 nt, Artificial Sequence
  LRRK2 RNA guide
aaguugaugcuaugaagccuu

SEQ ID NO: 15951 - RNA, 21 nt, Artificial Sequence
  LRRK2 RNA guide
acaggcugaaguugaugcuau

SEQ ID NO: 15952 - RNA, 21 nt, Artificial Sequence
  LRRK2 RNA guide
agagccaaggcuucauagcau

SEQ ID NO: 15953 - RNA, 21 nt, Artificial Sequence
  LRRK2 RNA guide
agccaaggcuucauagcauca

SEQ ID NO: 15954 - RNA, 21 nt, Artificial Sequence
  LRRK2 RNA guide
aggcugaaguugaugcuauga

SEQ ID NO: 15955 - RNA, 21 nt, Artificial Sequence
  LRRK2 RNA guide
aggcuucauagcaucaacuuc

SEQ ID NO: 15956 - RNA, 21 nt, Artificial Sequence
  LRRK2 RNA guide
agggacaggcugaaguugaug

SEQ ID NO: 15957 - RNA, 21 nt, Artificial Sequence
  LRRK2 RNA guide
aguugaugcuaugaagccuug

SEQ ID NO: 15958 - RNA, 21 nt, Artificial Sequence
  LRRK2 RNA guide
auagcaucaacuucagccugu

SEQ ID NO: 15959 - RNA, 21 nt, Artificial Sequence
  LRRK2 RNA guide
auauugaagagccaaggcuuc

SEQ ID NO: 15960 - RNA, 21 nt, Artificial Sequence
  LRRK2 RNA guide
augcuaugaagccuuggcucu

SEQ ID NO: 15961 - RNA, 21 nt, Artificial Sequence
  LRRK2 RNA guide
auugaagagccaaggcuucau

SEQ ID NO: 15962 - RNA, 21 nt, Artificial Sequence
  LRRK2 RNA guide
caaggcuucauagcaucaacu

SEQ ID NO: 15963 - RNA, 21 nt, Artificial Sequence
  LRRK2 RNA guide
caagggacaggcugaaguuga

SEQ ID NO: 15964 - RNA, 21 nt, Artificial Sequence
  LRRK2 RNA guide
caggcugaaguugaugcuaug

SEQ ID NO: 15965 - RNA, 21 nt, Artificial Sequence
  LRRK2 RNA guide
cauagcaucaacuucagccug

SEQ ID NO: 15966 - RNA, 21 nt, Artificial Sequence
  LRRK2 RNA guide
ccaaggcuucauagcaucaac

SEQ ID NO: 15967 - RNA, 21 nt, Artificial Sequence
  LRRK2 RNA guide
cuaugaagccuuggcucuuca

SEQ ID NO: 15968 - RNA, 21 nt, Artificial Sequence
  LRRK2 RNA guide
cugaaguugaugcuaugaagc

SEQ ID NO: 15969 - RNA, 21 nt, Artificial Sequence
  LRRK2 RNA guide
cuucauagcaucaacuucagc

SEQ ID NO: 15970 - RNA, 21 nt, Artificial Sequence
  LRRK2 RNA guide
gaagagccaaggcuucauagc

SEQ ID NO: 15971 - RNA, 21 nt, Artificial Sequence
  LRRK2 RNA guide
gaaguugaugcuaugaagccu

SEQ ID NO: 15972 - RNA, 21 nt, Artificial Sequence
  LRRK2 RNA guide
gacaggcugaaguugaugcua

SEQ ID NO: 15973 - RNA, 21 nt, Artificial Sequence
  LRRK2 RNA guide
gagccaaggcuucauagcauc

SEQ ID NO: 15974 - RNA, 21 nt, Artificial Sequence
  LRRK2 RNA guide
gaugcuaugaagccuuggcuc

SEQ ID NO: 15975 - RNA, 21 nt, Artificial Sequence
  LRRK2 RNA guide
gcaagggacaggcugaaguug

SEQ ID NO: 15976 - RNA, 21 nt, Artificial Sequence
  LRRK2 RNA guide
gccaaggcuucauagcaucaa

SEQ ID NO: 15977 - RNA, 21 nt, Artificial Sequence
  LRRK2 RNA guide
gcuaugaagccuuggcucuuc

SEQ ID NO: 15978 - RNA, 21 nt, Artificial Sequence
  LRRK2 RNA guide
gcugaaguugaugcuaugaag

SEQ ID NO: 15979 - RNA, 21 nt, Artificial Sequence
  LRRK2 RNA guide
gcuucauagcaucaacuucag

SEQ ID NO: 15980 - RNA, 21 nt, Artificial Sequence
  LRRK2 RNA guide
ggacaggcugaaguugaugcu

SEQ ID NO: 15981 - RNA, 21 nt, Artificial Sequence
  LRRK2 RNA guide
ggcugaaguugaugcuaugaa

SEQ ID NO: 15982 - RNA, 21 nt, Artificial Sequence
  LRRK2 RNA guide
ggcuucauagcaucaacuuca

SEQ ID NO: 15983 - RNA, 21 nt, Artificial Sequence
  LRRK2 RNA guide
gggacaggcugaaguugaugc

SEQ ID NO: 15984 - RNA, 21 nt, Artificial Sequence
  LRRK2 RNA guide
guugaugcuaugaagccuugg

SEQ ID NO: 15985 - RNA, 21 nt, Artificial Sequence
  LRRK2 RNA guide
uagcaucaacuucagccuguc

SEQ ID NO: 15986 - RNA, 21 nt, Artificial Sequence
  LRRK2 RNA guide
uauauugaagagccaaggcuu

SEQ ID NO: 15987 - RNA, 21 nt, Artificial Sequence
  LRRK2 RNA guide
uauugaagagccaaggcuuca

SEQ ID NO: 15988 - RNA, 21 nt, Artificial Sequence
  LRRK2 RNA guide
ucauagcaucaacuucagccu

SEQ ID NO: 15989 - RNA, 21 nt, Artificial Sequence
  LRRK2 RNA guide
ugaagagccaaggcuucauag

SEQ ID NO: 15990 - RNA, 21 nt, Artificial Sequence
  LRRK2 RNA guide
ugaaguugaugcuaugaagcc

SEQ ID NO: 15991 - RNA, 21 nt, Artificial Sequence
  LRRK2 RNA guide
ugaugcuaugaagccuuggcu

SEQ ID NO: 15992 - RNA, 21 nt, Artificial Sequence
  LRRK2 RNA guide
ugcuaugaagccuuggcucuu

SEQ ID NO: 15993 - RNA, 21 nt, Artificial Sequence
  LRRK2 RNA guide
uuauauugaagagccaaggcu

SEQ ID NO: 15994 - RNA, 21 nt, Artificial Sequence
  LRRK2 RNA guide
uucauagcaucaacuucagcc

SEQ ID NO: 15995 - RNA, 21 nt, Artificial Sequence
  LRRK2 RNA guide
uugaagagccaaggcuucaua

SEQ ID NO: 15996 - RNA, 21 nt, Artificial Sequence
  LRRK2 RNA guide
uugaugcuaugaagccuuggc

SEQ ID NO: 15997 - RNA, 22 nt, Artificial Sequence
  LRRK2 RNA guide
aagagccaaggcuucauagcau

SEQ ID NO: 15998 - RNA, 22 nt, Artificial Sequence
  LRRK2 RNA guide
aaggcuucauagcaucaacuuc

SEQ ID NO: 15999 - RNA, 22 nt, Artificial Sequence
  LRRK2 RNA guide
aagggacaggcugaaguugaug

SEQ ID NO: 16000 - RNA, 22 nt, Artificial Sequence
  LRRK2 RNA guide
aaguugaugcuaugaagccuug

SEQ ID NO: 16001 - RNA, 22 nt, Artificial Sequence
  LRRK2 RNA guide
acaggcugaaguugaugcuaug

SEQ ID NO: 16002 - RNA, 22 nt, Artificial Sequence
  LRRK2 RNA guide
agagccaaggcuucauagcauc

SEQ ID NO: 16003 - RNA, 22 nt, Artificial Sequence
  LRRK2 RNA guide
agcaagggacaggcugaaguug

SEQ ID NO: 16004 - RNA, 22 nt, Artificial Sequence
  LRRK2 RNA guide
agccaaggcuucauagcaucaa

SEQ ID NO: 16005 - RNA, 22 nt, Artificial Sequence
  LRRK2 RNA guide
aggcugaaguugaugcuaugaa

SEQ ID NO: 16006 - RNA, 22 nt, Artificial Sequence
  LRRK2 RNA guide
aggcuucauagcaucaacuuca

SEQ ID NO: 16007 - RNA, 22 nt, Artificial Sequence
  LRRK2 RNA guide
agggacaggcugaaguugaugc

SEQ ID NO: 16008 - RNA, 22 nt, Artificial Sequence
  LRRK2 RNA guide
aguugaugcuaugaagccuugg

SEQ ID NO: 16009 - RNA, 22 nt, Artificial Sequence
  LRRK2 RNA guide
auagcaucaacuucagccuguc

SEQ ID NO: 16010 - RNA, 22 nt, Artificial Sequence
  LRRK2 RNA guide
auauugaagagccaaggcuuca

SEQ ID NO: 16011 - RNA, 22 nt, Artificial Sequence
  LRRK2 RNA guide
augcuaugaagccuuggcucuu

SEQ ID NO: 16012 - RNA, 22 nt, Artificial Sequence
  LRRK2 RNA guide
auugaagagccaaggcuucaua

SEQ ID NO: 16013 - RNA, 22 nt, Artificial Sequence
  LRRK2 RNA guide
caaggcuucauagcaucaacuu

SEQ ID NO: 16014 - RNA, 22 nt, Artificial Sequence
  LRRK2 RNA guide
caagggacaggcugaaguugau

SEQ ID NO: 16015 - RNA, 22 nt, Artificial Sequence
  LRRK2 RNA guide
caggcugaaguugaugcuauga

SEQ ID NO: 16016 - RNA, 22 nt, Artificial Sequence
  LRRK2 RNA guide
cauagcaucaacuucagccugu

SEQ ID NO: 16017 - RNA, 22 nt, Artificial Sequence
  LRRK2 RNA guide
ccaaggcuucauagcaucaacu

SEQ ID NO: 16018 - RNA, 22 nt, Artificial Sequence
  LRRK2 RNA guide
cuaugaagccuuggcucuucaa

SEQ ID NO: 16019 - RNA, 22 nt, Artificial Sequence
  LRRK2 RNA guide
cugaaguugaugcuaugaagcc

SEQ ID NO: 16020 - RNA, 22 nt, Artificial Sequence
  LRRK2 RNA guide
cuucauagcaucaacuucagcc

SEQ ID NO: 16021 - RNA, 22 nt, Artificial Sequence
  LRRK2 RNA guide
gaagagccaaggcuucauagca

SEQ ID NO: 16022 - RNA, 22 nt, Artificial Sequence
  LRRK2 RNA guide
gaaguugaugcuaugaagccuu

SEQ ID NO: 16023 - RNA, 22 nt, Artificial Sequence
  LRRK2 RNA guide
gacaggcugaaguugaugcuau

SEQ ID NO: 16024 - RNA, 22 nt, Artificial Sequence
  LRRK2 RNA guide
gagccaaggcuucauagcauca

SEQ ID NO: 16025 - RNA, 22 nt, Artificial Sequence
  LRRK2 RNA guide
gaugcuaugaagccuuggcucu

SEQ ID NO: 16026 - RNA, 22 nt, Artificial Sequence
  LRRK2 RNA guide
gcaagggacaggcugaaguuga

SEQ ID NO: 16027 - RNA, 22 nt, Artificial Sequence
  LRRK2 RNA guide
gccaaggcuucauagcaucaac

SEQ ID NO: 16028 - RNA, 22 nt, Artificial Sequence
  LRRK2 RNA guide
gcuaugaagccuuggcucuuca

SEQ ID NO: 16029 - RNA, 22 nt, Artificial Sequence
  LRRK2 RNA guide
gcugaaguugaugcuaugaagc

SEQ ID NO: 16030 - RNA, 22 nt, Artificial Sequence
  LRRK2 RNA guide
gcuucauagcaucaacuucagc

SEQ ID NO: 16031 - RNA, 22 nt, Artificial Sequence
  LRRK2 RNA guide
ggacaggcugaaguugaugcua

SEQ ID NO: 16032 - RNA, 22 nt, Artificial Sequence
  LRRK2 RNA guide
ggcugaaguugaugcuaugaag

SEQ ID NO: 16033 - RNA, 22 nt, Artificial Sequence
  LRRK2 RNA guide
ggcuucauagcaucaacuucag

SEQ ID NO: 16034 - RNA, 22 nt, Artificial Sequence
  LRRK2 RNA guide
gggacaggcugaaguugaugcu

SEQ ID NO: 16035 - RNA, 22 nt, Artificial Sequence
  LRRK2 RNA guide
guugaugcuaugaagccuuggc

SEQ ID NO: 16036 - RNA, 22 nt, Artificial Sequence
  LRRK2 RNA guide
uagcaucaacuucagccugucc

SEQ ID NO: 16037 - RNA, 22 nt, Artificial Sequence
  LRRK2 RNA guide
uauauugaagagccaaggcuuc

SEQ ID NO: 16038 - RNA, 22 nt, Artificial Sequence
  LRRK2 RNA guide
uauugaagagccaaggcuucau

SEQ ID NO: 16039 - RNA, 22 nt, Artificial Sequence
  LRRK2 RNA guide
ucauagcaucaacuucagccug

SEQ ID NO: 16040 - RNA, 22 nt, Artificial Sequence
  LRRK2 RNA guide
ugaagagccaaggcuucauagc

SEQ ID NO: 16041 - RNA, 22 nt, Artificial Sequence
  LRRK2 RNA guide
ugaaguugaugcuaugaagccu

SEQ ID NO: 16042 - RNA, 22 nt, Artificial Sequence
  LRRK2 RNA guide
ugaugcuaugaagccuuggcuc

SEQ ID NO: 16043 - RNA, 22 nt, Artificial Sequence
  LRRK2 RNA guide
ugcuaugaagccuuggcucuuc

SEQ ID NO: 16044 - RNA, 22 nt, Artificial Sequence
  LRRK2 RNA guide
uuauauugaagagccaaggcuu

SEQ ID NO: 16045 - RNA, 22 nt, Artificial Sequence
  LRRK2 RNA guide
uucauagcaucaacuucagccu

SEQ ID NO: 16046 - RNA, 22 nt, Artificial Sequence
  LRRK2 RNA guide
uugaagagccaaggcuucauag

SEQ ID NO: 16047 - RNA, 22 nt, Artificial Sequence
  LRRK2 RNA guide
uugaugcuaugaagccuuggcu

SEQ ID NO: 16048 - RNA, 22 nt, Artificial Sequence
  LRRK2 RNA guide
uuuauauugaagagccaaggcu

SEQ ID NO: 16049 - RNA, 20 nt, Artificial Sequence
  LRRK2 RNA guide
aaaucaccuuuauauggaag

SEQ ID NO: 16050 - RNA, 20 nt, Artificial Sequence
  LRRK2 RNA guide
aacaaaucaccuuuauaugg

SEQ ID NO: 16051 - RNA, 20 nt, Artificial Sequence
  LRRK2 RNA guide
aagccuuggcucuuccauau

SEQ ID NO: 16052 - RNA, 20 nt, Artificial Sequence
  LRRK2 RNA guide
aaucaccuuuauauggaaga

SEQ ID NO: 16053 - RNA, 20 nt, Artificial Sequence
  LRRK2 RNA guide
acaaaucaccuuuauaugga

SEQ ID NO: 16054 - RNA, 20 nt, Artificial Sequence
  LRRK2 RNA guide
accuuuauauggaagagcca

SEQ ID NO: 16055 - RNA, 20 nt, Artificial Sequence
  LRRK2 RNA guide
agccuuggcucuuccauaua

SEQ ID NO: 16056 - RNA, 20 nt, Artificial Sequence
  LRRK2 RNA guide
auauggaagagccaaggcuu

SEQ ID NO: 16057 - RNA, 20 nt, Artificial Sequence
  LRRK2 RNA guide
aucaccuuuauauggaagag

SEQ ID NO: 16058 - RNA, 20 nt, Artificial Sequence
  LRRK2 RNA guide
aucagaacaaaucaccuuua

SEQ ID NO: 16059 - RNA, 20 nt, Artificial Sequence
  LRRK2 RNA guide
augaagccuuggcucuucca

SEQ ID NO: 16060 - RNA, 20 nt, Artificial Sequence
  LRRK2 RNA guide
augccaugaagccuuggcuc

SEQ ID NO: 16061 - RNA, 20 nt, Artificial Sequence
  LRRK2 RNA guide
auggaagagccaaggcuuca

SEQ ID NO: 16062 - RNA, 20 nt, Artificial Sequence
  LRRK2 RNA guide
caaaucaccuuuauauggaa

SEQ ID NO: 16063 - RNA, 20 nt, Artificial Sequence
  LRRK2 RNA guide
caccuuuauauggaagagcc

SEQ ID NO: 16064 - RNA, 20 nt, Artificial Sequence
  LRRK2 RNA guide
caugaagccuuggcucuucc

SEQ ID NO: 16065 - RNA, 20 nt, Artificial Sequence
  LRRK2 RNA guide
ccauauaaaggugauuuguu

SEQ ID NO: 16066 - RNA, 20 nt, Artificial Sequence
  LRRK2 RNA guide
ccaugaagccuuggcucuuc

SEQ ID NO: 16067 - RNA, 20 nt, Artificial Sequence
  LRRK2 RNA guide
ccuuggcucuuccauauaaa

SEQ ID NO: 16068 - RNA, 20 nt, Artificial Sequence
  LRRK2 RNA guide
ccuuuauauggaagagccaa

SEQ ID NO: 16069 - RNA, 20 nt, Artificial Sequence
  LRRK2 RNA guide
cucuuccauauaaaggugau

SEQ ID NO: 16070 - RNA, 20 nt, Artificial Sequence
  LRRK2 RNA guide
cuuccauauaaaggugauuu

SEQ ID NO: 16071 - RNA, 20 nt, Artificial Sequence
  LRRK2 RNA guide
cuuggcucuuccauauaaag

SEQ ID NO: 16072 - RNA, 20 nt, Artificial Sequence
  LRRK2 RNA guide
cuuuauauggaagagccaag

SEQ ID NO: 16073 - RNA, 20 nt, Artificial Sequence
  LRRK2 RNA guide
gaacaaaucaccuuuauaug

SEQ ID NO: 16074 - RNA, 20 nt, Artificial Sequence
  LRRK2 RNA guide
gaagccuuggcucuuccaua

SEQ ID NO: 16075 - RNA, 20 nt, Artificial Sequence
  LRRK2 RNA guide
gaucagaacaaaucaccuuu

SEQ ID NO: 16076 - RNA, 20 nt, Artificial Sequence
  LRRK2 RNA guide
gaugccaugaagccuuggcu

SEQ ID NO: 16077 - RNA, 20 nt, Artificial Sequence
  LRRK2 RNA guide
gccaugaagccuuggcucuu

SEQ ID NO: 16078 - RNA, 20 nt, Artificial Sequence
  LRRK2 RNA guide
gccuuggcucuuccauauaa

SEQ ID NO: 16079 - RNA, 20 nt, Artificial Sequence
  LRRK2 RNA guide
gcucuuccauauaaagguga

SEQ ID NO: 16080 - RNA, 20 nt, Artificial Sequence
  LRRK2 RNA guide
ggcucuuccauauaaaggug

SEQ ID NO: 16081 - RNA, 20 nt, Artificial Sequence
  LRRK2 RNA guide
uauauggaagagccaaggcu

SEQ ID NO: 16082 - RNA, 20 nt, Artificial Sequence
  LRRK2 RNA guide
uauggaagagccaaggcuuc

SEQ ID NO: 16083 - RNA, 20 nt, Artificial Sequence
  LRRK2 RNA guide
ucaccuuuauauggaagagc

SEQ ID NO: 16084 - RNA, 20 nt, Artificial Sequence
  LRRK2 RNA guide
ucagaacaaaucaccuuuau

SEQ ID NO: 16085 - RNA, 20 nt, Artificial Sequence
  LRRK2 RNA guide
uccauauaaaggugauuugu

SEQ ID NO: 16086 - RNA, 20 nt, Artificial Sequence
  LRRK2 RNA guide
ucuuccauauaaaggugauu

SEQ ID NO: 16087 - RNA, 20 nt, Artificial Sequence
  LRRK2 RNA guide
ugaagccuuggcucuuccau

SEQ ID NO: 16088 - RNA, 20 nt, Artificial Sequence
  LRRK2 RNA guide
ugccaugaagccuuggcucu

SEQ ID NO: 16089 - RNA, 20 nt, Artificial Sequence
  LRRK2 RNA guide
uggaagagccaaggcuucau

SEQ ID NO: 16090 - RNA, 20 nt, Artificial Sequence
  LRRK2 RNA guide
uggcucuuccauauaaaggu

SEQ ID NO: 16091 - RNA, 20 nt, Artificial Sequence
  LRRK2 RNA guide
uuauauggaagagccaaggc

SEQ ID NO: 16092 - RNA, 20 nt, Artificial Sequence
  LRRK2 RNA guide
uuccauauaaaggugauuug

SEQ ID NO: 16093 - RNA, 20 nt, Artificial Sequence
  LRRK2 RNA guide
uuggcucuuccauauaaagg

SEQ ID NO: 16094 - RNA, 20 nt, Artificial Sequence
  LRRK2 RNA guide
uuuauauggaagagccaagg

SEQ ID NO: 16095 - RNA, 21 nt, Artificial Sequence
  LRRK2 RNA guide
aagccuuggcucuuccauaua

SEQ ID NO: 16096 - RNA, 21 nt, Artificial Sequence
  LRRK2 RNA guide
aaucaccuuuauauggaagag

SEQ ID NO: 16097 - RNA, 21 nt, Artificial Sequence
  LRRK2 RNA guide
accuuuauauggaagagccaa

SEQ ID NO: 16098 - RNA, 21 nt, Artificial Sequence
  LRRK2 RNA guide
agccuuggcucuuccauauaa

SEQ ID NO: 16099 - RNA, 21 nt, Artificial Sequence
  LRRK2 RNA guide
auauggaagagccaaggcuuc

SEQ ID NO: 16100 - RNA, 21 nt, Artificial Sequence
  LRRK2 RNA guide
aucaccuuuauauggaagagc

SEQ ID NO: 16101 - RNA, 21 nt, Artificial Sequence
  LRRK2 RNA guide
augaagccuuggcucuuccau

SEQ ID NO: 16102 - RNA, 21 nt, Artificial Sequence
  LRRK2 RNA guide
augccaugaagccuuggcucu

SEQ ID NO: 16103 - RNA, 21 nt, Artificial Sequence
  LRRK2 RNA guide
auggaagagccaaggcuucau

SEQ ID NO: 16104 - RNA, 21 nt, Artificial Sequence
  LRRK2 RNA guide
caaaucaccuuuauauggaag

SEQ ID NO: 16105 - RNA, 21 nt, Artificial Sequence
  LRRK2 RNA guide
caccuuuauauggaagagcca

SEQ ID NO: 16106 - RNA, 21 nt, Artificial Sequence
  LRRK2 RNA guide
caugaagccuuggcucuucca

SEQ ID NO: 16107 - RNA, 21 nt, Artificial Sequence
  LRRK2 RNA guide
ccauauaaaggugauuuguuc

SEQ ID NO: 16108 - RNA, 21 nt, Artificial Sequence
  LRRK2 RNA guide
ccaugaagccuuggcucuucc

SEQ ID NO: 16109 - RNA, 21 nt, Artificial Sequence
  LRRK2 RNA guide
ccuuggcucuuccauauaaag

SEQ ID NO: 16110 - RNA, 21 nt, Artificial Sequence
  LRRK2 RNA guide
ccuuuauauggaagagccaag

SEQ ID NO: 16111 - RNA, 21 nt, Artificial Sequence
  LRRK2 RNA guide
cucuuccauauaaaggugauu

SEQ ID NO: 16112 - RNA, 21 nt, Artificial Sequence
  LRRK2 RNA guide
cuuccauauaaaggugauuug

SEQ ID NO: 16113 - RNA, 21 nt, Artificial Sequence
  LRRK2 RNA guide
cuuggcucuuccauauaaagg

SEQ ID NO: 16114 - RNA, 21 nt, Artificial Sequence
  LRRK2 RNA guide
cuuuauauggaagagccaagg

SEQ ID NO: 16115 - RNA, 21 nt, Artificial Sequence
  LRRK2 RNA guide
gaacaaaucaccuuuauaugg

SEQ ID NO: 16116 - RNA, 21 nt, Artificial Sequence
  LRRK2 RNA guide
gaagccuuggcucuuccauau

SEQ ID NO: 16117 - RNA, 21 nt, Artificial Sequence
  LRRK2 RNA guide
gaucagaacaaaucaccuuua

SEQ ID NO: 16118 - RNA, 21 nt, Artificial Sequence
  LRRK2 RNA guide
gaugccaugaagccuuggcuc

SEQ ID NO: 16119 - RNA, 21 nt, Artificial Sequence
  LRRK2 RNA guide
gccaugaagccuuggcucuuc

SEQ ID NO: 16120 - RNA, 21 nt, Artificial Sequence
  LRRK2 RNA guide
gccuuggcucuuccauauaaa

SEQ ID NO: 16121 - RNA, 21 nt, Artificial Sequence
  LRRK2 RNA guide
gcucuuccauauaaaggugau

SEQ ID NO: 16122 - RNA, 21 nt, Artificial Sequence
  LRRK2 RNA guide
ggcucuuccauauaaagguga

SEQ ID NO: 16123 - RNA, 21 nt, Artificial Sequence
  LRRK2 RNA guide
uauauggaagagccaaggcuu

SEQ ID NO: 16124 - RNA, 21 nt, Artificial Sequence
  LRRK2 RNA guide
uauggaagagccaaggcuuca

SEQ ID NO: 16125 - RNA, 21 nt, Artificial Sequence
  LRRK2 RNA guide
ucaccuuuauauggaagagcc

SEQ ID NO: 16126 - RNA, 21 nt, Artificial Sequence
  LRRK2 RNA guide
ugaagccuuggcucuuccaua

SEQ ID NO: 16127 - RNA, 21 nt, Artificial Sequence
  LRRK2 RNA guide
ugaucagaacaaaucaccuuu

SEQ ID NO: 16128 - RNA, 21 nt, Artificial Sequence
  LRRK2 RNA guide
ugaugccaugaagccuuggcu

SEQ ID NO: 16129 - RNA, 21 nt, Artificial Sequence
  LRRK2 RNA guide
ugccaugaagccuuggcucuu

SEQ ID NO: 16130 - RNA, 21 nt, Artificial Sequence
  LRRK2 RNA guide
uggaagagccaaggcuucaug

SEQ ID NO: 16131 - RNA, 21 nt, Artificial Sequence
  LRRK2 RNA guide
uggcucuuccauauaaaggug

SEQ ID NO: 16132 - RNA, 21 nt, Artificial Sequence
  LRRK2 RNA guide
uuauauggaagagccaaggcu

SEQ ID NO: 16133 - RNA, 21 nt, Artificial Sequence
  LRRK2 RNA guide
uuggcucuuccauauaaaggu

SEQ ID NO: 16134 - RNA, 21 nt, Artificial Sequence
  LRRK2 RNA guide
uuuauauggaagagccaaggc

SEQ ID NO: 16135 - RNA, 22 nt, Artificial Sequence
  LRRK2 RNA guide
aaaucaccuuuauauggaagag

SEQ ID NO: 16136 - RNA, 22 nt, Artificial Sequence
  LRRK2 RNA guide
aagccuuggcucuuccauauaa

SEQ ID NO: 16137 - RNA, 22 nt, Artificial Sequence
  LRRK2 RNA guide
aaucaccuuuauauggaagagc

SEQ ID NO: 16138 - RNA, 22 nt, Artificial Sequence
  LRRK2 RNA guide
acaaaucaccuuuauauggaag

SEQ ID NO: 16139 - RNA, 22 nt, Artificial Sequence
  LRRK2 RNA guide
accuuuauauggaagagccaag

SEQ ID NO: 16140 - RNA, 22 nt, Artificial Sequence
  LRRK2 RNA guide
agaacaaaucaccuuuauaugg

SEQ ID NO: 16141 - RNA, 22 nt, Artificial Sequence
  LRRK2 RNA guide
agccuuggcucuuccauauaaa

SEQ ID NO: 16142 - RNA, 22 nt, Artificial Sequence
  LRRK2 RNA guide
auauggaagagccaaggcuuca

SEQ ID NO: 16143 - RNA, 22 nt, Artificial Sequence
  LRRK2 RNA guide
aucaccuuuauauggaagagcc

SEQ ID NO: 16144 - RNA, 22 nt, Artificial Sequence
  LRRK2 RNA guide
augaagccuuggcucuuccaua

SEQ ID NO: 16145 - RNA, 22 nt, Artificial Sequence
  LRRK2 RNA guide
augaucagaacaaaucaccuuu

SEQ ID NO: 16146 - RNA, 22 nt, Artificial Sequence
  LRRK2 RNA guide
augccaugaagccuuggcucuu

SEQ ID NO: 16147 - RNA, 22 nt, Artificial Sequence
  LRRK2 RNA guide
auggaagagccaaggcuucaug

SEQ ID NO: 16148 - RNA, 22 nt, Artificial Sequence
  LRRK2 RNA guide
caaaucaccuuuauauggaaga

SEQ ID NO: 16149 - RNA, 22 nt, Artificial Sequence
  LRRK2 RNA guide
caccuuuauauggaagagccaa

SEQ ID NO: 16150 - RNA, 22 nt, Artificial Sequence
  LRRK2 RNA guide
cagaacaaaucaccuuuauaug

SEQ ID NO: 16151 - RNA, 22 nt, Artificial Sequence
  LRRK2 RNA guide
caugaagccuuggcucuuccau

SEQ ID NO: 16152 - RNA, 22 nt, Artificial Sequence
  LRRK2 RNA guide
ccauauaaaggugauuuguucu

SEQ ID NO: 16153 - RNA, 22 nt, Artificial Sequence
  LRRK2 RNA guide
ccaugaagccuuggcucuucca

SEQ ID NO: 16154 - RNA, 22 nt, Artificial Sequence
  LRRK2 RNA guide
ccuuggcucuuccauauaaagg

SEQ ID NO: 16155 - RNA, 22 nt, Artificial Sequence
  LRRK2 RNA guide
ccuuuauauggaagagccaagg

SEQ ID NO: 16156 - RNA, 22 nt, Artificial Sequence
  LRRK2 RNA guide
cucuuccauauaaaggugauuu

SEQ ID NO: 16157 - RNA, 22 nt, Artificial Sequence
  LRRK2 RNA guide
cuuccauauaaaggugauuugu

SEQ ID NO: 16158 - RNA, 22 nt, Artificial Sequence
  LRRK2 RNA guide
cuuggcucuuccauauaaaggu

SEQ ID NO: 16159 - RNA, 22 nt, Artificial Sequence
  LRRK2 RNA guide
cuuuauauggaagagccaaggc

SEQ ID NO: 16160 - RNA, 22 nt, Artificial Sequence
  LRRK2 RNA guide
gaacaaaucaccuuuauaugga

SEQ ID NO: 16161 - RNA, 22 nt, Artificial Sequence
  LRRK2 RNA guide
gaagccuuggcucuuccauaua

SEQ ID NO: 16162 - RNA, 22 nt, Artificial Sequence
  LRRK2 RNA guide
gaucagaacaaaucaccuuuau

SEQ ID NO: 16163 - RNA, 22 nt, Artificial Sequence
  LRRK2 RNA guide
gaugccaugaagccuuggcucu

SEQ ID NO: 16164 - RNA, 22 nt, Artificial Sequence
  LRRK2 RNA guide
gccaugaagccuuggcucuucc

SEQ ID NO: 16165 - RNA, 22 nt, Artificial Sequence
  LRRK2 RNA guide
gccuuggcucuuccauauaaag

SEQ ID NO: 16166 - RNA, 22 nt, Artificial Sequence
  LRRK2 RNA guide
gcucuuccauauaaaggugauu

SEQ ID NO: 16167 - RNA, 22 nt, Artificial Sequence
  LRRK2 RNA guide
ggcucuuccauauaaaggugau

SEQ ID NO: 16168 - RNA, 22 nt, Artificial Sequence
  LRRK2 RNA guide
uauauggaagagccaaggcuuc

SEQ ID NO: 16169 - RNA, 22 nt, Artificial Sequence
  LRRK2 RNA guide
uauggaagagccaaggcuucau

SEQ ID NO: 16170 - RNA, 22 nt, Artificial Sequence
  LRRK2 RNA guide
ucaccuuuauauggaagagcca

SEQ ID NO: 16171 - RNA, 22 nt, Artificial Sequence
  LRRK2 RNA guide
uccauauaaaggugauuuguuc

SEQ ID NO: 16172 - RNA, 22 nt, Artificial Sequence
  LRRK2 RNA guide
ucuuccauauaaaggugauuug

SEQ ID NO: 16173 - RNA, 22 nt, Artificial Sequence
  LRRK2 RNA guide
ugaagccuuggcucuuccauau

SEQ ID NO: 16174 - RNA, 22 nt, Artificial Sequence
  LRRK2 RNA guide
ugaucagaacaaaucaccuuua

SEQ ID NO: 16175 - RNA, 22 nt, Artificial Sequence
  LRRK2 RNA guide
ugaugccaugaagccuuggcuc

SEQ ID NO: 16176 - RNA, 22 nt, Artificial Sequence
  LRRK2 RNA guide
ugccaugaagccuuggcucuuc

SEQ ID NO: 16177 - RNA, 22 nt, Artificial Sequence
  LRRK2 RNA guide
uggaagagccaaggcuucaugg

SEQ ID NO: 16178 - RNA, 22 nt, Artificial Sequence
  LRRK2 RNA guide
uggcucuuccauauaaagguga

SEQ ID NO: 16179 - RNA, 22 nt, Artificial Sequence
  LRRK2 RNA guide
uuauauggaagagccaaggcuu

SEQ ID NO: 16180 - RNA, 22 nt, Artificial Sequence
  LRRK2 RNA guide
uugaugccaugaagccuuggcu

SEQ ID NO: 16181 - RNA, 22 nt, Artificial Sequence
  LRRK2 RNA guide
uuggcucuuccauauaaaggug

SEQ ID NO: 16182 - RNA, 22 nt, Artificial Sequence
  LRRK2 RNA guide
uuuauauggaagagccaaggcu

SEQ ID NO: 16183 - RNA, 20 nt, Artificial Sequence
  LRRK2 RNA guide
aaaucaccuuuauacugaag

SEQ ID NO: 16184 - RNA, 20 nt, Artificial Sequence
  LRRK2 RNA guide
aacaaaucaccuuuauacug

SEQ ID NO: 16185 - RNA, 20 nt, Artificial Sequence
  LRRK2 RNA guide
aagccuuggcucuucaguau

SEQ ID NO: 16186 - RNA, 20 nt, Artificial Sequence
  LRRK2 RNA guide
aaucaccuuuauacugaaga

SEQ ID NO: 16187 - RNA, 20 nt, Artificial Sequence
  LRRK2 RNA guide
acaaaucaccuuuauacuga

SEQ ID NO: 16188 - RNA, 20 nt, Artificial Sequence
  LRRK2 RNA guide
accuuuauacugaagagcca

SEQ ID NO: 16189 - RNA, 20 nt, Artificial Sequence
  LRRK2 RNA guide
acugaagagccaaggcuuca

SEQ ID NO: 16190 - RNA, 20 nt, Artificial Sequence
  LRRK2 RNA guide
agaacaaaucaccuuuauac

SEQ ID NO: 16191 - RNA, 20 nt, Artificial Sequence
  LRRK2 RNA guide
agccuuggcucuucaguaua

SEQ ID NO: 16192 - RNA, 20 nt, Artificial Sequence
  LRRK2 RNA guide
aguauaaaggugauuuguuc

SEQ ID NO: 16193 - RNA, 20 nt, Artificial Sequence
  LRRK2 RNA guide
auacugaagagccaaggcuu

SEQ ID NO: 16194 - RNA, 20 nt, Artificial Sequence
  LRRK2 RNA guide
aucaccuuuauacugaagag

SEQ ID NO: 16195 - RNA, 20 nt, Artificial Sequence
  LRRK2 RNA guide
augaagccuuggcucuucag

SEQ ID NO: 16196 - RNA, 20 nt, Artificial Sequence
  LRRK2 RNA guide
caaaucaccuuuauacugaa

SEQ ID NO: 16197 - RNA, 20 nt, Artificial Sequence
  LRRK2 RNA guide
caccuuuauacugaagagcc

SEQ ID NO: 16198 - RNA, 20 nt, Artificial Sequence
  LRRK2 RNA guide
caguauaaaggugauuuguu

SEQ ID NO: 16199 - RNA, 20 nt, Artificial Sequence
  LRRK2 RNA guide
caugaagccuuggcucuuca

SEQ ID NO: 16200 - RNA, 20 nt, Artificial Sequence
  LRRK2 RNA guide
ccuuggcucuucaguauaaa

SEQ ID NO: 16201 - RNA, 20 nt, Artificial Sequence
  LRRK2 RNA guide
ccuuuauacugaagagccaa

SEQ ID NO: 16202 - RNA, 20 nt, Artificial Sequence
  LRRK2 RNA guide
cucuucaguauaaaggugau

SEQ ID NO: 16203 - RNA, 20 nt, Artificial Sequence
  LRRK2 RNA guide
cuucaguauaaaggugauuu

SEQ ID NO: 16204 - RNA, 20 nt, Artificial Sequence
  LRRK2 RNA guide
cuuggcucuucaguauaaag

SEQ ID NO: 16205 - RNA, 20 nt, Artificial Sequence
  LRRK2 RNA guide
cuuuauacugaagagccaag

SEQ ID NO: 16206 - RNA, 20 nt, Artificial Sequence
  LRRK2 RNA guide
gaacaaaucaccuuuauacu

SEQ ID NO: 16207 - RNA, 20 nt, Artificial Sequence
  LRRK2 RNA guide
gaagccuuggcucuucagua

SEQ ID NO: 16208 - RNA, 20 nt, Artificial Sequence
  LRRK2 RNA guide
gccuuggcucuucaguauaa

SEQ ID NO: 16209 - RNA, 20 nt, Artificial Sequence
  LRRK2 RNA guide
gcucuucaguauaaagguga

SEQ ID NO: 16210 - RNA, 20 nt, Artificial Sequence
  LRRK2 RNA guide
ggcucuucaguauaaaggug

SEQ ID NO: 16211 - RNA, 20 nt, Artificial Sequence
  LRRK2 RNA guide
uacugaagagccaaggcuuc

SEQ ID NO: 16212 - RNA, 20 nt, Artificial Sequence
  LRRK2 RNA guide
uauacugaagagccaaggcu

SEQ ID NO: 16213 - RNA, 20 nt, Artificial Sequence
  LRRK2 RNA guide
ucaccuuuauacugaagagc

SEQ ID NO: 16214 - RNA, 20 nt, Artificial Sequence
  LRRK2 RNA guide
ucaguauaaaggugauuugu

SEQ ID NO: 16215 - RNA, 20 nt, Artificial Sequence
  LRRK2 RNA guide
ucuucaguauaaaggugauu

SEQ ID NO: 16216 - RNA, 20 nt, Artificial Sequence
  LRRK2 RNA guide
ugaagccuuggcucuucagu

SEQ ID NO: 16217 - RNA, 20 nt, Artificial Sequence
  LRRK2 RNA guide
ugaucagaacaaaucaccuu

SEQ ID NO: 16218 - RNA, 20 nt, Artificial Sequence
  LRRK2 RNA guide
uggcucuucaguauaaaggu

SEQ ID NO: 16219 - RNA, 20 nt, Artificial Sequence
  LRRK2 RNA guide
uuauacugaagagccaaggc

SEQ ID NO: 16220 - RNA, 20 nt, Artificial Sequence
  LRRK2 RNA guide
uucaguauaaaggugauuug

SEQ ID NO: 16221 - RNA, 20 nt, Artificial Sequence
  LRRK2 RNA guide
uuggcucuucaguauaaagg

SEQ ID NO: 16222 - RNA, 20 nt, Artificial Sequence
  LRRK2 RNA guide
uuuauacugaagagccaagg

SEQ ID NO: 16223 - RNA, 21 nt, Artificial Sequence
  LRRK2 RNA guide
aagccuuggcucuucaguaua

SEQ ID NO: 16224 - RNA, 21 nt, Artificial Sequence
  LRRK2 RNA guide
aaucaccuuuauacugaagag

SEQ ID NO: 16225 - RNA, 21 nt, Artificial Sequence
  LRRK2 RNA guide
accuuuauacugaagagccaa

SEQ ID NO: 16226 - RNA, 21 nt, Artificial Sequence
  LRRK2 RNA guide
acugaagagccaaggcuucau

SEQ ID NO: 16227 - RNA, 21 nt, Artificial Sequence
  LRRK2 RNA guide
agccuuggcucuucaguauaa

SEQ ID NO: 16228 - RNA, 21 nt, Artificial Sequence
  LRRK2 RNA guide
auacugaagagccaaggcuuc

SEQ ID NO: 16229 - RNA, 21 nt, Artificial Sequence
  LRRK2 RNA guide
aucaccuuuauacugaagagc

SEQ ID NO: 16230 - RNA, 21 nt, Artificial Sequence
  LRRK2 RNA guide
augaagccuuggcucuucagu

SEQ ID NO: 16231 - RNA, 21 nt, Artificial Sequence
  LRRK2 RNA guide
augaucagaacaaaucaccuu

SEQ ID NO: 16232 - RNA, 21 nt, Artificial Sequence
  LRRK2 RNA guide
caaaucaccuuuauacugaag

SEQ ID NO: 16233 - RNA, 21 nt, Artificial Sequence
  LRRK2 RNA guide
caccuuuauacugaagagcca

SEQ ID NO: 16234 - RNA, 21 nt, Artificial Sequence
  LRRK2 RNA guide
cagaacaaaucaccuuuauac

SEQ ID NO: 16235 - RNA, 21 nt, Artificial Sequence
  LRRK2 RNA guide
caguauaaaggugauuuguuc

SEQ ID NO: 16236 - RNA, 21 nt, Artificial Sequence
  LRRK2 RNA guide
caugaagccuuggcucuucag

SEQ ID NO: 16237 - RNA, 21 nt, Artificial Sequence
  LRRK2 RNA guide
ccaugaagccuuggcucuuca

SEQ ID NO: 16238 - RNA, 21 nt, Artificial Sequence
  LRRK2 RNA guide
ccuuggcucuucaguauaaag

SEQ ID NO: 16239 - RNA, 21 nt, Artificial Sequence
  LRRK2 RNA guide
ccuuuauacugaagagccaag

SEQ ID NO: 16240 - RNA, 21 nt, Artificial Sequence
  LRRK2 RNA guide
cucuucaguauaaaggugauu

SEQ ID NO: 16241 - RNA, 21 nt, Artificial Sequence
  LRRK2 RNA guide
cuucaguauaaaggugauuug

SEQ ID NO: 16242 - RNA, 21 nt, Artificial Sequence
  LRRK2 RNA guide
cuuggcucuucaguauaaagg

SEQ ID NO: 16243 - RNA, 21 nt, Artificial Sequence
  LRRK2 RNA guide
cuuuauacugaagagccaagg

SEQ ID NO: 16244 - RNA, 21 nt, Artificial Sequence
  LRRK2 RNA guide
gaacaaaucaccuuuauacug

SEQ ID NO: 16245 - RNA, 21 nt, Artificial Sequence
  LRRK2 RNA guide
gaagccuuggcucuucaguau

SEQ ID NO: 16246 - RNA, 21 nt, Artificial Sequence
  LRRK2 RNA guide
gccuuggcucuucaguauaaa

SEQ ID NO: 16247 - RNA, 21 nt, Artificial Sequence
  LRRK2 RNA guide
gcucuucaguauaaaggugau

SEQ ID NO: 16248 - RNA, 21 nt, Artificial Sequence
  LRRK2 RNA guide
ggcucuucaguauaaagguga

SEQ ID NO: 16249 - RNA, 21 nt, Artificial Sequence
  LRRK2 RNA guide
uacugaagagccaaggcuuca

SEQ ID NO: 16250 - RNA, 21 nt, Artificial Sequence
  LRRK2 RNA guide
uauacugaagagccaaggcuu

SEQ ID NO: 16251 - RNA, 21 nt, Artificial Sequence
  LRRK2 RNA guide
ucaccuuuauacugaagagcc

SEQ ID NO: 16252 - RNA, 21 nt, Artificial Sequence
  LRRK2 RNA guide
ugaagccuuggcucuucagua

SEQ ID NO: 16253 - RNA, 21 nt, Artificial Sequence
  LRRK2 RNA guide
uggcucuucaguauaaaggug

SEQ ID NO: 16254 - RNA, 21 nt, Artificial Sequence
  LRRK2 RNA guide
uuauacugaagagccaaggcu

SEQ ID NO: 16255 - RNA, 21 nt, Artificial Sequence
  LRRK2 RNA guide
uuggcucuucaguauaaaggu

SEQ ID NO: 16256 - RNA, 21 nt, Artificial Sequence
  LRRK2 RNA guide
uuuauacugaagagccaaggc

SEQ ID NO: 16257 - RNA, 22 nt, Artificial Sequence
  LRRK2 RNA guide
aaaucaccuuuauacugaagag

SEQ ID NO: 16258 - RNA, 22 nt, Artificial Sequence
  LRRK2 RNA guide
aagccuuggcucuucaguauaa

SEQ ID NO: 16259 - RNA, 22 nt, Artificial Sequence
  LRRK2 RNA guide
aaucaccuuuauacugaagagc

SEQ ID NO: 16260 - RNA, 22 nt, Artificial Sequence
  LRRK2 RNA guide
aaugaucagaacaaaucaccuu

SEQ ID NO: 16261 - RNA, 22 nt, Artificial Sequence
  LRRK2 RNA guide
acaaaucaccuuuauacugaag

SEQ ID NO: 16262 - RNA, 22 nt, Artificial Sequence
  LRRK2 RNA guide
accuuuauacugaagagccaag

SEQ ID NO: 16263 - RNA, 22 nt, Artificial Sequence
  LRRK2 RNA guide
acugaagagccaaggcuucaug

SEQ ID NO: 16264 - RNA, 22 nt, Artificial Sequence
  LRRK2 RNA guide
agaacaaaucaccuuuauacug

SEQ ID NO: 16265 - RNA, 22 nt, Artificial Sequence
  LRRK2 RNA guide
agccuuggcucuucaguauaaa

SEQ ID NO: 16266 - RNA, 22 nt, Artificial Sequence
  LRRK2 RNA guide
aguauaaaggugauuuguucug

SEQ ID NO: 16267 - RNA, 22 nt, Artificial Sequence
  LRRK2 RNA guide
auacugaagagccaaggcuuca

SEQ ID NO: 16268 - RNA, 22 nt, Artificial Sequence
  LRRK2 RNA guide
aucaccuuuauacugaagagcc

SEQ ID NO: 16269 - RNA, 22 nt, Artificial Sequence
  LRRK2 RNA guide
augaagccuuggcucuucagua

SEQ ID NO: 16270 - RNA, 22 nt, Artificial Sequence
  LRRK2 RNA guide
caaaucaccuuuauacugaaga

SEQ ID NO: 16271 - RNA, 22 nt, Artificial Sequence
  LRRK2 RNA guide
caccuuuauacugaagagccaa

SEQ ID NO: 16272 - RNA, 22 nt, Artificial Sequence
  LRRK2 RNA guide
cagaacaaaucaccuuuauacu

SEQ ID NO: 16273 - RNA, 22 nt, Artificial Sequence
  LRRK2 RNA guide
caguauaaaggugauuuguucu

SEQ ID NO: 16274 - RNA, 22 nt, Artificial Sequence
  LRRK2 RNA guide
caugaagccuuggcucuucagu

SEQ ID NO: 16275 - RNA, 22 nt, Artificial Sequence
  LRRK2 RNA guide
ccaugaagccuuggcucuucag

SEQ ID NO: 16276 - RNA, 22 nt, Artificial Sequence
  LRRK2 RNA guide
ccuuggcucuucaguauaaagg

SEQ ID NO: 16277 - RNA, 22 nt, Artificial Sequence
  LRRK2 RNA guide
ccuuuauacugaagagccaagg

SEQ ID NO: 16278 - RNA, 22 nt, Artificial Sequence
  LRRK2 RNA guide
cucuucaguauaaaggugauuu

SEQ ID NO: 16279 - RNA, 22 nt, Artificial Sequence
  LRRK2 RNA guide
cuucaguauaaaggugauuugu

SEQ ID NO: 16280 - RNA, 22 nt, Artificial Sequence
  LRRK2 RNA guide
cuuggcucuucaguauaaaggu

SEQ ID NO: 16281 - RNA, 22 nt, Artificial Sequence
  LRRK2 RNA guide
cuuuauacugaagagccaaggc

SEQ ID NO: 16282 - RNA, 22 nt, Artificial Sequence
  LRRK2 RNA guide
gaacaaaucaccuuuauacuga

SEQ ID NO: 16283 - RNA, 22 nt, Artificial Sequence
  LRRK2 RNA guide
gaagccuuggcucuucaguaua

SEQ ID NO: 16284 - RNA, 22 nt, Artificial Sequence
  LRRK2 RNA guide
gccaugaagccuuggcucuuca

SEQ ID NO: 16285 - RNA, 22 nt, Artificial Sequence
  LRRK2 RNA guide
gccuuggcucuucaguauaaag

SEQ ID NO: 16286 - RNA, 22 nt, Artificial Sequence
  LRRK2 RNA guide
gcucuucaguauaaaggugauu

SEQ ID NO: 16287 - RNA, 22 nt, Artificial Sequence
  LRRK2 RNA guide
ggcucuucaguauaaaggugau

SEQ ID NO: 16288 - RNA, 22 nt, Artificial Sequence
  LRRK2 RNA guide
uacugaagagccaaggcuucau

SEQ ID NO: 16289 - RNA, 22 nt, Artificial Sequence
  LRRK2 RNA guide
uauacugaagagccaaggcuuc

SEQ ID NO: 16290 - RNA, 22 nt, Artificial Sequence
  LRRK2 RNA guide
ucaccuuuauacugaagagcca

SEQ ID NO: 16291 - RNA, 22 nt, Artificial Sequence
  LRRK2 RNA guide
ucagaacaaaucaccuuuauac

SEQ ID NO: 16292 - RNA, 22 nt, Artificial Sequence
  LRRK2 RNA guide
ucaguauaaaggugauuuguuc

SEQ ID NO: 16293 - RNA, 22 nt, Artificial Sequence
  LRRK2 RNA guide
ucuucaguauaaaggugauuug

SEQ ID NO: 16294 - RNA, 22 nt, Artificial Sequence
  LRRK2 RNA guide
ugaagccuuggcucuucaguau

SEQ ID NO: 16295 - RNA, 22 nt, Artificial Sequence
  LRRK2 RNA guide
uggcucuucaguauaaagguga

SEQ ID NO: 16296 - RNA, 22 nt, Artificial Sequence
  LRRK2 RNA guide
uuauacugaagagccaaggcuu

SEQ ID NO: 16297 - RNA, 22 nt, Artificial Sequence
  LRRK2 RNA guide
uuggcucuucaguauaaaggug

SEQ ID NO: 16298 - RNA, 22 nt, Artificial Sequence
  LRRK2 RNA guide
uuuauacugaagagccaaggcu

SEQ ID NO: 16299 - RNA, 20 nt, Artificial Sequence
  LRRK2 RNA guide
aaaucaccuucauauugaag

SEQ ID NO: 16300 - RNA, 20 nt, Artificial Sequence
  LRRK2 RNA guide
aaaugaucagaacaaaucac

SEQ ID NO: 16301 - RNA, 20 nt, Artificial Sequence
  LRRK2 RNA guide
aacaaaucaccuucauauug

SEQ ID NO: 16302 - RNA, 20 nt, Artificial Sequence
  LRRK2 RNA guide
aagccuuggcucuucaauau

SEQ ID NO: 16303 - RNA, 20 nt, Artificial Sequence
  LRRK2 RNA guide
aauaugaaggugauuuguuc

SEQ ID NO: 16304 - RNA, 20 nt, Artificial Sequence
  LRRK2 RNA guide
aaucaccuucauauugaaga

SEQ ID NO: 16305 - RNA, 20 nt, Artificial Sequence
  LRRK2 RNA guide
aaugaucagaacaaaucacc

SEQ ID NO: 16306 - RNA, 20 nt, Artificial Sequence
  LRRK2 RNA guide
acaaaucaccuucauauuga

SEQ ID NO: 16307 - RNA, 20 nt, Artificial Sequence
  LRRK2 RNA guide
accuucauauugaagagcca

SEQ ID NO: 16308 - RNA, 20 nt, Artificial Sequence
  LRRK2 RNA guide
agaacaaaucaccuucauau

SEQ ID NO: 16309 - RNA, 20 nt, Artificial Sequence
  LRRK2 RNA guide
agccuuggcucuucaauaug

SEQ ID NO: 16310 - RNA, 20 nt, Artificial Sequence
  LRRK2 RNA guide
auaugaaggugauuuguucu

SEQ ID NO: 16311 - RNA, 20 nt, Artificial Sequence
  LRRK2 RNA guide
aucaccuucauauugaagag

SEQ ID NO: 16312 - RNA, 20 nt, Artificial Sequence
  LRRK2 RNA guide
aucagaacaaaucaccuuca

SEQ ID NO: 16313 - RNA, 20 nt, Artificial Sequence
  LRRK2 RNA guide
augaaggugauuuguucuga

SEQ ID NO: 16314 - RNA, 20 nt, Artificial Sequence
  LRRK2 RNA guide
augaucagaacaaaucaccu

SEQ ID NO: 16315 - RNA, 20 nt, Artificial Sequence
  LRRK2 RNA guide
caaaucaccuucauauugaa

SEQ ID NO: 16316 - RNA, 20 nt, Artificial Sequence
  LRRK2 RNA guide
caaaugaucagaacaaauca

SEQ ID NO: 16317 - RNA, 20 nt, Artificial Sequence
  LRRK2 RNA guide
caauaugaaggugauuuguu

SEQ ID NO: 16318 - RNA, 20 nt, Artificial Sequence
  LRRK2 RNA guide
caccuucauauugaagagcc

SEQ ID NO: 16319 - RNA, 20 nt, Artificial Sequence
  LRRK2 RNA guide
cagaacaaaucaccuucaua

SEQ ID NO: 16320 - RNA, 20 nt, Artificial Sequence
  LRRK2 RNA guide
ccuucauauugaagagccaa

SEQ ID NO: 16321 - RNA, 20 nt, Artificial Sequence
  LRRK2 RNA guide
ccuuggcucuucaauaugaa

SEQ ID NO: 16322 - RNA, 20 nt, Artificial Sequence
  LRRK2 RNA guide
cucuucaauaugaaggugau

SEQ ID NO: 16323 - RNA, 20 nt, Artificial Sequence
  LRRK2 RNA guide
cuucaauaugaaggugauuu

SEQ ID NO: 16324 - RNA, 20 nt, Artificial Sequence
  LRRK2 RNA guide
cuucauauugaagagccaag

SEQ ID NO: 16325 - RNA, 20 nt, Artificial Sequence
  LRRK2 RNA guide
cuuggcucuucaauaugaag

SEQ ID NO: 16326 - RNA, 20 nt, Artificial Sequence
  LRRK2 RNA guide
gaacaaaucaccuucauauu

SEQ ID NO: 16327 - RNA, 20 nt, Artificial Sequence
  LRRK2 RNA guide
gaagccuuggcucuucaaua

SEQ ID NO: 16328 - RNA, 20 nt, Artificial Sequence
  LRRK2 RNA guide
gaucagaacaaaucaccuuc

SEQ ID NO: 16329 - RNA, 20 nt, Artificial Sequence
  LRRK2 RNA guide
gccuuggcucuucaauauga

SEQ ID NO: 16330 - RNA, 20 nt, Artificial Sequence
  LRRK2 RNA guide
gcucuucaauaugaagguga

SEQ ID NO: 16331 - RNA, 20 nt, Artificial Sequence
  LRRK2 RNA guide
ggcucuucaauaugaaggug

SEQ ID NO: 16332 - RNA, 20 nt, Artificial Sequence
  LRRK2 RNA guide
uaugaaggugauuuguucug

SEQ ID NO: 16333 - RNA, 20 nt, Artificial Sequence
  LRRK2 RNA guide
ucaauaugaaggugauuugu

SEQ ID NO: 16334 - RNA, 20 nt, Artificial Sequence
  LRRK2 RNA guide
ucaccuucauauugaagagc

SEQ ID NO: 16335 - RNA, 20 nt, Artificial Sequence
  LRRK2 RNA guide
ucagaacaaaucaccuucau

SEQ ID NO: 16336 - RNA, 20 nt, Artificial Sequence
  LRRK2 RNA guide
ucauauugaagagccaaggc

SEQ ID NO: 16337 - RNA, 20 nt, Artificial Sequence
  LRRK2 RNA guide
ucuucaauaugaaggugauu

SEQ ID NO: 16338 - RNA, 20 nt, Artificial Sequence
  LRRK2 RNA guide
ugaagccuuggcucuucaau

SEQ ID NO: 16339 - RNA, 20 nt, Artificial Sequence
  LRRK2 RNA guide
ugaaggugauuuguucugau

SEQ ID NO: 16340 - RNA, 20 nt, Artificial Sequence
  LRRK2 RNA guide
uggcucuucaauaugaaggu

SEQ ID NO: 16341 - RNA, 20 nt, Artificial Sequence
  LRRK2 RNA guide
uucaauaugaaggugauuug

SEQ ID NO: 16342 - RNA, 20 nt, Artificial Sequence
  LRRK2 RNA guide
uucauauugaagagccaagg

SEQ ID NO: 16343 - RNA, 20 nt, Artificial Sequence
  LRRK2 RNA guide
uuggcucuucaauaugaagg

SEQ ID NO: 16344 - RNA, 21 nt, Artificial Sequence
  LRRK2 RNA guide
aaaugaucagaacaaaucacc

SEQ ID NO: 16345 - RNA, 21 nt, Artificial Sequence
  LRRK2 RNA guide
aagccuuggcucuucaauaug

SEQ ID NO: 16346 - RNA, 21 nt, Artificial Sequence
  LRRK2 RNA guide
aaucaccuucauauugaagag

SEQ ID NO: 16347 - RNA, 21 nt, Artificial Sequence
  LRRK2 RNA guide
aaugaucagaacaaaucaccu

SEQ ID NO: 16348 - RNA, 21 nt, Artificial Sequence
  LRRK2 RNA guide
accuucauauugaagagccaa

SEQ ID NO: 16349 - RNA, 21 nt, Artificial Sequence
  LRRK2 RNA guide
agccuuggcucuucaauauga

SEQ ID NO: 16350 - RNA, 21 nt, Artificial Sequence
  LRRK2 RNA guide
auaugaaggugauuuguucug

SEQ ID NO: 16351 - RNA, 21 nt, Artificial Sequence
  LRRK2 RNA guide
aucaccuucauauugaagagc

SEQ ID NO: 16352 - RNA, 21 nt, Artificial Sequence
  LRRK2 RNA guide
aucagaacaaaucaccuucau

SEQ ID NO: 16353 - RNA, 21 nt, Artificial Sequence
  LRRK2 RNA guide
augaagccuuggcucuucaau

SEQ ID NO: 16354 - RNA, 21 nt, Artificial Sequence
  LRRK2 RNA guide
augaaggugauuuguucugau

SEQ ID NO: 16355 - RNA, 21 nt, Artificial Sequence
  LRRK2 RNA guide
caaaucaccuucauauugaag

SEQ ID NO: 16356 - RNA, 21 nt, Artificial Sequence
  LRRK2 RNA guide
caaaugaucagaacaaaucac

SEQ ID NO: 16357 - RNA, 21 nt, Artificial Sequence
  LRRK2 RNA guide
caauaugaaggugauuuguuc

SEQ ID NO: 16358 - RNA, 21 nt, Artificial Sequence
  LRRK2 RNA guide
caccuucauauugaagagcca

SEQ ID NO: 16359 - RNA, 21 nt, Artificial Sequence
  LRRK2 RNA guide
cagaacaaaucaccuucauau

SEQ ID NO: 16360 - RNA, 21 nt, Artificial Sequence
  LRRK2 RNA guide
caugaagccuuggcucuucaa

SEQ ID NO: 16361 - RNA, 21 nt, Artificial Sequence
  LRRK2 RNA guide
ccuucauauugaagagccaag

SEQ ID NO: 16362 - RNA, 21 nt, Artificial Sequence
  LRRK2 RNA guide
ccuuggcucuucaauaugaag

SEQ ID NO: 16363 - RNA, 21 nt, Artificial Sequence
  LRRK2 RNA guide
cucuucaauaugaaggugauu

SEQ ID NO: 16364 - RNA, 21 nt, Artificial Sequence
  LRRK2 RNA guide
cuucaauaugaaggugauuug

SEQ ID NO: 16365 - RNA, 21 nt, Artificial Sequence
  LRRK2 RNA guide
cuucauauugaagagccaagg

SEQ ID NO: 16366 - RNA, 21 nt, Artificial Sequence
  LRRK2 RNA guide
cuuggcucuucaauaugaagg

SEQ ID NO: 16367 - RNA, 21 nt, Artificial Sequence
  LRRK2 RNA guide
gaacaaaucaccuucauauug

SEQ ID NO: 16368 - RNA, 21 nt, Artificial Sequence
  LRRK2 RNA guide
gaagccuuggcucuucaauau

SEQ ID NO: 16369 - RNA, 21 nt, Artificial Sequence
  LRRK2 RNA guide
gaucagaacaaaucaccuuca

SEQ ID NO: 16370 - RNA, 21 nt, Artificial Sequence
  LRRK2 RNA guide
gccuuggcucuucaauaugaa

SEQ ID NO: 16371 - RNA, 21 nt, Artificial Sequence
  LRRK2 RNA guide
gcucuucaauaugaaggugau

SEQ ID NO: 16372 - RNA, 21 nt, Artificial Sequence
  LRRK2 RNA guide
ggcucuucaauaugaagguga

SEQ ID NO: 16373 - RNA, 21 nt, Artificial Sequence
  LRRK2 RNA guide
uaugaaggugauuuguucuga

SEQ ID NO: 16374 - RNA, 21 nt, Artificial Sequence
  LRRK2 RNA guide
ucaccuucauauugaagagcc

SEQ ID NO: 16375 - RNA, 21 nt, Artificial Sequence
  LRRK2 RNA guide
ucagaacaaaucaccuucaua

SEQ ID NO: 16376 - RNA, 21 nt, Artificial Sequence
  LRRK2 RNA guide
ucauauugaagagccaaggcu

SEQ ID NO: 16377 - RNA, 21 nt, Artificial Sequence
  LRRK2 RNA guide
ugaagccuuggcucuucaaua

SEQ ID NO: 16378 - RNA, 21 nt, Artificial Sequence
  LRRK2 RNA guide
ugaaggugauuuguucugauc

SEQ ID NO: 16379 - RNA, 21 nt, Artificial Sequence
  LRRK2 RNA guide
ugaucagaacaaaucaccuuc

SEQ ID NO: 16380 - RNA, 21 nt, Artificial Sequence
  LRRK2 RNA guide
uggcucuucaauaugaaggug

SEQ ID NO: 16381 - RNA, 21 nt, Artificial Sequence
  LRRK2 RNA guide
uucauauugaagagccaaggc

SEQ ID NO: 16382 - RNA, 21 nt, Artificial Sequence
  LRRK2 RNA guide
uuggcucuucaauaugaaggu

SEQ ID NO: 16383 - RNA, 22 nt, Artificial Sequence
  LRRK2 RNA guide
aaaucaccuucauauugaagag

SEQ ID NO: 16384 - RNA, 22 nt, Artificial Sequence
  LRRK2 RNA guide
aaaugaucagaacaaaucaccu

SEQ ID NO: 16385 - RNA, 22 nt, Artificial Sequence
  LRRK2 RNA guide
aagccuuggcucuucaauauga

SEQ ID NO: 16386 - RNA, 22 nt, Artificial Sequence
  LRRK2 RNA guide
aauaugaaggugauuuguucug

SEQ ID NO: 16387 - RNA, 22 nt, Artificial Sequence
  LRRK2 RNA guide
aaucaccuucauauugaagagc

SEQ ID NO: 16388 - RNA, 22 nt, Artificial Sequence
  LRRK2 RNA guide
acaaaucaccuucauauugaag

SEQ ID NO: 16389 - RNA, 22 nt, Artificial Sequence
  LRRK2 RNA guide
accuucauauugaagagccaag

SEQ ID NO: 16390 - RNA, 22 nt, Artificial Sequence
  LRRK2 RNA guide
agaacaaaucaccuucauauug

SEQ ID NO: 16391 - RNA, 22 nt, Artificial Sequence
  LRRK2 RNA guide
agccuuggcucuucaauaugaa

SEQ ID NO: 16392 - RNA, 22 nt, Artificial Sequence
  LRRK2 RNA guide
auaugaaggugauuuguucuga

SEQ ID NO: 16393 - RNA, 22 nt, Artificial Sequence
  LRRK2 RNA guide
aucaccuucauauugaagagcc

SEQ ID NO: 16394 - RNA, 22 nt, Artificial Sequence
  LRRK2 RNA guide
aucagaacaaaucaccuucaua

SEQ ID NO: 16395 - RNA, 22 nt, Artificial Sequence
  LRRK2 RNA guide
augaagccuuggcucuucaaua

SEQ ID NO: 16396 - RNA, 22 nt, Artificial Sequence
  LRRK2 RNA guide
augaaggugauuuguucugauc

SEQ ID NO: 16397 - RNA, 22 nt, Artificial Sequence
  LRRK2 RNA guide
augaucagaacaaaucaccuuc

SEQ ID NO: 16398 - RNA, 22 nt, Artificial Sequence
  LRRK2 RNA guide
caaaucaccuucauauugaaga

SEQ ID NO: 16399 - RNA, 22 nt, Artificial Sequence
  LRRK2 RNA guide
caaaugaucagaacaaaucacc

SEQ ID NO: 16400 - RNA, 22 nt, Artificial Sequence
  LRRK2 RNA guide
caauaugaaggugauuuguucu

SEQ ID NO: 16401 - RNA, 22 nt, Artificial Sequence
  LRRK2 RNA guide
caccuucauauugaagagccaa

SEQ ID NO: 16402 - RNA, 22 nt, Artificial Sequence
  LRRK2 RNA guide
cagaacaaaucaccuucauauu

SEQ ID NO: 16403 - RNA, 22 nt, Artificial Sequence
  LRRK2 RNA guide
caugaagccuuggcucuucaau

SEQ ID NO: 16404 - RNA, 22 nt, Artificial Sequence
  LRRK2 RNA guide
ccaugaagccuuggcucuucaa

SEQ ID NO: 16405 - RNA, 22 nt, Artificial Sequence
  LRRK2 RNA guide
ccuucauauugaagagccaagg

SEQ ID NO: 16406 - RNA, 22 nt, Artificial Sequence
  LRRK2 RNA guide
ccuuggcucuucaauaugaagg

SEQ ID NO: 16407 - RNA, 22 nt, Artificial Sequence
  LRRK2 RNA guide
cucuucaauaugaaggugauuu

SEQ ID NO: 16408 - RNA, 22 nt, Artificial Sequence
  LRRK2 RNA guide
cuucaauaugaaggugauuugu

SEQ ID NO: 16409 - RNA, 22 nt, Artificial Sequence
  LRRK2 RNA guide
cuucauauugaagagccaaggc

SEQ ID NO: 16410 - RNA, 22 nt, Artificial Sequence
  LRRK2 RNA guide
cuuggcucuucaauaugaaggu

SEQ ID NO: 16411 - RNA, 22 nt, Artificial Sequence
  LRRK2 RNA guide
gaacaaaucaccuucauauuga

SEQ ID NO: 16412 - RNA, 22 nt, Artificial Sequence
  LRRK2 RNA guide
gaagccuuggcucuucaauaug

SEQ ID NO: 16413 - RNA, 22 nt, Artificial Sequence
  LRRK2 RNA guide
gaucagaacaaaucaccuucau

SEQ ID NO: 16414 - RNA, 22 nt, Artificial Sequence
  LRRK2 RNA guide
gccuuggcucuucaauaugaag

SEQ ID NO: 16415 - RNA, 22 nt, Artificial Sequence
  LRRK2 RNA guide
gcucuucaauaugaaggugauu

SEQ ID NO: 16416 - RNA, 22 nt, Artificial Sequence
  LRRK2 RNA guide
ggcucuucaauaugaaggugau

SEQ ID NO: 16417 - RNA, 22 nt, Artificial Sequence
  LRRK2 RNA guide
uaugaaggugauuuguucugau

SEQ ID NO: 16418 - RNA, 22 nt, Artificial Sequence
  LRRK2 RNA guide
ucaaaugaucagaacaaaucac

SEQ ID NO: 16419 - RNA, 22 nt, Artificial Sequence
  LRRK2 RNA guide
ucaauaugaaggugauuuguuc

SEQ ID NO: 16420 - RNA, 22 nt, Artificial Sequence
  LRRK2 RNA guide
ucaccuucauauugaagagcca

SEQ ID NO: 16421 - RNA, 22 nt, Artificial Sequence
  LRRK2 RNA guide
ucagaacaaaucaccuucauau

SEQ ID NO: 16422 - RNA, 22 nt, Artificial Sequence
  LRRK2 RNA guide
ucauauugaagagccaaggcuu

SEQ ID NO: 16423 - RNA, 22 nt, Artificial Sequence
  LRRK2 RNA guide
ucuucaauaugaaggugauuug

SEQ ID NO: 16424 - RNA, 22 nt, Artificial Sequence
  LRRK2 RNA guide
ugaagccuuggcucuucaauau

SEQ ID NO: 16425 - RNA, 22 nt, Artificial Sequence
  LRRK2 RNA guide
ugaaggugauuuguucugauca

SEQ ID NO: 16426 - RNA, 22 nt, Artificial Sequence
  LRRK2 RNA guide
ugaucagaacaaaucaccuuca

SEQ ID NO: 16427 - RNA, 22 nt, Artificial Sequence
  LRRK2 RNA guide
uggcucuucaauaugaagguga

SEQ ID NO: 16428 - RNA, 22 nt, Artificial Sequence
  LRRK2 RNA guide
uucauauugaagagccaaggcu

SEQ ID NO: 16429 - RNA, 22 nt, Artificial Sequence
  LRRK2 RNA guide
uuggcucuucaauaugaaggug

SEQ ID NO: 16430 - RNA, 20 nt, Artificial Sequence
  LRRK2 RNA guide
aaagguaauuuguucugauc

SEQ ID NO: 16431 - RNA, 20 nt, Artificial Sequence
  LRRK2 RNA guide
aagguaauuuguucugauca

SEQ ID NO: 16432 - RNA, 20 nt, Artificial Sequence
  LRRK2 RNA guide
aaugaucagaacaaauuacc

SEQ ID NO: 16433 - RNA, 20 nt, Artificial Sequence
  LRRK2 RNA guide
agguaauuuguucugaucau

SEQ ID NO: 16434 - RNA, 20 nt, Artificial Sequence
  LRRK2 RNA guide
augaucagaacaaauuaccu

SEQ ID NO: 16435 - RNA, 20 nt, Artificial Sequence
  LRRK2 RNA guide
ccuuggcucuucaauauaaa

SEQ ID NO: 16436 - RNA, 20 nt, Artificial Sequence
  LRRK2 RNA guide
cuuggcucuucaauauaaag

SEQ ID NO: 16437 - RNA, 20 nt, Artificial Sequence
  LRRK2 RNA guide
gaucagaacaaauuaccuuu

SEQ ID NO: 16438 - RNA, 20 nt, Artificial Sequence
  LRRK2 RNA guide
gccuuggcucuucaauauaa

SEQ ID NO: 16439 - RNA, 20 nt, Artificial Sequence
  LRRK2 RNA guide
gcucuucaauauaaagguaa

SEQ ID NO: 16440 - RNA, 20 nt, Artificial Sequence
  LRRK2 RNA guide
ggcucuucaauauaaaggua

SEQ ID NO: 16441 - RNA, 20 nt, Artificial Sequence
  LRRK2 RNA guide
gguaauuuguucugaucauu

SEQ ID NO: 16442 - RNA, 20 nt, Artificial Sequence
  LRRK2 RNA guide
ugaucagaacaaauuaccuu

SEQ ID NO: 16443 - RNA, 20 nt, Artificial Sequence
  LRRK2 RNA guide
uggcucuucaauauaaaggu

SEQ ID NO: 16444 - RNA, 20 nt, Artificial Sequence
  LRRK2 RNA guide
uuaccuuuauauugaagagc

SEQ ID NO: 16445 - RNA, 20 nt, Artificial Sequence
  LRRK2 RNA guide
uuggcucuucaauauaaagg

SEQ ID NO: 16446 - RNA, 21 nt, Artificial Sequence
  LRRK2 RNA guide
agccuuggcucuucaauauaa

SEQ ID NO: 16447 - RNA, 21 nt, Artificial Sequence
  LRRK2 RNA guide
ccuuggcucuucaauauaaag

SEQ ID NO: 16448 - RNA, 21 nt, Artificial Sequence
  LRRK2 RNA guide
cuuggcucuucaauauaaagg

SEQ ID NO: 16449 - RNA, 21 nt, Artificial Sequence
  LRRK2 RNA guide
gccuuggcucuucaauauaaa

SEQ ID NO: 16450 - RNA, 21 nt, Artificial Sequence
  LRRK2 RNA guide
ggcucuucaauauaaagguaa

SEQ ID NO: 16451 - RNA, 21 nt, Artificial Sequence
  LRRK2 RNA guide
uggcucuucaauauaaaggua

SEQ ID NO: 16452 - RNA, 21 nt, Artificial Sequence
  LRRK2 RNA guide
uuaccuuuauauugaagagcc

SEQ ID NO: 16453 - RNA, 21 nt, Artificial Sequence
  LRRK2 RNA guide
uuggcucuucaauauaaaggu

SEQ ID NO: 16454 - RNA, 22 nt, Artificial Sequence
  LRRK2 RNA guide
aagccuuggcucuucaauauaa

SEQ ID NO: 16455 - RNA, 22 nt, Artificial Sequence
  LRRK2 RNA guide
agccuuggcucuucaauauaaa

SEQ ID NO: 16456 - RNA, 22 nt, Artificial Sequence
  LRRK2 RNA guide
auuaccuuuauauugaagagcc

SEQ ID NO: 16457 - RNA, 22 nt, Artificial Sequence
  LRRK2 RNA guide
caaaugaucagaacaaauuacc

SEQ ID NO: 16458 - RNA, 22 nt, Artificial Sequence
  LRRK2 RNA guide
ccuuggcucuucaauauaaagg

SEQ ID NO: 16459 - RNA, 22 nt, Artificial Sequence
  LRRK2 RNA guide
cuuggcucuucaauauaaaggu

SEQ ID NO: 16460 - RNA, 22 nt, Artificial Sequence
  LRRK2 RNA guide
gccuuggcucuucaauauaaag

SEQ ID NO: 16461 - RNA, 22 nt, Artificial Sequence
  LRRK2 RNA guide
ggcucuucaauauaaagguaau

SEQ ID NO: 16462 - RNA, 22 nt, Artificial Sequence
  LRRK2 RNA guide
gguaauuuguucugaucauuug

SEQ ID NO: 16463 - RNA, 22 nt, Artificial Sequence
  LRRK2 RNA guide
uggcucuucaauauaaagguaa

SEQ ID NO: 16464 - RNA, 22 nt, Artificial Sequence
  LRRK2 RNA guide
uuaccuuuauauugaagagcca

SEQ ID NO: 16465 - RNA, 22 nt, Artificial Sequence
  LRRK2 RNA guide
uuggcucuucaauauaaaggua

SEQ ID NO: 16466 - RNA, 20 nt, Artificial Sequence
  LRRK2 RNA guide
aagaagaagcgcuagccugg

SEQ ID NO: 16467 - RNA, 20 nt, Artificial Sequence
  LRRK2 RNA guide
aagaagcgcuagccuggagg

SEQ ID NO: 16468 - RNA, 20 nt, Artificial Sequence
  LRRK2 RNA guide
aagcgcuagccuggagggaa

SEQ ID NO: 16469 - RNA, 20 nt, Artificial Sequence
  LRRK2 RNA guide
aaucacaggggaagaagaag

SEQ ID NO: 16470 - RNA, 20 nt, Artificial Sequence
  LRRK2 RNA guide
acaggggaagaagaagcgcu

SEQ ID NO: 16471 - RNA, 20 nt, Artificial Sequence
  LRRK2 RNA guide
agaagaagcgcuagccugga

SEQ ID NO: 16472 - RNA, 20 nt, Artificial Sequence
  LRRK2 RNA guide
agaagcgcuagccuggaggg

SEQ ID NO: 16473 - RNA, 20 nt, Artificial Sequence
  LRRK2 RNA guide
agcgcuagccuggagggaaa

SEQ ID NO: 16474 - RNA, 20 nt, Artificial Sequence
  LRRK2 RNA guide
aggcuagcgcuucuucuucc

SEQ ID NO: 16475 - RNA, 20 nt, Artificial Sequence
  LRRK2 RNA guide
aggggaagaagaagcgcuag

SEQ ID NO: 16476 - RNA, 20 nt, Artificial Sequence
  LRRK2 RNA guide
aucacaggggaagaagaagc

SEQ ID NO: 16477 - RNA, 20 nt, Artificial Sequence
  LRRK2 RNA guide
cacaggggaagaagaagcgc

SEQ ID NO: 16478 - RNA, 20 nt, Artificial Sequence
  LRRK2 RNA guide
caggcuagcgcuucuucuuc

SEQ ID NO: 16479 - RNA, 20 nt, Artificial Sequence
  LRRK2 RNA guide
caggggaagaagaagcgcua

SEQ ID NO: 16480 - RNA, 20 nt, Artificial Sequence
  LRRK2 RNA guide
ccaggcuagcgcuucuucuu

SEQ ID NO: 16481 - RNA, 20 nt, Artificial Sequence
  LRRK2 RNA guide
cccuccaggcuagcgcuucu

SEQ ID NO: 16482 - RNA, 20 nt, Artificial Sequence
  LRRK2 RNA guide
ccuccaggcuagcgcuucuu

SEQ ID NO: 16483 - RNA, 20 nt, Artificial Sequence
  LRRK2 RNA guide
cgcuagccuggagggaaaga

SEQ ID NO: 16484 - RNA, 20 nt, Artificial Sequence
  LRRK2 RNA guide
cuagccuggagggaaagaca

SEQ ID NO: 16485 - RNA, 20 nt, Artificial Sequence
  LRRK2 RNA guide
cuagcgcuucuucuuccccu

SEQ ID NO: 16486 - RNA, 20 nt, Artificial Sequence
  LRRK2 RNA guide
cuccaggcuagcgcuucuuc

SEQ ID NO: 16487 - RNA, 20 nt, Artificial Sequence
  LRRK2 RNA guide
cuuucccuccaggcuagcgc

SEQ ID NO: 16488 - RNA, 20 nt, Artificial Sequence
  LRRK2 RNA guide
gaagaagaagcgcuagccug

SEQ ID NO: 16489 - RNA, 20 nt, Artificial Sequence
  LRRK2 RNA guide
gaagaagcgcuagccuggag

SEQ ID NO: 16490 - RNA, 20 nt, Artificial Sequence
  LRRK2 RNA guide
gaagcgcuagccuggaggga

SEQ ID NO: 16491 - RNA, 20 nt, Artificial Sequence
  LRRK2 RNA guide
gcgcuagccuggagggaaag

SEQ ID NO: 16492 - RNA, 20 nt, Artificial Sequence
  LRRK2 RNA guide
gcuagccuggagggaaagac

SEQ ID NO: 16493 - RNA, 20 nt, Artificial Sequence
  LRRK2 RNA guide
gcuagcgcuucuucuucccc

SEQ ID NO: 16494 - RNA, 20 nt, Artificial Sequence
  LRRK2 RNA guide
ggaagaagaagcgcuagccu

SEQ ID NO: 16495 - RNA, 20 nt, Artificial Sequence
  LRRK2 RNA guide
ggcuagcgcuucuucuuccc

SEQ ID NO: 16496 - RNA, 20 nt, Artificial Sequence
  LRRK2 RNA guide
gggaagaagaagcgcuagcc

SEQ ID NO: 16497 - RNA, 20 nt, Artificial Sequence
  LRRK2 RNA guide
ggggaagaagaagcgcuagc

SEQ ID NO: 16498 - RNA, 20 nt, Artificial Sequence
  LRRK2 RNA guide
gucuuucccuccaggcuagc

SEQ ID NO: 16499 - RNA, 20 nt, Artificial Sequence
  LRRK2 RNA guide
gugucuuucccuccaggcua

SEQ ID NO: 16500 - RNA, 20 nt, Artificial Sequence
  LRRK2 RNA guide
guuuugugucuuucccucca

SEQ ID NO: 16501 - RNA, 20 nt, Artificial Sequence
  LRRK2 RNA guide
uagcgcuucuucuuccccug

SEQ ID NO: 16502 - RNA, 20 nt, Artificial Sequence
  LRRK2 RNA guide
ucacaggggaagaagaagcg

SEQ ID NO: 16503 - RNA, 20 nt, Artificial Sequence
  LRRK2 RNA guide
uccaggcuagcgcuucuucu

SEQ ID NO: 16504 - RNA, 20 nt, Artificial Sequence
  LRRK2 RNA guide
ucccuccaggcuagcgcuuc

SEQ ID NO: 16505 - RNA, 20 nt, Artificial Sequence
  LRRK2 RNA guide
ucuuucccuccaggcuagcg

SEQ ID NO: 16506 - RNA, 20 nt, Artificial Sequence
  LRRK2 RNA guide
ugugucuuucccuccaggcu

SEQ ID NO: 16507 - RNA, 20 nt, Artificial Sequence
  LRRK2 RNA guide
uucccuccaggcuagcgcuu

SEQ ID NO: 16508 - RNA, 20 nt, Artificial Sequence
  LRRK2 RNA guide
uuucccuccaggcuagcgcu

SEQ ID NO: 16509 - RNA, 20 nt, Artificial Sequence
  LRRK2 RNA guide
uuugugucuuucccuccagg

SEQ ID NO: 16510 - RNA, 20 nt, Artificial Sequence
  LRRK2 RNA guide
uuuugugucuuucccuccag

SEQ ID NO: 16511 - RNA, 21 nt, Artificial Sequence
  LRRK2 RNA guide
aagaagaagcgcuagccugga

SEQ ID NO: 16512 - RNA, 21 nt, Artificial Sequence
  LRRK2 RNA guide
aagaagcgcuagccuggaggg

SEQ ID NO: 16513 - RNA, 21 nt, Artificial Sequence
  LRRK2 RNA guide
aagcgcuagccuggagggaaa

SEQ ID NO: 16514 - RNA, 21 nt, Artificial Sequence
  LRRK2 RNA guide
aaucacaggggaagaagaagc

SEQ ID NO: 16515 - RNA, 21 nt, Artificial Sequence
  LRRK2 RNA guide
acaggggaagaagaagcgcua

SEQ ID NO: 16516 - RNA, 21 nt, Artificial Sequence
  LRRK2 RNA guide
agaagaagcgcuagccuggag

SEQ ID NO: 16517 - RNA, 21 nt, Artificial Sequence
  LRRK2 RNA guide
agaagcgcuagccuggaggga

SEQ ID NO: 16518 - RNA, 21 nt, Artificial Sequence
  LRRK2 RNA guide
agaaucacaggggaagaagaa

SEQ ID NO: 16519 - RNA, 21 nt, Artificial Sequence
  LRRK2 RNA guide
agcgcuagccuggagggaaag

SEQ ID NO: 16520 - RNA, 21 nt, Artificial Sequence
  LRRK2 RNA guide
aggcuagcgcuucuucuuccc

SEQ ID NO: 16521 - RNA, 21 nt, Artificial Sequence
  LRRK2 RNA guide
aggggaagaagaagcgcuagc

SEQ ID NO: 16522 - RNA, 21 nt, Artificial Sequence
  LRRK2 RNA guide
aucacaggggaagaagaagcg

SEQ ID NO: 16523 - RNA, 21 nt, Artificial Sequence
  LRRK2 RNA guide
cacaggggaagaagaagcgcu

SEQ ID NO: 16524 - RNA, 21 nt, Artificial Sequence
  LRRK2 RNA guide
caggcuagcgcuucuucuucc

SEQ ID NO: 16525 - RNA, 21 nt, Artificial Sequence
  LRRK2 RNA guide
caggggaagaagaagcgcuag

SEQ ID NO: 16526 - RNA, 21 nt, Artificial Sequence
  LRRK2 RNA guide
ccaggcuagcgcuucuucuuc

SEQ ID NO: 16527 - RNA, 21 nt, Artificial Sequence
  LRRK2 RNA guide
cccuccaggcuagcgcuucuu

SEQ ID NO: 16528 - RNA, 21 nt, Artificial Sequence
  LRRK2 RNA guide
ccuccaggcuagcgcuucuuc

SEQ ID NO: 16529 - RNA, 21 nt, Artificial Sequence
  LRRK2 RNA guide
cgcuagccuggagggaaagac

SEQ ID NO: 16530 - RNA, 21 nt, Artificial Sequence
  LRRK2 RNA guide
cuagccuggagggaaagacac

SEQ ID NO: 16531 - RNA, 21 nt, Artificial Sequence
  LRRK2 RNA guide
cuagcgcuucuucuuccccug

SEQ ID NO: 16532 - RNA, 21 nt, Artificial Sequence
  LRRK2 RNA guide
cuccaggcuagcgcuucuucu

SEQ ID NO: 16533 - RNA, 21 nt, Artificial Sequence
  LRRK2 RNA guide
cuuucccuccaggcuagcgcu

SEQ ID NO: 16534 - RNA, 21 nt, Artificial Sequence
  LRRK2 RNA guide
gaagaagaagcgcuagccugg

SEQ ID NO: 16535 - RNA, 21 nt, Artificial Sequence
  LRRK2 RNA guide
gaagaagcgcuagccuggagg

SEQ ID NO: 16536 - RNA, 21 nt, Artificial Sequence
  LRRK2 RNA guide
gaagcgcuagccuggagggaa

SEQ ID NO: 16537 - RNA, 21 nt, Artificial Sequence
  LRRK2 RNA guide
gaaucacaggggaagaagaag

SEQ ID NO: 16538 - RNA, 21 nt, Artificial Sequence
  LRRK2 RNA guide
gcgcuagccuggagggaaaga

SEQ ID NO: 16539 - RNA, 21 nt, Artificial Sequence
  LRRK2 RNA guide
gcuagccuggagggaaagaca

SEQ ID NO: 16540 - RNA, 21 nt, Artificial Sequence
  LRRK2 RNA guide
gcuagcgcuucuucuuccccu

SEQ ID NO: 16541 - RNA, 21 nt, Artificial Sequence
  LRRK2 RNA guide
ggaagaagaagcgcuagccug

SEQ ID NO: 16542 - RNA, 21 nt, Artificial Sequence
  LRRK2 RNA guide
ggcuagcgcuucuucuucccc

SEQ ID NO: 16543 - RNA, 21 nt, Artificial Sequence
  LRRK2 RNA guide
gggaagaagaagcgcuagccu

SEQ ID NO: 16544 - RNA, 21 nt, Artificial Sequence
  LRRK2 RNA guide
ggggaagaagaagcgcuagcc

SEQ ID NO: 16545 - RNA, 21 nt, Artificial Sequence
  LRRK2 RNA guide
gguuuugugucuuucccucca

SEQ ID NO: 16546 - RNA, 21 nt, Artificial Sequence
  LRRK2 RNA guide
gucuuucccuccaggcuagcg

SEQ ID NO: 16547 - RNA, 21 nt, Artificial Sequence
  LRRK2 RNA guide
gugucuuucccuccaggcuag

SEQ ID NO: 16548 - RNA, 21 nt, Artificial Sequence
  LRRK2 RNA guide
guuuugugucuuucccuccag

SEQ ID NO: 16549 - RNA, 21 nt, Artificial Sequence
  LRRK2 RNA guide
uagcgcuucuucuuccccugu

SEQ ID NO: 16550 - RNA, 21 nt, Artificial Sequence
  LRRK2 RNA guide
ucacaggggaagaagaagcgc

SEQ ID NO: 16551 - RNA, 21 nt, Artificial Sequence
  LRRK2 RNA guide
uccaggcuagcgcuucuucuu

SEQ ID NO: 16552 - RNA, 21 nt, Artificial Sequence
  LRRK2 RNA guide
ucccuccaggcuagcgcuucu

SEQ ID NO: 16553 - RNA, 21 nt, Artificial Sequence
  LRRK2 RNA guide
ucuuucccuccaggcuagcgc

SEQ ID NO: 16554 - RNA, 21 nt, Artificial Sequence
  LRRK2 RNA guide
ugucuuucccuccaggcuagc

SEQ ID NO: 16555 - RNA, 21 nt, Artificial Sequence
  LRRK2 RNA guide
ugugucuuucccuccaggcua

SEQ ID NO: 16556 - RNA, 21 nt, Artificial Sequence
  LRRK2 RNA guide
uucccuccaggcuagcgcuuc

SEQ ID NO: 16557 - RNA, 21 nt, Artificial Sequence
  LRRK2 RNA guide
uugugucuuucccuccaggcu

SEQ ID NO: 16558 - RNA, 21 nt, Artificial Sequence
  LRRK2 RNA guide
uuucccuccaggcuagcgcuu

SEQ ID NO: 16559 - RNA, 21 nt, Artificial Sequence
  LRRK2 RNA guide
uuugugucuuucccuccaggc

SEQ ID NO: 16560 - RNA, 21 nt, Artificial Sequence
  LRRK2 RNA guide
uuuugugucuuucccuccagg

SEQ ID NO: 16561 - RNA, 22 nt, Artificial Sequence
  LRRK2 RNA guide
aagaagaagcgcuagccuggag

SEQ ID NO: 16562 - RNA, 22 nt, Artificial Sequence
  LRRK2 RNA guide
aagaagcgcuagccuggaggga

SEQ ID NO: 16563 - RNA, 22 nt, Artificial Sequence
  LRRK2 RNA guide
aagcgcuagccuggagggaaag

SEQ ID NO: 16564 - RNA, 22 nt, Artificial Sequence
  LRRK2 RNA guide
aaucacaggggaagaagaagcg

SEQ ID NO: 16565 - RNA, 22 nt, Artificial Sequence
  LRRK2 RNA guide
acaggggaagaagaagcgcuag

SEQ ID NO: 16566 - RNA, 22 nt, Artificial Sequence
  LRRK2 RNA guide
agaagaagcgcuagccuggagg

SEQ ID NO: 16567 - RNA, 22 nt, Artificial Sequence
  LRRK2 RNA guide
agaagcgcuagccuggagggaa

SEQ ID NO: 16568 - RNA, 22 nt, Artificial Sequence
  LRRK2 RNA guide
agaaucacaggggaagaagaag

SEQ ID NO: 16569 - RNA, 22 nt, Artificial Sequence
  LRRK2 RNA guide
agcgcuagccuggagggaaaga

SEQ ID NO: 16570 - RNA, 22 nt, Artificial Sequence
  LRRK2 RNA guide
aggcuagcgcuucuucuucccc

SEQ ID NO: 16571 - RNA, 22 nt, Artificial Sequence
  LRRK2 RNA guide
aggggaagaagaagcgcuagcc

SEQ ID NO: 16572 - RNA, 22 nt, Artificial Sequence
  LRRK2 RNA guide
aucacaggggaagaagaagcgc

SEQ ID NO: 16573 - RNA, 22 nt, Artificial Sequence
  LRRK2 RNA guide
cacaggggaagaagaagcgcua

SEQ ID NO: 16574 - RNA, 22 nt, Artificial Sequence
  LRRK2 RNA guide
caggcuagcgcuucuucuuccc

SEQ ID NO: 16575 - RNA, 22 nt, Artificial Sequence
  LRRK2 RNA guide
caggggaagaagaagcgcuagc

SEQ ID NO: 16576 - RNA, 22 nt, Artificial Sequence
  LRRK2 RNA guide
ccaggcuagcgcuucuucuucc

SEQ ID NO: 16577 - RNA, 22 nt, Artificial Sequence
  LRRK2 RNA guide
cccuccaggcuagcgcuucuuc

SEQ ID NO: 16578 - RNA, 22 nt, Artificial Sequence
  LRRK2 RNA guide
ccuccaggcuagcgcuucuucu

SEQ ID NO: 16579 - RNA, 22 nt, Artificial Sequence
  LRRK2 RNA guide
cgcuagccuggagggaaagaca

SEQ ID NO: 16580 - RNA, 22 nt, Artificial Sequence
  LRRK2 RNA guide
cuagccuggagggaaagacaca

SEQ ID NO: 16581 - RNA, 22 nt, Artificial Sequence
  LRRK2 RNA guide
cuagcgcuucuucuuccccugu

SEQ ID NO: 16582 - RNA, 22 nt, Artificial Sequence
  LRRK2 RNA guide
cuccaggcuagcgcuucuucuu

SEQ ID NO: 16583 - RNA, 22 nt, Artificial Sequence
  LRRK2 RNA guide
cuuucccuccaggcuagcgcuu

SEQ ID NO: 16584 - RNA, 22 nt, Artificial Sequence
  LRRK2 RNA guide
gaagaagaagcgcuagccugga

SEQ ID NO: 16585 - RNA, 22 nt, Artificial Sequence
  LRRK2 RNA guide
gaagaagcgcuagccuggaggg

SEQ ID NO: 16586 - RNA, 22 nt, Artificial Sequence
  LRRK2 RNA guide
gaagcgcuagccuggagggaaa

SEQ ID NO: 16587 - RNA, 22 nt, Artificial Sequence
  LRRK2 RNA guide
gaaucacaggggaagaagaagc

SEQ ID NO: 16588 - RNA, 22 nt, Artificial Sequence
  LRRK2 RNA guide
gagaaucacaggggaagaagaa

SEQ ID NO: 16589 - RNA, 22 nt, Artificial Sequence
  LRRK2 RNA guide
gcgcuagccuggagggaaagac

SEQ ID NO: 16590 - RNA, 22 nt, Artificial Sequence
  LRRK2 RNA guide
gcuagccuggagggaaagacac

SEQ ID NO: 16591 - RNA, 22 nt, Artificial Sequence
  LRRK2 RNA guide
gcuagcgcuucuucuuccccug

SEQ ID NO: 16592 - RNA, 22 nt, Artificial Sequence
  LRRK2 RNA guide
ggaagaagaagcgcuagccugg

SEQ ID NO: 16593 - RNA, 22 nt, Artificial Sequence
  LRRK2 RNA guide
ggcuagcgcuucuucuuccccu

SEQ ID NO: 16594 - RNA, 22 nt, Artificial Sequence
  LRRK2 RNA guide
gggaagaagaagcgcuagccug

SEQ ID NO: 16595 - RNA, 22 nt, Artificial Sequence
  LRRK2 RNA guide
ggggaagaagaagcgcuagccu

SEQ ID NO: 16596 - RNA, 22 nt, Artificial Sequence
  LRRK2 RNA guide
ggguuuugugucuuucccucca

SEQ ID NO: 16597 - RNA, 22 nt, Artificial Sequence
  LRRK2 RNA guide
gguuuugugucuuucccuccag

SEQ ID NO: 16598 - RNA, 22 nt, Artificial Sequence
  LRRK2 RNA guide
gucuuucccuccaggcuagcgc

SEQ ID NO: 16599 - RNA, 22 nt, Artificial Sequence
  LRRK2 RNA guide
gugucuuucccuccaggcuagc

SEQ ID NO: 16600 - RNA, 22 nt, Artificial Sequence
  LRRK2 RNA guide
guuuugugucuuucccuccagg

SEQ ID NO: 16601 - RNA, 22 nt, Artificial Sequence
  LRRK2 RNA guide
uagcgcuucuucuuccccugug

SEQ ID NO: 16602 - RNA, 22 nt, Artificial Sequence
  LRRK2 RNA guide
ucacaggggaagaagaagcgcu

SEQ ID NO: 16603 - RNA, 22 nt, Artificial Sequence
  LRRK2 RNA guide
uccaggcuagcgcuucuucuuc

SEQ ID NO: 16604 - RNA, 22 nt, Artificial Sequence
  LRRK2 RNA guide
ucccuccaggcuagcgcuucuu

SEQ ID NO: 16605 - RNA, 22 nt, Artificial Sequence
  LRRK2 RNA guide
ucuuucccuccaggcuagcgcu

SEQ ID NO: 16606 - RNA, 22 nt, Artificial Sequence
  LRRK2 RNA guide
ugucuuucccuccaggcuagcg

SEQ ID NO: 16607 - RNA, 22 nt, Artificial Sequence
  LRRK2 RNA guide
ugugucuuucccuccaggcuag

SEQ ID NO: 16608 - RNA, 22 nt, Artificial Sequence
  LRRK2 RNA guide
uucccuccaggcuagcgcuucu

SEQ ID NO: 16609 - RNA, 22 nt, Artificial Sequence
  LRRK2 RNA guide
uugugucuuucccuccaggcua

SEQ ID NO: 16610 - RNA, 22 nt, Artificial Sequence
  LRRK2 RNA guide
uuucccuccaggcuagcgcuuc

SEQ ID NO: 16611 - RNA, 22 nt, Artificial Sequence
  LRRK2 RNA guide
uuugugucuuucccuccaggcu

SEQ ID NO: 16612 - RNA, 22 nt, Artificial Sequence
  LRRK2 RNA guide
uuuugugucuuucccuccaggc

SEQ ID NO: 16613 - RNA, 20 nt, Artificial Sequence
  LRRK2 RNA guide
aagaagaagcgccagccugg

SEQ ID NO: 16614 - RNA, 20 nt, Artificial Sequence
  LRRK2 RNA guide
aagaagcgccagccuggagg

SEQ ID NO: 16615 - RNA, 20 nt, Artificial Sequence
  LRRK2 RNA guide
aagcgccagccuggagggaa

SEQ ID NO: 16616 - RNA, 20 nt, Artificial Sequence
  LRRK2 RNA guide
acaggggaagaagaagcgcc

SEQ ID NO: 16617 - RNA, 20 nt, Artificial Sequence
  LRRK2 RNA guide
agaagaagcgccagccugga

SEQ ID NO: 16618 - RNA, 20 nt, Artificial Sequence
  LRRK2 RNA guide
agaagcgccagccuggaggg

SEQ ID NO: 16619 - RNA, 20 nt, Artificial Sequence
  LRRK2 RNA guide
agcgccagccuggagggaaa

SEQ ID NO: 16620 - RNA, 20 nt, Artificial Sequence
  LRRK2 RNA guide
aggcuggcgcuucuucuucc

SEQ ID NO: 16621 - RNA, 20 nt, Artificial Sequence
  LRRK2 RNA guide
aggggaagaagaagcgccag

SEQ ID NO: 16622 - RNA, 20 nt, Artificial Sequence
  LRRK2 RNA guide
caggcuggcgcuucuucuuc

SEQ ID NO: 16623 - RNA, 20 nt, Artificial Sequence
  LRRK2 RNA guide
caggggaagaagaagcgcca

SEQ ID NO: 16624 - RNA, 20 nt, Artificial Sequence
  LRRK2 RNA guide
ccagccuggagggaaagaca

SEQ ID NO: 16625 - RNA, 20 nt, Artificial Sequence
  LRRK2 RNA guide
ccaggcuggcgcuucuucuu

SEQ ID NO: 16626 - RNA, 20 nt, Artificial Sequence
  LRRK2 RNA guide
cccuccaggcuggcgcuucu

SEQ ID NO: 16627 - RNA, 20 nt, Artificial Sequence
  LRRK2 RNA guide
ccuccaggcuggcgcuucuu

SEQ ID NO: 16628 - RNA, 20 nt, Artificial Sequence
  LRRK2 RNA guide
cgccagccuggagggaaaga

SEQ ID NO: 16629 - RNA, 20 nt, Artificial Sequence
  LRRK2 RNA guide
cuccaggcuggcgcuucuuc

SEQ ID NO: 16630 - RNA, 20 nt, Artificial Sequence
  LRRK2 RNA guide
cuggcgcuucuucuuccccu

SEQ ID NO: 16631 - RNA, 20 nt, Artificial Sequence
  LRRK2 RNA guide
cuuucccuccaggcuggcgc

SEQ ID NO: 16632 - RNA, 20 nt, Artificial Sequence
  LRRK2 RNA guide
gaagaagaagcgccagccug

SEQ ID NO: 16633 - RNA, 20 nt, Artificial Sequence
  LRRK2 RNA guide
gaagaagcgccagccuggag

SEQ ID NO: 16634 - RNA, 20 nt, Artificial Sequence
  LRRK2 RNA guide
gaagcgccagccuggaggga

SEQ ID NO: 16635 - RNA, 20 nt, Artificial Sequence
  LRRK2 RNA guide
gccagccuggagggaaagac

SEQ ID NO: 16636 - RNA, 20 nt, Artificial Sequence
  LRRK2 RNA guide
gcgccagccuggagggaaag

SEQ ID NO: 16637 - RNA, 20 nt, Artificial Sequence
  LRRK2 RNA guide
gcuggcgcuucuucuucccc

SEQ ID NO: 16638 - RNA, 20 nt, Artificial Sequence
  LRRK2 RNA guide
ggaagaagaagcgccagccu

SEQ ID NO: 16639 - RNA, 20 nt, Artificial Sequence
  LRRK2 RNA guide
ggcuggcgcuucuucuuccc

SEQ ID NO: 16640 - RNA, 20 nt, Artificial Sequence
  LRRK2 RNA guide
gggaagaagaagcgccagcc

SEQ ID NO: 16641 - RNA, 20 nt, Artificial Sequence
  LRRK2 RNA guide
ggggaagaagaagcgccagc

SEQ ID NO: 16642 - RNA, 20 nt, Artificial Sequence
  LRRK2 RNA guide
gucuuucccuccaggcuggc

SEQ ID NO: 16643 - RNA, 20 nt, Artificial Sequence
  LRRK2 RNA guide
gugucuuucccuccaggcug

SEQ ID NO: 16644 - RNA, 20 nt, Artificial Sequence
  LRRK2 RNA guide
uccaggcuggcgcuucuucu

SEQ ID NO: 16645 - RNA, 20 nt, Artificial Sequence
  LRRK2 RNA guide
ucccuccaggcuggcgcuuc

SEQ ID NO: 16646 - RNA, 20 nt, Artificial Sequence
  LRRK2 RNA guide
ucuuucccuccaggcuggcg

SEQ ID NO: 16647 - RNA, 20 nt, Artificial Sequence
  LRRK2 RNA guide
uggcgcuucuucuuccccug

SEQ ID NO: 16648 - RNA, 20 nt, Artificial Sequence
  LRRK2 RNA guide
uucccuccaggcuggcgcuu

SEQ ID NO: 16649 - RNA, 20 nt, Artificial Sequence
  LRRK2 RNA guide
uuucccuccaggcuggcgcu

SEQ ID NO: 16650 - RNA, 21 nt, Artificial Sequence
  LRRK2 RNA guide
aagaagaagcgccagccugga

SEQ ID NO: 16651 - RNA, 21 nt, Artificial Sequence
  LRRK2 RNA guide
aagaagcgccagccuggaggg

SEQ ID NO: 16652 - RNA, 21 nt, Artificial Sequence
  LRRK2 RNA guide
aagcgccagccuggagggaaa

SEQ ID NO: 16653 - RNA, 21 nt, Artificial Sequence
  LRRK2 RNA guide
acaggggaagaagaagcgcca

SEQ ID NO: 16654 - RNA, 21 nt, Artificial Sequence
  LRRK2 RNA guide
agaagaagcgccagccuggag

SEQ ID NO: 16655 - RNA, 21 nt, Artificial Sequence
  LRRK2 RNA guide
agaagcgccagccuggaggga

SEQ ID NO: 16656 - RNA, 21 nt, Artificial Sequence
  LRRK2 RNA guide
agcgccagccuggagggaaag

SEQ ID NO: 16657 - RNA, 21 nt, Artificial Sequence
  LRRK2 RNA guide
aggcuggcgcuucuucuuccc

SEQ ID NO: 16658 - RNA, 21 nt, Artificial Sequence
  LRRK2 RNA guide
aggggaagaagaagcgccagc

SEQ ID NO: 16659 - RNA, 21 nt, Artificial Sequence
  LRRK2 RNA guide
cacaggggaagaagaagcgcc

SEQ ID NO: 16660 - RNA, 21 nt, Artificial Sequence
  LRRK2 RNA guide
caggcuggcgcuucuucuucc

SEQ ID NO: 16661 - RNA, 21 nt, Artificial Sequence
  LRRK2 RNA guide
caggggaagaagaagcgccag

SEQ ID NO: 16662 - RNA, 21 nt, Artificial Sequence
  LRRK2 RNA guide
ccagccuggagggaaagacac

SEQ ID NO: 16663 - RNA, 21 nt, Artificial Sequence
  LRRK2 RNA guide
ccaggcuggcgcuucuucuuc

SEQ ID NO: 16664 - RNA, 21 nt, Artificial Sequence
  LRRK2 RNA guide
cccuccaggcuggcgcuucuu

SEQ ID NO: 16665 - RNA, 21 nt, Artificial Sequence
  LRRK2 RNA guide
ccuccaggcuggcgcuucuuc

SEQ ID NO: 16666 - RNA, 21 nt, Artificial Sequence
  LRRK2 RNA guide
cgccagccuggagggaaagac

SEQ ID NO: 16667 - RNA, 21 nt, Artificial Sequence
  LRRK2 RNA guide
cuccaggcuggcgcuucuucu

SEQ ID NO: 16668 - RNA, 21 nt, Artificial Sequence
  LRRK2 RNA guide
cuggcgcuucuucuuccccug

SEQ ID NO: 16669 - RNA, 21 nt, Artificial Sequence
  LRRK2 RNA guide
cuuucccuccaggcuggcgcu

SEQ ID NO: 16670 - RNA, 21 nt, Artificial Sequence
  LRRK2 RNA guide
gaagaagaagcgccagccugg

SEQ ID NO: 16671 - RNA, 21 nt, Artificial Sequence
  LRRK2 RNA guide
gaagaagcgccagccuggagg

SEQ ID NO: 16672 - RNA, 21 nt, Artificial Sequence
  LRRK2 RNA guide
gaagcgccagccuggagggaa

SEQ ID NO: 16673 - RNA, 21 nt, Artificial Sequence
  LRRK2 RNA guide
gccagccuggagggaaagaca

SEQ ID NO: 16674 - RNA, 21 nt, Artificial Sequence
  LRRK2 RNA guide
gcgccagccuggagggaaaga

SEQ ID NO: 16675 - RNA, 21 nt, Artificial Sequence
  LRRK2 RNA guide
gcuggcgcuucuucuuccccu

SEQ ID NO: 16676 - RNA, 21 nt, Artificial Sequence
  LRRK2 RNA guide
ggaagaagaagcgccagccug

SEQ ID NO: 16677 - RNA, 21 nt, Artificial Sequence
  LRRK2 RNA guide
ggcuggcgcuucuucuucccc

SEQ ID NO: 16678 - RNA, 21 nt, Artificial Sequence
  LRRK2 RNA guide
gggaagaagaagcgccagccu

SEQ ID NO: 16679 - RNA, 21 nt, Artificial Sequence
  LRRK2 RNA guide
ggggaagaagaagcgccagcc

SEQ ID NO: 16680 - RNA, 21 nt, Artificial Sequence
  LRRK2 RNA guide
gucuuucccuccaggcuggcg

SEQ ID NO: 16681 - RNA, 21 nt, Artificial Sequence
  LRRK2 RNA guide
gugucuuucccuccaggcugg

SEQ ID NO: 16682 - RNA, 21 nt, Artificial Sequence
  LRRK2 RNA guide
uccaggcuggcgcuucuucuu

SEQ ID NO: 16683 - RNA, 21 nt, Artificial Sequence
  LRRK2 RNA guide
ucccuccaggcuggcgcuucu

SEQ ID NO: 16684 - RNA, 21 nt, Artificial Sequence
  LRRK2 RNA guide
ucuuucccuccaggcuggcgc

SEQ ID NO: 16685 - RNA, 21 nt, Artificial Sequence
  LRRK2 RNA guide
uggcgcuucuucuuccccugu

SEQ ID NO: 16686 - RNA, 21 nt, Artificial Sequence
  LRRK2 RNA guide
ugucuuucccuccaggcuggc

SEQ ID NO: 16687 - RNA, 21 nt, Artificial Sequence
  LRRK2 RNA guide
ugugucuuucccuccaggcug

SEQ ID NO: 16688 - RNA, 21 nt, Artificial Sequence
  LRRK2 RNA guide
uucccuccaggcuggcgcuuc

SEQ ID NO: 16689 - RNA, 21 nt, Artificial Sequence
  LRRK2 RNA guide
uuucccuccaggcuggcgcuu

SEQ ID NO: 16690 - RNA, 22 nt, Artificial Sequence
  LRRK2 RNA guide
aagaagaagcgccagccuggag

SEQ ID NO: 16691 - RNA, 22 nt, Artificial Sequence
  LRRK2 RNA guide
aagaagcgccagccuggaggga

SEQ ID NO: 16692 - RNA, 22 nt, Artificial Sequence
  LRRK2 RNA guide
aagcgccagccuggagggaaag

SEQ ID NO: 16693 - RNA, 22 nt, Artificial Sequence
  LRRK2 RNA guide
acaggggaagaagaagcgccag

SEQ ID NO: 16694 - RNA, 22 nt, Artificial Sequence
  LRRK2 RNA guide
agaagaagcgccagccuggagg

SEQ ID NO: 16695 - RNA, 22 nt, Artificial Sequence
  LRRK2 RNA guide
agaagcgccagccuggagggaa

SEQ ID NO: 16696 - RNA, 22 nt, Artificial Sequence
  LRRK2 RNA guide
agcgccagccuggagggaaaga

SEQ ID NO: 16697 - RNA, 22 nt, Artificial Sequence
  LRRK2 RNA guide
aggcuggcgcuucuucuucccc

SEQ ID NO: 16698 - RNA, 22 nt, Artificial Sequence
  LRRK2 RNA guide
aggggaagaagaagcgccagcc

SEQ ID NO: 16699 - RNA, 22 nt, Artificial Sequence
  LRRK2 RNA guide
cacaggggaagaagaagcgcca

SEQ ID NO: 16700 - RNA, 22 nt, Artificial Sequence
  LRRK2 RNA guide
caggcuggcgcuucuucuuccc

SEQ ID NO: 16701 - RNA, 22 nt, Artificial Sequence
  LRRK2 RNA guide
caggggaagaagaagcgccagc

SEQ ID NO: 16702 - RNA, 22 nt, Artificial Sequence
  LRRK2 RNA guide
ccagccuggagggaaagacaca

SEQ ID NO: 16703 - RNA, 22 nt, Artificial Sequence
  LRRK2 RNA guide
ccaggcuggcgcuucuucuucc

SEQ ID NO: 16704 - RNA, 22 nt, Artificial Sequence
  LRRK2 RNA guide
cccuccaggcuggcgcuucuuc

SEQ ID NO: 16705 - RNA, 22 nt, Artificial Sequence
  LRRK2 RNA guide
ccuccaggcuggcgcuucuucu

SEQ ID NO: 16706 - RNA, 22 nt, Artificial Sequence
  LRRK2 RNA guide
cgccagccuggagggaaagaca

SEQ ID NO: 16707 - RNA, 22 nt, Artificial Sequence
  LRRK2 RNA guide
cuccaggcuggcgcuucuucuu

SEQ ID NO: 16708 - RNA, 22 nt, Artificial Sequence
  LRRK2 RNA guide
cuggcgcuucuucuuccccugu

SEQ ID NO: 16709 - RNA, 22 nt, Artificial Sequence
  LRRK2 RNA guide
cuuucccuccaggcuggcgcuu

SEQ ID NO: 16710 - RNA, 22 nt, Artificial Sequence
  LRRK2 RNA guide
gaagaagaagcgccagccugga

SEQ ID NO: 16711 - RNA, 22 nt, Artificial Sequence
  LRRK2 RNA guide
gaagaagcgccagccuggaggg

SEQ ID NO: 16712 - RNA, 22 nt, Artificial Sequence
  LRRK2 RNA guide
gaagcgccagccuggagggaaa

SEQ ID NO: 16713 - RNA, 22 nt, Artificial Sequence
  LRRK2 RNA guide
gccagccuggagggaaagacac

SEQ ID NO: 16714 - RNA, 22 nt, Artificial Sequence
  LRRK2 RNA guide
gcgccagccuggagggaaagac

SEQ ID NO: 16715 - RNA, 22 nt, Artificial Sequence
  LRRK2 RNA guide
gcuggcgcuucuucuuccccug

SEQ ID NO: 16716 - RNA, 22 nt, Artificial Sequence
  LRRK2 RNA guide
ggaagaagaagcgccagccugg

SEQ ID NO: 16717 - RNA, 22 nt, Artificial Sequence
  LRRK2 RNA guide
ggcuggcgcuucuucuuccccu

SEQ ID NO: 16718 - RNA, 22 nt, Artificial Sequence
  LRRK2 RNA guide
gggaagaagaagcgccagccug

SEQ ID NO: 16719 - RNA, 22 nt, Artificial Sequence
  LRRK2 RNA guide
ggggaagaagaagcgccagccu

SEQ ID NO: 16720 - RNA, 22 nt, Artificial Sequence
  LRRK2 RNA guide
gucuuucccuccaggcuggcgc

SEQ ID NO: 16721 - RNA, 22 nt, Artificial Sequence
  LRRK2 RNA guide
gugucuuucccuccaggcuggc

SEQ ID NO: 16722 - RNA, 22 nt, Artificial Sequence
  LRRK2 RNA guide
ucacaggggaagaagaagcgcc

SEQ ID NO: 16723 - RNA, 22 nt, Artificial Sequence
  LRRK2 RNA guide
uccaggcuggcgcuucuucuuc

SEQ ID NO: 16724 - RNA, 22 nt, Artificial Sequence
  LRRK2 RNA guide
ucccuccaggcuggcgcuucuu

SEQ ID NO: 16725 - RNA, 22 nt, Artificial Sequence
  LRRK2 RNA guide
ucuuucccuccaggcuggcgcu

SEQ ID NO: 16726 - RNA, 22 nt, Artificial Sequence
  LRRK2 RNA guide
uggcgcuucuucuuccccugug

SEQ ID NO: 16727 - RNA, 22 nt, Artificial Sequence
  LRRK2 RNA guide
ugucuuucccuccaggcuggcg

SEQ ID NO: 16728 - RNA, 22 nt, Artificial Sequence
  LRRK2 RNA guide
ugugucuuucccuccaggcugg

SEQ ID NO: 16729 - RNA, 22 nt, Artificial Sequence
  LRRK2 RNA guide
uucccuccaggcuggcgcuucu

SEQ ID NO: 16730 - RNA, 22 nt, Artificial Sequence
  LRRK2 RNA guide
uugugucuuucccuccaggcug

SEQ ID NO: 16731 - RNA, 22 nt, Artificial Sequence
  LRRK2 RNA guide
uuucccuccaggcuggcgcuuc

SEQ ID NO: 16732 - RNA, 20 nt, Artificial Sequence
  LRRK2 RNA guide
aagaagaagcgcaagccugg

SEQ ID NO: 16733 - RNA, 20 nt, Artificial Sequence
  LRRK2 RNA guide
aagaagcgcaagccuggagg

SEQ ID NO: 16734 - RNA, 20 nt, Artificial Sequence
  LRRK2 RNA guide
aagcgcaagccuggagggaa

SEQ ID NO: 16735 - RNA, 20 nt, Artificial Sequence
  LRRK2 RNA guide
acaggggaagaagaagcgca

SEQ ID NO: 16736 - RNA, 20 nt, Artificial Sequence
  LRRK2 RNA guide
agaagaagcgcaagccugga

SEQ ID NO: 16737 - RNA, 20 nt, Artificial Sequence
  LRRK2 RNA guide
agaagcgcaagccuggaggg

SEQ ID NO: 16738 - RNA, 20 nt, Artificial Sequence
  LRRK2 RNA guide
agcgcaagccuggagggaaa

SEQ ID NO: 16739 - RNA, 20 nt, Artificial Sequence
  LRRK2 RNA guide
aggcuugcgcuucuucuucc

SEQ ID NO: 16740 - RNA, 20 nt, Artificial Sequence
  LRRK2 RNA guide
aggggaagaagaagcgcaag

SEQ ID NO: 16741 - RNA, 20 nt, Artificial Sequence
  LRRK2 RNA guide
caagccuggagggaaagaca

SEQ ID NO: 16742 - RNA, 20 nt, Artificial Sequence
  LRRK2 RNA guide
caggcuugcgcuucuucuuc

SEQ ID NO: 16743 - RNA, 20 nt, Artificial Sequence
  LRRK2 RNA guide
caggggaagaagaagcgcaa

SEQ ID NO: 16744 - RNA, 20 nt, Artificial Sequence
  LRRK2 RNA guide
ccaggcuugcgcuucuucuu

SEQ ID NO: 16745 - RNA, 20 nt, Artificial Sequence
  LRRK2 RNA guide
cccuccaggcuugcgcuucu

SEQ ID NO: 16746 - RNA, 20 nt, Artificial Sequence
  LRRK2 RNA guide
ccuccaggcuugcgcuucuu

SEQ ID NO: 16747 - RNA, 20 nt, Artificial Sequence
  LRRK2 RNA guide
cgcaagccuggagggaaaga

SEQ ID NO: 16748 - RNA, 20 nt, Artificial Sequence
  LRRK2 RNA guide
cuccaggcuugcgcuucuuc

SEQ ID NO: 16749 - RNA, 20 nt, Artificial Sequence
  LRRK2 RNA guide
cuugcgcuucuucuuccccu

SEQ ID NO: 16750 - RNA, 20 nt, Artificial Sequence
  LRRK2 RNA guide
cuuucccuccaggcuugcgc

SEQ ID NO: 16751 - RNA, 20 nt, Artificial Sequence
  LRRK2 RNA guide
gaagaagaagcgcaagccug

SEQ ID NO: 16752 - RNA, 20 nt, Artificial Sequence
  LRRK2 RNA guide
gaagaagcgcaagccuggag

SEQ ID NO: 16753 - RNA, 20 nt, Artificial Sequence
  LRRK2 RNA guide
gaagcgcaagccuggaggga

SEQ ID NO: 16754 - RNA, 20 nt, Artificial Sequence
  LRRK2 RNA guide
gcaagccuggagggaaagac

SEQ ID NO: 16755 - RNA, 20 nt, Artificial Sequence
  LRRK2 RNA guide
gcgcaagccuggagggaaag

SEQ ID NO: 16756 - RNA, 20 nt, Artificial Sequence
  LRRK2 RNA guide
gcuugcgcuucuucuucccc

SEQ ID NO: 16757 - RNA, 20 nt, Artificial Sequence
  LRRK2 RNA guide
ggaagaagaagcgcaagccu

SEQ ID NO: 16758 - RNA, 20 nt, Artificial Sequence
  LRRK2 RNA guide
ggcuugcgcuucuucuuccc

SEQ ID NO: 16759 - RNA, 20 nt, Artificial Sequence
  LRRK2 RNA guide
gggaagaagaagcgcaagcc

SEQ ID NO: 16760 - RNA, 20 nt, Artificial Sequence
  LRRK2 RNA guide
ggggaagaagaagcgcaagc

SEQ ID NO: 16761 - RNA, 20 nt, Artificial Sequence
  LRRK2 RNA guide
gucuuucccuccaggcuugc

SEQ ID NO: 16762 - RNA, 20 nt, Artificial Sequence
  LRRK2 RNA guide
gugucuuucccuccaggcuu

SEQ ID NO: 16763 - RNA, 20 nt, Artificial Sequence
  LRRK2 RNA guide
uccaggcuugcgcuucuucu

SEQ ID NO: 16764 - RNA, 20 nt, Artificial Sequence
  LRRK2 RNA guide
ucccuccaggcuugcgcuuc

SEQ ID NO: 16765 - RNA, 20 nt, Artificial Sequence
  LRRK2 RNA guide
ucuuucccuccaggcuugcg

SEQ ID NO: 16766 - RNA, 20 nt, Artificial Sequence
  LRRK2 RNA guide
uucccuccaggcuugcgcuu

SEQ ID NO: 16767 - RNA, 20 nt, Artificial Sequence
  LRRK2 RNA guide
uugcgcuucuucuuccccug

SEQ ID NO: 16768 - RNA, 20 nt, Artificial Sequence
  LRRK2 RNA guide
uuucccuccaggcuugcgcu

SEQ ID NO: 16769 - RNA, 21 nt, Artificial Sequence
  LRRK2 RNA guide
aagaagaagcgcaagccugga

SEQ ID NO: 16770 - RNA, 21 nt, Artificial Sequence
  LRRK2 RNA guide
aagaagcgcaagccuggaggg

SEQ ID NO: 16771 - RNA, 21 nt, Artificial Sequence
  LRRK2 RNA guide
aagcgcaagccuggagggaaa

SEQ ID NO: 16772 - RNA, 21 nt, Artificial Sequence
  LRRK2 RNA guide
acaggggaagaagaagcgcaa

SEQ ID NO: 16773 - RNA, 21 nt, Artificial Sequence
  LRRK2 RNA guide
agaagaagcgcaagccuggag

SEQ ID NO: 16774 - RNA, 21 nt, Artificial Sequence
  LRRK2 RNA guide
agaagcgcaagccuggaggga

SEQ ID NO: 16775 - RNA, 21 nt, Artificial Sequence
  LRRK2 RNA guide
agcgcaagccuggagggaaag

SEQ ID NO: 16776 - RNA, 21 nt, Artificial Sequence
  LRRK2 RNA guide
aggcuugcgcuucuucuuccc

SEQ ID NO: 16777 - RNA, 21 nt, Artificial Sequence
  LRRK2 RNA guide
aggggaagaagaagcgcaagc

SEQ ID NO: 16778 - RNA, 21 nt, Artificial Sequence
  LRRK2 RNA guide
caagccuggagggaaagacac

SEQ ID NO: 16779 - RNA, 21 nt, Artificial Sequence
  LRRK2 RNA guide
cacaggggaagaagaagcgca

SEQ ID NO: 16780 - RNA, 21 nt, Artificial Sequence
  LRRK2 RNA guide
caggcuugcgcuucuucuucc

SEQ ID NO: 16781 - RNA, 21 nt, Artificial Sequence
  LRRK2 RNA guide
caggggaagaagaagcgcaag

SEQ ID NO: 16782 - RNA, 21 nt, Artificial Sequence
  LRRK2 RNA guide
ccaggcuugcgcuucuucuuc

SEQ ID NO: 16783 - RNA, 21 nt, Artificial Sequence
  LRRK2 RNA guide
cccuccaggcuugcgcuucuu

SEQ ID NO: 16784 - RNA, 21 nt, Artificial Sequence
  LRRK2 RNA guide
ccuccaggcuugcgcuucuuc

SEQ ID NO: 16785 - RNA, 21 nt, Artificial Sequence
  LRRK2 RNA guide
cgcaagccuggagggaaagac

SEQ ID NO: 16786 - RNA, 21 nt, Artificial Sequence
  LRRK2 RNA guide
cuccaggcuugcgcuucuucu

SEQ ID NO: 16787 - RNA, 21 nt, Artificial Sequence
  LRRK2 RNA guide
cuugcgcuucuucuuccccug

SEQ ID NO: 16788 - RNA, 21 nt, Artificial Sequence
  LRRK2 RNA guide
cuuucccuccaggcuugcgcu

SEQ ID NO: 16789 - RNA, 21 nt, Artificial Sequence
  LRRK2 RNA guide
gaagaagaagcgcaagccugg

SEQ ID NO: 16790 - RNA, 21 nt, Artificial Sequence
  LRRK2 RNA guide
gaagaagcgcaagccuggagg

SEQ ID NO: 16791 - RNA, 21 nt, Artificial Sequence
  LRRK2 RNA guide
gaagcgcaagccuggagggaa

SEQ ID NO: 16792 - RNA, 21 nt, Artificial Sequence
  LRRK2 RNA guide
gcaagccuggagggaaagaca

SEQ ID NO: 16793 - RNA, 21 nt, Artificial Sequence
  LRRK2 RNA guide
gcgcaagccuggagggaaaga

SEQ ID NO: 16794 - RNA, 21 nt, Artificial Sequence
  LRRK2 RNA guide
gcuugcgcuucuucuuccccu

SEQ ID NO: 16795 - RNA, 21 nt, Artificial Sequence
  LRRK2 RNA guide
ggaagaagaagcgcaagccug

SEQ ID NO: 16796 - RNA, 21 nt, Artificial Sequence
  LRRK2 RNA guide
ggcuugcgcuucuucuucccc

SEQ ID NO: 16797 - RNA, 21 nt, Artificial Sequence
  LRRK2 RNA guide
gggaagaagaagcgcaagccu

SEQ ID NO: 16798 - RNA, 21 nt, Artificial Sequence
  LRRK2 RNA guide
ggggaagaagaagcgcaagcc

SEQ ID NO: 16799 - RNA, 21 nt, Artificial Sequence
  LRRK2 RNA guide
gucuuucccuccaggcuugcg

SEQ ID NO: 16800 - RNA, 21 nt, Artificial Sequence
  LRRK2 RNA guide
gugucuuucccuccaggcuug

SEQ ID NO: 16801 - RNA, 21 nt, Artificial Sequence
  LRRK2 RNA guide
uccaggcuugcgcuucuucuu

SEQ ID NO: 16802 - RNA, 21 nt, Artificial Sequence
  LRRK2 RNA guide
ucccuccaggcuugcgcuucu

SEQ ID NO: 16803 - RNA, 21 nt, Artificial Sequence
  LRRK2 RNA guide
ucuuucccuccaggcuugcgc

SEQ ID NO: 16804 - RNA, 21 nt, Artificial Sequence
  LRRK2 RNA guide
ugucuuucccuccaggcuugc

SEQ ID NO: 16805 - RNA, 21 nt, Artificial Sequence
  LRRK2 RNA guide
ugugucuuucccuccaggcuu

SEQ ID NO: 16806 - RNA, 21 nt, Artificial Sequence
  LRRK2 RNA guide
uucccuccaggcuugcgcuuc

SEQ ID NO: 16807 - RNA, 21 nt, Artificial Sequence
  LRRK2 RNA guide
uugcgcuucuucuuccccugu

SEQ ID NO: 16808 - RNA, 21 nt, Artificial Sequence
  LRRK2 RNA guide
uuucccuccaggcuugcgcuu

SEQ ID NO: 16809 - RNA, 22 nt, Artificial Sequence
  LRRK2 RNA guide
aagaagaagcgcaagccuggag

SEQ ID NO: 16810 - RNA, 22 nt, Artificial Sequence
  LRRK2 RNA guide
aagaagcgcaagccuggaggga

SEQ ID NO: 16811 - RNA, 22 nt, Artificial Sequence
  LRRK2 RNA guide
aagcgcaagccuggagggaaag

SEQ ID NO: 16812 - RNA, 22 nt, Artificial Sequence
  LRRK2 RNA guide
acaggggaagaagaagcgcaag

SEQ ID NO: 16813 - RNA, 22 nt, Artificial Sequence
  LRRK2 RNA guide
agaagaagcgcaagccuggagg

SEQ ID NO: 16814 - RNA, 22 nt, Artificial Sequence
  LRRK2 RNA guide
agaagcgcaagccuggagggaa

SEQ ID NO: 16815 - RNA, 22 nt, Artificial Sequence
  LRRK2 RNA guide
agcgcaagccuggagggaaaga

SEQ ID NO: 16816 - RNA, 22 nt, Artificial Sequence
  LRRK2 RNA guide
aggcuugcgcuucuucuucccc

SEQ ID NO: 16817 - RNA, 22 nt, Artificial Sequence
  LRRK2 RNA guide
aggggaagaagaagcgcaagcc

SEQ ID NO: 16818 - RNA, 22 nt, Artificial Sequence
  LRRK2 RNA guide
caagccuggagggaaagacaca

SEQ ID NO: 16819 - RNA, 22 nt, Artificial Sequence
  LRRK2 RNA guide
cacaggggaagaagaagcgcaa

SEQ ID NO: 16820 - RNA, 22 nt, Artificial Sequence
  LRRK2 RNA guide
caggcuugcgcuucuucuuccc

SEQ ID NO: 16821 - RNA, 22 nt, Artificial Sequence
  LRRK2 RNA guide
caggggaagaagaagcgcaagc

SEQ ID NO: 16822 - RNA, 22 nt, Artificial Sequence
  LRRK2 RNA guide
ccaggcuugcgcuucuucuucc

SEQ ID NO: 16823 - RNA, 22 nt, Artificial Sequence
  LRRK2 RNA guide
cccuccaggcuugcgcuucuuc

SEQ ID NO: 16824 - RNA, 22 nt, Artificial Sequence
  LRRK2 RNA guide
ccuccaggcuugcgcuucuucu

SEQ ID NO: 16825 - RNA, 22 nt, Artificial Sequence
  LRRK2 RNA guide
cgcaagccuggagggaaagaca

SEQ ID NO: 16826 - RNA, 22 nt, Artificial Sequence
  LRRK2 RNA guide
cuccaggcuugcgcuucuucuu

SEQ ID NO: 16827 - RNA, 22 nt, Artificial Sequence
  LRRK2 RNA guide
cuugcgcuucuucuuccccugu

SEQ ID NO: 16828 - RNA, 22 nt, Artificial Sequence
  LRRK2 RNA guide
cuuucccuccaggcuugcgcuu

SEQ ID NO: 16829 - RNA, 22 nt, Artificial Sequence
  LRRK2 RNA guide
gaagaagaagcgcaagccugga

SEQ ID NO: 16830 - RNA, 22 nt, Artificial Sequence
  LRRK2 RNA guide
gaagaagcgcaagccuggaggg

SEQ ID NO: 16831 - RNA, 22 nt, Artificial Sequence
  LRRK2 RNA guide
gaagcgcaagccuggagggaaa

SEQ ID NO: 16832 - RNA, 22 nt, Artificial Sequence
  LRRK2 RNA guide
gcaagccuggagggaaagacac

SEQ ID NO: 16833 - RNA, 22 nt, Artificial Sequence
  LRRK2 RNA guide
gcgcaagccuggagggaaagac

SEQ ID NO: 16834 - RNA, 22 nt, Artificial Sequence
  LRRK2 RNA guide
gcuugcgcuucuucuuccccug

SEQ ID NO: 16835 - RNA, 22 nt, Artificial Sequence
  LRRK2 RNA guide
ggaagaagaagcgcaagccugg

SEQ ID NO: 16836 - RNA, 22 nt, Artificial Sequence
  LRRK2 RNA guide
ggcuugcgcuucuucuuccccu

SEQ ID NO: 16837 - RNA, 22 nt, Artificial Sequence
  LRRK2 RNA guide
gggaagaagaagcgcaagccug

SEQ ID NO: 16838 - RNA, 22 nt, Artificial Sequence
  LRRK2 RNA guide
ggggaagaagaagcgcaagccu

SEQ ID NO: 16839 - RNA, 22 nt, Artificial Sequence
  LRRK2 RNA guide
gucuuucccuccaggcuugcgc

SEQ ID NO: 16840 - RNA, 22 nt, Artificial Sequence
  LRRK2 RNA guide
gugucuuucccuccaggcuugc

SEQ ID NO: 16841 - RNA, 22 nt, Artificial Sequence
  LRRK2 RNA guide
ucacaggggaagaagaagcgca

SEQ ID NO: 16842 - RNA, 22 nt, Artificial Sequence
  LRRK2 RNA guide
uccaggcuugcgcuucuucuuc

SEQ ID NO: 16843 - RNA, 22 nt, Artificial Sequence
  LRRK2 RNA guide
ucccuccaggcuugcgcuucuu

SEQ ID NO: 16844 - RNA, 22 nt, Artificial Sequence
  LRRK2 RNA guide
ucuuucccuccaggcuugcgcu

SEQ ID NO: 16845 - RNA, 22 nt, Artificial Sequence
  LRRK2 RNA guide
ugucuuucccuccaggcuugcg

SEQ ID NO: 16846 - RNA, 22 nt, Artificial Sequence
  LRRK2 RNA guide
ugugucuuucccuccaggcuug

SEQ ID NO: 16847 - RNA, 22 nt, Artificial Sequence
  LRRK2 RNA guide
uucccuccaggcuugcgcuucu

SEQ ID NO: 16848 - RNA, 22 nt, Artificial Sequence
  LRRK2 RNA guide
uugcgcuucuucuuccccugug

SEQ ID NO: 16849 - RNA, 22 nt, Artificial Sequence
  LRRK2 RNA guide
uugugucuuucccuccaggcuu

SEQ ID NO: 16850 - RNA, 22 nt, Artificial Sequence
  LRRK2 RNA guide
uuucccuccaggcuugcgcuuc

SEQ ID NO: 16851 - RNA, 20 nt, Artificial Sequence
  LRRK2 RNA guide
aagaagaagcgugagccugg

SEQ ID NO: 16852 - RNA, 20 nt, Artificial Sequence
  LRRK2 RNA guide
aagaagcgugagccuggagg

SEQ ID NO: 16853 - RNA, 20 nt, Artificial Sequence
  LRRK2 RNA guide
aagcgugagccuggagggaa

SEQ ID NO: 16854 - RNA, 20 nt, Artificial Sequence
  LRRK2 RNA guide
agaagaagcgugagccugga

SEQ ID NO: 16855 - RNA, 20 nt, Artificial Sequence
  LRRK2 RNA guide
agaagcgugagccuggaggg

SEQ ID NO: 16856 - RNA, 20 nt, Artificial Sequence
  LRRK2 RNA guide
agaaucacaggggaagaaga

SEQ ID NO: 16857 - RNA, 20 nt, Artificial Sequence
  LRRK2 RNA guide
agcgugagccuggagggaaa

SEQ ID NO: 16858 - RNA, 20 nt, Artificial Sequence
  LRRK2 RNA guide
aggcucacgcuucuucuucc

SEQ ID NO: 16859 - RNA, 20 nt, Artificial Sequence
  LRRK2 RNA guide
aggggaagaagaagcgugag

SEQ ID NO: 16860 - RNA, 20 nt, Artificial Sequence
  LRRK2 RNA guide
cacaggggaagaagaagcgu

SEQ ID NO: 16861 - RNA, 20 nt, Artificial Sequence
  LRRK2 RNA guide
cacgcuucuucuuccccugu

SEQ ID NO: 16862 - RNA, 20 nt, Artificial Sequence
  LRRK2 RNA guide
caggcucacgcuucuucuuc

SEQ ID NO: 16863 - RNA, 20 nt, Artificial Sequence
  LRRK2 RNA guide
caggggaagaagaagcguga

SEQ ID NO: 16864 - RNA, 20 nt, Artificial Sequence
  LRRK2 RNA guide
ccaggcucacgcuucuucuu

SEQ ID NO: 16865 - RNA, 20 nt, Artificial Sequence
  LRRK2 RNA guide
cccuccaggcucacgcuucu

SEQ ID NO: 16866 - RNA, 20 nt, Artificial Sequence
  LRRK2 RNA guide
ccuccaggcucacgcuucuu

SEQ ID NO: 16867 - RNA, 20 nt, Artificial Sequence
  LRRK2 RNA guide
cgugagccuggagggaaaga

SEQ ID NO: 16868 - RNA, 20 nt, Artificial Sequence
  LRRK2 RNA guide
cucacgcuucuucuuccccu

SEQ ID NO: 16869 - RNA, 20 nt, Artificial Sequence
  LRRK2 RNA guide
cuccaggcucacgcuucuuc

SEQ ID NO: 16870 - RNA, 20 nt, Artificial Sequence
  LRRK2 RNA guide
cuuucccuccaggcucacgc

SEQ ID NO: 16871 - RNA, 20 nt, Artificial Sequence
  LRRK2 RNA guide
gaagaagaagcgugagccug

SEQ ID NO: 16872 - RNA, 20 nt, Artificial Sequence
  LRRK2 RNA guide
gaagaagcgugagccuggag

SEQ ID NO: 16873 - RNA, 20 nt, Artificial Sequence
  LRRK2 RNA guide
gaagcgugagccuggaggga

SEQ ID NO: 16874 - RNA, 20 nt, Artificial Sequence
  LRRK2 RNA guide
gcgugagccuggagggaaag

SEQ ID NO: 16875 - RNA, 20 nt, Artificial Sequence
  LRRK2 RNA guide
gcucacgcuucuucuucccc

SEQ ID NO: 16876 - RNA, 20 nt, Artificial Sequence
  LRRK2 RNA guide
ggaagaagaagcgugagccu

SEQ ID NO: 16877 - RNA, 20 nt, Artificial Sequence
  LRRK2 RNA guide
ggcucacgcuucuucuuccc

SEQ ID NO: 16878 - RNA, 20 nt, Artificial Sequence
  LRRK2 RNA guide
gggaagaagaagcgugagcc

SEQ ID NO: 16879 - RNA, 20 nt, Artificial Sequence
  LRRK2 RNA guide
ggggaagaagaagcgugagc

SEQ ID NO: 16880 - RNA, 20 nt, Artificial Sequence
  LRRK2 RNA guide
gucuuucccuccaggcucac

SEQ ID NO: 16881 - RNA, 20 nt, Artificial Sequence
  LRRK2 RNA guide
gugagccuggagggaaagac

SEQ ID NO: 16882 - RNA, 20 nt, Artificial Sequence
  LRRK2 RNA guide
gugucuuucccuccaggcuc

SEQ ID NO: 16883 - RNA, 20 nt, Artificial Sequence
  LRRK2 RNA guide
ucacgcuucuucuuccccug

SEQ ID NO: 16884 - RNA, 20 nt, Artificial Sequence
  LRRK2 RNA guide
uccaggcucacgcuucuucu

SEQ ID NO: 16885 - RNA, 20 nt, Artificial Sequence
  LRRK2 RNA guide
ucccuccaggcucacgcuuc

SEQ ID NO: 16886 - RNA, 20 nt, Artificial Sequence
  LRRK2 RNA guide
ucuuucccuccaggcucacg

SEQ ID NO: 16887 - RNA, 20 nt, Artificial Sequence
  LRRK2 RNA guide
ugucuuucccuccaggcuca

SEQ ID NO: 16888 - RNA, 20 nt, Artificial Sequence
  LRRK2 RNA guide
uucccuccaggcucacgcuu

SEQ ID NO: 16889 - RNA, 20 nt, Artificial Sequence
  LRRK2 RNA guide
uuucccuccaggcucacgcu

SEQ ID NO: 16890 - RNA, 21 nt, Artificial Sequence
  LRRK2 RNA guide
aagaagaagcgugagccugga

SEQ ID NO: 16891 - RNA, 21 nt, Artificial Sequence
  LRRK2 RNA guide
aagaagcgugagccuggaggg

SEQ ID NO: 16892 - RNA, 21 nt, Artificial Sequence
  LRRK2 RNA guide
aagcgugagccuggagggaaa

SEQ ID NO: 16893 - RNA, 21 nt, Artificial Sequence
  LRRK2 RNA guide
acaggggaagaagaagcguga

SEQ ID NO: 16894 - RNA, 21 nt, Artificial Sequence
  LRRK2 RNA guide
agaagaagcgugagccuggag

SEQ ID NO: 16895 - RNA, 21 nt, Artificial Sequence
  LRRK2 RNA guide
agaagcgugagccuggaggga

SEQ ID NO: 16896 - RNA, 21 nt, Artificial Sequence
  LRRK2 RNA guide
agcgugagccuggagggaaag

SEQ ID NO: 16897 - RNA, 21 nt, Artificial Sequence
  LRRK2 RNA guide
aggcucacgcuucuucuuccc

SEQ ID NO: 16898 - RNA, 21 nt, Artificial Sequence
  LRRK2 RNA guide
aggggaagaagaagcgugagc

SEQ ID NO: 16899 - RNA, 21 nt, Artificial Sequence
  LRRK2 RNA guide
cacaggggaagaagaagcgug

SEQ ID NO: 16900 - RNA, 21 nt, Artificial Sequence
  LRRK2 RNA guide
cacgcuucuucuuccccugug

SEQ ID NO: 16901 - RNA, 21 nt, Artificial Sequence
  LRRK2 RNA guide
caggcucacgcuucuucuucc

SEQ ID NO: 16902 - RNA, 21 nt, Artificial Sequence
  LRRK2 RNA guide
caggggaagaagaagcgugag

SEQ ID NO: 16903 - RNA, 21 nt, Artificial Sequence
  LRRK2 RNA guide
ccaggcucacgcuucuucuuc

SEQ ID NO: 16904 - RNA, 21 nt, Artificial Sequence
  LRRK2 RNA guide
cccuccaggcucacgcuucuu

SEQ ID NO: 16905 - RNA, 21 nt, Artificial Sequence
  LRRK2 RNA guide
ccuccaggcucacgcuucuuc

SEQ ID NO: 16906 - RNA, 21 nt, Artificial Sequence
  LRRK2 RNA guide
cgugagccuggagggaaagac

SEQ ID NO: 16907 - RNA, 21 nt, Artificial Sequence
  LRRK2 RNA guide
cucacgcuucuucuuccccug

SEQ ID NO: 16908 - RNA, 21 nt, Artificial Sequence
  LRRK2 RNA guide
cuccaggcucacgcuucuucu

SEQ ID NO: 16909 - RNA, 21 nt, Artificial Sequence
  LRRK2 RNA guide
cuuucccuccaggcucacgcu

SEQ ID NO: 16910 - RNA, 21 nt, Artificial Sequence
  LRRK2 RNA guide
gaagaagaagcgugagccugg

SEQ ID NO: 16911 - RNA, 21 nt, Artificial Sequence
  LRRK2 RNA guide
gaagaagcgugagccuggagg

SEQ ID NO: 16912 - RNA, 21 nt, Artificial Sequence
  LRRK2 RNA guide
gaagcgugagccuggagggaa

SEQ ID NO: 16913 - RNA, 21 nt, Artificial Sequence
  LRRK2 RNA guide
gagaaucacaggggaagaaga

SEQ ID NO: 16914 - RNA, 21 nt, Artificial Sequence
  LRRK2 RNA guide
gcgugagccuggagggaaaga

SEQ ID NO: 16915 - RNA, 21 nt, Artificial Sequence
  LRRK2 RNA guide
gcucacgcuucuucuuccccu

SEQ ID NO: 16916 - RNA, 21 nt, Artificial Sequence
  LRRK2 RNA guide
ggaagaagaagcgugagccug

SEQ ID NO: 16917 - RNA, 21 nt, Artificial Sequence
  LRRK2 RNA guide
ggcucacgcuucuucuucccc

SEQ ID NO: 16918 - RNA, 21 nt, Artificial Sequence
  LRRK2 RNA guide
gggaagaagaagcgugagccu

SEQ ID NO: 16919 - RNA, 21 nt, Artificial Sequence
  LRRK2 RNA guide
ggggaagaagaagcgugagcc

SEQ ID NO: 16920 - RNA, 21 nt, Artificial Sequence
  LRRK2 RNA guide
gucuuucccuccaggcucacg

SEQ ID NO: 16921 - RNA, 21 nt, Artificial Sequence
  LRRK2 RNA guide
gugagccuggagggaaagaca

SEQ ID NO: 16922 - RNA, 21 nt, Artificial Sequence
  LRRK2 RNA guide
gugucuuucccuccaggcuca

SEQ ID NO: 16923 - RNA, 21 nt, Artificial Sequence
  LRRK2 RNA guide
ucacaggggaagaagaagcgu

SEQ ID NO: 16924 - RNA, 21 nt, Artificial Sequence
  LRRK2 RNA guide
ucacgcuucuucuuccccugu

SEQ ID NO: 16925 - RNA, 21 nt, Artificial Sequence
  LRRK2 RNA guide
uccaggcucacgcuucuucuu

SEQ ID NO: 16926 - RNA, 21 nt, Artificial Sequence
  LRRK2 RNA guide
ucccuccaggcucacgcuucu

SEQ ID NO: 16927 - RNA, 21 nt, Artificial Sequence
  LRRK2 RNA guide
ucuuucccuccaggcucacgc

SEQ ID NO: 16928 - RNA, 21 nt, Artificial Sequence
  LRRK2 RNA guide
ugucuuucccuccaggcucac

SEQ ID NO: 16929 - RNA, 21 nt, Artificial Sequence
  LRRK2 RNA guide
ugugucuuucccuccaggcuc

SEQ ID NO: 16930 - RNA, 21 nt, Artificial Sequence
  LRRK2 RNA guide
uucccuccaggcucacgcuuc

SEQ ID NO: 16931 - RNA, 21 nt, Artificial Sequence
  LRRK2 RNA guide
uuucccuccaggcucacgcuu

SEQ ID NO: 16932 - RNA, 22 nt, Artificial Sequence
  LRRK2 RNA guide
aagaagaagcgugagccuggag

SEQ ID NO: 16933 - RNA, 22 nt, Artificial Sequence
  LRRK2 RNA guide
aagaagcgugagccuggaggga

SEQ ID NO: 16934 - RNA, 22 nt, Artificial Sequence
  LRRK2 RNA guide
aagcgugagccuggagggaaag

SEQ ID NO: 16935 - RNA, 22 nt, Artificial Sequence
  LRRK2 RNA guide
acaggggaagaagaagcgugag

SEQ ID NO: 16936 - RNA, 22 nt, Artificial Sequence
  LRRK2 RNA guide
agaagaagcgugagccuggagg

SEQ ID NO: 16937 - RNA, 22 nt, Artificial Sequence
  LRRK2 RNA guide
agaagcgugagccuggagggaa

SEQ ID NO: 16938 - RNA, 22 nt, Artificial Sequence
  LRRK2 RNA guide
agcgugagccuggagggaaaga

SEQ ID NO: 16939 - RNA, 22 nt, Artificial Sequence
  LRRK2 RNA guide
aggcucacgcuucuucuucccc

SEQ ID NO: 16940 - RNA, 22 nt, Artificial Sequence
  LRRK2 RNA guide
aggggaagaagaagcgugagcc

SEQ ID NO: 16941 - RNA, 22 nt, Artificial Sequence
  LRRK2 RNA guide
aucacaggggaagaagaagcgu

SEQ ID NO: 16942 - RNA, 22 nt, Artificial Sequence
  LRRK2 RNA guide
cacaggggaagaagaagcguga

SEQ ID NO: 16943 - RNA, 22 nt, Artificial Sequence
  LRRK2 RNA guide
cacgcuucuucuuccccuguga

SEQ ID NO: 16944 - RNA, 22 nt, Artificial Sequence
  LRRK2 RNA guide
caggcucacgcuucuucuuccc

SEQ ID NO: 16945 - RNA, 22 nt, Artificial Sequence
  LRRK2 RNA guide
caggggaagaagaagcgugagc

SEQ ID NO: 16946 - RNA, 22 nt, Artificial Sequence
  LRRK2 RNA guide
ccaggcucacgcuucuucuucc

SEQ ID NO: 16947 - RNA, 22 nt, Artificial Sequence
  LRRK2 RNA guide
cccuccaggcucacgcuucuuc

SEQ ID NO: 16948 - RNA, 22 nt, Artificial Sequence
  LRRK2 RNA guide
ccuccaggcucacgcuucuucu

SEQ ID NO: 16949 - RNA, 22 nt, Artificial Sequence
  LRRK2 RNA guide
cgagaaucacaggggaagaaga

SEQ ID NO: 16950 - RNA, 22 nt, Artificial Sequence
  LRRK2 RNA guide
cgugagccuggagggaaagaca

SEQ ID NO: 16951 - RNA, 22 nt, Artificial Sequence
  LRRK2 RNA guide
cucacgcuucuucuuccccugu

SEQ ID NO: 16952 - RNA, 22 nt, Artificial Sequence
  LRRK2 RNA guide
cuccaggcucacgcuucuucuu

SEQ ID NO: 16953 - RNA, 22 nt, Artificial Sequence
  LRRK2 RNA guide
cuuucccuccaggcucacgcuu

SEQ ID NO: 16954 - RNA, 22 nt, Artificial Sequence
  LRRK2 RNA guide
gaagaagaagcgugagccugga

SEQ ID NO: 16955 - RNA, 22 nt, Artificial Sequence
  LRRK2 RNA guide
gaagaagcgugagccuggaggg

SEQ ID NO: 16956 - RNA, 22 nt, Artificial Sequence
  LRRK2 RNA guide
gaagcgugagccuggagggaaa

SEQ ID NO: 16957 - RNA, 22 nt, Artificial Sequence
  LRRK2 RNA guide
gcgugagccuggagggaaagac

SEQ ID NO: 16958 - RNA, 22 nt, Artificial Sequence
  LRRK2 RNA guide
gcucacgcuucuucuuccccug

SEQ ID NO: 16959 - RNA, 22 nt, Artificial Sequence
  LRRK2 RNA guide
ggaagaagaagcgugagccugg

SEQ ID NO: 16960 - RNA, 22 nt, Artificial Sequence
  LRRK2 RNA guide
ggcucacgcuucuucuuccccu

SEQ ID NO: 16961 - RNA, 22 nt, Artificial Sequence
  LRRK2 RNA guide
gggaagaagaagcgugagccug

SEQ ID NO: 16962 - RNA, 22 nt, Artificial Sequence
  LRRK2 RNA guide
ggggaagaagaagcgugagccu

SEQ ID NO: 16963 - RNA, 22 nt, Artificial Sequence
  LRRK2 RNA guide
gucuuucccuccaggcucacgc

SEQ ID NO: 16964 - RNA, 22 nt, Artificial Sequence
  LRRK2 RNA guide
gugagccuggagggaaagacac

SEQ ID NO: 16965 - RNA, 22 nt, Artificial Sequence
  LRRK2 RNA guide
gugucuuucccuccaggcucac

SEQ ID NO: 16966 - RNA, 22 nt, Artificial Sequence
  LRRK2 RNA guide
ucacaggggaagaagaagcgug

SEQ ID NO: 16967 - RNA, 22 nt, Artificial Sequence
  LRRK2 RNA guide
ucacgcuucuucuuccccugug

SEQ ID NO: 16968 - RNA, 22 nt, Artificial Sequence
  LRRK2 RNA guide
uccaggcucacgcuucuucuuc

SEQ ID NO: 16969 - RNA, 22 nt, Artificial Sequence
  LRRK2 RNA guide
ucccuccaggcucacgcuucuu

SEQ ID NO: 16970 - RNA, 22 nt, Artificial Sequence
  LRRK2 RNA guide
ucuuucccuccaggcucacgcu

SEQ ID NO: 16971 - RNA, 22 nt, Artificial Sequence
  LRRK2 RNA guide
ugucuuucccuccaggcucacg

SEQ ID NO: 16972 - RNA, 22 nt, Artificial Sequence
  LRRK2 RNA guide
ugugucuuucccuccaggcuca

SEQ ID NO: 16973 - RNA, 22 nt, Artificial Sequence
  LRRK2 RNA guide
uucccuccaggcucacgcuucu

SEQ ID NO: 16974 - RNA, 22 nt, Artificial Sequence
  LRRK2 RNA guide
uugugucuuucccuccaggcuc

SEQ ID NO: 16975 - RNA, 22 nt, Artificial Sequence
  LRRK2 RNA guide
uuucccuccaggcucacgcuuc

SEQ ID NO: 16976 - RNA, 20 nt, Artificial Sequence
  LRRK2 RNA guide
aagaagaagcacgagccugg

SEQ ID NO: 16977 - RNA, 20 nt, Artificial Sequence
  LRRK2 RNA guide
aagaagcacgagccuggagg

SEQ ID NO: 16978 - RNA, 20 nt, Artificial Sequence
  LRRK2 RNA guide
aagcacgagccuggagggaa

SEQ ID NO: 16979 - RNA, 20 nt, Artificial Sequence
  LRRK2 RNA guide
acaggggaagaagaagcacg

SEQ ID NO: 16980 - RNA, 20 nt, Artificial Sequence
  LRRK2 RNA guide
agaagaagcacgagccugga

SEQ ID NO: 16981 - RNA, 20 nt, Artificial Sequence
  LRRK2 RNA guide
agaagcacgagccuggaggg

SEQ ID NO: 16982 - RNA, 20 nt, Artificial Sequence
  LRRK2 RNA guide
agcacgagccuggagggaaa

SEQ ID NO: 16983 - RNA, 20 nt, Artificial Sequence
  LRRK2 RNA guide
aggcucgugcuucuucuucc

SEQ ID NO: 16984 - RNA, 20 nt, Artificial Sequence
  LRRK2 RNA guide
aggggaagaagaagcacgag

SEQ ID NO: 16985 - RNA, 20 nt, Artificial Sequence
  LRRK2 RNA guide
cacaggggaagaagaagcac

SEQ ID NO: 16986 - RNA, 20 nt, Artificial Sequence
  LRRK2 RNA guide
cacgagccuggagggaaaga

SEQ ID NO: 16987 - RNA, 20 nt, Artificial Sequence
  LRRK2 RNA guide
caggcucgugcuucuucuuc

SEQ ID NO: 16988 - RNA, 20 nt, Artificial Sequence
  LRRK2 RNA guide
caggggaagaagaagcacga

SEQ ID NO: 16989 - RNA, 20 nt, Artificial Sequence
  LRRK2 RNA guide
ccaggcucgugcuucuucuu

SEQ ID NO: 16990 - RNA, 20 nt, Artificial Sequence
  LRRK2 RNA guide
cccuccaggcucgugcuucu

SEQ ID NO: 16991 - RNA, 20 nt, Artificial Sequence
  LRRK2 RNA guide
ccuccaggcucgugcuucuu

SEQ ID NO: 16992 - RNA, 20 nt, Artificial Sequence
  LRRK2 RNA guide
cgugcuucuucuuccccugu

SEQ ID NO: 16993 - RNA, 20 nt, Artificial Sequence
  LRRK2 RNA guide
cuccaggcucgugcuucuuc

SEQ ID NO: 16994 - RNA, 20 nt, Artificial Sequence
  LRRK2 RNA guide
cucgugcuucuucuuccccu

SEQ ID NO: 16995 - RNA, 20 nt, Artificial Sequence
  LRRK2 RNA guide
cuuucccuccaggcucgugc

SEQ ID NO: 16996 - RNA, 20 nt, Artificial Sequence
  LRRK2 RNA guide
gaagaagaagcacgagccug

SEQ ID NO: 16997 - RNA, 20 nt, Artificial Sequence
  LRRK2 RNA guide
gaagaagcacgagccuggag

SEQ ID NO: 16998 - RNA, 20 nt, Artificial Sequence
  LRRK2 RNA guide
gaagcacgagccuggaggga

SEQ ID NO: 16999 - RNA, 20 nt, Artificial Sequence
  LRRK2 RNA guide
gagaaucacaggggaagaag

SEQ ID NO: 17000 - RNA, 20 nt, Artificial Sequence
  LRRK2 RNA guide
gcacgagccuggagggaaag

SEQ ID NO: 17001 - RNA, 20 nt, Artificial Sequence
  LRRK2 RNA guide
gcucgugcuucuucuucccc

SEQ ID NO: 17002 - RNA, 20 nt, Artificial Sequence
  LRRK2 RNA guide
ggaagaagaagcacgagccu

SEQ ID NO: 17003 - RNA, 20 nt, Artificial Sequence
  LRRK2 RNA guide
ggcucgugcuucuucuuccc

SEQ ID NO: 17004 - RNA, 20 nt, Artificial Sequence
  LRRK2 RNA guide
gggaagaagaagcacgagcc

SEQ ID NO: 17005 - RNA, 20 nt, Artificial Sequence
  LRRK2 RNA guide
ggggaagaagaagcacgagc

SEQ ID NO: 17006 - RNA, 20 nt, Artificial Sequence
  LRRK2 RNA guide
gucuuucccuccaggcucgu

SEQ ID NO: 17007 - RNA, 20 nt, Artificial Sequence
  LRRK2 RNA guide
gugcuucuucuuccccugug

SEQ ID NO: 17008 - RNA, 20 nt, Artificial Sequence
  LRRK2 RNA guide
ucacaggggaagaagaagca

SEQ ID NO: 17009 - RNA, 20 nt, Artificial Sequence
  LRRK2 RNA guide
uccaggcucgugcuucuucu

SEQ ID NO: 17010 - RNA, 20 nt, Artificial Sequence
  LRRK2 RNA guide
ucccuccaggcucgugcuuc

SEQ ID NO: 17011 - RNA, 20 nt, Artificial Sequence
  LRRK2 RNA guide
ucgugcuucuucuuccccug

SEQ ID NO: 17012 - RNA, 20 nt, Artificial Sequence
  LRRK2 RNA guide
ucuuucccuccaggcucgug

SEQ ID NO: 17013 - RNA, 20 nt, Artificial Sequence
  LRRK2 RNA guide
ugucuuucccuccaggcucg

SEQ ID NO: 17014 - RNA, 20 nt, Artificial Sequence
  LRRK2 RNA guide
uucccuccaggcucgugcuu

SEQ ID NO: 17015 - RNA, 20 nt, Artificial Sequence
  LRRK2 RNA guide
uuucccuccaggcucgugcu

SEQ ID NO: 17016 - RNA, 21 nt, Artificial Sequence
  LRRK2 RNA guide
aagaagaagcacgagccugga

SEQ ID NO: 17017 - RNA, 21 nt, Artificial Sequence
  LRRK2 RNA guide
aagaagcacgagccuggaggg

SEQ ID NO: 17018 - RNA, 21 nt, Artificial Sequence
  LRRK2 RNA guide
aagcacgagccuggagggaaa

SEQ ID NO: 17019 - RNA, 21 nt, Artificial Sequence
  LRRK2 RNA guide
acaggggaagaagaagcacga

SEQ ID NO: 17020 - RNA, 21 nt, Artificial Sequence
  LRRK2 RNA guide
agaagaagcacgagccuggag

SEQ ID NO: 17021 - RNA, 21 nt, Artificial Sequence
  LRRK2 RNA guide
agaagcacgagccuggaggga

SEQ ID NO: 17022 - RNA, 21 nt, Artificial Sequence
  LRRK2 RNA guide
agcacgagccuggagggaaag

SEQ ID NO: 17023 - RNA, 21 nt, Artificial Sequence
  LRRK2 RNA guide
aggcucgugcuucuucuuccc

SEQ ID NO: 17024 - RNA, 21 nt, Artificial Sequence
  LRRK2 RNA guide
aggggaagaagaagcacgagc

SEQ ID NO: 17025 - RNA, 21 nt, Artificial Sequence
  LRRK2 RNA guide
aucacaggggaagaagaagca

SEQ ID NO: 17026 - RNA, 21 nt, Artificial Sequence
  LRRK2 RNA guide
cacaggggaagaagaagcacg

SEQ ID NO: 17027 - RNA, 21 nt, Artificial Sequence
  LRRK2 RNA guide
cacgagccuggagggaaagac

SEQ ID NO: 17028 - RNA, 21 nt, Artificial Sequence
  LRRK2 RNA guide
caggcucgugcuucuucuucc

SEQ ID NO: 17029 - RNA, 21 nt, Artificial Sequence
  LRRK2 RNA guide
caggggaagaagaagcacgag

SEQ ID NO: 17030 - RNA, 21 nt, Artificial Sequence
  LRRK2 RNA guide
ccaggcucgugcuucuucuuc

SEQ ID NO: 17031 - RNA, 21 nt, Artificial Sequence
  LRRK2 RNA guide
cccuccaggcucgugcuucuu

SEQ ID NO: 17032 - RNA, 21 nt, Artificial Sequence
  LRRK2 RNA guide
ccuccaggcucgugcuucuuc

SEQ ID NO: 17033 - RNA, 21 nt, Artificial Sequence
  LRRK2 RNA guide
cgagaaucacaggggaagaag

SEQ ID NO: 17034 - RNA, 21 nt, Artificial Sequence
  LRRK2 RNA guide
cgugcuucuucuuccccugug

SEQ ID NO: 17035 - RNA, 21 nt, Artificial Sequence
  LRRK2 RNA guide
cuccaggcucgugcuucuucu

SEQ ID NO: 17036 - RNA, 21 nt, Artificial Sequence
  LRRK2 RNA guide
cucgugcuucuucuuccccug

SEQ ID NO: 17037 - RNA, 21 nt, Artificial Sequence
  LRRK2 RNA guide
cuuucccuccaggcucgugcu

SEQ ID NO: 17038 - RNA, 21 nt, Artificial Sequence
  LRRK2 RNA guide
gaagaagaagcacgagccugg

SEQ ID NO: 17039 - RNA, 21 nt, Artificial Sequence
  LRRK2 RNA guide
gaagaagcacgagccuggagg

SEQ ID NO: 17040 - RNA, 21 nt, Artificial Sequence
  LRRK2 RNA guide
gaagcacgagccuggagggaa

SEQ ID NO: 17041 - RNA, 21 nt, Artificial Sequence
  LRRK2 RNA guide
gcacgagccuggagggaaaga

SEQ ID NO: 17042 - RNA, 21 nt, Artificial Sequence
  LRRK2 RNA guide
gcucgugcuucuucuuccccu

SEQ ID NO: 17043 - RNA, 21 nt, Artificial Sequence
  LRRK2 RNA guide
ggaagaagaagcacgagccug

SEQ ID NO: 17044 - RNA, 21 nt, Artificial Sequence
  LRRK2 RNA guide
ggcucgugcuucuucuucccc

SEQ ID NO: 17045 - RNA, 21 nt, Artificial Sequence
  LRRK2 RNA guide
gggaagaagaagcacgagccu

SEQ ID NO: 17046 - RNA, 21 nt, Artificial Sequence
  LRRK2 RNA guide
ggggaagaagaagcacgagcc

SEQ ID NO: 17047 - RNA, 21 nt, Artificial Sequence
  LRRK2 RNA guide
gucuuucccuccaggcucgug

SEQ ID NO: 17048 - RNA, 21 nt, Artificial Sequence
  LRRK2 RNA guide
gugcuucuucuuccccuguga

SEQ ID NO: 17049 - RNA, 21 nt, Artificial Sequence
  LRRK2 RNA guide
gugucuuucccuccaggcucg

SEQ ID NO: 17050 - RNA, 21 nt, Artificial Sequence
  LRRK2 RNA guide
ucacaggggaagaagaagcac

SEQ ID NO: 17051 - RNA, 21 nt, Artificial Sequence
  LRRK2 RNA guide
uccaggcucgugcuucuucuu

SEQ ID NO: 17052 - RNA, 21 nt, Artificial Sequence
  LRRK2 RNA guide
ucccuccaggcucgugcuucu

SEQ ID NO: 17053 - RNA, 21 nt, Artificial Sequence
  LRRK2 RNA guide
ucgugcuucuucuuccccugu

SEQ ID NO: 17054 - RNA, 21 nt, Artificial Sequence
  LRRK2 RNA guide
ucuuucccuccaggcucgugc

SEQ ID NO: 17055 - RNA, 21 nt, Artificial Sequence
  LRRK2 RNA guide
ugucuuucccuccaggcucgu

SEQ ID NO: 17056 - RNA, 21 nt, Artificial Sequence
  LRRK2 RNA guide
uucccuccaggcucgugcuuc

SEQ ID NO: 17057 - RNA, 21 nt, Artificial Sequence
  LRRK2 RNA guide
uuucccuccaggcucgugcuu

SEQ ID NO: 17058 - RNA, 22 nt, Artificial Sequence
  LRRK2 RNA guide
aagaagaagcacgagccuggag

SEQ ID NO: 17059 - RNA, 22 nt, Artificial Sequence
  LRRK2 RNA guide
aagaagcacgagccuggaggga

SEQ ID NO: 17060 - RNA, 22 nt, Artificial Sequence
  LRRK2 RNA guide
aagcacgagccuggagggaaag

SEQ ID NO: 17061 - RNA, 22 nt, Artificial Sequence
  LRRK2 RNA guide
aaucacaggggaagaagaagca

SEQ ID NO: 17062 - RNA, 22 nt, Artificial Sequence
  LRRK2 RNA guide
acaggggaagaagaagcacgag

SEQ ID NO: 17063 - RNA, 22 nt, Artificial Sequence
  LRRK2 RNA guide
acgagaaucacaggggaagaag

SEQ ID NO: 17064 - RNA, 22 nt, Artificial Sequence
  LRRK2 RNA guide
agaagaagcacgagccuggagg

SEQ ID NO: 17065 - RNA, 22 nt, Artificial Sequence
  LRRK2 RNA guide
agaagcacgagccuggagggaa

SEQ ID NO: 17066 - RNA, 22 nt, Artificial Sequence
  LRRK2 RNA guide
agcacgagccuggagggaaaga

SEQ ID NO: 17067 - RNA, 22 nt, Artificial Sequence
  LRRK2 RNA guide
aggcucgugcuucuucuucccc

SEQ ID NO: 17068 - RNA, 22 nt, Artificial Sequence
  LRRK2 RNA guide
aggggaagaagaagcacgagcc

SEQ ID NO: 17069 - RNA, 22 nt, Artificial Sequence
  LRRK2 RNA guide
aucacaggggaagaagaagcac

SEQ ID NO: 17070 - RNA, 22 nt, Artificial Sequence
  LRRK2 RNA guide
cacaggggaagaagaagcacga

SEQ ID NO: 17071 - RNA, 22 nt, Artificial Sequence
  LRRK2 RNA guide
cacgagccuggagggaaagaca

SEQ ID NO: 17072 - RNA, 22 nt, Artificial Sequence
  LRRK2 RNA guide
caggcucgugcuucuucuuccc

SEQ ID NO: 17073 - RNA, 22 nt, Artificial Sequence
  LRRK2 RNA guide
caggggaagaagaagcacgagc

SEQ ID NO: 17074 - RNA, 22 nt, Artificial Sequence
  LRRK2 RNA guide
ccaggcucgugcuucuucuucc

SEQ ID NO: 17075 - RNA, 22 nt, Artificial Sequence
  LRRK2 RNA guide
cccuccaggcucgugcuucuuc

SEQ ID NO: 17076 - RNA, 22 nt, Artificial Sequence
  LRRK2 RNA guide
ccuccaggcucgugcuucuucu

SEQ ID NO: 17077 - RNA, 22 nt, Artificial Sequence
  LRRK2 RNA guide
cgugcuucuucuuccccuguga

SEQ ID NO: 17078 - RNA, 22 nt, Artificial Sequence
  LRRK2 RNA guide
cuccaggcucgugcuucuucuu

SEQ ID NO: 17079 - RNA, 22 nt, Artificial Sequence
  LRRK2 RNA guide
cucgugcuucuucuuccccugu

SEQ ID NO: 17080 - RNA, 22 nt, Artificial Sequence
  LRRK2 RNA guide
cuuucccuccaggcucgugcuu

SEQ ID NO: 17081 - RNA, 22 nt, Artificial Sequence
  LRRK2 RNA guide
gaagaagaagcacgagccugga

SEQ ID NO: 17082 - RNA, 22 nt, Artificial Sequence
  LRRK2 RNA guide
gaagaagcacgagccuggaggg

SEQ ID NO: 17083 - RNA, 22 nt, Artificial Sequence
  LRRK2 RNA guide
gaagcacgagccuggagggaaa

SEQ ID NO: 17084 - RNA, 22 nt, Artificial Sequence
  LRRK2 RNA guide
gcacgagccuggagggaaagac

SEQ ID NO: 17085 - RNA, 22 nt, Artificial Sequence
  LRRK2 RNA guide
gcucgugcuucuucuuccccug

SEQ ID NO: 17086 - RNA, 22 nt, Artificial Sequence
  LRRK2 RNA guide
ggaagaagaagcacgagccugg

SEQ ID NO: 17087 - RNA, 22 nt, Artificial Sequence
  LRRK2 RNA guide
ggcucgugcuucuucuuccccu

SEQ ID NO: 17088 - RNA, 22 nt, Artificial Sequence
  LRRK2 RNA guide
gggaagaagaagcacgagccug

SEQ ID NO: 17089 - RNA, 22 nt, Artificial Sequence
  LRRK2 RNA guide
ggggaagaagaagcacgagccu

SEQ ID NO: 17090 - RNA, 22 nt, Artificial Sequence
  LRRK2 RNA guide
gucuuucccuccaggcucgugc

SEQ ID NO: 17091 - RNA, 22 nt, Artificial Sequence
  LRRK2 RNA guide
gugcuucuucuuccccugugau

SEQ ID NO: 17092 - RNA, 22 nt, Artificial Sequence
  LRRK2 RNA guide
gugucuuucccuccaggcucgu

SEQ ID NO: 17093 - RNA, 22 nt, Artificial Sequence
  LRRK2 RNA guide
ucacaggggaagaagaagcacg

SEQ ID NO: 17094 - RNA, 22 nt, Artificial Sequence
  LRRK2 RNA guide
uccaggcucgugcuucuucuuc

SEQ ID NO: 17095 - RNA, 22 nt, Artificial Sequence
  LRRK2 RNA guide
ucccuccaggcucgugcuucuu

SEQ ID NO: 17096 - RNA, 22 nt, Artificial Sequence
  LRRK2 RNA guide
ucgugcuucuucuuccccugug

SEQ ID NO: 17097 - RNA, 22 nt, Artificial Sequence
  LRRK2 RNA guide
ucuuucccuccaggcucgugcu

SEQ ID NO: 17098 - RNA, 22 nt, Artificial Sequence
  LRRK2 RNA guide
ugucuuucccuccaggcucgug

SEQ ID NO: 17099 - RNA, 22 nt, Artificial Sequence
  LRRK2 RNA guide
ugugucuuucccuccaggcucg

SEQ ID NO: 17100 - RNA, 22 nt, Artificial Sequence
  LRRK2 RNA guide
uucccuccaggcucgugcuucu

SEQ ID NO: 17101 - RNA, 22 nt, Artificial Sequence
  LRRK2 RNA guide
uuucccuccaggcucgugcuuc

SEQ ID NO: 17102 - RNA, 20 nt, Artificial Sequence
  LRRK2 RNA guide
aagaagaagggcgagccugg

SEQ ID NO: 17103 - RNA, 20 nt, Artificial Sequence
  LRRK2 RNA guide
aagaagggcgagccuggagg

SEQ ID NO: 17104 - RNA, 20 nt, Artificial Sequence
  LRRK2 RNA guide
aagggcgagccuggagggaa

SEQ ID NO: 17105 - RNA, 20 nt, Artificial Sequence
  LRRK2 RNA guide
acaggggaagaagaagggcg

SEQ ID NO: 17106 - RNA, 20 nt, Artificial Sequence
  LRRK2 RNA guide
agaagaagggcgagccugga

SEQ ID NO: 17107 - RNA, 20 nt, Artificial Sequence
  LRRK2 RNA guide
agaagggcgagccuggaggg

SEQ ID NO: 17108 - RNA, 20 nt, Artificial Sequence
  LRRK2 RNA guide
aggcucgcccuucuucuucc

SEQ ID NO: 17109 - RNA, 20 nt, Artificial Sequence
  LRRK2 RNA guide
agggcgagccuggagggaaa

SEQ ID NO: 17110 - RNA, 20 nt, Artificial Sequence
  LRRK2 RNA guide
aggggaagaagaagggcgag

SEQ ID NO: 17111 - RNA, 20 nt, Artificial Sequence
  LRRK2 RNA guide
aucacaggggaagaagaagg

SEQ ID NO: 17112 - RNA, 20 nt, Artificial Sequence
  LRRK2 RNA guide
cacaggggaagaagaagggc

SEQ ID NO: 17113 - RNA, 20 nt, Artificial Sequence
  LRRK2 RNA guide
caggcucgcccuucuucuuc

SEQ ID NO: 17114 - RNA, 20 nt, Artificial Sequence
  LRRK2 RNA guide
caggggaagaagaagggcga

SEQ ID NO: 17115 - RNA, 20 nt, Artificial Sequence
  LRRK2 RNA guide
ccaggcucgcccuucuucuu

SEQ ID NO: 17116 - RNA, 20 nt, Artificial Sequence
  LRRK2 RNA guide
cccuccaggcucgcccuucu

SEQ ID NO: 17117 - RNA, 20 nt, Artificial Sequence
  LRRK2 RNA guide
cccuucuucuuccccuguga

SEQ ID NO: 17118 - RNA, 20 nt, Artificial Sequence
  LRRK2 RNA guide
ccuccaggcucgcccuucuu

SEQ ID NO: 17119 - RNA, 20 nt, Artificial Sequence
  LRRK2 RNA guide
cgagaaucacaggggaagaa

SEQ ID NO: 17120 - RNA, 20 nt, Artificial Sequence
  LRRK2 RNA guide
cgcccuucuucuuccccugu

SEQ ID NO: 17121 - RNA, 20 nt, Artificial Sequence
  LRRK2 RNA guide
cuccaggcucgcccuucuuc

SEQ ID NO: 17122 - RNA, 20 nt, Artificial Sequence
  LRRK2 RNA guide
cucgcccuucuucuuccccu

SEQ ID NO: 17123 - RNA, 20 nt, Artificial Sequence
  LRRK2 RNA guide
cuuucccuccaggcucgccc

SEQ ID NO: 17124 - RNA, 20 nt, Artificial Sequence
  LRRK2 RNA guide
gaagaagaagggcgagccug

SEQ ID NO: 17125 - RNA, 20 nt, Artificial Sequence
  LRRK2 RNA guide
gaagaagggcgagccuggag

SEQ ID NO: 17126 - RNA, 20 nt, Artificial Sequence
  LRRK2 RNA guide
gaagggcgagccuggaggga

SEQ ID NO: 17127 - RNA, 20 nt, Artificial Sequence
  LRRK2 RNA guide
gcccuucuucuuccccugug

SEQ ID NO: 17128 - RNA, 20 nt, Artificial Sequence
  LRRK2 RNA guide
gcucgcccuucuucuucccc

SEQ ID NO: 17129 - RNA, 20 nt, Artificial Sequence
  LRRK2 RNA guide
ggaagaagaagggcgagccu

SEQ ID NO: 17130 - RNA, 20 nt, Artificial Sequence
  LRRK2 RNA guide
ggcucgcccuucuucuuccc

SEQ ID NO: 17131 - RNA, 20 nt, Artificial Sequence
  LRRK2 RNA guide
gggaagaagaagggcgagcc

SEQ ID NO: 17132 - RNA, 20 nt, Artificial Sequence
  LRRK2 RNA guide
gggcgagccuggagggaaag

SEQ ID NO: 17133 - RNA, 20 nt, Artificial Sequence
  LRRK2 RNA guide
ggggaagaagaagggcgagc

SEQ ID NO: 17134 - RNA, 20 nt, Artificial Sequence
  LRRK2 RNA guide
gucuuucccuccaggcucgc

SEQ ID NO: 17135 - RNA, 20 nt, Artificial Sequence
  LRRK2 RNA guide
ucacaggggaagaagaaggg

SEQ ID NO: 17136 - RNA, 20 nt, Artificial Sequence
  LRRK2 RNA guide
uccaggcucgcccuucuucu

SEQ ID NO: 17137 - RNA, 20 nt, Artificial Sequence
  LRRK2 RNA guide
ucccuccaggcucgcccuuc

SEQ ID NO: 17138 - RNA, 20 nt, Artificial Sequence
  LRRK2 RNA guide
ucgcccuucuucuuccccug

SEQ ID NO: 17139 - RNA, 20 nt, Artificial Sequence
  LRRK2 RNA guide
ucuuucccuccaggcucgcc

SEQ ID NO: 17140 - RNA, 20 nt, Artificial Sequence
  LRRK2 RNA guide
uucccuccaggcucgcccuu

SEQ ID NO: 17141 - RNA, 20 nt, Artificial Sequence
  LRRK2 RNA guide
uuucccuccaggcucgcccu

SEQ ID NO: 17142 - RNA, 21 nt, Artificial Sequence
  LRRK2 RNA guide
aagaagaagggcgagccugga

SEQ ID NO: 17143 - RNA, 21 nt, Artificial Sequence
  LRRK2 RNA guide
aagaagggcgagccuggaggg

SEQ ID NO: 17144 - RNA, 21 nt, Artificial Sequence
  LRRK2 RNA guide
aagggcgagccuggagggaaa

SEQ ID NO: 17145 - RNA, 21 nt, Artificial Sequence
  LRRK2 RNA guide
aaucacaggggaagaagaagg

SEQ ID NO: 17146 - RNA, 21 nt, Artificial Sequence
  LRRK2 RNA guide
acaggggaagaagaagggcga

SEQ ID NO: 17147 - RNA, 21 nt, Artificial Sequence
  LRRK2 RNA guide
acgagaaucacaggggaagaa

SEQ ID NO: 17148 - RNA, 21 nt, Artificial Sequence
  LRRK2 RNA guide
agaagaagggcgagccuggag

SEQ ID NO: 17149 - RNA, 21 nt, Artificial Sequence
  LRRK2 RNA guide
agaagggcgagccuggaggga

SEQ ID NO: 17150 - RNA, 21 nt, Artificial Sequence
  LRRK2 RNA guide
aggcucgcccuucuucuuccc

SEQ ID NO: 17151 - RNA, 21 nt, Artificial Sequence
  LRRK2 RNA guide
agggcgagccuggagggaaag

SEQ ID NO: 17152 - RNA, 21 nt, Artificial Sequence
  LRRK2 RNA guide
aggggaagaagaagggcgagc

SEQ ID NO: 17153 - RNA, 21 nt, Artificial Sequence
  LRRK2 RNA guide
aucacaggggaagaagaaggg

SEQ ID NO: 17154 - RNA, 21 nt, Artificial Sequence
  LRRK2 RNA guide
cacaggggaagaagaagggcg

SEQ ID NO: 17155 - RNA, 21 nt, Artificial Sequence
  LRRK2 RNA guide
caggcucgcccuucuucuucc

SEQ ID NO: 17156 - RNA, 21 nt, Artificial Sequence
  LRRK2 RNA guide
caggggaagaagaagggcgag

SEQ ID NO: 17157 - RNA, 21 nt, Artificial Sequence
  LRRK2 RNA guide
ccaggcucgcccuucuucuuc

SEQ ID NO: 17158 - RNA, 21 nt, Artificial Sequence
  LRRK2 RNA guide
cccuccaggcucgcccuucuu

SEQ ID NO: 17159 - RNA, 21 nt, Artificial Sequence
  LRRK2 RNA guide
cccuucuucuuccccugugau

SEQ ID NO: 17160 - RNA, 21 nt, Artificial Sequence
  LRRK2 RNA guide
ccuccaggcucgcccuucuuc

SEQ ID NO: 17161 - RNA, 21 nt, Artificial Sequence
  LRRK2 RNA guide
cgcccuucuucuuccccugug

SEQ ID NO: 17162 - RNA, 21 nt, Artificial Sequence
  LRRK2 RNA guide
cuccaggcucgcccuucuucu

SEQ ID NO: 17163 - RNA, 21 nt, Artificial Sequence
  LRRK2 RNA guide
cucgcccuucuucuuccccug

SEQ ID NO: 17164 - RNA, 21 nt, Artificial Sequence
  LRRK2 RNA guide
cuuucccuccaggcucgcccu

SEQ ID NO: 17165 - RNA, 21 nt, Artificial Sequence
  LRRK2 RNA guide
gaagaagaagggcgagccugg

SEQ ID NO: 17166 - RNA, 21 nt, Artificial Sequence
  LRRK2 RNA guide
gaagaagggcgagccuggagg

SEQ ID NO: 17167 - RNA, 21 nt, Artificial Sequence
  LRRK2 RNA guide
gaagggcgagccuggagggaa

SEQ ID NO: 17168 - RNA, 21 nt, Artificial Sequence
  LRRK2 RNA guide
gcccuucuucuuccccuguga

SEQ ID NO: 17169 - RNA, 21 nt, Artificial Sequence
  LRRK2 RNA guide
gcucgcccuucuucuuccccu

SEQ ID NO: 17170 - RNA, 21 nt, Artificial Sequence
  LRRK2 RNA guide
ggaagaagaagggcgagccug

SEQ ID NO: 17171 - RNA, 21 nt, Artificial Sequence
  LRRK2 RNA guide
ggcucgcccuucuucuucccc

SEQ ID NO: 17172 - RNA, 21 nt, Artificial Sequence
  LRRK2 RNA guide
gggaagaagaagggcgagccu

SEQ ID NO: 17173 - RNA, 21 nt, Artificial Sequence
  LRRK2 RNA guide
gggcgagccuggagggaaaga

SEQ ID NO: 17174 - RNA, 21 nt, Artificial Sequence
  LRRK2 RNA guide
ggggaagaagaagggcgagcc

SEQ ID NO: 17175 - RNA, 21 nt, Artificial Sequence
  LRRK2 RNA guide
gucuuucccuccaggcucgcc

SEQ ID NO: 17176 - RNA, 21 nt, Artificial Sequence
  LRRK2 RNA guide
ucacaggggaagaagaagggc

SEQ ID NO: 17177 - RNA, 21 nt, Artificial Sequence
  LRRK2 RNA guide
uccaggcucgcccuucuucuu

SEQ ID NO: 17178 - RNA, 21 nt, Artificial Sequence
  LRRK2 RNA guide
ucccuccaggcucgcccuucu

SEQ ID NO: 17179 - RNA, 21 nt, Artificial Sequence
  LRRK2 RNA guide
ucgcccuucuucuuccccugu

SEQ ID NO: 17180 - RNA, 21 nt, Artificial Sequence
  LRRK2 RNA guide
ucuuucccuccaggcucgccc

SEQ ID NO: 17181 - RNA, 21 nt, Artificial Sequence
  LRRK2 RNA guide
ugucuuucccuccaggcucgc

SEQ ID NO: 17182 - RNA, 21 nt, Artificial Sequence
  LRRK2 RNA guide
uucccuccaggcucgcccuuc

SEQ ID NO: 17183 - RNA, 21 nt, Artificial Sequence
  LRRK2 RNA guide
uuucccuccaggcucgcccuu

SEQ ID NO: 17184 - RNA, 22 nt, Artificial Sequence
  LRRK2 RNA guide
aacgagaaucacaggggaagaa

SEQ ID NO: 17185 - RNA, 22 nt, Artificial Sequence
  LRRK2 RNA guide
aagaagaagggcgagccuggag

SEQ ID NO: 17186 - RNA, 22 nt, Artificial Sequence
  LRRK2 RNA guide
aagaagggcgagccuggaggga

SEQ ID NO: 17187 - RNA, 22 nt, Artificial Sequence
  LRRK2 RNA guide
aagggcgagccuggagggaaag

SEQ ID NO: 17188 - RNA, 22 nt, Artificial Sequence
  LRRK2 RNA guide
aaucacaggggaagaagaaggg

SEQ ID NO: 17189 - RNA, 22 nt, Artificial Sequence
  LRRK2 RNA guide
acaggggaagaagaagggcgag

SEQ ID NO: 17190 - RNA, 22 nt, Artificial Sequence
  LRRK2 RNA guide
agaagaagggcgagccuggagg

SEQ ID NO: 17191 - RNA, 22 nt, Artificial Sequence
  LRRK2 RNA guide
agaagggcgagccuggagggaa

SEQ ID NO: 17192 - RNA, 22 nt, Artificial Sequence
  LRRK2 RNA guide
aggcucgcccuucuucuucccc

SEQ ID NO: 17193 - RNA, 22 nt, Artificial Sequence
  LRRK2 RNA guide
agggcgagccuggagggaaaga

SEQ ID NO: 17194 - RNA, 22 nt, Artificial Sequence
  LRRK2 RNA guide
aggggaagaagaagggcgagcc

SEQ ID NO: 17195 - RNA, 22 nt, Artificial Sequence
  LRRK2 RNA guide
aucacaggggaagaagaagggc

SEQ ID NO: 17196 - RNA, 22 nt, Artificial Sequence
  LRRK2 RNA guide
cacaggggaagaagaagggcga

SEQ ID NO: 17197 - RNA, 22 nt, Artificial Sequence
  LRRK2 RNA guide
caggcucgcccuucuucuuccc

SEQ ID NO: 17198 - RNA, 22 nt, Artificial Sequence
  LRRK2 RNA guide
caggggaagaagaagggcgagc

SEQ ID NO: 17199 - RNA, 22 nt, Artificial Sequence
  LRRK2 RNA guide
ccaggcucgcccuucuucuucc

SEQ ID NO: 17200 - RNA, 22 nt, Artificial Sequence
  LRRK2 RNA guide
cccuccaggcucgcccuucuuc

SEQ ID NO: 17201 - RNA, 22 nt, Artificial Sequence
  LRRK2 RNA guide
cccuucuucuuccccugugauu

SEQ ID NO: 17202 - RNA, 22 nt, Artificial Sequence
  LRRK2 RNA guide
ccuccaggcucgcccuucuucu

SEQ ID NO: 17203 - RNA, 22 nt, Artificial Sequence
  LRRK2 RNA guide
cgcccuucuucuuccccuguga

SEQ ID NO: 17204 - RNA, 22 nt, Artificial Sequence
  LRRK2 RNA guide
cuccaggcucgcccuucuucuu

SEQ ID NO: 17205 - RNA, 22 nt, Artificial Sequence
  LRRK2 RNA guide
cucgcccuucuucuuccccugu

SEQ ID NO: 17206 - RNA, 22 nt, Artificial Sequence
  LRRK2 RNA guide
cuuucccuccaggcucgcccuu

SEQ ID NO: 17207 - RNA, 22 nt, Artificial Sequence
  LRRK2 RNA guide
gaagaagaagggcgagccugga

SEQ ID NO: 17208 - RNA, 22 nt, Artificial Sequence
  LRRK2 RNA guide
gaagaagggcgagccuggaggg

SEQ ID NO: 17209 - RNA, 22 nt, Artificial Sequence
  LRRK2 RNA guide
gaagggcgagccuggagggaaa

SEQ ID NO: 17210 - RNA, 22 nt, Artificial Sequence
  LRRK2 RNA guide
gaaucacaggggaagaagaagg

SEQ ID NO: 17211 - RNA, 22 nt, Artificial Sequence
  LRRK2 RNA guide
gcccuucuucuuccccugugau

SEQ ID NO: 17212 - RNA, 22 nt, Artificial Sequence
  LRRK2 RNA guide
gcucgcccuucuucuuccccug

SEQ ID NO: 17213 - RNA, 22 nt, Artificial Sequence
  LRRK2 RNA guide
ggaagaagaagggcgagccugg

SEQ ID NO: 17214 - RNA, 22 nt, Artificial Sequence
  LRRK2 RNA guide
ggcucgcccuucuucuuccccu

SEQ ID NO: 17215 - RNA, 22 nt, Artificial Sequence
  LRRK2 RNA guide
gggaagaagaagggcgagccug

SEQ ID NO: 17216 - RNA, 22 nt, Artificial Sequence
  LRRK2 RNA guide
gggcgagccuggagggaaagac

SEQ ID NO: 17217 - RNA, 22 nt, Artificial Sequence
  LRRK2 RNA guide
ggggaagaagaagggcgagccu

SEQ ID NO: 17218 - RNA, 22 nt, Artificial Sequence
  LRRK2 RNA guide
gucuuucccuccaggcucgccc

SEQ ID NO: 17219 - RNA, 22 nt, Artificial Sequence
  LRRK2 RNA guide
gugucuuucccuccaggcucgc

SEQ ID NO: 17220 - RNA, 22 nt, Artificial Sequence
  LRRK2 RNA guide
ucacaggggaagaagaagggcg

SEQ ID NO: 17221 - RNA, 22 nt, Artificial Sequence
  LRRK2 RNA guide
uccaggcucgcccuucuucuuc

SEQ ID NO: 17222 - RNA, 22 nt, Artificial Sequence
  LRRK2 RNA guide
ucccuccaggcucgcccuucuu

SEQ ID NO: 17223 - RNA, 22 nt, Artificial Sequence
  LRRK2 RNA guide
ucgcccuucuucuuccccugug

SEQ ID NO: 17224 - RNA, 22 nt, Artificial Sequence
  LRRK2 RNA guide
ucuuucccuccaggcucgcccu

SEQ ID NO: 17225 - RNA, 22 nt, Artificial Sequence
  LRRK2 RNA guide
ugucuuucccuccaggcucgcc

SEQ ID NO: 17226 - RNA, 22 nt, Artificial Sequence
  LRRK2 RNA guide
uucccuccaggcucgcccuucu

SEQ ID NO: 17227 - RNA, 22 nt, Artificial Sequence
  LRRK2 RNA guide
uuucccuccaggcucgcccuuc

SEQ ID NO: 17228 - RNA, 20 nt, Artificial Sequence
  LRRK2 RNA guide
aacgagaaucacaggggaag

SEQ ID NO: 17229 - RNA, 20 nt, Artificial Sequence
  LRRK2 RNA guide
aagaagcagcgcgagccugg

SEQ ID NO: 17230 - RNA, 20 nt, Artificial Sequence
  LRRK2 RNA guide
aagcagcgcgagccuggagg

SEQ ID NO: 17231 - RNA, 20 nt, Artificial Sequence
  LRRK2 RNA guide
aaucacaggggaagaagcag

SEQ ID NO: 17232 - RNA, 20 nt, Artificial Sequence
  LRRK2 RNA guide
acaggggaagaagcagcgcg

SEQ ID NO: 17233 - RNA, 20 nt, Artificial Sequence
  LRRK2 RNA guide
acgagaaucacaggggaaga

SEQ ID NO: 17234 - RNA, 20 nt, Artificial Sequence
  LRRK2 RNA guide
agaagcagcgcgagccugga

SEQ ID NO: 17235 - RNA, 20 nt, Artificial Sequence
  LRRK2 RNA guide
agaaucacaggggaagaagc

SEQ ID NO: 17236 - RNA, 20 nt, Artificial Sequence
  LRRK2 RNA guide
agcagcgcgagccuggaggg

SEQ ID NO: 17237 - RNA, 20 nt, Artificial Sequence
  LRRK2 RNA guide
aggcucgcgcugcuucuucc

SEQ ID NO: 17238 - RNA, 20 nt, Artificial Sequence
  LRRK2 RNA guide
aggggaagaagcagcgcgag

SEQ ID NO: 17239 - RNA, 20 nt, Artificial Sequence
  LRRK2 RNA guide
aucacaggggaagaagcagc

SEQ ID NO: 17240 - RNA, 20 nt, Artificial Sequence
  LRRK2 RNA guide
caacgagaaucacaggggaa

SEQ ID NO: 17241 - RNA, 20 nt, Artificial Sequence
  LRRK2 RNA guide
cacaggggaagaagcagcgc

SEQ ID NO: 17242 - RNA, 20 nt, Artificial Sequence
  LRRK2 RNA guide
caggcucgcgcugcuucuuc

SEQ ID NO: 17243 - RNA, 20 nt, Artificial Sequence
  LRRK2 RNA guide
caggggaagaagcagcgcga

SEQ ID NO: 17244 - RNA, 20 nt, Artificial Sequence
  LRRK2 RNA guide
ccaggcucgcgcugcuucuu

SEQ ID NO: 17245 - RNA, 20 nt, Artificial Sequence
  LRRK2 RNA guide
cccuccaggcucgcgcugcu

SEQ ID NO: 17246 - RNA, 20 nt, Artificial Sequence
  LRRK2 RNA guide
ccuccaggcucgcgcugcuu

SEQ ID NO: 17247 - RNA, 20 nt, Artificial Sequence
  LRRK2 RNA guide
cgcgcugcuucuuccccugu

SEQ ID NO: 17248 - RNA, 20 nt, Artificial Sequence
  LRRK2 RNA guide
cgcugcuucuuccccuguga

SEQ ID NO: 17249 - RNA, 20 nt, Artificial Sequence
  LRRK2 RNA guide
cuccaggcucgcgcugcuuc

SEQ ID NO: 17250 - RNA, 20 nt, Artificial Sequence
  LRRK2 RNA guide
cucgcgcugcuucuuccccu

SEQ ID NO: 17251 - RNA, 20 nt, Artificial Sequence
  LRRK2 RNA guide
cugcuucuuccccugugauu

SEQ ID NO: 17252 - RNA, 20 nt, Artificial Sequence
  LRRK2 RNA guide
cuuucccuccaggcucgcgc

SEQ ID NO: 17253 - RNA, 20 nt, Artificial Sequence
  LRRK2 RNA guide
gaagaagcagcgcgagccug

SEQ ID NO: 17254 - RNA, 20 nt, Artificial Sequence
  LRRK2 RNA guide
gaagcagcgcgagccuggag

SEQ ID NO: 17255 - RNA, 20 nt, Artificial Sequence
  LRRK2 RNA guide
gaaucacaggggaagaagca

SEQ ID NO: 17256 - RNA, 20 nt, Artificial Sequence
  LRRK2 RNA guide
gcagcgcgagccuggaggga

SEQ ID NO: 17257 - RNA, 20 nt, Artificial Sequence
  LRRK2 RNA guide
gcgcugcuucuuccccugug

SEQ ID NO: 17258 - RNA, 20 nt, Artificial Sequence
  LRRK2 RNA guide
gcucgcgcugcuucuucccc

SEQ ID NO: 17259 - RNA, 20 nt, Artificial Sequence
  LRRK2 RNA guide
gcugcuucuuccccugugau

SEQ ID NO: 17260 - RNA, 20 nt, Artificial Sequence
  LRRK2 RNA guide
ggaagaagcagcgcgagccu

SEQ ID NO: 17261 - RNA, 20 nt, Artificial Sequence
  LRRK2 RNA guide
ggcucgcgcugcuucuuccc

SEQ ID NO: 17262 - RNA, 20 nt, Artificial Sequence
  LRRK2 RNA guide
gggaagaagcagcgcgagcc

SEQ ID NO: 17263 - RNA, 20 nt, Artificial Sequence
  LRRK2 RNA guide
ggggaagaagcagcgcgagc

SEQ ID NO: 17264 - RNA, 20 nt, Artificial Sequence
  LRRK2 RNA guide
ucacaggggaagaagcagcg

SEQ ID NO: 17265 - RNA, 20 nt, Artificial Sequence
  LRRK2 RNA guide
uccaggcucgcgcugcuucu

SEQ ID NO: 17266 - RNA, 20 nt, Artificial Sequence
  LRRK2 RNA guide
ucccuccaggcucgcgcugc

SEQ ID NO: 17267 - RNA, 20 nt, Artificial Sequence
  LRRK2 RNA guide
ucgcgcugcuucuuccccug

SEQ ID NO: 17268 - RNA, 20 nt, Artificial Sequence
  LRRK2 RNA guide
ucuuucccuccaggcucgcg

SEQ ID NO: 17269 - RNA, 20 nt, Artificial Sequence
  LRRK2 RNA guide
ugcuucuuccccugugauuc

SEQ ID NO: 17270 - RNA, 20 nt, Artificial Sequence
  LRRK2 RNA guide
uucccuccaggcucgcgcug

SEQ ID NO: 17271 - RNA, 20 nt, Artificial Sequence
  LRRK2 RNA guide
uuucccuccaggcucgcgcu

SEQ ID NO: 17272 - RNA, 21 nt, Artificial Sequence
  LRRK2 RNA guide
aacgagaaucacaggggaaga

SEQ ID NO: 17273 - RNA, 21 nt, Artificial Sequence
  LRRK2 RNA guide
aagaagcagcgcgagccugga

SEQ ID NO: 17274 - RNA, 21 nt, Artificial Sequence
  LRRK2 RNA guide
aagcagcgcgagccuggaggg

SEQ ID NO: 17275 - RNA, 21 nt, Artificial Sequence
  LRRK2 RNA guide
aaucacaggggaagaagcagc

SEQ ID NO: 17276 - RNA, 21 nt, Artificial Sequence
  LRRK2 RNA guide
acaggggaagaagcagcgcga

SEQ ID NO: 17277 - RNA, 21 nt, Artificial Sequence
  LRRK2 RNA guide
agaagcagcgcgagccuggag

SEQ ID NO: 17278 - RNA, 21 nt, Artificial Sequence
  LRRK2 RNA guide
agaaucacaggggaagaagca

SEQ ID NO: 17279 - RNA, 21 nt, Artificial Sequence
  LRRK2 RNA guide
agcagcgcgagccuggaggga

SEQ ID NO: 17280 - RNA, 21 nt, Artificial Sequence
  LRRK2 RNA guide
aggcucgcgcugcuucuuccc

SEQ ID NO: 17281 - RNA, 21 nt, Artificial Sequence
  LRRK2 RNA guide
aggggaagaagcagcgcgagc

SEQ ID NO: 17282 - RNA, 21 nt, Artificial Sequence
  LRRK2 RNA guide
aucacaggggaagaagcagcg

SEQ ID NO: 17283 - RNA, 21 nt, Artificial Sequence
  LRRK2 RNA guide
caacgagaaucacaggggaag

SEQ ID NO: 17284 - RNA, 21 nt, Artificial Sequence
  LRRK2 RNA guide
cacaggggaagaagcagcgcg

SEQ ID NO: 17285 - RNA, 21 nt, Artificial Sequence
  LRRK2 RNA guide
caggcucgcgcugcuucuucc

SEQ ID NO: 17286 - RNA, 21 nt, Artificial Sequence
  LRRK2 RNA guide
caggggaagaagcagcgcgag

SEQ ID NO: 17287 - RNA, 21 nt, Artificial Sequence
  LRRK2 RNA guide
ccaacgagaaucacaggggaa

SEQ ID NO: 17288 - RNA, 21 nt, Artificial Sequence
  LRRK2 RNA guide
ccaggcucgcgcugcuucuuc

SEQ ID NO: 17289 - RNA, 21 nt, Artificial Sequence
  LRRK2 RNA guide
cccuccaggcucgcgcugcuu

SEQ ID NO: 17290 - RNA, 21 nt, Artificial Sequence
  LRRK2 RNA guide
ccuccaggcucgcgcugcuuc

SEQ ID NO: 17291 - RNA, 21 nt, Artificial Sequence
  LRRK2 RNA guide
cgcgcugcuucuuccccugug

SEQ ID NO: 17292 - RNA, 21 nt, Artificial Sequence
  LRRK2 RNA guide
cgcugcuucuuccccugugau

SEQ ID NO: 17293 - RNA, 21 nt, Artificial Sequence
  LRRK2 RNA guide
cuccaggcucgcgcugcuucu

SEQ ID NO: 17294 - RNA, 21 nt, Artificial Sequence
  LRRK2 RNA guide
cucgcgcugcuucuuccccug

SEQ ID NO: 17295 - RNA, 21 nt, Artificial Sequence
  LRRK2 RNA guide
cugcuucuuccccugugauuc

SEQ ID NO: 17296 - RNA, 21 nt, Artificial Sequence
  LRRK2 RNA guide
cuuucccuccaggcucgcgcu

SEQ ID NO: 17297 - RNA, 21 nt, Artificial Sequence
  LRRK2 RNA guide
gaagaagcagcgcgagccugg

SEQ ID NO: 17298 - RNA, 21 nt, Artificial Sequence
  LRRK2 RNA guide
gaagcagcgcgagccuggagg

SEQ ID NO: 17299 - RNA, 21 nt, Artificial Sequence
  LRRK2 RNA guide
gaaucacaggggaagaagcag

SEQ ID NO: 17300 - RNA, 21 nt, Artificial Sequence
  LRRK2 RNA guide
gagaaucacaggggaagaagc

SEQ ID NO: 17301 - RNA, 21 nt, Artificial Sequence
  LRRK2 RNA guide
gcagcgcgagccuggagggaa

SEQ ID NO: 17302 - RNA, 21 nt, Artificial Sequence
  LRRK2 RNA guide
gcgcugcuucuuccccuguga

SEQ ID NO: 17303 - RNA, 21 nt, Artificial Sequence
  LRRK2 RNA guide
gcucgcgcugcuucuuccccu

SEQ ID NO: 17304 - RNA, 21 nt, Artificial Sequence
  LRRK2 RNA guide
gcugcuucuuccccugugauu

SEQ ID NO: 17305 - RNA, 21 nt, Artificial Sequence
  LRRK2 RNA guide
ggaagaagcagcgcgagccug

SEQ ID NO: 17306 - RNA, 21 nt, Artificial Sequence
  LRRK2 RNA guide
ggcucgcgcugcuucuucccc

SEQ ID NO: 17307 - RNA, 21 nt, Artificial Sequence
  LRRK2 RNA guide
gggaagaagcagcgcgagccu

SEQ ID NO: 17308 - RNA, 21 nt, Artificial Sequence
  LRRK2 RNA guide
ggggaagaagcagcgcgagcc

SEQ ID NO: 17309 - RNA, 21 nt, Artificial Sequence
  LRRK2 RNA guide
gucuuucccuccaggcucgcg

SEQ ID NO: 17310 - RNA, 21 nt, Artificial Sequence
  LRRK2 RNA guide
ucacaggggaagaagcagcgc

SEQ ID NO: 17311 - RNA, 21 nt, Artificial Sequence
  LRRK2 RNA guide
uccaggcucgcgcugcuucuu

SEQ ID NO: 17312 - RNA, 21 nt, Artificial Sequence
  LRRK2 RNA guide
ucccuccaggcucgcgcugcu

SEQ ID NO: 17313 - RNA, 21 nt, Artificial Sequence
  LRRK2 RNA guide
ucgcgcugcuucuuccccugu

SEQ ID NO: 17314 - RNA, 21 nt, Artificial Sequence
  LRRK2 RNA guide
ucuuucccuccaggcucgcgc

SEQ ID NO: 17315 - RNA, 21 nt, Artificial Sequence
  LRRK2 RNA guide
ugcuucuuccccugugauucu

SEQ ID NO: 17316 - RNA, 21 nt, Artificial Sequence
  LRRK2 RNA guide
uucccuccaggcucgcgcugc

SEQ ID NO: 17317 - RNA, 21 nt, Artificial Sequence
  LRRK2 RNA guide
uuucccuccaggcucgcgcug

SEQ ID NO: 17318 - RNA, 22 nt, Artificial Sequence
  LRRK2 RNA guide
aagaagcagcgcgagccuggag

SEQ ID NO: 17319 - RNA, 22 nt, Artificial Sequence
  LRRK2 RNA guide
aagcagcgcgagccuggaggga

SEQ ID NO: 17320 - RNA, 22 nt, Artificial Sequence
  LRRK2 RNA guide
aaucacaggggaagaagcagcg

SEQ ID NO: 17321 - RNA, 22 nt, Artificial Sequence
  LRRK2 RNA guide
acaggggaagaagcagcgcgag

SEQ ID NO: 17322 - RNA, 22 nt, Artificial Sequence
  LRRK2 RNA guide
agaagcagcgcgagccuggagg

SEQ ID NO: 17323 - RNA, 22 nt, Artificial Sequence
  LRRK2 RNA guide
agaaucacaggggaagaagcag

SEQ ID NO: 17324 - RNA, 22 nt, Artificial Sequence
  LRRK2 RNA guide
agcagcgcgagccuggagggaa

SEQ ID NO: 17325 - RNA, 22 nt, Artificial Sequence
  LRRK2 RNA guide
aggcucgcgcugcuucuucccc

SEQ ID NO: 17326 - RNA, 22 nt, Artificial Sequence
  LRRK2 RNA guide
aggggaagaagcagcgcgagcc

SEQ ID NO: 17327 - RNA, 22 nt, Artificial Sequence
  LRRK2 RNA guide
aucacaggggaagaagcagcgc

SEQ ID NO: 17328 - RNA, 22 nt, Artificial Sequence
  LRRK2 RNA guide
caacgagaaucacaggggaaga

SEQ ID NO: 17329 - RNA, 22 nt, Artificial Sequence
  LRRK2 RNA guide
cacaggggaagaagcagcgcga

SEQ ID NO: 17330 - RNA, 22 nt, Artificial Sequence
  LRRK2 RNA guide
caggcucgcgcugcuucuuccc

SEQ ID NO: 17331 - RNA, 22 nt, Artificial Sequence
  LRRK2 RNA guide
caggggaagaagcagcgcgagc

SEQ ID NO: 17332 - RNA, 22 nt, Artificial Sequence
  LRRK2 RNA guide
ccaacgagaaucacaggggaag

SEQ ID NO: 17333 - RNA, 22 nt, Artificial Sequence
  LRRK2 RNA guide
ccaggcucgcgcugcuucuucc

SEQ ID NO: 17334 - RNA, 22 nt, Artificial Sequence
  LRRK2 RNA guide
cccuccaggcucgcgcugcuuc

SEQ ID NO: 17335 - RNA, 22 nt, Artificial Sequence
  LRRK2 RNA guide
ccuccaggcucgcgcugcuucu

SEQ ID NO: 17336 - RNA, 22 nt, Artificial Sequence
  LRRK2 RNA guide
cgagaaucacaggggaagaagc

SEQ ID NO: 17337 - RNA, 22 nt, Artificial Sequence
  LRRK2 RNA guide
cgcgcugcuucuuccccuguga

SEQ ID NO: 17338 - RNA, 22 nt, Artificial Sequence
  LRRK2 RNA guide
cgcugcuucuuccccugugauu

SEQ ID NO: 17339 - RNA, 22 nt, Artificial Sequence
  LRRK2 RNA guide
cuccaggcucgcgcugcuucuu

SEQ ID NO: 17340 - RNA, 22 nt, Artificial Sequence
  LRRK2 RNA guide
cucgcgcugcuucuuccccugu

SEQ ID NO: 17341 - RNA, 22 nt, Artificial Sequence
  LRRK2 RNA guide
cugcuucuuccccugugauucu

SEQ ID NO: 17342 - RNA, 22 nt, Artificial Sequence
  LRRK2 RNA guide
cuuucccuccaggcucgcgcug

SEQ ID NO: 17343 - RNA, 22 nt, Artificial Sequence
  LRRK2 RNA guide
gaagaagcagcgcgagccugga

SEQ ID NO: 17344 - RNA, 22 nt, Artificial Sequence
  LRRK2 RNA guide
gaagcagcgcgagccuggaggg

SEQ ID NO: 17345 - RNA, 22 nt, Artificial Sequence
  LRRK2 RNA guide
gaaucacaggggaagaagcagc

SEQ ID NO: 17346 - RNA, 22 nt, Artificial Sequence
  LRRK2 RNA guide
gagaaucacaggggaagaagca

SEQ ID NO: 17347 - RNA, 22 nt, Artificial Sequence
  LRRK2 RNA guide
gcagcgcgagccuggagggaaa

SEQ ID NO: 17348 - RNA, 22 nt, Artificial Sequence
  LRRK2 RNA guide
gccaacgagaaucacaggggaa

SEQ ID NO: 17349 - RNA, 22 nt, Artificial Sequence
  LRRK2 RNA guide
gcgcugcuucuuccccugugau

SEQ ID NO: 17350 - RNA, 22 nt, Artificial Sequence
  LRRK2 RNA guide
gcucgcgcugcuucuuccccug

SEQ ID NO: 17351 - RNA, 22 nt, Artificial Sequence
  LRRK2 RNA guide
gcugcuucuuccccugugauuc

SEQ ID NO: 17352 - RNA, 22 nt, Artificial Sequence
  LRRK2 RNA guide
ggaagaagcagcgcgagccugg

SEQ ID NO: 17353 - RNA, 22 nt, Artificial Sequence
  LRRK2 RNA guide
ggcucgcgcugcuucuuccccu

SEQ ID NO: 17354 - RNA, 22 nt, Artificial Sequence
  LRRK2 RNA guide
gggaagaagcagcgcgagccug

SEQ ID NO: 17355 - RNA, 22 nt, Artificial Sequence
  LRRK2 RNA guide
ggggaagaagcagcgcgagccu

SEQ ID NO: 17356 - RNA, 22 nt, Artificial Sequence
  LRRK2 RNA guide
gucuuucccuccaggcucgcgc

SEQ ID NO: 17357 - RNA, 22 nt, Artificial Sequence
  LRRK2 RNA guide
ucacaggggaagaagcagcgcg

SEQ ID NO: 17358 - RNA, 22 nt, Artificial Sequence
  LRRK2 RNA guide
uccaggcucgcgcugcuucuuc

SEQ ID NO: 17359 - RNA, 22 nt, Artificial Sequence
  LRRK2 RNA guide
ucccuccaggcucgcgcugcuu

SEQ ID NO: 17360 - RNA, 22 nt, Artificial Sequence
  LRRK2 RNA guide
ucgcgcugcuucuuccccugug

SEQ ID NO: 17361 - RNA, 22 nt, Artificial Sequence
  LRRK2 RNA guide
ucuuucccuccaggcucgcgcu

SEQ ID NO: 17362 - RNA, 22 nt, Artificial Sequence
  LRRK2 RNA guide
ugcuucuuccccugugauucuc

SEQ ID NO: 17363 - RNA, 22 nt, Artificial Sequence
  LRRK2 RNA guide
ugucuuucccuccaggcucgcg

SEQ ID NO: 17364 - RNA, 22 nt, Artificial Sequence
  LRRK2 RNA guide
uucccuccaggcucgcgcugcu

SEQ ID NO: 17365 - RNA, 22 nt, Artificial Sequence
  LRRK2 RNA guide
uuucccuccaggcucgcgcugc

SEQ ID NO: 17366 - RNA, 20 nt, Artificial Sequence
  LRRK2 RNA guide
aaaugugugccaacgagaau

SEQ ID NO: 17367 - RNA, 20 nt, Artificial Sequence
  LRRK2 RNA guide
aacgagaaucacaagggaag

SEQ ID NO: 17368 - RNA, 20 nt, Artificial Sequence
  LRRK2 RNA guide
aagggaagaagaagcgcgag

SEQ ID NO: 17369 - RNA, 20 nt, Artificial Sequence
  LRRK2 RNA guide
aaucacaagggaagaagaag

SEQ ID NO: 17370 - RNA, 20 nt, Artificial Sequence
  LRRK2 RNA guide
aaugugugccaacgagaauc

SEQ ID NO: 17371 - RNA, 20 nt, Artificial Sequence
  LRRK2 RNA guide
acaagggaagaagaagcgcg

SEQ ID NO: 17372 - RNA, 20 nt, Artificial Sequence
  LRRK2 RNA guide
acgagaaucacaagggaaga

SEQ ID NO: 17373 - RNA, 20 nt, Artificial Sequence
  LRRK2 RNA guide
agaaucacaagggaagaaga

SEQ ID NO: 17374 - RNA, 20 nt, Artificial Sequence
  LRRK2 RNA guide
aggcucgcgcuucuucuucc

SEQ ID NO: 17375 - RNA, 20 nt, Artificial Sequence
  LRRK2 RNA guide
aucacaagggaagaagaagc

SEQ ID NO: 17376 - RNA, 20 nt, Artificial Sequence
  LRRK2 RNA guide
augugugccaacgagaauca

SEQ ID NO: 17377 - RNA, 20 nt, Artificial Sequence
  LRRK2 RNA guide
caacgagaaucacaagggaa

SEQ ID NO: 17378 - RNA, 20 nt, Artificial Sequence
  LRRK2 RNA guide
caagggaagaagaagcgcga

SEQ ID NO: 17379 - RNA, 20 nt, Artificial Sequence
  LRRK2 RNA guide
cacaagggaagaagaagcgc

SEQ ID NO: 17380 - RNA, 20 nt, Artificial Sequence
  LRRK2 RNA guide
caggcucgcgcuucuucuuc

SEQ ID NO: 17381 - RNA, 20 nt, Artificial Sequence
  LRRK2 RNA guide
ccaacgagaaucacaaggga

SEQ ID NO: 17382 - RNA, 20 nt, Artificial Sequence
  LRRK2 RNA guide
ccaggcucgcgcuucuucuu

SEQ ID NO: 17383 - RNA, 20 nt, Artificial Sequence
  LRRK2 RNA guide
cccuugugauucucguuggc

SEQ ID NO: 17384 - RNA, 20 nt, Artificial Sequence
  LRRK2 RNA guide
ccuugugauucucguuggca

SEQ ID NO: 17385 - RNA, 20 nt, Artificial Sequence
  LRRK2 RNA guide
cgagaaucacaagggaagaa

SEQ ID NO: 17386 - RNA, 20 nt, Artificial Sequence
  LRRK2 RNA guide
cgcgcuucuucuucccuugu

SEQ ID NO: 17387 - RNA, 20 nt, Artificial Sequence
  LRRK2 RNA guide
cgcuucuucuucccuuguga

SEQ ID NO: 17388 - RNA, 20 nt, Artificial Sequence
  LRRK2 RNA guide
cucgcgcuucuucuucccuu

SEQ ID NO: 17389 - RNA, 20 nt, Artificial Sequence
  LRRK2 RNA guide
cuucccuugugauucucguu

SEQ ID NO: 17390 - RNA, 20 nt, Artificial Sequence
  LRRK2 RNA guide
cuucuucccuugugauucuc

SEQ ID NO: 17391 - RNA, 20 nt, Artificial Sequence
  LRRK2 RNA guide
cuucuucuucccuugugauu

SEQ ID NO: 17392 - RNA, 20 nt, Artificial Sequence
  LRRK2 RNA guide
cuugugauucucguuggcac

SEQ ID NO: 17393 - RNA, 20 nt, Artificial Sequence
  LRRK2 RNA guide
gaaucacaagggaagaagaa

SEQ ID NO: 17394 - RNA, 20 nt, Artificial Sequence
  LRRK2 RNA guide
gagaaucacaagggaagaag

SEQ ID NO: 17395 - RNA, 20 nt, Artificial Sequence
  LRRK2 RNA guide
gccaacgagaaucacaaggg

SEQ ID NO: 17396 - RNA, 20 nt, Artificial Sequence
  LRRK2 RNA guide
gcgcuucuucuucccuugug

SEQ ID NO: 17397 - RNA, 20 nt, Artificial Sequence
  LRRK2 RNA guide
gcucgcgcuucuucuucccu

SEQ ID NO: 17398 - RNA, 20 nt, Artificial Sequence
  LRRK2 RNA guide
gcuucuucuucccuugugau

SEQ ID NO: 17399 - RNA, 20 nt, Artificial Sequence
  LRRK2 RNA guide
ggcucgcgcuucuucuuccc

SEQ ID NO: 17400 - RNA, 20 nt, Artificial Sequence
  LRRK2 RNA guide
gugccaacgagaaucacaag

SEQ ID NO: 17401 - RNA, 20 nt, Artificial Sequence
  LRRK2 RNA guide
gugugccaacgagaaucaca

SEQ ID NO: 17402 - RNA, 20 nt, Artificial Sequence
  LRRK2 RNA guide
ucacaagggaagaagaagcg

SEQ ID NO: 17403 - RNA, 20 nt, Artificial Sequence
  LRRK2 RNA guide
uccaggcucgcgcuucuucu

SEQ ID NO: 17404 - RNA, 20 nt, Artificial Sequence
  LRRK2 RNA guide
ucccuugugauucucguugg

SEQ ID NO: 17405 - RNA, 20 nt, Artificial Sequence
  LRRK2 RNA guide
ucgcgcuucuucuucccuug

SEQ ID NO: 17406 - RNA, 20 nt, Artificial Sequence
  LRRK2 RNA guide
ucuucccuugugauucucgu

SEQ ID NO: 17407 - RNA, 20 nt, Artificial Sequence
  LRRK2 RNA guide
ucuucuucccuugugauucu

SEQ ID NO: 17408 - RNA, 20 nt, Artificial Sequence
  LRRK2 RNA guide
ugccaacgagaaucacaagg

SEQ ID NO: 17409 - RNA, 20 nt, Artificial Sequence
  LRRK2 RNA guide
ugugccaacgagaaucacaa

SEQ ID NO: 17410 - RNA, 20 nt, Artificial Sequence
  LRRK2 RNA guide
ugugugccaacgagaaucac

SEQ ID NO: 17411 - RNA, 20 nt, Artificial Sequence
  LRRK2 RNA guide
uucccuugugauucucguug

SEQ ID NO: 17412 - RNA, 20 nt, Artificial Sequence
  LRRK2 RNA guide
uucuucccuugugauucucg

SEQ ID NO: 17413 - RNA, 20 nt, Artificial Sequence
  LRRK2 RNA guide
uucuucuucccuugugauuc

SEQ ID NO: 17414 - RNA, 21 nt, Artificial Sequence
  LRRK2 RNA guide
aaaugugugccaacgagaauc

SEQ ID NO: 17415 - RNA, 21 nt, Artificial Sequence
  LRRK2 RNA guide
aacgagaaucacaagggaaga

SEQ ID NO: 17416 - RNA, 21 nt, Artificial Sequence
  LRRK2 RNA guide
aagggaagaagaagcgcgagc

SEQ ID NO: 17417 - RNA, 21 nt, Artificial Sequence
  LRRK2 RNA guide
aaucacaagggaagaagaagc

SEQ ID NO: 17418 - RNA, 21 nt, Artificial Sequence
  LRRK2 RNA guide
aaugugugccaacgagaauca

SEQ ID NO: 17419 - RNA, 21 nt, Artificial Sequence
  LRRK2 RNA guide
acaagggaagaagaagcgcga

SEQ ID NO: 17420 - RNA, 21 nt, Artificial Sequence
  LRRK2 RNA guide
acgagaaucacaagggaagaa

SEQ ID NO: 17421 - RNA, 21 nt, Artificial Sequence
  LRRK2 RNA guide
agaaucacaagggaagaagaa

SEQ ID NO: 17422 - RNA, 21 nt, Artificial Sequence
  LRRK2 RNA guide
aggcucgcgcuucuucuuccc

SEQ ID NO: 17423 - RNA, 21 nt, Artificial Sequence
  LRRK2 RNA guide
aucacaagggaagaagaagcg

SEQ ID NO: 17424 - RNA, 21 nt, Artificial Sequence
  LRRK2 RNA guide
augugugccaacgagaaucac

SEQ ID NO: 17425 - RNA, 21 nt, Artificial Sequence
  LRRK2 RNA guide
caaaugugugccaacgagaau

SEQ ID NO: 17426 - RNA, 21 nt, Artificial Sequence
  LRRK2 RNA guide
caacgagaaucacaagggaag

SEQ ID NO: 17427 - RNA, 21 nt, Artificial Sequence
  LRRK2 RNA guide
caagggaagaagaagcgcgag

SEQ ID NO: 17428 - RNA, 21 nt, Artificial Sequence
  LRRK2 RNA guide
cacaagggaagaagaagcgcg

SEQ ID NO: 17429 - RNA, 21 nt, Artificial Sequence
  LRRK2 RNA guide
caggcucgcgcuucuucuucc

SEQ ID NO: 17430 - RNA, 21 nt, Artificial Sequence
  LRRK2 RNA guide
ccaacgagaaucacaagggaa

SEQ ID NO: 17431 - RNA, 21 nt, Artificial Sequence
  LRRK2 RNA guide
ccaggcucgcgcuucuucuuc

SEQ ID NO: 17432 - RNA, 21 nt, Artificial Sequence
  LRRK2 RNA guide
cccuugugauucucguuggca

SEQ ID NO: 17433 - RNA, 21 nt, Artificial Sequence
  LRRK2 RNA guide
ccuugugauucucguuggcac

SEQ ID NO: 17434 - RNA, 21 nt, Artificial Sequence
  LRRK2 RNA guide
cgagaaucacaagggaagaag

SEQ ID NO: 17435 - RNA, 21 nt, Artificial Sequence
  LRRK2 RNA guide
cgcgcuucuucuucccuugug

SEQ ID NO: 17436 - RNA, 21 nt, Artificial Sequence
  LRRK2 RNA guide
cgcuucuucuucccuugugau

SEQ ID NO: 17437 - RNA, 21 nt, Artificial Sequence
  LRRK2 RNA guide
cuccaggcucgcgcuucuucu

SEQ ID NO: 17438 - RNA, 21 nt, Artificial Sequence
  LRRK2 RNA guide
cucgcgcuucuucuucccuug

SEQ ID NO: 17439 - RNA, 21 nt, Artificial Sequence
  LRRK2 RNA guide
cuucccuugugauucucguug

SEQ ID NO: 17440 - RNA, 21 nt, Artificial Sequence
  LRRK2 RNA guide
cuucuucccuugugauucucg

SEQ ID NO: 17441 - RNA, 21 nt, Artificial Sequence
  LRRK2 RNA guide
cuucuucuucccuugugauuc

SEQ ID NO: 17442 - RNA, 21 nt, Artificial Sequence
  LRRK2 RNA guide
cuugugauucucguuggcaca

SEQ ID NO: 17443 - RNA, 21 nt, Artificial Sequence
  LRRK2 RNA guide
gaaucacaagggaagaagaag

SEQ ID NO: 17444 - RNA, 21 nt, Artificial Sequence
  LRRK2 RNA guide
gagaaucacaagggaagaaga

SEQ ID NO: 17445 - RNA, 21 nt, Artificial Sequence
  LRRK2 RNA guide
gccaacgagaaucacaaggga

SEQ ID NO: 17446 - RNA, 21 nt, Artificial Sequence
  LRRK2 RNA guide
gcgcuucuucuucccuuguga

SEQ ID NO: 17447 - RNA, 21 nt, Artificial Sequence
  LRRK2 RNA guide
gcucgcgcuucuucuucccuu

SEQ ID NO: 17448 - RNA, 21 nt, Artificial Sequence
  LRRK2 RNA guide
gcuucuucuucccuugugauu

SEQ ID NO: 17449 - RNA, 21 nt, Artificial Sequence
  LRRK2 RNA guide
ggcucgcgcuucuucuucccu

SEQ ID NO: 17450 - RNA, 21 nt, Artificial Sequence
  LRRK2 RNA guide
gugccaacgagaaucacaagg

SEQ ID NO: 17451 - RNA, 21 nt, Artificial Sequence
  LRRK2 RNA guide
gugugccaacgagaaucacaa

SEQ ID NO: 17452 - RNA, 21 nt, Artificial Sequence
  LRRK2 RNA guide
ucacaagggaagaagaagcgc

SEQ ID NO: 17453 - RNA, 21 nt, Artificial Sequence
  LRRK2 RNA guide
uccaggcucgcgcuucuucuu

SEQ ID NO: 17454 - RNA, 21 nt, Artificial Sequence
  LRRK2 RNA guide
ucccuugugauucucguuggc

SEQ ID NO: 17455 - RNA, 21 nt, Artificial Sequence
  LRRK2 RNA guide
ucgcgcuucuucuucccuugu

SEQ ID NO: 17456 - RNA, 21 nt, Artificial Sequence
  LRRK2 RNA guide
ucuucccuugugauucucguu

SEQ ID NO: 17457 - RNA, 21 nt, Artificial Sequence
  LRRK2 RNA guide
ucuucuucccuugugauucuc

SEQ ID NO: 17458 - RNA, 21 nt, Artificial Sequence
  LRRK2 RNA guide
ugccaacgagaaucacaaggg

SEQ ID NO: 17459 - RNA, 21 nt, Artificial Sequence
  LRRK2 RNA guide
ugugccaacgagaaucacaag

SEQ ID NO: 17460 - RNA, 21 nt, Artificial Sequence
  LRRK2 RNA guide
ugugugccaacgagaaucaca

SEQ ID NO: 17461 - RNA, 21 nt, Artificial Sequence
  LRRK2 RNA guide
uucccuugugauucucguugg

SEQ ID NO: 17462 - RNA, 21 nt, Artificial Sequence
  LRRK2 RNA guide
uucuucccuugugauucucgu

SEQ ID NO: 17463 - RNA, 21 nt, Artificial Sequence
  LRRK2 RNA guide
uucuucuucccuugugauucu

SEQ ID NO: 17464 - RNA, 22 nt, Artificial Sequence
  LRRK2 RNA guide
aaaugugugccaacgagaauca

SEQ ID NO: 17465 - RNA, 22 nt, Artificial Sequence
  LRRK2 RNA guide
aacgagaaucacaagggaagaa

SEQ ID NO: 17466 - RNA, 22 nt, Artificial Sequence
  LRRK2 RNA guide
aagggaagaagaagcgcgagcc

SEQ ID NO: 17467 - RNA, 22 nt, Artificial Sequence
  LRRK2 RNA guide
aaucacaagggaagaagaagcg

SEQ ID NO: 17468 - RNA, 22 nt, Artificial Sequence
  LRRK2 RNA guide
aaugugugccaacgagaaucac

SEQ ID NO: 17469 - RNA, 22 nt, Artificial Sequence
  LRRK2 RNA guide
acaagggaagaagaagcgcgag

SEQ ID NO: 17470 - RNA, 22 nt, Artificial Sequence
  LRRK2 RNA guide
acgagaaucacaagggaagaag

SEQ ID NO: 17471 - RNA, 22 nt, Artificial Sequence
  LRRK2 RNA guide
agaaucacaagggaagaagaag

SEQ ID NO: 17472 - RNA, 22 nt, Artificial Sequence
  LRRK2 RNA guide
aggcucgcgcuucuucuucccu

SEQ ID NO: 17473 - RNA, 22 nt, Artificial Sequence
  LRRK2 RNA guide
aucacaagggaagaagaagcgc

SEQ ID NO: 17474 - RNA, 22 nt, Artificial Sequence
  LRRK2 RNA guide
augugugccaacgagaaucaca

SEQ ID NO: 17475 - RNA, 22 nt, Artificial Sequence
  LRRK2 RNA guide
caaaugugugccaacgagaauc

SEQ ID NO: 17476 - RNA, 22 nt, Artificial Sequence
  LRRK2 RNA guide
caacgagaaucacaagggaaga

SEQ ID NO: 17477 - RNA, 22 nt, Artificial Sequence
  LRRK2 RNA guide
caagggaagaagaagcgcgagc

SEQ ID NO: 17478 - RNA, 22 nt, Artificial Sequence
  LRRK2 RNA guide
cacaagggaagaagaagcgcga

SEQ ID NO: 17479 - RNA, 22 nt, Artificial Sequence
  LRRK2 RNA guide
caggcucgcgcuucuucuuccc

SEQ ID NO: 17480 - RNA, 22 nt, Artificial Sequence
  LRRK2 RNA guide
ccaaaugugugccaacgagaau

SEQ ID NO: 17481 - RNA, 22 nt, Artificial Sequence
  LRRK2 RNA guide
ccaacgagaaucacaagggaag

SEQ ID NO: 17482 - RNA, 22 nt, Artificial Sequence
  LRRK2 RNA guide
ccaggcucgcgcuucuucuucc

SEQ ID NO: 17483 - RNA, 22 nt, Artificial Sequence
  LRRK2 RNA guide
cccuugugauucucguuggcac

SEQ ID NO: 17484 - RNA, 22 nt, Artificial Sequence
  LRRK2 RNA guide
ccuccaggcucgcgcuucuucu

SEQ ID NO: 17485 - RNA, 22 nt, Artificial Sequence
  LRRK2 RNA guide
ccuugugauucucguuggcaca

SEQ ID NO: 17486 - RNA, 22 nt, Artificial Sequence
  LRRK2 RNA guide
cgagaaucacaagggaagaaga

SEQ ID NO: 17487 - RNA, 22 nt, Artificial Sequence
  LRRK2 RNA guide
cgcgcuucuucuucccuuguga

SEQ ID NO: 17488 - RNA, 22 nt, Artificial Sequence
  LRRK2 RNA guide
cgcuucuucuucccuugugauu

SEQ ID NO: 17489 - RNA, 22 nt, Artificial Sequence
  LRRK2 RNA guide
cuccaggcucgcgcuucuucuu

SEQ ID NO: 17490 - RNA, 22 nt, Artificial Sequence
  LRRK2 RNA guide
cucgcgcuucuucuucccuugu

SEQ ID NO: 17491 - RNA, 22 nt, Artificial Sequence
  LRRK2 RNA guide
cuucccuugugauucucguugg

SEQ ID NO: 17492 - RNA, 22 nt, Artificial Sequence
  LRRK2 RNA guide
cuucuucccuugugauucucgu

SEQ ID NO: 17493 - RNA, 22 nt, Artificial Sequence
  LRRK2 RNA guide
cuucuucuucccuugugauucu

SEQ ID NO: 17494 - RNA, 22 nt, Artificial Sequence
  LRRK2 RNA guide
cuugugauucucguuggcacac

SEQ ID NO: 17495 - RNA, 22 nt, Artificial Sequence
  LRRK2 RNA guide
gaaucacaagggaagaagaagc

SEQ ID NO: 17496 - RNA, 22 nt, Artificial Sequence
  LRRK2 RNA guide
gagaaucacaagggaagaagaa

SEQ ID NO: 17497 - RNA, 22 nt, Artificial Sequence
  LRRK2 RNA guide
gccaacgagaaucacaagggaa

SEQ ID NO: 17498 - RNA, 22 nt, Artificial Sequence
  LRRK2 RNA guide
gcgcuucuucuucccuugugau

SEQ ID NO: 17499 - RNA, 22 nt, Artificial Sequence
  LRRK2 RNA guide
gcucgcgcuucuucuucccuug

SEQ ID NO: 17500 - RNA, 22 nt, Artificial Sequence
  LRRK2 RNA guide
gcuucuucuucccuugugauuc

SEQ ID NO: 17501 - RNA, 22 nt, Artificial Sequence
  LRRK2 RNA guide
ggcucgcgcuucuucuucccuu

SEQ ID NO: 17502 - RNA, 22 nt, Artificial Sequence
  LRRK2 RNA guide
gugccaacgagaaucacaaggg

SEQ ID NO: 17503 - RNA, 22 nt, Artificial Sequence
  LRRK2 RNA guide
gugugccaacgagaaucacaag

SEQ ID NO: 17504 - RNA, 22 nt, Artificial Sequence
  LRRK2 RNA guide
ucacaagggaagaagaagcgcg

SEQ ID NO: 17505 - RNA, 22 nt, Artificial Sequence
  LRRK2 RNA guide
uccaggcucgcgcuucuucuuc

SEQ ID NO: 17506 - RNA, 22 nt, Artificial Sequence
  LRRK2 RNA guide
ucccuugugauucucguuggca

SEQ ID NO: 17507 - RNA, 22 nt, Artificial Sequence
  LRRK2 RNA guide
ucgcgcuucuucuucccuugug

SEQ ID NO: 17508 - RNA, 22 nt, Artificial Sequence
  LRRK2 RNA guide
ucuucccuugugauucucguug

SEQ ID NO: 17509 - RNA, 22 nt, Artificial Sequence
  LRRK2 RNA guide
ucuucuucccuugugauucucg

SEQ ID NO: 17510 - RNA, 22 nt, Artificial Sequence
  LRRK2 RNA guide
ugccaacgagaaucacaaggga

SEQ ID NO: 17511 - RNA, 22 nt, Artificial Sequence
  LRRK2 RNA guide
ugugccaacgagaaucacaagg

SEQ ID NO: 17512 - RNA, 22 nt, Artificial Sequence
  LRRK2 RNA guide
ugugugccaacgagaaucacaa

SEQ ID NO: 17513 - RNA, 22 nt, Artificial Sequence
  LRRK2 RNA guide
uucccuugugauucucguuggc

SEQ ID NO: 17514 - RNA, 22 nt, Artificial Sequence
  LRRK2 RNA guide
uucuucccuugugauucucguu

SEQ ID NO: 17515 - RNA, 22 nt, Artificial Sequence
  LRRK2 RNA guide
uucuucuucccuugugauucuc

SEQ ID NO: 17516 - RNA, 20 nt, Artificial Sequence
  LRRK2 RNA guide
aaacauccaaaugugugcca

SEQ ID NO: 17517 - RNA, 20 nt, Artificial Sequence
  LRRK2 RNA guide
aaaugugugccaaugagaau

SEQ ID NO: 17518 - RNA, 20 nt, Artificial Sequence
  LRRK2 RNA guide
aacauccaaaugugugccaa

SEQ ID NO: 17519 - RNA, 20 nt, Artificial Sequence
  LRRK2 RNA guide
aaugagaaucacaggggaag

SEQ ID NO: 17520 - RNA, 20 nt, Artificial Sequence
  LRRK2 RNA guide
aaugugugccaaugagaauc

SEQ ID NO: 17521 - RNA, 20 nt, Artificial Sequence
  LRRK2 RNA guide
acauccaaaugugugccaau

SEQ ID NO: 17522 - RNA, 20 nt, Artificial Sequence
  LRRK2 RNA guide
agaaacauccaaaugugugc

SEQ ID NO: 17523 - RNA, 20 nt, Artificial Sequence
  LRRK2 RNA guide
auccaaaugugugccaauga

SEQ ID NO: 17524 - RNA, 20 nt, Artificial Sequence
  LRRK2 RNA guide
augagaaucacaggggaaga

SEQ ID NO: 17525 - RNA, 20 nt, Artificial Sequence
  LRRK2 RNA guide
augugugccaaugagaauca

SEQ ID NO: 17526 - RNA, 20 nt, Artificial Sequence
  LRRK2 RNA guide
auucucauuggcacacauuu

SEQ ID NO: 17527 - RNA, 20 nt, Artificial Sequence
  LRRK2 RNA guide
caaaugugugccaaugagaa

SEQ ID NO: 17528 - RNA, 20 nt, Artificial Sequence
  LRRK2 RNA guide
caaugagaaucacaggggaa

SEQ ID NO: 17529 - RNA, 20 nt, Artificial Sequence
  LRRK2 RNA guide
cauccaaaugugugccaaug

SEQ ID NO: 17530 - RNA, 20 nt, Artificial Sequence
  LRRK2 RNA guide
cauuggcacacauuuggaug

SEQ ID NO: 17531 - RNA, 20 nt, Artificial Sequence
  LRRK2 RNA guide
ccaaaugugugccaaugaga

SEQ ID NO: 17532 - RNA, 20 nt, Artificial Sequence
  LRRK2 RNA guide
ccaaugagaaucacagggga

SEQ ID NO: 17533 - RNA, 20 nt, Artificial Sequence
  LRRK2 RNA guide
ccccugugauucucauuggc

SEQ ID NO: 17534 - RNA, 20 nt, Artificial Sequence
  LRRK2 RNA guide
cccugugauucucauuggca

SEQ ID NO: 17535 - RNA, 20 nt, Artificial Sequence
  LRRK2 RNA guide
ccugugauucucauuggcac

SEQ ID NO: 17536 - RNA, 20 nt, Artificial Sequence
  LRRK2 RNA guide
cucauuggcacacauuugga

SEQ ID NO: 17537 - RNA, 20 nt, Artificial Sequence
  LRRK2 RNA guide
cugugauucucauuggcaca

SEQ ID NO: 17538 - RNA, 20 nt, Artificial Sequence
  LRRK2 RNA guide
cuuccccugugauucucauu

SEQ ID NO: 17539 - RNA, 20 nt, Artificial Sequence
  LRRK2 RNA guide
cuucuuccccugugauucuc

SEQ ID NO: 17540 - RNA, 20 nt, Artificial Sequence
  LRRK2 RNA guide
cuucuucuuccccugugauu

SEQ ID NO: 17541 - RNA, 20 nt, Artificial Sequence
  LRRK2 RNA guide
gauucucauuggcacacauu

SEQ ID NO: 17542 - RNA, 20 nt, Artificial Sequence
  LRRK2 RNA guide
gccaaugagaaucacagggg

SEQ ID NO: 17543 - RNA, 20 nt, Artificial Sequence
  LRRK2 RNA guide
gcuucuucuuccccugugau

SEQ ID NO: 17544 - RNA, 20 nt, Artificial Sequence
  LRRK2 RNA guide
gugauucucauuggcacaca

SEQ ID NO: 17545 - RNA, 20 nt, Artificial Sequence
  LRRK2 RNA guide
gugccaaugagaaucacagg

SEQ ID NO: 17546 - RNA, 20 nt, Artificial Sequence
  LRRK2 RNA guide
gugugccaaugagaaucaca

SEQ ID NO: 17547 - RNA, 20 nt, Artificial Sequence
  LRRK2 RNA guide
ucauuggcacacauuuggau

SEQ ID NO: 17548 - RNA, 20 nt, Artificial Sequence
  LRRK2 RNA guide
uccaaaugugugccaaugag

SEQ ID NO: 17549 - RNA, 20 nt, Artificial Sequence
  LRRK2 RNA guide
uccccugugauucucauugg

SEQ ID NO: 17550 - RNA, 20 nt, Artificial Sequence
  LRRK2 RNA guide
ucucauuggcacacauuugg

SEQ ID NO: 17551 - RNA, 20 nt, Artificial Sequence
  LRRK2 RNA guide
ucuuccccugugauucucau

SEQ ID NO: 17552 - RNA, 20 nt, Artificial Sequence
  LRRK2 RNA guide
ucuucuuccccugugauucu

SEQ ID NO: 17553 - RNA, 20 nt, Artificial Sequence
  LRRK2 RNA guide
ugauucucauuggcacacau

SEQ ID NO: 17554 - RNA, 20 nt, Artificial Sequence
  LRRK2 RNA guide
ugccaaugagaaucacaggg

SEQ ID NO: 17555 - RNA, 20 nt, Artificial Sequence
  LRRK2 RNA guide
ugugauucucauuggcacac

SEQ ID NO: 17556 - RNA, 20 nt, Artificial Sequence
  LRRK2 RNA guide
ugugccaaugagaaucacag

SEQ ID NO: 17557 - RNA, 20 nt, Artificial Sequence
  LRRK2 RNA guide
ugugugccaaugagaaucac

SEQ ID NO: 17558 - RNA, 20 nt, Artificial Sequence
  LRRK2 RNA guide
uuccccugugauucucauug

SEQ ID NO: 17559 - RNA, 20 nt, Artificial Sequence
  LRRK2 RNA guide
uucucauuggcacacauuug

SEQ ID NO: 17560 - RNA, 20 nt, Artificial Sequence
  LRRK2 RNA guide
uucuuccccugugauucuca

SEQ ID NO: 17561 - RNA, 20 nt, Artificial Sequence
  LRRK2 RNA guide
uucuucuuccccugugauuc

SEQ ID NO: 17562 - RNA, 21 nt, Artificial Sequence
  LRRK2 RNA guide
aaacauccaaaugugugccaa

SEQ ID NO: 17563 - RNA, 21 nt, Artificial Sequence
  LRRK2 RNA guide
aaaugugugccaaugagaauc

SEQ ID NO: 17564 - RNA, 21 nt, Artificial Sequence
  LRRK2 RNA guide
aacauccaaaugugugccaau

SEQ ID NO: 17565 - RNA, 21 nt, Artificial Sequence
  LRRK2 RNA guide
aaugagaaucacaggggaaga

SEQ ID NO: 17566 - RNA, 21 nt, Artificial Sequence
  LRRK2 RNA guide
aaugugugccaaugagaauca

SEQ ID NO: 17567 - RNA, 21 nt, Artificial Sequence
  LRRK2 RNA guide
acauccaaaugugugccaaug

SEQ ID NO: 17568 - RNA, 21 nt, Artificial Sequence
  LRRK2 RNA guide
agaaacauccaaaugugugcc

SEQ ID NO: 17569 - RNA, 21 nt, Artificial Sequence
  LRRK2 RNA guide
auccaaaugugugccaaugag

SEQ ID NO: 17570 - RNA, 21 nt, Artificial Sequence
  LRRK2 RNA guide
augagaaucacaggggaagaa

SEQ ID NO: 17571 - RNA, 21 nt, Artificial Sequence
  LRRK2 RNA guide
augugugccaaugagaaucac

SEQ ID NO: 17572 - RNA, 21 nt, Artificial Sequence
  LRRK2 RNA guide
auucucauuggcacacauuug

SEQ ID NO: 17573 - RNA, 21 nt, Artificial Sequence
  LRRK2 RNA guide
caaaugugugccaaugagaau

SEQ ID NO: 17574 - RNA, 21 nt, Artificial Sequence
  LRRK2 RNA guide
caaugagaaucacaggggaag

SEQ ID NO: 17575 - RNA, 21 nt, Artificial Sequence
  LRRK2 RNA guide
cagaaacauccaaaugugugc

SEQ ID NO: 17576 - RNA, 21 nt, Artificial Sequence
  LRRK2 RNA guide
cauccaaaugugugccaauga

SEQ ID NO: 17577 - RNA, 21 nt, Artificial Sequence
  LRRK2 RNA guide
cauuggcacacauuuggaugu

SEQ ID NO: 17578 - RNA, 21 nt, Artificial Sequence
  LRRK2 RNA guide
ccaaaugugugccaaugagaa

SEQ ID NO: 17579 - RNA, 21 nt, Artificial Sequence
  LRRK2 RNA guide
ccaaugagaaucacaggggaa

SEQ ID NO: 17580 - RNA, 21 nt, Artificial Sequence
  LRRK2 RNA guide
ccccugugauucucauuggca

SEQ ID NO: 17581 - RNA, 21 nt, Artificial Sequence
  LRRK2 RNA guide
cccugugauucucauuggcac

SEQ ID NO: 17582 - RNA, 21 nt, Artificial Sequence
  LRRK2 RNA guide
ccugugauucucauuggcaca

SEQ ID NO: 17583 - RNA, 21 nt, Artificial Sequence
  LRRK2 RNA guide
cgcuucuucuuccccugugau

SEQ ID NO: 17584 - RNA, 21 nt, Artificial Sequence
  LRRK2 RNA guide
cucauuggcacacauuuggau

SEQ ID NO: 17585 - RNA, 21 nt, Artificial Sequence
  LRRK2 RNA guide
cugugauucucauuggcacac

SEQ ID NO: 17586 - RNA, 21 nt, Artificial Sequence
  LRRK2 RNA guide
cuuccccugugauucucauug

SEQ ID NO: 17587 - RNA, 21 nt, Artificial Sequence
  LRRK2 RNA guide
cuucuuccccugugauucuca

SEQ ID NO: 17588 - RNA, 21 nt, Artificial Sequence
  LRRK2 RNA guide
cuucuucuuccccugugauuc

SEQ ID NO: 17589 - RNA, 21 nt, Artificial Sequence
  LRRK2 RNA guide
gaaacauccaaaugugugcca

SEQ ID NO: 17590 - RNA, 21 nt, Artificial Sequence
  LRRK2 RNA guide
gauucucauuggcacacauuu

SEQ ID NO: 17591 - RNA, 21 nt, Artificial Sequence
  LRRK2 RNA guide
gccaaugagaaucacagggga

SEQ ID NO: 17592 - RNA, 21 nt, Artificial Sequence
  LRRK2 RNA guide
gcuucuucuuccccugugauu

SEQ ID NO: 17593 - RNA, 21 nt, Artificial Sequence
  LRRK2 RNA guide
gugauucucauuggcacacau

SEQ ID NO: 17594 - RNA, 21 nt, Artificial Sequence
  LRRK2 RNA guide
gugccaaugagaaucacaggg

SEQ ID NO: 17595 - RNA, 21 nt, Artificial Sequence
  LRRK2 RNA guide
gugugccaaugagaaucacag

SEQ ID NO: 17596 - RNA, 21 nt, Artificial Sequence
  LRRK2 RNA guide
ucagaaacauccaaaugugug

SEQ ID NO: 17597 - RNA, 21 nt, Artificial Sequence
  LRRK2 RNA guide
ucauuggcacacauuuggaug

SEQ ID NO: 17598 - RNA, 21 nt, Artificial Sequence
  LRRK2 RNA guide
uccaaaugugugccaaugaga

SEQ ID NO: 17599 - RNA, 21 nt, Artificial Sequence
  LRRK2 RNA guide
uccccugugauucucauuggc

SEQ ID NO: 17600 - RNA, 21 nt, Artificial Sequence
  LRRK2 RNA guide
ucucauuggcacacauuugga

SEQ ID NO: 17601 - RNA, 21 nt, Artificial Sequence
  LRRK2 RNA guide
ucuuccccugugauucucauu

SEQ ID NO: 17602 - RNA, 21 nt, Artificial Sequence
  LRRK2 RNA guide
ucuucuuccccugugauucuc

SEQ ID NO: 17603 - RNA, 21 nt, Artificial Sequence
  LRRK2 RNA guide
ugauucucauuggcacacauu

SEQ ID NO: 17604 - RNA, 21 nt, Artificial Sequence
  LRRK2 RNA guide
ugccaaugagaaucacagggg

SEQ ID NO: 17605 - RNA, 21 nt, Artificial Sequence
  LRRK2 RNA guide
ugugauucucauuggcacaca

SEQ ID NO: 17606 - RNA, 21 nt, Artificial Sequence
  LRRK2 RNA guide
ugugccaaugagaaucacagg

SEQ ID NO: 17607 - RNA, 21 nt, Artificial Sequence
  LRRK2 RNA guide
ugugugccaaugagaaucaca

SEQ ID NO: 17608 - RNA, 21 nt, Artificial Sequence
  LRRK2 RNA guide
uuccccugugauucucauugg

SEQ ID NO: 17609 - RNA, 21 nt, Artificial Sequence
  LRRK2 RNA guide
uucucauuggcacacauuugg

SEQ ID NO: 17610 - RNA, 21 nt, Artificial Sequence
  LRRK2 RNA guide
uucuuccccugugauucucau

SEQ ID NO: 17611 - RNA, 21 nt, Artificial Sequence
  LRRK2 RNA guide
uucuucuuccccugugauucu

SEQ ID NO: 17612 - RNA, 22 nt, Artificial Sequence
  LRRK2 RNA guide
aaacauccaaaugugugccaau

SEQ ID NO: 17613 - RNA, 22 nt, Artificial Sequence
  LRRK2 RNA guide
aaaugugugccaaugagaauca

SEQ ID NO: 17614 - RNA, 22 nt, Artificial Sequence
  LRRK2 RNA guide
aacauccaaaugugugccaaug

SEQ ID NO: 17615 - RNA, 22 nt, Artificial Sequence
  LRRK2 RNA guide
aaugagaaucacaggggaagaa

SEQ ID NO: 17616 - RNA, 22 nt, Artificial Sequence
  LRRK2 RNA guide
aaugugugccaaugagaaucac

SEQ ID NO: 17617 - RNA, 22 nt, Artificial Sequence
  LRRK2 RNA guide
acauccaaaugugugccaauga

SEQ ID NO: 17618 - RNA, 22 nt, Artificial Sequence
  LRRK2 RNA guide
agaaacauccaaaugugugcca

SEQ ID NO: 17619 - RNA, 22 nt, Artificial Sequence
  LRRK2 RNA guide
aucagaaacauccaaaugugug

SEQ ID NO: 17620 - RNA, 22 nt, Artificial Sequence
  LRRK2 RNA guide
auccaaaugugugccaaugaga

SEQ ID NO: 17621 - RNA, 22 nt, Artificial Sequence
  LRRK2 RNA guide
augagaaucacaggggaagaag

SEQ ID NO: 17622 - RNA, 22 nt, Artificial Sequence
  LRRK2 RNA guide
augugugccaaugagaaucaca

SEQ ID NO: 17623 - RNA, 22 nt, Artificial Sequence
  LRRK2 RNA guide
auucucauuggcacacauuugg

SEQ ID NO: 17624 - RNA, 22 nt, Artificial Sequence
  LRRK2 RNA guide
caaaugugugccaaugagaauc

SEQ ID NO: 17625 - RNA, 22 nt, Artificial Sequence
  LRRK2 RNA guide
caaugagaaucacaggggaaga

SEQ ID NO: 17626 - RNA, 22 nt, Artificial Sequence
  LRRK2 RNA guide
cagaaacauccaaaugugugcc

SEQ ID NO: 17627 - RNA, 22 nt, Artificial Sequence
  LRRK2 RNA guide
cauccaaaugugugccaaugag

SEQ ID NO: 17628 - RNA, 22 nt, Artificial Sequence
  LRRK2 RNA guide
cauuggcacacauuuggauguu

SEQ ID NO: 17629 - RNA, 22 nt, Artificial Sequence
  LRRK2 RNA guide
ccaaaugugugccaaugagaau

SEQ ID NO: 17630 - RNA, 22 nt, Artificial Sequence
  LRRK2 RNA guide
ccaaugagaaucacaggggaag

SEQ ID NO: 17631 - RNA, 22 nt, Artificial Sequence
  LRRK2 RNA guide
ccccugugauucucauuggcac

SEQ ID NO: 17632 - RNA, 22 nt, Artificial Sequence
  LRRK2 RNA guide
cccugugauucucauuggcaca

SEQ ID NO: 17633 - RNA, 22 nt, Artificial Sequence
  LRRK2 RNA guide
ccugugauucucauuggcacac

SEQ ID NO: 17634 - RNA, 22 nt, Artificial Sequence
  LRRK2 RNA guide
cgcuucuucuuccccugugauu

SEQ ID NO: 17635 - RNA, 22 nt, Artificial Sequence
  LRRK2 RNA guide
cucauuggcacacauuuggaug

SEQ ID NO: 17636 - RNA, 22 nt, Artificial Sequence
  LRRK2 RNA guide
cugugauucucauuggcacaca

SEQ ID NO: 17637 - RNA, 22 nt, Artificial Sequence
  LRRK2 RNA guide
cuuccccugugauucucauugg

SEQ ID NO: 17638 - RNA, 22 nt, Artificial Sequence
  LRRK2 RNA guide
cuucuuccccugugauucucau

SEQ ID NO: 17639 - RNA, 22 nt, Artificial Sequence
  LRRK2 RNA guide
cuucuucuuccccugugauucu

SEQ ID NO: 17640 - RNA, 22 nt, Artificial Sequence
  LRRK2 RNA guide
gaaacauccaaaugugugccaa

SEQ ID NO: 17641 - RNA, 22 nt, Artificial Sequence
  LRRK2 RNA guide
gauucucauuggcacacauuug

SEQ ID NO: 17642 - RNA, 22 nt, Artificial Sequence
  LRRK2 RNA guide
gccaaugagaaucacaggggaa

SEQ ID NO: 17643 - RNA, 22 nt, Artificial Sequence
  LRRK2 RNA guide
gcgcuucuucuuccccugugau

SEQ ID NO: 17644 - RNA, 22 nt, Artificial Sequence
  LRRK2 RNA guide
gcuucuucuuccccugugauuc

SEQ ID NO: 17645 - RNA, 22 nt, Artificial Sequence
  LRRK2 RNA guide
gugauucucauuggcacacauu

SEQ ID NO: 17646 - RNA, 22 nt, Artificial Sequence
  LRRK2 RNA guide
gugccaaugagaaucacagggg

SEQ ID NO: 17647 - RNA, 22 nt, Artificial Sequence
  LRRK2 RNA guide
gugugccaaugagaaucacagg

SEQ ID NO: 17648 - RNA, 22 nt, Artificial Sequence
  LRRK2 RNA guide
ucagaaacauccaaaugugugc

SEQ ID NO: 17649 - RNA, 22 nt, Artificial Sequence
  LRRK2 RNA guide
ucauuggcacacauuuggaugu

SEQ ID NO: 17650 - RNA, 22 nt, Artificial Sequence
  LRRK2 RNA guide
uccaaaugugugccaaugagaa

SEQ ID NO: 17651 - RNA, 22 nt, Artificial Sequence
  LRRK2 RNA guide
uccccugugauucucauuggca

SEQ ID NO: 17652 - RNA, 22 nt, Artificial Sequence
  LRRK2 RNA guide
ucucauuggcacacauuuggau

SEQ ID NO: 17653 - RNA, 22 nt, Artificial Sequence
  LRRK2 RNA guide
ucuuccccugugauucucauug

SEQ ID NO: 17654 - RNA, 22 nt, Artificial Sequence
  LRRK2 RNA guide
ucuucuuccccugugauucuca

SEQ ID NO: 17655 - RNA, 22 nt, Artificial Sequence
  LRRK2 RNA guide
ugauucucauuggcacacauuu

SEQ ID NO: 17656 - RNA, 22 nt, Artificial Sequence
  LRRK2 RNA guide
ugccaaugagaaucacagggga

SEQ ID NO: 17657 - RNA, 22 nt, Artificial Sequence
  LRRK2 RNA guide
ugugauucucauuggcacacau

SEQ ID NO: 17658 - RNA, 22 nt, Artificial Sequence
  LRRK2 RNA guide
ugugccaaugagaaucacaggg

SEQ ID NO: 17659 - RNA, 22 nt, Artificial Sequence
  LRRK2 RNA guide
ugugugccaaugagaaucacag

SEQ ID NO: 17660 - RNA, 22 nt, Artificial Sequence
  LRRK2 RNA guide
uuccccugugauucucauuggc

SEQ ID NO: 17661 - RNA, 22 nt, Artificial Sequence
  LRRK2 RNA guide
uucucauuggcacacauuugga

SEQ ID NO: 17662 - RNA, 22 nt, Artificial Sequence
  LRRK2 RNA guide
uucuuccccugugauucucauu

SEQ ID NO: 17663 - RNA, 22 nt, Artificial Sequence
  LRRK2 RNA guide
uucuucuuccccugugauucuc

SEQ ID NO: 17664 - RNA, 20 nt, Artificial Sequence
  LRRK2 RNA guide
aaacauccaaacgugugcca

SEQ ID NO: 17665 - RNA, 20 nt, Artificial Sequence
  LRRK2 RNA guide
aaacgugugccaacgagaau

SEQ ID NO: 17666 - RNA, 20 nt, Artificial Sequence
  LRRK2 RNA guide
aacauccaaacgugugccaa

SEQ ID NO: 17667 - RNA, 20 nt, Artificial Sequence
  LRRK2 RNA guide
aacgugugccaacgagaauc

SEQ ID NO: 17668 - RNA, 20 nt, Artificial Sequence
  LRRK2 RNA guide
acacguuuggauguuucuga

SEQ ID NO: 17669 - RNA, 20 nt, Artificial Sequence
  LRRK2 RNA guide
acauccaaacgugugccaac

SEQ ID NO: 17670 - RNA, 20 nt, Artificial Sequence
  LRRK2 RNA guide
acgugugccaacgagaauca

SEQ ID NO: 17671 - RNA, 20 nt, Artificial Sequence
  LRRK2 RNA guide
acguuuggauguuucugaug

SEQ ID NO: 17672 - RNA, 20 nt, Artificial Sequence
  LRRK2 RNA guide
agaaacauccaaacgugugc

SEQ ID NO: 17673 - RNA, 20 nt, Artificial Sequence
  LRRK2 RNA guide
aucagaaacauccaaacgug

SEQ ID NO: 17674 - RNA, 20 nt, Artificial Sequence
  LRRK2 RNA guide
auccaaacgugugccaacga

SEQ ID NO: 17675 - RNA, 20 nt, Artificial Sequence
  LRRK2 RNA guide
auucucguuggcacacguuu

SEQ ID NO: 17676 - RNA, 20 nt, Artificial Sequence
  LRRK2 RNA guide
caaacgugugccaacgagaa

SEQ ID NO: 17677 - RNA, 20 nt, Artificial Sequence
  LRRK2 RNA guide
cacacguuuggauguuucug

SEQ ID NO: 17678 - RNA, 20 nt, Artificial Sequence
  LRRK2 RNA guide
cacguuuggauguuucugau

SEQ ID NO: 17679 - RNA, 20 nt, Artificial Sequence
  LRRK2 RNA guide
cagaaacauccaaacgugug

SEQ ID NO: 17680 - RNA, 20 nt, Artificial Sequence
  LRRK2 RNA guide
caucagaaacauccaaacgu

SEQ ID NO: 17681 - RNA, 20 nt, Artificial Sequence
  LRRK2 RNA guide
cauccaaacgugugccaacg

SEQ ID NO: 17682 - RNA, 20 nt, Artificial Sequence
  LRRK2 RNA guide
ccaaacgugugccaacgaga

SEQ ID NO: 17683 - RNA, 20 nt, Artificial Sequence
  LRRK2 RNA guide
ccccugugauucucguuggc

SEQ ID NO: 17684 - RNA, 20 nt, Artificial Sequence
  LRRK2 RNA guide
cccugugauucucguuggca

SEQ ID NO: 17685 - RNA, 20 nt, Artificial Sequence
  LRRK2 RNA guide
cguuggcacacguuuggaug

SEQ ID NO: 17686 - RNA, 20 nt, Artificial Sequence
  LRRK2 RNA guide
cguuuggauguuucugauga

SEQ ID NO: 17687 - RNA, 20 nt, Artificial Sequence
  LRRK2 RNA guide
cucaucagaaacauccaaac

SEQ ID NO: 17688 - RNA, 20 nt, Artificial Sequence
  LRRK2 RNA guide
cucguuggcacacguuugga

SEQ ID NO: 17689 - RNA, 20 nt, Artificial Sequence
  LRRK2 RNA guide
cugugauucucguuggcaca

SEQ ID NO: 17690 - RNA, 20 nt, Artificial Sequence
  LRRK2 RNA guide
cuucucaucagaaacaucca

SEQ ID NO: 17691 - RNA, 20 nt, Artificial Sequence
  LRRK2 RNA guide
gaaacauccaaacgugugcc

SEQ ID NO: 17692 - RNA, 20 nt, Artificial Sequence
  LRRK2 RNA guide
gauucucguuggcacacguu

SEQ ID NO: 17693 - RNA, 20 nt, Artificial Sequence
  LRRK2 RNA guide
gcacacguuuggauguuucu

SEQ ID NO: 17694 - RNA, 20 nt, Artificial Sequence
  LRRK2 RNA guide
ggcacacguuuggauguuuc

SEQ ID NO: 17695 - RNA, 20 nt, Artificial Sequence
  LRRK2 RNA guide
gugauucucguuggcacacg

SEQ ID NO: 17696 - RNA, 20 nt, Artificial Sequence
  LRRK2 RNA guide
guuggcacacguuuggaugu

SEQ ID NO: 17697 - RNA, 20 nt, Artificial Sequence
  LRRK2 RNA guide
ucagaaacauccaaacgugu

SEQ ID NO: 17698 - RNA, 20 nt, Artificial Sequence
  LRRK2 RNA guide
ucaucagaaacauccaaacg

SEQ ID NO: 17699 - RNA, 20 nt, Artificial Sequence
  LRRK2 RNA guide
uccaaacgugugccaacgag

SEQ ID NO: 17700 - RNA, 20 nt, Artificial Sequence
  LRRK2 RNA guide
ucguuggcacacguuuggau

SEQ ID NO: 17701 - RNA, 20 nt, Artificial Sequence
  LRRK2 RNA guide
ucucguuggcacacguuugg

SEQ ID NO: 17702 - RNA, 20 nt, Artificial Sequence
  LRRK2 RNA guide
ugauucucguuggcacacgu

SEQ ID NO: 17703 - RNA, 20 nt, Artificial Sequence
  LRRK2 RNA guide
uggcacacguuuggauguuu

SEQ ID NO: 17704 - RNA, 20 nt, Artificial Sequence
  LRRK2 RNA guide
ugugauucucguuggcacac

SEQ ID NO: 17705 - RNA, 20 nt, Artificial Sequence
  LRRK2 RNA guide
uucucaucagaaacauccaa

SEQ ID NO: 17706 - RNA, 20 nt, Artificial Sequence
  LRRK2 RNA guide
uucucguuggcacacguuug

SEQ ID NO: 17707 - RNA, 20 nt, Artificial Sequence
  LRRK2 RNA guide
uuggcacacguuuggauguu

SEQ ID NO: 17708 - RNA, 21 nt, Artificial Sequence
  LRRK2 RNA guide
aaacauccaaacgugugccaa

SEQ ID NO: 17709 - RNA, 21 nt, Artificial Sequence
  LRRK2 RNA guide
aaacgugugccaacgagaauc

SEQ ID NO: 17710 - RNA, 21 nt, Artificial Sequence
  LRRK2 RNA guide
aacauccaaacgugugccaac

SEQ ID NO: 17711 - RNA, 21 nt, Artificial Sequence
  LRRK2 RNA guide
aacgugugccaacgagaauca

SEQ ID NO: 17712 - RNA, 21 nt, Artificial Sequence
  LRRK2 RNA guide
acacguuuggauguuucugau

SEQ ID NO: 17713 - RNA, 21 nt, Artificial Sequence
  LRRK2 RNA guide
acauccaaacgugugccaacg

SEQ ID NO: 17714 - RNA, 21 nt, Artificial Sequence
  LRRK2 RNA guide
acgugugccaacgagaaucac

SEQ ID NO: 17715 - RNA, 21 nt, Artificial Sequence
  LRRK2 RNA guide
acguuuggauguuucugauga

SEQ ID NO: 17716 - RNA, 21 nt, Artificial Sequence
  LRRK2 RNA guide
agaaacauccaaacgugugcc

SEQ ID NO: 17717 - RNA, 21 nt, Artificial Sequence
  LRRK2 RNA guide
aucagaaacauccaaacgugu

SEQ ID NO: 17718 - RNA, 21 nt, Artificial Sequence
  LRRK2 RNA guide
auccaaacgugugccaacgag

SEQ ID NO: 17719 - RNA, 21 nt, Artificial Sequence
  LRRK2 RNA guide
auucucguuggcacacguuug

SEQ ID NO: 17720 - RNA, 21 nt, Artificial Sequence
  LRRK2 RNA guide
caaacgugugccaacgagaau

SEQ ID NO: 17721 - RNA, 21 nt, Artificial Sequence
  LRRK2 RNA guide
cacacguuuggauguuucuga

SEQ ID NO: 17722 - RNA, 21 nt, Artificial Sequence
  LRRK2 RNA guide
cacguuuggauguuucugaug

SEQ ID NO: 17723 - RNA, 21 nt, Artificial Sequence
  LRRK2 RNA guide
cagaaacauccaaacgugugc

SEQ ID NO: 17724 - RNA, 21 nt, Artificial Sequence
  LRRK2 RNA guide
caucagaaacauccaaacgug

SEQ ID NO: 17725 - RNA, 21 nt, Artificial Sequence
  LRRK2 RNA guide
cauccaaacgugugccaacga

SEQ ID NO: 17726 - RNA, 21 nt, Artificial Sequence
  LRRK2 RNA guide
ccaaacgugugccaacgagaa

SEQ ID NO: 17727 - RNA, 21 nt, Artificial Sequence
  LRRK2 RNA guide
ccccugugauucucguuggca

SEQ ID NO: 17728 - RNA, 21 nt, Artificial Sequence
  LRRK2 RNA guide
cccugugauucucguuggcac

SEQ ID NO: 17729 - RNA, 21 nt, Artificial Sequence
  LRRK2 RNA guide
ccugugauucucguuggcaca

SEQ ID NO: 17730 - RNA, 21 nt, Artificial Sequence
  LRRK2 RNA guide
cguuggcacacguuuggaugu

SEQ ID NO: 17731 - RNA, 21 nt, Artificial Sequence
  LRRK2 RNA guide
cguuuggauguuucugaugag

SEQ ID NO: 17732 - RNA, 21 nt, Artificial Sequence
  LRRK2 RNA guide
cucaucagaaacauccaaacg

SEQ ID NO: 17733 - RNA, 21 nt, Artificial Sequence
  LRRK2 RNA guide
cucguuggcacacguuuggau

SEQ ID NO: 17734 - RNA, 21 nt, Artificial Sequence
  LRRK2 RNA guide
cugugauucucguuggcacac

SEQ ID NO: 17735 - RNA, 21 nt, Artificial Sequence
  LRRK2 RNA guide
cuucucaucagaaacauccaa

SEQ ID NO: 17736 - RNA, 21 nt, Artificial Sequence
  LRRK2 RNA guide
gaaacauccaaacgugugcca

SEQ ID NO: 17737 - RNA, 21 nt, Artificial Sequence
  LRRK2 RNA guide
gauucucguuggcacacguuu

SEQ ID NO: 17738 - RNA, 21 nt, Artificial Sequence
  LRRK2 RNA guide
gcacacguuuggauguuucug

SEQ ID NO: 17739 - RNA, 21 nt, Artificial Sequence
  LRRK2 RNA guide
gcuucucaucagaaacaucca

SEQ ID NO: 17740 - RNA, 21 nt, Artificial Sequence
  LRRK2 RNA guide
ggcacacguuuggauguuucu

SEQ ID NO: 17741 - RNA, 21 nt, Artificial Sequence
  LRRK2 RNA guide
gugauucucguuggcacacgu

SEQ ID NO: 17742 - RNA, 21 nt, Artificial Sequence
  LRRK2 RNA guide
guuggcacacguuuggauguu

SEQ ID NO: 17743 - RNA, 21 nt, Artificial Sequence
  LRRK2 RNA guide
ucagaaacauccaaacgugug

SEQ ID NO: 17744 - RNA, 21 nt, Artificial Sequence
  LRRK2 RNA guide
ucaucagaaacauccaaacgu

SEQ ID NO: 17745 - RNA, 21 nt, Artificial Sequence
  LRRK2 RNA guide
uccaaacgugugccaacgaga

SEQ ID NO: 17746 - RNA, 21 nt, Artificial Sequence
  LRRK2 RNA guide
uccccugugauucucguuggc

SEQ ID NO: 17747 - RNA, 21 nt, Artificial Sequence
  LRRK2 RNA guide
ucguuggcacacguuuggaug

SEQ ID NO: 17748 - RNA, 21 nt, Artificial Sequence
  LRRK2 RNA guide
ucucaucagaaacauccaaac

SEQ ID NO: 17749 - RNA, 21 nt, Artificial Sequence
  LRRK2 RNA guide
ucucguuggcacacguuugga

SEQ ID NO: 17750 - RNA, 21 nt, Artificial Sequence
  LRRK2 RNA guide
ugauucucguuggcacacguu

SEQ ID NO: 17751 - RNA, 21 nt, Artificial Sequence
  LRRK2 RNA guide
ugcuucucaucagaaacaucc

SEQ ID NO: 17752 - RNA, 21 nt, Artificial Sequence
  LRRK2 RNA guide
uggcacacguuuggauguuuc

SEQ ID NO: 17753 - RNA, 21 nt, Artificial Sequence
  LRRK2 RNA guide
ugugauucucguuggcacacg

SEQ ID NO: 17754 - RNA, 21 nt, Artificial Sequence
  LRRK2 RNA guide
uucucaucagaaacauccaaa

SEQ ID NO: 17755 - RNA, 21 nt, Artificial Sequence
  LRRK2 RNA guide
uucucguuggcacacguuugg

SEQ ID NO: 17756 - RNA, 21 nt, Artificial Sequence
  LRRK2 RNA guide
uugcuucucaucagaaacauc

SEQ ID NO: 17757 - RNA, 21 nt, Artificial Sequence
  LRRK2 RNA guide
uuggcacacguuuggauguuu

SEQ ID NO: 17758 - RNA, 22 nt, Artificial Sequence
  LRRK2 RNA guide
aaacauccaaacgugugccaac

SEQ ID NO: 17759 - RNA, 22 nt, Artificial Sequence
  LRRK2 RNA guide
aaacgugugccaacgagaauca

SEQ ID NO: 17760 - RNA, 22 nt, Artificial Sequence
  LRRK2 RNA guide
aacauccaaacgugugccaacg

SEQ ID NO: 17761 - RNA, 22 nt, Artificial Sequence
  LRRK2 RNA guide
aacgugugccaacgagaaucac

SEQ ID NO: 17762 - RNA, 22 nt, Artificial Sequence
  LRRK2 RNA guide
acacguuuggauguuucugaug

SEQ ID NO: 17763 - RNA, 22 nt, Artificial Sequence
  LRRK2 RNA guide
acauccaaacgugugccaacga

SEQ ID NO: 17764 - RNA, 22 nt, Artificial Sequence
  LRRK2 RNA guide
acgugugccaacgagaaucaca

SEQ ID NO: 17765 - RNA, 22 nt, Artificial Sequence
  LRRK2 RNA guide
acguuuggauguuucugaugag

SEQ ID NO: 17766 - RNA, 22 nt, Artificial Sequence
  LRRK2 RNA guide
agaaacauccaaacgugugcca

SEQ ID NO: 17767 - RNA, 22 nt, Artificial Sequence
  LRRK2 RNA guide
aucagaaacauccaaacgugug

SEQ ID NO: 17768 - RNA, 22 nt, Artificial Sequence
  LRRK2 RNA guide
auccaaacgugugccaacgaga

SEQ ID NO: 17769 - RNA, 22 nt, Artificial Sequence
  LRRK2 RNA guide
auucucguuggcacacguuugg

SEQ ID NO: 17770 - RNA, 22 nt, Artificial Sequence
  LRRK2 RNA guide
caaacgugugccaacgagaauc

SEQ ID NO: 17771 - RNA, 22 nt, Artificial Sequence
  LRRK2 RNA guide
cacacguuuggauguuucugau

SEQ ID NO: 17772 - RNA, 22 nt, Artificial Sequence
  LRRK2 RNA guide
cacguuuggauguuucugauga

SEQ ID NO: 17773 - RNA, 22 nt, Artificial Sequence
  LRRK2 RNA guide
cagaaacauccaaacgugugcc

SEQ ID NO: 17774 - RNA, 22 nt, Artificial Sequence
  LRRK2 RNA guide
caucagaaacauccaaacgugu

SEQ ID NO: 17775 - RNA, 22 nt, Artificial Sequence
  LRRK2 RNA guide
cauccaaacgugugccaacgag

SEQ ID NO: 17776 - RNA, 22 nt, Artificial Sequence
  LRRK2 RNA guide
ccaaacgugugccaacgagaau

SEQ ID NO: 17777 - RNA, 22 nt, Artificial Sequence
  LRRK2 RNA guide
ccccugugauucucguuggcac

SEQ ID NO: 17778 - RNA, 22 nt, Artificial Sequence
  LRRK2 RNA guide
cccugugauucucguuggcaca

SEQ ID NO: 17779 - RNA, 22 nt, Artificial Sequence
  LRRK2 RNA guide
ccugugauucucguuggcacac

SEQ ID NO: 17780 - RNA, 22 nt, Artificial Sequence
  LRRK2 RNA guide
cguuggcacacguuuggauguu

SEQ ID NO: 17781 - RNA, 22 nt, Artificial Sequence
  LRRK2 RNA guide
cguuuggauguuucugaugaga

SEQ ID NO: 17782 - RNA, 22 nt, Artificial Sequence
  LRRK2 RNA guide
cucaucagaaacauccaaacgu

SEQ ID NO: 17783 - RNA, 22 nt, Artificial Sequence
  LRRK2 RNA guide
cucguuggcacacguuuggaug

SEQ ID NO: 17784 - RNA, 22 nt, Artificial Sequence
  LRRK2 RNA guide
cugugauucucguuggcacacg

SEQ ID NO: 17785 - RNA, 22 nt, Artificial Sequence
  LRRK2 RNA guide
cuucucaucagaaacauccaaa

SEQ ID NO: 17786 - RNA, 22 nt, Artificial Sequence
  LRRK2 RNA guide
gaaacauccaaacgugugccaa

SEQ ID NO: 17787 - RNA, 22 nt, Artificial Sequence
  LRRK2 RNA guide
gauucucguuggcacacguuug

SEQ ID NO: 17788 - RNA, 22 nt, Artificial Sequence
  LRRK2 RNA guide
gcacacguuuggauguuucuga

SEQ ID NO: 17789 - RNA, 22 nt, Artificial Sequence
  LRRK2 RNA guide
gcuucucaucagaaacauccaa

SEQ ID NO: 17790 - RNA, 22 nt, Artificial Sequence
  LRRK2 RNA guide
ggcacacguuuggauguuucug

SEQ ID NO: 17791 - RNA, 22 nt, Artificial Sequence
  LRRK2 RNA guide
gugauucucguuggcacacguu

SEQ ID NO: 17792 - RNA, 22 nt, Artificial Sequence
  LRRK2 RNA guide
guugcuucucaucagaaacauc

SEQ ID NO: 17793 - RNA, 22 nt, Artificial Sequence
  LRRK2 RNA guide
guuggcacacguuuggauguuu

SEQ ID NO: 17794 - RNA, 22 nt, Artificial Sequence
  LRRK2 RNA guide
ucagaaacauccaaacgugugc

SEQ ID NO: 17795 - RNA, 22 nt, Artificial Sequence
  LRRK2 RNA guide
ucaucagaaacauccaaacgug

SEQ ID NO: 17796 - RNA, 22 nt, Artificial Sequence
  LRRK2 RNA guide
uccaaacgugugccaacgagaa

SEQ ID NO: 17797 - RNA, 22 nt, Artificial Sequence
  LRRK2 RNA guide
uccccugugauucucguuggca

SEQ ID NO: 17798 - RNA, 22 nt, Artificial Sequence
  LRRK2 RNA guide
ucguuggcacacguuuggaugu

SEQ ID NO: 17799 - RNA, 22 nt, Artificial Sequence
  LRRK2 RNA guide
ucucaucagaaacauccaaacg

SEQ ID NO: 17800 - RNA, 22 nt, Artificial Sequence
  LRRK2 RNA guide
ucucguuggcacacguuuggau

SEQ ID NO: 17801 - RNA, 22 nt, Artificial Sequence
  LRRK2 RNA guide
ugauucucguuggcacacguuu

SEQ ID NO: 17802 - RNA, 22 nt, Artificial Sequence
  LRRK2 RNA guide
ugcuucucaucagaaacaucca

SEQ ID NO: 17803 - RNA, 22 nt, Artificial Sequence
  LRRK2 RNA guide
uggcacacguuuggauguuucu

SEQ ID NO: 17804 - RNA, 22 nt, Artificial Sequence
  LRRK2 RNA guide
ugugauucucguuggcacacgu

SEQ ID NO: 17805 - RNA, 22 nt, Artificial Sequence
  LRRK2 RNA guide
uuccccugugauucucguuggc

SEQ ID NO: 17806 - RNA, 22 nt, Artificial Sequence
  LRRK2 RNA guide
uucucaucagaaacauccaaac

SEQ ID NO: 17807 - RNA, 22 nt, Artificial Sequence
  LRRK2 RNA guide
uucucguuggcacacguuugga

SEQ ID NO: 17808 - RNA, 22 nt, Artificial Sequence
  LRRK2 RNA guide
uugcuucucaucagaaacaucc

SEQ ID NO: 17809 - RNA, 22 nt, Artificial Sequence
  LRRK2 RNA guide
uuggcacacguuuggauguuuc

SEQ ID NO: 17810 - RNA, 20 nt, Artificial Sequence
  LRRK2 RNA guide
aaacccaaaugugugccaac

SEQ ID NO: 17811 - RNA, 20 nt, Artificial Sequence
  LRRK2 RNA guide
aacccaaaugugugccaacg

SEQ ID NO: 17812 - RNA, 20 nt, Artificial Sequence
  LRRK2 RNA guide
acacauuuggguuucugaug

SEQ ID NO: 17813 - RNA, 20 nt, Artificial Sequence
  LRRK2 RNA guide
acauuuggguuucugaugag

SEQ ID NO: 17814 - RNA, 20 nt, Artificial Sequence
  LRRK2 RNA guide
acccaaaugugugccaacga

SEQ ID NO: 17815 - RNA, 20 nt, Artificial Sequence
  LRRK2 RNA guide
agaaacccaaaugugugcca

SEQ ID NO: 17816 - RNA, 20 nt, Artificial Sequence
  LRRK2 RNA guide
aucagaaacccaaaugugug

SEQ ID NO: 17817 - RNA, 20 nt, Artificial Sequence
  LRRK2 RNA guide
auucucguuggcacacauuu

SEQ ID NO: 17818 - RNA, 20 nt, Artificial Sequence
  LRRK2 RNA guide
auuuggguuucugaugagaa

SEQ ID NO: 17819 - RNA, 20 nt, Artificial Sequence
  LRRK2 RNA guide
cacacauuuggguuucugau

SEQ ID NO: 17820 - RNA, 20 nt, Artificial Sequence
  LRRK2 RNA guide
cacauuuggguuucugauga

SEQ ID NO: 17821 - RNA, 20 nt, Artificial Sequence
  LRRK2 RNA guide
cagaaacccaaaugugugcc

SEQ ID NO: 17822 - RNA, 20 nt, Artificial Sequence
  LRRK2 RNA guide
caucagaaacccaaaugugu

SEQ ID NO: 17823 - RNA, 20 nt, Artificial Sequence
  LRRK2 RNA guide
cauuuggguuucugaugaga

SEQ ID NO: 17824 - RNA, 20 nt, Artificial Sequence
  LRRK2 RNA guide
cccaaaugugugccaacgag

SEQ ID NO: 17825 - RNA, 20 nt, Artificial Sequence
  LRRK2 RNA guide
cguugcuucucaucagaaac

SEQ ID NO: 17826 - RNA, 20 nt, Artificial Sequence
  LRRK2 RNA guide
cguuggcacacauuuggguu

SEQ ID NO: 17827 - RNA, 20 nt, Artificial Sequence
  LRRK2 RNA guide
cucaucagaaacccaaaugu

SEQ ID NO: 17828 - RNA, 20 nt, Artificial Sequence
  LRRK2 RNA guide
cucguuggcacacauuuggg

SEQ ID NO: 17829 - RNA, 20 nt, Artificial Sequence
  LRRK2 RNA guide
cuucucaucagaaacccaaa

SEQ ID NO: 17830 - RNA, 20 nt, Artificial Sequence
  LRRK2 RNA guide
gaaacccaaaugugugccaa

SEQ ID NO: 17831 - RNA, 20 nt, Artificial Sequence
  LRRK2 RNA guide
gauucucguuggcacacauu

SEQ ID NO: 17832 - RNA, 20 nt, Artificial Sequence
  LRRK2 RNA guide
gcacacauuuggguuucuga

SEQ ID NO: 17833 - RNA, 20 nt, Artificial Sequence
  LRRK2 RNA guide
gcguugcuucucaucagaaa

SEQ ID NO: 17834 - RNA, 20 nt, Artificial Sequence
  LRRK2 RNA guide
gcuucucaucagaaacccaa

SEQ ID NO: 17835 - RNA, 20 nt, Artificial Sequence
  LRRK2 RNA guide
ggcacacauuuggguuucug

SEQ ID NO: 17836 - RNA, 20 nt, Artificial Sequence
  LRRK2 RNA guide
ggguuucugaugagaagcaa

SEQ ID NO: 17837 - RNA, 20 nt, Artificial Sequence
  LRRK2 RNA guide
guugcuucucaucagaaacc

SEQ ID NO: 17838 - RNA, 20 nt, Artificial Sequence
  LRRK2 RNA guide
guuggcacacauuuggguuu

SEQ ID NO: 17839 - RNA, 20 nt, Artificial Sequence
  LRRK2 RNA guide
ucagaaacccaaaugugugc

SEQ ID NO: 17840 - RNA, 20 nt, Artificial Sequence
  LRRK2 RNA guide
ucaucagaaacccaaaugug

SEQ ID NO: 17841 - RNA, 20 nt, Artificial Sequence
  LRRK2 RNA guide
ucguuggcacacauuugggu

SEQ ID NO: 17842 - RNA, 20 nt, Artificial Sequence
  LRRK2 RNA guide
ucucaucagaaacccaaaug

SEQ ID NO: 17843 - RNA, 20 nt, Artificial Sequence
  LRRK2 RNA guide
ucucguuggcacacauuugg

SEQ ID NO: 17844 - RNA, 20 nt, Artificial Sequence
  LRRK2 RNA guide
ugauucucguuggcacacau

SEQ ID NO: 17845 - RNA, 20 nt, Artificial Sequence
  LRRK2 RNA guide
ugcguugcuucucaucagaa

SEQ ID NO: 17846 - RNA, 20 nt, Artificial Sequence
  LRRK2 RNA guide
ugcuucucaucagaaaccca

SEQ ID NO: 17847 - RNA, 20 nt, Artificial Sequence
  LRRK2 RNA guide
uggcacacauuuggguuucu

SEQ ID NO: 17848 - RNA, 20 nt, Artificial Sequence
  LRRK2 RNA guide
uggguuucugaugagaagca

SEQ ID NO: 17849 - RNA, 20 nt, Artificial Sequence
  LRRK2 RNA guide
uucucaucagaaacccaaau

SEQ ID NO: 17850 - RNA, 20 nt, Artificial Sequence
  LRRK2 RNA guide
uucucguuggcacacauuug

SEQ ID NO: 17851 - RNA, 20 nt, Artificial Sequence
  LRRK2 RNA guide
uugcguugcuucucaucaga

SEQ ID NO: 17852 - RNA, 20 nt, Artificial Sequence
  LRRK2 RNA guide
uugcuucucaucagaaaccc

SEQ ID NO: 17853 - RNA, 20 nt, Artificial Sequence
  LRRK2 RNA guide
uuggcacacauuuggguuuc

SEQ ID NO: 17854 - RNA, 20 nt, Artificial Sequence
  LRRK2 RNA guide
uuggguuucugaugagaagc

SEQ ID NO: 17855 - RNA, 20 nt, Artificial Sequence
  LRRK2 RNA guide
uuugcguugcuucucaucag

SEQ ID NO: 17856 - RNA, 20 nt, Artificial Sequence
  LRRK2 RNA guide
uuuggguuucugaugagaag

SEQ ID NO: 17857 - RNA, 21 nt, Artificial Sequence
  LRRK2 RNA guide
aaacccaaaugugugccaacg

SEQ ID NO: 17858 - RNA, 21 nt, Artificial Sequence
  LRRK2 RNA guide
aacccaaaugugugccaacga

SEQ ID NO: 17859 - RNA, 21 nt, Artificial Sequence
  LRRK2 RNA guide
acacauuuggguuucugauga

SEQ ID NO: 17860 - RNA, 21 nt, Artificial Sequence
  LRRK2 RNA guide
acauuuggguuucugaugaga

SEQ ID NO: 17861 - RNA, 21 nt, Artificial Sequence
  LRRK2 RNA guide
acccaaaugugugccaacgag

SEQ ID NO: 17862 - RNA, 21 nt, Artificial Sequence
  LRRK2 RNA guide
agaaacccaaaugugugccaa

SEQ ID NO: 17863 - RNA, 21 nt, Artificial Sequence
  LRRK2 RNA guide
aucagaaacccaaaugugugc

SEQ ID NO: 17864 - RNA, 21 nt, Artificial Sequence
  LRRK2 RNA guide
auucucguuggcacacauuug

SEQ ID NO: 17865 - RNA, 21 nt, Artificial Sequence
  LRRK2 RNA guide
auuuggguuucugaugagaag

SEQ ID NO: 17866 - RNA, 21 nt, Artificial Sequence
  LRRK2 RNA guide
cacacauuuggguuucugaug

SEQ ID NO: 17867 - RNA, 21 nt, Artificial Sequence
  LRRK2 RNA guide
cacauuuggguuucugaugag

SEQ ID NO: 17868 - RNA, 21 nt, Artificial Sequence
  LRRK2 RNA guide
cagaaacccaaaugugugcca

SEQ ID NO: 17869 - RNA, 21 nt, Artificial Sequence
  LRRK2 RNA guide
caucagaaacccaaaugugug

SEQ ID NO: 17870 - RNA, 21 nt, Artificial Sequence
  LRRK2 RNA guide
cauuuggguuucugaugagaa

SEQ ID NO: 17871 - RNA, 21 nt, Artificial Sequence
  LRRK2 RNA guide
cccaaaugugugccaacgaga

SEQ ID NO: 17872 - RNA, 21 nt, Artificial Sequence
  LRRK2 RNA guide
cguugcuucucaucagaaacc

SEQ ID NO: 17873 - RNA, 21 nt, Artificial Sequence
  LRRK2 RNA guide
cguuggcacacauuuggguuu

SEQ ID NO: 17874 - RNA, 21 nt, Artificial Sequence
  LRRK2 RNA guide
cucaucagaaacccaaaugug

SEQ ID NO: 17875 - RNA, 21 nt, Artificial Sequence
  LRRK2 RNA guide
cucguuggcacacauuugggu

SEQ ID NO: 17876 - RNA, 21 nt, Artificial Sequence
  LRRK2 RNA guide
cuucucaucagaaacccaaau

SEQ ID NO: 17877 - RNA, 21 nt, Artificial Sequence
  LRRK2 RNA guide
cuuugcguugcuucucaucag

SEQ ID NO: 17878 - RNA, 21 nt, Artificial Sequence
  LRRK2 RNA guide
gaaacccaaaugugugccaac

SEQ ID NO: 17879 - RNA, 21 nt, Artificial Sequence
  LRRK2 RNA guide
gauucucguuggcacacauuu

SEQ ID NO: 17880 - RNA, 21 nt, Artificial Sequence
  LRRK2 RNA guide
gcacacauuuggguuucugau

SEQ ID NO: 17881 - RNA, 21 nt, Artificial Sequence
  LRRK2 RNA guide
gcguugcuucucaucagaaac

SEQ ID NO: 17882 - RNA, 21 nt, Artificial Sequence
  LRRK2 RNA guide
gcuucucaucagaaacccaaa

SEQ ID NO: 17883 - RNA, 21 nt, Artificial Sequence
  LRRK2 RNA guide
ggcacacauuuggguuucuga

SEQ ID NO: 17884 - RNA, 21 nt, Artificial Sequence
  LRRK2 RNA guide
ggguuucugaugagaagcaac

SEQ ID NO: 17885 - RNA, 21 nt, Artificial Sequence
  LRRK2 RNA guide
gugauucucguuggcacacau

SEQ ID NO: 17886 - RNA, 21 nt, Artificial Sequence
  LRRK2 RNA guide
guugcuucucaucagaaaccc

SEQ ID NO: 17887 - RNA, 21 nt, Artificial Sequence
  LRRK2 RNA guide
guuggcacacauuuggguuuc

SEQ ID NO: 17888 - RNA, 21 nt, Artificial Sequence
  LRRK2 RNA guide
ucagaaacccaaaugugugcc

SEQ ID NO: 17889 - RNA, 21 nt, Artificial Sequence
  LRRK2 RNA guide
ucaucagaaacccaaaugugu

SEQ ID NO: 17890 - RNA, 21 nt, Artificial Sequence
  LRRK2 RNA guide
ucguuggcacacauuuggguu

SEQ ID NO: 17891 - RNA, 21 nt, Artificial Sequence
  LRRK2 RNA guide
ucucaucagaaacccaaaugu

SEQ ID NO: 17892 - RNA, 21 nt, Artificial Sequence
  LRRK2 RNA guide
ucucguuggcacacauuuggg

SEQ ID NO: 17893 - RNA, 21 nt, Artificial Sequence
  LRRK2 RNA guide
ugauucucguuggcacacauu

SEQ ID NO: 17894 - RNA, 21 nt, Artificial Sequence
  LRRK2 RNA guide
ugcguugcuucucaucagaaa

SEQ ID NO: 17895 - RNA, 21 nt, Artificial Sequence
  LRRK2 RNA guide
ugcuucucaucagaaacccaa

SEQ ID NO: 17896 - RNA, 21 nt, Artificial Sequence
  LRRK2 RNA guide
uggcacacauuuggguuucug

SEQ ID NO: 17897 - RNA, 21 nt, Artificial Sequence
  LRRK2 RNA guide
uggguuucugaugagaagcaa

SEQ ID NO: 17898 - RNA, 21 nt, Artificial Sequence
  LRRK2 RNA guide
uucucaucagaaacccaaaug

SEQ ID NO: 17899 - RNA, 21 nt, Artificial Sequence
  LRRK2 RNA guide
uucucguuggcacacauuugg

SEQ ID NO: 17900 - RNA, 21 nt, Artificial Sequence
  LRRK2 RNA guide
uugcguugcuucucaucagaa

SEQ ID NO: 17901 - RNA, 21 nt, Artificial Sequence
  LRRK2 RNA guide
uugcuucucaucagaaaccca

SEQ ID NO: 17902 - RNA, 21 nt, Artificial Sequence
  LRRK2 RNA guide
uuggcacacauuuggguuucu

SEQ ID NO: 17903 - RNA, 21 nt, Artificial Sequence
  LRRK2 RNA guide
uuggguuucugaugagaagca

SEQ ID NO: 17904 - RNA, 21 nt, Artificial Sequence
  LRRK2 RNA guide
uuugcguugcuucucaucaga

SEQ ID NO: 17905 - RNA, 21 nt, Artificial Sequence
  LRRK2 RNA guide
uuuggguuucugaugagaagc

SEQ ID NO: 17906 - RNA, 22 nt, Artificial Sequence
  LRRK2 RNA guide
aaacccaaaugugugccaacga

SEQ ID NO: 17907 - RNA, 22 nt, Artificial Sequence
  LRRK2 RNA guide
aacccaaaugugugccaacgag

SEQ ID NO: 17908 - RNA, 22 nt, Artificial Sequence
  LRRK2 RNA guide
acacauuuggguuucugaugag

SEQ ID NO: 17909 - RNA, 22 nt, Artificial Sequence
  LRRK2 RNA guide
acauuuggguuucugaugagaa

SEQ ID NO: 17910 - RNA, 22 nt, Artificial Sequence
  LRRK2 RNA guide
acccaaaugugugccaacgaga

SEQ ID NO: 17911 - RNA, 22 nt, Artificial Sequence
  LRRK2 RNA guide
agaaacccaaaugugugccaac

SEQ ID NO: 17912 - RNA, 22 nt, Artificial Sequence
  LRRK2 RNA guide
aucagaaacccaaaugugugcc

SEQ ID NO: 17913 - RNA, 22 nt, Artificial Sequence
  LRRK2 RNA guide
auucucguuggcacacauuugg

SEQ ID NO: 17914 - RNA, 22 nt, Artificial Sequence
  LRRK2 RNA guide
auuuggguuucugaugagaagc

SEQ ID NO: 17915 - RNA, 22 nt, Artificial Sequence
  LRRK2 RNA guide
cacacauuuggguuucugauga

SEQ ID NO: 17916 - RNA, 22 nt, Artificial Sequence
  LRRK2 RNA guide
cacauuuggguuucugaugaga

SEQ ID NO: 17917 - RNA, 22 nt, Artificial Sequence
  LRRK2 RNA guide
cagaaacccaaaugugugccaa

SEQ ID NO: 17918 - RNA, 22 nt, Artificial Sequence
  LRRK2 RNA guide
caucagaaacccaaaugugugc

SEQ ID NO: 17919 - RNA, 22 nt, Artificial Sequence
  LRRK2 RNA guide
cauuuggguuucugaugagaag

SEQ ID NO: 17920 - RNA, 22 nt, Artificial Sequence
  LRRK2 RNA guide
cccaaaugugugccaacgagaa

SEQ ID NO: 17921 - RNA, 22 nt, Artificial Sequence
  LRRK2 RNA guide
cguugcuucucaucagaaaccc

SEQ ID NO: 17922 - RNA, 22 nt, Artificial Sequence
  LRRK2 RNA guide
cguuggcacacauuuggguuuc

SEQ ID NO: 17923 - RNA, 22 nt, Artificial Sequence
  LRRK2 RNA guide
cucaucagaaacccaaaugugu

SEQ ID NO: 17924 - RNA, 22 nt, Artificial Sequence
  LRRK2 RNA guide
cucguuggcacacauuuggguu

SEQ ID NO: 17925 - RNA, 22 nt, Artificial Sequence
  LRRK2 RNA guide
cuucucaucagaaacccaaaug

SEQ ID NO: 17926 - RNA, 22 nt, Artificial Sequence
  LRRK2 RNA guide
cuuugcguugcuucucaucaga

SEQ ID NO: 17927 - RNA, 22 nt, Artificial Sequence
  LRRK2 RNA guide
gaaacccaaaugugugccaacg

SEQ ID NO: 17928 - RNA, 22 nt, Artificial Sequence
  LRRK2 RNA guide
gauucucguuggcacacauuug

SEQ ID NO: 17929 - RNA, 22 nt, Artificial Sequence
  LRRK2 RNA guide
gcacacauuuggguuucugaug

SEQ ID NO: 17930 - RNA, 22 nt, Artificial Sequence
  LRRK2 RNA guide
gcguugcuucucaucagaaacc

SEQ ID NO: 17931 - RNA, 22 nt, Artificial Sequence
  LRRK2 RNA guide
gcuucucaucagaaacccaaau

SEQ ID NO: 17932 - RNA, 22 nt, Artificial Sequence
  LRRK2 RNA guide
gcuuugcguugcuucucaucag

SEQ ID NO: 17933 - RNA, 22 nt, Artificial Sequence
  LRRK2 RNA guide
ggcacacauuuggguuucugau

SEQ ID NO: 17934 - RNA, 22 nt, Artificial Sequence
  LRRK2 RNA guide
ggguuucugaugagaagcaacg

SEQ ID NO: 17935 - RNA, 22 nt, Artificial Sequence
  LRRK2 RNA guide
gugauucucguuggcacacauu

SEQ ID NO: 17936 - RNA, 22 nt, Artificial Sequence
  LRRK2 RNA guide
guugcuucucaucagaaaccca

SEQ ID NO: 17937 - RNA, 22 nt, Artificial Sequence
  LRRK2 RNA guide
guuggcacacauuuggguuucu

SEQ ID NO: 17938 - RNA, 22 nt, Artificial Sequence
  LRRK2 RNA guide
ucagaaacccaaaugugugcca

SEQ ID NO: 17939 - RNA, 22 nt, Artificial Sequence
  LRRK2 RNA guide
ucaucagaaacccaaaugugug

SEQ ID NO: 17940 - RNA, 22 nt, Artificial Sequence
  LRRK2 RNA guide
ucguuggcacacauuuggguuu

SEQ ID NO: 17941 - RNA, 22 nt, Artificial Sequence
  LRRK2 RNA guide
ucucaucagaaacccaaaugug

SEQ ID NO: 17942 - RNA, 22 nt, Artificial Sequence
  LRRK2 RNA guide
ucucguuggcacacauuugggu

SEQ ID NO: 17943 - RNA, 22 nt, Artificial Sequence
  LRRK2 RNA guide
ugauucucguuggcacacauuu

SEQ ID NO: 17944 - RNA, 22 nt, Artificial Sequence
  LRRK2 RNA guide
ugcguugcuucucaucagaaac

SEQ ID NO: 17945 - RNA, 22 nt, Artificial Sequence
  LRRK2 RNA guide
ugcuucucaucagaaacccaaa

SEQ ID NO: 17946 - RNA, 22 nt, Artificial Sequence
  LRRK2 RNA guide
uggcacacauuuggguuucuga

SEQ ID NO: 17947 - RNA, 22 nt, Artificial Sequence
  LRRK2 RNA guide
uggguuucugaugagaagcaac

SEQ ID NO: 17948 - RNA, 22 nt, Artificial Sequence
  LRRK2 RNA guide
ugugauucucguuggcacacau

SEQ ID NO: 17949 - RNA, 22 nt, Artificial Sequence
  LRRK2 RNA guide
uucucaucagaaacccaaaugu

SEQ ID NO: 17950 - RNA, 22 nt, Artificial Sequence
  LRRK2 RNA guide
uucucguuggcacacauuuggg

SEQ ID NO: 17951 - RNA, 22 nt, Artificial Sequence
  LRRK2 RNA guide
uugcguugcuucucaucagaaa

SEQ ID NO: 17952 - RNA, 22 nt, Artificial Sequence
  LRRK2 RNA guide
uugcuucucaucagaaacccaa

SEQ ID NO: 17953 - RNA, 22 nt, Artificial Sequence
  LRRK2 RNA guide
uuggcacacauuuggguuucug

SEQ ID NO: 17954 - RNA, 22 nt, Artificial Sequence
  LRRK2 RNA guide
uuggguuucugaugagaagcaa

SEQ ID NO: 17955 - RNA, 22 nt, Artificial Sequence
  LRRK2 RNA guide
uuugcguugcuucucaucagaa

SEQ ID NO: 17956 - RNA, 22 nt, Artificial Sequence
  LRRK2 RNA guide
uuuggguuucugaugagaagca

SEQ ID NO: 17957 - RNA, 20 nt, Artificial Sequence
  LRRK2 RNA guide
aaagccugcaugagugaaau

SEQ ID NO: 17958 - RNA, 20 nt, Artificial Sequence
  LRRK2 RNA guide
aacgcaaagccugcaugagu

SEQ ID NO: 17959 - RNA, 20 nt, Artificial Sequence
  LRRK2 RNA guide
aagcaacgcaaagccugcau

SEQ ID NO: 17960 - RNA, 20 nt, Artificial Sequence
  LRRK2 RNA guide
aagccugcaugagugaaauc

SEQ ID NO: 17961 - RNA, 20 nt, Artificial Sequence
  LRRK2 RNA guide
acgcaaagccugcaugagug

SEQ ID NO: 17962 - RNA, 20 nt, Artificial Sequence
  LRRK2 RNA guide
agcaacgcaaagccugcaug

SEQ ID NO: 17963 - RNA, 20 nt, Artificial Sequence
  LRRK2 RNA guide
agccugcaugagugaaauca

SEQ ID NO: 17964 - RNA, 20 nt, Artificial Sequence
  LRRK2 RNA guide
aggaguuccuuggugauuuc

SEQ ID NO: 17965 - RNA, 20 nt, Artificial Sequence
  LRRK2 RNA guide
agugaaaucaccaaggaacu

SEQ ID NO: 17966 - RNA, 20 nt, Artificial Sequence
  LRRK2 RNA guide
aguuccuuggugauuucacu

SEQ ID NO: 17967 - RNA, 20 nt, Artificial Sequence
  LRRK2 RNA guide
augagugaaaucaccaagga

SEQ ID NO: 17968 - RNA, 20 nt, Artificial Sequence
  LRRK2 RNA guide
auuucacucaugcaggcuuu

SEQ ID NO: 17969 - RNA, 20 nt, Artificial Sequence
  LRRK2 RNA guide
caaagccugcaugagugaaa

SEQ ID NO: 17970 - RNA, 20 nt, Artificial Sequence
  LRRK2 RNA guide
caacgcaaagccugcaugag

SEQ ID NO: 17971 - RNA, 20 nt, Artificial Sequence
  LRRK2 RNA guide
caggaguuccuuggugauuu

SEQ ID NO: 17972 - RNA, 20 nt, Artificial Sequence
  LRRK2 RNA guide
caugagugaaaucaccaagg

SEQ ID NO: 17973 - RNA, 20 nt, Artificial Sequence
  LRRK2 RNA guide
ccugcaugagugaaaucacc

SEQ ID NO: 17974 - RNA, 20 nt, Artificial Sequence
  LRRK2 RNA guide
ccuuggugauuucacucaug

SEQ ID NO: 17975 - RNA, 20 nt, Artificial Sequence
  LRRK2 RNA guide
cgcaaagccugcaugaguga

SEQ ID NO: 17976 - RNA, 20 nt, Artificial Sequence
  LRRK2 RNA guide
cugcaugagugaaaucacca

SEQ ID NO: 17977 - RNA, 20 nt, Artificial Sequence
  LRRK2 RNA guide
cuuggugauuucacucaugc

SEQ ID NO: 17978 - RNA, 20 nt, Artificial Sequence
  LRRK2 RNA guide
gagugaaaucaccaaggaac

SEQ ID NO: 17979 - RNA, 20 nt, Artificial Sequence
  LRRK2 RNA guide
gaguuccuuggugauuucac

SEQ ID NO: 17980 - RNA, 20 nt, Artificial Sequence
  LRRK2 RNA guide
gauuucacucaugcaggcuu

SEQ ID NO: 17981 - RNA, 20 nt, Artificial Sequence
  LRRK2 RNA guide
gcaaagccugcaugagugaa

SEQ ID NO: 17982 - RNA, 20 nt, Artificial Sequence
  LRRK2 RNA guide
gcaacgcaaagccugcauga

SEQ ID NO: 17983 - RNA, 20 nt, Artificial Sequence
  LRRK2 RNA guide
gcaugagugaaaucaccaag

SEQ ID NO: 17984 - RNA, 20 nt, Artificial Sequence
  LRRK2 RNA guide
gccugcaugagugaaaucac

SEQ ID NO: 17985 - RNA, 20 nt, Artificial Sequence
  LRRK2 RNA guide
ggaguuccuuggugauuuca

SEQ ID NO: 17986 - RNA, 20 nt, Artificial Sequence
  LRRK2 RNA guide
ggugauuucacucaugcagg

SEQ ID NO: 17987 - RNA, 20 nt, Artificial Sequence
  LRRK2 RNA guide
gugaaaucaccaaggaacuc

SEQ ID NO: 17988 - RNA, 20 nt, Artificial Sequence
  LRRK2 RNA guide
gugauuucacucaugcaggc

SEQ ID NO: 17989 - RNA, 20 nt, Artificial Sequence
  LRRK2 RNA guide
guuccuuggugauuucacuc

SEQ ID NO: 17990 - RNA, 20 nt, Artificial Sequence
  LRRK2 RNA guide
uauucaggaguuccuuggug

SEQ ID NO: 17991 - RNA, 20 nt, Artificial Sequence
  LRRK2 RNA guide
ucacucaugcaggcuuugcg

SEQ ID NO: 17992 - RNA, 20 nt, Artificial Sequence
  LRRK2 RNA guide
ucaggaguuccuuggugauu

SEQ ID NO: 17993 - RNA, 20 nt, Artificial Sequence
  LRRK2 RNA guide
uccuuggugauuucacucau

SEQ ID NO: 17994 - RNA, 20 nt, Artificial Sequence
  LRRK2 RNA guide
ugaaaucaccaaggaacucc

SEQ ID NO: 17995 - RNA, 20 nt, Artificial Sequence
  LRRK2 RNA guide
ugagugaaaucaccaaggaa

SEQ ID NO: 17996 - RNA, 20 nt, Artificial Sequence
  LRRK2 RNA guide
ugauuucacucaugcaggcu

SEQ ID NO: 17997 - RNA, 20 nt, Artificial Sequence
  LRRK2 RNA guide
ugcaugagugaaaucaccaa

SEQ ID NO: 17998 - RNA, 20 nt, Artificial Sequence
  LRRK2 RNA guide
uggugauuucacucaugcag

SEQ ID NO: 17999 - RNA, 20 nt, Artificial Sequence
  LRRK2 RNA guide
uucacucaugcaggcuuugc

SEQ ID NO: 18000 - RNA, 20 nt, Artificial Sequence
  LRRK2 RNA guide
uucaggaguuccuuggugau

SEQ ID NO: 18001 - RNA, 20 nt, Artificial Sequence
  LRRK2 RNA guide
uuccuuggugauuucacuca

SEQ ID NO: 18002 - RNA, 20 nt, Artificial Sequence
  LRRK2 RNA guide
uuggugauuucacucaugca

SEQ ID NO: 18003 - RNA, 20 nt, Artificial Sequence
  LRRK2 RNA guide
uuucacucaugcaggcuuug

SEQ ID NO: 18004 - RNA, 21 nt, Artificial Sequence
  LRRK2 RNA guide
aaagccugcaugagugaaauc

SEQ ID NO: 18005 - RNA, 21 nt, Artificial Sequence
  LRRK2 RNA guide
aacgcaaagccugcaugagug

SEQ ID NO: 18006 - RNA, 21 nt, Artificial Sequence
  LRRK2 RNA guide
aagcaacgcaaagccugcaug

SEQ ID NO: 18007 - RNA, 21 nt, Artificial Sequence
  LRRK2 RNA guide
aagccugcaugagugaaauca

SEQ ID NO: 18008 - RNA, 21 nt, Artificial Sequence
  LRRK2 RNA guide
acgcaaagccugcaugaguga

SEQ ID NO: 18009 - RNA, 21 nt, Artificial Sequence
  LRRK2 RNA guide
agcaacgcaaagccugcauga

SEQ ID NO: 18010 - RNA, 21 nt, Artificial Sequence
  LRRK2 RNA guide
agccugcaugagugaaaucac

SEQ ID NO: 18011 - RNA, 21 nt, Artificial Sequence
  LRRK2 RNA guide
aggaguuccuuggugauuuca

SEQ ID NO: 18012 - RNA, 21 nt, Artificial Sequence
  LRRK2 RNA guide
agugaaaucaccaaggaacuc

SEQ ID NO: 18013 - RNA, 21 nt, Artificial Sequence
  LRRK2 RNA guide
aguuccuuggugauuucacuc

SEQ ID NO: 18014 - RNA, 21 nt, Artificial Sequence
  LRRK2 RNA guide
augagugaaaucaccaaggaa

SEQ ID NO: 18015 - RNA, 21 nt, Artificial Sequence
  LRRK2 RNA guide
auucaggaguuccuuggugau

SEQ ID NO: 18016 - RNA, 21 nt, Artificial Sequence
  LRRK2 RNA guide
auuucacucaugcaggcuuug

SEQ ID NO: 18017 - RNA, 21 nt, Artificial Sequence
  LRRK2 RNA guide
caaagccugcaugagugaaau

SEQ ID NO: 18018 - RNA, 21 nt, Artificial Sequence
  LRRK2 RNA guide
caacgcaaagccugcaugagu

SEQ ID NO: 18019 - RNA, 21 nt, Artificial Sequence
  LRRK2 RNA guide
caggaguuccuuggugauuuc

SEQ ID NO: 18020 - RNA, 21 nt, Artificial Sequence
  LRRK2 RNA guide
caugagugaaaucaccaagga

SEQ ID NO: 18021 - RNA, 21 nt, Artificial Sequence
  LRRK2 RNA guide
ccugcaugagugaaaucacca

SEQ ID NO: 18022 - RNA, 21 nt, Artificial Sequence
  LRRK2 RNA guide
ccuuggugauuucacucaugc

SEQ ID NO: 18023 - RNA, 21 nt, Artificial Sequence
  LRRK2 RNA guide
cgcaaagccugcaugagugaa

SEQ ID NO: 18024 - RNA, 21 nt, Artificial Sequence
  LRRK2 RNA guide
cugcaugagugaaaucaccaa

SEQ ID NO: 18025 - RNA, 21 nt, Artificial Sequence
  LRRK2 RNA guide
cuuggugauuucacucaugca

SEQ ID NO: 18026 - RNA, 21 nt, Artificial Sequence
  LRRK2 RNA guide
gaagcaacgcaaagccugcau

SEQ ID NO: 18027 - RNA, 21 nt, Artificial Sequence
  LRRK2 RNA guide
gagugaaaucaccaaggaacu

SEQ ID NO: 18028 - RNA, 21 nt, Artificial Sequence
  LRRK2 RNA guide
gaguuccuuggugauuucacu

SEQ ID NO: 18029 - RNA, 21 nt, Artificial Sequence
  LRRK2 RNA guide
gauuucacucaugcaggcuuu

SEQ ID NO: 18030 - RNA, 21 nt, Artificial Sequence
  LRRK2 RNA guide
gcaaagccugcaugagugaaa

SEQ ID NO: 18031 - RNA, 21 nt, Artificial Sequence
  LRRK2 RNA guide
gcaacgcaaagccugcaugag

SEQ ID NO: 18032 - RNA, 21 nt, Artificial Sequence
  LRRK2 RNA guide
gcaugagugaaaucaccaagg

SEQ ID NO: 18033 - RNA, 21 nt, Artificial Sequence
  LRRK2 RNA guide
gccugcaugagugaaaucacc

SEQ ID NO: 18034 - RNA, 21 nt, Artificial Sequence
  LRRK2 RNA guide
ggaguuccuuggugauuucac

SEQ ID NO: 18035 - RNA, 21 nt, Artificial Sequence
  LRRK2 RNA guide
ggugauuucacucaugcaggc

SEQ ID NO: 18036 - RNA, 21 nt, Artificial Sequence
  LRRK2 RNA guide
gugaaaucaccaaggaacucc

SEQ ID NO: 18037 - RNA, 21 nt, Artificial Sequence
  LRRK2 RNA guide
gugauuucacucaugcaggcu

SEQ ID NO: 18038 - RNA, 21 nt, Artificial Sequence
  LRRK2 RNA guide
guuccuuggugauuucacuca

SEQ ID NO: 18039 - RNA, 21 nt, Artificial Sequence
  LRRK2 RNA guide
uauucaggaguuccuugguga

SEQ ID NO: 18040 - RNA, 21 nt, Artificial Sequence
  LRRK2 RNA guide
ucacucaugcaggcuuugcgu

SEQ ID NO: 18041 - RNA, 21 nt, Artificial Sequence
  LRRK2 RNA guide
ucaggaguuccuuggugauuu

SEQ ID NO: 18042 - RNA, 21 nt, Artificial Sequence
  LRRK2 RNA guide
uccuuggugauuucacucaug

SEQ ID NO: 18043 - RNA, 21 nt, Artificial Sequence
  LRRK2 RNA guide
ugaaaucaccaaggaacuccu

SEQ ID NO: 18044 - RNA, 21 nt, Artificial Sequence
  LRRK2 RNA guide
ugagugaaaucaccaaggaac

SEQ ID NO: 18045 - RNA, 21 nt, Artificial Sequence
  LRRK2 RNA guide
ugauuucacucaugcaggcuu

SEQ ID NO: 18046 - RNA, 21 nt, Artificial Sequence
  LRRK2 RNA guide
ugcaugagugaaaucaccaag

SEQ ID NO: 18047 - RNA, 21 nt, Artificial Sequence
  LRRK2 RNA guide
uggugauuucacucaugcagg

SEQ ID NO: 18048 - RNA, 21 nt, Artificial Sequence
  LRRK2 RNA guide
uuauucaggaguuccuuggug

SEQ ID NO: 18049 - RNA, 21 nt, Artificial Sequence
  LRRK2 RNA guide
uucacucaugcaggcuuugcg

SEQ ID NO: 18050 - RNA, 21 nt, Artificial Sequence
  LRRK2 RNA guide
uucaggaguuccuuggugauu

SEQ ID NO: 18051 - RNA, 21 nt, Artificial Sequence
  LRRK2 RNA guide
uuccuuggugauuucacucau

SEQ ID NO: 18052 - RNA, 21 nt, Artificial Sequence
  LRRK2 RNA guide
uuggugauuucacucaugcag

SEQ ID NO: 18053 - RNA, 21 nt, Artificial Sequence
  LRRK2 RNA guide
uuucacucaugcaggcuuugc

SEQ ID NO: 18054 - RNA, 22 nt, Artificial Sequence
  LRRK2 RNA guide
aaagccugcaugagugaaauca

SEQ ID NO: 18055 - RNA, 22 nt, Artificial Sequence
  LRRK2 RNA guide
aacgcaaagccugcaugaguga

SEQ ID NO: 18056 - RNA, 22 nt, Artificial Sequence
  LRRK2 RNA guide
aagcaacgcaaagccugcauga

SEQ ID NO: 18057 - RNA, 22 nt, Artificial Sequence
  LRRK2 RNA guide
aagccugcaugagugaaaucac

SEQ ID NO: 18058 - RNA, 22 nt, Artificial Sequence
  LRRK2 RNA guide
acgcaaagccugcaugagugaa

SEQ ID NO: 18059 - RNA, 22 nt, Artificial Sequence
  LRRK2 RNA guide
agaagcaacgcaaagccugcau

SEQ ID NO: 18060 - RNA, 22 nt, Artificial Sequence
  LRRK2 RNA guide
agcaacgcaaagccugcaugag

SEQ ID NO: 18061 - RNA, 22 nt, Artificial Sequence
  LRRK2 RNA guide
agccugcaugagugaaaucacc

SEQ ID NO: 18062 - RNA, 22 nt, Artificial Sequence
  LRRK2 RNA guide
aggaguuccuuggugauuucac

SEQ ID NO: 18063 - RNA, 22 nt, Artificial Sequence
  LRRK2 RNA guide
agugaaaucaccaaggaacucc

SEQ ID NO: 18064 - RNA, 22 nt, Artificial Sequence
  LRRK2 RNA guide
aguuccuuggugauuucacuca

SEQ ID NO: 18065 - RNA, 22 nt, Artificial Sequence
  LRRK2 RNA guide
augagugaaaucaccaaggaac

SEQ ID NO: 18066 - RNA, 22 nt, Artificial Sequence
  LRRK2 RNA guide
auucaggaguuccuuggugauu

SEQ ID NO: 18067 - RNA, 22 nt, Artificial Sequence
  LRRK2 RNA guide
auuucacucaugcaggcuuugc

SEQ ID NO: 18068 - RNA, 22 nt, Artificial Sequence
  LRRK2 RNA guide
caaagccugcaugagugaaauc

SEQ ID NO: 18069 - RNA, 22 nt, Artificial Sequence
  LRRK2 RNA guide
caacgcaaagccugcaugagug

SEQ ID NO: 18070 - RNA, 22 nt, Artificial Sequence
  LRRK2 RNA guide
caggaguuccuuggugauuuca

SEQ ID NO: 18071 - RNA, 22 nt, Artificial Sequence
  LRRK2 RNA guide
caugagugaaaucaccaaggaa

SEQ ID NO: 18072 - RNA, 22 nt, Artificial Sequence
  LRRK2 RNA guide
ccugcaugagugaaaucaccaa

SEQ ID NO: 18073 - RNA, 22 nt, Artificial Sequence
  LRRK2 RNA guide
ccuuggugauuucacucaugca

SEQ ID NO: 18074 - RNA, 22 nt, Artificial Sequence
  LRRK2 RNA guide
cgcaaagccugcaugagugaaa

SEQ ID NO: 18075 - RNA, 22 nt, Artificial Sequence
  LRRK2 RNA guide
cugcaugagugaaaucaccaag

SEQ ID NO: 18076 - RNA, 22 nt, Artificial Sequence
  LRRK2 RNA guide
cuuauucaggaguuccuuggug

SEQ ID NO: 18077 - RNA, 22 nt, Artificial Sequence
  LRRK2 RNA guide
cuuggugauuucacucaugcag

SEQ ID NO: 18078 - RNA, 22 nt, Artificial Sequence
  LRRK2 RNA guide
gaagcaacgcaaagccugcaug

SEQ ID NO: 18079 - RNA, 22 nt, Artificial Sequence
  LRRK2 RNA guide
gagugaaaucaccaaggaacuc

SEQ ID NO: 18080 - RNA, 22 nt, Artificial Sequence
  LRRK2 RNA guide
gaguuccuuggugauuucacuc

SEQ ID NO: 18081 - RNA, 22 nt, Artificial Sequence
  LRRK2 RNA guide
gauuucacucaugcaggcuuug

SEQ ID NO: 18082 - RNA, 22 nt, Artificial Sequence
  LRRK2 RNA guide
gcaaagccugcaugagugaaau

SEQ ID NO: 18083 - RNA, 22 nt, Artificial Sequence
  LRRK2 RNA guide
gcaacgcaaagccugcaugagu

SEQ ID NO: 18084 - RNA, 22 nt, Artificial Sequence
  LRRK2 RNA guide
gcaugagugaaaucaccaagga

SEQ ID NO: 18085 - RNA, 22 nt, Artificial Sequence
  LRRK2 RNA guide
gccugcaugagugaaaucacca

SEQ ID NO: 18086 - RNA, 22 nt, Artificial Sequence
  LRRK2 RNA guide
ggaguuccuuggugauuucacu

SEQ ID NO: 18087 - RNA, 22 nt, Artificial Sequence
  LRRK2 RNA guide
ggugauuucacucaugcaggcu

SEQ ID NO: 18088 - RNA, 22 nt, Artificial Sequence
  LRRK2 RNA guide
gugaaaucaccaaggaacuccu

SEQ ID NO: 18089 - RNA, 22 nt, Artificial Sequence
  LRRK2 RNA guide
gugauuucacucaugcaggcuu

SEQ ID NO: 18090 - RNA, 22 nt, Artificial Sequence
  LRRK2 RNA guide
guuccuuggugauuucacucau

SEQ ID NO: 18091 - RNA, 22 nt, Artificial Sequence
  LRRK2 RNA guide
uauucaggaguuccuuggugau

SEQ ID NO: 18092 - RNA, 22 nt, Artificial Sequence
  LRRK2 RNA guide
ucacucaugcaggcuuugcguu

SEQ ID NO: 18093 - RNA, 22 nt, Artificial Sequence
  LRRK2 RNA guide
ucaggaguuccuuggugauuuc

SEQ ID NO: 18094 - RNA, 22 nt, Artificial Sequence
  LRRK2 RNA guide
uccuuggugauuucacucaugc

SEQ ID NO: 18095 - RNA, 22 nt, Artificial Sequence
  LRRK2 RNA guide
ugaaaucaccaaggaacuccug

SEQ ID NO: 18096 - RNA, 22 nt, Artificial Sequence
  LRRK2 RNA guide
ugagugaaaucaccaaggaacu

SEQ ID NO: 18097 - RNA, 22 nt, Artificial Sequence
  LRRK2 RNA guide
ugauuucacucaugcaggcuuu

SEQ ID NO: 18098 - RNA, 22 nt, Artificial Sequence
  LRRK2 RNA guide
ugcaugagugaaaucaccaagg

SEQ ID NO: 18099 - RNA, 22 nt, Artificial Sequence
  LRRK2 RNA guide
uggugauuucacucaugcaggc

SEQ ID NO: 18100 - RNA, 22 nt, Artificial Sequence
  LRRK2 RNA guide
uuauucaggaguuccuugguga

SEQ ID NO: 18101 - RNA, 22 nt, Artificial Sequence
  LRRK2 RNA guide
uucacucaugcaggcuuugcgu

SEQ ID NO: 18102 - RNA, 22 nt, Artificial Sequence
  LRRK2 RNA guide
uucaggaguuccuuggugauuu

SEQ ID NO: 18103 - RNA, 22 nt, Artificial Sequence
  LRRK2 RNA guide
uuccuuggugauuucacucaug

SEQ ID NO: 18104 - RNA, 22 nt, Artificial Sequence
  LRRK2 RNA guide
uuggugauuucacucaugcagg

SEQ ID NO: 18105 - RNA, 22 nt, Artificial Sequence
  LRRK2 RNA guide
uuucacucaugcaggcuuugcg

SEQ ID NO: 18106 - RNA, 20 nt, Artificial Sequence
  LRRK2 RNA guide
aaaaucaccaaggaauuccu

SEQ ID NO: 18107 - RNA, 20 nt, Artificial Sequence
  LRRK2 RNA guide
aaaucaccaaggaauuccug

SEQ ID NO: 18108 - RNA, 20 nt, Artificial Sequence
  LRRK2 RNA guide
aacccucgcuuauucaggaa

SEQ ID NO: 18109 - RNA, 20 nt, Artificial Sequence
  LRRK2 RNA guide
aaggaauuccugaauaagcg

SEQ ID NO: 18110 - RNA, 20 nt, Artificial Sequence
  LRRK2 RNA guide
aaucaccaaggaauuccuga

SEQ ID NO: 18111 - RNA, 20 nt, Artificial Sequence
  LRRK2 RNA guide
aauuccugaauaagcgaggg

SEQ ID NO: 18112 - RNA, 20 nt, Artificial Sequence
  LRRK2 RNA guide
aauuccuuggugauuuuacu

SEQ ID NO: 18113 - RNA, 20 nt, Artificial Sequence
  LRRK2 RNA guide
accaaggaauuccugaauaa

SEQ ID NO: 18114 - RNA, 20 nt, Artificial Sequence
  LRRK2 RNA guide
acccucgcuuauucaggaau

SEQ ID NO: 18115 - RNA, 20 nt, Artificial Sequence
  LRRK2 RNA guide
aggaauuccugaauaagcga

SEQ ID NO: 18116 - RNA, 20 nt, Artificial Sequence
  LRRK2 RNA guide
aggaauuccuuggugauuuu

SEQ ID NO: 18117 - RNA, 20 nt, Artificial Sequence
  LRRK2 RNA guide
agggaacccucgcuuauuca

SEQ ID NO: 18118 - RNA, 20 nt, Artificial Sequence
  LRRK2 RNA guide
aguaaaaucaccaaggaauu

SEQ ID NO: 18119 - RNA, 20 nt, Artificial Sequence
  LRRK2 RNA guide
aucaccaaggaauuccugaa

SEQ ID NO: 18120 - RNA, 20 nt, Artificial Sequence
  LRRK2 RNA guide
augaguaaaaucaccaagga

SEQ ID NO: 18121 - RNA, 20 nt, Artificial Sequence
  LRRK2 RNA guide
auucaggaauuccuugguga

SEQ ID NO: 18122 - RNA, 20 nt, Artificial Sequence
  LRRK2 RNA guide
auuccugaauaagcgagggu

SEQ ID NO: 18123 - RNA, 20 nt, Artificial Sequence
  LRRK2 RNA guide
caaggaauuccugaauaagc

SEQ ID NO: 18124 - RNA, 20 nt, Artificial Sequence
  LRRK2 RNA guide
caccaaggaauuccugaaua

SEQ ID NO: 18125 - RNA, 20 nt, Artificial Sequence
  LRRK2 RNA guide
caggaauuccuuggugauuu

SEQ ID NO: 18126 - RNA, 20 nt, Artificial Sequence
  LRRK2 RNA guide
cagggaacccucgcuuauuc

SEQ ID NO: 18127 - RNA, 20 nt, Artificial Sequence
  LRRK2 RNA guide
caugaguaaaaucaccaagg

SEQ ID NO: 18128 - RNA, 20 nt, Artificial Sequence
  LRRK2 RNA guide
ccaaggaauuccugaauaag

SEQ ID NO: 18129 - RNA, 20 nt, Artificial Sequence
  LRRK2 RNA guide
cccucgcuuauucaggaauu

SEQ ID NO: 18130 - RNA, 20 nt, Artificial Sequence
  LRRK2 RNA guide
ccucgcuuauucaggaauuc

SEQ ID NO: 18131 - RNA, 20 nt, Artificial Sequence
  LRRK2 RNA guide
cgcuuauucaggaauuccuu

SEQ ID NO: 18132 - RNA, 20 nt, Artificial Sequence
  LRRK2 RNA guide
cucgcuuauucaggaauucc

SEQ ID NO: 18133 - RNA, 20 nt, Artificial Sequence
  LRRK2 RNA guide
cuuauucaggaauuccuugg

SEQ ID NO: 18134 - RNA, 20 nt, Artificial Sequence
  LRRK2 RNA guide
gaacccucgcuuauucagga

SEQ ID NO: 18135 - RNA, 20 nt, Artificial Sequence
  LRRK2 RNA guide
gaauuccugaauaagcgagg

SEQ ID NO: 18136 - RNA, 20 nt, Artificial Sequence
  LRRK2 RNA guide
gaauuccuuggugauuuuac

SEQ ID NO: 18137 - RNA, 20 nt, Artificial Sequence
  LRRK2 RNA guide
gaguaaaaucaccaaggaau

SEQ ID NO: 18138 - RNA, 20 nt, Artificial Sequence
  LRRK2 RNA guide
gcaugaguaaaaucaccaag

SEQ ID NO: 18139 - RNA, 20 nt, Artificial Sequence
  LRRK2 RNA guide
gcuuauucaggaauuccuug

SEQ ID NO: 18140 - RNA, 20 nt, Artificial Sequence
  LRRK2 RNA guide
ggaacccucgcuuauucagg

SEQ ID NO: 18141 - RNA, 20 nt, Artificial Sequence
  LRRK2 RNA guide
ggaauuccugaauaagcgag

SEQ ID NO: 18142 - RNA, 20 nt, Artificial Sequence
  LRRK2 RNA guide
ggaauuccuuggugauuuua

SEQ ID NO: 18143 - RNA, 20 nt, Artificial Sequence
  LRRK2 RNA guide
gggaacccucgcuuauucag

SEQ ID NO: 18144 - RNA, 20 nt, Artificial Sequence
  LRRK2 RNA guide
guaaaaucaccaaggaauuc

SEQ ID NO: 18145 - RNA, 20 nt, Artificial Sequence
  LRRK2 RNA guide
uaaaaucaccaaggaauucc

SEQ ID NO: 18146 - RNA, 20 nt, Artificial Sequence
  LRRK2 RNA guide
uauucaggaauuccuuggug

SEQ ID NO: 18147 - RNA, 20 nt, Artificial Sequence
  LRRK2 RNA guide
ucaccaaggaauuccugaau

SEQ ID NO: 18148 - RNA, 20 nt, Artificial Sequence
  LRRK2 RNA guide
ucaggaauuccuuggugauu

SEQ ID NO: 18149 - RNA, 20 nt, Artificial Sequence
  LRRK2 RNA guide
ucgcuuauucaggaauuccu

SEQ ID NO: 18150 - RNA, 20 nt, Artificial Sequence
  LRRK2 RNA guide
ugaguaaaaucaccaaggaa

SEQ ID NO: 18151 - RNA, 20 nt, Artificial Sequence
  LRRK2 RNA guide
ugcaugaguaaaaucaccaa

SEQ ID NO: 18152 - RNA, 20 nt, Artificial Sequence
  LRRK2 RNA guide
uuauucaggaauuccuuggu

SEQ ID NO: 18153 - RNA, 20 nt, Artificial Sequence
  LRRK2 RNA guide
uucaggaauuccuuggugau

SEQ ID NO: 18154 - RNA, 21 nt, Artificial Sequence
  LRRK2 RNA guide
aaaaucaccaaggaauuccug

SEQ ID NO: 18155 - RNA, 21 nt, Artificial Sequence
  LRRK2 RNA guide
aaaucaccaaggaauuccuga

SEQ ID NO: 18156 - RNA, 21 nt, Artificial Sequence
  LRRK2 RNA guide
aacccucgcuuauucaggaau

SEQ ID NO: 18157 - RNA, 21 nt, Artificial Sequence
  LRRK2 RNA guide
aaggaauuccugaauaagcga

SEQ ID NO: 18158 - RNA, 21 nt, Artificial Sequence
  LRRK2 RNA guide
aaucaccaaggaauuccugaa

SEQ ID NO: 18159 - RNA, 21 nt, Artificial Sequence
  LRRK2 RNA guide
aauuccugaauaagcgagggu

SEQ ID NO: 18160 - RNA, 21 nt, Artificial Sequence
  LRRK2 RNA guide
aauuccuuggugauuuuacuc

SEQ ID NO: 18161 - RNA, 21 nt, Artificial Sequence
  LRRK2 RNA guide
accaaggaauuccugaauaag

SEQ ID NO: 18162 - RNA, 21 nt, Artificial Sequence
  LRRK2 RNA guide
acccucgcuuauucaggaauu

SEQ ID NO: 18163 - RNA, 21 nt, Artificial Sequence
  LRRK2 RNA guide
aggaauuccugaauaagcgag

SEQ ID NO: 18164 - RNA, 21 nt, Artificial Sequence
  LRRK2 RNA guide
aggaauuccuuggugauuuua

SEQ ID NO: 18165 - RNA, 21 nt, Artificial Sequence
  LRRK2 RNA guide
agggaacccucgcuuauucag

SEQ ID NO: 18166 - RNA, 21 nt, Artificial Sequence
  LRRK2 RNA guide
aguaaaaucaccaaggaauuc

SEQ ID NO: 18167 - RNA, 21 nt, Artificial Sequence
  LRRK2 RNA guide
aucaccaaggaauuccugaau

SEQ ID NO: 18168 - RNA, 21 nt, Artificial Sequence
  LRRK2 RNA guide
augaguaaaaucaccaaggaa

SEQ ID NO: 18169 - RNA, 21 nt, Artificial Sequence
  LRRK2 RNA guide
auucaggaauuccuuggugau

SEQ ID NO: 18170 - RNA, 21 nt, Artificial Sequence
  LRRK2 RNA guide
auuccugaauaagcgaggguu

SEQ ID NO: 18171 - RNA, 21 nt, Artificial Sequence
  LRRK2 RNA guide
caaggaauuccugaauaagcg

SEQ ID NO: 18172 - RNA, 21 nt, Artificial Sequence
  LRRK2 RNA guide
caccaaggaauuccugaauaa

SEQ ID NO: 18173 - RNA, 21 nt, Artificial Sequence
  LRRK2 RNA guide
caggaauuccuuggugauuuu

SEQ ID NO: 18174 - RNA, 21 nt, Artificial Sequence
  LRRK2 RNA guide
cagggaacccucgcuuauuca

SEQ ID NO: 18175 - RNA, 21 nt, Artificial Sequence
  LRRK2 RNA guide
caugaguaaaaucaccaagga

SEQ ID NO: 18176 - RNA, 21 nt, Artificial Sequence
  LRRK2 RNA guide
ccaaggaauuccugaauaagc

SEQ ID NO: 18177 - RNA, 21 nt, Artificial Sequence
  LRRK2 RNA guide
cccucgcuuauucaggaauuc

SEQ ID NO: 18178 - RNA, 21 nt, Artificial Sequence
  LRRK2 RNA guide
ccucgcuuauucaggaauucc

SEQ ID NO: 18179 - RNA, 21 nt, Artificial Sequence
  LRRK2 RNA guide
cgcuuauucaggaauuccuug

SEQ ID NO: 18180 - RNA, 21 nt, Artificial Sequence
  LRRK2 RNA guide
cucgcuuauucaggaauuccu

SEQ ID NO: 18181 - RNA, 21 nt, Artificial Sequence
  LRRK2 RNA guide
cugcaugaguaaaaucaccaa

SEQ ID NO: 18182 - RNA, 21 nt, Artificial Sequence
  LRRK2 RNA guide
cuuauucaggaauuccuuggu

SEQ ID NO: 18183 - RNA, 21 nt, Artificial Sequence
  LRRK2 RNA guide
gaacccucgcuuauucaggaa

SEQ ID NO: 18184 - RNA, 21 nt, Artificial Sequence
  LRRK2 RNA guide
gaauuccugaauaagcgaggg

SEQ ID NO: 18185 - RNA, 21 nt, Artificial Sequence
  LRRK2 RNA guide
gaauuccuuggugauuuuacu

SEQ ID NO: 18186 - RNA, 21 nt, Artificial Sequence
  LRRK2 RNA guide
gaguaaaaucaccaaggaauu

SEQ ID NO: 18187 - RNA, 21 nt, Artificial Sequence
  LRRK2 RNA guide
gcagggaacccucgcuuauuc

SEQ ID NO: 18188 - RNA, 21 nt, Artificial Sequence
  LRRK2 RNA guide
gcaugaguaaaaucaccaagg

SEQ ID NO: 18189 - RNA, 21 nt, Artificial Sequence
  LRRK2 RNA guide
gcuuauucaggaauuccuugg

SEQ ID NO: 18190 - RNA, 21 nt, Artificial Sequence
  LRRK2 RNA guide
ggaacccucgcuuauucagga

SEQ ID NO: 18191 - RNA, 21 nt, Artificial Sequence
  LRRK2 RNA guide
ggaauuccugaauaagcgagg

SEQ ID NO: 18192 - RNA, 21 nt, Artificial Sequence
  LRRK2 RNA guide
ggaauuccuuggugauuuuac

SEQ ID NO: 18193 - RNA, 21 nt, Artificial Sequence
  LRRK2 RNA guide
gggaacccucgcuuauucagg

SEQ ID NO: 18194 - RNA, 21 nt, Artificial Sequence
  LRRK2 RNA guide
guaaaaucaccaaggaauucc

SEQ ID NO: 18195 - RNA, 21 nt, Artificial Sequence
  LRRK2 RNA guide
uaaaaucaccaaggaauuccu

SEQ ID NO: 18196 - RNA, 21 nt, Artificial Sequence
  LRRK2 RNA guide
uauucaggaauuccuugguga

SEQ ID NO: 18197 - RNA, 21 nt, Artificial Sequence
  LRRK2 RNA guide
ucaccaaggaauuccugaaua

SEQ ID NO: 18198 - RNA, 21 nt, Artificial Sequence
  LRRK2 RNA guide
ucaggaauuccuuggugauuu

SEQ ID NO: 18199 - RNA, 21 nt, Artificial Sequence
  LRRK2 RNA guide
ucgcuuauucaggaauuccuu

SEQ ID NO: 18200 - RNA, 21 nt, Artificial Sequence
  LRRK2 RNA guide
ugaguaaaaucaccaaggaau

SEQ ID NO: 18201 - RNA, 21 nt, Artificial Sequence
  LRRK2 RNA guide
ugcaugaguaaaaucaccaag

SEQ ID NO: 18202 - RNA, 21 nt, Artificial Sequence
  LRRK2 RNA guide
uuauucaggaauuccuuggug

SEQ ID NO: 18203 - RNA, 21 nt, Artificial Sequence
  LRRK2 RNA guide
uucaggaauuccuuggugauu

SEQ ID NO: 18204 - RNA, 22 nt, Artificial Sequence
  LRRK2 RNA guide
aaaaucaccaaggaauuccuga

SEQ ID NO: 18205 - RNA, 22 nt, Artificial Sequence
  LRRK2 RNA guide
aaaucaccaaggaauuccugaa

SEQ ID NO: 18206 - RNA, 22 nt, Artificial Sequence
  LRRK2 RNA guide
aacccucgcuuauucaggaauu

SEQ ID NO: 18207 - RNA, 22 nt, Artificial Sequence
  LRRK2 RNA guide
aaggaauuccugaauaagcgag

SEQ ID NO: 18208 - RNA, 22 nt, Artificial Sequence
  LRRK2 RNA guide
aaucaccaaggaauuccugaau

SEQ ID NO: 18209 - RNA, 22 nt, Artificial Sequence
  LRRK2 RNA guide
aauuccugaauaagcgaggguu

SEQ ID NO: 18210 - RNA, 22 nt, Artificial Sequence
  LRRK2 RNA guide
aauuccuuggugauuuuacuca

SEQ ID NO: 18211 - RNA, 22 nt, Artificial Sequence
  LRRK2 RNA guide
accaaggaauuccugaauaagc

SEQ ID NO: 18212 - RNA, 22 nt, Artificial Sequence
  LRRK2 RNA guide
acccucgcuuauucaggaauuc

SEQ ID NO: 18213 - RNA, 22 nt, Artificial Sequence
  LRRK2 RNA guide
aggaauuccugaauaagcgagg

SEQ ID NO: 18214 - RNA, 22 nt, Artificial Sequence
  LRRK2 RNA guide
aggaauuccuuggugauuuuac

SEQ ID NO: 18215 - RNA, 22 nt, Artificial Sequence
  LRRK2 RNA guide
agggaacccucgcuuauucagg

SEQ ID NO: 18216 - RNA, 22 nt, Artificial Sequence
  LRRK2 RNA guide
aguaaaaucaccaaggaauucc

SEQ ID NO: 18217 - RNA, 22 nt, Artificial Sequence
  LRRK2 RNA guide
aucaccaaggaauuccugaaua

SEQ ID NO: 18218 - RNA, 22 nt, Artificial Sequence
  LRRK2 RNA guide
augaguaaaaucaccaaggaau

SEQ ID NO: 18219 - RNA, 22 nt, Artificial Sequence
  LRRK2 RNA guide
auucaggaauuccuuggugauu

SEQ ID NO: 18220 - RNA, 22 nt, Artificial Sequence
  LRRK2 RNA guide
auuccugaauaagcgaggguuc

SEQ ID NO: 18221 - RNA, 22 nt, Artificial Sequence
  LRRK2 RNA guide
caaggaauuccugaauaagcga

SEQ ID NO: 18222 - RNA, 22 nt, Artificial Sequence
  LRRK2 RNA guide
caccaaggaauuccugaauaag

SEQ ID NO: 18223 - RNA, 22 nt, Artificial Sequence
  LRRK2 RNA guide
caggaauuccuuggugauuuua

SEQ ID NO: 18224 - RNA, 22 nt, Artificial Sequence
  LRRK2 RNA guide
cagggaacccucgcuuauucag

SEQ ID NO: 18225 - RNA, 22 nt, Artificial Sequence
  LRRK2 RNA guide
caugaguaaaaucaccaaggaa

SEQ ID NO: 18226 - RNA, 22 nt, Artificial Sequence
  LRRK2 RNA guide
ccaaggaauuccugaauaagcg

SEQ ID NO: 18227 - RNA, 22 nt, Artificial Sequence
  LRRK2 RNA guide
cccucgcuuauucaggaauucc

SEQ ID NO: 18228 - RNA, 22 nt, Artificial Sequence
  LRRK2 RNA guide
ccucgcuuauucaggaauuccu

SEQ ID NO: 18229 - RNA, 22 nt, Artificial Sequence
  LRRK2 RNA guide
ccugcaugaguaaaaucaccaa

SEQ ID NO: 18230 - RNA, 22 nt, Artificial Sequence
  LRRK2 RNA guide
cgcuuauucaggaauuccuugg

SEQ ID NO: 18231 - RNA, 22 nt, Artificial Sequence
  LRRK2 RNA guide
cucgcuuauucaggaauuccuu

SEQ ID NO: 18232 - RNA, 22 nt, Artificial Sequence
  LRRK2 RNA guide
cugcaugaguaaaaucaccaag

SEQ ID NO: 18233 - RNA, 22 nt, Artificial Sequence
  LRRK2 RNA guide
cuuauucaggaauuccuuggug

SEQ ID NO: 18234 - RNA, 22 nt, Artificial Sequence
  LRRK2 RNA guide
gaacccucgcuuauucaggaau

SEQ ID NO: 18235 - RNA, 22 nt, Artificial Sequence
  LRRK2 RNA guide
gaauuccugaauaagcgagggu

SEQ ID NO: 18236 - RNA, 22 nt, Artificial Sequence
  LRRK2 RNA guide
gaauuccuuggugauuuuacuc

SEQ ID NO: 18237 - RNA, 22 nt, Artificial Sequence
  LRRK2 RNA guide
gaguaaaaucaccaaggaauuc

SEQ ID NO: 18238 - RNA, 22 nt, Artificial Sequence
  LRRK2 RNA guide
gcagggaacccucgcuuauuca

SEQ ID NO: 18239 - RNA, 22 nt, Artificial Sequence
  LRRK2 RNA guide
gcaugaguaaaaucaccaagga

SEQ ID NO: 18240 - RNA, 22 nt, Artificial Sequence
  LRRK2 RNA guide
gcuuauucaggaauuccuuggu

SEQ ID NO: 18241 - RNA, 22 nt, Artificial Sequence
  LRRK2 RNA guide
ggaacccucgcuuauucaggaa

SEQ ID NO: 18242 - RNA, 22 nt, Artificial Sequence
  LRRK2 RNA guide
ggaauuccugaauaagcgaggg

SEQ ID NO: 18243 - RNA, 22 nt, Artificial Sequence
  LRRK2 RNA guide
ggaauuccuuggugauuuuacu

SEQ ID NO: 18244 - RNA, 22 nt, Artificial Sequence
  LRRK2 RNA guide
ggcagggaacccucgcuuauuc

SEQ ID NO: 18245 - RNA, 22 nt, Artificial Sequence
  LRRK2 RNA guide
gggaacccucgcuuauucagga

SEQ ID NO: 18246 - RNA, 22 nt, Artificial Sequence
  LRRK2 RNA guide
guaaaaucaccaaggaauuccu

SEQ ID NO: 18247 - RNA, 22 nt, Artificial Sequence
  LRRK2 RNA guide
uaaaaucaccaaggaauuccug

SEQ ID NO: 18248 - RNA, 22 nt, Artificial Sequence
  LRRK2 RNA guide
uauucaggaauuccuuggugau

SEQ ID NO: 18249 - RNA, 22 nt, Artificial Sequence
  LRRK2 RNA guide
ucaccaaggaauuccugaauaa

SEQ ID NO: 18250 - RNA, 22 nt, Artificial Sequence
  LRRK2 RNA guide
ucaggaauuccuuggugauuuu

SEQ ID NO: 18251 - RNA, 22 nt, Artificial Sequence
  LRRK2 RNA guide
ucgcuuauucaggaauuccuug

SEQ ID NO: 18252 - RNA, 22 nt, Artificial Sequence
  LRRK2 RNA guide
ugaguaaaaucaccaaggaauu

SEQ ID NO: 18253 - RNA, 22 nt, Artificial Sequence
  LRRK2 RNA guide
ugcaugaguaaaaucaccaagg

SEQ ID NO: 18254 - RNA, 22 nt, Artificial Sequence
  LRRK2 RNA guide
uuauucaggaauuccuugguga

SEQ ID NO: 18255 - RNA, 22 nt, Artificial Sequence
  LRRK2 RNA guide
uucaggaauuccuuggugauuu

SEQ ID NO: 18256 - RNA, 20 nt, Artificial Sequence
  LRRK2 RNA guide
aacuccugaauaagcgagag

SEQ ID NO: 18257 - RNA, 20 nt, Artificial Sequence
  LRRK2 RNA guide
aacucucgcuuauucaggag

SEQ ID NO: 18258 - RNA, 20 nt, Artificial Sequence
  LRRK2 RNA guide
aagcgagaguucccugccau

SEQ ID NO: 18259 - RNA, 20 nt, Artificial Sequence
  LRRK2 RNA guide
aaggaacuccugaauaagcg

SEQ ID NO: 18260 - RNA, 20 nt, Artificial Sequence
  LRRK2 RNA guide
aauaagcgagaguucccugc

SEQ ID NO: 18261 - RNA, 20 nt, Artificial Sequence
  LRRK2 RNA guide
aaucucguauggcagggaac

SEQ ID NO: 18262 - RNA, 20 nt, Artificial Sequence
  LRRK2 RNA guide
acuccugaauaagcgagagu

SEQ ID NO: 18263 - RNA, 20 nt, Artificial Sequence
  LRRK2 RNA guide
acucucgcuuauucaggagu

SEQ ID NO: 18264 - RNA, 20 nt, Artificial Sequence
  LRRK2 RNA guide
agaguucccugccauacgag

SEQ ID NO: 18265 - RNA, 20 nt, Artificial Sequence
  LRRK2 RNA guide
agcgagaguucccugccaua

SEQ ID NO: 18266 - RNA, 20 nt, Artificial Sequence
  LRRK2 RNA guide
aggaacuccugaauaagcga

SEQ ID NO: 18267 - RNA, 20 nt, Artificial Sequence
  LRRK2 RNA guide
agggaacucucgcuuauuca

SEQ ID NO: 18268 - RNA, 20 nt, Artificial Sequence
  LRRK2 RNA guide
auaagcgagaguucccugcc

SEQ ID NO: 18269 - RNA, 20 nt, Artificial Sequence
  LRRK2 RNA guide
aucucguauggcagggaacu

SEQ ID NO: 18270 - RNA, 20 nt, Artificial Sequence
  LRRK2 RNA guide
auggcagggaacucucgcuu

SEQ ID NO: 18271 - RNA, 20 nt, Artificial Sequence
  LRRK2 RNA guide
caaggaacuccugaauaagc

SEQ ID NO: 18272 - RNA, 20 nt, Artificial Sequence
  LRRK2 RNA guide
cagggaacucucgcuuauuc

SEQ ID NO: 18273 - RNA, 20 nt, Artificial Sequence
  LRRK2 RNA guide
ccaaggaacuccugaauaag

SEQ ID NO: 18274 - RNA, 20 nt, Artificial Sequence
  LRRK2 RNA guide
ccugaauaagcgagaguucc

SEQ ID NO: 18275 - RNA, 20 nt, Artificial Sequence
  LRRK2 RNA guide
cgagaguucccugccauacg

SEQ ID NO: 18276 - RNA, 20 nt, Artificial Sequence
  LRRK2 RNA guide
cguauggcagggaacucucg

SEQ ID NO: 18277 - RNA, 20 nt, Artificial Sequence
  LRRK2 RNA guide
cuccugaauaagcgagaguu

SEQ ID NO: 18278 - RNA, 20 nt, Artificial Sequence
  LRRK2 RNA guide
cucguauggcagggaacucu

SEQ ID NO: 18279 - RNA, 20 nt, Artificial Sequence
  LRRK2 RNA guide
cucucgcuuauucaggaguu

SEQ ID NO: 18280 - RNA, 20 nt, Artificial Sequence
  LRRK2 RNA guide
cugaauaagcgagaguuccc

SEQ ID NO: 18281 - RNA, 20 nt, Artificial Sequence
  LRRK2 RNA guide
gaacuccugaauaagcgaga

SEQ ID NO: 18282 - RNA, 20 nt, Artificial Sequence
  LRRK2 RNA guide
gaacucucgcuuauucagga

SEQ ID NO: 18283 - RNA, 20 nt, Artificial Sequence
  LRRK2 RNA guide
gaauaagcgagaguucccug

SEQ ID NO: 18284 - RNA, 20 nt, Artificial Sequence
  LRRK2 RNA guide
gagaguucccugccauacga

SEQ ID NO: 18285 - RNA, 20 nt, Artificial Sequence
  LRRK2 RNA guide
gaguucccugccauacgaga

SEQ ID NO: 18286 - RNA, 20 nt, Artificial Sequence
  LRRK2 RNA guide
gcagggaacucucgcuuauu

SEQ ID NO: 18287 - RNA, 20 nt, Artificial Sequence
  LRRK2 RNA guide
gcgagaguucccugccauac

SEQ ID NO: 18288 - RNA, 20 nt, Artificial Sequence
  LRRK2 RNA guide
ggaacuccugaauaagcgag

SEQ ID NO: 18289 - RNA, 20 nt, Artificial Sequence
  LRRK2 RNA guide
ggaacucucgcuuauucagg

SEQ ID NO: 18290 - RNA, 20 nt, Artificial Sequence
  LRRK2 RNA guide
ggcagggaacucucgcuuau

SEQ ID NO: 18291 - RNA, 20 nt, Artificial Sequence
  LRRK2 RNA guide
gggaacucucgcuuauucag

SEQ ID NO: 18292 - RNA, 20 nt, Artificial Sequence
  LRRK2 RNA guide
gguaaucucguauggcaggg

SEQ ID NO: 18293 - RNA, 20 nt, Artificial Sequence
  LRRK2 RNA guide
guaaucucguauggcaggga

SEQ ID NO: 18294 - RNA, 20 nt, Artificial Sequence
  LRRK2 RNA guide
guauggcagggaacucucgc

SEQ ID NO: 18295 - RNA, 20 nt, Artificial Sequence
  LRRK2 RNA guide
uaagcgagaguucccugcca

SEQ ID NO: 18296 - RNA, 20 nt, Artificial Sequence
  LRRK2 RNA guide
uaaucucguauggcagggaa

SEQ ID NO: 18297 - RNA, 20 nt, Artificial Sequence
  LRRK2 RNA guide
uauggcagggaacucucgcu

SEQ ID NO: 18298 - RNA, 20 nt, Artificial Sequence
  LRRK2 RNA guide
uccugaauaagcgagaguuc

SEQ ID NO: 18299 - RNA, 20 nt, Artificial Sequence
  LRRK2 RNA guide
ucguauggcagggaacucuc

SEQ ID NO: 18300 - RNA, 20 nt, Artificial Sequence
  LRRK2 RNA guide
ucucguauggcagggaacuc

SEQ ID NO: 18301 - RNA, 20 nt, Artificial Sequence
  LRRK2 RNA guide
ugaauaagcgagaguucccu

SEQ ID NO: 18302 - RNA, 20 nt, Artificial Sequence
  LRRK2 RNA guide
uggcagggaacucucgcuua

SEQ ID NO: 18303 - RNA, 20 nt, Artificial Sequence
  LRRK2 RNA guide
ugguaaucucguauggcagg

SEQ ID NO: 18304 - RNA, 21 nt, Artificial Sequence
  LRRK2 RNA guide
aacuccugaauaagcgagagu

SEQ ID NO: 18305 - RNA, 21 nt, Artificial Sequence
  LRRK2 RNA guide
aacucucgcuuauucaggagu

SEQ ID NO: 18306 - RNA, 21 nt, Artificial Sequence
  LRRK2 RNA guide
aagcgagaguucccugccaua

SEQ ID NO: 18307 - RNA, 21 nt, Artificial Sequence
  LRRK2 RNA guide
aaggaacuccugaauaagcga

SEQ ID NO: 18308 - RNA, 21 nt, Artificial Sequence
  LRRK2 RNA guide
aauaagcgagaguucccugcc

SEQ ID NO: 18309 - RNA, 21 nt, Artificial Sequence
  LRRK2 RNA guide
aaucucguauggcagggaacu

SEQ ID NO: 18310 - RNA, 21 nt, Artificial Sequence
  LRRK2 RNA guide
accaaggaacuccugaauaag

SEQ ID NO: 18311 - RNA, 21 nt, Artificial Sequence
  LRRK2 RNA guide
acuccugaauaagcgagaguu

SEQ ID NO: 18312 - RNA, 21 nt, Artificial Sequence
  LRRK2 RNA guide
acucucgcuuauucaggaguu

SEQ ID NO: 18313 - RNA, 21 nt, Artificial Sequence
  LRRK2 RNA guide
agaguucccugccauacgaga

SEQ ID NO: 18314 - RNA, 21 nt, Artificial Sequence
  LRRK2 RNA guide
agcgagaguucccugccauac

SEQ ID NO: 18315 - RNA, 21 nt, Artificial Sequence
  LRRK2 RNA guide
aggaacuccugaauaagcgag

SEQ ID NO: 18316 - RNA, 21 nt, Artificial Sequence
  LRRK2 RNA guide
agggaacucucgcuuauucag

SEQ ID NO: 18317 - RNA, 21 nt, Artificial Sequence
  LRRK2 RNA guide
auaagcgagaguucccugcca

SEQ ID NO: 18318 - RNA, 21 nt, Artificial Sequence
  LRRK2 RNA guide
aucucguauggcagggaacuc

SEQ ID NO: 18319 - RNA, 21 nt, Artificial Sequence
  LRRK2 RNA guide
auggcagggaacucucgcuua

SEQ ID NO: 18320 - RNA, 21 nt, Artificial Sequence
  LRRK2 RNA guide
caaggaacuccugaauaagcg

SEQ ID NO: 18321 - RNA, 21 nt, Artificial Sequence
  LRRK2 RNA guide
cagggaacucucgcuuauuca

SEQ ID NO: 18322 - RNA, 21 nt, Artificial Sequence
  LRRK2 RNA guide
ccaaggaacuccugaauaagc

SEQ ID NO: 18323 - RNA, 21 nt, Artificial Sequence
  LRRK2 RNA guide
ccugaauaagcgagaguuccc

SEQ ID NO: 18324 - RNA, 21 nt, Artificial Sequence
  LRRK2 RNA guide
cgagaguucccugccauacga

SEQ ID NO: 18325 - RNA, 21 nt, Artificial Sequence
  LRRK2 RNA guide
cguauggcagggaacucucgc

SEQ ID NO: 18326 - RNA, 21 nt, Artificial Sequence
  LRRK2 RNA guide
cuccugaauaagcgagaguuc

SEQ ID NO: 18327 - RNA, 21 nt, Artificial Sequence
  LRRK2 RNA guide
cucguauggcagggaacucuc

SEQ ID NO: 18328 - RNA, 21 nt, Artificial Sequence
  LRRK2 RNA guide
cucucgcuuauucaggaguuc

SEQ ID NO: 18329 - RNA, 21 nt, Artificial Sequence
  LRRK2 RNA guide
cugaauaagcgagaguucccu

SEQ ID NO: 18330 - RNA, 21 nt, Artificial Sequence
  LRRK2 RNA guide
gaacuccugaauaagcgagag

SEQ ID NO: 18331 - RNA, 21 nt, Artificial Sequence
  LRRK2 RNA guide
gaacucucgcuuauucaggag

SEQ ID NO: 18332 - RNA, 21 nt, Artificial Sequence
  LRRK2 RNA guide
gaauaagcgagaguucccugc

SEQ ID NO: 18333 - RNA, 21 nt, Artificial Sequence
  LRRK2 RNA guide
gagaguucccugccauacgag

SEQ ID NO: 18334 - RNA, 21 nt, Artificial Sequence
  LRRK2 RNA guide
gaguucccugccauacgagau

SEQ ID NO: 18335 - RNA, 21 nt, Artificial Sequence
  LRRK2 RNA guide
gcagggaacucucgcuuauuc

SEQ ID NO: 18336 - RNA, 21 nt, Artificial Sequence
  LRRK2 RNA guide
gcgagaguucccugccauacg

SEQ ID NO: 18337 - RNA, 21 nt, Artificial Sequence
  LRRK2 RNA guide
ggaacuccugaauaagcgaga

SEQ ID NO: 18338 - RNA, 21 nt, Artificial Sequence
  LRRK2 RNA guide
ggaacucucgcuuauucagga

SEQ ID NO: 18339 - RNA, 21 nt, Artificial Sequence
  LRRK2 RNA guide
ggcagggaacucucgcuuauu

SEQ ID NO: 18340 - RNA, 21 nt, Artificial Sequence
  LRRK2 RNA guide
gggaacucucgcuuauucagg

SEQ ID NO: 18341 - RNA, 21 nt, Artificial Sequence
  LRRK2 RNA guide
gguaaucucguauggcaggga

SEQ ID NO: 18342 - RNA, 21 nt, Artificial Sequence
  LRRK2 RNA guide
guaaucucguauggcagggaa

SEQ ID NO: 18343 - RNA, 21 nt, Artificial Sequence
  LRRK2 RNA guide
guauggcagggaacucucgcu

SEQ ID NO: 18344 - RNA, 21 nt, Artificial Sequence
  LRRK2 RNA guide
gugguaaucucguauggcagg

SEQ ID NO: 18345 - RNA, 21 nt, Artificial Sequence
  LRRK2 RNA guide
uaagcgagaguucccugccau

SEQ ID NO: 18346 - RNA, 21 nt, Artificial Sequence
  LRRK2 RNA guide
uaaucucguauggcagggaac

SEQ ID NO: 18347 - RNA, 21 nt, Artificial Sequence
  LRRK2 RNA guide
uauggcagggaacucucgcuu

SEQ ID NO: 18348 - RNA, 21 nt, Artificial Sequence
  LRRK2 RNA guide
uccugaauaagcgagaguucc

SEQ ID NO: 18349 - RNA, 21 nt, Artificial Sequence
  LRRK2 RNA guide
ucguauggcagggaacucucg

SEQ ID NO: 18350 - RNA, 21 nt, Artificial Sequence
  LRRK2 RNA guide
ucucguauggcagggaacucu

SEQ ID NO: 18351 - RNA, 21 nt, Artificial Sequence
  LRRK2 RNA guide
ugaauaagcgagaguucccug

SEQ ID NO: 18352 - RNA, 21 nt, Artificial Sequence
  LRRK2 RNA guide
uggcagggaacucucgcuuau

SEQ ID NO: 18353 - RNA, 21 nt, Artificial Sequence
  LRRK2 RNA guide
ugguaaucucguauggcaggg

SEQ ID NO: 18354 - RNA, 22 nt, Artificial Sequence
  LRRK2 RNA guide
aacuccugaauaagcgagaguu

SEQ ID NO: 18355 - RNA, 22 nt, Artificial Sequence
  LRRK2 RNA guide
aacucucgcuuauucaggaguu

SEQ ID NO: 18356 - RNA, 22 nt, Artificial Sequence
  LRRK2 RNA guide
aagcgagaguucccugccauac

SEQ ID NO: 18357 - RNA, 22 nt, Artificial Sequence
  LRRK2 RNA guide
aaggaacuccugaauaagcgag

SEQ ID NO: 18358 - RNA, 22 nt, Artificial Sequence
  LRRK2 RNA guide
aauaagcgagaguucccugcca

SEQ ID NO: 18359 - RNA, 22 nt, Artificial Sequence
  LRRK2 RNA guide
aaucucguauggcagggaacuc

SEQ ID NO: 18360 - RNA, 22 nt, Artificial Sequence
  LRRK2 RNA guide
accaaggaacuccugaauaagc

SEQ ID NO: 18361 - RNA, 22 nt, Artificial Sequence
  LRRK2 RNA guide
acuccugaauaagcgagaguuc

SEQ ID NO: 18362 - RNA, 22 nt, Artificial Sequence
  LRRK2 RNA guide
acucucgcuuauucaggaguuc

SEQ ID NO: 18363 - RNA, 22 nt, Artificial Sequence
  LRRK2 RNA guide
agaguucccugccauacgagau

SEQ ID NO: 18364 - RNA, 22 nt, Artificial Sequence
  LRRK2 RNA guide
agcgagaguucccugccauacg

SEQ ID NO: 18365 - RNA, 22 nt, Artificial Sequence
  LRRK2 RNA guide
aggaacuccugaauaagcgaga

SEQ ID NO: 18366 - RNA, 22 nt, Artificial Sequence
  LRRK2 RNA guide
agggaacucucgcuuauucagg

SEQ ID NO: 18367 - RNA, 22 nt, Artificial Sequence
  LRRK2 RNA guide
agugguaaucucguauggcagg

SEQ ID NO: 18368 - RNA, 22 nt, Artificial Sequence
  LRRK2 RNA guide
auaagcgagaguucccugccau

SEQ ID NO: 18369 - RNA, 22 nt, Artificial Sequence
  LRRK2 RNA guide
aucucguauggcagggaacucu

SEQ ID NO: 18370 - RNA, 22 nt, Artificial Sequence
  LRRK2 RNA guide
auggcagggaacucucgcuuau

SEQ ID NO: 18371 - RNA, 22 nt, Artificial Sequence
  LRRK2 RNA guide
caaggaacuccugaauaagcga

SEQ ID NO: 18372 - RNA, 22 nt, Artificial Sequence
  LRRK2 RNA guide
caccaaggaacuccugaauaag

SEQ ID NO: 18373 - RNA, 22 nt, Artificial Sequence
  LRRK2 RNA guide
cagggaacucucgcuuauucag

SEQ ID NO: 18374 - RNA, 22 nt, Artificial Sequence
  LRRK2 RNA guide
ccaaggaacuccugaauaagcg

SEQ ID NO: 18375 - RNA, 22 nt, Artificial Sequence
  LRRK2 RNA guide
ccugaauaagcgagaguucccu

SEQ ID NO: 18376 - RNA, 22 nt, Artificial Sequence
  LRRK2 RNA guide
cgagaguucccugccauacgag

SEQ ID NO: 18377 - RNA, 22 nt, Artificial Sequence
  LRRK2 RNA guide
cguauggcagggaacucucgcu

SEQ ID NO: 18378 - RNA, 22 nt, Artificial Sequence
  LRRK2 RNA guide
cuccugaauaagcgagaguucc

SEQ ID NO: 18379 - RNA, 22 nt, Artificial Sequence
  LRRK2 RNA guide
cucguauggcagggaacucucg

SEQ ID NO: 18380 - RNA, 22 nt, Artificial Sequence
  LRRK2 RNA guide
cucucgcuuauucaggaguucc

SEQ ID NO: 18381 - RNA, 22 nt, Artificial Sequence
  LRRK2 RNA guide
cugaauaagcgagaguucccug

SEQ ID NO: 18382 - RNA, 22 nt, Artificial Sequence
  LRRK2 RNA guide
gaacuccugaauaagcgagagu

SEQ ID NO: 18383 - RNA, 22 nt, Artificial Sequence
  LRRK2 RNA guide
gaacucucgcuuauucaggagu

SEQ ID NO: 18384 - RNA, 22 nt, Artificial Sequence
  LRRK2 RNA guide
gaauaagcgagaguucccugcc

SEQ ID NO: 18385 - RNA, 22 nt, Artificial Sequence
  LRRK2 RNA guide
gagaguucccugccauacgaga

SEQ ID NO: 18386 - RNA, 22 nt, Artificial Sequence
  LRRK2 RNA guide
gaguucccugccauacgagauu

SEQ ID NO: 18387 - RNA, 22 nt, Artificial Sequence
  LRRK2 RNA guide
gcagggaacucucgcuuauuca

SEQ ID NO: 18388 - RNA, 22 nt, Artificial Sequence
  LRRK2 RNA guide
gcgagaguucccugccauacga

SEQ ID NO: 18389 - RNA, 22 nt, Artificial Sequence
  LRRK2 RNA guide
ggaacuccugaauaagcgagag

SEQ ID NO: 18390 - RNA, 22 nt, Artificial Sequence
  LRRK2 RNA guide
ggaacucucgcuuauucaggag

SEQ ID NO: 18391 - RNA, 22 nt, Artificial Sequence
  LRRK2 RNA guide
ggcagggaacucucgcuuauuc

SEQ ID NO: 18392 - RNA, 22 nt, Artificial Sequence
  LRRK2 RNA guide
gggaacucucgcuuauucagga

SEQ ID NO: 18393 - RNA, 22 nt, Artificial Sequence
  LRRK2 RNA guide
gguaaucucguauggcagggaa

SEQ ID NO: 18394 - RNA, 22 nt, Artificial Sequence
  LRRK2 RNA guide
guaaucucguauggcagggaac

SEQ ID NO: 18395 - RNA, 22 nt, Artificial Sequence
  LRRK2 RNA guide
guauggcagggaacucucgcuu

SEQ ID NO: 18396 - RNA, 22 nt, Artificial Sequence
  LRRK2 RNA guide
gugguaaucucguauggcaggg

SEQ ID NO: 18397 - RNA, 22 nt, Artificial Sequence
  LRRK2 RNA guide
uaagcgagaguucccugccaua

SEQ ID NO: 18398 - RNA, 22 nt, Artificial Sequence
  LRRK2 RNA guide
uaaucucguauggcagggaacu

SEQ ID NO: 18399 - RNA, 22 nt, Artificial Sequence
  LRRK2 RNA guide
uauggcagggaacucucgcuua

SEQ ID NO: 18400 - RNA, 22 nt, Artificial Sequence
  LRRK2 RNA guide
uccugaauaagcgagaguuccc

SEQ ID NO: 18401 - RNA, 22 nt, Artificial Sequence
  LRRK2 RNA guide
ucguauggcagggaacucucgc

SEQ ID NO: 18402 - RNA, 22 nt, Artificial Sequence
  LRRK2 RNA guide
ucucguauggcagggaacucuc

SEQ ID NO: 18403 - RNA, 22 nt, Artificial Sequence
  LRRK2 RNA guide
ugaauaagcgagaguucccugc

SEQ ID NO: 18404 - RNA, 22 nt, Artificial Sequence
  LRRK2 RNA guide
uggcagggaacucucgcuuauu

SEQ ID NO: 18405 - RNA, 22 nt, Artificial Sequence
  LRRK2 RNA guide
ugguaaucucguauggcaggga

SEQ ID NO: 18406 - RNA, 20 nt, Artificial Sequence
  LRRK2 RNA guide
aaagugguaaucucguaugg

SEQ ID NO: 18407 - RNA, 20 nt, Artificial Sequence
  LRRK2 RNA guide
aagcgaggguucccuaccau

SEQ ID NO: 18408 - RNA, 20 nt, Artificial Sequence
  LRRK2 RNA guide
aagugguaaucucguauggu

SEQ ID NO: 18409 - RNA, 20 nt, Artificial Sequence
  LRRK2 RNA guide
aauaagcgaggguucccuac

SEQ ID NO: 18410 - RNA, 20 nt, Artificial Sequence
  LRRK2 RNA guide
aaucucguaugguagggaac

SEQ ID NO: 18411 - RNA, 20 nt, Artificial Sequence
  LRRK2 RNA guide
acaaagugguaaucucguau

SEQ ID NO: 18412 - RNA, 20 nt, Artificial Sequence
  LRRK2 RNA guide
agcgaggguucccuaccaua

SEQ ID NO: 18413 - RNA, 20 nt, Artificial Sequence
  LRRK2 RNA guide
aggguucccuaccauacgag

SEQ ID NO: 18414 - RNA, 20 nt, Artificial Sequence
  LRRK2 RNA guide
agugguaaucucguauggua

SEQ ID NO: 18415 - RNA, 20 nt, Artificial Sequence
  LRRK2 RNA guide
auaagcgaggguucccuacc

SEQ ID NO: 18416 - RNA, 20 nt, Artificial Sequence
  LRRK2 RNA guide
aucucguaugguagggaacc

SEQ ID NO: 18417 - RNA, 20 nt, Artificial Sequence
  LRRK2 RNA guide
augguagggaacccucgcuu

SEQ ID NO: 18418 - RNA, 20 nt, Artificial Sequence
  LRRK2 RNA guide
caaagugguaaucucguaug

SEQ ID NO: 18419 - RNA, 20 nt, Artificial Sequence
  LRRK2 RNA guide
cacaaagugguaaucucgua

SEQ ID NO: 18420 - RNA, 20 nt, Artificial Sequence
  LRRK2 RNA guide
cccuaccauacgagauuacc

SEQ ID NO: 18421 - RNA, 20 nt, Artificial Sequence
  LRRK2 RNA guide
ccuaccauacgagauuacca

SEQ ID NO: 18422 - RNA, 20 nt, Artificial Sequence
  LRRK2 RNA guide
ccugaauaagcgaggguucc

SEQ ID NO: 18423 - RNA, 20 nt, Artificial Sequence
  LRRK2 RNA guide
cgaggguucccuaccauacg

SEQ ID NO: 18424 - RNA, 20 nt, Artificial Sequence
  LRRK2 RNA guide
cguaugguagggaacccucg

SEQ ID NO: 18425 - RNA, 20 nt, Artificial Sequence
  LRRK2 RNA guide
cuaccauacgagauuaccac

SEQ ID NO: 18426 - RNA, 20 nt, Artificial Sequence
  LRRK2 RNA guide
cuccugaauaagcgaggguu

SEQ ID NO: 18427 - RNA, 20 nt, Artificial Sequence
  LRRK2 RNA guide
cucguaugguagggaacccu

SEQ ID NO: 18428 - RNA, 20 nt, Artificial Sequence
  LRRK2 RNA guide
cugaauaagcgaggguuccc

SEQ ID NO: 18429 - RNA, 20 nt, Artificial Sequence
  LRRK2 RNA guide
gaauaagcgaggguucccua

SEQ ID NO: 18430 - RNA, 20 nt, Artificial Sequence
  LRRK2 RNA guide
gaggguucccuaccauacga

SEQ ID NO: 18431 - RNA, 20 nt, Artificial Sequence
  LRRK2 RNA guide
gcgaggguucccuaccauac

SEQ ID NO: 18432 - RNA, 20 nt, Artificial Sequence
  LRRK2 RNA guide
ggguucccuaccauacgaga

SEQ ID NO: 18433 - RNA, 20 nt, Artificial Sequence
  LRRK2 RNA guide
gguaaucucguaugguaggg

SEQ ID NO: 18434 - RNA, 20 nt, Artificial Sequence
  LRRK2 RNA guide
gguagggaacccucgcuuau

SEQ ID NO: 18435 - RNA, 20 nt, Artificial Sequence
  LRRK2 RNA guide
gguucccuaccauacgagau

SEQ ID NO: 18436 - RNA, 20 nt, Artificial Sequence
  LRRK2 RNA guide
guaaucucguaugguaggga

SEQ ID NO: 18437 - RNA, 20 nt, Artificial Sequence
  LRRK2 RNA guide
guagggaacccucgcuuauu

SEQ ID NO: 18438 - RNA, 20 nt, Artificial Sequence
  LRRK2 RNA guide
guaugguagggaacccucgc

SEQ ID NO: 18439 - RNA, 20 nt, Artificial Sequence
  LRRK2 RNA guide
gugguaaucucguaugguag

SEQ ID NO: 18440 - RNA, 20 nt, Artificial Sequence
  LRRK2 RNA guide
guucccuaccauacgagauu

SEQ ID NO: 18441 - RNA, 20 nt, Artificial Sequence
  LRRK2 RNA guide
uaagcgaggguucccuacca

SEQ ID NO: 18442 - RNA, 20 nt, Artificial Sequence
  LRRK2 RNA guide
uaaucucguaugguagggaa

SEQ ID NO: 18443 - RNA, 20 nt, Artificial Sequence
  LRRK2 RNA guide
uaccauacgagauuaccacu

SEQ ID NO: 18444 - RNA, 20 nt, Artificial Sequence
  LRRK2 RNA guide
uaugguagggaacccucgcu

SEQ ID NO: 18445 - RNA, 20 nt, Artificial Sequence
  LRRK2 RNA guide
ucacaaagugguaaucucgu

SEQ ID NO: 18446 - RNA, 20 nt, Artificial Sequence
  LRRK2 RNA guide
ucccuaccauacgagauuac

SEQ ID NO: 18447 - RNA, 20 nt, Artificial Sequence
  LRRK2 RNA guide
uccugaauaagcgaggguuc

SEQ ID NO: 18448 - RNA, 20 nt, Artificial Sequence
  LRRK2 RNA guide
ucguaugguagggaacccuc

SEQ ID NO: 18449 - RNA, 20 nt, Artificial Sequence
  LRRK2 RNA guide
ucucguaugguagggaaccc

SEQ ID NO: 18450 - RNA, 20 nt, Artificial Sequence
  LRRK2 RNA guide
ugaauaagcgaggguucccu

SEQ ID NO: 18451 - RNA, 20 nt, Artificial Sequence
  LRRK2 RNA guide
ugguaaucucguaugguagg

SEQ ID NO: 18452 - RNA, 20 nt, Artificial Sequence
  LRRK2 RNA guide
ugguagggaacccucgcuua

SEQ ID NO: 18453 - RNA, 20 nt, Artificial Sequence
  LRRK2 RNA guide
uucccuaccauacgagauua

SEQ ID NO: 18454 - RNA, 21 nt, Artificial Sequence
  LRRK2 RNA guide
aaagugguaaucucguauggu

SEQ ID NO: 18455 - RNA, 21 nt, Artificial Sequence
  LRRK2 RNA guide
aagcgaggguucccuaccaua

SEQ ID NO: 18456 - RNA, 21 nt, Artificial Sequence
  LRRK2 RNA guide
aagugguaaucucguauggua

SEQ ID NO: 18457 - RNA, 21 nt, Artificial Sequence
  LRRK2 RNA guide
aauaagcgaggguucccuacc

SEQ ID NO: 18458 - RNA, 21 nt, Artificial Sequence
  LRRK2 RNA guide
aaucucguaugguagggaacc

SEQ ID NO: 18459 - RNA, 21 nt, Artificial Sequence
  LRRK2 RNA guide
acaaagugguaaucucguaug

SEQ ID NO: 18460 - RNA, 21 nt, Artificial Sequence
  LRRK2 RNA guide
acuccugaauaagcgaggguu

SEQ ID NO: 18461 - RNA, 21 nt, Artificial Sequence
  LRRK2 RNA guide
agcgaggguucccuaccauac

SEQ ID NO: 18462 - RNA, 21 nt, Artificial Sequence
  LRRK2 RNA guide
aggguucccuaccauacgaga

SEQ ID NO: 18463 - RNA, 21 nt, Artificial Sequence
  LRRK2 RNA guide
agugguaaucucguaugguag

SEQ ID NO: 18464 - RNA, 21 nt, Artificial Sequence
  LRRK2 RNA guide
auaagcgaggguucccuacca

SEQ ID NO: 18465 - RNA, 21 nt, Artificial Sequence
  LRRK2 RNA guide
aucucguaugguagggaaccc

SEQ ID NO: 18466 - RNA, 21 nt, Artificial Sequence
  LRRK2 RNA guide
augguagggaacccucgcuua

SEQ ID NO: 18467 - RNA, 21 nt, Artificial Sequence
  LRRK2 RNA guide
caaagugguaaucucguaugg

SEQ ID NO: 18468 - RNA, 21 nt, Artificial Sequence
  LRRK2 RNA guide
cacaaagugguaaucucguau

SEQ ID NO: 18469 - RNA, 21 nt, Artificial Sequence
  LRRK2 RNA guide
cccuaccauacgagauuacca

SEQ ID NO: 18470 - RNA, 21 nt, Artificial Sequence
  LRRK2 RNA guide
ccuaccauacgagauuaccac

SEQ ID NO: 18471 - RNA, 21 nt, Artificial Sequence
  LRRK2 RNA guide
ccugaauaagcgaggguuccc

SEQ ID NO: 18472 - RNA, 21 nt, Artificial Sequence
  LRRK2 RNA guide
cgaggguucccuaccauacga

SEQ ID NO: 18473 - RNA, 21 nt, Artificial Sequence
  LRRK2 RNA guide
cguaugguagggaacccucgc

SEQ ID NO: 18474 - RNA, 21 nt, Artificial Sequence
  LRRK2 RNA guide
cuaccauacgagauuaccacu

SEQ ID NO: 18475 - RNA, 21 nt, Artificial Sequence
  LRRK2 RNA guide
cuccugaauaagcgaggguuc

SEQ ID NO: 18476 - RNA, 21 nt, Artificial Sequence
  LRRK2 RNA guide
cucguaugguagggaacccuc

SEQ ID NO: 18477 - RNA, 21 nt, Artificial Sequence
  LRRK2 RNA guide
cugaauaagcgaggguucccu

SEQ ID NO: 18478 - RNA, 21 nt, Artificial Sequence
  LRRK2 RNA guide
gaauaagcgaggguucccuac

SEQ ID NO: 18479 - RNA, 21 nt, Artificial Sequence
  LRRK2 RNA guide
gaggguucccuaccauacgag

SEQ ID NO: 18480 - RNA, 21 nt, Artificial Sequence
  LRRK2 RNA guide
gcgaggguucccuaccauacg

SEQ ID NO: 18481 - RNA, 21 nt, Artificial Sequence
  LRRK2 RNA guide
ggguucccuaccauacgagau

SEQ ID NO: 18482 - RNA, 21 nt, Artificial Sequence
  LRRK2 RNA guide
gguaaucucguaugguaggga

SEQ ID NO: 18483 - RNA, 21 nt, Artificial Sequence
  LRRK2 RNA guide
gguagggaacccucgcuuauu

SEQ ID NO: 18484 - RNA, 21 nt, Artificial Sequence
  LRRK2 RNA guide
gguucccuaccauacgagauu

SEQ ID NO: 18485 - RNA, 21 nt, Artificial Sequence
  LRRK2 RNA guide
guaaucucguaugguagggaa

SEQ ID NO: 18486 - RNA, 21 nt, Artificial Sequence
  LRRK2 RNA guide
guagggaacccucgcuuauuc

SEQ ID NO: 18487 - RNA, 21 nt, Artificial Sequence
  LRRK2 RNA guide
guaugguagggaacccucgcu

SEQ ID NO: 18488 - RNA, 21 nt, Artificial Sequence
  LRRK2 RNA guide
gugguaaucucguaugguagg

SEQ ID NO: 18489 - RNA, 21 nt, Artificial Sequence
  LRRK2 RNA guide
guucccuaccauacgagauua

SEQ ID NO: 18490 - RNA, 21 nt, Artificial Sequence
  LRRK2 RNA guide
uaagcgaggguucccuaccau

SEQ ID NO: 18491 - RNA, 21 nt, Artificial Sequence
  LRRK2 RNA guide
uaaucucguaugguagggaac

SEQ ID NO: 18492 - RNA, 21 nt, Artificial Sequence
  LRRK2 RNA guide
uaccauacgagauuaccacuu

SEQ ID NO: 18493 - RNA, 21 nt, Artificial Sequence
  LRRK2 RNA guide
uaugguagggaacccucgcuu

SEQ ID NO: 18494 - RNA, 21 nt, Artificial Sequence
  LRRK2 RNA guide
ucacaaagugguaaucucgua

SEQ ID NO: 18495 - RNA, 21 nt, Artificial Sequence
  LRRK2 RNA guide
ucccuaccauacgagauuacc

SEQ ID NO: 18496 - RNA, 21 nt, Artificial Sequence
  LRRK2 RNA guide
uccugaauaagcgaggguucc

SEQ ID NO: 18497 - RNA, 21 nt, Artificial Sequence
  LRRK2 RNA guide
ucguaugguagggaacccucg

SEQ ID NO: 18498 - RNA, 21 nt, Artificial Sequence
  LRRK2 RNA guide
ucucguaugguagggaacccu

SEQ ID NO: 18499 - RNA, 21 nt, Artificial Sequence
  LRRK2 RNA guide
ugaauaagcgaggguucccua

SEQ ID NO: 18500 - RNA, 21 nt, Artificial Sequence
  LRRK2 RNA guide
ugguaaucucguaugguaggg

SEQ ID NO: 18501 - RNA, 21 nt, Artificial Sequence
  LRRK2 RNA guide
ugguagggaacccucgcuuau

SEQ ID NO: 18502 - RNA, 21 nt, Artificial Sequence
  LRRK2 RNA guide
uucacaaagugguaaucucgu

SEQ ID NO: 18503 - RNA, 21 nt, Artificial Sequence
  LRRK2 RNA guide
uucccuaccauacgagauuac

SEQ ID NO: 18504 - RNA, 22 nt, Artificial Sequence
  LRRK2 RNA guide
aaagugguaaucucguauggua

SEQ ID NO: 18505 - RNA, 22 nt, Artificial Sequence
  LRRK2 RNA guide
aacuccugaauaagcgaggguu

SEQ ID NO: 18506 - RNA, 22 nt, Artificial Sequence
  LRRK2 RNA guide
aagcgaggguucccuaccauac

SEQ ID NO: 18507 - RNA, 22 nt, Artificial Sequence
  LRRK2 RNA guide
aagugguaaucucguaugguag

SEQ ID NO: 18508 - RNA, 22 nt, Artificial Sequence
  LRRK2 RNA guide
aauaagcgaggguucccuacca

SEQ ID NO: 18509 - RNA, 22 nt, Artificial Sequence
  LRRK2 RNA guide
aaucucguaugguagggaaccc

SEQ ID NO: 18510 - RNA, 22 nt, Artificial Sequence
  LRRK2 RNA guide
acaaagugguaaucucguaugg

SEQ ID NO: 18511 - RNA, 22 nt, Artificial Sequence
  LRRK2 RNA guide
acuccugaauaagcgaggguuc

SEQ ID NO: 18512 - RNA, 22 nt, Artificial Sequence
  LRRK2 RNA guide
agcgaggguucccuaccauacg

SEQ ID NO: 18513 - RNA, 22 nt, Artificial Sequence
  LRRK2 RNA guide
aggguucccuaccauacgagau

SEQ ID NO: 18514 - RNA, 22 nt, Artificial Sequence
  LRRK2 RNA guide
agugguaaucucguaugguagg

SEQ ID NO: 18515 - RNA, 22 nt, Artificial Sequence
  LRRK2 RNA guide
auaagcgaggguucccuaccau

SEQ ID NO: 18516 - RNA, 22 nt, Artificial Sequence
  LRRK2 RNA guide
aucucguaugguagggaacccu

SEQ ID NO: 18517 - RNA, 22 nt, Artificial Sequence
  LRRK2 RNA guide
augguagggaacccucgcuuau

SEQ ID NO: 18518 - RNA, 22 nt, Artificial Sequence
  LRRK2 RNA guide
auucacaaagugguaaucucgu

SEQ ID NO: 18519 - RNA, 22 nt, Artificial Sequence
  LRRK2 RNA guide
caaagugguaaucucguauggu

SEQ ID NO: 18520 - RNA, 22 nt, Artificial Sequence
  LRRK2 RNA guide
cacaaagugguaaucucguaug

SEQ ID NO: 18521 - RNA, 22 nt, Artificial Sequence
  LRRK2 RNA guide
cccuaccauacgagauuaccac

SEQ ID NO: 18522 - RNA, 22 nt, Artificial Sequence
  LRRK2 RNA guide
ccuaccauacgagauuaccacu

SEQ ID NO: 18523 - RNA, 22 nt, Artificial Sequence
  LRRK2 RNA guide
ccugaauaagcgaggguucccu

SEQ ID NO: 18524 - RNA, 22 nt, Artificial Sequence
  LRRK2 RNA guide
cgaggguucccuaccauacgag

SEQ ID NO: 18525 - RNA, 22 nt, Artificial Sequence
  LRRK2 RNA guide
cguaugguagggaacccucgcu

SEQ ID NO: 18526 - RNA, 22 nt, Artificial Sequence
  LRRK2 RNA guide
cuaccauacgagauuaccacuu

SEQ ID NO: 18527 - RNA, 22 nt, Artificial Sequence
  LRRK2 RNA guide
cuccugaauaagcgaggguucc

SEQ ID NO: 18528 - RNA, 22 nt, Artificial Sequence
  LRRK2 RNA guide
cucguaugguagggaacccucg

SEQ ID NO: 18529 - RNA, 22 nt, Artificial Sequence
  LRRK2 RNA guide
cugaauaagcgaggguucccua

SEQ ID NO: 18530 - RNA, 22 nt, Artificial Sequence
  LRRK2 RNA guide
gaauaagcgaggguucccuacc

SEQ ID NO: 18531 - RNA, 22 nt, Artificial Sequence
  LRRK2 RNA guide
gaggguucccuaccauacgaga

SEQ ID NO: 18532 - RNA, 22 nt, Artificial Sequence
  LRRK2 RNA guide
gcgaggguucccuaccauacga

SEQ ID NO: 18533 - RNA, 22 nt, Artificial Sequence
  LRRK2 RNA guide
ggguucccuaccauacgagauu

SEQ ID NO: 18534 - RNA, 22 nt, Artificial Sequence
  LRRK2 RNA guide
gguaaucucguaugguagggaa

SEQ ID NO: 18535 - RNA, 22 nt, Artificial Sequence
  LRRK2 RNA guide
gguagggaacccucgcuuauuc

SEQ ID NO: 18536 - RNA, 22 nt, Artificial Sequence
  LRRK2 RNA guide
gguucccuaccauacgagauua

SEQ ID NO: 18537 - RNA, 22 nt, Artificial Sequence
  LRRK2 RNA guide
guaaucucguaugguagggaac

SEQ ID NO: 18538 - RNA, 22 nt, Artificial Sequence
  LRRK2 RNA guide
guagggaacccucgcuuauuca

SEQ ID NO: 18539 - RNA, 22 nt, Artificial Sequence
  LRRK2 RNA guide
guaugguagggaacccucgcuu

SEQ ID NO: 18540 - RNA, 22 nt, Artificial Sequence
  LRRK2 RNA guide
gugguaaucucguaugguaggg

SEQ ID NO: 18541 - RNA, 22 nt, Artificial Sequence
  LRRK2 RNA guide
guucccuaccauacgagauuac

SEQ ID NO: 18542 - RNA, 22 nt, Artificial Sequence
  LRRK2 RNA guide
uaagcgaggguucccuaccaua

SEQ ID NO: 18543 - RNA, 22 nt, Artificial Sequence
  LRRK2 RNA guide
uaaucucguaugguagggaacc

SEQ ID NO: 18544 - RNA, 22 nt, Artificial Sequence
  LRRK2 RNA guide
uaccauacgagauuaccacuuu

SEQ ID NO: 18545 - RNA, 22 nt, Artificial Sequence
  LRRK2 RNA guide
uaugguagggaacccucgcuua

SEQ ID NO: 18546 - RNA, 22 nt, Artificial Sequence
  LRRK2 RNA guide
ucacaaagugguaaucucguau

SEQ ID NO: 18547 - RNA, 22 nt, Artificial Sequence
  LRRK2 RNA guide
ucccuaccauacgagauuacca

SEQ ID NO: 18548 - RNA, 22 nt, Artificial Sequence
  LRRK2 RNA guide
uccugaauaagcgaggguuccc

SEQ ID NO: 18549 - RNA, 22 nt, Artificial Sequence
  LRRK2 RNA guide
ucguaugguagggaacccucgc

SEQ ID NO: 18550 - RNA, 22 nt, Artificial Sequence
  LRRK2 RNA guide
ucucguaugguagggaacccuc

SEQ ID NO: 18551 - RNA, 22 nt, Artificial Sequence
  LRRK2 RNA guide
ugaauaagcgaggguucccuac

SEQ ID NO: 18552 - RNA, 22 nt, Artificial Sequence
  LRRK2 RNA guide
ugguaaucucguaugguaggga

SEQ ID NO: 18553 - RNA, 22 nt, Artificial Sequence
  LRRK2 RNA guide
ugguagggaacccucgcuuauu

SEQ ID NO: 18554 - RNA, 22 nt, Artificial Sequence
  LRRK2 RNA guide
uucacaaagugguaaucucgua

SEQ ID NO: 18555 - RNA, 22 nt, Artificial Sequence
  LRRK2 RNA guide
uucccuaccauacgagauuacc

SEQ ID NO: 18556 - RNA, 20 nt, Artificial Sequence
  LRRK2 RNA guide
aaagugguaaucuuguaugg

SEQ ID NO: 18557 - RNA, 20 nt, Artificial Sequence
  LRRK2 RNA guide
aagcgaggguucccugccau

SEQ ID NO: 18558 - RNA, 20 nt, Artificial Sequence
  LRRK2 RNA guide
aagugguaaucuuguauggc

SEQ ID NO: 18559 - RNA, 20 nt, Artificial Sequence
  LRRK2 RNA guide
aaucuuguauggcagggaac

SEQ ID NO: 18560 - RNA, 20 nt, Artificial Sequence
  LRRK2 RNA guide
acaaagugguaaucuuguau

SEQ ID NO: 18561 - RNA, 20 nt, Artificial Sequence
  LRRK2 RNA guide
acaagauuaccacuuuguga

SEQ ID NO: 18562 - RNA, 20 nt, Artificial Sequence
  LRRK2 RNA guide
agcgaggguucccugccaua

SEQ ID NO: 18563 - RNA, 20 nt, Artificial Sequence
  LRRK2 RNA guide
aggguucccugccauacaag

SEQ ID NO: 18564 - RNA, 20 nt, Artificial Sequence
  LRRK2 RNA guide
agugguaaucuuguauggca

SEQ ID NO: 18565 - RNA, 20 nt, Artificial Sequence
  LRRK2 RNA guide
auaagcgaggguucccugcc

SEQ ID NO: 18566 - RNA, 20 nt, Artificial Sequence
  LRRK2 RNA guide
auacaagauuaccacuuugu

SEQ ID NO: 18567 - RNA, 20 nt, Artificial Sequence
  LRRK2 RNA guide
aucuuguauggcagggaacc

SEQ ID NO: 18568 - RNA, 20 nt, Artificial Sequence
  LRRK2 RNA guide
auucacaaagugguaaucuu

SEQ ID NO: 18569 - RNA, 20 nt, Artificial Sequence
  LRRK2 RNA guide
caaagugguaaucuuguaug

SEQ ID NO: 18570 - RNA, 20 nt, Artificial Sequence
  LRRK2 RNA guide
caagauuaccacuuugugaa

SEQ ID NO: 18571 - RNA, 20 nt, Artificial Sequence
  LRRK2 RNA guide
cacaaagugguaaucuugua

SEQ ID NO: 18572 - RNA, 20 nt, Artificial Sequence
  LRRK2 RNA guide
cauacaagauuaccacuuug

SEQ ID NO: 18573 - RNA, 20 nt, Artificial Sequence
  LRRK2 RNA guide
cauucacaaagugguaaucu

SEQ ID NO: 18574 - RNA, 20 nt, Artificial Sequence
  LRRK2 RNA guide
ccauacaagauuaccacuuu

SEQ ID NO: 18575 - RNA, 20 nt, Artificial Sequence
  LRRK2 RNA guide
cccugccauacaagauuacc

SEQ ID NO: 18576 - RNA, 20 nt, Artificial Sequence
  LRRK2 RNA guide
ccugccauacaagauuacca

SEQ ID NO: 18577 - RNA, 20 nt, Artificial Sequence
  LRRK2 RNA guide
cgaggguucccugccauaca

SEQ ID NO: 18578 - RNA, 20 nt, Artificial Sequence
  LRRK2 RNA guide
cugccauacaagauuaccac

SEQ ID NO: 18579 - RNA, 20 nt, Artificial Sequence
  LRRK2 RNA guide
cuuguauggcagggaacccu

SEQ ID NO: 18580 - RNA, 20 nt, Artificial Sequence
  LRRK2 RNA guide
gaggguucccugccauacaa

SEQ ID NO: 18581 - RNA, 20 nt, Artificial Sequence
  LRRK2 RNA guide
gccauacaagauuaccacuu

SEQ ID NO: 18582 - RNA, 20 nt, Artificial Sequence
  LRRK2 RNA guide
gcgaggguucccugccauac

SEQ ID NO: 18583 - RNA, 20 nt, Artificial Sequence
  LRRK2 RNA guide
ggcauucacaaagugguaau

SEQ ID NO: 18584 - RNA, 20 nt, Artificial Sequence
  LRRK2 RNA guide
ggguucccugccauacaaga

SEQ ID NO: 18585 - RNA, 20 nt, Artificial Sequence
  LRRK2 RNA guide
gguaaucuuguauggcaggg

SEQ ID NO: 18586 - RNA, 20 nt, Artificial Sequence
  LRRK2 RNA guide
gguucccugccauacaagau

SEQ ID NO: 18587 - RNA, 20 nt, Artificial Sequence
  LRRK2 RNA guide
guaaucuuguauggcaggga

SEQ ID NO: 18588 - RNA, 20 nt, Artificial Sequence
  LRRK2 RNA guide
guggcauucacaaaguggua

SEQ ID NO: 18589 - RNA, 20 nt, Artificial Sequence
  LRRK2 RNA guide
gugguaaucuuguauggcag

SEQ ID NO: 18590 - RNA, 20 nt, Artificial Sequence
  LRRK2 RNA guide
guucccugccauacaagauu

SEQ ID NO: 18591 - RNA, 20 nt, Artificial Sequence
  LRRK2 RNA guide
uaagcgaggguucccugcca

SEQ ID NO: 18592 - RNA, 20 nt, Artificial Sequence
  LRRK2 RNA guide
uaaucuuguauggcagggaa

SEQ ID NO: 18593 - RNA, 20 nt, Artificial Sequence
  LRRK2 RNA guide
uacaagauuaccacuuugug

SEQ ID NO: 18594 - RNA, 20 nt, Artificial Sequence
  LRRK2 RNA guide
ucacaaagugguaaucuugu

SEQ ID NO: 18595 - RNA, 20 nt, Artificial Sequence
  LRRK2 RNA guide
ucccugccauacaagauuac

SEQ ID NO: 18596 - RNA, 20 nt, Artificial Sequence
  LRRK2 RNA guide
ucuuguauggcagggaaccc

SEQ ID NO: 18597 - RNA, 20 nt, Artificial Sequence
  LRRK2 RNA guide
ugccauacaagauuaccacu

SEQ ID NO: 18598 - RNA, 20 nt, Artificial Sequence
  LRRK2 RNA guide
uggcauucacaaagugguaa

SEQ ID NO: 18599 - RNA, 20 nt, Artificial Sequence
  LRRK2 RNA guide
ugguaaucuuguauggcagg

SEQ ID NO: 18600 - RNA, 20 nt, Artificial Sequence
  LRRK2 RNA guide
uucacaaagugguaaucuug

SEQ ID NO: 18601 - RNA, 20 nt, Artificial Sequence
  LRRK2 RNA guide
uucccugccauacaagauua

SEQ ID NO: 18602 - RNA, 20 nt, Artificial Sequence
  LRRK2 RNA guide
uuguauggcagggaacccuc

SEQ ID NO: 18603 - RNA, 21 nt, Artificial Sequence
  LRRK2 RNA guide
aaagugguaaucuuguauggc

SEQ ID NO: 18604 - RNA, 21 nt, Artificial Sequence
  LRRK2 RNA guide
aagcgaggguucccugccaua

SEQ ID NO: 18605 - RNA, 21 nt, Artificial Sequence
  LRRK2 RNA guide
aagugguaaucuuguauggca

SEQ ID NO: 18606 - RNA, 21 nt, Artificial Sequence
  LRRK2 RNA guide
aauaagcgaggguucccugcc

SEQ ID NO: 18607 - RNA, 21 nt, Artificial Sequence
  LRRK2 RNA guide
aaucuuguauggcagggaacc

SEQ ID NO: 18608 - RNA, 21 nt, Artificial Sequence
  LRRK2 RNA guide
acaaagugguaaucuuguaug

SEQ ID NO: 18609 - RNA, 21 nt, Artificial Sequence
  LRRK2 RNA guide
acaagauuaccacuuugugaa

SEQ ID NO: 18610 - RNA, 21 nt, Artificial Sequence
  LRRK2 RNA guide
agcgaggguucccugccauac

SEQ ID NO: 18611 - RNA, 21 nt, Artificial Sequence
  LRRK2 RNA guide
aggguucccugccauacaaga

SEQ ID NO: 18612 - RNA, 21 nt, Artificial Sequence
  LRRK2 RNA guide
agugguaaucuuguauggcag

SEQ ID NO: 18613 - RNA, 21 nt, Artificial Sequence
  LRRK2 RNA guide
auaagcgaggguucccugcca

SEQ ID NO: 18614 - RNA, 21 nt, Artificial Sequence
  LRRK2 RNA guide
auacaagauuaccacuuugug

SEQ ID NO: 18615 - RNA, 21 nt, Artificial Sequence
  LRRK2 RNA guide
aucuuguauggcagggaaccc

SEQ ID NO: 18616 - RNA, 21 nt, Artificial Sequence
  LRRK2 RNA guide
auucacaaagugguaaucuug

SEQ ID NO: 18617 - RNA, 21 nt, Artificial Sequence
  LRRK2 RNA guide
caaagugguaaucuuguaugg

SEQ ID NO: 18618 - RNA, 21 nt, Artificial Sequence
  LRRK2 RNA guide
caagauuaccacuuugugaau

SEQ ID NO: 18619 - RNA, 21 nt, Artificial Sequence
  LRRK2 RNA guide
cacaaagugguaaucuuguau

SEQ ID NO: 18620 - RNA, 21 nt, Artificial Sequence
  LRRK2 RNA guide
cauacaagauuaccacuuugu

SEQ ID NO: 18621 - RNA, 21 nt, Artificial Sequence
  LRRK2 RNA guide
cauucacaaagugguaaucuu

SEQ ID NO: 18622 - RNA, 21 nt, Artificial Sequence
  LRRK2 RNA guide
ccauacaagauuaccacuuug

SEQ ID NO: 18623 - RNA, 21 nt, Artificial Sequence
  LRRK2 RNA guide
cccugccauacaagauuacca

SEQ ID NO: 18624 - RNA, 21 nt, Artificial Sequence
  LRRK2 RNA guide
ccugccauacaagauuaccac

SEQ ID NO: 18625 - RNA, 21 nt, Artificial Sequence
  LRRK2 RNA guide
cgaggguucccugccauacaa

SEQ ID NO: 18626 - RNA, 21 nt, Artificial Sequence
  LRRK2 RNA guide
cugccauacaagauuaccacu

SEQ ID NO: 18627 - RNA, 21 nt, Artificial Sequence
  LRRK2 RNA guide
cuuguauggcagggaacccuc

SEQ ID NO: 18628 - RNA, 21 nt, Artificial Sequence
  LRRK2 RNA guide
gaggguucccugccauacaag

SEQ ID NO: 18629 - RNA, 21 nt, Artificial Sequence
  LRRK2 RNA guide
gcauucacaaagugguaaucu

SEQ ID NO: 18630 - RNA, 21 nt, Artificial Sequence
  LRRK2 RNA guide
gccauacaagauuaccacuuu

SEQ ID NO: 18631 - RNA, 21 nt, Artificial Sequence
  LRRK2 RNA guide
gcgaggguucccugccauaca

SEQ ID NO: 18632 - RNA, 21 nt, Artificial Sequence
  LRRK2 RNA guide
ggcauucacaaagugguaauc

SEQ ID NO: 18633 - RNA, 21 nt, Artificial Sequence
  LRRK2 RNA guide
ggguucccugccauacaagau

SEQ ID NO: 18634 - RNA, 21 nt, Artificial Sequence
  LRRK2 RNA guide
gguaaucuuguauggcaggga

SEQ ID NO: 18635 - RNA, 21 nt, Artificial Sequence
  LRRK2 RNA guide
gguggcauucacaaaguggua

SEQ ID NO: 18636 - RNA, 21 nt, Artificial Sequence
  LRRK2 RNA guide
gguucccugccauacaagauu

SEQ ID NO: 18637 - RNA, 21 nt, Artificial Sequence
  LRRK2 RNA guide
guaaucuuguauggcagggaa

SEQ ID NO: 18638 - RNA, 21 nt, Artificial Sequence
  LRRK2 RNA guide
guggcauucacaaagugguaa

SEQ ID NO: 18639 - RNA, 21 nt, Artificial Sequence
  LRRK2 RNA guide
gugguaaucuuguauggcagg

SEQ ID NO: 18640 - RNA, 21 nt, Artificial Sequence
  LRRK2 RNA guide
guucccugccauacaagauua

SEQ ID NO: 18641 - RNA, 21 nt, Artificial Sequence
  LRRK2 RNA guide
uaagcgaggguucccugccau

SEQ ID NO: 18642 - RNA, 21 nt, Artificial Sequence
  LRRK2 RNA guide
uaaucuuguauggcagggaac

SEQ ID NO: 18643 - RNA, 21 nt, Artificial Sequence
  LRRK2 RNA guide
uacaagauuaccacuuuguga

SEQ ID NO: 18644 - RNA, 21 nt, Artificial Sequence
  LRRK2 RNA guide
ucacaaagugguaaucuugua

SEQ ID NO: 18645 - RNA, 21 nt, Artificial Sequence
  LRRK2 RNA guide
ucccugccauacaagauuacc

SEQ ID NO: 18646 - RNA, 21 nt, Artificial Sequence
  LRRK2 RNA guide
ucuuguauggcagggaacccu

SEQ ID NO: 18647 - RNA, 21 nt, Artificial Sequence
  LRRK2 RNA guide
ugccauacaagauuaccacuu

SEQ ID NO: 18648 - RNA, 21 nt, Artificial Sequence
  LRRK2 RNA guide
uggcauucacaaagugguaau

SEQ ID NO: 18649 - RNA, 21 nt, Artificial Sequence
  LRRK2 RNA guide
ugguaaucuuguauggcaggg

SEQ ID NO: 18650 - RNA, 21 nt, Artificial Sequence
  LRRK2 RNA guide
uucacaaagugguaaucuugu

SEQ ID NO: 18651 - RNA, 21 nt, Artificial Sequence
  LRRK2 RNA guide
uucccugccauacaagauuac

SEQ ID NO: 18652 - RNA, 21 nt, Artificial Sequence
  LRRK2 RNA guide
uuguauggcagggaacccucg

SEQ ID NO: 18653 - RNA, 22 nt, Artificial Sequence
  LRRK2 RNA guide
aaagugguaaucuuguauggca

SEQ ID NO: 18654 - RNA, 22 nt, Artificial Sequence
  LRRK2 RNA guide
aagcgaggguucccugccauac

SEQ ID NO: 18655 - RNA, 22 nt, Artificial Sequence
  LRRK2 RNA guide
aagugguaaucuuguauggcag

SEQ ID NO: 18656 - RNA, 22 nt, Artificial Sequence
  LRRK2 RNA guide
aauaagcgaggguucccugcca

SEQ ID NO: 18657 - RNA, 22 nt, Artificial Sequence
  LRRK2 RNA guide
aaucuuguauggcagggaaccc

SEQ ID NO: 18658 - RNA, 22 nt, Artificial Sequence
  LRRK2 RNA guide
acaaagugguaaucuuguaugg

SEQ ID NO: 18659 - RNA, 22 nt, Artificial Sequence
  LRRK2 RNA guide
acaagauuaccacuuugugaau

SEQ ID NO: 18660 - RNA, 22 nt, Artificial Sequence
  LRRK2 RNA guide
agcgaggguucccugccauaca

SEQ ID NO: 18661 - RNA, 22 nt, Artificial Sequence
  LRRK2 RNA guide
aggguucccugccauacaagau

SEQ ID NO: 18662 - RNA, 22 nt, Artificial Sequence
  LRRK2 RNA guide
agugguaaucuuguauggcagg

SEQ ID NO: 18663 - RNA, 22 nt, Artificial Sequence
  LRRK2 RNA guide
auaagcgaggguucccugccau

SEQ ID NO: 18664 - RNA, 22 nt, Artificial Sequence
  LRRK2 RNA guide
auacaagauuaccacuuuguga

SEQ ID NO: 18665 - RNA, 22 nt, Artificial Sequence
  LRRK2 RNA guide
aucuuguauggcagggaacccu

SEQ ID NO: 18666 - RNA, 22 nt, Artificial Sequence
  LRRK2 RNA guide
auucacaaagugguaaucuugu

SEQ ID NO: 18667 - RNA, 22 nt, Artificial Sequence
  LRRK2 RNA guide
caaagugguaaucuuguauggc

SEQ ID NO: 18668 - RNA, 22 nt, Artificial Sequence
  LRRK2 RNA guide
caagauuaccacuuugugaaug

SEQ ID NO: 18669 - RNA, 22 nt, Artificial Sequence
  LRRK2 RNA guide
cacaaagugguaaucuuguaug

SEQ ID NO: 18670 - RNA, 22 nt, Artificial Sequence
  LRRK2 RNA guide
cauacaagauuaccacuuugug

SEQ ID NO: 18671 - RNA, 22 nt, Artificial Sequence
  LRRK2 RNA guide
cauucacaaagugguaaucuug

SEQ ID NO: 18672 - RNA, 22 nt, Artificial Sequence
  LRRK2 RNA guide
ccauacaagauuaccacuuugu

SEQ ID NO: 18673 - RNA, 22 nt, Artificial Sequence
  LRRK2 RNA guide
cccugccauacaagauuaccac

SEQ ID NO: 18674 - RNA, 22 nt, Artificial Sequence
  LRRK2 RNA guide
ccugccauacaagauuaccacu

SEQ ID NO: 18675 - RNA, 22 nt, Artificial Sequence
  LRRK2 RNA guide
cgaggguucccugccauacaag

SEQ ID NO: 18676 - RNA, 22 nt, Artificial Sequence
  LRRK2 RNA guide
cgguggcauucacaaaguggua

SEQ ID NO: 18677 - RNA, 22 nt, Artificial Sequence
  LRRK2 RNA guide
cugccauacaagauuaccacuu

SEQ ID NO: 18678 - RNA, 22 nt, Artificial Sequence
  LRRK2 RNA guide
cuuguauggcagggaacccucg

SEQ ID NO: 18679 - RNA, 22 nt, Artificial Sequence
  LRRK2 RNA guide
gaauaagcgaggguucccugcc

SEQ ID NO: 18680 - RNA, 22 nt, Artificial Sequence
  LRRK2 RNA guide
gaggguucccugccauacaaga

SEQ ID NO: 18681 - RNA, 22 nt, Artificial Sequence
  LRRK2 RNA guide
gcauucacaaagugguaaucuu

SEQ ID NO: 18682 - RNA, 22 nt, Artificial Sequence
  LRRK2 RNA guide
gccauacaagauuaccacuuug

SEQ ID NO: 18683 - RNA, 22 nt, Artificial Sequence
  LRRK2 RNA guide
gcgaggguucccugccauacaa

SEQ ID NO: 18684 - RNA, 22 nt, Artificial Sequence
  LRRK2 RNA guide
ggcauucacaaagugguaaucu

SEQ ID NO: 18685 - RNA, 22 nt, Artificial Sequence
  LRRK2 RNA guide
ggguucccugccauacaagauu

SEQ ID NO: 18686 - RNA, 22 nt, Artificial Sequence
  LRRK2 RNA guide
gguaaucuuguauggcagggaa

SEQ ID NO: 18687 - RNA, 22 nt, Artificial Sequence
  LRRK2 RNA guide
gguggcauucacaaagugguaa

SEQ ID NO: 18688 - RNA, 22 nt, Artificial Sequence
  LRRK2 RNA guide
gguucccugccauacaagauua

SEQ ID NO: 18689 - RNA, 22 nt, Artificial Sequence
  LRRK2 RNA guide
guaaucuuguauggcagggaac

SEQ ID NO: 18690 - RNA, 22 nt, Artificial Sequence
  LRRK2 RNA guide
guggcauucacaaagugguaau

SEQ ID NO: 18691 - RNA, 22 nt, Artificial Sequence
  LRRK2 RNA guide
gugguaaucuuguauggcaggg

SEQ ID NO: 18692 - RNA, 22 nt, Artificial Sequence
  LRRK2 RNA guide
guucccugccauacaagauuac

SEQ ID NO: 18693 - RNA, 22 nt, Artificial Sequence
  LRRK2 RNA guide
uaagcgaggguucccugccaua

SEQ ID NO: 18694 - RNA, 22 nt, Artificial Sequence
  LRRK2 RNA guide
uaaucuuguauggcagggaacc

SEQ ID NO: 18695 - RNA, 22 nt, Artificial Sequence
  LRRK2 RNA guide
uacaagauuaccacuuugugaa

SEQ ID NO: 18696 - RNA, 22 nt, Artificial Sequence
  LRRK2 RNA guide
ucacaaagugguaaucuuguau

SEQ ID NO: 18697 - RNA, 22 nt, Artificial Sequence
  LRRK2 RNA guide
ucccugccauacaagauuacca

SEQ ID NO: 18698 - RNA, 22 nt, Artificial Sequence
  LRRK2 RNA guide
ucuuguauggcagggaacccuc

SEQ ID NO: 18699 - RNA, 22 nt, Artificial Sequence
  LRRK2 RNA guide
ugccauacaagauuaccacuuu

SEQ ID NO: 18700 - RNA, 22 nt, Artificial Sequence
  LRRK2 RNA guide
uggcauucacaaagugguaauc

SEQ ID NO: 18701 - RNA, 22 nt, Artificial Sequence
  LRRK2 RNA guide
ugguaaucuuguauggcaggga

SEQ ID NO: 18702 - RNA, 22 nt, Artificial Sequence
  LRRK2 RNA guide
uucacaaagugguaaucuugua

SEQ ID NO: 18703 - RNA, 22 nt, Artificial Sequence
  LRRK2 RNA guide
uucccugccauacaagauuacc

SEQ ID NO: 18704 - RNA, 22 nt, Artificial Sequence
  LRRK2 RNA guide
uuguauggcagggaacccucgc

SEQ ID NO: 18705 - RNA, 20 nt, Artificial Sequence
  LRRK2 RNA guide
aaaaucauuuuaucagagcg

SEQ ID NO: 18706 - RNA, 20 nt, Artificial Sequence
  LRRK2 RNA guide
aaaucauuuuaucagagcgu

SEQ ID NO: 18707 - RNA, 20 nt, Artificial Sequence
  LRRK2 RNA guide
aaucauuuuaucagagcgua

SEQ ID NO: 18708 - RNA, 20 nt, Artificial Sequence
  LRRK2 RNA guide
acauuuuuacgcucugauaa

SEQ ID NO: 18709 - RNA, 20 nt, Artificial Sequence
  LRRK2 RNA guide
acgcucugauaaaaugauuu

SEQ ID NO: 18710 - RNA, 20 nt, Artificial Sequence
  LRRK2 RNA guide
aucagagcguaaaaaugugc

SEQ ID NO: 18711 - RNA, 20 nt, Artificial Sequence
  LRRK2 RNA guide
aucauuuuaucagagcguaa

SEQ ID NO: 18712 - RNA, 20 nt, Artificial Sequence
  LRRK2 RNA guide
cacauuuuuacgcucugaua

SEQ ID NO: 18713 - RNA, 20 nt, Artificial Sequence
  LRRK2 RNA guide
cagagcguaaaaaugugcca

SEQ ID NO: 18714 - RNA, 20 nt, Artificial Sequence
  LRRK2 RNA guide
cauuuuaucagagcguaaaa

SEQ ID NO: 18715 - RNA, 20 nt, Artificial Sequence
  LRRK2 RNA guide
cauuuuuacgcucugauaaa

SEQ ID NO: 18716 - RNA, 20 nt, Artificial Sequence
  LRRK2 RNA guide
cgcucugauaaaaugauuuu

SEQ ID NO: 18717 - RNA, 20 nt, Artificial Sequence
  LRRK2 RNA guide
gcacauuuuuacgcucugau

SEQ ID NO: 18718 - RNA, 20 nt, Artificial Sequence
  LRRK2 RNA guide
ggcacauuuuuacgcucuga

SEQ ID NO: 18719 - RNA, 20 nt, Artificial Sequence
  LRRK2 RNA guide
uacgcucugauaaaaugauu

SEQ ID NO: 18720 - RNA, 20 nt, Artificial Sequence
  LRRK2 RNA guide
uaucagagcguaaaaaugug

SEQ ID NO: 18721 - RNA, 20 nt, Artificial Sequence
  LRRK2 RNA guide
ucagagcguaaaaaugugcc

SEQ ID NO: 18722 - RNA, 20 nt, Artificial Sequence
  LRRK2 RNA guide
ucauuuuaucagagcguaaa

SEQ ID NO: 18723 - RNA, 20 nt, Artificial Sequence
  LRRK2 RNA guide
uggcacauuuuuacgcucug

SEQ ID NO: 18724 - RNA, 20 nt, Artificial Sequence
  LRRK2 RNA guide
uuacgcucugauaaaaugau

SEQ ID NO: 18725 - RNA, 20 nt, Artificial Sequence
  LRRK2 RNA guide
uuaucagagcguaaaaaugu

SEQ ID NO: 18726 - RNA, 20 nt, Artificial Sequence
  LRRK2 RNA guide
uucaauuggcacauuuuuac

SEQ ID NO: 18727 - RNA, 20 nt, Artificial Sequence
  LRRK2 RNA guide
uuggcacauuuuuacgcucu

SEQ ID NO: 18728 - RNA, 20 nt, Artificial Sequence
  LRRK2 RNA guide
uuuacgcucugauaaaauga

SEQ ID NO: 18729 - RNA, 20 nt, Artificial Sequence
  LRRK2 RNA guide
uuuaucagagcguaaaaaug

SEQ ID NO: 18730 - RNA, 20 nt, Artificial Sequence
  LRRK2 RNA guide
uuuuacgcucugauaaaaug

SEQ ID NO: 18731 - RNA, 21 nt, Artificial Sequence
  LRRK2 RNA guide
aauuggcacauuuuuacgcuc

SEQ ID NO: 18732 - RNA, 21 nt, Artificial Sequence
  LRRK2 RNA guide
aucagagcguaaaaaugugcc

SEQ ID NO: 18733 - RNA, 21 nt, Artificial Sequence
  LRRK2 RNA guide
auuggcacauuuuuacgcucu

SEQ ID NO: 18734 - RNA, 21 nt, Artificial Sequence
  LRRK2 RNA guide
caauuggcacauuuuuacgcu

SEQ ID NO: 18735 - RNA, 21 nt, Artificial Sequence
  LRRK2 RNA guide
cacauuuuuacgcucugauaa

SEQ ID NO: 18736 - RNA, 21 nt, Artificial Sequence
  LRRK2 RNA guide
cagagcguaaaaaugugccaa

SEQ ID NO: 18737 - RNA, 21 nt, Artificial Sequence
  LRRK2 RNA guide
gcacauuuuuacgcucugaua

SEQ ID NO: 18738 - RNA, 21 nt, Artificial Sequence
  LRRK2 RNA guide
ggcacauuuuuacgcucugau

SEQ ID NO: 18739 - RNA, 21 nt, Artificial Sequence
  LRRK2 RNA guide
uaucagagcguaaaaaugugc

SEQ ID NO: 18740 - RNA, 21 nt, Artificial Sequence
  LRRK2 RNA guide
ucaauuggcacauuuuuacgc

SEQ ID NO: 18741 - RNA, 21 nt, Artificial Sequence
  LRRK2 RNA guide
ucagagcguaaaaaugugcca

SEQ ID NO: 18742 - RNA, 21 nt, Artificial Sequence
  LRRK2 RNA guide
uggcacauuuuuacgcucuga

SEQ ID NO: 18743 - RNA, 21 nt, Artificial Sequence
  LRRK2 RNA guide
uuaucagagcguaaaaaugug

SEQ ID NO: 18744 - RNA, 21 nt, Artificial Sequence
  LRRK2 RNA guide
uucaauuggcacauuuuuacg

SEQ ID NO: 18745 - RNA, 21 nt, Artificial Sequence
  LRRK2 RNA guide
uuggcacauuuuuacgcucug

SEQ ID NO: 18746 - RNA, 22 nt, Artificial Sequence
  LRRK2 RNA guide
aauuggcacauuuuuacgcucu

SEQ ID NO: 18747 - RNA, 22 nt, Artificial Sequence
  LRRK2 RNA guide
aucagagcguaaaaaugugcca

SEQ ID NO: 18748 - RNA, 22 nt, Artificial Sequence
  LRRK2 RNA guide
auucaauuggcacauuuuuacg

SEQ ID NO: 18749 - RNA, 22 nt, Artificial Sequence
  LRRK2 RNA guide
auuggcacauuuuuacgcucug

SEQ ID NO: 18750 - RNA, 22 nt, Artificial Sequence
  LRRK2 RNA guide
caauuggcacauuuuuacgcuc

SEQ ID NO: 18751 - RNA, 22 nt, Artificial Sequence
  LRRK2 RNA guide
cacauuuuuacgcucugauaaa

SEQ ID NO: 18752 - RNA, 22 nt, Artificial Sequence
  LRRK2 RNA guide
cagagcguaaaaaugugccaau

SEQ ID NO: 18753 - RNA, 22 nt, Artificial Sequence
  LRRK2 RNA guide
gcacauuuuuacgcucugauaa

SEQ ID NO: 18754 - RNA, 22 nt, Artificial Sequence
  LRRK2 RNA guide
ggcacauuuuuacgcucugaua

SEQ ID NO: 18755 - RNA, 22 nt, Artificial Sequence
  LRRK2 RNA guide
uaucagagcguaaaaaugugcc

SEQ ID NO: 18756 - RNA, 22 nt, Artificial Sequence
  LRRK2 RNA guide
ucaauuggcacauuuuuacgcu

SEQ ID NO: 18757 - RNA, 22 nt, Artificial Sequence
  LRRK2 RNA guide
ucagagcguaaaaaugugccaa

SEQ ID NO: 18758 - RNA, 22 nt, Artificial Sequence
  LRRK2 RNA guide
uggcacauuuuuacgcucugau

SEQ ID NO: 18759 - RNA, 22 nt, Artificial Sequence
  LRRK2 RNA guide
uuaucagagcguaaaaaugugc

SEQ ID NO: 18760 - RNA, 22 nt, Artificial Sequence
  LRRK2 RNA guide
uucaauuggcacauuuuuacgc

SEQ ID NO: 18761 - RNA, 22 nt, Artificial Sequence
  LRRK2 RNA guide
uuggcacauuuuuacgcucuga

SEQ ID NO: 18762 - RNA, 22 nt, Artificial Sequence
  LRRK2 RNA guide
uuuaucagagcguaaaaaugug

SEQ ID NO: 18763 - RNA, 20 nt, Artificial Sequence
  LRRK2 RNA guide
aaugugucaauugaauuucc

SEQ ID NO: 18764 - RNA, 20 nt, Artificial Sequence
  LRRK2 RNA guide
aauuacgggaaauucaauug

SEQ ID NO: 18765 - RNA, 20 nt, Artificial Sequence
  LRRK2 RNA guide
aauugacacauuuuuacgcu

SEQ ID NO: 18766 - RNA, 20 nt, Artificial Sequence
  LRRK2 RNA guide
acgggaaauucaauugacac

SEQ ID NO: 18767 - RNA, 20 nt, Artificial Sequence
  LRRK2 RNA guide
agcguaaaaaugugucaauu

SEQ ID NO: 18768 - RNA, 20 nt, Artificial Sequence
  LRRK2 RNA guide
aucggagcguaaaaaugugu

SEQ ID NO: 18769 - RNA, 20 nt, Artificial Sequence
  LRRK2 RNA guide
augugucaauugaauuuccc

SEQ ID NO: 18770 - RNA, 20 nt, Artificial Sequence
  LRRK2 RNA guide
auuacgggaaauucaauuga

SEQ ID NO: 18771 - RNA, 20 nt, Artificial Sequence
  LRRK2 RNA guide
auugacacauuuuuacgcuc

SEQ ID NO: 18772 - RNA, 20 nt, Artificial Sequence
  LRRK2 RNA guide
auuuuaucggagcguaaaaa

SEQ ID NO: 18773 - RNA, 20 nt, Artificial Sequence
  LRRK2 RNA guide
caauugacacauuuuuacgc

SEQ ID NO: 18774 - RNA, 20 nt, Artificial Sequence
  LRRK2 RNA guide
cggagcguaaaaauguguca

SEQ ID NO: 18775 - RNA, 20 nt, Artificial Sequence
  LRRK2 RNA guide
cgggaaauucaauugacaca

SEQ ID NO: 18776 - RNA, 20 nt, Artificial Sequence
  LRRK2 RNA guide
cguaaaaaugugucaauuga

SEQ ID NO: 18777 - RNA, 20 nt, Artificial Sequence
  LRRK2 RNA guide
gacacauuuuuacgcuccga

SEQ ID NO: 18778 - RNA, 20 nt, Artificial Sequence
  LRRK2 RNA guide
gagcguaaaaaugugucaau

SEQ ID NO: 18779 - RNA, 20 nt, Artificial Sequence
  LRRK2 RNA guide
gcguaaaaaugugucaauug

SEQ ID NO: 18780 - RNA, 20 nt, Artificial Sequence
  LRRK2 RNA guide
ggaaauucaauugacacauu

SEQ ID NO: 18781 - RNA, 20 nt, Artificial Sequence
  LRRK2 RNA guide
ggagcguaaaaaugugucaa

SEQ ID NO: 18782 - RNA, 20 nt, Artificial Sequence
  LRRK2 RNA guide
gggaaauucaauugacacau

SEQ ID NO: 18783 - RNA, 20 nt, Artificial Sequence
  LRRK2 RNA guide
ggucaauuacgggaaauuca

SEQ ID NO: 18784 - RNA, 20 nt, Artificial Sequence
  LRRK2 RNA guide
gucaauuacgggaaauucaa

SEQ ID NO: 18785 - RNA, 20 nt, Artificial Sequence
  LRRK2 RNA guide
gucaauugaauuucccguaa

SEQ ID NO: 18786 - RNA, 20 nt, Artificial Sequence
  LRRK2 RNA guide
gugucaauugaauuucccgu

SEQ ID NO: 18787 - RNA, 20 nt, Artificial Sequence
  LRRK2 RNA guide
uacgggaaauucaauugaca

SEQ ID NO: 18788 - RNA, 20 nt, Artificial Sequence
  LRRK2 RNA guide
uaucggagcguaaaaaugug

SEQ ID NO: 18789 - RNA, 20 nt, Artificial Sequence
  LRRK2 RNA guide
ucaauuacgggaaauucaau

SEQ ID NO: 18790 - RNA, 20 nt, Artificial Sequence
  LRRK2 RNA guide
ucaauugacacauuuuuacg

SEQ ID NO: 18791 - RNA, 20 nt, Artificial Sequence
  LRRK2 RNA guide
ucggagcguaaaaauguguc

SEQ ID NO: 18792 - RNA, 20 nt, Artificial Sequence
  LRRK2 RNA guide
ugacacauuuuuacgcuccg

SEQ ID NO: 18793 - RNA, 20 nt, Artificial Sequence
  LRRK2 RNA guide
ugucaauugaauuucccgua

SEQ ID NO: 18794 - RNA, 20 nt, Artificial Sequence
  LRRK2 RNA guide
ugugucaauugaauuucccg

SEQ ID NO: 18795 - RNA, 20 nt, Artificial Sequence
  LRRK2 RNA guide
uuacgggaaauucaauugac

SEQ ID NO: 18796 - RNA, 20 nt, Artificial Sequence
  LRRK2 RNA guide
uuaucggagcguaaaaaugu

SEQ ID NO: 18797 - RNA, 20 nt, Artificial Sequence
  LRRK2 RNA guide
uugacacauuuuuacgcucc

SEQ ID NO: 18798 - RNA, 20 nt, Artificial Sequence
  LRRK2 RNA guide
uuuaucggagcguaaaaaug

SEQ ID NO: 18799 - RNA, 20 nt, Artificial Sequence
  LRRK2 RNA guide
uuuuaucggagcguaaaaau

SEQ ID NO: 18800 - RNA, 21 nt, Artificial Sequence
  LRRK2 RNA guide
aaugugucaauugaauuuccc

SEQ ID NO: 18801 - RNA, 21 nt, Artificial Sequence
  LRRK2 RNA guide
aauugacacauuuuuacgcuc

SEQ ID NO: 18802 - RNA, 21 nt, Artificial Sequence
  LRRK2 RNA guide
acgggaaauucaauugacaca

SEQ ID NO: 18803 - RNA, 21 nt, Artificial Sequence
  LRRK2 RNA guide
agcguaaaaaugugucaauug

SEQ ID NO: 18804 - RNA, 21 nt, Artificial Sequence
  LRRK2 RNA guide
aucggagcguaaaaauguguc

SEQ ID NO: 18805 - RNA, 21 nt, Artificial Sequence
  LRRK2 RNA guide
augugucaauugaauuucccg

SEQ ID NO: 18806 - RNA, 21 nt, Artificial Sequence
  LRRK2 RNA guide
auuacgggaaauucaauugac

SEQ ID NO: 18807 - RNA, 21 nt, Artificial Sequence
  LRRK2 RNA guide
auugacacauuuuuacgcucc

SEQ ID NO: 18808 - RNA, 21 nt, Artificial Sequence
  LRRK2 RNA guide
caauuacgggaaauucaauug

SEQ ID NO: 18809 - RNA, 21 nt, Artificial Sequence
  LRRK2 RNA guide
caauugacacauuuuuacgcu

SEQ ID NO: 18810 - RNA, 21 nt, Artificial Sequence
  LRRK2 RNA guide
cauuuuaucggagcguaaaaa

SEQ ID NO: 18811 - RNA, 21 nt, Artificial Sequence
  LRRK2 RNA guide
cggagcguaaaaaugugucaa

SEQ ID NO: 18812 - RNA, 21 nt, Artificial Sequence
  LRRK2 RNA guide
cgggaaauucaauugacacau

SEQ ID NO: 18813 - RNA, 21 nt, Artificial Sequence
  LRRK2 RNA guide
cggucaauuacgggaaauuca

SEQ ID NO: 18814 - RNA, 21 nt, Artificial Sequence
  LRRK2 RNA guide
gacacauuuuuacgcuccgau

SEQ ID NO: 18815 - RNA, 21 nt, Artificial Sequence
  LRRK2 RNA guide
gagcguaaaaaugugucaauu

SEQ ID NO: 18816 - RNA, 21 nt, Artificial Sequence
  LRRK2 RNA guide
gcguaaaaaugugucaauuga

SEQ ID NO: 18817 - RNA, 21 nt, Artificial Sequence
  LRRK2 RNA guide
ggagcguaaaaaugugucaau

SEQ ID NO: 18818 - RNA, 21 nt, Artificial Sequence
  LRRK2 RNA guide
gggaaauucaauugacacauu

SEQ ID NO: 18819 - RNA, 21 nt, Artificial Sequence
  LRRK2 RNA guide
ggucaauuacgggaaauucaa

SEQ ID NO: 18820 - RNA, 21 nt, Artificial Sequence
  LRRK2 RNA guide
gucaauuacgggaaauucaau

SEQ ID NO: 18821 - RNA, 21 nt, Artificial Sequence
  LRRK2 RNA guide
gucaauugaauuucccguaau

SEQ ID NO: 18822 - RNA, 21 nt, Artificial Sequence
  LRRK2 RNA guide
gugucaauugaauuucccgua

SEQ ID NO: 18823 - RNA, 21 nt, Artificial Sequence
  LRRK2 RNA guide
uacgggaaauucaauugacac

SEQ ID NO: 18824 - RNA, 21 nt, Artificial Sequence
  LRRK2 RNA guide
uaucggagcguaaaaaugugu

SEQ ID NO: 18825 - RNA, 21 nt, Artificial Sequence
  LRRK2 RNA guide
ucaauugacacauuuuuacgc

SEQ ID NO: 18826 - RNA, 21 nt, Artificial Sequence
  LRRK2 RNA guide
ucggagcguaaaaauguguca

SEQ ID NO: 18827 - RNA, 21 nt, Artificial Sequence
  LRRK2 RNA guide
ugacacauuuuuacgcuccga

SEQ ID NO: 18828 - RNA, 21 nt, Artificial Sequence
  LRRK2 RNA guide
ugucaauugaauuucccguaa

SEQ ID NO: 18829 - RNA, 21 nt, Artificial Sequence
  LRRK2 RNA guide
ugugucaauugaauuucccgu

SEQ ID NO: 18830 - RNA, 21 nt, Artificial Sequence
  LRRK2 RNA guide
uuacgggaaauucaauugaca

SEQ ID NO: 18831 - RNA, 21 nt, Artificial Sequence
  LRRK2 RNA guide
uuaucggagcguaaaaaugug

SEQ ID NO: 18832 - RNA, 21 nt, Artificial Sequence
  LRRK2 RNA guide
uugacacauuuuuacgcuccg

SEQ ID NO: 18833 - RNA, 21 nt, Artificial Sequence
  LRRK2 RNA guide
uuuaucggagcguaaaaaugu

SEQ ID NO: 18834 - RNA, 21 nt, Artificial Sequence
  LRRK2 RNA guide
uuuuaucggagcguaaaaaug

SEQ ID NO: 18835 - RNA, 22 nt, Artificial Sequence
  LRRK2 RNA guide
aaaugugucaauugaauuuccc

SEQ ID NO: 18836 - RNA, 22 nt, Artificial Sequence
  LRRK2 RNA guide
aaugugucaauugaauuucccg

SEQ ID NO: 18837 - RNA, 22 nt, Artificial Sequence
  LRRK2 RNA guide
aauuacgggaaauucaauugac

SEQ ID NO: 18838 - RNA, 22 nt, Artificial Sequence
  LRRK2 RNA guide
aauugacacauuuuuacgcucc

SEQ ID NO: 18839 - RNA, 22 nt, Artificial Sequence
  LRRK2 RNA guide
acgggaaauucaauugacacau

SEQ ID NO: 18840 - RNA, 22 nt, Artificial Sequence
  LRRK2 RNA guide
agcguaaaaaugugucaauuga

SEQ ID NO: 18841 - RNA, 22 nt, Artificial Sequence
  LRRK2 RNA guide
aucggagcguaaaaauguguca

SEQ ID NO: 18842 - RNA, 22 nt, Artificial Sequence
  LRRK2 RNA guide
augugucaauugaauuucccgu

SEQ ID NO: 18843 - RNA, 22 nt, Artificial Sequence
  LRRK2 RNA guide
auuacgggaaauucaauugaca

SEQ ID NO: 18844 - RNA, 22 nt, Artificial Sequence
  LRRK2 RNA guide
auugacacauuuuuacgcuccg

SEQ ID NO: 18845 - RNA, 22 nt, Artificial Sequence
  LRRK2 RNA guide
auuuuaucggagcguaaaaaug

SEQ ID NO: 18846 - RNA, 22 nt, Artificial Sequence
  LRRK2 RNA guide
caauuacgggaaauucaauuga

SEQ ID NO: 18847 - RNA, 22 nt, Artificial Sequence
  LRRK2 RNA guide
caauugacacauuuuuacgcuc

SEQ ID NO: 18848 - RNA, 22 nt, Artificial Sequence
  LRRK2 RNA guide
cauuuuaucggagcguaaaaau

SEQ ID NO: 18849 - RNA, 22 nt, Artificial Sequence
  LRRK2 RNA guide
ccggucaauuacgggaaauuca

SEQ ID NO: 18850 - RNA, 22 nt, Artificial Sequence
  LRRK2 RNA guide
cggagcguaaaaaugugucaau

SEQ ID NO: 18851 - RNA, 22 nt, Artificial Sequence
  LRRK2 RNA guide
cgggaaauucaauugacacauu

SEQ ID NO: 18852 - RNA, 22 nt, Artificial Sequence
  LRRK2 RNA guide
cggucaauuacgggaaauucaa

SEQ ID NO: 18853 - RNA, 22 nt, Artificial Sequence
  LRRK2 RNA guide
gacacauuuuuacgcuccgaua

SEQ ID NO: 18854 - RNA, 22 nt, Artificial Sequence
  LRRK2 RNA guide
gagcguaaaaaugugucaauug

SEQ ID NO: 18855 - RNA, 22 nt, Artificial Sequence
  LRRK2 RNA guide
gcguaaaaaugugucaauugaa

SEQ ID NO: 18856 - RNA, 22 nt, Artificial Sequence
  LRRK2 RNA guide
ggagcguaaaaaugugucaauu

SEQ ID NO: 18857 - RNA, 22 nt, Artificial Sequence
  LRRK2 RNA guide
gggaaauucaauugacacauuu

SEQ ID NO: 18858 - RNA, 22 nt, Artificial Sequence
  LRRK2 RNA guide
ggucaauuacgggaaauucaau

SEQ ID NO: 18859 - RNA, 22 nt, Artificial Sequence
  LRRK2 RNA guide
gucaauuacgggaaauucaauu

SEQ ID NO: 18860 - RNA, 22 nt, Artificial Sequence
  LRRK2 RNA guide
gucaauugaauuucccguaauu

SEQ ID NO: 18861 - RNA, 22 nt, Artificial Sequence
  LRRK2 RNA guide
gugucaauugaauuucccguaa

SEQ ID NO: 18862 - RNA, 22 nt, Artificial Sequence
  LRRK2 RNA guide
uacgggaaauucaauugacaca

SEQ ID NO: 18863 - RNA, 22 nt, Artificial Sequence
  LRRK2 RNA guide
uaucggagcguaaaaauguguc

SEQ ID NO: 18864 - RNA, 22 nt, Artificial Sequence
  LRRK2 RNA guide
ucaauuacgggaaauucaauug

SEQ ID NO: 18865 - RNA, 22 nt, Artificial Sequence
  LRRK2 RNA guide
ucaauugacacauuuuuacgcu

SEQ ID NO: 18866 - RNA, 22 nt, Artificial Sequence
  LRRK2 RNA guide
ucauuuuaucggagcguaaaaa

SEQ ID NO: 18867 - RNA, 22 nt, Artificial Sequence
  LRRK2 RNA guide
ucggagcguaaaaaugugucaa

SEQ ID NO: 18868 - RNA, 22 nt, Artificial Sequence
  LRRK2 RNA guide
ugacacauuuuuacgcuccgau

SEQ ID NO: 18869 - RNA, 22 nt, Artificial Sequence
  LRRK2 RNA guide
ugucaauugaauuucccguaau

SEQ ID NO: 18870 - RNA, 22 nt, Artificial Sequence
  LRRK2 RNA guide
ugugucaauugaauuucccgua

SEQ ID NO: 18871 - RNA, 22 nt, Artificial Sequence
  LRRK2 RNA guide
uuacgggaaauucaauugacac

SEQ ID NO: 18872 - RNA, 22 nt, Artificial Sequence
  LRRK2 RNA guide
uuaucggagcguaaaaaugugu

SEQ ID NO: 18873 - RNA, 22 nt, Artificial Sequence
  LRRK2 RNA guide
uucaauugacacauuuuuacgc

SEQ ID NO: 18874 - RNA, 22 nt, Artificial Sequence
  LRRK2 RNA guide
uugacacauuuuuacgcuccga

SEQ ID NO: 18875 - RNA, 22 nt, Artificial Sequence
  LRRK2 RNA guide
uuuaucggagcguaaaaaugug

SEQ ID NO: 18876 - RNA, 22 nt, Artificial Sequence
  LRRK2 RNA guide
uuuuaucggagcguaaaaaugu

SEQ ID NO: 18877 - RNA, 20 nt, Artificial Sequence
  LRRK2 RNA guide
aaaaaugugccaguugaauu

SEQ ID NO: 18878 - RNA, 20 nt, Artificial Sequence
  LRRK2 RNA guide
aaaaugugccaguugaauuu

SEQ ID NO: 18879 - RNA, 20 nt, Artificial Sequence
  LRRK2 RNA guide
aaaugugccaguugaauuuc

SEQ ID NO: 18880 - RNA, 20 nt, Artificial Sequence
  LRRK2 RNA guide
aaauucaacuggcacauuuu

SEQ ID NO: 18881 - RNA, 20 nt, Artificial Sequence
  LRRK2 RNA guide
aacuggcacauuuuuacgcu

SEQ ID NO: 18882 - RNA, 20 nt, Artificial Sequence
  LRRK2 RNA guide
aaugugccaguugaauuucc

SEQ ID NO: 18883 - RNA, 20 nt, Artificial Sequence
  LRRK2 RNA guide
aauuacgggaaauucaacug

SEQ ID NO: 18884 - RNA, 20 nt, Artificial Sequence
  LRRK2 RNA guide
aauucaacuggcacauuuuu

SEQ ID NO: 18885 - RNA, 20 nt, Artificial Sequence
  LRRK2 RNA guide
acgggaaauucaacuggcac

SEQ ID NO: 18886 - RNA, 20 nt, Artificial Sequence
  LRRK2 RNA guide
acuggcacauuuuuacgcuc

SEQ ID NO: 18887 - RNA, 20 nt, Artificial Sequence
  LRRK2 RNA guide
agcguaaaaaugugccaguu

SEQ ID NO: 18888 - RNA, 20 nt, Artificial Sequence
  LRRK2 RNA guide
aguugaauuucccguaauug

SEQ ID NO: 18889 - RNA, 20 nt, Artificial Sequence
  LRRK2 RNA guide
aucggagcguaaaaaugugc

SEQ ID NO: 18890 - RNA, 20 nt, Artificial Sequence
  LRRK2 RNA guide
augugccaguugaauuuccc

SEQ ID NO: 18891 - RNA, 20 nt, Artificial Sequence
  LRRK2 RNA guide
auuacgggaaauucaacugg

SEQ ID NO: 18892 - RNA, 20 nt, Artificial Sequence
  LRRK2 RNA guide
auucaacuggcacauuuuua

SEQ ID NO: 18893 - RNA, 20 nt, Artificial Sequence
  LRRK2 RNA guide
caacuggcacauuuuuacgc

SEQ ID NO: 18894 - RNA, 20 nt, Artificial Sequence
  LRRK2 RNA guide
caauuacgggaaauucaacu

SEQ ID NO: 18895 - RNA, 20 nt, Artificial Sequence
  LRRK2 RNA guide
caguugaauuucccguaauu

SEQ ID NO: 18896 - RNA, 20 nt, Artificial Sequence
  LRRK2 RNA guide
ccaguugaauuucccguaau

SEQ ID NO: 18897 - RNA, 20 nt, Artificial Sequence
  LRRK2 RNA guide
ccggucaauuacgggaaauu

SEQ ID NO: 18898 - RNA, 20 nt, Artificial Sequence
  LRRK2 RNA guide
cggagcguaaaaaugugcca

SEQ ID NO: 18899 - RNA, 20 nt, Artificial Sequence
  LRRK2 RNA guide
cgggaaauucaacuggcaca

SEQ ID NO: 18900 - RNA, 20 nt, Artificial Sequence
  LRRK2 RNA guide
cguaaaaaugugccaguuga

SEQ ID NO: 18901 - RNA, 20 nt, Artificial Sequence
  LRRK2 RNA guide
gaaauucaacuggcacauuu

SEQ ID NO: 18902 - RNA, 20 nt, Artificial Sequence
  LRRK2 RNA guide
gagcguaaaaaugugccagu

SEQ ID NO: 18903 - RNA, 20 nt, Artificial Sequence
  LRRK2 RNA guide
gccaguugaauuucccguaa

SEQ ID NO: 18904 - RNA, 20 nt, Artificial Sequence
  LRRK2 RNA guide
gcguaaaaaugugccaguug

SEQ ID NO: 18905 - RNA, 20 nt, Artificial Sequence
  LRRK2 RNA guide
ggaaauucaacuggcacauu

SEQ ID NO: 18906 - RNA, 20 nt, Artificial Sequence
  LRRK2 RNA guide
ggagcguaaaaaugugccag

SEQ ID NO: 18907 - RNA, 20 nt, Artificial Sequence
  LRRK2 RNA guide
gggaaauucaacuggcacau

SEQ ID NO: 18908 - RNA, 20 nt, Artificial Sequence
  LRRK2 RNA guide
guaaaaaugugccaguugaa

SEQ ID NO: 18909 - RNA, 20 nt, Artificial Sequence
  LRRK2 RNA guide
gugccaguugaauuucccgu

SEQ ID NO: 18910 - RNA, 20 nt, Artificial Sequence
  LRRK2 RNA guide
uaaaaaugugccaguugaau

SEQ ID NO: 18911 - RNA, 20 nt, Artificial Sequence
  LRRK2 RNA guide
uacgggaaauucaacuggca

SEQ ID NO: 18912 - RNA, 20 nt, Artificial Sequence
  LRRK2 RNA guide
ucaacuggcacauuuuuacg

SEQ ID NO: 18913 - RNA, 20 nt, Artificial Sequence
  LRRK2 RNA guide
ucaauuacgggaaauucaac

SEQ ID NO: 18914 - RNA, 20 nt, Artificial Sequence
  LRRK2 RNA guide
ucggagcguaaaaaugugcc

SEQ ID NO: 18915 - RNA, 20 nt, Artificial Sequence
  LRRK2 RNA guide
ugccaguugaauuucccgua

SEQ ID NO: 18916 - RNA, 20 nt, Artificial Sequence
  LRRK2 RNA guide
ugugccaguugaauuucccg

SEQ ID NO: 18917 - RNA, 20 nt, Artificial Sequence
  LRRK2 RNA guide
uuacgggaaauucaacuggc

SEQ ID NO: 18918 - RNA, 20 nt, Artificial Sequence
  LRRK2 RNA guide
uucaacuggcacauuuuuac

SEQ ID NO: 18919 - RNA, 21 nt, Artificial Sequence
  LRRK2 RNA guide
aaaaugugccaguugaauuuc

SEQ ID NO: 18920 - RNA, 21 nt, Artificial Sequence
  LRRK2 RNA guide
aaaugugccaguugaauuucc

SEQ ID NO: 18921 - RNA, 21 nt, Artificial Sequence
  LRRK2 RNA guide
aacuggcacauuuuuacgcuc

SEQ ID NO: 18922 - RNA, 21 nt, Artificial Sequence
  LRRK2 RNA guide
aaugugccaguugaauuuccc

SEQ ID NO: 18923 - RNA, 21 nt, Artificial Sequence
  LRRK2 RNA guide
aauuacgggaaauucaacugg

SEQ ID NO: 18924 - RNA, 21 nt, Artificial Sequence
  LRRK2 RNA guide
acgggaaauucaacuggcaca

SEQ ID NO: 18925 - RNA, 21 nt, Artificial Sequence
  LRRK2 RNA guide
acuggcacauuuuuacgcucc

SEQ ID NO: 18926 - RNA, 21 nt, Artificial Sequence
  LRRK2 RNA guide
agcguaaaaaugugccaguug

SEQ ID NO: 18927 - RNA, 21 nt, Artificial Sequence
  LRRK2 RNA guide
aguugaauuucccguaauuga

SEQ ID NO: 18928 - RNA, 21 nt, Artificial Sequence
  LRRK2 RNA guide
aucggagcguaaaaaugugcc

SEQ ID NO: 18929 - RNA, 21 nt, Artificial Sequence
  LRRK2 RNA guide
augugccaguugaauuucccg

SEQ ID NO: 18930 - RNA, 21 nt, Artificial Sequence
  LRRK2 RNA guide
auuacgggaaauucaacuggc

SEQ ID NO: 18931 - RNA, 21 nt, Artificial Sequence
  LRRK2 RNA guide
auucaacuggcacauuuuuac

SEQ ID NO: 18932 - RNA, 21 nt, Artificial Sequence
  LRRK2 RNA guide
caacuggcacauuuuuacgcu

SEQ ID NO: 18933 - RNA, 21 nt, Artificial Sequence
  LRRK2 RNA guide
caauuacgggaaauucaacug

SEQ ID NO: 18934 - RNA, 21 nt, Artificial Sequence
  LRRK2 RNA guide
caguugaauuucccguaauug

SEQ ID NO: 18935 - RNA, 21 nt, Artificial Sequence
  LRRK2 RNA guide
ccaguugaauuucccguaauu

SEQ ID NO: 18936 - RNA, 21 nt, Artificial Sequence
  LRRK2 RNA guide
ccggucaauuacgggaaauuc

SEQ ID NO: 18937 - RNA, 21 nt, Artificial Sequence
  LRRK2 RNA guide
cggagcguaaaaaugugccag

SEQ ID NO: 18938 - RNA, 21 nt, Artificial Sequence
  LRRK2 RNA guide
cgggaaauucaacuggcacau

SEQ ID NO: 18939 - RNA, 21 nt, Artificial Sequence
  LRRK2 RNA guide
cguaaaaaugugccaguugaa

SEQ ID NO: 18940 - RNA, 21 nt, Artificial Sequence
  LRRK2 RNA guide
gaaauucaacuggcacauuuu

SEQ ID NO: 18941 - RNA, 21 nt, Artificial Sequence
  LRRK2 RNA guide
gagcguaaaaaugugccaguu

SEQ ID NO: 18942 - RNA, 21 nt, Artificial Sequence
  LRRK2 RNA guide
gccaguugaauuucccguaau

SEQ ID NO: 18943 - RNA, 21 nt, Artificial Sequence
  LRRK2 RNA guide
gcguaaaaaugugccaguuga

SEQ ID NO: 18944 - RNA, 21 nt, Artificial Sequence
  LRRK2 RNA guide
ggaaauucaacuggcacauuu

SEQ ID NO: 18945 - RNA, 21 nt, Artificial Sequence
  LRRK2 RNA guide
ggagcguaaaaaugugccagu

SEQ ID NO: 18946 - RNA, 21 nt, Artificial Sequence
  LRRK2 RNA guide
gggaaauucaacuggcacauu

SEQ ID NO: 18947 - RNA, 21 nt, Artificial Sequence
  LRRK2 RNA guide
guaaaaaugugccaguugaau

SEQ ID NO: 18948 - RNA, 21 nt, Artificial Sequence
  LRRK2 RNA guide
gucaauuacgggaaauucaac

SEQ ID NO: 18949 - RNA, 21 nt, Artificial Sequence
  LRRK2 RNA guide
gugccaguugaauuucccgua

SEQ ID NO: 18950 - RNA, 21 nt, Artificial Sequence
  LRRK2 RNA guide
uacgggaaauucaacuggcac

SEQ ID NO: 18951 - RNA, 21 nt, Artificial Sequence
  LRRK2 RNA guide
uaucggagcguaaaaaugugc

SEQ ID NO: 18952 - RNA, 21 nt, Artificial Sequence
  LRRK2 RNA guide
ucaacuggcacauuuuuacgc

SEQ ID NO: 18953 - RNA, 21 nt, Artificial Sequence
  LRRK2 RNA guide
ucaauuacgggaaauucaacu

SEQ ID NO: 18954 - RNA, 21 nt, Artificial Sequence
  LRRK2 RNA guide
uccggucaauuacgggaaauu

SEQ ID NO: 18955 - RNA, 21 nt, Artificial Sequence
  LRRK2 RNA guide
ucggagcguaaaaaugugcca

SEQ ID NO: 18956 - RNA, 21 nt, Artificial Sequence
  LRRK2 RNA guide
ugccaguugaauuucccguaa

SEQ ID NO: 18957 - RNA, 21 nt, Artificial Sequence
  LRRK2 RNA guide
ugugccaguugaauuucccgu

SEQ ID NO: 18958 - RNA, 21 nt, Artificial Sequence
  LRRK2 RNA guide
uuacgggaaauucaacuggca

SEQ ID NO: 18959 - RNA, 21 nt, Artificial Sequence
  LRRK2 RNA guide
uucaacuggcacauuuuuacg

SEQ ID NO: 18960 - RNA, 21 nt, Artificial Sequence
  LRRK2 RNA guide
uuccggucaauuacgggaaau

SEQ ID NO: 18961 - RNA, 22 nt, Artificial Sequence
  LRRK2 RNA guide
aaaaaugugccaguugaauuuc

SEQ ID NO: 18962 - RNA, 22 nt, Artificial Sequence
  LRRK2 RNA guide
aaaaugugccaguugaauuucc

SEQ ID NO: 18963 - RNA, 22 nt, Artificial Sequence
  LRRK2 RNA guide
aaaugugccaguugaauuuccc

SEQ ID NO: 18964 - RNA, 22 nt, Artificial Sequence
  LRRK2 RNA guide
aacuggcacauuuuuacgcucc

SEQ ID NO: 18965 - RNA, 22 nt, Artificial Sequence
  LRRK2 RNA guide
aaugugccaguugaauuucccg

SEQ ID NO: 18966 - RNA, 22 nt, Artificial Sequence
  LRRK2 RNA guide
aauuacgggaaauucaacuggc

SEQ ID NO: 18967 - RNA, 22 nt, Artificial Sequence
  LRRK2 RNA guide
aauucaacuggcacauuuuuac

SEQ ID NO: 18968 - RNA, 22 nt, Artificial Sequence
  LRRK2 RNA guide
acgggaaauucaacuggcacau

SEQ ID NO: 18969 - RNA, 22 nt, Artificial Sequence
  LRRK2 RNA guide
acuggcacauuuuuacgcuccg

SEQ ID NO: 18970 - RNA, 22 nt, Artificial Sequence
  LRRK2 RNA guide
agcguaaaaaugugccaguuga

SEQ ID NO: 18971 - RNA, 22 nt, Artificial Sequence
  LRRK2 RNA guide
aguugaauuucccguaauugac

SEQ ID NO: 18972 - RNA, 22 nt, Artificial Sequence
  LRRK2 RNA guide
aucggagcguaaaaaugugcca

SEQ ID NO: 18973 - RNA, 22 nt, Artificial Sequence
  LRRK2 RNA guide
augugccaguugaauuucccgu

SEQ ID NO: 18974 - RNA, 22 nt, Artificial Sequence
  LRRK2 RNA guide
auuacgggaaauucaacuggca

SEQ ID NO: 18975 - RNA, 22 nt, Artificial Sequence
  LRRK2 RNA guide
auucaacuggcacauuuuuacg

SEQ ID NO: 18976 - RNA, 22 nt, Artificial Sequence
  LRRK2 RNA guide
caacuggcacauuuuuacgcuc

SEQ ID NO: 18977 - RNA, 22 nt, Artificial Sequence
  LRRK2 RNA guide
caauuacgggaaauucaacugg

SEQ ID NO: 18978 - RNA, 22 nt, Artificial Sequence
  LRRK2 RNA guide
caguugaauuucccguaauuga

SEQ ID NO: 18979 - RNA, 22 nt, Artificial Sequence
  LRRK2 RNA guide
ccaguugaauuucccguaauug

SEQ ID NO: 18980 - RNA, 22 nt, Artificial Sequence
  LRRK2 RNA guide
cggagcguaaaaaugugccagu

SEQ ID NO: 18981 - RNA, 22 nt, Artificial Sequence
  LRRK2 RNA guide
cgggaaauucaacuggcacauu

SEQ ID NO: 18982 - RNA, 22 nt, Artificial Sequence
  LRRK2 RNA guide
cguaaaaaugugccaguugaau

SEQ ID NO: 18983 - RNA, 22 nt, Artificial Sequence
  LRRK2 RNA guide
gaaauucaacuggcacauuuuu

SEQ ID NO: 18984 - RNA, 22 nt, Artificial Sequence
  LRRK2 RNA guide
gagcguaaaaaugugccaguug

SEQ ID NO: 18985 - RNA, 22 nt, Artificial Sequence
  LRRK2 RNA guide
gccaguugaauuucccguaauu

SEQ ID NO: 18986 - RNA, 22 nt, Artificial Sequence
  LRRK2 RNA guide
gcguaaaaaugugccaguugaa

SEQ ID NO: 18987 - RNA, 22 nt, Artificial Sequence
  LRRK2 RNA guide
ggaaauucaacuggcacauuuu

SEQ ID NO: 18988 - RNA, 22 nt, Artificial Sequence
  LRRK2 RNA guide
ggagcguaaaaaugugccaguu

SEQ ID NO: 18989 - RNA, 22 nt, Artificial Sequence
  LRRK2 RNA guide
gggaaauucaacuggcacauuu

SEQ ID NO: 18990 - RNA, 22 nt, Artificial Sequence
  LRRK2 RNA guide
ggucaauuacgggaaauucaac

SEQ ID NO: 18991 - RNA, 22 nt, Artificial Sequence
  LRRK2 RNA guide
guaaaaaugugccaguugaauu

SEQ ID NO: 18992 - RNA, 22 nt, Artificial Sequence
  LRRK2 RNA guide
gucaauuacgggaaauucaacu

SEQ ID NO: 18993 - RNA, 22 nt, Artificial Sequence
  LRRK2 RNA guide
gugccaguugaauuucccguaa

SEQ ID NO: 18994 - RNA, 22 nt, Artificial Sequence
  LRRK2 RNA guide
uacgggaaauucaacuggcaca

SEQ ID NO: 18995 - RNA, 22 nt, Artificial Sequence
  LRRK2 RNA guide
uaucggagcguaaaaaugugcc

SEQ ID NO: 18996 - RNA, 22 nt, Artificial Sequence
  LRRK2 RNA guide
ucaacuggcacauuuuuacgcu

SEQ ID NO: 18997 - RNA, 22 nt, Artificial Sequence
  LRRK2 RNA guide
ucaauuacgggaaauucaacug

SEQ ID NO: 18998 - RNA, 22 nt, Artificial Sequence
  LRRK2 RNA guide
uccggucaauuacgggaaauuc

SEQ ID NO: 18999 - RNA, 22 nt, Artificial Sequence
  LRRK2 RNA guide
ucggagcguaaaaaugugccag

SEQ ID NO: 19000 - RNA, 22 nt, Artificial Sequence
  LRRK2 RNA guide
ugccaguugaauuucccguaau

SEQ ID NO: 19001 - RNA, 22 nt, Artificial Sequence
  LRRK2 RNA guide
ugugccaguugaauuucccgua

SEQ ID NO: 19002 - RNA, 22 nt, Artificial Sequence
  LRRK2 RNA guide
uuacgggaaauucaacuggcac

SEQ ID NO: 19003 - RNA, 22 nt, Artificial Sequence
  LRRK2 RNA guide
uuaucggagcguaaaaaugugc

SEQ ID NO: 19004 - RNA, 22 nt, Artificial Sequence
  LRRK2 RNA guide
uucaacuggcacauuuuuacgc

SEQ ID NO: 19005 - RNA, 22 nt, Artificial Sequence
  LRRK2 RNA guide
uuccggucaauuacgggaaauu

SEQ ID NO: 19006 - RNA, 22 nt, Artificial Sequence
  LRRK2 RNA guide
uuuccggucaauuacgggaaau

SEQ ID NO: 19007 - RNA, 20 nt, Artificial Sequence
  LRRK2 RNA guide
aaauagugagagaaaaucag

SEQ ID NO: 19008 - RNA, 20 nt, Artificial Sequence
  LRRK2 RNA guide
aauagugagagaaaaucagc

SEQ ID NO: 19009 - RNA, 20 nt, Artificial Sequence
  LRRK2 RNA guide
acaaauagugagagaaaauc

SEQ ID NO: 19010 - RNA, 20 nt, Artificial Sequence
  LRRK2 RNA guide
accggaaacgauuauuacaa

SEQ ID NO: 19011 - RNA, 20 nt, Artificial Sequence
  LRRK2 RNA guide
acugcagcugauuuucucuc

SEQ ID NO: 19012 - RNA, 20 nt, Artificial Sequence
  LRRK2 RNA guide
agcugauuuucucucacuau

SEQ ID NO: 19013 - RNA, 20 nt, Artificial Sequence
  LRRK2 RNA guide
auugaccggaaacgauuauu

SEQ ID NO: 19014 - RNA, 20 nt, Artificial Sequence
  LRRK2 RNA guide
auuuguaauaaucguuuccg

SEQ ID NO: 19015 - RNA, 20 nt, Artificial Sequence
  LRRK2 RNA guide
caaauagugagagaaaauca

SEQ ID NO: 19016 - RNA, 20 nt, Artificial Sequence
  LRRK2 RNA guide
cagcugauuuucucucacua

SEQ ID NO: 19017 - RNA, 20 nt, Artificial Sequence
  LRRK2 RNA guide
ccggaaacgauuauuacaaa

SEQ ID NO: 19018 - RNA, 20 nt, Artificial Sequence
  LRRK2 RNA guide
cgauuauuacaaauagugag

SEQ ID NO: 19019 - RNA, 20 nt, Artificial Sequence
  LRRK2 RNA guide
cggaaacgauuauuacaaau

SEQ ID NO: 19020 - RNA, 20 nt, Artificial Sequence
  LRRK2 RNA guide
cucacuauuuguaauaaucg

SEQ ID NO: 19021 - RNA, 20 nt, Artificial Sequence
  LRRK2 RNA guide
cugauuuucucucacuauuu

SEQ ID NO: 19022 - RNA, 20 nt, Artificial Sequence
  LRRK2 RNA guide
gaccggaaacgauuauuaca

SEQ ID NO: 19023 - RNA, 20 nt, Artificial Sequence
  LRRK2 RNA guide
gauuuucucucacuauuugu

SEQ ID NO: 19024 - RNA, 20 nt, Artificial Sequence
  LRRK2 RNA guide
gcagcugauuuucucucacu

SEQ ID NO: 19025 - RNA, 20 nt, Artificial Sequence
  LRRK2 RNA guide
gcugauuuucucucacuauu

SEQ ID NO: 19026 - RNA, 20 nt, Artificial Sequence
  LRRK2 RNA guide
ugaccggaaacgauuauuac

SEQ ID NO: 19027 - RNA, 20 nt, Artificial Sequence
  LRRK2 RNA guide
ugauuuucucucacuauuug

SEQ ID NO: 19028 - RNA, 20 nt, Artificial Sequence
  LRRK2 RNA guide
ugcagcugauuuucucucac

SEQ ID NO: 19029 - RNA, 20 nt, Artificial Sequence
  LRRK2 RNA guide
uugaccggaaacgauuauua

SEQ ID NO: 19030 - RNA, 21 nt, Artificial Sequence
  LRRK2 RNA guide
aaauagugagagaaaaucagc

SEQ ID NO: 19031 - RNA, 21 nt, Artificial Sequence
  LRRK2 RNA guide
aacugcagcugauuuucucuc

SEQ ID NO: 19032 - RNA, 21 nt, Artificial Sequence
  LRRK2 RNA guide
aauagugagagaaaaucagcu

SEQ ID NO: 19033 - RNA, 21 nt, Artificial Sequence
  LRRK2 RNA guide
aauugaccggaaacgauuauu

SEQ ID NO: 19034 - RNA, 21 nt, Artificial Sequence
  LRRK2 RNA guide
accggaaacgauuauuacaaa

SEQ ID NO: 19035 - RNA, 21 nt, Artificial Sequence
  LRRK2 RNA guide
acugcagcugauuuucucuca

SEQ ID NO: 19036 - RNA, 21 nt, Artificial Sequence
  LRRK2 RNA guide
agcugauuuucucucacuauu

SEQ ID NO: 19037 - RNA, 21 nt, Artificial Sequence
  LRRK2 RNA guide
auugaccggaaacgauuauua

SEQ ID NO: 19038 - RNA, 21 nt, Artificial Sequence
  LRRK2 RNA guide
auuuguaauaaucguuuccgg

SEQ ID NO: 19039 - RNA, 21 nt, Artificial Sequence
  LRRK2 RNA guide
caaauagugagagaaaaucag

SEQ ID NO: 19040 - RNA, 21 nt, Artificial Sequence
  LRRK2 RNA guide
cagcugauuuucucucacuau

SEQ ID NO: 19041 - RNA, 21 nt, Artificial Sequence
  LRRK2 RNA guide
ccggaaacgauuauuacaaau

SEQ ID NO: 19042 - RNA, 21 nt, Artificial Sequence
  LRRK2 RNA guide
cugauuuucucucacuauuug

SEQ ID NO: 19043 - RNA, 21 nt, Artificial Sequence
  LRRK2 RNA guide
cugcagcugauuuucucucac

SEQ ID NO: 19044 - RNA, 21 nt, Artificial Sequence
  LRRK2 RNA guide
gaccggaaacgauuauuacaa

SEQ ID NO: 19045 - RNA, 21 nt, Artificial Sequence
  LRRK2 RNA guide
gcagcugauuuucucucacua

SEQ ID NO: 19046 - RNA, 21 nt, Artificial Sequence
  LRRK2 RNA guide
gcugauuuucucucacuauuu

SEQ ID NO: 19047 - RNA, 21 nt, Artificial Sequence
  LRRK2 RNA guide
ugaccggaaacgauuauuaca

SEQ ID NO: 19048 - RNA, 21 nt, Artificial Sequence
  LRRK2 RNA guide
ugcagcugauuuucucucacu

SEQ ID NO: 19049 - RNA, 21 nt, Artificial Sequence
  LRRK2 RNA guide
uugaccggaaacgauuauuac

SEQ ID NO: 19050 - RNA, 22 nt, Artificial Sequence
  LRRK2 RNA guide
aaauagugagagaaaaucagcu

SEQ ID NO: 19051 - RNA, 22 nt, Artificial Sequence
  LRRK2 RNA guide
aacugcagcugauuuucucuca

SEQ ID NO: 19052 - RNA, 22 nt, Artificial Sequence
  LRRK2 RNA guide
aauagugagagaaaaucagcug

SEQ ID NO: 19053 - RNA, 22 nt, Artificial Sequence
  LRRK2 RNA guide
aauugaccggaaacgauuauua

SEQ ID NO: 19054 - RNA, 22 nt, Artificial Sequence
  LRRK2 RNA guide
acaaauagugagagaaaaucag

SEQ ID NO: 19055 - RNA, 22 nt, Artificial Sequence
  LRRK2 RNA guide
accggaaacgauuauuacaaau

SEQ ID NO: 19056 - RNA, 22 nt, Artificial Sequence
  LRRK2 RNA guide
acugcagcugauuuucucucac

SEQ ID NO: 19057 - RNA, 22 nt, Artificial Sequence
  LRRK2 RNA guide
agcugauuuucucucacuauuu

SEQ ID NO: 19058 - RNA, 22 nt, Artificial Sequence
  LRRK2 RNA guide
auugaccggaaacgauuauuac

SEQ ID NO: 19059 - RNA, 22 nt, Artificial Sequence
  LRRK2 RNA guide
auuuguaauaaucguuuccggu

SEQ ID NO: 19060 - RNA, 22 nt, Artificial Sequence
  LRRK2 RNA guide
caaauagugagagaaaaucagc

SEQ ID NO: 19061 - RNA, 22 nt, Artificial Sequence
  LRRK2 RNA guide
cagcugauuuucucucacuauu

SEQ ID NO: 19062 - RNA, 22 nt, Artificial Sequence
  LRRK2 RNA guide
ccggaaacgauuauuacaaaua

SEQ ID NO: 19063 - RNA, 22 nt, Artificial Sequence
  LRRK2 RNA guide
cgauuauuacaaauagugagag

SEQ ID NO: 19064 - RNA, 22 nt, Artificial Sequence
  LRRK2 RNA guide
cggaaacgauuauuacaaauag

SEQ ID NO: 19065 - RNA, 22 nt, Artificial Sequence
  LRRK2 RNA guide
cuauuuguaauaaucguuuccg

SEQ ID NO: 19066 - RNA, 22 nt, Artificial Sequence
  LRRK2 RNA guide
cucucacuauuuguaauaaucg

SEQ ID NO: 19067 - RNA, 22 nt, Artificial Sequence
  LRRK2 RNA guide
cugauuuucucucacuauuugu

SEQ ID NO: 19068 - RNA, 22 nt, Artificial Sequence
  LRRK2 RNA guide
cugcagcugauuuucucucacu

SEQ ID NO: 19069 - RNA, 22 nt, Artificial Sequence
  LRRK2 RNA guide
gaccggaaacgauuauuacaaa

SEQ ID NO: 19070 - RNA, 22 nt, Artificial Sequence
  LRRK2 RNA guide
gcagcugauuuucucucacuau

SEQ ID NO: 19071 - RNA, 22 nt, Artificial Sequence
  LRRK2 RNA guide
gcugauuuucucucacuauuug

SEQ ID NO: 19072 - RNA, 22 nt, Artificial Sequence
  LRRK2 RNA guide
uaacugcagcugauuuucucuc

SEQ ID NO: 19073 - RNA, 22 nt, Artificial Sequence
  LRRK2 RNA guide
uaauugaccggaaacgauuauu

SEQ ID NO: 19074 - RNA, 22 nt, Artificial Sequence
  LRRK2 RNA guide
uauuuguaauaaucguuuccgg

SEQ ID NO: 19075 - RNA, 22 nt, Artificial Sequence
  LRRK2 RNA guide
ugaccggaaacgauuauuacaa

SEQ ID NO: 19076 - RNA, 22 nt, Artificial Sequence
  LRRK2 RNA guide
ugcagcugauuuucucucacua

SEQ ID NO: 19077 - RNA, 22 nt, Artificial Sequence
  LRRK2 RNA guide
uugaccggaaacgauuauuaca

SEQ ID NO: 19078 - RNA, 20 nt, Artificial Sequence
  LRRK2 RNA guide
aaagccacuuggguuccuca

SEQ ID NO: 19079 - RNA, 20 nt, Artificial Sequence
  LRRK2 RNA guide
aagccacuuggguuccucaa

SEQ ID NO: 19080 - RNA, 20 nt, Artificial Sequence
  LRRK2 RNA guide
aagugacuuguacuuugagg

SEQ ID NO: 19081 - RNA, 20 nt, Artificial Sequence
  LRRK2 RNA guide
acaaagccacuuggguuccu

SEQ ID NO: 19082 - RNA, 20 nt, Artificial Sequence
  LRRK2 RNA guide
acuuggguuccucaaaguac

SEQ ID NO: 19083 - RNA, 20 nt, Artificial Sequence
  LRRK2 RNA guide
acuuguacuuugaggaaccc

SEQ ID NO: 19084 - RNA, 20 nt, Artificial Sequence
  LRRK2 RNA guide
acuuugaggaacccaagugg

SEQ ID NO: 19085 - RNA, 20 nt, Artificial Sequence
  LRRK2 RNA guide
agccacuuggguuccucaaa

SEQ ID NO: 19086 - RNA, 20 nt, Artificial Sequence
  LRRK2 RNA guide
agugacuuguacuuugagga

SEQ ID NO: 19087 - RNA, 20 nt, Artificial Sequence
  LRRK2 RNA guide
aguuaagugacuuguacuuu

SEQ ID NO: 19088 - RNA, 20 nt, Artificial Sequence
  LRRK2 RNA guide
caaagccacuuggguuccuc

SEQ ID NO: 19089 - RNA, 20 nt, Artificial Sequence
  LRRK2 RNA guide
cacuuggguuccucaaagua

SEQ ID NO: 19090 - RNA, 20 nt, Artificial Sequence
  LRRK2 RNA guide
caguuaagugacuuguacuu

SEQ ID NO: 19091 - RNA, 20 nt, Artificial Sequence
  LRRK2 RNA guide
ccacuuggguuccucaaagu

SEQ ID NO: 19092 - RNA, 20 nt, Artificial Sequence
  LRRK2 RNA guide
ccucaaaguacaagucacuu

SEQ ID NO: 19093 - RNA, 20 nt, Artificial Sequence
  LRRK2 RNA guide
cucaaaguacaagucacuua

SEQ ID NO: 19094 - RNA, 20 nt, Artificial Sequence
  LRRK2 RNA guide
cuuggguuccucaaaguaca

SEQ ID NO: 19095 - RNA, 20 nt, Artificial Sequence
  LRRK2 RNA guide
cuuguacuuugaggaaccca

SEQ ID NO: 19096 - RNA, 20 nt, Artificial Sequence
  LRRK2 RNA guide
cuuugaggaacccaaguggc

SEQ ID NO: 19097 - RNA, 20 nt, Artificial Sequence
  LRRK2 RNA guide
gacuuguacuuugaggaacc

SEQ ID NO: 19098 - RNA, 20 nt, Artificial Sequence
  LRRK2 RNA guide
gaggaacccaaguggcuuug

SEQ ID NO: 19099 - RNA, 20 nt, Artificial Sequence
  LRRK2 RNA guide
gcaguuaagugacuuguacu

SEQ ID NO: 19100 - RNA, 20 nt, Artificial Sequence
  LRRK2 RNA guide
gccacuuggguuccucaaag

SEQ ID NO: 19101 - RNA, 20 nt, Artificial Sequence
  LRRK2 RNA guide
ggguuccucaaaguacaagu

SEQ ID NO: 19102 - RNA, 20 nt, Artificial Sequence
  LRRK2 RNA guide
gguuccucaaaguacaaguc

SEQ ID NO: 19103 - RNA, 20 nt, Artificial Sequence
  LRRK2 RNA guide
guacuuugaggaacccaagu

SEQ ID NO: 19104 - RNA, 20 nt, Artificial Sequence
  LRRK2 RNA guide
gugacuuguacuuugaggaa

SEQ ID NO: 19105 - RNA, 20 nt, Artificial Sequence
  LRRK2 RNA guide
guuaagugacuuguacuuug

SEQ ID NO: 19106 - RNA, 20 nt, Artificial Sequence
  LRRK2 RNA guide
guuccucaaaguacaaguca

SEQ ID NO: 19107 - RNA, 20 nt, Artificial Sequence
  LRRK2 RNA guide
uaagugacuuguacuuugag

SEQ ID NO: 19108 - RNA, 20 nt, Artificial Sequence
  LRRK2 RNA guide
uacuuugaggaacccaagug

SEQ ID NO: 19109 - RNA, 20 nt, Artificial Sequence
  LRRK2 RNA guide
uccucaaaguacaagucacu

SEQ ID NO: 19110 - RNA, 20 nt, Artificial Sequence
  LRRK2 RNA guide
ugacuuguacuuugaggaac

SEQ ID NO: 19111 - RNA, 20 nt, Artificial Sequence
  LRRK2 RNA guide
ugaggaacccaaguggcuuu

SEQ ID NO: 19112 - RNA, 20 nt, Artificial Sequence
  LRRK2 RNA guide
ugcaguuaagugacuuguac

SEQ ID NO: 19113 - RNA, 20 nt, Artificial Sequence
  LRRK2 RNA guide
uggguuccucaaaguacaag

SEQ ID NO: 19114 - RNA, 20 nt, Artificial Sequence
  LRRK2 RNA guide
uguacuuugaggaacccaag

SEQ ID NO: 19115 - RNA, 20 nt, Artificial Sequence
  LRRK2 RNA guide
uuaagugacuuguacuuuga

SEQ ID NO: 19116 - RNA, 20 nt, Artificial Sequence
  LRRK2 RNA guide
uuacaaagccacuuggguuc

SEQ ID NO: 19117 - RNA, 20 nt, Artificial Sequence
  LRRK2 RNA guide
uuccucaaaguacaagucac

SEQ ID NO: 19118 - RNA, 20 nt, Artificial Sequence
  LRRK2 RNA guide
uugaggaacccaaguggcuu

SEQ ID NO: 19119 - RNA, 20 nt, Artificial Sequence
  LRRK2 RNA guide
uuggguuccucaaaguacaa

SEQ ID NO: 19120 - RNA, 20 nt, Artificial Sequence
  LRRK2 RNA guide
uuguacuuugaggaacccaa

SEQ ID NO: 19121 - RNA, 20 nt, Artificial Sequence
  LRRK2 RNA guide
uuuacaaagccacuuggguu

SEQ ID NO: 19122 - RNA, 20 nt, Artificial Sequence
  LRRK2 RNA guide
uuugaggaacccaaguggcu

SEQ ID NO: 19123 - RNA, 20 nt, Artificial Sequence
  LRRK2 RNA guide
uuuuacaaagccacuugggu

SEQ ID NO: 19124 - RNA, 21 nt, Artificial Sequence
  LRRK2 RNA guide
aaagccacuuggguuccucaa

SEQ ID NO: 19125 - RNA, 21 nt, Artificial Sequence
  LRRK2 RNA guide
aagccacuuggguuccucaaa

SEQ ID NO: 19126 - RNA, 21 nt, Artificial Sequence
  LRRK2 RNA guide
aagugacuuguacuuugagga

SEQ ID NO: 19127 - RNA, 21 nt, Artificial Sequence
  LRRK2 RNA guide
acaaagccacuuggguuccuc

SEQ ID NO: 19128 - RNA, 21 nt, Artificial Sequence
  LRRK2 RNA guide
acuuggguuccucaaaguaca

SEQ ID NO: 19129 - RNA, 21 nt, Artificial Sequence
  LRRK2 RNA guide
acuuguacuuugaggaaccca

SEQ ID NO: 19130 - RNA, 21 nt, Artificial Sequence
  LRRK2 RNA guide
acuuugaggaacccaaguggc

SEQ ID NO: 19131 - RNA, 21 nt, Artificial Sequence
  LRRK2 RNA guide
agccacuuggguuccucaaag

SEQ ID NO: 19132 - RNA, 21 nt, Artificial Sequence
  LRRK2 RNA guide
agugacuuguacuuugaggaa

SEQ ID NO: 19133 - RNA, 21 nt, Artificial Sequence
  LRRK2 RNA guide
aguuaagugacuuguacuuug

SEQ ID NO: 19134 - RNA, 21 nt, Artificial Sequence
  LRRK2 RNA guide
auuuuacaaagccacuugggu

SEQ ID NO: 19135 - RNA, 21 nt, Artificial Sequence
  LRRK2 RNA guide
caaagccacuuggguuccuca

SEQ ID NO: 19136 - RNA, 21 nt, Artificial Sequence
  LRRK2 RNA guide
cacuuggguuccucaaaguac

SEQ ID NO: 19137 - RNA, 21 nt, Artificial Sequence
  LRRK2 RNA guide
caguuaagugacuuguacuuu

SEQ ID NO: 19138 - RNA, 21 nt, Artificial Sequence
  LRRK2 RNA guide
ccacuuggguuccucaaagua

SEQ ID NO: 19139 - RNA, 21 nt, Artificial Sequence
  LRRK2 RNA guide
ccucaaaguacaagucacuua

SEQ ID NO: 19140 - RNA, 21 nt, Artificial Sequence
  LRRK2 RNA guide
cucaaaguacaagucacuuaa

SEQ ID NO: 19141 - RNA, 21 nt, Artificial Sequence
  LRRK2 RNA guide
cugcaguuaagugacuuguac

SEQ ID NO: 19142 - RNA, 21 nt, Artificial Sequence
  LRRK2 RNA guide
cuuggguuccucaaaguacaa

SEQ ID NO: 19143 - RNA, 21 nt, Artificial Sequence
  LRRK2 RNA guide
cuuguacuuugaggaacccaa

SEQ ID NO: 19144 - RNA, 21 nt, Artificial Sequence
  LRRK2 RNA guide
cuuugaggaacccaaguggcu

SEQ ID NO: 19145 - RNA, 21 nt, Artificial Sequence
  LRRK2 RNA guide
gacuuguacuuugaggaaccc

SEQ ID NO: 19146 - RNA, 21 nt, Artificial Sequence
  LRRK2 RNA guide
gaggaacccaaguggcuuugu

SEQ ID NO: 19147 - RNA, 21 nt, Artificial Sequence
  LRRK2 RNA guide
gauuuuacaaagccacuuggg

SEQ ID NO: 19148 - RNA, 21 nt, Artificial Sequence
  LRRK2 RNA guide
gcaguuaagugacuuguacuu

SEQ ID NO: 19149 - RNA, 21 nt, Artificial Sequence
  LRRK2 RNA guide
gccacuuggguuccucaaagu

SEQ ID NO: 19150 - RNA, 21 nt, Artificial Sequence
  LRRK2 RNA guide
ggguuccucaaaguacaaguc

SEQ ID NO: 19151 - RNA, 21 nt, Artificial Sequence
  LRRK2 RNA guide
gguuccucaaaguacaaguca

SEQ ID NO: 19152 - RNA, 21 nt, Artificial Sequence
  LRRK2 RNA guide
guacuuugaggaacccaagug

SEQ ID NO: 19153 - RNA, 21 nt, Artificial Sequence
  LRRK2 RNA guide
gugacuuguacuuugaggaac

SEQ ID NO: 19154 - RNA, 21 nt, Artificial Sequence
  LRRK2 RNA guide
guuaagugacuuguacuuuga

SEQ ID NO: 19155 - RNA, 21 nt, Artificial Sequence
  LRRK2 RNA guide
guuccucaaaguacaagucac

SEQ ID NO: 19156 - RNA, 21 nt, Artificial Sequence
  LRRK2 RNA guide
uaagugacuuguacuuugagg

SEQ ID NO: 19157 - RNA, 21 nt, Artificial Sequence
  LRRK2 RNA guide
uacaaagccacuuggguuccu

SEQ ID NO: 19158 - RNA, 21 nt, Artificial Sequence
  LRRK2 RNA guide
uacuuugaggaacccaagugg

SEQ ID NO: 19159 - RNA, 21 nt, Artificial Sequence
  LRRK2 RNA guide
uccucaaaguacaagucacuu

SEQ ID NO: 19160 - RNA, 21 nt, Artificial Sequence
  LRRK2 RNA guide
ugacuuguacuuugaggaacc

SEQ ID NO: 19161 - RNA, 21 nt, Artificial Sequence
  LRRK2 RNA guide
ugaggaacccaaguggcuuug

SEQ ID NO: 19162 - RNA, 21 nt, Artificial Sequence
  LRRK2 RNA guide
ugcaguuaagugacuuguacu

SEQ ID NO: 19163 - RNA, 21 nt, Artificial Sequence
  LRRK2 RNA guide
uggguuccucaaaguacaagu

SEQ ID NO: 19164 - RNA, 21 nt, Artificial Sequence
  LRRK2 RNA guide
uguacuuugaggaacccaagu

SEQ ID NO: 19165 - RNA, 21 nt, Artificial Sequence
  LRRK2 RNA guide
uuaagugacuuguacuuugag

SEQ ID NO: 19166 - RNA, 21 nt, Artificial Sequence
  LRRK2 RNA guide
uuacaaagccacuuggguucc

SEQ ID NO: 19167 - RNA, 21 nt, Artificial Sequence
  LRRK2 RNA guide
uuccucaaaguacaagucacu

SEQ ID NO: 19168 - RNA, 21 nt, Artificial Sequence
  LRRK2 RNA guide
uugaggaacccaaguggcuuu

SEQ ID NO: 19169 - RNA, 21 nt, Artificial Sequence
  LRRK2 RNA guide
uuggguuccucaaaguacaag

SEQ ID NO: 19170 - RNA, 21 nt, Artificial Sequence
  LRRK2 RNA guide
uuguacuuugaggaacccaag

SEQ ID NO: 19171 - RNA, 21 nt, Artificial Sequence
  LRRK2 RNA guide
uuuacaaagccacuuggguuc

SEQ ID NO: 19172 - RNA, 21 nt, Artificial Sequence
  LRRK2 RNA guide
uuugaggaacccaaguggcuu

SEQ ID NO: 19173 - RNA, 21 nt, Artificial Sequence
  LRRK2 RNA guide
uuuuacaaagccacuuggguu

SEQ ID NO: 19174 - RNA, 22 nt, Artificial Sequence
  LRRK2 RNA guide
aaagccacuuggguuccucaaa

SEQ ID NO: 19175 - RNA, 22 nt, Artificial Sequence
  LRRK2 RNA guide
aagccacuuggguuccucaaag

SEQ ID NO: 19176 - RNA, 22 nt, Artificial Sequence
  LRRK2 RNA guide
aagugacuuguacuuugaggaa

SEQ ID NO: 19177 - RNA, 22 nt, Artificial Sequence
  LRRK2 RNA guide
acaaagccacuuggguuccuca

SEQ ID NO: 19178 - RNA, 22 nt, Artificial Sequence
  LRRK2 RNA guide
acugcaguuaagugacuuguac

SEQ ID NO: 19179 - RNA, 22 nt, Artificial Sequence
  LRRK2 RNA guide
acuuggguuccucaaaguacaa

SEQ ID NO: 19180 - RNA, 22 nt, Artificial Sequence
  LRRK2 RNA guide
acuuguacuuugaggaacccaa

SEQ ID NO: 19181 - RNA, 22 nt, Artificial Sequence
  LRRK2 RNA guide
acuuugaggaacccaaguggcu

SEQ ID NO: 19182 - RNA, 22 nt, Artificial Sequence
  LRRK2 RNA guide
agccacuuggguuccucaaagu

SEQ ID NO: 19183 - RNA, 22 nt, Artificial Sequence
  LRRK2 RNA guide
agugacuuguacuuugaggaac

SEQ ID NO: 19184 - RNA, 22 nt, Artificial Sequence
  LRRK2 RNA guide
aguuaagugacuuguacuuuga

SEQ ID NO: 19185 - RNA, 22 nt, Artificial Sequence
  LRRK2 RNA guide
auuuuacaaagccacuuggguu

SEQ ID NO: 19186 - RNA, 22 nt, Artificial Sequence
  LRRK2 RNA guide
caaagccacuuggguuccucaa

SEQ ID NO: 19187 - RNA, 22 nt, Artificial Sequence
  LRRK2 RNA guide
cacuuggguuccucaaaguaca

SEQ ID NO: 19188 - RNA, 22 nt, Artificial Sequence
  LRRK2 RNA guide
caguuaagugacuuguacuuug

SEQ ID NO: 19189 - RNA, 22 nt, Artificial Sequence
  LRRK2 RNA guide
ccacuuggguuccucaaaguac

SEQ ID NO: 19190 - RNA, 22 nt, Artificial Sequence
  LRRK2 RNA guide
ccucaaaguacaagucacuuaa

SEQ ID NO: 19191 - RNA, 22 nt, Artificial Sequence
  LRRK2 RNA guide
cucaaaguacaagucacuuaac

SEQ ID NO: 19192 - RNA, 22 nt, Artificial Sequence
  LRRK2 RNA guide
cugcaguuaagugacuuguacu

SEQ ID NO: 19193 - RNA, 22 nt, Artificial Sequence
  LRRK2 RNA guide
cuuggguuccucaaaguacaag

SEQ ID NO: 19194 - RNA, 22 nt, Artificial Sequence
  LRRK2 RNA guide
cuuguacuuugaggaacccaag

SEQ ID NO: 19195 - RNA, 22 nt, Artificial Sequence
  LRRK2 RNA guide
cuuugaggaacccaaguggcuu

SEQ ID NO: 19196 - RNA, 22 nt, Artificial Sequence
  LRRK2 RNA guide
gacuuguacuuugaggaaccca

SEQ ID NO: 19197 - RNA, 22 nt, Artificial Sequence
  LRRK2 RNA guide
gaggaacccaaguggcuuugua

SEQ ID NO: 19198 - RNA, 22 nt, Artificial Sequence
  LRRK2 RNA guide
gauuuuacaaagccacuugggu

SEQ ID NO: 19199 - RNA, 22 nt, Artificial Sequence
  LRRK2 RNA guide
gcaguuaagugacuuguacuuu

SEQ ID NO: 19200 - RNA, 22 nt, Artificial Sequence
  LRRK2 RNA guide
gccacuuggguuccucaaagua

SEQ ID NO: 19201 - RNA, 22 nt, Artificial Sequence
  LRRK2 RNA guide
ggguuccucaaaguacaaguca

SEQ ID NO: 19202 - RNA, 22 nt, Artificial Sequence
  LRRK2 RNA guide
gguuccucaaaguacaagucac

SEQ ID NO: 19203 - RNA, 22 nt, Artificial Sequence
  LRRK2 RNA guide
guacuuugaggaacccaagugg

SEQ ID NO: 19204 - RNA, 22 nt, Artificial Sequence
  LRRK2 RNA guide
gugacuuguacuuugaggaacc

SEQ ID NO: 19205 - RNA, 22 nt, Artificial Sequence
  LRRK2 RNA guide
guuaagugacuuguacuuugag

SEQ ID NO: 19206 - RNA, 22 nt, Artificial Sequence
  LRRK2 RNA guide
guuccucaaaguacaagucacu

SEQ ID NO: 19207 - RNA, 22 nt, Artificial Sequence
  LRRK2 RNA guide
uaagugacuuguacuuugagga

SEQ ID NO: 19208 - RNA, 22 nt, Artificial Sequence
  LRRK2 RNA guide
uacaaagccacuuggguuccuc

SEQ ID NO: 19209 - RNA, 22 nt, Artificial Sequence
  LRRK2 RNA guide
uacuuugaggaacccaaguggc

SEQ ID NO: 19210 - RNA, 22 nt, Artificial Sequence
  LRRK2 RNA guide
uccucaaaguacaagucacuua

SEQ ID NO: 19211 - RNA, 22 nt, Artificial Sequence
  LRRK2 RNA guide
ugacuuguacuuugaggaaccc

SEQ ID NO: 19212 - RNA, 22 nt, Artificial Sequence
  LRRK2 RNA guide
ugaggaacccaaguggcuuugu

SEQ ID NO: 19213 - RNA, 22 nt, Artificial Sequence
  LRRK2 RNA guide
ugauuuuacaaagccacuuggg

SEQ ID NO: 19214 - RNA, 22 nt, Artificial Sequence
  LRRK2 RNA guide
ugcaguuaagugacuuguacuu

SEQ ID NO: 19215 - RNA, 22 nt, Artificial Sequence
  LRRK2 RNA guide
uggguuccucaaaguacaaguc

SEQ ID NO: 19216 - RNA, 22 nt, Artificial Sequence
  LRRK2 RNA guide
uguacuuugaggaacccaagug

SEQ ID NO: 19217 - RNA, 22 nt, Artificial Sequence
  LRRK2 RNA guide
uuaagugacuuguacuuugagg

SEQ ID NO: 19218 - RNA, 22 nt, Artificial Sequence
  LRRK2 RNA guide
uuacaaagccacuuggguuccu

SEQ ID NO: 19219 - RNA, 22 nt, Artificial Sequence
  LRRK2 RNA guide
uuccucaaaguacaagucacuu

SEQ ID NO: 19220 - RNA, 22 nt, Artificial Sequence
  LRRK2 RNA guide
uugaggaacccaaguggcuuug

SEQ ID NO: 19221 - RNA, 22 nt, Artificial Sequence
  LRRK2 RNA guide
uuggguuccucaaaguacaagu

SEQ ID NO: 19222 - RNA, 22 nt, Artificial Sequence
  LRRK2 RNA guide
uuguacuuugaggaacccaagu

SEQ ID NO: 19223 - RNA, 22 nt, Artificial Sequence
  LRRK2 RNA guide
uuuacaaagccacuuggguucc

SEQ ID NO: 19224 - RNA, 22 nt, Artificial Sequence
  LRRK2 RNA guide
uuugaggaacccaaguggcuuu

SEQ ID NO: 19225 - RNA, 22 nt, Artificial Sequence
  LRRK2 RNA guide
uuuuacaaagccacuuggguuc

SEQ ID NO: 19226 - RNA, 20 nt, Artificial Sequence
  LRRK2 RNA guide
aaaaucugaaagaaucgagu

SEQ ID NO: 19227 - RNA, 20 nt, Artificial Sequence
  LRRK2 RNA guide
aaaucugaaagaaucgaguc

SEQ ID NO: 19228 - RNA, 20 nt, Artificial Sequence
  LRRK2 RNA guide
aaucugaaagaaucgaguca

SEQ ID NO: 19229 - RNA, 20 nt, Artificial Sequence
  LRRK2 RNA guide
acucgauucuuucagauuuu

SEQ ID NO: 19230 - RNA, 20 nt, Artificial Sequence
  LRRK2 RNA guide
acugucaaaaucugaaagaa

SEQ ID NO: 19231 - RNA, 20 nt, Artificial Sequence
  LRRK2 RNA guide
agugauuauuuaugacucga

SEQ ID NO: 19232 - RNA, 20 nt, Artificial Sequence
  LRRK2 RNA guide
aucugaaagaaucgagucau

SEQ ID NO: 19233 - RNA, 20 nt, Artificial Sequence
  LRRK2 RNA guide
augacucgauucuuucagau

SEQ ID NO: 19234 - RNA, 20 nt, Artificial Sequence
  LRRK2 RNA guide
auucuuucagauuuugacag

SEQ ID NO: 19235 - RNA, 20 nt, Artificial Sequence
  LRRK2 RNA guide
auuuaugacucgauucuuuc

SEQ ID NO: 19236 - RNA, 20 nt, Artificial Sequence
  LRRK2 RNA guide
caaaaucugaaagaaucgag

SEQ ID NO: 19237 - RNA, 20 nt, Artificial Sequence
  LRRK2 RNA guide
cacugucaaaaucugaaaga

SEQ ID NO: 19238 - RNA, 20 nt, Artificial Sequence
  LRRK2 RNA guide
cgauucuuucagauuuugac

SEQ ID NO: 19239 - RNA, 20 nt, Artificial Sequence
  LRRK2 RNA guide
cucgauucuuucagauuuug

SEQ ID NO: 19240 - RNA, 20 nt, Artificial Sequence
  LRRK2 RNA guide
cugaaagaaucgagucauaa

SEQ ID NO: 19241 - RNA, 20 nt, Artificial Sequence
  LRRK2 RNA guide
cugucaaaaucugaaagaau

SEQ ID NO: 19242 - RNA, 20 nt, Artificial Sequence
  LRRK2 RNA guide
cuuucacugucaaaaucuga

SEQ ID NO: 19243 - RNA, 20 nt, Artificial Sequence
  LRRK2 RNA guide
gaaagaaucgagucauaaau

SEQ ID NO: 19244 - RNA, 20 nt, Artificial Sequence
  LRRK2 RNA guide
gaaucgagucauaaauaauc

SEQ ID NO: 19245 - RNA, 20 nt, Artificial Sequence
  LRRK2 RNA guide
gacucgauucuuucagauuu

SEQ ID NO: 19246 - RNA, 20 nt, Artificial Sequence
  LRRK2 RNA guide
gauuauuuaugacucgauuc

SEQ ID NO: 19247 - RNA, 20 nt, Artificial Sequence
  LRRK2 RNA guide
gauucuuucagauuuugaca

SEQ ID NO: 19248 - RNA, 20 nt, Artificial Sequence
  LRRK2 RNA guide
gucaaaaucugaaagaaucg

SEQ ID NO: 19249 - RNA, 20 nt, Artificial Sequence
  LRRK2 RNA guide
gugauuauuuaugacucgau

SEQ ID NO: 19250 - RNA, 20 nt, Artificial Sequence
  LRRK2 RNA guide
uagugauuauuuaugacucg

SEQ ID NO: 19251 - RNA, 20 nt, Artificial Sequence
  LRRK2 RNA guide
uaugacucgauucuuucaga

SEQ ID NO: 19252 - RNA, 20 nt, Artificial Sequence
  LRRK2 RNA guide
ucaaaaucugaaagaaucga

SEQ ID NO: 19253 - RNA, 20 nt, Artificial Sequence
  LRRK2 RNA guide
ucacugucaaaaucugaaag

SEQ ID NO: 19254 - RNA, 20 nt, Artificial Sequence
  LRRK2 RNA guide
ucgauucuuucagauuuuga

SEQ ID NO: 19255 - RNA, 20 nt, Artificial Sequence
  LRRK2 RNA guide
ucugaaagaaucgagucaua

SEQ ID NO: 19256 - RNA, 20 nt, Artificial Sequence
  LRRK2 RNA guide
ugaaagaaucgagucauaaa

SEQ ID NO: 19257 - RNA, 20 nt, Artificial Sequence
  LRRK2 RNA guide
ugacucgauucuuucagauu

SEQ ID NO: 19258 - RNA, 20 nt, Artificial Sequence
  LRRK2 RNA guide
ugucaaaaucugaaagaauc

SEQ ID NO: 19259 - RNA, 20 nt, Artificial Sequence
  LRRK2 RNA guide
uuaugacucgauucuuucag

SEQ ID NO: 19260 - RNA, 20 nt, Artificial Sequence
  LRRK2 RNA guide
uucacugucaaaaucugaaa

SEQ ID NO: 19261 - RNA, 20 nt, Artificial Sequence
  LRRK2 RNA guide
uuuaugacucgauucuuuca

SEQ ID NO: 19262 - RNA, 20 nt, Artificial Sequence
  LRRK2 RNA guide
uuucacugucaaaaucugaa

SEQ ID NO: 19263 - RNA, 21 nt, Artificial Sequence
  LRRK2 RNA guide
aaaaucugaaagaaucgaguc

SEQ ID NO: 19264 - RNA, 21 nt, Artificial Sequence
  LRRK2 RNA guide
aaaucugaaagaaucgaguca

SEQ ID NO: 19265 - RNA, 21 nt, Artificial Sequence
  LRRK2 RNA guide
aaucugaaagaaucgagucau

SEQ ID NO: 19266 - RNA, 21 nt, Artificial Sequence
  LRRK2 RNA guide
acucgauucuuucagauuuug

SEQ ID NO: 19267 - RNA, 21 nt, Artificial Sequence
  LRRK2 RNA guide
acuuucacugucaaaaucuga

SEQ ID NO: 19268 - RNA, 21 nt, Artificial Sequence
  LRRK2 RNA guide
aucugaaagaaucgagucaua

SEQ ID NO: 19269 - RNA, 21 nt, Artificial Sequence
  LRRK2 RNA guide
augacucgauucuuucagauu

SEQ ID NO: 19270 - RNA, 21 nt, Artificial Sequence
  LRRK2 RNA guide
caaaaucugaaagaaucgagu

SEQ ID NO: 19271 - RNA, 21 nt, Artificial Sequence
  LRRK2 RNA guide
cacugucaaaaucugaaagaa

SEQ ID NO: 19272 - RNA, 21 nt, Artificial Sequence
  LRRK2 RNA guide
cgauucuuucagauuuugaca

SEQ ID NO: 19273 - RNA, 21 nt, Artificial Sequence
  LRRK2 RNA guide
cucgauucuuucagauuuuga

SEQ ID NO: 19274 - RNA, 21 nt, Artificial Sequence
  LRRK2 RNA guide
cugaaagaaucgagucauaaa

SEQ ID NO: 19275 - RNA, 21 nt, Artificial Sequence
  LRRK2 RNA guide
cugucaaaaucugaaagaauc

SEQ ID NO: 19276 - RNA, 21 nt, Artificial Sequence
  LRRK2 RNA guide
cuuucacugucaaaaucugaa

SEQ ID NO: 19277 - RNA, 21 nt, Artificial Sequence
  LRRK2 RNA guide
gacucgauucuuucagauuuu

SEQ ID NO: 19278 - RNA, 21 nt, Artificial Sequence
  LRRK2 RNA guide
gauucuuucagauuuugacag

SEQ ID NO: 19279 - RNA, 21 nt, Artificial Sequence
  LRRK2 RNA guide
gucaaaaucugaaagaaucga

SEQ ID NO: 19280 - RNA, 21 nt, Artificial Sequence
  LRRK2 RNA guide
uaugacucgauucuuucagau

SEQ ID NO: 19281 - RNA, 21 nt, Artificial Sequence
  LRRK2 RNA guide
ucaaaaucugaaagaaucgag

SEQ ID NO: 19282 - RNA, 21 nt, Artificial Sequence
  LRRK2 RNA guide
ucacugucaaaaucugaaaga

SEQ ID NO: 19283 - RNA, 21 nt, Artificial Sequence
  LRRK2 RNA guide
ucgauucuuucagauuuugac

SEQ ID NO: 19284 - RNA, 21 nt, Artificial Sequence
  LRRK2 RNA guide
ucugaaagaaucgagucauaa

SEQ ID NO: 19285 - RNA, 21 nt, Artificial Sequence
  LRRK2 RNA guide
ugacucgauucuuucagauuu

SEQ ID NO: 19286 - RNA, 21 nt, Artificial Sequence
  LRRK2 RNA guide
ugucaaaaucugaaagaaucg

SEQ ID NO: 19287 - RNA, 21 nt, Artificial Sequence
  LRRK2 RNA guide
uuaugacucgauucuuucaga

SEQ ID NO: 19288 - RNA, 21 nt, Artificial Sequence
  LRRK2 RNA guide
uucacugucaaaaucugaaag

SEQ ID NO: 19289 - RNA, 21 nt, Artificial Sequence
  LRRK2 RNA guide
uuuaugacucgauucuuucag

SEQ ID NO: 19290 - RNA, 22 nt, Artificial Sequence
  LRRK2 RNA guide
aaaaucugaaagaaucgaguca

SEQ ID NO: 19291 - RNA, 22 nt, Artificial Sequence
  LRRK2 RNA guide
aaaucugaaagaaucgagucau

SEQ ID NO: 19292 - RNA, 22 nt, Artificial Sequence
  LRRK2 RNA guide
aaucugaaagaaucgagucaua

SEQ ID NO: 19293 - RNA, 22 nt, Artificial Sequence
  LRRK2 RNA guide
acucgauucuuucagauuuuga

SEQ ID NO: 19294 - RNA, 22 nt, Artificial Sequence
  LRRK2 RNA guide
acugucaaaaucugaaagaauc

SEQ ID NO: 19295 - RNA, 22 nt, Artificial Sequence
  LRRK2 RNA guide
acuuucacugucaaaaucugaa

SEQ ID NO: 19296 - RNA, 22 nt, Artificial Sequence
  LRRK2 RNA guide
aucugaaagaaucgagucauaa

SEQ ID NO: 19297 - RNA, 22 nt, Artificial Sequence
  LRRK2 RNA guide
augacucgauucuuucagauuu

SEQ ID NO: 19298 - RNA, 22 nt, Artificial Sequence
  LRRK2 RNA guide
auucuuucagauuuugacagug

SEQ ID NO: 19299 - RNA, 22 nt, Artificial Sequence
  LRRK2 RNA guide
auuuaugacucgauucuuucag

SEQ ID NO: 19300 - RNA, 22 nt, Artificial Sequence
  LRRK2 RNA guide
caaaaucugaaagaaucgaguc

SEQ ID NO: 19301 - RNA, 22 nt, Artificial Sequence
  LRRK2 RNA guide
cacugucaaaaucugaaagaau

SEQ ID NO: 19302 - RNA, 22 nt, Artificial Sequence
  LRRK2 RNA guide
cacuuucacugucaaaaucuga

SEQ ID NO: 19303 - RNA, 22 nt, Artificial Sequence
  LRRK2 RNA guide
cgauucuuucagauuuugacag

SEQ ID NO: 19304 - RNA, 22 nt, Artificial Sequence
  LRRK2 RNA guide
cucgauucuuucagauuuugac

SEQ ID NO: 19305 - RNA, 22 nt, Artificial Sequence
  LRRK2 RNA guide
cugaaagaaucgagucauaaau

SEQ ID NO: 19306 - RNA, 22 nt, Artificial Sequence
  LRRK2 RNA guide
cugucaaaaucugaaagaaucg

SEQ ID NO: 19307 - RNA, 22 nt, Artificial Sequence
  LRRK2 RNA guide
cuuucacugucaaaaucugaaa

SEQ ID NO: 19308 - RNA, 22 nt, Artificial Sequence
  LRRK2 RNA guide
gaaucgagucauaaauaaucac

SEQ ID NO: 19309 - RNA, 22 nt, Artificial Sequence
  LRRK2 RNA guide
gacucgauucuuucagauuuug

SEQ ID NO: 19310 - RNA, 22 nt, Artificial Sequence
  LRRK2 RNA guide
gauucuuucagauuuugacagu

SEQ ID NO: 19311 - RNA, 22 nt, Artificial Sequence
  LRRK2 RNA guide
gucaaaaucugaaagaaucgag

SEQ ID NO: 19312 - RNA, 22 nt, Artificial Sequence
  LRRK2 RNA guide
gugauuauuuaugacucgauuc

SEQ ID NO: 19313 - RNA, 22 nt, Artificial Sequence
  LRRK2 RNA guide
uaugacucgauucuuucagauu

SEQ ID NO: 19314 - RNA, 22 nt, Artificial Sequence
  LRRK2 RNA guide
ucaaaaucugaaagaaucgagu

SEQ ID NO: 19315 - RNA, 22 nt, Artificial Sequence
  LRRK2 RNA guide
ucacugucaaaaucugaaagaa

SEQ ID NO: 19316 - RNA, 22 nt, Artificial Sequence
  LRRK2 RNA guide
ucgauucuuucagauuuugaca

SEQ ID NO: 19317 - RNA, 22 nt, Artificial Sequence
  LRRK2 RNA guide
ucugaaagaaucgagucauaaa

SEQ ID NO: 19318 - RNA, 22 nt, Artificial Sequence
  LRRK2 RNA guide
ugacucgauucuuucagauuuu

SEQ ID NO: 19319 - RNA, 22 nt, Artificial Sequence
  LRRK2 RNA guide
ugucaaaaucugaaagaaucga

SEQ ID NO: 19320 - RNA, 22 nt, Artificial Sequence
  LRRK2 RNA guide
uuaugacucgauucuuucagau

SEQ ID NO: 19321 - RNA, 22 nt, Artificial Sequence
  LRRK2 RNA guide
uucacugucaaaaucugaaaga

SEQ ID NO: 19322 - RNA, 22 nt, Artificial Sequence
  LRRK2 RNA guide
uuuaugacucgauucuuucaga

SEQ ID NO: 19323 - RNA, 22 nt, Artificial Sequence
  LRRK2 RNA guide
uuucacugucaaaaucugaaag

SEQ ID NO: 19324 - RNA, 20 nt, Artificial Sequence
  LRRK2 RNA guide
aaccuuccacuuucgcuguc

SEQ ID NO: 19325 - RNA, 20 nt, Artificial Sequence
  LRRK2 RNA guide
aaucuuucagauuuugacag

SEQ ID NO: 19326 - RNA, 20 nt, Artificial Sequence
  LRRK2 RNA guide
acaaccuuccacuuucgcug

SEQ ID NO: 19327 - RNA, 20 nt, Artificial Sequence
  LRRK2 RNA guide
acagcgaaaguggaagguug

SEQ ID NO: 19328 - RNA, 20 nt, Artificial Sequence
  LRRK2 RNA guide
accuuccacuuucgcuguca

SEQ ID NO: 19329 - RNA, 20 nt, Artificial Sequence
  LRRK2 RNA guide
acuuucgcugucaaaaucug

SEQ ID NO: 19330 - RNA, 20 nt, Artificial Sequence
  LRRK2 RNA guide
agauuuugacagcgaaagug

SEQ ID NO: 19331 - RNA, 20 nt, Artificial Sequence
  LRRK2 RNA guide
agcgaaaguggaagguuguc

SEQ ID NO: 19332 - RNA, 20 nt, Artificial Sequence
  LRRK2 RNA guide
aucuuucagauuuugacagc

SEQ ID NO: 19333 - RNA, 20 nt, Artificial Sequence
  LRRK2 RNA guide
auuuugacagcgaaagugga

SEQ ID NO: 19334 - RNA, 20 nt, Artificial Sequence
  LRRK2 RNA guide
caaccuuccacuuucgcugu

SEQ ID NO: 19335 - RNA, 20 nt, Artificial Sequence
  LRRK2 RNA guide
cacuuucgcugucaaaaucu

SEQ ID NO: 19336 - RNA, 20 nt, Artificial Sequence
  LRRK2 RNA guide
cagauuuugacagcgaaagu

SEQ ID NO: 19337 - RNA, 20 nt, Artificial Sequence
  LRRK2 RNA guide
cagcgaaaguggaagguugu

SEQ ID NO: 19338 - RNA, 20 nt, Artificial Sequence
  LRRK2 RNA guide
ccacuuucgcugucaaaauc

SEQ ID NO: 19339 - RNA, 20 nt, Artificial Sequence
  LRRK2 RNA guide
ccuuccacuuucgcugucaa

SEQ ID NO: 19340 - RNA, 20 nt, Artificial Sequence
  LRRK2 RNA guide
cgaaucuuucagauuuugac

SEQ ID NO: 19341 - RNA, 20 nt, Artificial Sequence
  LRRK2 RNA guide
cgcugucaaaaucugaaaga

SEQ ID NO: 19342 - RNA, 20 nt, Artificial Sequence
  LRRK2 RNA guide
cucgaaucuuucagauuuug

SEQ ID NO: 19343 - RNA, 20 nt, Artificial Sequence
  LRRK2 RNA guide
cuuccacuuucgcugucaaa

SEQ ID NO: 19344 - RNA, 20 nt, Artificial Sequence
  LRRK2 RNA guide
cuuucagauuuugacagcga

SEQ ID NO: 19345 - RNA, 20 nt, Artificial Sequence
  LRRK2 RNA guide
cuuucgcugucaaaaucuga

SEQ ID NO: 19346 - RNA, 20 nt, Artificial Sequence
  LRRK2 RNA guide
gaaucuuucagauuuugaca

SEQ ID NO: 19347 - RNA, 20 nt, Artificial Sequence
  LRRK2 RNA guide
gacaaccuuccacuuucgcu

SEQ ID NO: 19348 - RNA, 20 nt, Artificial Sequence
  LRRK2 RNA guide
gacagcgaaaguggaagguu

SEQ ID NO: 19349 - RNA, 20 nt, Artificial Sequence
  LRRK2 RNA guide
gauuuugacagcgaaagugg

SEQ ID NO: 19350 - RNA, 20 nt, Artificial Sequence
  LRRK2 RNA guide
gcgaaaguggaagguugucc

SEQ ID NO: 19351 - RNA, 20 nt, Artificial Sequence
  LRRK2 RNA guide
ggacaaccuuccacuuucgc

SEQ ID NO: 19352 - RNA, 20 nt, Artificial Sequence
  LRRK2 RNA guide
ucagauuuugacagcgaaag

SEQ ID NO: 19353 - RNA, 20 nt, Artificial Sequence
  LRRK2 RNA guide
uccacuuucgcugucaaaau

SEQ ID NO: 19354 - RNA, 20 nt, Artificial Sequence
  LRRK2 RNA guide
ucgaaucuuucagauuuuga

SEQ ID NO: 19355 - RNA, 20 nt, Artificial Sequence
  LRRK2 RNA guide
ucgcugucaaaaucugaaag

SEQ ID NO: 19356 - RNA, 20 nt, Artificial Sequence
  LRRK2 RNA guide
ucuuucagauuuugacagcg

SEQ ID NO: 19357 - RNA, 20 nt, Artificial Sequence
  LRRK2 RNA guide
ugacagcgaaaguggaaggu

SEQ ID NO: 19358 - RNA, 20 nt, Artificial Sequence
  LRRK2 RNA guide
uggacaaccuuccacuuucg

SEQ ID NO: 19359 - RNA, 20 nt, Artificial Sequence
  LRRK2 RNA guide
uguuuuggacaaccuuccac

SEQ ID NO: 19360 - RNA, 20 nt, Artificial Sequence
  LRRK2 RNA guide
uucagauuuugacagcgaaa

SEQ ID NO: 19361 - RNA, 20 nt, Artificial Sequence
  LRRK2 RNA guide
uuccacuuucgcugucaaaa

SEQ ID NO: 19362 - RNA, 20 nt, Artificial Sequence
  LRRK2 RNA guide
uucgcugucaaaaucugaaa

SEQ ID NO: 19363 - RNA, 20 nt, Artificial Sequence
  LRRK2 RNA guide
uugacagcgaaaguggaagg

SEQ ID NO: 19364 - RNA, 20 nt, Artificial Sequence
  LRRK2 RNA guide
uuggacaaccuuccacuuuc

SEQ ID NO: 19365 - RNA, 20 nt, Artificial Sequence
  LRRK2 RNA guide
uuucagauuuugacagcgaa

SEQ ID NO: 19366 - RNA, 20 nt, Artificial Sequence
  LRRK2 RNA guide
uuucgcugucaaaaucugaa

SEQ ID NO: 19367 - RNA, 20 nt, Artificial Sequence
  LRRK2 RNA guide
uuugacagcgaaaguggaag

SEQ ID NO: 19368 - RNA, 20 nt, Artificial Sequence
  LRRK2 RNA guide
uuuggacaaccuuccacuuu

SEQ ID NO: 19369 - RNA, 20 nt, Artificial Sequence
  LRRK2 RNA guide
uuuugacagcgaaaguggaa

SEQ ID NO: 19370 - RNA, 21 nt, Artificial Sequence
  LRRK2 RNA guide
aaccuuccacuuucgcuguca

SEQ ID NO: 19371 - RNA, 21 nt, Artificial Sequence
  LRRK2 RNA guide
aaucuuucagauuuugacagc

SEQ ID NO: 19372 - RNA, 21 nt, Artificial Sequence
  LRRK2 RNA guide
acaaccuuccacuuucgcugu

SEQ ID NO: 19373 - RNA, 21 nt, Artificial Sequence
  LRRK2 RNA guide
acagcgaaaguggaagguugu

SEQ ID NO: 19374 - RNA, 21 nt, Artificial Sequence
  LRRK2 RNA guide
accuuccacuuucgcugucaa

SEQ ID NO: 19375 - RNA, 21 nt, Artificial Sequence
  LRRK2 RNA guide
acucgaaucuuucagauuuug

SEQ ID NO: 19376 - RNA, 21 nt, Artificial Sequence
  LRRK2 RNA guide
acuuucgcugucaaaaucuga

SEQ ID NO: 19377 - RNA, 21 nt, Artificial Sequence
  LRRK2 RNA guide
agauuuugacagcgaaagugg

SEQ ID NO: 19378 - RNA, 21 nt, Artificial Sequence
  LRRK2 RNA guide
agcgaaaguggaagguugucc

SEQ ID NO: 19379 - RNA, 21 nt, Artificial Sequence
  LRRK2 RNA guide
aucuuucagauuuugacagcg

SEQ ID NO: 19380 - RNA, 21 nt, Artificial Sequence
  LRRK2 RNA guide
auuuugacagcgaaaguggaa

SEQ ID NO: 19381 - RNA, 21 nt, Artificial Sequence
  LRRK2 RNA guide
caaccuuccacuuucgcuguc

SEQ ID NO: 19382 - RNA, 21 nt, Artificial Sequence
  LRRK2 RNA guide
cacuuucgcugucaaaaucug

SEQ ID NO: 19383 - RNA, 21 nt, Artificial Sequence
  LRRK2 RNA guide
cagauuuugacagcgaaagug

SEQ ID NO: 19384 - RNA, 21 nt, Artificial Sequence
  LRRK2 RNA guide
cagcgaaaguggaagguuguc

SEQ ID NO: 19385 - RNA, 21 nt, Artificial Sequence
  LRRK2 RNA guide
ccacuuucgcugucaaaaucu

SEQ ID NO: 19386 - RNA, 21 nt, Artificial Sequence
  LRRK2 RNA guide
ccuuccacuuucgcugucaaa

SEQ ID NO: 19387 - RNA, 21 nt, Artificial Sequence
  LRRK2 RNA guide
cgaaucuuucagauuuugaca

SEQ ID NO: 19388 - RNA, 21 nt, Artificial Sequence
  LRRK2 RNA guide
cgcugucaaaaucugaaagau

SEQ ID NO: 19389 - RNA, 21 nt, Artificial Sequence
  LRRK2 RNA guide
cucgaaucuuucagauuuuga

SEQ ID NO: 19390 - RNA, 21 nt, Artificial Sequence
  LRRK2 RNA guide
cuuccacuuucgcugucaaaa

SEQ ID NO: 19391 - RNA, 21 nt, Artificial Sequence
  LRRK2 RNA guide
cuuucagauuuugacagcgaa

SEQ ID NO: 19392 - RNA, 21 nt, Artificial Sequence
  LRRK2 RNA guide
cuuucgcugucaaaaucugaa

SEQ ID NO: 19393 - RNA, 21 nt, Artificial Sequence
  LRRK2 RNA guide
gacaaccuuccacuuucgcug

SEQ ID NO: 19394 - RNA, 21 nt, Artificial Sequence
  LRRK2 RNA guide
gacagcgaaaguggaagguug

SEQ ID NO: 19395 - RNA, 21 nt, Artificial Sequence
  LRRK2 RNA guide
gauuuugacagcgaaagugga

SEQ ID NO: 19396 - RNA, 21 nt, Artificial Sequence
  LRRK2 RNA guide
gcgaaaguggaagguugucca

SEQ ID NO: 19397 - RNA, 21 nt, Artificial Sequence
  LRRK2 RNA guide
ggacaaccuuccacuuucgcu

SEQ ID NO: 19398 - RNA, 21 nt, Artificial Sequence
  LRRK2 RNA guide
guguuuuggacaaccuuccac

SEQ ID NO: 19399 - RNA, 21 nt, Artificial Sequence
  LRRK2 RNA guide
guuuuggacaaccuuccacuu

SEQ ID NO: 19400 - RNA, 21 nt, Artificial Sequence
  LRRK2 RNA guide
ucagauuuugacagcgaaagu

SEQ ID NO: 19401 - RNA, 21 nt, Artificial Sequence
  LRRK2 RNA guide
uccacuuucgcugucaaaauc

SEQ ID NO: 19402 - RNA, 21 nt, Artificial Sequence
  LRRK2 RNA guide
ucgaaucuuucagauuuugac

SEQ ID NO: 19403 - RNA, 21 nt, Artificial Sequence
  LRRK2 RNA guide
ucgcugucaaaaucugaaaga

SEQ ID NO: 19404 - RNA, 21 nt, Artificial Sequence
  LRRK2 RNA guide
ucuuucagauuuugacagcga

SEQ ID NO: 19405 - RNA, 21 nt, Artificial Sequence
  LRRK2 RNA guide
ugacagcgaaaguggaagguu

SEQ ID NO: 19406 - RNA, 21 nt, Artificial Sequence
  LRRK2 RNA guide
uggacaaccuuccacuuucgc

SEQ ID NO: 19407 - RNA, 21 nt, Artificial Sequence
  LRRK2 RNA guide
uguuuuggacaaccuuccacu

SEQ ID NO: 19408 - RNA, 21 nt, Artificial Sequence
  LRRK2 RNA guide
uucagauuuugacagcgaaag

SEQ ID NO: 19409 - RNA, 21 nt, Artificial Sequence
  LRRK2 RNA guide
uuccacuuucgcugucaaaau

SEQ ID NO: 19410 - RNA, 21 nt, Artificial Sequence
  LRRK2 RNA guide
uucgcugucaaaaucugaaag

SEQ ID NO: 19411 - RNA, 21 nt, Artificial Sequence
  LRRK2 RNA guide
uugacagcgaaaguggaaggu

SEQ ID NO: 19412 - RNA, 21 nt, Artificial Sequence
  LRRK2 RNA guide
uuggacaaccuuccacuuucg

SEQ ID NO: 19413 - RNA, 21 nt, Artificial Sequence
  LRRK2 RNA guide
uuucagauuuugacagcgaaa

SEQ ID NO: 19414 - RNA, 21 nt, Artificial Sequence
  LRRK2 RNA guide
uuucgcugucaaaaucugaaa

SEQ ID NO: 19415 - RNA, 21 nt, Artificial Sequence
  LRRK2 RNA guide
uuugacagcgaaaguggaagg

SEQ ID NO: 19416 - RNA, 21 nt, Artificial Sequence
  LRRK2 RNA guide
uuuggacaaccuuccacuuuc

SEQ ID NO: 19417 - RNA, 21 nt, Artificial Sequence
  LRRK2 RNA guide
uuuugacagcgaaaguggaag

SEQ ID NO: 19418 - RNA, 21 nt, Artificial Sequence
  LRRK2 RNA guide
uuuuggacaaccuuccacuuu

SEQ ID NO: 19419 - RNA, 22 nt, Artificial Sequence
  LRRK2 RNA guide
aaccuuccacuuucgcugucaa

SEQ ID NO: 19420 - RNA, 22 nt, Artificial Sequence
  LRRK2 RNA guide
aaucuuucagauuuugacagcg

SEQ ID NO: 19421 - RNA, 22 nt, Artificial Sequence
  LRRK2 RNA guide
acaaccuuccacuuucgcuguc

SEQ ID NO: 19422 - RNA, 22 nt, Artificial Sequence
  LRRK2 RNA guide
acagcgaaaguggaagguuguc

SEQ ID NO: 19423 - RNA, 22 nt, Artificial Sequence
  LRRK2 RNA guide
accuuccacuuucgcugucaaa

SEQ ID NO: 19424 - RNA, 22 nt, Artificial Sequence
  LRRK2 RNA guide
acucgaaucuuucagauuuuga

SEQ ID NO: 19425 - RNA, 22 nt, Artificial Sequence
  LRRK2 RNA guide
acuuucgcugucaaaaucugaa

SEQ ID NO: 19426 - RNA, 22 nt, Artificial Sequence
  LRRK2 RNA guide
agauuuugacagcgaaagugga

SEQ ID NO: 19427 - RNA, 22 nt, Artificial Sequence
  LRRK2 RNA guide
agcgaaaguggaagguugucca

SEQ ID NO: 19428 - RNA, 22 nt, Artificial Sequence
  LRRK2 RNA guide
aucuuucagauuuugacagcga

SEQ ID NO: 19429 - RNA, 22 nt, Artificial Sequence
  LRRK2 RNA guide
auuuugacagcgaaaguggaag

SEQ ID NO: 19430 - RNA, 22 nt, Artificial Sequence
  LRRK2 RNA guide
caaccuuccacuuucgcuguca

SEQ ID NO: 19431 - RNA, 22 nt, Artificial Sequence
  LRRK2 RNA guide
cacuuucgcugucaaaaucuga

SEQ ID NO: 19432 - RNA, 22 nt, Artificial Sequence
  LRRK2 RNA guide
cagauuuugacagcgaaagugg

SEQ ID NO: 19433 - RNA, 22 nt, Artificial Sequence
  LRRK2 RNA guide
cagcgaaaguggaagguugucc

SEQ ID NO: 19434 - RNA, 22 nt, Artificial Sequence
  LRRK2 RNA guide
ccacuuucgcugucaaaaucug

SEQ ID NO: 19435 - RNA, 22 nt, Artificial Sequence
  LRRK2 RNA guide
ccuuccacuuucgcugucaaaa

SEQ ID NO: 19436 - RNA, 22 nt, Artificial Sequence
  LRRK2 RNA guide
cgaaucuuucagauuuugacag

SEQ ID NO: 19437 - RNA, 22 nt, Artificial Sequence
  LRRK2 RNA guide
cgcugucaaaaucugaaagauu

SEQ ID NO: 19438 - RNA, 22 nt, Artificial Sequence
  LRRK2 RNA guide
cucgaaucuuucagauuuugac

SEQ ID NO: 19439 - RNA, 22 nt, Artificial Sequence
  LRRK2 RNA guide
cuuccacuuucgcugucaaaau

SEQ ID NO: 19440 - RNA, 22 nt, Artificial Sequence
  LRRK2 RNA guide
cuuucagauuuugacagcgaaa

SEQ ID NO: 19441 - RNA, 22 nt, Artificial Sequence
  LRRK2 RNA guide
cuuucgcugucaaaaucugaaa

SEQ ID NO: 19442 - RNA, 22 nt, Artificial Sequence
  LRRK2 RNA guide
gaaucuuucagauuuugacagc

SEQ ID NO: 19443 - RNA, 22 nt, Artificial Sequence
  LRRK2 RNA guide
gacaaccuuccacuuucgcugu

SEQ ID NO: 19444 - RNA, 22 nt, Artificial Sequence
  LRRK2 RNA guide
gacagcgaaaguggaagguugu

SEQ ID NO: 19445 - RNA, 22 nt, Artificial Sequence
  LRRK2 RNA guide
gacucgaaucuuucagauuuug

SEQ ID NO: 19446 - RNA, 22 nt, Artificial Sequence
  LRRK2 RNA guide
gauuuugacagcgaaaguggaa

SEQ ID NO: 19447 - RNA, 22 nt, Artificial Sequence
  LRRK2 RNA guide
gcgaaaguggaagguuguccaa

SEQ ID NO: 19448 - RNA, 22 nt, Artificial Sequence
  LRRK2 RNA guide
ggacaaccuuccacuuucgcug

SEQ ID NO: 19449 - RNA, 22 nt, Artificial Sequence
  LRRK2 RNA guide
gguguuuuggacaaccuuccac

SEQ ID NO: 19450 - RNA, 22 nt, Artificial Sequence
  LRRK2 RNA guide
guguuuuggacaaccuuccacu

SEQ ID NO: 19451 - RNA, 22 nt, Artificial Sequence
  LRRK2 RNA guide
guuuuggacaaccuuccacuuu

SEQ ID NO: 19452 - RNA, 22 nt, Artificial Sequence
  LRRK2 RNA guide
ucagauuuugacagcgaaagug

SEQ ID NO: 19453 - RNA, 22 nt, Artificial Sequence
  LRRK2 RNA guide
uccacuuucgcugucaaaaucu

SEQ ID NO: 19454 - RNA, 22 nt, Artificial Sequence
  LRRK2 RNA guide
ucgaaucuuucagauuuugaca

SEQ ID NO: 19455 - RNA, 22 nt, Artificial Sequence
  LRRK2 RNA guide
ucgcugucaaaaucugaaagau

SEQ ID NO: 19456 - RNA, 22 nt, Artificial Sequence
  LRRK2 RNA guide
ucuuucagauuuugacagcgaa

SEQ ID NO: 19457 - RNA, 22 nt, Artificial Sequence
  LRRK2 RNA guide
ugacagcgaaaguggaagguug

SEQ ID NO: 19458 - RNA, 22 nt, Artificial Sequence
  LRRK2 RNA guide
uggacaaccuuccacuuucgcu

SEQ ID NO: 19459 - RNA, 22 nt, Artificial Sequence
  LRRK2 RNA guide
uguuuuggacaaccuuccacuu

SEQ ID NO: 19460 - RNA, 22 nt, Artificial Sequence
  LRRK2 RNA guide
uucagauuuugacagcgaaagu

SEQ ID NO: 19461 - RNA, 22 nt, Artificial Sequence
  LRRK2 RNA guide
uuccacuuucgcugucaaaauc

SEQ ID NO: 19462 - RNA, 22 nt, Artificial Sequence
  LRRK2 RNA guide
uucgcugucaaaaucugaaaga

SEQ ID NO: 19463 - RNA, 22 nt, Artificial Sequence
  LRRK2 RNA guide
uugacagcgaaaguggaagguu

SEQ ID NO: 19464 - RNA, 22 nt, Artificial Sequence
  LRRK2 RNA guide
uuggacaaccuuccacuuucgc

SEQ ID NO: 19465 - RNA, 22 nt, Artificial Sequence
  LRRK2 RNA guide
uuucagauuuugacagcgaaag

SEQ ID NO: 19466 - RNA, 22 nt, Artificial Sequence
  LRRK2 RNA guide
uuucgcugucaaaaucugaaag

SEQ ID NO: 19467 - RNA, 22 nt, Artificial Sequence
  LRRK2 RNA guide
uuugacagcgaaaguggaaggu

SEQ ID NO: 19468 - RNA, 22 nt, Artificial Sequence
  LRRK2 RNA guide
uuuggacaaccuuccacuuucg

SEQ ID NO: 19469 - RNA, 22 nt, Artificial Sequence
  LRRK2 RNA guide
uuuugacagcgaaaguggaagg

SEQ ID NO: 19470 - RNA, 22 nt, Artificial Sequence
  LRRK2 RNA guide
uuuuggacaaccuuccacuuuc

SEQ ID NO: 19471 - RNA, 20 nt, Artificial Sequence
  LRRK2 RNA guide
aacacccuaagggcauuauu

SEQ ID NO: 19472 - RNA, 20 nt, Artificial Sequence
  LRRK2 RNA guide
aagaaauuuuuccacaucuc

SEQ ID NO: 19473 - RNA, 20 nt, Artificial Sequence
  LRRK2 RNA guide
aagggcauuauuucgcauag

SEQ ID NO: 19474 - RNA, 20 nt, Artificial Sequence
  LRRK2 RNA guide
aauuuuuccacaucucuaug

SEQ ID NO: 19475 - RNA, 20 nt, Artificial Sequence
  LRRK2 RNA guide
acacccuaagggcauuauuu

SEQ ID NO: 19476 - RNA, 20 nt, Artificial Sequence
  LRRK2 RNA guide
acaucucuaugcgaaauaau

SEQ ID NO: 19477 - RNA, 20 nt, Artificial Sequence
  LRRK2 RNA guide
acccuaagggcauuauuucg

SEQ ID NO: 19478 - RNA, 20 nt, Artificial Sequence
  LRRK2 RNA guide
agaaauuuuuccacaucucu

SEQ ID NO: 19479 - RNA, 20 nt, Artificial Sequence
  LRRK2 RNA guide
agggcauuauuucgcauaga

SEQ ID NO: 19480 - RNA, 20 nt, Artificial Sequence
  LRRK2 RNA guide
aucucuaugcgaaauaaugc

SEQ ID NO: 19481 - RNA, 20 nt, Artificial Sequence
  LRRK2 RNA guide
augcgaaauaaugcccuuag

SEQ ID NO: 19482 - RNA, 20 nt, Artificial Sequence
  LRRK2 RNA guide
auuauuucgcauagagaugu

SEQ ID NO: 19483 - RNA, 20 nt, Artificial Sequence
  LRRK2 RNA guide
auuucgcauagagaugugga

SEQ ID NO: 19484 - RNA, 20 nt, Artificial Sequence
  LRRK2 RNA guide
auuuuuccacaucucuaugc

SEQ ID NO: 19485 - RNA, 20 nt, Artificial Sequence
  LRRK2 RNA guide
cacaucucuaugcgaaauaa

SEQ ID NO: 19486 - RNA, 20 nt, Artificial Sequence
  LRRK2 RNA guide
cacccuaagggcauuauuuc

SEQ ID NO: 19487 - RNA, 20 nt, Artificial Sequence
  LRRK2 RNA guide
cauagagauguggaaaaauu

SEQ ID NO: 19488 - RNA, 20 nt, Artificial Sequence
  LRRK2 RNA guide
caucucuaugcgaaauaaug

SEQ ID NO: 19489 - RNA, 20 nt, Artificial Sequence
  LRRK2 RNA guide
cauuauuucgcauagagaug

SEQ ID NO: 19490 - RNA, 20 nt, Artificial Sequence
  LRRK2 RNA guide
ccacaucucuaugcgaaaua

SEQ ID NO: 19491 - RNA, 20 nt, Artificial Sequence
  LRRK2 RNA guide
cccuaagggcauuauuucgc

SEQ ID NO: 19492 - RNA, 20 nt, Artificial Sequence
  LRRK2 RNA guide
ccuaagggcauuauuucgca

SEQ ID NO: 19493 - RNA, 20 nt, Artificial Sequence
  LRRK2 RNA guide
cgcauagagauguggaaaaa

SEQ ID NO: 19494 - RNA, 20 nt, Artificial Sequence
  LRRK2 RNA guide
cuaagggcauuauuucgcau

SEQ ID NO: 19495 - RNA, 20 nt, Artificial Sequence
  LRRK2 RNA guide
cuaugcgaaauaaugcccuu

SEQ ID NO: 19496 - RNA, 20 nt, Artificial Sequence
  LRRK2 RNA guide
cucuaugcgaaauaaugccc

SEQ ID NO: 19497 - RNA, 20 nt, Artificial Sequence
  LRRK2 RNA guide
gaaauuuuuccacaucucua

SEQ ID NO: 19498 - RNA, 20 nt, Artificial Sequence
  LRRK2 RNA guide
gcauagagauguggaaaaau

SEQ ID NO: 19499 - RNA, 20 nt, Artificial Sequence
  LRRK2 RNA guide
gcauuauuucgcauagagau

SEQ ID NO: 19500 - RNA, 20 nt, Artificial Sequence
  LRRK2 RNA guide
ggcauuauuucgcauagaga

SEQ ID NO: 19501 - RNA, 20 nt, Artificial Sequence
  LRRK2 RNA guide
gggcauuauuucgcauagag

SEQ ID NO: 19502 - RNA, 20 nt, Artificial Sequence
  LRRK2 RNA guide
uaagggcauuauuucgcaua

SEQ ID NO: 19503 - RNA, 20 nt, Artificial Sequence
  LRRK2 RNA guide
uaugcgaaauaaugcccuua

SEQ ID NO: 19504 - RNA, 20 nt, Artificial Sequence
  LRRK2 RNA guide
uauuucgcauagagaugugg

SEQ ID NO: 19505 - RNA, 20 nt, Artificial Sequence
  LRRK2 RNA guide
uccacaucucuaugcgaaau

SEQ ID NO: 19506 - RNA, 20 nt, Artificial Sequence
  LRRK2 RNA guide
ucgcauagagauguggaaaa

SEQ ID NO: 19507 - RNA, 20 nt, Artificial Sequence
  LRRK2 RNA guide
ucuaugcgaaauaaugcccu

SEQ ID NO: 19508 - RNA, 20 nt, Artificial Sequence
  LRRK2 RNA guide
ucucuaugcgaaauaaugcc

SEQ ID NO: 19509 - RNA, 20 nt, Artificial Sequence
  LRRK2 RNA guide
uuauuucgcauagagaugug

SEQ ID NO: 19510 - RNA, 20 nt, Artificial Sequence
  LRRK2 RNA guide
uuccacaucucuaugcgaaa

SEQ ID NO: 19511 - RNA, 20 nt, Artificial Sequence
  LRRK2 RNA guide
uucgcauagagauguggaaa

SEQ ID NO: 19512 - RNA, 20 nt, Artificial Sequence
  LRRK2 RNA guide
uuuccacaucucuaugcgaa

SEQ ID NO: 19513 - RNA, 20 nt, Artificial Sequence
  LRRK2 RNA guide
uuucgcauagagauguggaa

SEQ ID NO: 19514 - RNA, 20 nt, Artificial Sequence
  LRRK2 RNA guide
uuuuccacaucucuaugcga

SEQ ID NO: 19515 - RNA, 20 nt, Artificial Sequence
  LRRK2 RNA guide
uuuuuccacaucucuaugcg

SEQ ID NO: 19516 - RNA, 21 nt, Artificial Sequence
  LRRK2 RNA guide
aaacacccuaagggcauuauu

SEQ ID NO: 19517 - RNA, 21 nt, Artificial Sequence
  LRRK2 RNA guide
aacacccuaagggcauuauuu

SEQ ID NO: 19518 - RNA, 21 nt, Artificial Sequence
  LRRK2 RNA guide
aagggcauuauuucgcauaga

SEQ ID NO: 19519 - RNA, 21 nt, Artificial Sequence
  LRRK2 RNA guide
aauuuuuccacaucucuaugc

SEQ ID NO: 19520 - RNA, 21 nt, Artificial Sequence
  LRRK2 RNA guide
acacccuaagggcauuauuuc

SEQ ID NO: 19521 - RNA, 21 nt, Artificial Sequence
  LRRK2 RNA guide
acaucucuaugcgaaauaaug

SEQ ID NO: 19522 - RNA, 21 nt, Artificial Sequence
  LRRK2 RNA guide
acccuaagggcauuauuucgc

SEQ ID NO: 19523 - RNA, 21 nt, Artificial Sequence
  LRRK2 RNA guide
agggcauuauuucgcauagag

SEQ ID NO: 19524 - RNA, 21 nt, Artificial Sequence
  LRRK2 RNA guide
aucucuaugcgaaauaaugcc

SEQ ID NO: 19525 - RNA, 21 nt, Artificial Sequence
  LRRK2 RNA guide
augcgaaauaaugcccuuagg

SEQ ID NO: 19526 - RNA, 21 nt, Artificial Sequence
  LRRK2 RNA guide
auuauuucgcauagagaugug

SEQ ID NO: 19527 - RNA, 21 nt, Artificial Sequence
  LRRK2 RNA guide
auuucgcauagagauguggaa

SEQ ID NO: 19528 - RNA, 21 nt, Artificial Sequence
  LRRK2 RNA guide
auuuuuccacaucucuaugcg

SEQ ID NO: 19529 - RNA, 21 nt, Artificial Sequence
  LRRK2 RNA guide
cacaucucuaugcgaaauaau

SEQ ID NO: 19530 - RNA, 21 nt, Artificial Sequence
  LRRK2 RNA guide
cacccuaagggcauuauuucg

SEQ ID NO: 19531 - RNA, 21 nt, Artificial Sequence
  LRRK2 RNA guide
caucucuaugcgaaauaaugc

SEQ ID NO: 19532 - RNA, 21 nt, Artificial Sequence
  LRRK2 RNA guide
cauuauuucgcauagagaugu

SEQ ID NO: 19533 - RNA, 21 nt, Artificial Sequence
  LRRK2 RNA guide
ccacaucucuaugcgaaauaa

SEQ ID NO: 19534 - RNA, 21 nt, Artificial Sequence
  LRRK2 RNA guide
cccuaagggcauuauuucgca

SEQ ID NO: 19535 - RNA, 21 nt, Artificial Sequence
  LRRK2 RNA guide
ccuaagggcauuauuucgcau

SEQ ID NO: 19536 - RNA, 21 nt, Artificial Sequence
  LRRK2 RNA guide
cgcauagagauguggaaaaau

SEQ ID NO: 19537 - RNA, 21 nt, Artificial Sequence
  LRRK2 RNA guide
cuaagggcauuauuucgcaua

SEQ ID NO: 19538 - RNA, 21 nt, Artificial Sequence
  LRRK2 RNA guide
cuaugcgaaauaaugcccuua

SEQ ID NO: 19539 - RNA, 21 nt, Artificial Sequence
  LRRK2 RNA guide
cucuaugcgaaauaaugcccu

SEQ ID NO: 19540 - RNA, 21 nt, Artificial Sequence
  LRRK2 RNA guide
gcauagagauguggaaaaauu

SEQ ID NO: 19541 - RNA, 21 nt, Artificial Sequence
  LRRK2 RNA guide
gcauuauuucgcauagagaug

SEQ ID NO: 19542 - RNA, 21 nt, Artificial Sequence
  LRRK2 RNA guide
ggcauuauuucgcauagagau

SEQ ID NO: 19543 - RNA, 21 nt, Artificial Sequence
  LRRK2 RNA guide
gggcauuauuucgcauagaga

SEQ ID NO: 19544 - RNA, 21 nt, Artificial Sequence
  LRRK2 RNA guide
uaagggcauuauuucgcauag

SEQ ID NO: 19545 - RNA, 21 nt, Artificial Sequence
  LRRK2 RNA guide
uaugcgaaauaaugcccuuag

SEQ ID NO: 19546 - RNA, 21 nt, Artificial Sequence
  LRRK2 RNA guide
uauuucgcauagagaugugga

SEQ ID NO: 19547 - RNA, 21 nt, Artificial Sequence
  LRRK2 RNA guide
uccacaucucuaugcgaaaua

SEQ ID NO: 19548 - RNA, 21 nt, Artificial Sequence
  LRRK2 RNA guide
ucgcauagagauguggaaaaa

SEQ ID NO: 19549 - RNA, 21 nt, Artificial Sequence
  LRRK2 RNA guide
ucuaugcgaaauaaugcccuu

SEQ ID NO: 19550 - RNA, 21 nt, Artificial Sequence
  LRRK2 RNA guide
ucucuaugcgaaauaaugccc

SEQ ID NO: 19551 - RNA, 21 nt, Artificial Sequence
  LRRK2 RNA guide
uuauuucgcauagagaugugg

SEQ ID NO: 19552 - RNA, 21 nt, Artificial Sequence
  LRRK2 RNA guide
uuccacaucucuaugcgaaau

SEQ ID NO: 19553 - RNA, 21 nt, Artificial Sequence
  LRRK2 RNA guide
uucgcauagagauguggaaaa

SEQ ID NO: 19554 - RNA, 21 nt, Artificial Sequence
  LRRK2 RNA guide
uuuccacaucucuaugcgaaa

SEQ ID NO: 19555 - RNA, 21 nt, Artificial Sequence
  LRRK2 RNA guide
uuucgcauagagauguggaaa

SEQ ID NO: 19556 - RNA, 21 nt, Artificial Sequence
  LRRK2 RNA guide
uuuuccacaucucuaugcgaa

SEQ ID NO: 19557 - RNA, 21 nt, Artificial Sequence
  LRRK2 RNA guide
uuuuuccacaucucuaugcga

SEQ ID NO: 19558 - RNA, 22 nt, Artificial Sequence
  LRRK2 RNA guide
aaaacacccuaagggcauuauu

SEQ ID NO: 19559 - RNA, 22 nt, Artificial Sequence
  LRRK2 RNA guide
aaacacccuaagggcauuauuu

SEQ ID NO: 19560 - RNA, 22 nt, Artificial Sequence
  LRRK2 RNA guide
aaauuuuuccacaucucuaugc

SEQ ID NO: 19561 - RNA, 22 nt, Artificial Sequence
  LRRK2 RNA guide
aacacccuaagggcauuauuuc

SEQ ID NO: 19562 - RNA, 22 nt, Artificial Sequence
  LRRK2 RNA guide
aagggcauuauuucgcauagag

SEQ ID NO: 19563 - RNA, 22 nt, Artificial Sequence
  LRRK2 RNA guide
aauuuuuccacaucucuaugcg

SEQ ID NO: 19564 - RNA, 22 nt, Artificial Sequence
  LRRK2 RNA guide
acacccuaagggcauuauuucg

SEQ ID NO: 19565 - RNA, 22 nt, Artificial Sequence
  LRRK2 RNA guide
acaucucuaugcgaaauaaugc

SEQ ID NO: 19566 - RNA, 22 nt, Artificial Sequence
  LRRK2 RNA guide
acccuaagggcauuauuucgca

SEQ ID NO: 19567 - RNA, 22 nt, Artificial Sequence
  LRRK2 RNA guide
agggcauuauuucgcauagaga

SEQ ID NO: 19568 - RNA, 22 nt, Artificial Sequence
  LRRK2 RNA guide
aucucuaugcgaaauaaugccc

SEQ ID NO: 19569 - RNA, 22 nt, Artificial Sequence
  LRRK2 RNA guide
augcgaaauaaugcccuuaggg

SEQ ID NO: 19570 - RNA, 22 nt, Artificial Sequence
  LRRK2 RNA guide
auuauuucgcauagagaugugg

SEQ ID NO: 19571 - RNA, 22 nt, Artificial Sequence
  LRRK2 RNA guide
auuucgcauagagauguggaaa

SEQ ID NO: 19572 - RNA, 22 nt, Artificial Sequence
  LRRK2 RNA guide
auuuuuccacaucucuaugcga

SEQ ID NO: 19573 - RNA, 22 nt, Artificial Sequence
  LRRK2 RNA guide
cacaucucuaugcgaaauaaug

SEQ ID NO: 19574 - RNA, 22 nt, Artificial Sequence
  LRRK2 RNA guide
cacccuaagggcauuauuucgc

SEQ ID NO: 19575 - RNA, 22 nt, Artificial Sequence
  LRRK2 RNA guide
cauagagauguggaaaaauuuc

SEQ ID NO: 19576 - RNA, 22 nt, Artificial Sequence
  LRRK2 RNA guide
caucucuaugcgaaauaaugcc

SEQ ID NO: 19577 - RNA, 22 nt, Artificial Sequence
  LRRK2 RNA guide
cauuauuucgcauagagaugug

SEQ ID NO: 19578 - RNA, 22 nt, Artificial Sequence
  LRRK2 RNA guide
ccacaucucuaugcgaaauaau

SEQ ID NO: 19579 - RNA, 22 nt, Artificial Sequence
  LRRK2 RNA guide
cccuaagggcauuauuucgcau

SEQ ID NO: 19580 - RNA, 22 nt, Artificial Sequence
  LRRK2 RNA guide
ccuaagggcauuauuucgcaua

SEQ ID NO: 19581 - RNA, 22 nt, Artificial Sequence
  LRRK2 RNA guide
cgcauagagauguggaaaaauu

SEQ ID NO: 19582 - RNA, 22 nt, Artificial Sequence
  LRRK2 RNA guide
cuaagggcauuauuucgcauag

SEQ ID NO: 19583 - RNA, 22 nt, Artificial Sequence
  LRRK2 RNA guide
cuaugcgaaauaaugcccuuag

SEQ ID NO: 19584 - RNA, 22 nt, Artificial Sequence
  LRRK2 RNA guide
cucuaugcgaaauaaugcccuu

SEQ ID NO: 19585 - RNA, 22 nt, Artificial Sequence
  LRRK2 RNA guide
gaaagaaauuuuuccacaucuc

SEQ ID NO: 19586 - RNA, 22 nt, Artificial Sequence
  LRRK2 RNA guide
gaaauuuuuccacaucucuaug

SEQ ID NO: 19587 - RNA, 22 nt, Artificial Sequence
  LRRK2 RNA guide
gcauagagauguggaaaaauuu

SEQ ID NO: 19588 - RNA, 22 nt, Artificial Sequence
  LRRK2 RNA guide
gcauuauuucgcauagagaugu

SEQ ID NO: 19589 - RNA, 22 nt, Artificial Sequence
  LRRK2 RNA guide
ggcauuauuucgcauagagaug

SEQ ID NO: 19590 - RNA, 22 nt, Artificial Sequence
  LRRK2 RNA guide
gggcauuauuucgcauagagau

SEQ ID NO: 19591 - RNA, 22 nt, Artificial Sequence
  LRRK2 RNA guide
uaagggcauuauuucgcauaga

SEQ ID NO: 19592 - RNA, 22 nt, Artificial Sequence
  LRRK2 RNA guide
uaugcgaaauaaugcccuuagg

SEQ ID NO: 19593 - RNA, 22 nt, Artificial Sequence
  LRRK2 RNA guide
uauuucgcauagagauguggaa

SEQ ID NO: 19594 - RNA, 22 nt, Artificial Sequence
  LRRK2 RNA guide
uccacaucucuaugcgaaauaa

SEQ ID NO: 19595 - RNA, 22 nt, Artificial Sequence
  LRRK2 RNA guide
ucgcauagagauguggaaaaau

SEQ ID NO: 19596 - RNA, 22 nt, Artificial Sequence
  LRRK2 RNA guide
ucuaugcgaaauaaugcccuua

SEQ ID NO: 19597 - RNA, 22 nt, Artificial Sequence
  LRRK2 RNA guide
ucucuaugcgaaauaaugcccu

SEQ ID NO: 19598 - RNA, 22 nt, Artificial Sequence
  LRRK2 RNA guide
uuauuucgcauagagaugugga

SEQ ID NO: 19599 - RNA, 22 nt, Artificial Sequence
  LRRK2 RNA guide
uuccacaucucuaugcgaaaua

SEQ ID NO: 19600 - RNA, 22 nt, Artificial Sequence
  LRRK2 RNA guide
uucgcauagagauguggaaaaa

SEQ ID NO: 19601 - RNA, 22 nt, Artificial Sequence
  LRRK2 RNA guide
uuuccacaucucuaugcgaaau

SEQ ID NO: 19602 - RNA, 22 nt, Artificial Sequence
  LRRK2 RNA guide
uuucgcauagagauguggaaaa

SEQ ID NO: 19603 - RNA, 22 nt, Artificial Sequence
  LRRK2 RNA guide
uuuuccacaucucuaugcgaaa

SEQ ID NO: 19604 - RNA, 22 nt, Artificial Sequence
  LRRK2 RNA guide
uuuuuccacaucucuaugcgaa

SEQ ID NO: 19605 - RNA, 20 nt, Artificial Sequence
  LRRK2 RNA guide
aaauuuuugcacaucucuac

SEQ ID NO: 19606 - RNA, 20 nt, Artificial Sequence
  LRRK2 RNA guide
aagaaauuuuugcacaucuc

SEQ ID NO: 19607 - RNA, 20 nt, Artificial Sequence
  LRRK2 RNA guide
aauuuuugcacaucucuacg

SEQ ID NO: 19608 - RNA, 20 nt, Artificial Sequence
  LRRK2 RNA guide
agaaauuuuugcacaucucu

SEQ ID NO: 19609 - RNA, 20 nt, Artificial Sequence
  LRRK2 RNA guide
agagaugugcaaaaauuucu

SEQ ID NO: 19610 - RNA, 20 nt, Artificial Sequence
  LRRK2 RNA guide
auuauuucgcguagagaugu

SEQ ID NO: 19611 - RNA, 20 nt, Artificial Sequence
  LRRK2 RNA guide
auuucgcguagagaugugca

SEQ ID NO: 19612 - RNA, 20 nt, Artificial Sequence
  LRRK2 RNA guide
auuuuugcacaucucuacgc

SEQ ID NO: 19613 - RNA, 20 nt, Artificial Sequence
  LRRK2 RNA guide
cauuauuucgcguagagaug

SEQ ID NO: 19614 - RNA, 20 nt, Artificial Sequence
  LRRK2 RNA guide
cgcguagagaugugcaaaaa

SEQ ID NO: 19615 - RNA, 20 nt, Artificial Sequence
  LRRK2 RNA guide
cguagagaugugcaaaaauu

SEQ ID NO: 19616 - RNA, 20 nt, Artificial Sequence
  LRRK2 RNA guide
gaaagaaauuuuugcacauc

SEQ ID NO: 19617 - RNA, 20 nt, Artificial Sequence
  LRRK2 RNA guide
gaaauuuuugcacaucucua

SEQ ID NO: 19618 - RNA, 20 nt, Artificial Sequence
  LRRK2 RNA guide
gagaugugcaaaaauuucuu

SEQ ID NO: 19619 - RNA, 20 nt, Artificial Sequence
  LRRK2 RNA guide
gaugugcaaaaauuucuuuc

SEQ ID NO: 19620 - RNA, 20 nt, Artificial Sequence
  LRRK2 RNA guide
gcauuauuucgcguagagau

SEQ ID NO: 19621 - RNA, 20 nt, Artificial Sequence
  LRRK2 RNA guide
gcguagagaugugcaaaaau

SEQ ID NO: 19622 - RNA, 20 nt, Artificial Sequence
  LRRK2 RNA guide
ggcauuauuucgcguagaga

SEQ ID NO: 19623 - RNA, 20 nt, Artificial Sequence
  LRRK2 RNA guide
guagagaugugcaaaaauuu

SEQ ID NO: 19624 - RNA, 20 nt, Artificial Sequence
  LRRK2 RNA guide
uagagaugugcaaaaauuuc

SEQ ID NO: 19625 - RNA, 20 nt, Artificial Sequence
  LRRK2 RNA guide
uauuucgcguagagaugugc

SEQ ID NO: 19626 - RNA, 20 nt, Artificial Sequence
  LRRK2 RNA guide
ucgcguagagaugugcaaaa

SEQ ID NO: 19627 - RNA, 20 nt, Artificial Sequence
  LRRK2 RNA guide
ugcacaucucuacgcgaaau

SEQ ID NO: 19628 - RNA, 20 nt, Artificial Sequence
  LRRK2 RNA guide
uuauuucgcguagagaugug

SEQ ID NO: 19629 - RNA, 20 nt, Artificial Sequence
  LRRK2 RNA guide
uucgcguagagaugugcaaa

SEQ ID NO: 19630 - RNA, 20 nt, Artificial Sequence
  LRRK2 RNA guide
uugcacaucucuacgcgaaa

SEQ ID NO: 19631 - RNA, 20 nt, Artificial Sequence
  LRRK2 RNA guide
uuucgcguagagaugugcaa

SEQ ID NO: 19632 - RNA, 20 nt, Artificial Sequence
  LRRK2 RNA guide
uuugcacaucucuacgcgaa

SEQ ID NO: 19633 - RNA, 20 nt, Artificial Sequence
  LRRK2 RNA guide
uuuugcacaucucuacgcga

SEQ ID NO: 19634 - RNA, 20 nt, Artificial Sequence
  LRRK2 RNA guide
uuuuugcacaucucuacgcg

SEQ ID NO: 19635 - RNA, 21 nt, Artificial Sequence
  LRRK2 RNA guide
aaauuuuugcacaucucuacg

SEQ ID NO: 19636 - RNA, 21 nt, Artificial Sequence
  LRRK2 RNA guide
aauuuuugcacaucucuacgc

SEQ ID NO: 19637 - RNA, 21 nt, Artificial Sequence
  LRRK2 RNA guide
auuauuucgcguagagaugug

SEQ ID NO: 19638 - RNA, 21 nt, Artificial Sequence
  LRRK2 RNA guide
auuucgcguagagaugugcaa

SEQ ID NO: 19639 - RNA, 21 nt, Artificial Sequence
  LRRK2 RNA guide
auuuuugcacaucucuacgcg

SEQ ID NO: 19640 - RNA, 21 nt, Artificial Sequence
  LRRK2 RNA guide
cauuauuucgcguagagaugu

SEQ ID NO: 19641 - RNA, 21 nt, Artificial Sequence
  LRRK2 RNA guide
cgcguagagaugugcaaaaau

SEQ ID NO: 19642 - RNA, 21 nt, Artificial Sequence
  LRRK2 RNA guide
cguagagaugugcaaaaauuu

SEQ ID NO: 19643 - RNA, 21 nt, Artificial Sequence
  LRRK2 RNA guide
gaaauuuuugcacaucucuac

SEQ ID NO: 19644 - RNA, 21 nt, Artificial Sequence
  LRRK2 RNA guide
gcauuauuucgcguagagaug

SEQ ID NO: 19645 - RNA, 21 nt, Artificial Sequence
  LRRK2 RNA guide
gcguagagaugugcaaaaauu

SEQ ID NO: 19646 - RNA, 21 nt, Artificial Sequence
  LRRK2 RNA guide
ggcauuauuucgcguagagau

SEQ ID NO: 19647 - RNA, 21 nt, Artificial Sequence
  LRRK2 RNA guide
gggcauuauuucgcguagaga

SEQ ID NO: 19648 - RNA, 21 nt, Artificial Sequence
  LRRK2 RNA guide
guagagaugugcaaaaauuuc

SEQ ID NO: 19649 - RNA, 21 nt, Artificial Sequence
  LRRK2 RNA guide
uauuucgcguagagaugugca

SEQ ID NO: 19650 - RNA, 21 nt, Artificial Sequence
  LRRK2 RNA guide
ucgcguagagaugugcaaaaa

SEQ ID NO: 19651 - RNA, 21 nt, Artificial Sequence
  LRRK2 RNA guide
ugcacaucucuacgcgaaaua

SEQ ID NO: 19652 - RNA, 21 nt, Artificial Sequence
  LRRK2 RNA guide
uuauuucgcguagagaugugc

SEQ ID NO: 19653 - RNA, 21 nt, Artificial Sequence
  LRRK2 RNA guide
uucgcguagagaugugcaaaa

SEQ ID NO: 19654 - RNA, 21 nt, Artificial Sequence
  LRRK2 RNA guide
uugcacaucucuacgcgaaau

SEQ ID NO: 19655 - RNA, 21 nt, Artificial Sequence
  LRRK2 RNA guide
uuucgcguagagaugugcaaa

SEQ ID NO: 19656 - RNA, 21 nt, Artificial Sequence
  LRRK2 RNA guide
uuugcacaucucuacgcgaaa

SEQ ID NO: 19657 - RNA, 21 nt, Artificial Sequence
  LRRK2 RNA guide
uuuugcacaucucuacgcgaa

SEQ ID NO: 19658 - RNA, 21 nt, Artificial Sequence
  LRRK2 RNA guide
uuuuugcacaucucuacgcga

SEQ ID NO: 19659 - RNA, 22 nt, Artificial Sequence
  LRRK2 RNA guide
aaauuuuugcacaucucuacgc

SEQ ID NO: 19660 - RNA, 22 nt, Artificial Sequence
  LRRK2 RNA guide
aauuuuugcacaucucuacgcg

SEQ ID NO: 19661 - RNA, 22 nt, Artificial Sequence
  LRRK2 RNA guide
agaaauuuuugcacaucucuac

SEQ ID NO: 19662 - RNA, 22 nt, Artificial Sequence
  LRRK2 RNA guide
agggcauuauuucgcguagaga

SEQ ID NO: 19663 - RNA, 22 nt, Artificial Sequence
  LRRK2 RNA guide
auuauuucgcguagagaugugc

SEQ ID NO: 19664 - RNA, 22 nt, Artificial Sequence
  LRRK2 RNA guide
auuucgcguagagaugugcaaa

SEQ ID NO: 19665 - RNA, 22 nt, Artificial Sequence
  LRRK2 RNA guide
auuuuugcacaucucuacgcga

SEQ ID NO: 19666 - RNA, 22 nt, Artificial Sequence
  LRRK2 RNA guide
cauuauuucgcguagagaugug

SEQ ID NO: 19667 - RNA, 22 nt, Artificial Sequence
  LRRK2 RNA guide
cgcguagagaugugcaaaaauu

SEQ ID NO: 19668 - RNA, 22 nt, Artificial Sequence
  LRRK2 RNA guide
cguagagaugugcaaaaauuuc

SEQ ID NO: 19669 - RNA, 22 nt, Artificial Sequence
  LRRK2 RNA guide
gaaagaaauuuuugcacaucuc

SEQ ID NO: 19670 - RNA, 22 nt, Artificial Sequence
  LRRK2 RNA guide
gaaauuuuugcacaucucuacg

SEQ ID NO: 19671 - RNA, 22 nt, Artificial Sequence
  LRRK2 RNA guide
gagaugugcaaaaauuucuuuc

SEQ ID NO: 19672 - RNA, 22 nt, Artificial Sequence
  LRRK2 RNA guide
gcauuauuucgcguagagaugu

SEQ ID NO: 19673 - RNA, 22 nt, Artificial Sequence
  LRRK2 RNA guide
gcguagagaugugcaaaaauuu

SEQ ID NO: 19674 - RNA, 22 nt, Artificial Sequence
  LRRK2 RNA guide
ggcauuauuucgcguagagaug

SEQ ID NO: 19675 - RNA, 22 nt, Artificial Sequence
  LRRK2 RNA guide
gggcauuauuucgcguagagau

SEQ ID NO: 19676 - RNA, 22 nt, Artificial Sequence
  LRRK2 RNA guide
guagagaugugcaaaaauuucu

SEQ ID NO: 19677 - RNA, 22 nt, Artificial Sequence
  LRRK2 RNA guide
uauuucgcguagagaugugcaa

SEQ ID NO: 19678 - RNA, 22 nt, Artificial Sequence
  LRRK2 RNA guide
ucgcguagagaugugcaaaaau

SEQ ID NO: 19679 - RNA, 22 nt, Artificial Sequence
  LRRK2 RNA guide
ugcacaucucuacgcgaaauaa

SEQ ID NO: 19680 - RNA, 22 nt, Artificial Sequence
  LRRK2 RNA guide
uuauuucgcguagagaugugca

SEQ ID NO: 19681 - RNA, 22 nt, Artificial Sequence
  LRRK2 RNA guide
uucgcguagagaugugcaaaaa

SEQ ID NO: 19682 - RNA, 22 nt, Artificial Sequence
  LRRK2 RNA guide
uugcacaucucuacgcgaaaua

SEQ ID NO: 19683 - RNA, 22 nt, Artificial Sequence
  LRRK2 RNA guide
uuucgcguagagaugugcaaaa

SEQ ID NO: 19684 - RNA, 22 nt, Artificial Sequence
  LRRK2 RNA guide
uuugcacaucucuacgcgaaau

SEQ ID NO: 19685 - RNA, 22 nt, Artificial Sequence
  LRRK2 RNA guide
uuuugcacaucucuacgcgaaa

SEQ ID NO: 19686 - RNA, 22 nt, Artificial Sequence
  LRRK2 RNA guide
uuuuugcacaucucuacgcgaa

SEQ ID NO: 19687 - RNA, 20 nt, Artificial Sequence
  LRRK2 RNA guide
aaaaaggaaauuuccaaagg

SEQ ID NO: 19688 - RNA, 20 nt, Artificial Sequence
  LRRK2 RNA guide
aaaaggaaauuuccaaagga

SEQ ID NO: 19689 - RNA, 20 nt, Artificial Sequence
  LRRK2 RNA guide
aaaggaaauuuccaaaggac

SEQ ID NO: 19690 - RNA, 20 nt, Artificial Sequence
  LRRK2 RNA guide
aaaggacuacaugucacagu

SEQ ID NO: 19691 - RNA, 20 nt, Artificial Sequence
  LRRK2 RNA guide
aaauacugugacauguaguc

SEQ ID NO: 19692 - RNA, 20 nt, Artificial Sequence
  LRRK2 RNA guide
aaauuuccaaaggacuacau

SEQ ID NO: 19693 - RNA, 20 nt, Artificial Sequence
  LRRK2 RNA guide
aaggaaauuuccaaaggacu

SEQ ID NO: 19694 - RNA, 20 nt, Artificial Sequence
  LRRK2 RNA guide
aaggacuacaugucacagua

SEQ ID NO: 19695 - RNA, 20 nt, Artificial Sequence
  LRRK2 RNA guide
aauacugugacauguagucc

SEQ ID NO: 19696 - RNA, 20 nt, Artificial Sequence
  LRRK2 RNA guide
aauuuccaaaggacuacaug

SEQ ID NO: 19697 - RNA, 20 nt, Artificial Sequence
  LRRK2 RNA guide
acauguaguccuuuggaaau

SEQ ID NO: 19698 - RNA, 20 nt, Artificial Sequence
  LRRK2 RNA guide
acugugacauguaguccuuu

SEQ ID NO: 19699 - RNA, 20 nt, Artificial Sequence
  LRRK2 RNA guide
aggaaauuuccaaaggacua

SEQ ID NO: 19700 - RNA, 20 nt, Artificial Sequence
  LRRK2 RNA guide
aggacuacaugucacaguau

SEQ ID NO: 19701 - RNA, 20 nt, Artificial Sequence
  LRRK2 RNA guide
aguccuuuggaaauuuccuu

SEQ ID NO: 19702 - RNA, 20 nt, Artificial Sequence
  LRRK2 RNA guide
auacugugacauguaguccu

SEQ ID NO: 19703 - RNA, 20 nt, Artificial Sequence
  LRRK2 RNA guide
auguaguccuuuggaaauuu

SEQ ID NO: 19704 - RNA, 20 nt, Artificial Sequence
  LRRK2 RNA guide
auuuccaaaggacuacaugu

SEQ ID NO: 19705 - RNA, 20 nt, Artificial Sequence
  LRRK2 RNA guide
caaaggacuacaugucacag

SEQ ID NO: 19706 - RNA, 20 nt, Artificial Sequence
  LRRK2 RNA guide
cauguaguccuuuggaaauu

SEQ ID NO: 19707 - RNA, 20 nt, Artificial Sequence
  LRRK2 RNA guide
ccaaaggacuacaugucaca

SEQ ID NO: 19708 - RNA, 20 nt, Artificial Sequence
  LRRK2 RNA guide
cugugacauguaguccuuug

SEQ ID NO: 19709 - RNA, 20 nt, Artificial Sequence
  LRRK2 RNA guide
cuuaaaauacugugacaugu

SEQ ID NO: 19710 - RNA, 20 nt, Artificial Sequence
  LRRK2 RNA guide
gaaauuuccaaaggacuaca

SEQ ID NO: 19711 - RNA, 20 nt, Artificial Sequence
  LRRK2 RNA guide
gacauguaguccuuuggaaa

SEQ ID NO: 19712 - RNA, 20 nt, Artificial Sequence
  LRRK2 RNA guide
gcuuaaaauacugugacaug

SEQ ID NO: 19713 - RNA, 20 nt, Artificial Sequence
  LRRK2 RNA guide
ggaaauuuccaaaggacuac

SEQ ID NO: 19714 - RNA, 20 nt, Artificial Sequence
  LRRK2 RNA guide
ggacuacaugucacaguauu

SEQ ID NO: 19715 - RNA, 20 nt, Artificial Sequence
  LRRK2 RNA guide
guaguccuuuggaaauuucc

SEQ ID NO: 19716 - RNA, 20 nt, Artificial Sequence
  LRRK2 RNA guide
guccuuuggaaauuuccuuu

SEQ ID NO: 19717 - RNA, 20 nt, Artificial Sequence
  LRRK2 RNA guide
gugacauguaguccuuugga

SEQ ID NO: 19718 - RNA, 20 nt, Artificial Sequence
  LRRK2 RNA guide
uacugugacauguaguccuu

SEQ ID NO: 19719 - RNA, 20 nt, Artificial Sequence
  LRRK2 RNA guide
uaguccuuuggaaauuuccu

SEQ ID NO: 19720 - RNA, 20 nt, Artificial Sequence
  LRRK2 RNA guide
uccaaaggacuacaugucac

SEQ ID NO: 19721 - RNA, 20 nt, Artificial Sequence
  LRRK2 RNA guide
uccuuuggaaauuuccuuuu

SEQ ID NO: 19722 - RNA, 20 nt, Artificial Sequence
  LRRK2 RNA guide
ugacauguaguccuuuggaa

SEQ ID NO: 19723 - RNA, 20 nt, Artificial Sequence
  LRRK2 RNA guide
uguaguccuuuggaaauuuc

SEQ ID NO: 19724 - RNA, 20 nt, Artificial Sequence
  LRRK2 RNA guide
ugugacauguaguccuuugg

SEQ ID NO: 19725 - RNA, 20 nt, Artificial Sequence
  LRRK2 RNA guide
uuccaaaggacuacauguca

SEQ ID NO: 19726 - RNA, 20 nt, Artificial Sequence
  LRRK2 RNA guide
uuuccaaaggacuacauguc

SEQ ID NO: 19727 - RNA, 21 nt, Artificial Sequence
  LRRK2 RNA guide
aaaaggaaauuuccaaaggac

SEQ ID NO: 19728 - RNA, 21 nt, Artificial Sequence
  LRRK2 RNA guide
aaaauacugugacauguaguc

SEQ ID NO: 19729 - RNA, 21 nt, Artificial Sequence
  LRRK2 RNA guide
aaaggaaauuuccaaaggacu

SEQ ID NO: 19730 - RNA, 21 nt, Artificial Sequence
  LRRK2 RNA guide
aaaggacuacaugucacagua

SEQ ID NO: 19731 - RNA, 21 nt, Artificial Sequence
  LRRK2 RNA guide
aaauacugugacauguagucc

SEQ ID NO: 19732 - RNA, 21 nt, Artificial Sequence
  LRRK2 RNA guide
aaauuuccaaaggacuacaug

SEQ ID NO: 19733 - RNA, 21 nt, Artificial Sequence
  LRRK2 RNA guide
aaggaaauuuccaaaggacua

SEQ ID NO: 19734 - RNA, 21 nt, Artificial Sequence
  LRRK2 RNA guide
aaggacuacaugucacaguau

SEQ ID NO: 19735 - RNA, 21 nt, Artificial Sequence
  LRRK2 RNA guide
aauacugugacauguaguccu

SEQ ID NO: 19736 - RNA, 21 nt, Artificial Sequence
  LRRK2 RNA guide
aauuuccaaaggacuacaugu

SEQ ID NO: 19737 - RNA, 21 nt, Artificial Sequence
  LRRK2 RNA guide
acauguaguccuuuggaaauu

SEQ ID NO: 19738 - RNA, 21 nt, Artificial Sequence
  LRRK2 RNA guide
acugugacauguaguccuuug

SEQ ID NO: 19739 - RNA, 21 nt, Artificial Sequence
  LRRK2 RNA guide
agcuuaaaauacugugacaug

SEQ ID NO: 19740 - RNA, 21 nt, Artificial Sequence
  LRRK2 RNA guide
aggaaauuuccaaaggacuac

SEQ ID NO: 19741 - RNA, 21 nt, Artificial Sequence
  LRRK2 RNA guide
aggacuacaugucacaguauu

SEQ ID NO: 19742 - RNA, 21 nt, Artificial Sequence
  LRRK2 RNA guide
aguccuuuggaaauuuccuuu

SEQ ID NO: 19743 - RNA, 21 nt, Artificial Sequence
  LRRK2 RNA guide
auacugugacauguaguccuu

SEQ ID NO: 19744 - RNA, 21 nt, Artificial Sequence
  LRRK2 RNA guide
auguaguccuuuggaaauuuc

SEQ ID NO: 19745 - RNA, 21 nt, Artificial Sequence
  LRRK2 RNA guide
auuuccaaaggacuacauguc

SEQ ID NO: 19746 - RNA, 21 nt, Artificial Sequence
  LRRK2 RNA guide
caaaggacuacaugucacagu

SEQ ID NO: 19747 - RNA, 21 nt, Artificial Sequence
  LRRK2 RNA guide
cauguaguccuuuggaaauuu

SEQ ID NO: 19748 - RNA, 21 nt, Artificial Sequence
  LRRK2 RNA guide
ccaaaggacuacaugucacag

SEQ ID NO: 19749 - RNA, 21 nt, Artificial Sequence
  LRRK2 RNA guide
cugugacauguaguccuuugg

SEQ ID NO: 19750 - RNA, 21 nt, Artificial Sequence
  LRRK2 RNA guide
gaaauuuccaaaggacuacau

SEQ ID NO: 19751 - RNA, 21 nt, Artificial Sequence
  LRRK2 RNA guide
gacauguaguccuuuggaaau

SEQ ID NO: 19752 - RNA, 21 nt, Artificial Sequence
  LRRK2 RNA guide
gcuuaaaauacugugacaugu

SEQ ID NO: 19753 - RNA, 21 nt, Artificial Sequence
  LRRK2 RNA guide
ggaaauuuccaaaggacuaca

SEQ ID NO: 19754 - RNA, 21 nt, Artificial Sequence
  LRRK2 RNA guide
ggacuacaugucacaguauuu

SEQ ID NO: 19755 - RNA, 21 nt, Artificial Sequence
  LRRK2 RNA guide
guaguccuuuggaaauuuccu

SEQ ID NO: 19756 - RNA, 21 nt, Artificial Sequence
  LRRK2 RNA guide
guccuuuggaaauuuccuuuu

SEQ ID NO: 19757 - RNA, 21 nt, Artificial Sequence
  LRRK2 RNA guide
gugacauguaguccuuuggaa

SEQ ID NO: 19758 - RNA, 21 nt, Artificial Sequence
  LRRK2 RNA guide
uacugugacauguaguccuuu

SEQ ID NO: 19759 - RNA, 21 nt, Artificial Sequence
  LRRK2 RNA guide
uaguccuuuggaaauuuccuu

SEQ ID NO: 19760 - RNA, 21 nt, Artificial Sequence
  LRRK2 RNA guide
uccaaaggacuacaugucaca

SEQ ID NO: 19761 - RNA, 21 nt, Artificial Sequence
  LRRK2 RNA guide
ugacauguaguccuuuggaaa

SEQ ID NO: 19762 - RNA, 21 nt, Artificial Sequence
  LRRK2 RNA guide
uguaguccuuuggaaauuucc

SEQ ID NO: 19763 - RNA, 21 nt, Artificial Sequence
  LRRK2 RNA guide
ugugacauguaguccuuugga

SEQ ID NO: 19764 - RNA, 21 nt, Artificial Sequence
  LRRK2 RNA guide
uuccaaaggacuacaugucac

SEQ ID NO: 19765 - RNA, 21 nt, Artificial Sequence
  LRRK2 RNA guide
uuuccaaaggacuacauguca

SEQ ID NO: 19766 - RNA, 22 nt, Artificial Sequence
  LRRK2 RNA guide
aaaaaggaaauuuccaaaggac

SEQ ID NO: 19767 - RNA, 22 nt, Artificial Sequence
  LRRK2 RNA guide
aaaaggaaauuuccaaaggacu

SEQ ID NO: 19768 - RNA, 22 nt, Artificial Sequence
  LRRK2 RNA guide
aaaauacugugacauguagucc

SEQ ID NO: 19769 - RNA, 22 nt, Artificial Sequence
  LRRK2 RNA guide
aaaggaaauuuccaaaggacua

SEQ ID NO: 19770 - RNA, 22 nt, Artificial Sequence
  LRRK2 RNA guide
aaaggacuacaugucacaguau

SEQ ID NO: 19771 - RNA, 22 nt, Artificial Sequence
  LRRK2 RNA guide
aaauacugugacauguaguccu

SEQ ID NO: 19772 - RNA, 22 nt, Artificial Sequence
  LRRK2 RNA guide
aaauuuccaaaggacuacaugu

SEQ ID NO: 19773 - RNA, 22 nt, Artificial Sequence
  LRRK2 RNA guide
aaggaaauuuccaaaggacuac

SEQ ID NO: 19774 - RNA, 22 nt, Artificial Sequence
  LRRK2 RNA guide
aaggacuacaugucacaguauu

SEQ ID NO: 19775 - RNA, 22 nt, Artificial Sequence
  LRRK2 RNA guide
aauacugugacauguaguccuu

SEQ ID NO: 19776 - RNA, 22 nt, Artificial Sequence
  LRRK2 RNA guide
aauuuccaaaggacuacauguc

SEQ ID NO: 19777 - RNA, 22 nt, Artificial Sequence
  LRRK2 RNA guide
acauguaguccuuuggaaauuu

SEQ ID NO: 19778 - RNA, 22 nt, Artificial Sequence
  LRRK2 RNA guide
acugugacauguaguccuuugg

SEQ ID NO: 19779 - RNA, 22 nt, Artificial Sequence
  LRRK2 RNA guide
agcuuaaaauacugugacaugu

SEQ ID NO: 19780 - RNA, 22 nt, Artificial Sequence
  LRRK2 RNA guide
aggaaauuuccaaaggacuaca

SEQ ID NO: 19781 - RNA, 22 nt, Artificial Sequence
  LRRK2 RNA guide
aggacuacaugucacaguauuu

SEQ ID NO: 19782 - RNA, 22 nt, Artificial Sequence
  LRRK2 RNA guide
aguccuuuggaaauuuccuuuu

SEQ ID NO: 19783 - RNA, 22 nt, Artificial Sequence
  LRRK2 RNA guide
auacugugacauguaguccuuu

SEQ ID NO: 19784 - RNA, 22 nt, Artificial Sequence
  LRRK2 RNA guide
auguaguccuuuggaaauuucc

SEQ ID NO: 19785 - RNA, 22 nt, Artificial Sequence
  LRRK2 RNA guide
auuuccaaaggacuacauguca

SEQ ID NO: 19786 - RNA, 22 nt, Artificial Sequence
  LRRK2 RNA guide
caaaggacuacaugucacagua

SEQ ID NO: 19787 - RNA, 22 nt, Artificial Sequence
  LRRK2 RNA guide
cauguaguccuuuggaaauuuc

SEQ ID NO: 19788 - RNA, 22 nt, Artificial Sequence
  LRRK2 RNA guide
ccaaaggacuacaugucacagu

SEQ ID NO: 19789 - RNA, 22 nt, Artificial Sequence
  LRRK2 RNA guide
cugugacauguaguccuuugga

SEQ ID NO: 19790 - RNA, 22 nt, Artificial Sequence
  LRRK2 RNA guide
cuuaaaauacugugacauguag

SEQ ID NO: 19791 - RNA, 22 nt, Artificial Sequence
  LRRK2 RNA guide
gaaauuuccaaaggacuacaug

SEQ ID NO: 19792 - RNA, 22 nt, Artificial Sequence
  LRRK2 RNA guide
gacauguaguccuuuggaaauu

SEQ ID NO: 19793 - RNA, 22 nt, Artificial Sequence
  LRRK2 RNA guide
gagcuuaaaauacugugacaug

SEQ ID NO: 19794 - RNA, 22 nt, Artificial Sequence
  LRRK2 RNA guide
gcuuaaaauacugugacaugua

SEQ ID NO: 19795 - RNA, 22 nt, Artificial Sequence
  LRRK2 RNA guide
ggaaauuuccaaaggacuacau

SEQ ID NO: 19796 - RNA, 22 nt, Artificial Sequence
  LRRK2 RNA guide
ggacuacaugucacaguauuuu

SEQ ID NO: 19797 - RNA, 22 nt, Artificial Sequence
  LRRK2 RNA guide
guaguccuuuggaaauuuccuu

SEQ ID NO: 19798 - RNA, 22 nt, Artificial Sequence
  LRRK2 RNA guide
guccuuuggaaauuuccuuuuu

SEQ ID NO: 19799 - RNA, 22 nt, Artificial Sequence
  LRRK2 RNA guide
gugacauguaguccuuuggaaa

SEQ ID NO: 19800 - RNA, 22 nt, Artificial Sequence
  LRRK2 RNA guide
uaaaauacugugacauguaguc

SEQ ID NO: 19801 - RNA, 22 nt, Artificial Sequence
  LRRK2 RNA guide
uacugugacauguaguccuuug

SEQ ID NO: 19802 - RNA, 22 nt, Artificial Sequence
  LRRK2 RNA guide
uaguccuuuggaaauuuccuuu

SEQ ID NO: 19803 - RNA, 22 nt, Artificial Sequence
  LRRK2 RNA guide
uccaaaggacuacaugucacag

SEQ ID NO: 19804 - RNA, 22 nt, Artificial Sequence
  LRRK2 RNA guide
ugacauguaguccuuuggaaau

SEQ ID NO: 19805 - RNA, 22 nt, Artificial Sequence
  LRRK2 RNA guide
uguaguccuuuggaaauuuccu

SEQ ID NO: 19806 - RNA, 22 nt, Artificial Sequence
  LRRK2 RNA guide
ugugacauguaguccuuuggaa

SEQ ID NO: 19807 - RNA, 22 nt, Artificial Sequence
  LRRK2 RNA guide
uuccaaaggacuacaugucaca

SEQ ID NO: 19808 - RNA, 22 nt, Artificial Sequence
  LRRK2 RNA guide
uuuccaaaggacuacaugucac

SEQ ID NO: 19809 - RNA, 20 nt, Artificial Sequence
  LRRK2 RNA guide
aaaauacugugacaugcagu

SEQ ID NO: 19810 - RNA, 20 nt, Artificial Sequence
  LRRK2 RNA guide
aaagaacugcaugucacagu

SEQ ID NO: 19811 - RNA, 20 nt, Artificial Sequence
  LRRK2 RNA guide
aaaggaaauuuccaaagaac

SEQ ID NO: 19812 - RNA, 20 nt, Artificial Sequence
  LRRK2 RNA guide
aaauacugugacaugcaguu

SEQ ID NO: 19813 - RNA, 20 nt, Artificial Sequence
  LRRK2 RNA guide
aaauuuccaaagaacugcau

SEQ ID NO: 19814 - RNA, 20 nt, Artificial Sequence
  LRRK2 RNA guide
aacugcaugucacaguauuu

SEQ ID NO: 19815 - RNA, 20 nt, Artificial Sequence
  LRRK2 RNA guide
aagaacugcaugucacagua

SEQ ID NO: 19816 - RNA, 20 nt, Artificial Sequence
  LRRK2 RNA guide
aaggaaauuuccaaagaacu

SEQ ID NO: 19817 - RNA, 20 nt, Artificial Sequence
  LRRK2 RNA guide
aauacugugacaugcaguuc

SEQ ID NO: 19818 - RNA, 20 nt, Artificial Sequence
  LRRK2 RNA guide
aauuuccaaagaacugcaug

SEQ ID NO: 19819 - RNA, 20 nt, Artificial Sequence
  LRRK2 RNA guide
acaugcaguucuuuggaaau

SEQ ID NO: 19820 - RNA, 20 nt, Artificial Sequence
  LRRK2 RNA guide
acugcaugucacaguauuuu

SEQ ID NO: 19821 - RNA, 20 nt, Artificial Sequence
  LRRK2 RNA guide
acugugacaugcaguucuuu

SEQ ID NO: 19822 - RNA, 20 nt, Artificial Sequence
  LRRK2 RNA guide
agaacugcaugucacaguau

SEQ ID NO: 19823 - RNA, 20 nt, Artificial Sequence
  LRRK2 RNA guide
agcuuaaaauacugugacau

SEQ ID NO: 19824 - RNA, 20 nt, Artificial Sequence
  LRRK2 RNA guide
aggaaauuuccaaagaacug

SEQ ID NO: 19825 - RNA, 20 nt, Artificial Sequence
  LRRK2 RNA guide
aggagcuuaaaauacuguga

SEQ ID NO: 19826 - RNA, 20 nt, Artificial Sequence
  LRRK2 RNA guide
auacugugacaugcaguucu

SEQ ID NO: 19827 - RNA, 20 nt, Artificial Sequence
  LRRK2 RNA guide
augcaguucuuuggaaauuu

SEQ ID NO: 19828 - RNA, 20 nt, Artificial Sequence
  LRRK2 RNA guide
auuuccaaagaacugcaugu

SEQ ID NO: 19829 - RNA, 20 nt, Artificial Sequence
  LRRK2 RNA guide
caaagaacugcaugucacag

SEQ ID NO: 19830 - RNA, 20 nt, Artificial Sequence
  LRRK2 RNA guide
caugcaguucuuuggaaauu

SEQ ID NO: 19831 - RNA, 20 nt, Artificial Sequence
  LRRK2 RNA guide
ccaaagaacugcaugucaca

SEQ ID NO: 19832 - RNA, 20 nt, Artificial Sequence
  LRRK2 RNA guide
cugcaugucacaguauuuua

SEQ ID NO: 19833 - RNA, 20 nt, Artificial Sequence
  LRRK2 RNA guide
cugugacaugcaguucuuug

SEQ ID NO: 19834 - RNA, 20 nt, Artificial Sequence
  LRRK2 RNA guide
cuuaaaauacugugacaugc

SEQ ID NO: 19835 - RNA, 20 nt, Artificial Sequence
  LRRK2 RNA guide
gaaauuuccaaagaacugca

SEQ ID NO: 19836 - RNA, 20 nt, Artificial Sequence
  LRRK2 RNA guide
gaacugcaugucacaguauu

SEQ ID NO: 19837 - RNA, 20 nt, Artificial Sequence
  LRRK2 RNA guide
gacaugcaguucuuuggaaa

SEQ ID NO: 19838 - RNA, 20 nt, Artificial Sequence
  LRRK2 RNA guide
gagcuuaaaauacugugaca

SEQ ID NO: 19839 - RNA, 20 nt, Artificial Sequence
  LRRK2 RNA guide
gcaguucuuuggaaauuucc

SEQ ID NO: 19840 - RNA, 20 nt, Artificial Sequence
  LRRK2 RNA guide
ggaaauuuccaaagaacugc

SEQ ID NO: 19841 - RNA, 20 nt, Artificial Sequence
  LRRK2 RNA guide
ggagcuuaaaauacugugac

SEQ ID NO: 19842 - RNA, 20 nt, Artificial Sequence
  LRRK2 RNA guide
gugacaugcaguucuuugga

SEQ ID NO: 19843 - RNA, 20 nt, Artificial Sequence
  LRRK2 RNA guide
uaaaauacugugacaugcag

SEQ ID NO: 19844 - RNA, 20 nt, Artificial Sequence
  LRRK2 RNA guide
uacugugacaugcaguucuu

SEQ ID NO: 19845 - RNA, 20 nt, Artificial Sequence
  LRRK2 RNA guide
uccaaagaacugcaugucac

SEQ ID NO: 19846 - RNA, 20 nt, Artificial Sequence
  LRRK2 RNA guide
ugacaugcaguucuuuggaa

SEQ ID NO: 19847 - RNA, 20 nt, Artificial Sequence
  LRRK2 RNA guide
ugcaguucuuuggaaauuuc

SEQ ID NO: 19848 - RNA, 20 nt, Artificial Sequence
  LRRK2 RNA guide
ugcaugucacaguauuuuaa

SEQ ID NO: 19849 - RNA, 20 nt, Artificial Sequence
  LRRK2 RNA guide
ugugacaugcaguucuuugg

SEQ ID NO: 19850 - RNA, 20 nt, Artificial Sequence
  LRRK2 RNA guide
uuaaaauacugugacaugca

SEQ ID NO: 19851 - RNA, 20 nt, Artificial Sequence
  LRRK2 RNA guide
uuccaaagaacugcauguca

SEQ ID NO: 19852 - RNA, 20 nt, Artificial Sequence
  LRRK2 RNA guide
uuuccaaagaacugcauguc

SEQ ID NO: 19853 - RNA, 21 nt, Artificial Sequence
  LRRK2 RNA guide
aaaauacugugacaugcaguu

SEQ ID NO: 19854 - RNA, 21 nt, Artificial Sequence
  LRRK2 RNA guide
aaagaacugcaugucacagua

SEQ ID NO: 19855 - RNA, 21 nt, Artificial Sequence
  LRRK2 RNA guide
aaauacugugacaugcaguuc

SEQ ID NO: 19856 - RNA, 21 nt, Artificial Sequence
  LRRK2 RNA guide
aaauuuccaaagaacugcaug

SEQ ID NO: 19857 - RNA, 21 nt, Artificial Sequence
  LRRK2 RNA guide
aacugcaugucacaguauuuu

SEQ ID NO: 19858 - RNA, 21 nt, Artificial Sequence
  LRRK2 RNA guide
aagaacugcaugucacaguau

SEQ ID NO: 19859 - RNA, 21 nt, Artificial Sequence
  LRRK2 RNA guide
aaggaaauuuccaaagaacug

SEQ ID NO: 19860 - RNA, 21 nt, Artificial Sequence
  LRRK2 RNA guide
aauacugugacaugcaguucu

SEQ ID NO: 19861 - RNA, 21 nt, Artificial Sequence
  LRRK2 RNA guide
aauuuccaaagaacugcaugu

SEQ ID NO: 19862 - RNA, 21 nt, Artificial Sequence
  LRRK2 RNA guide
acaugcaguucuuuggaaauu

SEQ ID NO: 19863 - RNA, 21 nt, Artificial Sequence
  LRRK2 RNA guide
acugcaugucacaguauuuua

SEQ ID NO: 19864 - RNA, 21 nt, Artificial Sequence
  LRRK2 RNA guide
acugugacaugcaguucuuug

SEQ ID NO: 19865 - RNA, 21 nt, Artificial Sequence
  LRRK2 RNA guide
agaacugcaugucacaguauu

SEQ ID NO: 19866 - RNA, 21 nt, Artificial Sequence
  LRRK2 RNA guide
aggaaauuuccaaagaacugc

SEQ ID NO: 19867 - RNA, 21 nt, Artificial Sequence
  LRRK2 RNA guide
aggagcuuaaaauacugugac

SEQ ID NO: 19868 - RNA, 21 nt, Artificial Sequence
  LRRK2 RNA guide
auacugugacaugcaguucuu

SEQ ID NO: 19869 - RNA, 21 nt, Artificial Sequence
  LRRK2 RNA guide
augcaguucuuuggaaauuuc

SEQ ID NO: 19870 - RNA, 21 nt, Artificial Sequence
  LRRK2 RNA guide
auuuccaaagaacugcauguc

SEQ ID NO: 19871 - RNA, 21 nt, Artificial Sequence
  LRRK2 RNA guide
caaagaacugcaugucacagu

SEQ ID NO: 19872 - RNA, 21 nt, Artificial Sequence
  LRRK2 RNA guide
caugcaguucuuuggaaauuu

SEQ ID NO: 19873 - RNA, 21 nt, Artificial Sequence
  LRRK2 RNA guide
ccaaagaacugcaugucacag

SEQ ID NO: 19874 - RNA, 21 nt, Artificial Sequence
  LRRK2 RNA guide
cugcaugucacaguauuuuaa

SEQ ID NO: 19875 - RNA, 21 nt, Artificial Sequence
  LRRK2 RNA guide
cugugacaugcaguucuuugg

SEQ ID NO: 19876 - RNA, 21 nt, Artificial Sequence
  LRRK2 RNA guide
cuuaaaauacugugacaugca

SEQ ID NO: 19877 - RNA, 21 nt, Artificial Sequence
  LRRK2 RNA guide
gaaauuuccaaagaacugcau

SEQ ID NO: 19878 - RNA, 21 nt, Artificial Sequence
  LRRK2 RNA guide
gaacugcaugucacaguauuu

SEQ ID NO: 19879 - RNA, 21 nt, Artificial Sequence
  LRRK2 RNA guide
gacaugcaguucuuuggaaau

SEQ ID NO: 19880 - RNA, 21 nt, Artificial Sequence
  LRRK2 RNA guide
gagcuuaaaauacugugacau

SEQ ID NO: 19881 - RNA, 21 nt, Artificial Sequence
  LRRK2 RNA guide
gcaguucuuuggaaauuuccu

SEQ ID NO: 19882 - RNA, 21 nt, Artificial Sequence
  LRRK2 RNA guide
gcuuaaaauacugugacaugc

SEQ ID NO: 19883 - RNA, 21 nt, Artificial Sequence
  LRRK2 RNA guide
ggaaauuuccaaagaacugca

SEQ ID NO: 19884 - RNA, 21 nt, Artificial Sequence
  LRRK2 RNA guide
ggagcuuaaaauacugugaca

SEQ ID NO: 19885 - RNA, 21 nt, Artificial Sequence
  LRRK2 RNA guide
gugacaugcaguucuuuggaa

SEQ ID NO: 19886 - RNA, 21 nt, Artificial Sequence
  LRRK2 RNA guide
uaaaauacugugacaugcagu

SEQ ID NO: 19887 - RNA, 21 nt, Artificial Sequence
  LRRK2 RNA guide
uacugugacaugcaguucuuu

SEQ ID NO: 19888 - RNA, 21 nt, Artificial Sequence
  LRRK2 RNA guide
uaggagcuuaaaauacuguga

SEQ ID NO: 19889 - RNA, 21 nt, Artificial Sequence
  LRRK2 RNA guide
uccaaagaacugcaugucaca

SEQ ID NO: 19890 - RNA, 21 nt, Artificial Sequence
  LRRK2 RNA guide
ugacaugcaguucuuuggaaa

SEQ ID NO: 19891 - RNA, 21 nt, Artificial Sequence
  LRRK2 RNA guide
ugcaguucuuuggaaauuucc

SEQ ID NO: 19892 - RNA, 21 nt, Artificial Sequence
  LRRK2 RNA guide
ugcaugucacaguauuuuaag

SEQ ID NO: 19893 - RNA, 21 nt, Artificial Sequence
  LRRK2 RNA guide
ugugacaugcaguucuuugga

SEQ ID NO: 19894 - RNA, 21 nt, Artificial Sequence
  LRRK2 RNA guide
uuaaaauacugugacaugcag

SEQ ID NO: 19895 - RNA, 21 nt, Artificial Sequence
  LRRK2 RNA guide
uuccaaagaacugcaugucac

SEQ ID NO: 19896 - RNA, 21 nt, Artificial Sequence
  LRRK2 RNA guide
uuuccaaagaacugcauguca

SEQ ID NO: 19897 - RNA, 22 nt, Artificial Sequence
  LRRK2 RNA guide
aaaauacugugacaugcaguuc

SEQ ID NO: 19898 - RNA, 22 nt, Artificial Sequence
  LRRK2 RNA guide
aaagaacugcaugucacaguau

SEQ ID NO: 19899 - RNA, 22 nt, Artificial Sequence
  LRRK2 RNA guide
aaaggaaauuuccaaagaacug

SEQ ID NO: 19900 - RNA, 22 nt, Artificial Sequence
  LRRK2 RNA guide
aaauacugugacaugcaguucu

SEQ ID NO: 19901 - RNA, 22 nt, Artificial Sequence
  LRRK2 RNA guide
aaauuuccaaagaacugcaugu

SEQ ID NO: 19902 - RNA, 22 nt, Artificial Sequence
  LRRK2 RNA guide
aacugcaugucacaguauuuua

SEQ ID NO: 19903 - RNA, 22 nt, Artificial Sequence
  LRRK2 RNA guide
aagaacugcaugucacaguauu

SEQ ID NO: 19904 - RNA, 22 nt, Artificial Sequence
  LRRK2 RNA guide
aaggaaauuuccaaagaacugc

SEQ ID NO: 19905 - RNA, 22 nt, Artificial Sequence
  LRRK2 RNA guide
aauacugugacaugcaguucuu

SEQ ID NO: 19906 - RNA, 22 nt, Artificial Sequence
  LRRK2 RNA guide
aauuuccaaagaacugcauguc

SEQ ID NO: 19907 - RNA, 22 nt, Artificial Sequence
  LRRK2 RNA guide
acaugcaguucuuuggaaauuu

SEQ ID NO: 19908 - RNA, 22 nt, Artificial Sequence
  LRRK2 RNA guide
acugcaugucacaguauuuuaa

SEQ ID NO: 19909 - RNA, 22 nt, Artificial Sequence
  LRRK2 RNA guide
acugugacaugcaguucuuugg

SEQ ID NO: 19910 - RNA, 22 nt, Artificial Sequence
  LRRK2 RNA guide
agaacugcaugucacaguauuu

SEQ ID NO: 19911 - RNA, 22 nt, Artificial Sequence
  LRRK2 RNA guide
agcuuaaaauacugugacaugc

SEQ ID NO: 19912 - RNA, 22 nt, Artificial Sequence
  LRRK2 RNA guide
aggaaauuuccaaagaacugca

SEQ ID NO: 19913 - RNA, 22 nt, Artificial Sequence
  LRRK2 RNA guide
aggagcuuaaaauacugugaca

SEQ ID NO: 19914 - RNA, 22 nt, Artificial Sequence
  LRRK2 RNA guide
auacugugacaugcaguucuuu

SEQ ID NO: 19915 - RNA, 22 nt, Artificial Sequence
  LRRK2 RNA guide
augcaguucuuuggaaauuucc

SEQ ID NO: 19916 - RNA, 22 nt, Artificial Sequence
  LRRK2 RNA guide
auuuccaaagaacugcauguca

SEQ ID NO: 19917 - RNA, 22 nt, Artificial Sequence
  LRRK2 RNA guide
caaagaacugcaugucacagua

SEQ ID NO: 19918 - RNA, 22 nt, Artificial Sequence
  LRRK2 RNA guide
caugcaguucuuuggaaauuuc

SEQ ID NO: 19919 - RNA, 22 nt, Artificial Sequence
  LRRK2 RNA guide
ccaaagaacugcaugucacagu

SEQ ID NO: 19920 - RNA, 22 nt, Artificial Sequence
  LRRK2 RNA guide
cuaggagcuuaaaauacuguga

SEQ ID NO: 19921 - RNA, 22 nt, Artificial Sequence
  LRRK2 RNA guide
cugcaugucacaguauuuuaag

SEQ ID NO: 19922 - RNA, 22 nt, Artificial Sequence
  LRRK2 RNA guide
cugugacaugcaguucuuugga

SEQ ID NO: 19923 - RNA, 22 nt, Artificial Sequence
  LRRK2 RNA guide
cuuaaaauacugugacaugcag

SEQ ID NO: 19924 - RNA, 22 nt, Artificial Sequence
  LRRK2 RNA guide
gaaauuuccaaagaacugcaug

SEQ ID NO: 19925 - RNA, 22 nt, Artificial Sequence
  LRRK2 RNA guide
gaacugcaugucacaguauuuu

SEQ ID NO: 19926 - RNA, 22 nt, Artificial Sequence
  LRRK2 RNA guide
gacaugcaguucuuuggaaauu

SEQ ID NO: 19927 - RNA, 22 nt, Artificial Sequence
  LRRK2 RNA guide
gcaguucuuuggaaauuuccuu

SEQ ID NO: 19928 - RNA, 22 nt, Artificial Sequence
  LRRK2 RNA guide
gcuuaaaauacugugacaugca

SEQ ID NO: 19929 - RNA, 22 nt, Artificial Sequence
  LRRK2 RNA guide
ggaaauuuccaaagaacugcau

SEQ ID NO: 19930 - RNA, 22 nt, Artificial Sequence
  LRRK2 RNA guide
ggagcuuaaaauacugugacau

SEQ ID NO: 19931 - RNA, 22 nt, Artificial Sequence
  LRRK2 RNA guide
gugacaugcaguucuuuggaaa

SEQ ID NO: 19932 - RNA, 22 nt, Artificial Sequence
  LRRK2 RNA guide
uaaaauacugugacaugcaguu

SEQ ID NO: 19933 - RNA, 22 nt, Artificial Sequence
  LRRK2 RNA guide
uacugugacaugcaguucuuug

SEQ ID NO: 19934 - RNA, 22 nt, Artificial Sequence
  LRRK2 RNA guide
uaggagcuuaaaauacugugac

SEQ ID NO: 19935 - RNA, 22 nt, Artificial Sequence
  LRRK2 RNA guide
uccaaagaacugcaugucacag

SEQ ID NO: 19936 - RNA, 22 nt, Artificial Sequence
  LRRK2 RNA guide
ugacaugcaguucuuuggaaau

SEQ ID NO: 19937 - RNA, 22 nt, Artificial Sequence
  LRRK2 RNA guide
ugcaguucuuuggaaauuuccu

SEQ ID NO: 19938 - RNA, 22 nt, Artificial Sequence
  LRRK2 RNA guide
ugcaugucacaguauuuuaagc

SEQ ID NO: 19939 - RNA, 22 nt, Artificial Sequence
  LRRK2 RNA guide
ugugacaugcaguucuuuggaa

SEQ ID NO: 19940 - RNA, 22 nt, Artificial Sequence
  LRRK2 RNA guide
uuaaaauacugugacaugcagu

SEQ ID NO: 19941 - RNA, 22 nt, Artificial Sequence
  LRRK2 RNA guide
uuccaaagaacugcaugucaca

SEQ ID NO: 19942 - RNA, 22 nt, Artificial Sequence
  LRRK2 RNA guide
uuuccaaagaacugcaugucac

SEQ ID NO: 19943 - RNA, 20 nt, Artificial Sequence
  LRRK2 RNA guide
aaaauacugugacguguagu

SEQ ID NO: 19944 - RNA, 20 nt, Artificial Sequence
  LRRK2 RNA guide
aaagaacuacacgucacagu

SEQ ID NO: 19945 - RNA, 20 nt, Artificial Sequence
  LRRK2 RNA guide
aaauacugugacguguaguu

SEQ ID NO: 19946 - RNA, 20 nt, Artificial Sequence
  LRRK2 RNA guide
aaauuuccaaagaacuacac

SEQ ID NO: 19947 - RNA, 20 nt, Artificial Sequence
  LRRK2 RNA guide
aacuacacgucacaguauuu

SEQ ID NO: 19948 - RNA, 20 nt, Artificial Sequence
  LRRK2 RNA guide
aagaacuacacgucacagua

SEQ ID NO: 19949 - RNA, 20 nt, Artificial Sequence
  LRRK2 RNA guide
aauacugugacguguaguuc

SEQ ID NO: 19950 - RNA, 20 nt, Artificial Sequence
  LRRK2 RNA guide
aauuuccaaagaacuacacg

SEQ ID NO: 19951 - RNA, 20 nt, Artificial Sequence
  LRRK2 RNA guide
acacgucacaguauuuuaag

SEQ ID NO: 19952 - RNA, 20 nt, Artificial Sequence
  LRRK2 RNA guide
acgucacaguauuuuaagcu

SEQ ID NO: 19953 - RNA, 20 nt, Artificial Sequence
  LRRK2 RNA guide
acguguaguucuuuggaaau

SEQ ID NO: 19954 - RNA, 20 nt, Artificial Sequence
  LRRK2 RNA guide
acuacacgucacaguauuuu

SEQ ID NO: 19955 - RNA, 20 nt, Artificial Sequence
  LRRK2 RNA guide
acugugacguguaguucuuu

SEQ ID NO: 19956 - RNA, 20 nt, Artificial Sequence
  LRRK2 RNA guide
agaacuacacgucacaguau

SEQ ID NO: 19957 - RNA, 20 nt, Artificial Sequence
  LRRK2 RNA guide
agcuuaaaauacugugacgu

SEQ ID NO: 19958 - RNA, 20 nt, Artificial Sequence
  LRRK2 RNA guide
aggaaauuuccaaagaacua

SEQ ID NO: 19959 - RNA, 20 nt, Artificial Sequence
  LRRK2 RNA guide
auacugugacguguaguucu

SEQ ID NO: 19960 - RNA, 20 nt, Artificial Sequence
  LRRK2 RNA guide
auuuccaaagaacuacacgu

SEQ ID NO: 19961 - RNA, 20 nt, Artificial Sequence
  LRRK2 RNA guide
caaagaacuacacgucacag

SEQ ID NO: 19962 - RNA, 20 nt, Artificial Sequence
  LRRK2 RNA guide
cacgucacaguauuuuaagc

SEQ ID NO: 19963 - RNA, 20 nt, Artificial Sequence
  LRRK2 RNA guide
ccaaagaacuacacgucaca

SEQ ID NO: 19964 - RNA, 20 nt, Artificial Sequence
  LRRK2 RNA guide
cguguaguucuuuggaaauu

SEQ ID NO: 19965 - RNA, 20 nt, Artificial Sequence
  LRRK2 RNA guide
cuacacgucacaguauuuua

SEQ ID NO: 19966 - RNA, 20 nt, Artificial Sequence
  LRRK2 RNA guide
cuaggagcuuaaaauacugu

SEQ ID NO: 19967 - RNA, 20 nt, Artificial Sequence
  LRRK2 RNA guide
cugugacguguaguucuuug

SEQ ID NO: 19968 - RNA, 20 nt, Artificial Sequence
  LRRK2 RNA guide
cuuaaaauacugugacgugu

SEQ ID NO: 19969 - RNA, 20 nt, Artificial Sequence
  LRRK2 RNA guide
gaaauuuccaaagaacuaca

SEQ ID NO: 19970 - RNA, 20 nt, Artificial Sequence
  LRRK2 RNA guide
gaacuacacgucacaguauu

SEQ ID NO: 19971 - RNA, 20 nt, Artificial Sequence
  LRRK2 RNA guide
gacguguaguucuuuggaaa

SEQ ID NO: 19972 - RNA, 20 nt, Artificial Sequence
  LRRK2 RNA guide
gagcuuaaaauacugugacg

SEQ ID NO: 19973 - RNA, 20 nt, Artificial Sequence
  LRRK2 RNA guide
gcuuaaaauacugugacgug

SEQ ID NO: 19974 - RNA, 20 nt, Artificial Sequence
  LRRK2 RNA guide
ggaaauuuccaaagaacuac

SEQ ID NO: 19975 - RNA, 20 nt, Artificial Sequence
  LRRK2 RNA guide
gugacguguaguucuuugga

SEQ ID NO: 19976 - RNA, 20 nt, Artificial Sequence
  LRRK2 RNA guide
uaaaauacugugacguguag

SEQ ID NO: 19977 - RNA, 20 nt, Artificial Sequence
  LRRK2 RNA guide
uacacgucacaguauuuuaa

SEQ ID NO: 19978 - RNA, 20 nt, Artificial Sequence
  LRRK2 RNA guide
uacugugacguguaguucuu

SEQ ID NO: 19979 - RNA, 20 nt, Artificial Sequence
  LRRK2 RNA guide
uaggagcuuaaaauacugug

SEQ ID NO: 19980 - RNA, 20 nt, Artificial Sequence
  LRRK2 RNA guide
uccaaagaacuacacgucac

SEQ ID NO: 19981 - RNA, 20 nt, Artificial Sequence
  LRRK2 RNA guide
ugacguguaguucuuuggaa

SEQ ID NO: 19982 - RNA, 20 nt, Artificial Sequence
  LRRK2 RNA guide
ugugacguguaguucuuugg

SEQ ID NO: 19983 - RNA, 20 nt, Artificial Sequence
  LRRK2 RNA guide
uuaaaauacugugacgugua

SEQ ID NO: 19984 - RNA, 20 nt, Artificial Sequence
  LRRK2 RNA guide
uuccaaagaacuacacguca

SEQ ID NO: 19985 - RNA, 20 nt, Artificial Sequence
  LRRK2 RNA guide
uuuccaaagaacuacacguc

SEQ ID NO: 19986 - RNA, 21 nt, Artificial Sequence
  LRRK2 RNA guide
aaaauacugugacguguaguu

SEQ ID NO: 19987 - RNA, 21 nt, Artificial Sequence
  LRRK2 RNA guide
aaagaacuacacgucacagua

SEQ ID NO: 19988 - RNA, 21 nt, Artificial Sequence
  LRRK2 RNA guide
aaauacugugacguguaguuc

SEQ ID NO: 19989 - RNA, 21 nt, Artificial Sequence
  LRRK2 RNA guide
aaauuuccaaagaacuacacg

SEQ ID NO: 19990 - RNA, 21 nt, Artificial Sequence
  LRRK2 RNA guide
aacuacacgucacaguauuuu

SEQ ID NO: 19991 - RNA, 21 nt, Artificial Sequence
  LRRK2 RNA guide
aagaacuacacgucacaguau

SEQ ID NO: 19992 - RNA, 21 nt, Artificial Sequence
  LRRK2 RNA guide
aauacugugacguguaguucu

SEQ ID NO: 19993 - RNA, 21 nt, Artificial Sequence
  LRRK2 RNA guide
aauuuccaaagaacuacacgu

SEQ ID NO: 19994 - RNA, 21 nt, Artificial Sequence
  LRRK2 RNA guide
acacgucacaguauuuuaagc

SEQ ID NO: 19995 - RNA, 21 nt, Artificial Sequence
  LRRK2 RNA guide
acgucacaguauuuuaagcuc

SEQ ID NO: 19996 - RNA, 21 nt, Artificial Sequence
  LRRK2 RNA guide
acguguaguucuuuggaaauu

SEQ ID NO: 19997 - RNA, 21 nt, Artificial Sequence
  LRRK2 RNA guide
acuacacgucacaguauuuua

SEQ ID NO: 19998 - RNA, 21 nt, Artificial Sequence
  LRRK2 RNA guide
acugugacguguaguucuuug

SEQ ID NO: 19999 - RNA, 21 nt, Artificial Sequence
  LRRK2 RNA guide
agaacuacacgucacaguauu

SEQ ID NO: 20000 - RNA, 21 nt, Artificial Sequence
  LRRK2 RNA guide
agcuuaaaauacugugacgug

SEQ ID NO: 20001 - RNA, 21 nt, Artificial Sequence
  LRRK2 RNA guide
aggaaauuuccaaagaacuac

SEQ ID NO: 20002 - RNA, 21 nt, Artificial Sequence
  LRRK2 RNA guide
auacugugacguguaguucuu

SEQ ID NO: 20003 - RNA, 21 nt, Artificial Sequence
  LRRK2 RNA guide
auuuccaaagaacuacacguc

SEQ ID NO: 20004 - RNA, 21 nt, Artificial Sequence
  LRRK2 RNA guide
caaagaacuacacgucacagu

SEQ ID NO: 20005 - RNA, 21 nt, Artificial Sequence
  LRRK2 RNA guide
cacgucacaguauuuuaagcu

SEQ ID NO: 20006 - RNA, 21 nt, Artificial Sequence
  LRRK2 RNA guide
ccaaagaacuacacgucacag

SEQ ID NO: 20007 - RNA, 21 nt, Artificial Sequence
  LRRK2 RNA guide
cguguaguucuuuggaaauuu

SEQ ID NO: 20008 - RNA, 21 nt, Artificial Sequence
  LRRK2 RNA guide
cuacacgucacaguauuuuaa

SEQ ID NO: 20009 - RNA, 21 nt, Artificial Sequence
  LRRK2 RNA guide
cuaggagcuuaaaauacugug

SEQ ID NO: 20010 - RNA, 21 nt, Artificial Sequence
  LRRK2 RNA guide
cugugacguguaguucuuugg

SEQ ID NO: 20011 - RNA, 21 nt, Artificial Sequence
  LRRK2 RNA guide
cuuaaaauacugugacgugua

SEQ ID NO: 20012 - RNA, 21 nt, Artificial Sequence
  LRRK2 RNA guide
gaaauuuccaaagaacuacac

SEQ ID NO: 20013 - RNA, 21 nt, Artificial Sequence
  LRRK2 RNA guide
gaacuacacgucacaguauuu

SEQ ID NO: 20014 - RNA, 21 nt, Artificial Sequence
  LRRK2 RNA guide
gacguguaguucuuuggaaau

SEQ ID NO: 20015 - RNA, 21 nt, Artificial Sequence
  LRRK2 RNA guide
gagcuuaaaauacugugacgu

SEQ ID NO: 20016 - RNA, 21 nt, Artificial Sequence
  LRRK2 RNA guide
gcuuaaaauacugugacgugu

SEQ ID NO: 20017 - RNA, 21 nt, Artificial Sequence
  LRRK2 RNA guide
ggaaauuuccaaagaacuaca

SEQ ID NO: 20018 - RNA, 21 nt, Artificial Sequence
  LRRK2 RNA guide
ggagcuuaaaauacugugacg

SEQ ID NO: 20019 - RNA, 21 nt, Artificial Sequence
  LRRK2 RNA guide
gugacguguaguucuuuggaa

SEQ ID NO: 20020 - RNA, 21 nt, Artificial Sequence
  LRRK2 RNA guide
uaaaauacugugacguguagu

SEQ ID NO: 20021 - RNA, 21 nt, Artificial Sequence
  LRRK2 RNA guide
uacacgucacaguauuuuaag

SEQ ID NO: 20022 - RNA, 21 nt, Artificial Sequence
  LRRK2 RNA guide
uacugugacguguaguucuuu

SEQ ID NO: 20023 - RNA, 21 nt, Artificial Sequence
  LRRK2 RNA guide
uccaaagaacuacacgucaca

SEQ ID NO: 20024 - RNA, 21 nt, Artificial Sequence
  LRRK2 RNA guide
ucuaggagcuuaaaauacugu

SEQ ID NO: 20025 - RNA, 21 nt, Artificial Sequence
  LRRK2 RNA guide
ugacguguaguucuuuggaaa

SEQ ID NO: 20026 - RNA, 21 nt, Artificial Sequence
  LRRK2 RNA guide
ugugacguguaguucuuugga

SEQ ID NO: 20027 - RNA, 21 nt, Artificial Sequence
  LRRK2 RNA guide
uuaaaauacugugacguguag

SEQ ID NO: 20028 - RNA, 21 nt, Artificial Sequence
  LRRK2 RNA guide
uuccaaagaacuacacgucac

SEQ ID NO: 20029 - RNA, 21 nt, Artificial Sequence
  LRRK2 RNA guide
uucuaggagcuuaaaauacug

SEQ ID NO: 20030 - RNA, 21 nt, Artificial Sequence
  LRRK2 RNA guide
uuuccaaagaacuacacguca

SEQ ID NO: 20031 - RNA, 22 nt, Artificial Sequence
  LRRK2 RNA guide
aaaauacugugacguguaguuc

SEQ ID NO: 20032 - RNA, 22 nt, Artificial Sequence
  LRRK2 RNA guide
aaagaacuacacgucacaguau

SEQ ID NO: 20033 - RNA, 22 nt, Artificial Sequence
  LRRK2 RNA guide
aaauacugugacguguaguucu

SEQ ID NO: 20034 - RNA, 22 nt, Artificial Sequence
  LRRK2 RNA guide
aaauuuccaaagaacuacacgu

SEQ ID NO: 20035 - RNA, 22 nt, Artificial Sequence
  LRRK2 RNA guide
aacuacacgucacaguauuuua

SEQ ID NO: 20036 - RNA, 22 nt, Artificial Sequence
  LRRK2 RNA guide
aagaacuacacgucacaguauu

SEQ ID NO: 20037 - RNA, 22 nt, Artificial Sequence
  LRRK2 RNA guide
aaggaaauuuccaaagaacuac

SEQ ID NO: 20038 - RNA, 22 nt, Artificial Sequence
  LRRK2 RNA guide
aauacugugacguguaguucuu

SEQ ID NO: 20039 - RNA, 22 nt, Artificial Sequence
  LRRK2 RNA guide
aauuuccaaagaacuacacguc

SEQ ID NO: 20040 - RNA, 22 nt, Artificial Sequence
  LRRK2 RNA guide
acacgucacaguauuuuaagcu

SEQ ID NO: 20041 - RNA, 22 nt, Artificial Sequence
  LRRK2 RNA guide
acgucacaguauuuuaagcucc

SEQ ID NO: 20042 - RNA, 22 nt, Artificial Sequence
  LRRK2 RNA guide
acguguaguucuuuggaaauuu

SEQ ID NO: 20043 - RNA, 22 nt, Artificial Sequence
  LRRK2 RNA guide
acuacacgucacaguauuuuaa

SEQ ID NO: 20044 - RNA, 22 nt, Artificial Sequence
  LRRK2 RNA guide
acugugacguguaguucuuugg

SEQ ID NO: 20045 - RNA, 22 nt, Artificial Sequence
  LRRK2 RNA guide
agaacuacacgucacaguauuu

SEQ ID NO: 20046 - RNA, 22 nt, Artificial Sequence
  LRRK2 RNA guide
agcuuaaaauacugugacgugu

SEQ ID NO: 20047 - RNA, 22 nt, Artificial Sequence
  LRRK2 RNA guide
aggaaauuuccaaagaacuaca

SEQ ID NO: 20048 - RNA, 22 nt, Artificial Sequence
  LRRK2 RNA guide
aggagcuuaaaauacugugacg

SEQ ID NO: 20049 - RNA, 22 nt, Artificial Sequence
  LRRK2 RNA guide
auacugugacguguaguucuuu

SEQ ID NO: 20050 - RNA, 22 nt, Artificial Sequence
  LRRK2 RNA guide
auuuccaaagaacuacacguca

SEQ ID NO: 20051 - RNA, 22 nt, Artificial Sequence
  LRRK2 RNA guide
caaagaacuacacgucacagua

SEQ ID NO: 20052 - RNA, 22 nt, Artificial Sequence
  LRRK2 RNA guide
cacgucacaguauuuuaagcuc

SEQ ID NO: 20053 - RNA, 22 nt, Artificial Sequence
  LRRK2 RNA guide
ccaaagaacuacacgucacagu

SEQ ID NO: 20054 - RNA, 22 nt, Artificial Sequence
  LRRK2 RNA guide
cguguaguucuuuggaaauuuc

SEQ ID NO: 20055 - RNA, 22 nt, Artificial Sequence
  LRRK2 RNA guide
cuacacgucacaguauuuuaag

SEQ ID NO: 20056 - RNA, 22 nt, Artificial Sequence
  LRRK2 RNA guide
cugugacguguaguucuuugga

SEQ ID NO: 20057 - RNA, 22 nt, Artificial Sequence
  LRRK2 RNA guide
cuuaaaauacugugacguguag

SEQ ID NO: 20058 - RNA, 22 nt, Artificial Sequence
  LRRK2 RNA guide
gaaauuuccaaagaacuacacg

SEQ ID NO: 20059 - RNA, 22 nt, Artificial Sequence
  LRRK2 RNA guide
gaacuacacgucacaguauuuu

SEQ ID NO: 20060 - RNA, 22 nt, Artificial Sequence
  LRRK2 RNA guide
gacguguaguucuuuggaaauu

SEQ ID NO: 20061 - RNA, 22 nt, Artificial Sequence
  LRRK2 RNA guide
gagcuuaaaauacugugacgug

SEQ ID NO: 20062 - RNA, 22 nt, Artificial Sequence
  LRRK2 RNA guide
gcuuaaaauacugugacgugua

SEQ ID NO: 20063 - RNA, 22 nt, Artificial Sequence
  LRRK2 RNA guide
ggaaauuuccaaagaacuacac

SEQ ID NO: 20064 - RNA, 22 nt, Artificial Sequence
  LRRK2 RNA guide
ggagcuuaaaauacugugacgu

SEQ ID NO: 20065 - RNA, 22 nt, Artificial Sequence
  LRRK2 RNA guide
gugacguguaguucuuuggaaa

SEQ ID NO: 20066 - RNA, 22 nt, Artificial Sequence
  LRRK2 RNA guide
uaaaauacugugacguguaguu

SEQ ID NO: 20067 - RNA, 22 nt, Artificial Sequence
  LRRK2 RNA guide
uacacgucacaguauuuuaagc

SEQ ID NO: 20068 - RNA, 22 nt, Artificial Sequence
  LRRK2 RNA guide
uacugugacguguaguucuuug

SEQ ID NO: 20069 - RNA, 22 nt, Artificial Sequence
  LRRK2 RNA guide
uccaaagaacuacacgucacag

SEQ ID NO: 20070 - RNA, 22 nt, Artificial Sequence
  LRRK2 RNA guide
ucuaggagcuuaaaauacugug

SEQ ID NO: 20071 - RNA, 22 nt, Artificial Sequence
  LRRK2 RNA guide
ugacguguaguucuuuggaaau

SEQ ID NO: 20072 - RNA, 22 nt, Artificial Sequence
  LRRK2 RNA guide
ugugacguguaguucuuuggaa

SEQ ID NO: 20073 - RNA, 22 nt, Artificial Sequence
  LRRK2 RNA guide
uuaaaauacugugacguguagu

SEQ ID NO: 20074 - RNA, 22 nt, Artificial Sequence
  LRRK2 RNA guide
uuccaaagaacuacacgucaca

SEQ ID NO: 20075 - RNA, 22 nt, Artificial Sequence
  LRRK2 RNA guide
uucuaggagcuuaaaauacugu

SEQ ID NO: 20076 - RNA, 22 nt, Artificial Sequence
  LRRK2 RNA guide
uuuccaaagaacuacacgucac

SEQ ID NO: 20077 - RNA, 22 nt, Artificial Sequence
  LRRK2 RNA guide
uuucuaggagcuuaaaauacug

SEQ ID NO: 20078 - RNA, 20 nt, Artificial Sequence
  LRRK2 RNA guide
aagcaaucuggaauuuuucc

SEQ ID NO: 20079 - RNA, 20 nt, Artificial Sequence
  LRRK2 RNA guide
aagcuccuggaaaaauucca

SEQ ID NO: 20080 - RNA, 20 nt, Artificial Sequence
  LRRK2 RNA guide
aaucuggaauuuuuccagga

SEQ ID NO: 20081 - RNA, 20 nt, Artificial Sequence
  LRRK2 RNA guide
aauuuuuccaggagcuuaaa

SEQ ID NO: 20082 - RNA, 20 nt, Artificial Sequence
  LRRK2 RNA guide
acaguauuuuaagcuccugg

SEQ ID NO: 20083 - RNA, 20 nt, Artificial Sequence
  LRRK2 RNA guide
agcaaucuggaauuuuucca

SEQ ID NO: 20084 - RNA, 20 nt, Artificial Sequence
  LRRK2 RNA guide
agcuccuggaaaaauuccag

SEQ ID NO: 20085 - RNA, 20 nt, Artificial Sequence
  LRRK2 RNA guide
aguauuuuaagcuccuggaa

SEQ ID NO: 20086 - RNA, 20 nt, Artificial Sequence
  LRRK2 RNA guide
aucuggaauuuuuccaggag

SEQ ID NO: 20087 - RNA, 20 nt, Artificial Sequence
  LRRK2 RNA guide
augucacaguauuuuaagcu

SEQ ID NO: 20088 - RNA, 20 nt, Artificial Sequence
  LRRK2 RNA guide
auuuuaagcuccuggaaaaa

SEQ ID NO: 20089 - RNA, 20 nt, Artificial Sequence
  LRRK2 RNA guide
auuuuuccaggagcuuaaaa

SEQ ID NO: 20090 - RNA, 20 nt, Artificial Sequence
  LRRK2 RNA guide
caaucuggaauuuuuccagg

SEQ ID NO: 20091 - RNA, 20 nt, Artificial Sequence
  LRRK2 RNA guide
cacaguauuuuaagcuccug

SEQ ID NO: 20092 - RNA, 20 nt, Artificial Sequence
  LRRK2 RNA guide
caguauuuuaagcuccugga

SEQ ID NO: 20093 - RNA, 20 nt, Artificial Sequence
  LRRK2 RNA guide
caugucacaguauuuuaagc

SEQ ID NO: 20094 - RNA, 20 nt, Artificial Sequence
  LRRK2 RNA guide
ccaggagcuuaaaauacugu

SEQ ID NO: 20095 - RNA, 20 nt, Artificial Sequence
  LRRK2 RNA guide
ccuggaaaaauuccagauug

SEQ ID NO: 20096 - RNA, 20 nt, Artificial Sequence
  LRRK2 RNA guide
cuccuggaaaaauuccagau

SEQ ID NO: 20097 - RNA, 20 nt, Artificial Sequence
  LRRK2 RNA guide
cuggaaaaauuccagauugc

SEQ ID NO: 20098 - RNA, 20 nt, Artificial Sequence
  LRRK2 RNA guide
cuggaauuuuuccaggagcu

SEQ ID NO: 20099 - RNA, 20 nt, Artificial Sequence
  LRRK2 RNA guide
gaauuuuuccaggagcuuaa

SEQ ID NO: 20100 - RNA, 20 nt, Artificial Sequence
  LRRK2 RNA guide
gcaaagcaaucuggaauuuu

SEQ ID NO: 20101 - RNA, 20 nt, Artificial Sequence
  LRRK2 RNA guide
gcaaucuggaauuuuuccag

SEQ ID NO: 20102 - RNA, 20 nt, Artificial Sequence
  LRRK2 RNA guide
gcuccuggaaaaauuccaga

SEQ ID NO: 20103 - RNA, 20 nt, Artificial Sequence
  LRRK2 RNA guide
ggaauuuuuccaggagcuua

SEQ ID NO: 20104 - RNA, 20 nt, Artificial Sequence
  LRRK2 RNA guide
ggcaaagcaaucuggaauuu

SEQ ID NO: 20105 - RNA, 20 nt, Artificial Sequence
  LRRK2 RNA guide
guauuuuaagcuccuggaaa

SEQ ID NO: 20106 - RNA, 20 nt, Artificial Sequence
  LRRK2 RNA guide
gucacaguauuuuaagcucc

SEQ ID NO: 20107 - RNA, 20 nt, Artificial Sequence
  LRRK2 RNA guide
uaagcuccuggaaaaauucc

SEQ ID NO: 20108 - RNA, 20 nt, Artificial Sequence
  LRRK2 RNA guide
uauuuuaagcuccuggaaaa

SEQ ID NO: 20109 - RNA, 20 nt, Artificial Sequence
  LRRK2 RNA guide
ucacaguauuuuaagcuccu

SEQ ID NO: 20110 - RNA, 20 nt, Artificial Sequence
  LRRK2 RNA guide
uccaggagcuuaaaauacug

SEQ ID NO: 20111 - RNA, 20 nt, Artificial Sequence
  LRRK2 RNA guide
uccuggaaaaauuccagauu

SEQ ID NO: 20112 - RNA, 20 nt, Artificial Sequence
  LRRK2 RNA guide
ucuggaauuuuuccaggagc

SEQ ID NO: 20113 - RNA, 20 nt, Artificial Sequence
  LRRK2 RNA guide
uggaaaaauuccagauugcu

SEQ ID NO: 20114 - RNA, 20 nt, Artificial Sequence
  LRRK2 RNA guide
uggaauuuuuccaggagcuu

SEQ ID NO: 20115 - RNA, 20 nt, Artificial Sequence
  LRRK2 RNA guide
uggcaaagcaaucuggaauu

SEQ ID NO: 20116 - RNA, 20 nt, Artificial Sequence
  LRRK2 RNA guide
ugucacaguauuuuaagcuc

SEQ ID NO: 20117 - RNA, 20 nt, Artificial Sequence
  LRRK2 RNA guide
uuaagcuccuggaaaaauuc

SEQ ID NO: 20118 - RNA, 20 nt, Artificial Sequence
  LRRK2 RNA guide
uuccaggagcuuaaaauacu

SEQ ID NO: 20119 - RNA, 20 nt, Artificial Sequence
  LRRK2 RNA guide
uuuaagcuccuggaaaaauu

SEQ ID NO: 20120 - RNA, 20 nt, Artificial Sequence
  LRRK2 RNA guide
uuuccaggagcuuaaaauac

SEQ ID NO: 20121 - RNA, 20 nt, Artificial Sequence
  LRRK2 RNA guide
uuuuaagcuccuggaaaaau

SEQ ID NO: 20122 - RNA, 20 nt, Artificial Sequence
  LRRK2 RNA guide
uuuuccaggagcuuaaaaua

SEQ ID NO: 20123 - RNA, 20 nt, Artificial Sequence
  LRRK2 RNA guide
uuuuuccaggagcuuaaaau

SEQ ID NO: 20124 - RNA, 21 nt, Artificial Sequence
  LRRK2 RNA guide
aaagcaaucuggaauuuuucc

SEQ ID NO: 20125 - RNA, 21 nt, Artificial Sequence
  LRRK2 RNA guide
aagcaaucuggaauuuuucca

SEQ ID NO: 20126 - RNA, 21 nt, Artificial Sequence
  LRRK2 RNA guide
aagcuccuggaaaaauuccag

SEQ ID NO: 20127 - RNA, 21 nt, Artificial Sequence
  LRRK2 RNA guide
aaucuggaauuuuuccaggag

SEQ ID NO: 20128 - RNA, 21 nt, Artificial Sequence
  LRRK2 RNA guide
acaguauuuuaagcuccugga

SEQ ID NO: 20129 - RNA, 21 nt, Artificial Sequence
  LRRK2 RNA guide
acaugucacaguauuuuaagc

SEQ ID NO: 20130 - RNA, 21 nt, Artificial Sequence
  LRRK2 RNA guide
agcaaucuggaauuuuuccag

SEQ ID NO: 20131 - RNA, 21 nt, Artificial Sequence
  LRRK2 RNA guide
agcuccuggaaaaauuccaga

SEQ ID NO: 20132 - RNA, 21 nt, Artificial Sequence
  LRRK2 RNA guide
aguauuuuaagcuccuggaaa

SEQ ID NO: 20133 - RNA, 21 nt, Artificial Sequence
  LRRK2 RNA guide
aucuggaauuuuuccaggagc

SEQ ID NO: 20134 - RNA, 21 nt, Artificial Sequence
  LRRK2 RNA guide
augucacaguauuuuaagcuc

SEQ ID NO: 20135 - RNA, 21 nt, Artificial Sequence
  LRRK2 RNA guide
caaagcaaucuggaauuuuuc

SEQ ID NO: 20136 - RNA, 21 nt, Artificial Sequence
  LRRK2 RNA guide
caaucuggaauuuuuccagga

SEQ ID NO: 20137 - RNA, 21 nt, Artificial Sequence
  LRRK2 RNA guide
cacaguauuuuaagcuccugg

SEQ ID NO: 20138 - RNA, 21 nt, Artificial Sequence
  LRRK2 RNA guide
caguauuuuaagcuccuggaa

SEQ ID NO: 20139 - RNA, 21 nt, Artificial Sequence
  LRRK2 RNA guide
caugucacaguauuuuaagcu

SEQ ID NO: 20140 - RNA, 21 nt, Artificial Sequence
  LRRK2 RNA guide
ccaggagcuuaaaauacugug

SEQ ID NO: 20141 - RNA, 21 nt, Artificial Sequence
  LRRK2 RNA guide
ccuggaaaaauuccagauugc

SEQ ID NO: 20142 - RNA, 21 nt, Artificial Sequence
  LRRK2 RNA guide
cuccuggaaaaauuccagauu

SEQ ID NO: 20143 - RNA, 21 nt, Artificial Sequence
  LRRK2 RNA guide
cuggaaaaauuccagauugcu

SEQ ID NO: 20144 - RNA, 21 nt, Artificial Sequence
  LRRK2 RNA guide
cuggaauuuuuccaggagcuu

SEQ ID NO: 20145 - RNA, 21 nt, Artificial Sequence
  LRRK2 RNA guide
gaauuuuuccaggagcuuaaa

SEQ ID NO: 20146 - RNA, 21 nt, Artificial Sequence
  LRRK2 RNA guide
gcaaagcaaucuggaauuuuu

SEQ ID NO: 20147 - RNA, 21 nt, Artificial Sequence
  LRRK2 RNA guide
gcaaucuggaauuuuuccagg

SEQ ID NO: 20148 - RNA, 21 nt, Artificial Sequence
  LRRK2 RNA guide
gcuccuggaaaaauuccagau

SEQ ID NO: 20149 - RNA, 21 nt, Artificial Sequence
  LRRK2 RNA guide
ggaauuuuuccaggagcuuaa

SEQ ID NO: 20150 - RNA, 21 nt, Artificial Sequence
  LRRK2 RNA guide
ggcaaagcaaucuggaauuuu

SEQ ID NO: 20151 - RNA, 21 nt, Artificial Sequence
  LRRK2 RNA guide
guauuuuaagcuccuggaaaa

SEQ ID NO: 20152 - RNA, 21 nt, Artificial Sequence
  LRRK2 RNA guide
gucacaguauuuuaagcuccu

SEQ ID NO: 20153 - RNA, 21 nt, Artificial Sequence
  LRRK2 RNA guide
uaagcuccuggaaaaauucca

SEQ ID NO: 20154 - RNA, 21 nt, Artificial Sequence
  LRRK2 RNA guide
ucacaguauuuuaagcuccug

SEQ ID NO: 20155 - RNA, 21 nt, Artificial Sequence
  LRRK2 RNA guide
uccaggagcuuaaaauacugu

SEQ ID NO: 20156 - RNA, 21 nt, Artificial Sequence
  LRRK2 RNA guide
uccuggaaaaauuccagauug

SEQ ID NO: 20157 - RNA, 21 nt, Artificial Sequence
  LRRK2 RNA guide
ucuggaauuuuuccaggagcu

SEQ ID NO: 20158 - RNA, 21 nt, Artificial Sequence
  LRRK2 RNA guide
uggaaaaauuccagauugcuu

SEQ ID NO: 20159 - RNA, 21 nt, Artificial Sequence
  LRRK2 RNA guide
uggaauuuuuccaggagcuua

SEQ ID NO: 20160 - RNA, 21 nt, Artificial Sequence
  LRRK2 RNA guide
uggcaaagcaaucuggaauuu

SEQ ID NO: 20161 - RNA, 21 nt, Artificial Sequence
  LRRK2 RNA guide
ugucacaguauuuuaagcucc

SEQ ID NO: 20162 - RNA, 21 nt, Artificial Sequence
  LRRK2 RNA guide
uuaagcuccuggaaaaauucc

SEQ ID NO: 20163 - RNA, 21 nt, Artificial Sequence
  LRRK2 RNA guide
uuccaggagcuuaaaauacug

SEQ ID NO: 20164 - RNA, 21 nt, Artificial Sequence
  LRRK2 RNA guide
uuggcaaagcaaucuggaauu

SEQ ID NO: 20165 - RNA, 21 nt, Artificial Sequence
  LRRK2 RNA guide
uuuaagcuccuggaaaaauuc

SEQ ID NO: 20166 - RNA, 21 nt, Artificial Sequence
  LRRK2 RNA guide
uuuccaggagcuuaaaauacu

SEQ ID NO: 20167 - RNA, 21 nt, Artificial Sequence
  LRRK2 RNA guide
uuuuccaggagcuuaaaauac

SEQ ID NO: 20168 - RNA, 22 nt, Artificial Sequence
  LRRK2 RNA guide
aaagcaaucuggaauuuuucca

SEQ ID NO: 20169 - RNA, 22 nt, Artificial Sequence
  LRRK2 RNA guide
aagcaaucuggaauuuuuccag

SEQ ID NO: 20170 - RNA, 22 nt, Artificial Sequence
  LRRK2 RNA guide
aagcuccuggaaaaauuccaga

SEQ ID NO: 20171 - RNA, 22 nt, Artificial Sequence
  LRRK2 RNA guide
aaucuggaauuuuuccaggagc

SEQ ID NO: 20172 - RNA, 22 nt, Artificial Sequence
  LRRK2 RNA guide
acaguauuuuaagcuccuggaa

SEQ ID NO: 20173 - RNA, 22 nt, Artificial Sequence
  LRRK2 RNA guide
acaugucacaguauuuuaagcu

SEQ ID NO: 20174 - RNA, 22 nt, Artificial Sequence
  LRRK2 RNA guide
agcaaucuggaauuuuuccagg

SEQ ID NO: 20175 - RNA, 22 nt, Artificial Sequence
  LRRK2 RNA guide
agcuccuggaaaaauuccagau

SEQ ID NO: 20176 - RNA, 22 nt, Artificial Sequence
  LRRK2 RNA guide
aguauuuuaagcuccuggaaaa

SEQ ID NO: 20177 - RNA, 22 nt, Artificial Sequence
  LRRK2 RNA guide
aucuggaauuuuuccaggagcu

SEQ ID NO: 20178 - RNA, 22 nt, Artificial Sequence
  LRRK2 RNA guide
augucacaguauuuuaagcucc

SEQ ID NO: 20179 - RNA, 22 nt, Artificial Sequence
  LRRK2 RNA guide
auuggcaaagcaaucuggaauu

SEQ ID NO: 20180 - RNA, 22 nt, Artificial Sequence
  LRRK2 RNA guide
caaagcaaucuggaauuuuucc

SEQ ID NO: 20181 - RNA, 22 nt, Artificial Sequence
  LRRK2 RNA guide
caaucuggaauuuuuccaggag

SEQ ID NO: 20182 - RNA, 22 nt, Artificial Sequence
  LRRK2 RNA guide
cacaguauuuuaagcuccugga

SEQ ID NO: 20183 - RNA, 22 nt, Artificial Sequence
  LRRK2 RNA guide
caguauuuuaagcuccuggaaa

SEQ ID NO: 20184 - RNA, 22 nt, Artificial Sequence
  LRRK2 RNA guide
caugucacaguauuuuaagcuc

SEQ ID NO: 20185 - RNA, 22 nt, Artificial Sequence
  LRRK2 RNA guide
ccaggagcuuaaaauacuguga

SEQ ID NO: 20186 - RNA, 22 nt, Artificial Sequence
  LRRK2 RNA guide
ccuggaaaaauuccagauugcu

SEQ ID NO: 20187 - RNA, 22 nt, Artificial Sequence
  LRRK2 RNA guide
cuccuggaaaaauuccagauug

SEQ ID NO: 20188 - RNA, 22 nt, Artificial Sequence
  LRRK2 RNA guide
cuggaaaaauuccagauugcuu

SEQ ID NO: 20189 - RNA, 22 nt, Artificial Sequence
  LRRK2 RNA guide
cuggaauuuuuccaggagcuua

SEQ ID NO: 20190 - RNA, 22 nt, Artificial Sequence
  LRRK2 RNA guide
gaauuuuuccaggagcuuaaaa

SEQ ID NO: 20191 - RNA, 22 nt, Artificial Sequence
  LRRK2 RNA guide
gcaaagcaaucuggaauuuuuc

SEQ ID NO: 20192 - RNA, 22 nt, Artificial Sequence
  LRRK2 RNA guide
gcaaucuggaauuuuuccagga

SEQ ID NO: 20193 - RNA, 22 nt, Artificial Sequence
  LRRK2 RNA guide
gcuccuggaaaaauuccagauu

SEQ ID NO: 20194 - RNA, 22 nt, Artificial Sequence
  LRRK2 RNA guide
ggaauuuuuccaggagcuuaaa

SEQ ID NO: 20195 - RNA, 22 nt, Artificial Sequence
  LRRK2 RNA guide
ggcaaagcaaucuggaauuuuu

SEQ ID NO: 20196 - RNA, 22 nt, Artificial Sequence
  LRRK2 RNA guide
guauuuuaagcuccuggaaaaa

SEQ ID NO: 20197 - RNA, 22 nt, Artificial Sequence
  LRRK2 RNA guide
gucacaguauuuuaagcuccug

SEQ ID NO: 20198 - RNA, 22 nt, Artificial Sequence
  LRRK2 RNA guide
uaagcuccuggaaaaauuccag

SEQ ID NO: 20199 - RNA, 22 nt, Artificial Sequence
  LRRK2 RNA guide
uacaugucacaguauuuuaagc

SEQ ID NO: 20200 - RNA, 22 nt, Artificial Sequence
  LRRK2 RNA guide
ucacaguauuuuaagcuccugg

SEQ ID NO: 20201 - RNA, 22 nt, Artificial Sequence
  LRRK2 RNA guide
uccaggagcuuaaaauacugug

SEQ ID NO: 20202 - RNA, 22 nt, Artificial Sequence
  LRRK2 RNA guide
uccuggaaaaauuccagauugc

SEQ ID NO: 20203 - RNA, 22 nt, Artificial Sequence
  LRRK2 RNA guide
ucuggaauuuuuccaggagcuu

SEQ ID NO: 20204 - RNA, 22 nt, Artificial Sequence
  LRRK2 RNA guide
uggaaaaauuccagauugcuuu

SEQ ID NO: 20205 - RNA, 22 nt, Artificial Sequence
  LRRK2 RNA guide
uggaauuuuuccaggagcuuaa

SEQ ID NO: 20206 - RNA, 22 nt, Artificial Sequence
  LRRK2 RNA guide
uggcaaagcaaucuggaauuuu

SEQ ID NO: 20207 - RNA, 22 nt, Artificial Sequence
  LRRK2 RNA guide
ugucacaguauuuuaagcuccu

SEQ ID NO: 20208 - RNA, 22 nt, Artificial Sequence
  LRRK2 RNA guide
uuaagcuccuggaaaaauucca

SEQ ID NO: 20209 - RNA, 22 nt, Artificial Sequence
  LRRK2 RNA guide
uuccaggagcuuaaaauacugu

SEQ ID NO: 20210 - RNA, 22 nt, Artificial Sequence
  LRRK2 RNA guide
uuggcaaagcaaucuggaauuu

SEQ ID NO: 20211 - RNA, 22 nt, Artificial Sequence
  LRRK2 RNA guide
uuuaagcuccuggaaaaauucc

SEQ ID NO: 20212 - RNA, 22 nt, Artificial Sequence
  LRRK2 RNA guide
uuuccaggagcuuaaaauacug

SEQ ID NO: 20213 - RNA, 22 nt, Artificial Sequence
  LRRK2 RNA guide
uuuuaagcuccuggaaaaauuc

SEQ ID NO: 20214 - RNA, 22 nt, Artificial Sequence
  LRRK2 RNA guide
uuuuccaggagcuuaaaauacu

SEQ ID NO: 20215 - RNA, 22 nt, Artificial Sequence
  LRRK2 RNA guide
uuuuuccaggagcuuaaaauac

SEQ ID NO: 20216 - RNA, 20 nt, Artificial Sequence
  LRRK2 RNA guide
aaacaaggcauuucauauag

SEQ ID NO: 20217 - RNA, 20 nt, Artificial Sequence
  LRRK2 RNA guide
aaaucccauuggaaaacaag

SEQ ID NO: 20218 - RNA, 20 nt, Artificial Sequence
  LRRK2 RNA guide
aaaugccuuguuuuccaaug

SEQ ID NO: 20219 - RNA, 20 nt, Artificial Sequence
  LRRK2 RNA guide
aacaaggcauuucauauagu

SEQ ID NO: 20220 - RNA, 20 nt, Artificial Sequence
  LRRK2 RNA guide
aaucccauuggaaaacaagg

SEQ ID NO: 20221 - RNA, 20 nt, Artificial Sequence
  LRRK2 RNA guide
aaugccuuguuuuccaaugg

SEQ ID NO: 20222 - RNA, 20 nt, Artificial Sequence
  LRRK2 RNA guide
acaaggcauuucauauaguc

SEQ ID NO: 20223 - RNA, 20 nt, Artificial Sequence
  LRRK2 RNA guide
accaaaaucccauuggaaaa

SEQ ID NO: 20224 - RNA, 20 nt, Artificial Sequence
  LRRK2 RNA guide
acuauaugaaaugccuuguu

SEQ ID NO: 20225 - RNA, 20 nt, Artificial Sequence
  LRRK2 RNA guide
auaugaaaugccuuguuuuc

SEQ ID NO: 20226 - RNA, 20 nt, Artificial Sequence
  LRRK2 RNA guide
aucccauuggaaaacaaggc

SEQ ID NO: 20227 - RNA, 20 nt, Artificial Sequence
  LRRK2 RNA guide
auccgacuauaugaaaugcc

SEQ ID NO: 20228 - RNA, 20 nt, Artificial Sequence
  LRRK2 RNA guide
augaaaugccuuguuuucca

SEQ ID NO: 20229 - RNA, 20 nt, Artificial Sequence
  LRRK2 RNA guide
augccuuguuuuccaauggg

SEQ ID NO: 20230 - RNA, 20 nt, Artificial Sequence
  LRRK2 RNA guide
auuggaaaacaaggcauuuc

SEQ ID NO: 20231 - RNA, 20 nt, Artificial Sequence
  LRRK2 RNA guide
cauccgacuauaugaaaugc

SEQ ID NO: 20232 - RNA, 20 nt, Artificial Sequence
  LRRK2 RNA guide
cauuggaaaacaaggcauuu

SEQ ID NO: 20233 - RNA, 20 nt, Artificial Sequence
  LRRK2 RNA guide
ccaaaaucccauuggaaaac

SEQ ID NO: 20234 - RNA, 20 nt, Artificial Sequence
  LRRK2 RNA guide
ccauuggaaaacaaggcauu

SEQ ID NO: 20235 - RNA, 20 nt, Artificial Sequence
  LRRK2 RNA guide
cccauuggaaaacaaggcau

SEQ ID NO: 20236 - RNA, 20 nt, Artificial Sequence
  LRRK2 RNA guide
ccgacuauaugaaaugccuu

SEQ ID NO: 20237 - RNA, 20 nt, Artificial Sequence
  LRRK2 RNA guide
ccuuguuuuccaaugggauu

SEQ ID NO: 20238 - RNA, 20 nt, Artificial Sequence
  LRRK2 RNA guide
cgacuauaugaaaugccuug

SEQ ID NO: 20239 - RNA, 20 nt, Artificial Sequence
  LRRK2 RNA guide
cuauaugaaaugccuuguuu

SEQ ID NO: 20240 - RNA, 20 nt, Artificial Sequence
  LRRK2 RNA guide
cuugaccaaaaucccauugg

SEQ ID NO: 20241 - RNA, 20 nt, Artificial Sequence
  LRRK2 RNA guide
cuuguuuuccaaugggauuu

SEQ ID NO: 20242 - RNA, 20 nt, Artificial Sequence
  LRRK2 RNA guide
gaaaacaaggcauuucauau

SEQ ID NO: 20243 - RNA, 20 nt, Artificial Sequence
  LRRK2 RNA guide
gaaaugccuuguuuuccaau

SEQ ID NO: 20244 - RNA, 20 nt, Artificial Sequence
  LRRK2 RNA guide
gaccaaaaucccauuggaaa

SEQ ID NO: 20245 - RNA, 20 nt, Artificial Sequence
  LRRK2 RNA guide
gacuauaugaaaugccuugu

SEQ ID NO: 20246 - RNA, 20 nt, Artificial Sequence
  LRRK2 RNA guide
gccuuguuuuccaaugggau

SEQ ID NO: 20247 - RNA, 20 nt, Artificial Sequence
  LRRK2 RNA guide
ggaaaacaaggcauuucaua

SEQ ID NO: 20248 - RNA, 20 nt, Artificial Sequence
  LRRK2 RNA guide
uaugaaaugccuuguuuucc

SEQ ID NO: 20249 - RNA, 20 nt, Artificial Sequence
  LRRK2 RNA guide
ucauccgacuauaugaaaug

SEQ ID NO: 20250 - RNA, 20 nt, Artificial Sequence
  LRRK2 RNA guide
ucccauuggaaaacaaggca

SEQ ID NO: 20251 - RNA, 20 nt, Artificial Sequence
  LRRK2 RNA guide
uccgacuauaugaaaugccu

SEQ ID NO: 20252 - RNA, 20 nt, Artificial Sequence
  LRRK2 RNA guide
ugaaaugccuuguuuuccaa

SEQ ID NO: 20253 - RNA, 20 nt, Artificial Sequence
  LRRK2 RNA guide
ugaccaaaaucccauuggaa

SEQ ID NO: 20254 - RNA, 20 nt, Artificial Sequence
  LRRK2 RNA guide
ugccuuguuuuccaauggga

SEQ ID NO: 20255 - RNA, 20 nt, Artificial Sequence
  LRRK2 RNA guide
uggaaaacaaggcauuucau

SEQ ID NO: 20256 - RNA, 20 nt, Artificial Sequence
  LRRK2 RNA guide
uguuuuccaaugggauuuug

SEQ ID NO: 20257 - RNA, 20 nt, Artificial Sequence
  LRRK2 RNA guide
uugaccaaaaucccauugga

SEQ ID NO: 20258 - RNA, 20 nt, Artificial Sequence
  LRRK2 RNA guide
uuggaaaacaaggcauuuca

SEQ ID NO: 20259 - RNA, 20 nt, Artificial Sequence
  LRRK2 RNA guide
uuguuuuccaaugggauuuu

SEQ ID NO: 20260 - RNA, 21 nt, Artificial Sequence
  LRRK2 RNA guide
aaaaucccauuggaaaacaag

SEQ ID NO: 20261 - RNA, 21 nt, Artificial Sequence
  LRRK2 RNA guide
aaaucccauuggaaaacaagg

SEQ ID NO: 20262 - RNA, 21 nt, Artificial Sequence
  LRRK2 RNA guide
aaaugccuuguuuuccaaugg

SEQ ID NO: 20263 - RNA, 21 nt, Artificial Sequence
  LRRK2 RNA guide
aacaaggcauuucauauaguc

SEQ ID NO: 20264 - RNA, 21 nt, Artificial Sequence
  LRRK2 RNA guide
aaucccauuggaaaacaaggc

SEQ ID NO: 20265 - RNA, 21 nt, Artificial Sequence
  LRRK2 RNA guide
aaugccuuguuuuccaauggg

SEQ ID NO: 20266 - RNA, 21 nt, Artificial Sequence
  LRRK2 RNA guide
acaaggcauuucauauagucg

SEQ ID NO: 20267 - RNA, 21 nt, Artificial Sequence
  LRRK2 RNA guide
accaaaaucccauuggaaaac

SEQ ID NO: 20268 - RNA, 21 nt, Artificial Sequence
  LRRK2 RNA guide
auaugaaaugccuuguuuucc

SEQ ID NO: 20269 - RNA, 21 nt, Artificial Sequence
  LRRK2 RNA guide
aucauccgacuauaugaaaug

SEQ ID NO: 20270 - RNA, 21 nt, Artificial Sequence
  LRRK2 RNA guide
aucccauuggaaaacaaggca

SEQ ID NO: 20271 - RNA, 21 nt, Artificial Sequence
  LRRK2 RNA guide
auccgacuauaugaaaugccu

SEQ ID NO: 20272 - RNA, 21 nt, Artificial Sequence
  LRRK2 RNA guide
augaaaugccuuguuuuccaa

SEQ ID NO: 20273 - RNA, 21 nt, Artificial Sequence
  LRRK2 RNA guide
augccuuguuuuccaauggga

SEQ ID NO: 20274 - RNA, 21 nt, Artificial Sequence
  LRRK2 RNA guide
auuggaaaacaaggcauuuca

SEQ ID NO: 20275 - RNA, 21 nt, Artificial Sequence
  LRRK2 RNA guide
caaaaucccauuggaaaacaa

SEQ ID NO: 20276 - RNA, 21 nt, Artificial Sequence
  LRRK2 RNA guide
cauccgacuauaugaaaugcc

SEQ ID NO: 20277 - RNA, 21 nt, Artificial Sequence
  LRRK2 RNA guide
cauuggaaaacaaggcauuuc

SEQ ID NO: 20278 - RNA, 21 nt, Artificial Sequence
  LRRK2 RNA guide
ccaaaaucccauuggaaaaca

SEQ ID NO: 20279 - RNA, 21 nt, Artificial Sequence
  LRRK2 RNA guide
ccauuggaaaacaaggcauuu

SEQ ID NO: 20280 - RNA, 21 nt, Artificial Sequence
  LRRK2 RNA guide
cccauuggaaaacaaggcauu

SEQ ID NO: 20281 - RNA, 21 nt, Artificial Sequence
  LRRK2 RNA guide
ccgacuauaugaaaugccuug

SEQ ID NO: 20282 - RNA, 21 nt, Artificial Sequence
  LRRK2 RNA guide
ccuuguuuuccaaugggauuu

SEQ ID NO: 20283 - RNA, 21 nt, Artificial Sequence
  LRRK2 RNA guide
cgacuauaugaaaugccuugu

SEQ ID NO: 20284 - RNA, 21 nt, Artificial Sequence
  LRRK2 RNA guide
cuugaccaaaaucccauugga

SEQ ID NO: 20285 - RNA, 21 nt, Artificial Sequence
  LRRK2 RNA guide
cuuguuuuccaaugggauuuu

SEQ ID NO: 20286 - RNA, 21 nt, Artificial Sequence
  LRRK2 RNA guide
gaaaugccuuguuuuccaaug

SEQ ID NO: 20287 - RNA, 21 nt, Artificial Sequence
  LRRK2 RNA guide
gaccaaaaucccauuggaaaa

SEQ ID NO: 20288 - RNA, 21 nt, Artificial Sequence
  LRRK2 RNA guide
gacuauaugaaaugccuuguu

SEQ ID NO: 20289 - RNA, 21 nt, Artificial Sequence
  LRRK2 RNA guide
gccuuguuuuccaaugggauu

SEQ ID NO: 20290 - RNA, 21 nt, Artificial Sequence
  LRRK2 RNA guide
ggaaaacaaggcauuucauau

SEQ ID NO: 20291 - RNA, 21 nt, Artificial Sequence
  LRRK2 RNA guide
uaugaaaugccuuguuuucca

SEQ ID NO: 20292 - RNA, 21 nt, Artificial Sequence
  LRRK2 RNA guide
ucauccgacuauaugaaaugc

SEQ ID NO: 20293 - RNA, 21 nt, Artificial Sequence
  LRRK2 RNA guide
ucccauuggaaaacaaggcau

SEQ ID NO: 20294 - RNA, 21 nt, Artificial Sequence
  LRRK2 RNA guide
uccgacuauaugaaaugccuu

SEQ ID NO: 20295 - RNA, 21 nt, Artificial Sequence
  LRRK2 RNA guide
ucuugaccaaaaucccauugg

SEQ ID NO: 20296 - RNA, 21 nt, Artificial Sequence
  LRRK2 RNA guide
ugaaaugccuuguuuuccaau

SEQ ID NO: 20297 - RNA, 21 nt, Artificial Sequence
  LRRK2 RNA guide
ugaccaaaaucccauuggaaa

SEQ ID NO: 20298 - RNA, 21 nt, Artificial Sequence
  LRRK2 RNA guide
ugccuuguuuuccaaugggau

SEQ ID NO: 20299 - RNA, 21 nt, Artificial Sequence
  LRRK2 RNA guide
uggaaaacaaggcauuucaua

SEQ ID NO: 20300 - RNA, 21 nt, Artificial Sequence
  LRRK2 RNA guide
uguuuuccaaugggauuuugg

SEQ ID NO: 20301 - RNA, 21 nt, Artificial Sequence
  LRRK2 RNA guide
uugaccaaaaucccauuggaa

SEQ ID NO: 20302 - RNA, 21 nt, Artificial Sequence
  LRRK2 RNA guide
uuggaaaacaaggcauuucau

SEQ ID NO: 20303 - RNA, 21 nt, Artificial Sequence
  LRRK2 RNA guide
uuguuuuccaaugggauuuug

SEQ ID NO: 20304 - RNA, 22 nt, Artificial Sequence
  LRRK2 RNA guide
aaaaucccauuggaaaacaagg

SEQ ID NO: 20305 - RNA, 22 nt, Artificial Sequence
  LRRK2 RNA guide
aaacaaggcauuucauauaguc

SEQ ID NO: 20306 - RNA, 22 nt, Artificial Sequence
  LRRK2 RNA guide
aaaucccauuggaaaacaaggc

SEQ ID NO: 20307 - RNA, 22 nt, Artificial Sequence
  LRRK2 RNA guide
aaaugccuuguuuuccaauggg

SEQ ID NO: 20308 - RNA, 22 nt, Artificial Sequence
  LRRK2 RNA guide
aacaaggcauuucauauagucg

SEQ ID NO: 20309 - RNA, 22 nt, Artificial Sequence
  LRRK2 RNA guide
aaucccauuggaaaacaaggca

SEQ ID NO: 20310 - RNA, 22 nt, Artificial Sequence
  LRRK2 RNA guide
aaugccuuguuuuccaauggga

SEQ ID NO: 20311 - RNA, 22 nt, Artificial Sequence
  LRRK2 RNA guide
acaaggcauuucauauagucgg

SEQ ID NO: 20312 - RNA, 22 nt, Artificial Sequence
  LRRK2 RNA guide
accaaaaucccauuggaaaaca

SEQ ID NO: 20313 - RNA, 22 nt, Artificial Sequence
  LRRK2 RNA guide
auaugaaaugccuuguuuucca

SEQ ID NO: 20314 - RNA, 22 nt, Artificial Sequence
  LRRK2 RNA guide
aucauccgacuauaugaaaugc

SEQ ID NO: 20315 - RNA, 22 nt, Artificial Sequence
  LRRK2 RNA guide
aucccauuggaaaacaaggcau

SEQ ID NO: 20316 - RNA, 22 nt, Artificial Sequence
  LRRK2 RNA guide
auccgacuauaugaaaugccuu

SEQ ID NO: 20317 - RNA, 22 nt, Artificial Sequence
  LRRK2 RNA guide
aucuugaccaaaaucccauugg

SEQ ID NO: 20318 - RNA, 22 nt, Artificial Sequence
  LRRK2 RNA guide
augaaaugccuuguuuuccaau

SEQ ID NO: 20319 - RNA, 22 nt, Artificial Sequence
  LRRK2 RNA guide
augccuuguuuuccaaugggau

SEQ ID NO: 20320 - RNA, 22 nt, Artificial Sequence
  LRRK2 RNA guide
auuggaaaacaaggcauuucau

SEQ ID NO: 20321 - RNA, 22 nt, Artificial Sequence
  LRRK2 RNA guide
caaaaucccauuggaaaacaag

SEQ ID NO: 20322 - RNA, 22 nt, Artificial Sequence
  LRRK2 RNA guide
cauccgacuauaugaaaugccu

SEQ ID NO: 20323 - RNA, 22 nt, Artificial Sequence
  LRRK2 RNA guide
cauuggaaaacaaggcauuuca

SEQ ID NO: 20324 - RNA, 22 nt, Artificial Sequence
  LRRK2 RNA guide
ccaaaaucccauuggaaaacaa

SEQ ID NO: 20325 - RNA, 22 nt, Artificial Sequence
  LRRK2 RNA guide
ccauuggaaaacaaggcauuuc

SEQ ID NO: 20326 - RNA, 22 nt, Artificial Sequence
  LRRK2 RNA guide
cccauuggaaaacaaggcauuu

SEQ ID NO: 20327 - RNA, 22 nt, Artificial Sequence
  LRRK2 RNA guide
ccgacuauaugaaaugccuugu

SEQ ID NO: 20328 - RNA, 22 nt, Artificial Sequence
  LRRK2 RNA guide
ccuuguuuuccaaugggauuuu

SEQ ID NO: 20329 - RNA, 22 nt, Artificial Sequence
  LRRK2 RNA guide
cgacuauaugaaaugccuuguu

SEQ ID NO: 20330 - RNA, 22 nt, Artificial Sequence
  LRRK2 RNA guide
cuauaugaaaugccuuguuuuc

SEQ ID NO: 20331 - RNA, 22 nt, Artificial Sequence
  LRRK2 RNA guide
cuugaccaaaaucccauuggaa

SEQ ID NO: 20332 - RNA, 22 nt, Artificial Sequence
  LRRK2 RNA guide
cuuguuuuccaaugggauuuug

SEQ ID NO: 20333 - RNA, 22 nt, Artificial Sequence
  LRRK2 RNA guide
gaaaacaaggcauuucauauag

SEQ ID NO: 20334 - RNA, 22 nt, Artificial Sequence
  LRRK2 RNA guide
gaaaugccuuguuuuccaaugg

SEQ ID NO: 20335 - RNA, 22 nt, Artificial Sequence
  LRRK2 RNA guide
gaccaaaaucccauuggaaaac

SEQ ID NO: 20336 - RNA, 22 nt, Artificial Sequence
  LRRK2 RNA guide
gacuauaugaaaugccuuguuu

SEQ ID NO: 20337 - RNA, 22 nt, Artificial Sequence
  LRRK2 RNA guide
gccuuguuuuccaaugggauuu

SEQ ID NO: 20338 - RNA, 22 nt, Artificial Sequence
  LRRK2 RNA guide
ggaaaacaaggcauuucauaua

SEQ ID NO: 20339 - RNA, 22 nt, Artificial Sequence
  LRRK2 RNA guide
uauaugaaaugccuuguuuucc

SEQ ID NO: 20340 - RNA, 22 nt, Artificial Sequence
  LRRK2 RNA guide
uaucauccgacuauaugaaaug

SEQ ID NO: 20341 - RNA, 22 nt, Artificial Sequence
  LRRK2 RNA guide
uaugaaaugccuuguuuuccaa

SEQ ID NO: 20342 - RNA, 22 nt, Artificial Sequence
  LRRK2 RNA guide
ucauccgacuauaugaaaugcc

SEQ ID NO: 20343 - RNA, 22 nt, Artificial Sequence
  LRRK2 RNA guide
ucccauuggaaaacaaggcauu

SEQ ID NO: 20344 - RNA, 22 nt, Artificial Sequence
  LRRK2 RNA guide
uccgacuauaugaaaugccuug

SEQ ID NO: 20345 - RNA, 22 nt, Artificial Sequence
  LRRK2 RNA guide
ucuugaccaaaaucccauugga

SEQ ID NO: 20346 - RNA, 22 nt, Artificial Sequence
  LRRK2 RNA guide
ugaaaugccuuguuuuccaaug

SEQ ID NO: 20347 - RNA, 22 nt, Artificial Sequence
  LRRK2 RNA guide
ugaccaaaaucccauuggaaaa

SEQ ID NO: 20348 - RNA, 22 nt, Artificial Sequence
  LRRK2 RNA guide
ugccuuguuuuccaaugggauu

SEQ ID NO: 20349 - RNA, 22 nt, Artificial Sequence
  LRRK2 RNA guide
uggaaaacaaggcauuucauau

SEQ ID NO: 20350 - RNA, 22 nt, Artificial Sequence
  LRRK2 RNA guide
uguuuuccaaugggauuuuggu

SEQ ID NO: 20351 - RNA, 22 nt, Artificial Sequence
  LRRK2 RNA guide
uugaccaaaaucccauuggaaa

SEQ ID NO: 20352 - RNA, 22 nt, Artificial Sequence
  LRRK2 RNA guide
uuggaaaacaaggcauuucaua

SEQ ID NO: 20353 - RNA, 22 nt, Artificial Sequence
  LRRK2 RNA guide
uuguuuuccaaugggauuuugg

SEQ ID NO: 20354 - RNA, 20 nt, Artificial Sequence
  LRRK2 RNA guide
aaaaucccguuggaaaauaa

SEQ ID NO: 20355 - RNA, 20 nt, Artificial Sequence
  LRRK2 RNA guide
aaaucccguuggaaaauaag

SEQ ID NO: 20356 - RNA, 20 nt, Artificial Sequence
  LRRK2 RNA guide
aaaugccuuauuuuccaacg

SEQ ID NO: 20357 - RNA, 20 nt, Artificial Sequence
  LRRK2 RNA guide
aacgggauuuuggucaagau

SEQ ID NO: 20358 - RNA, 20 nt, Artificial Sequence
  LRRK2 RNA guide
aaucccguuggaaaauaagg

SEQ ID NO: 20359 - RNA, 20 nt, Artificial Sequence
  LRRK2 RNA guide
aaucuugaccaaaaucccgu

SEQ ID NO: 20360 - RNA, 20 nt, Artificial Sequence
  LRRK2 RNA guide
aaugccuuauuuuccaacgg

SEQ ID NO: 20361 - RNA, 20 nt, Artificial Sequence
  LRRK2 RNA guide
accaaaaucccguuggaaaa

SEQ ID NO: 20362 - RNA, 20 nt, Artificial Sequence
  LRRK2 RNA guide
acgggauuuuggucaagauu

SEQ ID NO: 20363 - RNA, 20 nt, Artificial Sequence
  LRRK2 RNA guide
aucccguuggaaaauaaggc

SEQ ID NO: 20364 - RNA, 20 nt, Artificial Sequence
  LRRK2 RNA guide
aucuugaccaaaaucccguu

SEQ ID NO: 20365 - RNA, 20 nt, Artificial Sequence
  LRRK2 RNA guide
augaaaugccuuauuuucca

SEQ ID NO: 20366 - RNA, 20 nt, Artificial Sequence
  LRRK2 RNA guide
augccuuauuuuccaacggg

SEQ ID NO: 20367 - RNA, 20 nt, Artificial Sequence
  LRRK2 RNA guide
auuaaucuugaccaaaaucc

SEQ ID NO: 20368 - RNA, 20 nt, Artificial Sequence
  LRRK2 RNA guide
auuuuccaacgggauuuugg

SEQ ID NO: 20369 - RNA, 20 nt, Artificial Sequence
  LRRK2 RNA guide
caaaaucccguuggaaaaua

SEQ ID NO: 20370 - RNA, 20 nt, Artificial Sequence
  LRRK2 RNA guide
caacgggauuuuggucaaga

SEQ ID NO: 20371 - RNA, 20 nt, Artificial Sequence
  LRRK2 RNA guide
ccaaaaucccguuggaaaau

SEQ ID NO: 20372 - RNA, 20 nt, Artificial Sequence
  LRRK2 RNA guide
ccaacgggauuuuggucaag

SEQ ID NO: 20373 - RNA, 20 nt, Artificial Sequence
  LRRK2 RNA guide
cccguuggaaaauaaggcau

SEQ ID NO: 20374 - RNA, 20 nt, Artificial Sequence
  LRRK2 RNA guide
ccguuggaaaauaaggcauu

SEQ ID NO: 20375 - RNA, 20 nt, Artificial Sequence
  LRRK2 RNA guide
ccuuauuuuccaacgggauu

SEQ ID NO: 20376 - RNA, 20 nt, Artificial Sequence
  LRRK2 RNA guide
cguuggaaaauaaggcauuu

SEQ ID NO: 20377 - RNA, 20 nt, Artificial Sequence
  LRRK2 RNA guide
cuuauuuuccaacgggauuu

SEQ ID NO: 20378 - RNA, 20 nt, Artificial Sequence
  LRRK2 RNA guide
cuugaccaaaaucccguugg

SEQ ID NO: 20379 - RNA, 20 nt, Artificial Sequence
  LRRK2 RNA guide
gaaaugccuuauuuuccaac

SEQ ID NO: 20380 - RNA, 20 nt, Artificial Sequence
  LRRK2 RNA guide
gaccaaaaucccguuggaaa

SEQ ID NO: 20381 - RNA, 20 nt, Artificial Sequence
  LRRK2 RNA guide
gauuaaucuugaccaaaauc

SEQ ID NO: 20382 - RNA, 20 nt, Artificial Sequence
  LRRK2 RNA guide
gccuuauuuuccaacgggau

SEQ ID NO: 20383 - RNA, 20 nt, Artificial Sequence
  LRRK2 RNA guide
uaaucuugaccaaaaucccg

SEQ ID NO: 20384 - RNA, 20 nt, Artificial Sequence
  LRRK2 RNA guide
uaugaaaugccuuauuuucc

SEQ ID NO: 20385 - RNA, 20 nt, Artificial Sequence
  LRRK2 RNA guide
uauuuuccaacgggauuuug

SEQ ID NO: 20386 - RNA, 20 nt, Artificial Sequence
  LRRK2 RNA guide
uccaacgggauuuuggucaa

SEQ ID NO: 20387 - RNA, 20 nt, Artificial Sequence
  LRRK2 RNA guide
ucccguuggaaaauaaggca

SEQ ID NO: 20388 - RNA, 20 nt, Artificial Sequence
  LRRK2 RNA guide
ucuugaccaaaaucccguug

SEQ ID NO: 20389 - RNA, 20 nt, Artificial Sequence
  LRRK2 RNA guide
ugaaaugccuuauuuuccaa

SEQ ID NO: 20390 - RNA, 20 nt, Artificial Sequence
  LRRK2 RNA guide
ugaccaaaaucccguuggaa

SEQ ID NO: 20391 - RNA, 20 nt, Artificial Sequence
  LRRK2 RNA guide
ugccuuauuuuccaacggga

SEQ ID NO: 20392 - RNA, 20 nt, Artificial Sequence
  LRRK2 RNA guide
uuauuuuccaacgggauuuu

SEQ ID NO: 20393 - RNA, 20 nt, Artificial Sequence
  LRRK2 RNA guide
uuccaacgggauuuugguca

SEQ ID NO: 20394 - RNA, 20 nt, Artificial Sequence
  LRRK2 RNA guide
uugaccaaaaucccguugga

SEQ ID NO: 20395 - RNA, 20 nt, Artificial Sequence
  LRRK2 RNA guide
uuuccaacgggauuuugguc

SEQ ID NO: 20396 - RNA, 20 nt, Artificial Sequence
  LRRK2 RNA guide
uuuuccaacgggauuuuggu

SEQ ID NO: 20397 - RNA, 21 nt, Artificial Sequence
  LRRK2 RNA guide
aaaaucccguuggaaaauaag

SEQ ID NO: 20398 - RNA, 21 nt, Artificial Sequence
  LRRK2 RNA guide
aaaucccguuggaaaauaagg

SEQ ID NO: 20399 - RNA, 21 nt, Artificial Sequence
  LRRK2 RNA guide
aaaugccuuauuuuccaacgg

SEQ ID NO: 20400 - RNA, 21 nt, Artificial Sequence
  LRRK2 RNA guide
aacgggauuuuggucaagauu

SEQ ID NO: 20401 - RNA, 21 nt, Artificial Sequence
  LRRK2 RNA guide
aaucccguuggaaaauaaggc

SEQ ID NO: 20402 - RNA, 21 nt, Artificial Sequence
  LRRK2 RNA guide
aaucuugaccaaaaucccguu

SEQ ID NO: 20403 - RNA, 21 nt, Artificial Sequence
  LRRK2 RNA guide
aaugccuuauuuuccaacggg

SEQ ID NO: 20404 - RNA, 21 nt, Artificial Sequence
  LRRK2 RNA guide
accaaaaucccguuggaaaau

SEQ ID NO: 20405 - RNA, 21 nt, Artificial Sequence
  LRRK2 RNA guide
acgggauuuuggucaagauua

SEQ ID NO: 20406 - RNA, 21 nt, Artificial Sequence
  LRRK2 RNA guide
aucccguuggaaaauaaggca

SEQ ID NO: 20407 - RNA, 21 nt, Artificial Sequence
  LRRK2 RNA guide
aucuugaccaaaaucccguug

SEQ ID NO: 20408 - RNA, 21 nt, Artificial Sequence
  LRRK2 RNA guide
augccuuauuuuccaacggga

SEQ ID NO: 20409 - RNA, 21 nt, Artificial Sequence
  LRRK2 RNA guide
auuaaucuugaccaaaauccc

SEQ ID NO: 20410 - RNA, 21 nt, Artificial Sequence
  LRRK2 RNA guide
auuuuccaacgggauuuuggu

SEQ ID NO: 20411 - RNA, 21 nt, Artificial Sequence
  LRRK2 RNA guide
caaaaucccguuggaaaauaa

SEQ ID NO: 20412 - RNA, 21 nt, Artificial Sequence
  LRRK2 RNA guide
caacgggauuuuggucaagau

SEQ ID NO: 20413 - RNA, 21 nt, Artificial Sequence
  LRRK2 RNA guide
ccaaaaucccguuggaaaaua

SEQ ID NO: 20414 - RNA, 21 nt, Artificial Sequence
  LRRK2 RNA guide
ccaacgggauuuuggucaaga

SEQ ID NO: 20415 - RNA, 21 nt, Artificial Sequence
  LRRK2 RNA guide
cccguuggaaaauaaggcauu

SEQ ID NO: 20416 - RNA, 21 nt, Artificial Sequence
  LRRK2 RNA guide
ccguuggaaaauaaggcauuu

SEQ ID NO: 20417 - RNA, 21 nt, Artificial Sequence
  LRRK2 RNA guide
ccuuauuuuccaacgggauuu

SEQ ID NO: 20418 - RNA, 21 nt, Artificial Sequence
  LRRK2 RNA guide
cguuggaaaauaaggcauuuc

SEQ ID NO: 20419 - RNA, 21 nt, Artificial Sequence
  LRRK2 RNA guide
cuuauuuuccaacgggauuuu

SEQ ID NO: 20420 - RNA, 21 nt, Artificial Sequence
  LRRK2 RNA guide
cuugaccaaaaucccguugga

SEQ ID NO: 20421 - RNA, 21 nt, Artificial Sequence
  LRRK2 RNA guide
gaaaugccuuauuuuccaacg

SEQ ID NO: 20422 - RNA, 21 nt, Artificial Sequence
  LRRK2 RNA guide
gaccaaaaucccguuggaaaa

SEQ ID NO: 20423 - RNA, 21 nt, Artificial Sequence
  LRRK2 RNA guide
gauuaaucuugaccaaaaucc

SEQ ID NO: 20424 - RNA, 21 nt, Artificial Sequence
  LRRK2 RNA guide
gccuuauuuuccaacgggauu

SEQ ID NO: 20425 - RNA, 21 nt, Artificial Sequence
  LRRK2 RNA guide
uaaucuugaccaaaaucccgu

SEQ ID NO: 20426 - RNA, 21 nt, Artificial Sequence
  LRRK2 RNA guide
uauuuuccaacgggauuuugg

SEQ ID NO: 20427 - RNA, 21 nt, Artificial Sequence
  LRRK2 RNA guide
uccaacgggauuuuggucaag

SEQ ID NO: 20428 - RNA, 21 nt, Artificial Sequence
  LRRK2 RNA guide
ucccguuggaaaauaaggcau

SEQ ID NO: 20429 - RNA, 21 nt, Artificial Sequence
  LRRK2 RNA guide
ucuugaccaaaaucccguugg

SEQ ID NO: 20430 - RNA, 21 nt, Artificial Sequence
  LRRK2 RNA guide
ugaaaugccuuauuuuccaac

SEQ ID NO: 20431 - RNA, 21 nt, Artificial Sequence
  LRRK2 RNA guide
ugaccaaaaucccguuggaaa

SEQ ID NO: 20432 - RNA, 21 nt, Artificial Sequence
  LRRK2 RNA guide
ugccuuauuuuccaacgggau

SEQ ID NO: 20433 - RNA, 21 nt, Artificial Sequence
  LRRK2 RNA guide
uuaaucuugaccaaaaucccg

SEQ ID NO: 20434 - RNA, 21 nt, Artificial Sequence
  LRRK2 RNA guide
uuauuuuccaacgggauuuug

SEQ ID NO: 20435 - RNA, 21 nt, Artificial Sequence
  LRRK2 RNA guide
uuccaacgggauuuuggucaa

SEQ ID NO: 20436 - RNA, 21 nt, Artificial Sequence
  LRRK2 RNA guide
uugaccaaaaucccguuggaa

SEQ ID NO: 20437 - RNA, 21 nt, Artificial Sequence
  LRRK2 RNA guide
uuuccaacgggauuuugguca

SEQ ID NO: 20438 - RNA, 21 nt, Artificial Sequence
  LRRK2 RNA guide
uuuuccaacgggauuuugguc

SEQ ID NO: 20439 - RNA, 22 nt, Artificial Sequence
  LRRK2 RNA guide
aaaaucccguuggaaaauaagg

SEQ ID NO: 20440 - RNA, 22 nt, Artificial Sequence
  LRRK2 RNA guide
aaaucccguuggaaaauaaggc

SEQ ID NO: 20441 - RNA, 22 nt, Artificial Sequence
  LRRK2 RNA guide
aaaugccuuauuuuccaacggg

SEQ ID NO: 20442 - RNA, 22 nt, Artificial Sequence
  LRRK2 RNA guide
aacgggauuuuggucaagauua

SEQ ID NO: 20443 - RNA, 22 nt, Artificial Sequence
  LRRK2 RNA guide
aaucccguuggaaaauaaggca

SEQ ID NO: 20444 - RNA, 22 nt, Artificial Sequence
  LRRK2 RNA guide
aaucuugaccaaaaucccguug

SEQ ID NO: 20445 - RNA, 22 nt, Artificial Sequence
  LRRK2 RNA guide
aaugccuuauuuuccaacggga

SEQ ID NO: 20446 - RNA, 22 nt, Artificial Sequence
  LRRK2 RNA guide
accaaaaucccguuggaaaaua

SEQ ID NO: 20447 - RNA, 22 nt, Artificial Sequence
  LRRK2 RNA guide
acgggauuuuggucaagauuaa

SEQ ID NO: 20448 - RNA, 22 nt, Artificial Sequence
  LRRK2 RNA guide
aucccguuggaaaauaaggcau

SEQ ID NO: 20449 - RNA, 22 nt, Artificial Sequence
  LRRK2 RNA guide
aucuugaccaaaaucccguugg

SEQ ID NO: 20450 - RNA, 22 nt, Artificial Sequence
  LRRK2 RNA guide
augaaaugccuuauuuuccaac

SEQ ID NO: 20451 - RNA, 22 nt, Artificial Sequence
  LRRK2 RNA guide
augccuuauuuuccaacgggau

SEQ ID NO: 20452 - RNA, 22 nt, Artificial Sequence
  LRRK2 RNA guide
auuaaucuugaccaaaaucccg

SEQ ID NO: 20453 - RNA, 22 nt, Artificial Sequence
  LRRK2 RNA guide
auuuuccaacgggauuuugguc

SEQ ID NO: 20454 - RNA, 22 nt, Artificial Sequence
  LRRK2 RNA guide
caaaaucccguuggaaaauaag

SEQ ID NO: 20455 - RNA, 22 nt, Artificial Sequence
  LRRK2 RNA guide
caacgggauuuuggucaagauu

SEQ ID NO: 20456 - RNA, 22 nt, Artificial Sequence
  LRRK2 RNA guide
ccaaaaucccguuggaaaauaa

SEQ ID NO: 20457 - RNA, 22 nt, Artificial Sequence
  LRRK2 RNA guide
ccaacgggauuuuggucaagau

SEQ ID NO: 20458 - RNA, 22 nt, Artificial Sequence
  LRRK2 RNA guide
cccguuggaaaauaaggcauuu

SEQ ID NO: 20459 - RNA, 22 nt, Artificial Sequence
  LRRK2 RNA guide
ccguuggaaaauaaggcauuuc

SEQ ID NO: 20460 - RNA, 22 nt, Artificial Sequence
  LRRK2 RNA guide
ccuuauuuuccaacgggauuuu

SEQ ID NO: 20461 - RNA, 22 nt, Artificial Sequence
  LRRK2 RNA guide
cguuggaaaauaaggcauuuca

SEQ ID NO: 20462 - RNA, 22 nt, Artificial Sequence
  LRRK2 RNA guide
cuuauuuuccaacgggauuuug

SEQ ID NO: 20463 - RNA, 22 nt, Artificial Sequence
  LRRK2 RNA guide
cuugaccaaaaucccguuggaa

SEQ ID NO: 20464 - RNA, 22 nt, Artificial Sequence
  LRRK2 RNA guide
gaaaugccuuauuuuccaacgg

SEQ ID NO: 20465 - RNA, 22 nt, Artificial Sequence
  LRRK2 RNA guide
gaccaaaaucccguuggaaaau

SEQ ID NO: 20466 - RNA, 22 nt, Artificial Sequence
  LRRK2 RNA guide
gauuaaucuugaccaaaauccc

SEQ ID NO: 20467 - RNA, 22 nt, Artificial Sequence
  LRRK2 RNA guide
gccuuauuuuccaacgggauuu

SEQ ID NO: 20468 - RNA, 22 nt, Artificial Sequence
  LRRK2 RNA guide
uaaucuugaccaaaaucccguu

SEQ ID NO: 20469 - RNA, 22 nt, Artificial Sequence
  LRRK2 RNA guide
uauuuuccaacgggauuuuggu

SEQ ID NO: 20470 - RNA, 22 nt, Artificial Sequence
  LRRK2 RNA guide
uccaacgggauuuuggucaaga

SEQ ID NO: 20471 - RNA, 22 nt, Artificial Sequence
  LRRK2 RNA guide
ucccguuggaaaauaaggcauu

SEQ ID NO: 20472 - RNA, 22 nt, Artificial Sequence
  LRRK2 RNA guide
ucuugaccaaaaucccguugga

SEQ ID NO: 20473 - RNA, 22 nt, Artificial Sequence
  LRRK2 RNA guide
ugaaaugccuuauuuuccaacg

SEQ ID NO: 20474 - RNA, 22 nt, Artificial Sequence
  LRRK2 RNA guide
ugaccaaaaucccguuggaaaa

SEQ ID NO: 20475 - RNA, 22 nt, Artificial Sequence
  LRRK2 RNA guide
ugauuaaucuugaccaaaaucc

SEQ ID NO: 20476 - RNA, 22 nt, Artificial Sequence
  LRRK2 RNA guide
ugccuuauuuuccaacgggauu

SEQ ID NO: 20477 - RNA, 22 nt, Artificial Sequence
  LRRK2 RNA guide
uuaaucuugaccaaaaucccgu

SEQ ID NO: 20478 - RNA, 22 nt, Artificial Sequence
  LRRK2 RNA guide
uuauuuuccaacgggauuuugg

SEQ ID NO: 20479 - RNA, 22 nt, Artificial Sequence
  LRRK2 RNA guide
uuccaacgggauuuuggucaag

SEQ ID NO: 20480 - RNA, 22 nt, Artificial Sequence
  LRRK2 RNA guide
uugaccaaaaucccguuggaaa

SEQ ID NO: 20481 - RNA, 22 nt, Artificial Sequence
  LRRK2 RNA guide
uuuccaacgggauuuuggucaa

SEQ ID NO: 20482 - RNA, 22 nt, Artificial Sequence
  LRRK2 RNA guide
uuuuccaacgggauuuugguca

SEQ ID NO: 20483 - RNA, 20 nt, Artificial Sequence
  LRRK2 RNA guide
aaugagcacuucgcccaaac

SEQ ID NO: 20484 - RNA, 20 nt, Artificial Sequence
  LRRK2 RNA guide
aauggcuccauuuuuuagaa

SEQ ID NO: 20485 - RNA, 20 nt, Artificial Sequence
  LRRK2 RNA guide
acauucuguuugggcgaagu

SEQ ID NO: 20486 - RNA, 20 nt, Artificial Sequence
  LRRK2 RNA guide
agaaugagcacuucgcccaa

SEQ ID NO: 20487 - RNA, 20 nt, Artificial Sequence
  LRRK2 RNA guide
agugcucauucuaaaaaaug

SEQ ID NO: 20488 - RNA, 20 nt, Artificial Sequence
  LRRK2 RNA guide
augagcacuucgcccaaaca

SEQ ID NO: 20489 - RNA, 20 nt, Artificial Sequence
  LRRK2 RNA guide
auggcuccauuuuuuagaau

SEQ ID NO: 20490 - RNA, 20 nt, Artificial Sequence
  LRRK2 RNA guide
auucuguuugggcgaagugc

SEQ ID NO: 20491 - RNA, 20 nt, Artificial Sequence
  LRRK2 RNA guide
cauucuaaaaaauggagcca

SEQ ID NO: 20492 - RNA, 20 nt, Artificial Sequence
  LRRK2 RNA guide
cauucuguuugggcgaagug

SEQ ID NO: 20493 - RNA, 20 nt, Artificial Sequence
  LRRK2 RNA guide
cauuuuuuagaaugagcacu

SEQ ID NO: 20494 - RNA, 20 nt, Artificial Sequence
  LRRK2 RNA guide
ccauuuuuuagaaugagcac

SEQ ID NO: 20495 - RNA, 20 nt, Artificial Sequence
  LRRK2 RNA guide
cgaagugcucauucuaaaaa

SEQ ID NO: 20496 - RNA, 20 nt, Artificial Sequence
  LRRK2 RNA guide
cucauucuaaaaaauggagc

SEQ ID NO: 20497 - RNA, 20 nt, Artificial Sequence
  LRRK2 RNA guide
cuccauuuuuuagaaugagc

SEQ ID NO: 20498 - RNA, 20 nt, Artificial Sequence
  LRRK2 RNA guide
cuguuugggcgaagugcuca

SEQ ID NO: 20499 - RNA, 20 nt, Artificial Sequence
  LRRK2 RNA guide
gaagugcucauucuaaaaaa

SEQ ID NO: 20500 - RNA, 20 nt, Artificial Sequence
  LRRK2 RNA guide
gaaugagcacuucgcccaaa

SEQ ID NO: 20501 - RNA, 20 nt, Artificial Sequence
  LRRK2 RNA guide
gcgaagugcucauucuaaaa

SEQ ID NO: 20502 - RNA, 20 nt, Artificial Sequence
  LRRK2 RNA guide
gcucauucuaaaaaauggag

SEQ ID NO: 20503 - RNA, 20 nt, Artificial Sequence
  LRRK2 RNA guide
gcuccauuuuuuagaaugag

SEQ ID NO: 20504 - RNA, 20 nt, Artificial Sequence
  LRRK2 RNA guide
ggcgaagugcucauucuaaa

SEQ ID NO: 20505 - RNA, 20 nt, Artificial Sequence
  LRRK2 RNA guide
ggcuccauuuuuuagaauga

SEQ ID NO: 20506 - RNA, 20 nt, Artificial Sequence
  LRRK2 RNA guide
gggcgaagugcucauucuaa

SEQ ID NO: 20507 - RNA, 20 nt, Artificial Sequence
  LRRK2 RNA guide
gugcucauucuaaaaaaugg

SEQ ID NO: 20508 - RNA, 20 nt, Artificial Sequence
  LRRK2 RNA guide
guuugggcgaagugcucauu

SEQ ID NO: 20509 - RNA, 20 nt, Artificial Sequence
  LRRK2 RNA guide
uaauggcuccauuuuuuaga

SEQ ID NO: 20510 - RNA, 20 nt, Artificial Sequence
  LRRK2 RNA guide
uagaaugagcacuucgccca

SEQ ID NO: 20511 - RNA, 20 nt, Artificial Sequence
  LRRK2 RNA guide
ucauucuaaaaaauggagcc

SEQ ID NO: 20512 - RNA, 20 nt, Artificial Sequence
  LRRK2 RNA guide
uccauuuuuuagaaugagca

SEQ ID NO: 20513 - RNA, 20 nt, Artificial Sequence
  LRRK2 RNA guide
ucuguuugggcgaagugcuc

SEQ ID NO: 20514 - RNA, 20 nt, Artificial Sequence
  LRRK2 RNA guide
ugcucauucuaaaaaaugga

SEQ ID NO: 20515 - RNA, 20 nt, Artificial Sequence
  LRRK2 RNA guide
uggcuccauuuuuuagaaug

SEQ ID NO: 20516 - RNA, 20 nt, Artificial Sequence
  LRRK2 RNA guide
ugggcgaagugcucauucua

SEQ ID NO: 20517 - RNA, 20 nt, Artificial Sequence
  LRRK2 RNA guide
uguuugggcgaagugcucau

SEQ ID NO: 20518 - RNA, 20 nt, Artificial Sequence
  LRRK2 RNA guide
uuaauggcuccauuuuuuag

SEQ ID NO: 20519 - RNA, 20 nt, Artificial Sequence
  LRRK2 RNA guide
uuagaaugagcacuucgccc

SEQ ID NO: 20520 - RNA, 20 nt, Artificial Sequence
  LRRK2 RNA guide
uucuguuugggcgaagugcu

SEQ ID NO: 20521 - RNA, 20 nt, Artificial Sequence
  LRRK2 RNA guide
uugggcgaagugcucauucu

SEQ ID NO: 20522 - RNA, 20 nt, Artificial Sequence
  LRRK2 RNA guide
uuuagaaugagcacuucgcc

SEQ ID NO: 20523 - RNA, 20 nt, Artificial Sequence
  LRRK2 RNA guide
uuugggcgaagugcucauuc

SEQ ID NO: 20524 - RNA, 20 nt, Artificial Sequence
  LRRK2 RNA guide
uuuuagaaugagcacuucgc

SEQ ID NO: 20525 - RNA, 20 nt, Artificial Sequence
  LRRK2 RNA guide
uuuuuagaaugagcacuucg

SEQ ID NO: 20526 - RNA, 20 nt, Artificial Sequence
  LRRK2 RNA guide
uuuuuuagaaugagcacuuc

SEQ ID NO: 20527 - RNA, 21 nt, Artificial Sequence
  LRRK2 RNA guide
aaugagcacuucgcccaaaca

SEQ ID NO: 20528 - RNA, 21 nt, Artificial Sequence
  LRRK2 RNA guide
acauucuguuugggcgaagug

SEQ ID NO: 20529 - RNA, 21 nt, Artificial Sequence
  LRRK2 RNA guide
agaaugagcacuucgcccaaa

SEQ ID NO: 20530 - RNA, 21 nt, Artificial Sequence
  LRRK2 RNA guide
agugcucauucuaaaaaaugg

SEQ ID NO: 20531 - RNA, 21 nt, Artificial Sequence
  LRRK2 RNA guide
augagcacuucgcccaaacag

SEQ ID NO: 20532 - RNA, 21 nt, Artificial Sequence
  LRRK2 RNA guide
auggcuccauuuuuuagaaug

SEQ ID NO: 20533 - RNA, 21 nt, Artificial Sequence
  LRRK2 RNA guide
auucuguuugggcgaagugcu

SEQ ID NO: 20534 - RNA, 21 nt, Artificial Sequence
  LRRK2 RNA guide
cauucuaaaaaauggagccau

SEQ ID NO: 20535 - RNA, 21 nt, Artificial Sequence
  LRRK2 RNA guide
cauucuguuugggcgaagugc

SEQ ID NO: 20536 - RNA, 21 nt, Artificial Sequence
  LRRK2 RNA guide
ccauuuuuuagaaugagcacu

SEQ ID NO: 20537 - RNA, 21 nt, Artificial Sequence
  LRRK2 RNA guide
cgaagugcucauucuaaaaaa

SEQ ID NO: 20538 - RNA, 21 nt, Artificial Sequence
  LRRK2 RNA guide
cucauucuaaaaaauggagcc

SEQ ID NO: 20539 - RNA, 21 nt, Artificial Sequence
  LRRK2 RNA guide
cuccauuuuuuagaaugagca

SEQ ID NO: 20540 - RNA, 21 nt, Artificial Sequence
  LRRK2 RNA guide
cuguuugggcgaagugcucau

SEQ ID NO: 20541 - RNA, 21 nt, Artificial Sequence
  LRRK2 RNA guide
gaaugagcacuucgcccaaac

SEQ ID NO: 20542 - RNA, 21 nt, Artificial Sequence
  LRRK2 RNA guide
gcgaagugcucauucuaaaaa

SEQ ID NO: 20543 - RNA, 21 nt, Artificial Sequence
  LRRK2 RNA guide
gcucauucuaaaaaauggagc

SEQ ID NO: 20544 - RNA, 21 nt, Artificial Sequence
  LRRK2 RNA guide
gcuccauuuuuuagaaugagc

SEQ ID NO: 20545 - RNA, 21 nt, Artificial Sequence
  LRRK2 RNA guide
ggcgaagugcucauucuaaaa

SEQ ID NO: 20546 - RNA, 21 nt, Artificial Sequence
  LRRK2 RNA guide
ggcuccauuuuuuagaaugag

SEQ ID NO: 20547 - RNA, 21 nt, Artificial Sequence
  LRRK2 RNA guide
gggcgaagugcucauucuaaa

SEQ ID NO: 20548 - RNA, 21 nt, Artificial Sequence
  LRRK2 RNA guide
gugcucauucuaaaaaaugga

SEQ ID NO: 20549 - RNA, 21 nt, Artificial Sequence
  LRRK2 RNA guide
guuugggcgaagugcucauuc

SEQ ID NO: 20550 - RNA, 21 nt, Artificial Sequence
  LRRK2 RNA guide
uacauucuguuugggcgaagu

SEQ ID NO: 20551 - RNA, 21 nt, Artificial Sequence
  LRRK2 RNA guide
uagaaugagcacuucgcccaa

SEQ ID NO: 20552 - RNA, 21 nt, Artificial Sequence
  LRRK2 RNA guide
ucauucuaaaaaauggagcca

SEQ ID NO: 20553 - RNA, 21 nt, Artificial Sequence
  LRRK2 RNA guide
uccauuuuuuagaaugagcac

SEQ ID NO: 20554 - RNA, 21 nt, Artificial Sequence
  LRRK2 RNA guide
ucuguuugggcgaagugcuca

SEQ ID NO: 20555 - RNA, 21 nt, Artificial Sequence
  LRRK2 RNA guide
ugcucauucuaaaaaauggag

SEQ ID NO: 20556 - RNA, 21 nt, Artificial Sequence
  LRRK2 RNA guide
uggcuccauuuuuuagaauga

SEQ ID NO: 20557 - RNA, 21 nt, Artificial Sequence
  LRRK2 RNA guide
ugggcgaagugcucauucuaa

SEQ ID NO: 20558 - RNA, 21 nt, Artificial Sequence
  LRRK2 RNA guide
uguuugggcgaagugcucauu

SEQ ID NO: 20559 - RNA, 21 nt, Artificial Sequence
  LRRK2 RNA guide
uuagaaugagcacuucgccca

SEQ ID NO: 20560 - RNA, 21 nt, Artificial Sequence
  LRRK2 RNA guide
uucuguuugggcgaagugcuc

SEQ ID NO: 20561 - RNA, 21 nt, Artificial Sequence
  LRRK2 RNA guide
uugggcgaagugcucauucua

SEQ ID NO: 20562 - RNA, 21 nt, Artificial Sequence
  LRRK2 RNA guide
uuuagaaugagcacuucgccc

SEQ ID NO: 20563 - RNA, 21 nt, Artificial Sequence
  LRRK2 RNA guide
uuugggcgaagugcucauucu

SEQ ID NO: 20564 - RNA, 21 nt, Artificial Sequence
  LRRK2 RNA guide
uuuuagaaugagcacuucgcc

SEQ ID NO: 20565 - RNA, 21 nt, Artificial Sequence
  LRRK2 RNA guide
uuuuuagaaugagcacuucgc

SEQ ID NO: 20566 - RNA, 21 nt, Artificial Sequence
  LRRK2 RNA guide
uuuuuuagaaugagcacuucg

SEQ ID NO: 20567 - RNA, 22 nt, Artificial Sequence
  LRRK2 RNA guide
aagugcucauucuaaaaaaugg

SEQ ID NO: 20568 - RNA, 22 nt, Artificial Sequence
  LRRK2 RNA guide
aaugagcacuucgcccaaacag

SEQ ID NO: 20569 - RNA, 22 nt, Artificial Sequence
  LRRK2 RNA guide
aauggcuccauuuuuuagaaug

SEQ ID NO: 20570 - RNA, 22 nt, Artificial Sequence
  LRRK2 RNA guide
acauucuguuugggcgaagugc

SEQ ID NO: 20571 - RNA, 22 nt, Artificial Sequence
  LRRK2 RNA guide
agaaugagcacuucgcccaaac

SEQ ID NO: 20572 - RNA, 22 nt, Artificial Sequence
  LRRK2 RNA guide
agugcucauucuaaaaaaugga

SEQ ID NO: 20573 - RNA, 22 nt, Artificial Sequence
  LRRK2 RNA guide
auacauucuguuugggcgaagu

SEQ ID NO: 20574 - RNA, 22 nt, Artificial Sequence
  LRRK2 RNA guide
augagcacuucgcccaaacaga

SEQ ID NO: 20575 - RNA, 22 nt, Artificial Sequence
  LRRK2 RNA guide
auggcuccauuuuuuagaauga

SEQ ID NO: 20576 - RNA, 22 nt, Artificial Sequence
  LRRK2 RNA guide
auucuguuugggcgaagugcuc

SEQ ID NO: 20577 - RNA, 22 nt, Artificial Sequence
  LRRK2 RNA guide
auuuuuuagaaugagcacuucg

SEQ ID NO: 20578 - RNA, 22 nt, Artificial Sequence
  LRRK2 RNA guide
cauucuaaaaaauggagccauu

SEQ ID NO: 20579 - RNA, 22 nt, Artificial Sequence
  LRRK2 RNA guide
cauucuguuugggcgaagugcu

SEQ ID NO: 20580 - RNA, 22 nt, Artificial Sequence
  LRRK2 RNA guide
cauuuuuuagaaugagcacuuc

SEQ ID NO: 20581 - RNA, 22 nt, Artificial Sequence
  LRRK2 RNA guide
ccauuuuuuagaaugagcacuu

SEQ ID NO: 20582 - RNA, 22 nt, Artificial Sequence
  LRRK2 RNA guide
cgaagugcucauucuaaaaaau

SEQ ID NO: 20583 - RNA, 22 nt, Artificial Sequence
  LRRK2 RNA guide
cucauucuaaaaaauggagcca

SEQ ID NO: 20584 - RNA, 22 nt, Artificial Sequence
  LRRK2 RNA guide
cuccauuuuuuagaaugagcac

SEQ ID NO: 20585 - RNA, 22 nt, Artificial Sequence
  LRRK2 RNA guide
cuguuugggcgaagugcucauu

SEQ ID NO: 20586 - RNA, 22 nt, Artificial Sequence
  LRRK2 RNA guide
gaagugcucauucuaaaaaaug

SEQ ID NO: 20587 - RNA, 22 nt, Artificial Sequence
  LRRK2 RNA guide
gaaugagcacuucgcccaaaca

SEQ ID NO: 20588 - RNA, 22 nt, Artificial Sequence
  LRRK2 RNA guide
gcgaagugcucauucuaaaaaa

SEQ ID NO: 20589 - RNA, 22 nt, Artificial Sequence
  LRRK2 RNA guide
gcucauucuaaaaaauggagcc

SEQ ID NO: 20590 - RNA, 22 nt, Artificial Sequence
  LRRK2 RNA guide
gcuccauuuuuuagaaugagca

SEQ ID NO: 20591 - RNA, 22 nt, Artificial Sequence
  LRRK2 RNA guide
ggcgaagugcucauucuaaaaa

SEQ ID NO: 20592 - RNA, 22 nt, Artificial Sequence
  LRRK2 RNA guide
ggcuccauuuuuuagaaugagc

SEQ ID NO: 20593 - RNA, 22 nt, Artificial Sequence
  LRRK2 RNA guide
gggcgaagugcucauucuaaaa

SEQ ID NO: 20594 - RNA, 22 nt, Artificial Sequence
  LRRK2 RNA guide
gugcucauucuaaaaaauggag

SEQ ID NO: 20595 - RNA, 22 nt, Artificial Sequence
  LRRK2 RNA guide
guuugggcgaagugcucauucu

SEQ ID NO: 20596 - RNA, 22 nt, Artificial Sequence
  LRRK2 RNA guide
uacauucuguuugggcgaagug

SEQ ID NO: 20597 - RNA, 22 nt, Artificial Sequence
  LRRK2 RNA guide
uagaaugagcacuucgcccaaa

SEQ ID NO: 20598 - RNA, 22 nt, Artificial Sequence
  LRRK2 RNA guide
ucauucuaaaaaauggagccau

SEQ ID NO: 20599 - RNA, 22 nt, Artificial Sequence
  LRRK2 RNA guide
uccauuuuuuagaaugagcacu

SEQ ID NO: 20600 - RNA, 22 nt, Artificial Sequence
  LRRK2 RNA guide
ucuguuugggcgaagugcucau

SEQ ID NO: 20601 - RNA, 22 nt, Artificial Sequence
  LRRK2 RNA guide
ugcucauucuaaaaaauggagc

SEQ ID NO: 20602 - RNA, 22 nt, Artificial Sequence
  LRRK2 RNA guide
uggcuccauuuuuuagaaugag

SEQ ID NO: 20603 - RNA, 22 nt, Artificial Sequence
  LRRK2 RNA guide
ugggcgaagugcucauucuaaa

SEQ ID NO: 20604 - RNA, 22 nt, Artificial Sequence
  LRRK2 RNA guide
uguuugggcgaagugcucauuc

SEQ ID NO: 20605 - RNA, 22 nt, Artificial Sequence
  LRRK2 RNA guide
uuagaaugagcacuucgcccaa

SEQ ID NO: 20606 - RNA, 22 nt, Artificial Sequence
  LRRK2 RNA guide
uucuguuugggcgaagugcuca

SEQ ID NO: 20607 - RNA, 22 nt, Artificial Sequence
  LRRK2 RNA guide
uugggcgaagugcucauucuaa

SEQ ID NO: 20608 - RNA, 22 nt, Artificial Sequence
  LRRK2 RNA guide
uuuagaaugagcacuucgccca

SEQ ID NO: 20609 - RNA, 22 nt, Artificial Sequence
  LRRK2 RNA guide
uuugggcgaagugcucauucua

SEQ ID NO: 20610 - RNA, 22 nt, Artificial Sequence
  LRRK2 RNA guide
uuuuagaaugagcacuucgccc

SEQ ID NO: 20611 - RNA, 22 nt, Artificial Sequence
  LRRK2 RNA guide
uuuuuagaaugagcacuucgcc

SEQ ID NO: 20612 - RNA, 22 nt, Artificial Sequence
  LRRK2 RNA guide
uuuuuuagaaugagcacuucgc

SEQ ID NO: 20613 - RNA, 20 nt, Artificial Sequence
  LRRK2 RNA guide
aacaagcacuucgcccaaac

SEQ ID NO: 20614 - RNA, 20 nt, Artificial Sequence
  LRRK2 RNA guide
acaagcacuucgcccaaaca

SEQ ID NO: 20615 - RNA, 20 nt, Artificial Sequence
  LRRK2 RNA guide
agaacaagcacuucgcccaa

SEQ ID NO: 20616 - RNA, 20 nt, Artificial Sequence
  LRRK2 RNA guide
agugcuuguucuaaaaaaug

SEQ ID NO: 20617 - RNA, 20 nt, Artificial Sequence
  LRRK2 RNA guide
auggcuccauuuuuuagaac

SEQ ID NO: 20618 - RNA, 20 nt, Artificial Sequence
  LRRK2 RNA guide
caagcacuucgcccaaacag

SEQ ID NO: 20619 - RNA, 20 nt, Artificial Sequence
  LRRK2 RNA guide
cauuuuuuagaacaagcacu

SEQ ID NO: 20620 - RNA, 20 nt, Artificial Sequence
  LRRK2 RNA guide
ccauuuuuuagaacaagcac

SEQ ID NO: 20621 - RNA, 20 nt, Artificial Sequence
  LRRK2 RNA guide
cgaagugcuuguucuaaaaa

SEQ ID NO: 20622 - RNA, 20 nt, Artificial Sequence
  LRRK2 RNA guide
cuccauuuuuuagaacaagc

SEQ ID NO: 20623 - RNA, 20 nt, Artificial Sequence
  LRRK2 RNA guide
cuguuugggcgaagugcuug

SEQ ID NO: 20624 - RNA, 20 nt, Artificial Sequence
  LRRK2 RNA guide
cuuguucuaaaaaauggagc

SEQ ID NO: 20625 - RNA, 20 nt, Artificial Sequence
  LRRK2 RNA guide
gaacaagcacuucgcccaaa

SEQ ID NO: 20626 - RNA, 20 nt, Artificial Sequence
  LRRK2 RNA guide
gaagugcuuguucuaaaaaa

SEQ ID NO: 20627 - RNA, 20 nt, Artificial Sequence
  LRRK2 RNA guide
gcgaagugcuuguucuaaaa

SEQ ID NO: 20628 - RNA, 20 nt, Artificial Sequence
  LRRK2 RNA guide
gcuccauuuuuuagaacaag

SEQ ID NO: 20629 - RNA, 20 nt, Artificial Sequence
  LRRK2 RNA guide
gcuuguucuaaaaaauggag

SEQ ID NO: 20630 - RNA, 20 nt, Artificial Sequence
  LRRK2 RNA guide
ggcgaagugcuuguucuaaa

SEQ ID NO: 20631 - RNA, 20 nt, Artificial Sequence
  LRRK2 RNA guide
ggcuccauuuuuuagaacaa

SEQ ID NO: 20632 - RNA, 20 nt, Artificial Sequence
  LRRK2 RNA guide
gggcgaagugcuuguucuaa

SEQ ID NO: 20633 - RNA, 20 nt, Artificial Sequence
  LRRK2 RNA guide
gugcuuguucuaaaaaaugg

SEQ ID NO: 20634 - RNA, 20 nt, Artificial Sequence
  LRRK2 RNA guide
guuugggcgaagugcuuguu

SEQ ID NO: 20635 - RNA, 20 nt, Artificial Sequence
  LRRK2 RNA guide
uagaacaagcacuucgccca

SEQ ID NO: 20636 - RNA, 20 nt, Artificial Sequence
  LRRK2 RNA guide
uccauuuuuuagaacaagca

SEQ ID NO: 20637 - RNA, 20 nt, Artificial Sequence
  LRRK2 RNA guide
ucuguuugggcgaagugcuu

SEQ ID NO: 20638 - RNA, 20 nt, Artificial Sequence
  LRRK2 RNA guide
ugcuuguucuaaaaaaugga

SEQ ID NO: 20639 - RNA, 20 nt, Artificial Sequence
  LRRK2 RNA guide
uggcuccauuuuuuagaaca

SEQ ID NO: 20640 - RNA, 20 nt, Artificial Sequence
  LRRK2 RNA guide
ugggcgaagugcuuguucua

SEQ ID NO: 20641 - RNA, 20 nt, Artificial Sequence
  LRRK2 RNA guide
uguuugggcgaagugcuugu

SEQ ID NO: 20642 - RNA, 20 nt, Artificial Sequence
  LRRK2 RNA guide
uuagaacaagcacuucgccc

SEQ ID NO: 20643 - RNA, 20 nt, Artificial Sequence
  LRRK2 RNA guide
uugggcgaagugcuuguucu

SEQ ID NO: 20644 - RNA, 20 nt, Artificial Sequence
  LRRK2 RNA guide
uuguucuaaaaaauggagcc

SEQ ID NO: 20645 - RNA, 20 nt, Artificial Sequence
  LRRK2 RNA guide
uuuagaacaagcacuucgcc

SEQ ID NO: 20646 - RNA, 20 nt, Artificial Sequence
  LRRK2 RNA guide
uuugggcgaagugcuuguuc

SEQ ID NO: 20647 - RNA, 20 nt, Artificial Sequence
  LRRK2 RNA guide
uuuuagaacaagcacuucgc

SEQ ID NO: 20648 - RNA, 20 nt, Artificial Sequence
  LRRK2 RNA guide
uuuuuagaacaagcacuucg

SEQ ID NO: 20649 - RNA, 20 nt, Artificial Sequence
  LRRK2 RNA guide
uuuuuuagaacaagcacuuc

SEQ ID NO: 20650 - RNA, 21 nt, Artificial Sequence
  LRRK2 RNA guide
aacaagcacuucgcccaaaca

SEQ ID NO: 20651 - RNA, 21 nt, Artificial Sequence
  LRRK2 RNA guide
aauggcuccauuuuuuagaac

SEQ ID NO: 20652 - RNA, 21 nt, Artificial Sequence
  LRRK2 RNA guide
acaagcacuucgcccaaacag

SEQ ID NO: 20653 - RNA, 21 nt, Artificial Sequence
  LRRK2 RNA guide
agaacaagcacuucgcccaaa

SEQ ID NO: 20654 - RNA, 21 nt, Artificial Sequence
  LRRK2 RNA guide
agugcuuguucuaaaaaaugg

SEQ ID NO: 20655 - RNA, 21 nt, Artificial Sequence
  LRRK2 RNA guide
auacauucuguuugggcgaag

SEQ ID NO: 20656 - RNA, 21 nt, Artificial Sequence
  LRRK2 RNA guide
auggcuccauuuuuuagaaca

SEQ ID NO: 20657 - RNA, 21 nt, Artificial Sequence
  LRRK2 RNA guide
caagcacuucgcccaaacaga

SEQ ID NO: 20658 - RNA, 21 nt, Artificial Sequence
  LRRK2 RNA guide
ccauuuuuuagaacaagcacu

SEQ ID NO: 20659 - RNA, 21 nt, Artificial Sequence
  LRRK2 RNA guide
cgaagugcuuguucuaaaaaa

SEQ ID NO: 20660 - RNA, 21 nt, Artificial Sequence
  LRRK2 RNA guide
cuccauuuuuuagaacaagca

SEQ ID NO: 20661 - RNA, 21 nt, Artificial Sequence
  LRRK2 RNA guide
cuguuugggcgaagugcuugu

SEQ ID NO: 20662 - RNA, 21 nt, Artificial Sequence
  LRRK2 RNA guide
cuuguucuaaaaaauggagcc

SEQ ID NO: 20663 - RNA, 21 nt, Artificial Sequence
  LRRK2 RNA guide
gaacaagcacuucgcccaaac

SEQ ID NO: 20664 - RNA, 21 nt, Artificial Sequence
  LRRK2 RNA guide
gcgaagugcuuguucuaaaaa

SEQ ID NO: 20665 - RNA, 21 nt, Artificial Sequence
  LRRK2 RNA guide
gcuccauuuuuuagaacaagc

SEQ ID NO: 20666 - RNA, 21 nt, Artificial Sequence
  LRRK2 RNA guide
gcuuguucuaaaaaauggagc

SEQ ID NO: 20667 - RNA, 21 nt, Artificial Sequence
  LRRK2 RNA guide
ggcgaagugcuuguucuaaaa

SEQ ID NO: 20668 - RNA, 21 nt, Artificial Sequence
  LRRK2 RNA guide
ggcuccauuuuuuagaacaag

SEQ ID NO: 20669 - RNA, 21 nt, Artificial Sequence
  LRRK2 RNA guide
gggcgaagugcuuguucuaaa

SEQ ID NO: 20670 - RNA, 21 nt, Artificial Sequence
  LRRK2 RNA guide
gugcuuguucuaaaaaaugga

SEQ ID NO: 20671 - RNA, 21 nt, Artificial Sequence
  LRRK2 RNA guide
guuugggcgaagugcuuguuc

SEQ ID NO: 20672 - RNA, 21 nt, Artificial Sequence
  LRRK2 RNA guide
uagaacaagcacuucgcccaa

SEQ ID NO: 20673 - RNA, 21 nt, Artificial Sequence
  LRRK2 RNA guide
uccauuuuuuagaacaagcac

SEQ ID NO: 20674 - RNA, 21 nt, Artificial Sequence
  LRRK2 RNA guide
ucuguuugggcgaagugcuug

SEQ ID NO: 20675 - RNA, 21 nt, Artificial Sequence
  LRRK2 RNA guide
ugcuuguucuaaaaaauggag

SEQ ID NO: 20676 - RNA, 21 nt, Artificial Sequence
  LRRK2 RNA guide
uggcuccauuuuuuagaacaa

SEQ ID NO: 20677 - RNA, 21 nt, Artificial Sequence
  LRRK2 RNA guide
ugggcgaagugcuuguucuaa

SEQ ID NO: 20678 - RNA, 21 nt, Artificial Sequence
  LRRK2 RNA guide
uguuugggcgaagugcuuguu

SEQ ID NO: 20679 - RNA, 21 nt, Artificial Sequence
  LRRK2 RNA guide
uuagaacaagcacuucgccca

SEQ ID NO: 20680 - RNA, 21 nt, Artificial Sequence
  LRRK2 RNA guide
uucuguuugggcgaagugcuu

SEQ ID NO: 20681 - RNA, 21 nt, Artificial Sequence
  LRRK2 RNA guide
uugggcgaagugcuuguucua

SEQ ID NO: 20682 - RNA, 21 nt, Artificial Sequence
  LRRK2 RNA guide
uuguucuaaaaaauggagcca

SEQ ID NO: 20683 - RNA, 21 nt, Artificial Sequence
  LRRK2 RNA guide
uuuagaacaagcacuucgccc

SEQ ID NO: 20684 - RNA, 21 nt, Artificial Sequence
  LRRK2 RNA guide
uuugggcgaagugcuuguucu

SEQ ID NO: 20685 - RNA, 21 nt, Artificial Sequence
  LRRK2 RNA guide
uuuuagaacaagcacuucgcc

SEQ ID NO: 20686 - RNA, 21 nt, Artificial Sequence
  LRRK2 RNA guide
uuuuuagaacaagcacuucgc

SEQ ID NO: 20687 - RNA, 21 nt, Artificial Sequence
  LRRK2 RNA guide
uuuuuuagaacaagcacuucg

SEQ ID NO: 20688 - RNA, 22 nt, Artificial Sequence
  LRRK2 RNA guide
aacaagcacuucgcccaaacag

SEQ ID NO: 20689 - RNA, 22 nt, Artificial Sequence
  LRRK2 RNA guide
aagugcuuguucuaaaaaaugg

SEQ ID NO: 20690 - RNA, 22 nt, Artificial Sequence
  LRRK2 RNA guide
aauacauucuguuugggcgaag

SEQ ID NO: 20691 - RNA, 22 nt, Artificial Sequence
  LRRK2 RNA guide
aauggcuccauuuuuuagaaca

SEQ ID NO: 20692 - RNA, 22 nt, Artificial Sequence
  LRRK2 RNA guide
acaagcacuucgcccaaacaga

SEQ ID NO: 20693 - RNA, 22 nt, Artificial Sequence
  LRRK2 RNA guide
agaacaagcacuucgcccaaac

SEQ ID NO: 20694 - RNA, 22 nt, Artificial Sequence
  LRRK2 RNA guide
agugcuuguucuaaaaaaugga

SEQ ID NO: 20695 - RNA, 22 nt, Artificial Sequence
  LRRK2 RNA guide
auggcuccauuuuuuagaacaa

SEQ ID NO: 20696 - RNA, 22 nt, Artificial Sequence
  LRRK2 RNA guide
auucuguuugggcgaagugcuu

SEQ ID NO: 20697 - RNA, 22 nt, Artificial Sequence
  LRRK2 RNA guide
auuuuuuagaacaagcacuucg

SEQ ID NO: 20698 - RNA, 22 nt, Artificial Sequence
  LRRK2 RNA guide
caagcacuucgcccaaacagaa

SEQ ID NO: 20699 - RNA, 22 nt, Artificial Sequence
  LRRK2 RNA guide
cauuuuuuagaacaagcacuuc

SEQ ID NO: 20700 - RNA, 22 nt, Artificial Sequence
  LRRK2 RNA guide
ccauuuuuuagaacaagcacuu

SEQ ID NO: 20701 - RNA, 22 nt, Artificial Sequence
  LRRK2 RNA guide
cgaagugcuuguucuaaaaaau

SEQ ID NO: 20702 - RNA, 22 nt, Artificial Sequence
  LRRK2 RNA guide
cuccauuuuuuagaacaagcac

SEQ ID NO: 20703 - RNA, 22 nt, Artificial Sequence
  LRRK2 RNA guide
cuguuugggcgaagugcuuguu

SEQ ID NO: 20704 - RNA, 22 nt, Artificial Sequence
  LRRK2 RNA guide
cuuguucuaaaaaauggagcca

SEQ ID NO: 20705 - RNA, 22 nt, Artificial Sequence
  LRRK2 RNA guide
gaacaagcacuucgcccaaaca

SEQ ID NO: 20706 - RNA, 22 nt, Artificial Sequence
  LRRK2 RNA guide
gaagugcuuguucuaaaaaaug

SEQ ID NO: 20707 - RNA, 22 nt, Artificial Sequence
  LRRK2 RNA guide
gcgaagugcuuguucuaaaaaa

SEQ ID NO: 20708 - RNA, 22 nt, Artificial Sequence
  LRRK2 RNA guide
gcuccauuuuuuagaacaagca

SEQ ID NO: 20709 - RNA, 22 nt, Artificial Sequence
  LRRK2 RNA guide
gcuuguucuaaaaaauggagcc

SEQ ID NO: 20710 - RNA, 22 nt, Artificial Sequence
  LRRK2 RNA guide
ggcgaagugcuuguucuaaaaa

SEQ ID NO: 20711 - RNA, 22 nt, Artificial Sequence
  LRRK2 RNA guide
ggcuccauuuuuuagaacaagc

SEQ ID NO: 20712 - RNA, 22 nt, Artificial Sequence
  LRRK2 RNA guide
gggcgaagugcuuguucuaaaa

SEQ ID NO: 20713 - RNA, 22 nt, Artificial Sequence
  LRRK2 RNA guide
gugcuuguucuaaaaaauggag

SEQ ID NO: 20714 - RNA, 22 nt, Artificial Sequence
  LRRK2 RNA guide
guuugggcgaagugcuuguucu

SEQ ID NO: 20715 - RNA, 22 nt, Artificial Sequence
  LRRK2 RNA guide
uaauggcuccauuuuuuagaac

SEQ ID NO: 20716 - RNA, 22 nt, Artificial Sequence
  LRRK2 RNA guide
uagaacaagcacuucgcccaaa

SEQ ID NO: 20717 - RNA, 22 nt, Artificial Sequence
  LRRK2 RNA guide
uccauuuuuuagaacaagcacu

SEQ ID NO: 20718 - RNA, 22 nt, Artificial Sequence
  LRRK2 RNA guide
ucuguuugggcgaagugcuugu

SEQ ID NO: 20719 - RNA, 22 nt, Artificial Sequence
  LRRK2 RNA guide
ugcuuguucuaaaaaauggagc

SEQ ID NO: 20720 - RNA, 22 nt, Artificial Sequence
  LRRK2 RNA guide
uggcuccauuuuuuagaacaag

SEQ ID NO: 20721 - RNA, 22 nt, Artificial Sequence
  LRRK2 RNA guide
ugggcgaagugcuuguucuaaa

SEQ ID NO: 20722 - RNA, 22 nt, Artificial Sequence
  LRRK2 RNA guide
uguuugggcgaagugcuuguuc

SEQ ID NO: 20723 - RNA, 22 nt, Artificial Sequence
  LRRK2 RNA guide
uuagaacaagcacuucgcccaa

SEQ ID NO: 20724 - RNA, 22 nt, Artificial Sequence
  LRRK2 RNA guide
uucuguuugggcgaagugcuug

SEQ ID NO: 20725 - RNA, 22 nt, Artificial Sequence
  LRRK2 RNA guide
uugggcgaagugcuuguucuaa

SEQ ID NO: 20726 - RNA, 22 nt, Artificial Sequence
  LRRK2 RNA guide
uuguucuaaaaaauggagccau

SEQ ID NO: 20727 - RNA, 22 nt, Artificial Sequence
  LRRK2 RNA guide
uuuagaacaagcacuucgccca

SEQ ID NO: 20728 - RNA, 22 nt, Artificial Sequence
  LRRK2 RNA guide
uuugggcgaagugcuuguucua

SEQ ID NO: 20729 - RNA, 22 nt, Artificial Sequence
  LRRK2 RNA guide
uuuuagaacaagcacuucgccc

SEQ ID NO: 20730 - RNA, 22 nt, Artificial Sequence
  LRRK2 RNA guide
uuuuuagaacaagcacuucgcc

SEQ ID NO: 20731 - RNA, 22 nt, Artificial Sequence
  LRRK2 RNA guide
uuuuuuagaacaagcacuucgc

SEQ ID NO: 20732 - RNA, 20 nt, Artificial Sequence
  LRRK2 RNA guide
aacgagcacuucacccaaac

SEQ ID NO: 20733 - RNA, 20 nt, Artificial Sequence
  LRRK2 RNA guide
aauacauucuguuuggguga

SEQ ID NO: 20734 - RNA, 20 nt, Artificial Sequence
  LRRK2 RNA guide
acauucuguuugggugaagu

SEQ ID NO: 20735 - RNA, 20 nt, Artificial Sequence
  LRRK2 RNA guide
acgagcacuucacccaaaca

SEQ ID NO: 20736 - RNA, 20 nt, Artificial Sequence
  LRRK2 RNA guide
acuucacccaaacagaaugu

SEQ ID NO: 20737 - RNA, 20 nt, Artificial Sequence
  LRRK2 RNA guide
agaacgagcacuucacccaa

SEQ ID NO: 20738 - RNA, 20 nt, Artificial Sequence
  LRRK2 RNA guide
agcacuucacccaaacagaa

SEQ ID NO: 20739 - RNA, 20 nt, Artificial Sequence
  LRRK2 RNA guide
auacauucuguuugggugaa

SEQ ID NO: 20740 - RNA, 20 nt, Artificial Sequence
  LRRK2 RNA guide
auucuguuugggugaagugc

SEQ ID NO: 20741 - RNA, 20 nt, Artificial Sequence
  LRRK2 RNA guide
auuuuuuagaacgagcacuu

SEQ ID NO: 20742 - RNA, 20 nt, Artificial Sequence
  LRRK2 RNA guide
caauacauucuguuugggug

SEQ ID NO: 20743 - RNA, 20 nt, Artificial Sequence
  LRRK2 RNA guide
cacccaaacagaauguauug

SEQ ID NO: 20744 - RNA, 20 nt, Artificial Sequence
  LRRK2 RNA guide
cacuucacccaaacagaaug

SEQ ID NO: 20745 - RNA, 20 nt, Artificial Sequence
  LRRK2 RNA guide
cauucuguuugggugaagug

SEQ ID NO: 20746 - RNA, 20 nt, Artificial Sequence
  LRRK2 RNA guide
cauuuuuuagaacgagcacu

SEQ ID NO: 20747 - RNA, 20 nt, Artificial Sequence
  LRRK2 RNA guide
ccaauacauucuguuugggu

SEQ ID NO: 20748 - RNA, 20 nt, Artificial Sequence
  LRRK2 RNA guide
ccauuuuuuagaacgagcac

SEQ ID NO: 20749 - RNA, 20 nt, Artificial Sequence
  LRRK2 RNA guide
cgagcacuucacccaaacag

SEQ ID NO: 20750 - RNA, 20 nt, Artificial Sequence
  LRRK2 RNA guide
cuguuugggugaagugcucg

SEQ ID NO: 20751 - RNA, 20 nt, Artificial Sequence
  LRRK2 RNA guide
cuucacccaaacagaaugua

SEQ ID NO: 20752 - RNA, 20 nt, Artificial Sequence
  LRRK2 RNA guide
gaacgagcacuucacccaaa

SEQ ID NO: 20753 - RNA, 20 nt, Artificial Sequence
  LRRK2 RNA guide
gagcacuucacccaaacaga

SEQ ID NO: 20754 - RNA, 20 nt, Artificial Sequence
  LRRK2 RNA guide
gcacuucacccaaacagaau

SEQ ID NO: 20755 - RNA, 20 nt, Artificial Sequence
  LRRK2 RNA guide
gggugaagugcucguucuaa

SEQ ID NO: 20756 - RNA, 20 nt, Artificial Sequence
  LRRK2 RNA guide
ggugaagugcucguucuaaa

SEQ ID NO: 20757 - RNA, 20 nt, Artificial Sequence
  LRRK2 RNA guide
gugaagugcucguucuaaaa

SEQ ID NO: 20758 - RNA, 20 nt, Artificial Sequence
  LRRK2 RNA guide
guuugggugaagugcucguu

SEQ ID NO: 20759 - RNA, 20 nt, Artificial Sequence
  LRRK2 RNA guide
uacauucuguuugggugaag

SEQ ID NO: 20760 - RNA, 20 nt, Artificial Sequence
  LRRK2 RNA guide
uagaacgagcacuucaccca

SEQ ID NO: 20761 - RNA, 20 nt, Artificial Sequence
  LRRK2 RNA guide
ucacccaaacagaauguauu

SEQ ID NO: 20762 - RNA, 20 nt, Artificial Sequence
  LRRK2 RNA guide
uccauuuuuuagaacgagca

SEQ ID NO: 20763 - RNA, 20 nt, Artificial Sequence
  LRRK2 RNA guide
ucuguuugggugaagugcuc

SEQ ID NO: 20764 - RNA, 20 nt, Artificial Sequence
  LRRK2 RNA guide
ugggugaagugcucguucua

SEQ ID NO: 20765 - RNA, 20 nt, Artificial Sequence
  LRRK2 RNA guide
uguuugggugaagugcucgu

SEQ ID NO: 20766 - RNA, 20 nt, Artificial Sequence
  LRRK2 RNA guide
uuagaacgagcacuucaccc

SEQ ID NO: 20767 - RNA, 20 nt, Artificial Sequence
  LRRK2 RNA guide
uucacccaaacagaauguau

SEQ ID NO: 20768 - RNA, 20 nt, Artificial Sequence
  LRRK2 RNA guide
uucuguuugggugaagugcu

SEQ ID NO: 20769 - RNA, 20 nt, Artificial Sequence
  LRRK2 RNA guide
uugggugaagugcucguucu

SEQ ID NO: 20770 - RNA, 20 nt, Artificial Sequence
  LRRK2 RNA guide
uuuagaacgagcacuucacc

SEQ ID NO: 20771 - RNA, 20 nt, Artificial Sequence
  LRRK2 RNA guide
uuugggugaagugcucguuc

SEQ ID NO: 20772 - RNA, 20 nt, Artificial Sequence
  LRRK2 RNA guide
uuuuagaacgagcacuucac

SEQ ID NO: 20773 - RNA, 20 nt, Artificial Sequence
  LRRK2 RNA guide
uuuuuagaacgagcacuuca

SEQ ID NO: 20774 - RNA, 20 nt, Artificial Sequence
  LRRK2 RNA guide
uuuuuuagaacgagcacuuc

SEQ ID NO: 20775 - RNA, 21 nt, Artificial Sequence
  LRRK2 RNA guide
aacgagcacuucacccaaaca

SEQ ID NO: 20776 - RNA, 21 nt, Artificial Sequence
  LRRK2 RNA guide
aauacauucuguuugggugaa

SEQ ID NO: 20777 - RNA, 21 nt, Artificial Sequence
  LRRK2 RNA guide
acauucuguuugggugaagug

SEQ ID NO: 20778 - RNA, 21 nt, Artificial Sequence
  LRRK2 RNA guide
acgagcacuucacccaaacag

SEQ ID NO: 20779 - RNA, 21 nt, Artificial Sequence
  LRRK2 RNA guide
acuucacccaaacagaaugua

SEQ ID NO: 20780 - RNA, 21 nt, Artificial Sequence
  LRRK2 RNA guide
agaacgagcacuucacccaaa

SEQ ID NO: 20781 - RNA, 21 nt, Artificial Sequence
  LRRK2 RNA guide
agcacuucacccaaacagaau

SEQ ID NO: 20782 - RNA, 21 nt, Artificial Sequence
  LRRK2 RNA guide
auacauucuguuugggugaag

SEQ ID NO: 20783 - RNA, 21 nt, Artificial Sequence
  LRRK2 RNA guide
auucuguuugggugaagugcu

SEQ ID NO: 20784 - RNA, 21 nt, Artificial Sequence
  LRRK2 RNA guide
auuuuuuagaacgagcacuuc

SEQ ID NO: 20785 - RNA, 21 nt, Artificial Sequence
  LRRK2 RNA guide
caauacauucuguuuggguga

SEQ ID NO: 20786 - RNA, 21 nt, Artificial Sequence
  LRRK2 RNA guide
cacccaaacagaauguauugg

SEQ ID NO: 20787 - RNA, 21 nt, Artificial Sequence
  LRRK2 RNA guide
cacuucacccaaacagaaugu

SEQ ID NO: 20788 - RNA, 21 nt, Artificial Sequence
  LRRK2 RNA guide
cauucuguuugggugaagugc

SEQ ID NO: 20789 - RNA, 21 nt, Artificial Sequence
  LRRK2 RNA guide
cauuuuuuagaacgagcacuu

SEQ ID NO: 20790 - RNA, 21 nt, Artificial Sequence
  LRRK2 RNA guide
ccaauacauucuguuugggug

SEQ ID NO: 20791 - RNA, 21 nt, Artificial Sequence
  LRRK2 RNA guide
ccauuuuuuagaacgagcacu

SEQ ID NO: 20792 - RNA, 21 nt, Artificial Sequence
  LRRK2 RNA guide
cgagcacuucacccaaacaga

SEQ ID NO: 20793 - RNA, 21 nt, Artificial Sequence
  LRRK2 RNA guide
cgccaauacauucuguuuggg

SEQ ID NO: 20794 - RNA, 21 nt, Artificial Sequence
  LRRK2 RNA guide
cuccauuuuuuagaacgagca

SEQ ID NO: 20795 - RNA, 21 nt, Artificial Sequence
  LRRK2 RNA guide
cuguuugggugaagugcucgu

SEQ ID NO: 20796 - RNA, 21 nt, Artificial Sequence
  LRRK2 RNA guide
cuucacccaaacagaauguau

SEQ ID NO: 20797 - RNA, 21 nt, Artificial Sequence
  LRRK2 RNA guide
gaacgagcacuucacccaaac

SEQ ID NO: 20798 - RNA, 21 nt, Artificial Sequence
  LRRK2 RNA guide
gagcacuucacccaaacagaa

SEQ ID NO: 20799 - RNA, 21 nt, Artificial Sequence
  LRRK2 RNA guide
gcacuucacccaaacagaaug

SEQ ID NO: 20800 - RNA, 21 nt, Artificial Sequence
  LRRK2 RNA guide
gccaauacauucuguuugggu

SEQ ID NO: 20801 - RNA, 21 nt, Artificial Sequence
  LRRK2 RNA guide
gggugaagugcucguucuaaa

SEQ ID NO: 20802 - RNA, 21 nt, Artificial Sequence
  LRRK2 RNA guide
ggugaagugcucguucuaaaa

SEQ ID NO: 20803 - RNA, 21 nt, Artificial Sequence
  LRRK2 RNA guide
gucgccaauacauucuguuug

SEQ ID NO: 20804 - RNA, 21 nt, Artificial Sequence
  LRRK2 RNA guide
gugaagugcucguucuaaaaa

SEQ ID NO: 20805 - RNA, 21 nt, Artificial Sequence
  LRRK2 RNA guide
guuugggugaagugcucguuc

SEQ ID NO: 20806 - RNA, 21 nt, Artificial Sequence
  LRRK2 RNA guide
uacauucuguuugggugaagu

SEQ ID NO: 20807 - RNA, 21 nt, Artificial Sequence
  LRRK2 RNA guide
uagaacgagcacuucacccaa

SEQ ID NO: 20808 - RNA, 21 nt, Artificial Sequence
  LRRK2 RNA guide
ucacccaaacagaauguauug

SEQ ID NO: 20809 - RNA, 21 nt, Artificial Sequence
  LRRK2 RNA guide
uccauuuuuuagaacgagcac

SEQ ID NO: 20810 - RNA, 21 nt, Artificial Sequence
  LRRK2 RNA guide
ucgccaauacauucuguuugg

SEQ ID NO: 20811 - RNA, 21 nt, Artificial Sequence
  LRRK2 RNA guide
ucuguuugggugaagugcucg

SEQ ID NO: 20812 - RNA, 21 nt, Artificial Sequence
  LRRK2 RNA guide
ugggugaagugcucguucuaa

SEQ ID NO: 20813 - RNA, 21 nt, Artificial Sequence
  LRRK2 RNA guide
ugucgccaauacauucuguuu

SEQ ID NO: 20814 - RNA, 21 nt, Artificial Sequence
  LRRK2 RNA guide
uguuugggugaagugcucguu

SEQ ID NO: 20815 - RNA, 21 nt, Artificial Sequence
  LRRK2 RNA guide
uuagaacgagcacuucaccca

SEQ ID NO: 20816 - RNA, 21 nt, Artificial Sequence
  LRRK2 RNA guide
uucacccaaacagaauguauu

SEQ ID NO: 20817 - RNA, 21 nt, Artificial Sequence
  LRRK2 RNA guide
uucuguuugggugaagugcuc

SEQ ID NO: 20818 - RNA, 21 nt, Artificial Sequence
  LRRK2 RNA guide
uugggugaagugcucguucua

SEQ ID NO: 20819 - RNA, 21 nt, Artificial Sequence
  LRRK2 RNA guide
uugucgccaauacauucuguu

SEQ ID NO: 20820 - RNA, 21 nt, Artificial Sequence
  LRRK2 RNA guide
uuuagaacgagcacuucaccc

SEQ ID NO: 20821 - RNA, 21 nt, Artificial Sequence
  LRRK2 RNA guide
uuugggugaagugcucguucu

SEQ ID NO: 20822 - RNA, 21 nt, Artificial Sequence
  LRRK2 RNA guide
uuuuagaacgagcacuucacc

SEQ ID NO: 20823 - RNA, 21 nt, Artificial Sequence
  LRRK2 RNA guide
uuuuuagaacgagcacuucac

SEQ ID NO: 20824 - RNA, 21 nt, Artificial Sequence
  LRRK2 RNA guide
uuuuuuagaacgagcacuuca

SEQ ID NO: 20825 - RNA, 22 nt, Artificial Sequence
  LRRK2 RNA guide
aacgagcacuucacccaaacag

SEQ ID NO: 20826 - RNA, 22 nt, Artificial Sequence
  LRRK2 RNA guide
aauacauucuguuugggugaag

SEQ ID NO: 20827 - RNA, 22 nt, Artificial Sequence
  LRRK2 RNA guide
acauucuguuugggugaagugc

SEQ ID NO: 20828 - RNA, 22 nt, Artificial Sequence
  LRRK2 RNA guide
acgagcacuucacccaaacaga

SEQ ID NO: 20829 - RNA, 22 nt, Artificial Sequence
  LRRK2 RNA guide
acuucacccaaacagaauguau

SEQ ID NO: 20830 - RNA, 22 nt, Artificial Sequence
  LRRK2 RNA guide
agaacgagcacuucacccaaac

SEQ ID NO: 20831 - RNA, 22 nt, Artificial Sequence
  LRRK2 RNA guide
agcacuucacccaaacagaaug

SEQ ID NO: 20832 - RNA, 22 nt, Artificial Sequence
  LRRK2 RNA guide
auacauucuguuugggugaagu

SEQ ID NO: 20833 - RNA, 22 nt, Artificial Sequence
  LRRK2 RNA guide
auucuguuugggugaagugcuc

SEQ ID NO: 20834 - RNA, 22 nt, Artificial Sequence
  LRRK2 RNA guide
auuuuuuagaacgagcacuuca

SEQ ID NO: 20835 - RNA, 22 nt, Artificial Sequence
  LRRK2 RNA guide
caauacauucuguuugggugaa

SEQ ID NO: 20836 - RNA, 22 nt, Artificial Sequence
  LRRK2 RNA guide
cacccaaacagaauguauuggc

SEQ ID NO: 20837 - RNA, 22 nt, Artificial Sequence
  LRRK2 RNA guide
cacuucacccaaacagaaugua

SEQ ID NO: 20838 - RNA, 22 nt, Artificial Sequence
  LRRK2 RNA guide
cauucuguuugggugaagugcu

SEQ ID NO: 20839 - RNA, 22 nt, Artificial Sequence
  LRRK2 RNA guide
cauuuuuuagaacgagcacuuc

SEQ ID NO: 20840 - RNA, 22 nt, Artificial Sequence
  LRRK2 RNA guide
ccaauacauucuguuuggguga

SEQ ID NO: 20841 - RNA, 22 nt, Artificial Sequence
  LRRK2 RNA guide
ccauuuuuuagaacgagcacuu

SEQ ID NO: 20842 - RNA, 22 nt, Artificial Sequence
  LRRK2 RNA guide
cgagcacuucacccaaacagaa

SEQ ID NO: 20843 - RNA, 22 nt, Artificial Sequence
  LRRK2 RNA guide
cgccaauacauucuguuugggu

SEQ ID NO: 20844 - RNA, 22 nt, Artificial Sequence
  LRRK2 RNA guide
cuccauuuuuuagaacgagcac

SEQ ID NO: 20845 - RNA, 22 nt, Artificial Sequence
  LRRK2 RNA guide
cuguuugggugaagugcucguu

SEQ ID NO: 20846 - RNA, 22 nt, Artificial Sequence
  LRRK2 RNA guide
cuucacccaaacagaauguauu

SEQ ID NO: 20847 - RNA, 22 nt, Artificial Sequence
  LRRK2 RNA guide
cuugucgccaauacauucuguu

SEQ ID NO: 20848 - RNA, 22 nt, Artificial Sequence
  LRRK2 RNA guide
gaacgagcacuucacccaaaca

SEQ ID NO: 20849 - RNA, 22 nt, Artificial Sequence
  LRRK2 RNA guide
gagcacuucacccaaacagaau

SEQ ID NO: 20850 - RNA, 22 nt, Artificial Sequence
  LRRK2 RNA guide
gcacuucacccaaacagaaugu

SEQ ID NO: 20851 - RNA, 22 nt, Artificial Sequence
  LRRK2 RNA guide
gccaauacauucuguuugggug

SEQ ID NO: 20852 - RNA, 22 nt, Artificial Sequence
  LRRK2 RNA guide
gcuccauuuuuuagaacgagca

SEQ ID NO: 20853 - RNA, 22 nt, Artificial Sequence
  LRRK2 RNA guide
gggugaagugcucguucuaaaa

SEQ ID NO: 20854 - RNA, 22 nt, Artificial Sequence
  LRRK2 RNA guide
ggugaagugcucguucuaaaaa

SEQ ID NO: 20855 - RNA, 22 nt, Artificial Sequence
  LRRK2 RNA guide
gucgccaauacauucuguuugg

SEQ ID NO: 20856 - RNA, 22 nt, Artificial Sequence
  LRRK2 RNA guide
gugaagugcucguucuaaaaaa

SEQ ID NO: 20857 - RNA, 22 nt, Artificial Sequence
  LRRK2 RNA guide
guuugggugaagugcucguucu

SEQ ID NO: 20858 - RNA, 22 nt, Artificial Sequence
  LRRK2 RNA guide
uacauucuguuugggugaagug

SEQ ID NO: 20859 - RNA, 22 nt, Artificial Sequence
  LRRK2 RNA guide
uagaacgagcacuucacccaaa

SEQ ID NO: 20860 - RNA, 22 nt, Artificial Sequence
  LRRK2 RNA guide
ucacccaaacagaauguauugg

SEQ ID NO: 20861 - RNA, 22 nt, Artificial Sequence
  LRRK2 RNA guide
uccauuuuuuagaacgagcacu

SEQ ID NO: 20862 - RNA, 22 nt, Artificial Sequence
  LRRK2 RNA guide
ucgccaauacauucuguuuggg

SEQ ID NO: 20863 - RNA, 22 nt, Artificial Sequence
  LRRK2 RNA guide
ucuguuugggugaagugcucgu

SEQ ID NO: 20864 - RNA, 22 nt, Artificial Sequence
  LRRK2 RNA guide
ugggugaagugcucguucuaaa

SEQ ID NO: 20865 - RNA, 22 nt, Artificial Sequence
  LRRK2 RNA guide
ugucgccaauacauucuguuug

SEQ ID NO: 20866 - RNA, 22 nt, Artificial Sequence
  LRRK2 RNA guide
uguuugggugaagugcucguuc

SEQ ID NO: 20867 - RNA, 22 nt, Artificial Sequence
  LRRK2 RNA guide
uuagaacgagcacuucacccaa

SEQ ID NO: 20868 - RNA, 22 nt, Artificial Sequence
  LRRK2 RNA guide
uucacccaaacagaauguauug

SEQ ID NO: 20869 - RNA, 22 nt, Artificial Sequence
  LRRK2 RNA guide
uucuguuugggugaagugcucg

SEQ ID NO: 20870 - RNA, 22 nt, Artificial Sequence
  LRRK2 RNA guide
uugggugaagugcucguucuaa

SEQ ID NO: 20871 - RNA, 22 nt, Artificial Sequence
  LRRK2 RNA guide
uugucgccaauacauucuguuu

SEQ ID NO: 20872 - RNA, 22 nt, Artificial Sequence
  LRRK2 RNA guide
uuuagaacgagcacuucaccca

SEQ ID NO: 20873 - RNA, 22 nt, Artificial Sequence
  LRRK2 RNA guide
uuugggugaagugcucguucua

SEQ ID NO: 20874 - RNA, 22 nt, Artificial Sequence
  LRRK2 RNA guide
uuuuagaacgagcacuucaccc

SEQ ID NO: 20875 - RNA, 22 nt, Artificial Sequence
  LRRK2 RNA guide
uuuuuagaacgagcacuucacc

SEQ ID NO: 20876 - RNA, 22 nt, Artificial Sequence
  LRRK2 RNA guide
uuuuuuagaacgagcacuucac

SEQ ID NO: 20877 - RNA, 20 nt, Artificial Sequence
  LRRK2 RNA guide
aacgagcacuucucccaaac

SEQ ID NO: 20878 - RNA, 20 nt, Artificial Sequence
  LRRK2 RNA guide
aauacauucuguuugggaga

SEQ ID NO: 20879 - RNA, 20 nt, Artificial Sequence
  LRRK2 RNA guide
acauucuguuugggagaagu

SEQ ID NO: 20880 - RNA, 20 nt, Artificial Sequence
  LRRK2 RNA guide
acgagcacuucucccaaaca

SEQ ID NO: 20881 - RNA, 20 nt, Artificial Sequence
  LRRK2 RNA guide
acuucucccaaacagaaugu

SEQ ID NO: 20882 - RNA, 20 nt, Artificial Sequence
  LRRK2 RNA guide
agaacgagcacuucucccaa

SEQ ID NO: 20883 - RNA, 20 nt, Artificial Sequence
  LRRK2 RNA guide
agcacuucucccaaacagaa

SEQ ID NO: 20884 - RNA, 20 nt, Artificial Sequence
  LRRK2 RNA guide
auacauucuguuugggagaa

SEQ ID NO: 20885 - RNA, 20 nt, Artificial Sequence
  LRRK2 RNA guide
auucuguuugggagaagugc

SEQ ID NO: 20886 - RNA, 20 nt, Artificial Sequence
  LRRK2 RNA guide
caauacauucuguuugggag

SEQ ID NO: 20887 - RNA, 20 nt, Artificial Sequence
  LRRK2 RNA guide
cacuucucccaaacagaaug

SEQ ID NO: 20888 - RNA, 20 nt, Artificial Sequence
  LRRK2 RNA guide
cauucuguuugggagaagug

SEQ ID NO: 20889 - RNA, 20 nt, Artificial Sequence
  LRRK2 RNA guide
ccaauacauucuguuuggga

SEQ ID NO: 20890 - RNA, 20 nt, Artificial Sequence
  LRRK2 RNA guide
cgagcacuucucccaaacag

SEQ ID NO: 20891 - RNA, 20 nt, Artificial Sequence
  LRRK2 RNA guide
cucccaaacagaauguauug

SEQ ID NO: 20892 - RNA, 20 nt, Artificial Sequence
  LRRK2 RNA guide
cuguuugggagaagugcucg

SEQ ID NO: 20893 - RNA, 20 nt, Artificial Sequence
  LRRK2 RNA guide
cuucucccaaacagaaugua

SEQ ID NO: 20894 - RNA, 20 nt, Artificial Sequence
  LRRK2 RNA guide
gaacgagcacuucucccaaa

SEQ ID NO: 20895 - RNA, 20 nt, Artificial Sequence
  LRRK2 RNA guide
gagaagugcucguucuaaaa

SEQ ID NO: 20896 - RNA, 20 nt, Artificial Sequence
  LRRK2 RNA guide
gagcacuucucccaaacaga

SEQ ID NO: 20897 - RNA, 20 nt, Artificial Sequence
  LRRK2 RNA guide
gcacuucucccaaacagaau

SEQ ID NO: 20898 - RNA, 20 nt, Artificial Sequence
  LRRK2 RNA guide
ggagaagugcucguucuaaa

SEQ ID NO: 20899 - RNA, 20 nt, Artificial Sequence
  LRRK2 RNA guide
gggagaagugcucguucuaa

SEQ ID NO: 20900 - RNA, 20 nt, Artificial Sequence
  LRRK2 RNA guide
guuugggagaagugcucguu

SEQ ID NO: 20901 - RNA, 20 nt, Artificial Sequence
  LRRK2 RNA guide
uacauucuguuugggagaag

SEQ ID NO: 20902 - RNA, 20 nt, Artificial Sequence
  LRRK2 RNA guide
uagaacgagcacuucuccca

SEQ ID NO: 20903 - RNA, 20 nt, Artificial Sequence
  LRRK2 RNA guide
ucucccaaacagaauguauu

SEQ ID NO: 20904 - RNA, 20 nt, Artificial Sequence
  LRRK2 RNA guide
ucuguuugggagaagugcuc

SEQ ID NO: 20905 - RNA, 20 nt, Artificial Sequence
  LRRK2 RNA guide
ugggagaagugcucguucua

SEQ ID NO: 20906 - RNA, 20 nt, Artificial Sequence
  LRRK2 RNA guide
uguuugggagaagugcucgu

SEQ ID NO: 20907 - RNA, 20 nt, Artificial Sequence
  LRRK2 RNA guide
uuagaacgagcacuucuccc

SEQ ID NO: 20908 - RNA, 20 nt, Artificial Sequence
  LRRK2 RNA guide
uucucccaaacagaauguau

SEQ ID NO: 20909 - RNA, 20 nt, Artificial Sequence
  LRRK2 RNA guide
uucuguuugggagaagugcu

SEQ ID NO: 20910 - RNA, 20 nt, Artificial Sequence
  LRRK2 RNA guide
uugggagaagugcucguucu

SEQ ID NO: 20911 - RNA, 20 nt, Artificial Sequence
  LRRK2 RNA guide
uuuagaacgagcacuucucc

SEQ ID NO: 20912 - RNA, 20 nt, Artificial Sequence
  LRRK2 RNA guide
uuugggagaagugcucguuc

SEQ ID NO: 20913 - RNA, 20 nt, Artificial Sequence
  LRRK2 RNA guide
uuuuagaacgagcacuucuc

SEQ ID NO: 20914 - RNA, 20 nt, Artificial Sequence
  LRRK2 RNA guide
uuuuuagaacgagcacuucu

SEQ ID NO: 20915 - RNA, 21 nt, Artificial Sequence
  LRRK2 RNA guide
aacgagcacuucucccaaaca

SEQ ID NO: 20916 - RNA, 21 nt, Artificial Sequence
  LRRK2 RNA guide
aauacauucuguuugggagaa

SEQ ID NO: 20917 - RNA, 21 nt, Artificial Sequence
  LRRK2 RNA guide
acauucuguuugggagaagug

SEQ ID NO: 20918 - RNA, 21 nt, Artificial Sequence
  LRRK2 RNA guide
acgagcacuucucccaaacag

SEQ ID NO: 20919 - RNA, 21 nt, Artificial Sequence
  LRRK2 RNA guide
acuucucccaaacagaaugua

SEQ ID NO: 20920 - RNA, 21 nt, Artificial Sequence
  LRRK2 RNA guide
agaacgagcacuucucccaaa

SEQ ID NO: 20921 - RNA, 21 nt, Artificial Sequence
  LRRK2 RNA guide
agcacuucucccaaacagaau

SEQ ID NO: 20922 - RNA, 21 nt, Artificial Sequence
  LRRK2 RNA guide
auacauucuguuugggagaag

SEQ ID NO: 20923 - RNA, 21 nt, Artificial Sequence
  LRRK2 RNA guide
auucuguuugggagaagugcu

SEQ ID NO: 20924 - RNA, 21 nt, Artificial Sequence
  LRRK2 RNA guide
caauacauucuguuugggaga

SEQ ID NO: 20925 - RNA, 21 nt, Artificial Sequence
  LRRK2 RNA guide
cacuucucccaaacagaaugu

SEQ ID NO: 20926 - RNA, 21 nt, Artificial Sequence
  LRRK2 RNA guide
cauucuguuugggagaagugc

SEQ ID NO: 20927 - RNA, 21 nt, Artificial Sequence
  LRRK2 RNA guide
ccaauacauucuguuugggag

SEQ ID NO: 20928 - RNA, 21 nt, Artificial Sequence
  LRRK2 RNA guide
cgagcacuucucccaaacaga

SEQ ID NO: 20929 - RNA, 21 nt, Artificial Sequence
  LRRK2 RNA guide
cucccaaacagaauguauugg

SEQ ID NO: 20930 - RNA, 21 nt, Artificial Sequence
  LRRK2 RNA guide
cuguuugggagaagugcucgu

SEQ ID NO: 20931 - RNA, 21 nt, Artificial Sequence
  LRRK2 RNA guide
cuucucccaaacagaauguau

SEQ ID NO: 20932 - RNA, 21 nt, Artificial Sequence
  LRRK2 RNA guide
gaacgagcacuucucccaaac

SEQ ID NO: 20933 - RNA, 21 nt, Artificial Sequence
  LRRK2 RNA guide
gagaagugcucguucuaaaaa

SEQ ID NO: 20934 - RNA, 21 nt, Artificial Sequence
  LRRK2 RNA guide
gagcacuucucccaaacagaa

SEQ ID NO: 20935 - RNA, 21 nt, Artificial Sequence
  LRRK2 RNA guide
gcacuucucccaaacagaaug

SEQ ID NO: 20936 - RNA, 21 nt, Artificial Sequence
  LRRK2 RNA guide
gccaauacauucuguuuggga

SEQ ID NO: 20937 - RNA, 21 nt, Artificial Sequence
  LRRK2 RNA guide
ggagaagugcucguucuaaaa

SEQ ID NO: 20938 - RNA, 21 nt, Artificial Sequence
  LRRK2 RNA guide
gggagaagugcucguucuaaa

SEQ ID NO: 20939 - RNA, 21 nt, Artificial Sequence
  LRRK2 RNA guide
guuugggagaagugcucguuc

SEQ ID NO: 20940 - RNA, 21 nt, Artificial Sequence
  LRRK2 RNA guide
uacauucuguuugggagaagu

SEQ ID NO: 20941 - RNA, 21 nt, Artificial Sequence
  LRRK2 RNA guide
uagaacgagcacuucucccaa

SEQ ID NO: 20942 - RNA, 21 nt, Artificial Sequence
  LRRK2 RNA guide
ucucccaaacagaauguauug

SEQ ID NO: 20943 - RNA, 21 nt, Artificial Sequence
  LRRK2 RNA guide
ucuguuugggagaagugcucg

SEQ ID NO: 20944 - RNA, 21 nt, Artificial Sequence
  LRRK2 RNA guide
ugggagaagugcucguucuaa

SEQ ID NO: 20945 - RNA, 21 nt, Artificial Sequence
  LRRK2 RNA guide
uguuugggagaagugcucguu

SEQ ID NO: 20946 - RNA, 21 nt, Artificial Sequence
  LRRK2 RNA guide
uuagaacgagcacuucuccca

SEQ ID NO: 20947 - RNA, 21 nt, Artificial Sequence
  LRRK2 RNA guide
uucucccaaacagaauguauu

SEQ ID NO: 20948 - RNA, 21 nt, Artificial Sequence
  LRRK2 RNA guide
uucuguuugggagaagugcuc

SEQ ID NO: 20949 - RNA, 21 nt, Artificial Sequence
  LRRK2 RNA guide
uugggagaagugcucguucua

SEQ ID NO: 20950 - RNA, 21 nt, Artificial Sequence
  LRRK2 RNA guide
uuuagaacgagcacuucuccc

SEQ ID NO: 20951 - RNA, 21 nt, Artificial Sequence
  LRRK2 RNA guide
uuugggagaagugcucguucu

SEQ ID NO: 20952 - RNA, 21 nt, Artificial Sequence
  LRRK2 RNA guide
uuuuagaacgagcacuucucc

SEQ ID NO: 20953 - RNA, 21 nt, Artificial Sequence
  LRRK2 RNA guide
uuuuuagaacgagcacuucuc

SEQ ID NO: 20954 - RNA, 21 nt, Artificial Sequence
  LRRK2 RNA guide
uuuuuuagaacgagcacuucu

SEQ ID NO: 20955 - RNA, 22 nt, Artificial Sequence
  LRRK2 RNA guide
aacgagcacuucucccaaacag

SEQ ID NO: 20956 - RNA, 22 nt, Artificial Sequence
  LRRK2 RNA guide
aauacauucuguuugggagaag

SEQ ID NO: 20957 - RNA, 22 nt, Artificial Sequence
  LRRK2 RNA guide
acauucuguuugggagaagugc

SEQ ID NO: 20958 - RNA, 22 nt, Artificial Sequence
  LRRK2 RNA guide
acgagcacuucucccaaacaga

SEQ ID NO: 20959 - RNA, 22 nt, Artificial Sequence
  LRRK2 RNA guide
acuucucccaaacagaauguau

SEQ ID NO: 20960 - RNA, 22 nt, Artificial Sequence
  LRRK2 RNA guide
agaacgagcacuucucccaaac

SEQ ID NO: 20961 - RNA, 22 nt, Artificial Sequence
  LRRK2 RNA guide
agcacuucucccaaacagaaug

SEQ ID NO: 20962 - RNA, 22 nt, Artificial Sequence
  LRRK2 RNA guide
auacauucuguuugggagaagu

SEQ ID NO: 20963 - RNA, 22 nt, Artificial Sequence
  LRRK2 RNA guide
auucuguuugggagaagugcuc

SEQ ID NO: 20964 - RNA, 22 nt, Artificial Sequence
  LRRK2 RNA guide
auuuuuuagaacgagcacuucu

SEQ ID NO: 20965 - RNA, 22 nt, Artificial Sequence
  LRRK2 RNA guide
caauacauucuguuugggagaa

SEQ ID NO: 20966 - RNA, 22 nt, Artificial Sequence
  LRRK2 RNA guide
cacuucucccaaacagaaugua

SEQ ID NO: 20967 - RNA, 22 nt, Artificial Sequence
  LRRK2 RNA guide
cauucuguuugggagaagugcu

SEQ ID NO: 20968 - RNA, 22 nt, Artificial Sequence
  LRRK2 RNA guide
ccaauacauucuguuugggaga

SEQ ID NO: 20969 - RNA, 22 nt, Artificial Sequence
  LRRK2 RNA guide
cgagcacuucucccaaacagaa

SEQ ID NO: 20970 - RNA, 22 nt, Artificial Sequence
  LRRK2 RNA guide
cgccaauacauucuguuuggga

SEQ ID NO: 20971 - RNA, 22 nt, Artificial Sequence
  LRRK2 RNA guide
cucccaaacagaauguauuggc

SEQ ID NO: 20972 - RNA, 22 nt, Artificial Sequence
  LRRK2 RNA guide
cuguuugggagaagugcucguu

SEQ ID NO: 20973 - RNA, 22 nt, Artificial Sequence
  LRRK2 RNA guide
cuucucccaaacagaauguauu

SEQ ID NO: 20974 - RNA, 22 nt, Artificial Sequence
  LRRK2 RNA guide
gaacgagcacuucucccaaaca

SEQ ID NO: 20975 - RNA, 22 nt, Artificial Sequence
  LRRK2 RNA guide
gagaagugcucguucuaaaaaa

SEQ ID NO: 20976 - RNA, 22 nt, Artificial Sequence
  LRRK2 RNA guide
gagcacuucucccaaacagaau

SEQ ID NO: 20977 - RNA, 22 nt, Artificial Sequence
  LRRK2 RNA guide
gcacuucucccaaacagaaugu

SEQ ID NO: 20978 - RNA, 22 nt, Artificial Sequence
  LRRK2 RNA guide
gccaauacauucuguuugggag

SEQ ID NO: 20979 - RNA, 22 nt, Artificial Sequence
  LRRK2 RNA guide
ggagaagugcucguucuaaaaa

SEQ ID NO: 20980 - RNA, 22 nt, Artificial Sequence
  LRRK2 RNA guide
gggagaagugcucguucuaaaa

SEQ ID NO: 20981 - RNA, 22 nt, Artificial Sequence
  LRRK2 RNA guide
guuugggagaagugcucguucu

SEQ ID NO: 20982 - RNA, 22 nt, Artificial Sequence
  LRRK2 RNA guide
uacauucuguuugggagaagug

SEQ ID NO: 20983 - RNA, 22 nt, Artificial Sequence
  LRRK2 RNA guide
uagaacgagcacuucucccaaa

SEQ ID NO: 20984 - RNA, 22 nt, Artificial Sequence
  LRRK2 RNA guide
ucucccaaacagaauguauugg

SEQ ID NO: 20985 - RNA, 22 nt, Artificial Sequence
  LRRK2 RNA guide
ucuguuugggagaagugcucgu

SEQ ID NO: 20986 - RNA, 22 nt, Artificial Sequence
  LRRK2 RNA guide
ugggagaagugcucguucuaaa

SEQ ID NO: 20987 - RNA, 22 nt, Artificial Sequence
  LRRK2 RNA guide
uguuugggagaagugcucguuc

SEQ ID NO: 20988 - RNA, 22 nt, Artificial Sequence
  LRRK2 RNA guide
uuagaacgagcacuucucccaa

SEQ ID NO: 20989 - RNA, 22 nt, Artificial Sequence
  LRRK2 RNA guide
uucucccaaacagaauguauug

SEQ ID NO: 20990 - RNA, 22 nt, Artificial Sequence
  LRRK2 RNA guide
uucuguuugggagaagugcucg

SEQ ID NO: 20991 - RNA, 22 nt, Artificial Sequence
  LRRK2 RNA guide
uugggagaagugcucguucuaa

SEQ ID NO: 20992 - RNA, 22 nt, Artificial Sequence
  LRRK2 RNA guide
uuuagaacgagcacuucuccca

SEQ ID NO: 20993 - RNA, 22 nt, Artificial Sequence
  LRRK2 RNA guide
uuugggagaagugcucguucua

SEQ ID NO: 20994 - RNA, 22 nt, Artificial Sequence
  LRRK2 RNA guide
uuuuagaacgagcacuucuccc

SEQ ID NO: 20995 - RNA, 22 nt, Artificial Sequence
  LRRK2 RNA guide
uuuuuagaacgagcacuucucc

SEQ ID NO: 20996 - RNA, 22 nt, Artificial Sequence
  LRRK2 RNA guide
uuuuuuagaacgagcacuucuc

SEQ ID NO: 20997 - RNA, 20 nt, Artificial Sequence
  LRRK2 RNA guide
aaacucucuggaugacuguc

SEQ ID NO: 20998 - RNA, 20 nt, Artificial Sequence
  LRRK2 RNA guide
aacucucuggaugacugucu

SEQ ID NO: 20999 - RNA, 20 nt, Artificial Sequence
  LRRK2 RNA guide
aagaaacucucuggaugacu

SEQ ID NO: 21000 - RNA, 20 nt, Artificial Sequence
  LRRK2 RNA guide
aagucuuagacagucaucca

SEQ ID NO: 21001 - RNA, 20 nt, Artificial Sequence
  LRRK2 RNA guide
acagucauccagagaguuuc

SEQ ID NO: 21002 - RNA, 20 nt, Artificial Sequence
  LRRK2 RNA guide
acucucuggaugacugucua

SEQ ID NO: 21003 - RNA, 20 nt, Artificial Sequence
  LRRK2 RNA guide
acugucuaagacuucagauc

SEQ ID NO: 21004 - RNA, 20 nt, Artificial Sequence
  LRRK2 RNA guide
agaaacucucuggaugacug

SEQ ID NO: 21005 - RNA, 20 nt, Artificial Sequence
  LRRK2 RNA guide
agacagucauccagagaguu

SEQ ID NO: 21006 - RNA, 20 nt, Artificial Sequence
  LRRK2 RNA guide
aggaucugaagucuuagaca

SEQ ID NO: 21007 - RNA, 20 nt, Artificial Sequence
  LRRK2 RNA guide
agucauccagagaguuucuu

SEQ ID NO: 21008 - RNA, 20 nt, Artificial Sequence
  LRRK2 RNA guide
agucuuagacagucauccag

SEQ ID NO: 21009 - RNA, 20 nt, Artificial Sequence
  LRRK2 RNA guide
aucugaagucuuagacaguc

SEQ ID NO: 21010 - RNA, 20 nt, Artificial Sequence
  LRRK2 RNA guide
augacugucuaagacuucag

SEQ ID NO: 21011 - RNA, 20 nt, Artificial Sequence
  LRRK2 RNA guide
cagucauccagagaguuucu

SEQ ID NO: 21012 - RNA, 20 nt, Artificial Sequence
  LRRK2 RNA guide
cucucuggaugacugucuaa

SEQ ID NO: 21013 - RNA, 20 nt, Artificial Sequence
  LRRK2 RNA guide
cucuggaugacugucuaaga

SEQ ID NO: 21014 - RNA, 20 nt, Artificial Sequence
  LRRK2 RNA guide
cugaagucuuagacagucau

SEQ ID NO: 21015 - RNA, 20 nt, Artificial Sequence
  LRRK2 RNA guide
cuggaugacugucuaagacu

SEQ ID NO: 21016 - RNA, 20 nt, Artificial Sequence
  LRRK2 RNA guide
cuuagacagucauccagaga

SEQ ID NO: 21017 - RNA, 20 nt, Artificial Sequence
  LRRK2 RNA guide
gaaacucucuggaugacugu

SEQ ID NO: 21018 - RNA, 20 nt, Artificial Sequence
  LRRK2 RNA guide
gaagucuuagacagucaucc

SEQ ID NO: 21019 - RNA, 20 nt, Artificial Sequence
  LRRK2 RNA guide
gacagucauccagagaguuu

SEQ ID NO: 21020 - RNA, 20 nt, Artificial Sequence
  LRRK2 RNA guide
gacugucuaagacuucagau

SEQ ID NO: 21021 - RNA, 20 nt, Artificial Sequence
  LRRK2 RNA guide
gaucugaagucuuagacagu

SEQ ID NO: 21022 - RNA, 20 nt, Artificial Sequence
  LRRK2 RNA guide
gaugacugucuaagacuuca

SEQ ID NO: 21023 - RNA, 20 nt, Artificial Sequence
  LRRK2 RNA guide
ggaucugaagucuuagacag

SEQ ID NO: 21024 - RNA, 20 nt, Artificial Sequence
  LRRK2 RNA guide
ggaugacugucuaagacuuc

SEQ ID NO: 21025 - RNA, 20 nt, Artificial Sequence
  LRRK2 RNA guide
gguaggaucugaagucuuag

SEQ ID NO: 21026 - RNA, 20 nt, Artificial Sequence
  LRRK2 RNA guide
guaggaucugaagucuuaga

SEQ ID NO: 21027 - RNA, 20 nt, Artificial Sequence
  LRRK2 RNA guide
gucuuagacagucauccaga

SEQ ID NO: 21028 - RNA, 20 nt, Artificial Sequence
  LRRK2 RNA guide
uaagaaacucucuggaugac

SEQ ID NO: 21029 - RNA, 20 nt, Artificial Sequence
  LRRK2 RNA guide
uagacagucauccagagagu

SEQ ID NO: 21030 - RNA, 20 nt, Artificial Sequence
  LRRK2 RNA guide
uaggaucugaagucuuagac

SEQ ID NO: 21031 - RNA, 20 nt, Artificial Sequence
  LRRK2 RNA guide
ucucuggaugacugucuaag

SEQ ID NO: 21032 - RNA, 20 nt, Artificial Sequence
  LRRK2 RNA guide
ucugaagucuuagacaguca

SEQ ID NO: 21033 - RNA, 20 nt, Artificial Sequence
  LRRK2 RNA guide
ucuggaugacugucuaagac

SEQ ID NO: 21034 - RNA, 20 nt, Artificial Sequence
  LRRK2 RNA guide
ucuuagacagucauccagag

SEQ ID NO: 21035 - RNA, 20 nt, Artificial Sequence
  LRRK2 RNA guide
ugaagucuuagacagucauc

SEQ ID NO: 21036 - RNA, 20 nt, Artificial Sequence
  LRRK2 RNA guide
ugacugucuaagacuucaga

SEQ ID NO: 21037 - RNA, 20 nt, Artificial Sequence
  LRRK2 RNA guide
uggaugacugucuaagacuu

SEQ ID NO: 21038 - RNA, 20 nt, Artificial Sequence
  LRRK2 RNA guide
ugguaggaucugaagucuua

SEQ ID NO: 21039 - RNA, 20 nt, Artificial Sequence
  LRRK2 RNA guide
uuaagaaacucucuggauga

SEQ ID NO: 21040 - RNA, 20 nt, Artificial Sequence
  LRRK2 RNA guide
uuagacagucauccagagag

SEQ ID NO: 21041 - RNA, 20 nt, Artificial Sequence
  LRRK2 RNA guide
uuuaagaaacucucuggaug

SEQ ID NO: 21042 - RNA, 20 nt, Artificial Sequence
  LRRK2 RNA guide
uuuuaagaaacucucuggau

SEQ ID NO: 21043 - RNA, 20 nt, Artificial Sequence
  LRRK2 RNA guide
uuuuuaagaaacucucugga

SEQ ID NO: 21044 - RNA, 21 nt, Artificial Sequence
  LRRK2 RNA guide
aaacucucuggaugacugucu

SEQ ID NO: 21045 - RNA, 21 nt, Artificial Sequence
  LRRK2 RNA guide
aacucucuggaugacugucua

SEQ ID NO: 21046 - RNA, 21 nt, Artificial Sequence
  LRRK2 RNA guide
aagaaacucucuggaugacug

SEQ ID NO: 21047 - RNA, 21 nt, Artificial Sequence
  LRRK2 RNA guide
aagucuuagacagucauccag

SEQ ID NO: 21048 - RNA, 21 nt, Artificial Sequence
  LRRK2 RNA guide
acagucauccagagaguuucu

SEQ ID NO: 21049 - RNA, 21 nt, Artificial Sequence
  LRRK2 RNA guide
acucucuggaugacugucuaa

SEQ ID NO: 21050 - RNA, 21 nt, Artificial Sequence
  LRRK2 RNA guide
acugucuaagacuucagaucc

SEQ ID NO: 21051 - RNA, 21 nt, Artificial Sequence
  LRRK2 RNA guide
agaaacucucuggaugacugu

SEQ ID NO: 21052 - RNA, 21 nt, Artificial Sequence
  LRRK2 RNA guide
agacagucauccagagaguuu

SEQ ID NO: 21053 - RNA, 21 nt, Artificial Sequence
  LRRK2 RNA guide
aggaucugaagucuuagacag

SEQ ID NO: 21054 - RNA, 21 nt, Artificial Sequence
  LRRK2 RNA guide
agucauccagagaguuucuua

SEQ ID NO: 21055 - RNA, 21 nt, Artificial Sequence
  LRRK2 RNA guide
agucuuagacagucauccaga

SEQ ID NO: 21056 - RNA, 21 nt, Artificial Sequence
  LRRK2 RNA guide
aucugaagucuuagacaguca

SEQ ID NO: 21057 - RNA, 21 nt, Artificial Sequence
  LRRK2 RNA guide
augacugucuaagacuucaga

SEQ ID NO: 21058 - RNA, 21 nt, Artificial Sequence
  LRRK2 RNA guide
cagucauccagagaguuucuu

SEQ ID NO: 21059 - RNA, 21 nt, Artificial Sequence
  LRRK2 RNA guide
cucucuggaugacugucuaag

SEQ ID NO: 21060 - RNA, 21 nt, Artificial Sequence
  LRRK2 RNA guide
cucuggaugacugucuaagac

SEQ ID NO: 21061 - RNA, 21 nt, Artificial Sequence
  LRRK2 RNA guide
cugaagucuuagacagucauc

SEQ ID NO: 21062 - RNA, 21 nt, Artificial Sequence
  LRRK2 RNA guide
cuggaugacugucuaagacuu

SEQ ID NO: 21063 - RNA, 21 nt, Artificial Sequence
  LRRK2 RNA guide
cugguaggaucugaagucuua

SEQ ID NO: 21064 - RNA, 21 nt, Artificial Sequence
  LRRK2 RNA guide
cuuagacagucauccagagag

SEQ ID NO: 21065 - RNA, 21 nt, Artificial Sequence
  LRRK2 RNA guide
gaaacucucuggaugacuguc

SEQ ID NO: 21066 - RNA, 21 nt, Artificial Sequence
  LRRK2 RNA guide
gaagucuuagacagucaucca

SEQ ID NO: 21067 - RNA, 21 nt, Artificial Sequence
  LRRK2 RNA guide
gacagucauccagagaguuuc

SEQ ID NO: 21068 - RNA, 21 nt, Artificial Sequence
  LRRK2 RNA guide
gacugucuaagacuucagauc

SEQ ID NO: 21069 - RNA, 21 nt, Artificial Sequence
  LRRK2 RNA guide
gaucugaagucuuagacaguc

SEQ ID NO: 21070 - RNA, 21 nt, Artificial Sequence
  LRRK2 RNA guide
gaugacugucuaagacuucag

SEQ ID NO: 21071 - RNA, 21 nt, Artificial Sequence
  LRRK2 RNA guide
ggaucugaagucuuagacagu

SEQ ID NO: 21072 - RNA, 21 nt, Artificial Sequence
  LRRK2 RNA guide
ggaugacugucuaagacuuca

SEQ ID NO: 21073 - RNA, 21 nt, Artificial Sequence
  LRRK2 RNA guide
gguaggaucugaagucuuaga

SEQ ID NO: 21074 - RNA, 21 nt, Artificial Sequence
  LRRK2 RNA guide
guaggaucugaagucuuagac

SEQ ID NO: 21075 - RNA, 21 nt, Artificial Sequence
  LRRK2 RNA guide
gucuuagacagucauccagag

SEQ ID NO: 21076 - RNA, 21 nt, Artificial Sequence
  LRRK2 RNA guide
uaagaaacucucuggaugacu

SEQ ID NO: 21077 - RNA, 21 nt, Artificial Sequence
  LRRK2 RNA guide
uagacagucauccagagaguu

SEQ ID NO: 21078 - RNA, 21 nt, Artificial Sequence
  LRRK2 RNA guide
uaggaucugaagucuuagaca

SEQ ID NO: 21079 - RNA, 21 nt, Artificial Sequence
  LRRK2 RNA guide
ucucuggaugacugucuaaga

SEQ ID NO: 21080 - RNA, 21 nt, Artificial Sequence
  LRRK2 RNA guide
ucugaagucuuagacagucau

SEQ ID NO: 21081 - RNA, 21 nt, Artificial Sequence
  LRRK2 RNA guide
ucuggaugacugucuaagacu

SEQ ID NO: 21082 - RNA, 21 nt, Artificial Sequence
  LRRK2 RNA guide
ucuuagacagucauccagaga

SEQ ID NO: 21083 - RNA, 21 nt, Artificial Sequence
  LRRK2 RNA guide
ugaagucuuagacagucaucc

SEQ ID NO: 21084 - RNA, 21 nt, Artificial Sequence
  LRRK2 RNA guide
ugacugucuaagacuucagau

SEQ ID NO: 21085 - RNA, 21 nt, Artificial Sequence
  LRRK2 RNA guide
uggaugacugucuaagacuuc

SEQ ID NO: 21086 - RNA, 21 nt, Artificial Sequence
  LRRK2 RNA guide
ugguaggaucugaagucuuag

SEQ ID NO: 21087 - RNA, 21 nt, Artificial Sequence
  LRRK2 RNA guide
uuaagaaacucucuggaugac

SEQ ID NO: 21088 - RNA, 21 nt, Artificial Sequence
  LRRK2 RNA guide
uuagacagucauccagagagu

SEQ ID NO: 21089 - RNA, 21 nt, Artificial Sequence
  LRRK2 RNA guide
uuuaagaaacucucuggauga

SEQ ID NO: 21090 - RNA, 21 nt, Artificial Sequence
  LRRK2 RNA guide
uuuuaagaaacucucuggaug

SEQ ID NO: 21091 - RNA, 22 nt, Artificial Sequence
  LRRK2 RNA guide
aaacucucuggaugacugucua

SEQ ID NO: 21092 - RNA, 22 nt, Artificial Sequence
  LRRK2 RNA guide
aacucucuggaugacugucuaa

SEQ ID NO: 21093 - RNA, 22 nt, Artificial Sequence
  LRRK2 RNA guide
aagaaacucucuggaugacugu

SEQ ID NO: 21094 - RNA, 22 nt, Artificial Sequence
  LRRK2 RNA guide
aagucuuagacagucauccaga

SEQ ID NO: 21095 - RNA, 22 nt, Artificial Sequence
  LRRK2 RNA guide
acagucauccagagaguuucuu

SEQ ID NO: 21096 - RNA, 22 nt, Artificial Sequence
  LRRK2 RNA guide
acucucuggaugacugucuaag

SEQ ID NO: 21097 - RNA, 22 nt, Artificial Sequence
  LRRK2 RNA guide
acugucuaagacuucagauccu

SEQ ID NO: 21098 - RNA, 22 nt, Artificial Sequence
  LRRK2 RNA guide
agaaacucucuggaugacuguc

SEQ ID NO: 21099 - RNA, 22 nt, Artificial Sequence
  LRRK2 RNA guide
agacagucauccagagaguuuc

SEQ ID NO: 21100 - RNA, 22 nt, Artificial Sequence
  LRRK2 RNA guide
aggaucugaagucuuagacagu

SEQ ID NO: 21101 - RNA, 22 nt, Artificial Sequence
  LRRK2 RNA guide
agucauccagagaguuucuuaa

SEQ ID NO: 21102 - RNA, 22 nt, Artificial Sequence
  LRRK2 RNA guide
agucuuagacagucauccagag

SEQ ID NO: 21103 - RNA, 22 nt, Artificial Sequence
  LRRK2 RNA guide
aucugaagucuuagacagucau

SEQ ID NO: 21104 - RNA, 22 nt, Artificial Sequence
  LRRK2 RNA guide
augacugucuaagacuucagau

SEQ ID NO: 21105 - RNA, 22 nt, Artificial Sequence
  LRRK2 RNA guide
cagucauccagagaguuucuua

SEQ ID NO: 21106 - RNA, 22 nt, Artificial Sequence
  LRRK2 RNA guide
cucucuggaugacugucuaaga

SEQ ID NO: 21107 - RNA, 22 nt, Artificial Sequence
  LRRK2 RNA guide
cucuggaugacugucuaagacu

SEQ ID NO: 21108 - RNA, 22 nt, Artificial Sequence
  LRRK2 RNA guide
cugaagucuuagacagucaucc

SEQ ID NO: 21109 - RNA, 22 nt, Artificial Sequence
  LRRK2 RNA guide
cuggaugacugucuaagacuuc

SEQ ID NO: 21110 - RNA, 22 nt, Artificial Sequence
  LRRK2 RNA guide
cugguaggaucugaagucuuag

SEQ ID NO: 21111 - RNA, 22 nt, Artificial Sequence
  LRRK2 RNA guide
cuuagacagucauccagagagu

SEQ ID NO: 21112 - RNA, 22 nt, Artificial Sequence
  LRRK2 RNA guide
gaaacucucuggaugacugucu

SEQ ID NO: 21113 - RNA, 22 nt, Artificial Sequence
  LRRK2 RNA guide
gaagucuuagacagucauccag

SEQ ID NO: 21114 - RNA, 22 nt, Artificial Sequence
  LRRK2 RNA guide
gacagucauccagagaguuucu

SEQ ID NO: 21115 - RNA, 22 nt, Artificial Sequence
  LRRK2 RNA guide
gacugucuaagacuucagaucc

SEQ ID NO: 21116 - RNA, 22 nt, Artificial Sequence
  LRRK2 RNA guide
gaucugaagucuuagacaguca

SEQ ID NO: 21117 - RNA, 22 nt, Artificial Sequence
  LRRK2 RNA guide
gaugacugucuaagacuucaga

SEQ ID NO: 21118 - RNA, 22 nt, Artificial Sequence
  LRRK2 RNA guide
ggaucugaagucuuagacaguc

SEQ ID NO: 21119 - RNA, 22 nt, Artificial Sequence
  LRRK2 RNA guide
ggaugacugucuaagacuucag

SEQ ID NO: 21120 - RNA, 22 nt, Artificial Sequence
  LRRK2 RNA guide
gguaggaucugaagucuuagac

SEQ ID NO: 21121 - RNA, 22 nt, Artificial Sequence
  LRRK2 RNA guide
guaggaucugaagucuuagaca

SEQ ID NO: 21122 - RNA, 22 nt, Artificial Sequence
  LRRK2 RNA guide
gucuuagacagucauccagaga

SEQ ID NO: 21123 - RNA, 22 nt, Artificial Sequence
  LRRK2 RNA guide
uaagaaacucucuggaugacug

SEQ ID NO: 21124 - RNA, 22 nt, Artificial Sequence
  LRRK2 RNA guide
uagacagucauccagagaguuu

SEQ ID NO: 21125 - RNA, 22 nt, Artificial Sequence
  LRRK2 RNA guide
uaggaucugaagucuuagacag

SEQ ID NO: 21126 - RNA, 22 nt, Artificial Sequence
  LRRK2 RNA guide
ucucuggaugacugucuaagac

SEQ ID NO: 21127 - RNA, 22 nt, Artificial Sequence
  LRRK2 RNA guide
ucugaagucuuagacagucauc

SEQ ID NO: 21128 - RNA, 22 nt, Artificial Sequence
  LRRK2 RNA guide
ucuggaugacugucuaagacuu

SEQ ID NO: 21129 - RNA, 22 nt, Artificial Sequence
  LRRK2 RNA guide
ucugguaggaucugaagucuua

SEQ ID NO: 21130 - RNA, 22 nt, Artificial Sequence
  LRRK2 RNA guide
ucuuagacagucauccagagag

SEQ ID NO: 21131 - RNA, 22 nt, Artificial Sequence
  LRRK2 RNA guide
ugaagucuuagacagucaucca

SEQ ID NO: 21132 - RNA, 22 nt, Artificial Sequence
  LRRK2 RNA guide
ugacugucuaagacuucagauc

SEQ ID NO: 21133 - RNA, 22 nt, Artificial Sequence
  LRRK2 RNA guide
uggaugacugucuaagacuuca

SEQ ID NO: 21134 - RNA, 22 nt, Artificial Sequence
  LRRK2 RNA guide
ugguaggaucugaagucuuaga

SEQ ID NO: 21135 - RNA, 22 nt, Artificial Sequence
  LRRK2 RNA guide
uuaagaaacucucuggaugacu

SEQ ID NO: 21136 - RNA, 22 nt, Artificial Sequence
  LRRK2 RNA guide
uuagacagucauccagagaguu

SEQ ID NO: 21137 - RNA, 22 nt, Artificial Sequence
  LRRK2 RNA guide
uuuaagaaacucucuggaugac

SEQ ID NO: 21138 - RNA, 22 nt, Artificial Sequence
  LRRK2 RNA guide
uuuuaagaaacucucuggauga

SEQ ID NO: 21139 - RNA, 22 nt, Artificial Sequence
  LRRK2 RNA guide
uuuuuaagaaacucucuggaug

SEQ ID NO: 21140 - RNA, 20 nt, Artificial Sequence
  LRRK2 RNA guide
aaacucucuggaggauuguc

SEQ ID NO: 21141 - RNA, 20 nt, Artificial Sequence
  LRRK2 RNA guide
aacucucuggaggauugucu

SEQ ID NO: 21142 - RNA, 20 nt, Artificial Sequence
  LRRK2 RNA guide
aagaaacucucuggaggauu

SEQ ID NO: 21143 - RNA, 20 nt, Artificial Sequence
  LRRK2 RNA guide
aagucuuagacaauccucca

SEQ ID NO: 21144 - RNA, 20 nt, Artificial Sequence
  LRRK2 RNA guide
aauccuccagagaguuucuu

SEQ ID NO: 21145 - RNA, 20 nt, Artificial Sequence
  LRRK2 RNA guide
acaauccuccagagaguuuc

SEQ ID NO: 21146 - RNA, 20 nt, Artificial Sequence
  LRRK2 RNA guide
acucucuggaggauugucua

SEQ ID NO: 21147 - RNA, 20 nt, Artificial Sequence
  LRRK2 RNA guide
agaaacucucuggaggauug

SEQ ID NO: 21148 - RNA, 20 nt, Artificial Sequence
  LRRK2 RNA guide
agacaauccuccagagaguu

SEQ ID NO: 21149 - RNA, 20 nt, Artificial Sequence
  LRRK2 RNA guide
aggauugucuaagacuucag

SEQ ID NO: 21150 - RNA, 20 nt, Artificial Sequence
  LRRK2 RNA guide
agucuuagacaauccuccag

SEQ ID NO: 21151 - RNA, 20 nt, Artificial Sequence
  LRRK2 RNA guide
auccuccagagaguuucuua

SEQ ID NO: 21152 - RNA, 20 nt, Artificial Sequence
  LRRK2 RNA guide
aucugaagucuuagacaauc

SEQ ID NO: 21153 - RNA, 20 nt, Artificial Sequence
  LRRK2 RNA guide
caauccuccagagaguuucu

SEQ ID NO: 21154 - RNA, 20 nt, Artificial Sequence
  LRRK2 RNA guide
ccuccagagaguuucuuaaa

SEQ ID NO: 21155 - RNA, 20 nt, Artificial Sequence
  LRRK2 RNA guide
cucucuggaggauugucuaa

SEQ ID NO: 21156 - RNA, 20 nt, Artificial Sequence
  LRRK2 RNA guide
cucuggaggauugucuaaga

SEQ ID NO: 21157 - RNA, 20 nt, Artificial Sequence
  LRRK2 RNA guide
cugaagucuuagacaauccu

SEQ ID NO: 21158 - RNA, 20 nt, Artificial Sequence
  LRRK2 RNA guide
cuggaggauugucuaagacu

SEQ ID NO: 21159 - RNA, 20 nt, Artificial Sequence
  LRRK2 RNA guide
cuuagacaauccuccagaga

SEQ ID NO: 21160 - RNA, 20 nt, Artificial Sequence
  LRRK2 RNA guide
gaaacucucuggaggauugu

SEQ ID NO: 21161 - RNA, 20 nt, Artificial Sequence
  LRRK2 RNA guide
gaagucuuagacaauccucc

SEQ ID NO: 21162 - RNA, 20 nt, Artificial Sequence
  LRRK2 RNA guide
gacaauccuccagagaguuu

SEQ ID NO: 21163 - RNA, 20 nt, Artificial Sequence
  LRRK2 RNA guide
gaggauugucuaagacuuca

SEQ ID NO: 21164 - RNA, 20 nt, Artificial Sequence
  LRRK2 RNA guide
gaucugaagucuuagacaau

SEQ ID NO: 21165 - RNA, 20 nt, Artificial Sequence
  LRRK2 RNA guide
ggaggauugucuaagacuuc

SEQ ID NO: 21166 - RNA, 20 nt, Artificial Sequence
  LRRK2 RNA guide
ggaucugaagucuuagacaa

SEQ ID NO: 21167 - RNA, 20 nt, Artificial Sequence
  LRRK2 RNA guide
gucuuagacaauccuccaga

SEQ ID NO: 21168 - RNA, 20 nt, Artificial Sequence
  LRRK2 RNA guide
uaagaaacucucuggaggau

SEQ ID NO: 21169 - RNA, 20 nt, Artificial Sequence
  LRRK2 RNA guide
uagacaauccuccagagagu

SEQ ID NO: 21170 - RNA, 20 nt, Artificial Sequence
  LRRK2 RNA guide
uccuccagagaguuucuuaa

SEQ ID NO: 21171 - RNA, 20 nt, Artificial Sequence
  LRRK2 RNA guide
ucucuggaggauugucuaag

SEQ ID NO: 21172 - RNA, 20 nt, Artificial Sequence
  LRRK2 RNA guide
ucugaagucuuagacaaucc

SEQ ID NO: 21173 - RNA, 20 nt, Artificial Sequence
  LRRK2 RNA guide
ucuggaggauugucuaagac

SEQ ID NO: 21174 - RNA, 20 nt, Artificial Sequence
  LRRK2 RNA guide
ucuuagacaauccuccagag

SEQ ID NO: 21175 - RNA, 20 nt, Artificial Sequence
  LRRK2 RNA guide
ugaagucuuagacaauccuc

SEQ ID NO: 21176 - RNA, 20 nt, Artificial Sequence
  LRRK2 RNA guide
uggaggauugucuaagacuu

SEQ ID NO: 21177 - RNA, 20 nt, Artificial Sequence
  LRRK2 RNA guide
uuaagaaacucucuggagga

SEQ ID NO: 21178 - RNA, 20 nt, Artificial Sequence
  LRRK2 RNA guide
uuagacaauccuccagagag

SEQ ID NO: 21179 - RNA, 20 nt, Artificial Sequence
  LRRK2 RNA guide
uuuaagaaacucucuggagg

SEQ ID NO: 21180 - RNA, 20 nt, Artificial Sequence
  LRRK2 RNA guide
uuuuaagaaacucucuggag

SEQ ID NO: 21181 - RNA, 21 nt, Artificial Sequence
  LRRK2 RNA guide
aaacucucuggaggauugucu

SEQ ID NO: 21182 - RNA, 21 nt, Artificial Sequence
  LRRK2 RNA guide
aacucucuggaggauugucua

SEQ ID NO: 21183 - RNA, 21 nt, Artificial Sequence
  LRRK2 RNA guide
aagaaacucucuggaggauug

SEQ ID NO: 21184 - RNA, 21 nt, Artificial Sequence
  LRRK2 RNA guide
aagucuuagacaauccuccag

SEQ ID NO: 21185 - RNA, 21 nt, Artificial Sequence
  LRRK2 RNA guide
aauccuccagagaguuucuua

SEQ ID NO: 21186 - RNA, 21 nt, Artificial Sequence
  LRRK2 RNA guide
acaauccuccagagaguuucu

SEQ ID NO: 21187 - RNA, 21 nt, Artificial Sequence
  LRRK2 RNA guide
acucucuggaggauugucuaa

SEQ ID NO: 21188 - RNA, 21 nt, Artificial Sequence
  LRRK2 RNA guide
agaaacucucuggaggauugu

SEQ ID NO: 21189 - RNA, 21 nt, Artificial Sequence
  LRRK2 RNA guide
agacaauccuccagagaguuu

SEQ ID NO: 21190 - RNA, 21 nt, Artificial Sequence
  LRRK2 RNA guide
aggaucugaagucuuagacaa

SEQ ID NO: 21191 - RNA, 21 nt, Artificial Sequence
  LRRK2 RNA guide
aggauugucuaagacuucaga

SEQ ID NO: 21192 - RNA, 21 nt, Artificial Sequence
  LRRK2 RNA guide
agucuuagacaauccuccaga

SEQ ID NO: 21193 - RNA, 21 nt, Artificial Sequence
  LRRK2 RNA guide
auccuccagagaguuucuuaa

SEQ ID NO: 21194 - RNA, 21 nt, Artificial Sequence
  LRRK2 RNA guide
aucugaagucuuagacaaucc

SEQ ID NO: 21195 - RNA, 21 nt, Artificial Sequence
  LRRK2 RNA guide
caauccuccagagaguuucuu

SEQ ID NO: 21196 - RNA, 21 nt, Artificial Sequence
  LRRK2 RNA guide
ccuccagagaguuucuuaaaa

SEQ ID NO: 21197 - RNA, 21 nt, Artificial Sequence
  LRRK2 RNA guide
cucucuggaggauugucuaag

SEQ ID NO: 21198 - RNA, 21 nt, Artificial Sequence
  LRRK2 RNA guide
cucuggaggauugucuaagac

SEQ ID NO: 21199 - RNA, 21 nt, Artificial Sequence
  LRRK2 RNA guide
cugaagucuuagacaauccuc

SEQ ID NO: 21200 - RNA, 21 nt, Artificial Sequence
  LRRK2 RNA guide
cuggaggauugucuaagacuu

SEQ ID NO: 21201 - RNA, 21 nt, Artificial Sequence
  LRRK2 RNA guide
cuuagacaauccuccagagag

SEQ ID NO: 21202 - RNA, 21 nt, Artificial Sequence
  LRRK2 RNA guide
gaaacucucuggaggauuguc

SEQ ID NO: 21203 - RNA, 21 nt, Artificial Sequence
  LRRK2 RNA guide
gaagucuuagacaauccucca

SEQ ID NO: 21204 - RNA, 21 nt, Artificial Sequence
  LRRK2 RNA guide
gacaauccuccagagaguuuc

SEQ ID NO: 21205 - RNA, 21 nt, Artificial Sequence
  LRRK2 RNA guide
gaggauugucuaagacuucag

SEQ ID NO: 21206 - RNA, 21 nt, Artificial Sequence
  LRRK2 RNA guide
gaucugaagucuuagacaauc

SEQ ID NO: 21207 - RNA, 21 nt, Artificial Sequence
  LRRK2 RNA guide
ggaggauugucuaagacuuca

SEQ ID NO: 21208 - RNA, 21 nt, Artificial Sequence
  LRRK2 RNA guide
ggaucugaagucuuagacaau

SEQ ID NO: 21209 - RNA, 21 nt, Artificial Sequence
  LRRK2 RNA guide
gucuuagacaauccuccagag

SEQ ID NO: 21210 - RNA, 21 nt, Artificial Sequence
  LRRK2 RNA guide
uaagaaacucucuggaggauu

SEQ ID NO: 21211 - RNA, 21 nt, Artificial Sequence
  LRRK2 RNA guide
uagacaauccuccagagaguu

SEQ ID NO: 21212 - RNA, 21 nt, Artificial Sequence
  LRRK2 RNA guide
uccuccagagaguuucuuaaa

SEQ ID NO: 21213 - RNA, 21 nt, Artificial Sequence
  LRRK2 RNA guide
ucucuggaggauugucuaaga

SEQ ID NO: 21214 - RNA, 21 nt, Artificial Sequence
  LRRK2 RNA guide
ucugaagucuuagacaauccu

SEQ ID NO: 21215 - RNA, 21 nt, Artificial Sequence
  LRRK2 RNA guide
ucuggaggauugucuaagacu

SEQ ID NO: 21216 - RNA, 21 nt, Artificial Sequence
  LRRK2 RNA guide
ucuuagacaauccuccagaga

SEQ ID NO: 21217 - RNA, 21 nt, Artificial Sequence
  LRRK2 RNA guide
ugaagucuuagacaauccucc

SEQ ID NO: 21218 - RNA, 21 nt, Artificial Sequence
  LRRK2 RNA guide
uggaggauugucuaagacuuc

SEQ ID NO: 21219 - RNA, 21 nt, Artificial Sequence
  LRRK2 RNA guide
uuaagaaacucucuggaggau

SEQ ID NO: 21220 - RNA, 21 nt, Artificial Sequence
  LRRK2 RNA guide
uuagacaauccuccagagagu

SEQ ID NO: 21221 - RNA, 21 nt, Artificial Sequence
  LRRK2 RNA guide
uuuaagaaacucucuggagga

SEQ ID NO: 21222 - RNA, 21 nt, Artificial Sequence
  LRRK2 RNA guide
uuuuaagaaacucucuggagg

SEQ ID NO: 21223 - RNA, 21 nt, Artificial Sequence
  LRRK2 RNA guide
uuuuuaagaaacucucuggag

SEQ ID NO: 21224 - RNA, 22 nt, Artificial Sequence
  LRRK2 RNA guide
aaacucucuggaggauugucua

SEQ ID NO: 21225 - RNA, 22 nt, Artificial Sequence
  LRRK2 RNA guide
aacucucuggaggauugucuaa

SEQ ID NO: 21226 - RNA, 22 nt, Artificial Sequence
  LRRK2 RNA guide
aagaaacucucuggaggauugu

SEQ ID NO: 21227 - RNA, 22 nt, Artificial Sequence
  LRRK2 RNA guide
aagucuuagacaauccuccaga

SEQ ID NO: 21228 - RNA, 22 nt, Artificial Sequence
  LRRK2 RNA guide
aauccuccagagaguuucuuaa

SEQ ID NO: 21229 - RNA, 22 nt, Artificial Sequence
  LRRK2 RNA guide
acaauccuccagagaguuucuu

SEQ ID NO: 21230 - RNA, 22 nt, Artificial Sequence
  LRRK2 RNA guide
acucucuggaggauugucuaag

SEQ ID NO: 21231 - RNA, 22 nt, Artificial Sequence
  LRRK2 RNA guide
agaaacucucuggaggauuguc

SEQ ID NO: 21232 - RNA, 22 nt, Artificial Sequence
  LRRK2 RNA guide
agacaauccuccagagaguuuc

SEQ ID NO: 21233 - RNA, 22 nt, Artificial Sequence
  LRRK2 RNA guide
aggaucugaagucuuagacaau

SEQ ID NO: 21234 - RNA, 22 nt, Artificial Sequence
  LRRK2 RNA guide
aggauugucuaagacuucagau

SEQ ID NO: 21235 - RNA, 22 nt, Artificial Sequence
  LRRK2 RNA guide
agucuuagacaauccuccagag

SEQ ID NO: 21236 - RNA, 22 nt, Artificial Sequence
  LRRK2 RNA guide
auccuccagagaguuucuuaaa

SEQ ID NO: 21237 - RNA, 22 nt, Artificial Sequence
  LRRK2 RNA guide
aucugaagucuuagacaauccu

SEQ ID NO: 21238 - RNA, 22 nt, Artificial Sequence
  LRRK2 RNA guide
auuuuuaagaaacucucuggag

SEQ ID NO: 21239 - RNA, 22 nt, Artificial Sequence
  LRRK2 RNA guide
caauccuccagagaguuucuua

SEQ ID NO: 21240 - RNA, 22 nt, Artificial Sequence
  LRRK2 RNA guide
ccuccagagaguuucuuaaaaa

SEQ ID NO: 21241 - RNA, 22 nt, Artificial Sequence
  LRRK2 RNA guide
cucucuggaggauugucuaaga

SEQ ID NO: 21242 - RNA, 22 nt, Artificial Sequence
  LRRK2 RNA guide
cucuggaggauugucuaagacu

SEQ ID NO: 21243 - RNA, 22 nt, Artificial Sequence
  LRRK2 RNA guide
cugaagucuuagacaauccucc

SEQ ID NO: 21244 - RNA, 22 nt, Artificial Sequence
  LRRK2 RNA guide
cuggaggauugucuaagacuuc

SEQ ID NO: 21245 - RNA, 22 nt, Artificial Sequence
  LRRK2 RNA guide
cuuagacaauccuccagagagu

SEQ ID NO: 21246 - RNA, 22 nt, Artificial Sequence
  LRRK2 RNA guide
gaaacucucuggaggauugucu

SEQ ID NO: 21247 - RNA, 22 nt, Artificial Sequence
  LRRK2 RNA guide
gaagucuuagacaauccuccag

SEQ ID NO: 21248 - RNA, 22 nt, Artificial Sequence
  LRRK2 RNA guide
gacaauccuccagagaguuucu

SEQ ID NO: 21249 - RNA, 22 nt, Artificial Sequence
  LRRK2 RNA guide
gaggauugucuaagacuucaga

SEQ ID NO: 21250 - RNA, 22 nt, Artificial Sequence
  LRRK2 RNA guide
gaucugaagucuuagacaaucc

SEQ ID NO: 21251 - RNA, 22 nt, Artificial Sequence
  LRRK2 RNA guide
ggaggauugucuaagacuucag

SEQ ID NO: 21252 - RNA, 22 nt, Artificial Sequence
  LRRK2 RNA guide
ggaucugaagucuuagacaauc

SEQ ID NO: 21253 - RNA, 22 nt, Artificial Sequence
  LRRK2 RNA guide
gucuuagacaauccuccagaga

SEQ ID NO: 21254 - RNA, 22 nt, Artificial Sequence
  LRRK2 RNA guide
uaagaaacucucuggaggauug

SEQ ID NO: 21255 - RNA, 22 nt, Artificial Sequence
  LRRK2 RNA guide
uagacaauccuccagagaguuu

SEQ ID NO: 21256 - RNA, 22 nt, Artificial Sequence
  LRRK2 RNA guide
uaggaucugaagucuuagacaa

SEQ ID NO: 21257 - RNA, 22 nt, Artificial Sequence
  LRRK2 RNA guide
uccuccagagaguuucuuaaaa

SEQ ID NO: 21258 - RNA, 22 nt, Artificial Sequence
  LRRK2 RNA guide
ucucuggaggauugucuaagac

SEQ ID NO: 21259 - RNA, 22 nt, Artificial Sequence
  LRRK2 RNA guide
ucugaagucuuagacaauccuc

SEQ ID NO: 21260 - RNA, 22 nt, Artificial Sequence
  LRRK2 RNA guide
ucuggaggauugucuaagacuu

SEQ ID NO: 21261 - RNA, 22 nt, Artificial Sequence
  LRRK2 RNA guide
ucuuagacaauccuccagagag

SEQ ID NO: 21262 - RNA, 22 nt, Artificial Sequence
  LRRK2 RNA guide
ugaagucuuagacaauccucca

SEQ ID NO: 21263 - RNA, 22 nt, Artificial Sequence
  LRRK2 RNA guide
uggaggauugucuaagacuuca

SEQ ID NO: 21264 - RNA, 22 nt, Artificial Sequence
  LRRK2 RNA guide
uuaagaaacucucuggaggauu

SEQ ID NO: 21265 - RNA, 22 nt, Artificial Sequence
  LRRK2 RNA guide
uuagacaauccuccagagaguu

SEQ ID NO: 21266 - RNA, 22 nt, Artificial Sequence
  LRRK2 RNA guide
uuuaagaaacucucuggaggau

SEQ ID NO: 21267 - RNA, 22 nt, Artificial Sequence
  LRRK2 RNA guide
uuuuaagaaacucucuggagga

SEQ ID NO: 21268 - RNA, 22 nt, Artificial Sequence
  LRRK2 RNA guide
uuuuuaagaaacucucuggagg

SEQ ID NO: 21269 - RNA, 20 nt, Artificial Sequence
  LRRK2 RNA guide
aaaccauucuuccgugagag

SEQ ID NO: 21270 - RNA, 20 nt, Artificial Sequence
  LRRK2 RNA guide
aaccauucuuccgugagaga

SEQ ID NO: 21271 - RNA, 20 nt, Artificial Sequence
  LRRK2 RNA guide
aacccaggaaaccauucuuc

SEQ ID NO: 21272 - RNA, 20 nt, Artificial Sequence
  LRRK2 RNA guide
acauugauucucucacggaa

SEQ ID NO: 21273 - RNA, 20 nt, Artificial Sequence
  LRRK2 RNA guide
accacauugauucucucacg

SEQ ID NO: 21274 - RNA, 20 nt, Artificial Sequence
  LRRK2 RNA guide
accauucuuccgugagagaa

SEQ ID NO: 21275 - RNA, 20 nt, Artificial Sequence
  LRRK2 RNA guide
acccaggaaaccauucuucc

SEQ ID NO: 21276 - RNA, 20 nt, Artificial Sequence
  LRRK2 RNA guide
acggaagaaugguuuccugg

SEQ ID NO: 21277 - RNA, 20 nt, Artificial Sequence
  LRRK2 RNA guide
agcaacccaggaaaccauuc

SEQ ID NO: 21278 - RNA, 20 nt, Artificial Sequence
  LRRK2 RNA guide
aggaaaccauucuuccguga

SEQ ID NO: 21279 - RNA, 20 nt, Artificial Sequence
  LRRK2 RNA guide
auucucucacggaagaaugg

SEQ ID NO: 21280 - RNA, 20 nt, Artificial Sequence
  LRRK2 RNA guide
auucuuccgugagagaauca

SEQ ID NO: 21281 - RNA, 20 nt, Artificial Sequence
  LRRK2 RNA guide
auugauucucucacggaaga

SEQ ID NO: 21282 - RNA, 20 nt, Artificial Sequence
  LRRK2 RNA guide
caacccaggaaaccauucuu

SEQ ID NO: 21283 - RNA, 20 nt, Artificial Sequence
  LRRK2 RNA guide
cacauugauucucucacgga

SEQ ID NO: 21284 - RNA, 20 nt, Artificial Sequence
  LRRK2 RNA guide
cacggaagaaugguuuccug

SEQ ID NO: 21285 - RNA, 20 nt, Artificial Sequence
  LRRK2 RNA guide
caggaaaccauucuuccgug

SEQ ID NO: 21286 - RNA, 20 nt, Artificial Sequence
  LRRK2 RNA guide
cauucuuccgugagagaauc

SEQ ID NO: 21287 - RNA, 20 nt, Artificial Sequence
  LRRK2 RNA guide
cauugauucucucacggaag

SEQ ID NO: 21288 - RNA, 20 nt, Artificial Sequence
  LRRK2 RNA guide
ccacauugauucucucacgg

SEQ ID NO: 21289 - RNA, 20 nt, Artificial Sequence
  LRRK2 RNA guide
ccaggaaaccauucuuccgu

SEQ ID NO: 21290 - RNA, 20 nt, Artificial Sequence
  LRRK2 RNA guide
ccauucuuccgugagagaau

SEQ ID NO: 21291 - RNA, 20 nt, Artificial Sequence
  LRRK2 RNA guide
cccaggaaaccauucuuccg

SEQ ID NO: 21292 - RNA, 20 nt, Artificial Sequence
  LRRK2 RNA guide
ccgugagagaaucaaugugg

SEQ ID NO: 21293 - RNA, 20 nt, Artificial Sequence
  LRRK2 RNA guide
cgugagagaaucaauguggu

SEQ ID NO: 21294 - RNA, 20 nt, Artificial Sequence
  LRRK2 RNA guide
cucacggaagaaugguuucc

SEQ ID NO: 21295 - RNA, 20 nt, Artificial Sequence
  LRRK2 RNA guide
cucucacggaagaaugguuu

SEQ ID NO: 21296 - RNA, 20 nt, Artificial Sequence
  LRRK2 RNA guide
cuuccgugagagaaucaaug

SEQ ID NO: 21297 - RNA, 20 nt, Artificial Sequence
  LRRK2 RNA guide
gaaaccauucuuccgugaga

SEQ ID NO: 21298 - RNA, 20 nt, Artificial Sequence
  LRRK2 RNA guide
gaccacauugauucucucac

SEQ ID NO: 21299 - RNA, 20 nt, Artificial Sequence
  LRRK2 RNA guide
gauucucucacggaagaaug

SEQ ID NO: 21300 - RNA, 20 nt, Artificial Sequence
  LRRK2 RNA guide
ggaaaccauucuuccgugag

SEQ ID NO: 21301 - RNA, 20 nt, Artificial Sequence
  LRRK2 RNA guide
guggaccacauugauucucu

SEQ ID NO: 21302 - RNA, 20 nt, Artificial Sequence
  LRRK2 RNA guide
ucacggaagaaugguuuccu

SEQ ID NO: 21303 - RNA, 20 nt, Artificial Sequence
  LRRK2 RNA guide
uccgugagagaaucaaugug

SEQ ID NO: 21304 - RNA, 20 nt, Artificial Sequence
  LRRK2 RNA guide
ucucacggaagaaugguuuc

SEQ ID NO: 21305 - RNA, 20 nt, Artificial Sequence
  LRRK2 RNA guide
ucucucacggaagaaugguu

SEQ ID NO: 21306 - RNA, 20 nt, Artificial Sequence
  LRRK2 RNA guide
ucuuccgugagagaaucaau

SEQ ID NO: 21307 - RNA, 20 nt, Artificial Sequence
  LRRK2 RNA guide
ugauucucucacggaagaau

SEQ ID NO: 21308 - RNA, 20 nt, Artificial Sequence
  LRRK2 RNA guide
uggaccacauugauucucuc

SEQ ID NO: 21309 - RNA, 20 nt, Artificial Sequence
  LRRK2 RNA guide
uguggaccacauugauucuc

SEQ ID NO: 21310 - RNA, 20 nt, Artificial Sequence
  LRRK2 RNA guide
uuccgugagagaaucaaugu

SEQ ID NO: 21311 - RNA, 20 nt, Artificial Sequence
  LRRK2 RNA guide
uucucucacggaagaauggu

SEQ ID NO: 21312 - RNA, 20 nt, Artificial Sequence
  LRRK2 RNA guide
uucuuccgugagagaaucaa

SEQ ID NO: 21313 - RNA, 20 nt, Artificial Sequence
  LRRK2 RNA guide
uugauucucucacggaagaa

SEQ ID NO: 21314 - RNA, 20 nt, Artificial Sequence
  LRRK2 RNA guide
uuguggaccacauugauucu

SEQ ID NO: 21315 - RNA, 21 nt, Artificial Sequence
  LRRK2 RNA guide
aaaccauucuuccgugagaga

SEQ ID NO: 21316 - RNA, 21 nt, Artificial Sequence
  LRRK2 RNA guide
aaccauucuuccgugagagaa

SEQ ID NO: 21317 - RNA, 21 nt, Artificial Sequence
  LRRK2 RNA guide
aacccaggaaaccauucuucc

SEQ ID NO: 21318 - RNA, 21 nt, Artificial Sequence
  LRRK2 RNA guide
acauugauucucucacggaag

SEQ ID NO: 21319 - RNA, 21 nt, Artificial Sequence
  LRRK2 RNA guide
accacauugauucucucacgg

SEQ ID NO: 21320 - RNA, 21 nt, Artificial Sequence
  LRRK2 RNA guide
accauucuuccgugagagaau

SEQ ID NO: 21321 - RNA, 21 nt, Artificial Sequence
  LRRK2 RNA guide
acccaggaaaccauucuuccg

SEQ ID NO: 21322 - RNA, 21 nt, Artificial Sequence
  LRRK2 RNA guide
acggaagaaugguuuccuggg

SEQ ID NO: 21323 - RNA, 21 nt, Artificial Sequence
  LRRK2 RNA guide
agcaacccaggaaaccauucu

SEQ ID NO: 21324 - RNA, 21 nt, Artificial Sequence
  LRRK2 RNA guide
aggaaaccauucuuccgugag

SEQ ID NO: 21325 - RNA, 21 nt, Artificial Sequence
  LRRK2 RNA guide
auucucucacggaagaauggu

SEQ ID NO: 21326 - RNA, 21 nt, Artificial Sequence
  LRRK2 RNA guide
auucuuccgugagagaaucaa

SEQ ID NO: 21327 - RNA, 21 nt, Artificial Sequence
  LRRK2 RNA guide
auugauucucucacggaagaa

SEQ ID NO: 21328 - RNA, 21 nt, Artificial Sequence
  LRRK2 RNA guide
caacccaggaaaccauucuuc

SEQ ID NO: 21329 - RNA, 21 nt, Artificial Sequence
  LRRK2 RNA guide
cacauugauucucucacggaa

SEQ ID NO: 21330 - RNA, 21 nt, Artificial Sequence
  LRRK2 RNA guide
cacggaagaaugguuuccugg

SEQ ID NO: 21331 - RNA, 21 nt, Artificial Sequence
  LRRK2 RNA guide
cagcaacccaggaaaccauuc

SEQ ID NO: 21332 - RNA, 21 nt, Artificial Sequence
  LRRK2 RNA guide
caggaaaccauucuuccguga

SEQ ID NO: 21333 - RNA, 21 nt, Artificial Sequence
  LRRK2 RNA guide
cauucuuccgugagagaauca

SEQ ID NO: 21334 - RNA, 21 nt, Artificial Sequence
  LRRK2 RNA guide
cauugauucucucacggaaga

SEQ ID NO: 21335 - RNA, 21 nt, Artificial Sequence
  LRRK2 RNA guide
ccacauugauucucucacgga

SEQ ID NO: 21336 - RNA, 21 nt, Artificial Sequence
  LRRK2 RNA guide
ccaggaaaccauucuuccgug

SEQ ID NO: 21337 - RNA, 21 nt, Artificial Sequence
  LRRK2 RNA guide
ccauucuuccgugagagaauc

SEQ ID NO: 21338 - RNA, 21 nt, Artificial Sequence
  LRRK2 RNA guide
cccaggaaaccauucuuccgu

SEQ ID NO: 21339 - RNA, 21 nt, Artificial Sequence
  LRRK2 RNA guide
ccgugagagaaucaauguggu

SEQ ID NO: 21340 - RNA, 21 nt, Artificial Sequence
  LRRK2 RNA guide
cgugagagaaucaaugugguc

SEQ ID NO: 21341 - RNA, 21 nt, Artificial Sequence
  LRRK2 RNA guide
cucacggaagaaugguuuccu

SEQ ID NO: 21342 - RNA, 21 nt, Artificial Sequence
  LRRK2 RNA guide
cucucacggaagaaugguuuc

SEQ ID NO: 21343 - RNA, 21 nt, Artificial Sequence
  LRRK2 RNA guide
cuuccgugagagaaucaaugu

SEQ ID NO: 21344 - RNA, 21 nt, Artificial Sequence
  LRRK2 RNA guide
gaaaccauucuuccgugagag

SEQ ID NO: 21345 - RNA, 21 nt, Artificial Sequence
  LRRK2 RNA guide
gaccacauugauucucucacg

SEQ ID NO: 21346 - RNA, 21 nt, Artificial Sequence
  LRRK2 RNA guide
gauucucucacggaagaaugg

SEQ ID NO: 21347 - RNA, 21 nt, Artificial Sequence
  LRRK2 RNA guide
gcaacccaggaaaccauucuu

SEQ ID NO: 21348 - RNA, 21 nt, Artificial Sequence
  LRRK2 RNA guide
ggaaaccauucuuccgugaga

SEQ ID NO: 21349 - RNA, 21 nt, Artificial Sequence
  LRRK2 RNA guide
ggaccacauugauucucucac

SEQ ID NO: 21350 - RNA, 21 nt, Artificial Sequence
  LRRK2 RNA guide
guggaccacauugauucucuc

SEQ ID NO: 21351 - RNA, 21 nt, Artificial Sequence
  LRRK2 RNA guide
guuguggaccacauugauucu

SEQ ID NO: 21352 - RNA, 21 nt, Artificial Sequence
  LRRK2 RNA guide
ucacggaagaaugguuuccug

SEQ ID NO: 21353 - RNA, 21 nt, Artificial Sequence
  LRRK2 RNA guide
uccgugagagaaucaaugugg

SEQ ID NO: 21354 - RNA, 21 nt, Artificial Sequence
  LRRK2 RNA guide
ucucacggaagaaugguuucc

SEQ ID NO: 21355 - RNA, 21 nt, Artificial Sequence
  LRRK2 RNA guide
ucucucacggaagaaugguuu

SEQ ID NO: 21356 - RNA, 21 nt, Artificial Sequence
  LRRK2 RNA guide
ucuuccgugagagaaucaaug

SEQ ID NO: 21357 - RNA, 21 nt, Artificial Sequence
  LRRK2 RNA guide
ugauucucucacggaagaaug

SEQ ID NO: 21358 - RNA, 21 nt, Artificial Sequence
  LRRK2 RNA guide
uggaccacauugauucucuca

SEQ ID NO: 21359 - RNA, 21 nt, Artificial Sequence
  LRRK2 RNA guide
uguggaccacauugauucucu

SEQ ID NO: 21360 - RNA, 21 nt, Artificial Sequence
  LRRK2 RNA guide
uuccgugagagaaucaaugug

SEQ ID NO: 21361 - RNA, 21 nt, Artificial Sequence
  LRRK2 RNA guide
uucucucacggaagaaugguu

SEQ ID NO: 21362 - RNA, 21 nt, Artificial Sequence
  LRRK2 RNA guide
uucuuccgugagagaaucaau

SEQ ID NO: 21363 - RNA, 21 nt, Artificial Sequence
  LRRK2 RNA guide
uugauucucucacggaagaau

SEQ ID NO: 21364 - RNA, 21 nt, Artificial Sequence
  LRRK2 RNA guide
uuguggaccacauugauucuc

SEQ ID NO: 21365 - RNA, 22 nt, Artificial Sequence
  LRRK2 RNA guide
aaaccauucuuccgugagagaa

SEQ ID NO: 21366 - RNA, 22 nt, Artificial Sequence
  LRRK2 RNA guide
aaccauucuuccgugagagaau

SEQ ID NO: 21367 - RNA, 22 nt, Artificial Sequence
  LRRK2 RNA guide
aacccaggaaaccauucuuccg

SEQ ID NO: 21368 - RNA, 22 nt, Artificial Sequence
  LRRK2 RNA guide
acauugauucucucacggaaga

SEQ ID NO: 21369 - RNA, 22 nt, Artificial Sequence
  LRRK2 RNA guide
accacauugauucucucacgga

SEQ ID NO: 21370 - RNA, 22 nt, Artificial Sequence
  LRRK2 RNA guide
accauucuuccgugagagaauc

SEQ ID NO: 21371 - RNA, 22 nt, Artificial Sequence
  LRRK2 RNA guide
acccaggaaaccauucuuccgu

SEQ ID NO: 21372 - RNA, 22 nt, Artificial Sequence
  LRRK2 RNA guide
acggaagaaugguuuccugggu

SEQ ID NO: 21373 - RNA, 22 nt, Artificial Sequence
  LRRK2 RNA guide
agcaacccaggaaaccauucuu

SEQ ID NO: 21374 - RNA, 22 nt, Artificial Sequence
  LRRK2 RNA guide
aggaaaccauucuuccgugaga

SEQ ID NO: 21375 - RNA, 22 nt, Artificial Sequence
  LRRK2 RNA guide
aguuguggaccacauugauucu

SEQ ID NO: 21376 - RNA, 22 nt, Artificial Sequence
  LRRK2 RNA guide
auucucucacggaagaaugguu

SEQ ID NO: 21377 - RNA, 22 nt, Artificial Sequence
  LRRK2 RNA guide
auucuuccgugagagaaucaau

SEQ ID NO: 21378 - RNA, 22 nt, Artificial Sequence
  LRRK2 RNA guide
auugauucucucacggaagaau

SEQ ID NO: 21379 - RNA, 22 nt, Artificial Sequence
  LRRK2 RNA guide
caacccaggaaaccauucuucc

SEQ ID NO: 21380 - RNA, 22 nt, Artificial Sequence
  LRRK2 RNA guide
cacauugauucucucacggaag

SEQ ID NO: 21381 - RNA, 22 nt, Artificial Sequence
  LRRK2 RNA guide
cacggaagaaugguuuccuggg

SEQ ID NO: 21382 - RNA, 22 nt, Artificial Sequence
  LRRK2 RNA guide
cagcaacccaggaaaccauucu

SEQ ID NO: 21383 - RNA, 22 nt, Artificial Sequence
  LRRK2 RNA guide
caggaaaccauucuuccgugag

SEQ ID NO: 21384 - RNA, 22 nt, Artificial Sequence
  LRRK2 RNA guide
cauucuuccgugagagaaucaa

SEQ ID NO: 21385 - RNA, 22 nt, Artificial Sequence
  LRRK2 RNA guide
cauugauucucucacggaagaa

SEQ ID NO: 21386 - RNA, 22 nt, Artificial Sequence
  LRRK2 RNA guide
ccacauugauucucucacggaa

SEQ ID NO: 21387 - RNA, 22 nt, Artificial Sequence
  LRRK2 RNA guide
ccagcaacccaggaaaccauuc

SEQ ID NO: 21388 - RNA, 22 nt, Artificial Sequence
  LRRK2 RNA guide
ccaggaaaccauucuuccguga

SEQ ID NO: 21389 - RNA, 22 nt, Artificial Sequence
  LRRK2 RNA guide
ccauucuuccgugagagaauca

SEQ ID NO: 21390 - RNA, 22 nt, Artificial Sequence
  LRRK2 RNA guide
cccaggaaaccauucuuccgug

SEQ ID NO: 21391 - RNA, 22 nt, Artificial Sequence
  LRRK2 RNA guide
ccgugagagaaucaaugugguc

SEQ ID NO: 21392 - RNA, 22 nt, Artificial Sequence
  LRRK2 RNA guide
cgugagagaaucaauguggucc

SEQ ID NO: 21393 - RNA, 22 nt, Artificial Sequence
  LRRK2 RNA guide
cucacggaagaaugguuuccug

SEQ ID NO: 21394 - RNA, 22 nt, Artificial Sequence
  LRRK2 RNA guide
cucucacggaagaaugguuucc

SEQ ID NO: 21395 - RNA, 22 nt, Artificial Sequence
  LRRK2 RNA guide
cuuccgugagagaaucaaugug

SEQ ID NO: 21396 - RNA, 22 nt, Artificial Sequence
  LRRK2 RNA guide
gaaaccauucuuccgugagaga

SEQ ID NO: 21397 - RNA, 22 nt, Artificial Sequence
  LRRK2 RNA guide
gaccacauugauucucucacgg

SEQ ID NO: 21398 - RNA, 22 nt, Artificial Sequence
  LRRK2 RNA guide
gauucucucacggaagaauggu

SEQ ID NO: 21399 - RNA, 22 nt, Artificial Sequence
  LRRK2 RNA guide
gcaacccaggaaaccauucuuc

SEQ ID NO: 21400 - RNA, 22 nt, Artificial Sequence
  LRRK2 RNA guide
ggaaaccauucuuccgugagag

SEQ ID NO: 21401 - RNA, 22 nt, Artificial Sequence
  LRRK2 RNA guide
ggaccacauugauucucucacg

SEQ ID NO: 21402 - RNA, 22 nt, Artificial Sequence
  LRRK2 RNA guide
guggaccacauugauucucuca

SEQ ID NO: 21403 - RNA, 22 nt, Artificial Sequence
  LRRK2 RNA guide
guuguggaccacauugauucuc

SEQ ID NO: 21404 - RNA, 22 nt, Artificial Sequence
  LRRK2 RNA guide
ucacggaagaaugguuuccugg

SEQ ID NO: 21405 - RNA, 22 nt, Artificial Sequence
  LRRK2 RNA guide
uccgugagagaaucaauguggu

SEQ ID NO: 21406 - RNA, 22 nt, Artificial Sequence
  LRRK2 RNA guide
ucucacggaagaaugguuuccu

SEQ ID NO: 21407 - RNA, 22 nt, Artificial Sequence
  LRRK2 RNA guide
ucucucacggaagaaugguuuc

SEQ ID NO: 21408 - RNA, 22 nt, Artificial Sequence
  LRRK2 RNA guide
ucuuccgugagagaaucaaugu

SEQ ID NO: 21409 - RNA, 22 nt, Artificial Sequence
  LRRK2 RNA guide
ugauucucucacggaagaaugg

SEQ ID NO: 21410 - RNA, 22 nt, Artificial Sequence
  LRRK2 RNA guide
uggaccacauugauucucucac

SEQ ID NO: 21411 - RNA, 22 nt, Artificial Sequence
  LRRK2 RNA guide
uguggaccacauugauucucuc

SEQ ID NO: 21412 - RNA, 22 nt, Artificial Sequence
  LRRK2 RNA guide
uuccgugagagaaucaaugugg

SEQ ID NO: 21413 - RNA, 22 nt, Artificial Sequence
  LRRK2 RNA guide
uucucucacggaagaaugguuu

SEQ ID NO: 21414 - RNA, 22 nt, Artificial Sequence
  LRRK2 RNA guide
uucuuccgugagagaaucaaug

SEQ ID NO: 21415 - RNA, 22 nt, Artificial Sequence
  LRRK2 RNA guide
uugauucucucacggaagaaug

SEQ ID NO: 21416 - RNA, 22 nt, Artificial Sequence
  LRRK2 RNA guide
uuguggaccacauugauucucu

SEQ ID NO: 21417 - RNA, 20 nt, Artificial Sequence
  LRRK2 RNA guide
aaauaucaaucuccagaaac

SEQ ID NO: 21418 - RNA, 20 nt, Artificial Sequence
  LRRK2 RNA guide
aagaaugguuuccuggguuu

SEQ ID NO: 21419 - RNA, 20 nt, Artificial Sequence
  LRRK2 RNA guide
aauaucaaucuccagaaacc

SEQ ID NO: 21420 - RNA, 20 nt, Artificial Sequence
  LRRK2 RNA guide
aaucuccagaaacccaggaa

SEQ ID NO: 21421 - RNA, 20 nt, Artificial Sequence
  LRRK2 RNA guide
aaugguuuccuggguuucug

SEQ ID NO: 21422 - RNA, 20 nt, Artificial Sequence
  LRRK2 RNA guide
acaaauaucaaucuccagaa

SEQ ID NO: 21423 - RNA, 20 nt, Artificial Sequence
  LRRK2 RNA guide
accacaaauaucaaucucca

SEQ ID NO: 21424 - RNA, 20 nt, Artificial Sequence
  LRRK2 RNA guide
agaaacccaggaaaccauuc

SEQ ID NO: 21425 - RNA, 20 nt, Artificial Sequence
  LRRK2 RNA guide
agaaugguuuccuggguuuc

SEQ ID NO: 21426 - RNA, 20 nt, Artificial Sequence
  LRRK2 RNA guide
auaucaaucuccagaaaccc

SEQ ID NO: 21427 - RNA, 20 nt, Artificial Sequence
  LRRK2 RNA guide
aucaaucuccagaaacccag

SEQ ID NO: 21428 - RNA, 20 nt, Artificial Sequence
  LRRK2 RNA guide
aucuccagaaacccaggaaa

SEQ ID NO: 21429 - RNA, 20 nt, Artificial Sequence
  LRRK2 RNA guide
auggaagaaugguuuccugg

SEQ ID NO: 21430 - RNA, 20 nt, Artificial Sequence
  LRRK2 RNA guide
augguuuccuggguuucugg

SEQ ID NO: 21431 - RNA, 20 nt, Artificial Sequence
  LRRK2 RNA guide
caaauaucaaucuccagaaa

SEQ ID NO: 21432 - RNA, 20 nt, Artificial Sequence
  LRRK2 RNA guide
caaucuccagaaacccagga

SEQ ID NO: 21433 - RNA, 20 nt, Artificial Sequence
  LRRK2 RNA guide
cacaaauaucaaucuccaga

SEQ ID NO: 21434 - RNA, 20 nt, Artificial Sequence
  LRRK2 RNA guide
caccacaaauaucaaucucc

SEQ ID NO: 21435 - RNA, 20 nt, Artificial Sequence
  LRRK2 RNA guide
cagaaacccaggaaaccauu

SEQ ID NO: 21436 - RNA, 20 nt, Artificial Sequence
  LRRK2 RNA guide
cauggaagaaugguuuccug

SEQ ID NO: 21437 - RNA, 20 nt, Artificial Sequence
  LRRK2 RNA guide
ccagaaacccaggaaaccau

SEQ ID NO: 21438 - RNA, 20 nt, Artificial Sequence
  LRRK2 RNA guide
ccuggguuucuggagauuga

SEQ ID NO: 21439 - RNA, 20 nt, Artificial Sequence
  LRRK2 RNA guide
cuccagaaacccaggaaacc

SEQ ID NO: 21440 - RNA, 20 nt, Artificial Sequence
  LRRK2 RNA guide
cuggguuucuggagauugau

SEQ ID NO: 21441 - RNA, 20 nt, Artificial Sequence
  LRRK2 RNA guide
gaaacccaggaaaccauucu

SEQ ID NO: 21442 - RNA, 20 nt, Artificial Sequence
  LRRK2 RNA guide
gaagaaugguuuccuggguu

SEQ ID NO: 21443 - RNA, 20 nt, Artificial Sequence
  LRRK2 RNA guide
gaaugguuuccuggguuucu

SEQ ID NO: 21444 - RNA, 20 nt, Artificial Sequence
  LRRK2 RNA guide
ggaagaaugguuuccugggu

SEQ ID NO: 21445 - RNA, 20 nt, Artificial Sequence
  LRRK2 RNA guide
ggguuucuggagauugauau

SEQ ID NO: 21446 - RNA, 20 nt, Artificial Sequence
  LRRK2 RNA guide
gguuuccuggguuucuggag

SEQ ID NO: 21447 - RNA, 20 nt, Artificial Sequence
  LRRK2 RNA guide
gguuucuggagauugauauu

SEQ ID NO: 21448 - RNA, 20 nt, Artificial Sequence
  LRRK2 RNA guide
guuuccuggguuucuggaga

SEQ ID NO: 21449 - RNA, 20 nt, Artificial Sequence
  LRRK2 RNA guide
guuucuggagauugauauuu

SEQ ID NO: 21450 - RNA, 20 nt, Artificial Sequence
  LRRK2 RNA guide
uaucaaucuccagaaaccca

SEQ ID NO: 21451 - RNA, 20 nt, Artificial Sequence
  LRRK2 RNA guide
ucaaucuccagaaacccagg

SEQ ID NO: 21452 - RNA, 20 nt, Artificial Sequence
  LRRK2 RNA guide
ucaccacaaauaucaaucuc

SEQ ID NO: 21453 - RNA, 20 nt, Artificial Sequence
  LRRK2 RNA guide
uccagaaacccaggaaacca

SEQ ID NO: 21454 - RNA, 20 nt, Artificial Sequence
  LRRK2 RNA guide
uccuggguuucuggagauug

SEQ ID NO: 21455 - RNA, 20 nt, Artificial Sequence
  LRRK2 RNA guide
ucuccagaaacccaggaaac

SEQ ID NO: 21456 - RNA, 20 nt, Artificial Sequence
  LRRK2 RNA guide
uggaagaaugguuuccuggg

SEQ ID NO: 21457 - RNA, 20 nt, Artificial Sequence
  LRRK2 RNA guide
uggguuucuggagauugaua

SEQ ID NO: 21458 - RNA, 20 nt, Artificial Sequence
  LRRK2 RNA guide
ugguuuccuggguuucugga

SEQ ID NO: 21459 - RNA, 20 nt, Artificial Sequence
  LRRK2 RNA guide
uucaccacaaauaucaaucu

SEQ ID NO: 21460 - RNA, 20 nt, Artificial Sequence
  LRRK2 RNA guide
uuccuggguuucuggagauu

SEQ ID NO: 21461 - RNA, 20 nt, Artificial Sequence
  LRRK2 RNA guide
uucuggagauugauauuugu

SEQ ID NO: 21462 - RNA, 20 nt, Artificial Sequence
  LRRK2 RNA guide
uuuccuggguuucuggagau

SEQ ID NO: 21463 - RNA, 20 nt, Artificial Sequence
  LRRK2 RNA guide
uuucuggagauugauauuug

SEQ ID NO: 21464 - RNA, 21 nt, Artificial Sequence
  LRRK2 RNA guide
aaauaucaaucuccagaaacc

SEQ ID NO: 21465 - RNA, 21 nt, Artificial Sequence
  LRRK2 RNA guide
aagaaugguuuccuggguuuc

SEQ ID NO: 21466 - RNA, 21 nt, Artificial Sequence
  LRRK2 RNA guide
aauaucaaucuccagaaaccc

SEQ ID NO: 21467 - RNA, 21 nt, Artificial Sequence
  LRRK2 RNA guide
aaucuccagaaacccaggaaa

SEQ ID NO: 21468 - RNA, 21 nt, Artificial Sequence
  LRRK2 RNA guide
aaugguuuccuggguuucugg

SEQ ID NO: 21469 - RNA, 21 nt, Artificial Sequence
  LRRK2 RNA guide
accacaaauaucaaucuccag

SEQ ID NO: 21470 - RNA, 21 nt, Artificial Sequence
  LRRK2 RNA guide
agaaacccaggaaaccauucu

SEQ ID NO: 21471 - RNA, 21 nt, Artificial Sequence
  LRRK2 RNA guide
agaaugguuuccuggguuucu

SEQ ID NO: 21472 - RNA, 21 nt, Artificial Sequence
  LRRK2 RNA guide
auaucaaucuccagaaaccca

SEQ ID NO: 21473 - RNA, 21 nt, Artificial Sequence
  LRRK2 RNA guide
aucaaucuccagaaacccagg

SEQ ID NO: 21474 - RNA, 21 nt, Artificial Sequence
  LRRK2 RNA guide
aucuccagaaacccaggaaac

SEQ ID NO: 21475 - RNA, 21 nt, Artificial Sequence
  LRRK2 RNA guide
auggaagaaugguuuccuggg

SEQ ID NO: 21476 - RNA, 21 nt, Artificial Sequence
  LRRK2 RNA guide
augguuuccuggguuucugga

SEQ ID NO: 21477 - RNA, 21 nt, Artificial Sequence
  LRRK2 RNA guide
caaauaucaaucuccagaaac

SEQ ID NO: 21478 - RNA, 21 nt, Artificial Sequence
  LRRK2 RNA guide
caaucuccagaaacccaggaa

SEQ ID NO: 21479 - RNA, 21 nt, Artificial Sequence
  LRRK2 RNA guide
cacaaauaucaaucuccagaa

SEQ ID NO: 21480 - RNA, 21 nt, Artificial Sequence
  LRRK2 RNA guide
caccacaaauaucaaucucca

SEQ ID NO: 21481 - RNA, 21 nt, Artificial Sequence
  LRRK2 RNA guide
cagaaacccaggaaaccauuc

SEQ ID NO: 21482 - RNA, 21 nt, Artificial Sequence
  LRRK2 RNA guide
cauggaagaaugguuuccugg

SEQ ID NO: 21483 - RNA, 21 nt, Artificial Sequence
  LRRK2 RNA guide
ccacaaauaucaaucuccaga

SEQ ID NO: 21484 - RNA, 21 nt, Artificial Sequence
  LRRK2 RNA guide
ccagaaacccaggaaaccauu

SEQ ID NO: 21485 - RNA, 21 nt, Artificial Sequence
  LRRK2 RNA guide
ccuggguuucuggagauugau

SEQ ID NO: 21486 - RNA, 21 nt, Artificial Sequence
  LRRK2 RNA guide
cuccagaaacccaggaaacca

SEQ ID NO: 21487 - RNA, 21 nt, Artificial Sequence
  LRRK2 RNA guide
cuggguuucuggagauugaua

SEQ ID NO: 21488 - RNA, 21 nt, Artificial Sequence
  LRRK2 RNA guide
cuucaccacaaauaucaaucu

SEQ ID NO: 21489 - RNA, 21 nt, Artificial Sequence
  LRRK2 RNA guide
gaaacccaggaaaccauucuu

SEQ ID NO: 21490 - RNA, 21 nt, Artificial Sequence
  LRRK2 RNA guide
gaagaaugguuuccuggguuu

SEQ ID NO: 21491 - RNA, 21 nt, Artificial Sequence
  LRRK2 RNA guide
gaaugguuuccuggguuucug

SEQ ID NO: 21492 - RNA, 21 nt, Artificial Sequence
  LRRK2 RNA guide
ggaagaaugguuuccuggguu

SEQ ID NO: 21493 - RNA, 21 nt, Artificial Sequence
  LRRK2 RNA guide
ggguuucuggagauugauauu

SEQ ID NO: 21494 - RNA, 21 nt, Artificial Sequence
  LRRK2 RNA guide
gguuuccuggguuucuggaga

SEQ ID NO: 21495 - RNA, 21 nt, Artificial Sequence
  LRRK2 RNA guide
gguuucuggagauugauauuu

SEQ ID NO: 21496 - RNA, 21 nt, Artificial Sequence
  LRRK2 RNA guide
guuuccuggguuucuggagau

SEQ ID NO: 21497 - RNA, 21 nt, Artificial Sequence
  LRRK2 RNA guide
guuucuggagauugauauuug

SEQ ID NO: 21498 - RNA, 21 nt, Artificial Sequence
  LRRK2 RNA guide
uaucaaucuccagaaacccag

SEQ ID NO: 21499 - RNA, 21 nt, Artificial Sequence
  LRRK2 RNA guide
ucaaucuccagaaacccagga

SEQ ID NO: 21500 - RNA, 21 nt, Artificial Sequence
  LRRK2 RNA guide
ucaccacaaauaucaaucucc

SEQ ID NO: 21501 - RNA, 21 nt, Artificial Sequence
  LRRK2 RNA guide
ucauggaagaaugguuuccug

SEQ ID NO: 21502 - RNA, 21 nt, Artificial Sequence
  LRRK2 RNA guide
uccagaaacccaggaaaccau

SEQ ID NO: 21503 - RNA, 21 nt, Artificial Sequence
  LRRK2 RNA guide
uccuggguuucuggagauuga

SEQ ID NO: 21504 - RNA, 21 nt, Artificial Sequence
  LRRK2 RNA guide
ucuccagaaacccaggaaacc

SEQ ID NO: 21505 - RNA, 21 nt, Artificial Sequence
  LRRK2 RNA guide
uggaagaaugguuuccugggu

SEQ ID NO: 21506 - RNA, 21 nt, Artificial Sequence
  LRRK2 RNA guide
uggguuucuggagauugauau

SEQ ID NO: 21507 - RNA, 21 nt, Artificial Sequence
  LRRK2 RNA guide
ugguuuccuggguuucuggag

SEQ ID NO: 21508 - RNA, 21 nt, Artificial Sequence
  LRRK2 RNA guide
uucaccacaaauaucaaucuc

SEQ ID NO: 21509 - RNA, 21 nt, Artificial Sequence
  LRRK2 RNA guide
uuccuggguuucuggagauug

SEQ ID NO: 21510 - RNA, 21 nt, Artificial Sequence
  LRRK2 RNA guide
uucuggagauugauauuugug

SEQ ID NO: 21511 - RNA, 21 nt, Artificial Sequence
  LRRK2 RNA guide
uuuccuggguuucuggagauu

SEQ ID NO: 21512 - RNA, 22 nt, Artificial Sequence
  LRRK2 RNA guide
aaauaucaaucuccagaaaccc

SEQ ID NO: 21513 - RNA, 22 nt, Artificial Sequence
  LRRK2 RNA guide
aagaaugguuuccuggguuucu

SEQ ID NO: 21514 - RNA, 22 nt, Artificial Sequence
  LRRK2 RNA guide
aauaucaaucuccagaaaccca

SEQ ID NO: 21515 - RNA, 22 nt, Artificial Sequence
  LRRK2 RNA guide
aaucuccagaaacccaggaaac

SEQ ID NO: 21516 - RNA, 22 nt, Artificial Sequence
  LRRK2 RNA guide
aaugguuuccuggguuucugga

SEQ ID NO: 21517 - RNA, 22 nt, Artificial Sequence
  LRRK2 RNA guide
acaaauaucaaucuccagaaac

SEQ ID NO: 21518 - RNA, 22 nt, Artificial Sequence
  LRRK2 RNA guide
accacaaauaucaaucuccaga

SEQ ID NO: 21519 - RNA, 22 nt, Artificial Sequence
  LRRK2 RNA guide
agaaacccaggaaaccauucuu

SEQ ID NO: 21520 - RNA, 22 nt, Artificial Sequence
  LRRK2 RNA guide
agaaugguuuccuggguuucug

SEQ ID NO: 21521 - RNA, 22 nt, Artificial Sequence
  LRRK2 RNA guide
auaucaaucuccagaaacccag

SEQ ID NO: 21522 - RNA, 22 nt, Artificial Sequence
  LRRK2 RNA guide
aucaaucuccagaaacccagga

SEQ ID NO: 21523 - RNA, 22 nt, Artificial Sequence
  LRRK2 RNA guide
aucuccagaaacccaggaaacc

SEQ ID NO: 21524 - RNA, 22 nt, Artificial Sequence
  LRRK2 RNA guide
auggaagaaugguuuccugggu

SEQ ID NO: 21525 - RNA, 22 nt, Artificial Sequence
  LRRK2 RNA guide
augguuuccuggguuucuggag

SEQ ID NO: 21526 - RNA, 22 nt, Artificial Sequence
  LRRK2 RNA guide
caaauaucaaucuccagaaacc

SEQ ID NO: 21527 - RNA, 22 nt, Artificial Sequence
  LRRK2 RNA guide
caaucuccagaaacccaggaaa

SEQ ID NO: 21528 - RNA, 22 nt, Artificial Sequence
  LRRK2 RNA guide
cacaaauaucaaucuccagaaa

SEQ ID NO: 21529 - RNA, 22 nt, Artificial Sequence
  LRRK2 RNA guide
caccacaaauaucaaucuccag

SEQ ID NO: 21530 - RNA, 22 nt, Artificial Sequence
  LRRK2 RNA guide
cagaaacccaggaaaccauucu

SEQ ID NO: 21531 - RNA, 22 nt, Artificial Sequence
  LRRK2 RNA guide
cauggaagaaugguuuccuggg

SEQ ID NO: 21532 - RNA, 22 nt, Artificial Sequence
  LRRK2 RNA guide
ccacaaauaucaaucuccagaa

SEQ ID NO: 21533 - RNA, 22 nt, Artificial Sequence
  LRRK2 RNA guide
ccagaaacccaggaaaccauuc

SEQ ID NO: 21534 - RNA, 22 nt, Artificial Sequence
  LRRK2 RNA guide
ccuggguuucuggagauugaua

SEQ ID NO: 21535 - RNA, 22 nt, Artificial Sequence
  LRRK2 RNA guide
ccuucaccacaaauaucaaucu

SEQ ID NO: 21536 - RNA, 22 nt, Artificial Sequence
  LRRK2 RNA guide
cucauggaagaaugguuuccug

SEQ ID NO: 21537 - RNA, 22 nt, Artificial Sequence
  LRRK2 RNA guide
cuccagaaacccaggaaaccau

SEQ ID NO: 21538 - RNA, 22 nt, Artificial Sequence
  LRRK2 RNA guide
cuggguuucuggagauugauau

SEQ ID NO: 21539 - RNA, 22 nt, Artificial Sequence
  LRRK2 RNA guide
cuucaccacaaauaucaaucuc

SEQ ID NO: 21540 - RNA, 22 nt, Artificial Sequence
  LRRK2 RNA guide
gaaacccaggaaaccauucuuc

SEQ ID NO: 21541 - RNA, 22 nt, Artificial Sequence
  LRRK2 RNA guide
gaagaaugguuuccuggguuuc

SEQ ID NO: 21542 - RNA, 22 nt, Artificial Sequence
  LRRK2 RNA guide
gaaugguuuccuggguuucugg

SEQ ID NO: 21543 - RNA, 22 nt, Artificial Sequence
  LRRK2 RNA guide
ggaagaaugguuuccuggguuu

SEQ ID NO: 21544 - RNA, 22 nt, Artificial Sequence
  LRRK2 RNA guide
ggguuucuggagauugauauuu

SEQ ID NO: 21545 - RNA, 22 nt, Artificial Sequence
  LRRK2 RNA guide
gguuuccuggguuucuggagau

SEQ ID NO: 21546 - RNA, 22 nt, Artificial Sequence
  LRRK2 RNA guide
gguuucuggagauugauauuug

SEQ ID NO: 21547 - RNA, 22 nt, Artificial Sequence
  LRRK2 RNA guide
guuuccuggguuucuggagauu

SEQ ID NO: 21548 - RNA, 22 nt, Artificial Sequence
  LRRK2 RNA guide
guuucuggagauugauauuugu

SEQ ID NO: 21549 - RNA, 22 nt, Artificial Sequence
  LRRK2 RNA guide
uaucaaucuccagaaacccagg

SEQ ID NO: 21550 - RNA, 22 nt, Artificial Sequence
  LRRK2 RNA guide
ucaaucuccagaaacccaggaa

SEQ ID NO: 21551 - RNA, 22 nt, Artificial Sequence
  LRRK2 RNA guide
ucaccacaaauaucaaucucca

SEQ ID NO: 21552 - RNA, 22 nt, Artificial Sequence
  LRRK2 RNA guide
ucauggaagaaugguuuccugg

SEQ ID NO: 21553 - RNA, 22 nt, Artificial Sequence
  LRRK2 RNA guide
uccagaaacccaggaaaccauu

SEQ ID NO: 21554 - RNA, 22 nt, Artificial Sequence
  LRRK2 RNA guide
uccuggguuucuggagauugau

SEQ ID NO: 21555 - RNA, 22 nt, Artificial Sequence
  LRRK2 RNA guide
ucuccagaaacccaggaaacca

SEQ ID NO: 21556 - RNA, 22 nt, Artificial Sequence
  LRRK2 RNA guide
uggaagaaugguuuccuggguu

SEQ ID NO: 21557 - RNA, 22 nt, Artificial Sequence
  LRRK2 RNA guide
uggguuucuggagauugauauu

SEQ ID NO: 21558 - RNA, 22 nt, Artificial Sequence
  LRRK2 RNA guide
ugguuuccuggguuucuggaga

SEQ ID NO: 21559 - RNA, 22 nt, Artificial Sequence
  LRRK2 RNA guide
uucaccacaaauaucaaucucc

SEQ ID NO: 21560 - RNA, 22 nt, Artificial Sequence
  LRRK2 RNA guide
uuccuggguuucuggagauuga

SEQ ID NO: 21561 - RNA, 22 nt, Artificial Sequence
  LRRK2 RNA guide
uucuggagauugauauuugugg

SEQ ID NO: 21562 - RNA, 22 nt, Artificial Sequence
  LRRK2 RNA guide
uuuccuggguuucuggagauug

SEQ ID NO: 21563 - RNA, 22 nt, Artificial Sequence
  LRRK2 RNA guide
uuucuggagauugauauuugug

SEQ ID NO: 21564 - RNA, 20 nt, Artificial Sequence
  LRRK2 RNA guide
aaugauggugaagaacauaa

SEQ ID NO: 21565 - RNA, 20 nt, Artificial Sequence
  LRRK2 RNA guide
aguuuuaaugauggugaaga

SEQ ID NO: 21566 - RNA, 20 nt, Artificial Sequence
  LRRK2 RNA guide
augauggugaagaacauaaa

SEQ ID NO: 21567 - RNA, 20 nt, Artificial Sequence
  LRRK2 RNA guide
caagucaucaaguaagauuu

SEQ ID NO: 21568 - RNA, 20 nt, Artificial Sequence
  LRRK2 RNA guide
gauggugaagaacauaaaaa

SEQ ID NO: 21569 - RNA, 20 nt, Artificial Sequence
  LRRK2 RNA guide
guuuuaaugauggugaagaa

SEQ ID NO: 21570 - RNA, 20 nt, Artificial Sequence
  LRRK2 RNA guide
uaaugauggugaagaacaua

SEQ ID NO: 21571 - RNA, 20 nt, Artificial Sequence
  LRRK2 RNA guide
ucaagucaucaaguaagauu

SEQ ID NO: 21572 - RNA, 20 nt, Artificial Sequence
  LRRK2 RNA guide
ugauggugaagaacauaaaa

SEQ ID NO: 21573 - RNA, 20 nt, Artificial Sequence
  LRRK2 RNA guide
uuaaugauggugaagaacau

SEQ ID NO: 21574 - RNA, 20 nt, Artificial Sequence
  LRRK2 RNA guide
uuauguucuucaccaucauu

SEQ ID NO: 21575 - RNA, 20 nt, Artificial Sequence
  LRRK2 RNA guide
uuuaaugauggugaagaaca

SEQ ID NO: 21576 - RNA, 20 nt, Artificial Sequence
  LRRK2 RNA guide
uuuauguucuucaccaucau

SEQ ID NO: 21577 - RNA, 20 nt, Artificial Sequence
  LRRK2 RNA guide
uuuuaaugauggugaagaac

SEQ ID NO: 21578 - RNA, 20 nt, Artificial Sequence
  LRRK2 RNA guide
uuuuauguucuucaccauca

SEQ ID NO: 21579 - RNA, 20 nt, Artificial Sequence
  LRRK2 RNA guide
uuuuuauguucuucaccauc

SEQ ID NO: 21580 - RNA, 21 nt, Artificial Sequence
  LRRK2 RNA guide
guuuuaaugauggugaagaac

SEQ ID NO: 21581 - RNA, 22 nt, Artificial Sequence
  LRRK2 RNA guide
aguuuuaaugauggugaagaac

SEQ ID NO: 21582 - RNA, 22 nt, Artificial Sequence
  LRRK2 RNA guide
caucaagucaucaaguaagauu

SEQ ID NO: 21583 - RNA, 22 nt, Artificial Sequence
  LRRK2 RNA guide
guuuuaaugauggugaagaaca

SEQ ID NO: 21584 - RNA, 20 nt, Artificial Sequence
  LRRK2 RNA guide
aacauaauauuucuacgcag

SEQ ID NO: 21585 - RNA, 20 nt, Artificial Sequence
  LRRK2 RNA guide
aauauuucuacgcaggucag

SEQ ID NO: 21586 - RNA, 20 nt, Artificial Sequence
  LRRK2 RNA guide
acauaauauuucuacgcagg

SEQ ID NO: 21587 - RNA, 20 nt, Artificial Sequence
  LRRK2 RNA guide
accugcguagaaauauuaug

SEQ ID NO: 21588 - RNA, 20 nt, Artificial Sequence
  LRRK2 RNA guide
acgcaggucagccaaaauca

SEQ ID NO: 21589 - RNA, 20 nt, Artificial Sequence
  LRRK2 RNA guide
acuugauuuuggcugaccug

SEQ ID NO: 21590 - RNA, 20 nt, Artificial Sequence
  LRRK2 RNA guide
auaauauuucuacgcagguc

SEQ ID NO: 21591 - RNA, 20 nt, Artificial Sequence
  LRRK2 RNA guide
auauuucuacgcaggucagc

SEQ ID NO: 21592 - RNA, 20 nt, Artificial Sequence
  LRRK2 RNA guide
auuucuacgcaggucagcca

SEQ ID NO: 21593 - RNA, 20 nt, Artificial Sequence
  LRRK2 RNA guide
auuuuggcugaccugcguag

SEQ ID NO: 21594 - RNA, 20 nt, Artificial Sequence
  LRRK2 RNA guide
caacauaauauuucuacgca

SEQ ID NO: 21595 - RNA, 20 nt, Artificial Sequence
  LRRK2 RNA guide
cauaauauuucuacgcaggu

SEQ ID NO: 21596 - RNA, 20 nt, Artificial Sequence
  LRRK2 RNA guide
ccugcguagaaauauuaugu

SEQ ID NO: 21597 - RNA, 20 nt, Artificial Sequence
  LRRK2 RNA guide
cuacgcaggucagccaaaau

SEQ ID NO: 21598 - RNA, 20 nt, Artificial Sequence
  LRRK2 RNA guide
cugaccugcguagaaauauu

SEQ ID NO: 21599 - RNA, 20 nt, Artificial Sequence
  LRRK2 RNA guide
cugacuugauuuuggcugac

SEQ ID NO: 21600 - RNA, 20 nt, Artificial Sequence
  LRRK2 RNA guide
cugcguagaaauauuauguu

SEQ ID NO: 21601 - RNA, 20 nt, Artificial Sequence
  LRRK2 RNA guide
cuugauuuuggcugaccugc

SEQ ID NO: 21602 - RNA, 20 nt, Artificial Sequence
  LRRK2 RNA guide
gaccugcguagaaauauuau

SEQ ID NO: 21603 - RNA, 20 nt, Artificial Sequence
  LRRK2 RNA guide
gacuugauuuuggcugaccu

SEQ ID NO: 21604 - RNA, 20 nt, Artificial Sequence
  LRRK2 RNA guide
gauuuuggcugaccugcgua

SEQ ID NO: 21605 - RNA, 20 nt, Artificial Sequence
  LRRK2 RNA guide
gcguagaaauauuauguuga

SEQ ID NO: 21606 - RNA, 20 nt, Artificial Sequence
  LRRK2 RNA guide
gcugaccugcguagaaauau

SEQ ID NO: 21607 - RNA, 20 nt, Artificial Sequence
  LRRK2 RNA guide
ggcugaccugcguagaaaua

SEQ ID NO: 21608 - RNA, 20 nt, Artificial Sequence
  LRRK2 RNA guide
uaauauuucuacgcagguca

SEQ ID NO: 21609 - RNA, 20 nt, Artificial Sequence
  LRRK2 RNA guide
uacgcaggucagccaaaauc

SEQ ID NO: 21610 - RNA, 20 nt, Artificial Sequence
  LRRK2 RNA guide
uauuucuacgcaggucagcc

SEQ ID NO: 21611 - RNA, 20 nt, Artificial Sequence
  LRRK2 RNA guide
ucaacauaauauuucuacgc

SEQ ID NO: 21612 - RNA, 20 nt, Artificial Sequence
  LRRK2 RNA guide
ucuacgcaggucagccaaaa

SEQ ID NO: 21613 - RNA, 20 nt, Artificial Sequence
  LRRK2 RNA guide
ugaccugcguagaaauauua

SEQ ID NO: 21614 - RNA, 20 nt, Artificial Sequence
  LRRK2 RNA guide
ugacuugauuuuggcugacc

SEQ ID NO: 21615 - RNA, 20 nt, Artificial Sequence
  LRRK2 RNA guide
ugauuuuggcugaccugcgu

SEQ ID NO: 21616 - RNA, 20 nt, Artificial Sequence
  LRRK2 RNA guide
ugcguagaaauauuauguug

SEQ ID NO: 21617 - RNA, 20 nt, Artificial Sequence
  LRRK2 RNA guide
uggcugaccugcguagaaau

SEQ ID NO: 21618 - RNA, 20 nt, Artificial Sequence
  LRRK2 RNA guide
uucuacgcaggucagccaaa

SEQ ID NO: 21619 - RNA, 20 nt, Artificial Sequence
  LRRK2 RNA guide
uugauuuuggcugaccugcg

SEQ ID NO: 21620 - RNA, 20 nt, Artificial Sequence
  LRRK2 RNA guide
uuggcugaccugcguagaaa

SEQ ID NO: 21621 - RNA, 20 nt, Artificial Sequence
  LRRK2 RNA guide
uuucuacgcaggucagccaa

SEQ ID NO: 21622 - RNA, 20 nt, Artificial Sequence
  LRRK2 RNA guide
uuuggcugaccugcguagaa

SEQ ID NO: 21623 - RNA, 20 nt, Artificial Sequence
  LRRK2 RNA guide
uuuuggcugaccugcguaga

SEQ ID NO: 21624 - RNA, 21 nt, Artificial Sequence
  LRRK2 RNA guide
aacauaauauuucuacgcagg

SEQ ID NO: 21625 - RNA, 21 nt, Artificial Sequence
  LRRK2 RNA guide
aauauuucuacgcaggucagc

SEQ ID NO: 21626 - RNA, 21 nt, Artificial Sequence
  LRRK2 RNA guide
acauaauauuucuacgcaggu

SEQ ID NO: 21627 - RNA, 21 nt, Artificial Sequence
  LRRK2 RNA guide
accugcguagaaauauuaugu

SEQ ID NO: 21628 - RNA, 21 nt, Artificial Sequence
  LRRK2 RNA guide
acgcaggucagccaaaaucaa

SEQ ID NO: 21629 - RNA, 21 nt, Artificial Sequence
  LRRK2 RNA guide
acuugauuuuggcugaccugc

SEQ ID NO: 21630 - RNA, 21 nt, Artificial Sequence
  LRRK2 RNA guide
auaauauuucuacgcagguca

SEQ ID NO: 21631 - RNA, 21 nt, Artificial Sequence
  LRRK2 RNA guide
auauuucuacgcaggucagcc

SEQ ID NO: 21632 - RNA, 21 nt, Artificial Sequence
  LRRK2 RNA guide
auuucuacgcaggucagccaa

SEQ ID NO: 21633 - RNA, 21 nt, Artificial Sequence
  LRRK2 RNA guide
auuuuggcugaccugcguaga

SEQ ID NO: 21634 - RNA, 21 nt, Artificial Sequence
  LRRK2 RNA guide
caacauaauauuucuacgcag

SEQ ID NO: 21635 - RNA, 21 nt, Artificial Sequence
  LRRK2 RNA guide
cauaauauuucuacgcagguc

SEQ ID NO: 21636 - RNA, 21 nt, Artificial Sequence
  LRRK2 RNA guide
ccugacuugauuuuggcugac

SEQ ID NO: 21637 - RNA, 21 nt, Artificial Sequence
  LRRK2 RNA guide
ccugcguagaaauauuauguu

SEQ ID NO: 21638 - RNA, 21 nt, Artificial Sequence
  LRRK2 RNA guide
cuacgcaggucagccaaaauc

SEQ ID NO: 21639 - RNA, 21 nt, Artificial Sequence
  LRRK2 RNA guide
cugaccugcguagaaauauua

SEQ ID NO: 21640 - RNA, 21 nt, Artificial Sequence
  LRRK2 RNA guide
cugacuugauuuuggcugacc

SEQ ID NO: 21641 - RNA, 21 nt, Artificial Sequence
  LRRK2 RNA guide
cugcguagaaauauuauguug

SEQ ID NO: 21642 - RNA, 21 nt, Artificial Sequence
  LRRK2 RNA guide
cuugauuuuggcugaccugcg

SEQ ID NO: 21643 - RNA, 21 nt, Artificial Sequence
  LRRK2 RNA guide
gaccugcguagaaauauuaug

SEQ ID NO: 21644 - RNA, 21 nt, Artificial Sequence
  LRRK2 RNA guide
gacuugauuuuggcugaccug

SEQ ID NO: 21645 - RNA, 21 nt, Artificial Sequence
  LRRK2 RNA guide
gauuuuggcugaccugcguag

SEQ ID NO: 21646 - RNA, 21 nt, Artificial Sequence
  LRRK2 RNA guide
gcugaccugcguagaaauauu

SEQ ID NO: 21647 - RNA, 21 nt, Artificial Sequence
  LRRK2 RNA guide
ggcugaccugcguagaaauau

SEQ ID NO: 21648 - RNA, 21 nt, Artificial Sequence
  LRRK2 RNA guide
uaauauuucuacgcaggucag

SEQ ID NO: 21649 - RNA, 21 nt, Artificial Sequence
  LRRK2 RNA guide
uacgcaggucagccaaaauca

SEQ ID NO: 21650 - RNA, 21 nt, Artificial Sequence
  LRRK2 RNA guide
uauuucuacgcaggucagcca

SEQ ID NO: 21651 - RNA, 21 nt, Artificial Sequence
  LRRK2 RNA guide
ucuacgcaggucagccaaaau

SEQ ID NO: 21652 - RNA, 21 nt, Artificial Sequence
  LRRK2 RNA guide
ugaccugcguagaaauauuau

SEQ ID NO: 21653 - RNA, 21 nt, Artificial Sequence
  LRRK2 RNA guide
ugacuugauuuuggcugaccu

SEQ ID NO: 21654 - RNA, 21 nt, Artificial Sequence
  LRRK2 RNA guide
ugauuuuggcugaccugcgua

SEQ ID NO: 21655 - RNA, 21 nt, Artificial Sequence
  LRRK2 RNA guide
uggcugaccugcguagaaaua

SEQ ID NO: 21656 - RNA, 21 nt, Artificial Sequence
  LRRK2 RNA guide
uucuacgcaggucagccaaaa

SEQ ID NO: 21657 - RNA, 21 nt, Artificial Sequence
  LRRK2 RNA guide
uugauuuuggcugaccugcgu

SEQ ID NO: 21658 - RNA, 21 nt, Artificial Sequence
  LRRK2 RNA guide
uuggcugaccugcguagaaau

SEQ ID NO: 21659 - RNA, 21 nt, Artificial Sequence
  LRRK2 RNA guide
uuucuacgcaggucagccaaa

SEQ ID NO: 21660 - RNA, 21 nt, Artificial Sequence
  LRRK2 RNA guide
uuuggcugaccugcguagaaa

SEQ ID NO: 21661 - RNA, 21 nt, Artificial Sequence
  LRRK2 RNA guide
uuuuggcugaccugcguagaa

SEQ ID NO: 21662 - RNA, 22 nt, Artificial Sequence
  LRRK2 RNA guide
aacauaauauuucuacgcaggu

SEQ ID NO: 21663 - RNA, 22 nt, Artificial Sequence
  LRRK2 RNA guide
aauauuucuacgcaggucagcc

SEQ ID NO: 21664 - RNA, 22 nt, Artificial Sequence
  LRRK2 RNA guide
acauaauauuucuacgcagguc

SEQ ID NO: 21665 - RNA, 22 nt, Artificial Sequence
  LRRK2 RNA guide
accugcguagaaauauuauguu

SEQ ID NO: 21666 - RNA, 22 nt, Artificial Sequence
  LRRK2 RNA guide
acgcaggucagccaaaaucaag

SEQ ID NO: 21667 - RNA, 22 nt, Artificial Sequence
  LRRK2 RNA guide
acuugauuuuggcugaccugcg

SEQ ID NO: 21668 - RNA, 22 nt, Artificial Sequence
  LRRK2 RNA guide
auaauauuucuacgcaggucag

SEQ ID NO: 21669 - RNA, 22 nt, Artificial Sequence
  LRRK2 RNA guide
auauuucuacgcaggucagcca

SEQ ID NO: 21670 - RNA, 22 nt, Artificial Sequence
  LRRK2 RNA guide
auuucuacgcaggucagccaaa

SEQ ID NO: 21671 - RNA, 22 nt, Artificial Sequence
  LRRK2 RNA guide
auuuuggcugaccugcguagaa

SEQ ID NO: 21672 - RNA, 22 nt, Artificial Sequence
  LRRK2 RNA guide
caacauaauauuucuacgcagg

SEQ ID NO: 21673 - RNA, 22 nt, Artificial Sequence
  LRRK2 RNA guide
cauaauauuucuacgcagguca

SEQ ID NO: 21674 - RNA, 22 nt, Artificial Sequence
  LRRK2 RNA guide
cccugacuugauuuuggcugac

SEQ ID NO: 21675 - RNA, 22 nt, Artificial Sequence
  LRRK2 RNA guide
ccugacuugauuuuggcugacc

SEQ ID NO: 21676 - RNA, 22 nt, Artificial Sequence
  LRRK2 RNA guide
ccugcguagaaauauuauguug

SEQ ID NO: 21677 - RNA, 22 nt, Artificial Sequence
  LRRK2 RNA guide
cuacgcaggucagccaaaauca

SEQ ID NO: 21678 - RNA, 22 nt, Artificial Sequence
  LRRK2 RNA guide
cugaccugcguagaaauauuau

SEQ ID NO: 21679 - RNA, 22 nt, Artificial Sequence
  LRRK2 RNA guide
cugacuugauuuuggcugaccu

SEQ ID NO: 21680 - RNA, 22 nt, Artificial Sequence
  LRRK2 RNA guide
cugcguagaaauauuauguuga

SEQ ID NO: 21681 - RNA, 22 nt, Artificial Sequence
  LRRK2 RNA guide
cuugauuuuggcugaccugcgu

SEQ ID NO: 21682 - RNA, 22 nt, Artificial Sequence
  LRRK2 RNA guide
gaccugcguagaaauauuaugu

SEQ ID NO: 21683 - RNA, 22 nt, Artificial Sequence
  LRRK2 RNA guide
gacuugauuuuggcugaccugc

SEQ ID NO: 21684 - RNA, 22 nt, Artificial Sequence
  LRRK2 RNA guide
gauuuuggcugaccugcguaga

SEQ ID NO: 21685 - RNA, 22 nt, Artificial Sequence
  LRRK2 RNA guide
gcugaccugcguagaaauauua

SEQ ID NO: 21686 - RNA, 22 nt, Artificial Sequence
  LRRK2 RNA guide
ggcugaccugcguagaaauauu

SEQ ID NO: 21687 - RNA, 22 nt, Artificial Sequence
  LRRK2 RNA guide
uaauauuucuacgcaggucagc

SEQ ID NO: 21688 - RNA, 22 nt, Artificial Sequence
  LRRK2 RNA guide
uacgcaggucagccaaaaucaa

SEQ ID NO: 21689 - RNA, 22 nt, Artificial Sequence
  LRRK2 RNA guide
uauuucuacgcaggucagccaa

SEQ ID NO: 21690 - RNA, 22 nt, Artificial Sequence
  LRRK2 RNA guide
ucaacauaauauuucuacgcag

SEQ ID NO: 21691 - RNA, 22 nt, Artificial Sequence
  LRRK2 RNA guide
ucuacgcaggucagccaaaauc

SEQ ID NO: 21692 - RNA, 22 nt, Artificial Sequence
  LRRK2 RNA guide
ugaccugcguagaaauauuaug

SEQ ID NO: 21693 - RNA, 22 nt, Artificial Sequence
  LRRK2 RNA guide
ugacuugauuuuggcugaccug

SEQ ID NO: 21694 - RNA, 22 nt, Artificial Sequence
  LRRK2 RNA guide
ugauuuuggcugaccugcguag

SEQ ID NO: 21695 - RNA, 22 nt, Artificial Sequence
  LRRK2 RNA guide
uggcugaccugcguagaaauau

SEQ ID NO: 21696 - RNA, 22 nt, Artificial Sequence
  LRRK2 RNA guide
uucuacgcaggucagccaaaau

SEQ ID NO: 21697 - RNA, 22 nt, Artificial Sequence
  LRRK2 RNA guide
uugauuuuggcugaccugcgua

SEQ ID NO: 21698 - RNA, 22 nt, Artificial Sequence
  LRRK2 RNA guide
uuggcugaccugcguagaaaua

SEQ ID NO: 21699 - RNA, 22 nt, Artificial Sequence
  LRRK2 RNA guide
uuucuacgcaggucagccaaaa

SEQ ID NO: 21700 - RNA, 22 nt, Artificial Sequence
  LRRK2 RNA guide
uuuggcugaccugcguagaaau

SEQ ID NO: 21701 - RNA, 22 nt, Artificial Sequence
  LRRK2 RNA guide
uuuuggcugaccugcguagaaa

SEQ ID NO: 21702 - RNA, 20 nt, Artificial Sequence
  LRRK2 RNA guide
aacacaauauuucuaggcag

SEQ ID NO: 21703 - RNA, 20 nt, Artificial Sequence
  LRRK2 RNA guide
aacucaucauuauucaacac

SEQ ID NO: 21704 - RNA, 20 nt, Artificial Sequence
  LRRK2 RNA guide
acaauauuucuaggcagguc

SEQ ID NO: 21705 - RNA, 20 nt, Artificial Sequence
  LRRK2 RNA guide
acacaauauuucuaggcagg

SEQ ID NO: 21706 - RNA, 20 nt, Artificial Sequence
  LRRK2 RNA guide
accugccuagaaauauugug

SEQ ID NO: 21707 - RNA, 20 nt, Artificial Sequence
  LRRK2 RNA guide
acucaucauuauucaacaca

SEQ ID NO: 21708 - RNA, 20 nt, Artificial Sequence
  LRRK2 RNA guide
auuccaacucaucauuauuc

SEQ ID NO: 21709 - RNA, 20 nt, Artificial Sequence
  LRRK2 RNA guide
caacacaauauuucuaggca

SEQ ID NO: 21710 - RNA, 20 nt, Artificial Sequence
  LRRK2 RNA guide
caacucaucauuauucaaca

SEQ ID NO: 21711 - RNA, 20 nt, Artificial Sequence
  LRRK2 RNA guide
cacaauauuucuaggcaggu

SEQ ID NO: 21712 - RNA, 20 nt, Artificial Sequence
  LRRK2 RNA guide
ccaacucaucauuauucaac

SEQ ID NO: 21713 - RNA, 20 nt, Artificial Sequence
  LRRK2 RNA guide
ccuagaaauauuguguugaa

SEQ ID NO: 21714 - RNA, 20 nt, Artificial Sequence
  LRRK2 RNA guide
ccugccuagaaauauugugu

SEQ ID NO: 21715 - RNA, 20 nt, Artificial Sequence
  LRRK2 RNA guide
cucaucauuauucaacacaa

SEQ ID NO: 21716 - RNA, 20 nt, Artificial Sequence
  LRRK2 RNA guide
cugaccugccuagaaauauu

SEQ ID NO: 21717 - RNA, 20 nt, Artificial Sequence
  LRRK2 RNA guide
cugccuagaaauauuguguu

SEQ ID NO: 21718 - RNA, 20 nt, Artificial Sequence
  LRRK2 RNA guide
gaccugccuagaaauauugu

SEQ ID NO: 21719 - RNA, 20 nt, Artificial Sequence
  LRRK2 RNA guide
gccuagaaauauuguguuga

SEQ ID NO: 21720 - RNA, 20 nt, Artificial Sequence
  LRRK2 RNA guide
gcugaccugccuagaaauau

SEQ ID NO: 21721 - RNA, 20 nt, Artificial Sequence
  LRRK2 RNA guide
ggcugaccugccuagaaaua

SEQ ID NO: 21722 - RNA, 20 nt, Artificial Sequence
  LRRK2 RNA guide
ucaacacaauauuucuaggc

SEQ ID NO: 21723 - RNA, 20 nt, Artificial Sequence
  LRRK2 RNA guide
uccaacucaucauuauucaa

SEQ ID NO: 21724 - RNA, 20 nt, Artificial Sequence
  LRRK2 RNA guide
ugaccugccuagaaauauug

SEQ ID NO: 21725 - RNA, 20 nt, Artificial Sequence
  LRRK2 RNA guide
ugccuagaaauauuguguug

SEQ ID NO: 21726 - RNA, 20 nt, Artificial Sequence
  LRRK2 RNA guide
uggcugaccugccuagaaau

SEQ ID NO: 21727 - RNA, 20 nt, Artificial Sequence
  LRRK2 RNA guide
uucaacacaauauuucuagg

SEQ ID NO: 21728 - RNA, 20 nt, Artificial Sequence
  LRRK2 RNA guide
uuggcugaccugccuagaaa

SEQ ID NO: 21729 - RNA, 20 nt, Artificial Sequence
  LRRK2 RNA guide
uuguguugaauaaugaugag

SEQ ID NO: 21730 - RNA, 21 nt, Artificial Sequence
  LRRK2 RNA guide
aacacaauauuucuaggcagg

SEQ ID NO: 21731 - RNA, 21 nt, Artificial Sequence
  LRRK2 RNA guide
acaauauuucuaggcagguca

SEQ ID NO: 21732 - RNA, 21 nt, Artificial Sequence
  LRRK2 RNA guide
acacaauauuucuaggcaggu

SEQ ID NO: 21733 - RNA, 21 nt, Artificial Sequence
  LRRK2 RNA guide
accugccuagaaauauugugu

SEQ ID NO: 21734 - RNA, 21 nt, Artificial Sequence
  LRRK2 RNA guide
caacacaauauuucuaggcag

SEQ ID NO: 21735 - RNA, 21 nt, Artificial Sequence
  LRRK2 RNA guide
caacucaucauuauucaacac

SEQ ID NO: 21736 - RNA, 21 nt, Artificial Sequence
  LRRK2 RNA guide
cacaauauuucuaggcagguc

SEQ ID NO: 21737 - RNA, 21 nt, Artificial Sequence
  LRRK2 RNA guide
ccaacucaucauuauucaaca

SEQ ID NO: 21738 - RNA, 21 nt, Artificial Sequence
  LRRK2 RNA guide
ccugccuagaaauauuguguu

SEQ ID NO: 21739 - RNA, 21 nt, Artificial Sequence
  LRRK2 RNA guide
cugaccugccuagaaauauug

SEQ ID NO: 21740 - RNA, 21 nt, Artificial Sequence
  LRRK2 RNA guide
cugccuagaaauauuguguug

SEQ ID NO: 21741 - RNA, 21 nt, Artificial Sequence
  LRRK2 RNA guide
gaccugccuagaaauauugug

SEQ ID NO: 21742 - RNA, 21 nt, Artificial Sequence
  LRRK2 RNA guide
gccuagaaauauuguguugaa

SEQ ID NO: 21743 - RNA, 21 nt, Artificial Sequence
  LRRK2 RNA guide
gcugaccugccuagaaauauu

SEQ ID NO: 21744 - RNA, 21 nt, Artificial Sequence
  LRRK2 RNA guide
ggcugaccugccuagaaauau

SEQ ID NO: 21745 - RNA, 21 nt, Artificial Sequence
  LRRK2 RNA guide
ucaacacaauauuucuaggca

SEQ ID NO: 21746 - RNA, 21 nt, Artificial Sequence
  LRRK2 RNA guide
uccaacucaucauuauucaac

SEQ ID NO: 21747 - RNA, 21 nt, Artificial Sequence
  LRRK2 RNA guide
ugaccugccuagaaauauugu

SEQ ID NO: 21748 - RNA, 21 nt, Artificial Sequence
  LRRK2 RNA guide
ugccuagaaauauuguguuga

SEQ ID NO: 21749 - RNA, 21 nt, Artificial Sequence
  LRRK2 RNA guide
uggcugaccugccuagaaaua

SEQ ID NO: 21750 - RNA, 21 nt, Artificial Sequence
  LRRK2 RNA guide
uucaacacaauauuucuaggc

SEQ ID NO: 21751 - RNA, 21 nt, Artificial Sequence
  LRRK2 RNA guide
uuggcugaccugccuagaaau

SEQ ID NO: 21752 - RNA, 21 nt, Artificial Sequence
  LRRK2 RNA guide
uuuggcugaccugccuagaaa

SEQ ID NO: 21753 - RNA, 22 nt, Artificial Sequence
  LRRK2 RNA guide
aacacaauauuucuaggcaggu

SEQ ID NO: 21754 - RNA, 22 nt, Artificial Sequence
  LRRK2 RNA guide
acaauauuucuaggcaggucag

SEQ ID NO: 21755 - RNA, 22 nt, Artificial Sequence
  LRRK2 RNA guide
acacaauauuucuaggcagguc

SEQ ID NO: 21756 - RNA, 22 nt, Artificial Sequence
  LRRK2 RNA guide
accugccuagaaauauuguguu

SEQ ID NO: 21757 - RNA, 22 nt, Artificial Sequence
  LRRK2 RNA guide
auucaacacaauauuucuaggc

SEQ ID NO: 21758 - RNA, 22 nt, Artificial Sequence
  LRRK2 RNA guide
caacacaauauuucuaggcagg

SEQ ID NO: 21759 - RNA, 22 nt, Artificial Sequence
  LRRK2 RNA guide
caacucaucauuauucaacaca

SEQ ID NO: 21760 - RNA, 22 nt, Artificial Sequence
  LRRK2 RNA guide
cacaauauuucuaggcagguca

SEQ ID NO: 21761 - RNA, 22 nt, Artificial Sequence
  LRRK2 RNA guide
ccaacucaucauuauucaacac

SEQ ID NO: 21762 - RNA, 22 nt, Artificial Sequence
  LRRK2 RNA guide
ccugccuagaaauauuguguug

SEQ ID NO: 21763 - RNA, 22 nt, Artificial Sequence
  LRRK2 RNA guide
cugaccugccuagaaauauugu

SEQ ID NO: 21764 - RNA, 22 nt, Artificial Sequence
  LRRK2 RNA guide
cugccuagaaauauuguguuga

SEQ ID NO: 21765 - RNA, 22 nt, Artificial Sequence
  LRRK2 RNA guide
gaccugccuagaaauauugugu

SEQ ID NO: 21766 - RNA, 22 nt, Artificial Sequence
  LRRK2 RNA guide
gccuagaaauauuguguugaau

SEQ ID NO: 21767 - RNA, 22 nt, Artificial Sequence
  LRRK2 RNA guide
gcugaccugccuagaaauauug

SEQ ID NO: 21768 - RNA, 22 nt, Artificial Sequence
  LRRK2 RNA guide
ggcugaccugccuagaaauauu

SEQ ID NO: 21769 - RNA, 22 nt, Artificial Sequence
  LRRK2 RNA guide
ucaacacaauauuucuaggcag

SEQ ID NO: 21770 - RNA, 22 nt, Artificial Sequence
  LRRK2 RNA guide
uccaacucaucauuauucaaca

SEQ ID NO: 21771 - RNA, 22 nt, Artificial Sequence
  LRRK2 RNA guide
ugaccugccuagaaauauugug

SEQ ID NO: 21772 - RNA, 22 nt, Artificial Sequence
  LRRK2 RNA guide
ugccuagaaauauuguguugaa

SEQ ID NO: 21773 - RNA, 22 nt, Artificial Sequence
  LRRK2 RNA guide
uggcugaccugccuagaaauau

SEQ ID NO: 21774 - RNA, 22 nt, Artificial Sequence
  LRRK2 RNA guide
uguguugaauaaugaugaguug

SEQ ID NO: 21775 - RNA, 22 nt, Artificial Sequence
  LRRK2 RNA guide
uucaacacaauauuucuaggca

SEQ ID NO: 21776 - RNA, 22 nt, Artificial Sequence
  LRRK2 RNA guide
uuccaacucaucauuauucaac

SEQ ID NO: 21777 - RNA, 22 nt, Artificial Sequence
  LRRK2 RNA guide
uuggcugaccugccuagaaaua

SEQ ID NO: 21778 - RNA, 22 nt, Artificial Sequence
  LRRK2 RNA guide
uuuggcugaccugccuagaaau

SEQ ID NO: 21779 - RNA, 22 nt, Artificial Sequence
  LRRK2 RNA guide
uuuuggcugaccugccuagaaa

SEQ ID NO: 21780 - RNA, 20 nt, Artificial Sequence
  LRRK2 RNA guide
aacguaauauuucuaggcag

SEQ ID NO: 21781 - RNA, 20 nt, Artificial Sequence
  LRRK2 RNA guide
aacucaucauuauucaacgu

SEQ ID NO: 21782 - RNA, 20 nt, Artificial Sequence
  LRRK2 RNA guide
accugccuagaaauauuacg

SEQ ID NO: 21783 - RNA, 20 nt, Artificial Sequence
  LRRK2 RNA guide
acguaauauuucuaggcagg

SEQ ID NO: 21784 - RNA, 20 nt, Artificial Sequence
  LRRK2 RNA guide
acguugaauaaugaugaguu

SEQ ID NO: 21785 - RNA, 20 nt, Artificial Sequence
  LRRK2 RNA guide
acucaucauuauucaacgua

SEQ ID NO: 21786 - RNA, 20 nt, Artificial Sequence
  LRRK2 RNA guide
caacguaauauuucuaggca

SEQ ID NO: 21787 - RNA, 20 nt, Artificial Sequence
  LRRK2 RNA guide
caacucaucauuauucaacg

SEQ ID NO: 21788 - RNA, 20 nt, Artificial Sequence
  LRRK2 RNA guide
ccuagaaauauuacguugaa

SEQ ID NO: 21789 - RNA, 20 nt, Artificial Sequence
  LRRK2 RNA guide
ccugccuagaaauauuacgu

SEQ ID NO: 21790 - RNA, 20 nt, Artificial Sequence
  LRRK2 RNA guide
cguaauauuucuaggcaggu

SEQ ID NO: 21791 - RNA, 20 nt, Artificial Sequence
  LRRK2 RNA guide
cucaucauuauucaacguaa

SEQ ID NO: 21792 - RNA, 20 nt, Artificial Sequence
  LRRK2 RNA guide
cugccuagaaauauuacguu

SEQ ID NO: 21793 - RNA, 20 nt, Artificial Sequence
  LRRK2 RNA guide
gaccugccuagaaauauuac

SEQ ID NO: 21794 - RNA, 20 nt, Artificial Sequence
  LRRK2 RNA guide
gccuagaaauauuacguuga

SEQ ID NO: 21795 - RNA, 20 nt, Artificial Sequence
  LRRK2 RNA guide
uacguugaauaaugaugagu

SEQ ID NO: 21796 - RNA, 20 nt, Artificial Sequence
  LRRK2 RNA guide
ucaacguaauauuucuaggc

SEQ ID NO: 21797 - RNA, 20 nt, Artificial Sequence
  LRRK2 RNA guide
ugaccugccuagaaauauua

SEQ ID NO: 21798 - RNA, 20 nt, Artificial Sequence
  LRRK2 RNA guide
ugccuagaaauauuacguug

SEQ ID NO: 21799 - RNA, 20 nt, Artificial Sequence
  LRRK2 RNA guide
uuacguugaauaaugaugag

SEQ ID NO: 21800 - RNA, 20 nt, Artificial Sequence
  LRRK2 RNA guide
uucaacguaauauuucuagg

SEQ ID NO: 21801 - RNA, 21 nt, Artificial Sequence
  LRRK2 RNA guide
aacguaauauuucuaggcagg

SEQ ID NO: 21802 - RNA, 21 nt, Artificial Sequence
  LRRK2 RNA guide
accugccuagaaauauuacgu

SEQ ID NO: 21803 - RNA, 21 nt, Artificial Sequence
  LRRK2 RNA guide
acguaauauuucuaggcaggu

SEQ ID NO: 21804 - RNA, 21 nt, Artificial Sequence
  LRRK2 RNA guide
acguugaauaaugaugaguug

SEQ ID NO: 21805 - RNA, 21 nt, Artificial Sequence
  LRRK2 RNA guide
caacguaauauuucuaggcag

SEQ ID NO: 21806 - RNA, 21 nt, Artificial Sequence
  LRRK2 RNA guide
caacucaucauuauucaacgu

SEQ ID NO: 21807 - RNA, 21 nt, Artificial Sequence
  LRRK2 RNA guide
ccaacucaucauuauucaacg

SEQ ID NO: 21808 - RNA, 21 nt, Artificial Sequence
  LRRK2 RNA guide
ccugccuagaaauauuacguu

SEQ ID NO: 21809 - RNA, 21 nt, Artificial Sequence
  LRRK2 RNA guide
cguaauauuucuaggcagguc

SEQ ID NO: 21810 - RNA, 21 nt, Artificial Sequence
  LRRK2 RNA guide
cugaccugccuagaaauauua

SEQ ID NO: 21811 - RNA, 21 nt, Artificial Sequence
  LRRK2 RNA guide
cugccuagaaauauuacguug

SEQ ID NO: 21812 - RNA, 21 nt, Artificial Sequence
  LRRK2 RNA guide
gaccugccuagaaauauuacg

SEQ ID NO: 21813 - RNA, 21 nt, Artificial Sequence
  LRRK2 RNA guide
gccuagaaauauuacguugaa

SEQ ID NO: 21814 - RNA, 21 nt, Artificial Sequence
  LRRK2 RNA guide
ucaacguaauauuucuaggca

SEQ ID NO: 21815 - RNA, 21 nt, Artificial Sequence
  LRRK2 RNA guide
ugaccugccuagaaauauuac

SEQ ID NO: 21816 - RNA, 21 nt, Artificial Sequence
  LRRK2 RNA guide
ugccuagaaauauuacguuga

SEQ ID NO: 21817 - RNA, 21 nt, Artificial Sequence
  LRRK2 RNA guide
uucaacguaauauuucuaggc

SEQ ID NO: 21818 - RNA, 22 nt, Artificial Sequence
  LRRK2 RNA guide
aacguaauauuucuaggcaggu

SEQ ID NO: 21819 - RNA, 22 nt, Artificial Sequence
  LRRK2 RNA guide
accugccuagaaauauuacguu

SEQ ID NO: 21820 - RNA, 22 nt, Artificial Sequence
  LRRK2 RNA guide
acguaauauuucuaggcagguc

SEQ ID NO: 21821 - RNA, 22 nt, Artificial Sequence
  LRRK2 RNA guide
acguugaauaaugaugaguugg

SEQ ID NO: 21822 - RNA, 22 nt, Artificial Sequence
  LRRK2 RNA guide
auucaacguaauauuucuaggc

SEQ ID NO: 21823 - RNA, 22 nt, Artificial Sequence
  LRRK2 RNA guide
caacguaauauuucuaggcagg

SEQ ID NO: 21824 - RNA, 22 nt, Artificial Sequence
  LRRK2 RNA guide
caacucaucauuauucaacgua

SEQ ID NO: 21825 - RNA, 22 nt, Artificial Sequence
  LRRK2 RNA guide
ccaacucaucauuauucaacgu

SEQ ID NO: 21826 - RNA, 22 nt, Artificial Sequence
  LRRK2 RNA guide
ccugccuagaaauauuacguug

SEQ ID NO: 21827 - RNA, 22 nt, Artificial Sequence
  LRRK2 RNA guide
cguaauauuucuaggcagguca

SEQ ID NO: 21828 - RNA, 22 nt, Artificial Sequence
  LRRK2 RNA guide
cugaccugccuagaaauauuac

SEQ ID NO: 21829 - RNA, 22 nt, Artificial Sequence
  LRRK2 RNA guide
cugccuagaaauauuacguuga

SEQ ID NO: 21830 - RNA, 22 nt, Artificial Sequence
  LRRK2 RNA guide
gaccugccuagaaauauuacgu

SEQ ID NO: 21831 - RNA, 22 nt, Artificial Sequence
  LRRK2 RNA guide
gccuagaaauauuacguugaau

SEQ ID NO: 21832 - RNA, 22 nt, Artificial Sequence
  LRRK2 RNA guide
gcugaccugccuagaaauauua

SEQ ID NO: 21833 - RNA, 22 nt, Artificial Sequence
  LRRK2 RNA guide
uacguugaauaaugaugaguug

SEQ ID NO: 21834 - RNA, 22 nt, Artificial Sequence
  LRRK2 RNA guide
ucaacguaauauuucuaggcag

SEQ ID NO: 21835 - RNA, 22 nt, Artificial Sequence
  LRRK2 RNA guide
uccaacucaucauuauucaacg

SEQ ID NO: 21836 - RNA, 22 nt, Artificial Sequence
  LRRK2 RNA guide
ugaccugccuagaaauauuacg

SEQ ID NO: 21837 - RNA, 22 nt, Artificial Sequence
  LRRK2 RNA guide
ugccuagaaauauuacguugaa

SEQ ID NO: 21838 - RNA, 22 nt, Artificial Sequence
  LRRK2 RNA guide
uucaacguaauauuucuaggca

SEQ ID NO: 21839 - RNA, 20 nt, Artificial Sequence
  LRRK2 RNA guide
accugccuagaaauauuaug

SEQ ID NO: 21840 - RNA, 20 nt, Artificial Sequence
  LRRK2 RNA guide
caaauuccaacucaucauua

SEQ ID NO: 21841 - RNA, 20 nt, Artificial Sequence
  LRRK2 RNA guide
ccaacucaucauuauuaaac

SEQ ID NO: 21842 - RNA, 20 nt, Artificial Sequence
  LRRK2 RNA guide
ccugccuagaaauauuaugu

SEQ ID NO: 21843 - RNA, 20 nt, Artificial Sequence
  LRRK2 RNA guide
cugccuagaaauauuauguu

SEQ ID NO: 21844 - RNA, 20 nt, Artificial Sequence
  LRRK2 RNA guide
gaccugccuagaaauauuau

SEQ ID NO: 21845 - RNA, 20 nt, Artificial Sequence
  LRRK2 RNA guide
guuuaauaaugaugaguugg

SEQ ID NO: 21846 - RNA, 20 nt, Artificial Sequence
  LRRK2 RNA guide
uucaaauuccaacucaucau

SEQ ID NO: 21847 - RNA, 21 nt, Artificial Sequence
  LRRK2 RNA guide
accugccuagaaauauuaugu

SEQ ID NO: 21848 - RNA, 21 nt, Artificial Sequence
  LRRK2 RNA guide
gaccugccuagaaauauuaug

SEQ ID NO: 21849 - RNA, 21 nt, Artificial Sequence
  LRRK2 RNA guide
guucaaauuccaacucaucau

SEQ ID NO: 21850 - RNA, 21 nt, Artificial Sequence
  LRRK2 RNA guide
ugaccugccuagaaauauuau

SEQ ID NO: 21851 - RNA, 22 nt, Artificial Sequence
  LRRK2 RNA guide
accugccuagaaauauuauguu

SEQ ID NO: 21852 - RNA, 22 nt, Artificial Sequence
  LRRK2 RNA guide
ccugccuagaaauauuauguuu

SEQ ID NO: 21853 - RNA, 22 nt, Artificial Sequence
  LRRK2 RNA guide
cugaccugccuagaaauauuau

SEQ ID NO: 21854 - RNA, 22 nt, Artificial Sequence
  LRRK2 RNA guide
gaccugccuagaaauauuaugu

SEQ ID NO: 21855 - RNA, 22 nt, Artificial Sequence
  LRRK2 RNA guide
guucaaauuccaacucaucauu

SEQ ID NO: 21856 - RNA, 22 nt, Artificial Sequence
  LRRK2 RNA guide
ugaccugccuagaaauauuaug

SEQ ID NO: 21857 - RNA, 22 nt, Artificial Sequence
  LRRK2 RNA guide
uguucaaauuccaacucaucau

SEQ ID NO: 21858 - RNA, 20 nt, Artificial Sequence
  LRRK2 RNA guide
agcuuguucaaauuccaacu

SEQ ID NO: 21859 - RNA, 20 nt, Artificial Sequence
  LRRK2 RNA guide
ccaacuaaucauuauucaac

SEQ ID NO: 21860 - RNA, 20 nt, Artificial Sequence
  LRRK2 RNA guide
cuggagcuuguucaaauucc

SEQ ID NO: 21861 - RNA, 20 nt, Artificial Sequence
  LRRK2 RNA guide
cuuguucaaauuccaacuaa

SEQ ID NO: 21862 - RNA, 20 nt, Artificial Sequence
  LRRK2 RNA guide
gagcuuguucaaauuccaac

SEQ ID NO: 21863 - RNA, 20 nt, Artificial Sequence
  LRRK2 RNA guide
gauuaguuggaauuugaaca

SEQ ID NO: 21864 - RNA, 20 nt, Artificial Sequence
  LRRK2 RNA guide
gcuuguucaaauuccaacua

SEQ ID NO: 21865 - RNA, 20 nt, Artificial Sequence
  LRRK2 RNA guide
ggagcuuguucaaauuccaa

SEQ ID NO: 21866 - RNA, 20 nt, Artificial Sequence
  LRRK2 RNA guide
guucaaauuccaacuaauca

SEQ ID NO: 21867 - RNA, 20 nt, Artificial Sequence
  LRRK2 RNA guide
guugaauaaugauuaguugg

SEQ ID NO: 21868 - RNA, 20 nt, Artificial Sequence
  LRRK2 RNA guide
ugauuaguuggaauuugaac

SEQ ID NO: 21869 - RNA, 20 nt, Artificial Sequence
  LRRK2 RNA guide
uguucaaauuccaacuaauc

SEQ ID NO: 21870 - RNA, 20 nt, Artificial Sequence
  LRRK2 RNA guide
uuaguuggaauuugaacaag

SEQ ID NO: 21871 - RNA, 21 nt, Artificial Sequence
  LRRK2 RNA guide
agcuuguucaaauuccaacua

SEQ ID NO: 21872 - RNA, 21 nt, Artificial Sequence
  LRRK2 RNA guide
cuggagcuuguucaaauucca

SEQ ID NO: 21873 - RNA, 21 nt, Artificial Sequence
  LRRK2 RNA guide
gagcuuguucaaauuccaacu

SEQ ID NO: 21874 - RNA, 21 nt, Artificial Sequence
  LRRK2 RNA guide
gcuuguucaaauuccaacuaa

SEQ ID NO: 21875 - RNA, 21 nt, Artificial Sequence
  LRRK2 RNA guide
ggagcuuguucaaauuccaac

SEQ ID NO: 21876 - RNA, 21 nt, Artificial Sequence
  LRRK2 RNA guide
ucuggagcuuguucaaauucc

SEQ ID NO: 21877 - RNA, 21 nt, Artificial Sequence
  LRRK2 RNA guide
uggagcuuguucaaauuccaa

SEQ ID NO: 21878 - RNA, 21 nt, Artificial Sequence
  LRRK2 RNA guide
uuaguuggaauuugaacaagc

SEQ ID NO: 21879 - RNA, 22 nt, Artificial Sequence
  LRRK2 RNA guide
agcuuguucaaauuccaacuaa

SEQ ID NO: 21880 - RNA, 22 nt, Artificial Sequence
  LRRK2 RNA guide
auuaguuggaauuugaacaagc

SEQ ID NO: 21881 - RNA, 22 nt, Artificial Sequence
  LRRK2 RNA guide
cucuggagcuuguucaaauucc

SEQ ID NO: 21882 - RNA, 22 nt, Artificial Sequence
  LRRK2 RNA guide
cuggagcuuguucaaauuccaa

SEQ ID NO: 21883 - RNA, 22 nt, Artificial Sequence
  LRRK2 RNA guide
cuuguucaaauuccaacuaauc

SEQ ID NO: 21884 - RNA, 22 nt, Artificial Sequence
  LRRK2 RNA guide
gagcuuguucaaauuccaacua

SEQ ID NO: 21885 - RNA, 22 nt, Artificial Sequence
  LRRK2 RNA guide
gauuaguuggaauuugaacaag

SEQ ID NO: 21886 - RNA, 22 nt, Artificial Sequence
  LRRK2 RNA guide
gcuuguucaaauuccaacuaau

SEQ ID NO: 21887 - RNA, 22 nt, Artificial Sequence
  LRRK2 RNA guide
ggagcuuguucaaauuccaacu

SEQ ID NO: 21888 - RNA, 22 nt, Artificial Sequence
  LRRK2 RNA guide
ucuggagcuuguucaaauucca

SEQ ID NO: 21889 - RNA, 22 nt, Artificial Sequence
  LRRK2 RNA guide
uggagcuuguucaaauuccaac

SEQ ID NO: 21890 - RNA, 22 nt, Artificial Sequence
  LRRK2 RNA guide
uuaguuggaauuugaacaagcu

SEQ ID NO: 21891 - RNA, 20 nt, Artificial Sequence
  LRRK2 RNA guide
aaaaagaauuaccuaggaga

SEQ ID NO: 21892 - RNA, 20 nt, Artificial Sequence
  LRRK2 RNA guide
aaaagaauuaccuaggagaa

SEQ ID NO: 21893 - RNA, 20 nt, Artificial Sequence
  LRRK2 RNA guide
aaagaauuaccuaggagaag

SEQ ID NO: 21894 - RNA, 20 nt, Artificial Sequence
  LRRK2 RNA guide
aacaaaaagaauuaccuagg

SEQ ID NO: 21895 - RNA, 20 nt, Artificial Sequence
  LRRK2 RNA guide
aacaagcuccagagcuucuc

SEQ ID NO: 21896 - RNA, 20 nt, Artificial Sequence
  LRRK2 RNA guide
aagaauuaccuaggagaagc

SEQ ID NO: 21897 - RNA, 20 nt, Artificial Sequence
  LRRK2 RNA guide
aagcuccagagcuucuccua

SEQ ID NO: 21898 - RNA, 20 nt, Artificial Sequence
  LRRK2 RNA guide
aagcucuggagcuuguucaa

SEQ ID NO: 21899 - RNA, 20 nt, Artificial Sequence
  LRRK2 RNA guide
aauuaccuaggagaagcucu

SEQ ID NO: 21900 - RNA, 20 nt, Artificial Sequence
  LRRK2 RNA guide
aauuugaacaagcuccagag

SEQ ID NO: 21901 - RNA, 20 nt, Artificial Sequence
  LRRK2 RNA guide
acaaaaagaauuaccuagga

SEQ ID NO: 21902 - RNA, 20 nt, Artificial Sequence
  LRRK2 RNA guide
acaagcuccagagcuucucc

SEQ ID NO: 21903 - RNA, 20 nt, Artificial Sequence
  LRRK2 RNA guide
accuaggagaagcucuggag

SEQ ID NO: 21904 - RNA, 20 nt, Artificial Sequence
  LRRK2 RNA guide
agaagcucuggagcuuguuc

SEQ ID NO: 21905 - RNA, 20 nt, Artificial Sequence
  LRRK2 RNA guide
agaauuaccuaggagaagcu

SEQ ID NO: 21906 - RNA, 20 nt, Artificial Sequence
  LRRK2 RNA guide
agagcuucuccuagguaauu

SEQ ID NO: 21907 - RNA, 20 nt, Artificial Sequence
  LRRK2 RNA guide
agcuccagagcuucuccuag

SEQ ID NO: 21908 - RNA, 20 nt, Artificial Sequence
  LRRK2 RNA guide
agcucuggagcuuguucaaa

SEQ ID NO: 21909 - RNA, 20 nt, Artificial Sequence
  LRRK2 RNA guide
agcuucuccuagguaauucu

SEQ ID NO: 21910 - RNA, 20 nt, Artificial Sequence
  LRRK2 RNA guide
aggagaagcucuggagcuug

SEQ ID NO: 21911 - RNA, 20 nt, Artificial Sequence
  LRRK2 RNA guide
auuaccuaggagaagcucug

SEQ ID NO: 21912 - RNA, 20 nt, Artificial Sequence
  LRRK2 RNA guide
auuugaacaagcuccagagc

SEQ ID NO: 21913 - RNA, 20 nt, Artificial Sequence
  LRRK2 RNA guide
caaaaagaauuaccuaggag

SEQ ID NO: 21914 - RNA, 20 nt, Artificial Sequence
  LRRK2 RNA guide
caagcuccagagcuucuccu

SEQ ID NO: 21915 - RNA, 20 nt, Artificial Sequence
  LRRK2 RNA guide
cagagcuucuccuagguaau

SEQ ID NO: 21916 - RNA, 20 nt, Artificial Sequence
  LRRK2 RNA guide
ccagagcuucuccuagguaa

SEQ ID NO: 21917 - RNA, 20 nt, Artificial Sequence
  LRRK2 RNA guide
ccuaggagaagcucuggagc

SEQ ID NO: 21918 - RNA, 20 nt, Artificial Sequence
  LRRK2 RNA guide
cuaggagaagcucuggagcu

SEQ ID NO: 21919 - RNA, 20 nt, Artificial Sequence
  LRRK2 RNA guide
cuccagagcuucuccuaggu

SEQ ID NO: 21920 - RNA, 20 nt, Artificial Sequence
  LRRK2 RNA guide
gaacaagcuccagagcuucu

SEQ ID NO: 21921 - RNA, 20 nt, Artificial Sequence
  LRRK2 RNA guide
gaagcucuggagcuuguuca

SEQ ID NO: 21922 - RNA, 20 nt, Artificial Sequence
  LRRK2 RNA guide
gaauuaccuaggagaagcuc

SEQ ID NO: 21923 - RNA, 20 nt, Artificial Sequence
  LRRK2 RNA guide
gaauuugaacaagcuccaga

SEQ ID NO: 21924 - RNA, 20 nt, Artificial Sequence
  LRRK2 RNA guide
gagaagcucuggagcuuguu

SEQ ID NO: 21925 - RNA, 20 nt, Artificial Sequence
  LRRK2 RNA guide
gagcuucuccuagguaauuc

SEQ ID NO: 21926 - RNA, 20 nt, Artificial Sequence
  LRRK2 RNA guide
gcuccagagcuucuccuagg

SEQ ID NO: 21927 - RNA, 20 nt, Artificial Sequence
  LRRK2 RNA guide
gcuucuccuagguaauucuu

SEQ ID NO: 21928 - RNA, 20 nt, Artificial Sequence
  LRRK2 RNA guide
ggaauuugaacaagcuccag

SEQ ID NO: 21929 - RNA, 20 nt, Artificial Sequence
  LRRK2 RNA guide
ggagaagcucuggagcuugu

SEQ ID NO: 21930 - RNA, 20 nt, Artificial Sequence
  LRRK2 RNA guide
uaccuaggagaagcucugga

SEQ ID NO: 21931 - RNA, 20 nt, Artificial Sequence
  LRRK2 RNA guide
uaggagaagcucuggagcuu

SEQ ID NO: 21932 - RNA, 20 nt, Artificial Sequence
  LRRK2 RNA guide
uccagagcuucuccuaggua

SEQ ID NO: 21933 - RNA, 20 nt, Artificial Sequence
  LRRK2 RNA guide
ugaacaagcuccagagcuuc

SEQ ID NO: 21934 - RNA, 20 nt, Artificial Sequence
  LRRK2 RNA guide
uggaauuugaacaagcucca

SEQ ID NO: 21935 - RNA, 20 nt, Artificial Sequence
  LRRK2 RNA guide
uuaccuaggagaagcucugg

SEQ ID NO: 21936 - RNA, 20 nt, Artificial Sequence
  LRRK2 RNA guide
uugaacaagcuccagagcuu

SEQ ID NO: 21937 - RNA, 20 nt, Artificial Sequence
  LRRK2 RNA guide
uuggaauuugaacaagcucc

SEQ ID NO: 21938 - RNA, 20 nt, Artificial Sequence
  LRRK2 RNA guide
uuugaacaagcuccagagcu

SEQ ID NO: 21939 - RNA, 21 nt, Artificial Sequence
  LRRK2 RNA guide
aaaagaauuaccuaggagaag

SEQ ID NO: 21940 - RNA, 21 nt, Artificial Sequence
  LRRK2 RNA guide
aaagaauuaccuaggagaagc

SEQ ID NO: 21941 - RNA, 21 nt, Artificial Sequence
  LRRK2 RNA guide
aacaagcuccagagcuucucc

SEQ ID NO: 21942 - RNA, 21 nt, Artificial Sequence
  LRRK2 RNA guide
aagaauuaccuaggagaagcu

SEQ ID NO: 21943 - RNA, 21 nt, Artificial Sequence
  LRRK2 RNA guide
aagcuccagagcuucuccuag

SEQ ID NO: 21944 - RNA, 21 nt, Artificial Sequence
  LRRK2 RNA guide
aagcucuggagcuuguucaaa

SEQ ID NO: 21945 - RNA, 21 nt, Artificial Sequence
  LRRK2 RNA guide
aauuaccuaggagaagcucug

SEQ ID NO: 21946 - RNA, 21 nt, Artificial Sequence
  LRRK2 RNA guide
aauuugaacaagcuccagagc

SEQ ID NO: 21947 - RNA, 21 nt, Artificial Sequence
  LRRK2 RNA guide
acaaaaagaauuaccuaggag

SEQ ID NO: 21948 - RNA, 21 nt, Artificial Sequence
  LRRK2 RNA guide
acaagcuccagagcuucuccu

SEQ ID NO: 21949 - RNA, 21 nt, Artificial Sequence
  LRRK2 RNA guide
accuaggagaagcucuggagc

SEQ ID NO: 21950 - RNA, 21 nt, Artificial Sequence
  LRRK2 RNA guide
agaagcucuggagcuuguuca

SEQ ID NO: 21951 - RNA, 21 nt, Artificial Sequence
  LRRK2 RNA guide
agaauuaccuaggagaagcuc

SEQ ID NO: 21952 - RNA, 21 nt, Artificial Sequence
  LRRK2 RNA guide
agagcuucuccuagguaauuc

SEQ ID NO: 21953 - RNA, 21 nt, Artificial Sequence
  LRRK2 RNA guide
agcuccagagcuucuccuagg

SEQ ID NO: 21954 - RNA, 21 nt, Artificial Sequence
  LRRK2 RNA guide
agcucuggagcuuguucaaau

SEQ ID NO: 21955 - RNA, 21 nt, Artificial Sequence
  LRRK2 RNA guide
agcuucuccuagguaauucuu

SEQ ID NO: 21956 - RNA, 21 nt, Artificial Sequence
  LRRK2 RNA guide
aggagaagcucuggagcuugu

SEQ ID NO: 21957 - RNA, 21 nt, Artificial Sequence
  LRRK2 RNA guide
auuaccuaggagaagcucugg

SEQ ID NO: 21958 - RNA, 21 nt, Artificial Sequence
  LRRK2 RNA guide
auuugaacaagcuccagagcu

SEQ ID NO: 21959 - RNA, 21 nt, Artificial Sequence
  LRRK2 RNA guide
caaaaagaauuaccuaggaga

SEQ ID NO: 21960 - RNA, 21 nt, Artificial Sequence
  LRRK2 RNA guide
caagcuccagagcuucuccua

SEQ ID NO: 21961 - RNA, 21 nt, Artificial Sequence
  LRRK2 RNA guide
cagagcuucuccuagguaauu

SEQ ID NO: 21962 - RNA, 21 nt, Artificial Sequence
  LRRK2 RNA guide
ccagagcuucuccuagguaau

SEQ ID NO: 21963 - RNA, 21 nt, Artificial Sequence
  LRRK2 RNA guide
ccuaggagaagcucuggagcu

SEQ ID NO: 21964 - RNA, 21 nt, Artificial Sequence
  LRRK2 RNA guide
cuaggagaagcucuggagcuu

SEQ ID NO: 21965 - RNA, 21 nt, Artificial Sequence
  LRRK2 RNA guide
cuccagagcuucuccuaggua

SEQ ID NO: 21966 - RNA, 21 nt, Artificial Sequence
  LRRK2 RNA guide
gaacaagcuccagagcuucuc

SEQ ID NO: 21967 - RNA, 21 nt, Artificial Sequence
  LRRK2 RNA guide
gaagcucuggagcuuguucaa

SEQ ID NO: 21968 - RNA, 21 nt, Artificial Sequence
  LRRK2 RNA guide
gaauuaccuaggagaagcucu

SEQ ID NO: 21969 - RNA, 21 nt, Artificial Sequence
  LRRK2 RNA guide
gaauuugaacaagcuccagag

SEQ ID NO: 21970 - RNA, 21 nt, Artificial Sequence
  LRRK2 RNA guide
gagaagcucuggagcuuguuc

SEQ ID NO: 21971 - RNA, 21 nt, Artificial Sequence
  LRRK2 RNA guide
gagcuucuccuagguaauucu

SEQ ID NO: 21972 - RNA, 21 nt, Artificial Sequence
  LRRK2 RNA guide
gcuccagagcuucuccuaggu

SEQ ID NO: 21973 - RNA, 21 nt, Artificial Sequence
  LRRK2 RNA guide
gcuucuccuagguaauucuuu

SEQ ID NO: 21974 - RNA, 21 nt, Artificial Sequence
  LRRK2 RNA guide
ggaauuugaacaagcuccaga

SEQ ID NO: 21975 - RNA, 21 nt, Artificial Sequence
  LRRK2 RNA guide
ggagaagcucuggagcuuguu

SEQ ID NO: 21976 - RNA, 21 nt, Artificial Sequence
  LRRK2 RNA guide
guuggaauuugaacaagcucc

SEQ ID NO: 21977 - RNA, 21 nt, Artificial Sequence
  LRRK2 RNA guide
uaccuaggagaagcucuggag

SEQ ID NO: 21978 - RNA, 21 nt, Artificial Sequence
  LRRK2 RNA guide
uaggagaagcucuggagcuug

SEQ ID NO: 21979 - RNA, 21 nt, Artificial Sequence
  LRRK2 RNA guide
uccagagcuucuccuagguaa

SEQ ID NO: 21980 - RNA, 21 nt, Artificial Sequence
  LRRK2 RNA guide
ugaacaagcuccagagcuucu

SEQ ID NO: 21981 - RNA, 21 nt, Artificial Sequence
  LRRK2 RNA guide
uggaauuugaacaagcuccag

SEQ ID NO: 21982 - RNA, 21 nt, Artificial Sequence
  LRRK2 RNA guide
uuaccuaggagaagcucugga

SEQ ID NO: 21983 - RNA, 21 nt, Artificial Sequence
  LRRK2 RNA guide
uugaacaagcuccagagcuuc

SEQ ID NO: 21984 - RNA, 21 nt, Artificial Sequence
  LRRK2 RNA guide
uuggaauuugaacaagcucca

SEQ ID NO: 21985 - RNA, 21 nt, Artificial Sequence
  LRRK2 RNA guide
uuugaacaagcuccagagcuu

SEQ ID NO: 21986 - RNA, 22 nt, Artificial Sequence
  LRRK2 RNA guide
aaaaagaauuaccuaggagaag

SEQ ID NO: 21987 - RNA, 22 nt, Artificial Sequence
  LRRK2 RNA guide
aaaagaauuaccuaggagaagc

SEQ ID NO: 21988 - RNA, 22 nt, Artificial Sequence
  LRRK2 RNA guide
aaagaauuaccuaggagaagcu

SEQ ID NO: 21989 - RNA, 22 nt, Artificial Sequence
  LRRK2 RNA guide
aacaaaaagaauuaccuaggag

SEQ ID NO: 21990 - RNA, 22 nt, Artificial Sequence
  LRRK2 RNA guide
aacaagcuccagagcuucuccu

SEQ ID NO: 21991 - RNA, 22 nt, Artificial Sequence
  LRRK2 RNA guide
aagaauuaccuaggagaagcuc

SEQ ID NO: 21992 - RNA, 22 nt, Artificial Sequence
  LRRK2 RNA guide
aagcuccagagcuucuccuagg

SEQ ID NO: 21993 - RNA, 22 nt, Artificial Sequence
  LRRK2 RNA guide
aagcucuggagcuuguucaaau

SEQ ID NO: 21994 - RNA, 22 nt, Artificial Sequence
  LRRK2 RNA guide
aauuaccuaggagaagcucugg

SEQ ID NO: 21995 - RNA, 22 nt, Artificial Sequence
  LRRK2 RNA guide
aauuugaacaagcuccagagcu

SEQ ID NO: 21996 - RNA, 22 nt, Artificial Sequence
  LRRK2 RNA guide
acaaaaagaauuaccuaggaga

SEQ ID NO: 21997 - RNA, 22 nt, Artificial Sequence
  LRRK2 RNA guide
acaagcuccagagcuucuccua

SEQ ID NO: 21998 - RNA, 22 nt, Artificial Sequence
  LRRK2 RNA guide
accuaggagaagcucuggagcu

SEQ ID NO: 21999 - RNA, 22 nt, Artificial Sequence
  LRRK2 RNA guide
agaagcucuggagcuuguucaa

SEQ ID NO: 22000 - RNA, 22 nt, Artificial Sequence
  LRRK2 RNA guide
agaauuaccuaggagaagcucu

SEQ ID NO: 22001 - RNA, 22 nt, Artificial Sequence
  LRRK2 RNA guide
agagcuucuccuagguaauucu

SEQ ID NO: 22002 - RNA, 22 nt, Artificial Sequence
  LRRK2 RNA guide
agcuccagagcuucuccuaggu

SEQ ID NO: 22003 - RNA, 22 nt, Artificial Sequence
  LRRK2 RNA guide
agcucuggagcuuguucaaauu

SEQ ID NO: 22004 - RNA, 22 nt, Artificial Sequence
  LRRK2 RNA guide
agcuucuccuagguaauucuuu

SEQ ID NO: 22005 - RNA, 22 nt, Artificial Sequence
  LRRK2 RNA guide
aggagaagcucuggagcuuguu

SEQ ID NO: 22006 - RNA, 22 nt, Artificial Sequence
  LRRK2 RNA guide
aguuggaauuugaacaagcucc

SEQ ID NO: 22007 - RNA, 22 nt, Artificial Sequence
  LRRK2 RNA guide
auuaccuaggagaagcucugga

SEQ ID NO: 22008 - RNA, 22 nt, Artificial Sequence
  LRRK2 RNA guide
auuugaacaagcuccagagcuu

SEQ ID NO: 22009 - RNA, 22 nt, Artificial Sequence
  LRRK2 RNA guide
caaaaagaauuaccuaggagaa

SEQ ID NO: 22010 - RNA, 22 nt, Artificial Sequence
  LRRK2 RNA guide
caagcuccagagcuucuccuag

SEQ ID NO: 22011 - RNA, 22 nt, Artificial Sequence
  LRRK2 RNA guide
cagagcuucuccuagguaauuc

SEQ ID NO: 22012 - RNA, 22 nt, Artificial Sequence
  LRRK2 RNA guide
ccagagcuucuccuagguaauu

SEQ ID NO: 22013 - RNA, 22 nt, Artificial Sequence
  LRRK2 RNA guide
ccuaggagaagcucuggagcuu

SEQ ID NO: 22014 - RNA, 22 nt, Artificial Sequence
  LRRK2 RNA guide
cuaggagaagcucuggagcuug

SEQ ID NO: 22015 - RNA, 22 nt, Artificial Sequence
  LRRK2 RNA guide
cuccagagcuucuccuagguaa

SEQ ID NO: 22016 - RNA, 22 nt, Artificial Sequence
  LRRK2 RNA guide
gaacaagcuccagagcuucucc

SEQ ID NO: 22017 - RNA, 22 nt, Artificial Sequence
  LRRK2 RNA guide
gaagcucuggagcuuguucaaa

SEQ ID NO: 22018 - RNA, 22 nt, Artificial Sequence
  LRRK2 RNA guide
gaauuaccuaggagaagcucug

SEQ ID NO: 22019 - RNA, 22 nt, Artificial Sequence
  LRRK2 RNA guide
gaauuugaacaagcuccagagc

SEQ ID NO: 22020 - RNA, 22 nt, Artificial Sequence
  LRRK2 RNA guide
gagaagcucuggagcuuguuca

SEQ ID NO: 22021 - RNA, 22 nt, Artificial Sequence
  LRRK2 RNA guide
gagcuucuccuagguaauucuu

SEQ ID NO: 22022 - RNA, 22 nt, Artificial Sequence
  LRRK2 RNA guide
gcuccagagcuucuccuaggua

SEQ ID NO: 22023 - RNA, 22 nt, Artificial Sequence
  LRRK2 RNA guide
gcuucuccuagguaauucuuuu

SEQ ID NO: 22024 - RNA, 22 nt, Artificial Sequence
  LRRK2 RNA guide
ggaauuugaacaagcuccagag

SEQ ID NO: 22025 - RNA, 22 nt, Artificial Sequence
  LRRK2 RNA guide
ggagaagcucuggagcuuguuc

SEQ ID NO: 22026 - RNA, 22 nt, Artificial Sequence
  LRRK2 RNA guide
guuggaauuugaacaagcucca

SEQ ID NO: 22027 - RNA, 22 nt, Artificial Sequence
  LRRK2 RNA guide
uaccuaggagaagcucuggagc

SEQ ID NO: 22028 - RNA, 22 nt, Artificial Sequence
  LRRK2 RNA guide
uaggagaagcucuggagcuugu

SEQ ID NO: 22029 - RNA, 22 nt, Artificial Sequence
  LRRK2 RNA guide
uccagagcuucuccuagguaau

SEQ ID NO: 22030 - RNA, 22 nt, Artificial Sequence
  LRRK2 RNA guide
ugaacaagcuccagagcuucuc

SEQ ID NO: 22031 - RNA, 22 nt, Artificial Sequence
  LRRK2 RNA guide
uggaauuugaacaagcuccaga

SEQ ID NO: 22032 - RNA, 22 nt, Artificial Sequence
  LRRK2 RNA guide
uuaccuaggagaagcucuggag

SEQ ID NO: 22033 - RNA, 22 nt, Artificial Sequence
  LRRK2 RNA guide
uugaacaagcuccagagcuucu

SEQ ID NO: 22034 - RNA, 22 nt, Artificial Sequence
  LRRK2 RNA guide
uuggaauuugaacaagcuccag

SEQ ID NO: 22035 - RNA, 22 nt, Artificial Sequence
  LRRK2 RNA guide
uuugaacaagcuccagagcuuc

SEQ ID NO: 22036 - RNA, 20 nt, Artificial Sequence
  LRRK2 RNA guide
aaaaaucuucagagccacuu

SEQ ID NO: 22037 - RNA, 20 nt, Artificial Sequence
  LRRK2 RNA guide
aaaaucuucagagccacuuc

SEQ ID NO: 22038 - RNA, 20 nt, Artificial Sequence
  LRRK2 RNA guide
aaaucuucagagccacuucu

SEQ ID NO: 22039 - RNA, 20 nt, Artificial Sequence
  LRRK2 RNA guide
aagaaguggcucugaagauu

SEQ ID NO: 22040 - RNA, 20 nt, Artificial Sequence
  LRRK2 RNA guide
aaggagaagaaguggcucug

SEQ ID NO: 22041 - RNA, 20 nt, Artificial Sequence
  LRRK2 RNA guide
aaguggcucugaagauuuuu

SEQ ID NO: 22042 - RNA, 20 nt, Artificial Sequence
  LRRK2 RNA guide
aaucuucagagccacuucuu

SEQ ID NO: 22043 - RNA, 20 nt, Artificial Sequence
  LRRK2 RNA guide
agaagaaguggcucugaaga

SEQ ID NO: 22044 - RNA, 20 nt, Artificial Sequence
  LRRK2 RNA guide
agaaguggcucugaagauuu

SEQ ID NO: 22045 - RNA, 20 nt, Artificial Sequence
  LRRK2 RNA guide
agagccacuucuucuccuuc

SEQ ID NO: 22046 - RNA, 20 nt, Artificial Sequence
  LRRK2 RNA guide
aggagaagaaguggcucuga

SEQ ID NO: 22047 - RNA, 20 nt, Artificial Sequence
  LRRK2 RNA guide
aguggcucugaagauuuuua

SEQ ID NO: 22048 - RNA, 20 nt, Artificial Sequence
  LRRK2 RNA guide
aucuucagagccacuucuuc

SEQ ID NO: 22049 - RNA, 20 nt, Artificial Sequence
  LRRK2 RNA guide
augaaggagaagaaguggcu

SEQ ID NO: 22050 - RNA, 20 nt, Artificial Sequence
  LRRK2 RNA guide
auuaaaaaucuucagagcca

SEQ ID NO: 22051 - RNA, 20 nt, Artificial Sequence
  LRRK2 RNA guide
cagagccacuucuucuccuu

SEQ ID NO: 22052 - RNA, 20 nt, Artificial Sequence
  LRRK2 RNA guide
ccuaugaaggagaagaagug

SEQ ID NO: 22053 - RNA, 20 nt, Artificial Sequence
  LRRK2 RNA guide
cuaugaaggagaagaagugg

SEQ ID NO: 22054 - RNA, 20 nt, Artificial Sequence
  LRRK2 RNA guide
cuucagagccacuucuucuc

SEQ ID NO: 22055 - RNA, 20 nt, Artificial Sequence
  LRRK2 RNA guide
gaagaaguggcucugaagau

SEQ ID NO: 22056 - RNA, 20 nt, Artificial Sequence
  LRRK2 RNA guide
gaaggagaagaaguggcucu

SEQ ID NO: 22057 - RNA, 20 nt, Artificial Sequence
  LRRK2 RNA guide
gaaguggcucugaagauuuu

SEQ ID NO: 22058 - RNA, 20 nt, Artificial Sequence
  LRRK2 RNA guide
gagaagaaguggcucugaag

SEQ ID NO: 22059 - RNA, 20 nt, Artificial Sequence
  LRRK2 RNA guide
gccuaugaaggagaagaagu

SEQ ID NO: 22060 - RNA, 20 nt, Artificial Sequence
  LRRK2 RNA guide
ggagaagaaguggcucugaa

SEQ ID NO: 22061 - RNA, 20 nt, Artificial Sequence
  LRRK2 RNA guide
ggcucugaagauuuuuaaua

SEQ ID NO: 22062 - RNA, 20 nt, Artificial Sequence
  LRRK2 RNA guide
guggcucugaagauuuuuaa

SEQ ID NO: 22063 - RNA, 20 nt, Artificial Sequence
  LRRK2 RNA guide
uaaaaaucuucagagccacu

SEQ ID NO: 22064 - RNA, 20 nt, Artificial Sequence
  LRRK2 RNA guide
uaugaaggagaagaaguggc

SEQ ID NO: 22065 - RNA, 20 nt, Artificial Sequence
  LRRK2 RNA guide
uauuaaaaaucuucagagcc

SEQ ID NO: 22066 - RNA, 20 nt, Artificial Sequence
  LRRK2 RNA guide
ucagagccacuucuucuccu

SEQ ID NO: 22067 - RNA, 20 nt, Artificial Sequence
  LRRK2 RNA guide
ucuucagagccacuucuucu

SEQ ID NO: 22068 - RNA, 20 nt, Artificial Sequence
  LRRK2 RNA guide
ugaaggagaagaaguggcuc

SEQ ID NO: 22069 - RNA, 20 nt, Artificial Sequence
  LRRK2 RNA guide
uggcucugaagauuuuuaau

SEQ ID NO: 22070 - RNA, 20 nt, Artificial Sequence
  LRRK2 RNA guide
uuaaaaaucuucagagccac

SEQ ID NO: 22071 - RNA, 20 nt, Artificial Sequence
  LRRK2 RNA guide
uucagagccacuucuucucc

SEQ ID NO: 22072 - RNA, 21 nt, Artificial Sequence
  LRRK2 RNA guide
aaaaaucuucagagccacuuc

SEQ ID NO: 22073 - RNA, 21 nt, Artificial Sequence
  LRRK2 RNA guide
aaaaucuucagagccacuucu

SEQ ID NO: 22074 - RNA, 21 nt, Artificial Sequence
  LRRK2 RNA guide
aaaucuucagagccacuucuu

SEQ ID NO: 22075 - RNA, 21 nt, Artificial Sequence
  LRRK2 RNA guide
aagaaguggcucugaagauuu

SEQ ID NO: 22076 - RNA, 21 nt, Artificial Sequence
  LRRK2 RNA guide
aaggagaagaaguggcucuga

SEQ ID NO: 22077 - RNA, 21 nt, Artificial Sequence
  LRRK2 RNA guide
aaguggcucugaagauuuuua

SEQ ID NO: 22078 - RNA, 21 nt, Artificial Sequence
  LRRK2 RNA guide
aaucuucagagccacuucuuc

SEQ ID NO: 22079 - RNA, 21 nt, Artificial Sequence
  LRRK2 RNA guide
agaagaaguggcucugaagau

SEQ ID NO: 22080 - RNA, 21 nt, Artificial Sequence
  LRRK2 RNA guide
agaaguggcucugaagauuuu

SEQ ID NO: 22081 - RNA, 21 nt, Artificial Sequence
  LRRK2 RNA guide
agagccacuucuucuccuuca

SEQ ID NO: 22082 - RNA, 21 nt, Artificial Sequence
  LRRK2 RNA guide
agccuaugaaggagaagaagu

SEQ ID NO: 22083 - RNA, 21 nt, Artificial Sequence
  LRRK2 RNA guide
aggagaagaaguggcucugaa

SEQ ID NO: 22084 - RNA, 21 nt, Artificial Sequence
  LRRK2 RNA guide
aguggcucugaagauuuuuaa

SEQ ID NO: 22085 - RNA, 21 nt, Artificial Sequence
  LRRK2 RNA guide
aucuucagagccacuucuucu

SEQ ID NO: 22086 - RNA, 21 nt, Artificial Sequence
  LRRK2 RNA guide
augaaggagaagaaguggcuc

SEQ ID NO: 22087 - RNA, 21 nt, Artificial Sequence
  LRRK2 RNA guide
auuaaaaaucuucagagccac

SEQ ID NO: 22088 - RNA, 21 nt, Artificial Sequence
  LRRK2 RNA guide
cagagccacuucuucuccuuc

SEQ ID NO: 22089 - RNA, 21 nt, Artificial Sequence
  LRRK2 RNA guide
ccuaugaaggagaagaagugg

SEQ ID NO: 22090 - RNA, 21 nt, Artificial Sequence
  LRRK2 RNA guide
cuaugaaggagaagaaguggc

SEQ ID NO: 22091 - RNA, 21 nt, Artificial Sequence
  LRRK2 RNA guide
cuucagagccacuucuucucc

SEQ ID NO: 22092 - RNA, 21 nt, Artificial Sequence
  LRRK2 RNA guide
gaagaaguggcucugaagauu

SEQ ID NO: 22093 - RNA, 21 nt, Artificial Sequence
  LRRK2 RNA guide
gaaggagaagaaguggcucug

SEQ ID NO: 22094 - RNA, 21 nt, Artificial Sequence
  LRRK2 RNA guide
gaaguggcucugaagauuuuu

SEQ ID NO: 22095 - RNA, 21 nt, Artificial Sequence
  LRRK2 RNA guide
gagaagaaguggcucugaaga

SEQ ID NO: 22096 - RNA, 21 nt, Artificial Sequence
  LRRK2 RNA guide
gccuaugaaggagaagaagug

SEQ ID NO: 22097 - RNA, 21 nt, Artificial Sequence
  LRRK2 RNA guide
ggagaagaaguggcucugaag

SEQ ID NO: 22098 - RNA, 21 nt, Artificial Sequence
  LRRK2 RNA guide
guggcucugaagauuuuuaau

SEQ ID NO: 22099 - RNA, 21 nt, Artificial Sequence
  LRRK2 RNA guide
uaaaaaucuucagagccacuu

SEQ ID NO: 22100 - RNA, 21 nt, Artificial Sequence
  LRRK2 RNA guide
uaugaaggagaagaaguggcu

SEQ ID NO: 22101 - RNA, 21 nt, Artificial Sequence
  LRRK2 RNA guide
ucagagccacuucuucuccuu

SEQ ID NO: 22102 - RNA, 21 nt, Artificial Sequence
  LRRK2 RNA guide
ucuucagagccacuucuucuc

SEQ ID NO: 22103 - RNA, 21 nt, Artificial Sequence
  LRRK2 RNA guide
ugaaggagaagaaguggcucu

SEQ ID NO: 22104 - RNA, 21 nt, Artificial Sequence
  LRRK2 RNA guide
uuaaaaaucuucagagccacu

SEQ ID NO: 22105 - RNA, 21 nt, Artificial Sequence
  LRRK2 RNA guide
uucagagccacuucuucuccu

SEQ ID NO: 22106 - RNA, 22 nt, Artificial Sequence
  LRRK2 RNA guide
aaaaaucuucagagccacuucu

SEQ ID NO: 22107 - RNA, 22 nt, Artificial Sequence
  LRRK2 RNA guide
aaaaucuucagagccacuucuu

SEQ ID NO: 22108 - RNA, 22 nt, Artificial Sequence
  LRRK2 RNA guide
aaaucuucagagccacuucuuc

SEQ ID NO: 22109 - RNA, 22 nt, Artificial Sequence
  LRRK2 RNA guide
aagaaguggcucugaagauuuu

SEQ ID NO: 22110 - RNA, 22 nt, Artificial Sequence
  LRRK2 RNA guide
aaggagaagaaguggcucugaa

SEQ ID NO: 22111 - RNA, 22 nt, Artificial Sequence
  LRRK2 RNA guide
aaguggcucugaagauuuuuaa

SEQ ID NO: 22112 - RNA, 22 nt, Artificial Sequence
  LRRK2 RNA guide
aaucuucagagccacuucuucu

SEQ ID NO: 22113 - RNA, 22 nt, Artificial Sequence
  LRRK2 RNA guide
agaagaaguggcucugaagauu

SEQ ID NO: 22114 - RNA, 22 nt, Artificial Sequence
  LRRK2 RNA guide
agaaguggcucugaagauuuuu

SEQ ID NO: 22115 - RNA, 22 nt, Artificial Sequence
  LRRK2 RNA guide
agagccacuucuucuccuucau

SEQ ID NO: 22116 - RNA, 22 nt, Artificial Sequence
  LRRK2 RNA guide
agccuaugaaggagaagaagug

SEQ ID NO: 22117 - RNA, 22 nt, Artificial Sequence
  LRRK2 RNA guide
aggagaagaaguggcucugaag

SEQ ID NO: 22118 - RNA, 22 nt, Artificial Sequence
  LRRK2 RNA guide
aguggcucugaagauuuuuaau

SEQ ID NO: 22119 - RNA, 22 nt, Artificial Sequence
  LRRK2 RNA guide
aucuucagagccacuucuucuc

SEQ ID NO: 22120 - RNA, 22 nt, Artificial Sequence
  LRRK2 RNA guide
augaaggagaagaaguggcucu

SEQ ID NO: 22121 - RNA, 22 nt, Artificial Sequence
  LRRK2 RNA guide
auuaaaaaucuucagagccacu

SEQ ID NO: 22122 - RNA, 22 nt, Artificial Sequence
  LRRK2 RNA guide
cagagccacuucuucuccuuca

SEQ ID NO: 22123 - RNA, 22 nt, Artificial Sequence
  LRRK2 RNA guide
cagccuaugaaggagaagaagu

SEQ ID NO: 22124 - RNA, 22 nt, Artificial Sequence
  LRRK2 RNA guide
ccuaugaaggagaagaaguggc

SEQ ID NO: 22125 - RNA, 22 nt, Artificial Sequence
  LRRK2 RNA guide
cuaugaaggagaagaaguggcu

SEQ ID NO: 22126 - RNA, 22 nt, Artificial Sequence
  LRRK2 RNA guide
cuucagagccacuucuucuccu

SEQ ID NO: 22127 - RNA, 22 nt, Artificial Sequence
  LRRK2 RNA guide
gaagaaguggcucugaagauuu

SEQ ID NO: 22128 - RNA, 22 nt, Artificial Sequence
  LRRK2 RNA guide
gaaggagaagaaguggcucuga

SEQ ID NO: 22129 - RNA, 22 nt, Artificial Sequence
  LRRK2 RNA guide
gaaguggcucugaagauuuuua

SEQ ID NO: 22130 - RNA, 22 nt, Artificial Sequence
  LRRK2 RNA guide
gagaagaaguggcucugaagau

SEQ ID NO: 22131 - RNA, 22 nt, Artificial Sequence
  LRRK2 RNA guide
gccuaugaaggagaagaagugg

SEQ ID NO: 22132 - RNA, 22 nt, Artificial Sequence
  LRRK2 RNA guide
ggagaagaaguggcucugaaga

SEQ ID NO: 22133 - RNA, 22 nt, Artificial Sequence
  LRRK2 RNA guide
guggcucugaagauuuuuaaua

SEQ ID NO: 22134 - RNA, 22 nt, Artificial Sequence
  LRRK2 RNA guide
uaaaaaucuucagagccacuuc

SEQ ID NO: 22135 - RNA, 22 nt, Artificial Sequence
  LRRK2 RNA guide
uaugaaggagaagaaguggcuc

SEQ ID NO: 22136 - RNA, 22 nt, Artificial Sequence
  LRRK2 RNA guide
uauuaaaaaucuucagagccac

SEQ ID NO: 22137 - RNA, 22 nt, Artificial Sequence
  LRRK2 RNA guide
ucagagccacuucuucuccuuc

SEQ ID NO: 22138 - RNA, 22 nt, Artificial Sequence
  LRRK2 RNA guide
ucuucagagccacuucuucucc

SEQ ID NO: 22139 - RNA, 22 nt, Artificial Sequence
  LRRK2 RNA guide
ugaaggagaagaaguggcucug

SEQ ID NO: 22140 - RNA, 22 nt, Artificial Sequence
  LRRK2 RNA guide
uuaaaaaucuucagagccacuu

SEQ ID NO: 22141 - RNA, 22 nt, Artificial Sequence
  LRRK2 RNA guide
uucagagccacuucuucuccuu

SEQ ID NO: 22142 - RNA, 20 nt, Artificial Sequence
  LRRK2 RNA guide
aaagaaaucaaacuggggug

SEQ ID NO: 22143 - RNA, 20 nt, Artificial Sequence
  LRRK2 RNA guide
aaaucaaacugggguggugg

SEQ ID NO: 22144 - RNA, 20 nt, Artificial Sequence
  LRRK2 RNA guide
aagaaaucaaacuggggugg

SEQ ID NO: 22145 - RNA, 20 nt, Artificial Sequence
  LRRK2 RNA guide
aaucccagcugccagcaaag

SEQ ID NO: 22146 - RNA, 20 nt, Artificial Sequence
  LRRK2 RNA guide
accaccccaguuugauuucu

SEQ ID NO: 22147 - RNA, 20 nt, Artificial Sequence
  LRRK2 RNA guide
accccaguuugauuucuuug

SEQ ID NO: 22148 - RNA, 20 nt, Artificial Sequence
  LRRK2 RNA guide
accuccaccaccccaguuug

SEQ ID NO: 22149 - RNA, 20 nt, Artificial Sequence
  LRRK2 RNA guide
acgaaucccagcugccagca

SEQ ID NO: 22150 - RNA, 20 nt, Artificial Sequence
  LRRK2 RNA guide
agaaaucaaacugggguggu

SEQ ID NO: 22151 - RNA, 20 nt, Artificial Sequence
  LRRK2 RNA guide
agcaaagaaaucaaacuggg

SEQ ID NO: 22152 - RNA, 20 nt, Artificial Sequence
  LRRK2 RNA guide
agcugccagcaaagaaauca

SEQ ID NO: 22153 - RNA, 20 nt, Artificial Sequence
  LRRK2 RNA guide
aguuugauuucuuugcuggc

SEQ ID NO: 22154 - RNA, 20 nt, Artificial Sequence
  LRRK2 RNA guide
aucccagcugccagcaaaga

SEQ ID NO: 22155 - RNA, 20 nt, Artificial Sequence
  LRRK2 RNA guide
auuucuuugcuggcagcugg

SEQ ID NO: 22156 - RNA, 20 nt, Artificial Sequence
  LRRK2 RNA guide
caaagaaaucaaacuggggu

SEQ ID NO: 22157 - RNA, 20 nt, Artificial Sequence
  LRRK2 RNA guide
caccaccccaguuugauuuc

SEQ ID NO: 22158 - RNA, 20 nt, Artificial Sequence
  LRRK2 RNA guide
caccccaguuugauuucuuu

SEQ ID NO: 22159 - RNA, 20 nt, Artificial Sequence
  LRRK2 RNA guide
caccuccaccaccccaguuu

SEQ ID NO: 22160 - RNA, 20 nt, Artificial Sequence
  LRRK2 RNA guide
cagcaaagaaaucaaacugg

SEQ ID NO: 22161 - RNA, 20 nt, Artificial Sequence
  LRRK2 RNA guide
cagcugccagcaaagaaauc

SEQ ID NO: 22162 - RNA, 20 nt, Artificial Sequence
  LRRK2 RNA guide
caguuugauuucuuugcugg

SEQ ID NO: 22163 - RNA, 20 nt, Artificial Sequence
  LRRK2 RNA guide
ccaccaccccaguuugauuu

SEQ ID NO: 22164 - RNA, 20 nt, Artificial Sequence
  LRRK2 RNA guide
ccaccccaguuugauuucuu

SEQ ID NO: 22165 - RNA, 20 nt, Artificial Sequence
  LRRK2 RNA guide
ccaccuccaccaccccaguu

SEQ ID NO: 22166 - RNA, 20 nt, Artificial Sequence
  LRRK2 RNA guide
ccagcaaagaaaucaaacug

SEQ ID NO: 22167 - RNA, 20 nt, Artificial Sequence
  LRRK2 RNA guide
ccagcugccagcaaagaaau

SEQ ID NO: 22168 - RNA, 20 nt, Artificial Sequence
  LRRK2 RNA guide
ccaguuugauuucuuugcug

SEQ ID NO: 22169 - RNA, 20 nt, Artificial Sequence
  LRRK2 RNA guide
cccagcugccagcaaagaaa

SEQ ID NO: 22170 - RNA, 20 nt, Artificial Sequence
  LRRK2 RNA guide
cccaguuugauuucuuugcu

SEQ ID NO: 22171 - RNA, 20 nt, Artificial Sequence
  LRRK2 RNA guide
ccccaguuugauuucuuugc

SEQ ID NO: 22172 - RNA, 20 nt, Artificial Sequence
  LRRK2 RNA guide
ccuccaccaccccaguuuga

SEQ ID NO: 22173 - RNA, 20 nt, Artificial Sequence
  LRRK2 RNA guide
cgaaucccagcugccagcaa

SEQ ID NO: 22174 - RNA, 20 nt, Artificial Sequence
  LRRK2 RNA guide
cuccaccaccccaguuugau

SEQ ID NO: 22175 - RNA, 20 nt, Artificial Sequence
  LRRK2 RNA guide
cugccagcaaagaaaucaaa

SEQ ID NO: 22176 - RNA, 20 nt, Artificial Sequence
  LRRK2 RNA guide
gaaaucaaacugggguggug

SEQ ID NO: 22177 - RNA, 20 nt, Artificial Sequence
  LRRK2 RNA guide
gaaucccagcugccagcaaa

SEQ ID NO: 22178 - RNA, 20 nt, Artificial Sequence
  LRRK2 RNA guide
gauuucuuugcuggcagcug

SEQ ID NO: 22179 - RNA, 20 nt, Artificial Sequence
  LRRK2 RNA guide
gcaaagaaaucaaacugggg

SEQ ID NO: 22180 - RNA, 20 nt, Artificial Sequence
  LRRK2 RNA guide
gccagcaaagaaaucaaacu

SEQ ID NO: 22181 - RNA, 20 nt, Artificial Sequence
  LRRK2 RNA guide
gcugccagcaaagaaaucaa

SEQ ID NO: 22182 - RNA, 20 nt, Artificial Sequence
  LRRK2 RNA guide
guuugauuucuuugcuggca

SEQ ID NO: 22183 - RNA, 20 nt, Artificial Sequence
  LRRK2 RNA guide
uccaccaccccaguuugauu

SEQ ID NO: 22184 - RNA, 20 nt, Artificial Sequence
  LRRK2 RNA guide
ucccagcugccagcaaagaa

SEQ ID NO: 22185 - RNA, 20 nt, Artificial Sequence
  LRRK2 RNA guide
ugauuucuuugcuggcagcu

SEQ ID NO: 22186 - RNA, 20 nt, Artificial Sequence
  LRRK2 RNA guide
ugccagcaaagaaaucaaac

SEQ ID NO: 22187 - RNA, 20 nt, Artificial Sequence
  LRRK2 RNA guide
uugauuucuuugcuggcagc

SEQ ID NO: 22188 - RNA, 20 nt, Artificial Sequence
  LRRK2 RNA guide
uuucuuugcuggcagcuggg

SEQ ID NO: 22189 - RNA, 20 nt, Artificial Sequence
  LRRK2 RNA guide
uuugauuucuuugcuggcag

SEQ ID NO: 22190 - RNA, 21 nt, Artificial Sequence
  LRRK2 RNA guide
aaagaaaucaaacuggggugg

SEQ ID NO: 22191 - RNA, 21 nt, Artificial Sequence
  LRRK2 RNA guide
aaaucaaacugggguggugga

SEQ ID NO: 22192 - RNA, 21 nt, Artificial Sequence
  LRRK2 RNA guide
aagaaaucaaacugggguggu

SEQ ID NO: 22193 - RNA, 21 nt, Artificial Sequence
  LRRK2 RNA guide
aaucccagcugccagcaaaga

SEQ ID NO: 22194 - RNA, 21 nt, Artificial Sequence
  LRRK2 RNA guide
accaccccaguuugauuucuu

SEQ ID NO: 22195 - RNA, 21 nt, Artificial Sequence
  LRRK2 RNA guide
accccaguuugauuucuuugc

SEQ ID NO: 22196 - RNA, 21 nt, Artificial Sequence
  LRRK2 RNA guide
accuccaccaccccaguuuga

SEQ ID NO: 22197 - RNA, 21 nt, Artificial Sequence
  LRRK2 RNA guide
acgaaucccagcugccagcaa

SEQ ID NO: 22198 - RNA, 21 nt, Artificial Sequence
  LRRK2 RNA guide
agaaaucaaacugggguggug

SEQ ID NO: 22199 - RNA, 21 nt, Artificial Sequence
  LRRK2 RNA guide
agcaaagaaaucaaacugggg

SEQ ID NO: 22200 - RNA, 21 nt, Artificial Sequence
  LRRK2 RNA guide
agcugccagcaaagaaaucaa

SEQ ID NO: 22201 - RNA, 21 nt, Artificial Sequence
  LRRK2 RNA guide
aguuugauuucuuugcuggca

SEQ ID NO: 22202 - RNA, 21 nt, Artificial Sequence
  LRRK2 RNA guide
aucccagcugccagcaaagaa

SEQ ID NO: 22203 - RNA, 21 nt, Artificial Sequence
  LRRK2 RNA guide
auuucuuugcuggcagcuggg

SEQ ID NO: 22204 - RNA, 21 nt, Artificial Sequence
  LRRK2 RNA guide
caaagaaaucaaacuggggug

SEQ ID NO: 22205 - RNA, 21 nt, Artificial Sequence
  LRRK2 RNA guide
caccaccccaguuugauuucu

SEQ ID NO: 22206 - RNA, 21 nt, Artificial Sequence
  LRRK2 RNA guide
caccccaguuugauuucuuug

SEQ ID NO: 22207 - RNA, 21 nt, Artificial Sequence
  LRRK2 RNA guide
caccuccaccaccccaguuug

SEQ ID NO: 22208 - RNA, 21 nt, Artificial Sequence
  LRRK2 RNA guide
cagcaaagaaaucaaacuggg

SEQ ID NO: 22209 - RNA, 21 nt, Artificial Sequence
  LRRK2 RNA guide
cagcugccagcaaagaaauca

SEQ ID NO: 22210 - RNA, 21 nt, Artificial Sequence
  LRRK2 RNA guide
caguuugauuucuuugcuggc

SEQ ID NO: 22211 - RNA, 21 nt, Artificial Sequence
  LRRK2 RNA guide
ccaccaccccaguuugauuuc

SEQ ID NO: 22212 - RNA, 21 nt, Artificial Sequence
  LRRK2 RNA guide
ccaccccaguuugauuucuuu

SEQ ID NO: 22213 - RNA, 21 nt, Artificial Sequence
  LRRK2 RNA guide
ccaccuccaccaccccaguuu

SEQ ID NO: 22214 - RNA, 21 nt, Artificial Sequence
  LRRK2 RNA guide
ccagcaaagaaaucaaacugg

SEQ ID NO: 22215 - RNA, 21 nt, Artificial Sequence
  LRRK2 RNA guide
ccagcugccagcaaagaaauc

SEQ ID NO: 22216 - RNA, 21 nt, Artificial Sequence
  LRRK2 RNA guide
ccaguuugauuucuuugcugg

SEQ ID NO: 22217 - RNA, 21 nt, Artificial Sequence
  LRRK2 RNA guide
cccagcugccagcaaagaaau

SEQ ID NO: 22218 - RNA, 21 nt, Artificial Sequence
  LRRK2 RNA guide
cccaguuugauuucuuugcug

SEQ ID NO: 22219 - RNA, 21 nt, Artificial Sequence
  LRRK2 RNA guide
ccccaguuugauuucuuugcu

SEQ ID NO: 22220 - RNA, 21 nt, Artificial Sequence
  LRRK2 RNA guide
ccuccaccaccccaguuugau

SEQ ID NO: 22221 - RNA, 21 nt, Artificial Sequence
  LRRK2 RNA guide
cgaaucccagcugccagcaaa

SEQ ID NO: 22222 - RNA, 21 nt, Artificial Sequence
  LRRK2 RNA guide
cuccaccaccccaguuugauu

SEQ ID NO: 22223 - RNA, 21 nt, Artificial Sequence
  LRRK2 RNA guide
cugccagcaaagaaaucaaac

SEQ ID NO: 22224 - RNA, 21 nt, Artificial Sequence
  LRRK2 RNA guide
gaaaucaaacugggguggugg

SEQ ID NO: 22225 - RNA, 21 nt, Artificial Sequence
  LRRK2 RNA guide
gaaucccagcugccagcaaag

SEQ ID NO: 22226 - RNA, 21 nt, Artificial Sequence
  LRRK2 RNA guide
gacgaaucccagcugccagca

SEQ ID NO: 22227 - RNA, 21 nt, Artificial Sequence
  LRRK2 RNA guide
gauuucuuugcuggcagcugg

SEQ ID NO: 22228 - RNA, 21 nt, Artificial Sequence
  LRRK2 RNA guide
gcaaagaaaucaaacuggggu

SEQ ID NO: 22229 - RNA, 21 nt, Artificial Sequence
  LRRK2 RNA guide
gccaccuccaccaccccaguu

SEQ ID NO: 22230 - RNA, 21 nt, Artificial Sequence
  LRRK2 RNA guide
gccagcaaagaaaucaaacug

SEQ ID NO: 22231 - RNA, 21 nt, Artificial Sequence
  LRRK2 RNA guide
gcugccagcaaagaaaucaaa

SEQ ID NO: 22232 - RNA, 21 nt, Artificial Sequence
  LRRK2 RNA guide
guuugauuucuuugcuggcag

SEQ ID NO: 22233 - RNA, 21 nt, Artificial Sequence
  LRRK2 RNA guide
uccaccaccccaguuugauuu

SEQ ID NO: 22234 - RNA, 21 nt, Artificial Sequence
  LRRK2 RNA guide
ucccagcugccagcaaagaaa

SEQ ID NO: 22235 - RNA, 21 nt, Artificial Sequence
  LRRK2 RNA guide
ugauuucuuugcuggcagcug

SEQ ID NO: 22236 - RNA, 21 nt, Artificial Sequence
  LRRK2 RNA guide
ugccagcaaagaaaucaaacu

SEQ ID NO: 22237 - RNA, 21 nt, Artificial Sequence
  LRRK2 RNA guide
uugauuucuuugcuggcagcu

SEQ ID NO: 22238 - RNA, 21 nt, Artificial Sequence
  LRRK2 RNA guide
uuucuuugcuggcagcuggga

SEQ ID NO: 22239 - RNA, 21 nt, Artificial Sequence
  LRRK2 RNA guide
uuugauuucuuugcuggcagc

SEQ ID NO: 22240 - RNA, 22 nt, Artificial Sequence
  LRRK2 RNA guide
aaagaaaucaaacugggguggu

SEQ ID NO: 22241 - RNA, 22 nt, Artificial Sequence
  LRRK2 RNA guide
aaaucaaacuggggugguggag

SEQ ID NO: 22242 - RNA, 22 nt, Artificial Sequence
  LRRK2 RNA guide
aagaaaucaaacugggguggug

SEQ ID NO: 22243 - RNA, 22 nt, Artificial Sequence
  LRRK2 RNA guide
aaucccagcugccagcaaagaa

SEQ ID NO: 22244 - RNA, 22 nt, Artificial Sequence
  LRRK2 RNA guide
accaccccaguuugauuucuuu

SEQ ID NO: 22245 - RNA, 22 nt, Artificial Sequence
  LRRK2 RNA guide
accccaguuugauuucuuugcu

SEQ ID NO: 22246 - RNA, 22 nt, Artificial Sequence
  LRRK2 RNA guide
accuccaccaccccaguuugau

SEQ ID NO: 22247 - RNA, 22 nt, Artificial Sequence
  LRRK2 RNA guide
acgaaucccagcugccagcaaa

SEQ ID NO: 22248 - RNA, 22 nt, Artificial Sequence
  LRRK2 RNA guide
agaaaucaaacugggguggugg

SEQ ID NO: 22249 - RNA, 22 nt, Artificial Sequence
  LRRK2 RNA guide
agcaaagaaaucaaacuggggu

SEQ ID NO: 22250 - RNA, 22 nt, Artificial Sequence
  LRRK2 RNA guide
agcugccagcaaagaaaucaaa

SEQ ID NO: 22251 - RNA, 22 nt, Artificial Sequence
  LRRK2 RNA guide
aguuugauuucuuugcuggcag

SEQ ID NO: 22252 - RNA, 22 nt, Artificial Sequence
  LRRK2 RNA guide
aucccagcugccagcaaagaaa

SEQ ID NO: 22253 - RNA, 22 nt, Artificial Sequence
  LRRK2 RNA guide
auuucuuugcuggcagcuggga

SEQ ID NO: 22254 - RNA, 22 nt, Artificial Sequence
  LRRK2 RNA guide
caaagaaaucaaacuggggugg

SEQ ID NO: 22255 - RNA, 22 nt, Artificial Sequence
  LRRK2 RNA guide
caccaccccaguuugauuucuu

SEQ ID NO: 22256 - RNA, 22 nt, Artificial Sequence
  LRRK2 RNA guide
caccccaguuugauuucuuugc

SEQ ID NO: 22257 - RNA, 22 nt, Artificial Sequence
  LRRK2 RNA guide
caccuccaccaccccaguuuga

SEQ ID NO: 22258 - RNA, 22 nt, Artificial Sequence
  LRRK2 RNA guide
cagcaaagaaaucaaacugggg

SEQ ID NO: 22259 - RNA, 22 nt, Artificial Sequence
  LRRK2 RNA guide
cagcugccagcaaagaaaucaa

SEQ ID NO: 22260 - RNA, 22 nt, Artificial Sequence
  LRRK2 RNA guide
caguuugauuucuuugcuggca

SEQ ID NO: 22261 - RNA, 22 nt, Artificial Sequence
  LRRK2 RNA guide
ccaccaccccaguuugauuucu

SEQ ID NO: 22262 - RNA, 22 nt, Artificial Sequence
  LRRK2 RNA guide
ccaccccaguuugauuucuuug

SEQ ID NO: 22263 - RNA, 22 nt, Artificial Sequence
  LRRK2 RNA guide
ccaccuccaccaccccaguuug

SEQ ID NO: 22264 - RNA, 22 nt, Artificial Sequence
  LRRK2 RNA guide
ccagcaaagaaaucaaacuggg

SEQ ID NO: 22265 - RNA, 22 nt, Artificial Sequence
  LRRK2 RNA guide
ccagcugccagcaaagaaauca

SEQ ID NO: 22266 - RNA, 22 nt, Artificial Sequence
  LRRK2 RNA guide
ccaguuugauuucuuugcuggc

SEQ ID NO: 22267 - RNA, 22 nt, Artificial Sequence
  LRRK2 RNA guide
cccagcugccagcaaagaaauc

SEQ ID NO: 22268 - RNA, 22 nt, Artificial Sequence
  LRRK2 RNA guide
cccaguuugauuucuuugcugg

SEQ ID NO: 22269 - RNA, 22 nt, Artificial Sequence
  LRRK2 RNA guide
ccccaguuugauuucuuugcug

SEQ ID NO: 22270 - RNA, 22 nt, Artificial Sequence
  LRRK2 RNA guide
ccuccaccaccccaguuugauu

SEQ ID NO: 22271 - RNA, 22 nt, Artificial Sequence
  LRRK2 RNA guide
cgaaucccagcugccagcaaag

SEQ ID NO: 22272 - RNA, 22 nt, Artificial Sequence
  LRRK2 RNA guide
cuccaccaccccaguuugauuu

SEQ ID NO: 22273 - RNA, 22 nt, Artificial Sequence
  LRRK2 RNA guide
cugccagcaaagaaaucaaacu

SEQ ID NO: 22274 - RNA, 22 nt, Artificial Sequence
  LRRK2 RNA guide
gaaaucaaacugggguggugga

SEQ ID NO: 22275 - RNA, 22 nt, Artificial Sequence
  LRRK2 RNA guide
gaaucccagcugccagcaaaga

SEQ ID NO: 22276 - RNA, 22 nt, Artificial Sequence
  LRRK2 RNA guide
gacgaaucccagcugccagcaa

SEQ ID NO: 22277 - RNA, 22 nt, Artificial Sequence
  LRRK2 RNA guide
gauuucuuugcuggcagcuggg

SEQ ID NO: 22278 - RNA, 22 nt, Artificial Sequence
  LRRK2 RNA guide
gcaaagaaaucaaacuggggug

SEQ ID NO: 22279 - RNA, 22 nt, Artificial Sequence
  LRRK2 RNA guide
gccaccuccaccaccccaguuu

SEQ ID NO: 22280 - RNA, 22 nt, Artificial Sequence
  LRRK2 RNA guide
gccagcaaagaaaucaaacugg

SEQ ID NO: 22281 - RNA, 22 nt, Artificial Sequence
  LRRK2 RNA guide
gcugccagcaaagaaaucaaac

SEQ ID NO: 22282 - RNA, 22 nt, Artificial Sequence
  LRRK2 RNA guide
ggacgaaucccagcugccagca

SEQ ID NO: 22283 - RNA, 22 nt, Artificial Sequence
  LRRK2 RNA guide
guuugauuucuuugcuggcagc

SEQ ID NO: 22284 - RNA, 22 nt, Artificial Sequence
  LRRK2 RNA guide
uccaccaccccaguuugauuuc

SEQ ID NO: 22285 - RNA, 22 nt, Artificial Sequence
  LRRK2 RNA guide
ucccagcugccagcaaagaaau

SEQ ID NO: 22286 - RNA, 22 nt, Artificial Sequence
  LRRK2 RNA guide
ugauuucuuugcuggcagcugg

SEQ ID NO: 22287 - RNA, 22 nt, Artificial Sequence
  LRRK2 RNA guide
ugccaccuccaccaccccaguu

SEQ ID NO: 22288 - RNA, 22 nt, Artificial Sequence
  LRRK2 RNA guide
ugccagcaaagaaaucaaacug

SEQ ID NO: 22289 - RNA, 22 nt, Artificial Sequence
  LRRK2 RNA guide
uugauuucuuugcuggcagcug

SEQ ID NO: 22290 - RNA, 22 nt, Artificial Sequence
  LRRK2 RNA guide
uuucuuugcuggcagcugggau

SEQ ID NO: 22291 - RNA, 22 nt, Artificial Sequence
  LRRK2 RNA guide
uuugauuucuuugcuggcagcu

SEQ ID NO: 22292 - RNA, 20 nt, Artificial Sequence
  LRRK2 RNA guide
aacauccggggaugaauccc

SEQ ID NO: 22293 - RNA, 20 nt, Artificial Sequence
  LRRK2 RNA guide
aacuccaucaccaacauccg

SEQ ID NO: 22294 - RNA, 20 nt, Artificial Sequence
  LRRK2 RNA guide
acauccggggaugaauccca

SEQ ID NO: 22295 - RNA, 20 nt, Artificial Sequence
  LRRK2 RNA guide
accaacauccggggaugaau

SEQ ID NO: 22296 - RNA, 20 nt, Artificial Sequence
  LRRK2 RNA guide
acuccaucaccaacauccgg

SEQ ID NO: 22297 - RNA, 20 nt, Artificial Sequence
  LRRK2 RNA guide
agcugggauucauccccgga

SEQ ID NO: 22298 - RNA, 20 nt, Artificial Sequence
  LRRK2 RNA guide
aucaccaacauccggggaug

SEQ ID NO: 22299 - RNA, 20 nt, Artificial Sequence
  LRRK2 RNA guide
auccggggaugaaucccagc

SEQ ID NO: 22300 - RNA, 20 nt, Artificial Sequence
  LRRK2 RNA guide
aucuuugcuggcagcuggga

SEQ ID NO: 22301 - RNA, 20 nt, Artificial Sequence
  LRRK2 RNA guide
augaaucccagcugccagca

SEQ ID NO: 22302 - RNA, 20 nt, Artificial Sequence
  LRRK2 RNA guide
auucauccccggauguuggu

SEQ ID NO: 22303 - RNA, 20 nt, Artificial Sequence
  LRRK2 RNA guide
caacauccggggaugaaucc

SEQ ID NO: 22304 - RNA, 20 nt, Artificial Sequence
  LRRK2 RNA guide
caccaacauccggggaugaa

SEQ ID NO: 22305 - RNA, 20 nt, Artificial Sequence
  LRRK2 RNA guide
cagcugggauucauccccgg

SEQ ID NO: 22306 - RNA, 20 nt, Artificial Sequence
  LRRK2 RNA guide
caucaccaacauccggggau

SEQ ID NO: 22307 - RNA, 20 nt, Artificial Sequence
  LRRK2 RNA guide
cauccccggauguuggugau

SEQ ID NO: 22308 - RNA, 20 nt, Artificial Sequence
  LRRK2 RNA guide
cauccggggaugaaucccag

SEQ ID NO: 22309 - RNA, 20 nt, Artificial Sequence
  LRRK2 RNA guide
ccaacauccggggaugaauc

SEQ ID NO: 22310 - RNA, 20 nt, Artificial Sequence
  LRRK2 RNA guide
ccaucaccaacauccgggga

SEQ ID NO: 22311 - RNA, 20 nt, Artificial Sequence
  LRRK2 RNA guide
ccggggaugaaucccagcug

SEQ ID NO: 22312 - RNA, 20 nt, Artificial Sequence
  LRRK2 RNA guide
cggggaugaaucccagcugc

SEQ ID NO: 22313 - RNA, 20 nt, Artificial Sequence
  LRRK2 RNA guide
cuggcagcugggauucaucc

SEQ ID NO: 22314 - RNA, 20 nt, Artificial Sequence
  LRRK2 RNA guide
cugggauucauccccggaug

SEQ ID NO: 22315 - RNA, 20 nt, Artificial Sequence
  LRRK2 RNA guide
cuuugcuggcagcugggauu

SEQ ID NO: 22316 - RNA, 20 nt, Artificial Sequence
  LRRK2 RNA guide
gaugaaucccagcugccagc

SEQ ID NO: 22317 - RNA, 20 nt, Artificial Sequence
  LRRK2 RNA guide
gauucauccccggauguugg

SEQ ID NO: 22318 - RNA, 20 nt, Artificial Sequence
  LRRK2 RNA guide
gcagcugggauucauccccg

SEQ ID NO: 22319 - RNA, 20 nt, Artificial Sequence
  LRRK2 RNA guide
gcuggcagcugggauucauc

SEQ ID NO: 22320 - RNA, 20 nt, Artificial Sequence
  LRRK2 RNA guide
gcugggauucauccccggau

SEQ ID NO: 22321 - RNA, 20 nt, Artificial Sequence
  LRRK2 RNA guide
ggaugaaucccagcugccag

SEQ ID NO: 22322 - RNA, 20 nt, Artificial Sequence
  LRRK2 RNA guide
ggauucauccccggauguug

SEQ ID NO: 22323 - RNA, 20 nt, Artificial Sequence
  LRRK2 RNA guide
ggcagcugggauucaucccc

SEQ ID NO: 22324 - RNA, 20 nt, Artificial Sequence
  LRRK2 RNA guide
gggaugaaucccagcugcca

SEQ ID NO: 22325 - RNA, 20 nt, Artificial Sequence
  LRRK2 RNA guide
gggauucauccccggauguu

SEQ ID NO: 22326 - RNA, 20 nt, Artificial Sequence
  LRRK2 RNA guide
ggggaugaaucccagcugcc

SEQ ID NO: 22327 - RNA, 20 nt, Artificial Sequence
  LRRK2 RNA guide
uaucuuugcuggcagcuggg

SEQ ID NO: 22328 - RNA, 20 nt, Artificial Sequence
  LRRK2 RNA guide
ucaccaacauccggggauga

SEQ ID NO: 22329 - RNA, 20 nt, Artificial Sequence
  LRRK2 RNA guide
ucauccccggauguugguga

SEQ ID NO: 22330 - RNA, 20 nt, Artificial Sequence
  LRRK2 RNA guide
uccaucaccaacauccgggg

SEQ ID NO: 22331 - RNA, 20 nt, Artificial Sequence
  LRRK2 RNA guide
uccggggaugaaucccagcu

SEQ ID NO: 22332 - RNA, 20 nt, Artificial Sequence
  LRRK2 RNA guide
ucuuugcuggcagcugggau

SEQ ID NO: 22333 - RNA, 20 nt, Artificial Sequence
  LRRK2 RNA guide
ugcuggcagcugggauucau

SEQ ID NO: 22334 - RNA, 20 nt, Artificial Sequence
  LRRK2 RNA guide
uggcagcugggauucauccc

SEQ ID NO: 22335 - RNA, 20 nt, Artificial Sequence
  LRRK2 RNA guide
ugggauucauccccggaugu

SEQ ID NO: 22336 - RNA, 20 nt, Artificial Sequence
  LRRK2 RNA guide
uucauccccggauguuggug

SEQ ID NO: 22337 - RNA, 20 nt, Artificial Sequence
  LRRK2 RNA guide
uugcuggcagcugggauuca

SEQ ID NO: 22338 - RNA, 20 nt, Artificial Sequence
  LRRK2 RNA guide
uuugcuggcagcugggauuc

SEQ ID NO: 22339 - RNA, 21 nt, Artificial Sequence
  LRRK2 RNA guide
aacauccggggaugaauccca

SEQ ID NO: 22340 - RNA, 21 nt, Artificial Sequence
  LRRK2 RNA guide
aacuccaucaccaacauccgg

SEQ ID NO: 22341 - RNA, 21 nt, Artificial Sequence
  LRRK2 RNA guide
acauccggggaugaaucccag

SEQ ID NO: 22342 - RNA, 21 nt, Artificial Sequence
  LRRK2 RNA guide
accaacauccggggaugaauc

SEQ ID NO: 22343 - RNA, 21 nt, Artificial Sequence
  LRRK2 RNA guide
acuccaucaccaacauccggg

SEQ ID NO: 22344 - RNA, 21 nt, Artificial Sequence
  LRRK2 RNA guide
agcugggauucauccccggau

SEQ ID NO: 22345 - RNA, 21 nt, Artificial Sequence
  LRRK2 RNA guide
auaucuuugcuggcagcuggg

SEQ ID NO: 22346 - RNA, 21 nt, Artificial Sequence
  LRRK2 RNA guide
aucaccaacauccggggauga

SEQ ID NO: 22347 - RNA, 21 nt, Artificial Sequence
  LRRK2 RNA guide
auccggggaugaaucccagcu

SEQ ID NO: 22348 - RNA, 21 nt, Artificial Sequence
  LRRK2 RNA guide
aucuuugcuggcagcugggau

SEQ ID NO: 22349 - RNA, 21 nt, Artificial Sequence
  LRRK2 RNA guide
augaaucccagcugccagcaa

SEQ ID NO: 22350 - RNA, 21 nt, Artificial Sequence
  LRRK2 RNA guide
auucauccccggauguuggug

SEQ ID NO: 22351 - RNA, 21 nt, Artificial Sequence
  LRRK2 RNA guide
caacauccggggaugaauccc

SEQ ID NO: 22352 - RNA, 21 nt, Artificial Sequence
  LRRK2 RNA guide
caccaacauccggggaugaau

SEQ ID NO: 22353 - RNA, 21 nt, Artificial Sequence
  LRRK2 RNA guide
cagcugggauucauccccgga

SEQ ID NO: 22354 - RNA, 21 nt, Artificial Sequence
  LRRK2 RNA guide
caucaccaacauccggggaug

SEQ ID NO: 22355 - RNA, 21 nt, Artificial Sequence
  LRRK2 RNA guide
cauccccggauguuggugaug

SEQ ID NO: 22356 - RNA, 21 nt, Artificial Sequence
  LRRK2 RNA guide
cauccggggaugaaucccagc

SEQ ID NO: 22357 - RNA, 21 nt, Artificial Sequence
  LRRK2 RNA guide
ccaacauccggggaugaaucc

SEQ ID NO: 22358 - RNA, 21 nt, Artificial Sequence
  LRRK2 RNA guide
ccaucaccaacauccggggau

SEQ ID NO: 22359 - RNA, 21 nt, Artificial Sequence
  LRRK2 RNA guide
ccggggaugaaucccagcugc

SEQ ID NO: 22360 - RNA, 21 nt, Artificial Sequence
  LRRK2 RNA guide
cggggaugaaucccagcugcc

SEQ ID NO: 22361 - RNA, 21 nt, Artificial Sequence
  LRRK2 RNA guide
cuccaucaccaacauccgggg

SEQ ID NO: 22362 - RNA, 21 nt, Artificial Sequence
  LRRK2 RNA guide
cuggcagcugggauucauccc

SEQ ID NO: 22363 - RNA, 21 nt, Artificial Sequence
  LRRK2 RNA guide
cugggauucauccccggaugu

SEQ ID NO: 22364 - RNA, 21 nt, Artificial Sequence
  LRRK2 RNA guide
cuuugcuggcagcugggauuc

SEQ ID NO: 22365 - RNA, 21 nt, Artificial Sequence
  LRRK2 RNA guide
gaugaaucccagcugccagca

SEQ ID NO: 22366 - RNA, 21 nt, Artificial Sequence
  LRRK2 RNA guide
gauucauccccggauguuggu

SEQ ID NO: 22367 - RNA, 21 nt, Artificial Sequence
  LRRK2 RNA guide
gcagcugggauucauccccgg

SEQ ID NO: 22368 - RNA, 21 nt, Artificial Sequence
  LRRK2 RNA guide
gcuggcagcugggauucaucc

SEQ ID NO: 22369 - RNA, 21 nt, Artificial Sequence
  LRRK2 RNA guide
gcugggauucauccccggaug

SEQ ID NO: 22370 - RNA, 21 nt, Artificial Sequence
  LRRK2 RNA guide
ggaugaaucccagcugccagc

SEQ ID NO: 22371 - RNA, 21 nt, Artificial Sequence
  LRRK2 RNA guide
ggauucauccccggauguugg

SEQ ID NO: 22372 - RNA, 21 nt, Artificial Sequence
  LRRK2 RNA guide
ggcagcugggauucauccccg

SEQ ID NO: 22373 - RNA, 21 nt, Artificial Sequence
  LRRK2 RNA guide
gggaugaaucccagcugccag

SEQ ID NO: 22374 - RNA, 21 nt, Artificial Sequence
  LRRK2 RNA guide
gggauucauccccggauguug

SEQ ID NO: 22375 - RNA, 21 nt, Artificial Sequence
  LRRK2 RNA guide
ggggaugaaucccagcugcca

SEQ ID NO: 22376 - RNA, 21 nt, Artificial Sequence
  LRRK2 RNA guide
uaacuccaucaccaacauccg

SEQ ID NO: 22377 - RNA, 21 nt, Artificial Sequence
  LRRK2 RNA guide
uaucuuugcuggcagcuggga

SEQ ID NO: 22378 - RNA, 21 nt, Artificial Sequence
  LRRK2 RNA guide
ucaccaacauccggggaugaa

SEQ ID NO: 22379 - RNA, 21 nt, Artificial Sequence
  LRRK2 RNA guide
ucauccccggauguuggugau

SEQ ID NO: 22380 - RNA, 21 nt, Artificial Sequence
  LRRK2 RNA guide
uccaucaccaacauccgggga

SEQ ID NO: 22381 - RNA, 21 nt, Artificial Sequence
  LRRK2 RNA guide
uccggggaugaaucccagcug

SEQ ID NO: 22382 - RNA, 21 nt, Artificial Sequence
  LRRK2 RNA guide
ucuuugcuggcagcugggauu

SEQ ID NO: 22383 - RNA, 21 nt, Artificial Sequence
  LRRK2 RNA guide
ugcuggcagcugggauucauc

SEQ ID NO: 22384 - RNA, 21 nt, Artificial Sequence
  LRRK2 RNA guide
uggcagcugggauucaucccc

SEQ ID NO: 22385 - RNA, 21 nt, Artificial Sequence
  LRRK2 RNA guide
ugggauucauccccggauguu

SEQ ID NO: 22386 - RNA, 21 nt, Artificial Sequence
  LRRK2 RNA guide
uucauccccggauguugguga

SEQ ID NO: 22387 - RNA, 21 nt, Artificial Sequence
  LRRK2 RNA guide
uugcuggcagcugggauucau

SEQ ID NO: 22388 - RNA, 21 nt, Artificial Sequence
  LRRK2 RNA guide
uuugcuggcagcugggauuca

SEQ ID NO: 22389 - RNA, 22 nt, Artificial Sequence
  LRRK2 RNA guide
aacauccggggaugaaucccag

SEQ ID NO: 22390 - RNA, 22 nt, Artificial Sequence
  LRRK2 RNA guide
aacuccaucaccaacauccggg

SEQ ID NO: 22391 - RNA, 22 nt, Artificial Sequence
  LRRK2 RNA guide
acauccggggaugaaucccagc

SEQ ID NO: 22392 - RNA, 22 nt, Artificial Sequence
  LRRK2 RNA guide
accaacauccggggaugaaucc

SEQ ID NO: 22393 - RNA, 22 nt, Artificial Sequence
  LRRK2 RNA guide
acuccaucaccaacauccgggg

SEQ ID NO: 22394 - RNA, 22 nt, Artificial Sequence
  LRRK2 RNA guide
agcugggauucauccccggaug

SEQ ID NO: 22395 - RNA, 22 nt, Artificial Sequence
  LRRK2 RNA guide
auaucuuugcuggcagcuggga

SEQ ID NO: 22396 - RNA, 22 nt, Artificial Sequence
  LRRK2 RNA guide
aucaccaacauccggggaugaa

SEQ ID NO: 22397 - RNA, 22 nt, Artificial Sequence
  LRRK2 RNA guide
auccggggaugaaucccagcug

SEQ ID NO: 22398 - RNA, 22 nt, Artificial Sequence
  LRRK2 RNA guide
aucuuugcuggcagcugggauu

SEQ ID NO: 22399 - RNA, 22 nt, Artificial Sequence
  LRRK2 RNA guide
augaaucccagcugccagcaaa

SEQ ID NO: 22400 - RNA, 22 nt, Artificial Sequence
  LRRK2 RNA guide
auucauccccggauguugguga

SEQ ID NO: 22401 - RNA, 22 nt, Artificial Sequence
  LRRK2 RNA guide
caacauccggggaugaauccca

SEQ ID NO: 22402 - RNA, 22 nt, Artificial Sequence
  LRRK2 RNA guide
caccaacauccggggaugaauc

SEQ ID NO: 22403 - RNA, 22 nt, Artificial Sequence
  LRRK2 RNA guide
cagcugggauucauccccggau

SEQ ID NO: 22404 - RNA, 22 nt, Artificial Sequence
  LRRK2 RNA guide
caucaccaacauccggggauga

SEQ ID NO: 22405 - RNA, 22 nt, Artificial Sequence
  LRRK2 RNA guide
cauccccggauguuggugaugg

SEQ ID NO: 22406 - RNA, 22 nt, Artificial Sequence
  LRRK2 RNA guide
cauccggggaugaaucccagcu

SEQ ID NO: 22407 - RNA, 22 nt, Artificial Sequence
  LRRK2 RNA guide
ccaacauccggggaugaauccc

SEQ ID NO: 22408 - RNA, 22 nt, Artificial Sequence
  LRRK2 RNA guide
ccaucaccaacauccggggaug

SEQ ID NO: 22409 - RNA, 22 nt, Artificial Sequence
  LRRK2 RNA guide
ccggggaugaaucccagcugcc

SEQ ID NO: 22410 - RNA, 22 nt, Artificial Sequence
  LRRK2 RNA guide
cggggaugaaucccagcugcca

SEQ ID NO: 22411 - RNA, 22 nt, Artificial Sequence
  LRRK2 RNA guide
cuaacuccaucaccaacauccg

SEQ ID NO: 22412 - RNA, 22 nt, Artificial Sequence
  LRRK2 RNA guide
cuccaucaccaacauccgggga

SEQ ID NO: 22413 - RNA, 22 nt, Artificial Sequence
  LRRK2 RNA guide
cuggcagcugggauucaucccc

SEQ ID NO: 22414 - RNA, 22 nt, Artificial Sequence
  LRRK2 RNA guide
cugggauucauccccggauguu

SEQ ID NO: 22415 - RNA, 22 nt, Artificial Sequence
  LRRK2 RNA guide
cuuugcuggcagcugggauuca

SEQ ID NO: 22416 - RNA, 22 nt, Artificial Sequence
  LRRK2 RNA guide
gauaucuuugcuggcagcuggg

SEQ ID NO: 22417 - RNA, 22 nt, Artificial Sequence
  LRRK2 RNA guide
gaugaaucccagcugccagcaa

SEQ ID NO: 22418 - RNA, 22 nt, Artificial Sequence
  LRRK2 RNA guide
gauucauccccggauguuggug

SEQ ID NO: 22419 - RNA, 22 nt, Artificial Sequence
  LRRK2 RNA guide
gcagcugggauucauccccgga

SEQ ID NO: 22420 - RNA, 22 nt, Artificial Sequence
  LRRK2 RNA guide
gcuggcagcugggauucauccc

SEQ ID NO: 22421 - RNA, 22 nt, Artificial Sequence
  LRRK2 RNA guide
gcugggauucauccccggaugu

SEQ ID NO: 22422 - RNA, 22 nt, Artificial Sequence
  LRRK2 RNA guide
ggaugaaucccagcugccagca

SEQ ID NO: 22423 - RNA, 22 nt, Artificial Sequence
  LRRK2 RNA guide
ggauucauccccggauguuggu

SEQ ID NO: 22424 - RNA, 22 nt, Artificial Sequence
  LRRK2 RNA guide
ggcagcugggauucauccccgg

SEQ ID NO: 22425 - RNA, 22 nt, Artificial Sequence
  LRRK2 RNA guide
gggaugaaucccagcugccagc

SEQ ID NO: 22426 - RNA, 22 nt, Artificial Sequence
  LRRK2 RNA guide
gggauucauccccggauguugg

SEQ ID NO: 22427 - RNA, 22 nt, Artificial Sequence
  LRRK2 RNA guide
ggggaugaaucccagcugccag

SEQ ID NO: 22428 - RNA, 22 nt, Artificial Sequence
  LRRK2 RNA guide
uaacuccaucaccaacauccgg

SEQ ID NO: 22429 - RNA, 22 nt, Artificial Sequence
  LRRK2 RNA guide
uaucuuugcuggcagcugggau

SEQ ID NO: 22430 - RNA, 22 nt, Artificial Sequence
  LRRK2 RNA guide
ucaccaacauccggggaugaau

SEQ ID NO: 22431 - RNA, 22 nt, Artificial Sequence
  LRRK2 RNA guide
ucauccccggauguuggugaug

SEQ ID NO: 22432 - RNA, 22 nt, Artificial Sequence
  LRRK2 RNA guide
uccaucaccaacauccggggau

SEQ ID NO: 22433 - RNA, 22 nt, Artificial Sequence
  LRRK2 RNA guide
uccggggaugaaucccagcugc

SEQ ID NO: 22434 - RNA, 22 nt, Artificial Sequence
  LRRK2 RNA guide
ucuuugcuggcagcugggauuc

SEQ ID NO: 22435 - RNA, 22 nt, Artificial Sequence
  LRRK2 RNA guide
ugcuggcagcugggauucaucc

SEQ ID NO: 22436 - RNA, 22 nt, Artificial Sequence
  LRRK2 RNA guide
uggcagcugggauucauccccg

SEQ ID NO: 22437 - RNA, 22 nt, Artificial Sequence
  LRRK2 RNA guide
ugggauucauccccggauguug

SEQ ID NO: 22438 - RNA, 22 nt, Artificial Sequence
  LRRK2 RNA guide
uucauccccggauguuggugau

SEQ ID NO: 22439 - RNA, 22 nt, Artificial Sequence
  LRRK2 RNA guide
uugcuggcagcugggauucauc

SEQ ID NO: 22440 - RNA, 22 nt, Artificial Sequence
  LRRK2 RNA guide
uuugcuggcagcugggauucau

SEQ ID NO: 22441 - RNA, 20 nt, Artificial Sequence
  LRRK2 RNA guide
aacauccagggacgaauccc

SEQ ID NO: 22442 - RNA, 20 nt, Artificial Sequence
  LRRK2 RNA guide
aacuccaucaccaacaucca

SEQ ID NO: 22443 - RNA, 20 nt, Artificial Sequence
  LRRK2 RNA guide
acauccagggacgaauccca

SEQ ID NO: 22444 - RNA, 20 nt, Artificial Sequence
  LRRK2 RNA guide
accaacauccagggacgaau

SEQ ID NO: 22445 - RNA, 20 nt, Artificial Sequence
  LRRK2 RNA guide
acuccaucaccaacauccag

SEQ ID NO: 22446 - RNA, 20 nt, Artificial Sequence
  LRRK2 RNA guide
agcugggauucgucccugga

SEQ ID NO: 22447 - RNA, 20 nt, Artificial Sequence
  LRRK2 RNA guide
aggcuaacuccaucaccaac

SEQ ID NO: 22448 - RNA, 20 nt, Artificial Sequence
  LRRK2 RNA guide
aucaccaacauccagggacg

SEQ ID NO: 22449 - RNA, 20 nt, Artificial Sequence
  LRRK2 RNA guide
auccagggacgaaucccagc

SEQ ID NO: 22450 - RNA, 20 nt, Artificial Sequence
  LRRK2 RNA guide
auucgucccuggauguuggu

SEQ ID NO: 22451 - RNA, 20 nt, Artificial Sequence
  LRRK2 RNA guide
caacauccagggacgaaucc

SEQ ID NO: 22452 - RNA, 20 nt, Artificial Sequence
  LRRK2 RNA guide
caccaacauccagggacgaa

SEQ ID NO: 22453 - RNA, 20 nt, Artificial Sequence
  LRRK2 RNA guide
cagcugggauucgucccugg

SEQ ID NO: 22454 - RNA, 20 nt, Artificial Sequence
  LRRK2 RNA guide
cagggacgaaucccagcugc

SEQ ID NO: 22455 - RNA, 20 nt, Artificial Sequence
  LRRK2 RNA guide
caucaccaacauccagggac

SEQ ID NO: 22456 - RNA, 20 nt, Artificial Sequence
  LRRK2 RNA guide
cauccagggacgaaucccag

SEQ ID NO: 22457 - RNA, 20 nt, Artificial Sequence
  LRRK2 RNA guide
ccaacauccagggacgaauc

SEQ ID NO: 22458 - RNA, 20 nt, Artificial Sequence
  LRRK2 RNA guide
ccagggacgaaucccagcug

SEQ ID NO: 22459 - RNA, 20 nt, Artificial Sequence
  LRRK2 RNA guide
ccaucaccaacauccaggga

SEQ ID NO: 22460 - RNA, 20 nt, Artificial Sequence
  LRRK2 RNA guide
cccuggauguuggugaugga

SEQ ID NO: 22461 - RNA, 20 nt, Artificial Sequence
  LRRK2 RNA guide
ccuggauguuggugauggag

SEQ ID NO: 22462 - RNA, 20 nt, Artificial Sequence
  LRRK2 RNA guide
cgucccuggauguuggugau

SEQ ID NO: 22463 - RNA, 20 nt, Artificial Sequence
  LRRK2 RNA guide
cuaacuccaucaccaacauc

SEQ ID NO: 22464 - RNA, 20 nt, Artificial Sequence
  LRRK2 RNA guide
cuccaucaccaacauccagg

SEQ ID NO: 22465 - RNA, 20 nt, Artificial Sequence
  LRRK2 RNA guide
cuggauguuggugauggagu

SEQ ID NO: 22466 - RNA, 20 nt, Artificial Sequence
  LRRK2 RNA guide
cuggcagcugggauucgucc

SEQ ID NO: 22467 - RNA, 20 nt, Artificial Sequence
  LRRK2 RNA guide
cugggauucgucccuggaug

SEQ ID NO: 22468 - RNA, 20 nt, Artificial Sequence
  LRRK2 RNA guide
gauucgucccuggauguugg

SEQ ID NO: 22469 - RNA, 20 nt, Artificial Sequence
  LRRK2 RNA guide
gcagcugggauucgucccug

SEQ ID NO: 22470 - RNA, 20 nt, Artificial Sequence
  LRRK2 RNA guide
gcuaacuccaucaccaacau

SEQ ID NO: 22471 - RNA, 20 nt, Artificial Sequence
  LRRK2 RNA guide
gcuggcagcugggauucguc

SEQ ID NO: 22472 - RNA, 20 nt, Artificial Sequence
  LRRK2 RNA guide
gcugggauucgucccuggau

SEQ ID NO: 22473 - RNA, 20 nt, Artificial Sequence
  LRRK2 RNA guide
ggauucgucccuggauguug

SEQ ID NO: 22474 - RNA, 20 nt, Artificial Sequence
  LRRK2 RNA guide
ggcagcugggauucgucccu

SEQ ID NO: 22475 - RNA, 20 nt, Artificial Sequence
  LRRK2 RNA guide
ggcuaacuccaucaccaaca

SEQ ID NO: 22476 - RNA, 20 nt, Artificial Sequence
  LRRK2 RNA guide
gggauucgucccuggauguu

SEQ ID NO: 22477 - RNA, 20 nt, Artificial Sequence
  LRRK2 RNA guide
gucccuggauguuggugaug

SEQ ID NO: 22478 - RNA, 20 nt, Artificial Sequence
  LRRK2 RNA guide
uaacuccaucaccaacaucc

SEQ ID NO: 22479 - RNA, 20 nt, Artificial Sequence
  LRRK2 RNA guide
ucaccaacauccagggacga

SEQ ID NO: 22480 - RNA, 20 nt, Artificial Sequence
  LRRK2 RNA guide
uccagggacgaaucccagcu

SEQ ID NO: 22481 - RNA, 20 nt, Artificial Sequence
  LRRK2 RNA guide
uccaucaccaacauccaggg

SEQ ID NO: 22482 - RNA, 20 nt, Artificial Sequence
  LRRK2 RNA guide
ucccuggauguuggugaugg

SEQ ID NO: 22483 - RNA, 20 nt, Artificial Sequence
  LRRK2 RNA guide
ucgucccuggauguugguga

SEQ ID NO: 22484 - RNA, 20 nt, Artificial Sequence
  LRRK2 RNA guide
ugcuggcagcugggauucgu

SEQ ID NO: 22485 - RNA, 20 nt, Artificial Sequence
  LRRK2 RNA guide
uggcagcugggauucguccc

SEQ ID NO: 22486 - RNA, 20 nt, Artificial Sequence
  LRRK2 RNA guide
ugggauucgucccuggaugu

SEQ ID NO: 22487 - RNA, 20 nt, Artificial Sequence
  LRRK2 RNA guide
uucgucccuggauguuggug

SEQ ID NO: 22488 - RNA, 20 nt, Artificial Sequence
  LRRK2 RNA guide
uugcuggcagcugggauucg

SEQ ID NO: 22489 - RNA, 21 nt, Artificial Sequence
  LRRK2 RNA guide
aacauccagggacgaauccca

SEQ ID NO: 22490 - RNA, 21 nt, Artificial Sequence
  LRRK2 RNA guide
aacuccaucaccaacauccag

SEQ ID NO: 22491 - RNA, 21 nt, Artificial Sequence
  LRRK2 RNA guide
acauccagggacgaaucccag

SEQ ID NO: 22492 - RNA, 21 nt, Artificial Sequence
  LRRK2 RNA guide
accaacauccagggacgaauc

SEQ ID NO: 22493 - RNA, 21 nt, Artificial Sequence
  LRRK2 RNA guide
acuccaucaccaacauccagg

SEQ ID NO: 22494 - RNA, 21 nt, Artificial Sequence
  LRRK2 RNA guide
agcugggauucgucccuggau

SEQ ID NO: 22495 - RNA, 21 nt, Artificial Sequence
  LRRK2 RNA guide
aggcuaacuccaucaccaaca

SEQ ID NO: 22496 - RNA, 21 nt, Artificial Sequence
  LRRK2 RNA guide
aucaccaacauccagggacga

SEQ ID NO: 22497 - RNA, 21 nt, Artificial Sequence
  LRRK2 RNA guide
auccagggacgaaucccagcu

SEQ ID NO: 22498 - RNA, 21 nt, Artificial Sequence
  LRRK2 RNA guide
auucgucccuggauguuggug

SEQ ID NO: 22499 - RNA, 21 nt, Artificial Sequence
  LRRK2 RNA guide
caacauccagggacgaauccc

SEQ ID NO: 22500 - RNA, 21 nt, Artificial Sequence
  LRRK2 RNA guide
caccaacauccagggacgaau

SEQ ID NO: 22501 - RNA, 21 nt, Artificial Sequence
  LRRK2 RNA guide
cagcugggauucgucccugga

SEQ ID NO: 22502 - RNA, 21 nt, Artificial Sequence
  LRRK2 RNA guide
cagggacgaaucccagcugcc

SEQ ID NO: 22503 - RNA, 21 nt, Artificial Sequence
  LRRK2 RNA guide
caucaccaacauccagggacg

SEQ ID NO: 22504 - RNA, 21 nt, Artificial Sequence
  LRRK2 RNA guide
cauccagggacgaaucccagc

SEQ ID NO: 22505 - RNA, 21 nt, Artificial Sequence
  LRRK2 RNA guide
ccaacauccagggacgaaucc

SEQ ID NO: 22506 - RNA, 21 nt, Artificial Sequence
  LRRK2 RNA guide
ccagggacgaaucccagcugc

SEQ ID NO: 22507 - RNA, 21 nt, Artificial Sequence
  LRRK2 RNA guide
ccaucaccaacauccagggac

SEQ ID NO: 22508 - RNA, 21 nt, Artificial Sequence
  LRRK2 RNA guide
cccuggauguuggugauggag

SEQ ID NO: 22509 - RNA, 21 nt, Artificial Sequence
  LRRK2 RNA guide
ccuggauguuggugauggagu

SEQ ID NO: 22510 - RNA, 21 nt, Artificial Sequence
  LRRK2 RNA guide
cgucccuggauguuggugaug

SEQ ID NO: 22511 - RNA, 21 nt, Artificial Sequence
  LRRK2 RNA guide
cuaacuccaucaccaacaucc

SEQ ID NO: 22512 - RNA, 21 nt, Artificial Sequence
  LRRK2 RNA guide
cuccaucaccaacauccaggg

SEQ ID NO: 22513 - RNA, 21 nt, Artificial Sequence
  LRRK2 RNA guide
cuggauguuggugauggaguu

SEQ ID NO: 22514 - RNA, 21 nt, Artificial Sequence
  LRRK2 RNA guide
cuggcagcugggauucguccc

SEQ ID NO: 22515 - RNA, 21 nt, Artificial Sequence
  LRRK2 RNA guide
cugggauucgucccuggaugu

SEQ ID NO: 22516 - RNA, 21 nt, Artificial Sequence
  LRRK2 RNA guide
gaggcuaacuccaucaccaac

SEQ ID NO: 22517 - RNA, 21 nt, Artificial Sequence
  LRRK2 RNA guide
gauucgucccuggauguuggu

SEQ ID NO: 22518 - RNA, 21 nt, Artificial Sequence
  LRRK2 RNA guide
gcagcugggauucgucccugg

SEQ ID NO: 22519 - RNA, 21 nt, Artificial Sequence
  LRRK2 RNA guide
gcuaacuccaucaccaacauc

SEQ ID NO: 22520 - RNA, 21 nt, Artificial Sequence
  LRRK2 RNA guide
gcuggcagcugggauucgucc

SEQ ID NO: 22521 - RNA, 21 nt, Artificial Sequence
  LRRK2 RNA guide
gcugggauucgucccuggaug

SEQ ID NO: 22522 - RNA, 21 nt, Artificial Sequence
  LRRK2 RNA guide
ggauucgucccuggauguugg

SEQ ID NO: 22523 - RNA, 21 nt, Artificial Sequence
  LRRK2 RNA guide
ggcagcugggauucgucccug

SEQ ID NO: 22524 - RNA, 21 nt, Artificial Sequence
  LRRK2 RNA guide
ggcuaacuccaucaccaacau

SEQ ID NO: 22525 - RNA, 21 nt, Artificial Sequence
  LRRK2 RNA guide
gggauucgucccuggauguug

SEQ ID NO: 22526 - RNA, 21 nt, Artificial Sequence
  LRRK2 RNA guide
gucccuggauguuggugaugg

SEQ ID NO: 22527 - RNA, 21 nt, Artificial Sequence
  LRRK2 RNA guide
uaacuccaucaccaacaucca

SEQ ID NO: 22528 - RNA, 21 nt, Artificial Sequence
  LRRK2 RNA guide
ucaccaacauccagggacgaa

SEQ ID NO: 22529 - RNA, 21 nt, Artificial Sequence
  LRRK2 RNA guide
uccagggacgaaucccagcug

SEQ ID NO: 22530 - RNA, 21 nt, Artificial Sequence
  LRRK2 RNA guide
uccaucaccaacauccaggga

SEQ ID NO: 22531 - RNA, 21 nt, Artificial Sequence
  LRRK2 RNA guide
ucccuggauguuggugaugga

SEQ ID NO: 22532 - RNA, 21 nt, Artificial Sequence
  LRRK2 RNA guide
ucgucccuggauguuggugau

SEQ ID NO: 22533 - RNA, 21 nt, Artificial Sequence
  LRRK2 RNA guide
ugcuggcagcugggauucguc

SEQ ID NO: 22534 - RNA, 21 nt, Artificial Sequence
  LRRK2 RNA guide
uggcagcugggauucgucccu

SEQ ID NO: 22535 - RNA, 21 nt, Artificial Sequence
  LRRK2 RNA guide
ugggauucgucccuggauguu

SEQ ID NO: 22536 - RNA, 21 nt, Artificial Sequence
  LRRK2 RNA guide
uucgucccuggauguugguga

SEQ ID NO: 22537 - RNA, 21 nt, Artificial Sequence
  LRRK2 RNA guide
uugcuggcagcugggauucgu

SEQ ID NO: 22538 - RNA, 21 nt, Artificial Sequence
  LRRK2 RNA guide
uuugcuggcagcugggauucg

SEQ ID NO: 22539 - RNA, 22 nt, Artificial Sequence
  LRRK2 RNA guide
aacauccagggacgaaucccag

SEQ ID NO: 22540 - RNA, 22 nt, Artificial Sequence
  LRRK2 RNA guide
aacuccaucaccaacauccagg

SEQ ID NO: 22541 - RNA, 22 nt, Artificial Sequence
  LRRK2 RNA guide
acauccagggacgaaucccagc

SEQ ID NO: 22542 - RNA, 22 nt, Artificial Sequence
  LRRK2 RNA guide
accaacauccagggacgaaucc

SEQ ID NO: 22543 - RNA, 22 nt, Artificial Sequence
  LRRK2 RNA guide
acuccaucaccaacauccaggg

SEQ ID NO: 22544 - RNA, 22 nt, Artificial Sequence
  LRRK2 RNA guide
agcugggauucgucccuggaug

SEQ ID NO: 22545 - RNA, 22 nt, Artificial Sequence
  LRRK2 RNA guide
aggcuaacuccaucaccaacau

SEQ ID NO: 22546 - RNA, 22 nt, Artificial Sequence
  LRRK2 RNA guide
aucaccaacauccagggacgaa

SEQ ID NO: 22547 - RNA, 22 nt, Artificial Sequence
  LRRK2 RNA guide
auccagggacgaaucccagcug

SEQ ID NO: 22548 - RNA, 22 nt, Artificial Sequence
  LRRK2 RNA guide
auucgucccuggauguugguga

SEQ ID NO: 22549 - RNA, 22 nt, Artificial Sequence
  LRRK2 RNA guide
caacauccagggacgaauccca

SEQ ID NO: 22550 - RNA, 22 nt, Artificial Sequence
  LRRK2 RNA guide
caccaacauccagggacgaauc

SEQ ID NO: 22551 - RNA, 22 nt, Artificial Sequence
  LRRK2 RNA guide
cagcugggauucgucccuggau

SEQ ID NO: 22552 - RNA, 22 nt, Artificial Sequence
  LRRK2 RNA guide
cagggacgaaucccagcugcca

SEQ ID NO: 22553 - RNA, 22 nt, Artificial Sequence
  LRRK2 RNA guide
caucaccaacauccagggacga

SEQ ID NO: 22554 - RNA, 22 nt, Artificial Sequence
  LRRK2 RNA guide
cauccagggacgaaucccagcu

SEQ ID NO: 22555 - RNA, 22 nt, Artificial Sequence
  LRRK2 RNA guide
ccaacauccagggacgaauccc

SEQ ID NO: 22556 - RNA, 22 nt, Artificial Sequence
  LRRK2 RNA guide
ccagggacgaaucccagcugcc

SEQ ID NO: 22557 - RNA, 22 nt, Artificial Sequence
  LRRK2 RNA guide
ccaucaccaacauccagggacg

SEQ ID NO: 22558 - RNA, 22 nt, Artificial Sequence
  LRRK2 RNA guide
cccuggauguuggugauggagu

SEQ ID NO: 22559 - RNA, 22 nt, Artificial Sequence
  LRRK2 RNA guide
ccuggauguuggugauggaguu

SEQ ID NO: 22560 - RNA, 22 nt, Artificial Sequence
  LRRK2 RNA guide
cgucccuggauguuggugaugg

SEQ ID NO: 22561 - RNA, 22 nt, Artificial Sequence
  LRRK2 RNA guide
cuaacuccaucaccaacaucca

SEQ ID NO: 22562 - RNA, 22 nt, Artificial Sequence
  LRRK2 RNA guide
cuccaucaccaacauccaggga

SEQ ID NO: 22563 - RNA, 22 nt, Artificial Sequence
  LRRK2 RNA guide
cuggauguuggugauggaguua

SEQ ID NO: 22564 - RNA, 22 nt, Artificial Sequence
  LRRK2 RNA guide
cuggcagcugggauucgucccu

SEQ ID NO: 22565 - RNA, 22 nt, Artificial Sequence
  LRRK2 RNA guide
cugggauucgucccuggauguu

SEQ ID NO: 22566 - RNA, 22 nt, Artificial Sequence
  LRRK2 RNA guide
cuuugcuggcagcugggauucg

SEQ ID NO: 22567 - RNA, 22 nt, Artificial Sequence
  LRRK2 RNA guide
gaggcuaacuccaucaccaaca

SEQ ID NO: 22568 - RNA, 22 nt, Artificial Sequence
  LRRK2 RNA guide
gauucgucccuggauguuggug

SEQ ID NO: 22569 - RNA, 22 nt, Artificial Sequence
  LRRK2 RNA guide
gcagcugggauucgucccugga

SEQ ID NO: 22570 - RNA, 22 nt, Artificial Sequence
  LRRK2 RNA guide
gcuaacuccaucaccaacaucc

SEQ ID NO: 22571 - RNA, 22 nt, Artificial Sequence
  LRRK2 RNA guide
gcuggcagcugggauucguccc

SEQ ID NO: 22572 - RNA, 22 nt, Artificial Sequence
  LRRK2 RNA guide
gcugggauucgucccuggaugu

SEQ ID NO: 22573 - RNA, 22 nt, Artificial Sequence
  LRRK2 RNA guide
ggaggcuaacuccaucaccaac

SEQ ID NO: 22574 - RNA, 22 nt, Artificial Sequence
  LRRK2 RNA guide
ggauucgucccuggauguuggu

SEQ ID NO: 22575 - RNA, 22 nt, Artificial Sequence
  LRRK2 RNA guide
ggcagcugggauucgucccugg

SEQ ID NO: 22576 - RNA, 22 nt, Artificial Sequence
  LRRK2 RNA guide
ggcuaacuccaucaccaacauc

SEQ ID NO: 22577 - RNA, 22 nt, Artificial Sequence
  LRRK2 RNA guide
gggauucgucccuggauguugg

SEQ ID NO: 22578 - RNA, 22 nt, Artificial Sequence
  LRRK2 RNA guide
gucccuggauguuggugaugga

SEQ ID NO: 22579 - RNA, 22 nt, Artificial Sequence
  LRRK2 RNA guide
uaacuccaucaccaacauccag

SEQ ID NO: 22580 - RNA, 22 nt, Artificial Sequence
  LRRK2 RNA guide
ucaccaacauccagggacgaau

SEQ ID NO: 22581 - RNA, 22 nt, Artificial Sequence
  LRRK2 RNA guide
uccagggacgaaucccagcugc

SEQ ID NO: 22582 - RNA, 22 nt, Artificial Sequence
  LRRK2 RNA guide
uccaucaccaacauccagggac

SEQ ID NO: 22583 - RNA, 22 nt, Artificial Sequence
  LRRK2 RNA guide
ucccuggauguuggugauggag

SEQ ID NO: 22584 - RNA, 22 nt, Artificial Sequence
  LRRK2 RNA guide
ucgucccuggauguuggugaug

SEQ ID NO: 22585 - RNA, 22 nt, Artificial Sequence
  LRRK2 RNA guide
ugcuggcagcugggauucgucc

SEQ ID NO: 22586 - RNA, 22 nt, Artificial Sequence
  LRRK2 RNA guide
uggcagcugggauucgucccug

SEQ ID NO: 22587 - RNA, 22 nt, Artificial Sequence
  LRRK2 RNA guide
ugggauucgucccuggauguug

SEQ ID NO: 22588 - RNA, 22 nt, Artificial Sequence
  LRRK2 RNA guide
uucgucccuggauguuggugau

SEQ ID NO: 22589 - RNA, 22 nt, Artificial Sequence
  LRRK2 RNA guide
uugcuggcagcugggauucguc

SEQ ID NO: 22590 - RNA, 22 nt, Artificial Sequence
  LRRK2 RNA guide
uuugcuggcagcugggauucgu

SEQ ID NO: 22591 - RNA, 20 nt, Artificial Sequence
  LRRK2 RNA guide
aacaucuggggacgaauccc

SEQ ID NO: 22592 - RNA, 20 nt, Artificial Sequence
  LRRK2 RNA guide
aacuccaucaccaacaucug

SEQ ID NO: 22593 - RNA, 20 nt, Artificial Sequence
  LRRK2 RNA guide
acaucuggggacgaauccca

SEQ ID NO: 22594 - RNA, 20 nt, Artificial Sequence
  LRRK2 RNA guide
accaacaucuggggacgaau

SEQ ID NO: 22595 - RNA, 20 nt, Artificial Sequence
  LRRK2 RNA guide
acuccaucaccaacaucugg

SEQ ID NO: 22596 - RNA, 20 nt, Artificial Sequence
  LRRK2 RNA guide
agcugggauucguccccaga

SEQ ID NO: 22597 - RNA, 20 nt, Artificial Sequence
  LRRK2 RNA guide
aucaccaacaucuggggacg

SEQ ID NO: 22598 - RNA, 20 nt, Artificial Sequence
  LRRK2 RNA guide
aucuggggacgaaucccagc

SEQ ID NO: 22599 - RNA, 20 nt, Artificial Sequence
  LRRK2 RNA guide
auucguccccagauguuggu

SEQ ID NO: 22600 - RNA, 20 nt, Artificial Sequence
  LRRK2 RNA guide
caacaucuggggacgaaucc

SEQ ID NO: 22601 - RNA, 20 nt, Artificial Sequence
  LRRK2 RNA guide
caccaacaucuggggacgaa

SEQ ID NO: 22602 - RNA, 20 nt, Artificial Sequence
  LRRK2 RNA guide
cagauguuggugauggaguu

SEQ ID NO: 22603 - RNA, 20 nt, Artificial Sequence
  LRRK2 RNA guide
cagcugggauucguccccag

SEQ ID NO: 22604 - RNA, 20 nt, Artificial Sequence
  LRRK2 RNA guide
caucaccaacaucuggggac

SEQ ID NO: 22605 - RNA, 20 nt, Artificial Sequence
  LRRK2 RNA guide
caucuggggacgaaucccag

SEQ ID NO: 22606 - RNA, 20 nt, Artificial Sequence
  LRRK2 RNA guide
ccaacaucuggggacgaauc

SEQ ID NO: 22607 - RNA, 20 nt, Artificial Sequence
  LRRK2 RNA guide
ccagauguuggugauggagu

SEQ ID NO: 22608 - RNA, 20 nt, Artificial Sequence
  LRRK2 RNA guide
ccaucaccaacaucugggga

SEQ ID NO: 22609 - RNA, 20 nt, Artificial Sequence
  LRRK2 RNA guide
cccagauguuggugauggag

SEQ ID NO: 22610 - RNA, 20 nt, Artificial Sequence
  LRRK2 RNA guide
ccccagauguuggugaugga

SEQ ID NO: 22611 - RNA, 20 nt, Artificial Sequence
  LRRK2 RNA guide
cguccccagauguuggugau

SEQ ID NO: 22612 - RNA, 20 nt, Artificial Sequence
  LRRK2 RNA guide
cuccaucaccaacaucuggg

SEQ ID NO: 22613 - RNA, 20 nt, Artificial Sequence
  LRRK2 RNA guide
cugggauucguccccagaug

SEQ ID NO: 22614 - RNA, 20 nt, Artificial Sequence
  LRRK2 RNA guide
cuggggacgaaucccagcug

SEQ ID NO: 22615 - RNA, 20 nt, Artificial Sequence
  LRRK2 RNA guide
gaggcuaacuccaucaccaa

SEQ ID NO: 22616 - RNA, 20 nt, Artificial Sequence
  LRRK2 RNA guide
gauucguccccagauguugg

SEQ ID NO: 22617 - RNA, 20 nt, Artificial Sequence
  LRRK2 RNA guide
gcagcugggauucgucccca

SEQ ID NO: 22618 - RNA, 20 nt, Artificial Sequence
  LRRK2 RNA guide
gcugggauucguccccagau

SEQ ID NO: 22619 - RNA, 20 nt, Artificial Sequence
  LRRK2 RNA guide
ggauucguccccagauguug

SEQ ID NO: 22620 - RNA, 20 nt, Artificial Sequence
  LRRK2 RNA guide
ggcagcugggauucgucccc

SEQ ID NO: 22621 - RNA, 20 nt, Artificial Sequence
  LRRK2 RNA guide
gggauucguccccagauguu

SEQ ID NO: 22622 - RNA, 20 nt, Artificial Sequence
  LRRK2 RNA guide
guccccagauguuggugaug

SEQ ID NO: 22623 - RNA, 20 nt, Artificial Sequence
  LRRK2 RNA guide
uaacuccaucaccaacaucu

SEQ ID NO: 22624 - RNA, 20 nt, Artificial Sequence
  LRRK2 RNA guide
ucaccaacaucuggggacga

SEQ ID NO: 22625 - RNA, 20 nt, Artificial Sequence
  LRRK2 RNA guide
uccaucaccaacaucugggg

SEQ ID NO: 22626 - RNA, 20 nt, Artificial Sequence
  LRRK2 RNA guide
uccccagauguuggugaugg

SEQ ID NO: 22627 - RNA, 20 nt, Artificial Sequence
  LRRK2 RNA guide
ucguccccagauguugguga

SEQ ID NO: 22628 - RNA, 20 nt, Artificial Sequence
  LRRK2 RNA guide
ucuggggacgaaucccagcu

SEQ ID NO: 22629 - RNA, 20 nt, Artificial Sequence
  LRRK2 RNA guide
ugggauucguccccagaugu

SEQ ID NO: 22630 - RNA, 20 nt, Artificial Sequence
  LRRK2 RNA guide
uucguccccagauguuggug

SEQ ID NO: 22631 - RNA, 21 nt, Artificial Sequence
  LRRK2 RNA guide
aacaucuggggacgaauccca

SEQ ID NO: 22632 - RNA, 21 nt, Artificial Sequence
  LRRK2 RNA guide
aacuccaucaccaacaucugg

SEQ ID NO: 22633 - RNA, 21 nt, Artificial Sequence
  LRRK2 RNA guide
acaucuggggacgaaucccag

SEQ ID NO: 22634 - RNA, 21 nt, Artificial Sequence
  LRRK2 RNA guide
accaacaucuggggacgaauc

SEQ ID NO: 22635 - RNA, 21 nt, Artificial Sequence
  LRRK2 RNA guide
acuccaucaccaacaucuggg

SEQ ID NO: 22636 - RNA, 21 nt, Artificial Sequence
  LRRK2 RNA guide
agcugggauucguccccagau

SEQ ID NO: 22637 - RNA, 21 nt, Artificial Sequence
  LRRK2 RNA guide
aucaccaacaucuggggacga

SEQ ID NO: 22638 - RNA, 21 nt, Artificial Sequence
  LRRK2 RNA guide
aucuggggacgaaucccagcu

SEQ ID NO: 22639 - RNA, 21 nt, Artificial Sequence
  LRRK2 RNA guide
auucguccccagauguuggug

SEQ ID NO: 22640 - RNA, 21 nt, Artificial Sequence
  LRRK2 RNA guide
caacaucuggggacgaauccc

SEQ ID NO: 22641 - RNA, 21 nt, Artificial Sequence
  LRRK2 RNA guide
caccaacaucuggggacgaau

SEQ ID NO: 22642 - RNA, 21 nt, Artificial Sequence
  LRRK2 RNA guide
cagauguuggugauggaguua

SEQ ID NO: 22643 - RNA, 21 nt, Artificial Sequence
  LRRK2 RNA guide
cagcugggauucguccccaga

SEQ ID NO: 22644 - RNA, 21 nt, Artificial Sequence
  LRRK2 RNA guide
caucaccaacaucuggggacg

SEQ ID NO: 22645 - RNA, 21 nt, Artificial Sequence
  LRRK2 RNA guide
caucuggggacgaaucccagc

SEQ ID NO: 22646 - RNA, 21 nt, Artificial Sequence
  LRRK2 RNA guide
ccaacaucuggggacgaaucc

SEQ ID NO: 22647 - RNA, 21 nt, Artificial Sequence
  LRRK2 RNA guide
ccagauguuggugauggaguu

SEQ ID NO: 22648 - RNA, 21 nt, Artificial Sequence
  LRRK2 RNA guide
ccaucaccaacaucuggggac

SEQ ID NO: 22649 - RNA, 21 nt, Artificial Sequence
  LRRK2 RNA guide
cccagauguuggugauggagu

SEQ ID NO: 22650 - RNA, 21 nt, Artificial Sequence
  LRRK2 RNA guide
ccccagauguuggugauggag

SEQ ID NO: 22651 - RNA, 21 nt, Artificial Sequence
  LRRK2 RNA guide
cguccccagauguuggugaug

SEQ ID NO: 22652 - RNA, 21 nt, Artificial Sequence
  LRRK2 RNA guide
cuaacuccaucaccaacaucu

SEQ ID NO: 22653 - RNA, 21 nt, Artificial Sequence
  LRRK2 RNA guide
cuccaucaccaacaucugggg

SEQ ID NO: 22654 - RNA, 21 nt, Artificial Sequence
  LRRK2 RNA guide
cugggauucguccccagaugu

SEQ ID NO: 22655 - RNA, 21 nt, Artificial Sequence
  LRRK2 RNA guide
cuggggacgaaucccagcugc

SEQ ID NO: 22656 - RNA, 21 nt, Artificial Sequence
  LRRK2 RNA guide
gauucguccccagauguuggu

SEQ ID NO: 22657 - RNA, 21 nt, Artificial Sequence
  LRRK2 RNA guide
gcagcugggauucguccccag

SEQ ID NO: 22658 - RNA, 21 nt, Artificial Sequence
  LRRK2 RNA guide
gcugggauucguccccagaug

SEQ ID NO: 22659 - RNA, 21 nt, Artificial Sequence
  LRRK2 RNA guide
ggaggcuaacuccaucaccaa

SEQ ID NO: 22660 - RNA, 21 nt, Artificial Sequence
  LRRK2 RNA guide
ggauucguccccagauguugg

SEQ ID NO: 22661 - RNA, 21 nt, Artificial Sequence
  LRRK2 RNA guide
ggcagcugggauucgucccca

SEQ ID NO: 22662 - RNA, 21 nt, Artificial Sequence
  LRRK2 RNA guide
gggauucguccccagauguug

SEQ ID NO: 22663 - RNA, 21 nt, Artificial Sequence
  LRRK2 RNA guide
guccccagauguuggugaugg

SEQ ID NO: 22664 - RNA, 21 nt, Artificial Sequence
  LRRK2 RNA guide
uaacuccaucaccaacaucug

SEQ ID NO: 22665 - RNA, 21 nt, Artificial Sequence
  LRRK2 RNA guide
ucaccaacaucuggggacgaa

SEQ ID NO: 22666 - RNA, 21 nt, Artificial Sequence
  LRRK2 RNA guide
uccaucaccaacaucugggga

SEQ ID NO: 22667 - RNA, 21 nt, Artificial Sequence
  LRRK2 RNA guide
uccccagauguuggugaugga

SEQ ID NO: 22668 - RNA, 21 nt, Artificial Sequence
  LRRK2 RNA guide
ucguccccagauguuggugau

SEQ ID NO: 22669 - RNA, 21 nt, Artificial Sequence
  LRRK2 RNA guide
ucuggggacgaaucccagcug

SEQ ID NO: 22670 - RNA, 21 nt, Artificial Sequence
  LRRK2 RNA guide
uggcagcugggauucgucccc

SEQ ID NO: 22671 - RNA, 21 nt, Artificial Sequence
  LRRK2 RNA guide
ugggauucguccccagauguu

SEQ ID NO: 22672 - RNA, 21 nt, Artificial Sequence
  LRRK2 RNA guide
uucguccccagauguugguga

SEQ ID NO: 22673 - RNA, 22 nt, Artificial Sequence
  LRRK2 RNA guide
aacaucuggggacgaaucccag

SEQ ID NO: 22674 - RNA, 22 nt, Artificial Sequence
  LRRK2 RNA guide
aacuccaucaccaacaucuggg

SEQ ID NO: 22675 - RNA, 22 nt, Artificial Sequence
  LRRK2 RNA guide
acaucuggggacgaaucccagc

SEQ ID NO: 22676 - RNA, 22 nt, Artificial Sequence
  LRRK2 RNA guide
accaacaucuggggacgaaucc

SEQ ID NO: 22677 - RNA, 22 nt, Artificial Sequence
  LRRK2 RNA guide
acuccaucaccaacaucugggg

SEQ ID NO: 22678 - RNA, 22 nt, Artificial Sequence
  LRRK2 RNA guide
agcugggauucguccccagaug

SEQ ID NO: 22679 - RNA, 22 nt, Artificial Sequence
  LRRK2 RNA guide
aucaccaacaucuggggacgaa

SEQ ID NO: 22680 - RNA, 22 nt, Artificial Sequence
  LRRK2 RNA guide
aucuggggacgaaucccagcug

SEQ ID NO: 22681 - RNA, 22 nt, Artificial Sequence
  LRRK2 RNA guide
auucguccccagauguugguga

SEQ ID NO: 22682 - RNA, 22 nt, Artificial Sequence
  LRRK2 RNA guide
caacaucuggggacgaauccca

SEQ ID NO: 22683 - RNA, 22 nt, Artificial Sequence
  LRRK2 RNA guide
caccaacaucuggggacgaauc

SEQ ID NO: 22684 - RNA, 22 nt, Artificial Sequence
  LRRK2 RNA guide
cagauguuggugauggaguuag

SEQ ID NO: 22685 - RNA, 22 nt, Artificial Sequence
  LRRK2 RNA guide
cagcugggauucguccccagau

SEQ ID NO: 22686 - RNA, 22 nt, Artificial Sequence
  LRRK2 RNA guide
caucaccaacaucuggggacga

SEQ ID NO: 22687 - RNA, 22 nt, Artificial Sequence
  LRRK2 RNA guide
caucuggggacgaaucccagcu

SEQ ID NO: 22688 - RNA, 22 nt, Artificial Sequence
  LRRK2 RNA guide
ccaacaucuggggacgaauccc

SEQ ID NO: 22689 - RNA, 22 nt, Artificial Sequence
  LRRK2 RNA guide
ccagauguuggugauggaguua

SEQ ID NO: 22690 - RNA, 22 nt, Artificial Sequence
  LRRK2 RNA guide
ccaucaccaacaucuggggacg

SEQ ID NO: 22691 - RNA, 22 nt, Artificial Sequence
  LRRK2 RNA guide
cccagauguuggugauggaguu

SEQ ID NO: 22692 - RNA, 22 nt, Artificial Sequence
  LRRK2 RNA guide
ccccagauguuggugauggagu

SEQ ID NO: 22693 - RNA, 22 nt, Artificial Sequence
  LRRK2 RNA guide
cguccccagauguuggugaugg

SEQ ID NO: 22694 - RNA, 22 nt, Artificial Sequence
  LRRK2 RNA guide
cuaacuccaucaccaacaucug

SEQ ID NO: 22695 - RNA, 22 nt, Artificial Sequence
  LRRK2 RNA guide
cuccaucaccaacaucugggga

SEQ ID NO: 22696 - RNA, 22 nt, Artificial Sequence
  LRRK2 RNA guide
cuggcagcugggauucgucccc

SEQ ID NO: 22697 - RNA, 22 nt, Artificial Sequence
  LRRK2 RNA guide
cugggauucguccccagauguu

SEQ ID NO: 22698 - RNA, 22 nt, Artificial Sequence
  LRRK2 RNA guide
cuggggacgaaucccagcugcc

SEQ ID NO: 22699 - RNA, 22 nt, Artificial Sequence
  LRRK2 RNA guide
gauucguccccagauguuggug

SEQ ID NO: 22700 - RNA, 22 nt, Artificial Sequence
  LRRK2 RNA guide
gcagcugggauucguccccaga

SEQ ID NO: 22701 - RNA, 22 nt, Artificial Sequence
  LRRK2 RNA guide
gcuaacuccaucaccaacaucu

SEQ ID NO: 22702 - RNA, 22 nt, Artificial Sequence
  LRRK2 RNA guide
gcugggauucguccccagaugu

SEQ ID NO: 22703 - RNA, 22 nt, Artificial Sequence
  LRRK2 RNA guide
ggauucguccccagauguuggu

SEQ ID NO: 22704 - RNA, 22 nt, Artificial Sequence
  LRRK2 RNA guide
ggcagcugggauucguccccag

SEQ ID NO: 22705 - RNA, 22 nt, Artificial Sequence
  LRRK2 RNA guide
gggauucguccccagauguugg

SEQ ID NO: 22706 - RNA, 22 nt, Artificial Sequence
  LRRK2 RNA guide
guccccagauguuggugaugga

SEQ ID NO: 22707 - RNA, 22 nt, Artificial Sequence
  LRRK2 RNA guide
uaacuccaucaccaacaucugg

SEQ ID NO: 22708 - RNA, 22 nt, Artificial Sequence
  LRRK2 RNA guide
ucaccaacaucuggggacgaau

SEQ ID NO: 22709 - RNA, 22 nt, Artificial Sequence
  LRRK2 RNA guide
uccaucaccaacaucuggggac

SEQ ID NO: 22710 - RNA, 22 nt, Artificial Sequence
  LRRK2 RNA guide
uccccagauguuggugauggag

SEQ ID NO: 22711 - RNA, 22 nt, Artificial Sequence
  LRRK2 RNA guide
ucguccccagauguuggugaug

SEQ ID NO: 22712 - RNA, 22 nt, Artificial Sequence
  LRRK2 RNA guide
ucuggggacgaaucccagcugc

SEQ ID NO: 22713 - RNA, 22 nt, Artificial Sequence
  LRRK2 RNA guide
uggaggcuaacuccaucaccaa

SEQ ID NO: 22714 - RNA, 22 nt, Artificial Sequence
  LRRK2 RNA guide
uggcagcugggauucgucccca

SEQ ID NO: 22715 - RNA, 22 nt, Artificial Sequence
  LRRK2 RNA guide
ugggauucguccccagauguug

SEQ ID NO: 22716 - RNA, 22 nt, Artificial Sequence
  LRRK2 RNA guide
uucguccccagauguuggugau

SEQ ID NO: 22717 - RNA, 20 nt, Artificial Sequence
  LRRK2 RNA guide
aagcaggagauccaaggaac

SEQ ID NO: 22718 - RNA, 20 nt, Artificial Sequence
  LRRK2 RNA guide
aaggguuccuuggaucuccu

SEQ ID NO: 22719 - RNA, 20 nt, Artificial Sequence
  LRRK2 RNA guide
agcaggagauccaaggaacc

SEQ ID NO: 22720 - RNA, 20 nt, Artificial Sequence
  LRRK2 RNA guide
agccuccaaggguuccuugg

SEQ ID NO: 22721 - RNA, 20 nt, Artificial Sequence
  LRRK2 RNA guide
aggagauccaaggaacccuu

SEQ ID NO: 22722 - RNA, 20 nt, Artificial Sequence
  LRRK2 RNA guide
aggguuccuuggaucuccug

SEQ ID NO: 22723 - RNA, 20 nt, Artificial Sequence
  LRRK2 RNA guide
aucuccugcuucagcaggac

SEQ ID NO: 22724 - RNA, 20 nt, Artificial Sequence
  LRRK2 RNA guide
caaggguuccuuggaucucc

SEQ ID NO: 22725 - RNA, 20 nt, Artificial Sequence
  LRRK2 RNA guide
caggagauccaaggaacccu

SEQ ID NO: 22726 - RNA, 20 nt, Artificial Sequence
  LRRK2 RNA guide
ccaaggguuccuuggaucuc

SEQ ID NO: 22727 - RNA, 20 nt, Artificial Sequence
  LRRK2 RNA guide
ccuccaaggguuccuuggau

SEQ ID NO: 22728 - RNA, 20 nt, Artificial Sequence
  LRRK2 RNA guide
ccugcugaagcaggagaucc

SEQ ID NO: 22729 - RNA, 20 nt, Artificial Sequence
  LRRK2 RNA guide
ccuuggaucuccugcuucag

SEQ ID NO: 22730 - RNA, 20 nt, Artificial Sequence
  LRRK2 RNA guide
cuccaaggguuccuuggauc

SEQ ID NO: 22731 - RNA, 20 nt, Artificial Sequence
  LRRK2 RNA guide
cuccugcuucagcaggacaa

SEQ ID NO: 22732 - RNA, 20 nt, Artificial Sequence
  LRRK2 RNA guide
cugaagcaggagauccaagg

SEQ ID NO: 22733 - RNA, 20 nt, Artificial Sequence
  LRRK2 RNA guide
cugcugaagcaggagaucca

SEQ ID NO: 22734 - RNA, 20 nt, Artificial Sequence
  LRRK2 RNA guide
cuggcuuuguccugcugaag

SEQ ID NO: 22735 - RNA, 20 nt, Artificial Sequence
  LRRK2 RNA guide
cuuggaucuccugcuucagc

SEQ ID NO: 22736 - RNA, 20 nt, Artificial Sequence
  LRRK2 RNA guide
cuuuguccugcugaagcagg

SEQ ID NO: 22737 - RNA, 20 nt, Artificial Sequence
  LRRK2 RNA guide
gaagcaggagauccaaggaa

SEQ ID NO: 22738 - RNA, 20 nt, Artificial Sequence
  LRRK2 RNA guide
gagauccaaggaacccuugg

SEQ ID NO: 22739 - RNA, 20 nt, Artificial Sequence
  LRRK2 RNA guide
gaucuccugcuucagcagga

SEQ ID NO: 22740 - RNA, 20 nt, Artificial Sequence
  LRRK2 RNA guide
gcaggagauccaaggaaccc

SEQ ID NO: 22741 - RNA, 20 nt, Artificial Sequence
  LRRK2 RNA guide
gccuccaaggguuccuugga

SEQ ID NO: 22742 - RNA, 20 nt, Artificial Sequence
  LRRK2 RNA guide
gcugaagcaggagauccaag

SEQ ID NO: 22743 - RNA, 20 nt, Artificial Sequence
  LRRK2 RNA guide
gcuuuguccugcugaagcag

SEQ ID NO: 22744 - RNA, 20 nt, Artificial Sequence
  LRRK2 RNA guide
ggagauccaaggaacccuug

SEQ ID NO: 22745 - RNA, 20 nt, Artificial Sequence
  LRRK2 RNA guide
ggaucuccugcuucagcagg

SEQ ID NO: 22746 - RNA, 20 nt, Artificial Sequence
  LRRK2 RNA guide
ggcuuuguccugcugaagca

SEQ ID NO: 22747 - RNA, 20 nt, Artificial Sequence
  LRRK2 RNA guide
ggguuccuuggaucuccugc

SEQ ID NO: 22748 - RNA, 20 nt, Artificial Sequence
  LRRK2 RNA guide
gguuccuuggaucuccugcu

SEQ ID NO: 22749 - RNA, 20 nt, Artificial Sequence
  LRRK2 RNA guide
guccugcugaagcaggagau

SEQ ID NO: 22750 - RNA, 20 nt, Artificial Sequence
  LRRK2 RNA guide
guuccuuggaucuccugcuu

SEQ ID NO: 22751 - RNA, 20 nt, Artificial Sequence
  LRRK2 RNA guide
uagccuccaaggguuccuug

SEQ ID NO: 22752 - RNA, 20 nt, Artificial Sequence
  LRRK2 RNA guide
uccaaggguuccuuggaucu

SEQ ID NO: 22753 - RNA, 20 nt, Artificial Sequence
  LRRK2 RNA guide
uccugcugaagcaggagauc

SEQ ID NO: 22754 - RNA, 20 nt, Artificial Sequence
  LRRK2 RNA guide
uccuuggaucuccugcuuca

SEQ ID NO: 22755 - RNA, 20 nt, Artificial Sequence
  LRRK2 RNA guide
ucuccugcuucagcaggaca

SEQ ID NO: 22756 - RNA, 20 nt, Artificial Sequence
  LRRK2 RNA guide
ugaagcaggagauccaagga

SEQ ID NO: 22757 - RNA, 20 nt, Artificial Sequence
  LRRK2 RNA guide
ugcugaagcaggagauccaa

SEQ ID NO: 22758 - RNA, 20 nt, Artificial Sequence
  LRRK2 RNA guide
uggaucuccugcuucagcag

SEQ ID NO: 22759 - RNA, 20 nt, Artificial Sequence
  LRRK2 RNA guide
uggcuuuguccugcugaagc

SEQ ID NO: 22760 - RNA, 20 nt, Artificial Sequence
  LRRK2 RNA guide
uguccugcugaagcaggaga

SEQ ID NO: 22761 - RNA, 20 nt, Artificial Sequence
  LRRK2 RNA guide
uuccuuggaucuccugcuuc

SEQ ID NO: 22762 - RNA, 20 nt, Artificial Sequence
  LRRK2 RNA guide
uuggaucuccugcuucagca

SEQ ID NO: 22763 - RNA, 20 nt, Artificial Sequence
  LRRK2 RNA guide
uuguccugcugaagcaggag

SEQ ID NO: 22764 - RNA, 20 nt, Artificial Sequence
  LRRK2 RNA guide
uuuguccugcugaagcagga

SEQ ID NO: 22765 - RNA, 21 nt, Artificial Sequence
  LRRK2 RNA guide
aagcaggagauccaaggaacc

SEQ ID NO: 22766 - RNA, 21 nt, Artificial Sequence
  LRRK2 RNA guide
aaggguuccuuggaucuccug

SEQ ID NO: 22767 - RNA, 21 nt, Artificial Sequence
  LRRK2 RNA guide
agcaggagauccaaggaaccc

SEQ ID NO: 22768 - RNA, 21 nt, Artificial Sequence
  LRRK2 RNA guide
agccuccaaggguuccuugga

SEQ ID NO: 22769 - RNA, 21 nt, Artificial Sequence
  LRRK2 RNA guide
aggagauccaaggaacccuug

SEQ ID NO: 22770 - RNA, 21 nt, Artificial Sequence
  LRRK2 RNA guide
aggguuccuuggaucuccugc

SEQ ID NO: 22771 - RNA, 21 nt, Artificial Sequence
  LRRK2 RNA guide
aucuccugcuucagcaggaca

SEQ ID NO: 22772 - RNA, 21 nt, Artificial Sequence
  LRRK2 RNA guide
caaggguuccuuggaucuccu

SEQ ID NO: 22773 - RNA, 21 nt, Artificial Sequence
  LRRK2 RNA guide
caggagauccaaggaacccuu

SEQ ID NO: 22774 - RNA, 21 nt, Artificial Sequence
  LRRK2 RNA guide
ccaaggguuccuuggaucucc

SEQ ID NO: 22775 - RNA, 21 nt, Artificial Sequence
  LRRK2 RNA guide
ccuccaaggguuccuuggauc

SEQ ID NO: 22776 - RNA, 21 nt, Artificial Sequence
  LRRK2 RNA guide
ccugcugaagcaggagaucca

SEQ ID NO: 22777 - RNA, 21 nt, Artificial Sequence
  LRRK2 RNA guide
ccuuggaucuccugcuucagc

SEQ ID NO: 22778 - RNA, 21 nt, Artificial Sequence
  LRRK2 RNA guide
cuccaaggguuccuuggaucu

SEQ ID NO: 22779 - RNA, 21 nt, Artificial Sequence
  LRRK2 RNA guide
cuccugcuucagcaggacaaa

SEQ ID NO: 22780 - RNA, 21 nt, Artificial Sequence
  LRRK2 RNA guide
cugaagcaggagauccaagga

SEQ ID NO: 22781 - RNA, 21 nt, Artificial Sequence
  LRRK2 RNA guide
cugcugaagcaggagauccaa

SEQ ID NO: 22782 - RNA, 21 nt, Artificial Sequence
  LRRK2 RNA guide
cuggcuuuguccugcugaagc

SEQ ID NO: 22783 - RNA, 21 nt, Artificial Sequence
  LRRK2 RNA guide
cuuggaucuccugcuucagca

SEQ ID NO: 22784 - RNA, 21 nt, Artificial Sequence
  LRRK2 RNA guide
cuuuguccugcugaagcagga

SEQ ID NO: 22785 - RNA, 21 nt, Artificial Sequence
  LRRK2 RNA guide
gaagcaggagauccaaggaac

SEQ ID NO: 22786 - RNA, 21 nt, Artificial Sequence
  LRRK2 RNA guide
gagauccaaggaacccuugga

SEQ ID NO: 22787 - RNA, 21 nt, Artificial Sequence
  LRRK2 RNA guide
gaucuccugcuucagcaggac

SEQ ID NO: 22788 - RNA, 21 nt, Artificial Sequence
  LRRK2 RNA guide
gcaggagauccaaggaacccu

SEQ ID NO: 22789 - RNA, 21 nt, Artificial Sequence
  LRRK2 RNA guide
gccuccaaggguuccuuggau

SEQ ID NO: 22790 - RNA, 21 nt, Artificial Sequence
  LRRK2 RNA guide
gcugaagcaggagauccaagg

SEQ ID NO: 22791 - RNA, 21 nt, Artificial Sequence
  LRRK2 RNA guide
gcuggcuuuguccugcugaag

SEQ ID NO: 22792 - RNA, 21 nt, Artificial Sequence
  LRRK2 RNA guide
gcuuuguccugcugaagcagg

SEQ ID NO: 22793 - RNA, 21 nt, Artificial Sequence
  LRRK2 RNA guide
ggagauccaaggaacccuugg

SEQ ID NO: 22794 - RNA, 21 nt, Artificial Sequence
  LRRK2 RNA guide
ggaucuccugcuucagcagga

SEQ ID NO: 22795 - RNA, 21 nt, Artificial Sequence
  LRRK2 RNA guide
ggcuuuguccugcugaagcag

SEQ ID NO: 22796 - RNA, 21 nt, Artificial Sequence
  LRRK2 RNA guide
ggguuccuuggaucuccugcu

SEQ ID NO: 22797 - RNA, 21 nt, Artificial Sequence
  LRRK2 RNA guide
gguuccuuggaucuccugcuu

SEQ ID NO: 22798 - RNA, 21 nt, Artificial Sequence
  LRRK2 RNA guide
guccugcugaagcaggagauc

SEQ ID NO: 22799 - RNA, 21 nt, Artificial Sequence
  LRRK2 RNA guide
guuccuuggaucuccugcuuc

SEQ ID NO: 22800 - RNA, 21 nt, Artificial Sequence
  LRRK2 RNA guide
uagccuccaaggguuccuugg

SEQ ID NO: 22801 - RNA, 21 nt, Artificial Sequence
  LRRK2 RNA guide
uccaaggguuccuuggaucuc

SEQ ID NO: 22802 - RNA, 21 nt, Artificial Sequence
  LRRK2 RNA guide
uccugcugaagcaggagaucc

SEQ ID NO: 22803 - RNA, 21 nt, Artificial Sequence
  LRRK2 RNA guide
uccuuggaucuccugcuucag

SEQ ID NO: 22804 - RNA, 21 nt, Artificial Sequence
  LRRK2 RNA guide
ucuccugcuucagcaggacaa

SEQ ID NO: 22805 - RNA, 21 nt, Artificial Sequence
  LRRK2 RNA guide
ugaagcaggagauccaaggaa

SEQ ID NO: 22806 - RNA, 21 nt, Artificial Sequence
  LRRK2 RNA guide
ugcugaagcaggagauccaag

SEQ ID NO: 22807 - RNA, 21 nt, Artificial Sequence
  LRRK2 RNA guide
uggaucuccugcuucagcagg

SEQ ID NO: 22808 - RNA, 21 nt, Artificial Sequence
  LRRK2 RNA guide
uggcuuuguccugcugaagca

SEQ ID NO: 22809 - RNA, 21 nt, Artificial Sequence
  LRRK2 RNA guide
uguccugcugaagcaggagau

SEQ ID NO: 22810 - RNA, 21 nt, Artificial Sequence
  LRRK2 RNA guide
uuagccuccaaggguuccuug

SEQ ID NO: 22811 - RNA, 21 nt, Artificial Sequence
  LRRK2 RNA guide
uuccuuggaucuccugcuuca

SEQ ID NO: 22812 - RNA, 21 nt, Artificial Sequence
  LRRK2 RNA guide
uuggaucuccugcuucagcag

SEQ ID NO: 22813 - RNA, 21 nt, Artificial Sequence
  LRRK2 RNA guide
uuguccugcugaagcaggaga

SEQ ID NO: 22814 - RNA, 21 nt, Artificial Sequence
  LRRK2 RNA guide
uuuguccugcugaagcaggag

SEQ ID NO: 22815 - RNA, 22 nt, Artificial Sequence
  LRRK2 RNA guide
aagcaggagauccaaggaaccc

SEQ ID NO: 22816 - RNA, 22 nt, Artificial Sequence
  LRRK2 RNA guide
aaggguuccuuggaucuccugc

SEQ ID NO: 22817 - RNA, 22 nt, Artificial Sequence
  LRRK2 RNA guide
agcaggagauccaaggaacccu

SEQ ID NO: 22818 - RNA, 22 nt, Artificial Sequence
  LRRK2 RNA guide
agccuccaaggguuccuuggau

SEQ ID NO: 22819 - RNA, 22 nt, Artificial Sequence
  LRRK2 RNA guide
aggagauccaaggaacccuugg

SEQ ID NO: 22820 - RNA, 22 nt, Artificial Sequence
  LRRK2 RNA guide
aggguuccuuggaucuccugcu

SEQ ID NO: 22821 - RNA, 22 nt, Artificial Sequence
  LRRK2 RNA guide
aucuccugcuucagcaggacaa

SEQ ID NO: 22822 - RNA, 22 nt, Artificial Sequence
  LRRK2 RNA guide
caaggguuccuuggaucuccug

SEQ ID NO: 22823 - RNA, 22 nt, Artificial Sequence
  LRRK2 RNA guide
caggagauccaaggaacccuug

SEQ ID NO: 22824 - RNA, 22 nt, Artificial Sequence
  LRRK2 RNA guide
ccaaggguuccuuggaucuccu

SEQ ID NO: 22825 - RNA, 22 nt, Artificial Sequence
  LRRK2 RNA guide
ccuccaaggguuccuuggaucu

SEQ ID NO: 22826 - RNA, 22 nt, Artificial Sequence
  LRRK2 RNA guide
ccugcugaagcaggagauccaa

SEQ ID NO: 22827 - RNA, 22 nt, Artificial Sequence
  LRRK2 RNA guide
ccuuggaucuccugcuucagca

SEQ ID NO: 22828 - RNA, 22 nt, Artificial Sequence
  LRRK2 RNA guide
cuccaaggguuccuuggaucuc

SEQ ID NO: 22829 - RNA, 22 nt, Artificial Sequence
  LRRK2 RNA guide
cuccugcuucagcaggacaaag

SEQ ID NO: 22830 - RNA, 22 nt, Artificial Sequence
  LRRK2 RNA guide
cugaagcaggagauccaaggaa

SEQ ID NO: 22831 - RNA, 22 nt, Artificial Sequence
  LRRK2 RNA guide
cugcugaagcaggagauccaag

SEQ ID NO: 22832 - RNA, 22 nt, Artificial Sequence
  LRRK2 RNA guide
cuggcuuuguccugcugaagca

SEQ ID NO: 22833 - RNA, 22 nt, Artificial Sequence
  LRRK2 RNA guide
cuuggaucuccugcuucagcag

SEQ ID NO: 22834 - RNA, 22 nt, Artificial Sequence
  LRRK2 RNA guide
cuuuguccugcugaagcaggag

SEQ ID NO: 22835 - RNA, 22 nt, Artificial Sequence
  LRRK2 RNA guide
gaagcaggagauccaaggaacc

SEQ ID NO: 22836 - RNA, 22 nt, Artificial Sequence
  LRRK2 RNA guide
gagauccaaggaacccuuggag

SEQ ID NO: 22837 - RNA, 22 nt, Artificial Sequence
  LRRK2 RNA guide
gaucuccugcuucagcaggaca

SEQ ID NO: 22838 - RNA, 22 nt, Artificial Sequence
  LRRK2 RNA guide
gcaggagauccaaggaacccuu

SEQ ID NO: 22839 - RNA, 22 nt, Artificial Sequence
  LRRK2 RNA guide
gccuccaaggguuccuuggauc

SEQ ID NO: 22840 - RNA, 22 nt, Artificial Sequence
  LRRK2 RNA guide
gcugaagcaggagauccaagga

SEQ ID NO: 22841 - RNA, 22 nt, Artificial Sequence
  LRRK2 RNA guide
gcuggcuuuguccugcugaagc

SEQ ID NO: 22842 - RNA, 22 nt, Artificial Sequence
  LRRK2 RNA guide
gcuuuguccugcugaagcagga

SEQ ID NO: 22843 - RNA, 22 nt, Artificial Sequence
  LRRK2 RNA guide
ggagauccaaggaacccuugga

SEQ ID NO: 22844 - RNA, 22 nt, Artificial Sequence
  LRRK2 RNA guide
ggaucuccugcuucagcaggac

SEQ ID NO: 22845 - RNA, 22 nt, Artificial Sequence
  LRRK2 RNA guide
ggcuggcuuuguccugcugaag

SEQ ID NO: 22846 - RNA, 22 nt, Artificial Sequence
  LRRK2 RNA guide
ggcuuuguccugcugaagcagg

SEQ ID NO: 22847 - RNA, 22 nt, Artificial Sequence
  LRRK2 RNA guide
ggguuccuuggaucuccugcuu

SEQ ID NO: 22848 - RNA, 22 nt, Artificial Sequence
  LRRK2 RNA guide
gguuccuuggaucuccugcuuc

SEQ ID NO: 22849 - RNA, 22 nt, Artificial Sequence
  LRRK2 RNA guide
guccugcugaagcaggagaucc

SEQ ID NO: 22850 - RNA, 22 nt, Artificial Sequence
  LRRK2 RNA guide
guuagccuccaaggguuccuug

SEQ ID NO: 22851 - RNA, 22 nt, Artificial Sequence
  LRRK2 RNA guide
guuccuuggaucuccugcuuca

SEQ ID NO: 22852 - RNA, 22 nt, Artificial Sequence
  LRRK2 RNA guide
uagccuccaaggguuccuugga

SEQ ID NO: 22853 - RNA, 22 nt, Artificial Sequence
  LRRK2 RNA guide
uccaaggguuccuuggaucucc

SEQ ID NO: 22854 - RNA, 22 nt, Artificial Sequence
  LRRK2 RNA guide
uccugcugaagcaggagaucca

SEQ ID NO: 22855 - RNA, 22 nt, Artificial Sequence
  LRRK2 RNA guide
uccuuggaucuccugcuucagc

SEQ ID NO: 22856 - RNA, 22 nt, Artificial Sequence
  LRRK2 RNA guide
ucuccugcuucagcaggacaaa

SEQ ID NO: 22857 - RNA, 22 nt, Artificial Sequence
  LRRK2 RNA guide
ugaagcaggagauccaaggaac

SEQ ID NO: 22858 - RNA, 22 nt, Artificial Sequence
  LRRK2 RNA guide
ugcugaagcaggagauccaagg

SEQ ID NO: 22859 - RNA, 22 nt, Artificial Sequence
  LRRK2 RNA guide
uggaucuccugcuucagcagga

SEQ ID NO: 22860 - RNA, 22 nt, Artificial Sequence
  LRRK2 RNA guide
uggcuuuguccugcugaagcag

SEQ ID NO: 22861 - RNA, 22 nt, Artificial Sequence
  LRRK2 RNA guide
uguccugcugaagcaggagauc

SEQ ID NO: 22862 - RNA, 22 nt, Artificial Sequence
  LRRK2 RNA guide
uuagccuccaaggguuccuugg

SEQ ID NO: 22863 - RNA, 22 nt, Artificial Sequence
  LRRK2 RNA guide
uuccuuggaucuccugcuucag

SEQ ID NO: 22864 - RNA, 22 nt, Artificial Sequence
  LRRK2 RNA guide
uuggaucuccugcuucagcagg

SEQ ID NO: 22865 - RNA, 22 nt, Artificial Sequence
  LRRK2 RNA guide
uuguccugcugaagcaggagau

SEQ ID NO: 22866 - RNA, 22 nt, Artificial Sequence
  LRRK2 RNA guide
uuuguccugcugaagcaggaga

SEQ ID NO: 22867 - RNA, 20 nt, Artificial Sequence
  LRRK2 RNA guide
aaaaccagcacauugugggg

SEQ ID NO: 22868 - RNA, 20 nt, Artificial Sequence
  LRRK2 RNA guide
aaaccagcacauuguggggu

SEQ ID NO: 22869 - RNA, 20 nt, Artificial Sequence
  LRRK2 RNA guide
aaaccccacaaugugcuggu

SEQ ID NO: 22870 - RNA, 20 nt, Artificial Sequence
  LRRK2 RNA guide
aaccagcacauugugggguu

SEQ ID NO: 22871 - RNA, 20 nt, Artificial Sequence
  LRRK2 RNA guide
aaccccacaaugugcugguu

SEQ ID NO: 22872 - RNA, 20 nt, Artificial Sequence
  LRRK2 RNA guide
aaugugcugguuuucacacu

SEQ ID NO: 22873 - RNA, 20 nt, Artificial Sequence
  LRRK2 RNA guide
acaaugugcugguuuucaca

SEQ ID NO: 22874 - RNA, 20 nt, Artificial Sequence
  LRRK2 RNA guide
acagugugaaaaccagcaca

SEQ ID NO: 22875 - RNA, 20 nt, Artificial Sequence
  LRRK2 RNA guide
accagcacauugugggguuu

SEQ ID NO: 22876 - RNA, 20 nt, Artificial Sequence
  LRRK2 RNA guide
accccacaaugugcugguuu

SEQ ID NO: 22877 - RNA, 20 nt, Artificial Sequence
  LRRK2 RNA guide
accugaaaccccacaaugug

SEQ ID NO: 22878 - RNA, 20 nt, Artificial Sequence
  LRRK2 RNA guide
agcauugggauacaguguga

SEQ ID NO: 22879 - RNA, 20 nt, Artificial Sequence
  LRRK2 RNA guide
agugugaaaaccagcacauu

SEQ ID NO: 22880 - RNA, 20 nt, Artificial Sequence
  LRRK2 RNA guide
auacagugugaaaaccagca

SEQ ID NO: 22881 - RNA, 20 nt, Artificial Sequence
  LRRK2 RNA guide
augugcugguuuucacacug

SEQ ID NO: 22882 - RNA, 20 nt, Artificial Sequence
  LRRK2 RNA guide
auugggauacagugugaaaa

SEQ ID NO: 22883 - RNA, 20 nt, Artificial Sequence
  LRRK2 RNA guide
caaugugcugguuuucacac

SEQ ID NO: 22884 - RNA, 20 nt, Artificial Sequence
  LRRK2 RNA guide
cacaaugugcugguuuucac

SEQ ID NO: 22885 - RNA, 20 nt, Artificial Sequence
  LRRK2 RNA guide
cagcauugggauacagugug

SEQ ID NO: 22886 - RNA, 20 nt, Artificial Sequence
  LRRK2 RNA guide
cagugugaaaaccagcacau

SEQ ID NO: 22887 - RNA, 20 nt, Artificial Sequence
  LRRK2 RNA guide
cauugggauacagugugaaa

SEQ ID NO: 22888 - RNA, 20 nt, Artificial Sequence
  LRRK2 RNA guide
ccacaaugugcugguuuuca

SEQ ID NO: 22889 - RNA, 20 nt, Artificial Sequence
  LRRK2 RNA guide
cccacaaugugcugguuuuc

SEQ ID NO: 22890 - RNA, 20 nt, Artificial Sequence
  LRRK2 RNA guide
ccccacaaugugcugguuuu

SEQ ID NO: 22891 - RNA, 20 nt, Artificial Sequence
  LRRK2 RNA guide
ccugaaaccccacaaugugc

SEQ ID NO: 22892 - RNA, 20 nt, Artificial Sequence
  LRRK2 RNA guide
cugaaaccccacaaugugcu

SEQ ID NO: 22893 - RNA, 20 nt, Artificial Sequence
  LRRK2 RNA guide
cugguuuucacacuguaucc

SEQ ID NO: 22894 - RNA, 20 nt, Artificial Sequence
  LRRK2 RNA guide
gaaaaccagcacauuguggg

SEQ ID NO: 22895 - RNA, 20 nt, Artificial Sequence
  LRRK2 RNA guide
gaaaccccacaaugugcugg

SEQ ID NO: 22896 - RNA, 20 nt, Artificial Sequence
  LRRK2 RNA guide
gaccugaaaccccacaaugu

SEQ ID NO: 22897 - RNA, 20 nt, Artificial Sequence
  LRRK2 RNA guide
gauacagugugaaaaccagc

SEQ ID NO: 22898 - RNA, 20 nt, Artificial Sequence
  LRRK2 RNA guide
gcauugggauacagugugaa

SEQ ID NO: 22899 - RNA, 20 nt, Artificial Sequence
  LRRK2 RNA guide
gcugguuuucacacuguauc

SEQ ID NO: 22900 - RNA, 20 nt, Artificial Sequence
  LRRK2 RNA guide
ggauacagugugaaaaccag

SEQ ID NO: 22901 - RNA, 20 nt, Artificial Sequence
  LRRK2 RNA guide
gggauacagugugaaaacca

SEQ ID NO: 22902 - RNA, 20 nt, Artificial Sequence
  LRRK2 RNA guide
gguuuucacacuguauccca

SEQ ID NO: 22903 - RNA, 20 nt, Artificial Sequence
  LRRK2 RNA guide
gugaaaaccagcacauugug

SEQ ID NO: 22904 - RNA, 20 nt, Artificial Sequence
  LRRK2 RNA guide
gugcugguuuucacacugua

SEQ ID NO: 22905 - RNA, 20 nt, Artificial Sequence
  LRRK2 RNA guide
gugugaaaaccagcacauug

SEQ ID NO: 22906 - RNA, 20 nt, Artificial Sequence
  LRRK2 RNA guide
uacagugugaaaaccagcac

SEQ ID NO: 22907 - RNA, 20 nt, Artificial Sequence
  LRRK2 RNA guide
ugaaaaccagcacauugugg

SEQ ID NO: 22908 - RNA, 20 nt, Artificial Sequence
  LRRK2 RNA guide
ugaaaccccacaaugugcug

SEQ ID NO: 22909 - RNA, 20 nt, Artificial Sequence
  LRRK2 RNA guide
ugcugguuuucacacuguau

SEQ ID NO: 22910 - RNA, 20 nt, Artificial Sequence
  LRRK2 RNA guide
ugggauacagugugaaaacc

SEQ ID NO: 22911 - RNA, 20 nt, Artificial Sequence
  LRRK2 RNA guide
ugguuuucacacuguauccc

SEQ ID NO: 22912 - RNA, 20 nt, Artificial Sequence
  LRRK2 RNA guide
ugugaaaaccagcacauugu

SEQ ID NO: 22913 - RNA, 20 nt, Artificial Sequence
  LRRK2 RNA guide
ugugcugguuuucacacugu

SEQ ID NO: 22914 - RNA, 20 nt, Artificial Sequence
  LRRK2 RNA guide
uugggauacagugugaaaac

SEQ ID NO: 22915 - RNA, 21 nt, Artificial Sequence
  LRRK2 RNA guide
aaaaccagcacauuguggggu

SEQ ID NO: 22916 - RNA, 21 nt, Artificial Sequence
  LRRK2 RNA guide
aaaccagcacauugugggguu

SEQ ID NO: 22917 - RNA, 21 nt, Artificial Sequence
  LRRK2 RNA guide
aaaccccacaaugugcugguu

SEQ ID NO: 22918 - RNA, 21 nt, Artificial Sequence
  LRRK2 RNA guide
aaccagcacauugugggguuu

SEQ ID NO: 22919 - RNA, 21 nt, Artificial Sequence
  LRRK2 RNA guide
aaccccacaaugugcugguuu

SEQ ID NO: 22920 - RNA, 21 nt, Artificial Sequence
  LRRK2 RNA guide
aaugugcugguuuucacacug

SEQ ID NO: 22921 - RNA, 21 nt, Artificial Sequence
  LRRK2 RNA guide
acaaugugcugguuuucacac

SEQ ID NO: 22922 - RNA, 21 nt, Artificial Sequence
  LRRK2 RNA guide
acagugugaaaaccagcacau

SEQ ID NO: 22923 - RNA, 21 nt, Artificial Sequence
  LRRK2 RNA guide
accagcacauugugggguuuc

SEQ ID NO: 22924 - RNA, 21 nt, Artificial Sequence
  LRRK2 RNA guide
accccacaaugugcugguuuu

SEQ ID NO: 22925 - RNA, 21 nt, Artificial Sequence
  LRRK2 RNA guide
accugaaaccccacaaugugc

SEQ ID NO: 22926 - RNA, 21 nt, Artificial Sequence
  LRRK2 RNA guide
agaccugaaaccccacaaugu

SEQ ID NO: 22927 - RNA, 21 nt, Artificial Sequence
  LRRK2 RNA guide
agcauugggauacagugugaa

SEQ ID NO: 22928 - RNA, 21 nt, Artificial Sequence
  LRRK2 RNA guide
agugugaaaaccagcacauug

SEQ ID NO: 22929 - RNA, 21 nt, Artificial Sequence
  LRRK2 RNA guide
auacagugugaaaaccagcac

SEQ ID NO: 22930 - RNA, 21 nt, Artificial Sequence
  LRRK2 RNA guide
augugcugguuuucacacugu

SEQ ID NO: 22931 - RNA, 21 nt, Artificial Sequence
  LRRK2 RNA guide
auugggauacagugugaaaac

SEQ ID NO: 22932 - RNA, 21 nt, Artificial Sequence
  LRRK2 RNA guide
caaugugcugguuuucacacu

SEQ ID NO: 22933 - RNA, 21 nt, Artificial Sequence
  LRRK2 RNA guide
cacaaugugcugguuuucaca

SEQ ID NO: 22934 - RNA, 21 nt, Artificial Sequence
  LRRK2 RNA guide
cagcauugggauacaguguga

SEQ ID NO: 22935 - RNA, 21 nt, Artificial Sequence
  LRRK2 RNA guide
cagugugaaaaccagcacauu

SEQ ID NO: 22936 - RNA, 21 nt, Artificial Sequence
  LRRK2 RNA guide
cauugggauacagugugaaaa

SEQ ID NO: 22937 - RNA, 21 nt, Artificial Sequence
  LRRK2 RNA guide
ccacaaugugcugguuuucac

SEQ ID NO: 22938 - RNA, 21 nt, Artificial Sequence
  LRRK2 RNA guide
cccacaaugugcugguuuuca

SEQ ID NO: 22939 - RNA, 21 nt, Artificial Sequence
  LRRK2 RNA guide
ccccacaaugugcugguuuuc

SEQ ID NO: 22940 - RNA, 21 nt, Artificial Sequence
  LRRK2 RNA guide
ccugaaaccccacaaugugcu

SEQ ID NO: 22941 - RNA, 21 nt, Artificial Sequence
  LRRK2 RNA guide
cugaaaccccacaaugugcug

SEQ ID NO: 22942 - RNA, 21 nt, Artificial Sequence
  LRRK2 RNA guide
cugguuuucacacuguauccc

SEQ ID NO: 22943 - RNA, 21 nt, Artificial Sequence
  LRRK2 RNA guide
gaaaaccagcacauugugggg

SEQ ID NO: 22944 - RNA, 21 nt, Artificial Sequence
  LRRK2 RNA guide
gaaaccccacaaugugcuggu

SEQ ID NO: 22945 - RNA, 21 nt, Artificial Sequence
  LRRK2 RNA guide
gauacagugugaaaaccagca

SEQ ID NO: 22946 - RNA, 21 nt, Artificial Sequence
  LRRK2 RNA guide
gcagcauugggauacagugug

SEQ ID NO: 22947 - RNA, 21 nt, Artificial Sequence
  LRRK2 RNA guide
gcauugggauacagugugaaa

SEQ ID NO: 22948 - RNA, 21 nt, Artificial Sequence
  LRRK2 RNA guide
gcugguuuucacacuguaucc

SEQ ID NO: 22949 - RNA, 21 nt, Artificial Sequence
  LRRK2 RNA guide
ggauacagugugaaaaccagc

SEQ ID NO: 22950 - RNA, 21 nt, Artificial Sequence
  LRRK2 RNA guide
gggauacagugugaaaaccag

SEQ ID NO: 22951 - RNA, 21 nt, Artificial Sequence
  LRRK2 RNA guide
gguuuucacacuguaucccaa

SEQ ID NO: 22952 - RNA, 21 nt, Artificial Sequence
  LRRK2 RNA guide
gugaaaaccagcacauugugg

SEQ ID NO: 22953 - RNA, 21 nt, Artificial Sequence
  LRRK2 RNA guide
gugcugguuuucacacuguau

SEQ ID NO: 22954 - RNA, 21 nt, Artificial Sequence
  LRRK2 RNA guide
gugugaaaaccagcacauugu

SEQ ID NO: 22955 - RNA, 21 nt, Artificial Sequence
  LRRK2 RNA guide
uacagugugaaaaccagcaca

SEQ ID NO: 22956 - RNA, 21 nt, Artificial Sequence
  LRRK2 RNA guide
ugaaaaccagcacauuguggg

SEQ ID NO: 22957 - RNA, 21 nt, Artificial Sequence
  LRRK2 RNA guide
ugaaaccccacaaugugcugg

SEQ ID NO: 22958 - RNA, 21 nt, Artificial Sequence
  LRRK2 RNA guide
ugcugguuuucacacuguauc

SEQ ID NO: 22959 - RNA, 21 nt, Artificial Sequence
  LRRK2 RNA guide
ugggauacagugugaaaacca

SEQ ID NO: 22960 - RNA, 21 nt, Artificial Sequence
  LRRK2 RNA guide
ugguuuucacacuguauccca

SEQ ID NO: 22961 - RNA, 21 nt, Artificial Sequence
  LRRK2 RNA guide
ugugaaaaccagcacauugug

SEQ ID NO: 22962 - RNA, 21 nt, Artificial Sequence
  LRRK2 RNA guide
ugugcugguuuucacacugua

SEQ ID NO: 22963 - RNA, 21 nt, Artificial Sequence
  LRRK2 RNA guide
uugggauacagugugaaaacc

SEQ ID NO: 22964 - RNA, 22 nt, Artificial Sequence
  LRRK2 RNA guide
aaaaccagcacauugugggguu

SEQ ID NO: 22965 - RNA, 22 nt, Artificial Sequence
  LRRK2 RNA guide
aaaccagcacauugugggguuu

SEQ ID NO: 22966 - RNA, 22 nt, Artificial Sequence
  LRRK2 RNA guide
aaaccccacaaugugcugguuu

SEQ ID NO: 22967 - RNA, 22 nt, Artificial Sequence
  LRRK2 RNA guide
aaccagcacauugugggguuuc

SEQ ID NO: 22968 - RNA, 22 nt, Artificial Sequence
  LRRK2 RNA guide
aaccccacaaugugcugguuuu

SEQ ID NO: 22969 - RNA, 22 nt, Artificial Sequence
  LRRK2 RNA guide
aaugugcugguuuucacacugu

SEQ ID NO: 22970 - RNA, 22 nt, Artificial Sequence
  LRRK2 RNA guide
acaaugugcugguuuucacacu

SEQ ID NO: 22971 - RNA, 22 nt, Artificial Sequence
  LRRK2 RNA guide
acagugugaaaaccagcacauu

SEQ ID NO: 22972 - RNA, 22 nt, Artificial Sequence
  LRRK2 RNA guide
accagcacauugugggguuuca

SEQ ID NO: 22973 - RNA, 22 nt, Artificial Sequence
  LRRK2 RNA guide
accccacaaugugcugguuuuc

SEQ ID NO: 22974 - RNA, 22 nt, Artificial Sequence
  LRRK2 RNA guide
accugaaaccccacaaugugcu

SEQ ID NO: 22975 - RNA, 22 nt, Artificial Sequence
  LRRK2 RNA guide
agaccugaaaccccacaaugug

SEQ ID NO: 22976 - RNA, 22 nt, Artificial Sequence
  LRRK2 RNA guide
agcauugggauacagugugaaa

SEQ ID NO: 22977 - RNA, 22 nt, Artificial Sequence
  LRRK2 RNA guide
agugugaaaaccagcacauugu

SEQ ID NO: 22978 - RNA, 22 nt, Artificial Sequence
  LRRK2 RNA guide
auacagugugaaaaccagcaca

SEQ ID NO: 22979 - RNA, 22 nt, Artificial Sequence
  LRRK2 RNA guide
augugcugguuuucacacugua

SEQ ID NO: 22980 - RNA, 22 nt, Artificial Sequence
  LRRK2 RNA guide
auugggauacagugugaaaacc

SEQ ID NO: 22981 - RNA, 22 nt, Artificial Sequence
  LRRK2 RNA guide
caaugugcugguuuucacacug

SEQ ID NO: 22982 - RNA, 22 nt, Artificial Sequence
  LRRK2 RNA guide
cacaaugugcugguuuucacac

SEQ ID NO: 22983 - RNA, 22 nt, Artificial Sequence
  LRRK2 RNA guide
cagcauugggauacagugugaa

SEQ ID NO: 22984 - RNA, 22 nt, Artificial Sequence
  LRRK2 RNA guide
cagugugaaaaccagcacauug

SEQ ID NO: 22985 - RNA, 22 nt, Artificial Sequence
  LRRK2 RNA guide
cauugggauacagugugaaaac

SEQ ID NO: 22986 - RNA, 22 nt, Artificial Sequence
  LRRK2 RNA guide
ccacaaugugcugguuuucaca

SEQ ID NO: 22987 - RNA, 22 nt, Artificial Sequence
  LRRK2 RNA guide
cccacaaugugcugguuuucac

SEQ ID NO: 22988 - RNA, 22 nt, Artificial Sequence
  LRRK2 RNA guide
ccccacaaugugcugguuuuca

SEQ ID NO: 22989 - RNA, 22 nt, Artificial Sequence
  LRRK2 RNA guide
ccugaaaccccacaaugugcug

SEQ ID NO: 22990 - RNA, 22 nt, Artificial Sequence
  LRRK2 RNA guide
cugaaaccccacaaugugcugg

SEQ ID NO: 22991 - RNA, 22 nt, Artificial Sequence
  LRRK2 RNA guide
cugguuuucacacuguauccca

SEQ ID NO: 22992 - RNA, 22 nt, Artificial Sequence
  LRRK2 RNA guide
gaaaaccagcacauuguggggu

SEQ ID NO: 22993 - RNA, 22 nt, Artificial Sequence
  LRRK2 RNA guide
gaaaccccacaaugugcugguu

SEQ ID NO: 22994 - RNA, 22 nt, Artificial Sequence
  LRRK2 RNA guide
gaccugaaaccccacaaugugc

SEQ ID NO: 22995 - RNA, 22 nt, Artificial Sequence
  LRRK2 RNA guide
gagaccugaaaccccacaaugu

SEQ ID NO: 22996 - RNA, 22 nt, Artificial Sequence
  LRRK2 RNA guide
gauacagugugaaaaccagcac

SEQ ID NO: 22997 - RNA, 22 nt, Artificial Sequence
  LRRK2 RNA guide
gcagcauugggauacaguguga

SEQ ID NO: 22998 - RNA, 22 nt, Artificial Sequence
  LRRK2 RNA guide
gcauugggauacagugugaaaa

SEQ ID NO: 22999 - RNA, 22 nt, Artificial Sequence
  LRRK2 RNA guide
gcugguuuucacacuguauccc

SEQ ID NO: 23000 - RNA, 22 nt, Artificial Sequence
  LRRK2 RNA guide
ggauacagugugaaaaccagca

SEQ ID NO: 23001 - RNA, 22 nt, Artificial Sequence
  LRRK2 RNA guide
ggcagcauugggauacagugug

SEQ ID NO: 23002 - RNA, 22 nt, Artificial Sequence
  LRRK2 RNA guide
gggauacagugugaaaaccagc

SEQ ID NO: 23003 - RNA, 22 nt, Artificial Sequence
  LRRK2 RNA guide
gguuuucacacuguaucccaau

SEQ ID NO: 23004 - RNA, 22 nt, Artificial Sequence
  LRRK2 RNA guide
gugaaaaccagcacauuguggg

SEQ ID NO: 23005 - RNA, 22 nt, Artificial Sequence
  LRRK2 RNA guide
gugcugguuuucacacuguauc

SEQ ID NO: 23006 - RNA, 22 nt, Artificial Sequence
  LRRK2 RNA guide
gugugaaaaccagcacauugug

SEQ ID NO: 23007 - RNA, 22 nt, Artificial Sequence
  LRRK2 RNA guide
uacagugugaaaaccagcacau

SEQ ID NO: 23008 - RNA, 22 nt, Artificial Sequence
  LRRK2 RNA guide
ugaaaaccagcacauugugggg

SEQ ID NO: 23009 - RNA, 22 nt, Artificial Sequence
  LRRK2 RNA guide
ugaaaccccacaaugugcuggu

SEQ ID NO: 23010 - RNA, 22 nt, Artificial Sequence
  LRRK2 RNA guide
ugcugguuuucacacuguaucc

SEQ ID NO: 23011 - RNA, 22 nt, Artificial Sequence
  LRRK2 RNA guide
ugggauacagugugaaaaccag

SEQ ID NO: 23012 - RNA, 22 nt, Artificial Sequence
  LRRK2 RNA guide
ugguuuucacacuguaucccaa

SEQ ID NO: 23013 - RNA, 22 nt, Artificial Sequence
  LRRK2 RNA guide
ugugaaaaccagcacauugugg

SEQ ID NO: 23014 - RNA, 22 nt, Artificial Sequence
  LRRK2 RNA guide
ugugcugguuuucacacuguau

SEQ ID NO: 23015 - RNA, 22 nt, Artificial Sequence
  LRRK2 RNA guide
uugggauacagugugaaaacca

SEQ ID NO: 23016 - RNA, 20 nt, Artificial Sequence
  LRRK2 RNA guide
aaugauggcagcauugggau

SEQ ID NO: 23017 - RNA, 20 nt, Artificial Sequence
  LRRK2 RNA guide
aaugugcugcuuuucacacu

SEQ ID NO: 23018 - RNA, 20 nt, Artificial Sequence
  LRRK2 RNA guide
acaaugugcugcuuuucaca

SEQ ID NO: 23019 - RNA, 20 nt, Artificial Sequence
  LRRK2 RNA guide
acacugcaucccaaugcugc

SEQ ID NO: 23020 - RNA, 20 nt, Artificial Sequence
  LRRK2 RNA guide
acugcaucccaaugcugcca

SEQ ID NO: 23021 - RNA, 20 nt, Artificial Sequence
  LRRK2 RNA guide
agcauugggaugcaguguga

SEQ ID NO: 23022 - RNA, 20 nt, Artificial Sequence
  LRRK2 RNA guide
augauggcagcauugggaug

SEQ ID NO: 23023 - RNA, 20 nt, Artificial Sequence
  LRRK2 RNA guide
augcagugugaaaagcagca

SEQ ID NO: 23024 - RNA, 20 nt, Artificial Sequence
  LRRK2 RNA guide
auggcagcauugggaugcag

SEQ ID NO: 23025 - RNA, 20 nt, Artificial Sequence
  LRRK2 RNA guide
augugcugcuuuucacacug

SEQ ID NO: 23026 - RNA, 20 nt, Artificial Sequence
  LRRK2 RNA guide
auugggaugcagugugaaaa

SEQ ID NO: 23027 - RNA, 20 nt, Artificial Sequence
  LRRK2 RNA guide
caaugugcugcuuuucacac

SEQ ID NO: 23028 - RNA, 20 nt, Artificial Sequence
  LRRK2 RNA guide
cacaaugugcugcuuuucac

SEQ ID NO: 23029 - RNA, 20 nt, Artificial Sequence
  LRRK2 RNA guide
cacacugcaucccaaugcug

SEQ ID NO: 23030 - RNA, 20 nt, Artificial Sequence
  LRRK2 RNA guide
cacugcaucccaaugcugcc

SEQ ID NO: 23031 - RNA, 20 nt, Artificial Sequence
  LRRK2 RNA guide
cagcauugggaugcagugug

SEQ ID NO: 23032 - RNA, 20 nt, Artificial Sequence
  LRRK2 RNA guide
cauugggaugcagugugaaa

SEQ ID NO: 23033 - RNA, 20 nt, Artificial Sequence
  LRRK2 RNA guide
cugcaucccaaugcugccau

SEQ ID NO: 23034 - RNA, 20 nt, Artificial Sequence
  LRRK2 RNA guide
cugcuuuucacacugcaucc

SEQ ID NO: 23035 - RNA, 20 nt, Artificial Sequence
  LRRK2 RNA guide
cuuuucacacugcaucccaa

SEQ ID NO: 23036 - RNA, 20 nt, Artificial Sequence
  LRRK2 RNA guide
gaugcagugugaaaagcagc

SEQ ID NO: 23037 - RNA, 20 nt, Artificial Sequence
  LRRK2 RNA guide
gauggcagcauugggaugca

SEQ ID NO: 23038 - RNA, 20 nt, Artificial Sequence
  LRRK2 RNA guide
gcagcauugggaugcagugu

SEQ ID NO: 23039 - RNA, 20 nt, Artificial Sequence
  LRRK2 RNA guide
gcaucccaaugcugccauca

SEQ ID NO: 23040 - RNA, 20 nt, Artificial Sequence
  LRRK2 RNA guide
gcauugggaugcagugugaa

SEQ ID NO: 23041 - RNA, 20 nt, Artificial Sequence
  LRRK2 RNA guide
gcugcuuuucacacugcauc

SEQ ID NO: 23042 - RNA, 20 nt, Artificial Sequence
  LRRK2 RNA guide
gcuuuucacacugcauccca

SEQ ID NO: 23043 - RNA, 20 nt, Artificial Sequence
  LRRK2 RNA guide
ggaugcagugugaaaagcag

SEQ ID NO: 23044 - RNA, 20 nt, Artificial Sequence
  LRRK2 RNA guide
ggcagcauugggaugcagug

SEQ ID NO: 23045 - RNA, 20 nt, Artificial Sequence
  LRRK2 RNA guide
gggaugcagugugaaaagca

SEQ ID NO: 23046 - RNA, 20 nt, Artificial Sequence
  LRRK2 RNA guide
gugcugcuuuucacacugca

SEQ ID NO: 23047 - RNA, 20 nt, Artificial Sequence
  LRRK2 RNA guide
ucacacugcaucccaaugcu

SEQ ID NO: 23048 - RNA, 20 nt, Artificial Sequence
  LRRK2 RNA guide
ugauggcagcauugggaugc

SEQ ID NO: 23049 - RNA, 20 nt, Artificial Sequence
  LRRK2 RNA guide
ugcaaugauggcagcauugg

SEQ ID NO: 23050 - RNA, 20 nt, Artificial Sequence
  LRRK2 RNA guide
ugcagugugaaaagcagcac

SEQ ID NO: 23051 - RNA, 20 nt, Artificial Sequence
  LRRK2 RNA guide
ugcaucccaaugcugccauc

SEQ ID NO: 23052 - RNA, 20 nt, Artificial Sequence
  LRRK2 RNA guide
ugcugcuuuucacacugcau

SEQ ID NO: 23053 - RNA, 20 nt, Artificial Sequence
  LRRK2 RNA guide
ugcuuuucacacugcauccc

SEQ ID NO: 23054 - RNA, 20 nt, Artificial Sequence
  LRRK2 RNA guide
uggcagcauugggaugcagu

SEQ ID NO: 23055 - RNA, 20 nt, Artificial Sequence
  LRRK2 RNA guide
ugggaugcagugugaaaagc

SEQ ID NO: 23056 - RNA, 20 nt, Artificial Sequence
  LRRK2 RNA guide
ugugcugcuuuucacacugc

SEQ ID NO: 23057 - RNA, 20 nt, Artificial Sequence
  LRRK2 RNA guide
uucacacugcaucccaaugc

SEQ ID NO: 23058 - RNA, 20 nt, Artificial Sequence
  LRRK2 RNA guide
uugcaaugauggcagcauug

SEQ ID NO: 23059 - RNA, 20 nt, Artificial Sequence
  LRRK2 RNA guide
uugggaugcagugugaaaag

SEQ ID NO: 23060 - RNA, 20 nt, Artificial Sequence
  LRRK2 RNA guide
uuucacacugcaucccaaug

SEQ ID NO: 23061 - RNA, 20 nt, Artificial Sequence
  LRRK2 RNA guide
uuuucacacugcaucccaau

SEQ ID NO: 23062 - RNA, 21 nt, Artificial Sequence
  LRRK2 RNA guide
aaugauggcagcauugggaug

SEQ ID NO: 23063 - RNA, 21 nt, Artificial Sequence
  LRRK2 RNA guide
aaugugcugcuuuucacacug

SEQ ID NO: 23064 - RNA, 21 nt, Artificial Sequence
  LRRK2 RNA guide
acaaugugcugcuuuucacac

SEQ ID NO: 23065 - RNA, 21 nt, Artificial Sequence
  LRRK2 RNA guide
acacugcaucccaaugcugcc

SEQ ID NO: 23066 - RNA, 21 nt, Artificial Sequence
  LRRK2 RNA guide
acugcaucccaaugcugccau

SEQ ID NO: 23067 - RNA, 21 nt, Artificial Sequence
  LRRK2 RNA guide
agcauugggaugcagugugaa

SEQ ID NO: 23068 - RNA, 21 nt, Artificial Sequence
  LRRK2 RNA guide
augauggcagcauugggaugc

SEQ ID NO: 23069 - RNA, 21 nt, Artificial Sequence
  LRRK2 RNA guide
augcagugugaaaagcagcac

SEQ ID NO: 23070 - RNA, 21 nt, Artificial Sequence
  LRRK2 RNA guide
auggcagcauugggaugcagu

SEQ ID NO: 23071 - RNA, 21 nt, Artificial Sequence
  LRRK2 RNA guide
augugcugcuuuucacacugc

SEQ ID NO: 23072 - RNA, 21 nt, Artificial Sequence
  LRRK2 RNA guide
auugggaugcagugugaaaag

SEQ ID NO: 23073 - RNA, 21 nt, Artificial Sequence
  LRRK2 RNA guide
caaugauggcagcauugggau

SEQ ID NO: 23074 - RNA, 21 nt, Artificial Sequence
  LRRK2 RNA guide
caaugugcugcuuuucacacu

SEQ ID NO: 23075 - RNA, 21 nt, Artificial Sequence
  LRRK2 RNA guide
cacaaugugcugcuuuucaca

SEQ ID NO: 23076 - RNA, 21 nt, Artificial Sequence
  LRRK2 RNA guide
cacacugcaucccaaugcugc

SEQ ID NO: 23077 - RNA, 21 nt, Artificial Sequence
  LRRK2 RNA guide
cacugcaucccaaugcugcca

SEQ ID NO: 23078 - RNA, 21 nt, Artificial Sequence
  LRRK2 RNA guide
cagcauugggaugcaguguga

SEQ ID NO: 23079 - RNA, 21 nt, Artificial Sequence
  LRRK2 RNA guide
cauugggaugcagugugaaaa

SEQ ID NO: 23080 - RNA, 21 nt, Artificial Sequence
  LRRK2 RNA guide
ccacaaugugcugcuuuucac

SEQ ID NO: 23081 - RNA, 21 nt, Artificial Sequence
  LRRK2 RNA guide
cugcaucccaaugcugccauc

SEQ ID NO: 23082 - RNA, 21 nt, Artificial Sequence
  LRRK2 RNA guide
cugcuuuucacacugcauccc

SEQ ID NO: 23083 - RNA, 21 nt, Artificial Sequence
  LRRK2 RNA guide
cuuuucacacugcaucccaau

SEQ ID NO: 23084 - RNA, 21 nt, Artificial Sequence
  LRRK2 RNA guide
gaugcagugugaaaagcagca

SEQ ID NO: 23085 - RNA, 21 nt, Artificial Sequence
  LRRK2 RNA guide
gauggcagcauugggaugcag

SEQ ID NO: 23086 - RNA, 21 nt, Artificial Sequence
  LRRK2 RNA guide
gcaaugauggcagcauuggga

SEQ ID NO: 23087 - RNA, 21 nt, Artificial Sequence
  LRRK2 RNA guide
gcagcauugggaugcagugug

SEQ ID NO: 23088 - RNA, 21 nt, Artificial Sequence
  LRRK2 RNA guide
gcaucccaaugcugccaucau

SEQ ID NO: 23089 - RNA, 21 nt, Artificial Sequence
  LRRK2 RNA guide
gcauugggaugcagugugaaa

SEQ ID NO: 23090 - RNA, 21 nt, Artificial Sequence
  LRRK2 RNA guide
gcugcuuuucacacugcaucc

SEQ ID NO: 23091 - RNA, 21 nt, Artificial Sequence
  LRRK2 RNA guide
gcuuuucacacugcaucccaa

SEQ ID NO: 23092 - RNA, 21 nt, Artificial Sequence
  LRRK2 RNA guide
ggaugcagugugaaaagcagc

SEQ ID NO: 23093 - RNA, 21 nt, Artificial Sequence
  LRRK2 RNA guide
ggcagcauugggaugcagugu

SEQ ID NO: 23094 - RNA, 21 nt, Artificial Sequence
  LRRK2 RNA guide
gggaugcagugugaaaagcag

SEQ ID NO: 23095 - RNA, 21 nt, Artificial Sequence
  LRRK2 RNA guide
gugcugcuuuucacacugcau

SEQ ID NO: 23096 - RNA, 21 nt, Artificial Sequence
  LRRK2 RNA guide
ucacacugcaucccaaugcug

SEQ ID NO: 23097 - RNA, 21 nt, Artificial Sequence
  LRRK2 RNA guide
ugauggcagcauugggaugca

SEQ ID NO: 23098 - RNA, 21 nt, Artificial Sequence
  LRRK2 RNA guide
ugcaaugauggcagcauuggg

SEQ ID NO: 23099 - RNA, 21 nt, Artificial Sequence
  LRRK2 RNA guide
ugcagugugaaaagcagcaca

SEQ ID NO: 23100 - RNA, 21 nt, Artificial Sequence
  LRRK2 RNA guide
ugcaucccaaugcugccauca

SEQ ID NO: 23101 - RNA, 21 nt, Artificial Sequence
  LRRK2 RNA guide
ugcugcuuuucacacugcauc

SEQ ID NO: 23102 - RNA, 21 nt, Artificial Sequence
  LRRK2 RNA guide
ugcuuuucacacugcauccca

SEQ ID NO: 23103 - RNA, 21 nt, Artificial Sequence
  LRRK2 RNA guide
uggcagcauugggaugcagug

SEQ ID NO: 23104 - RNA, 21 nt, Artificial Sequence
  LRRK2 RNA guide
ugggaugcagugugaaaagca

SEQ ID NO: 23105 - RNA, 21 nt, Artificial Sequence
  LRRK2 RNA guide
ugugcugcuuuucacacugca

SEQ ID NO: 23106 - RNA, 21 nt, Artificial Sequence
  LRRK2 RNA guide
uucacacugcaucccaaugcu

SEQ ID NO: 23107 - RNA, 21 nt, Artificial Sequence
  LRRK2 RNA guide
uugcaaugauggcagcauugg

SEQ ID NO: 23108 - RNA, 21 nt, Artificial Sequence
  LRRK2 RNA guide
uugggaugcagugugaaaagc

SEQ ID NO: 23109 - RNA, 21 nt, Artificial Sequence
  LRRK2 RNA guide
uuucacacugcaucccaaugc

SEQ ID NO: 23110 - RNA, 21 nt, Artificial Sequence
  LRRK2 RNA guide
uuugcaaugauggcagcauug

SEQ ID NO: 23111 - RNA, 21 nt, Artificial Sequence
  LRRK2 RNA guide
uuuucacacugcaucccaaug

SEQ ID NO: 23112 - RNA, 22 nt, Artificial Sequence
  LRRK2 RNA guide
aaugauggcagcauugggaugc

SEQ ID NO: 23113 - RNA, 22 nt, Artificial Sequence
  LRRK2 RNA guide
aaugugcugcuuuucacacugc

SEQ ID NO: 23114 - RNA, 22 nt, Artificial Sequence
  LRRK2 RNA guide
acaaugugcugcuuuucacacu

SEQ ID NO: 23115 - RNA, 22 nt, Artificial Sequence
  LRRK2 RNA guide
acacugcaucccaaugcugcca

SEQ ID NO: 23116 - RNA, 22 nt, Artificial Sequence
  LRRK2 RNA guide
acugcaucccaaugcugccauc

SEQ ID NO: 23117 - RNA, 22 nt, Artificial Sequence
  LRRK2 RNA guide
agcauugggaugcagugugaaa

SEQ ID NO: 23118 - RNA, 22 nt, Artificial Sequence
  LRRK2 RNA guide
augauggcagcauugggaugca

SEQ ID NO: 23119 - RNA, 22 nt, Artificial Sequence
  LRRK2 RNA guide
augcagugugaaaagcagcaca

SEQ ID NO: 23120 - RNA, 22 nt, Artificial Sequence
  LRRK2 RNA guide
auggcagcauugggaugcagug

SEQ ID NO: 23121 - RNA, 22 nt, Artificial Sequence
  LRRK2 RNA guide
augugcugcuuuucacacugca

SEQ ID NO: 23122 - RNA, 22 nt, Artificial Sequence
  LRRK2 RNA guide
auugggaugcagugugaaaagc

SEQ ID NO: 23123 - RNA, 22 nt, Artificial Sequence
  LRRK2 RNA guide
caaugauggcagcauugggaug

SEQ ID NO: 23124 - RNA, 22 nt, Artificial Sequence
  LRRK2 RNA guide
caaugugcugcuuuucacacug

SEQ ID NO: 23125 - RNA, 22 nt, Artificial Sequence
  LRRK2 RNA guide
cacaaugugcugcuuuucacac

SEQ ID NO: 23126 - RNA, 22 nt, Artificial Sequence
  LRRK2 RNA guide
cacacugcaucccaaugcugcc

SEQ ID NO: 23127 - RNA, 22 nt, Artificial Sequence
  LRRK2 RNA guide
cacugcaucccaaugcugccau

SEQ ID NO: 23128 - RNA, 22 nt, Artificial Sequence
  LRRK2 RNA guide
cagcauugggaugcagugugaa

SEQ ID NO: 23129 - RNA, 22 nt, Artificial Sequence
  LRRK2 RNA guide
cauugggaugcagugugaaaag

SEQ ID NO: 23130 - RNA, 22 nt, Artificial Sequence
  LRRK2 RNA guide
ccacaaugugcugcuuuucaca

SEQ ID NO: 23131 - RNA, 22 nt, Artificial Sequence
  LRRK2 RNA guide
cccacaaugugcugcuuuucac

SEQ ID NO: 23132 - RNA, 22 nt, Artificial Sequence
  LRRK2 RNA guide
cugcaucccaaugcugccauca

SEQ ID NO: 23133 - RNA, 22 nt, Artificial Sequence
  LRRK2 RNA guide
cugcuuuucacacugcauccca

SEQ ID NO: 23134 - RNA, 22 nt, Artificial Sequence
  LRRK2 RNA guide
cuuugcaaugauggcagcauug

SEQ ID NO: 23135 - RNA, 22 nt, Artificial Sequence
  LRRK2 RNA guide
cuuuucacacugcaucccaaug

SEQ ID NO: 23136 - RNA, 22 nt, Artificial Sequence
  LRRK2 RNA guide
gaugcagugugaaaagcagcac

SEQ ID NO: 23137 - RNA, 22 nt, Artificial Sequence
  LRRK2 RNA guide
gauggcagcauugggaugcagu

SEQ ID NO: 23138 - RNA, 22 nt, Artificial Sequence
  LRRK2 RNA guide
gcaaugauggcagcauugggau

SEQ ID NO: 23139 - RNA, 22 nt, Artificial Sequence
  LRRK2 RNA guide
gcagcauugggaugcaguguga

SEQ ID NO: 23140 - RNA, 22 nt, Artificial Sequence
  LRRK2 RNA guide
gcaucccaaugcugccaucauu

SEQ ID NO: 23141 - RNA, 22 nt, Artificial Sequence
  LRRK2 RNA guide
gcauugggaugcagugugaaaa

SEQ ID NO: 23142 - RNA, 22 nt, Artificial Sequence
  LRRK2 RNA guide
gcugcuuuucacacugcauccc

SEQ ID NO: 23143 - RNA, 22 nt, Artificial Sequence
  LRRK2 RNA guide
gcuuuucacacugcaucccaau

SEQ ID NO: 23144 - RNA, 22 nt, Artificial Sequence
  LRRK2 RNA guide
ggaugcagugugaaaagcagca

SEQ ID NO: 23145 - RNA, 22 nt, Artificial Sequence
  LRRK2 RNA guide
ggcagcauugggaugcagugug

SEQ ID NO: 23146 - RNA, 22 nt, Artificial Sequence
  LRRK2 RNA guide
gggaugcagugugaaaagcagc

SEQ ID NO: 23147 - RNA, 22 nt, Artificial Sequence
  LRRK2 RNA guide
gugcugcuuuucacacugcauc

SEQ ID NO: 23148 - RNA, 22 nt, Artificial Sequence
  LRRK2 RNA guide
ucacacugcaucccaaugcugc

SEQ ID NO: 23149 - RNA, 22 nt, Artificial Sequence
  LRRK2 RNA guide
ugauggcagcauugggaugcag

SEQ ID NO: 23150 - RNA, 22 nt, Artificial Sequence
  LRRK2 RNA guide
ugcaaugauggcagcauuggga

SEQ ID NO: 23151 - RNA, 22 nt, Artificial Sequence
  LRRK2 RNA guide
ugcagugugaaaagcagcacau

SEQ ID NO: 23152 - RNA, 22 nt, Artificial Sequence
  LRRK2 RNA guide
ugcaucccaaugcugccaucau

SEQ ID NO: 23153 - RNA, 22 nt, Artificial Sequence
  LRRK2 RNA guide
ugcugcuuuucacacugcaucc

SEQ ID NO: 23154 - RNA, 22 nt, Artificial Sequence
  LRRK2 RNA guide
ugcuuuucacacugcaucccaa

SEQ ID NO: 23155 - RNA, 22 nt, Artificial Sequence
  LRRK2 RNA guide
uggcagcauugggaugcagugu

SEQ ID NO: 23156 - RNA, 22 nt, Artificial Sequence
  LRRK2 RNA guide
ugggaugcagugugaaaagcag

SEQ ID NO: 23157 - RNA, 22 nt, Artificial Sequence
  LRRK2 RNA guide
ugugcugcuuuucacacugcau

SEQ ID NO: 23158 - RNA, 22 nt, Artificial Sequence
  LRRK2 RNA guide
uucacacugcaucccaaugcug

SEQ ID NO: 23159 - RNA, 22 nt, Artificial Sequence
  LRRK2 RNA guide
uugcaaugauggcagcauuggg

SEQ ID NO: 23160 - RNA, 22 nt, Artificial Sequence
  LRRK2 RNA guide
uugggaugcagugugaaaagca

SEQ ID NO: 23161 - RNA, 22 nt, Artificial Sequence
  LRRK2 RNA guide
uuucacacugcaucccaaugcu

SEQ ID NO: 23162 - RNA, 22 nt, Artificial Sequence
  LRRK2 RNA guide
uuugcaaugauggcagcauugg

SEQ ID NO: 23163 - RNA, 22 nt, Artificial Sequence
  LRRK2 RNA guide
uuuucacacugcaucccaaugc

SEQ ID NO: 23164 - RNA, 20 nt, Artificial Sequence
  LRRK2 RNA guide
aaucuuugcagugauggcag

SEQ ID NO: 23165 - RNA, 20 nt, Artificial Sequence
  LRRK2 RNA guide
aaugcugccaucacugcaaa

SEQ ID NO: 23166 - RNA, 20 nt, Artificial Sequence
  LRRK2 RNA guide
acugcaaagauugcugacua

SEQ ID NO: 23167 - RNA, 20 nt, Artificial Sequence
  LRRK2 RNA guide
acuguaucccaaugcugcca

SEQ ID NO: 23168 - RNA, 20 nt, Artificial Sequence
  LRRK2 RNA guide
agcaaucuuugcagugaugg

SEQ ID NO: 23169 - RNA, 20 nt, Artificial Sequence
  LRRK2 RNA guide
agucagcaaucuuugcagug

SEQ ID NO: 23170 - RNA, 20 nt, Artificial Sequence
  LRRK2 RNA guide
agugauggcagcauugggau

SEQ ID NO: 23171 - RNA, 20 nt, Artificial Sequence
  LRRK2 RNA guide
aucacugcaaagauugcuga

SEQ ID NO: 23172 - RNA, 20 nt, Artificial Sequence
  LRRK2 RNA guide
aucccaaugcugccaucacu

SEQ ID NO: 23173 - RNA, 20 nt, Artificial Sequence
  LRRK2 RNA guide
aucuuugcagugauggcagc

SEQ ID NO: 23174 - RNA, 20 nt, Artificial Sequence
  LRRK2 RNA guide
augccguagucagcaaucuu

SEQ ID NO: 23175 - RNA, 20 nt, Artificial Sequence
  LRRK2 RNA guide
augcugccaucacugcaaag

SEQ ID NO: 23176 - RNA, 20 nt, Artificial Sequence
  LRRK2 RNA guide
caaucuuugcagugauggca

SEQ ID NO: 23177 - RNA, 20 nt, Artificial Sequence
  LRRK2 RNA guide
caaugcugccaucacugcaa

SEQ ID NO: 23178 - RNA, 20 nt, Artificial Sequence
  LRRK2 RNA guide
cacugcaaagauugcugacu

SEQ ID NO: 23179 - RNA, 20 nt, Artificial Sequence
  LRRK2 RNA guide
cacuguaucccaaugcugcc

SEQ ID NO: 23180 - RNA, 20 nt, Artificial Sequence
  LRRK2 RNA guide
cagcaaucuuugcagugaug

SEQ ID NO: 23181 - RNA, 20 nt, Artificial Sequence
  LRRK2 RNA guide
cagugauggcagcauuggga

SEQ ID NO: 23182 - RNA, 20 nt, Artificial Sequence
  LRRK2 RNA guide
caucacugcaaagauugcug

SEQ ID NO: 23183 - RNA, 20 nt, Artificial Sequence
  LRRK2 RNA guide
ccaaugcugccaucacugca

SEQ ID NO: 23184 - RNA, 20 nt, Artificial Sequence
  LRRK2 RNA guide
ccaucacugcaaagauugcu

SEQ ID NO: 23185 - RNA, 20 nt, Artificial Sequence
  LRRK2 RNA guide
cccaaugcugccaucacugc

SEQ ID NO: 23186 - RNA, 20 nt, Artificial Sequence
  LRRK2 RNA guide
ccguagucagcaaucuuugc

SEQ ID NO: 23187 - RNA, 20 nt, Artificial Sequence
  LRRK2 RNA guide
cugccaucacugcaaagauu

SEQ ID NO: 23188 - RNA, 20 nt, Artificial Sequence
  LRRK2 RNA guide
cuguaucccaaugcugccau

SEQ ID NO: 23189 - RNA, 20 nt, Artificial Sequence
  LRRK2 RNA guide
cuuugcagugauggcagcau

SEQ ID NO: 23190 - RNA, 20 nt, Artificial Sequence
  LRRK2 RNA guide
gcaaucuuugcagugauggc

SEQ ID NO: 23191 - RNA, 20 nt, Artificial Sequence
  LRRK2 RNA guide
gcagugauggcagcauuggg

SEQ ID NO: 23192 - RNA, 20 nt, Artificial Sequence
  LRRK2 RNA guide
gccaucacugcaaagauugc

SEQ ID NO: 23193 - RNA, 20 nt, Artificial Sequence
  LRRK2 RNA guide
gccguagucagcaaucuuug

SEQ ID NO: 23194 - RNA, 20 nt, Artificial Sequence
  LRRK2 RNA guide
gcugccaucacugcaaagau

SEQ ID NO: 23195 - RNA, 20 nt, Artificial Sequence
  LRRK2 RNA guide
guagucagcaaucuuugcag

SEQ ID NO: 23196 - RNA, 20 nt, Artificial Sequence
  LRRK2 RNA guide
guaucccaaugcugccauca

SEQ ID NO: 23197 - RNA, 20 nt, Artificial Sequence
  LRRK2 RNA guide
gucagcaaucuuugcaguga

SEQ ID NO: 23198 - RNA, 20 nt, Artificial Sequence
  LRRK2 RNA guide
uagucagcaaucuuugcagu

SEQ ID NO: 23199 - RNA, 20 nt, Artificial Sequence
  LRRK2 RNA guide
uaucccaaugcugccaucac

SEQ ID NO: 23200 - RNA, 20 nt, Artificial Sequence
  LRRK2 RNA guide
ucacugcaaagauugcugac

SEQ ID NO: 23201 - RNA, 20 nt, Artificial Sequence
  LRRK2 RNA guide
ucagcaaucuuugcagugau

SEQ ID NO: 23202 - RNA, 20 nt, Artificial Sequence
  LRRK2 RNA guide
ucccaaugcugccaucacug

SEQ ID NO: 23203 - RNA, 20 nt, Artificial Sequence
  LRRK2 RNA guide
ucuuugcagugauggcagca

SEQ ID NO: 23204 - RNA, 20 nt, Artificial Sequence
  LRRK2 RNA guide
ugcagugauggcagcauugg

SEQ ID NO: 23205 - RNA, 20 nt, Artificial Sequence
  LRRK2 RNA guide
ugccaucacugcaaagauug

SEQ ID NO: 23206 - RNA, 20 nt, Artificial Sequence
  LRRK2 RNA guide
ugcugccaucacugcaaaga

SEQ ID NO: 23207 - RNA, 20 nt, Artificial Sequence
  LRRK2 RNA guide
uguaucccaaugcugccauc

SEQ ID NO: 23208 - RNA, 20 nt, Artificial Sequence
  LRRK2 RNA guide
uugcagugauggcagcauug

SEQ ID NO: 23209 - RNA, 20 nt, Artificial Sequence
  LRRK2 RNA guide
uuugcagugauggcagcauu

SEQ ID NO: 23210 - RNA, 21 nt, Artificial Sequence
  LRRK2 RNA guide
aaucuuugcagugauggcagc

SEQ ID NO: 23211 - RNA, 21 nt, Artificial Sequence
  LRRK2 RNA guide
aaugccguagucagcaaucuu

SEQ ID NO: 23212 - RNA, 21 nt, Artificial Sequence
  LRRK2 RNA guide
aaugcugccaucacugcaaag

SEQ ID NO: 23213 - RNA, 21 nt, Artificial Sequence
  LRRK2 RNA guide
acacuguaucccaaugcugcc

SEQ ID NO: 23214 - RNA, 21 nt, Artificial Sequence
  LRRK2 RNA guide
acugcaaagauugcugacuac

SEQ ID NO: 23215 - RNA, 21 nt, Artificial Sequence
  LRRK2 RNA guide
acuguaucccaaugcugccau

SEQ ID NO: 23216 - RNA, 21 nt, Artificial Sequence
  LRRK2 RNA guide
agcaaucuuugcagugauggc

SEQ ID NO: 23217 - RNA, 21 nt, Artificial Sequence
  LRRK2 RNA guide
agucagcaaucuuugcaguga

SEQ ID NO: 23218 - RNA, 21 nt, Artificial Sequence
  LRRK2 RNA guide
agugauggcagcauugggaua

SEQ ID NO: 23219 - RNA, 21 nt, Artificial Sequence
  LRRK2 RNA guide
aucacugcaaagauugcugac

SEQ ID NO: 23220 - RNA, 21 nt, Artificial Sequence
  LRRK2 RNA guide
aucccaaugcugccaucacug

SEQ ID NO: 23221 - RNA, 21 nt, Artificial Sequence
  LRRK2 RNA guide
aucuuugcagugauggcagca

SEQ ID NO: 23222 - RNA, 21 nt, Artificial Sequence
  LRRK2 RNA guide
augccguagucagcaaucuuu

SEQ ID NO: 23223 - RNA, 21 nt, Artificial Sequence
  LRRK2 RNA guide
augcugccaucacugcaaaga

SEQ ID NO: 23224 - RNA, 21 nt, Artificial Sequence
  LRRK2 RNA guide
caaucuuugcagugauggcag

SEQ ID NO: 23225 - RNA, 21 nt, Artificial Sequence
  LRRK2 RNA guide
caaugcugccaucacugcaaa

SEQ ID NO: 23226 - RNA, 21 nt, Artificial Sequence
  LRRK2 RNA guide
cacugcaaagauugcugacua

SEQ ID NO: 23227 - RNA, 21 nt, Artificial Sequence
  LRRK2 RNA guide
cacuguaucccaaugcugcca

SEQ ID NO: 23228 - RNA, 21 nt, Artificial Sequence
  LRRK2 RNA guide
cagcaaucuuugcagugaugg

SEQ ID NO: 23229 - RNA, 21 nt, Artificial Sequence
  LRRK2 RNA guide
cagugauggcagcauugggau

SEQ ID NO: 23230 - RNA, 21 nt, Artificial Sequence
  LRRK2 RNA guide
caucacugcaaagauugcuga

SEQ ID NO: 23231 - RNA, 21 nt, Artificial Sequence
  LRRK2 RNA guide
ccaaugcugccaucacugcaa

SEQ ID NO: 23232 - RNA, 21 nt, Artificial Sequence
  LRRK2 RNA guide
ccaucacugcaaagauugcug

SEQ ID NO: 23233 - RNA, 21 nt, Artificial Sequence
  LRRK2 RNA guide
cccaaugcugccaucacugca

SEQ ID NO: 23234 - RNA, 21 nt, Artificial Sequence
  LRRK2 RNA guide
ccguagucagcaaucuuugca

SEQ ID NO: 23235 - RNA, 21 nt, Artificial Sequence
  LRRK2 RNA guide
cguagucagcaaucuuugcag

SEQ ID NO: 23236 - RNA, 21 nt, Artificial Sequence
  LRRK2 RNA guide
cugccaucacugcaaagauug

SEQ ID NO: 23237 - RNA, 21 nt, Artificial Sequence
  LRRK2 RNA guide
cuguaucccaaugcugccauc

SEQ ID NO: 23238 - RNA, 21 nt, Artificial Sequence
  LRRK2 RNA guide
cuuugcagugauggcagcauu

SEQ ID NO: 23239 - RNA, 21 nt, Artificial Sequence
  LRRK2 RNA guide
gcaaucuuugcagugauggca

SEQ ID NO: 23240 - RNA, 21 nt, Artificial Sequence
  LRRK2 RNA guide
gcagugauggcagcauuggga

SEQ ID NO: 23241 - RNA, 21 nt, Artificial Sequence
  LRRK2 RNA guide
gccaucacugcaaagauugcu

SEQ ID NO: 23242 - RNA, 21 nt, Artificial Sequence
  LRRK2 RNA guide
gccguagucagcaaucuuugc

SEQ ID NO: 23243 - RNA, 21 nt, Artificial Sequence
  LRRK2 RNA guide
gcugccaucacugcaaagauu

SEQ ID NO: 23244 - RNA, 21 nt, Artificial Sequence
  LRRK2 RNA guide
guagucagcaaucuuugcagu

SEQ ID NO: 23245 - RNA, 21 nt, Artificial Sequence
  LRRK2 RNA guide
guaucccaaugcugccaucac

SEQ ID NO: 23246 - RNA, 21 nt, Artificial Sequence
  LRRK2 RNA guide
gucagcaaucuuugcagugau

SEQ ID NO: 23247 - RNA, 21 nt, Artificial Sequence
  LRRK2 RNA guide
uagucagcaaucuuugcagug

SEQ ID NO: 23248 - RNA, 21 nt, Artificial Sequence
  LRRK2 RNA guide
uaucccaaugcugccaucacu

SEQ ID NO: 23249 - RNA, 21 nt, Artificial Sequence
  LRRK2 RNA guide
ucacugcaaagauugcugacu

SEQ ID NO: 23250 - RNA, 21 nt, Artificial Sequence
  LRRK2 RNA guide
ucagcaaucuuugcagugaug

SEQ ID NO: 23251 - RNA, 21 nt, Artificial Sequence
  LRRK2 RNA guide
ucccaaugcugccaucacugc

SEQ ID NO: 23252 - RNA, 21 nt, Artificial Sequence
  LRRK2 RNA guide
ucuuugcagugauggcagcau

SEQ ID NO: 23253 - RNA, 21 nt, Artificial Sequence
  LRRK2 RNA guide
ugcagugauggcagcauuggg

SEQ ID NO: 23254 - RNA, 21 nt, Artificial Sequence
  LRRK2 RNA guide
ugccaucacugcaaagauugc

SEQ ID NO: 23255 - RNA, 21 nt, Artificial Sequence
  LRRK2 RNA guide
ugccguagucagcaaucuuug

SEQ ID NO: 23256 - RNA, 21 nt, Artificial Sequence
  LRRK2 RNA guide
ugcugccaucacugcaaagau

SEQ ID NO: 23257 - RNA, 21 nt, Artificial Sequence
  LRRK2 RNA guide
uguaucccaaugcugccauca

SEQ ID NO: 23258 - RNA, 21 nt, Artificial Sequence
  LRRK2 RNA guide
uugcagugauggcagcauugg

SEQ ID NO: 23259 - RNA, 21 nt, Artificial Sequence
  LRRK2 RNA guide
uuugcagugauggcagcauug

SEQ ID NO: 23260 - RNA, 22 nt, Artificial Sequence
  LRRK2 RNA guide
aaucuuugcagugauggcagca

SEQ ID NO: 23261 - RNA, 22 nt, Artificial Sequence
  LRRK2 RNA guide
aaugccguagucagcaaucuuu

SEQ ID NO: 23262 - RNA, 22 nt, Artificial Sequence
  LRRK2 RNA guide
aaugcugccaucacugcaaaga

SEQ ID NO: 23263 - RNA, 22 nt, Artificial Sequence
  LRRK2 RNA guide
acacuguaucccaaugcugcca

SEQ ID NO: 23264 - RNA, 22 nt, Artificial Sequence
  LRRK2 RNA guide
acugcaaagauugcugacuacg

SEQ ID NO: 23265 - RNA, 22 nt, Artificial Sequence
  LRRK2 RNA guide
acuguaucccaaugcugccauc

SEQ ID NO: 23266 - RNA, 22 nt, Artificial Sequence
  LRRK2 RNA guide
agcaaucuuugcagugauggca

SEQ ID NO: 23267 - RNA, 22 nt, Artificial Sequence
  LRRK2 RNA guide
agucagcaaucuuugcagugau

SEQ ID NO: 23268 - RNA, 22 nt, Artificial Sequence
  LRRK2 RNA guide
agugauggcagcauugggauac

SEQ ID NO: 23269 - RNA, 22 nt, Artificial Sequence
  LRRK2 RNA guide
aucacugcaaagauugcugacu

SEQ ID NO: 23270 - RNA, 22 nt, Artificial Sequence
  LRRK2 RNA guide
aucccaaugcugccaucacugc

SEQ ID NO: 23271 - RNA, 22 nt, Artificial Sequence
  LRRK2 RNA guide
aucuuugcagugauggcagcau

SEQ ID NO: 23272 - RNA, 22 nt, Artificial Sequence
  LRRK2 RNA guide
augccguagucagcaaucuuug

SEQ ID NO: 23273 - RNA, 22 nt, Artificial Sequence
  LRRK2 RNA guide
augcugccaucacugcaaagau

SEQ ID NO: 23274 - RNA, 22 nt, Artificial Sequence
  LRRK2 RNA guide
caaucuuugcagugauggcagc

SEQ ID NO: 23275 - RNA, 22 nt, Artificial Sequence
  LRRK2 RNA guide
caaugcugccaucacugcaaag

SEQ ID NO: 23276 - RNA, 22 nt, Artificial Sequence
  LRRK2 RNA guide
cacacuguaucccaaugcugcc

SEQ ID NO: 23277 - RNA, 22 nt, Artificial Sequence
  LRRK2 RNA guide
cacugcaaagauugcugacuac

SEQ ID NO: 23278 - RNA, 22 nt, Artificial Sequence
  LRRK2 RNA guide
cacuguaucccaaugcugccau

SEQ ID NO: 23279 - RNA, 22 nt, Artificial Sequence
  LRRK2 RNA guide
cagcaaucuuugcagugauggc

SEQ ID NO: 23280 - RNA, 22 nt, Artificial Sequence
  LRRK2 RNA guide
cagugauggcagcauugggaua

SEQ ID NO: 23281 - RNA, 22 nt, Artificial Sequence
  LRRK2 RNA guide
caucacugcaaagauugcugac

SEQ ID NO: 23282 - RNA, 22 nt, Artificial Sequence
  LRRK2 RNA guide
ccaaugcugccaucacugcaaa

SEQ ID NO: 23283 - RNA, 22 nt, Artificial Sequence
  LRRK2 RNA guide
ccaucacugcaaagauugcuga

SEQ ID NO: 23284 - RNA, 22 nt, Artificial Sequence
  LRRK2 RNA guide
cccaaugcugccaucacugcaa

SEQ ID NO: 23285 - RNA, 22 nt, Artificial Sequence
  LRRK2 RNA guide
ccguagucagcaaucuuugcag

SEQ ID NO: 23286 - RNA, 22 nt, Artificial Sequence
  LRRK2 RNA guide
cguagucagcaaucuuugcagu

SEQ ID NO: 23287 - RNA, 22 nt, Artificial Sequence
  LRRK2 RNA guide
cugccaucacugcaaagauugc

SEQ ID NO: 23288 - RNA, 22 nt, Artificial Sequence
  LRRK2 RNA guide
cuguaucccaaugcugccauca

SEQ ID NO: 23289 - RNA, 22 nt, Artificial Sequence
  LRRK2 RNA guide
cuuugcagugauggcagcauug

SEQ ID NO: 23290 - RNA, 22 nt, Artificial Sequence
  LRRK2 RNA guide
gcaaucuuugcagugauggcag

SEQ ID NO: 23291 - RNA, 22 nt, Artificial Sequence
  LRRK2 RNA guide
gcagugauggcagcauugggau

SEQ ID NO: 23292 - RNA, 22 nt, Artificial Sequence
  LRRK2 RNA guide
gccaucacugcaaagauugcug

SEQ ID NO: 23293 - RNA, 22 nt, Artificial Sequence
  LRRK2 RNA guide
gccguagucagcaaucuuugca

SEQ ID NO: 23294 - RNA, 22 nt, Artificial Sequence
  LRRK2 RNA guide
gcugccaucacugcaaagauug

SEQ ID NO: 23295 - RNA, 22 nt, Artificial Sequence
  LRRK2 RNA guide
guagucagcaaucuuugcagug

SEQ ID NO: 23296 - RNA, 22 nt, Artificial Sequence
  LRRK2 RNA guide
guaucccaaugcugccaucacu

SEQ ID NO: 23297 - RNA, 22 nt, Artificial Sequence
  LRRK2 RNA guide
gucagcaaucuuugcagugaug

SEQ ID NO: 23298 - RNA, 22 nt, Artificial Sequence
  LRRK2 RNA guide
uagucagcaaucuuugcaguga

SEQ ID NO: 23299 - RNA, 22 nt, Artificial Sequence
  LRRK2 RNA guide
uaucccaaugcugccaucacug

SEQ ID NO: 23300 - RNA, 22 nt, Artificial Sequence
  LRRK2 RNA guide
ucacugcaaagauugcugacua

SEQ ID NO: 23301 - RNA, 22 nt, Artificial Sequence
  LRRK2 RNA guide
ucagcaaucuuugcagugaugg

SEQ ID NO: 23302 - RNA, 22 nt, Artificial Sequence
  LRRK2 RNA guide
ucccaaugcugccaucacugca

SEQ ID NO: 23303 - RNA, 22 nt, Artificial Sequence
  LRRK2 RNA guide
ucuuugcagugauggcagcauu

SEQ ID NO: 23304 - RNA, 22 nt, Artificial Sequence
  LRRK2 RNA guide
ugcagugauggcagcauuggga

SEQ ID NO: 23305 - RNA, 22 nt, Artificial Sequence
  LRRK2 RNA guide
ugccaucacugcaaagauugcu

SEQ ID NO: 23306 - RNA, 22 nt, Artificial Sequence
  LRRK2 RNA guide
ugccguagucagcaaucuuugc

SEQ ID NO: 23307 - RNA, 22 nt, Artificial Sequence
  LRRK2 RNA guide
ugcugccaucacugcaaagauu

SEQ ID NO: 23308 - RNA, 22 nt, Artificial Sequence
  LRRK2 RNA guide
uguaucccaaugcugccaucac

SEQ ID NO: 23309 - RNA, 22 nt, Artificial Sequence
  LRRK2 RNA guide
uugcagugauggcagcauuggg

SEQ ID NO: 23310 - RNA, 22 nt, Artificial Sequence
  LRRK2 RNA guide
uuugcagugauggcagcauugg

SEQ ID NO: 23311 - RNA, 20 nt, Artificial Sequence
  LRRK2 RNA guide
aaagauugcugacuacagca

SEQ ID NO: 23312 - RNA, 20 nt, Artificial Sequence
  LRRK2 RNA guide
aagauugcugacuacagcau

SEQ ID NO: 23313 - RNA, 20 nt, Artificial Sequence
  LRRK2 RNA guide
aaugcuguagucagcaaucu

SEQ ID NO: 23314 - RNA, 20 nt, Artificial Sequence
  LRRK2 RNA guide
acagcauugcucaguacugc

SEQ ID NO: 23315 - RNA, 20 nt, Artificial Sequence
  LRRK2 RNA guide
acuacagcauugcucaguac

SEQ ID NO: 23316 - RNA, 20 nt, Artificial Sequence
  LRRK2 RNA guide
acugagcaaugcuguaguca

SEQ ID NO: 23317 - RNA, 20 nt, Artificial Sequence
  LRRK2 RNA guide
agauugcugacuacagcauu

SEQ ID NO: 23318 - RNA, 20 nt, Artificial Sequence
  LRRK2 RNA guide
agcaaugcuguagucagcaa

SEQ ID NO: 23319 - RNA, 20 nt, Artificial Sequence
  LRRK2 RNA guide
agcaguacugagcaaugcug

SEQ ID NO: 23320 - RNA, 20 nt, Artificial Sequence
  LRRK2 RNA guide
aguacugagcaaugcuguag

SEQ ID NO: 23321 - RNA, 20 nt, Artificial Sequence
  LRRK2 RNA guide
aucauugcaaagauugcuga

SEQ ID NO: 23322 - RNA, 20 nt, Artificial Sequence
  LRRK2 RNA guide
augcuguagucagcaaucuu

SEQ ID NO: 23323 - RNA, 20 nt, Artificial Sequence
  LRRK2 RNA guide
auugcugacuacagcauugc

SEQ ID NO: 23324 - RNA, 20 nt, Artificial Sequence
  LRRK2 RNA guide
caaagauugcugacuacagc

SEQ ID NO: 23325 - RNA, 20 nt, Artificial Sequence
  LRRK2 RNA guide
caaugcuguagucagcaauc

SEQ ID NO: 23326 - RNA, 20 nt, Artificial Sequence
  LRRK2 RNA guide
cagcaguacugagcaaugcu

SEQ ID NO: 23327 - RNA, 20 nt, Artificial Sequence
  LRRK2 RNA guide
cagcauugcucaguacugcu

SEQ ID NO: 23328 - RNA, 20 nt, Artificial Sequence
  LRRK2 RNA guide
caguacugagcaaugcugua

SEQ ID NO: 23329 - RNA, 20 nt, Artificial Sequence
  LRRK2 RNA guide
cauugcaaagauugcugacu

SEQ ID NO: 23330 - RNA, 20 nt, Artificial Sequence
  LRRK2 RNA guide
cuacagcaguacugagcaau

SEQ ID NO: 23331 - RNA, 20 nt, Artificial Sequence
  LRRK2 RNA guide
cuacagcauugcucaguacu

SEQ ID NO: 23332 - RNA, 20 nt, Artificial Sequence
  LRRK2 RNA guide
cugacuacagcauugcucag

SEQ ID NO: 23333 - RNA, 20 nt, Artificial Sequence
  LRRK2 RNA guide
cugagcaaugcuguagucag

SEQ ID NO: 23334 - RNA, 20 nt, Artificial Sequence
  LRRK2 RNA guide
cuguagucagcaaucuuugc

SEQ ID NO: 23335 - RNA, 20 nt, Artificial Sequence
  LRRK2 RNA guide
gacuacagcauugcucagua

SEQ ID NO: 23336 - RNA, 20 nt, Artificial Sequence
  LRRK2 RNA guide
gagcaaugcuguagucagca

SEQ ID NO: 23337 - RNA, 20 nt, Artificial Sequence
  LRRK2 RNA guide
gauugcugacuacagcauug

SEQ ID NO: 23338 - RNA, 20 nt, Artificial Sequence
  LRRK2 RNA guide
gcaaagauugcugacuacag

SEQ ID NO: 23339 - RNA, 20 nt, Artificial Sequence
  LRRK2 RNA guide
gcaaugcuguagucagcaau

SEQ ID NO: 23340 - RNA, 20 nt, Artificial Sequence
  LRRK2 RNA guide
gcugacuacagcauugcuca

SEQ ID NO: 23341 - RNA, 20 nt, Artificial Sequence
  LRRK2 RNA guide
gcuguagucagcaaucuuug

SEQ ID NO: 23342 - RNA, 20 nt, Artificial Sequence
  LRRK2 RNA guide
guacugagcaaugcuguagu

SEQ ID NO: 23343 - RNA, 20 nt, Artificial Sequence
  LRRK2 RNA guide
uacagcaguacugagcaaug

SEQ ID NO: 23344 - RNA, 20 nt, Artificial Sequence
  LRRK2 RNA guide
uacagcauugcucaguacug

SEQ ID NO: 23345 - RNA, 20 nt, Artificial Sequence
  LRRK2 RNA guide
uacugagcaaugcuguaguc

SEQ ID NO: 23346 - RNA, 20 nt, Artificial Sequence
  LRRK2 RNA guide
ucauugcaaagauugcugac

SEQ ID NO: 23347 - RNA, 20 nt, Artificial Sequence
  LRRK2 RNA guide
ugacuacagcauugcucagu

SEQ ID NO: 23348 - RNA, 20 nt, Artificial Sequence
  LRRK2 RNA guide
ugagcaaugcuguagucagc

SEQ ID NO: 23349 - RNA, 20 nt, Artificial Sequence
  LRRK2 RNA guide
ugcaaagauugcugacuaca

SEQ ID NO: 23350 - RNA, 20 nt, Artificial Sequence
  LRRK2 RNA guide
ugcugacuacagcauugcuc

SEQ ID NO: 23351 - RNA, 20 nt, Artificial Sequence
  LRRK2 RNA guide
ugcuguagucagcaaucuuu

SEQ ID NO: 23352 - RNA, 20 nt, Artificial Sequence
  LRRK2 RNA guide
uucuacagcaguacugagca

SEQ ID NO: 23353 - RNA, 20 nt, Artificial Sequence
  LRRK2 RNA guide
uugcaaagauugcugacuac

SEQ ID NO: 23354 - RNA, 20 nt, Artificial Sequence
  LRRK2 RNA guide
uugcugacuacagcauugcu

SEQ ID NO: 23355 - RNA, 21 nt, Artificial Sequence
  LRRK2 RNA guide
aaagauugcugacuacagcau

SEQ ID NO: 23356 - RNA, 21 nt, Artificial Sequence
  LRRK2 RNA guide
aagauugcugacuacagcauu

SEQ ID NO: 23357 - RNA, 21 nt, Artificial Sequence
  LRRK2 RNA guide
aaugcuguagucagcaaucuu

SEQ ID NO: 23358 - RNA, 21 nt, Artificial Sequence
  LRRK2 RNA guide
acagcaguacugagcaaugcu

SEQ ID NO: 23359 - RNA, 21 nt, Artificial Sequence
  LRRK2 RNA guide
acagcauugcucaguacugcu

SEQ ID NO: 23360 - RNA, 21 nt, Artificial Sequence
  LRRK2 RNA guide
acuacagcauugcucaguacu

SEQ ID NO: 23361 - RNA, 21 nt, Artificial Sequence
  LRRK2 RNA guide
acugagcaaugcuguagucag

SEQ ID NO: 23362 - RNA, 21 nt, Artificial Sequence
  LRRK2 RNA guide
agauugcugacuacagcauug

SEQ ID NO: 23363 - RNA, 21 nt, Artificial Sequence
  LRRK2 RNA guide
agcaaugcuguagucagcaau

SEQ ID NO: 23364 - RNA, 21 nt, Artificial Sequence
  LRRK2 RNA guide
agcaguacugagcaaugcugu

SEQ ID NO: 23365 - RNA, 21 nt, Artificial Sequence
  LRRK2 RNA guide
aguacugagcaaugcuguagu

SEQ ID NO: 23366 - RNA, 21 nt, Artificial Sequence
  LRRK2 RNA guide
aucauugcaaagauugcugac

SEQ ID NO: 23367 - RNA, 21 nt, Artificial Sequence
  LRRK2 RNA guide
augcuguagucagcaaucuuu

SEQ ID NO: 23368 - RNA, 21 nt, Artificial Sequence
  LRRK2 RNA guide
auucuacagcaguacugagca

SEQ ID NO: 23369 - RNA, 21 nt, Artificial Sequence
  LRRK2 RNA guide
auugcaaagauugcugacuac

SEQ ID NO: 23370 - RNA, 21 nt, Artificial Sequence
  LRRK2 RNA guide
auugcugacuacagcauugcu

SEQ ID NO: 23371 - RNA, 21 nt, Artificial Sequence
  LRRK2 RNA guide
caaagauugcugacuacagca

SEQ ID NO: 23372 - RNA, 21 nt, Artificial Sequence
  LRRK2 RNA guide
caaugcuguagucagcaaucu

SEQ ID NO: 23373 - RNA, 21 nt, Artificial Sequence
  LRRK2 RNA guide
cagcaguacugagcaaugcug

SEQ ID NO: 23374 - RNA, 21 nt, Artificial Sequence
  LRRK2 RNA guide
cagcauugcucaguacugcug

SEQ ID NO: 23375 - RNA, 21 nt, Artificial Sequence
  LRRK2 RNA guide
caguacugagcaaugcuguag

SEQ ID NO: 23376 - RNA, 21 nt, Artificial Sequence
  LRRK2 RNA guide
caucauugcaaagauugcuga

SEQ ID NO: 23377 - RNA, 21 nt, Artificial Sequence
  LRRK2 RNA guide
cauugcaaagauugcugacua

SEQ ID NO: 23378 - RNA, 21 nt, Artificial Sequence
  LRRK2 RNA guide
cuacagcaguacugagcaaug

SEQ ID NO: 23379 - RNA, 21 nt, Artificial Sequence
  LRRK2 RNA guide
cuacagcauugcucaguacug

SEQ ID NO: 23380 - RNA, 21 nt, Artificial Sequence
  LRRK2 RNA guide
cugacuacagcauugcucagu

SEQ ID NO: 23381 - RNA, 21 nt, Artificial Sequence
  LRRK2 RNA guide
cugagcaaugcuguagucagc

SEQ ID NO: 23382 - RNA, 21 nt, Artificial Sequence
  LRRK2 RNA guide
cuguagucagcaaucuuugca

SEQ ID NO: 23383 - RNA, 21 nt, Artificial Sequence
  LRRK2 RNA guide
gacuacagcauugcucaguac

SEQ ID NO: 23384 - RNA, 21 nt, Artificial Sequence
  LRRK2 RNA guide
gagcaaugcuguagucagcaa

SEQ ID NO: 23385 - RNA, 21 nt, Artificial Sequence
  LRRK2 RNA guide
gauugcugacuacagcauugc

SEQ ID NO: 23386 - RNA, 21 nt, Artificial Sequence
  LRRK2 RNA guide
gcaaagauugcugacuacagc

SEQ ID NO: 23387 - RNA, 21 nt, Artificial Sequence
  LRRK2 RNA guide
gcaaugcuguagucagcaauc

SEQ ID NO: 23388 - RNA, 21 nt, Artificial Sequence
  LRRK2 RNA guide
gcaguacugagcaaugcugua

SEQ ID NO: 23389 - RNA, 21 nt, Artificial Sequence
  LRRK2 RNA guide
gcuguagucagcaaucuuugc

SEQ ID NO: 23390 - RNA, 21 nt, Artificial Sequence
  LRRK2 RNA guide
guacugagcaaugcuguaguc

SEQ ID NO: 23391 - RNA, 21 nt, Artificial Sequence
  LRRK2 RNA guide
uacagcaguacugagcaaugc

SEQ ID NO: 23392 - RNA, 21 nt, Artificial Sequence
  LRRK2 RNA guide
uacagcauugcucaguacugc

SEQ ID NO: 23393 - RNA, 21 nt, Artificial Sequence
  LRRK2 RNA guide
uacugagcaaugcuguaguca

SEQ ID NO: 23394 - RNA, 21 nt, Artificial Sequence
  LRRK2 RNA guide
ucauugcaaagauugcugacu

SEQ ID NO: 23395 - RNA, 21 nt, Artificial Sequence
  LRRK2 RNA guide
ucuacagcaguacugagcaau

SEQ ID NO: 23396 - RNA, 21 nt, Artificial Sequence
  LRRK2 RNA guide
ugacuacagcauugcucagua

SEQ ID NO: 23397 - RNA, 21 nt, Artificial Sequence
  LRRK2 RNA guide
ugagcaaugcuguagucagca

SEQ ID NO: 23398 - RNA, 21 nt, Artificial Sequence
  LRRK2 RNA guide
ugcaaagauugcugacuacag

SEQ ID NO: 23399 - RNA, 21 nt, Artificial Sequence
  LRRK2 RNA guide
ugcugacuacagcauugcuca

SEQ ID NO: 23400 - RNA, 21 nt, Artificial Sequence
  LRRK2 RNA guide
ugcuguagucagcaaucuuug

SEQ ID NO: 23401 - RNA, 21 nt, Artificial Sequence
  LRRK2 RNA guide
uucuacagcaguacugagcaa

SEQ ID NO: 23402 - RNA, 21 nt, Artificial Sequence
  LRRK2 RNA guide
uugcaaagauugcugacuaca

SEQ ID NO: 23403 - RNA, 21 nt, Artificial Sequence
  LRRK2 RNA guide
uugcugacuacagcauugcuc

SEQ ID NO: 23404 - RNA, 22 nt, Artificial Sequence
  LRRK2 RNA guide
aaagauugcugacuacagcauu

SEQ ID NO: 23405 - RNA, 22 nt, Artificial Sequence
  LRRK2 RNA guide
aagauugcugacuacagcauug

SEQ ID NO: 23406 - RNA, 22 nt, Artificial Sequence
  LRRK2 RNA guide
aaugcuguagucagcaaucuuu

SEQ ID NO: 23407 - RNA, 22 nt, Artificial Sequence
  LRRK2 RNA guide
acagcaguacugagcaaugcug

SEQ ID NO: 23408 - RNA, 22 nt, Artificial Sequence
  LRRK2 RNA guide
acagcauugcucaguacugcug

SEQ ID NO: 23409 - RNA, 22 nt, Artificial Sequence
  LRRK2 RNA guide
acuacagcauugcucaguacug

SEQ ID NO: 23410 - RNA, 22 nt, Artificial Sequence
  LRRK2 RNA guide
acugagcaaugcuguagucagc

SEQ ID NO: 23411 - RNA, 22 nt, Artificial Sequence
  LRRK2 RNA guide
agauugcugacuacagcauugc

SEQ ID NO: 23412 - RNA, 22 nt, Artificial Sequence
  LRRK2 RNA guide
agcaaugcuguagucagcaauc

SEQ ID NO: 23413 - RNA, 22 nt, Artificial Sequence
  LRRK2 RNA guide
agcaguacugagcaaugcugua

SEQ ID NO: 23414 - RNA, 22 nt, Artificial Sequence
  LRRK2 RNA guide
aguacugagcaaugcuguaguc

SEQ ID NO: 23415 - RNA, 22 nt, Artificial Sequence
  LRRK2 RNA guide
aucauugcaaagauugcugacu

SEQ ID NO: 23416 - RNA, 22 nt, Artificial Sequence
  LRRK2 RNA guide
augcuguagucagcaaucuuug

SEQ ID NO: 23417 - RNA, 22 nt, Artificial Sequence
  LRRK2 RNA guide
auucuacagcaguacugagcaa

SEQ ID NO: 23418 - RNA, 22 nt, Artificial Sequence
  LRRK2 RNA guide
auugcaaagauugcugacuaca

SEQ ID NO: 23419 - RNA, 22 nt, Artificial Sequence
  LRRK2 RNA guide
auugcugacuacagcauugcuc

SEQ ID NO: 23420 - RNA, 22 nt, Artificial Sequence
  LRRK2 RNA guide
caaagauugcugacuacagcau

SEQ ID NO: 23421 - RNA, 22 nt, Artificial Sequence
  LRRK2 RNA guide
caaugcuguagucagcaaucuu

SEQ ID NO: 23422 - RNA, 22 nt, Artificial Sequence
  LRRK2 RNA guide
cagcaguacugagcaaugcugu

SEQ ID NO: 23423 - RNA, 22 nt, Artificial Sequence
  LRRK2 RNA guide
cagcauugcucaguacugcugu

SEQ ID NO: 23424 - RNA, 22 nt, Artificial Sequence
  LRRK2 RNA guide
caguacugagcaaugcuguagu

SEQ ID NO: 23425 - RNA, 22 nt, Artificial Sequence
  LRRK2 RNA guide
caucauugcaaagauugcugac

SEQ ID NO: 23426 - RNA, 22 nt, Artificial Sequence
  LRRK2 RNA guide
cauucuacagcaguacugagca

SEQ ID NO: 23427 - RNA, 22 nt, Artificial Sequence
  LRRK2 RNA guide
cauugcaaagauugcugacuac

SEQ ID NO: 23428 - RNA, 22 nt, Artificial Sequence
  LRRK2 RNA guide
ccaucauugcaaagauugcuga

SEQ ID NO: 23429 - RNA, 22 nt, Artificial Sequence
  LRRK2 RNA guide
cuacagcaguacugagcaaugc

SEQ ID NO: 23430 - RNA, 22 nt, Artificial Sequence
  LRRK2 RNA guide
cuacagcauugcucaguacugc

SEQ ID NO: 23431 - RNA, 22 nt, Artificial Sequence
  LRRK2 RNA guide
cugacuacagcauugcucagua

SEQ ID NO: 23432 - RNA, 22 nt, Artificial Sequence
  LRRK2 RNA guide
cugagcaaugcuguagucagca

SEQ ID NO: 23433 - RNA, 22 nt, Artificial Sequence
  LRRK2 RNA guide
cuguagucagcaaucuuugcaa

SEQ ID NO: 23434 - RNA, 22 nt, Artificial Sequence
  LRRK2 RNA guide
gacuacagcauugcucaguacu

SEQ ID NO: 23435 - RNA, 22 nt, Artificial Sequence
  LRRK2 RNA guide
gagcaaugcuguagucagcaau

SEQ ID NO: 23436 - RNA, 22 nt, Artificial Sequence
  LRRK2 RNA guide
gauugcugacuacagcauugcu

SEQ ID NO: 23437 - RNA, 22 nt, Artificial Sequence
  LRRK2 RNA guide
gcaaagauugcugacuacagca

SEQ ID NO: 23438 - RNA, 22 nt, Artificial Sequence
  LRRK2 RNA guide
gcaaugcuguagucagcaaucu

SEQ ID NO: 23439 - RNA, 22 nt, Artificial Sequence
  LRRK2 RNA guide
gcaguacugagcaaugcuguag

SEQ ID NO: 23440 - RNA, 22 nt, Artificial Sequence
  LRRK2 RNA guide
gcugacuacagcauugcucagu

SEQ ID NO: 23441 - RNA, 22 nt, Artificial Sequence
  LRRK2 RNA guide
gcuguagucagcaaucuuugca

SEQ ID NO: 23442 - RNA, 22 nt, Artificial Sequence
  LRRK2 RNA guide
guacugagcaaugcuguaguca

SEQ ID NO: 23443 - RNA, 22 nt, Artificial Sequence
  LRRK2 RNA guide
uacagcaguacugagcaaugcu

SEQ ID NO: 23444 - RNA, 22 nt, Artificial Sequence
  LRRK2 RNA guide
uacagcauugcucaguacugcu

SEQ ID NO: 23445 - RNA, 22 nt, Artificial Sequence
  LRRK2 RNA guide
uacugagcaaugcuguagucag

SEQ ID NO: 23446 - RNA, 22 nt, Artificial Sequence
  LRRK2 RNA guide
ucauugcaaagauugcugacua

SEQ ID NO: 23447 - RNA, 22 nt, Artificial Sequence
  LRRK2 RNA guide
ucuacagcaguacugagcaaug

SEQ ID NO: 23448 - RNA, 22 nt, Artificial Sequence
  LRRK2 RNA guide
ugacuacagcauugcucaguac

SEQ ID NO: 23449 - RNA, 22 nt, Artificial Sequence
  LRRK2 RNA guide
ugagcaaugcuguagucagcaa

SEQ ID NO: 23450 - RNA, 22 nt, Artificial Sequence
  LRRK2 RNA guide
ugcaaagauugcugacuacagc

SEQ ID NO: 23451 - RNA, 22 nt, Artificial Sequence
  LRRK2 RNA guide
ugcugacuacagcauugcucag

SEQ ID NO: 23452 - RNA, 22 nt, Artificial Sequence
  LRRK2 RNA guide
ugcuguagucagcaaucuuugc

SEQ ID NO: 23453 - RNA, 22 nt, Artificial Sequence
  LRRK2 RNA guide
uucuacagcaguacugagcaau

SEQ ID NO: 23454 - RNA, 22 nt, Artificial Sequence
  LRRK2 RNA guide
uugcaaagauugcugacuacag

SEQ ID NO: 23455 - RNA, 22 nt, Artificial Sequence
  LRRK2 RNA guide
uugcugacuacagcauugcuca

SEQ ID NO: 23456 - RNA, 20 nt, Artificial Sequence
  LRRK2 RNA guide
aaagauugcugacuacggca

SEQ ID NO: 23457 - RNA, 20 nt, Artificial Sequence
  LRRK2 RNA guide
acagcaguacugagcagugc

SEQ ID NO: 23458 - RNA, 20 nt, Artificial Sequence
  LRRK2 RNA guide
acggcacugcucaguacugc

SEQ ID NO: 23459 - RNA, 20 nt, Artificial Sequence
  LRRK2 RNA guide
acuacggcacugcucaguac

SEQ ID NO: 23460 - RNA, 20 nt, Artificial Sequence
  LRRK2 RNA guide
acugagcagugccguaguca

SEQ ID NO: 23461 - RNA, 20 nt, Artificial Sequence
  LRRK2 RNA guide
acugcucaguacugcuguag

SEQ ID NO: 23462 - RNA, 20 nt, Artificial Sequence
  LRRK2 RNA guide
agauugcugacuacggcacu

SEQ ID NO: 23463 - RNA, 20 nt, Artificial Sequence
  LRRK2 RNA guide
agcaguacugagcagugccg

SEQ ID NO: 23464 - RNA, 20 nt, Artificial Sequence
  LRRK2 RNA guide
agcagugccguagucagcaa

SEQ ID NO: 23465 - RNA, 20 nt, Artificial Sequence
  LRRK2 RNA guide
aguacugagcagugccguag

SEQ ID NO: 23466 - RNA, 20 nt, Artificial Sequence
  LRRK2 RNA guide
agugccguagucagcaaucu

SEQ ID NO: 23467 - RNA, 20 nt, Artificial Sequence
  LRRK2 RNA guide
auucuacagcaguacugagc

SEQ ID NO: 23468 - RNA, 20 nt, Artificial Sequence
  LRRK2 RNA guide
auugcugacuacggcacugc

SEQ ID NO: 23469 - RNA, 20 nt, Artificial Sequence
  LRRK2 RNA guide
caaagauugcugacuacggc

SEQ ID NO: 23470 - RNA, 20 nt, Artificial Sequence
  LRRK2 RNA guide
cacugcucaguacugcugua

SEQ ID NO: 23471 - RNA, 20 nt, Artificial Sequence
  LRRK2 RNA guide
cagcaguacugagcagugcc

SEQ ID NO: 23472 - RNA, 20 nt, Artificial Sequence
  LRRK2 RNA guide
caguacugagcagugccgua

SEQ ID NO: 23473 - RNA, 20 nt, Artificial Sequence
  LRRK2 RNA guide
cagugccguagucagcaauc

SEQ ID NO: 23474 - RNA, 20 nt, Artificial Sequence
  LRRK2 RNA guide
cauucuacagcaguacugag

SEQ ID NO: 23475 - RNA, 20 nt, Artificial Sequence
  LRRK2 RNA guide
ccauucuacagcaguacuga

SEQ ID NO: 23476 - RNA, 20 nt, Artificial Sequence
  LRRK2 RNA guide
cccauucuacagcaguacug

SEQ ID NO: 23477 - RNA, 20 nt, Artificial Sequence
  LRRK2 RNA guide
cggcacugcucaguacugcu

SEQ ID NO: 23478 - RNA, 20 nt, Artificial Sequence
  LRRK2 RNA guide
cuacagcaguacugagcagu

SEQ ID NO: 23479 - RNA, 20 nt, Artificial Sequence
  LRRK2 RNA guide
cuacggcacugcucaguacu

SEQ ID NO: 23480 - RNA, 20 nt, Artificial Sequence
  LRRK2 RNA guide
cugacuacggcacugcucag

SEQ ID NO: 23481 - RNA, 20 nt, Artificial Sequence
  LRRK2 RNA guide
cugagcagugccguagucag

SEQ ID NO: 23482 - RNA, 20 nt, Artificial Sequence
  LRRK2 RNA guide
gacuacggcacugcucagua

SEQ ID NO: 23483 - RNA, 20 nt, Artificial Sequence
  LRRK2 RNA guide
gagcagugccguagucagca

SEQ ID NO: 23484 - RNA, 20 nt, Artificial Sequence
  LRRK2 RNA guide
gcaaagauugcugacuacgg

SEQ ID NO: 23485 - RNA, 20 nt, Artificial Sequence
  LRRK2 RNA guide
gcacugcucaguacugcugu

SEQ ID NO: 23486 - RNA, 20 nt, Artificial Sequence
  LRRK2 RNA guide
gcaguacugagcagugccgu

SEQ ID NO: 23487 - RNA, 20 nt, Artificial Sequence
  LRRK2 RNA guide
gcagugccguagucagcaau

SEQ ID NO: 23488 - RNA, 20 nt, Artificial Sequence
  LRRK2 RNA guide
gcugacuacggcacugcuca

SEQ ID NO: 23489 - RNA, 20 nt, Artificial Sequence
  LRRK2 RNA guide
ggcacugcucaguacugcug

SEQ ID NO: 23490 - RNA, 20 nt, Artificial Sequence
  LRRK2 RNA guide
guacugagcagugccguagu

SEQ ID NO: 23491 - RNA, 20 nt, Artificial Sequence
  LRRK2 RNA guide
uacagcaguacugagcagug

SEQ ID NO: 23492 - RNA, 20 nt, Artificial Sequence
  LRRK2 RNA guide
uacggcacugcucaguacug

SEQ ID NO: 23493 - RNA, 20 nt, Artificial Sequence
  LRRK2 RNA guide
uacugagcagugccguaguc

SEQ ID NO: 23494 - RNA, 20 nt, Artificial Sequence
  LRRK2 RNA guide
ucuacagcaguacugagcag

SEQ ID NO: 23495 - RNA, 20 nt, Artificial Sequence
  LRRK2 RNA guide
ugacuacggcacugcucagu

SEQ ID NO: 23496 - RNA, 20 nt, Artificial Sequence
  LRRK2 RNA guide
ugagcagugccguagucagc

SEQ ID NO: 23497 - RNA, 20 nt, Artificial Sequence
  LRRK2 RNA guide
ugcaaagauugcugacuacg

SEQ ID NO: 23498 - RNA, 20 nt, Artificial Sequence
  LRRK2 RNA guide
ugcugacuacggcacugcuc

SEQ ID NO: 23499 - RNA, 20 nt, Artificial Sequence
  LRRK2 RNA guide
uugcugacuacggcacugcu

SEQ ID NO: 23500 - RNA, 21 nt, Artificial Sequence
  LRRK2 RNA guide
aaagauugcugacuacggcac

SEQ ID NO: 23501 - RNA, 21 nt, Artificial Sequence
  LRRK2 RNA guide
aagauugcugacuacggcacu

SEQ ID NO: 23502 - RNA, 21 nt, Artificial Sequence
  LRRK2 RNA guide
acagcaguacugagcagugcc

SEQ ID NO: 23503 - RNA, 21 nt, Artificial Sequence
  LRRK2 RNA guide
acggcacugcucaguacugcu

SEQ ID NO: 23504 - RNA, 21 nt, Artificial Sequence
  LRRK2 RNA guide
acuacggcacugcucaguacu

SEQ ID NO: 23505 - RNA, 21 nt, Artificial Sequence
  LRRK2 RNA guide
acugagcagugccguagucag

SEQ ID NO: 23506 - RNA, 21 nt, Artificial Sequence
  LRRK2 RNA guide
acugcucaguacugcuguaga

SEQ ID NO: 23507 - RNA, 21 nt, Artificial Sequence
  LRRK2 RNA guide
agauugcugacuacggcacug

SEQ ID NO: 23508 - RNA, 21 nt, Artificial Sequence
  LRRK2 RNA guide
agcaguacugagcagugccgu

SEQ ID NO: 23509 - RNA, 21 nt, Artificial Sequence
  LRRK2 RNA guide
agcagugccguagucagcaau

SEQ ID NO: 23510 - RNA, 21 nt, Artificial Sequence
  LRRK2 RNA guide
aguacugagcagugccguagu

SEQ ID NO: 23511 - RNA, 21 nt, Artificial Sequence
  LRRK2 RNA guide
agugccguagucagcaaucuu

SEQ ID NO: 23512 - RNA, 21 nt, Artificial Sequence
  LRRK2 RNA guide
auugcugacuacggcacugcu

SEQ ID NO: 23513 - RNA, 21 nt, Artificial Sequence
  LRRK2 RNA guide
caaagauugcugacuacggca

SEQ ID NO: 23514 - RNA, 21 nt, Artificial Sequence
  LRRK2 RNA guide
cacugcucaguacugcuguag

SEQ ID NO: 23515 - RNA, 21 nt, Artificial Sequence
  LRRK2 RNA guide
cagcaguacugagcagugccg

SEQ ID NO: 23516 - RNA, 21 nt, Artificial Sequence
  LRRK2 RNA guide
caguacugagcagugccguag

SEQ ID NO: 23517 - RNA, 21 nt, Artificial Sequence
  LRRK2 RNA guide
cagugccguagucagcaaucu

SEQ ID NO: 23518 - RNA, 21 nt, Artificial Sequence
  LRRK2 RNA guide
cauucuacagcaguacugagc

SEQ ID NO: 23519 - RNA, 21 nt, Artificial Sequence
  LRRK2 RNA guide
ccauucuacagcaguacugag

SEQ ID NO: 23520 - RNA, 21 nt, Artificial Sequence
  LRRK2 RNA guide
cccauucuacagcaguacuga

SEQ ID NO: 23521 - RNA, 21 nt, Artificial Sequence
  LRRK2 RNA guide
ccccauucuacagcaguacug

SEQ ID NO: 23522 - RNA, 21 nt, Artificial Sequence
  LRRK2 RNA guide
cggcacugcucaguacugcug

SEQ ID NO: 23523 - RNA, 21 nt, Artificial Sequence
  LRRK2 RNA guide
cuacagcaguacugagcagug

SEQ ID NO: 23524 - RNA, 21 nt, Artificial Sequence
  LRRK2 RNA guide
cuacggcacugcucaguacug

SEQ ID NO: 23525 - RNA, 21 nt, Artificial Sequence
  LRRK2 RNA guide
cugacuacggcacugcucagu

SEQ ID NO: 23526 - RNA, 21 nt, Artificial Sequence
  LRRK2 RNA guide
cugagcagugccguagucagc

SEQ ID NO: 23527 - RNA, 21 nt, Artificial Sequence
  LRRK2 RNA guide
gacuacggcacugcucaguac

SEQ ID NO: 23528 - RNA, 21 nt, Artificial Sequence
  LRRK2 RNA guide
gagcagugccguagucagcaa

SEQ ID NO: 23529 - RNA, 21 nt, Artificial Sequence
  LRRK2 RNA guide
gauugcugacuacggcacugc

SEQ ID NO: 23530 - RNA, 21 nt, Artificial Sequence
  LRRK2 RNA guide
gcaaagauugcugacuacggc

SEQ ID NO: 23531 - RNA, 21 nt, Artificial Sequence
  LRRK2 RNA guide
gcacugcucaguacugcugua

SEQ ID NO: 23532 - RNA, 21 nt, Artificial Sequence
  LRRK2 RNA guide
gcaguacugagcagugccgua

SEQ ID NO: 23533 - RNA, 21 nt, Artificial Sequence
  LRRK2 RNA guide
gcagugccguagucagcaauc

SEQ ID NO: 23534 - RNA, 21 nt, Artificial Sequence
  LRRK2 RNA guide
gcugacuacggcacugcucag

SEQ ID NO: 23535 - RNA, 21 nt, Artificial Sequence
  LRRK2 RNA guide
ggcacugcucaguacugcugu

SEQ ID NO: 23536 - RNA, 21 nt, Artificial Sequence
  LRRK2 RNA guide
guacugagcagugccguaguc

SEQ ID NO: 23537 - RNA, 21 nt, Artificial Sequence
  LRRK2 RNA guide
uacagcaguacugagcagugc

SEQ ID NO: 23538 - RNA, 21 nt, Artificial Sequence
  LRRK2 RNA guide
uacggcacugcucaguacugc

SEQ ID NO: 23539 - RNA, 21 nt, Artificial Sequence
  LRRK2 RNA guide
uacugagcagugccguaguca

SEQ ID NO: 23540 - RNA, 21 nt, Artificial Sequence
  LRRK2 RNA guide
ucuacagcaguacugagcagu

SEQ ID NO: 23541 - RNA, 21 nt, Artificial Sequence
  LRRK2 RNA guide
ugacuacggcacugcucagua

SEQ ID NO: 23542 - RNA, 21 nt, Artificial Sequence
  LRRK2 RNA guide
ugagcagugccguagucagca

SEQ ID NO: 23543 - RNA, 21 nt, Artificial Sequence
  LRRK2 RNA guide
ugcaaagauugcugacuacgg

SEQ ID NO: 23544 - RNA, 21 nt, Artificial Sequence
  LRRK2 RNA guide
ugcugacuacggcacugcuca

SEQ ID NO: 23545 - RNA, 21 nt, Artificial Sequence
  LRRK2 RNA guide
uucuacagcaguacugagcag

SEQ ID NO: 23546 - RNA, 21 nt, Artificial Sequence
  LRRK2 RNA guide
uugcaaagauugcugacuacg

SEQ ID NO: 23547 - RNA, 21 nt, Artificial Sequence
  LRRK2 RNA guide
uugcugacuacggcacugcuc

SEQ ID NO: 23548 - RNA, 22 nt, Artificial Sequence
  LRRK2 RNA guide
aaagauugcugacuacggcacu

SEQ ID NO: 23549 - RNA, 22 nt, Artificial Sequence
  LRRK2 RNA guide
aagauugcugacuacggcacug

SEQ ID NO: 23550 - RNA, 22 nt, Artificial Sequence
  LRRK2 RNA guide
acagcaguacugagcagugccg

SEQ ID NO: 23551 - RNA, 22 nt, Artificial Sequence
  LRRK2 RNA guide
acggcacugcucaguacugcug

SEQ ID NO: 23552 - RNA, 22 nt, Artificial Sequence
  LRRK2 RNA guide
acuacggcacugcucaguacug

SEQ ID NO: 23553 - RNA, 22 nt, Artificial Sequence
  LRRK2 RNA guide
acugagcagugccguagucagc

SEQ ID NO: 23554 - RNA, 22 nt, Artificial Sequence
  LRRK2 RNA guide
acugcucaguacugcuguagaa

SEQ ID NO: 23555 - RNA, 22 nt, Artificial Sequence
  LRRK2 RNA guide
agauugcugacuacggcacugc

SEQ ID NO: 23556 - RNA, 22 nt, Artificial Sequence
  LRRK2 RNA guide
agcaguacugagcagugccgua

SEQ ID NO: 23557 - RNA, 22 nt, Artificial Sequence
  LRRK2 RNA guide
agcagugccguagucagcaauc

SEQ ID NO: 23558 - RNA, 22 nt, Artificial Sequence
  LRRK2 RNA guide
aguacugagcagugccguaguc

SEQ ID NO: 23559 - RNA, 22 nt, Artificial Sequence
  LRRK2 RNA guide
agugccguagucagcaaucuuu

SEQ ID NO: 23560 - RNA, 22 nt, Artificial Sequence
  LRRK2 RNA guide
auucuacagcaguacugagcag

SEQ ID NO: 23561 - RNA, 22 nt, Artificial Sequence
  LRRK2 RNA guide
auugcaaagauugcugacuacg

SEQ ID NO: 23562 - RNA, 22 nt, Artificial Sequence
  LRRK2 RNA guide
auugcugacuacggcacugcuc

SEQ ID NO: 23563 - RNA, 22 nt, Artificial Sequence
  LRRK2 RNA guide
caaagauugcugacuacggcac

SEQ ID NO: 23564 - RNA, 22 nt, Artificial Sequence
  LRRK2 RNA guide
cacugcucaguacugcuguaga

SEQ ID NO: 23565 - RNA, 22 nt, Artificial Sequence
  LRRK2 RNA guide
cagcaguacugagcagugccgu

SEQ ID NO: 23566 - RNA, 22 nt, Artificial Sequence
  LRRK2 RNA guide
caguacugagcagugccguagu

SEQ ID NO: 23567 - RNA, 22 nt, Artificial Sequence
  LRRK2 RNA guide
cagugccguagucagcaaucuu

SEQ ID NO: 23568 - RNA, 22 nt, Artificial Sequence
  LRRK2 RNA guide
ccauucuacagcaguacugagc

SEQ ID NO: 23569 - RNA, 22 nt, Artificial Sequence
  LRRK2 RNA guide
cccauucuacagcaguacugag

SEQ ID NO: 23570 - RNA, 22 nt, Artificial Sequence
  LRRK2 RNA guide
ccccauucuacagcaguacuga

SEQ ID NO: 23571 - RNA, 22 nt, Artificial Sequence
  LRRK2 RNA guide
cggcacugcucaguacugcugu

SEQ ID NO: 23572 - RNA, 22 nt, Artificial Sequence
  LRRK2 RNA guide
cuacagcaguacugagcagugc

SEQ ID NO: 23573 - RNA, 22 nt, Artificial Sequence
  LRRK2 RNA guide
cuacggcacugcucaguacugc

SEQ ID NO: 23574 - RNA, 22 nt, Artificial Sequence
  LRRK2 RNA guide
cugacuacggcacugcucagua

SEQ ID NO: 23575 - RNA, 22 nt, Artificial Sequence
  LRRK2 RNA guide
cugagcagugccguagucagca

SEQ ID NO: 23576 - RNA, 22 nt, Artificial Sequence
  LRRK2 RNA guide
gacuacggcacugcucaguacu

SEQ ID NO: 23577 - RNA, 22 nt, Artificial Sequence
  LRRK2 RNA guide
gagcagugccguagucagcaau

SEQ ID NO: 23578 - RNA, 22 nt, Artificial Sequence
  LRRK2 RNA guide
gauugcugacuacggcacugcu

SEQ ID NO: 23579 - RNA, 22 nt, Artificial Sequence
  LRRK2 RNA guide
gcaaagauugcugacuacggca

SEQ ID NO: 23580 - RNA, 22 nt, Artificial Sequence
  LRRK2 RNA guide
gcacugcucaguacugcuguag

SEQ ID NO: 23581 - RNA, 22 nt, Artificial Sequence
  LRRK2 RNA guide
gcaguacugagcagugccguag

SEQ ID NO: 23582 - RNA, 22 nt, Artificial Sequence
  LRRK2 RNA guide
gcagugccguagucagcaaucu

SEQ ID NO: 23583 - RNA, 22 nt, Artificial Sequence
  LRRK2 RNA guide
gcugacuacggcacugcucagu

SEQ ID NO: 23584 - RNA, 22 nt, Artificial Sequence
  LRRK2 RNA guide
ggcacugcucaguacugcugua

SEQ ID NO: 23585 - RNA, 22 nt, Artificial Sequence
  LRRK2 RNA guide
guacugagcagugccguaguca

SEQ ID NO: 23586 - RNA, 22 nt, Artificial Sequence
  LRRK2 RNA guide
uacagcaguacugagcagugcc

SEQ ID NO: 23587 - RNA, 22 nt, Artificial Sequence
  LRRK2 RNA guide
uacggcacugcucaguacugcu

SEQ ID NO: 23588 - RNA, 22 nt, Artificial Sequence
  LRRK2 RNA guide
uacugagcagugccguagucag

SEQ ID NO: 23589 - RNA, 22 nt, Artificial Sequence
  LRRK2 RNA guide
uccccauucuacagcaguacug

SEQ ID NO: 23590 - RNA, 22 nt, Artificial Sequence
  LRRK2 RNA guide
ucuacagcaguacugagcagug

SEQ ID NO: 23591 - RNA, 22 nt, Artificial Sequence
  LRRK2 RNA guide
ugacuacggcacugcucaguac

SEQ ID NO: 23592 - RNA, 22 nt, Artificial Sequence
  LRRK2 RNA guide
ugagcagugccguagucagcaa

SEQ ID NO: 23593 - RNA, 22 nt, Artificial Sequence
  LRRK2 RNA guide
ugcaaagauugcugacuacggc

SEQ ID NO: 23594 - RNA, 22 nt, Artificial Sequence
  LRRK2 RNA guide
ugcugacuacggcacugcucag

SEQ ID NO: 23595 - RNA, 22 nt, Artificial Sequence
  LRRK2 RNA guide
uucuacagcaguacugagcagu

SEQ ID NO: 23596 - RNA, 22 nt, Artificial Sequence
  LRRK2 RNA guide
uugcaaagauugcugacuacgg

SEQ ID NO: 23597 - RNA, 22 nt, Artificial Sequence
  LRRK2 RNA guide
uugcugacuacggcacugcuca

SEQ ID NO: 23598 - RNA, 20 nt, Artificial Sequence
  LRRK2 RNA guide
aauggggaugaaaacaucag

SEQ ID NO: 23599 - RNA, 20 nt, Artificial Sequence
  LRRK2 RNA guide
accuggugugcccucugaug

SEQ ID NO: 23600 - RNA, 20 nt, Artificial Sequence
  LRRK2 RNA guide
acugcuguagaauggggaug

SEQ ID NO: 23601 - RNA, 20 nt, Artificial Sequence
  LRRK2 RNA guide
agaauggggaugaaaacauc

SEQ ID NO: 23602 - RNA, 20 nt, Artificial Sequence
  LRRK2 RNA guide
aguacugcuguagaaugggg

SEQ ID NO: 23603 - RNA, 20 nt, Artificial Sequence
  LRRK2 RNA guide
augaaaacaucagagggcac

SEQ ID NO: 23604 - RNA, 20 nt, Artificial Sequence
  LRRK2 RNA guide
auggggaugaaaacaucaga

SEQ ID NO: 23605 - RNA, 20 nt, Artificial Sequence
  LRRK2 RNA guide
auguuuucauccccauucua

SEQ ID NO: 23606 - RNA, 20 nt, Artificial Sequence
  LRRK2 RNA guide
caguacugcuguagaauggg

SEQ ID NO: 23607 - RNA, 20 nt, Artificial Sequence
  LRRK2 RNA guide
cccucugauguuuucauccc

SEQ ID NO: 23608 - RNA, 20 nt, Artificial Sequence
  LRRK2 RNA guide
ccucugauguuuucaucccc

SEQ ID NO: 23609 - RNA, 20 nt, Artificial Sequence
  LRRK2 RNA guide
ccuggugugcccucugaugu

SEQ ID NO: 23610 - RNA, 20 nt, Artificial Sequence
  LRRK2 RNA guide
cucugauguuuucaucccca

SEQ ID NO: 23611 - RNA, 20 nt, Artificial Sequence
  LRRK2 RNA guide
cugauguuuucauccccauu

SEQ ID NO: 23612 - RNA, 20 nt, Artificial Sequence
  LRRK2 RNA guide
cugcuguagaauggggauga

SEQ ID NO: 23613 - RNA, 20 nt, Artificial Sequence
  LRRK2 RNA guide
cuguagaauggggaugaaaa

SEQ ID NO: 23614 - RNA, 20 nt, Artificial Sequence
  LRRK2 RNA guide
gaauggggaugaaaacauca

SEQ ID NO: 23615 - RNA, 20 nt, Artificial Sequence
  LRRK2 RNA guide
gaugaaaacaucagagggca

SEQ ID NO: 23616 - RNA, 20 nt, Artificial Sequence
  LRRK2 RNA guide
gauguuuucauccccauucu

SEQ ID NO: 23617 - RNA, 20 nt, Artificial Sequence
  LRRK2 RNA guide
gcccucugauguuuucaucc

SEQ ID NO: 23618 - RNA, 20 nt, Artificial Sequence
  LRRK2 RNA guide
gcuguagaauggggaugaaa

SEQ ID NO: 23619 - RNA, 20 nt, Artificial Sequence
  LRRK2 RNA guide
ggaugaaaacaucagagggc

SEQ ID NO: 23620 - RNA, 20 nt, Artificial Sequence
  LRRK2 RNA guide
gggaugaaaacaucagaggg

SEQ ID NO: 23621 - RNA, 20 nt, Artificial Sequence
  LRRK2 RNA guide
ggggaugaaaacaucagagg

SEQ ID NO: 23622 - RNA, 20 nt, Artificial Sequence
  LRRK2 RNA guide
ggugugcccucugauguuuu

SEQ ID NO: 23623 - RNA, 20 nt, Artificial Sequence
  LRRK2 RNA guide
guacugcuguagaaugggga

SEQ ID NO: 23624 - RNA, 20 nt, Artificial Sequence
  LRRK2 RNA guide
guagaauggggaugaaaaca

SEQ ID NO: 23625 - RNA, 20 nt, Artificial Sequence
  LRRK2 RNA guide
gugcccucugauguuuucau

SEQ ID NO: 23626 - RNA, 20 nt, Artificial Sequence
  LRRK2 RNA guide
gugugcccucugauguuuuc

SEQ ID NO: 23627 - RNA, 20 nt, Artificial Sequence
  LRRK2 RNA guide
guuuucauccccauucuaca

SEQ ID NO: 23628 - RNA, 20 nt, Artificial Sequence
  LRRK2 RNA guide
uacugcuguagaauggggau

SEQ ID NO: 23629 - RNA, 20 nt, Artificial Sequence
  LRRK2 RNA guide
uagaauggggaugaaaacau

SEQ ID NO: 23630 - RNA, 20 nt, Artificial Sequence
  LRRK2 RNA guide
ucaguacugcuguagaaugg

SEQ ID NO: 23631 - RNA, 20 nt, Artificial Sequence
  LRRK2 RNA guide
ucauccccauucuacagcag

SEQ ID NO: 23632 - RNA, 20 nt, Artificial Sequence
  LRRK2 RNA guide
ucugauguuuucauccccau

SEQ ID NO: 23633 - RNA, 20 nt, Artificial Sequence
  LRRK2 RNA guide
ugaaaacaucagagggcaca

SEQ ID NO: 23634 - RNA, 20 nt, Artificial Sequence
  LRRK2 RNA guide
ugauguuuucauccccauuc

SEQ ID NO: 23635 - RNA, 20 nt, Artificial Sequence
  LRRK2 RNA guide
ugcccucugauguuuucauc

SEQ ID NO: 23636 - RNA, 20 nt, Artificial Sequence
  LRRK2 RNA guide
ugcuguagaauggggaugaa

SEQ ID NO: 23637 - RNA, 20 nt, Artificial Sequence
  LRRK2 RNA guide
uggggaugaaaacaucagag

SEQ ID NO: 23638 - RNA, 20 nt, Artificial Sequence
  LRRK2 RNA guide
uggugugcccucugauguuu

SEQ ID NO: 23639 - RNA, 20 nt, Artificial Sequence
  LRRK2 RNA guide
uguagaauggggaugaaaac

SEQ ID NO: 23640 - RNA, 20 nt, Artificial Sequence
  LRRK2 RNA guide
ugugcccucugauguuuuca

SEQ ID NO: 23641 - RNA, 20 nt, Artificial Sequence
  LRRK2 RNA guide
uguuuucauccccauucuac

SEQ ID NO: 23642 - RNA, 20 nt, Artificial Sequence
  LRRK2 RNA guide
uucauccccauucuacagca

SEQ ID NO: 23643 - RNA, 20 nt, Artificial Sequence
  LRRK2 RNA guide
uuucauccccauucuacagc

SEQ ID NO: 23644 - RNA, 20 nt, Artificial Sequence
  LRRK2 RNA guide
uuuucauccccauucuacag

SEQ ID NO: 23645 - RNA, 21 nt, Artificial Sequence
  LRRK2 RNA guide
aauggggaugaaaacaucaga

SEQ ID NO: 23646 - RNA, 21 nt, Artificial Sequence
  LRRK2 RNA guide
accuggugugcccucugaugu

SEQ ID NO: 23647 - RNA, 21 nt, Artificial Sequence
  LRRK2 RNA guide
acugcuguagaauggggauga

SEQ ID NO: 23648 - RNA, 21 nt, Artificial Sequence
  LRRK2 RNA guide
agaauggggaugaaaacauca

SEQ ID NO: 23649 - RNA, 21 nt, Artificial Sequence
  LRRK2 RNA guide
aguacugcuguagaaugggga

SEQ ID NO: 23650 - RNA, 21 nt, Artificial Sequence
  LRRK2 RNA guide
augaaaacaucagagggcaca

SEQ ID NO: 23651 - RNA, 21 nt, Artificial Sequence
  LRRK2 RNA guide
auggggaugaaaacaucagag

SEQ ID NO: 23652 - RNA, 21 nt, Artificial Sequence
  LRRK2 RNA guide
auguuuucauccccauucuac

SEQ ID NO: 23653 - RNA, 21 nt, Artificial Sequence
  LRRK2 RNA guide
caguacugcuguagaaugggg

SEQ ID NO: 23654 - RNA, 21 nt, Artificial Sequence
  LRRK2 RNA guide
cccucugauguuuucaucccc

SEQ ID NO: 23655 - RNA, 21 nt, Artificial Sequence
  LRRK2 RNA guide
ccucugauguuuucaucccca

SEQ ID NO: 23656 - RNA, 21 nt, Artificial Sequence
  LRRK2 RNA guide
ccuggugugcccucugauguu

SEQ ID NO: 23657 - RNA, 21 nt, Artificial Sequence
  LRRK2 RNA guide
cucaguacugcuguagaaugg

SEQ ID NO: 23658 - RNA, 21 nt, Artificial Sequence
  LRRK2 RNA guide
cucugauguuuucauccccau

SEQ ID NO: 23659 - RNA, 21 nt, Artificial Sequence
  LRRK2 RNA guide
cugauguuuucauccccauuc

SEQ ID NO: 23660 - RNA, 21 nt, Artificial Sequence
  LRRK2 RNA guide
cugcuguagaauggggaugaa

SEQ ID NO: 23661 - RNA, 21 nt, Artificial Sequence
  LRRK2 RNA guide
cuggugugcccucugauguuu

SEQ ID NO: 23662 - RNA, 21 nt, Artificial Sequence
  LRRK2 RNA guide
cuguagaauggggaugaaaac

SEQ ID NO: 23663 - RNA, 21 nt, Artificial Sequence
  LRRK2 RNA guide
gaauggggaugaaaacaucag

SEQ ID NO: 23664 - RNA, 21 nt, Artificial Sequence
  LRRK2 RNA guide
gaugaaaacaucagagggcac

SEQ ID NO: 23665 - RNA, 21 nt, Artificial Sequence
  LRRK2 RNA guide
gauguuuucauccccauucua

SEQ ID NO: 23666 - RNA, 21 nt, Artificial Sequence
  LRRK2 RNA guide
gcccucugauguuuucauccc

SEQ ID NO: 23667 - RNA, 21 nt, Artificial Sequence
  LRRK2 RNA guide
gcuguagaauggggaugaaaa

SEQ ID NO: 23668 - RNA, 21 nt, Artificial Sequence
  LRRK2 RNA guide
ggaugaaaacaucagagggca

SEQ ID NO: 23669 - RNA, 21 nt, Artificial Sequence
  LRRK2 RNA guide
gggaugaaaacaucagagggc

SEQ ID NO: 23670 - RNA, 21 nt, Artificial Sequence
  LRRK2 RNA guide
ggggaugaaaacaucagaggg

SEQ ID NO: 23671 - RNA, 21 nt, Artificial Sequence
  LRRK2 RNA guide
ggugugcccucugauguuuuc

SEQ ID NO: 23672 - RNA, 21 nt, Artificial Sequence
  LRRK2 RNA guide
guacugcuguagaauggggau

SEQ ID NO: 23673 - RNA, 21 nt, Artificial Sequence
  LRRK2 RNA guide
guagaauggggaugaaaacau

SEQ ID NO: 23674 - RNA, 21 nt, Artificial Sequence
  LRRK2 RNA guide
gugcccucugauguuuucauc

SEQ ID NO: 23675 - RNA, 21 nt, Artificial Sequence
  LRRK2 RNA guide
gugugcccucugauguuuuca

SEQ ID NO: 23676 - RNA, 21 nt, Artificial Sequence
  LRRK2 RNA guide
guuuucauccccauucuacag

SEQ ID NO: 23677 - RNA, 21 nt, Artificial Sequence
  LRRK2 RNA guide
uaccuggugugcccucugaug

SEQ ID NO: 23678 - RNA, 21 nt, Artificial Sequence
  LRRK2 RNA guide
uacugcuguagaauggggaug

SEQ ID NO: 23679 - RNA, 21 nt, Artificial Sequence
  LRRK2 RNA guide
uagaauggggaugaaaacauc

SEQ ID NO: 23680 - RNA, 21 nt, Artificial Sequence
  LRRK2 RNA guide
ucaguacugcuguagaauggg

SEQ ID NO: 23681 - RNA, 21 nt, Artificial Sequence
  LRRK2 RNA guide
ucauccccauucuacagcagu

SEQ ID NO: 23682 - RNA, 21 nt, Artificial Sequence
  LRRK2 RNA guide
ucugauguuuucauccccauu

SEQ ID NO: 23683 - RNA, 21 nt, Artificial Sequence
  LRRK2 RNA guide
ugaaaacaucagagggcacac

SEQ ID NO: 23684 - RNA, 21 nt, Artificial Sequence
  LRRK2 RNA guide
ugauguuuucauccccauucu

SEQ ID NO: 23685 - RNA, 21 nt, Artificial Sequence
  LRRK2 RNA guide
ugcccucugauguuuucaucc

SEQ ID NO: 23686 - RNA, 21 nt, Artificial Sequence
  LRRK2 RNA guide
ugcuguagaauggggaugaaa

SEQ ID NO: 23687 - RNA, 21 nt, Artificial Sequence
  LRRK2 RNA guide
uggggaugaaaacaucagagg

SEQ ID NO: 23688 - RNA, 21 nt, Artificial Sequence
  LRRK2 RNA guide
uggugugcccucugauguuuu

SEQ ID NO: 23689 - RNA, 21 nt, Artificial Sequence
  LRRK2 RNA guide
uguagaauggggaugaaaaca

SEQ ID NO: 23690 - RNA, 21 nt, Artificial Sequence
  LRRK2 RNA guide
ugugcccucugauguuuucau

SEQ ID NO: 23691 - RNA, 21 nt, Artificial Sequence
  LRRK2 RNA guide
uguuuucauccccauucuaca

SEQ ID NO: 23692 - RNA, 21 nt, Artificial Sequence
  LRRK2 RNA guide
uucauccccauucuacagcag

SEQ ID NO: 23693 - RNA, 21 nt, Artificial Sequence
  LRRK2 RNA guide
uuucauccccauucuacagca

SEQ ID NO: 23694 - RNA, 21 nt, Artificial Sequence
  LRRK2 RNA guide
uuuucauccccauucuacagc

SEQ ID NO: 23695 - RNA, 22 nt, Artificial Sequence
  LRRK2 RNA guide
aauggggaugaaaacaucagag

SEQ ID NO: 23696 - RNA, 22 nt, Artificial Sequence
  LRRK2 RNA guide
accuggugugcccucugauguu

SEQ ID NO: 23697 - RNA, 22 nt, Artificial Sequence
  LRRK2 RNA guide
acugcuguagaauggggaugaa

SEQ ID NO: 23698 - RNA, 22 nt, Artificial Sequence
  LRRK2 RNA guide
agaauggggaugaaaacaucag

SEQ ID NO: 23699 - RNA, 22 nt, Artificial Sequence
  LRRK2 RNA guide
aguacugcuguagaauggggau

SEQ ID NO: 23700 - RNA, 22 nt, Artificial Sequence
  LRRK2 RNA guide
augaaaacaucagagggcacac

SEQ ID NO: 23701 - RNA, 22 nt, Artificial Sequence
  LRRK2 RNA guide
auggggaugaaaacaucagagg

SEQ ID NO: 23702 - RNA, 22 nt, Artificial Sequence
  LRRK2 RNA guide
auguuuucauccccauucuaca

SEQ ID NO: 23703 - RNA, 22 nt, Artificial Sequence
  LRRK2 RNA guide
caguacugcuguagaaugggga

SEQ ID NO: 23704 - RNA, 22 nt, Artificial Sequence
  LRRK2 RNA guide
cccucugauguuuucaucccca

SEQ ID NO: 23705 - RNA, 22 nt, Artificial Sequence
  LRRK2 RNA guide
ccucugauguuuucauccccau

SEQ ID NO: 23706 - RNA, 22 nt, Artificial Sequence
  LRRK2 RNA guide
ccuggugugcccucugauguuu

SEQ ID NO: 23707 - RNA, 22 nt, Artificial Sequence
  LRRK2 RNA guide
cuaccuggugugcccucugaug

SEQ ID NO: 23708 - RNA, 22 nt, Artificial Sequence
  LRRK2 RNA guide
cucaguacugcuguagaauggg

SEQ ID NO: 23709 - RNA, 22 nt, Artificial Sequence
  LRRK2 RNA guide
cucugauguuuucauccccauu

SEQ ID NO: 23710 - RNA, 22 nt, Artificial Sequence
  LRRK2 RNA guide
cugauguuuucauccccauucu

SEQ ID NO: 23711 - RNA, 22 nt, Artificial Sequence
  LRRK2 RNA guide
cugcuguagaauggggaugaaa

SEQ ID NO: 23712 - RNA, 22 nt, Artificial Sequence
  LRRK2 RNA guide
cuggugugcccucugauguuuu

SEQ ID NO: 23713 - RNA, 22 nt, Artificial Sequence
  LRRK2 RNA guide
cuguagaauggggaugaaaaca

SEQ ID NO: 23714 - RNA, 22 nt, Artificial Sequence
  LRRK2 RNA guide
gaauggggaugaaaacaucaga

SEQ ID NO: 23715 - RNA, 22 nt, Artificial Sequence
  LRRK2 RNA guide
gaugaaaacaucagagggcaca

SEQ ID NO: 23716 - RNA, 22 nt, Artificial Sequence
  LRRK2 RNA guide
gauguuuucauccccauucuac

SEQ ID NO: 23717 - RNA, 22 nt, Artificial Sequence
  LRRK2 RNA guide
gcccucugauguuuucaucccc

SEQ ID NO: 23718 - RNA, 22 nt, Artificial Sequence
  LRRK2 RNA guide
gcucaguacugcuguagaaugg

SEQ ID NO: 23719 - RNA, 22 nt, Artificial Sequence
  LRRK2 RNA guide
gcuguagaauggggaugaaaac

SEQ ID NO: 23720 - RNA, 22 nt, Artificial Sequence
  LRRK2 RNA guide
ggaugaaaacaucagagggcac

SEQ ID NO: 23721 - RNA, 22 nt, Artificial Sequence
  LRRK2 RNA guide
gggaugaaaacaucagagggca

SEQ ID NO: 23722 - RNA, 22 nt, Artificial Sequence
  LRRK2 RNA guide
ggggaugaaaacaucagagggc

SEQ ID NO: 23723 - RNA, 22 nt, Artificial Sequence
  LRRK2 RNA guide
ggugugcccucugauguuuuca

SEQ ID NO: 23724 - RNA, 22 nt, Artificial Sequence
  LRRK2 RNA guide
guacugcuguagaauggggaug

SEQ ID NO: 23725 - RNA, 22 nt, Artificial Sequence
  LRRK2 RNA guide
guagaauggggaugaaaacauc

SEQ ID NO: 23726 - RNA, 22 nt, Artificial Sequence
  LRRK2 RNA guide
gugcccucugauguuuucaucc

SEQ ID NO: 23727 - RNA, 22 nt, Artificial Sequence
  LRRK2 RNA guide
gugugcccucugauguuuucau

SEQ ID NO: 23728 - RNA, 22 nt, Artificial Sequence
  LRRK2 RNA guide
guuuucauccccauucuacagc

SEQ ID NO: 23729 - RNA, 22 nt, Artificial Sequence
  LRRK2 RNA guide
uaccuggugugcccucugaugu

SEQ ID NO: 23730 - RNA, 22 nt, Artificial Sequence
  LRRK2 RNA guide
uacugcuguagaauggggauga

SEQ ID NO: 23731 - RNA, 22 nt, Artificial Sequence
  LRRK2 RNA guide
uagaauggggaugaaaacauca

SEQ ID NO: 23732 - RNA, 22 nt, Artificial Sequence
  LRRK2 RNA guide
ucaguacugcuguagaaugggg

SEQ ID NO: 23733 - RNA, 22 nt, Artificial Sequence
  LRRK2 RNA guide
ucauccccauucuacagcagua

SEQ ID NO: 23734 - RNA, 22 nt, Artificial Sequence
  LRRK2 RNA guide
ucugauguuuucauccccauuc

SEQ ID NO: 23735 - RNA, 22 nt, Artificial Sequence
  LRRK2 RNA guide
ugaaaacaucagagggcacacc

SEQ ID NO: 23736 - RNA, 22 nt, Artificial Sequence
  LRRK2 RNA guide
ugauguuuucauccccauucua

SEQ ID NO: 23737 - RNA, 22 nt, Artificial Sequence
  LRRK2 RNA guide
ugcccucugauguuuucauccc

SEQ ID NO: 23738 - RNA, 22 nt, Artificial Sequence
  LRRK2 RNA guide
ugcuguagaauggggaugaaaa

SEQ ID NO: 23739 - RNA, 22 nt, Artificial Sequence
  LRRK2 RNA guide
uggggaugaaaacaucagaggg

SEQ ID NO: 23740 - RNA, 22 nt, Artificial Sequence
  LRRK2 RNA guide
uggugugcccucugauguuuuc

SEQ ID NO: 23741 - RNA, 22 nt, Artificial Sequence
  LRRK2 RNA guide
uguagaauggggaugaaaacau

SEQ ID NO: 23742 - RNA, 22 nt, Artificial Sequence
  LRRK2 RNA guide
ugugcccucugauguuuucauc

SEQ ID NO: 23743 - RNA, 22 nt, Artificial Sequence
  LRRK2 RNA guide
uguuuucauccccauucuacag

SEQ ID NO: 23744 - RNA, 22 nt, Artificial Sequence
  LRRK2 RNA guide
uucauccccauucuacagcagu

SEQ ID NO: 23745 - RNA, 22 nt, Artificial Sequence
  LRRK2 RNA guide
uuucauccccauucuacagcag

SEQ ID NO: 23746 - RNA, 22 nt, Artificial Sequence
  LRRK2 RNA guide
uuuucauccccauucuacagca

SEQ ID NO: 23747 - RNA, 20 nt, Artificial Sequence
  LRRK2 RNA guide
aaaaucaucagagggcacac

SEQ ID NO: 23748 - RNA, 20 nt, Artificial Sequence
  LRRK2 RNA guide
aaaucaucagagggcacacc

SEQ ID NO: 23749 - RNA, 20 nt, Artificial Sequence
  LRRK2 RNA guide
aaucaucagagggcacacca

SEQ ID NO: 23750 - RNA, 20 nt, Artificial Sequence
  LRRK2 RNA guide
aauggggauaaaaucaucag

SEQ ID NO: 23751 - RNA, 20 nt, Artificial Sequence
  LRRK2 RNA guide
accuaccuggugugcccucu

SEQ ID NO: 23752 - RNA, 20 nt, Artificial Sequence
  LRRK2 RNA guide
acugcuguagaauggggaua

SEQ ID NO: 23753 - RNA, 20 nt, Artificial Sequence
  LRRK2 RNA guide
agaauggggauaaaaucauc

SEQ ID NO: 23754 - RNA, 20 nt, Artificial Sequence
  LRRK2 RNA guide
auaaaaucaucagagggcac

SEQ ID NO: 23755 - RNA, 20 nt, Artificial Sequence
  LRRK2 RNA guide
aucaucagagggcacaccag

SEQ ID NO: 23756 - RNA, 20 nt, Artificial Sequence
  LRRK2 RNA guide
augauuuuauccccauucua

SEQ ID NO: 23757 - RNA, 20 nt, Artificial Sequence
  LRRK2 RNA guide
auggggauaaaaucaucaga

SEQ ID NO: 23758 - RNA, 20 nt, Artificial Sequence
  LRRK2 RNA guide
cccucugaugauuuuauccc

SEQ ID NO: 23759 - RNA, 20 nt, Artificial Sequence
  LRRK2 RNA guide
ccuaccuggugugcccucug

SEQ ID NO: 23760 - RNA, 20 nt, Artificial Sequence
  LRRK2 RNA guide
ccucugaugauuuuaucccc

SEQ ID NO: 23761 - RNA, 20 nt, Artificial Sequence
  LRRK2 RNA guide
ccuggugugcccucugauga

SEQ ID NO: 23762 - RNA, 20 nt, Artificial Sequence
  LRRK2 RNA guide
cuaccuggugugcccucuga

SEQ ID NO: 23763 - RNA, 20 nt, Artificial Sequence
  LRRK2 RNA guide
cucugaugauuuuaucccca

SEQ ID NO: 23764 - RNA, 20 nt, Artificial Sequence
  LRRK2 RNA guide
cugaugauuuuauccccauu

SEQ ID NO: 23765 - RNA, 20 nt, Artificial Sequence
  LRRK2 RNA guide
cugcuguagaauggggauaa

SEQ ID NO: 23766 - RNA, 20 nt, Artificial Sequence
  LRRK2 RNA guide
cuggugugcccucugaugau

SEQ ID NO: 23767 - RNA, 20 nt, Artificial Sequence
  LRRK2 RNA guide
cuguagaauggggauaaaau

SEQ ID NO: 23768 - RNA, 20 nt, Artificial Sequence
  LRRK2 RNA guide
gaauggggauaaaaucauca

SEQ ID NO: 23769 - RNA, 20 nt, Artificial Sequence
  LRRK2 RNA guide
gauaaaaucaucagagggca

SEQ ID NO: 23770 - RNA, 20 nt, Artificial Sequence
  LRRK2 RNA guide
gaugauuuuauccccauucu

SEQ ID NO: 23771 - RNA, 20 nt, Artificial Sequence
  LRRK2 RNA guide
gauuuuauccccauucuaca

SEQ ID NO: 23772 - RNA, 20 nt, Artificial Sequence
  LRRK2 RNA guide
gcccucugaugauuuuaucc

SEQ ID NO: 23773 - RNA, 20 nt, Artificial Sequence
  LRRK2 RNA guide
gcuguagaauggggauaaaa

SEQ ID NO: 23774 - RNA, 20 nt, Artificial Sequence
  LRRK2 RNA guide
ggauaaaaucaucagagggc

SEQ ID NO: 23775 - RNA, 20 nt, Artificial Sequence
  LRRK2 RNA guide
gggauaaaaucaucagaggg

SEQ ID NO: 23776 - RNA, 20 nt, Artificial Sequence
  LRRK2 RNA guide
ggggauaaaaucaucagagg

SEQ ID NO: 23777 - RNA, 20 nt, Artificial Sequence
  LRRK2 RNA guide
ggugugcccucugaugauuu

SEQ ID NO: 23778 - RNA, 20 nt, Artificial Sequence
  LRRK2 RNA guide
guagaauggggauaaaauca

SEQ ID NO: 23779 - RNA, 20 nt, Artificial Sequence
  LRRK2 RNA guide
gugcccucugaugauuuuau

SEQ ID NO: 23780 - RNA, 20 nt, Artificial Sequence
  LRRK2 RNA guide
gugugcccucugaugauuuu

SEQ ID NO: 23781 - RNA, 20 nt, Artificial Sequence
  LRRK2 RNA guide
uaaaaucaucagagggcaca

SEQ ID NO: 23782 - RNA, 20 nt, Artificial Sequence
  LRRK2 RNA guide
uaccuggugugcccucugau

SEQ ID NO: 23783 - RNA, 20 nt, Artificial Sequence
  LRRK2 RNA guide
uagaauggggauaaaaucau

SEQ ID NO: 23784 - RNA, 20 nt, Artificial Sequence
  LRRK2 RNA guide
ucugaugauuuuauccccau

SEQ ID NO: 23785 - RNA, 20 nt, Artificial Sequence
  LRRK2 RNA guide
ugaugauuuuauccccauuc

SEQ ID NO: 23786 - RNA, 20 nt, Artificial Sequence
  LRRK2 RNA guide
ugauuuuauccccauucuac

SEQ ID NO: 23787 - RNA, 20 nt, Artificial Sequence
  LRRK2 RNA guide
ugcccucugaugauuuuauc

SEQ ID NO: 23788 - RNA, 20 nt, Artificial Sequence
  LRRK2 RNA guide
ugcuguagaauggggauaaa

SEQ ID NO: 23789 - RNA, 20 nt, Artificial Sequence
  LRRK2 RNA guide
uggggauaaaaucaucagag

SEQ ID NO: 23790 - RNA, 20 nt, Artificial Sequence
  LRRK2 RNA guide
uggugugcccucugaugauu

SEQ ID NO: 23791 - RNA, 20 nt, Artificial Sequence
  LRRK2 RNA guide
uguagaauggggauaaaauc

SEQ ID NO: 23792 - RNA, 20 nt, Artificial Sequence
  LRRK2 RNA guide
ugugcccucugaugauuuua

SEQ ID NO: 23793 - RNA, 21 nt, Artificial Sequence
  LRRK2 RNA guide
aaaaucaucagagggcacacc

SEQ ID NO: 23794 - RNA, 21 nt, Artificial Sequence
  LRRK2 RNA guide
aaaucaucagagggcacacca

SEQ ID NO: 23795 - RNA, 21 nt, Artificial Sequence
  LRRK2 RNA guide
aaucaucagagggcacaccag

SEQ ID NO: 23796 - RNA, 21 nt, Artificial Sequence
  LRRK2 RNA guide
aauggggauaaaaucaucaga

SEQ ID NO: 23797 - RNA, 21 nt, Artificial Sequence
  LRRK2 RNA guide
accuaccuggugugcccucug

SEQ ID NO: 23798 - RNA, 21 nt, Artificial Sequence
  LRRK2 RNA guide
accuggugugcccucugauga

SEQ ID NO: 23799 - RNA, 21 nt, Artificial Sequence
  LRRK2 RNA guide
acugcuguagaauggggauaa

SEQ ID NO: 23800 - RNA, 21 nt, Artificial Sequence
  LRRK2 RNA guide
agaauggggauaaaaucauca

SEQ ID NO: 23801 - RNA, 21 nt, Artificial Sequence
  LRRK2 RNA guide
auaaaaucaucagagggcaca

SEQ ID NO: 23802 - RNA, 21 nt, Artificial Sequence
  LRRK2 RNA guide
aucaucagagggcacaccagg

SEQ ID NO: 23803 - RNA, 21 nt, Artificial Sequence
  LRRK2 RNA guide
augauuuuauccccauucuac

SEQ ID NO: 23804 - RNA, 21 nt, Artificial Sequence
  LRRK2 RNA guide
auggggauaaaaucaucagag

SEQ ID NO: 23805 - RNA, 21 nt, Artificial Sequence
  LRRK2 RNA guide
caccuaccuggugugcccucu

SEQ ID NO: 23806 - RNA, 21 nt, Artificial Sequence
  LRRK2 RNA guide
cccucugaugauuuuaucccc

SEQ ID NO: 23807 - RNA, 21 nt, Artificial Sequence
  LRRK2 RNA guide
ccuaccuggugugcccucuga

SEQ ID NO: 23808 - RNA, 21 nt, Artificial Sequence
  LRRK2 RNA guide
ccucugaugauuuuaucccca

SEQ ID NO: 23809 - RNA, 21 nt, Artificial Sequence
  LRRK2 RNA guide
ccuggugugcccucugaugau

SEQ ID NO: 23810 - RNA, 21 nt, Artificial Sequence
  LRRK2 RNA guide
cuaccuggugugcccucugau

SEQ ID NO: 23811 - RNA, 21 nt, Artificial Sequence
  LRRK2 RNA guide
cucugaugauuuuauccccau

SEQ ID NO: 23812 - RNA, 21 nt, Artificial Sequence
  LRRK2 RNA guide
cugaugauuuuauccccauuc

SEQ ID NO: 23813 - RNA, 21 nt, Artificial Sequence
  LRRK2 RNA guide
cugcuguagaauggggauaaa

SEQ ID NO: 23814 - RNA, 21 nt, Artificial Sequence
  LRRK2 RNA guide
cuggugugcccucugaugauu

SEQ ID NO: 23815 - RNA, 21 nt, Artificial Sequence
  LRRK2 RNA guide
cuguagaauggggauaaaauc

SEQ ID NO: 23816 - RNA, 21 nt, Artificial Sequence
  LRRK2 RNA guide
gaauggggauaaaaucaucag

SEQ ID NO: 23817 - RNA, 21 nt, Artificial Sequence
  LRRK2 RNA guide
gauaaaaucaucagagggcac

SEQ ID NO: 23818 - RNA, 21 nt, Artificial Sequence
  LRRK2 RNA guide
gaugauuuuauccccauucua

SEQ ID NO: 23819 - RNA, 21 nt, Artificial Sequence
  LRRK2 RNA guide
gauuuuauccccauucuacag

SEQ ID NO: 23820 - RNA, 21 nt, Artificial Sequence
  LRRK2 RNA guide
gcccucugaugauuuuauccc

SEQ ID NO: 23821 - RNA, 21 nt, Artificial Sequence
  LRRK2 RNA guide
gcuguagaauggggauaaaau

SEQ ID NO: 23822 - RNA, 21 nt, Artificial Sequence
  LRRK2 RNA guide
ggauaaaaucaucagagggca

SEQ ID NO: 23823 - RNA, 21 nt, Artificial Sequence
  LRRK2 RNA guide
gggauaaaaucaucagagggc

SEQ ID NO: 23824 - RNA, 21 nt, Artificial Sequence
  LRRK2 RNA guide
ggggauaaaaucaucagaggg

SEQ ID NO: 23825 - RNA, 21 nt, Artificial Sequence
  LRRK2 RNA guide
ggugugcccucugaugauuuu

SEQ ID NO: 23826 - RNA, 21 nt, Artificial Sequence
  LRRK2 RNA guide
guagaauggggauaaaaucau

SEQ ID NO: 23827 - RNA, 21 nt, Artificial Sequence
  LRRK2 RNA guide
gugcccucugaugauuuuauc

SEQ ID NO: 23828 - RNA, 21 nt, Artificial Sequence
  LRRK2 RNA guide
gugugcccucugaugauuuua

SEQ ID NO: 23829 - RNA, 21 nt, Artificial Sequence
  LRRK2 RNA guide
uaaaaucaucagagggcacac

SEQ ID NO: 23830 - RNA, 21 nt, Artificial Sequence
  LRRK2 RNA guide
uacugcuguagaauggggaua

SEQ ID NO: 23831 - RNA, 21 nt, Artificial Sequence
  LRRK2 RNA guide
uagaauggggauaaaaucauc

SEQ ID NO: 23832 - RNA, 21 nt, Artificial Sequence
  LRRK2 RNA guide
ucugaugauuuuauccccauu

SEQ ID NO: 23833 - RNA, 21 nt, Artificial Sequence
  LRRK2 RNA guide
ugaugauuuuauccccauucu

SEQ ID NO: 23834 - RNA, 21 nt, Artificial Sequence
  LRRK2 RNA guide
ugauuuuauccccauucuaca

SEQ ID NO: 23835 - RNA, 21 nt, Artificial Sequence
  LRRK2 RNA guide
ugcccucugaugauuuuaucc

SEQ ID NO: 23836 - RNA, 21 nt, Artificial Sequence
  LRRK2 RNA guide
ugcuguagaauggggauaaaa

SEQ ID NO: 23837 - RNA, 21 nt, Artificial Sequence
  LRRK2 RNA guide
uggggauaaaaucaucagagg

SEQ ID NO: 23838 - RNA, 21 nt, Artificial Sequence
  LRRK2 RNA guide
uggugugcccucugaugauuu

SEQ ID NO: 23839 - RNA, 21 nt, Artificial Sequence
  LRRK2 RNA guide
uguagaauggggauaaaauca

SEQ ID NO: 23840 - RNA, 21 nt, Artificial Sequence
  LRRK2 RNA guide
ugugcccucugaugauuuuau

SEQ ID NO: 23841 - RNA, 22 nt, Artificial Sequence
  LRRK2 RNA guide
aaaaucaucagagggcacacca

SEQ ID NO: 23842 - RNA, 22 nt, Artificial Sequence
  LRRK2 RNA guide
aaaucaucagagggcacaccag

SEQ ID NO: 23843 - RNA, 22 nt, Artificial Sequence
  LRRK2 RNA guide
aaucaucagagggcacaccagg

SEQ ID NO: 23844 - RNA, 22 nt, Artificial Sequence
  LRRK2 RNA guide
aauggggauaaaaucaucagag

SEQ ID NO: 23845 - RNA, 22 nt, Artificial Sequence
  LRRK2 RNA guide
accuaccuggugugcccucuga

SEQ ID NO: 23846 - RNA, 22 nt, Artificial Sequence
  LRRK2 RNA guide
accuggugugcccucugaugau

SEQ ID NO: 23847 - RNA, 22 nt, Artificial Sequence
  LRRK2 RNA guide
acugcuguagaauggggauaaa

SEQ ID NO: 23848 - RNA, 22 nt, Artificial Sequence
  LRRK2 RNA guide
agaauggggauaaaaucaucag

SEQ ID NO: 23849 - RNA, 22 nt, Artificial Sequence
  LRRK2 RNA guide
auaaaaucaucagagggcacac

SEQ ID NO: 23850 - RNA, 22 nt, Artificial Sequence
  LRRK2 RNA guide
aucaucagagggcacaccaggu

SEQ ID NO: 23851 - RNA, 22 nt, Artificial Sequence
  LRRK2 RNA guide
augauuuuauccccauucuaca

SEQ ID NO: 23852 - RNA, 22 nt, Artificial Sequence
  LRRK2 RNA guide
auggggauaaaaucaucagagg

SEQ ID NO: 23853 - RNA, 22 nt, Artificial Sequence
  LRRK2 RNA guide
caccuaccuggugugcccucug

SEQ ID NO: 23854 - RNA, 22 nt, Artificial Sequence
  LRRK2 RNA guide
cccucugaugauuuuaucccca

SEQ ID NO: 23855 - RNA, 22 nt, Artificial Sequence
  LRRK2 RNA guide
ccuaccuggugugcccucugau

SEQ ID NO: 23856 - RNA, 22 nt, Artificial Sequence
  LRRK2 RNA guide
ccucugaugauuuuauccccau

SEQ ID NO: 23857 - RNA, 22 nt, Artificial Sequence
  LRRK2 RNA guide
ccuggugugcccucugaugauu

SEQ ID NO: 23858 - RNA, 22 nt, Artificial Sequence
  LRRK2 RNA guide
cucugaugauuuuauccccauu

SEQ ID NO: 23859 - RNA, 22 nt, Artificial Sequence
  LRRK2 RNA guide
cugaugauuuuauccccauucu

SEQ ID NO: 23860 - RNA, 22 nt, Artificial Sequence
  LRRK2 RNA guide
cugcuguagaauggggauaaaa

SEQ ID NO: 23861 - RNA, 22 nt, Artificial Sequence
  LRRK2 RNA guide
cuggugugcccucugaugauuu

SEQ ID NO: 23862 - RNA, 22 nt, Artificial Sequence
  LRRK2 RNA guide
cuguagaauggggauaaaauca

SEQ ID NO: 23863 - RNA, 22 nt, Artificial Sequence
  LRRK2 RNA guide
gaauggggauaaaaucaucaga

SEQ ID NO: 23864 - RNA, 22 nt, Artificial Sequence
  LRRK2 RNA guide
gauaaaaucaucagagggcaca

SEQ ID NO: 23865 - RNA, 22 nt, Artificial Sequence
  LRRK2 RNA guide
gaugauuuuauccccauucuac

SEQ ID NO: 23866 - RNA, 22 nt, Artificial Sequence
  LRRK2 RNA guide
gauuuuauccccauucuacagc

SEQ ID NO: 23867 - RNA, 22 nt, Artificial Sequence
  LRRK2 RNA guide
gcccucugaugauuuuaucccc

SEQ ID NO: 23868 - RNA, 22 nt, Artificial Sequence
  LRRK2 RNA guide
gcuguagaauggggauaaaauc

SEQ ID NO: 23869 - RNA, 22 nt, Artificial Sequence
  LRRK2 RNA guide
ggauaaaaucaucagagggcac

SEQ ID NO: 23870 - RNA, 22 nt, Artificial Sequence
  LRRK2 RNA guide
gggauaaaaucaucagagggca

SEQ ID NO: 23871 - RNA, 22 nt, Artificial Sequence
  LRRK2 RNA guide
ggggauaaaaucaucagagggc

SEQ ID NO: 23872 - RNA, 22 nt, Artificial Sequence
  LRRK2 RNA guide
ggugugcccucugaugauuuua

SEQ ID NO: 23873 - RNA, 22 nt, Artificial Sequence
  LRRK2 RNA guide
guacugcuguagaauggggaua

SEQ ID NO: 23874 - RNA, 22 nt, Artificial Sequence
  LRRK2 RNA guide
guagaauggggauaaaaucauc

SEQ ID NO: 23875 - RNA, 22 nt, Artificial Sequence
  LRRK2 RNA guide
gugcccucugaugauuuuaucc

SEQ ID NO: 23876 - RNA, 22 nt, Artificial Sequence
  LRRK2 RNA guide
gugugcccucugaugauuuuau

SEQ ID NO: 23877 - RNA, 22 nt, Artificial Sequence
  LRRK2 RNA guide
uaaaaucaucagagggcacacc

SEQ ID NO: 23878 - RNA, 22 nt, Artificial Sequence
  LRRK2 RNA guide
uaccuggugugcccucugauga

SEQ ID NO: 23879 - RNA, 22 nt, Artificial Sequence
  LRRK2 RNA guide
uacugcuguagaauggggauaa

SEQ ID NO: 23880 - RNA, 22 nt, Artificial Sequence
  LRRK2 RNA guide
uagaauggggauaaaaucauca

SEQ ID NO: 23881 - RNA, 22 nt, Artificial Sequence
  LRRK2 RNA guide
ucaccuaccuggugugcccucu

SEQ ID NO: 23882 - RNA, 22 nt, Artificial Sequence
  LRRK2 RNA guide
ucugaugauuuuauccccauuc

SEQ ID NO: 23883 - RNA, 22 nt, Artificial Sequence
  LRRK2 RNA guide
ugaugauuuuauccccauucua

SEQ ID NO: 23884 - RNA, 22 nt, Artificial Sequence
  LRRK2 RNA guide
ugauuuuauccccauucuacag

SEQ ID NO: 23885 - RNA, 22 nt, Artificial Sequence
  LRRK2 RNA guide
ugcccucugaugauuuuauccc

SEQ ID NO: 23886 - RNA, 22 nt, Artificial Sequence
  LRRK2 RNA guide
ugcuguagaauggggauaaaau

SEQ ID NO: 23887 - RNA, 22 nt, Artificial Sequence
  LRRK2 RNA guide
uggggauaaaaucaucagaggg

SEQ ID NO: 23888 - RNA, 22 nt, Artificial Sequence
  LRRK2 RNA guide
uggugugcccucugaugauuuu

SEQ ID NO: 23889 - RNA, 22 nt, Artificial Sequence
  LRRK2 RNA guide
uguagaauggggauaaaaucau

SEQ ID NO: 23890 - RNA, 22 nt, Artificial Sequence
  LRRK2 RNA guide
ugugcccucugaugauuuuauc

SEQ ID NO: 23891 - RNA, 20 nt, Artificial Sequence
  LRRK2 RNA guide
aaaccaagugaauaaacauc

SEQ ID NO: 23892 - RNA, 20 nt, Artificial Sequence
  LRRK2 RNA guide
aacaggcugauguuuauuca

SEQ ID NO: 23893 - RNA, 20 nt, Artificial Sequence
  LRRK2 RNA guide
aaccaacaggcugauguuua

SEQ ID NO: 23894 - RNA, 20 nt, Artificial Sequence
  LRRK2 RNA guide
aaccaagugaauaaacauca

SEQ ID NO: 23895 - RNA, 20 nt, Artificial Sequence
  LRRK2 RNA guide
aagugaauaaacaucagccu

SEQ ID NO: 23896 - RNA, 20 nt, Artificial Sequence
  LRRK2 RNA guide
aaugucauagaguaguaaac

SEQ ID NO: 23897 - RNA, 20 nt, Artificial Sequence
  LRRK2 RNA guide
acaggcugauguuuauucac

SEQ ID NO: 23898 - RNA, 20 nt, Artificial Sequence
  LRRK2 RNA guide
accaacaggcugauguuuau

SEQ ID NO: 23899 - RNA, 20 nt, Artificial Sequence
  LRRK2 RNA guide
accaagugaauaaacaucag

SEQ ID NO: 23900 - RNA, 20 nt, Artificial Sequence
  LRRK2 RNA guide
acuugguuuacuacucuaug

SEQ ID NO: 23901 - RNA, 20 nt, Artificial Sequence
  LRRK2 RNA guide
agaguaguaaaccaagugaa

SEQ ID NO: 23902 - RNA, 20 nt, Artificial Sequence
  LRRK2 RNA guide
aggcugauguuuauucacuu

SEQ ID NO: 23903 - RNA, 20 nt, Artificial Sequence
  LRRK2 RNA guide
aguaaaccaagugaauaaac

SEQ ID NO: 23904 - RNA, 20 nt, Artificial Sequence
  LRRK2 RNA guide
aguaguaaaccaagugaaua

SEQ ID NO: 23905 - RNA, 20 nt, Artificial Sequence
  LRRK2 RNA guide
agugaauaaacaucagccug

SEQ ID NO: 23906 - RNA, 20 nt, Artificial Sequence
  LRRK2 RNA guide
auagaguaguaaaccaagug

SEQ ID NO: 23907 - RNA, 20 nt, Artificial Sequence
  LRRK2 RNA guide
auucacuugguuuacuacuc

SEQ ID NO: 23908 - RNA, 20 nt, Artificial Sequence
  LRRK2 RNA guide
caacaggcugauguuuauuc

SEQ ID NO: 23909 - RNA, 20 nt, Artificial Sequence
  LRRK2 RNA guide
caagugaauaaacaucagcc

SEQ ID NO: 23910 - RNA, 20 nt, Artificial Sequence
  LRRK2 RNA guide
cacuugguuuacuacucuau

SEQ ID NO: 23911 - RNA, 20 nt, Artificial Sequence
  LRRK2 RNA guide
caggcugauguuuauucacu

SEQ ID NO: 23912 - RNA, 20 nt, Artificial Sequence
  LRRK2 RNA guide
cauagaguaguaaaccaagu

SEQ ID NO: 23913 - RNA, 20 nt, Artificial Sequence
  LRRK2 RNA guide
ccaacaggcugauguuuauu

SEQ ID NO: 23914 - RNA, 20 nt, Artificial Sequence
  LRRK2 RNA guide
ccaagugaauaaacaucagc

SEQ ID NO: 23915 - RNA, 20 nt, Artificial Sequence
  LRRK2 RNA guide
cugauguuuauucacuuggu

SEQ ID NO: 23916 - RNA, 20 nt, Artificial Sequence
  LRRK2 RNA guide
gaguaguaaaccaagugaau

SEQ ID NO: 23917 - RNA, 20 nt, Artificial Sequence
  LRRK2 RNA guide
gauguuuauucacuugguuu

SEQ ID NO: 23918 - RNA, 20 nt, Artificial Sequence
  LRRK2 RNA guide
gcugauguuuauucacuugg

SEQ ID NO: 23919 - RNA, 20 nt, Artificial Sequence
  LRRK2 RNA guide
ggcugauguuuauucacuug

SEQ ID NO: 23920 - RNA, 20 nt, Artificial Sequence
  LRRK2 RNA guide
guaaaccaagugaauaaaca

SEQ ID NO: 23921 - RNA, 20 nt, Artificial Sequence
  LRRK2 RNA guide
guaguaaaccaagugaauaa

SEQ ID NO: 23922 - RNA, 20 nt, Artificial Sequence
  LRRK2 RNA guide
gucauagaguaguaaaccaa

SEQ ID NO: 23923 - RNA, 20 nt, Artificial Sequence
  LRRK2 RNA guide
guuuauucacuugguuuacu

SEQ ID NO: 23924 - RNA, 20 nt, Artificial Sequence
  LRRK2 RNA guide
uagaguaguaaaccaaguga

SEQ ID NO: 23925 - RNA, 20 nt, Artificial Sequence
  LRRK2 RNA guide
uauucacuugguuuacuacu

SEQ ID NO: 23926 - RNA, 20 nt, Artificial Sequence
  LRRK2 RNA guide
ucacuugguuuacuacucua

SEQ ID NO: 23927 - RNA, 20 nt, Artificial Sequence
  LRRK2 RNA guide
ucauagaguaguaaaccaag

SEQ ID NO: 23928 - RNA, 20 nt, Artificial Sequence
  LRRK2 RNA guide
ugauguuuauucacuugguu

SEQ ID NO: 23929 - RNA, 20 nt, Artificial Sequence
  LRRK2 RNA guide
ugucauagaguaguaaacca

SEQ ID NO: 23930 - RNA, 20 nt, Artificial Sequence
  LRRK2 RNA guide
uguuuauucacuugguuuac

SEQ ID NO: 23931 - RNA, 20 nt, Artificial Sequence
  LRRK2 RNA guide
uuauucacuugguuuacuac

SEQ ID NO: 23932 - RNA, 20 nt, Artificial Sequence
  LRRK2 RNA guide
uucacuugguuuacuacucu

SEQ ID NO: 23933 - RNA, 21 nt, Artificial Sequence
  LRRK2 RNA guide
aacaggcugauguuuauucac

SEQ ID NO: 23934 - RNA, 21 nt, Artificial Sequence
  LRRK2 RNA guide
aaccaacaggcugauguuuau

SEQ ID NO: 23935 - RNA, 21 nt, Artificial Sequence
  LRRK2 RNA guide
aaccaagugaauaaacaucag

SEQ ID NO: 23936 - RNA, 21 nt, Artificial Sequence
  LRRK2 RNA guide
aagugaauaaacaucagccug

SEQ ID NO: 23937 - RNA, 21 nt, Artificial Sequence
  LRRK2 RNA guide
aaugucauagaguaguaaacc

SEQ ID NO: 23938 - RNA, 21 nt, Artificial Sequence
  LRRK2 RNA guide
acaggcugauguuuauucacu

SEQ ID NO: 23939 - RNA, 21 nt, Artificial Sequence
  LRRK2 RNA guide
accaacaggcugauguuuauu

SEQ ID NO: 23940 - RNA, 21 nt, Artificial Sequence
  LRRK2 RNA guide
accaagugaauaaacaucagc

SEQ ID NO: 23941 - RNA, 21 nt, Artificial Sequence
  LRRK2 RNA guide
acuugguuuacuacucuauga

SEQ ID NO: 23942 - RNA, 21 nt, Artificial Sequence
  LRRK2 RNA guide
agaguaguaaaccaagugaau

SEQ ID NO: 23943 - RNA, 21 nt, Artificial Sequence
  LRRK2 RNA guide
aggcugauguuuauucacuug

SEQ ID NO: 23944 - RNA, 21 nt, Artificial Sequence
  LRRK2 RNA guide
agugaauaaacaucagccugu

SEQ ID NO: 23945 - RNA, 21 nt, Artificial Sequence
  LRRK2 RNA guide
auagaguaguaaaccaaguga

SEQ ID NO: 23946 - RNA, 21 nt, Artificial Sequence
  LRRK2 RNA guide
augucauagaguaguaaacca

SEQ ID NO: 23947 - RNA, 21 nt, Artificial Sequence
  LRRK2 RNA guide
auucacuugguuuacuacucu

SEQ ID NO: 23948 - RNA, 21 nt, Artificial Sequence
  LRRK2 RNA guide
caacaggcugauguuuauuca

SEQ ID NO: 23949 - RNA, 21 nt, Artificial Sequence
  LRRK2 RNA guide
caagugaauaaacaucagccu

SEQ ID NO: 23950 - RNA, 21 nt, Artificial Sequence
  LRRK2 RNA guide
cacuugguuuacuacucuaug

SEQ ID NO: 23951 - RNA, 21 nt, Artificial Sequence
  LRRK2 RNA guide
caggcugauguuuauucacuu

SEQ ID NO: 23952 - RNA, 21 nt, Artificial Sequence
  LRRK2 RNA guide
cauagaguaguaaaccaagug

SEQ ID NO: 23953 - RNA, 21 nt, Artificial Sequence
  LRRK2 RNA guide
ccaacaggcugauguuuauuc

SEQ ID NO: 23954 - RNA, 21 nt, Artificial Sequence
  LRRK2 RNA guide
ccaagugaauaaacaucagcc

SEQ ID NO: 23955 - RNA, 21 nt, Artificial Sequence
  LRRK2 RNA guide
cugauguuuauucacuugguu

SEQ ID NO: 23956 - RNA, 21 nt, Artificial Sequence
  LRRK2 RNA guide
gaguaguaaaccaagugaaua

SEQ ID NO: 23957 - RNA, 21 nt, Artificial Sequence
  LRRK2 RNA guide
gcugauguuuauucacuuggu

SEQ ID NO: 23958 - RNA, 21 nt, Artificial Sequence
  LRRK2 RNA guide
ggcugauguuuauucacuugg

SEQ ID NO: 23959 - RNA, 21 nt, Artificial Sequence
  LRRK2 RNA guide
gucauagaguaguaaaccaag

SEQ ID NO: 23960 - RNA, 21 nt, Artificial Sequence
  LRRK2 RNA guide
uaaccaacaggcugauguuua

SEQ ID NO: 23961 - RNA, 21 nt, Artificial Sequence
  LRRK2 RNA guide
uagaguaguaaaccaagugaa

SEQ ID NO: 23962 - RNA, 21 nt, Artificial Sequence
  LRRK2 RNA guide
uauucacuugguuuacuacuc

SEQ ID NO: 23963 - RNA, 21 nt, Artificial Sequence
  LRRK2 RNA guide
ucacuugguuuacuacucuau

SEQ ID NO: 23964 - RNA, 21 nt, Artificial Sequence
  LRRK2 RNA guide
ucauagaguaguaaaccaagu

SEQ ID NO: 23965 - RNA, 21 nt, Artificial Sequence
  LRRK2 RNA guide
ugucauagaguaguaaaccaa

SEQ ID NO: 23966 - RNA, 21 nt, Artificial Sequence
  LRRK2 RNA guide
uucacuugguuuacuacucua

SEQ ID NO: 23967 - RNA, 22 nt, Artificial Sequence
  LRRK2 RNA guide
aaaccaagugaauaaacaucag

SEQ ID NO: 23968 - RNA, 22 nt, Artificial Sequence
  LRRK2 RNA guide
aaaugucauagaguaguaaacc

SEQ ID NO: 23969 - RNA, 22 nt, Artificial Sequence
  LRRK2 RNA guide
aacaggcugauguuuauucacu

SEQ ID NO: 23970 - RNA, 22 nt, Artificial Sequence
  LRRK2 RNA guide
aaccaacaggcugauguuuauu

SEQ ID NO: 23971 - RNA, 22 nt, Artificial Sequence
  LRRK2 RNA guide
aaccaagugaauaaacaucagc

SEQ ID NO: 23972 - RNA, 22 nt, Artificial Sequence
  LRRK2 RNA guide
aagugaauaaacaucagccugu

SEQ ID NO: 23973 - RNA, 22 nt, Artificial Sequence
  LRRK2 RNA guide
aaugucauagaguaguaaacca

SEQ ID NO: 23974 - RNA, 22 nt, Artificial Sequence
  LRRK2 RNA guide
acaggcugauguuuauucacuu

SEQ ID NO: 23975 - RNA, 22 nt, Artificial Sequence
  LRRK2 RNA guide
accaacaggcugauguuuauuc

SEQ ID NO: 23976 - RNA, 22 nt, Artificial Sequence
  LRRK2 RNA guide
accaagugaauaaacaucagcc

SEQ ID NO: 23977 - RNA, 22 nt, Artificial Sequence
  LRRK2 RNA guide
acuugguuuacuacucuaugac

SEQ ID NO: 23978 - RNA, 22 nt, Artificial Sequence
  LRRK2 RNA guide
agaguaguaaaccaagugaaua

SEQ ID NO: 23979 - RNA, 22 nt, Artificial Sequence
  LRRK2 RNA guide
aggcugauguuuauucacuugg

SEQ ID NO: 23980 - RNA, 22 nt, Artificial Sequence
  LRRK2 RNA guide
agugaauaaacaucagccuguu

SEQ ID NO: 23981 - RNA, 22 nt, Artificial Sequence
  LRRK2 RNA guide
auaaccaacaggcugauguuua

SEQ ID NO: 23982 - RNA, 22 nt, Artificial Sequence
  LRRK2 RNA guide
auagaguaguaaaccaagugaa

SEQ ID NO: 23983 - RNA, 22 nt, Artificial Sequence
  LRRK2 RNA guide
augucauagaguaguaaaccaa

SEQ ID NO: 23984 - RNA, 22 nt, Artificial Sequence
  LRRK2 RNA guide
auucacuugguuuacuacucua

SEQ ID NO: 23985 - RNA, 22 nt, Artificial Sequence
  LRRK2 RNA guide
caacaggcugauguuuauucac

SEQ ID NO: 23986 - RNA, 22 nt, Artificial Sequence
  LRRK2 RNA guide
caagugaauaaacaucagccug

SEQ ID NO: 23987 - RNA, 22 nt, Artificial Sequence
  LRRK2 RNA guide
cacuugguuuacuacucuauga

SEQ ID NO: 23988 - RNA, 22 nt, Artificial Sequence
  LRRK2 RNA guide
caggcugauguuuauucacuug

SEQ ID NO: 23989 - RNA, 22 nt, Artificial Sequence
  LRRK2 RNA guide
cauagaguaguaaaccaaguga

SEQ ID NO: 23990 - RNA, 22 nt, Artificial Sequence
  LRRK2 RNA guide
ccaacaggcugauguuuauuca

SEQ ID NO: 23991 - RNA, 22 nt, Artificial Sequence
  LRRK2 RNA guide
ccaagugaauaaacaucagccu

SEQ ID NO: 23992 - RNA, 22 nt, Artificial Sequence
  LRRK2 RNA guide
cugauguuuauucacuugguuu

SEQ ID NO: 23993 - RNA, 22 nt, Artificial Sequence
  LRRK2 RNA guide
gaguaguaaaccaagugaauaa

SEQ ID NO: 23994 - RNA, 22 nt, Artificial Sequence
  LRRK2 RNA guide
gauguuuauucacuugguuuac

SEQ ID NO: 23995 - RNA, 22 nt, Artificial Sequence
  LRRK2 RNA guide
gcugauguuuauucacuugguu

SEQ ID NO: 23996 - RNA, 22 nt, Artificial Sequence
  LRRK2 RNA guide
ggcugauguuuauucacuuggu

SEQ ID NO: 23997 - RNA, 22 nt, Artificial Sequence
  LRRK2 RNA guide
guaaaccaagugaauaaacauc

SEQ ID NO: 23998 - RNA, 22 nt, Artificial Sequence
  LRRK2 RNA guide
guaguaaaccaagugaauaaac

SEQ ID NO: 23999 - RNA, 22 nt, Artificial Sequence
  LRRK2 RNA guide
gucauagaguaguaaaccaagu

SEQ ID NO: 24000 - RNA, 22 nt, Artificial Sequence
  LRRK2 RNA guide
guuuauucacuugguuuacuac

SEQ ID NO: 24001 - RNA, 22 nt, Artificial Sequence
  LRRK2 RNA guide
uaaccaacaggcugauguuuau

SEQ ID NO: 24002 - RNA, 22 nt, Artificial Sequence
  LRRK2 RNA guide
uagaguaguaaaccaagugaau

SEQ ID NO: 24003 - RNA, 22 nt, Artificial Sequence
  LRRK2 RNA guide
uauucacuugguuuacuacucu

SEQ ID NO: 24004 - RNA, 22 nt, Artificial Sequence
  LRRK2 RNA guide
ucacuugguuuacuacucuaug

SEQ ID NO: 24005 - RNA, 22 nt, Artificial Sequence
  LRRK2 RNA guide
ucauagaguaguaaaccaagug

SEQ ID NO: 24006 - RNA, 22 nt, Artificial Sequence
  LRRK2 RNA guide
ugucauagaguaguaaaccaag

SEQ ID NO: 24007 - RNA, 22 nt, Artificial Sequence
  LRRK2 RNA guide
uuauucacuugguuuacuacuc

SEQ ID NO: 24008 - RNA, 22 nt, Artificial Sequence
  LRRK2 RNA guide
uucacuugguuuacuacucuau

SEQ ID NO: 24009 - RNA, 20 nt, Artificial Sequence
  LRRK2 RNA guide
aguugucaaaaugucauagu

SEQ ID NO: 24010 - RNA, 20 nt, Artificial Sequence
  LRRK2 RNA guide
augucauaguaaaccaaaug

SEQ ID NO: 24011 - RNA, 20 nt, Artificial Sequence
  LRRK2 RNA guide
caaaaugucauaguaaacca

SEQ ID NO: 24012 - RNA, 20 nt, Artificial Sequence
  LRRK2 RNA guide
caguugucaaaaugucauag

SEQ ID NO: 24013 - RNA, 20 nt, Artificial Sequence
  LRRK2 RNA guide
cauuugguuuacuaugacau

SEQ ID NO: 24014 - RNA, 20 nt, Artificial Sequence
  LRRK2 RNA guide
ccaguugucaaaaugucaua

SEQ ID NO: 24015 - RNA, 20 nt, Artificial Sequence
  LRRK2 RNA guide
ccuccaguugucaaaauguc

SEQ ID NO: 24016 - RNA, 20 nt, Artificial Sequence
  LRRK2 RNA guide
cuccaguugucaaaauguca

SEQ ID NO: 24017 - RNA, 20 nt, Artificial Sequence
  LRRK2 RNA guide
gguuuacuaugacauuuuga

SEQ ID NO: 24018 - RNA, 20 nt, Artificial Sequence
  LRRK2 RNA guide
gucaaaaugucauaguaaac

SEQ ID NO: 24019 - RNA, 20 nt, Artificial Sequence
  LRRK2 RNA guide
gucauaguaaaccaaaugaa

SEQ ID NO: 24020 - RNA, 20 nt, Artificial Sequence
  LRRK2 RNA guide
guugucaaaaugucauagua

SEQ ID NO: 24021 - RNA, 20 nt, Artificial Sequence
  LRRK2 RNA guide
guuuacuaugacauuuugac

SEQ ID NO: 24022 - RNA, 20 nt, Artificial Sequence
  LRRK2 RNA guide
uacuaugacauuuugacaac

SEQ ID NO: 24023 - RNA, 20 nt, Artificial Sequence
  LRRK2 RNA guide
ucaaaaugucauaguaaacc

SEQ ID NO: 24024 - RNA, 20 nt, Artificial Sequence
  LRRK2 RNA guide
ucauuugguuuacuaugaca

SEQ ID NO: 24025 - RNA, 20 nt, Artificial Sequence
  LRRK2 RNA guide
uccaguugucaaaaugucau

SEQ ID NO: 24026 - RNA, 20 nt, Artificial Sequence
  LRRK2 RNA guide
ugguuuacuaugacauuuug

SEQ ID NO: 24027 - RNA, 20 nt, Artificial Sequence
  LRRK2 RNA guide
ugucauaguaaaccaaauga

SEQ ID NO: 24028 - RNA, 20 nt, Artificial Sequence
  LRRK2 RNA guide
uucauuugguuuacuaugac

SEQ ID NO: 24029 - RNA, 21 nt, Artificial Sequence
  LRRK2 RNA guide
accuccaguugucaaaauguc

SEQ ID NO: 24030 - RNA, 21 nt, Artificial Sequence
  LRRK2 RNA guide
caguugucaaaaugucauagu

SEQ ID NO: 24031 - RNA, 21 nt, Artificial Sequence
  LRRK2 RNA guide
ccaguugucaaaaugucauag

SEQ ID NO: 24032 - RNA, 21 nt, Artificial Sequence
  LRRK2 RNA guide
ccuccaguugucaaaauguca

SEQ ID NO: 24033 - RNA, 21 nt, Artificial Sequence
  LRRK2 RNA guide
cuccaguugucaaaaugucau

SEQ ID NO: 24034 - RNA, 21 nt, Artificial Sequence
  LRRK2 RNA guide
gguuuacuaugacauuuugac

SEQ ID NO: 24035 - RNA, 21 nt, Artificial Sequence
  LRRK2 RNA guide
gucaaaaugucauaguaaacc

SEQ ID NO: 24036 - RNA, 21 nt, Artificial Sequence
  LRRK2 RNA guide
uccaguugucaaaaugucaua

SEQ ID NO: 24037 - RNA, 22 nt, Artificial Sequence
  LRRK2 RNA guide
accuccaguugucaaaauguca

SEQ ID NO: 24038 - RNA, 22 nt, Artificial Sequence
  LRRK2 RNA guide
caguugucaaaaugucauagua

SEQ ID NO: 24039 - RNA, 22 nt, Artificial Sequence
  LRRK2 RNA guide
ccaguugucaaaaugucauagu

SEQ ID NO: 24040 - RNA, 22 nt, Artificial Sequence
  LRRK2 RNA guide
ccuccaguugucaaaaugucau

SEQ ID NO: 24041 - RNA, 22 nt, Artificial Sequence
  LRRK2 RNA guide
cuccaguugucaaaaugucaua

SEQ ID NO: 24042 - RNA, 22 nt, Artificial Sequence
  LRRK2 RNA guide
gguuuacuaugacauuuugaca

SEQ ID NO: 24043 - RNA, 22 nt, Artificial Sequence
  LRRK2 RNA guide
gucaaaaugucauaguaaacca

SEQ ID NO: 24044 - RNA, 22 nt, Artificial Sequence
  LRRK2 RNA guide
uaccuccaguugucaaaauguc

SEQ ID NO: 24045 - RNA, 22 nt, Artificial Sequence
  LRRK2 RNA guide
uacuaugacauuuugacaacug

SEQ ID NO: 24046 - RNA, 22 nt, Artificial Sequence
  LRRK2 RNA guide
uccaguugucaaaaugucauag

SEQ ID NO: 24047 - RNA, 22 nt, Artificial Sequence
  LRRK2 RNA guide
ugguuuacuaugacauuuugac

SEQ ID NO: 24048 - RNA, 22 nt, Artificial Sequence
  LRRK2 RNA guide
ugucaaaaugucauaguaaacc

SEQ ID NO: 24049 - RNA, 20 nt, Artificial Sequence
  LRRK2 RNA guide
aaacucaucuggaaacuuca

SEQ ID NO: 24050 - RNA, 20 nt, Artificial Sequence
  LRRK2 RNA guide
aacucaucuggaaacuucaa

SEQ ID NO: 24051 - RNA, 20 nt, Artificial Sequence
  LRRK2 RNA guide
aaguuuccagaugaguuuga

SEQ ID NO: 24052 - RNA, 20 nt, Artificial Sequence
  LRRK2 RNA guide
aauucaucaaacucaucugg

SEQ ID NO: 24053 - RNA, 20 nt, Artificial Sequence
  LRRK2 RNA guide
acucaucuggaaacuucaaa

SEQ ID NO: 24054 - RNA, 20 nt, Artificial Sequence
  LRRK2 RNA guide
agaggguuugaaguuuccag

SEQ ID NO: 24055 - RNA, 20 nt, Artificial Sequence
  LRRK2 RNA guide
agaugaguuugaugaauuag

SEQ ID NO: 24056 - RNA, 20 nt, Artificial Sequence
  LRRK2 RNA guide
aggguuugaaguuuccagau

SEQ ID NO: 24057 - RNA, 20 nt, Artificial Sequence
  LRRK2 RNA guide
aguagaggguuugaaguuuc

SEQ ID NO: 24058 - RNA, 20 nt, Artificial Sequence
  LRRK2 RNA guide
aguuuccagaugaguuugau

SEQ ID NO: 24059 - RNA, 20 nt, Artificial Sequence
  LRRK2 RNA guide
auaguagaggguuugaaguu

SEQ ID NO: 24060 - RNA, 20 nt, Artificial Sequence
  LRRK2 RNA guide
aucaaacucaucuggaaacu

SEQ ID NO: 24061 - RNA, 20 nt, Artificial Sequence
  LRRK2 RNA guide
aucuggaaacuucaaacccu

SEQ ID NO: 24062 - RNA, 20 nt, Artificial Sequence
  LRRK2 RNA guide
auucaucaaacucaucugga

SEQ ID NO: 24063 - RNA, 20 nt, Artificial Sequence
  LRRK2 RNA guide
caaacucaucuggaaacuuc

SEQ ID NO: 24064 - RNA, 20 nt, Artificial Sequence
  LRRK2 RNA guide
cagaugaguuugaugaauua

SEQ ID NO: 24065 - RNA, 20 nt, Artificial Sequence
  LRRK2 RNA guide
caucaaacucaucuggaaac

SEQ ID NO: 24066 - RNA, 20 nt, Artificial Sequence
  LRRK2 RNA guide
caucuggaaacuucaaaccc

SEQ ID NO: 24067 - RNA, 20 nt, Artificial Sequence
  LRRK2 RNA guide
ccagaugaguuugaugaauu

SEQ ID NO: 24068 - RNA, 20 nt, Artificial Sequence
  LRRK2 RNA guide
cuaauucaucaaacucaucu

SEQ ID NO: 24069 - RNA, 20 nt, Artificial Sequence
  LRRK2 RNA guide
cucaucuggaaacuucaaac

SEQ ID NO: 24070 - RNA, 20 nt, Artificial Sequence
  LRRK2 RNA guide
gaaguuuccagaugaguuug

SEQ ID NO: 24071 - RNA, 20 nt, Artificial Sequence
  LRRK2 RNA guide
gaggguuugaaguuuccaga

SEQ ID NO: 24072 - RNA, 20 nt, Artificial Sequence
  LRRK2 RNA guide
ggguuugaaguuuccagaug

SEQ ID NO: 24073 - RNA, 20 nt, Artificial Sequence
  LRRK2 RNA guide
gguuugaaguuuccagauga

SEQ ID NO: 24074 - RNA, 20 nt, Artificial Sequence
  LRRK2 RNA guide
guagaggguuugaaguuucc

SEQ ID NO: 24075 - RNA, 20 nt, Artificial Sequence
  LRRK2 RNA guide
guuuccagaugaguuugaug

SEQ ID NO: 24076 - RNA, 20 nt, Artificial Sequence
  LRRK2 RNA guide
guuugaaguuuccagaugag

SEQ ID NO: 24077 - RNA, 20 nt, Artificial Sequence
  LRRK2 RNA guide
uaauucaucaaacucaucug

SEQ ID NO: 24078 - RNA, 20 nt, Artificial Sequence
  LRRK2 RNA guide
uagaggguuugaaguuucca

SEQ ID NO: 24079 - RNA, 20 nt, Artificial Sequence
  LRRK2 RNA guide
uaguagaggguuugaaguuu

SEQ ID NO: 24080 - RNA, 20 nt, Artificial Sequence
  LRRK2 RNA guide
ucaaacucaucuggaaacuu

SEQ ID NO: 24081 - RNA, 20 nt, Artificial Sequence
  LRRK2 RNA guide
ucaucaaacucaucuggaaa

SEQ ID NO: 24082 - RNA, 20 nt, Artificial Sequence
  LRRK2 RNA guide
ucaucuggaaacuucaaacc

SEQ ID NO: 24083 - RNA, 20 nt, Artificial Sequence
  LRRK2 RNA guide
uccagaugaguuugaugaau

SEQ ID NO: 24084 - RNA, 20 nt, Artificial Sequence
  LRRK2 RNA guide
ucuaauucaucaaacucauc

SEQ ID NO: 24085 - RNA, 20 nt, Artificial Sequence
  LRRK2 RNA guide
ucuggaaacuucaaacccuc

SEQ ID NO: 24086 - RNA, 20 nt, Artificial Sequence
  LRRK2 RNA guide
ugaaguuuccagaugaguuu

SEQ ID NO: 24087 - RNA, 20 nt, Artificial Sequence
  LRRK2 RNA guide
uucaucaaacucaucuggaa

SEQ ID NO: 24088 - RNA, 20 nt, Artificial Sequence
  LRRK2 RNA guide
uuccagaugaguuugaugaa

SEQ ID NO: 24089 - RNA, 20 nt, Artificial Sequence
  LRRK2 RNA guide
uugaaguuuccagaugaguu

SEQ ID NO: 24090 - RNA, 20 nt, Artificial Sequence
  LRRK2 RNA guide
uuuccagaugaguuugauga

SEQ ID NO: 24091 - RNA, 20 nt, Artificial Sequence
  LRRK2 RNA guide
uuugaaguuuccagaugagu

SEQ ID NO: 24092 - RNA, 21 nt, Artificial Sequence
  LRRK2 RNA guide
aaacucaucuggaaacuucaa

SEQ ID NO: 24093 - RNA, 21 nt, Artificial Sequence
  LRRK2 RNA guide
aacucaucuggaaacuucaaa

SEQ ID NO: 24094 - RNA, 21 nt, Artificial Sequence
  LRRK2 RNA guide
aaguuuccagaugaguuugau

SEQ ID NO: 24095 - RNA, 21 nt, Artificial Sequence
  LRRK2 RNA guide
aauaguagaggguuugaaguu

SEQ ID NO: 24096 - RNA, 21 nt, Artificial Sequence
  LRRK2 RNA guide
aauucaucaaacucaucugga

SEQ ID NO: 24097 - RNA, 21 nt, Artificial Sequence
  LRRK2 RNA guide
acucaucuggaaacuucaaac

SEQ ID NO: 24098 - RNA, 21 nt, Artificial Sequence
  LRRK2 RNA guide
agaggguuugaaguuuccaga

SEQ ID NO: 24099 - RNA, 21 nt, Artificial Sequence
  LRRK2 RNA guide
aggguuugaaguuuccagaug

SEQ ID NO: 24100 - RNA, 21 nt, Artificial Sequence
  LRRK2 RNA guide
aguagaggguuugaaguuucc

SEQ ID NO: 24101 - RNA, 21 nt, Artificial Sequence
  LRRK2 RNA guide
aguuuccagaugaguuugaug

SEQ ID NO: 24102 - RNA, 21 nt, Artificial Sequence
  LRRK2 RNA guide
auaguagaggguuugaaguuu

SEQ ID NO: 24103 - RNA, 21 nt, Artificial Sequence
  LRRK2 RNA guide
aucaaacucaucuggaaacuu

SEQ ID NO: 24104 - RNA, 21 nt, Artificial Sequence
  LRRK2 RNA guide
aucuggaaacuucaaacccuc

SEQ ID NO: 24105 - RNA, 21 nt, Artificial Sequence
  LRRK2 RNA guide
auucaucaaacucaucuggaa

SEQ ID NO: 24106 - RNA, 21 nt, Artificial Sequence
  LRRK2 RNA guide
caaacucaucuggaaacuuca

SEQ ID NO: 24107 - RNA, 21 nt, Artificial Sequence
  LRRK2 RNA guide
cagaugaguuugaugaauuag

SEQ ID NO: 24108 - RNA, 21 nt, Artificial Sequence
  LRRK2 RNA guide
caucaaacucaucuggaaacu

SEQ ID NO: 24109 - RNA, 21 nt, Artificial Sequence
  LRRK2 RNA guide
caucuggaaacuucaaacccu

SEQ ID NO: 24110 - RNA, 21 nt, Artificial Sequence
  LRRK2 RNA guide
ccagaugaguuugaugaauua

SEQ ID NO: 24111 - RNA, 21 nt, Artificial Sequence
  LRRK2 RNA guide
cuaauucaucaaacucaucug

SEQ ID NO: 24112 - RNA, 21 nt, Artificial Sequence
  LRRK2 RNA guide
cucaucuggaaacuucaaacc

SEQ ID NO: 24113 - RNA, 21 nt, Artificial Sequence
  LRRK2 RNA guide
gaaguuuccagaugaguuuga

SEQ ID NO: 24114 - RNA, 21 nt, Artificial Sequence
  LRRK2 RNA guide
gaggguuugaaguuuccagau

SEQ ID NO: 24115 - RNA, 21 nt, Artificial Sequence
  LRRK2 RNA guide
ggguuugaaguuuccagauga

SEQ ID NO: 24116 - RNA, 21 nt, Artificial Sequence
  LRRK2 RNA guide
gguuugaaguuuccagaugag

SEQ ID NO: 24117 - RNA, 21 nt, Artificial Sequence
  LRRK2 RNA guide
guagaggguuugaaguuucca

SEQ ID NO: 24118 - RNA, 21 nt, Artificial Sequence
  LRRK2 RNA guide
guuuccagaugaguuugauga

SEQ ID NO: 24119 - RNA, 21 nt, Artificial Sequence
  LRRK2 RNA guide
guuugaaguuuccagaugagu

SEQ ID NO: 24120 - RNA, 21 nt, Artificial Sequence
  LRRK2 RNA guide
uaauucaucaaacucaucugg

SEQ ID NO: 24121 - RNA, 21 nt, Artificial Sequence
  LRRK2 RNA guide
uagaggguuugaaguuuccag

SEQ ID NO: 24122 - RNA, 21 nt, Artificial Sequence
  LRRK2 RNA guide
uaguagaggguuugaaguuuc

SEQ ID NO: 24123 - RNA, 21 nt, Artificial Sequence
  LRRK2 RNA guide
ucaaacucaucuggaaacuuc

SEQ ID NO: 24124 - RNA, 21 nt, Artificial Sequence
  LRRK2 RNA guide
ucaucaaacucaucuggaaac

SEQ ID NO: 24125 - RNA, 21 nt, Artificial Sequence
  LRRK2 RNA guide
ucaucuggaaacuucaaaccc

SEQ ID NO: 24126 - RNA, 21 nt, Artificial Sequence
  LRRK2 RNA guide
uccagaugaguuugaugaauu

SEQ ID NO: 24127 - RNA, 21 nt, Artificial Sequence
  LRRK2 RNA guide
ucuggaaacuucaaacccucu

SEQ ID NO: 24128 - RNA, 21 nt, Artificial Sequence
  LRRK2 RNA guide
ugaaguuuccagaugaguuug

SEQ ID NO: 24129 - RNA, 21 nt, Artificial Sequence
  LRRK2 RNA guide
uucaucaaacucaucuggaaa

SEQ ID NO: 24130 - RNA, 21 nt, Artificial Sequence
  LRRK2 RNA guide
uuccagaugaguuugaugaau

SEQ ID NO: 24131 - RNA, 21 nt, Artificial Sequence
  LRRK2 RNA guide
uugaaguuuccagaugaguuu

SEQ ID NO: 24132 - RNA, 21 nt, Artificial Sequence
  LRRK2 RNA guide
uuuccagaugaguuugaugaa

SEQ ID NO: 24133 - RNA, 21 nt, Artificial Sequence
  LRRK2 RNA guide
uuugaaguuuccagaugaguu

SEQ ID NO: 24134 - RNA, 22 nt, Artificial Sequence
  LRRK2 RNA guide
aaacucaucuggaaacuucaaa

SEQ ID NO: 24135 - RNA, 22 nt, Artificial Sequence
  LRRK2 RNA guide
aacucaucuggaaacuucaaac

SEQ ID NO: 24136 - RNA, 22 nt, Artificial Sequence
  LRRK2 RNA guide
aaguuuccagaugaguuugaug

SEQ ID NO: 24137 - RNA, 22 nt, Artificial Sequence
  LRRK2 RNA guide
aauaguagaggguuugaaguuu

SEQ ID NO: 24138 - RNA, 22 nt, Artificial Sequence
  LRRK2 RNA guide
aauucaucaaacucaucuggaa

SEQ ID NO: 24139 - RNA, 22 nt, Artificial Sequence
  LRRK2 RNA guide
acucaucuggaaacuucaaacc

SEQ ID NO: 24140 - RNA, 22 nt, Artificial Sequence
  LRRK2 RNA guide
agaggguuugaaguuuccagau

SEQ ID NO: 24141 - RNA, 22 nt, Artificial Sequence
  LRRK2 RNA guide
aggguuugaaguuuccagauga

SEQ ID NO: 24142 - RNA, 22 nt, Artificial Sequence
  LRRK2 RNA guide
aguagaggguuugaaguuucca

SEQ ID NO: 24143 - RNA, 22 nt, Artificial Sequence
  LRRK2 RNA guide
aguuuccagaugaguuugauga

SEQ ID NO: 24144 - RNA, 22 nt, Artificial Sequence
  LRRK2 RNA guide
auaguagaggguuugaaguuuc

SEQ ID NO: 24145 - RNA, 22 nt, Artificial Sequence
  LRRK2 RNA guide
aucaaacucaucuggaaacuuc

SEQ ID NO: 24146 - RNA, 22 nt, Artificial Sequence
  LRRK2 RNA guide
aucuggaaacuucaaacccucu

SEQ ID NO: 24147 - RNA, 22 nt, Artificial Sequence
  LRRK2 RNA guide
auucaucaaacucaucuggaaa

SEQ ID NO: 24148 - RNA, 22 nt, Artificial Sequence
  LRRK2 RNA guide
caaacucaucuggaaacuucaa

SEQ ID NO: 24149 - RNA, 22 nt, Artificial Sequence
  LRRK2 RNA guide
cagaugaguuugaugaauuaga

SEQ ID NO: 24150 - RNA, 22 nt, Artificial Sequence
  LRRK2 RNA guide
caucaaacucaucuggaaacuu

SEQ ID NO: 24151 - RNA, 22 nt, Artificial Sequence
  LRRK2 RNA guide
caucuggaaacuucaaacccuc

SEQ ID NO: 24152 - RNA, 22 nt, Artificial Sequence
  LRRK2 RNA guide
ccagaugaguuugaugaauuag

SEQ ID NO: 24153 - RNA, 22 nt, Artificial Sequence
  LRRK2 RNA guide
cuaauucaucaaacucaucugg

SEQ ID NO: 24154 - RNA, 22 nt, Artificial Sequence
  LRRK2 RNA guide
cucaucuggaaacuucaaaccc

SEQ ID NO: 24155 - RNA, 22 nt, Artificial Sequence
  LRRK2 RNA guide
gaaguuuccagaugaguuugau

SEQ ID NO: 24156 - RNA, 22 nt, Artificial Sequence
  LRRK2 RNA guide
gaauaguagaggguuugaaguu

SEQ ID NO: 24157 - RNA, 22 nt, Artificial Sequence
  LRRK2 RNA guide
gaggguuugaaguuuccagaug

SEQ ID NO: 24158 - RNA, 22 nt, Artificial Sequence
  LRRK2 RNA guide
ggguuugaaguuuccagaugag

SEQ ID NO: 24159 - RNA, 22 nt, Artificial Sequence
  LRRK2 RNA guide
gguuugaaguuuccagaugagu

SEQ ID NO: 24160 - RNA, 22 nt, Artificial Sequence
  LRRK2 RNA guide
guagaggguuugaaguuuccag

SEQ ID NO: 24161 - RNA, 22 nt, Artificial Sequence
  LRRK2 RNA guide
guuuccagaugaguuugaugaa

SEQ ID NO: 24162 - RNA, 22 nt, Artificial Sequence
  LRRK2 RNA guide
guuugaaguuuccagaugaguu

SEQ ID NO: 24163 - RNA, 22 nt, Artificial Sequence
  LRRK2 RNA guide
uaauucaucaaacucaucugga

SEQ ID NO: 24164 - RNA, 22 nt, Artificial Sequence
  LRRK2 RNA guide
uagaggguuugaaguuuccaga

SEQ ID NO: 24165 - RNA, 22 nt, Artificial Sequence
  LRRK2 RNA guide
uaguagaggguuugaaguuucc

SEQ ID NO: 24166 - RNA, 22 nt, Artificial Sequence
  LRRK2 RNA guide
ucaaacucaucuggaaacuuca

SEQ ID NO: 24167 - RNA, 22 nt, Artificial Sequence
  LRRK2 RNA guide
ucaucaaacucaucuggaaacu

SEQ ID NO: 24168 - RNA, 22 nt, Artificial Sequence
  LRRK2 RNA guide
ucaucuggaaacuucaaacccu

SEQ ID NO: 24169 - RNA, 22 nt, Artificial Sequence
  LRRK2 RNA guide
uccagaugaguuugaugaauua

SEQ ID NO: 24170 - RNA, 22 nt, Artificial Sequence
  LRRK2 RNA guide
ucuaauucaucaaacucaucug

SEQ ID NO: 24171 - RNA, 22 nt, Artificial Sequence
  LRRK2 RNA guide
ucuggaaacuucaaacccucua

SEQ ID NO: 24172 - RNA, 22 nt, Artificial Sequence
  LRRK2 RNA guide
ugaaguuuccagaugaguuuga

SEQ ID NO: 24173 - RNA, 22 nt, Artificial Sequence
  LRRK2 RNA guide
uucaucaaacucaucuggaaac

SEQ ID NO: 24174 - RNA, 22 nt, Artificial Sequence
  LRRK2 RNA guide
uuccagaugaguuugaugaauu

SEQ ID NO: 24175 - RNA, 22 nt, Artificial Sequence
  LRRK2 RNA guide
uugaaguuuccagaugaguuug

SEQ ID NO: 24176 - RNA, 22 nt, Artificial Sequence
  LRRK2 RNA guide
uuuccagaugaguuugaugaau

SEQ ID NO: 24177 - RNA, 22 nt, Artificial Sequence
  LRRK2 RNA guide
uuugaaguuuccagaugaguuu

SEQ ID NO: 24178 - RNA, 20 nt, Artificial Sequence
  LRRK2 RNA guide
aacuggaucuaaaaacacau

SEQ ID NO: 24179 - RNA, 20 nt, Artificial Sequence
  LRRK2 RNA guide
aauguguuuuuagauccagu

SEQ ID NO: 24180 - RNA, 20 nt, Artificial Sequence
  LRRK2 RNA guide
acuggaucuaaaaacacauu

SEQ ID NO: 24181 - RNA, 20 nt, Artificial Sequence
  LRRK2 RNA guide
auguguuuuuagauccaguu

SEQ ID NO: 24182 - RNA, 20 nt, Artificial Sequence
  LRRK2 RNA guide
cacauuaaaaaacaucaugc

SEQ ID NO: 24183 - RNA, 20 nt, Artificial Sequence
  LRRK2 RNA guide
cuggaucuaaaaacacauua

SEQ ID NO: 24184 - RNA, 20 nt, Artificial Sequence
  LRRK2 RNA guide
cuuuaacuggaucuaaaaac

SEQ ID NO: 24185 - RNA, 20 nt, Artificial Sequence
  LRRK2 RNA guide
gcaugauguuuuuuaaugug

SEQ ID NO: 24186 - RNA, 20 nt, Artificial Sequence
  LRRK2 RNA guide
gcuagcaugauguuuuuuaa

SEQ ID NO: 24187 - RNA, 20 nt, Artificial Sequence
  LRRK2 RNA guide
uaacuggaucuaaaaacaca

SEQ ID NO: 24188 - RNA, 20 nt, Artificial Sequence
  LRRK2 RNA guide
uaauguguuuuuagauccag

SEQ ID NO: 24189 - RNA, 20 nt, Artificial Sequence
  LRRK2 RNA guide
ugcuagcaugauguuuuuua

SEQ ID NO: 24190 - RNA, 20 nt, Artificial Sequence
  LRRK2 RNA guide
uguguuuuuagauccaguua

SEQ ID NO: 24191 - RNA, 20 nt, Artificial Sequence
  LRRK2 RNA guide
uuaacuggaucuaaaaacac

SEQ ID NO: 24192 - RNA, 22 nt, Artificial Sequence
  LRRK2 RNA guide
cuuuaacuggaucuaaaaacac

SEQ ID NO: 24193 - RNA, 22 nt, Artificial Sequence
  LRRK2 RNA guide
gcuagcaugauguuuuuuaaug

SEQ ID NO: 24194 - RNA, 20 nt, Artificial Sequence
  LRRK2 RNA guide
aaacaguguuugagagaaaa

SEQ ID NO: 24195 - RNA, 20 nt, Artificial Sequence
  LRRK2 RNA guide
aacaguguuugagagaaaau

SEQ ID NO: 24196 - RNA, 20 nt, Artificial Sequence
  LRRK2 RNA guide
aauuaaacaguguuugagag

SEQ ID NO: 24197 - RNA, 20 nt, Artificial Sequence
  LRRK2 RNA guide
acaguguuugagagaaaauc

SEQ ID NO: 24198 - RNA, 20 nt, Artificial Sequence
  LRRK2 RNA guide
agagaaaauccucaagaaag

SEQ ID NO: 24199 - RNA, 20 nt, Artificial Sequence
  LRRK2 RNA guide
aggauuuucucucaaacacu

SEQ ID NO: 24200 - RNA, 20 nt, Artificial Sequence
  LRRK2 RNA guide
aguguuugagagaaaauccu

SEQ ID NO: 24201 - RNA, 20 nt, Artificial Sequence
  LRRK2 RNA guide
auuaaacaguguuugagaga

SEQ ID NO: 24202 - RNA, 20 nt, Artificial Sequence
  LRRK2 RNA guide
auuuucucucaaacacuguu

SEQ ID NO: 24203 - RNA, 20 nt, Artificial Sequence
  LRRK2 RNA guide
caguguuugagagaaaaucc

SEQ ID NO: 24204 - RNA, 20 nt, Artificial Sequence
  LRRK2 RNA guide
ccuuucuugaggauuuucuc

SEQ ID NO: 24205 - RNA, 20 nt, Artificial Sequence
  LRRK2 RNA guide
cucucaaacacuguuuaauu

SEQ ID NO: 24206 - RNA, 20 nt, Artificial Sequence
  LRRK2 RNA guide
cuugaggauuuucucucaaa

SEQ ID NO: 24207 - RNA, 20 nt, Artificial Sequence
  LRRK2 RNA guide
cuuucuugaggauuuucucu

SEQ ID NO: 24208 - RNA, 20 nt, Artificial Sequence
  LRRK2 RNA guide
gagagaaaauccucaagaaa

SEQ ID NO: 24209 - RNA, 20 nt, Artificial Sequence
  LRRK2 RNA guide
gaggauuuucucucaaacac

SEQ ID NO: 24210 - RNA, 20 nt, Artificial Sequence
  LRRK2 RNA guide
gauuuucucucaaacacugu

SEQ ID NO: 24211 - RNA, 20 nt, Artificial Sequence
  LRRK2 RNA guide
gccuuucuugaggauuuucu

SEQ ID NO: 24212 - RNA, 20 nt, Artificial Sequence
  LRRK2 RNA guide
ggauuuucucucaaacacug

SEQ ID NO: 24213 - RNA, 20 nt, Artificial Sequence
  LRRK2 RNA guide
ggccuuucuugaggauuuuc

SEQ ID NO: 24214 - RNA, 20 nt, Artificial Sequence
  LRRK2 RNA guide
guaggccuuucuugaggauu

SEQ ID NO: 24215 - RNA, 20 nt, Artificial Sequence
  LRRK2 RNA guide
guguuugagagaaaauccuc

SEQ ID NO: 24216 - RNA, 20 nt, Artificial Sequence
  LRRK2 RNA guide
guuugagagaaaauccucaa

SEQ ID NO: 24217 - RNA, 20 nt, Artificial Sequence
  LRRK2 RNA guide
uaaacaguguuugagagaaa

SEQ ID NO: 24218 - RNA, 20 nt, Artificial Sequence
  LRRK2 RNA guide
uaggccuuucuugaggauuu

SEQ ID NO: 24219 - RNA, 20 nt, Artificial Sequence
  LRRK2 RNA guide
ucucucaaacacuguuuaau

SEQ ID NO: 24220 - RNA, 20 nt, Artificial Sequence
  LRRK2 RNA guide
ucuugaggauuuucucucaa

SEQ ID NO: 24221 - RNA, 20 nt, Artificial Sequence
  LRRK2 RNA guide
ugagagaaaauccucaagaa

SEQ ID NO: 24222 - RNA, 20 nt, Artificial Sequence
  LRRK2 RNA guide
ugaggauuuucucucaaaca

SEQ ID NO: 24223 - RNA, 20 nt, Artificial Sequence
  LRRK2 RNA guide
uguuugagagaaaauccuca

SEQ ID NO: 24224 - RNA, 20 nt, Artificial Sequence
  LRRK2 RNA guide
uuaaacaguguuugagagaa

SEQ ID NO: 24225 - RNA, 20 nt, Artificial Sequence
  LRRK2 RNA guide
uucucucaaacacuguuuaa

SEQ ID NO: 24226 - RNA, 20 nt, Artificial Sequence
  LRRK2 RNA guide
uucuugaggauuuucucuca

SEQ ID NO: 24227 - RNA, 20 nt, Artificial Sequence
  LRRK2 RNA guide
uugagagaaaauccucaaga

SEQ ID NO: 24228 - RNA, 20 nt, Artificial Sequence
  LRRK2 RNA guide
uugaggauuuucucucaaac

SEQ ID NO: 24229 - RNA, 20 nt, Artificial Sequence
  LRRK2 RNA guide
uuucucucaaacacuguuua

SEQ ID NO: 24230 - RNA, 20 nt, Artificial Sequence
  LRRK2 RNA guide
uuucuugaggauuuucucuc

SEQ ID NO: 24231 - RNA, 20 nt, Artificial Sequence
  LRRK2 RNA guide
uuugagagaaaauccucaag

SEQ ID NO: 24232 - RNA, 20 nt, Artificial Sequence
  LRRK2 RNA guide
uuuucucucaaacacuguuu

SEQ ID NO: 24233 - RNA, 21 nt, Artificial Sequence
  LRRK2 RNA guide
aacaguguuugagagaaaauc

SEQ ID NO: 24234 - RNA, 21 nt, Artificial Sequence
  LRRK2 RNA guide
acaguguuugagagaaaaucc

SEQ ID NO: 24235 - RNA, 21 nt, Artificial Sequence
  LRRK2 RNA guide
agagaaaauccucaagaaagg

SEQ ID NO: 24236 - RNA, 21 nt, Artificial Sequence
  LRRK2 RNA guide
aggauuuucucucaaacacug

SEQ ID NO: 24237 - RNA, 21 nt, Artificial Sequence
  LRRK2 RNA guide
aggccuuucuugaggauuuuc

SEQ ID NO: 24238 - RNA, 21 nt, Artificial Sequence
  LRRK2 RNA guide
aguaggccuuucuugaggauu

SEQ ID NO: 24239 - RNA, 21 nt, Artificial Sequence
  LRRK2 RNA guide
aguguuugagagaaaauccuc

SEQ ID NO: 24240 - RNA, 21 nt, Artificial Sequence
  LRRK2 RNA guide
caguguuugagagaaaauccu

SEQ ID NO: 24241 - RNA, 21 nt, Artificial Sequence
  LRRK2 RNA guide
ccuuucuugaggauuuucucu

SEQ ID NO: 24242 - RNA, 21 nt, Artificial Sequence
  LRRK2 RNA guide
cuugaggauuuucucucaaac

SEQ ID NO: 24243 - RNA, 21 nt, Artificial Sequence
  LRRK2 RNA guide
cuuucuugaggauuuucucuc

SEQ ID NO: 24244 - RNA, 21 nt, Artificial Sequence
  LRRK2 RNA guide
gagagaaaauccucaagaaag

SEQ ID NO: 24245 - RNA, 21 nt, Artificial Sequence
  LRRK2 RNA guide
gaggauuuucucucaaacacu

SEQ ID NO: 24246 - RNA, 21 nt, Artificial Sequence
  LRRK2 RNA guide
gauuuucucucaaacacuguu

SEQ ID NO: 24247 - RNA, 21 nt, Artificial Sequence
  LRRK2 RNA guide
gccuuucuugaggauuuucuc

SEQ ID NO: 24248 - RNA, 21 nt, Artificial Sequence
  LRRK2 RNA guide
ggauuuucucucaaacacugu

SEQ ID NO: 24249 - RNA, 21 nt, Artificial Sequence
  LRRK2 RNA guide
ggccuuucuugaggauuuucu

SEQ ID NO: 24250 - RNA, 21 nt, Artificial Sequence
  LRRK2 RNA guide
guaggccuuucuugaggauuu

SEQ ID NO: 24251 - RNA, 21 nt, Artificial Sequence
  LRRK2 RNA guide
guguuugagagaaaauccuca

SEQ ID NO: 24252 - RNA, 21 nt, Artificial Sequence
  LRRK2 RNA guide
guuugagagaaaauccucaag

SEQ ID NO: 24253 - RNA, 21 nt, Artificial Sequence
  LRRK2 RNA guide
uaggccuuucuugaggauuuu

SEQ ID NO: 24254 - RNA, 21 nt, Artificial Sequence
  LRRK2 RNA guide
ucuugaggauuuucucucaaa

SEQ ID NO: 24255 - RNA, 21 nt, Artificial Sequence
  LRRK2 RNA guide
ugagagaaaauccucaagaaa

SEQ ID NO: 24256 - RNA, 21 nt, Artificial Sequence
  LRRK2 RNA guide
ugaggauuuucucucaaacac

SEQ ID NO: 24257 - RNA, 21 nt, Artificial Sequence
  LRRK2 RNA guide
uguuugagagaaaauccucaa

SEQ ID NO: 24258 - RNA, 21 nt, Artificial Sequence
  LRRK2 RNA guide
uucuugaggauuuucucucaa

SEQ ID NO: 24259 - RNA, 21 nt, Artificial Sequence
  LRRK2 RNA guide
uugagagaaaauccucaagaa

SEQ ID NO: 24260 - RNA, 21 nt, Artificial Sequence
  LRRK2 RNA guide
uugaggauuuucucucaaaca

SEQ ID NO: 24261 - RNA, 21 nt, Artificial Sequence
  LRRK2 RNA guide
uuucuugaggauuuucucuca

SEQ ID NO: 24262 - RNA, 21 nt, Artificial Sequence
  LRRK2 RNA guide
uuugagagaaaauccucaaga

SEQ ID NO: 24263 - RNA, 22 nt, Artificial Sequence
  LRRK2 RNA guide
aaacaguguuugagagaaaauc

SEQ ID NO: 24264 - RNA, 22 nt, Artificial Sequence
  LRRK2 RNA guide
aacaguguuugagagaaaaucc

SEQ ID NO: 24265 - RNA, 22 nt, Artificial Sequence
  LRRK2 RNA guide
aaguaggccuuucuugaggauu

SEQ ID NO: 24266 - RNA, 22 nt, Artificial Sequence
  LRRK2 RNA guide
acaguguuugagagaaaauccu

SEQ ID NO: 24267 - RNA, 22 nt, Artificial Sequence
  LRRK2 RNA guide
agagaaaauccucaagaaaggc

SEQ ID NO: 24268 - RNA, 22 nt, Artificial Sequence
  LRRK2 RNA guide
aggauuuucucucaaacacugu

SEQ ID NO: 24269 - RNA, 22 nt, Artificial Sequence
  LRRK2 RNA guide
aggccuuucuugaggauuuucu

SEQ ID NO: 24270 - RNA, 22 nt, Artificial Sequence
  LRRK2 RNA guide
aguaggccuuucuugaggauuu

SEQ ID NO: 24271 - RNA, 22 nt, Artificial Sequence
  LRRK2 RNA guide
aguguuugagagaaaauccuca

SEQ ID NO: 24272 - RNA, 22 nt, Artificial Sequence
  LRRK2 RNA guide
caguguuugagagaaaauccuc

SEQ ID NO: 24273 - RNA, 22 nt, Artificial Sequence
  LRRK2 RNA guide
ccuuucuugaggauuuucucuc

SEQ ID NO: 24274 - RNA, 22 nt, Artificial Sequence
  LRRK2 RNA guide
cuugaggauuuucucucaaaca

SEQ ID NO: 24275 - RNA, 22 nt, Artificial Sequence
  LRRK2 RNA guide
cuuucuugaggauuuucucuca

SEQ ID NO: 24276 - RNA, 22 nt, Artificial Sequence
  LRRK2 RNA guide
gagagaaaauccucaagaaagg

SEQ ID NO: 24277 - RNA, 22 nt, Artificial Sequence
  LRRK2 RNA guide
gaggauuuucucucaaacacug

SEQ ID NO: 24278 - RNA, 22 nt, Artificial Sequence
  LRRK2 RNA guide
gauuuucucucaaacacuguuu

SEQ ID NO: 24279 - RNA, 22 nt, Artificial Sequence
  LRRK2 RNA guide
gccuuucuugaggauuuucucu

SEQ ID NO: 24280 - RNA, 22 nt, Artificial Sequence
  LRRK2 RNA guide
ggauuuucucucaaacacuguu

SEQ ID NO: 24281 - RNA, 22 nt, Artificial Sequence
  LRRK2 RNA guide
ggccuuucuugaggauuuucuc

SEQ ID NO: 24282 - RNA, 22 nt, Artificial Sequence
  LRRK2 RNA guide
guaggccuuucuugaggauuuu

SEQ ID NO: 24283 - RNA, 22 nt, Artificial Sequence
  LRRK2 RNA guide
guguuugagagaaaauccucaa

SEQ ID NO: 24284 - RNA, 22 nt, Artificial Sequence
  LRRK2 RNA guide
guuugagagaaaauccucaaga

SEQ ID NO: 24285 - RNA, 22 nt, Artificial Sequence
  LRRK2 RNA guide
uaggccuuucuugaggauuuuc

SEQ ID NO: 24286 - RNA, 22 nt, Artificial Sequence
  LRRK2 RNA guide
ucuugaggauuuucucucaaac

SEQ ID NO: 24287 - RNA, 22 nt, Artificial Sequence
  LRRK2 RNA guide
ugagagaaaauccucaagaaag

SEQ ID NO: 24288 - RNA, 22 nt, Artificial Sequence
  LRRK2 RNA guide
ugaggauuuucucucaaacacu

SEQ ID NO: 24289 - RNA, 22 nt, Artificial Sequence
  LRRK2 RNA guide
uguuugagagaaaauccucaag

SEQ ID NO: 24290 - RNA, 22 nt, Artificial Sequence
  LRRK2 RNA guide
uucuugaggauuuucucucaaa

SEQ ID NO: 24291 - RNA, 22 nt, Artificial Sequence
  LRRK2 RNA guide
uugagagaaaauccucaagaaa

SEQ ID NO: 24292 - RNA, 22 nt, Artificial Sequence
  LRRK2 RNA guide
uugaggauuuucucucaaacac

SEQ ID NO: 24293 - RNA, 22 nt, Artificial Sequence
  LRRK2 RNA guide
uuucuugaggauuuucucucaa

SEQ ID NO: 24294 - RNA, 22 nt, Artificial Sequence
  LRRK2 RNA guide
uuugagagaaaauccucaagaa

SEQ ID NO: 24295 - RNA, 20 nt, Artificial Sequence
  LRRK2 RNA guide
aaaaucuucaagaaaggccu

SEQ ID NO: 24296 - RNA, 20 nt, Artificial Sequence
  LRRK2 RNA guide
aaaucuucaagaaaggccua

SEQ ID NO: 24297 - RNA, 20 nt, Artificial Sequence
  LRRK2 RNA guide
aagaaaaucuucaagaaagg

SEQ ID NO: 24298 - RNA, 20 nt, Artificial Sequence
  LRRK2 RNA guide
aaguaggccuuucuugaaga

SEQ ID NO: 24299 - RNA, 20 nt, Artificial Sequence
  LRRK2 RNA guide
aaucuucaagaaaggccuac

SEQ ID NO: 24300 - RNA, 20 nt, Artificial Sequence
  LRRK2 RNA guide
acaguguuugaaagaaaauc

SEQ ID NO: 24301 - RNA, 20 nt, Artificial Sequence
  LRRK2 RNA guide
agaaaaucuucaagaaaggc

SEQ ID NO: 24302 - RNA, 20 nt, Artificial Sequence
  LRRK2 RNA guide
agaaguaggccuuucuugaa

SEQ ID NO: 24303 - RNA, 20 nt, Artificial Sequence
  LRRK2 RNA guide
aggccuuucuugaagauuuu

SEQ ID NO: 24304 - RNA, 20 nt, Artificial Sequence
  LRRK2 RNA guide
aguaggccuuucuugaagau

SEQ ID NO: 24305 - RNA, 20 nt, Artificial Sequence
  LRRK2 RNA guide
aucuucaagaaaggccuacu

SEQ ID NO: 24306 - RNA, 20 nt, Artificial Sequence
  LRRK2 RNA guide
cagaaguaggccuuucuuga

SEQ ID NO: 24307 - RNA, 20 nt, Artificial Sequence
  LRRK2 RNA guide
caguguuugaaagaaaaucu

SEQ ID NO: 24308 - RNA, 20 nt, Artificial Sequence
  LRRK2 RNA guide
ccuuucuugaagauuuucuu

SEQ ID NO: 24309 - RNA, 20 nt, Artificial Sequence
  LRRK2 RNA guide
cuucaagaaaggccuacuuc

SEQ ID NO: 24310 - RNA, 20 nt, Artificial Sequence
  LRRK2 RNA guide
gaaaaucuucaagaaaggcc

SEQ ID NO: 24311 - RNA, 20 nt, Artificial Sequence
  LRRK2 RNA guide
gaagauuuucuuucaaacac

SEQ ID NO: 24312 - RNA, 20 nt, Artificial Sequence
  LRRK2 RNA guide
gaaguaggccuuucuugaag

SEQ ID NO: 24313 - RNA, 20 nt, Artificial Sequence
  LRRK2 RNA guide
gcagaaguaggccuuucuug

SEQ ID NO: 24314 - RNA, 20 nt, Artificial Sequence
  LRRK2 RNA guide
gccuuucuugaagauuuucu

SEQ ID NO: 24315 - RNA, 20 nt, Artificial Sequence
  LRRK2 RNA guide
ggcagaaguaggccuuucuu

SEQ ID NO: 24316 - RNA, 20 nt, Artificial Sequence
  LRRK2 RNA guide
ggccuuucuugaagauuuuc

SEQ ID NO: 24317 - RNA, 20 nt, Artificial Sequence
  LRRK2 RNA guide
gggcagaaguaggccuuucu

SEQ ID NO: 24318 - RNA, 20 nt, Artificial Sequence
  LRRK2 RNA guide
guaggccuuucuugaagauu

SEQ ID NO: 24319 - RNA, 20 nt, Artificial Sequence
  LRRK2 RNA guide
guguuugaaagaaaaucuuc

SEQ ID NO: 24320 - RNA, 20 nt, Artificial Sequence
  LRRK2 RNA guide
uaggccuuucuugaagauuu

SEQ ID NO: 24321 - RNA, 20 nt, Artificial Sequence
  LRRK2 RNA guide
ucuucaagaaaggccuacuu

SEQ ID NO: 24322 - RNA, 20 nt, Artificial Sequence
  LRRK2 RNA guide
ugggcagaaguaggccuuuc

SEQ ID NO: 24323 - RNA, 21 nt, Artificial Sequence
  LRRK2 RNA guide
aaaaucuucaagaaaggccua

SEQ ID NO: 24324 - RNA, 21 nt, Artificial Sequence
  LRRK2 RNA guide
aaaucuucaagaaaggccuac

SEQ ID NO: 24325 - RNA, 21 nt, Artificial Sequence
  LRRK2 RNA guide
aagaaaaucuucaagaaaggc

SEQ ID NO: 24326 - RNA, 21 nt, Artificial Sequence
  LRRK2 RNA guide
aaguaggccuuucuugaagau

SEQ ID NO: 24327 - RNA, 21 nt, Artificial Sequence
  LRRK2 RNA guide
aaucuucaagaaaggccuacu

SEQ ID NO: 24328 - RNA, 21 nt, Artificial Sequence
  LRRK2 RNA guide
agaaaaucuucaagaaaggcc

SEQ ID NO: 24329 - RNA, 21 nt, Artificial Sequence
  LRRK2 RNA guide
agaaguaggccuuucuugaag

SEQ ID NO: 24330 - RNA, 21 nt, Artificial Sequence
  LRRK2 RNA guide
aggccuuucuugaagauuuuc

SEQ ID NO: 24331 - RNA, 21 nt, Artificial Sequence
  LRRK2 RNA guide
aguaggccuuucuugaagauu

SEQ ID NO: 24332 - RNA, 21 nt, Artificial Sequence
  LRRK2 RNA guide
aucuucaagaaaggccuacuu

SEQ ID NO: 24333 - RNA, 21 nt, Artificial Sequence
  LRRK2 RNA guide
cagaaguaggccuuucuugaa

SEQ ID NO: 24334 - RNA, 21 nt, Artificial Sequence
  LRRK2 RNA guide
cugggcagaaguaggccuuuc

SEQ ID NO: 24335 - RNA, 21 nt, Artificial Sequence
  LRRK2 RNA guide
cuucaagaaaggccuacuucu

SEQ ID NO: 24336 - RNA, 21 nt, Artificial Sequence
  LRRK2 RNA guide
gaaaaucuucaagaaaggccu

SEQ ID NO: 24337 - RNA, 21 nt, Artificial Sequence
  LRRK2 RNA guide
gaaguaggccuuucuugaaga

SEQ ID NO: 24338 - RNA, 21 nt, Artificial Sequence
  LRRK2 RNA guide
gcagaaguaggccuuucuuga

SEQ ID NO: 24339 - RNA, 21 nt, Artificial Sequence
  LRRK2 RNA guide
gccuuucuugaagauuuucuu

SEQ ID NO: 24340 - RNA, 21 nt, Artificial Sequence
  LRRK2 RNA guide
ggcagaaguaggccuuucuug

SEQ ID NO: 24341 - RNA, 21 nt, Artificial Sequence
  LRRK2 RNA guide
ggccuuucuugaagauuuucu

SEQ ID NO: 24342 - RNA, 21 nt, Artificial Sequence
  LRRK2 RNA guide
gggcagaaguaggccuuucuu

SEQ ID NO: 24343 - RNA, 21 nt, Artificial Sequence
  LRRK2 RNA guide
guaggccuuucuugaagauuu

SEQ ID NO: 24344 - RNA, 21 nt, Artificial Sequence
  LRRK2 RNA guide
uaggccuuucuugaagauuuu

SEQ ID NO: 24345 - RNA, 21 nt, Artificial Sequence
  LRRK2 RNA guide
ucuucaagaaaggccuacuuc

SEQ ID NO: 24346 - RNA, 21 nt, Artificial Sequence
  LRRK2 RNA guide
ugggcagaaguaggccuuucu

SEQ ID NO: 24347 - RNA, 22 nt, Artificial Sequence
  LRRK2 RNA guide
aaaaucuucaagaaaggccuac

SEQ ID NO: 24348 - RNA, 22 nt, Artificial Sequence
  LRRK2 RNA guide
aaagaaaaucuucaagaaaggc

SEQ ID NO: 24349 - RNA, 22 nt, Artificial Sequence
  LRRK2 RNA guide
aaaucuucaagaaaggccuacu

SEQ ID NO: 24350 - RNA, 22 nt, Artificial Sequence
  LRRK2 RNA guide
aagaaaaucuucaagaaaggcc

SEQ ID NO: 24351 - RNA, 22 nt, Artificial Sequence
  LRRK2 RNA guide
aaguaggccuuucuugaagauu

SEQ ID NO: 24352 - RNA, 22 nt, Artificial Sequence
  LRRK2 RNA guide
aaucuucaagaaaggccuacuu

SEQ ID NO: 24353 - RNA, 22 nt, Artificial Sequence
  LRRK2 RNA guide
agaaaaucuucaagaaaggccu

SEQ ID NO: 24354 - RNA, 22 nt, Artificial Sequence
  LRRK2 RNA guide
agaaguaggccuuucuugaaga

SEQ ID NO: 24355 - RNA, 22 nt, Artificial Sequence
  LRRK2 RNA guide
aggccuuucuugaagauuuucu

SEQ ID NO: 24356 - RNA, 22 nt, Artificial Sequence
  LRRK2 RNA guide
aguaggccuuucuugaagauuu

SEQ ID NO: 24357 - RNA, 22 nt, Artificial Sequence
  LRRK2 RNA guide
aucuucaagaaaggccuacuuc

SEQ ID NO: 24358 - RNA, 22 nt, Artificial Sequence
  LRRK2 RNA guide
cagaaguaggccuuucuugaag

SEQ ID NO: 24359 - RNA, 22 nt, Artificial Sequence
  LRRK2 RNA guide
caguguuugaaagaaaaucuuc

SEQ ID NO: 24360 - RNA, 22 nt, Artificial Sequence
  LRRK2 RNA guide
ccugggcagaaguaggccuuuc

SEQ ID NO: 24361 - RNA, 22 nt, Artificial Sequence
  LRRK2 RNA guide
ccuuucuugaagauuuucuuuc

SEQ ID NO: 24362 - RNA, 22 nt, Artificial Sequence
  LRRK2 RNA guide
cugggcagaaguaggccuuucu

SEQ ID NO: 24363 - RNA, 22 nt, Artificial Sequence
  LRRK2 RNA guide
cuucaagaaaggccuacuucug

SEQ ID NO: 24364 - RNA, 22 nt, Artificial Sequence
  LRRK2 RNA guide
gaaaaucuucaagaaaggccua

SEQ ID NO: 24365 - RNA, 22 nt, Artificial Sequence
  LRRK2 RNA guide
gaaagaaaaucuucaagaaagg

SEQ ID NO: 24366 - RNA, 22 nt, Artificial Sequence
  LRRK2 RNA guide
gaagauuuucuuucaaacacug

SEQ ID NO: 24367 - RNA, 22 nt, Artificial Sequence
  LRRK2 RNA guide
gaaguaggccuuucuugaagau

SEQ ID NO: 24368 - RNA, 22 nt, Artificial Sequence
  LRRK2 RNA guide
gcagaaguaggccuuucuugaa

SEQ ID NO: 24369 - RNA, 22 nt, Artificial Sequence
  LRRK2 RNA guide
gccuuucuugaagauuuucuuu

SEQ ID NO: 24370 - RNA, 22 nt, Artificial Sequence
  LRRK2 RNA guide
ggcagaaguaggccuuucuuga

SEQ ID NO: 24371 - RNA, 22 nt, Artificial Sequence
  LRRK2 RNA guide
ggccuuucuugaagauuuucuu

SEQ ID NO: 24372 - RNA, 22 nt, Artificial Sequence
  LRRK2 RNA guide
gggcagaaguaggccuuucuug

SEQ ID NO: 24373 - RNA, 22 nt, Artificial Sequence
  LRRK2 RNA guide
guaggccuuucuugaagauuuu

SEQ ID NO: 24374 - RNA, 22 nt, Artificial Sequence
  LRRK2 RNA guide
uaggccuuucuugaagauuuuc

SEQ ID NO: 24375 - RNA, 22 nt, Artificial Sequence
  LRRK2 RNA guide
ucuucaagaaaggccuacuucu

SEQ ID NO: 24376 - RNA, 22 nt, Artificial Sequence
  LRRK2 RNA guide
ugggcagaaguaggccuuucuu

SEQ ID NO: 24377 - RNA, 20 nt, Artificial Sequence
  LRRK2 RNA guide
aaaaugucaaagacccgaga

SEQ ID NO: 24378 - RNA, 20 nt, Artificial Sequence
  LRRK2 RNA guide
aaacuuucucgggucuuuga

SEQ ID NO: 24379 - RNA, 20 nt, Artificial Sequence
  LRRK2 RNA guide
aaagacccgagaaaguuuaa

SEQ ID NO: 24380 - RNA, 20 nt, Artificial Sequence
  LRRK2 RNA guide
aaaugucaaagacccgagaa

SEQ ID NO: 24381 - RNA, 20 nt, Artificial Sequence
  LRRK2 RNA guide
aacuuucucgggucuuugac

SEQ ID NO: 24382 - RNA, 20 nt, Artificial Sequence
  LRRK2 RNA guide
aagacccgagaaaguuuaaa

SEQ ID NO: 24383 - RNA, 20 nt, Artificial Sequence
  LRRK2 RNA guide
aaugucaaagacccgagaaa

SEQ ID NO: 24384 - RNA, 20 nt, Artificial Sequence
  LRRK2 RNA guide
aauucaaaaugucaaagacc

SEQ ID NO: 24385 - RNA, 20 nt, Artificial Sequence
  LRRK2 RNA guide
acccgagaaaguuuaaagau

SEQ ID NO: 24386 - RNA, 20 nt, Artificial Sequence
  LRRK2 RNA guide
acuuucucgggucuuugaca

SEQ ID NO: 24387 - RNA, 20 nt, Artificial Sequence
  LRRK2 RNA guide
agacccgagaaaguuuaaag

SEQ ID NO: 24388 - RNA, 20 nt, Artificial Sequence
  LRRK2 RNA guide
aucuuuaaacuuucucgggu

SEQ ID NO: 24389 - RNA, 20 nt, Artificial Sequence
  LRRK2 RNA guide
augucaaagacccgagaaag

SEQ ID NO: 24390 - RNA, 20 nt, Artificial Sequence
  LRRK2 RNA guide
auucaaaaugucaaagaccc

SEQ ID NO: 24391 - RNA, 20 nt, Artificial Sequence
  LRRK2 RNA guide
caaaaugucaaagacccgag

SEQ ID NO: 24392 - RNA, 20 nt, Artificial Sequence
  LRRK2 RNA guide
caaagacccgagaaaguuua

SEQ ID NO: 24393 - RNA, 20 nt, Artificial Sequence
  LRRK2 RNA guide
cccgagaaaguuuaaagaua

SEQ ID NO: 24394 - RNA, 20 nt, Artificial Sequence
  LRRK2 RNA guide
ccgagaaaguuuaaagauaa

SEQ ID NO: 24395 - RNA, 20 nt, Artificial Sequence
  LRRK2 RNA guide
cgggucuuugacauuuugaa

SEQ ID NO: 24396 - RNA, 20 nt, Artificial Sequence
  LRRK2 RNA guide
cucgggucuuugacauuuug

SEQ ID NO: 24397 - RNA, 20 nt, Artificial Sequence
  LRRK2 RNA guide
cugaauucaaaaugucaaag

SEQ ID NO: 24398 - RNA, 20 nt, Artificial Sequence
  LRRK2 RNA guide
cuuuaaacuuucucgggucu

SEQ ID NO: 24399 - RNA, 20 nt, Artificial Sequence
  LRRK2 RNA guide
cuuucucgggucuuugacau

SEQ ID NO: 24400 - RNA, 20 nt, Artificial Sequence
  LRRK2 RNA guide
gaauucaaaaugucaaagac

SEQ ID NO: 24401 - RNA, 20 nt, Artificial Sequence
  LRRK2 RNA guide
gacccgagaaaguuuaaaga

SEQ ID NO: 24402 - RNA, 20 nt, Artificial Sequence
  LRRK2 RNA guide
gcugaauucaaaaugucaaa

SEQ ID NO: 24403 - RNA, 20 nt, Artificial Sequence
  LRRK2 RNA guide
gucaaagacccgagaaaguu

SEQ ID NO: 24404 - RNA, 20 nt, Artificial Sequence
  LRRK2 RNA guide
guuaucuuuaaacuuucucg

SEQ ID NO: 24405 - RNA, 20 nt, Artificial Sequence
  LRRK2 RNA guide
uaaacuuucucgggucuuug

SEQ ID NO: 24406 - RNA, 20 nt, Artificial Sequence
  LRRK2 RNA guide
uaucuuuaaacuuucucggg

SEQ ID NO: 24407 - RNA, 20 nt, Artificial Sequence
  LRRK2 RNA guide
ucaaaaugucaaagacccga

SEQ ID NO: 24408 - RNA, 20 nt, Artificial Sequence
  LRRK2 RNA guide
ucaaagacccgagaaaguuu

SEQ ID NO: 24409 - RNA, 20 nt, Artificial Sequence
  LRRK2 RNA guide
ucgggucuuugacauuuuga

SEQ ID NO: 24410 - RNA, 20 nt, Artificial Sequence
  LRRK2 RNA guide
ucucgggucuuugacauuuu

SEQ ID NO: 24411 - RNA, 20 nt, Artificial Sequence
  LRRK2 RNA guide
ucuuuaaacuuucucggguc

SEQ ID NO: 24412 - RNA, 20 nt, Artificial Sequence
  LRRK2 RNA guide
ugucaaagacccgagaaagu

SEQ ID NO: 24413 - RNA, 20 nt, Artificial Sequence
  LRRK2 RNA guide
uuaaacuuucucgggucuuu

SEQ ID NO: 24414 - RNA, 20 nt, Artificial Sequence
  LRRK2 RNA guide
uuaucuuuaaacuuucucgg

SEQ ID NO: 24415 - RNA, 20 nt, Artificial Sequence
  LRRK2 RNA guide
uucaaaaugucaaagacccg

SEQ ID NO: 24416 - RNA, 20 nt, Artificial Sequence
  LRRK2 RNA guide
uucucgggucuuugacauuu

SEQ ID NO: 24417 - RNA, 20 nt, Artificial Sequence
  LRRK2 RNA guide
uuuaaacuuucucgggucuu

SEQ ID NO: 24418 - RNA, 20 nt, Artificial Sequence
  LRRK2 RNA guide
uuucucgggucuuugacauu

SEQ ID NO: 24419 - RNA, 21 nt, Artificial Sequence
  LRRK2 RNA guide
aaaaugucaaagacccgagaa

SEQ ID NO: 24420 - RNA, 21 nt, Artificial Sequence
  LRRK2 RNA guide
aaacuuucucgggucuuugac

SEQ ID NO: 24421 - RNA, 21 nt, Artificial Sequence
  LRRK2 RNA guide
aaagacccgagaaaguuuaaa

SEQ ID NO: 24422 - RNA, 21 nt, Artificial Sequence
  LRRK2 RNA guide
aaaugucaaagacccgagaaa

SEQ ID NO: 24423 - RNA, 21 nt, Artificial Sequence
  LRRK2 RNA guide
aacuuucucgggucuuugaca

SEQ ID NO: 24424 - RNA, 21 nt, Artificial Sequence
  LRRK2 RNA guide
aagacccgagaaaguuuaaag

SEQ ID NO: 24425 - RNA, 21 nt, Artificial Sequence
  LRRK2 RNA guide
aaugucaaagacccgagaaag

SEQ ID NO: 24426 - RNA, 21 nt, Artificial Sequence
  LRRK2 RNA guide
aauucaaaaugucaaagaccc

SEQ ID NO: 24427 - RNA, 21 nt, Artificial Sequence
  LRRK2 RNA guide
acccgagaaaguuuaaagaua

SEQ ID NO: 24428 - RNA, 21 nt, Artificial Sequence
  LRRK2 RNA guide
acuuucucgggucuuugacau

SEQ ID NO: 24429 - RNA, 21 nt, Artificial Sequence
  LRRK2 RNA guide
agacccgagaaaguuuaaaga

SEQ ID NO: 24430 - RNA, 21 nt, Artificial Sequence
  LRRK2 RNA guide
aucuuuaaacuuucucggguc

SEQ ID NO: 24431 - RNA, 21 nt, Artificial Sequence
  LRRK2 RNA guide
augucaaagacccgagaaagu

SEQ ID NO: 24432 - RNA, 21 nt, Artificial Sequence
  LRRK2 RNA guide
auucaaaaugucaaagacccg

SEQ ID NO: 24433 - RNA, 21 nt, Artificial Sequence
  LRRK2 RNA guide
caaaaugucaaagacccgaga

SEQ ID NO: 24434 - RNA, 21 nt, Artificial Sequence
  LRRK2 RNA guide
caaagacccgagaaaguuuaa

SEQ ID NO: 24435 - RNA, 21 nt, Artificial Sequence
  LRRK2 RNA guide
cccgagaaaguuuaaagauaa

SEQ ID NO: 24436 - RNA, 21 nt, Artificial Sequence
  LRRK2 RNA guide
ccgagaaaguuuaaagauaac

SEQ ID NO: 24437 - RNA, 21 nt, Artificial Sequence
  LRRK2 RNA guide
cgggucuuugacauuuugaau

SEQ ID NO: 24438 - RNA, 21 nt, Artificial Sequence
  LRRK2 RNA guide
cucgggucuuugacauuuuga

SEQ ID NO: 24439 - RNA, 21 nt, Artificial Sequence
  LRRK2 RNA guide
cuuuaaacuuucucgggucuu

SEQ ID NO: 24440 - RNA, 21 nt, Artificial Sequence
  LRRK2 RNA guide
cuuucucgggucuuugacauu

SEQ ID NO: 24441 - RNA, 21 nt, Artificial Sequence
  LRRK2 RNA guide
gaauucaaaaugucaaagacc

SEQ ID NO: 24442 - RNA, 21 nt, Artificial Sequence
  LRRK2 RNA guide
gacccgagaaaguuuaaagau

SEQ ID NO: 24443 - RNA, 21 nt, Artificial Sequence
  LRRK2 RNA guide
gcugaauucaaaaugucaaag

SEQ ID NO: 24444 - RNA, 21 nt, Artificial Sequence
  LRRK2 RNA guide
gucaaagacccgagaaaguuu

SEQ ID NO: 24445 - RNA, 21 nt, Artificial Sequence
  LRRK2 RNA guide
guuaucuuuaaacuuucucgg

SEQ ID NO: 24446 - RNA, 21 nt, Artificial Sequence
  LRRK2 RNA guide
uaaacuuucucgggucuuuga

SEQ ID NO: 24447 - RNA, 21 nt, Artificial Sequence
  LRRK2 RNA guide
uaucuuuaaacuuucucgggu

SEQ ID NO: 24448 - RNA, 21 nt, Artificial Sequence
  LRRK2 RNA guide
ucaaaaugucaaagacccgag

SEQ ID NO: 24449 - RNA, 21 nt, Artificial Sequence
  LRRK2 RNA guide
ucaaagacccgagaaaguuua

SEQ ID NO: 24450 - RNA, 21 nt, Artificial Sequence
  LRRK2 RNA guide
ucgggucuuugacauuuugaa

SEQ ID NO: 24451 - RNA, 21 nt, Artificial Sequence
  LRRK2 RNA guide
ucucgggucuuugacauuuug

SEQ ID NO: 24452 - RNA, 21 nt, Artificial Sequence
  LRRK2 RNA guide
ucuuuaaacuuucucgggucu

SEQ ID NO: 24453 - RNA, 21 nt, Artificial Sequence
  LRRK2 RNA guide
ugucaaagacccgagaaaguu

SEQ ID NO: 24454 - RNA, 21 nt, Artificial Sequence
  LRRK2 RNA guide
uuaaacuuucucgggucuuug

SEQ ID NO: 24455 - RNA, 21 nt, Artificial Sequence
  LRRK2 RNA guide
uuaucuuuaaacuuucucggg

SEQ ID NO: 24456 - RNA, 21 nt, Artificial Sequence
  LRRK2 RNA guide
uucaaaaugucaaagacccga

SEQ ID NO: 24457 - RNA, 21 nt, Artificial Sequence
  LRRK2 RNA guide
uucucgggucuuugacauuuu

SEQ ID NO: 24458 - RNA, 21 nt, Artificial Sequence
  LRRK2 RNA guide
uuuaaacuuucucgggucuuu

SEQ ID NO: 24459 - RNA, 21 nt, Artificial Sequence
  LRRK2 RNA guide
uuucucgggucuuugacauuu

SEQ ID NO: 24460 - RNA, 22 nt, Artificial Sequence
  LRRK2 RNA guide
aaaaugucaaagacccgagaaa

SEQ ID NO: 24461 - RNA, 22 nt, Artificial Sequence
  LRRK2 RNA guide
aaacuuucucgggucuuugaca

SEQ ID NO: 24462 - RNA, 22 nt, Artificial Sequence
  LRRK2 RNA guide
aaagacccgagaaaguuuaaag

SEQ ID NO: 24463 - RNA, 22 nt, Artificial Sequence
  LRRK2 RNA guide
aaaugucaaagacccgagaaag

SEQ ID NO: 24464 - RNA, 22 nt, Artificial Sequence
  LRRK2 RNA guide
aacuuucucgggucuuugacau

SEQ ID NO: 24465 - RNA, 22 nt, Artificial Sequence
  LRRK2 RNA guide
aagacccgagaaaguuuaaaga

SEQ ID NO: 24466 - RNA, 22 nt, Artificial Sequence
  LRRK2 RNA guide
aaugucaaagacccgagaaagu

SEQ ID NO: 24467 - RNA, 22 nt, Artificial Sequence
  LRRK2 RNA guide
aauucaaaaugucaaagacccg

SEQ ID NO: 24468 - RNA, 22 nt, Artificial Sequence
  LRRK2 RNA guide
acccgagaaaguuuaaagauaa

SEQ ID NO: 24469 - RNA, 22 nt, Artificial Sequence
  LRRK2 RNA guide
acuuucucgggucuuugacauu

SEQ ID NO: 24470 - RNA, 22 nt, Artificial Sequence
  LRRK2 RNA guide
agacccgagaaaguuuaaagau

SEQ ID NO: 24471 - RNA, 22 nt, Artificial Sequence
  LRRK2 RNA guide
agcugaauucaaaaugucaaag

SEQ ID NO: 24472 - RNA, 22 nt, Artificial Sequence
  LRRK2 RNA guide
aucuuuaaacuuucucgggucu

SEQ ID NO: 24473 - RNA, 22 nt, Artificial Sequence
  LRRK2 RNA guide
augucaaagacccgagaaaguu

SEQ ID NO: 24474 - RNA, 22 nt, Artificial Sequence
  LRRK2 RNA guide
auucaaaaugucaaagacccga

SEQ ID NO: 24475 - RNA, 22 nt, Artificial Sequence
  LRRK2 RNA guide
caaaaugucaaagacccgagaa

SEQ ID NO: 24476 - RNA, 22 nt, Artificial Sequence
  LRRK2 RNA guide
caaagacccgagaaaguuuaaa

SEQ ID NO: 24477 - RNA, 22 nt, Artificial Sequence
  LRRK2 RNA guide
cagcugaauucaaaaugucaaa

SEQ ID NO: 24478 - RNA, 22 nt, Artificial Sequence
  LRRK2 RNA guide
cccgagaaaguuuaaagauaac

SEQ ID NO: 24479 - RNA, 22 nt, Artificial Sequence
  LRRK2 RNA guide
ccgagaaaguuuaaagauaaca

SEQ ID NO: 24480 - RNA, 22 nt, Artificial Sequence
  LRRK2 RNA guide
cgggucuuugacauuuugaauu

SEQ ID NO: 24481 - RNA, 22 nt, Artificial Sequence
  LRRK2 RNA guide
cucgggucuuugacauuuugaa

SEQ ID NO: 24482 - RNA, 22 nt, Artificial Sequence
  LRRK2 RNA guide
cugaauucaaaaugucaaagac

SEQ ID NO: 24483 - RNA, 22 nt, Artificial Sequence
  LRRK2 RNA guide
cuuuaaacuuucucgggucuuu

SEQ ID NO: 24484 - RNA, 22 nt, Artificial Sequence
  LRRK2 RNA guide
cuuucucgggucuuugacauuu

SEQ ID NO: 24485 - RNA, 22 nt, Artificial Sequence
  LRRK2 RNA guide
gaauucaaaaugucaaagaccc

SEQ ID NO: 24486 - RNA, 22 nt, Artificial Sequence
  LRRK2 RNA guide
gacccgagaaaguuuaaagaua

SEQ ID NO: 24487 - RNA, 22 nt, Artificial Sequence
  LRRK2 RNA guide
gcugaauucaaaaugucaaaga

SEQ ID NO: 24488 - RNA, 22 nt, Artificial Sequence
  LRRK2 RNA guide
gucaaagacccgagaaaguuua

SEQ ID NO: 24489 - RNA, 22 nt, Artificial Sequence
  LRRK2 RNA guide
guuaucuuuaaacuuucucggg

SEQ ID NO: 24490 - RNA, 22 nt, Artificial Sequence
  LRRK2 RNA guide
uaaacuuucucgggucuuugac

SEQ ID NO: 24491 - RNA, 22 nt, Artificial Sequence
  LRRK2 RNA guide
uaucuuuaaacuuucucggguc

SEQ ID NO: 24492 - RNA, 22 nt, Artificial Sequence
  LRRK2 RNA guide
ucaaaaugucaaagacccgaga

SEQ ID NO: 24493 - RNA, 22 nt, Artificial Sequence
  LRRK2 RNA guide
ucaaagacccgagaaaguuuaa

SEQ ID NO: 24494 - RNA, 22 nt, Artificial Sequence
  LRRK2 RNA guide
ucgggucuuugacauuuugaau

SEQ ID NO: 24495 - RNA, 22 nt, Artificial Sequence
  LRRK2 RNA guide
ucucgggucuuugacauuuuga

SEQ ID NO: 24496 - RNA, 22 nt, Artificial Sequence
  LRRK2 RNA guide
ucuuuaaacuuucucgggucuu

SEQ ID NO: 24497 - RNA, 22 nt, Artificial Sequence
  LRRK2 RNA guide
ugaauucaaaaugucaaagacc

SEQ ID NO: 24498 - RNA, 22 nt, Artificial Sequence
  LRRK2 RNA guide
ugucaaagacccgagaaaguuu

SEQ ID NO: 24499 - RNA, 22 nt, Artificial Sequence
  LRRK2 RNA guide
uguuaucuuuaaacuuucucgg

SEQ ID NO: 24500 - RNA, 22 nt, Artificial Sequence
  LRRK2 RNA guide
uuaaacuuucucgggucuuuga

SEQ ID NO: 24501 - RNA, 22 nt, Artificial Sequence
  LRRK2 RNA guide
uuaucuuuaaacuuucucgggu

SEQ ID NO: 24502 - RNA, 22 nt, Artificial Sequence
  LRRK2 RNA guide
uucaaaaugucaaagacccgag

SEQ ID NO: 24503 - RNA, 22 nt, Artificial Sequence
  LRRK2 RNA guide
uucucgggucuuugacauuuug

SEQ ID NO: 24504 - RNA, 22 nt, Artificial Sequence
  LRRK2 RNA guide
uuuaaacuuucucgggucuuug

SEQ ID NO: 24505 - RNA, 22 nt, Artificial Sequence
  LRRK2 RNA guide
uuucucgggucuuugacauuuu

SEQ ID NO: 24506 - RNA, 20 nt, Artificial Sequence
  LRRK2 RNA guide
aaaaugcgucucgucagacu

SEQ ID NO: 24507 - RNA, 20 nt, Artificial Sequence
  LRRK2 RNA guide
aaaugcgucucgucagacug

SEQ ID NO: 24508 - RNA, 20 nt, Artificial Sequence
  LRRK2 RNA guide
aauaaaaugcgucucgucag

SEQ ID NO: 24509 - RNA, 20 nt, Artificial Sequence
  LRRK2 RNA guide
aaugcgucucgucagacuga

SEQ ID NO: 24510 - RNA, 20 nt, Artificial Sequence
  LRRK2 RNA guide
aauuagucagucugacgaga

SEQ ID NO: 24511 - RNA, 20 nt, Artificial Sequence
  LRRK2 RNA guide
aauucagcugaauuagucag

SEQ ID NO: 24512 - RNA, 20 nt, Artificial Sequence
  LRRK2 RNA guide
acugacuaauucagcugaau

SEQ ID NO: 24513 - RNA, 20 nt, Artificial Sequence
  LRRK2 RNA guide
agacugacuaauucagcuga

SEQ ID NO: 24514 - RNA, 20 nt, Artificial Sequence
  LRRK2 RNA guide
agcugaauuagucagucuga

SEQ ID NO: 24515 - RNA, 20 nt, Artificial Sequence
  LRRK2 RNA guide
agucagucugacgagacgca

SEQ ID NO: 24516 - RNA, 20 nt, Artificial Sequence
  LRRK2 RNA guide
auaaaaugcgucucgucaga

SEQ ID NO: 24517 - RNA, 20 nt, Artificial Sequence
  LRRK2 RNA guide
augcgucucgucagacugac

SEQ ID NO: 24518 - RNA, 20 nt, Artificial Sequence
  LRRK2 RNA guide
auuagucagucugacgagac

SEQ ID NO: 24519 - RNA, 20 nt, Artificial Sequence
  LRRK2 RNA guide
auucagcugaauuagucagu

SEQ ID NO: 24520 - RNA, 20 nt, Artificial Sequence
  LRRK2 RNA guide
cagacugacuaauucagcug

SEQ ID NO: 24521 - RNA, 20 nt, Artificial Sequence
  LRRK2 RNA guide
cagcugaauuagucagucug

SEQ ID NO: 24522 - RNA, 20 nt, Artificial Sequence
  LRRK2 RNA guide
cagucugacgagacgcauuu

SEQ ID NO: 24523 - RNA, 20 nt, Artificial Sequence
  LRRK2 RNA guide
cgucagacugacuaauucag

SEQ ID NO: 24524 - RNA, 20 nt, Artificial Sequence
  LRRK2 RNA guide
cgucucgucagacugacuaa

SEQ ID NO: 24525 - RNA, 20 nt, Artificial Sequence
  LRRK2 RNA guide
cucgucagacugacuaauuc

SEQ ID NO: 24526 - RNA, 20 nt, Artificial Sequence
  LRRK2 RNA guide
cugaauuagucagucugacg

SEQ ID NO: 24527 - RNA, 20 nt, Artificial Sequence
  LRRK2 RNA guide
cugacuaauucagcugaauu

SEQ ID NO: 24528 - RNA, 20 nt, Artificial Sequence
  LRRK2 RNA guide
gaauuagucagucugacgag

SEQ ID NO: 24529 - RNA, 20 nt, Artificial Sequence
  LRRK2 RNA guide
gaauucagcugaauuaguca

SEQ ID NO: 24530 - RNA, 20 nt, Artificial Sequence
  LRRK2 RNA guide
gacugacuaauucagcugaa

SEQ ID NO: 24531 - RNA, 20 nt, Artificial Sequence
  LRRK2 RNA guide
gcgucucgucagacugacua

SEQ ID NO: 24532 - RNA, 20 nt, Artificial Sequence
  LRRK2 RNA guide
gcugaauuagucagucugac

SEQ ID NO: 24533 - RNA, 20 nt, Artificial Sequence
  LRRK2 RNA guide
guaauaaaaugcgucucguc

SEQ ID NO: 24534 - RNA, 20 nt, Artificial Sequence
  LRRK2 RNA guide
gucagacugacuaauucagc

SEQ ID NO: 24535 - RNA, 20 nt, Artificial Sequence
  LRRK2 RNA guide
gucagucugacgagacgcau

SEQ ID NO: 24536 - RNA, 20 nt, Artificial Sequence
  LRRK2 RNA guide
gucucgucagacugacuaau

SEQ ID NO: 24537 - RNA, 20 nt, Artificial Sequence
  LRRK2 RNA guide
uaaaaugcgucucgucagac

SEQ ID NO: 24538 - RNA, 20 nt, Artificial Sequence
  LRRK2 RNA guide
uaauaaaaugcgucucguca

SEQ ID NO: 24539 - RNA, 20 nt, Artificial Sequence
  LRRK2 RNA guide
uagucagucugacgagacgc

SEQ ID NO: 24540 - RNA, 20 nt, Artificial Sequence
  LRRK2 RNA guide
ucagacugacuaauucagcu

SEQ ID NO: 24541 - RNA, 20 nt, Artificial Sequence
  LRRK2 RNA guide
ucagcugaauuagucagucu

SEQ ID NO: 24542 - RNA, 20 nt, Artificial Sequence
  LRRK2 RNA guide
ucagucugacgagacgcauu

SEQ ID NO: 24543 - RNA, 20 nt, Artificial Sequence
  LRRK2 RNA guide
ucgucagacugacuaauuca

SEQ ID NO: 24544 - RNA, 20 nt, Artificial Sequence
  LRRK2 RNA guide
ucucgucagacugacuaauu

SEQ ID NO: 24545 - RNA, 20 nt, Artificial Sequence
  LRRK2 RNA guide
ugaauuagucagucugacga

SEQ ID NO: 24546 - RNA, 20 nt, Artificial Sequence
  LRRK2 RNA guide
ugaauucagcugaauuaguc

SEQ ID NO: 24547 - RNA, 20 nt, Artificial Sequence
  LRRK2 RNA guide
ugcgucucgucagacugacu

SEQ ID NO: 24548 - RNA, 20 nt, Artificial Sequence
  LRRK2 RNA guide
uuagucagucugacgagacg

SEQ ID NO: 24549 - RNA, 20 nt, Artificial Sequence
  LRRK2 RNA guide
uucagcugaauuagucaguc

SEQ ID NO: 24550 - RNA, 20 nt, Artificial Sequence
  LRRK2 RNA guide
uugaauucagcugaauuagu

SEQ ID NO: 24551 - RNA, 20 nt, Artificial Sequence
  LRRK2 RNA guide
uuugaauucagcugaauuag

SEQ ID NO: 24552 - RNA, 21 nt, Artificial Sequence
  LRRK2 RNA guide
aaaaugcgucucgucagacug

SEQ ID NO: 24553 - RNA, 21 nt, Artificial Sequence
  LRRK2 RNA guide
aaaugcgucucgucagacuga

SEQ ID NO: 24554 - RNA, 21 nt, Artificial Sequence
  LRRK2 RNA guide
aauaaaaugcgucucgucaga

SEQ ID NO: 24555 - RNA, 21 nt, Artificial Sequence
  LRRK2 RNA guide
aaugcgucucgucagacugac

SEQ ID NO: 24556 - RNA, 21 nt, Artificial Sequence
  LRRK2 RNA guide
aauuagucagucugacgagac

SEQ ID NO: 24557 - RNA, 21 nt, Artificial Sequence
  LRRK2 RNA guide
aauucagcugaauuagucagu

SEQ ID NO: 24558 - RNA, 21 nt, Artificial Sequence
  LRRK2 RNA guide
acugacuaauucagcugaauu

SEQ ID NO: 24559 - RNA, 21 nt, Artificial Sequence
  LRRK2 RNA guide
agacugacuaauucagcugaa

SEQ ID NO: 24560 - RNA, 21 nt, Artificial Sequence
  LRRK2 RNA guide
agcugaauuagucagucugac

SEQ ID NO: 24561 - RNA, 21 nt, Artificial Sequence
  LRRK2 RNA guide
agucagucugacgagacgcau

SEQ ID NO: 24562 - RNA, 21 nt, Artificial Sequence
  LRRK2 RNA guide
auaaaaugcgucucgucagac

SEQ ID NO: 24563 - RNA, 21 nt, Artificial Sequence
  LRRK2 RNA guide
augcgucucgucagacugacu

SEQ ID NO: 24564 - RNA, 21 nt, Artificial Sequence
  LRRK2 RNA guide
auuagucagucugacgagacg

SEQ ID NO: 24565 - RNA, 21 nt, Artificial Sequence
  LRRK2 RNA guide
auucagcugaauuagucaguc

SEQ ID NO: 24566 - RNA, 21 nt, Artificial Sequence
  LRRK2 RNA guide
cagacugacuaauucagcuga

SEQ ID NO: 24567 - RNA, 21 nt, Artificial Sequence
  LRRK2 RNA guide
cagcugaauuagucagucuga

SEQ ID NO: 24568 - RNA, 21 nt, Artificial Sequence
  LRRK2 RNA guide
cagucugacgagacgcauuuu

SEQ ID NO: 24569 - RNA, 21 nt, Artificial Sequence
  LRRK2 RNA guide
cgucagacugacuaauucagc

SEQ ID NO: 24570 - RNA, 21 nt, Artificial Sequence
  LRRK2 RNA guide
cgucucgucagacugacuaau

SEQ ID NO: 24571 - RNA, 21 nt, Artificial Sequence
  LRRK2 RNA guide
cucgucagacugacuaauuca

SEQ ID NO: 24572 - RNA, 21 nt, Artificial Sequence
  LRRK2 RNA guide
cugaauuagucagucugacga

SEQ ID NO: 24573 - RNA, 21 nt, Artificial Sequence
  LRRK2 RNA guide
cugacuaauucagcugaauuc

SEQ ID NO: 24574 - RNA, 21 nt, Artificial Sequence
  LRRK2 RNA guide
gaauuagucagucugacgaga

SEQ ID NO: 24575 - RNA, 21 nt, Artificial Sequence
  LRRK2 RNA guide
gaauucagcugaauuagucag

SEQ ID NO: 24576 - RNA, 21 nt, Artificial Sequence
  LRRK2 RNA guide
gacugacuaauucagcugaau

SEQ ID NO: 24577 - RNA, 21 nt, Artificial Sequence
  LRRK2 RNA guide
gcgucucgucagacugacuaa

SEQ ID NO: 24578 - RNA, 21 nt, Artificial Sequence
  LRRK2 RNA guide
gcugaauuagucagucugacg

SEQ ID NO: 24579 - RNA, 21 nt, Artificial Sequence
  LRRK2 RNA guide
gguaauaaaaugcgucucguc

SEQ ID NO: 24580 - RNA, 21 nt, Artificial Sequence
  LRRK2 RNA guide
guaauaaaaugcgucucguca

SEQ ID NO: 24581 - RNA, 21 nt, Artificial Sequence
  LRRK2 RNA guide
gucagacugacuaauucagcu

SEQ ID NO: 24582 - RNA, 21 nt, Artificial Sequence
  LRRK2 RNA guide
gucagucugacgagacgcauu

SEQ ID NO: 24583 - RNA, 21 nt, Artificial Sequence
  LRRK2 RNA guide
gucucgucagacugacuaauu

SEQ ID NO: 24584 - RNA, 21 nt, Artificial Sequence
  LRRK2 RNA guide
uaaaaugcgucucgucagacu

SEQ ID NO: 24585 - RNA, 21 nt, Artificial Sequence
  LRRK2 RNA guide
uaauaaaaugcgucucgucag

SEQ ID NO: 24586 - RNA, 21 nt, Artificial Sequence
  LRRK2 RNA guide
uagucagucugacgagacgca

SEQ ID NO: 24587 - RNA, 21 nt, Artificial Sequence
  LRRK2 RNA guide
ucagacugacuaauucagcug

SEQ ID NO: 24588 - RNA, 21 nt, Artificial Sequence
  LRRK2 RNA guide
ucagcugaauuagucagucug

SEQ ID NO: 24589 - RNA, 21 nt, Artificial Sequence
  LRRK2 RNA guide
ucagucugacgagacgcauuu

SEQ ID NO: 24590 - RNA, 21 nt, Artificial Sequence
  LRRK2 RNA guide
ucgucagacugacuaauucag

SEQ ID NO: 24591 - RNA, 21 nt, Artificial Sequence
  LRRK2 RNA guide
ucucgucagacugacuaauuc

SEQ ID NO: 24592 - RNA, 21 nt, Artificial Sequence
  LRRK2 RNA guide
ugaauuagucagucugacgag

SEQ ID NO: 24593 - RNA, 21 nt, Artificial Sequence
  LRRK2 RNA guide
ugaauucagcugaauuaguca

SEQ ID NO: 24594 - RNA, 21 nt, Artificial Sequence
  LRRK2 RNA guide
ugcgucucgucagacugacua

SEQ ID NO: 24595 - RNA, 21 nt, Artificial Sequence
  LRRK2 RNA guide
uuagucagucugacgagacgc

SEQ ID NO: 24596 - RNA, 21 nt, Artificial Sequence
  LRRK2 RNA guide
uucagcugaauuagucagucu

SEQ ID NO: 24597 - RNA, 21 nt, Artificial Sequence
  LRRK2 RNA guide
uugaauucagcugaauuaguc

SEQ ID NO: 24598 - RNA, 22 nt, Artificial Sequence
  LRRK2 RNA guide
aaaaugcgucucgucagacuga

SEQ ID NO: 24599 - RNA, 22 nt, Artificial Sequence
  LRRK2 RNA guide
aaaugcgucucgucagacugac

SEQ ID NO: 24600 - RNA, 22 nt, Artificial Sequence
  LRRK2 RNA guide
aauaaaaugcgucucgucagac

SEQ ID NO: 24601 - RNA, 22 nt, Artificial Sequence
  LRRK2 RNA guide
aaugcgucucgucagacugacu

SEQ ID NO: 24602 - RNA, 22 nt, Artificial Sequence
  LRRK2 RNA guide
aauuagucagucugacgagacg

SEQ ID NO: 24603 - RNA, 22 nt, Artificial Sequence
  LRRK2 RNA guide
aauucagcugaauuagucaguc

SEQ ID NO: 24604 - RNA, 22 nt, Artificial Sequence
  LRRK2 RNA guide
acugacuaauucagcugaauuc

SEQ ID NO: 24605 - RNA, 22 nt, Artificial Sequence
  LRRK2 RNA guide
agacugacuaauucagcugaau

SEQ ID NO: 24606 - RNA, 22 nt, Artificial Sequence
  LRRK2 RNA guide
agcugaauuagucagucugacg

SEQ ID NO: 24607 - RNA, 22 nt, Artificial Sequence
  LRRK2 RNA guide
agguaauaaaaugcgucucguc

SEQ ID NO: 24608 - RNA, 22 nt, Artificial Sequence
  LRRK2 RNA guide
agucagucugacgagacgcauu

SEQ ID NO: 24609 - RNA, 22 nt, Artificial Sequence
  LRRK2 RNA guide
auaaaaugcgucucgucagacu

SEQ ID NO: 24610 - RNA, 22 nt, Artificial Sequence
  LRRK2 RNA guide
augcgucucgucagacugacua

SEQ ID NO: 24611 - RNA, 22 nt, Artificial Sequence
  LRRK2 RNA guide
auuagucagucugacgagacgc

SEQ ID NO: 24612 - RNA, 22 nt, Artificial Sequence
  LRRK2 RNA guide
auucagcugaauuagucagucu

SEQ ID NO: 24613 - RNA, 22 nt, Artificial Sequence
  LRRK2 RNA guide
cagacugacuaauucagcugaa

SEQ ID NO: 24614 - RNA, 22 nt, Artificial Sequence
  LRRK2 RNA guide
cagcugaauuagucagucugac

SEQ ID NO: 24615 - RNA, 22 nt, Artificial Sequence
  LRRK2 RNA guide
cagucugacgagacgcauuuua

SEQ ID NO: 24616 - RNA, 22 nt, Artificial Sequence
  LRRK2 RNA guide
cgucagacugacuaauucagcu

SEQ ID NO: 24617 - RNA, 22 nt, Artificial Sequence
  LRRK2 RNA guide
cgucucgucagacugacuaauu

SEQ ID NO: 24618 - RNA, 22 nt, Artificial Sequence
  LRRK2 RNA guide
cucgucagacugacuaauucag

SEQ ID NO: 24619 - RNA, 22 nt, Artificial Sequence
  LRRK2 RNA guide
cugaauuagucagucugacgag

SEQ ID NO: 24620 - RNA, 22 nt, Artificial Sequence
  LRRK2 RNA guide
cugacuaauucagcugaauuca

SEQ ID NO: 24621 - RNA, 22 nt, Artificial Sequence
  LRRK2 RNA guide
gaauuagucagucugacgagac

SEQ ID NO: 24622 - RNA, 22 nt, Artificial Sequence
  LRRK2 RNA guide
gaauucagcugaauuagucagu

SEQ ID NO: 24623 - RNA, 22 nt, Artificial Sequence
  LRRK2 RNA guide
gacugacuaauucagcugaauu

SEQ ID NO: 24624 - RNA, 22 nt, Artificial Sequence
  LRRK2 RNA guide
gcgucucgucagacugacuaau

SEQ ID NO: 24625 - RNA, 22 nt, Artificial Sequence
  LRRK2 RNA guide
gcugaauuagucagucugacga

SEQ ID NO: 24626 - RNA, 22 nt, Artificial Sequence
  LRRK2 RNA guide
gguaauaaaaugcgucucguca

SEQ ID NO: 24627 - RNA, 22 nt, Artificial Sequence
  LRRK2 RNA guide
guaauaaaaugcgucucgucag

SEQ ID NO: 24628 - RNA, 22 nt, Artificial Sequence
  LRRK2 RNA guide
gucagacugacuaauucagcug

SEQ ID NO: 24629 - RNA, 22 nt, Artificial Sequence
  LRRK2 RNA guide
gucagucugacgagacgcauuu

SEQ ID NO: 24630 - RNA, 22 nt, Artificial Sequence
  LRRK2 RNA guide
gucucgucagacugacuaauuc

SEQ ID NO: 24631 - RNA, 22 nt, Artificial Sequence
  LRRK2 RNA guide
uaaaaugcgucucgucagacug

SEQ ID NO: 24632 - RNA, 22 nt, Artificial Sequence
  LRRK2 RNA guide
uaauaaaaugcgucucgucaga

SEQ ID NO: 24633 - RNA, 22 nt, Artificial Sequence
  LRRK2 RNA guide
uagucagucugacgagacgcau

SEQ ID NO: 24634 - RNA, 22 nt, Artificial Sequence
  LRRK2 RNA guide
ucagacugacuaauucagcuga

SEQ ID NO: 24635 - RNA, 22 nt, Artificial Sequence
  LRRK2 RNA guide
ucagcugaauuagucagucuga

SEQ ID NO: 24636 - RNA, 22 nt, Artificial Sequence
  LRRK2 RNA guide
ucagucugacgagacgcauuuu

SEQ ID NO: 24637 - RNA, 22 nt, Artificial Sequence
  LRRK2 RNA guide
ucgucagacugacuaauucagc

SEQ ID NO: 24638 - RNA, 22 nt, Artificial Sequence
  LRRK2 RNA guide
ucucgucagacugacuaauuca

SEQ ID NO: 24639 - RNA, 22 nt, Artificial Sequence
  LRRK2 RNA guide
ugaauuagucagucugacgaga

SEQ ID NO: 24640 - RNA, 22 nt, Artificial Sequence
  LRRK2 RNA guide
ugaauucagcugaauuagucag

SEQ ID NO: 24641 - RNA, 22 nt, Artificial Sequence
  LRRK2 RNA guide
ugcgucucgucagacugacuaa

SEQ ID NO: 24642 - RNA, 22 nt, Artificial Sequence
  LRRK2 RNA guide
uuagucagucugacgagacgca

SEQ ID NO: 24643 - RNA, 22 nt, Artificial Sequence
  LRRK2 RNA guide
uucagcugaauuagucagucug

SEQ ID NO: 24644 - RNA, 22 nt, Artificial Sequence
  LRRK2 RNA guide
uugaauucagcugaauuaguca

SEQ ID NO: 24645 - RNA, 22 nt, Artificial Sequence
  LRRK2 RNA guide
uuugaauucagcugaauuaguc

SEQ ID NO: 24646 - RNA, 20 nt, Artificial Sequence
  LRRK2 RNA guide
aaaaugcgucucaucagaca

SEQ ID NO: 24647 - RNA, 20 nt, Artificial Sequence
  LRRK2 RNA guide
aaaugcgucucaucagacag

SEQ ID NO: 24648 - RNA, 20 nt, Artificial Sequence
  LRRK2 RNA guide
aauaaaaugcgucucaucag

SEQ ID NO: 24649 - RNA, 20 nt, Artificial Sequence
  LRRK2 RNA guide
aaugcgucucaucagacaga

SEQ ID NO: 24650 - RNA, 20 nt, Artificial Sequence
  LRRK2 RNA guide
aauuagucugucugaugaga

SEQ ID NO: 24651 - RNA, 20 nt, Artificial Sequence
  LRRK2 RNA guide
agcugaauuagucugucuga

SEQ ID NO: 24652 - RNA, 20 nt, Artificial Sequence
  LRRK2 RNA guide
agguaauaaaaugcgucuca

SEQ ID NO: 24653 - RNA, 20 nt, Artificial Sequence
  LRRK2 RNA guide
agucugucugaugagacgca

SEQ ID NO: 24654 - RNA, 20 nt, Artificial Sequence
  LRRK2 RNA guide
auaaaaugcgucucaucaga

SEQ ID NO: 24655 - RNA, 20 nt, Artificial Sequence
  LRRK2 RNA guide
augagacgcauuuuauuacc

SEQ ID NO: 24656 - RNA, 20 nt, Artificial Sequence
  LRRK2 RNA guide
augcgucucaucagacagac

SEQ ID NO: 24657 - RNA, 20 nt, Artificial Sequence
  LRRK2 RNA guide
auuagucugucugaugagac

SEQ ID NO: 24658 - RNA, 20 nt, Artificial Sequence
  LRRK2 RNA guide
auucagcugaauuagucugu

SEQ ID NO: 24659 - RNA, 20 nt, Artificial Sequence
  LRRK2 RNA guide
cagcugaauuagucugucug

SEQ ID NO: 24660 - RNA, 20 nt, Artificial Sequence
  LRRK2 RNA guide
caucagacagacuaauucag

SEQ ID NO: 24661 - RNA, 20 nt, Artificial Sequence
  LRRK2 RNA guide
cgucucaucagacagacuaa

SEQ ID NO: 24662 - RNA, 20 nt, Artificial Sequence
  LRRK2 RNA guide
cucaucagacagacuaauuc

SEQ ID NO: 24663 - RNA, 20 nt, Artificial Sequence
  LRRK2 RNA guide
cugaauuagucugucugaug

SEQ ID NO: 24664 - RNA, 20 nt, Artificial Sequence
  LRRK2 RNA guide
cugaugagacgcauuuuauu

SEQ ID NO: 24665 - RNA, 20 nt, Artificial Sequence
  LRRK2 RNA guide
cugucugaugagacgcauuu

SEQ ID NO: 24666 - RNA, 20 nt, Artificial Sequence
  LRRK2 RNA guide
gaauuagucugucugaugag

SEQ ID NO: 24667 - RNA, 20 nt, Artificial Sequence
  LRRK2 RNA guide
gaugagacgcauuuuauuac

SEQ ID NO: 24668 - RNA, 20 nt, Artificial Sequence
  LRRK2 RNA guide
gcgucucaucagacagacua

SEQ ID NO: 24669 - RNA, 20 nt, Artificial Sequence
  LRRK2 RNA guide
gcugaauuagucugucugau

SEQ ID NO: 24670 - RNA, 20 nt, Artificial Sequence
  LRRK2 RNA guide
gguaauaaaaugcgucucau

SEQ ID NO: 24671 - RNA, 20 nt, Artificial Sequence
  LRRK2 RNA guide
guaauaaaaugcgucucauc

SEQ ID NO: 24672 - RNA, 20 nt, Artificial Sequence
  LRRK2 RNA guide
gucucaucagacagacuaau

SEQ ID NO: 24673 - RNA, 20 nt, Artificial Sequence
  LRRK2 RNA guide
gucugaugagacgcauuuua

SEQ ID NO: 24674 - RNA, 20 nt, Artificial Sequence
  LRRK2 RNA guide
gucugucugaugagacgcau

SEQ ID NO: 24675 - RNA, 20 nt, Artificial Sequence
  LRRK2 RNA guide
uaaaaugcgucucaucagac

SEQ ID NO: 24676 - RNA, 20 nt, Artificial Sequence
  LRRK2 RNA guide
uaauaaaaugcgucucauca

SEQ ID NO: 24677 - RNA, 20 nt, Artificial Sequence
  LRRK2 RNA guide
uagguaauaaaaugcgucuc

SEQ ID NO: 24678 - RNA, 20 nt, Artificial Sequence
  LRRK2 RNA guide
uagucugucugaugagacgc

SEQ ID NO: 24679 - RNA, 20 nt, Artificial Sequence
  LRRK2 RNA guide
ucagcugaauuagucugucu

SEQ ID NO: 24680 - RNA, 20 nt, Artificial Sequence
  LRRK2 RNA guide
ucaucagacagacuaauuca

SEQ ID NO: 24681 - RNA, 20 nt, Artificial Sequence
  LRRK2 RNA guide
ucucaucagacagacuaauu

SEQ ID NO: 24682 - RNA, 20 nt, Artificial Sequence
  LRRK2 RNA guide
ucugaugagacgcauuuuau

SEQ ID NO: 24683 - RNA, 20 nt, Artificial Sequence
  LRRK2 RNA guide
ucugucugaugagacgcauu

SEQ ID NO: 24684 - RNA, 20 nt, Artificial Sequence
  LRRK2 RNA guide
ugaauuagucugucugauga

SEQ ID NO: 24685 - RNA, 20 nt, Artificial Sequence
  LRRK2 RNA guide
ugaugagacgcauuuuauua

SEQ ID NO: 24686 - RNA, 20 nt, Artificial Sequence
  LRRK2 RNA guide
ugcgucucaucagacagacu

SEQ ID NO: 24687 - RNA, 20 nt, Artificial Sequence
  LRRK2 RNA guide
ugucugaugagacgcauuuu

SEQ ID NO: 24688 - RNA, 20 nt, Artificial Sequence
  LRRK2 RNA guide
uuagguaauaaaaugcgucu

SEQ ID NO: 24689 - RNA, 20 nt, Artificial Sequence
  LRRK2 RNA guide
uuagucugucugaugagacg

SEQ ID NO: 24690 - RNA, 20 nt, Artificial Sequence
  LRRK2 RNA guide
uucagcugaauuagucuguc

SEQ ID NO: 24691 - RNA, 20 nt, Artificial Sequence
  LRRK2 RNA guide
uuuagguaauaaaaugcguc

SEQ ID NO: 24692 - RNA, 21 nt, Artificial Sequence
  LRRK2 RNA guide
aaaaugcgucucaucagacag

SEQ ID NO: 24693 - RNA, 21 nt, Artificial Sequence
  LRRK2 RNA guide
aaaugcgucucaucagacaga

SEQ ID NO: 24694 - RNA, 21 nt, Artificial Sequence
  LRRK2 RNA guide
aauaaaaugcgucucaucaga

SEQ ID NO: 24695 - RNA, 21 nt, Artificial Sequence
  LRRK2 RNA guide
aaugcgucucaucagacagac

SEQ ID NO: 24696 - RNA, 21 nt, Artificial Sequence
  LRRK2 RNA guide
aauuagucugucugaugagac

SEQ ID NO: 24697 - RNA, 21 nt, Artificial Sequence
  LRRK2 RNA guide
aauucagcugaauuagucugu

SEQ ID NO: 24698 - RNA, 21 nt, Artificial Sequence
  LRRK2 RNA guide
agcugaauuagucugucugau

SEQ ID NO: 24699 - RNA, 21 nt, Artificial Sequence
  LRRK2 RNA guide
agguaauaaaaugcgucucau

SEQ ID NO: 24700 - RNA, 21 nt, Artificial Sequence
  LRRK2 RNA guide
agucugucugaugagacgcau

SEQ ID NO: 24701 - RNA, 21 nt, Artificial Sequence
  LRRK2 RNA guide
auaaaaugcgucucaucagac

SEQ ID NO: 24702 - RNA, 21 nt, Artificial Sequence
  LRRK2 RNA guide
augagacgcauuuuauuaccu

SEQ ID NO: 24703 - RNA, 21 nt, Artificial Sequence
  LRRK2 RNA guide
augcgucucaucagacagacu

SEQ ID NO: 24704 - RNA, 21 nt, Artificial Sequence
  LRRK2 RNA guide
auuagucugucugaugagacg

SEQ ID NO: 24705 - RNA, 21 nt, Artificial Sequence
  LRRK2 RNA guide
auucagcugaauuagucuguc

SEQ ID NO: 24706 - RNA, 21 nt, Artificial Sequence
  LRRK2 RNA guide
cagcugaauuagucugucuga

SEQ ID NO: 24707 - RNA, 21 nt, Artificial Sequence
  LRRK2 RNA guide
caucagacagacuaauucagc

SEQ ID NO: 24708 - RNA, 21 nt, Artificial Sequence
  LRRK2 RNA guide
cgucucaucagacagacuaau

SEQ ID NO: 24709 - RNA, 21 nt, Artificial Sequence
  LRRK2 RNA guide
cucaucagacagacuaauuca

SEQ ID NO: 24710 - RNA, 21 nt, Artificial Sequence
  LRRK2 RNA guide
cugaauuagucugucugauga

SEQ ID NO: 24711 - RNA, 21 nt, Artificial Sequence
  LRRK2 RNA guide
cugaugagacgcauuuuauua

SEQ ID NO: 24712 - RNA, 21 nt, Artificial Sequence
  LRRK2 RNA guide
cugucugaugagacgcauuuu

SEQ ID NO: 24713 - RNA, 21 nt, Artificial Sequence
  LRRK2 RNA guide
gaauuagucugucugaugaga

SEQ ID NO: 24714 - RNA, 21 nt, Artificial Sequence
  LRRK2 RNA guide
gaugagacgcauuuuauuacc

SEQ ID NO: 24715 - RNA, 21 nt, Artificial Sequence
  LRRK2 RNA guide
gcgucucaucagacagacuaa

SEQ ID NO: 24716 - RNA, 21 nt, Artificial Sequence
  LRRK2 RNA guide
gcugaauuagucugucugaug

SEQ ID NO: 24717 - RNA, 21 nt, Artificial Sequence
  LRRK2 RNA guide
gguaauaaaaugcgucucauc

SEQ ID NO: 24718 - RNA, 21 nt, Artificial Sequence
  LRRK2 RNA guide
guaauaaaaugcgucucauca

SEQ ID NO: 24719 - RNA, 21 nt, Artificial Sequence
  LRRK2 RNA guide
gucucaucagacagacuaauu

SEQ ID NO: 24720 - RNA, 21 nt, Artificial Sequence
  LRRK2 RNA guide
gucugaugagacgcauuuuau

SEQ ID NO: 24721 - RNA, 21 nt, Artificial Sequence
  LRRK2 RNA guide
gucugucugaugagacgcauu

SEQ ID NO: 24722 - RNA, 21 nt, Artificial Sequence
  LRRK2 RNA guide
uaaaaugcgucucaucagaca

SEQ ID NO: 24723 - RNA, 21 nt, Artificial Sequence
  LRRK2 RNA guide
uaauaaaaugcgucucaucag

SEQ ID NO: 24724 - RNA, 21 nt, Artificial Sequence
  LRRK2 RNA guide
uagguaauaaaaugcgucuca

SEQ ID NO: 24725 - RNA, 21 nt, Artificial Sequence
  LRRK2 RNA guide
uagucugucugaugagacgca

SEQ ID NO: 24726 - RNA, 21 nt, Artificial Sequence
  LRRK2 RNA guide
ucagcugaauuagucugucug

SEQ ID NO: 24727 - RNA, 21 nt, Artificial Sequence
  LRRK2 RNA guide
ucaucagacagacuaauucag

SEQ ID NO: 24728 - RNA, 21 nt, Artificial Sequence
  LRRK2 RNA guide
ucucaucagacagacuaauuc

SEQ ID NO: 24729 - RNA, 21 nt, Artificial Sequence
  LRRK2 RNA guide
ucugaugagacgcauuuuauu

SEQ ID NO: 24730 - RNA, 21 nt, Artificial Sequence
  LRRK2 RNA guide
ucugucugaugagacgcauuu

SEQ ID NO: 24731 - RNA, 21 nt, Artificial Sequence
  LRRK2 RNA guide
ugaauuagucugucugaugag

SEQ ID NO: 24732 - RNA, 21 nt, Artificial Sequence
  LRRK2 RNA guide
ugaugagacgcauuuuauuac

SEQ ID NO: 24733 - RNA, 21 nt, Artificial Sequence
  LRRK2 RNA guide
ugcgucucaucagacagacua

SEQ ID NO: 24734 - RNA, 21 nt, Artificial Sequence
  LRRK2 RNA guide
ugucugaugagacgcauuuua

SEQ ID NO: 24735 - RNA, 21 nt, Artificial Sequence
  LRRK2 RNA guide
uuagguaauaaaaugcgucuc

SEQ ID NO: 24736 - RNA, 21 nt, Artificial Sequence
  LRRK2 RNA guide
uuagucugucugaugagacgc

SEQ ID NO: 24737 - RNA, 21 nt, Artificial Sequence
  LRRK2 RNA guide
uucagcugaauuagucugucu

SEQ ID NO: 24738 - RNA, 22 nt, Artificial Sequence
  LRRK2 RNA guide
aaaaugcgucucaucagacaga

SEQ ID NO: 24739 - RNA, 22 nt, Artificial Sequence
  LRRK2 RNA guide
aaaugcgucucaucagacagac

SEQ ID NO: 24740 - RNA, 22 nt, Artificial Sequence
  LRRK2 RNA guide
aauaaaaugcgucucaucagac

SEQ ID NO: 24741 - RNA, 22 nt, Artificial Sequence
  LRRK2 RNA guide
aaugcgucucaucagacagacu

SEQ ID NO: 24742 - RNA, 22 nt, Artificial Sequence
  LRRK2 RNA guide
aauuagucugucugaugagacg

SEQ ID NO: 24743 - RNA, 22 nt, Artificial Sequence
  LRRK2 RNA guide
aauucagcugaauuagucuguc

SEQ ID NO: 24744 - RNA, 22 nt, Artificial Sequence
  LRRK2 RNA guide
agcugaauuagucugucugaug

SEQ ID NO: 24745 - RNA, 22 nt, Artificial Sequence
  LRRK2 RNA guide
agguaauaaaaugcgucucauc

SEQ ID NO: 24746 - RNA, 22 nt, Artificial Sequence
  LRRK2 RNA guide
agucugucugaugagacgcauu

SEQ ID NO: 24747 - RNA, 22 nt, Artificial Sequence
  LRRK2 RNA guide
auaaaaugcgucucaucagaca

SEQ ID NO: 24748 - RNA, 22 nt, Artificial Sequence
  LRRK2 RNA guide
augagacgcauuuuauuaccua

SEQ ID NO: 24749 - RNA, 22 nt, Artificial Sequence
  LRRK2 RNA guide
augcgucucaucagacagacua

SEQ ID NO: 24750 - RNA, 22 nt, Artificial Sequence
  LRRK2 RNA guide
auuagucugucugaugagacgc

SEQ ID NO: 24751 - RNA, 22 nt, Artificial Sequence
  LRRK2 RNA guide
auucagcugaauuagucugucu

SEQ ID NO: 24752 - RNA, 22 nt, Artificial Sequence
  LRRK2 RNA guide
cagcugaauuagucugucugau

SEQ ID NO: 24753 - RNA, 22 nt, Artificial Sequence
  LRRK2 RNA guide
caucagacagacuaauucagcu

SEQ ID NO: 24754 - RNA, 22 nt, Artificial Sequence
  LRRK2 RNA guide
cgucucaucagacagacuaauu

SEQ ID NO: 24755 - RNA, 22 nt, Artificial Sequence
  LRRK2 RNA guide
cguuuuuagguaauaaaaugcg

SEQ ID NO: 24756 - RNA, 22 nt, Artificial Sequence
  LRRK2 RNA guide
cucaucagacagacuaauucag

SEQ ID NO: 24757 - RNA, 22 nt, Artificial Sequence
  LRRK2 RNA guide
cugaauuagucugucugaugag

SEQ ID NO: 24758 - RNA, 22 nt, Artificial Sequence
  LRRK2 RNA guide
cugaugagacgcauuuuauuac

SEQ ID NO: 24759 - RNA, 22 nt, Artificial Sequence
  LRRK2 RNA guide
cugucugaugagacgcauuuua

SEQ ID NO: 24760 - RNA, 22 nt, Artificial Sequence
  LRRK2 RNA guide
gaauuagucugucugaugagac

SEQ ID NO: 24761 - RNA, 22 nt, Artificial Sequence
  LRRK2 RNA guide
gaauucagcugaauuagucugu

SEQ ID NO: 24762 - RNA, 22 nt, Artificial Sequence
  LRRK2 RNA guide
gaugagacgcauuuuauuaccu

SEQ ID NO: 24763 - RNA, 22 nt, Artificial Sequence
  LRRK2 RNA guide
gcgucucaucagacagacuaau

SEQ ID NO: 24764 - RNA, 22 nt, Artificial Sequence
  LRRK2 RNA guide
gcugaauuagucugucugauga

SEQ ID NO: 24765 - RNA, 22 nt, Artificial Sequence
  LRRK2 RNA guide
gguaauaaaaugcgucucauca

SEQ ID NO: 24766 - RNA, 22 nt, Artificial Sequence
  LRRK2 RNA guide
guaauaaaaugcgucucaucag

SEQ ID NO: 24767 - RNA, 22 nt, Artificial Sequence
  LRRK2 RNA guide
gucucaucagacagacuaauuc

SEQ ID NO: 24768 - RNA, 22 nt, Artificial Sequence
  LRRK2 RNA guide
gucugaugagacgcauuuuauu

SEQ ID NO: 24769 - RNA, 22 nt, Artificial Sequence
  LRRK2 RNA guide
gucugucugaugagacgcauuu

SEQ ID NO: 24770 - RNA, 22 nt, Artificial Sequence
  LRRK2 RNA guide
uaaaaugcgucucaucagacag

SEQ ID NO: 24771 - RNA, 22 nt, Artificial Sequence
  LRRK2 RNA guide
uaauaaaaugcgucucaucaga

SEQ ID NO: 24772 - RNA, 22 nt, Artificial Sequence
  LRRK2 RNA guide
uagguaauaaaaugcgucucau

SEQ ID NO: 24773 - RNA, 22 nt, Artificial Sequence
  LRRK2 RNA guide
uagucugucugaugagacgcau

SEQ ID NO: 24774 - RNA, 22 nt, Artificial Sequence
  LRRK2 RNA guide
ucagcugaauuagucugucuga

SEQ ID NO: 24775 - RNA, 22 nt, Artificial Sequence
  LRRK2 RNA guide
ucaucagacagacuaauucagc

SEQ ID NO: 24776 - RNA, 22 nt, Artificial Sequence
  LRRK2 RNA guide
ucucaucagacagacuaauuca

SEQ ID NO: 24777 - RNA, 22 nt, Artificial Sequence
  LRRK2 RNA guide
ucugaugagacgcauuuuauua

SEQ ID NO: 24778 - RNA, 22 nt, Artificial Sequence
  LRRK2 RNA guide
ucugucugaugagacgcauuuu

SEQ ID NO: 24779 - RNA, 22 nt, Artificial Sequence
  LRRK2 RNA guide
ugaauuagucugucugaugaga

SEQ ID NO: 24780 - RNA, 22 nt, Artificial Sequence
  LRRK2 RNA guide
ugaugagacgcauuuuauuacc

SEQ ID NO: 24781 - RNA, 22 nt, Artificial Sequence
  LRRK2 RNA guide
ugcgucucaucagacagacuaa

SEQ ID NO: 24782 - RNA, 22 nt, Artificial Sequence
  LRRK2 RNA guide
ugucugaugagacgcauuuuau

SEQ ID NO: 24783 - RNA, 22 nt, Artificial Sequence
  LRRK2 RNA guide
uuagguaauaaaaugcgucuca

SEQ ID NO: 24784 - RNA, 22 nt, Artificial Sequence
  LRRK2 RNA guide
uuagucugucugaugagacgca

SEQ ID NO: 24785 - RNA, 22 nt, Artificial Sequence
  LRRK2 RNA guide
uucagcugaauuagucugucug

SEQ ID NO: 24786 - RNA, 22 nt, Artificial Sequence
  LRRK2 RNA guide
uuuagguaauaaaaugcgucuc

SEQ ID NO: 24787 - RNA, 20 nt, Artificial Sequence
  LRRK2 RNA guide
aaaaugugucucgucagaca

SEQ ID NO: 24788 - RNA, 20 nt, Artificial Sequence
  LRRK2 RNA guide
aaaugugucucgucagacag

SEQ ID NO: 24789 - RNA, 20 nt, Artificial Sequence
  LRRK2 RNA guide
aauaaaaugugucucgucag

SEQ ID NO: 24790 - RNA, 20 nt, Artificial Sequence
  LRRK2 RNA guide
aaugugucucgucagacaga

SEQ ID NO: 24791 - RNA, 20 nt, Artificial Sequence
  LRRK2 RNA guide
aauuagucugucugacgaga

SEQ ID NO: 24792 - RNA, 20 nt, Artificial Sequence
  LRRK2 RNA guide
acgagacacauuuuauuacc

SEQ ID NO: 24793 - RNA, 20 nt, Artificial Sequence
  LRRK2 RNA guide
agguaauaaaaugugucucg

SEQ ID NO: 24794 - RNA, 20 nt, Artificial Sequence
  LRRK2 RNA guide
agucugucugacgagacaca

SEQ ID NO: 24795 - RNA, 20 nt, Artificial Sequence
  LRRK2 RNA guide
auaaaaugugucucgucaga

SEQ ID NO: 24796 - RNA, 20 nt, Artificial Sequence
  LRRK2 RNA guide
augugucucgucagacagac

SEQ ID NO: 24797 - RNA, 20 nt, Artificial Sequence
  LRRK2 RNA guide
auuagucugucugacgagac

SEQ ID NO: 24798 - RNA, 20 nt, Artificial Sequence
  LRRK2 RNA guide
cgagacacauuuuauuaccu

SEQ ID NO: 24799 - RNA, 20 nt, Artificial Sequence
  LRRK2 RNA guide
cugaauuagucugucugacg

SEQ ID NO: 24800 - RNA, 20 nt, Artificial Sequence
  LRRK2 RNA guide
cugacgagacacauuuuauu

SEQ ID NO: 24801 - RNA, 20 nt, Artificial Sequence
  LRRK2 RNA guide
cugucugacgagacacauuu

SEQ ID NO: 24802 - RNA, 20 nt, Artificial Sequence
  LRRK2 RNA guide
gaauuagucugucugacgag

SEQ ID NO: 24803 - RNA, 20 nt, Artificial Sequence
  LRRK2 RNA guide
gacgagacacauuuuauuac

SEQ ID NO: 24804 - RNA, 20 nt, Artificial Sequence
  LRRK2 RNA guide
gagacacauuuuauuaccua

SEQ ID NO: 24805 - RNA, 20 nt, Artificial Sequence
  LRRK2 RNA guide
gguaauaaaaugugucucgu

SEQ ID NO: 24806 - RNA, 20 nt, Artificial Sequence
  LRRK2 RNA guide
guaauaaaaugugucucguc

SEQ ID NO: 24807 - RNA, 20 nt, Artificial Sequence
  LRRK2 RNA guide
gucugacgagacacauuuua

SEQ ID NO: 24808 - RNA, 20 nt, Artificial Sequence
  LRRK2 RNA guide
gucugucugacgagacacau

SEQ ID NO: 24809 - RNA, 20 nt, Artificial Sequence
  LRRK2 RNA guide
gugucucgucagacagacua

SEQ ID NO: 24810 - RNA, 20 nt, Artificial Sequence
  LRRK2 RNA guide
uaaaaugugucucgucagac

SEQ ID NO: 24811 - RNA, 20 nt, Artificial Sequence
  LRRK2 RNA guide
uaauaaaaugugucucguca

SEQ ID NO: 24812 - RNA, 20 nt, Artificial Sequence
  LRRK2 RNA guide
uagguaauaaaaugugucuc

SEQ ID NO: 24813 - RNA, 20 nt, Artificial Sequence
  LRRK2 RNA guide
uagucugucugacgagacac

SEQ ID NO: 24814 - RNA, 20 nt, Artificial Sequence
  LRRK2 RNA guide
ucugacgagacacauuuuau

SEQ ID NO: 24815 - RNA, 20 nt, Artificial Sequence
  LRRK2 RNA guide
ucugucugacgagacacauu

SEQ ID NO: 24816 - RNA, 20 nt, Artificial Sequence
  LRRK2 RNA guide
ugaauuagucugucugacga

SEQ ID NO: 24817 - RNA, 20 nt, Artificial Sequence
  LRRK2 RNA guide
ugacgagacacauuuuauua

SEQ ID NO: 24818 - RNA, 20 nt, Artificial Sequence
  LRRK2 RNA guide
ugucugacgagacacauuuu

SEQ ID NO: 24819 - RNA, 20 nt, Artificial Sequence
  LRRK2 RNA guide
ugugucucgucagacagacu

SEQ ID NO: 24820 - RNA, 20 nt, Artificial Sequence
  LRRK2 RNA guide
uuagucugucugacgagaca

SEQ ID NO: 24821 - RNA, 21 nt, Artificial Sequence
  LRRK2 RNA guide
aaaaugugucucgucagacag

SEQ ID NO: 24822 - RNA, 21 nt, Artificial Sequence
  LRRK2 RNA guide
aaaugugucucgucagacaga

SEQ ID NO: 24823 - RNA, 21 nt, Artificial Sequence
  LRRK2 RNA guide
aauaaaaugugucucgucaga

SEQ ID NO: 24824 - RNA, 21 nt, Artificial Sequence
  LRRK2 RNA guide
aaugugucucgucagacagac

SEQ ID NO: 24825 - RNA, 21 nt, Artificial Sequence
  LRRK2 RNA guide
aauuagucugucugacgagac

SEQ ID NO: 24826 - RNA, 21 nt, Artificial Sequence
  LRRK2 RNA guide
acgagacacauuuuauuaccu

SEQ ID NO: 24827 - RNA, 21 nt, Artificial Sequence
  LRRK2 RNA guide
agguaauaaaaugugucucgu

SEQ ID NO: 24828 - RNA, 21 nt, Artificial Sequence
  LRRK2 RNA guide
agucugucugacgagacacau

SEQ ID NO: 24829 - RNA, 21 nt, Artificial Sequence
  LRRK2 RNA guide
auaaaaugugucucgucagac

SEQ ID NO: 24830 - RNA, 21 nt, Artificial Sequence
  LRRK2 RNA guide
augugucucgucagacagacu

SEQ ID NO: 24831 - RNA, 21 nt, Artificial Sequence
  LRRK2 RNA guide
auuagucugucugacgagaca

SEQ ID NO: 24832 - RNA, 21 nt, Artificial Sequence
  LRRK2 RNA guide
cgagacacauuuuauuaccua

SEQ ID NO: 24833 - RNA, 21 nt, Artificial Sequence
  LRRK2 RNA guide
cugaauuagucugucugacga

SEQ ID NO: 24834 - RNA, 21 nt, Artificial Sequence
  LRRK2 RNA guide
cugacgagacacauuuuauua

SEQ ID NO: 24835 - RNA, 21 nt, Artificial Sequence
  LRRK2 RNA guide
cugucugacgagacacauuuu

SEQ ID NO: 24836 - RNA, 21 nt, Artificial Sequence
  LRRK2 RNA guide
gaauuagucugucugacgaga

SEQ ID NO: 24837 - RNA, 21 nt, Artificial Sequence
  LRRK2 RNA guide
gacgagacacauuuuauuacc

SEQ ID NO: 24838 - RNA, 21 nt, Artificial Sequence
  LRRK2 RNA guide
gcugaauuagucugucugacg

SEQ ID NO: 24839 - RNA, 21 nt, Artificial Sequence
  LRRK2 RNA guide
gguaauaaaaugugucucguc

SEQ ID NO: 24840 - RNA, 21 nt, Artificial Sequence
  LRRK2 RNA guide
guaauaaaaugugucucguca

SEQ ID NO: 24841 - RNA, 21 nt, Artificial Sequence
  LRRK2 RNA guide
gucugacgagacacauuuuau

SEQ ID NO: 24842 - RNA, 21 nt, Artificial Sequence
  LRRK2 RNA guide
gucugucugacgagacacauu

SEQ ID NO: 24843 - RNA, 21 nt, Artificial Sequence
  LRRK2 RNA guide
gugucucgucagacagacuaa

SEQ ID NO: 24844 - RNA, 21 nt, Artificial Sequence
  LRRK2 RNA guide
uaaaaugugucucgucagaca

SEQ ID NO: 24845 - RNA, 21 nt, Artificial Sequence
  LRRK2 RNA guide
uaauaaaaugugucucgucag

SEQ ID NO: 24846 - RNA, 21 nt, Artificial Sequence
  LRRK2 RNA guide
uagguaauaaaaugugucucg

SEQ ID NO: 24847 - RNA, 21 nt, Artificial Sequence
  LRRK2 RNA guide
uagucugucugacgagacaca

SEQ ID NO: 24848 - RNA, 21 nt, Artificial Sequence
  LRRK2 RNA guide
ucugacgagacacauuuuauu

SEQ ID NO: 24849 - RNA, 21 nt, Artificial Sequence
  LRRK2 RNA guide
ucugucugacgagacacauuu

SEQ ID NO: 24850 - RNA, 21 nt, Artificial Sequence
  LRRK2 RNA guide
ugaauuagucugucugacgag

SEQ ID NO: 24851 - RNA, 21 nt, Artificial Sequence
  LRRK2 RNA guide
ugacgagacacauuuuauuac

SEQ ID NO: 24852 - RNA, 21 nt, Artificial Sequence
  LRRK2 RNA guide
ugucugacgagacacauuuua

SEQ ID NO: 24853 - RNA, 21 nt, Artificial Sequence
  LRRK2 RNA guide
ugugucucgucagacagacua

SEQ ID NO: 24854 - RNA, 21 nt, Artificial Sequence
  LRRK2 RNA guide
uuagucugucugacgagacac

SEQ ID NO: 24855 - RNA, 22 nt, Artificial Sequence
  LRRK2 RNA guide
aaaaugugucucgucagacaga

SEQ ID NO: 24856 - RNA, 22 nt, Artificial Sequence
  LRRK2 RNA guide
aaaugugucucgucagacagac

SEQ ID NO: 24857 - RNA, 22 nt, Artificial Sequence
  LRRK2 RNA guide
aauaaaaugugucucgucagac

SEQ ID NO: 24858 - RNA, 22 nt, Artificial Sequence
  LRRK2 RNA guide
aaugugucucgucagacagacu

SEQ ID NO: 24859 - RNA, 22 nt, Artificial Sequence
  LRRK2 RNA guide
aauuagucugucugacgagaca

SEQ ID NO: 24860 - RNA, 22 nt, Artificial Sequence
  LRRK2 RNA guide
acgagacacauuuuauuaccua

SEQ ID NO: 24861 - RNA, 22 nt, Artificial Sequence
  LRRK2 RNA guide
agcugaauuagucugucugacg

SEQ ID NO: 24862 - RNA, 22 nt, Artificial Sequence
  LRRK2 RNA guide
agguaauaaaaugugucucguc

SEQ ID NO: 24863 - RNA, 22 nt, Artificial Sequence
  LRRK2 RNA guide
agucugucugacgagacacauu

SEQ ID NO: 24864 - RNA, 22 nt, Artificial Sequence
  LRRK2 RNA guide
auaaaaugugucucgucagaca

SEQ ID NO: 24865 - RNA, 22 nt, Artificial Sequence
  LRRK2 RNA guide
augugucucgucagacagacua

SEQ ID NO: 24866 - RNA, 22 nt, Artificial Sequence
  LRRK2 RNA guide
auuagucugucugacgagacac

SEQ ID NO: 24867 - RNA, 22 nt, Artificial Sequence
  LRRK2 RNA guide
cgagacacauuuuauuaccuaa

SEQ ID NO: 24868 - RNA, 22 nt, Artificial Sequence
  LRRK2 RNA guide
cugaauuagucugucugacgag

SEQ ID NO: 24869 - RNA, 22 nt, Artificial Sequence
  LRRK2 RNA guide
cugacgagacacauuuuauuac

SEQ ID NO: 24870 - RNA, 22 nt, Artificial Sequence
  LRRK2 RNA guide
cugucugacgagacacauuuua

SEQ ID NO: 24871 - RNA, 22 nt, Artificial Sequence
  LRRK2 RNA guide
gaauuagucugucugacgagac

SEQ ID NO: 24872 - RNA, 22 nt, Artificial Sequence
  LRRK2 RNA guide
gacgagacacauuuuauuaccu

SEQ ID NO: 24873 - RNA, 22 nt, Artificial Sequence
  LRRK2 RNA guide
gcugaauuagucugucugacga

SEQ ID NO: 24874 - RNA, 22 nt, Artificial Sequence
  LRRK2 RNA guide
gguaauaaaaugugucucguca

SEQ ID NO: 24875 - RNA, 22 nt, Artificial Sequence
  LRRK2 RNA guide
guaauaaaaugugucucgucag

SEQ ID NO: 24876 - RNA, 22 nt, Artificial Sequence
  LRRK2 RNA guide
gucugacgagacacauuuuauu

SEQ ID NO: 24877 - RNA, 22 nt, Artificial Sequence
  LRRK2 RNA guide
gucugucugacgagacacauuu

SEQ ID NO: 24878 - RNA, 22 nt, Artificial Sequence
  LRRK2 RNA guide
gugucucgucagacagacuaau

SEQ ID NO: 24879 - RNA, 22 nt, Artificial Sequence
  LRRK2 RNA guide
uaaaaugugucucgucagacag

SEQ ID NO: 24880 - RNA, 22 nt, Artificial Sequence
  LRRK2 RNA guide
uaauaaaaugugucucgucaga

SEQ ID NO: 24881 - RNA, 22 nt, Artificial Sequence
  LRRK2 RNA guide
uagguaauaaaaugugucucgu

SEQ ID NO: 24882 - RNA, 22 nt, Artificial Sequence
  LRRK2 RNA guide
uagucugucugacgagacacau

SEQ ID NO: 24883 - RNA, 22 nt, Artificial Sequence
  LRRK2 RNA guide
ucugacgagacacauuuuauua

SEQ ID NO: 24884 - RNA, 22 nt, Artificial Sequence
  LRRK2 RNA guide
ucugucugacgagacacauuuu

SEQ ID NO: 24885 - RNA, 22 nt, Artificial Sequence
  LRRK2 RNA guide
ugaauuagucugucugacgaga

SEQ ID NO: 24886 - RNA, 22 nt, Artificial Sequence
  LRRK2 RNA guide
ugacgagacacauuuuauuacc

SEQ ID NO: 24887 - RNA, 22 nt, Artificial Sequence
  LRRK2 RNA guide
ugucugacgagacacauuuuau

SEQ ID NO: 24888 - RNA, 22 nt, Artificial Sequence
  LRRK2 RNA guide
ugugucucgucagacagacuaa

SEQ ID NO: 24889 - RNA, 22 nt, Artificial Sequence
  LRRK2 RNA guide
uuagguaauaaaaugugucucg

SEQ ID NO: 24890 - RNA, 22 nt, Artificial Sequence
  LRRK2 RNA guide
uuagucugucugacgagacaca

SEQ ID NO: 24891 - RNA, 20 nt, Artificial Sequence
  LRRK2 RNA guide
aaaaccuaauuguugaaugc

SEQ ID NO: 24892 - RNA, 20 nt, Artificial Sequence
  LRRK2 RNA guide
aaaccuaauuguugaaugca

SEQ ID NO: 24893 - RNA, 20 nt, Artificial Sequence
  LRRK2 RNA guide
aaccaugcauucaacaauua

SEQ ID NO: 24894 - RNA, 20 nt, Artificial Sequence
  LRRK2 RNA guide
aaccuaauuguugaaugcau

SEQ ID NO: 24895 - RNA, 20 nt, Artificial Sequence
  LRRK2 RNA guide
accaugcauucaacaauuag

SEQ ID NO: 24896 - RNA, 20 nt, Artificial Sequence
  LRRK2 RNA guide
accuaaaaaccuaauuguug

SEQ ID NO: 24897 - RNA, 20 nt, Artificial Sequence
  LRRK2 RNA guide
accuaauuguugaaugcaug

SEQ ID NO: 24898 - RNA, 20 nt, Artificial Sequence
  LRRK2 RNA guide
agacgcauuuuauuaccuaa

SEQ ID NO: 24899 - RNA, 20 nt, Artificial Sequence
  LRRK2 RNA guide
agcaaccaugcauucaacaa

SEQ ID NO: 24900 - RNA, 20 nt, Artificial Sequence
  LRRK2 RNA guide
augcauucaacaauuagguu

SEQ ID NO: 24901 - RNA, 20 nt, Artificial Sequence
  LRRK2 RNA guide
caacaauuagguuuuuaggu

SEQ ID NO: 24902 - RNA, 20 nt, Artificial Sequence
  LRRK2 RNA guide
caaccaugcauucaacaauu

SEQ ID NO: 24903 - RNA, 20 nt, Artificial Sequence
  LRRK2 RNA guide
caugcauucaacaauuaggu

SEQ ID NO: 24904 - RNA, 20 nt, Artificial Sequence
  LRRK2 RNA guide
ccaugcauucaacaauuagg

SEQ ID NO: 24905 - RNA, 20 nt, Artificial Sequence
  LRRK2 RNA guide
ccuaaaaaccuaauuguuga

SEQ ID NO: 24906 - RNA, 20 nt, Artificial Sequence
  LRRK2 RNA guide
ccuaauuguugaaugcaugg

SEQ ID NO: 24907 - RNA, 20 nt, Artificial Sequence
  LRRK2 RNA guide
gacgcauuuuauuaccuaaa

SEQ ID NO: 24908 - RNA, 20 nt, Artificial Sequence
  LRRK2 RNA guide
gcauucaacaauuagguuuu

SEQ ID NO: 24909 - RNA, 20 nt, Artificial Sequence
  LRRK2 RNA guide
uagcaaccaugcauucaaca

SEQ ID NO: 24910 - RNA, 20 nt, Artificial Sequence
  LRRK2 RNA guide
ucaacaauuagguuuuuagg

SEQ ID NO: 24911 - RNA, 20 nt, Artificial Sequence
  LRRK2 RNA guide
ugcauucaacaauuagguuu

SEQ ID NO: 24912 - RNA, 21 nt, Artificial Sequence
  LRRK2 RNA guide
aaccaugcauucaacaauuag

SEQ ID NO: 24913 - RNA, 21 nt, Artificial Sequence
  LRRK2 RNA guide
aaccuaauuguugaaugcaug

SEQ ID NO: 24914 - RNA, 21 nt, Artificial Sequence
  LRRK2 RNA guide
accaugcauucaacaauuagg

SEQ ID NO: 24915 - RNA, 21 nt, Artificial Sequence
  LRRK2 RNA guide
accuaauuguugaaugcaugg

SEQ ID NO: 24916 - RNA, 21 nt, Artificial Sequence
  LRRK2 RNA guide
agcaaccaugcauucaacaau

SEQ ID NO: 24917 - RNA, 21 nt, Artificial Sequence
  LRRK2 RNA guide
caaccaugcauucaacaauua

SEQ ID NO: 24918 - RNA, 21 nt, Artificial Sequence
  LRRK2 RNA guide
caugcauucaacaauuagguu

SEQ ID NO: 24919 - RNA, 21 nt, Artificial Sequence
  LRRK2 RNA guide
ccaugcauucaacaauuaggu

SEQ ID NO: 24920 - RNA, 21 nt, Artificial Sequence
  LRRK2 RNA guide
ccuaauuguugaaugcauggu

SEQ ID NO: 24921 - RNA, 21 nt, Artificial Sequence
  LRRK2 RNA guide
gagacgcauuuuauuaccuaa

SEQ ID NO: 24922 - RNA, 21 nt, Artificial Sequence
  LRRK2 RNA guide
gcaaccaugcauucaacaauu

SEQ ID NO: 24923 - RNA, 21 nt, Artificial Sequence
  LRRK2 RNA guide
guagcaaccaugcauucaaca

SEQ ID NO: 24924 - RNA, 21 nt, Artificial Sequence
  LRRK2 RNA guide
uagcaaccaugcauucaacaa

SEQ ID NO: 24925 - RNA, 22 nt, Artificial Sequence
  LRRK2 RNA guide
aaaccuaauuguugaaugcaug

SEQ ID NO: 24926 - RNA, 22 nt, Artificial Sequence
  LRRK2 RNA guide
aaccaugcauucaacaauuagg

SEQ ID NO: 24927 - RNA, 22 nt, Artificial Sequence
  LRRK2 RNA guide
aaccuaauuguugaaugcaugg

SEQ ID NO: 24928 - RNA, 22 nt, Artificial Sequence
  LRRK2 RNA guide
accaugcauucaacaauuaggu

SEQ ID NO: 24929 - RNA, 22 nt, Artificial Sequence
  LRRK2 RNA guide
accuaauuguugaaugcauggu

SEQ ID NO: 24930 - RNA, 22 nt, Artificial Sequence
  LRRK2 RNA guide
agcaaccaugcauucaacaauu

SEQ ID NO: 24931 - RNA, 22 nt, Artificial Sequence
  LRRK2 RNA guide
caaccaugcauucaacaauuag

SEQ ID NO: 24932 - RNA, 22 nt, Artificial Sequence
  LRRK2 RNA guide
caugcauucaacaauuagguuu

SEQ ID NO: 24933 - RNA, 22 nt, Artificial Sequence
  LRRK2 RNA guide
ccaugcauucaacaauuagguu

SEQ ID NO: 24934 - RNA, 22 nt, Artificial Sequence
  LRRK2 RNA guide
ccuaauuguugaaugcaugguu

SEQ ID NO: 24935 - RNA, 22 nt, Artificial Sequence
  LRRK2 RNA guide
cgagacgcauuuuauuaccuaa

SEQ ID NO: 24936 - RNA, 22 nt, Artificial Sequence
  LRRK2 RNA guide
cgcauuuuauuaccuaaaaacc

SEQ ID NO: 24937 - RNA, 22 nt, Artificial Sequence
  LRRK2 RNA guide
gagacgcauuuuauuaccuaaa

SEQ ID NO: 24938 - RNA, 22 nt, Artificial Sequence
  LRRK2 RNA guide
gcaaccaugcauucaacaauua

SEQ ID NO: 24939 - RNA, 22 nt, Artificial Sequence
  LRRK2 RNA guide
guagcaaccaugcauucaacaa

SEQ ID NO: 24940 - RNA, 22 nt, Artificial Sequence
  LRRK2 RNA guide
uagcaaccaugcauucaacaau

SEQ ID NO: 24941 - RNA, 22 nt, Artificial Sequence
  LRRK2 RNA guide
uguagcaaccaugcauucaaca

SEQ ID NO: 24942 - RNA, 20 nt, Artificial Sequence
  LRRK2 RNA guide
aaaacguaauuguugaaugc

SEQ ID NO: 24943 - RNA, 20 nt, Artificial Sequence
  LRRK2 RNA guide
aaacguaauuguugaaugca

SEQ ID NO: 24944 - RNA, 20 nt, Artificial Sequence
  LRRK2 RNA guide
aacaugcauucaacaauuac

SEQ ID NO: 24945 - RNA, 20 nt, Artificial Sequence
  LRRK2 RNA guide
aacguaauuguugaaugcau

SEQ ID NO: 24946 - RNA, 20 nt, Artificial Sequence
  LRRK2 RNA guide
aaugcauguuugcuacacau

SEQ ID NO: 24947 - RNA, 20 nt, Artificial Sequence
  LRRK2 RNA guide
aauuguugaaugcauguuug

SEQ ID NO: 24948 - RNA, 20 nt, Artificial Sequence
  LRRK2 RNA guide
acguaauuguugaaugcaug

SEQ ID NO: 24949 - RNA, 20 nt, Artificial Sequence
  LRRK2 RNA guide
agcaaacaugcauucaacaa

SEQ ID NO: 24950 - RNA, 20 nt, Artificial Sequence
  LRRK2 RNA guide
augcauguuugcuacacauc

SEQ ID NO: 24951 - RNA, 20 nt, Artificial Sequence
  LRRK2 RNA guide
auguguagcaaacaugcauu

SEQ ID NO: 24952 - RNA, 20 nt, Artificial Sequence
  LRRK2 RNA guide
auguuugcuacacaucacaa

SEQ ID NO: 24953 - RNA, 20 nt, Artificial Sequence
  LRRK2 RNA guide
auuguugaaugcauguuugc

SEQ ID NO: 24954 - RNA, 20 nt, Artificial Sequence
  LRRK2 RNA guide
caaacaugcauucaacaauu

SEQ ID NO: 24955 - RNA, 20 nt, Artificial Sequence
  LRRK2 RNA guide
cauguuugcuacacaucaca

SEQ ID NO: 24956 - RNA, 20 nt, Artificial Sequence
  LRRK2 RNA guide
ccugcuguugugauguguag

SEQ ID NO: 24957 - RNA, 20 nt, Artificial Sequence
  LRRK2 RNA guide
cguaauuguugaaugcaugu

SEQ ID NO: 24958 - RNA, 20 nt, Artificial Sequence
  LRRK2 RNA guide
cugcuguugugauguguagc

SEQ ID NO: 24959 - RNA, 20 nt, Artificial Sequence
  LRRK2 RNA guide
cuguugugauguguagcaaa

SEQ ID NO: 24960 - RNA, 20 nt, Artificial Sequence
  LRRK2 RNA guide
gaaugcauguuugcuacaca

SEQ ID NO: 24961 - RNA, 20 nt, Artificial Sequence
  LRRK2 RNA guide
gauguguagcaaacaugcau

SEQ ID NO: 24962 - RNA, 20 nt, Artificial Sequence
  LRRK2 RNA guide
gcaaacaugcauucaacaau

SEQ ID NO: 24963 - RNA, 20 nt, Artificial Sequence
  LRRK2 RNA guide
gcauguuugcuacacaucac

SEQ ID NO: 24964 - RNA, 20 nt, Artificial Sequence
  LRRK2 RNA guide
gcuguugugauguguagcaa

SEQ ID NO: 24965 - RNA, 20 nt, Artificial Sequence
  LRRK2 RNA guide
guaauuguugaaugcauguu

SEQ ID NO: 24966 - RNA, 20 nt, Artificial Sequence
  LRRK2 RNA guide
guagcaaacaugcauucaac

SEQ ID NO: 24967 - RNA, 20 nt, Artificial Sequence
  LRRK2 RNA guide
gugauguguagcaaacaugc

SEQ ID NO: 24968 - RNA, 20 nt, Artificial Sequence
  LRRK2 RNA guide
guguagcaaacaugcauuca

SEQ ID NO: 24969 - RNA, 20 nt, Artificial Sequence
  LRRK2 RNA guide
guugaaugcauguuugcuac

SEQ ID NO: 24970 - RNA, 20 nt, Artificial Sequence
  LRRK2 RNA guide
guugugauguguagcaaaca

SEQ ID NO: 24971 - RNA, 20 nt, Artificial Sequence
  LRRK2 RNA guide
guuugcuacacaucacaaca

SEQ ID NO: 24972 - RNA, 20 nt, Artificial Sequence
  LRRK2 RNA guide
uagcaaacaugcauucaaca

SEQ ID NO: 24973 - RNA, 20 nt, Artificial Sequence
  LRRK2 RNA guide
uccugcuguugugaugugua

SEQ ID NO: 24974 - RNA, 20 nt, Artificial Sequence
  LRRK2 RNA guide
ugaaugcauguuugcuacac

SEQ ID NO: 24975 - RNA, 20 nt, Artificial Sequence
  LRRK2 RNA guide
ugauguguagcaaacaugca

SEQ ID NO: 24976 - RNA, 20 nt, Artificial Sequence
  LRRK2 RNA guide
ugcauguuugcuacacauca

SEQ ID NO: 24977 - RNA, 20 nt, Artificial Sequence
  LRRK2 RNA guide
ugcuguugugauguguagca

SEQ ID NO: 24978 - RNA, 20 nt, Artificial Sequence
  LRRK2 RNA guide
uguagcaaacaugcauucaa

SEQ ID NO: 24979 - RNA, 20 nt, Artificial Sequence
  LRRK2 RNA guide
ugugauguguagcaaacaug

SEQ ID NO: 24980 - RNA, 20 nt, Artificial Sequence
  LRRK2 RNA guide
uguguagcaaacaugcauuc

SEQ ID NO: 24981 - RNA, 20 nt, Artificial Sequence
  LRRK2 RNA guide
uguugaaugcauguuugcua

SEQ ID NO: 24982 - RNA, 20 nt, Artificial Sequence
  LRRK2 RNA guide
uguugugauguguagcaaac

SEQ ID NO: 24983 - RNA, 20 nt, Artificial Sequence
  LRRK2 RNA guide
uguuugcuacacaucacaac

SEQ ID NO: 24984 - RNA, 20 nt, Artificial Sequence
  LRRK2 RNA guide
uugaaugcauguuugcuaca

SEQ ID NO: 24985 - RNA, 20 nt, Artificial Sequence
  LRRK2 RNA guide
uugugauguguagcaaacau

SEQ ID NO: 24986 - RNA, 20 nt, Artificial Sequence
  LRRK2 RNA guide
uuguugaaugcauguuugcu

SEQ ID NO: 24987 - RNA, 21 nt, Artificial Sequence
  LRRK2 RNA guide
aacaugcauucaacaauuacg

SEQ ID NO: 24988 - RNA, 21 nt, Artificial Sequence
  LRRK2 RNA guide
aacguaauuguugaaugcaug

SEQ ID NO: 24989 - RNA, 21 nt, Artificial Sequence
  LRRK2 RNA guide
aaugcauguuugcuacacauc

SEQ ID NO: 24990 - RNA, 21 nt, Artificial Sequence
  LRRK2 RNA guide
aauuguugaaugcauguuugc

SEQ ID NO: 24991 - RNA, 21 nt, Artificial Sequence
  LRRK2 RNA guide
acguaauuguugaaugcaugu

SEQ ID NO: 24992 - RNA, 21 nt, Artificial Sequence
  LRRK2 RNA guide
agcaaacaugcauucaacaau

SEQ ID NO: 24993 - RNA, 21 nt, Artificial Sequence
  LRRK2 RNA guide
augcauguuugcuacacauca

SEQ ID NO: 24994 - RNA, 21 nt, Artificial Sequence
  LRRK2 RNA guide
auguguagcaaacaugcauuc

SEQ ID NO: 24995 - RNA, 21 nt, Artificial Sequence
  LRRK2 RNA guide
auguuugcuacacaucacaac

SEQ ID NO: 24996 - RNA, 21 nt, Artificial Sequence
  LRRK2 RNA guide
auuguugaaugcauguuugcu

SEQ ID NO: 24997 - RNA, 21 nt, Artificial Sequence
  LRRK2 RNA guide
cauguuugcuacacaucacaa

SEQ ID NO: 24998 - RNA, 21 nt, Artificial Sequence
  LRRK2 RNA guide
ccugcuguugugauguguagc

SEQ ID NO: 24999 - RNA, 21 nt, Artificial Sequence
  LRRK2 RNA guide
cguaauuguugaaugcauguu

SEQ ID NO: 25000 - RNA, 21 nt, Artificial Sequence
  LRRK2 RNA guide
cugcuguugugauguguagca

SEQ ID NO: 25001 - RNA, 21 nt, Artificial Sequence
  LRRK2 RNA guide
cuguugugauguguagcaaac

SEQ ID NO: 25002 - RNA, 21 nt, Artificial Sequence
  LRRK2 RNA guide
gaaugcauguuugcuacacau

SEQ ID NO: 25003 - RNA, 21 nt, Artificial Sequence
  LRRK2 RNA guide
gauguguagcaaacaugcauu

SEQ ID NO: 25004 - RNA, 21 nt, Artificial Sequence
  LRRK2 RNA guide
gcaaacaugcauucaacaauu

SEQ ID NO: 25005 - RNA, 21 nt, Artificial Sequence
  LRRK2 RNA guide
gcauguuugcuacacaucaca

SEQ ID NO: 25006 - RNA, 21 nt, Artificial Sequence
  LRRK2 RNA guide
gcuguugugauguguagcaaa

SEQ ID NO: 25007 - RNA, 21 nt, Artificial Sequence
  LRRK2 RNA guide
guagcaaacaugcauucaaca

SEQ ID NO: 25008 - RNA, 21 nt, Artificial Sequence
  LRRK2 RNA guide
gugauguguagcaaacaugca

SEQ ID NO: 25009 - RNA, 21 nt, Artificial Sequence
  LRRK2 RNA guide
guguagcaaacaugcauucaa

SEQ ID NO: 25010 - RNA, 21 nt, Artificial Sequence
  LRRK2 RNA guide
guugaaugcauguuugcuaca

SEQ ID NO: 25011 - RNA, 21 nt, Artificial Sequence
  LRRK2 RNA guide
guugugauguguagcaaacau

SEQ ID NO: 25012 - RNA, 21 nt, Artificial Sequence
  LRRK2 RNA guide
guuugcuacacaucacaacag

SEQ ID NO: 25013 - RNA, 21 nt, Artificial Sequence
  LRRK2 RNA guide
uagcaaacaugcauucaacaa

SEQ ID NO: 25014 - RNA, 21 nt, Artificial Sequence
  LRRK2 RNA guide
uccugcuguugugauguguag

SEQ ID NO: 25015 - RNA, 21 nt, Artificial Sequence
  LRRK2 RNA guide
ugaaugcauguuugcuacaca

SEQ ID NO: 25016 - RNA, 21 nt, Artificial Sequence
  LRRK2 RNA guide
ugauguguagcaaacaugcau

SEQ ID NO: 25017 - RNA, 21 nt, Artificial Sequence
  LRRK2 RNA guide
ugcauguuugcuacacaucac

SEQ ID NO: 25018 - RNA, 21 nt, Artificial Sequence
  LRRK2 RNA guide
ugcuguugugauguguagcaa

SEQ ID NO: 25019 - RNA, 21 nt, Artificial Sequence
  LRRK2 RNA guide
uguagcaaacaugcauucaac

SEQ ID NO: 25020 - RNA, 21 nt, Artificial Sequence
  LRRK2 RNA guide
ugugauguguagcaaacaugc

SEQ ID NO: 25021 - RNA, 21 nt, Artificial Sequence
  LRRK2 RNA guide
uguguagcaaacaugcauuca

SEQ ID NO: 25022 - RNA, 21 nt, Artificial Sequence
  LRRK2 RNA guide
uguugaaugcauguuugcuac

SEQ ID NO: 25023 - RNA, 21 nt, Artificial Sequence
  LRRK2 RNA guide
uguugugauguguagcaaaca

SEQ ID NO: 25024 - RNA, 21 nt, Artificial Sequence
  LRRK2 RNA guide
uguuugcuacacaucacaaca

SEQ ID NO: 25025 - RNA, 21 nt, Artificial Sequence
  LRRK2 RNA guide
uuccugcuguugugaugugua

SEQ ID NO: 25026 - RNA, 21 nt, Artificial Sequence
  LRRK2 RNA guide
uugaaugcauguuugcuacac

SEQ ID NO: 25027 - RNA, 21 nt, Artificial Sequence
  LRRK2 RNA guide
uugugauguguagcaaacaug

SEQ ID NO: 25028 - RNA, 21 nt, Artificial Sequence
  LRRK2 RNA guide
uuguugaaugcauguuugcua

SEQ ID NO: 25029 - RNA, 22 nt, Artificial Sequence
  LRRK2 RNA guide
aaacaugcauucaacaauuacg

SEQ ID NO: 25030 - RNA, 22 nt, Artificial Sequence
  LRRK2 RNA guide
aaacguaauuguugaaugcaug

SEQ ID NO: 25031 - RNA, 22 nt, Artificial Sequence
  LRRK2 RNA guide
aacaugcauucaacaauuacgu

SEQ ID NO: 25032 - RNA, 22 nt, Artificial Sequence
  LRRK2 RNA guide
aacguaauuguugaaugcaugu

SEQ ID NO: 25033 - RNA, 22 nt, Artificial Sequence
  LRRK2 RNA guide
aaugcauguuugcuacacauca

SEQ ID NO: 25034 - RNA, 22 nt, Artificial Sequence
  LRRK2 RNA guide
aauuguugaaugcauguuugcu

SEQ ID NO: 25035 - RNA, 22 nt, Artificial Sequence
  LRRK2 RNA guide
acguaauuguugaaugcauguu

SEQ ID NO: 25036 - RNA, 22 nt, Artificial Sequence
  LRRK2 RNA guide
agcaaacaugcauucaacaauu

SEQ ID NO: 25037 - RNA, 22 nt, Artificial Sequence
  LRRK2 RNA guide
augcauguuugcuacacaucac

SEQ ID NO: 25038 - RNA, 22 nt, Artificial Sequence
  LRRK2 RNA guide
auguguagcaaacaugcauuca

SEQ ID NO: 25039 - RNA, 22 nt, Artificial Sequence
  LRRK2 RNA guide
auguuugcuacacaucacaaca

SEQ ID NO: 25040 - RNA, 22 nt, Artificial Sequence
  LRRK2 RNA guide
auuccugcuguugugaugugua

SEQ ID NO: 25041 - RNA, 22 nt, Artificial Sequence
  LRRK2 RNA guide
auuguugaaugcauguuugcua

SEQ ID NO: 25042 - RNA, 22 nt, Artificial Sequence
  LRRK2 RNA guide
caaacaugcauucaacaauuac

SEQ ID NO: 25043 - RNA, 22 nt, Artificial Sequence
  LRRK2 RNA guide
cauguuugcuacacaucacaac

SEQ ID NO: 25044 - RNA, 22 nt, Artificial Sequence
  LRRK2 RNA guide
ccugcuguugugauguguagca

SEQ ID NO: 25045 - RNA, 22 nt, Artificial Sequence
  LRRK2 RNA guide
cguaauuguugaaugcauguuu

SEQ ID NO: 25046 - RNA, 22 nt, Artificial Sequence
  LRRK2 RNA guide
cugcuguugugauguguagcaa

SEQ ID NO: 25047 - RNA, 22 nt, Artificial Sequence
  LRRK2 RNA guide
cuguugugauguguagcaaaca

SEQ ID NO: 25048 - RNA, 22 nt, Artificial Sequence
  LRRK2 RNA guide
gaaugcauguuugcuacacauc

SEQ ID NO: 25049 - RNA, 22 nt, Artificial Sequence
  LRRK2 RNA guide
gauguguagcaaacaugcauuc

SEQ ID NO: 25050 - RNA, 22 nt, Artificial Sequence
  LRRK2 RNA guide
gcaaacaugcauucaacaauua

SEQ ID NO: 25051 - RNA, 22 nt, Artificial Sequence
  LRRK2 RNA guide
gcauguuugcuacacaucacaa

SEQ ID NO: 25052 - RNA, 22 nt, Artificial Sequence
  LRRK2 RNA guide
gcuguugugauguguagcaaac

SEQ ID NO: 25053 - RNA, 22 nt, Artificial Sequence
  LRRK2 RNA guide
guaauuguugaaugcauguuug

SEQ ID NO: 25054 - RNA, 22 nt, Artificial Sequence
  LRRK2 RNA guide
guagcaaacaugcauucaacaa

SEQ ID NO: 25055 - RNA, 22 nt, Artificial Sequence
  LRRK2 RNA guide
gugauguguagcaaacaugcau

SEQ ID NO: 25056 - RNA, 22 nt, Artificial Sequence
  LRRK2 RNA guide
guguagcaaacaugcauucaac

SEQ ID NO: 25057 - RNA, 22 nt, Artificial Sequence
  LRRK2 RNA guide
guugaaugcauguuugcuacac

SEQ ID NO: 25058 - RNA, 22 nt, Artificial Sequence
  LRRK2 RNA guide
guugugauguguagcaaacaug

SEQ ID NO: 25059 - RNA, 22 nt, Artificial Sequence
  LRRK2 RNA guide
guuugcuacacaucacaacagc

SEQ ID NO: 25060 - RNA, 22 nt, Artificial Sequence
  LRRK2 RNA guide
uaauuguugaaugcauguuugc

SEQ ID NO: 25061 - RNA, 22 nt, Artificial Sequence
  LRRK2 RNA guide
uagcaaacaugcauucaacaau

SEQ ID NO: 25062 - RNA, 22 nt, Artificial Sequence
  LRRK2 RNA guide
uccugcuguugugauguguagc

SEQ ID NO: 25063 - RNA, 22 nt, Artificial Sequence
  LRRK2 RNA guide
ugaaugcauguuugcuacacau

SEQ ID NO: 25064 - RNA, 22 nt, Artificial Sequence
  LRRK2 RNA guide
ugauguguagcaaacaugcauu

SEQ ID NO: 25065 - RNA, 22 nt, Artificial Sequence
  LRRK2 RNA guide
ugcauguuugcuacacaucaca

SEQ ID NO: 25066 - RNA, 22 nt, Artificial Sequence
  LRRK2 RNA guide
ugcuguugugauguguagcaaa

SEQ ID NO: 25067 - RNA, 22 nt, Artificial Sequence
  LRRK2 RNA guide
uguagcaaacaugcauucaaca

SEQ ID NO: 25068 - RNA, 22 nt, Artificial Sequence
  LRRK2 RNA guide
ugugauguguagcaaacaugca

SEQ ID NO: 25069 - RNA, 22 nt, Artificial Sequence
  LRRK2 RNA guide
uguguagcaaacaugcauucaa

SEQ ID NO: 25070 - RNA, 22 nt, Artificial Sequence
  LRRK2 RNA guide
uguugaaugcauguuugcuaca

SEQ ID NO: 25071 - RNA, 22 nt, Artificial Sequence
  LRRK2 RNA guide
uguugugauguguagcaaacau

SEQ ID NO: 25072 - RNA, 22 nt, Artificial Sequence
  LRRK2 RNA guide
uguuugcuacacaucacaacag

SEQ ID NO: 25073 - RNA, 22 nt, Artificial Sequence
  LRRK2 RNA guide
uuccugcuguugugauguguag

SEQ ID NO: 25074 - RNA, 22 nt, Artificial Sequence
  LRRK2 RNA guide
uugaaugcauguuugcuacaca

SEQ ID NO: 25075 - RNA, 22 nt, Artificial Sequence
  LRRK2 RNA guide
uugugauguguagcaaacaugc

SEQ ID NO: 25076 - RNA, 22 nt, Artificial Sequence
  LRRK2 RNA guide
uuguugaaugcauguuugcuac

SEQ ID NO: 25077 - RNA, 20 nt, Artificial Sequence
  LRRK2 RNA guide
aagcauuuggcugggaugug

SEQ ID NO: 25078 - RNA, 20 nt, Artificial Sequence
  LRRK2 RNA guide
aaugcaagcauuuggcuggg

SEQ ID NO: 25079 - RNA, 20 nt, Artificial Sequence
  LRRK2 RNA guide
acaucccagccaaaugcuug

SEQ ID NO: 25080 - RNA, 20 nt, Artificial Sequence
  LRRK2 RNA guide
agcauuuggcugggaugugg

SEQ ID NO: 25081 - RNA, 20 nt, Artificial Sequence
  LRRK2 RNA guide
aggaaugcaagcauuuggcu

SEQ ID NO: 25082 - RNA, 20 nt, Artificial Sequence
  LRRK2 RNA guide
aucccagccaaaugcuugca

SEQ ID NO: 25083 - RNA, 20 nt, Artificial Sequence
  LRRK2 RNA guide
augcaagcauuuggcuggga

SEQ ID NO: 25084 - RNA, 20 nt, Artificial Sequence
  LRRK2 RNA guide
auuuggcugggaugugggca

SEQ ID NO: 25085 - RNA, 20 nt, Artificial Sequence
  LRRK2 RNA guide
caagcauuuggcugggaugu

SEQ ID NO: 25086 - RNA, 20 nt, Artificial Sequence
  LRRK2 RNA guide
cacaucccagccaaaugcuu

SEQ ID NO: 25087 - RNA, 20 nt, Artificial Sequence
  LRRK2 RNA guide
caggaaugcaagcauuuggc

SEQ ID NO: 25088 - RNA, 20 nt, Artificial Sequence
  LRRK2 RNA guide
caucccagccaaaugcuugc

SEQ ID NO: 25089 - RNA, 20 nt, Artificial Sequence
  LRRK2 RNA guide
cauuuggcugggaugugggc

SEQ ID NO: 25090 - RNA, 20 nt, Artificial Sequence
  LRRK2 RNA guide
ccacaucccagccaaaugcu

SEQ ID NO: 25091 - RNA, 20 nt, Artificial Sequence
  LRRK2 RNA guide
cccacaucccagccaaaugc

SEQ ID NO: 25092 - RNA, 20 nt, Artificial Sequence
  LRRK2 RNA guide
ccucugucggugugcccaca

SEQ ID NO: 25093 - RNA, 20 nt, Artificial Sequence
  LRRK2 RNA guide
cggugugcccacaucccagc

SEQ ID NO: 25094 - RNA, 20 nt, Artificial Sequence
  LRRK2 RNA guide
cucugucggugugcccacau

SEQ ID NO: 25095 - RNA, 20 nt, Artificial Sequence
  LRRK2 RNA guide
cugggaugugggcacaccga

SEQ ID NO: 25096 - RNA, 20 nt, Artificial Sequence
  LRRK2 RNA guide
cuguccucugucggugugcc

SEQ ID NO: 25097 - RNA, 20 nt, Artificial Sequence
  LRRK2 RNA guide
cugucggugugcccacaucc

SEQ ID NO: 25098 - RNA, 20 nt, Artificial Sequence
  LRRK2 RNA guide
gaaugcaagcauuuggcugg

SEQ ID NO: 25099 - RNA, 20 nt, Artificial Sequence
  LRRK2 RNA guide
gaugugggcacaccgacaga

SEQ ID NO: 25100 - RNA, 20 nt, Artificial Sequence
  LRRK2 RNA guide
gcaagcauuuggcugggaug

SEQ ID NO: 25101 - RNA, 20 nt, Artificial Sequence
  LRRK2 RNA guide
gcauuuggcugggauguggg

SEQ ID NO: 25102 - RNA, 20 nt, Artificial Sequence
  LRRK2 RNA guide
gcccacaucccagccaaaug

SEQ ID NO: 25103 - RNA, 20 nt, Artificial Sequence
  LRRK2 RNA guide
gcugggaugugggcacaccg

SEQ ID NO: 25104 - RNA, 20 nt, Artificial Sequence
  LRRK2 RNA guide
ggaaugcaagcauuuggcug

SEQ ID NO: 25105 - RNA, 20 nt, Artificial Sequence
  LRRK2 RNA guide
ggaugugggcacaccgacag

SEQ ID NO: 25106 - RNA, 20 nt, Artificial Sequence
  LRRK2 RNA guide
ggcugggaugugggcacacc

SEQ ID NO: 25107 - RNA, 20 nt, Artificial Sequence
  LRRK2 RNA guide
gggaugugggcacaccgaca

SEQ ID NO: 25108 - RNA, 20 nt, Artificial Sequence
  LRRK2 RNA guide
ggugugcccacaucccagcc

SEQ ID NO: 25109 - RNA, 20 nt, Artificial Sequence
  LRRK2 RNA guide
guccucugucggugugccca

SEQ ID NO: 25110 - RNA, 20 nt, Artificial Sequence
  LRRK2 RNA guide
gucggugugcccacauccca

SEQ ID NO: 25111 - RNA, 20 nt, Artificial Sequence
  LRRK2 RNA guide
gugcccacaucccagccaaa

SEQ ID NO: 25112 - RNA, 20 nt, Artificial Sequence
  LRRK2 RNA guide
gugugcccacaucccagcca

SEQ ID NO: 25113 - RNA, 20 nt, Artificial Sequence
  LRRK2 RNA guide
uccucugucggugugcccac

SEQ ID NO: 25114 - RNA, 20 nt, Artificial Sequence
  LRRK2 RNA guide
ucggugugcccacaucccag

SEQ ID NO: 25115 - RNA, 20 nt, Artificial Sequence
  LRRK2 RNA guide
ucugucggugugcccacauc

SEQ ID NO: 25116 - RNA, 20 nt, Artificial Sequence
  LRRK2 RNA guide
ugcaagcauuuggcugggau

SEQ ID NO: 25117 - RNA, 20 nt, Artificial Sequence
  LRRK2 RNA guide
ugcccacaucccagccaaau

SEQ ID NO: 25118 - RNA, 20 nt, Artificial Sequence
  LRRK2 RNA guide
uggcugggaugugggcacac

SEQ ID NO: 25119 - RNA, 20 nt, Artificial Sequence
  LRRK2 RNA guide
ugggaugugggcacaccgac

SEQ ID NO: 25120 - RNA, 20 nt, Artificial Sequence
  LRRK2 RNA guide
uguccucugucggugugccc

SEQ ID NO: 25121 - RNA, 20 nt, Artificial Sequence
  LRRK2 RNA guide
ugucggugugcccacauccc

SEQ ID NO: 25122 - RNA, 20 nt, Artificial Sequence
  LRRK2 RNA guide
ugugcccacaucccagccaa

SEQ ID NO: 25123 - RNA, 20 nt, Artificial Sequence
  LRRK2 RNA guide
uuggcugggaugugggcaca

SEQ ID NO: 25124 - RNA, 20 nt, Artificial Sequence
  LRRK2 RNA guide
uuuggcugggaugugggcac

SEQ ID NO: 25125 - RNA, 21 nt, Artificial Sequence
  LRRK2 RNA guide
aagcauuuggcugggaugugg

SEQ ID NO: 25126 - RNA, 21 nt, Artificial Sequence
  LRRK2 RNA guide
aaugcaagcauuuggcuggga

SEQ ID NO: 25127 - RNA, 21 nt, Artificial Sequence
  LRRK2 RNA guide
acaucccagccaaaugcuugc

SEQ ID NO: 25128 - RNA, 21 nt, Artificial Sequence
  LRRK2 RNA guide
agcauuuggcugggauguggg

SEQ ID NO: 25129 - RNA, 21 nt, Artificial Sequence
  LRRK2 RNA guide
aggaaugcaagcauuuggcug

SEQ ID NO: 25130 - RNA, 21 nt, Artificial Sequence
  LRRK2 RNA guide
aucccagccaaaugcuugcau

SEQ ID NO: 25131 - RNA, 21 nt, Artificial Sequence
  LRRK2 RNA guide
augcaagcauuuggcugggau

SEQ ID NO: 25132 - RNA, 21 nt, Artificial Sequence
  LRRK2 RNA guide
auuuggcugggaugugggcac

SEQ ID NO: 25133 - RNA, 21 nt, Artificial Sequence
  LRRK2 RNA guide
caagcauuuggcugggaugug

SEQ ID NO: 25134 - RNA, 21 nt, Artificial Sequence
  LRRK2 RNA guide
cacaucccagccaaaugcuug

SEQ ID NO: 25135 - RNA, 21 nt, Artificial Sequence
  LRRK2 RNA guide
caggaaugcaagcauuuggcu

SEQ ID NO: 25136 - RNA, 21 nt, Artificial Sequence
  LRRK2 RNA guide
caucccagccaaaugcuugca

SEQ ID NO: 25137 - RNA, 21 nt, Artificial Sequence
  LRRK2 RNA guide
cauuuggcugggaugugggca

SEQ ID NO: 25138 - RNA, 21 nt, Artificial Sequence
  LRRK2 RNA guide
ccacaucccagccaaaugcuu

SEQ ID NO: 25139 - RNA, 21 nt, Artificial Sequence
  LRRK2 RNA guide
cccacaucccagccaaaugcu

SEQ ID NO: 25140 - RNA, 21 nt, Artificial Sequence
  LRRK2 RNA guide
ccucugucggugugcccacau

SEQ ID NO: 25141 - RNA, 21 nt, Artificial Sequence
  LRRK2 RNA guide
cggugugcccacaucccagcc

SEQ ID NO: 25142 - RNA, 21 nt, Artificial Sequence
  LRRK2 RNA guide
cucugucggugugcccacauc

SEQ ID NO: 25143 - RNA, 21 nt, Artificial Sequence
  LRRK2 RNA guide
cugggaugugggcacaccgac

SEQ ID NO: 25144 - RNA, 21 nt, Artificial Sequence
  LRRK2 RNA guide
cuguccucugucggugugccc

SEQ ID NO: 25145 - RNA, 21 nt, Artificial Sequence
  LRRK2 RNA guide
cugucggugugcccacauccc

SEQ ID NO: 25146 - RNA, 21 nt, Artificial Sequence
  LRRK2 RNA guide
gaaugcaagcauuuggcuggg

SEQ ID NO: 25147 - RNA, 21 nt, Artificial Sequence
  LRRK2 RNA guide
gaugugggcacaccgacagag

SEQ ID NO: 25148 - RNA, 21 nt, Artificial Sequence
  LRRK2 RNA guide
gcaagcauuuggcugggaugu

SEQ ID NO: 25149 - RNA, 21 nt, Artificial Sequence
  LRRK2 RNA guide
gcaggaaugcaagcauuuggc

SEQ ID NO: 25150 - RNA, 21 nt, Artificial Sequence
  LRRK2 RNA guide
gcauuuggcugggaugugggc

SEQ ID NO: 25151 - RNA, 21 nt, Artificial Sequence
  LRRK2 RNA guide
gcccacaucccagccaaaugc

SEQ ID NO: 25152 - RNA, 21 nt, Artificial Sequence
  LRRK2 RNA guide
gcugggaugugggcacaccga

SEQ ID NO: 25153 - RNA, 21 nt, Artificial Sequence
  LRRK2 RNA guide
gcuguccucugucggugugcc

SEQ ID NO: 25154 - RNA, 21 nt, Artificial Sequence
  LRRK2 RNA guide
ggaaugcaagcauuuggcugg

SEQ ID NO: 25155 - RNA, 21 nt, Artificial Sequence
  LRRK2 RNA guide
ggaugugggcacaccgacaga

SEQ ID NO: 25156 - RNA, 21 nt, Artificial Sequence
  LRRK2 RNA guide
ggcugggaugugggcacaccg

SEQ ID NO: 25157 - RNA, 21 nt, Artificial Sequence
  LRRK2 RNA guide
gggaugugggcacaccgacag

SEQ ID NO: 25158 - RNA, 21 nt, Artificial Sequence
  LRRK2 RNA guide
ggugugcccacaucccagcca

SEQ ID NO: 25159 - RNA, 21 nt, Artificial Sequence
  LRRK2 RNA guide
guccucugucggugugcccac

SEQ ID NO: 25160 - RNA, 21 nt, Artificial Sequence
  LRRK2 RNA guide
gucggugugcccacaucccag

SEQ ID NO: 25161 - RNA, 21 nt, Artificial Sequence
  LRRK2 RNA guide
gugcccacaucccagccaaau

SEQ ID NO: 25162 - RNA, 21 nt, Artificial Sequence
  LRRK2 RNA guide
gugugcccacaucccagccaa

SEQ ID NO: 25163 - RNA, 21 nt, Artificial Sequence
  LRRK2 RNA guide
uccucugucggugugcccaca

SEQ ID NO: 25164 - RNA, 21 nt, Artificial Sequence
  LRRK2 RNA guide
ucggugugcccacaucccagc

SEQ ID NO: 25165 - RNA, 21 nt, Artificial Sequence
  LRRK2 RNA guide
ucugucggugugcccacaucc

SEQ ID NO: 25166 - RNA, 21 nt, Artificial Sequence
  LRRK2 RNA guide
ugcaagcauuuggcugggaug

SEQ ID NO: 25167 - RNA, 21 nt, Artificial Sequence
  LRRK2 RNA guide
ugcccacaucccagccaaaug

SEQ ID NO: 25168 - RNA, 21 nt, Artificial Sequence
  LRRK2 RNA guide
uggcugggaugugggcacacc

SEQ ID NO: 25169 - RNA, 21 nt, Artificial Sequence
  LRRK2 RNA guide
ugggaugugggcacaccgaca

SEQ ID NO: 25170 - RNA, 21 nt, Artificial Sequence
  LRRK2 RNA guide
uguccucugucggugugccca

SEQ ID NO: 25171 - RNA, 21 nt, Artificial Sequence
  LRRK2 RNA guide
ugucggugugcccacauccca

SEQ ID NO: 25172 - RNA, 21 nt, Artificial Sequence
  LRRK2 RNA guide
ugugcccacaucccagccaaa

SEQ ID NO: 25173 - RNA, 21 nt, Artificial Sequence
  LRRK2 RNA guide
uuggcugggaugugggcacac

SEQ ID NO: 25174 - RNA, 21 nt, Artificial Sequence
  LRRK2 RNA guide
uuuggcugggaugugggcaca

SEQ ID NO: 25175 - RNA, 22 nt, Artificial Sequence
  LRRK2 RNA guide
aagcauuuggcugggauguggg

SEQ ID NO: 25176 - RNA, 22 nt, Artificial Sequence
  LRRK2 RNA guide
aaugcaagcauuuggcugggau

SEQ ID NO: 25177 - RNA, 22 nt, Artificial Sequence
  LRRK2 RNA guide
acaucccagccaaaugcuugca

SEQ ID NO: 25178 - RNA, 22 nt, Artificial Sequence
  LRRK2 RNA guide
agcaggaaugcaagcauuuggc

SEQ ID NO: 25179 - RNA, 22 nt, Artificial Sequence
  LRRK2 RNA guide
agcauuuggcugggaugugggc

SEQ ID NO: 25180 - RNA, 22 nt, Artificial Sequence
  LRRK2 RNA guide
agcuguccucugucggugugcc

SEQ ID NO: 25181 - RNA, 22 nt, Artificial Sequence
  LRRK2 RNA guide
aggaaugcaagcauuuggcugg

SEQ ID NO: 25182 - RNA, 22 nt, Artificial Sequence
  LRRK2 RNA guide
aucccagccaaaugcuugcauu

SEQ ID NO: 25183 - RNA, 22 nt, Artificial Sequence
  LRRK2 RNA guide
augcaagcauuuggcugggaug

SEQ ID NO: 25184 - RNA, 22 nt, Artificial Sequence
  LRRK2 RNA guide
auuuggcugggaugugggcaca

SEQ ID NO: 25185 - RNA, 22 nt, Artificial Sequence
  LRRK2 RNA guide
caagcauuuggcugggaugugg

SEQ ID NO: 25186 - RNA, 22 nt, Artificial Sequence
  LRRK2 RNA guide
cacaucccagccaaaugcuugc

SEQ ID NO: 25187 - RNA, 22 nt, Artificial Sequence
  LRRK2 RNA guide
caggaaugcaagcauuuggcug

SEQ ID NO: 25188 - RNA, 22 nt, Artificial Sequence
  LRRK2 RNA guide
caucccagccaaaugcuugcau

SEQ ID NO: 25189 - RNA, 22 nt, Artificial Sequence
  LRRK2 RNA guide
cauuuggcugggaugugggcac

SEQ ID NO: 25190 - RNA, 22 nt, Artificial Sequence
  LRRK2 RNA guide
ccacaucccagccaaaugcuug

SEQ ID NO: 25191 - RNA, 22 nt, Artificial Sequence
  LRRK2 RNA guide
cccacaucccagccaaaugcuu

SEQ ID NO: 25192 - RNA, 22 nt, Artificial Sequence
  LRRK2 RNA guide
ccucugucggugugcccacauc

SEQ ID NO: 25193 - RNA, 22 nt, Artificial Sequence
  LRRK2 RNA guide
cggugugcccacaucccagcca

SEQ ID NO: 25194 - RNA, 22 nt, Artificial Sequence
  LRRK2 RNA guide
cucugucggugugcccacaucc

SEQ ID NO: 25195 - RNA, 22 nt, Artificial Sequence
  LRRK2 RNA guide
cugggaugugggcacaccgaca

SEQ ID NO: 25196 - RNA, 22 nt, Artificial Sequence
  LRRK2 RNA guide
cuguccucugucggugugccca

SEQ ID NO: 25197 - RNA, 22 nt, Artificial Sequence
  LRRK2 RNA guide
cugucggugugcccacauccca

SEQ ID NO: 25198 - RNA, 22 nt, Artificial Sequence
  LRRK2 RNA guide
gaaugcaagcauuuggcuggga

SEQ ID NO: 25199 - RNA, 22 nt, Artificial Sequence
  LRRK2 RNA guide
gaugugggcacaccgacagagg

SEQ ID NO: 25200 - RNA, 22 nt, Artificial Sequence
  LRRK2 RNA guide
gcaagcauuuggcugggaugug

SEQ ID NO: 25201 - RNA, 22 nt, Artificial Sequence
  LRRK2 RNA guide
gcaggaaugcaagcauuuggcu

SEQ ID NO: 25202 - RNA, 22 nt, Artificial Sequence
  LRRK2 RNA guide
gcauuuggcugggaugugggca

SEQ ID NO: 25203 - RNA, 22 nt, Artificial Sequence
  LRRK2 RNA guide
gcccacaucccagccaaaugcu

SEQ ID NO: 25204 - RNA, 22 nt, Artificial Sequence
  LRRK2 RNA guide
gcugggaugugggcacaccgac

SEQ ID NO: 25205 - RNA, 22 nt, Artificial Sequence
  LRRK2 RNA guide
gcuguccucugucggugugccc

SEQ ID NO: 25206 - RNA, 22 nt, Artificial Sequence
  LRRK2 RNA guide
ggaaugcaagcauuuggcuggg

SEQ ID NO: 25207 - RNA, 22 nt, Artificial Sequence
  LRRK2 RNA guide
ggaugugggcacaccgacagag

SEQ ID NO: 25208 - RNA, 22 nt, Artificial Sequence
  LRRK2 RNA guide
ggcugggaugugggcacaccga

SEQ ID NO: 25209 - RNA, 22 nt, Artificial Sequence
  LRRK2 RNA guide
gggaugugggcacaccgacaga

SEQ ID NO: 25210 - RNA, 22 nt, Artificial Sequence
  LRRK2 RNA guide
ggugugcccacaucccagccaa

SEQ ID NO: 25211 - RNA, 22 nt, Artificial Sequence
  LRRK2 RNA guide
guccucugucggugugcccaca

SEQ ID NO: 25212 - RNA, 22 nt, Artificial Sequence
  LRRK2 RNA guide
gucggugugcccacaucccagc

SEQ ID NO: 25213 - RNA, 22 nt, Artificial Sequence
  LRRK2 RNA guide
gugcccacaucccagccaaaug

SEQ ID NO: 25214 - RNA, 22 nt, Artificial Sequence
  LRRK2 RNA guide
gugugcccacaucccagccaaa

SEQ ID NO: 25215 - RNA, 22 nt, Artificial Sequence
  LRRK2 RNA guide
uccucugucggugugcccacau

SEQ ID NO: 25216 - RNA, 22 nt, Artificial Sequence
  LRRK2 RNA guide
ucggugugcccacaucccagcc

SEQ ID NO: 25217 - RNA, 22 nt, Artificial Sequence
  LRRK2 RNA guide
ucugucggugugcccacauccc

SEQ ID NO: 25218 - RNA, 22 nt, Artificial Sequence
  LRRK2 RNA guide
ugcaagcauuuggcugggaugu

SEQ ID NO: 25219 - RNA, 22 nt, Artificial Sequence
  LRRK2 RNA guide
ugcccacaucccagccaaaugc

SEQ ID NO: 25220 - RNA, 22 nt, Artificial Sequence
  LRRK2 RNA guide
uggcugggaugugggcacaccg

SEQ ID NO: 25221 - RNA, 22 nt, Artificial Sequence
  LRRK2 RNA guide
ugggaugugggcacaccgacag

SEQ ID NO: 25222 - RNA, 22 nt, Artificial Sequence
  LRRK2 RNA guide
uguccucugucggugugcccac

SEQ ID NO: 25223 - RNA, 22 nt, Artificial Sequence
  LRRK2 RNA guide
ugucggugugcccacaucccag

SEQ ID NO: 25224 - RNA, 22 nt, Artificial Sequence
  LRRK2 RNA guide
ugugcccacaucccagccaaau

SEQ ID NO: 25225 - RNA, 22 nt, Artificial Sequence
  LRRK2 RNA guide
uuggcugggaugugggcacacc

SEQ ID NO: 25226 - RNA, 22 nt, Artificial Sequence
  LRRK2 RNA guide
uuuggcugggaugugggcacac

SEQ ID NO: 25227 - RNA, 20 nt, Artificial Sequence
  LRRK2 RNA guide
aagaaaugagagcuguccuc

SEQ ID NO: 25228 - RNA, 20 nt, Artificial Sequence
  LRRK2 RNA guide
aaugagagcuguccucugug

SEQ ID NO: 25229 - RNA, 20 nt, Artificial Sequence
  LRRK2 RNA guide
acacccacagaggacagcuc

SEQ ID NO: 25230 - RNA, 20 nt, Artificial Sequence
  LRRK2 RNA guide
acccacagaggacagcucuc

SEQ ID NO: 25231 - RNA, 20 nt, Artificial Sequence
  LRRK2 RNA guide
agaaaugagagcuguccucu

SEQ ID NO: 25232 - RNA, 20 nt, Artificial Sequence
  LRRK2 RNA guide
agagcuguccucugugggug

SEQ ID NO: 25233 - RNA, 20 nt, Artificial Sequence
  LRRK2 RNA guide
agcuguccucugugggugug

SEQ ID NO: 25234 - RNA, 20 nt, Artificial Sequence
  LRRK2 RNA guide
augagagcuguccucugugg

SEQ ID NO: 25235 - RNA, 20 nt, Artificial Sequence
  LRRK2 RNA guide
auuuggcugggcugugggca

SEQ ID NO: 25236 - RNA, 20 nt, Artificial Sequence
  LRRK2 RNA guide
caagaaaugagagcuguccu

SEQ ID NO: 25237 - RNA, 20 nt, Artificial Sequence
  LRRK2 RNA guide
cacacccacagaggacagcu

SEQ ID NO: 25238 - RNA, 20 nt, Artificial Sequence
  LRRK2 RNA guide
cacccacagaggacagcucu

SEQ ID NO: 25239 - RNA, 20 nt, Artificial Sequence
  LRRK2 RNA guide
ccacagaggacagcucucau

SEQ ID NO: 25240 - RNA, 20 nt, Artificial Sequence
  LRRK2 RNA guide
cccacagaggacagcucuca

SEQ ID NO: 25241 - RNA, 20 nt, Artificial Sequence
  LRRK2 RNA guide
ccucugugggugugcccaca

SEQ ID NO: 25242 - RNA, 20 nt, Artificial Sequence
  LRRK2 RNA guide
cucugugggugugcccacag

SEQ ID NO: 25243 - RNA, 20 nt, Artificial Sequence
  LRRK2 RNA guide
cugggcugugggcacaccca

SEQ ID NO: 25244 - RNA, 20 nt, Artificial Sequence
  LRRK2 RNA guide
cuguccucugugggugugcc

SEQ ID NO: 25245 - RNA, 20 nt, Artificial Sequence
  LRRK2 RNA guide
cugugggcacacccacagag

SEQ ID NO: 25246 - RNA, 20 nt, Artificial Sequence
  LRRK2 RNA guide
cugugggugugcccacagcc

SEQ ID NO: 25247 - RNA, 20 nt, Artificial Sequence
  LRRK2 RNA guide
gaaaugagagcuguccucug

SEQ ID NO: 25248 - RNA, 20 nt, Artificial Sequence
  LRRK2 RNA guide
gagagcuguccucugugggu

SEQ ID NO: 25249 - RNA, 20 nt, Artificial Sequence
  LRRK2 RNA guide
gagcuguccucugugggugu

SEQ ID NO: 25250 - RNA, 20 nt, Artificial Sequence
  LRRK2 RNA guide
gcacacccacagaggacagc

SEQ ID NO: 25251 - RNA, 20 nt, Artificial Sequence
  LRRK2 RNA guide
gcugggcugugggcacaccc

SEQ ID NO: 25252 - RNA, 20 nt, Artificial Sequence
  LRRK2 RNA guide
gcuguccucugugggugugc

SEQ ID NO: 25253 - RNA, 20 nt, Artificial Sequence
  LRRK2 RNA guide
gcugugggcacacccacaga

SEQ ID NO: 25254 - RNA, 20 nt, Artificial Sequence
  LRRK2 RNA guide
ggcacacccacagaggacag

SEQ ID NO: 25255 - RNA, 20 nt, Artificial Sequence
  LRRK2 RNA guide
ggcugggcugugggcacacc

SEQ ID NO: 25256 - RNA, 20 nt, Artificial Sequence
  LRRK2 RNA guide
ggcugugggcacacccacag

SEQ ID NO: 25257 - RNA, 20 nt, Artificial Sequence
  LRRK2 RNA guide
gggcacacccacagaggaca

SEQ ID NO: 25258 - RNA, 20 nt, Artificial Sequence
  LRRK2 RNA guide
gggcugugggcacacccaca

SEQ ID NO: 25259 - RNA, 20 nt, Artificial Sequence
  LRRK2 RNA guide
guccucugugggugugccca

SEQ ID NO: 25260 - RNA, 20 nt, Artificial Sequence
  LRRK2 RNA guide
gugggcacacccacagagga

SEQ ID NO: 25261 - RNA, 20 nt, Artificial Sequence
  LRRK2 RNA guide
gugggugugcccacagccca

SEQ ID NO: 25262 - RNA, 20 nt, Artificial Sequence
  LRRK2 RNA guide
uccucugugggugugcccac

SEQ ID NO: 25263 - RNA, 20 nt, Artificial Sequence
  LRRK2 RNA guide
ucugugggugugcccacagc

SEQ ID NO: 25264 - RNA, 20 nt, Artificial Sequence
  LRRK2 RNA guide
ugagagcuguccucuguggg

SEQ ID NO: 25265 - RNA, 20 nt, Artificial Sequence
  LRRK2 RNA guide
uggcugggcugugggcacac

SEQ ID NO: 25266 - RNA, 20 nt, Artificial Sequence
  LRRK2 RNA guide
ugggcacacccacagaggac

SEQ ID NO: 25267 - RNA, 20 nt, Artificial Sequence
  LRRK2 RNA guide
ugggcugugggcacacccac

SEQ ID NO: 25268 - RNA, 20 nt, Artificial Sequence
  LRRK2 RNA guide
ugggugugcccacagcccag

SEQ ID NO: 25269 - RNA, 20 nt, Artificial Sequence
  LRRK2 RNA guide
uguccucugugggugugccc

SEQ ID NO: 25270 - RNA, 20 nt, Artificial Sequence
  LRRK2 RNA guide
ugugggcacacccacagagg

SEQ ID NO: 25271 - RNA, 20 nt, Artificial Sequence
  LRRK2 RNA guide
ugugggugugcccacagccc

SEQ ID NO: 25272 - RNA, 20 nt, Artificial Sequence
  LRRK2 RNA guide
uuggcugggcugugggcaca

SEQ ID NO: 25273 - RNA, 20 nt, Artificial Sequence
  LRRK2 RNA guide
uuuggcugggcugugggcac

SEQ ID NO: 25274 - RNA, 21 nt, Artificial Sequence
  LRRK2 RNA guide
aaaugagagcuguccucugug

SEQ ID NO: 25275 - RNA, 21 nt, Artificial Sequence
  LRRK2 RNA guide
aagaaaugagagcuguccucu

SEQ ID NO: 25276 - RNA, 21 nt, Artificial Sequence
  LRRK2 RNA guide
aaugagagcuguccucugugg

SEQ ID NO: 25277 - RNA, 21 nt, Artificial Sequence
  LRRK2 RNA guide
acacccacagaggacagcucu

SEQ ID NO: 25278 - RNA, 21 nt, Artificial Sequence
  LRRK2 RNA guide
acccacagaggacagcucuca

SEQ ID NO: 25279 - RNA, 21 nt, Artificial Sequence
  LRRK2 RNA guide
agaaaugagagcuguccucug

SEQ ID NO: 25280 - RNA, 21 nt, Artificial Sequence
  LRRK2 RNA guide
agagcuguccucugugggugu

SEQ ID NO: 25281 - RNA, 21 nt, Artificial Sequence
  LRRK2 RNA guide
agcuguccucugugggugugc

SEQ ID NO: 25282 - RNA, 21 nt, Artificial Sequence
  LRRK2 RNA guide
augagagcuguccucuguggg

SEQ ID NO: 25283 - RNA, 21 nt, Artificial Sequence
  LRRK2 RNA guide
auuuggcugggcugugggcac

SEQ ID NO: 25284 - RNA, 21 nt, Artificial Sequence
  LRRK2 RNA guide
caagaaaugagagcuguccuc

SEQ ID NO: 25285 - RNA, 21 nt, Artificial Sequence
  LRRK2 RNA guide
cacacccacagaggacagcuc

SEQ ID NO: 25286 - RNA, 21 nt, Artificial Sequence
  LRRK2 RNA guide
cacccacagaggacagcucuc

SEQ ID NO: 25287 - RNA, 21 nt, Artificial Sequence
  LRRK2 RNA guide
cauuuggcugggcugugggca

SEQ ID NO: 25288 - RNA, 21 nt, Artificial Sequence
  LRRK2 RNA guide
ccacagaggacagcucucauu

SEQ ID NO: 25289 - RNA, 21 nt, Artificial Sequence
  LRRK2 RNA guide
cccacagaggacagcucucau

SEQ ID NO: 25290 - RNA, 21 nt, Artificial Sequence
  LRRK2 RNA guide
ccucugugggugugcccacag

SEQ ID NO: 25291 - RNA, 21 nt, Artificial Sequence
  LRRK2 RNA guide
cucugugggugugcccacagc

SEQ ID NO: 25292 - RNA, 21 nt, Artificial Sequence
  LRRK2 RNA guide
cugggcugugggcacacccac

SEQ ID NO: 25293 - RNA, 21 nt, Artificial Sequence
  LRRK2 RNA guide
cuguccucugugggugugccc

SEQ ID NO: 25294 - RNA, 21 nt, Artificial Sequence
  LRRK2 RNA guide
cugugggcacacccacagagg

SEQ ID NO: 25295 - RNA, 21 nt, Artificial Sequence
  LRRK2 RNA guide
cugugggugugcccacagccc

SEQ ID NO: 25296 - RNA, 21 nt, Artificial Sequence
  LRRK2 RNA guide
gaaaugagagcuguccucugu

SEQ ID NO: 25297 - RNA, 21 nt, Artificial Sequence
  LRRK2 RNA guide
gagagcuguccucugugggug

SEQ ID NO: 25298 - RNA, 21 nt, Artificial Sequence
  LRRK2 RNA guide
gagcuguccucugugggugug

SEQ ID NO: 25299 - RNA, 21 nt, Artificial Sequence
  LRRK2 RNA guide
gcacacccacagaggacagcu

SEQ ID NO: 25300 - RNA, 21 nt, Artificial Sequence
  LRRK2 RNA guide
gcugggcugugggcacaccca

SEQ ID NO: 25301 - RNA, 21 nt, Artificial Sequence
  LRRK2 RNA guide
gcuguccucugugggugugcc

SEQ ID NO: 25302 - RNA, 21 nt, Artificial Sequence
  LRRK2 RNA guide
gcugugggcacacccacagag

SEQ ID NO: 25303 - RNA, 21 nt, Artificial Sequence
  LRRK2 RNA guide
ggcacacccacagaggacagc

SEQ ID NO: 25304 - RNA, 21 nt, Artificial Sequence
  LRRK2 RNA guide
ggcugggcugugggcacaccc

SEQ ID NO: 25305 - RNA, 21 nt, Artificial Sequence
  LRRK2 RNA guide
ggcugugggcacacccacaga

SEQ ID NO: 25306 - RNA, 21 nt, Artificial Sequence
  LRRK2 RNA guide
gggcacacccacagaggacag

SEQ ID NO: 25307 - RNA, 21 nt, Artificial Sequence
  LRRK2 RNA guide
gggcugugggcacacccacag

SEQ ID NO: 25308 - RNA, 21 nt, Artificial Sequence
  LRRK2 RNA guide
guccucugugggugugcccac

SEQ ID NO: 25309 - RNA, 21 nt, Artificial Sequence
  LRRK2 RNA guide
gugggcacacccacagaggac

SEQ ID NO: 25310 - RNA, 21 nt, Artificial Sequence
  LRRK2 RNA guide
gugggugugcccacagcccag

SEQ ID NO: 25311 - RNA, 21 nt, Artificial Sequence
  LRRK2 RNA guide
ucaagaaaugagagcuguccu

SEQ ID NO: 25312 - RNA, 21 nt, Artificial Sequence
  LRRK2 RNA guide
uccucugugggugugcccaca

SEQ ID NO: 25313 - RNA, 21 nt, Artificial Sequence
  LRRK2 RNA guide
ucugugggugugcccacagcc

SEQ ID NO: 25314 - RNA, 21 nt, Artificial Sequence
  LRRK2 RNA guide
ugagagcuguccucugugggu

SEQ ID NO: 25315 - RNA, 21 nt, Artificial Sequence
  LRRK2 RNA guide
uggcugggcugugggcacacc

SEQ ID NO: 25316 - RNA, 21 nt, Artificial Sequence
  LRRK2 RNA guide
ugggcacacccacagaggaca

SEQ ID NO: 25317 - RNA, 21 nt, Artificial Sequence
  LRRK2 RNA guide
ugggcugugggcacacccaca

SEQ ID NO: 25318 - RNA, 21 nt, Artificial Sequence
  LRRK2 RNA guide
ugggugugcccacagcccagc

SEQ ID NO: 25319 - RNA, 21 nt, Artificial Sequence
  LRRK2 RNA guide
uguccucugugggugugccca

SEQ ID NO: 25320 - RNA, 21 nt, Artificial Sequence
  LRRK2 RNA guide
ugugggcacacccacagagga

SEQ ID NO: 25321 - RNA, 21 nt, Artificial Sequence
  LRRK2 RNA guide
ugugggugugcccacagccca

SEQ ID NO: 25322 - RNA, 21 nt, Artificial Sequence
  LRRK2 RNA guide
uuggcugggcugugggcacac

SEQ ID NO: 25323 - RNA, 21 nt, Artificial Sequence
  LRRK2 RNA guide
uuuggcugggcugugggcaca

SEQ ID NO: 25324 - RNA, 22 nt, Artificial Sequence
  LRRK2 RNA guide
aaaugagagcuguccucugugg

SEQ ID NO: 25325 - RNA, 22 nt, Artificial Sequence
  LRRK2 RNA guide
aagaaaugagagcuguccucug

SEQ ID NO: 25326 - RNA, 22 nt, Artificial Sequence
  LRRK2 RNA guide
aaugagagcuguccucuguggg

SEQ ID NO: 25327 - RNA, 22 nt, Artificial Sequence
  LRRK2 RNA guide
acacccacagaggacagcucuc

SEQ ID NO: 25328 - RNA, 22 nt, Artificial Sequence
  LRRK2 RNA guide
acccacagaggacagcucucau

SEQ ID NO: 25329 - RNA, 22 nt, Artificial Sequence
  LRRK2 RNA guide
agaaaugagagcuguccucugu

SEQ ID NO: 25330 - RNA, 22 nt, Artificial Sequence
  LRRK2 RNA guide
agagcuguccucugugggugug

SEQ ID NO: 25331 - RNA, 22 nt, Artificial Sequence
  LRRK2 RNA guide
agcuguccucugugggugugcc

SEQ ID NO: 25332 - RNA, 22 nt, Artificial Sequence
  LRRK2 RNA guide
augagagcuguccucugugggu

SEQ ID NO: 25333 - RNA, 22 nt, Artificial Sequence
  LRRK2 RNA guide
auuuggcugggcugugggcaca

SEQ ID NO: 25334 - RNA, 22 nt, Artificial Sequence
  LRRK2 RNA guide
caagaaaugagagcuguccucu

SEQ ID NO: 25335 - RNA, 22 nt, Artificial Sequence
  LRRK2 RNA guide
cacacccacagaggacagcucu

SEQ ID NO: 25336 - RNA, 22 nt, Artificial Sequence
  LRRK2 RNA guide
cacccacagaggacagcucuca

SEQ ID NO: 25337 - RNA, 22 nt, Artificial Sequence
  LRRK2 RNA guide
cauuuggcugggcugugggcac

SEQ ID NO: 25338 - RNA, 22 nt, Artificial Sequence
  LRRK2 RNA guide
ccacagaggacagcucucauuu

SEQ ID NO: 25339 - RNA, 22 nt, Artificial Sequence
  LRRK2 RNA guide
cccacagaggacagcucucauu

SEQ ID NO: 25340 - RNA, 22 nt, Artificial Sequence
  LRRK2 RNA guide
ccucugugggugugcccacagc

SEQ ID NO: 25341 - RNA, 22 nt, Artificial Sequence
  LRRK2 RNA guide
cucugugggugugcccacagcc

SEQ ID NO: 25342 - RNA, 22 nt, Artificial Sequence
  LRRK2 RNA guide
cugggcugugggcacacccaca

SEQ ID NO: 25343 - RNA, 22 nt, Artificial Sequence
  LRRK2 RNA guide
cuguccucugugggugugccca

SEQ ID NO: 25344 - RNA, 22 nt, Artificial Sequence
  LRRK2 RNA guide
cugugggcacacccacagagga

SEQ ID NO: 25345 - RNA, 22 nt, Artificial Sequence
  LRRK2 RNA guide
cugugggugugcccacagccca

SEQ ID NO: 25346 - RNA, 22 nt, Artificial Sequence
  LRRK2 RNA guide
gaaaugagagcuguccucugug

SEQ ID NO: 25347 - RNA, 22 nt, Artificial Sequence
  LRRK2 RNA guide
gagagcuguccucugugggugu

SEQ ID NO: 25348 - RNA, 22 nt, Artificial Sequence
  LRRK2 RNA guide
gagcuguccucugugggugugc

SEQ ID NO: 25349 - RNA, 22 nt, Artificial Sequence
  LRRK2 RNA guide
gcacacccacagaggacagcuc

SEQ ID NO: 25350 - RNA, 22 nt, Artificial Sequence
  LRRK2 RNA guide
gcauuuggcugggcugugggca

SEQ ID NO: 25351 - RNA, 22 nt, Artificial Sequence
  LRRK2 RNA guide
gcugggcugugggcacacccac

SEQ ID NO: 25352 - RNA, 22 nt, Artificial Sequence
  LRRK2 RNA guide
gcuguccucugugggugugccc

SEQ ID NO: 25353 - RNA, 22 nt, Artificial Sequence
  LRRK2 RNA guide
gcugugggcacacccacagagg

SEQ ID NO: 25354 - RNA, 22 nt, Artificial Sequence
  LRRK2 RNA guide
ggcacacccacagaggacagcu

SEQ ID NO: 25355 - RNA, 22 nt, Artificial Sequence
  LRRK2 RNA guide
ggcugggcugugggcacaccca

SEQ ID NO: 25356 - RNA, 22 nt, Artificial Sequence
  LRRK2 RNA guide
ggcugugggcacacccacagag

SEQ ID NO: 25357 - RNA, 22 nt, Artificial Sequence
  LRRK2 RNA guide
gggcacacccacagaggacagc

SEQ ID NO: 25358 - RNA, 22 nt, Artificial Sequence
  LRRK2 RNA guide
gggcugugggcacacccacaga

SEQ ID NO: 25359 - RNA, 22 nt, Artificial Sequence
  LRRK2 RNA guide
gucaagaaaugagagcuguccu

SEQ ID NO: 25360 - RNA, 22 nt, Artificial Sequence
  LRRK2 RNA guide
guccucugugggugugcccaca

SEQ ID NO: 25361 - RNA, 22 nt, Artificial Sequence
  LRRK2 RNA guide
gugggcacacccacagaggaca

SEQ ID NO: 25362 - RNA, 22 nt, Artificial Sequence
  LRRK2 RNA guide
gugggugugcccacagcccagc

SEQ ID NO: 25363 - RNA, 22 nt, Artificial Sequence
  LRRK2 RNA guide
ucaagaaaugagagcuguccuc

SEQ ID NO: 25364 - RNA, 22 nt, Artificial Sequence
  LRRK2 RNA guide
uccucugugggugugcccacag

SEQ ID NO: 25365 - RNA, 22 nt, Artificial Sequence
  LRRK2 RNA guide
ucugugggugugcccacagccc

SEQ ID NO: 25366 - RNA, 22 nt, Artificial Sequence
  LRRK2 RNA guide
ugagagcuguccucugugggug

SEQ ID NO: 25367 - RNA, 22 nt, Artificial Sequence
  LRRK2 RNA guide
uggcugggcugugggcacaccc

SEQ ID NO: 25368 - RNA, 22 nt, Artificial Sequence
  LRRK2 RNA guide
ugggcacacccacagaggacag

SEQ ID NO: 25369 - RNA, 22 nt, Artificial Sequence
  LRRK2 RNA guide
ugggcugugggcacacccacag

SEQ ID NO: 25370 - RNA, 22 nt, Artificial Sequence
  LRRK2 RNA guide
ugggugugcccacagcccagcc

SEQ ID NO: 25371 - RNA, 22 nt, Artificial Sequence
  LRRK2 RNA guide
uguccucugugggugugcccac

SEQ ID NO: 25372 - RNA, 22 nt, Artificial Sequence
  LRRK2 RNA guide
ugugggcacacccacagaggac

SEQ ID NO: 25373 - RNA, 22 nt, Artificial Sequence
  LRRK2 RNA guide
ugugggugugcccacagcccag

SEQ ID NO: 25374 - RNA, 22 nt, Artificial Sequence
  LRRK2 RNA guide
uuggcugggcugugggcacacc

SEQ ID NO: 25375 - RNA, 22 nt, Artificial Sequence
  LRRK2 RNA guide
uuuggcugggcugugggcacac

SEQ ID NO: 25376 - RNA, 20 nt, Artificial Sequence
  LRRK2 RNA guide
aaauacugaagcauacacuu

SEQ ID NO: 25377 - RNA, 20 nt, Artificial Sequence
  LRRK2 RNA guide
aagcauacacuucugaggua

SEQ ID NO: 25378 - RNA, 20 nt, Artificial Sequence
  LRRK2 RNA guide
aaguguaugcuucaguauuu

SEQ ID NO: 25379 - RNA, 20 nt, Artificial Sequence
  LRRK2 RNA guide
aauacugaagcauacacuuc

SEQ ID NO: 25380 - RNA, 20 nt, Artificial Sequence
  LRRK2 RNA guide
accucagaaguguaugcuuc

SEQ ID NO: 25381 - RNA, 20 nt, Artificial Sequence
  LRRK2 RNA guide
acugaagcauacacuucuga

SEQ ID NO: 25382 - RNA, 20 nt, Artificial Sequence
  LRRK2 RNA guide
acuuaaauacugaagcauac

SEQ ID NO: 25383 - RNA, 20 nt, Artificial Sequence
  LRRK2 RNA guide
agaaguguaugcuucaguau

SEQ ID NO: 25384 - RNA, 20 nt, Artificial Sequence
  LRRK2 RNA guide
agcauacacuucugagguaa

SEQ ID NO: 25385 - RNA, 20 nt, Artificial Sequence
  LRRK2 RNA guide
aguguaugcuucaguauuua

SEQ ID NO: 25386 - RNA, 20 nt, Artificial Sequence
  LRRK2 RNA guide
auacugaagcauacacuucu

SEQ ID NO: 25387 - RNA, 20 nt, Artificial Sequence
  LRRK2 RNA guide
augcuucaguauuuaaguca

SEQ ID NO: 25388 - RNA, 20 nt, Artificial Sequence
  LRRK2 RNA guide
auuuaccucagaaguguaug

SEQ ID NO: 25389 - RNA, 20 nt, Artificial Sequence
  LRRK2 RNA guide
cagaaguguaugcuucagua

SEQ ID NO: 25390 - RNA, 20 nt, Artificial Sequence
  LRRK2 RNA guide
ccucagaaguguaugcuuca

SEQ ID NO: 25391 - RNA, 20 nt, Artificial Sequence
  LRRK2 RNA guide
cucagaaguguaugcuucag

SEQ ID NO: 25392 - RNA, 20 nt, Artificial Sequence
  LRRK2 RNA guide
cugaagcauacacuucugag

SEQ ID NO: 25393 - RNA, 20 nt, Artificial Sequence
  LRRK2 RNA guide
cuuaaauacugaagcauaca

SEQ ID NO: 25394 - RNA, 20 nt, Artificial Sequence
  LRRK2 RNA guide
cuugacuuaaauacugaagc

SEQ ID NO: 25395 - RNA, 20 nt, Artificial Sequence
  LRRK2 RNA guide
gaagcauacacuucugaggu

SEQ ID NO: 25396 - RNA, 20 nt, Artificial Sequence
  LRRK2 RNA guide
gaaguguaugcuucaguauu

SEQ ID NO: 25397 - RNA, 20 nt, Artificial Sequence
  LRRK2 RNA guide
gacuuaaauacugaagcaua

SEQ ID NO: 25398 - RNA, 20 nt, Artificial Sequence
  LRRK2 RNA guide
gauuuaccucagaaguguau

SEQ ID NO: 25399 - RNA, 20 nt, Artificial Sequence
  LRRK2 RNA guide
gcauacacuucugagguaaa

SEQ ID NO: 25400 - RNA, 20 nt, Artificial Sequence
  LRRK2 RNA guide
ggauuuaccucagaagugua

SEQ ID NO: 25401 - RNA, 20 nt, Artificial Sequence
  LRRK2 RNA guide
guaugcuucaguauuuaagu

SEQ ID NO: 25402 - RNA, 20 nt, Artificial Sequence
  LRRK2 RNA guide
guguaugcuucaguauuuaa

SEQ ID NO: 25403 - RNA, 20 nt, Artificial Sequence
  LRRK2 RNA guide
uaaauacugaagcauacacu

SEQ ID NO: 25404 - RNA, 20 nt, Artificial Sequence
  LRRK2 RNA guide
uaccucagaaguguaugcuu

SEQ ID NO: 25405 - RNA, 20 nt, Artificial Sequence
  LRRK2 RNA guide
uacugaagcauacacuucug

SEQ ID NO: 25406 - RNA, 20 nt, Artificial Sequence
  LRRK2 RNA guide
uaugcuucaguauuuaaguc

SEQ ID NO: 25407 - RNA, 20 nt, Artificial Sequence
  LRRK2 RNA guide
ucagaaguguaugcuucagu

SEQ ID NO: 25408 - RNA, 20 nt, Artificial Sequence
  LRRK2 RNA guide
ucuugacuuaaauacugaag

SEQ ID NO: 25409 - RNA, 20 nt, Artificial Sequence
  LRRK2 RNA guide
ugaagcauacacuucugagg

SEQ ID NO: 25410 - RNA, 20 nt, Artificial Sequence
  LRRK2 RNA guide
ugacuuaaauacugaagcau

SEQ ID NO: 25411 - RNA, 20 nt, Artificial Sequence
  LRRK2 RNA guide
ugcuucaguauuuaagucaa

SEQ ID NO: 25412 - RNA, 20 nt, Artificial Sequence
  LRRK2 RNA guide
uggauuuaccucagaagugu

SEQ ID NO: 25413 - RNA, 20 nt, Artificial Sequence
  LRRK2 RNA guide
uguaugcuucaguauuuaag

SEQ ID NO: 25414 - RNA, 20 nt, Artificial Sequence
  LRRK2 RNA guide
uuaaauacugaagcauacac

SEQ ID NO: 25415 - RNA, 20 nt, Artificial Sequence
  LRRK2 RNA guide
uuaccucagaaguguaugcu

SEQ ID NO: 25416 - RNA, 20 nt, Artificial Sequence
  LRRK2 RNA guide
uugacuuaaauacugaagca

SEQ ID NO: 25417 - RNA, 20 nt, Artificial Sequence
  LRRK2 RNA guide
uuggauuuaccucagaagug

SEQ ID NO: 25418 - RNA, 20 nt, Artificial Sequence
  LRRK2 RNA guide
uuuaccucagaaguguaugc

SEQ ID NO: 25419 - RNA, 20 nt, Artificial Sequence
  LRRK2 RNA guide
uuuggauuuaccucagaagu

SEQ ID NO: 25420 - RNA, 21 nt, Artificial Sequence
  LRRK2 RNA guide
aaauacugaagcauacacuuc

SEQ ID NO: 25421 - RNA, 21 nt, Artificial Sequence
  LRRK2 RNA guide
aagcauacacuucugagguaa

SEQ ID NO: 25422 - RNA, 21 nt, Artificial Sequence
  LRRK2 RNA guide
aauacugaagcauacacuucu

SEQ ID NO: 25423 - RNA, 21 nt, Artificial Sequence
  LRRK2 RNA guide
accucagaaguguaugcuuca

SEQ ID NO: 25424 - RNA, 21 nt, Artificial Sequence
  LRRK2 RNA guide
acugaagcauacacuucugag

SEQ ID NO: 25425 - RNA, 21 nt, Artificial Sequence
  LRRK2 RNA guide
agaaguguaugcuucaguauu

SEQ ID NO: 25426 - RNA, 21 nt, Artificial Sequence
  LRRK2 RNA guide
agcauacacuucugagguaaa

SEQ ID NO: 25427 - RNA, 21 nt, Artificial Sequence
  LRRK2 RNA guide
auacugaagcauacacuucug

SEQ ID NO: 25428 - RNA, 21 nt, Artificial Sequence
  LRRK2 RNA guide
auuuaccucagaaguguaugc

SEQ ID NO: 25429 - RNA, 21 nt, Artificial Sequence
  LRRK2 RNA guide
auuuggauuuaccucagaagu

SEQ ID NO: 25430 - RNA, 21 nt, Artificial Sequence
  LRRK2 RNA guide
cagaaguguaugcuucaguau

SEQ ID NO: 25431 - RNA, 21 nt, Artificial Sequence
  LRRK2 RNA guide
ccucagaaguguaugcuucag

SEQ ID NO: 25432 - RNA, 21 nt, Artificial Sequence
  LRRK2 RNA guide
cucagaaguguaugcuucagu

SEQ ID NO: 25433 - RNA, 21 nt, Artificial Sequence
  LRRK2 RNA guide
cugaagcauacacuucugagg

SEQ ID NO: 25434 - RNA, 21 nt, Artificial Sequence
  LRRK2 RNA guide
cuuaaauacugaagcauacac

SEQ ID NO: 25435 - RNA, 21 nt, Artificial Sequence
  LRRK2 RNA guide
cuugacuuaaauacugaagca

SEQ ID NO: 25436 - RNA, 21 nt, Artificial Sequence
  LRRK2 RNA guide
gaagcauacacuucugaggua

SEQ ID NO: 25437 - RNA, 21 nt, Artificial Sequence
  LRRK2 RNA guide
gaaguguaugcuucaguauuu

SEQ ID NO: 25438 - RNA, 21 nt, Artificial Sequence
  LRRK2 RNA guide
gacuuaaauacugaagcauac

SEQ ID NO: 25439 - RNA, 21 nt, Artificial Sequence
  LRRK2 RNA guide
gauuuaccucagaaguguaug

SEQ ID NO: 25440 - RNA, 21 nt, Artificial Sequence
  LRRK2 RNA guide
gcauacacuucugagguaaau

SEQ ID NO: 25441 - RNA, 21 nt, Artificial Sequence
  LRRK2 RNA guide
ggauuuaccucagaaguguau

SEQ ID NO: 25442 - RNA, 21 nt, Artificial Sequence
  LRRK2 RNA guide
guaugcuucaguauuuaaguc

SEQ ID NO: 25443 - RNA, 21 nt, Artificial Sequence
  LRRK2 RNA guide
guguaugcuucaguauuuaag

SEQ ID NO: 25444 - RNA, 21 nt, Artificial Sequence
  LRRK2 RNA guide
uaccucagaaguguaugcuuc

SEQ ID NO: 25445 - RNA, 21 nt, Artificial Sequence
  LRRK2 RNA guide
uacugaagcauacacuucuga

SEQ ID NO: 25446 - RNA, 21 nt, Artificial Sequence
  LRRK2 RNA guide
ucagaaguguaugcuucagua

SEQ ID NO: 25447 - RNA, 21 nt, Artificial Sequence
  LRRK2 RNA guide
ucuugacuuaaauacugaagc

SEQ ID NO: 25448 - RNA, 21 nt, Artificial Sequence
  LRRK2 RNA guide
ugaagcauacacuucugaggu

SEQ ID NO: 25449 - RNA, 21 nt, Artificial Sequence
  LRRK2 RNA guide
ugcuucaguauuuaagucaag

SEQ ID NO: 25450 - RNA, 21 nt, Artificial Sequence
  LRRK2 RNA guide
uggauuuaccucagaagugua

SEQ ID NO: 25451 - RNA, 21 nt, Artificial Sequence
  LRRK2 RNA guide
uuaccucagaaguguaugcuu

SEQ ID NO: 25452 - RNA, 21 nt, Artificial Sequence
  LRRK2 RNA guide
uuggauuuaccucagaagugu

SEQ ID NO: 25453 - RNA, 21 nt, Artificial Sequence
  LRRK2 RNA guide
uuuaccucagaaguguaugcu

SEQ ID NO: 25454 - RNA, 21 nt, Artificial Sequence
  LRRK2 RNA guide
uuuggauuuaccucagaagug

SEQ ID NO: 25455 - RNA, 22 nt, Artificial Sequence
  LRRK2 RNA guide
aaauacugaagcauacacuucu

SEQ ID NO: 25456 - RNA, 22 nt, Artificial Sequence
  LRRK2 RNA guide
aagcauacacuucugagguaaa

SEQ ID NO: 25457 - RNA, 22 nt, Artificial Sequence
  LRRK2 RNA guide
aauacugaagcauacacuucug

SEQ ID NO: 25458 - RNA, 22 nt, Artificial Sequence
  LRRK2 RNA guide
accucagaaguguaugcuucag

SEQ ID NO: 25459 - RNA, 22 nt, Artificial Sequence
  LRRK2 RNA guide
acugaagcauacacuucugagg

SEQ ID NO: 25460 - RNA, 22 nt, Artificial Sequence
  LRRK2 RNA guide
acuuaaauacugaagcauacac

SEQ ID NO: 25461 - RNA, 22 nt, Artificial Sequence
  LRRK2 RNA guide
agaaguguaugcuucaguauuu

SEQ ID NO: 25462 - RNA, 22 nt, Artificial Sequence
  LRRK2 RNA guide
agcauacacuucugagguaaau

SEQ ID NO: 25463 - RNA, 22 nt, Artificial Sequence
  LRRK2 RNA guide
aguguaugcuucaguauuuaag

SEQ ID NO: 25464 - RNA, 22 nt, Artificial Sequence
  LRRK2 RNA guide
auacugaagcauacacuucuga

SEQ ID NO: 25465 - RNA, 22 nt, Artificial Sequence
  LRRK2 RNA guide
augcuucaguauuuaagucaag

SEQ ID NO: 25466 - RNA, 22 nt, Artificial Sequence
  LRRK2 RNA guide
auuuaccucagaaguguaugcu

SEQ ID NO: 25467 - RNA, 22 nt, Artificial Sequence
  LRRK2 RNA guide
auuuggauuuaccucagaagug

SEQ ID NO: 25468 - RNA, 22 nt, Artificial Sequence
  LRRK2 RNA guide
cagaaguguaugcuucaguauu

SEQ ID NO: 25469 - RNA, 22 nt, Artificial Sequence
  LRRK2 RNA guide
cauuuggauuuaccucagaagu

SEQ ID NO: 25470 - RNA, 22 nt, Artificial Sequence
  LRRK2 RNA guide
ccucagaaguguaugcuucagu

SEQ ID NO: 25471 - RNA, 22 nt, Artificial Sequence
  LRRK2 RNA guide
cucagaaguguaugcuucagua

SEQ ID NO: 25472 - RNA, 22 nt, Artificial Sequence
  LRRK2 RNA guide
cugaagcauacacuucugaggu

SEQ ID NO: 25473 - RNA, 22 nt, Artificial Sequence
  LRRK2 RNA guide
cuuaaauacugaagcauacacu

SEQ ID NO: 25474 - RNA, 22 nt, Artificial Sequence
  LRRK2 RNA guide
cuugacuuaaauacugaagcau

SEQ ID NO: 25475 - RNA, 22 nt, Artificial Sequence
  LRRK2 RNA guide
gaagcauacacuucugagguaa

SEQ ID NO: 25476 - RNA, 22 nt, Artificial Sequence
  LRRK2 RNA guide
gaaguguaugcuucaguauuua

SEQ ID NO: 25477 - RNA, 22 nt, Artificial Sequence
  LRRK2 RNA guide
gacuuaaauacugaagcauaca

SEQ ID NO: 25478 - RNA, 22 nt, Artificial Sequence
  LRRK2 RNA guide
gauuuaccucagaaguguaugc

SEQ ID NO: 25479 - RNA, 22 nt, Artificial Sequence
  LRRK2 RNA guide
gcauacacuucugagguaaauc

SEQ ID NO: 25480 - RNA, 22 nt, Artificial Sequence
  LRRK2 RNA guide
ggauuuaccucagaaguguaug

SEQ ID NO: 25481 - RNA, 22 nt, Artificial Sequence
  LRRK2 RNA guide
guaugcuucaguauuuaaguca

SEQ ID NO: 25482 - RNA, 22 nt, Artificial Sequence
  LRRK2 RNA guide
guguaugcuucaguauuuaagu

SEQ ID NO: 25483 - RNA, 22 nt, Artificial Sequence
  LRRK2 RNA guide
uaaauacugaagcauacacuuc

SEQ ID NO: 25484 - RNA, 22 nt, Artificial Sequence
  LRRK2 RNA guide
uaccucagaaguguaugcuuca

SEQ ID NO: 25485 - RNA, 22 nt, Artificial Sequence
  LRRK2 RNA guide
uacugaagcauacacuucugag

SEQ ID NO: 25486 - RNA, 22 nt, Artificial Sequence
  LRRK2 RNA guide
ucagaaguguaugcuucaguau

SEQ ID NO: 25487 - RNA, 22 nt, Artificial Sequence
  LRRK2 RNA guide
ucuugacuuaaauacugaagca

SEQ ID NO: 25488 - RNA, 22 nt, Artificial Sequence
  LRRK2 RNA guide
ugaagcauacacuucugaggua

SEQ ID NO: 25489 - RNA, 22 nt, Artificial Sequence
  LRRK2 RNA guide
ugacuuaaauacugaagcauac

SEQ ID NO: 25490 - RNA, 22 nt, Artificial Sequence
  LRRK2 RNA guide
ugcuucaguauuuaagucaaga

SEQ ID NO: 25491 - RNA, 22 nt, Artificial Sequence
  LRRK2 RNA guide
uggauuuaccucagaaguguau

SEQ ID NO: 25492 - RNA, 22 nt, Artificial Sequence
  LRRK2 RNA guide
uguaugcuucaguauuuaaguc

SEQ ID NO: 25493 - RNA, 22 nt, Artificial Sequence
  LRRK2 RNA guide
uuaccucagaaguguaugcuuc

SEQ ID NO: 25494 - RNA, 22 nt, Artificial Sequence
  LRRK2 RNA guide
uucuugacuuaaauacugaagc

SEQ ID NO: 25495 - RNA, 22 nt, Artificial Sequence
  LRRK2 RNA guide
uuggauuuaccucagaagugua

SEQ ID NO: 25496 - RNA, 22 nt, Artificial Sequence
  LRRK2 RNA guide
uuuaccucagaaguguaugcuu

SEQ ID NO: 25497 - RNA, 22 nt, Artificial Sequence
  LRRK2 RNA guide
uuuggauuuaccucagaagugu

SEQ ID NO: 25498 - RNA, 20 nt, Artificial Sequence
  LRRK2 RNA guide
aaauacugaaggaugcacuu

SEQ ID NO: 25499 - RNA, 20 nt, Artificial Sequence
  LRRK2 RNA guide
aaggaugcacuucugaggua

SEQ ID NO: 25500 - RNA, 20 nt, Artificial Sequence
  LRRK2 RNA guide
aagugcauccuucaguauuu

SEQ ID NO: 25501 - RNA, 20 nt, Artificial Sequence
  LRRK2 RNA guide
aauacugaaggaugcacuuc

SEQ ID NO: 25502 - RNA, 20 nt, Artificial Sequence
  LRRK2 RNA guide
accucagaagugcauccuuc

SEQ ID NO: 25503 - RNA, 20 nt, Artificial Sequence
  LRRK2 RNA guide
acugaaggaugcacuucuga

SEQ ID NO: 25504 - RNA, 20 nt, Artificial Sequence
  LRRK2 RNA guide
acuuaaauacugaaggaugc

SEQ ID NO: 25505 - RNA, 20 nt, Artificial Sequence
  LRRK2 RNA guide
agaagugcauccuucaguau

SEQ ID NO: 25506 - RNA, 20 nt, Artificial Sequence
  LRRK2 RNA guide
aggaugcacuucugagguaa

SEQ ID NO: 25507 - RNA, 20 nt, Artificial Sequence
  LRRK2 RNA guide
agugcauccuucaguauuua

SEQ ID NO: 25508 - RNA, 20 nt, Artificial Sequence
  LRRK2 RNA guide
auacugaaggaugcacuucu

SEQ ID NO: 25509 - RNA, 20 nt, Artificial Sequence
  LRRK2 RNA guide
augcacuucugagguaaauc

SEQ ID NO: 25510 - RNA, 20 nt, Artificial Sequence
  LRRK2 RNA guide
auuuaccucagaagugcauc

SEQ ID NO: 25511 - RNA, 20 nt, Artificial Sequence
  LRRK2 RNA guide
auuuggauuuaccucagaag

SEQ ID NO: 25512 - RNA, 20 nt, Artificial Sequence
  LRRK2 RNA guide
cagaagugcauccuucagua

SEQ ID NO: 25513 - RNA, 20 nt, Artificial Sequence
  LRRK2 RNA guide
cauuuggauuuaccucagaa

SEQ ID NO: 25514 - RNA, 20 nt, Artificial Sequence
  LRRK2 RNA guide
ccucagaagugcauccuuca

SEQ ID NO: 25515 - RNA, 20 nt, Artificial Sequence
  LRRK2 RNA guide
cucagaagugcauccuucag

SEQ ID NO: 25516 - RNA, 20 nt, Artificial Sequence
  LRRK2 RNA guide
cugaaggaugcacuucugag

SEQ ID NO: 25517 - RNA, 20 nt, Artificial Sequence
  LRRK2 RNA guide
cuuaaauacugaaggaugca

SEQ ID NO: 25518 - RNA, 20 nt, Artificial Sequence
  LRRK2 RNA guide
cuugacuuaaauacugaagg

SEQ ID NO: 25519 - RNA, 20 nt, Artificial Sequence
  LRRK2 RNA guide
gaaggaugcacuucugaggu

SEQ ID NO: 25520 - RNA, 20 nt, Artificial Sequence
  LRRK2 RNA guide
gaagugcauccuucaguauu

SEQ ID NO: 25521 - RNA, 20 nt, Artificial Sequence
  LRRK2 RNA guide
gacuuaaauacugaaggaug

SEQ ID NO: 25522 - RNA, 20 nt, Artificial Sequence
  LRRK2 RNA guide
gaugcacuucugagguaaau

SEQ ID NO: 25523 - RNA, 20 nt, Artificial Sequence
  LRRK2 RNA guide
gauuuaccucagaagugcau

SEQ ID NO: 25524 - RNA, 20 nt, Artificial Sequence
  LRRK2 RNA guide
gcauccuucaguauuuaagu

SEQ ID NO: 25525 - RNA, 20 nt, Artificial Sequence
  LRRK2 RNA guide
gcauuuggauuuaccucaga

SEQ ID NO: 25526 - RNA, 20 nt, Artificial Sequence
  LRRK2 RNA guide
ggaugcacuucugagguaaa

SEQ ID NO: 25527 - RNA, 20 nt, Artificial Sequence
  LRRK2 RNA guide
ggauuuaccucagaagugca

SEQ ID NO: 25528 - RNA, 20 nt, Artificial Sequence
  LRRK2 RNA guide
gugcauccuucaguauuuaa

SEQ ID NO: 25529 - RNA, 20 nt, Artificial Sequence
  LRRK2 RNA guide
uaaauacugaaggaugcacu

SEQ ID NO: 25530 - RNA, 20 nt, Artificial Sequence
  LRRK2 RNA guide
uaccucagaagugcauccuu

SEQ ID NO: 25531 - RNA, 20 nt, Artificial Sequence
  LRRK2 RNA guide
uacugaaggaugcacuucug

SEQ ID NO: 25532 - RNA, 20 nt, Artificial Sequence
  LRRK2 RNA guide
ucagaagugcauccuucagu

SEQ ID NO: 25533 - RNA, 20 nt, Artificial Sequence
  LRRK2 RNA guide
ugaaggaugcacuucugagg

SEQ ID NO: 25534 - RNA, 20 nt, Artificial Sequence
  LRRK2 RNA guide
ugacuuaaauacugaaggau

SEQ ID NO: 25535 - RNA, 20 nt, Artificial Sequence
  LRRK2 RNA guide
ugcacuucugagguaaaucc

SEQ ID NO: 25536 - RNA, 20 nt, Artificial Sequence
  LRRK2 RNA guide
ugcauccuucaguauuuaag

SEQ ID NO: 25537 - RNA, 20 nt, Artificial Sequence
  LRRK2 RNA guide
uggauuuaccucagaagugc

SEQ ID NO: 25538 - RNA, 20 nt, Artificial Sequence
  LRRK2 RNA guide
uuaaauacugaaggaugcac

SEQ ID NO: 25539 - RNA, 20 nt, Artificial Sequence
  LRRK2 RNA guide
uuaccucagaagugcauccu

SEQ ID NO: 25540 - RNA, 20 nt, Artificial Sequence
  LRRK2 RNA guide
uugacuuaaauacugaagga

SEQ ID NO: 25541 - RNA, 20 nt, Artificial Sequence
  LRRK2 RNA guide
uuuaccucagaagugcaucc

SEQ ID NO: 25542 - RNA, 21 nt, Artificial Sequence
  LRRK2 RNA guide
aaauacugaaggaugcacuuc

SEQ ID NO: 25543 - RNA, 21 nt, Artificial Sequence
  LRRK2 RNA guide
aaggaugcacuucugagguaa

SEQ ID NO: 25544 - RNA, 21 nt, Artificial Sequence
  LRRK2 RNA guide
aagugcauccuucaguauuua

SEQ ID NO: 25545 - RNA, 21 nt, Artificial Sequence
  LRRK2 RNA guide
aauacugaaggaugcacuucu

SEQ ID NO: 25546 - RNA, 21 nt, Artificial Sequence
  LRRK2 RNA guide
accucagaagugcauccuuca

SEQ ID NO: 25547 - RNA, 21 nt, Artificial Sequence
  LRRK2 RNA guide
acugaaggaugcacuucugag

SEQ ID NO: 25548 - RNA, 21 nt, Artificial Sequence
  LRRK2 RNA guide
acuuaaauacugaaggaugca

SEQ ID NO: 25549 - RNA, 21 nt, Artificial Sequence
  LRRK2 RNA guide
agaagugcauccuucaguauu

SEQ ID NO: 25550 - RNA, 21 nt, Artificial Sequence
  LRRK2 RNA guide
agcauuuggauuuaccucaga

SEQ ID NO: 25551 - RNA, 21 nt, Artificial Sequence
  LRRK2 RNA guide
aggaugcacuucugagguaaa

SEQ ID NO: 25552 - RNA, 21 nt, Artificial Sequence
  LRRK2 RNA guide
agugcauccuucaguauuuaa

SEQ ID NO: 25553 - RNA, 21 nt, Artificial Sequence
  LRRK2 RNA guide
auacugaaggaugcacuucug

SEQ ID NO: 25554 - RNA, 21 nt, Artificial Sequence
  LRRK2 RNA guide
augcacuucugagguaaaucc

SEQ ID NO: 25555 - RNA, 21 nt, Artificial Sequence
  LRRK2 RNA guide
auuuaccucagaagugcaucc

SEQ ID NO: 25556 - RNA, 21 nt, Artificial Sequence
  LRRK2 RNA guide
cagaagugcauccuucaguau

SEQ ID NO: 25557 - RNA, 21 nt, Artificial Sequence
  LRRK2 RNA guide
cauuuggauuuaccucagaag

SEQ ID NO: 25558 - RNA, 21 nt, Artificial Sequence
  LRRK2 RNA guide
ccucagaagugcauccuucag

SEQ ID NO: 25559 - RNA, 21 nt, Artificial Sequence
  LRRK2 RNA guide
cucagaagugcauccuucagu

SEQ ID NO: 25560 - RNA, 21 nt, Artificial Sequence
  LRRK2 RNA guide
cugaaggaugcacuucugagg

SEQ ID NO: 25561 - RNA, 21 nt, Artificial Sequence
  LRRK2 RNA guide
cuuaaauacugaaggaugcac

SEQ ID NO: 25562 - RNA, 21 nt, Artificial Sequence
  LRRK2 RNA guide
cuugacuuaaauacugaagga

SEQ ID NO: 25563 - RNA, 21 nt, Artificial Sequence
  LRRK2 RNA guide
gaaggaugcacuucugaggua

SEQ ID NO: 25564 - RNA, 21 nt, Artificial Sequence
  LRRK2 RNA guide
gaagugcauccuucaguauuu

SEQ ID NO: 25565 - RNA, 21 nt, Artificial Sequence
  LRRK2 RNA guide
gacuuaaauacugaaggaugc

SEQ ID NO: 25566 - RNA, 21 nt, Artificial Sequence
  LRRK2 RNA guide
gaugcacuucugagguaaauc

SEQ ID NO: 25567 - RNA, 21 nt, Artificial Sequence
  LRRK2 RNA guide
gauuuaccucagaagugcauc

SEQ ID NO: 25568 - RNA, 21 nt, Artificial Sequence
  LRRK2 RNA guide
gcauccuucaguauuuaaguc

SEQ ID NO: 25569 - RNA, 21 nt, Artificial Sequence
  LRRK2 RNA guide
gcauuuggauuuaccucagaa

SEQ ID NO: 25570 - RNA, 21 nt, Artificial Sequence
  LRRK2 RNA guide
ggaugcacuucugagguaaau

SEQ ID NO: 25571 - RNA, 21 nt, Artificial Sequence
  LRRK2 RNA guide
ggauuuaccucagaagugcau

SEQ ID NO: 25572 - RNA, 21 nt, Artificial Sequence
  LRRK2 RNA guide
gugcauccuucaguauuuaag

SEQ ID NO: 25573 - RNA, 21 nt, Artificial Sequence
  LRRK2 RNA guide
uaaauacugaaggaugcacuu

SEQ ID NO: 25574 - RNA, 21 nt, Artificial Sequence
  LRRK2 RNA guide
uaccucagaagugcauccuuc

SEQ ID NO: 25575 - RNA, 21 nt, Artificial Sequence
  LRRK2 RNA guide
uacugaaggaugcacuucuga

SEQ ID NO: 25576 - RNA, 21 nt, Artificial Sequence
  LRRK2 RNA guide
ucagaagugcauccuucagua

SEQ ID NO: 25577 - RNA, 21 nt, Artificial Sequence
  LRRK2 RNA guide
ucuugacuuaaauacugaagg

SEQ ID NO: 25578 - RNA, 21 nt, Artificial Sequence
  LRRK2 RNA guide
ugaaggaugcacuucugaggu

SEQ ID NO: 25579 - RNA, 21 nt, Artificial Sequence
  LRRK2 RNA guide
ugacuuaaauacugaaggaug

SEQ ID NO: 25580 - RNA, 21 nt, Artificial Sequence
  LRRK2 RNA guide
ugcacuucugagguaaaucca

SEQ ID NO: 25581 - RNA, 21 nt, Artificial Sequence
  LRRK2 RNA guide
ugcauccuucaguauuuaagu

SEQ ID NO: 25582 - RNA, 21 nt, Artificial Sequence
  LRRK2 RNA guide
uggauuuaccucagaagugca

SEQ ID NO: 25583 - RNA, 21 nt, Artificial Sequence
  LRRK2 RNA guide
uuaaauacugaaggaugcacu

SEQ ID NO: 25584 - RNA, 21 nt, Artificial Sequence
  LRRK2 RNA guide
uuaccucagaagugcauccuu

SEQ ID NO: 25585 - RNA, 21 nt, Artificial Sequence
  LRRK2 RNA guide
uuggauuuaccucagaagugc

SEQ ID NO: 25586 - RNA, 21 nt, Artificial Sequence
  LRRK2 RNA guide
uuuaccucagaagugcauccu

SEQ ID NO: 25587 - RNA, 22 nt, Artificial Sequence
  LRRK2 RNA guide
aaauacugaaggaugcacuucu

SEQ ID NO: 25588 - RNA, 22 nt, Artificial Sequence
  LRRK2 RNA guide
aaggaugcacuucugagguaaa

SEQ ID NO: 25589 - RNA, 22 nt, Artificial Sequence
  LRRK2 RNA guide
aagugcauccuucaguauuuaa

SEQ ID NO: 25590 - RNA, 22 nt, Artificial Sequence
  LRRK2 RNA guide
aauacugaaggaugcacuucug

SEQ ID NO: 25591 - RNA, 22 nt, Artificial Sequence
  LRRK2 RNA guide
accucagaagugcauccuucag

SEQ ID NO: 25592 - RNA, 22 nt, Artificial Sequence
  LRRK2 RNA guide
acugaaggaugcacuucugagg

SEQ ID NO: 25593 - RNA, 22 nt, Artificial Sequence
  LRRK2 RNA guide
acuuaaauacugaaggaugcac

SEQ ID NO: 25594 - RNA, 22 nt, Artificial Sequence
  LRRK2 RNA guide
agaagugcauccuucaguauuu

SEQ ID NO: 25595 - RNA, 22 nt, Artificial Sequence
  LRRK2 RNA guide
agcauuuggauuuaccucagaa

SEQ ID NO: 25596 - RNA, 22 nt, Artificial Sequence
  LRRK2 RNA guide
aggaugcacuucugagguaaau

SEQ ID NO: 25597 - RNA, 22 nt, Artificial Sequence
  LRRK2 RNA guide
agugcauccuucaguauuuaag

SEQ ID NO: 25598 - RNA, 22 nt, Artificial Sequence
  LRRK2 RNA guide
auacugaaggaugcacuucuga

SEQ ID NO: 25599 - RNA, 22 nt, Artificial Sequence
  LRRK2 RNA guide
augcacuucugagguaaaucca

SEQ ID NO: 25600 - RNA, 22 nt, Artificial Sequence
  LRRK2 RNA guide
auuuaccucagaagugcauccu

SEQ ID NO: 25601 - RNA, 22 nt, Artificial Sequence
  LRRK2 RNA guide
cagaagugcauccuucaguauu

SEQ ID NO: 25602 - RNA, 22 nt, Artificial Sequence
  LRRK2 RNA guide
ccucagaagugcauccuucagu

SEQ ID NO: 25603 - RNA, 22 nt, Artificial Sequence
  LRRK2 RNA guide
cucagaagugcauccuucagua

SEQ ID NO: 25604 - RNA, 22 nt, Artificial Sequence
  LRRK2 RNA guide
cugaaggaugcacuucugaggu

SEQ ID NO: 25605 - RNA, 22 nt, Artificial Sequence
  LRRK2 RNA guide
cuuaaauacugaaggaugcacu

SEQ ID NO: 25606 - RNA, 22 nt, Artificial Sequence
  LRRK2 RNA guide
cuugacuuaaauacugaaggau

SEQ ID NO: 25607 - RNA, 22 nt, Artificial Sequence
  LRRK2 RNA guide
gaaggaugcacuucugagguaa

SEQ ID NO: 25608 - RNA, 22 nt, Artificial Sequence
  LRRK2 RNA guide
gaagugcauccuucaguauuua

SEQ ID NO: 25609 - RNA, 22 nt, Artificial Sequence
  LRRK2 RNA guide
gacuuaaauacugaaggaugca

SEQ ID NO: 25610 - RNA, 22 nt, Artificial Sequence
  LRRK2 RNA guide
gagcauuuggauuuaccucaga

SEQ ID NO: 25611 - RNA, 22 nt, Artificial Sequence
  LRRK2 RNA guide
gaugcacuucugagguaaaucc

SEQ ID NO: 25612 - RNA, 22 nt, Artificial Sequence
  LRRK2 RNA guide
gauuuaccucagaagugcaucc

SEQ ID NO: 25613 - RNA, 22 nt, Artificial Sequence
  LRRK2 RNA guide
gcauccuucaguauuuaaguca

SEQ ID NO: 25614 - RNA, 22 nt, Artificial Sequence
  LRRK2 RNA guide
gcauuuggauuuaccucagaag

SEQ ID NO: 25615 - RNA, 22 nt, Artificial Sequence
  LRRK2 RNA guide
ggaugcacuucugagguaaauc

SEQ ID NO: 25616 - RNA, 22 nt, Artificial Sequence
  LRRK2 RNA guide
ggauuuaccucagaagugcauc

SEQ ID NO: 25617 - RNA, 22 nt, Artificial Sequence
  LRRK2 RNA guide
gugcauccuucaguauuuaagu

SEQ ID NO: 25618 - RNA, 22 nt, Artificial Sequence
  LRRK2 RNA guide
uaaauacugaaggaugcacuuc

SEQ ID NO: 25619 - RNA, 22 nt, Artificial Sequence
  LRRK2 RNA guide
uaccucagaagugcauccuuca

SEQ ID NO: 25620 - RNA, 22 nt, Artificial Sequence
  LRRK2 RNA guide
uacugaaggaugcacuucugag

SEQ ID NO: 25621 - RNA, 22 nt, Artificial Sequence
  LRRK2 RNA guide
ucagaagugcauccuucaguau

SEQ ID NO: 25622 - RNA, 22 nt, Artificial Sequence
  LRRK2 RNA guide
ucuugacuuaaauacugaagga

SEQ ID NO: 25623 - RNA, 22 nt, Artificial Sequence
  LRRK2 RNA guide
ugaaggaugcacuucugaggua

SEQ ID NO: 25624 - RNA, 22 nt, Artificial Sequence
  LRRK2 RNA guide
ugacuuaaauacugaaggaugc

SEQ ID NO: 25625 - RNA, 22 nt, Artificial Sequence
  LRRK2 RNA guide
ugcacuucugagguaaauccaa

SEQ ID NO: 25626 - RNA, 22 nt, Artificial Sequence
  LRRK2 RNA guide
ugcauccuucaguauuuaaguc

SEQ ID NO: 25627 - RNA, 22 nt, Artificial Sequence
  LRRK2 RNA guide
uggauuuaccucagaagugcau

SEQ ID NO: 25628 - RNA, 22 nt, Artificial Sequence
  LRRK2 RNA guide
uuaaauacugaaggaugcacuu

SEQ ID NO: 25629 - RNA, 22 nt, Artificial Sequence
  LRRK2 RNA guide
uuaccucagaagugcauccuuc

SEQ ID NO: 25630 - RNA, 22 nt, Artificial Sequence
  LRRK2 RNA guide
uucuugacuuaaauacugaagg

SEQ ID NO: 25631 - RNA, 22 nt, Artificial Sequence
  LRRK2 RNA guide
uugacuuaaauacugaaggaug

SEQ ID NO: 25632 - RNA, 22 nt, Artificial Sequence
  LRRK2 RNA guide
uuggauuuaccucagaagugca

SEQ ID NO: 25633 - RNA, 22 nt, Artificial Sequence
  LRRK2 RNA guide
uuuaccucagaagugcauccuu

SEQ ID NO: 25634 - RNA, 22 nt, Artificial Sequence
  LRRK2 RNA guide
uuuggauuuaccucagaagugc

SEQ ID NO: 25635 - RNA, 20 nt, Artificial Sequence
  LRRK2 RNA guide
aacaggaagucgcugauagu

SEQ ID NO: 25636 - RNA, 20 nt, Artificial Sequence
  LRRK2 RNA guide
aagcacaauauucuacuauc

SEQ ID NO: 25637 - RNA, 20 nt, Artificial Sequence
  LRRK2 RNA guide
aagucgcugauaguagaaua

SEQ ID NO: 25638 - RNA, 20 nt, Artificial Sequence
  LRRK2 RNA guide
aauauucuacuaucagcgac

SEQ ID NO: 25639 - RNA, 20 nt, Artificial Sequence
  LRRK2 RNA guide
acaauauucuacuaucagcg

SEQ ID NO: 25640 - RNA, 20 nt, Artificial Sequence
  LRRK2 RNA guide
acaggaagucgcugauagua

SEQ ID NO: 25641 - RNA, 20 nt, Artificial Sequence
  LRRK2 RNA guide
acuaucagcgacuuccuguu

SEQ ID NO: 25642 - RNA, 20 nt, Artificial Sequence
  LRRK2 RNA guide
agcacaauauucuacuauca

SEQ ID NO: 25643 - RNA, 20 nt, Artificial Sequence
  LRRK2 RNA guide
agcgacuuccuguuaagaaa

SEQ ID NO: 25644 - RNA, 20 nt, Artificial Sequence
  LRRK2 RNA guide
aggaagucgcugauaguaga

SEQ ID NO: 25645 - RNA, 20 nt, Artificial Sequence
  LRRK2 RNA guide
agucgcugauaguagaauau

SEQ ID NO: 25646 - RNA, 20 nt, Artificial Sequence
  LRRK2 RNA guide
auauucuacuaucagcgacu

SEQ ID NO: 25647 - RNA, 20 nt, Artificial Sequence
  LRRK2 RNA guide
aucagcgacuuccuguuaag

SEQ ID NO: 25648 - RNA, 20 nt, Artificial Sequence
  LRRK2 RNA guide
auucuacuaucagcgacuuc

SEQ ID NO: 25649 - RNA, 20 nt, Artificial Sequence
  LRRK2 RNA guide
caauauucuacuaucagcga

SEQ ID NO: 25650 - RNA, 20 nt, Artificial Sequence
  LRRK2 RNA guide
cacaauauucuacuaucagc

SEQ ID NO: 25651 - RNA, 20 nt, Artificial Sequence
  LRRK2 RNA guide
cagcgacuuccuguuaagaa

SEQ ID NO: 25652 - RNA, 20 nt, Artificial Sequence
  LRRK2 RNA guide
caggaagucgcugauaguag

SEQ ID NO: 25653 - RNA, 20 nt, Artificial Sequence
  LRRK2 RNA guide
cgacuuccuguuaagaaaag

SEQ ID NO: 25654 - RNA, 20 nt, Artificial Sequence
  LRRK2 RNA guide
cuacuaucagcgacuuccug

SEQ ID NO: 25655 - RNA, 20 nt, Artificial Sequence
  LRRK2 RNA guide
cuaucagcgacuuccuguua

SEQ ID NO: 25656 - RNA, 20 nt, Artificial Sequence
  LRRK2 RNA guide
cuuaacaggaagucgcugau

SEQ ID NO: 25657 - RNA, 20 nt, Artificial Sequence
  LRRK2 RNA guide
cuuuucuuaacaggaagucg

SEQ ID NO: 25658 - RNA, 20 nt, Artificial Sequence
  LRRK2 RNA guide
gaagucgcugauaguagaau

SEQ ID NO: 25659 - RNA, 20 nt, Artificial Sequence
  LRRK2 RNA guide
gcacaauauucuacuaucag

SEQ ID NO: 25660 - RNA, 20 nt, Artificial Sequence
  LRRK2 RNA guide
gcgacuuccuguuaagaaaa

SEQ ID NO: 25661 - RNA, 20 nt, Artificial Sequence
  LRRK2 RNA guide
ggaagucgcugauaguagaa

SEQ ID NO: 25662 - RNA, 20 nt, Artificial Sequence
  LRRK2 RNA guide
gucgcugauaguagaauauu

SEQ ID NO: 25663 - RNA, 20 nt, Artificial Sequence
  LRRK2 RNA guide
uaacaggaagucgcugauag

SEQ ID NO: 25664 - RNA, 20 nt, Artificial Sequence
  LRRK2 RNA guide
uacuaucagcgacuuccugu

SEQ ID NO: 25665 - RNA, 20 nt, Artificial Sequence
  LRRK2 RNA guide
uaucagcgacuuccuguuaa

SEQ ID NO: 25666 - RNA, 20 nt, Artificial Sequence
  LRRK2 RNA guide
uauucuacuaucagcgacuu

SEQ ID NO: 25667 - RNA, 20 nt, Artificial Sequence
  LRRK2 RNA guide
ucagcgacuuccuguuaaga

SEQ ID NO: 25668 - RNA, 20 nt, Artificial Sequence
  LRRK2 RNA guide
ucgcugauaguagaauauug

SEQ ID NO: 25669 - RNA, 20 nt, Artificial Sequence
  LRRK2 RNA guide
ucuacuaucagcgacuuccu

SEQ ID NO: 25670 - RNA, 20 nt, Artificial Sequence
  LRRK2 RNA guide
ucuuaacaggaagucgcuga

SEQ ID NO: 25671 - RNA, 20 nt, Artificial Sequence
  LRRK2 RNA guide
ucuuuucuuaacaggaaguc

SEQ ID NO: 25672 - RNA, 20 nt, Artificial Sequence
  LRRK2 RNA guide
uuaacaggaagucgcugaua

SEQ ID NO: 25673 - RNA, 20 nt, Artificial Sequence
  LRRK2 RNA guide
uucuacuaucagcgacuucc

SEQ ID NO: 25674 - RNA, 20 nt, Artificial Sequence
  LRRK2 RNA guide
uucuuaacaggaagucgcug

SEQ ID NO: 25675 - RNA, 20 nt, Artificial Sequence
  LRRK2 RNA guide
uucuuuucuuaacaggaagu

SEQ ID NO: 25676 - RNA, 20 nt, Artificial Sequence
  LRRK2 RNA guide
uuucuuaacaggaagucgcu

SEQ ID NO: 25677 - RNA, 20 nt, Artificial Sequence
  LRRK2 RNA guide
uuucuuuucuuaacaggaag

SEQ ID NO: 25678 - RNA, 20 nt, Artificial Sequence
  LRRK2 RNA guide
uuuucuuaacaggaagucgc

SEQ ID NO: 25679 - RNA, 21 nt, Artificial Sequence
  LRRK2 RNA guide
aacaggaagucgcugauagua

SEQ ID NO: 25680 - RNA, 21 nt, Artificial Sequence
  LRRK2 RNA guide
aagucgcugauaguagaauau

SEQ ID NO: 25681 - RNA, 21 nt, Artificial Sequence
  LRRK2 RNA guide
aauauucuacuaucagcgacu

SEQ ID NO: 25682 - RNA, 21 nt, Artificial Sequence
  LRRK2 RNA guide
acaauauucuacuaucagcga

SEQ ID NO: 25683 - RNA, 21 nt, Artificial Sequence
  LRRK2 RNA guide
acaggaagucgcugauaguag

SEQ ID NO: 25684 - RNA, 21 nt, Artificial Sequence
  LRRK2 RNA guide
acuaucagcgacuuccuguua

SEQ ID NO: 25685 - RNA, 21 nt, Artificial Sequence
  LRRK2 RNA guide
agcacaauauucuacuaucag

SEQ ID NO: 25686 - RNA, 21 nt, Artificial Sequence
  LRRK2 RNA guide
agcgacuuccuguuaagaaaa

SEQ ID NO: 25687 - RNA, 21 nt, Artificial Sequence
  LRRK2 RNA guide
aggaagucgcugauaguagaa

SEQ ID NO: 25688 - RNA, 21 nt, Artificial Sequence
  LRRK2 RNA guide
agucgcugauaguagaauauu

SEQ ID NO: 25689 - RNA, 21 nt, Artificial Sequence
  LRRK2 RNA guide
auauucuacuaucagcgacuu

SEQ ID NO: 25690 - RNA, 21 nt, Artificial Sequence
  LRRK2 RNA guide
aucagcgacuuccuguuaaga

SEQ ID NO: 25691 - RNA, 21 nt, Artificial Sequence
  LRRK2 RNA guide
auucuacuaucagcgacuucc

SEQ ID NO: 25692 - RNA, 21 nt, Artificial Sequence
  LRRK2 RNA guide
caauauucuacuaucagcgac

SEQ ID NO: 25693 - RNA, 21 nt, Artificial Sequence
  LRRK2 RNA guide
cacaauauucuacuaucagcg

SEQ ID NO: 25694 - RNA, 21 nt, Artificial Sequence
  LRRK2 RNA guide
cagcgacuuccuguuaagaaa

SEQ ID NO: 25695 - RNA, 21 nt, Artificial Sequence
  LRRK2 RNA guide
caggaagucgcugauaguaga

SEQ ID NO: 25696 - RNA, 21 nt, Artificial Sequence
  LRRK2 RNA guide
cgacuuccuguuaagaaaaga

SEQ ID NO: 25697 - RNA, 21 nt, Artificial Sequence
  LRRK2 RNA guide
cuacuaucagcgacuuccugu

SEQ ID NO: 25698 - RNA, 21 nt, Artificial Sequence
  LRRK2 RNA guide
cuaucagcgacuuccuguuaa

SEQ ID NO: 25699 - RNA, 21 nt, Artificial Sequence
  LRRK2 RNA guide
cuuaacaggaagucgcugaua

SEQ ID NO: 25700 - RNA, 21 nt, Artificial Sequence
  LRRK2 RNA guide
cuuuucuuaacaggaagucgc

SEQ ID NO: 25701 - RNA, 21 nt, Artificial Sequence
  LRRK2 RNA guide
gaagucgcugauaguagaaua

SEQ ID NO: 25702 - RNA, 21 nt, Artificial Sequence
  LRRK2 RNA guide
gcacaauauucuacuaucagc

SEQ ID NO: 25703 - RNA, 21 nt, Artificial Sequence
  LRRK2 RNA guide
gcgacuuccuguuaagaaaag

SEQ ID NO: 25704 - RNA, 21 nt, Artificial Sequence
  LRRK2 RNA guide
ggaagucgcugauaguagaau

SEQ ID NO: 25705 - RNA, 21 nt, Artificial Sequence
  LRRK2 RNA guide
gucgcugauaguagaauauug

SEQ ID NO: 25706 - RNA, 21 nt, Artificial Sequence
  LRRK2 RNA guide
uaacaggaagucgcugauagu

SEQ ID NO: 25707 - RNA, 21 nt, Artificial Sequence
  LRRK2 RNA guide
uacuaucagcgacuuccuguu

SEQ ID NO: 25708 - RNA, 21 nt, Artificial Sequence
  LRRK2 RNA guide
uaucagcgacuuccuguuaag

SEQ ID NO: 25709 - RNA, 21 nt, Artificial Sequence
  LRRK2 RNA guide
uauucuacuaucagcgacuuc

SEQ ID NO: 25710 - RNA, 21 nt, Artificial Sequence
  LRRK2 RNA guide
ucagcgacuuccuguuaagaa

SEQ ID NO: 25711 - RNA, 21 nt, Artificial Sequence
  LRRK2 RNA guide
ucgcugauaguagaauauugu

SEQ ID NO: 25712 - RNA, 21 nt, Artificial Sequence
  LRRK2 RNA guide
ucuacuaucagcgacuuccug

SEQ ID NO: 25713 - RNA, 21 nt, Artificial Sequence
  LRRK2 RNA guide
ucuuaacaggaagucgcugau

SEQ ID NO: 25714 - RNA, 21 nt, Artificial Sequence
  LRRK2 RNA guide
ucuuuucuuaacaggaagucg

SEQ ID NO: 25715 - RNA, 21 nt, Artificial Sequence
  LRRK2 RNA guide
uuaacaggaagucgcugauag

SEQ ID NO: 25716 - RNA, 21 nt, Artificial Sequence
  LRRK2 RNA guide
uucuacuaucagcgacuuccu

SEQ ID NO: 25717 - RNA, 21 nt, Artificial Sequence
  LRRK2 RNA guide
uucuuaacaggaagucgcuga

SEQ ID NO: 25718 - RNA, 21 nt, Artificial Sequence
  LRRK2 RNA guide
uucuuuucuuaacaggaaguc

SEQ ID NO: 25719 - RNA, 21 nt, Artificial Sequence
  LRRK2 RNA guide
uuucuuaacaggaagucgcug

SEQ ID NO: 25720 - RNA, 21 nt, Artificial Sequence
  LRRK2 RNA guide
uuuucuuaacaggaagucgcu

SEQ ID NO: 25721 - RNA, 22 nt, Artificial Sequence
  LRRK2 RNA guide
aacaggaagucgcugauaguag

SEQ ID NO: 25722 - RNA, 22 nt, Artificial Sequence
  LRRK2 RNA guide
aagcacaauauucuacuaucag

SEQ ID NO: 25723 - RNA, 22 nt, Artificial Sequence
  LRRK2 RNA guide
aagucgcugauaguagaauauu

SEQ ID NO: 25724 - RNA, 22 nt, Artificial Sequence
  LRRK2 RNA guide
aauauucuacuaucagcgacuu

SEQ ID NO: 25725 - RNA, 22 nt, Artificial Sequence
  LRRK2 RNA guide
acaauauucuacuaucagcgac

SEQ ID NO: 25726 - RNA, 22 nt, Artificial Sequence
  LRRK2 RNA guide
acaggaagucgcugauaguaga

SEQ ID NO: 25727 - RNA, 22 nt, Artificial Sequence
  LRRK2 RNA guide
acuaucagcgacuuccuguuaa

SEQ ID NO: 25728 - RNA, 22 nt, Artificial Sequence
  LRRK2 RNA guide
agcacaauauucuacuaucagc

SEQ ID NO: 25729 - RNA, 22 nt, Artificial Sequence
  LRRK2 RNA guide
agcgacuuccuguuaagaaaag

SEQ ID NO: 25730 - RNA, 22 nt, Artificial Sequence
  LRRK2 RNA guide
aggaagucgcugauaguagaau

SEQ ID NO: 25731 - RNA, 22 nt, Artificial Sequence
  LRRK2 RNA guide
agucgcugauaguagaauauug

SEQ ID NO: 25732 - RNA, 22 nt, Artificial Sequence
  LRRK2 RNA guide
auauucuacuaucagcgacuuc

SEQ ID NO: 25733 - RNA, 22 nt, Artificial Sequence
  LRRK2 RNA guide
aucagcgacuuccuguuaagaa

SEQ ID NO: 25734 - RNA, 22 nt, Artificial Sequence
  LRRK2 RNA guide
auucuacuaucagcgacuuccu

SEQ ID NO: 25735 - RNA, 22 nt, Artificial Sequence
  LRRK2 RNA guide
caauauucuacuaucagcgacu

SEQ ID NO: 25736 - RNA, 22 nt, Artificial Sequence
  LRRK2 RNA guide
cacaauauucuacuaucagcga

SEQ ID NO: 25737 - RNA, 22 nt, Artificial Sequence
  LRRK2 RNA guide
cagcgacuuccuguuaagaaaa

SEQ ID NO: 25738 - RNA, 22 nt, Artificial Sequence
  LRRK2 RNA guide
caggaagucgcugauaguagaa

SEQ ID NO: 25739 - RNA, 22 nt, Artificial Sequence
  LRRK2 RNA guide
cgacuuccuguuaagaaaagaa

SEQ ID NO: 25740 - RNA, 22 nt, Artificial Sequence
  LRRK2 RNA guide
cuaagcacaauauucuacuauc

SEQ ID NO: 25741 - RNA, 22 nt, Artificial Sequence
  LRRK2 RNA guide
cuacuaucagcgacuuccuguu

SEQ ID NO: 25742 - RNA, 22 nt, Artificial Sequence
  LRRK2 RNA guide
cuaucagcgacuuccuguuaag

SEQ ID NO: 25743 - RNA, 22 nt, Artificial Sequence
  LRRK2 RNA guide
cuuaacaggaagucgcugauag

SEQ ID NO: 25744 - RNA, 22 nt, Artificial Sequence
  LRRK2 RNA guide
cuuuucuuaacaggaagucgcu

SEQ ID NO: 25745 - RNA, 22 nt, Artificial Sequence
  LRRK2 RNA guide
gaagucgcugauaguagaauau

SEQ ID NO: 25746 - RNA, 22 nt, Artificial Sequence
  LRRK2 RNA guide
gcacaauauucuacuaucagcg

SEQ ID NO: 25747 - RNA, 22 nt, Artificial Sequence
  LRRK2 RNA guide
gcgacuuccuguuaagaaaaga

SEQ ID NO: 25748 - RNA, 22 nt, Artificial Sequence
  LRRK2 RNA guide
gcuaagcacaauauucuacuau

SEQ ID NO: 25749 - RNA, 22 nt, Artificial Sequence
  LRRK2 RNA guide
ggaagucgcugauaguagaaua

SEQ ID NO: 25750 - RNA, 22 nt, Artificial Sequence
  LRRK2 RNA guide
gucgcugauaguagaauauugu

SEQ ID NO: 25751 - RNA, 22 nt, Artificial Sequence
  LRRK2 RNA guide
uaacaggaagucgcugauagua

SEQ ID NO: 25752 - RNA, 22 nt, Artificial Sequence
  LRRK2 RNA guide
uacuaucagcgacuuccuguua

SEQ ID NO: 25753 - RNA, 22 nt, Artificial Sequence
  LRRK2 RNA guide
uaucagcgacuuccuguuaaga

SEQ ID NO: 25754 - RNA, 22 nt, Artificial Sequence
  LRRK2 RNA guide
uauucuacuaucagcgacuucc

SEQ ID NO: 25755 - RNA, 22 nt, Artificial Sequence
  LRRK2 RNA guide
ucagcgacuuccuguuaagaaa

SEQ ID NO: 25756 - RNA, 22 nt, Artificial Sequence
  LRRK2 RNA guide
ucgcugauaguagaauauugug

SEQ ID NO: 25757 - RNA, 22 nt, Artificial Sequence
  LRRK2 RNA guide
ucuacuaucagcgacuuccugu

SEQ ID NO: 25758 - RNA, 22 nt, Artificial Sequence
  LRRK2 RNA guide
ucuuaacaggaagucgcugaua

SEQ ID NO: 25759 - RNA, 22 nt, Artificial Sequence
  LRRK2 RNA guide
ucuuuucuuaacaggaagucgc

SEQ ID NO: 25760 - RNA, 22 nt, Artificial Sequence
  LRRK2 RNA guide
uuaacaggaagucgcugauagu

SEQ ID NO: 25761 - RNA, 22 nt, Artificial Sequence
  LRRK2 RNA guide
uucuacuaucagcgacuuccug

SEQ ID NO: 25762 - RNA, 22 nt, Artificial Sequence
  LRRK2 RNA guide
uucuuaacaggaagucgcugau

SEQ ID NO: 25763 - RNA, 22 nt, Artificial Sequence
  LRRK2 RNA guide
uucuuuucuuaacaggaagucg

SEQ ID NO: 25764 - RNA, 22 nt, Artificial Sequence
  LRRK2 RNA guide
uuucuuaacaggaagucgcuga

SEQ ID NO: 25765 - RNA, 22 nt, Artificial Sequence
  LRRK2 RNA guide
uuucuuuucuuaacaggaaguc

SEQ ID NO: 25766 - RNA, 22 nt, Artificial Sequence
  LRRK2 RNA guide
uuuucuuaacaggaagucgcug

SEQ ID NO: 25767 - RNA, 20 nt, Artificial Sequence
  LRRK2 RNA guide
aacaggaaguuucugauagu

SEQ ID NO: 25768 - RNA, 20 nt, Artificial Sequence
  LRRK2 RNA guide
acaggaaguuucugauagua

SEQ ID NO: 25769 - RNA, 20 nt, Artificial Sequence
  LRRK2 RNA guide
acuaucagaaacuuccuguu

SEQ ID NO: 25770 - RNA, 20 nt, Artificial Sequence
  LRRK2 RNA guide
agaaacuuccuguuaagaaa

SEQ ID NO: 25771 - RNA, 20 nt, Artificial Sequence
  LRRK2 RNA guide
aggaaguuucugauaguaga

SEQ ID NO: 25772 - RNA, 20 nt, Artificial Sequence
  LRRK2 RNA guide
aucagaaacuuccuguuaag

SEQ ID NO: 25773 - RNA, 20 nt, Artificial Sequence
  LRRK2 RNA guide
auucuacuaucagaaacuuc

SEQ ID NO: 25774 - RNA, 20 nt, Artificial Sequence
  LRRK2 RNA guide
cacaauauucuacuaucaga

SEQ ID NO: 25775 - RNA, 20 nt, Artificial Sequence
  LRRK2 RNA guide
cagaaacuuccuguuaagaa

SEQ ID NO: 25776 - RNA, 20 nt, Artificial Sequence
  LRRK2 RNA guide
caggaaguuucugauaguag

SEQ ID NO: 25777 - RNA, 20 nt, Artificial Sequence
  LRRK2 RNA guide
cuacuaucagaaacuuccug

SEQ ID NO: 25778 - RNA, 20 nt, Artificial Sequence
  LRRK2 RNA guide
cuaucagaaacuuccuguua

SEQ ID NO: 25779 - RNA, 20 nt, Artificial Sequence
  LRRK2 RNA guide
cuuaacaggaaguuucugau

SEQ ID NO: 25780 - RNA, 20 nt, Artificial Sequence
  LRRK2 RNA guide
cuuuucuuaacaggaaguuu

SEQ ID NO: 25781 - RNA, 20 nt, Artificial Sequence
  LRRK2 RNA guide
gaaacuuccuguuaagaaaa

SEQ ID NO: 25782 - RNA, 20 nt, Artificial Sequence
  LRRK2 RNA guide
gaaguuucugauaguagaau

SEQ ID NO: 25783 - RNA, 20 nt, Artificial Sequence
  LRRK2 RNA guide
ggaaguuucugauaguagaa

SEQ ID NO: 25784 - RNA, 20 nt, Artificial Sequence
  LRRK2 RNA guide
uaacaggaaguuucugauag

SEQ ID NO: 25785 - RNA, 20 nt, Artificial Sequence
  LRRK2 RNA guide
uacuaucagaaacuuccugu

SEQ ID NO: 25786 - RNA, 20 nt, Artificial Sequence
  LRRK2 RNA guide
uaucagaaacuuccuguuaa

SEQ ID NO: 25787 - RNA, 20 nt, Artificial Sequence
  LRRK2 RNA guide
ucagaaacuuccuguuaaga

SEQ ID NO: 25788 - RNA, 20 nt, Artificial Sequence
  LRRK2 RNA guide
ucuacuaucagaaacuuccu

SEQ ID NO: 25789 - RNA, 20 nt, Artificial Sequence
  LRRK2 RNA guide
ucuuaacaggaaguuucuga

SEQ ID NO: 25790 - RNA, 20 nt, Artificial Sequence
  LRRK2 RNA guide
ucuuuucuuaacaggaaguu

SEQ ID NO: 25791 - RNA, 20 nt, Artificial Sequence
  LRRK2 RNA guide
uuaacaggaaguuucugaua

SEQ ID NO: 25792 - RNA, 20 nt, Artificial Sequence
  LRRK2 RNA guide
uucuacuaucagaaacuucc

SEQ ID NO: 25793 - RNA, 20 nt, Artificial Sequence
  LRRK2 RNA guide
uucuuaacaggaaguuucug

SEQ ID NO: 25794 - RNA, 20 nt, Artificial Sequence
  LRRK2 RNA guide
uuucuuaacaggaaguuucu

SEQ ID NO: 25795 - RNA, 20 nt, Artificial Sequence
  LRRK2 RNA guide
uuuucuuaacaggaaguuuc

SEQ ID NO: 25796 - RNA, 21 nt, Artificial Sequence
  LRRK2 RNA guide
aacaggaaguuucugauagua

SEQ ID NO: 25797 - RNA, 21 nt, Artificial Sequence
  LRRK2 RNA guide
acaggaaguuucugauaguag

SEQ ID NO: 25798 - RNA, 21 nt, Artificial Sequence
  LRRK2 RNA guide
acuaucagaaacuuccuguua

SEQ ID NO: 25799 - RNA, 21 nt, Artificial Sequence
  LRRK2 RNA guide
aggaaguuucugauaguagaa

SEQ ID NO: 25800 - RNA, 21 nt, Artificial Sequence
  LRRK2 RNA guide
aucagaaacuuccuguuaaga

SEQ ID NO: 25801 - RNA, 21 nt, Artificial Sequence
  LRRK2 RNA guide
auucuacuaucagaaacuucc

SEQ ID NO: 25802 - RNA, 21 nt, Artificial Sequence
  LRRK2 RNA guide
cagaaacuuccuguuaagaaa

SEQ ID NO: 25803 - RNA, 21 nt, Artificial Sequence
  LRRK2 RNA guide
caggaaguuucugauaguaga

SEQ ID NO: 25804 - RNA, 21 nt, Artificial Sequence
  LRRK2 RNA guide
cuacuaucagaaacuuccugu

SEQ ID NO: 25805 - RNA, 21 nt, Artificial Sequence
  LRRK2 RNA guide
cuaucagaaacuuccuguuaa

SEQ ID NO: 25806 - RNA, 21 nt, Artificial Sequence
  LRRK2 RNA guide
cuuaacaggaaguuucugaua

SEQ ID NO: 25807 - RNA, 21 nt, Artificial Sequence
  LRRK2 RNA guide
cuuuucuuaacaggaaguuuc

SEQ ID NO: 25808 - RNA, 21 nt, Artificial Sequence
  LRRK2 RNA guide
gaaacuuccuguuaagaaaag

SEQ ID NO: 25809 - RNA, 21 nt, Artificial Sequence
  LRRK2 RNA guide
gcacaauauucuacuaucaga

SEQ ID NO: 25810 - RNA, 21 nt, Artificial Sequence
  LRRK2 RNA guide
gcuaagcacaauauucuacua

SEQ ID NO: 25811 - RNA, 21 nt, Artificial Sequence
  LRRK2 RNA guide
ggaaguuucugauaguagaau

SEQ ID NO: 25812 - RNA, 21 nt, Artificial Sequence
  LRRK2 RNA guide
uaacaggaaguuucugauagu

SEQ ID NO: 25813 - RNA, 21 nt, Artificial Sequence
  LRRK2 RNA guide
uacuaucagaaacuuccuguu

SEQ ID NO: 25814 - RNA, 21 nt, Artificial Sequence
  LRRK2 RNA guide
uaucagaaacuuccuguuaag

SEQ ID NO: 25815 - RNA, 21 nt, Artificial Sequence
  LRRK2 RNA guide
ucagaaacuuccuguuaagaa

SEQ ID NO: 25816 - RNA, 21 nt, Artificial Sequence
  LRRK2 RNA guide
ucuacuaucagaaacuuccug

SEQ ID NO: 25817 - RNA, 21 nt, Artificial Sequence
  LRRK2 RNA guide
ucuuaacaggaaguuucugau

SEQ ID NO: 25818 - RNA, 21 nt, Artificial Sequence
  LRRK2 RNA guide
uuaacaggaaguuucugauag

SEQ ID NO: 25819 - RNA, 21 nt, Artificial Sequence
  LRRK2 RNA guide
uucuacuaucagaaacuuccu

SEQ ID NO: 25820 - RNA, 21 nt, Artificial Sequence
  LRRK2 RNA guide
uucuuaacaggaaguuucuga

SEQ ID NO: 25821 - RNA, 21 nt, Artificial Sequence
  LRRK2 RNA guide
uuucuuaacaggaaguuucug

SEQ ID NO: 25822 - RNA, 22 nt, Artificial Sequence
  LRRK2 RNA guide
aacaggaaguuucugauaguag

SEQ ID NO: 25823 - RNA, 22 nt, Artificial Sequence
  LRRK2 RNA guide
acaggaaguuucugauaguaga

SEQ ID NO: 25824 - RNA, 22 nt, Artificial Sequence
  LRRK2 RNA guide
acuaucagaaacuuccuguuaa

SEQ ID NO: 25825 - RNA, 22 nt, Artificial Sequence
  LRRK2 RNA guide
agaaacuuccuguuaagaaaag

SEQ ID NO: 25826 - RNA, 22 nt, Artificial Sequence
  LRRK2 RNA guide
agcacaauauucuacuaucaga

SEQ ID NO: 25827 - RNA, 22 nt, Artificial Sequence
  LRRK2 RNA guide
aggaaguuucugauaguagaau

SEQ ID NO: 25828 - RNA, 22 nt, Artificial Sequence
  LRRK2 RNA guide
aucagaaacuuccuguuaagaa

SEQ ID NO: 25829 - RNA, 22 nt, Artificial Sequence
  LRRK2 RNA guide
auucuacuaucagaaacuuccu

SEQ ID NO: 25830 - RNA, 22 nt, Artificial Sequence
  LRRK2 RNA guide
cagaaacuuccuguuaagaaaa

SEQ ID NO: 25831 - RNA, 22 nt, Artificial Sequence
  LRRK2 RNA guide
caggaaguuucugauaguagaa

SEQ ID NO: 25832 - RNA, 22 nt, Artificial Sequence
  LRRK2 RNA guide
cuacuaucagaaacuuccuguu

SEQ ID NO: 25833 - RNA, 22 nt, Artificial Sequence
  LRRK2 RNA guide
cuaucagaaacuuccuguuaag

SEQ ID NO: 25834 - RNA, 22 nt, Artificial Sequence
  LRRK2 RNA guide
cuuaacaggaaguuucugauag

SEQ ID NO: 25835 - RNA, 22 nt, Artificial Sequence
  LRRK2 RNA guide
cuuuucuuaacaggaaguuucu

SEQ ID NO: 25836 - RNA, 22 nt, Artificial Sequence
  LRRK2 RNA guide
gaaacuuccuguuaagaaaaga

SEQ ID NO: 25837 - RNA, 22 nt, Artificial Sequence
  LRRK2 RNA guide
gcacaauauucuacuaucagaa

SEQ ID NO: 25838 - RNA, 22 nt, Artificial Sequence
  LRRK2 RNA guide
ggaaguuucugauaguagaaua

SEQ ID NO: 25839 - RNA, 22 nt, Artificial Sequence
  LRRK2 RNA guide
ggcuaagcacaauauucuacua

SEQ ID NO: 25840 - RNA, 22 nt, Artificial Sequence
  LRRK2 RNA guide
uaacaggaaguuucugauagua

SEQ ID NO: 25841 - RNA, 22 nt, Artificial Sequence
  LRRK2 RNA guide
uacuaucagaaacuuccuguua

SEQ ID NO: 25842 - RNA, 22 nt, Artificial Sequence
  LRRK2 RNA guide
uaucagaaacuuccuguuaaga

SEQ ID NO: 25843 - RNA, 22 nt, Artificial Sequence
  LRRK2 RNA guide
uauucuacuaucagaaacuucc

SEQ ID NO: 25844 - RNA, 22 nt, Artificial Sequence
  LRRK2 RNA guide
ucagaaacuuccuguuaagaaa

SEQ ID NO: 25845 - RNA, 22 nt, Artificial Sequence
  LRRK2 RNA guide
ucuacuaucagaaacuuccugu

SEQ ID NO: 25846 - RNA, 22 nt, Artificial Sequence
  LRRK2 RNA guide
ucuuaacaggaaguuucugaua

SEQ ID NO: 25847 - RNA, 22 nt, Artificial Sequence
  LRRK2 RNA guide
ucuuuucuuaacaggaaguuuc

SEQ ID NO: 25848 - RNA, 22 nt, Artificial Sequence
  LRRK2 RNA guide
uuaacaggaaguuucugauagu

SEQ ID NO: 25849 - RNA, 22 nt, Artificial Sequence
  LRRK2 RNA guide
uucuacuaucagaaacuuccug

SEQ ID NO: 25850 - RNA, 22 nt, Artificial Sequence
  LRRK2 RNA guide
uucugauaguagaauauugugc

SEQ ID NO: 25851 - RNA, 22 nt, Artificial Sequence
  LRRK2 RNA guide
uucuuaacaggaaguuucugau

SEQ ID NO: 25852 - RNA, 22 nt, Artificial Sequence
  LRRK2 RNA guide
uuucuuaacaggaaguuucuga

SEQ ID NO: 25853 - RNA, 22 nt, Artificial Sequence
  LRRK2 RNA guide
uuuucuuaacaggaaguuucug

SEQ ID NO: 25854 - RNA, 20 nt, Artificial Sequence
  LRRK2 RNA guide
aauaccaaagaugggaaaaa

SEQ ID NO: 25855 - RNA, 20 nt, Artificial Sequence
  LRRK2 RNA guide
accaaagaugggaaaaagag

SEQ ID NO: 25856 - RNA, 20 nt, Artificial Sequence
  LRRK2 RNA guide
acucuccuggucaucaauac

SEQ ID NO: 25857 - RNA, 20 nt, Artificial Sequence
  LRRK2 RNA guide
auaccaaagaugggaaaaag

SEQ ID NO: 25858 - RNA, 20 nt, Artificial Sequence
  LRRK2 RNA guide
aucaauaccaaagaugggaa

SEQ ID NO: 25859 - RNA, 20 nt, Artificial Sequence
  LRRK2 RNA guide
aucuuugguauugaugacca

SEQ ID NO: 25860 - RNA, 20 nt, Artificial Sequence
  LRRK2 RNA guide
augucucuuuuucccaucuu

SEQ ID NO: 25861 - RNA, 20 nt, Artificial Sequence
  LRRK2 RNA guide
caaagaugggaaaaagagac

SEQ ID NO: 25862 - RNA, 20 nt, Artificial Sequence
  LRRK2 RNA guide
caauaccaaagaugggaaaa

SEQ ID NO: 25863 - RNA, 20 nt, Artificial Sequence
  LRRK2 RNA guide
caucaauaccaaagauggga

SEQ ID NO: 25864 - RNA, 20 nt, Artificial Sequence
  LRRK2 RNA guide
caucuuugguauugaugacc

SEQ ID NO: 25865 - RNA, 20 nt, Artificial Sequence
  LRRK2 RNA guide
ccaaagaugggaaaaagaga

SEQ ID NO: 25866 - RNA, 20 nt, Artificial Sequence
  LRRK2 RNA guide
ccaucuuugguauugaugac

SEQ ID NO: 25867 - RNA, 20 nt, Artificial Sequence
  LRRK2 RNA guide
cccaucuuugguauugauga

SEQ ID NO: 25868 - RNA, 20 nt, Artificial Sequence
  LRRK2 RNA guide
ccuggucaucaauaccaaag

SEQ ID NO: 25869 - RNA, 20 nt, Artificial Sequence
  LRRK2 RNA guide
cuccuggucaucaauaccaa

SEQ ID NO: 25870 - RNA, 20 nt, Artificial Sequence
  LRRK2 RNA guide
cucuccuggucaucaauacc

SEQ ID NO: 25871 - RNA, 20 nt, Artificial Sequence
  LRRK2 RNA guide
cucuuuuucccaucuuuggu

SEQ ID NO: 25872 - RNA, 20 nt, Artificial Sequence
  LRRK2 RNA guide
cuggucaucaauaccaaaga

SEQ ID NO: 25873 - RNA, 20 nt, Artificial Sequence
  LRRK2 RNA guide
cuuugguauugaugaccagg

SEQ ID NO: 25874 - RNA, 20 nt, Artificial Sequence
  LRRK2 RNA guide
cuuuuucccaucuuugguau

SEQ ID NO: 25875 - RNA, 20 nt, Artificial Sequence
  LRRK2 RNA guide
ggguaugucucuuuuuccca

SEQ ID NO: 25876 - RNA, 20 nt, Artificial Sequence
  LRRK2 RNA guide
gguacucuccuggucaucaa

SEQ ID NO: 25877 - RNA, 20 nt, Artificial Sequence
  LRRK2 RNA guide
gguaugucucuuuuucccau

SEQ ID NO: 25878 - RNA, 20 nt, Artificial Sequence
  LRRK2 RNA guide
ggucaucaauaccaaagaug

SEQ ID NO: 25879 - RNA, 20 nt, Artificial Sequence
  LRRK2 RNA guide
guacucuccuggucaucaau

SEQ ID NO: 25880 - RNA, 20 nt, Artificial Sequence
  LRRK2 RNA guide
guaugucucuuuuucccauc

SEQ ID NO: 25881 - RNA, 20 nt, Artificial Sequence
  LRRK2 RNA guide
gucaucaauaccaaagaugg

SEQ ID NO: 25882 - RNA, 20 nt, Artificial Sequence
  LRRK2 RNA guide
gucucuuuuucccaucuuug

SEQ ID NO: 25883 - RNA, 20 nt, Artificial Sequence
  LRRK2 RNA guide
uaccaaagaugggaaaaaga

SEQ ID NO: 25884 - RNA, 20 nt, Artificial Sequence
  LRRK2 RNA guide
uacucuccuggucaucaaua

SEQ ID NO: 25885 - RNA, 20 nt, Artificial Sequence
  LRRK2 RNA guide
uaugucucuuuuucccaucu

SEQ ID NO: 25886 - RNA, 20 nt, Artificial Sequence
  LRRK2 RNA guide
ucaauaccaaagaugggaaa

SEQ ID NO: 25887 - RNA, 20 nt, Artificial Sequence
  LRRK2 RNA guide
ucaucaauaccaaagauggg

SEQ ID NO: 25888 - RNA, 20 nt, Artificial Sequence
  LRRK2 RNA guide
ucccaucuuugguauugaug

SEQ ID NO: 25889 - RNA, 20 nt, Artificial Sequence
  LRRK2 RNA guide
uccuggucaucaauaccaaa

SEQ ID NO: 25890 - RNA, 20 nt, Artificial Sequence
  LRRK2 RNA guide
ucuccuggucaucaauacca

SEQ ID NO: 25891 - RNA, 20 nt, Artificial Sequence
  LRRK2 RNA guide
ucucuuuuucccaucuuugg

SEQ ID NO: 25892 - RNA, 20 nt, Artificial Sequence
  LRRK2 RNA guide
ucuuugguauugaugaccag

SEQ ID NO: 25893 - RNA, 20 nt, Artificial Sequence
  LRRK2 RNA guide
ucuuuuucccaucuuuggua

SEQ ID NO: 25894 - RNA, 20 nt, Artificial Sequence
  LRRK2 RNA guide
uggucaucaauaccaaagau

SEQ ID NO: 25895 - RNA, 20 nt, Artificial Sequence
  LRRK2 RNA guide
ugucucuuuuucccaucuuu

SEQ ID NO: 25896 - RNA, 20 nt, Artificial Sequence
  LRRK2 RNA guide
uucccaucuuugguauugau

SEQ ID NO: 25897 - RNA, 20 nt, Artificial Sequence
  LRRK2 RNA guide
uugguauugaugaccaggag

SEQ ID NO: 25898 - RNA, 20 nt, Artificial Sequence
  LRRK2 RNA guide
uuucccaucuuugguauuga

SEQ ID NO: 25899 - RNA, 20 nt, Artificial Sequence
  LRRK2 RNA guide
uuugguauugaugaccagga

SEQ ID NO: 25900 - RNA, 20 nt, Artificial Sequence
  LRRK2 RNA guide
uuuucccaucuuugguauug

SEQ ID NO: 25901 - RNA, 20 nt, Artificial Sequence
  LRRK2 RNA guide
uuuuucccaucuuugguauu

SEQ ID NO: 25902 - RNA, 21 nt, Artificial Sequence
  LRRK2 RNA guide
aauaccaaagaugggaaaaag

SEQ ID NO: 25903 - RNA, 21 nt, Artificial Sequence
  LRRK2 RNA guide
accaaagaugggaaaaagaga

SEQ ID NO: 25904 - RNA, 21 nt, Artificial Sequence
  LRRK2 RNA guide
acucuccuggucaucaauacc

SEQ ID NO: 25905 - RNA, 21 nt, Artificial Sequence
  LRRK2 RNA guide
aggguaugucucuuuuuccca

SEQ ID NO: 25906 - RNA, 21 nt, Artificial Sequence
  LRRK2 RNA guide
auaccaaagaugggaaaaaga

SEQ ID NO: 25907 - RNA, 21 nt, Artificial Sequence
  LRRK2 RNA guide
aucaauaccaaagaugggaaa

SEQ ID NO: 25908 - RNA, 21 nt, Artificial Sequence
  LRRK2 RNA guide
aucuuugguauugaugaccag

SEQ ID NO: 25909 - RNA, 21 nt, Artificial Sequence
  LRRK2 RNA guide
augucucuuuuucccaucuuu

SEQ ID NO: 25910 - RNA, 21 nt, Artificial Sequence
  LRRK2 RNA guide
caaagaugggaaaaagagaca

SEQ ID NO: 25911 - RNA, 21 nt, Artificial Sequence
  LRRK2 RNA guide
caauaccaaagaugggaaaaa

SEQ ID NO: 25912 - RNA, 21 nt, Artificial Sequence
  LRRK2 RNA guide
caucaauaccaaagaugggaa

SEQ ID NO: 25913 - RNA, 21 nt, Artificial Sequence
  LRRK2 RNA guide
caucuuugguauugaugacca

SEQ ID NO: 25914 - RNA, 21 nt, Artificial Sequence
  LRRK2 RNA guide
ccaaagaugggaaaaagagac

SEQ ID NO: 25915 - RNA, 21 nt, Artificial Sequence
  LRRK2 RNA guide
ccaucuuugguauugaugacc

SEQ ID NO: 25916 - RNA, 21 nt, Artificial Sequence
  LRRK2 RNA guide
cccaucuuugguauugaugac

SEQ ID NO: 25917 - RNA, 21 nt, Artificial Sequence
  LRRK2 RNA guide
ccuggucaucaauaccaaaga

SEQ ID NO: 25918 - RNA, 21 nt, Artificial Sequence
  LRRK2 RNA guide
cuccuggucaucaauaccaaa

SEQ ID NO: 25919 - RNA, 21 nt, Artificial Sequence
  LRRK2 RNA guide
cucuccuggucaucaauacca

SEQ ID NO: 25920 - RNA, 21 nt, Artificial Sequence
  LRRK2 RNA guide
cucuuuuucccaucuuuggua

SEQ ID NO: 25921 - RNA, 21 nt, Artificial Sequence
  LRRK2 RNA guide
cuggucaucaauaccaaagau

SEQ ID NO: 25922 - RNA, 21 nt, Artificial Sequence
  LRRK2 RNA guide
cuuugguauugaugaccagga

SEQ ID NO: 25923 - RNA, 21 nt, Artificial Sequence
  LRRK2 RNA guide
cuuuuucccaucuuugguauu

SEQ ID NO: 25924 - RNA, 21 nt, Artificial Sequence
  LRRK2 RNA guide
ggguaugucucuuuuucccau

SEQ ID NO: 25925 - RNA, 21 nt, Artificial Sequence
  LRRK2 RNA guide
gguacucuccuggucaucaau

SEQ ID NO: 25926 - RNA, 21 nt, Artificial Sequence
  LRRK2 RNA guide
gguaugucucuuuuucccauc

SEQ ID NO: 25927 - RNA, 21 nt, Artificial Sequence
  LRRK2 RNA guide
ggucaucaauaccaaagaugg

SEQ ID NO: 25928 - RNA, 21 nt, Artificial Sequence
  LRRK2 RNA guide
guacucuccuggucaucaaua

SEQ ID NO: 25929 - RNA, 21 nt, Artificial Sequence
  LRRK2 RNA guide
guaugucucuuuuucccaucu

SEQ ID NO: 25930 - RNA, 21 nt, Artificial Sequence
  LRRK2 RNA guide
gucaucaauaccaaagauggg

SEQ ID NO: 25931 - RNA, 21 nt, Artificial Sequence
  LRRK2 RNA guide
gucucuuuuucccaucuuugg

SEQ ID NO: 25932 - RNA, 21 nt, Artificial Sequence
  LRRK2 RNA guide
uaccaaagaugggaaaaagag

SEQ ID NO: 25933 - RNA, 21 nt, Artificial Sequence
  LRRK2 RNA guide
uacucuccuggucaucaauac

SEQ ID NO: 25934 - RNA, 21 nt, Artificial Sequence
  LRRK2 RNA guide
uaugucucuuuuucccaucuu

SEQ ID NO: 25935 - RNA, 21 nt, Artificial Sequence
  LRRK2 RNA guide
ucaauaccaaagaugggaaaa

SEQ ID NO: 25936 - RNA, 21 nt, Artificial Sequence
  LRRK2 RNA guide
ucaucaauaccaaagauggga

SEQ ID NO: 25937 - RNA, 21 nt, Artificial Sequence
  LRRK2 RNA guide
ucccaucuuugguauugauga

SEQ ID NO: 25938 - RNA, 21 nt, Artificial Sequence
  LRRK2 RNA guide
uccuggucaucaauaccaaag

SEQ ID NO: 25939 - RNA, 21 nt, Artificial Sequence
  LRRK2 RNA guide
ucuccuggucaucaauaccaa

SEQ ID NO: 25940 - RNA, 21 nt, Artificial Sequence
  LRRK2 RNA guide
ucucuuuuucccaucuuuggu

SEQ ID NO: 25941 - RNA, 21 nt, Artificial Sequence
  LRRK2 RNA guide
ucuuugguauugaugaccagg

SEQ ID NO: 25942 - RNA, 21 nt, Artificial Sequence
  LRRK2 RNA guide
ucuuuuucccaucuuugguau

SEQ ID NO: 25943 - RNA, 21 nt, Artificial Sequence
  LRRK2 RNA guide
ugguacucuccuggucaucaa

SEQ ID NO: 25944 - RNA, 21 nt, Artificial Sequence
  LRRK2 RNA guide
uggucaucaauaccaaagaug

SEQ ID NO: 25945 - RNA, 21 nt, Artificial Sequence
  LRRK2 RNA guide
ugucucuuuuucccaucuuug

SEQ ID NO: 25946 - RNA, 21 nt, Artificial Sequence
  LRRK2 RNA guide
uucccaucuuugguauugaug

SEQ ID NO: 25947 - RNA, 21 nt, Artificial Sequence
  LRRK2 RNA guide
uugguauugaugaccaggaga

SEQ ID NO: 25948 - RNA, 21 nt, Artificial Sequence
  LRRK2 RNA guide
uuucccaucuuugguauugau

SEQ ID NO: 25949 - RNA, 21 nt, Artificial Sequence
  LRRK2 RNA guide
uuugguauugaugaccaggag

SEQ ID NO: 25950 - RNA, 21 nt, Artificial Sequence
  LRRK2 RNA guide
uuuucccaucuuugguauuga

SEQ ID NO: 25951 - RNA, 21 nt, Artificial Sequence
  LRRK2 RNA guide
uuuuucccaucuuugguauug

SEQ ID NO: 25952 - RNA, 22 nt, Artificial Sequence
  LRRK2 RNA guide
aauaccaaagaugggaaaaaga

SEQ ID NO: 25953 - RNA, 22 nt, Artificial Sequence
  LRRK2 RNA guide
accaaagaugggaaaaagagac

SEQ ID NO: 25954 - RNA, 22 nt, Artificial Sequence
  LRRK2 RNA guide
acucuccuggucaucaauacca

SEQ ID NO: 25955 - RNA, 22 nt, Artificial Sequence
  LRRK2 RNA guide
aggguaugucucuuuuucccau

SEQ ID NO: 25956 - RNA, 22 nt, Artificial Sequence
  LRRK2 RNA guide
auaccaaagaugggaaaaagag

SEQ ID NO: 25957 - RNA, 22 nt, Artificial Sequence
  LRRK2 RNA guide
aucaauaccaaagaugggaaaa

SEQ ID NO: 25958 - RNA, 22 nt, Artificial Sequence
  LRRK2 RNA guide
aucuuugguauugaugaccagg

SEQ ID NO: 25959 - RNA, 22 nt, Artificial Sequence
  LRRK2 RNA guide
augucucuuuuucccaucuuug

SEQ ID NO: 25960 - RNA, 22 nt, Artificial Sequence
  LRRK2 RNA guide
caaagaugggaaaaagagacau

SEQ ID NO: 25961 - RNA, 22 nt, Artificial Sequence
  LRRK2 RNA guide
caauaccaaagaugggaaaaag

SEQ ID NO: 25962 - RNA, 22 nt, Artificial Sequence
  LRRK2 RNA guide
caucaauaccaaagaugggaaa

SEQ ID NO: 25963 - RNA, 22 nt, Artificial Sequence
  LRRK2 RNA guide
caucuuugguauugaugaccag

SEQ ID NO: 25964 - RNA, 22 nt, Artificial Sequence
  LRRK2 RNA guide
ccaaagaugggaaaaagagaca

SEQ ID NO: 25965 - RNA, 22 nt, Artificial Sequence
  LRRK2 RNA guide
ccaucuuugguauugaugacca

SEQ ID NO: 25966 - RNA, 22 nt, Artificial Sequence
  LRRK2 RNA guide
cccaucuuugguauugaugacc

SEQ ID NO: 25967 - RNA, 22 nt, Artificial Sequence
  LRRK2 RNA guide
ccuggucaucaauaccaaagau

SEQ ID NO: 25968 - RNA, 22 nt, Artificial Sequence
  LRRK2 RNA guide
cuccuggucaucaauaccaaag

SEQ ID NO: 25969 - RNA, 22 nt, Artificial Sequence
  LRRK2 RNA guide
cucuccuggucaucaauaccaa

SEQ ID NO: 25970 - RNA, 22 nt, Artificial Sequence
  LRRK2 RNA guide
cucuuuuucccaucuuugguau

SEQ ID NO: 25971 - RNA, 22 nt, Artificial Sequence
  LRRK2 RNA guide
cugguacucuccuggucaucaa

SEQ ID NO: 25972 - RNA, 22 nt, Artificial Sequence
  LRRK2 RNA guide
cuggucaucaauaccaaagaug

SEQ ID NO: 25973 - RNA, 22 nt, Artificial Sequence
  LRRK2 RNA guide
cuuugguauugaugaccaggag

SEQ ID NO: 25974 - RNA, 22 nt, Artificial Sequence
  LRRK2 RNA guide
cuuuuucccaucuuugguauug

SEQ ID NO: 25975 - RNA, 22 nt, Artificial Sequence
  LRRK2 RNA guide
ggguaugucucuuuuucccauc

SEQ ID NO: 25976 - RNA, 22 nt, Artificial Sequence
  LRRK2 RNA guide
gguacucuccuggucaucaaua

SEQ ID NO: 25977 - RNA, 22 nt, Artificial Sequence
  LRRK2 RNA guide
gguaugucucuuuuucccaucu

SEQ ID NO: 25978 - RNA, 22 nt, Artificial Sequence
  LRRK2 RNA guide
ggucaucaauaccaaagauggg

SEQ ID NO: 25979 - RNA, 22 nt, Artificial Sequence
  LRRK2 RNA guide
guacucuccuggucaucaauac

SEQ ID NO: 25980 - RNA, 22 nt, Artificial Sequence
  LRRK2 RNA guide
guaugucucuuuuucccaucuu

SEQ ID NO: 25981 - RNA, 22 nt, Artificial Sequence
  LRRK2 RNA guide
gucaucaauaccaaagauggga

SEQ ID NO: 25982 - RNA, 22 nt, Artificial Sequence
  LRRK2 RNA guide
gucucuuuuucccaucuuuggu

SEQ ID NO: 25983 - RNA, 22 nt, Artificial Sequence
  LRRK2 RNA guide
uaccaaagaugggaaaaagaga

SEQ ID NO: 25984 - RNA, 22 nt, Artificial Sequence
  LRRK2 RNA guide
uacucuccuggucaucaauacc

SEQ ID NO: 25985 - RNA, 22 nt, Artificial Sequence
  LRRK2 RNA guide
uaggguaugucucuuuuuccca

SEQ ID NO: 25986 - RNA, 22 nt, Artificial Sequence
  LRRK2 RNA guide
uaugucucuuuuucccaucuuu

SEQ ID NO: 25987 - RNA, 22 nt, Artificial Sequence
  LRRK2 RNA guide
ucaauaccaaagaugggaaaaa

SEQ ID NO: 25988 - RNA, 22 nt, Artificial Sequence
  LRRK2 RNA guide
ucaucaauaccaaagaugggaa

SEQ ID NO: 25989 - RNA, 22 nt, Artificial Sequence
  LRRK2 RNA guide
ucccaucuuugguauugaugac

SEQ ID NO: 25990 - RNA, 22 nt, Artificial Sequence
  LRRK2 RNA guide
uccuggucaucaauaccaaaga

SEQ ID NO: 25991 - RNA, 22 nt, Artificial Sequence
  LRRK2 RNA guide
ucuccuggucaucaauaccaaa

SEQ ID NO: 25992 - RNA, 22 nt, Artificial Sequence
  LRRK2 RNA guide
ucucuuuuucccaucuuuggua

SEQ ID NO: 25993 - RNA, 22 nt, Artificial Sequence
  LRRK2 RNA guide
ucuuugguauugaugaccagga

SEQ ID NO: 25994 - RNA, 22 nt, Artificial Sequence
  LRRK2 RNA guide
ucuuuuucccaucuuugguauu

SEQ ID NO: 25995 - RNA, 22 nt, Artificial Sequence
  LRRK2 RNA guide
ugguacucuccuggucaucaau

SEQ ID NO: 25996 - RNA, 22 nt, Artificial Sequence
  LRRK2 RNA guide
uggucaucaauaccaaagaugg

SEQ ID NO: 25997 - RNA, 22 nt, Artificial Sequence
  LRRK2 RNA guide
ugucucuuuuucccaucuuugg

SEQ ID NO: 25998 - RNA, 22 nt, Artificial Sequence
  LRRK2 RNA guide
uucccaucuuugguauugauga

SEQ ID NO: 25999 - RNA, 22 nt, Artificial Sequence
  LRRK2 RNA guide
uugguauugaugaccaggagag

SEQ ID NO: 26000 - RNA, 22 nt, Artificial Sequence
  LRRK2 RNA guide
uuucccaucuuugguauugaug

SEQ ID NO: 26001 - RNA, 22 nt, Artificial Sequence
  LRRK2 RNA guide
uuugguauugaugaccaggaga

SEQ ID NO: 26002 - RNA, 22 nt, Artificial Sequence
  LRRK2 RNA guide
uuuucccaucuuugguauugau

SEQ ID NO: 26003 - RNA, 22 nt, Artificial Sequence
  LRRK2 RNA guide
uuuuucccaucuuugguauuga

SEQ ID NO: 26004 - RNA, 20 nt, Artificial Sequence
  LRRK2 RNA guide
agcgguuccaaccaaaagaa

SEQ ID NO: 26005 - RNA, 20 nt, Artificial Sequence
  LRRK2 RNA guide
auuuuucuuuugguuggaac

SEQ ID NO: 26006 - RNA, 20 nt, Artificial Sequence
  LRRK2 RNA guide
cagcgguuccaaccaaaaga

SEQ ID NO: 26007 - RNA, 20 nt, Artificial Sequence
  LRRK2 RNA guide
cgguuccaaccaaaagaaaa

SEQ ID NO: 26008 - RNA, 20 nt, Artificial Sequence
  LRRK2 RNA guide
gcgguuccaaccaaaagaaa

SEQ ID NO: 26009 - RNA, 20 nt, Artificial Sequence
  LRRK2 RNA guide
gguuccaaccaaaagaaaaa

SEQ ID NO: 26010 - RNA, 20 nt, Artificial Sequence
  LRRK2 RNA guide
guuccaaccaaaagaaaaau

SEQ ID NO: 26011 - RNA, 20 nt, Artificial Sequence
  LRRK2 RNA guide
ucagcgguuccaaccaaaag

SEQ ID NO: 26012 - RNA, 21 nt, Artificial Sequence
  LRRK2 RNA guide
agcgguuccaaccaaaagaaa

SEQ ID NO: 26013 - RNA, 21 nt, Artificial Sequence
  LRRK2 RNA guide
aucagcgguuccaaccaaaag

SEQ ID NO: 26014 - RNA, 21 nt, Artificial Sequence
  LRRK2 RNA guide
auuuuucuuuugguuggaacc

SEQ ID NO: 26015 - RNA, 21 nt, Artificial Sequence
  LRRK2 RNA guide
cagcgguuccaaccaaaagaa

SEQ ID NO: 26016 - RNA, 21 nt, Artificial Sequence
  LRRK2 RNA guide
cgguuccaaccaaaagaaaaa

SEQ ID NO: 26017 - RNA, 21 nt, Artificial Sequence
  LRRK2 RNA guide
gcgguuccaaccaaaagaaaa

SEQ ID NO: 26018 - RNA, 21 nt, Artificial Sequence
  LRRK2 RNA guide
gguuccaaccaaaagaaaaau

SEQ ID NO: 26019 - RNA, 21 nt, Artificial Sequence
  LRRK2 RNA guide
ucagcgguuccaaccaaaaga

SEQ ID NO: 26020 - RNA, 22 nt, Artificial Sequence
  LRRK2 RNA guide
aauuuuucuuuugguuggaacc

SEQ ID NO: 26021 - RNA, 22 nt, Artificial Sequence
  LRRK2 RNA guide
agcgguuccaaccaaaagaaaa

SEQ ID NO: 26022 - RNA, 22 nt, Artificial Sequence
  LRRK2 RNA guide
aucagcgguuccaaccaaaaga

SEQ ID NO: 26023 - RNA, 22 nt, Artificial Sequence
  LRRK2 RNA guide
auuuuucuuuugguuggaaccg

SEQ ID NO: 26024 - RNA, 22 nt, Artificial Sequence
  LRRK2 RNA guide
cagcgguuccaaccaaaagaaa

SEQ ID NO: 26025 - RNA, 22 nt, Artificial Sequence
  LRRK2 RNA guide
caucagcgguuccaaccaaaag

SEQ ID NO: 26026 - RNA, 22 nt, Artificial Sequence
  LRRK2 RNA guide
cgguuccaaccaaaagaaaaau

SEQ ID NO: 26027 - RNA, 22 nt, Artificial Sequence
  LRRK2 RNA guide
gcgguuccaaccaaaagaaaaa

SEQ ID NO: 26028 - RNA, 22 nt, Artificial Sequence
  LRRK2 RNA guide
gguuccaaccaaaagaaaaauu

SEQ ID NO: 26029 - RNA, 22 nt, Artificial Sequence
  LRRK2 RNA guide
ucagcgguuccaaccaaaagaa

SEQ ID NO: 26030 - RNA, 20 nt, Artificial Sequence
  LRRK2 RNA guide
aaaaauugcuaacuugccau

SEQ ID NO: 26031 - RNA, 20 nt, Artificial Sequence
  LRRK2 RNA guide
aaaauugcuaacuugccauc

SEQ ID NO: 26032 - RNA, 20 nt, Artificial Sequence
  LRRK2 RNA guide
aaauugcuaacuugccauca

SEQ ID NO: 26033 - RNA, 20 nt, Artificial Sequence
  LRRK2 RNA guide
aacugcugauggcaaguuag

SEQ ID NO: 26034 - RNA, 20 nt, Artificial Sequence
  LRRK2 RNA guide
aacuugccaucagcaguucc

SEQ ID NO: 26035 - RNA, 20 nt, Artificial Sequence
  LRRK2 RNA guide
aauugcuaacuugccaucag

SEQ ID NO: 26036 - RNA, 20 nt, Artificial Sequence
  LRRK2 RNA guide
aauuuucuuuugguuggaac

SEQ ID NO: 26037 - RNA, 20 nt, Artificial Sequence
  LRRK2 RNA guide
acugcugauggcaaguuagc

SEQ ID NO: 26038 - RNA, 20 nt, Artificial Sequence
  LRRK2 RNA guide
acuugccaucagcaguucca

SEQ ID NO: 26039 - RNA, 20 nt, Artificial Sequence
  LRRK2 RNA guide
agcaguuccaaccaaaagaa

SEQ ID NO: 26040 - RNA, 20 nt, Artificial Sequence
  LRRK2 RNA guide
aucagcaguuccaaccaaaa

SEQ ID NO: 26041 - RNA, 20 nt, Artificial Sequence
  LRRK2 RNA guide
auugcuaacuugccaucagc

SEQ ID NO: 26042 - RNA, 20 nt, Artificial Sequence
  LRRK2 RNA guide
auuuucuuuugguuggaacu

SEQ ID NO: 26043 - RNA, 20 nt, Artificial Sequence
  LRRK2 RNA guide
cagcaguuccaaccaaaaga

SEQ ID NO: 26044 - RNA, 20 nt, Artificial Sequence
  LRRK2 RNA guide
caguuccaaccaaaagaaaa

SEQ ID NO: 26045 - RNA, 20 nt, Artificial Sequence
  LRRK2 RNA guide
caucagcaguuccaaccaaa

SEQ ID NO: 26046 - RNA, 20 nt, Artificial Sequence
  LRRK2 RNA guide
ccaucagcaguuccaaccaa

SEQ ID NO: 26047 - RNA, 20 nt, Artificial Sequence
  LRRK2 RNA guide
cuaacuugccaucagcaguu

SEQ ID NO: 26048 - RNA, 20 nt, Artificial Sequence
  LRRK2 RNA guide
cugcugauggcaaguuagca

SEQ ID NO: 26049 - RNA, 20 nt, Artificial Sequence
  LRRK2 RNA guide
cuugccaucagcaguuccaa

SEQ ID NO: 26050 - RNA, 20 nt, Artificial Sequence
  LRRK2 RNA guide
cuuuugguuggaacugcuga

SEQ ID NO: 26051 - RNA, 20 nt, Artificial Sequence
  LRRK2 RNA guide
gaacugcugauggcaaguua

SEQ ID NO: 26052 - RNA, 20 nt, Artificial Sequence
  LRRK2 RNA guide
gcaguuccaaccaaaagaaa

SEQ ID NO: 26053 - RNA, 20 nt, Artificial Sequence
  LRRK2 RNA guide
gccaucagcaguuccaacca

SEQ ID NO: 26054 - RNA, 20 nt, Artificial Sequence
  LRRK2 RNA guide
gcuaacuugccaucagcagu

SEQ ID NO: 26055 - RNA, 20 nt, Artificial Sequence
  LRRK2 RNA guide
ggaacugcugauggcaaguu

SEQ ID NO: 26056 - RNA, 20 nt, Artificial Sequence
  LRRK2 RNA guide
gguuggaacugcugauggca

SEQ ID NO: 26057 - RNA, 20 nt, Artificial Sequence
  LRRK2 RNA guide
guuggaacugcugauggcaa

SEQ ID NO: 26058 - RNA, 20 nt, Artificial Sequence
  LRRK2 RNA guide
uaacuugccaucagcaguuc

SEQ ID NO: 26059 - RNA, 20 nt, Artificial Sequence
  LRRK2 RNA guide
ucagcaguuccaaccaaaag

SEQ ID NO: 26060 - RNA, 20 nt, Artificial Sequence
  LRRK2 RNA guide
ucuuuugguuggaacugcug

SEQ ID NO: 26061 - RNA, 20 nt, Artificial Sequence
  LRRK2 RNA guide
ugccaucagcaguuccaacc

SEQ ID NO: 26062 - RNA, 20 nt, Artificial Sequence
  LRRK2 RNA guide
ugcuaacuugccaucagcag

SEQ ID NO: 26063 - RNA, 20 nt, Artificial Sequence
  LRRK2 RNA guide
uggaacugcugauggcaagu

SEQ ID NO: 26064 - RNA, 20 nt, Artificial Sequence
  LRRK2 RNA guide
ugguuggaacugcugauggc

SEQ ID NO: 26065 - RNA, 20 nt, Artificial Sequence
  LRRK2 RNA guide
uucuuuugguuggaacugcu

SEQ ID NO: 26066 - RNA, 20 nt, Artificial Sequence
  LRRK2 RNA guide
uugccaucagcaguuccaac

SEQ ID NO: 26067 - RNA, 20 nt, Artificial Sequence
  LRRK2 RNA guide
uugcuaacuugccaucagca

SEQ ID NO: 26068 - RNA, 20 nt, Artificial Sequence
  LRRK2 RNA guide
uuggaacugcugauggcaag

SEQ ID NO: 26069 - RNA, 20 nt, Artificial Sequence
  LRRK2 RNA guide
uugguuggaacugcugaugg

SEQ ID NO: 26070 - RNA, 20 nt, Artificial Sequence
  LRRK2 RNA guide
uuucuuuugguuggaacugc

SEQ ID NO: 26071 - RNA, 20 nt, Artificial Sequence
  LRRK2 RNA guide
uuugguuggaacugcugaug

SEQ ID NO: 26072 - RNA, 20 nt, Artificial Sequence
  LRRK2 RNA guide
uuuucuuuugguuggaacug

SEQ ID NO: 26073 - RNA, 20 nt, Artificial Sequence
  LRRK2 RNA guide
uuuugguuggaacugcugau

SEQ ID NO: 26074 - RNA, 21 nt, Artificial Sequence
  LRRK2 RNA guide
aaaaauugcuaacuugccauc

SEQ ID NO: 26075 - RNA, 21 nt, Artificial Sequence
  LRRK2 RNA guide
aaaauugcuaacuugccauca

SEQ ID NO: 26076 - RNA, 21 nt, Artificial Sequence
  LRRK2 RNA guide
aaauugcuaacuugccaucag

SEQ ID NO: 26077 - RNA, 21 nt, Artificial Sequence
  LRRK2 RNA guide
aacugcugauggcaaguuagc

SEQ ID NO: 26078 - RNA, 21 nt, Artificial Sequence
  LRRK2 RNA guide
aacuugccaucagcaguucca

SEQ ID NO: 26079 - RNA, 21 nt, Artificial Sequence
  LRRK2 RNA guide
aauugcuaacuugccaucagc

SEQ ID NO: 26080 - RNA, 21 nt, Artificial Sequence
  LRRK2 RNA guide
acugcugauggcaaguuagca

SEQ ID NO: 26081 - RNA, 21 nt, Artificial Sequence
  LRRK2 RNA guide
acuugccaucagcaguuccaa

SEQ ID NO: 26082 - RNA, 21 nt, Artificial Sequence
  LRRK2 RNA guide
agcaguuccaaccaaaagaaa

SEQ ID NO: 26083 - RNA, 21 nt, Artificial Sequence
  LRRK2 RNA guide
aucagcaguuccaaccaaaag

SEQ ID NO: 26084 - RNA, 21 nt, Artificial Sequence
  LRRK2 RNA guide
auugcuaacuugccaucagca

SEQ ID NO: 26085 - RNA, 21 nt, Artificial Sequence
  LRRK2 RNA guide
auuuucuuuugguuggaacug

SEQ ID NO: 26086 - RNA, 21 nt, Artificial Sequence
  LRRK2 RNA guide
caaaaauugcuaacuugccau

SEQ ID NO: 26087 - RNA, 21 nt, Artificial Sequence
  LRRK2 RNA guide
cagcaguuccaaccaaaagaa

SEQ ID NO: 26088 - RNA, 21 nt, Artificial Sequence
  LRRK2 RNA guide
caguuccaaccaaaagaaaau

SEQ ID NO: 26089 - RNA, 21 nt, Artificial Sequence
  LRRK2 RNA guide
caucagcaguuccaaccaaaa

SEQ ID NO: 26090 - RNA, 21 nt, Artificial Sequence
  LRRK2 RNA guide
ccaucagcaguuccaaccaaa

SEQ ID NO: 26091 - RNA, 21 nt, Artificial Sequence
  LRRK2 RNA guide
cuaacuugccaucagcaguuc

SEQ ID NO: 26092 - RNA, 21 nt, Artificial Sequence
  LRRK2 RNA guide
cugcugauggcaaguuagcaa

SEQ ID NO: 26093 - RNA, 21 nt, Artificial Sequence
  LRRK2 RNA guide
cuugccaucagcaguuccaac

SEQ ID NO: 26094 - RNA, 21 nt, Artificial Sequence
  LRRK2 RNA guide
cuuuugguuggaacugcugau

SEQ ID NO: 26095 - RNA, 21 nt, Artificial Sequence
  LRRK2 RNA guide
gaacugcugauggcaaguuag

SEQ ID NO: 26096 - RNA, 21 nt, Artificial Sequence
  LRRK2 RNA guide
gcaguuccaaccaaaagaaaa

SEQ ID NO: 26097 - RNA, 21 nt, Artificial Sequence
  LRRK2 RNA guide
gccaucagcaguuccaaccaa

SEQ ID NO: 26098 - RNA, 21 nt, Artificial Sequence
  LRRK2 RNA guide
gcuaacuugccaucagcaguu

SEQ ID NO: 26099 - RNA, 21 nt, Artificial Sequence
  LRRK2 RNA guide
ggaacugcugauggcaaguua

SEQ ID NO: 26100 - RNA, 21 nt, Artificial Sequence
  LRRK2 RNA guide
gguuggaacugcugauggcaa

SEQ ID NO: 26101 - RNA, 21 nt, Artificial Sequence
  LRRK2 RNA guide
guuggaacugcugauggcaag

SEQ ID NO: 26102 - RNA, 21 nt, Artificial Sequence
  LRRK2 RNA guide
uaacuugccaucagcaguucc

SEQ ID NO: 26103 - RNA, 21 nt, Artificial Sequence
  LRRK2 RNA guide
ucagcaguuccaaccaaaaga

SEQ ID NO: 26104 - RNA, 21 nt, Artificial Sequence
  LRRK2 RNA guide
ucuuuugguuggaacugcuga

SEQ ID NO: 26105 - RNA, 21 nt, Artificial Sequence
  LRRK2 RNA guide
ugccaucagcaguuccaacca

SEQ ID NO: 26106 - RNA, 21 nt, Artificial Sequence
  LRRK2 RNA guide
ugcuaacuugccaucagcagu

SEQ ID NO: 26107 - RNA, 21 nt, Artificial Sequence
  LRRK2 RNA guide
uggaacugcugauggcaaguu

SEQ ID NO: 26108 - RNA, 21 nt, Artificial Sequence
  LRRK2 RNA guide
ugguuggaacugcugauggca

SEQ ID NO: 26109 - RNA, 21 nt, Artificial Sequence
  LRRK2 RNA guide
uucuuuugguuggaacugcug

SEQ ID NO: 26110 - RNA, 21 nt, Artificial Sequence
  LRRK2 RNA guide
uugccaucagcaguuccaacc

SEQ ID NO: 26111 - RNA, 21 nt, Artificial Sequence
  LRRK2 RNA guide
uugcuaacuugccaucagcag

SEQ ID NO: 26112 - RNA, 21 nt, Artificial Sequence
  LRRK2 RNA guide
uuggaacugcugauggcaagu

SEQ ID NO: 26113 - RNA, 21 nt, Artificial Sequence
  LRRK2 RNA guide
uugguuggaacugcugauggc

SEQ ID NO: 26114 - RNA, 21 nt, Artificial Sequence
  LRRK2 RNA guide
uuucuuuugguuggaacugcu

SEQ ID NO: 26115 - RNA, 21 nt, Artificial Sequence
  LRRK2 RNA guide
uuugguuggaacugcugaugg

SEQ ID NO: 26116 - RNA, 21 nt, Artificial Sequence
  LRRK2 RNA guide
uuuucuuuugguuggaacugc

SEQ ID NO: 26117 - RNA, 21 nt, Artificial Sequence
  LRRK2 RNA guide
uuuugguuggaacugcugaug

SEQ ID NO: 26118 - RNA, 22 nt, Artificial Sequence
  LRRK2 RNA guide
aaaaauugcuaacuugccauca

SEQ ID NO: 26119 - RNA, 22 nt, Artificial Sequence
  LRRK2 RNA guide
aaaauugcuaacuugccaucag

SEQ ID NO: 26120 - RNA, 22 nt, Artificial Sequence
  LRRK2 RNA guide
aaauugcuaacuugccaucagc

SEQ ID NO: 26121 - RNA, 22 nt, Artificial Sequence
  LRRK2 RNA guide
aacugcugauggcaaguuagca

SEQ ID NO: 26122 - RNA, 22 nt, Artificial Sequence
  LRRK2 RNA guide
aacuugccaucagcaguuccaa

SEQ ID NO: 26123 - RNA, 22 nt, Artificial Sequence
  LRRK2 RNA guide
aauugcuaacuugccaucagca

SEQ ID NO: 26124 - RNA, 22 nt, Artificial Sequence
  LRRK2 RNA guide
aauuuucuuuugguuggaacug

SEQ ID NO: 26125 - RNA, 22 nt, Artificial Sequence
  LRRK2 RNA guide
acugcugauggcaaguuagcaa

SEQ ID NO: 26126 - RNA, 22 nt, Artificial Sequence
  LRRK2 RNA guide
acuugccaucagcaguuccaac

SEQ ID NO: 26127 - RNA, 22 nt, Artificial Sequence
  LRRK2 RNA guide
agcaguuccaaccaaaagaaaa

SEQ ID NO: 26128 - RNA, 22 nt, Artificial Sequence
  LRRK2 RNA guide
aucagcaguuccaaccaaaaga

SEQ ID NO: 26129 - RNA, 22 nt, Artificial Sequence
  LRRK2 RNA guide
auugcuaacuugccaucagcag

SEQ ID NO: 26130 - RNA, 22 nt, Artificial Sequence
  LRRK2 RNA guide
auuuucuuuugguuggaacugc

SEQ ID NO: 26131 - RNA, 22 nt, Artificial Sequence
  LRRK2 RNA guide
caaaaauugcuaacuugccauc

SEQ ID NO: 26132 - RNA, 22 nt, Artificial Sequence
  LRRK2 RNA guide
cagcaguuccaaccaaaagaaa

SEQ ID NO: 26133 - RNA, 22 nt, Artificial Sequence
  LRRK2 RNA guide
caguuccaaccaaaagaaaauu

SEQ ID NO: 26134 - RNA, 22 nt, Artificial Sequence
  LRRK2 RNA guide
caucagcaguuccaaccaaaag

SEQ ID NO: 26135 - RNA, 22 nt, Artificial Sequence
  LRRK2 RNA guide
ccaucagcaguuccaaccaaaa

SEQ ID NO: 26136 - RNA, 22 nt, Artificial Sequence
  LRRK2 RNA guide
cuaacuugccaucagcaguucc

SEQ ID NO: 26137 - RNA, 22 nt, Artificial Sequence
  LRRK2 RNA guide
cugcugauggcaaguuagcaau

SEQ ID NO: 26138 - RNA, 22 nt, Artificial Sequence
  LRRK2 RNA guide
cuugccaucagcaguuccaacc

SEQ ID NO: 26139 - RNA, 22 nt, Artificial Sequence
  LRRK2 RNA guide
cuuuugguuggaacugcugaug

SEQ ID NO: 26140 - RNA, 22 nt, Artificial Sequence
  LRRK2 RNA guide
gaacugcugauggcaaguuagc

SEQ ID NO: 26141 - RNA, 22 nt, Artificial Sequence
  LRRK2 RNA guide
gcaguuccaaccaaaagaaaau

SEQ ID NO: 26142 - RNA, 22 nt, Artificial Sequence
  LRRK2 RNA guide
gccaucagcaguuccaaccaaa

SEQ ID NO: 26143 - RNA, 22 nt, Artificial Sequence
  LRRK2 RNA guide
gcuaacuugccaucagcaguuc

SEQ ID NO: 26144 - RNA, 22 nt, Artificial Sequence
  LRRK2 RNA guide
ggaacugcugauggcaaguuag

SEQ ID NO: 26145 - RNA, 22 nt, Artificial Sequence
  LRRK2 RNA guide
gguuggaacugcugauggcaag

SEQ ID NO: 26146 - RNA, 22 nt, Artificial Sequence
  LRRK2 RNA guide
guuggaacugcugauggcaagu

SEQ ID NO: 26147 - RNA, 22 nt, Artificial Sequence
  LRRK2 RNA guide
uaacuugccaucagcaguucca

SEQ ID NO: 26148 - RNA, 22 nt, Artificial Sequence
  LRRK2 RNA guide
ucaaaaauugcuaacuugccau

SEQ ID NO: 26149 - RNA, 22 nt, Artificial Sequence
  LRRK2 RNA guide
ucagcaguuccaaccaaaagaa

SEQ ID NO: 26150 - RNA, 22 nt, Artificial Sequence
  LRRK2 RNA guide
ucuuuugguuggaacugcugau

SEQ ID NO: 26151 - RNA, 22 nt, Artificial Sequence
  LRRK2 RNA guide
ugccaucagcaguuccaaccaa

SEQ ID NO: 26152 - RNA, 22 nt, Artificial Sequence
  LRRK2 RNA guide
ugcuaacuugccaucagcaguu

SEQ ID NO: 26153 - RNA, 22 nt, Artificial Sequence
  LRRK2 RNA guide
uggaacugcugauggcaaguua

SEQ ID NO: 26154 - RNA, 22 nt, Artificial Sequence
  LRRK2 RNA guide
ugguuggaacugcugauggcaa

SEQ ID NO: 26155 - RNA, 22 nt, Artificial Sequence
  LRRK2 RNA guide
uucuuuugguuggaacugcuga

SEQ ID NO: 26156 - RNA, 22 nt, Artificial Sequence
  LRRK2 RNA guide
uugccaucagcaguuccaacca

SEQ ID NO: 26157 - RNA, 22 nt, Artificial Sequence
  LRRK2 RNA guide
uugcuaacuugccaucagcagu

SEQ ID NO: 26158 - RNA, 22 nt, Artificial Sequence
  LRRK2 RNA guide
uuggaacugcugauggcaaguu

SEQ ID NO: 26159 - RNA, 22 nt, Artificial Sequence
  LRRK2 RNA guide
uugguuggaacugcugauggca

SEQ ID NO: 26160 - RNA, 22 nt, Artificial Sequence
  LRRK2 RNA guide
uuucuuuugguuggaacugcug

SEQ ID NO: 26161 - RNA, 22 nt, Artificial Sequence
  LRRK2 RNA guide
uuugguuggaacugcugauggc

SEQ ID NO: 26162 - RNA, 22 nt, Artificial Sequence
  LRRK2 RNA guide
uuuucuuuugguuggaacugcu

SEQ ID NO: 26163 - RNA, 22 nt, Artificial Sequence
  LRRK2 RNA guide
uuuugguuggaacugcugaugg

SEQ ID NO: 26164 - RNA, 20 nt, Artificial Sequence
  LRRK2 RNA guide
aauccacaaauucaauggaa

SEQ ID NO: 26165 - RNA, 20 nt, Artificial Sequence
  LRRK2 RNA guide
agugaauccacaaauucaau

SEQ ID NO: 26166 - RNA, 20 nt, Artificial Sequence
  LRRK2 RNA guide
auccacaaauucaauggaaa

SEQ ID NO: 26167 - RNA, 20 nt, Artificial Sequence
  LRRK2 RNA guide
auggaaagaaauguaaugug

SEQ ID NO: 26168 - RNA, 20 nt, Artificial Sequence
  LRRK2 RNA guide
caauggaaagaaauguaaug

SEQ ID NO: 26169 - RNA, 20 nt, Artificial Sequence
  LRRK2 RNA guide
cacaaauucaauggaaagaa

SEQ ID NO: 26170 - RNA, 20 nt, Artificial Sequence
  LRRK2 RNA guide
cacauuacauuucuuuccau

SEQ ID NO: 26171 - RNA, 20 nt, Artificial Sequence
  LRRK2 RNA guide
cauuacauuucuuuccauug

SEQ ID NO: 26172 - RNA, 20 nt, Artificial Sequence
  LRRK2 RNA guide
cauugaauuuguggauucac

SEQ ID NO: 26173 - RNA, 20 nt, Artificial Sequence
  LRRK2 RNA guide
ccacaaauucaauggaaaga

SEQ ID NO: 26174 - RNA, 20 nt, Artificial Sequence
  LRRK2 RNA guide
ccacauuacauuucuuucca

SEQ ID NO: 26175 - RNA, 20 nt, Artificial Sequence
  LRRK2 RNA guide
ccauugaauuuguggauuca

SEQ ID NO: 26176 - RNA, 20 nt, Artificial Sequence
  LRRK2 RNA guide
cccacauuacauuucuuucc

SEQ ID NO: 26177 - RNA, 20 nt, Artificial Sequence
  LRRK2 RNA guide
ccuccccacauuacauuucu

SEQ ID NO: 26178 - RNA, 20 nt, Artificial Sequence
  LRRK2 RNA guide
cuccccacauuacauuucuu

SEQ ID NO: 26179 - RNA, 20 nt, Artificial Sequence
  LRRK2 RNA guide
cuuuccauugaauuugugga

SEQ ID NO: 26180 - RNA, 20 nt, Artificial Sequence
  LRRK2 RNA guide
gaauccacaaauucaaugga

SEQ ID NO: 26181 - RNA, 20 nt, Artificial Sequence
  LRRK2 RNA guide
gagugaauccacaaauucaa

SEQ ID NO: 26182 - RNA, 20 nt, Artificial Sequence
  LRRK2 RNA guide
gugaauccacaaauucaaug

SEQ ID NO: 26183 - RNA, 20 nt, Artificial Sequence
  LRRK2 RNA guide
guuugagugaauccacaaau

SEQ ID NO: 26184 - RNA, 20 nt, Artificial Sequence
  LRRK2 RNA guide
uccacaaauucaauggaaag

SEQ ID NO: 26185 - RNA, 20 nt, Artificial Sequence
  LRRK2 RNA guide
uccauugaauuuguggauuc

SEQ ID NO: 26186 - RNA, 20 nt, Artificial Sequence
  LRRK2 RNA guide
uccccacauuacauuucuuu

SEQ ID NO: 26187 - RNA, 20 nt, Artificial Sequence
  LRRK2 RNA guide
ucuuuccauugaauuugugg

SEQ ID NO: 26188 - RNA, 20 nt, Artificial Sequence
  LRRK2 RNA guide
ugaauccacaaauucaaugg

SEQ ID NO: 26189 - RNA, 20 nt, Artificial Sequence
  LRRK2 RNA guide
ugagugaauccacaaauuca

SEQ ID NO: 26190 - RNA, 20 nt, Artificial Sequence
  LRRK2 RNA guide
uuccauugaauuuguggauu

SEQ ID NO: 26191 - RNA, 20 nt, Artificial Sequence
  LRRK2 RNA guide
uucuuuccauugaauuugug

SEQ ID NO: 26192 - RNA, 20 nt, Artificial Sequence
  LRRK2 RNA guide
uugagugaauccacaaauuc

SEQ ID NO: 26193 - RNA, 20 nt, Artificial Sequence
  LRRK2 RNA guide
uuuccauugaauuuguggau

SEQ ID NO: 26194 - RNA, 20 nt, Artificial Sequence
  LRRK2 RNA guide
uuugagugaauccacaaauu

SEQ ID NO: 26195 - RNA, 21 nt, Artificial Sequence
  LRRK2 RNA guide
agugaauccacaaauucaaug

SEQ ID NO: 26196 - RNA, 21 nt, Artificial Sequence
  LRRK2 RNA guide
auccacaaauucaauggaaag

SEQ ID NO: 26197 - RNA, 21 nt, Artificial Sequence
  LRRK2 RNA guide
auggaaagaaauguaaugugg

SEQ ID NO: 26198 - RNA, 21 nt, Artificial Sequence
  LRRK2 RNA guide
cauugaauuuguggauucacu

SEQ ID NO: 26199 - RNA, 21 nt, Artificial Sequence
  LRRK2 RNA guide
ccacaaauucaauggaaagaa

SEQ ID NO: 26200 - RNA, 21 nt, Artificial Sequence
  LRRK2 RNA guide
ccacauuacauuucuuuccau

SEQ ID NO: 26201 - RNA, 21 nt, Artificial Sequence
  LRRK2 RNA guide
ccauugaauuuguggauucac

SEQ ID NO: 26202 - RNA, 21 nt, Artificial Sequence
  LRRK2 RNA guide
cccacauuacauuucuuucca

SEQ ID NO: 26203 - RNA, 21 nt, Artificial Sequence
  LRRK2 RNA guide
ccccacauuacauuucuuucc

SEQ ID NO: 26204 - RNA, 21 nt, Artificial Sequence
  LRRK2 RNA guide
ccuccccacauuacauuucuu

SEQ ID NO: 26205 - RNA, 21 nt, Artificial Sequence
  LRRK2 RNA guide
cuccccacauuacauuucuuu

SEQ ID NO: 26206 - RNA, 21 nt, Artificial Sequence
  LRRK2 RNA guide
cuuuccauugaauuuguggau

SEQ ID NO: 26207 - RNA, 21 nt, Artificial Sequence
  LRRK2 RNA guide
gaauccacaaauucaauggaa

SEQ ID NO: 26208 - RNA, 21 nt, Artificial Sequence
  LRRK2 RNA guide
gagugaauccacaaauucaau

SEQ ID NO: 26209 - RNA, 21 nt, Artificial Sequence
  LRRK2 RNA guide
gugaauccacaaauucaaugg

SEQ ID NO: 26210 - RNA, 21 nt, Artificial Sequence
  LRRK2 RNA guide
guuugagugaauccacaaauu

SEQ ID NO: 26211 - RNA, 21 nt, Artificial Sequence
  LRRK2 RNA guide
uccacaaauucaauggaaaga

SEQ ID NO: 26212 - RNA, 21 nt, Artificial Sequence
  LRRK2 RNA guide
uccauugaauuuguggauuca

SEQ ID NO: 26213 - RNA, 21 nt, Artificial Sequence
  LRRK2 RNA guide
uccccacauuacauuucuuuc

SEQ ID NO: 26214 - RNA, 21 nt, Artificial Sequence
  LRRK2 RNA guide
uccuccccacauuacauuucu

SEQ ID NO: 26215 - RNA, 21 nt, Artificial Sequence
  LRRK2 RNA guide
ucuuuccauugaauuugugga

SEQ ID NO: 26216 - RNA, 21 nt, Artificial Sequence
  LRRK2 RNA guide
ugaauccacaaauucaaugga

SEQ ID NO: 26217 - RNA, 21 nt, Artificial Sequence
  LRRK2 RNA guide
ugagugaauccacaaauucaa

SEQ ID NO: 26218 - RNA, 21 nt, Artificial Sequence
  LRRK2 RNA guide
uguuugagugaauccacaaau

SEQ ID NO: 26219 - RNA, 21 nt, Artificial Sequence
  LRRK2 RNA guide
uuccauugaauuuguggauuc

SEQ ID NO: 26220 - RNA, 21 nt, Artificial Sequence
  LRRK2 RNA guide
uucuuuccauugaauuugugg

SEQ ID NO: 26221 - RNA, 21 nt, Artificial Sequence
  LRRK2 RNA guide
uugagugaauccacaaauuca

SEQ ID NO: 26222 - RNA, 21 nt, Artificial Sequence
  LRRK2 RNA guide
uuugagugaauccacaaauuc

SEQ ID NO: 26223 - RNA, 22 nt, Artificial Sequence
  LRRK2 RNA guide
aauccacaaauucaauggaaag

SEQ ID NO: 26224 - RNA, 22 nt, Artificial Sequence
  LRRK2 RNA guide
aauggaaagaaauguaaugugg

SEQ ID NO: 26225 - RNA, 22 nt, Artificial Sequence
  LRRK2 RNA guide
agugaauccacaaauucaaugg

SEQ ID NO: 26226 - RNA, 22 nt, Artificial Sequence
  LRRK2 RNA guide
auccacaaauucaauggaaaga

SEQ ID NO: 26227 - RNA, 22 nt, Artificial Sequence
  LRRK2 RNA guide
auccuccccacauuacauuucu

SEQ ID NO: 26228 - RNA, 22 nt, Artificial Sequence
  LRRK2 RNA guide
auggaaagaaauguaauguggg

SEQ ID NO: 26229 - RNA, 22 nt, Artificial Sequence
  LRRK2 RNA guide
caauggaaagaaauguaaugug

SEQ ID NO: 26230 - RNA, 22 nt, Artificial Sequence
  LRRK2 RNA guide
cacauuacauuucuuuccauug

SEQ ID NO: 26231 - RNA, 22 nt, Artificial Sequence
  LRRK2 RNA guide
cauugaauuuguggauucacuc

SEQ ID NO: 26232 - RNA, 22 nt, Artificial Sequence
  LRRK2 RNA guide
ccacaaauucaauggaaagaaa

SEQ ID NO: 26233 - RNA, 22 nt, Artificial Sequence
  LRRK2 RNA guide
ccacauuacauuucuuuccauu

SEQ ID NO: 26234 - RNA, 22 nt, Artificial Sequence
  LRRK2 RNA guide
ccauugaauuuguggauucacu

SEQ ID NO: 26235 - RNA, 22 nt, Artificial Sequence
  LRRK2 RNA guide
cccacauuacauuucuuuccau

SEQ ID NO: 26236 - RNA, 22 nt, Artificial Sequence
  LRRK2 RNA guide
ccccacauuacauuucuuucca

SEQ ID NO: 26237 - RNA, 22 nt, Artificial Sequence
  LRRK2 RNA guide
ccuccccacauuacauuucuuu

SEQ ID NO: 26238 - RNA, 22 nt, Artificial Sequence
  LRRK2 RNA guide
cuccccacauuacauuucuuuc

SEQ ID NO: 26239 - RNA, 22 nt, Artificial Sequence
  LRRK2 RNA guide
cuuuccauugaauuuguggauu

SEQ ID NO: 26240 - RNA, 22 nt, Artificial Sequence
  LRRK2 RNA guide
gaauccacaaauucaauggaaa

SEQ ID NO: 26241 - RNA, 22 nt, Artificial Sequence
  LRRK2 RNA guide
gagugaauccacaaauucaaug

SEQ ID NO: 26242 - RNA, 22 nt, Artificial Sequence
  LRRK2 RNA guide
gugaauccacaaauucaaugga

SEQ ID NO: 26243 - RNA, 22 nt, Artificial Sequence
  LRRK2 RNA guide
guguuugagugaauccacaaau

SEQ ID NO: 26244 - RNA, 22 nt, Artificial Sequence
  LRRK2 RNA guide
guuugagugaauccacaaauuc

SEQ ID NO: 26245 - RNA, 22 nt, Artificial Sequence
  LRRK2 RNA guide
uccacaaauucaauggaaagaa

SEQ ID NO: 26246 - RNA, 22 nt, Artificial Sequence
  LRRK2 RNA guide
uccauugaauuuguggauucac

SEQ ID NO: 26247 - RNA, 22 nt, Artificial Sequence
  LRRK2 RNA guide
uccccacauuacauuucuuucc

SEQ ID NO: 26248 - RNA, 22 nt, Artificial Sequence
  LRRK2 RNA guide
uccuccccacauuacauuucuu

SEQ ID NO: 26249 - RNA, 22 nt, Artificial Sequence
  LRRK2 RNA guide
ucuuuccauugaauuuguggau

SEQ ID NO: 26250 - RNA, 22 nt, Artificial Sequence
  LRRK2 RNA guide
ugaauccacaaauucaauggaa

SEQ ID NO: 26251 - RNA, 22 nt, Artificial Sequence
  LRRK2 RNA guide
ugagugaauccacaaauucaau

SEQ ID NO: 26252 - RNA, 22 nt, Artificial Sequence
  LRRK2 RNA guide
uguuugagugaauccacaaauu

SEQ ID NO: 26253 - RNA, 22 nt, Artificial Sequence
  LRRK2 RNA guide
uuccauugaauuuguggauuca

SEQ ID NO: 26254 - RNA, 22 nt, Artificial Sequence
  LRRK2 RNA guide
uucuuuccauugaauuugugga

SEQ ID NO: 26255 - RNA, 22 nt, Artificial Sequence
  LRRK2 RNA guide
uugagugaauccacaaauucaa

SEQ ID NO: 26256 - RNA, 22 nt, Artificial Sequence
  LRRK2 RNA guide
uuuccauugaauuuguggauuc

SEQ ID NO: 26257 - RNA, 22 nt, Artificial Sequence
  LRRK2 RNA guide
uuucuuuccauugaauuugugg

SEQ ID NO: 26258 - RNA, 22 nt, Artificial Sequence
  LRRK2 RNA guide
uuugagugaauccacaaauuca

SEQ ID NO: 26259 - RNA, 20 nt, Artificial Sequence
  LRRK2 RNA guide
aaacucguugagacaagaac

SEQ ID NO: 26260 - RNA, 20 nt, Artificial Sequence
  LRRK2 RNA guide
aacgaguuucugaaugguga

SEQ ID NO: 26261 - RNA, 20 nt, Artificial Sequence
  LRRK2 RNA guide
aacucguugagacaagaaca

SEQ ID NO: 26262 - RNA, 20 nt, Artificial Sequence
  LRRK2 RNA guide
aaugauuucaccauucagaa

SEQ ID NO: 26263 - RNA, 20 nt, Artificial Sequence
  LRRK2 RNA guide
accauucagaaacucguuga

SEQ ID NO: 26264 - RNA, 20 nt, Artificial Sequence
  LRRK2 RNA guide
acgaguuucugaauggugaa

SEQ ID NO: 26265 - RNA, 20 nt, Artificial Sequence
  LRRK2 RNA guide
acucguugagacaagaacaa

SEQ ID NO: 26266 - RNA, 20 nt, Artificial Sequence
  LRRK2 RNA guide
agaaacucguugagacaaga

SEQ ID NO: 26267 - RNA, 20 nt, Artificial Sequence
  LRRK2 RNA guide
aguuggcuuguucuugucuc

SEQ ID NO: 26268 - RNA, 20 nt, Artificial Sequence
  LRRK2 RNA guide
augauuucaccauucagaaa

SEQ ID NO: 26269 - RNA, 20 nt, Artificial Sequence
  LRRK2 RNA guide
auucagaaacucguugagac

SEQ ID NO: 26270 - RNA, 20 nt, Artificial Sequence
  LRRK2 RNA guide
auuucaccauucagaaacuc

SEQ ID NO: 26271 - RNA, 20 nt, Artificial Sequence
  LRRK2 RNA guide
caacgaguuucugaauggug

SEQ ID NO: 26272 - RNA, 20 nt, Artificial Sequence
  LRRK2 RNA guide
caccauucagaaacucguug

SEQ ID NO: 26273 - RNA, 20 nt, Artificial Sequence
  LRRK2 RNA guide
cagaaacucguugagacaag

SEQ ID NO: 26274 - RNA, 20 nt, Artificial Sequence
  LRRK2 RNA guide
caguuggcuuguucuugucu

SEQ ID NO: 26275 - RNA, 20 nt, Artificial Sequence
  LRRK2 RNA guide
cauucagaaacucguugaga

SEQ ID NO: 26276 - RNA, 20 nt, Artificial Sequence
  LRRK2 RNA guide
ccauucagaaacucguugag

SEQ ID NO: 26277 - RNA, 20 nt, Artificial Sequence
  LRRK2 RNA guide
cguugagacaagaacaagcc

SEQ ID NO: 26278 - RNA, 20 nt, Artificial Sequence
  LRRK2 RNA guide
cucaacgaguuucugaaugg

SEQ ID NO: 26279 - RNA, 20 nt, Artificial Sequence
  LRRK2 RNA guide
cucguugagacaagaacaag

SEQ ID NO: 26280 - RNA, 20 nt, Artificial Sequence
  LRRK2 RNA guide
cuugucucaacgaguuucug

SEQ ID NO: 26281 - RNA, 20 nt, Artificial Sequence
  LRRK2 RNA guide
cuuguucuugucucaacgag

SEQ ID NO: 26282 - RNA, 20 nt, Artificial Sequence
  LRRK2 RNA guide
gaaacucguugagacaagaa

SEQ ID NO: 26283 - RNA, 20 nt, Artificial Sequence
  LRRK2 RNA guide
gauuucaccauucagaaacu

SEQ ID NO: 26284 - RNA, 20 nt, Artificial Sequence
  LRRK2 RNA guide
gcuuguucuugucucaacga

SEQ ID NO: 26285 - RNA, 20 nt, Artificial Sequence
  LRRK2 RNA guide
ggcuuguucuugucucaacg

SEQ ID NO: 26286 - RNA, 20 nt, Artificial Sequence
  LRRK2 RNA guide
gucucaacgaguuucugaau

SEQ ID NO: 26287 - RNA, 20 nt, Artificial Sequence
  LRRK2 RNA guide
guucuugucucaacgaguuu

SEQ ID NO: 26288 - RNA, 20 nt, Artificial Sequence
  LRRK2 RNA guide
guuggcuuguucuugucuca

SEQ ID NO: 26289 - RNA, 20 nt, Artificial Sequence
  LRRK2 RNA guide
ucaacgaguuucugaauggu

SEQ ID NO: 26290 - RNA, 20 nt, Artificial Sequence
  LRRK2 RNA guide
ucaccauucagaaacucguu

SEQ ID NO: 26291 - RNA, 20 nt, Artificial Sequence
  LRRK2 RNA guide
ucagaaacucguugagacaa

SEQ ID NO: 26292 - RNA, 20 nt, Artificial Sequence
  LRRK2 RNA guide
ucguugagacaagaacaagc

SEQ ID NO: 26293 - RNA, 20 nt, Artificial Sequence
  LRRK2 RNA guide
ucucaacgaguuucugaaug

SEQ ID NO: 26294 - RNA, 20 nt, Artificial Sequence
  LRRK2 RNA guide
ucuugucucaacgaguuucu

SEQ ID NO: 26295 - RNA, 20 nt, Artificial Sequence
  LRRK2 RNA guide
ugauuucaccauucagaaac

SEQ ID NO: 26296 - RNA, 20 nt, Artificial Sequence
  LRRK2 RNA guide
uggcuuguucuugucucaac

SEQ ID NO: 26297 - RNA, 20 nt, Artificial Sequence
  LRRK2 RNA guide
ugucucaacgaguuucugaa

SEQ ID NO: 26298 - RNA, 20 nt, Artificial Sequence
  LRRK2 RNA guide
uguucuugucucaacgaguu

SEQ ID NO: 26299 - RNA, 20 nt, Artificial Sequence
  LRRK2 RNA guide
uucaccauucagaaacucgu

SEQ ID NO: 26300 - RNA, 20 nt, Artificial Sequence
  LRRK2 RNA guide
uucagaaacucguugagaca

SEQ ID NO: 26301 - RNA, 20 nt, Artificial Sequence
  LRRK2 RNA guide
uucuugucucaacgaguuuc

SEQ ID NO: 26302 - RNA, 20 nt, Artificial Sequence
  LRRK2 RNA guide
uuggcuuguucuugucucaa

SEQ ID NO: 26303 - RNA, 20 nt, Artificial Sequence
  LRRK2 RNA guide
uugucucaacgaguuucuga

SEQ ID NO: 26304 - RNA, 20 nt, Artificial Sequence
  LRRK2 RNA guide
uuguucuugucucaacgagu

SEQ ID NO: 26305 - RNA, 20 nt, Artificial Sequence
  LRRK2 RNA guide
uuucaccauucagaaacucg

SEQ ID NO: 26306 - RNA, 21 nt, Artificial Sequence
  LRRK2 RNA guide
aaacucguugagacaagaaca

SEQ ID NO: 26307 - RNA, 21 nt, Artificial Sequence
  LRRK2 RNA guide
aacgaguuucugaauggugaa

SEQ ID NO: 26308 - RNA, 21 nt, Artificial Sequence
  LRRK2 RNA guide
aacucguugagacaagaacaa

SEQ ID NO: 26309 - RNA, 21 nt, Artificial Sequence
  LRRK2 RNA guide
acaguuggcuuguucuugucu

SEQ ID NO: 26310 - RNA, 21 nt, Artificial Sequence
  LRRK2 RNA guide
accauucagaaacucguugag

SEQ ID NO: 26311 - RNA, 21 nt, Artificial Sequence
  LRRK2 RNA guide
acgaguuucugaauggugaaa

SEQ ID NO: 26312 - RNA, 21 nt, Artificial Sequence
  LRRK2 RNA guide
acucguugagacaagaacaag

SEQ ID NO: 26313 - RNA, 21 nt, Artificial Sequence
  LRRK2 RNA guide
agaaacucguugagacaagaa

SEQ ID NO: 26314 - RNA, 21 nt, Artificial Sequence
  LRRK2 RNA guide
aguuggcuuguucuugucuca

SEQ ID NO: 26315 - RNA, 21 nt, Artificial Sequence
  LRRK2 RNA guide
augauuucaccauucagaaac

SEQ ID NO: 26316 - RNA, 21 nt, Artificial Sequence
  LRRK2 RNA guide
auucagaaacucguugagaca

SEQ ID NO: 26317 - RNA, 21 nt, Artificial Sequence
  LRRK2 RNA guide
auuucaccauucagaaacucg

SEQ ID NO: 26318 - RNA, 21 nt, Artificial Sequence
  LRRK2 RNA guide
caacgaguuucugaaugguga

SEQ ID NO: 26319 - RNA, 21 nt, Artificial Sequence
  LRRK2 RNA guide
caccauucagaaacucguuga

SEQ ID NO: 26320 - RNA, 21 nt, Artificial Sequence
  LRRK2 RNA guide
cagaaacucguugagacaaga

SEQ ID NO: 26321 - RNA, 21 nt, Artificial Sequence
  LRRK2 RNA guide
caguuggcuuguucuugucuc

SEQ ID NO: 26322 - RNA, 21 nt, Artificial Sequence
  LRRK2 RNA guide
cauucagaaacucguugagac

SEQ ID NO: 26323 - RNA, 21 nt, Artificial Sequence
  LRRK2 RNA guide
ccauucagaaacucguugaga

SEQ ID NO: 26324 - RNA, 21 nt, Artificial Sequence
  LRRK2 RNA guide
cguugagacaagaacaagcca

SEQ ID NO: 26325 - RNA, 21 nt, Artificial Sequence
  LRRK2 RNA guide
cucaacgaguuucugaauggu

SEQ ID NO: 26326 - RNA, 21 nt, Artificial Sequence
  LRRK2 RNA guide
cucguugagacaagaacaagc

SEQ ID NO: 26327 - RNA, 21 nt, Artificial Sequence
  LRRK2 RNA guide
cuugucucaacgaguuucuga

SEQ ID NO: 26328 - RNA, 21 nt, Artificial Sequence
  LRRK2 RNA guide
cuuguucuugucucaacgagu

SEQ ID NO: 26329 - RNA, 21 nt, Artificial Sequence
  LRRK2 RNA guide
gaaacucguugagacaagaac

SEQ ID NO: 26330 - RNA, 21 nt, Artificial Sequence
  LRRK2 RNA guide
gauuucaccauucagaaacuc

SEQ ID NO: 26331 - RNA, 21 nt, Artificial Sequence
  LRRK2 RNA guide
gcuuguucuugucucaacgag

SEQ ID NO: 26332 - RNA, 21 nt, Artificial Sequence
  LRRK2 RNA guide
ggcuuguucuugucucaacga

SEQ ID NO: 26333 - RNA, 21 nt, Artificial Sequence
  LRRK2 RNA guide
gucucaacgaguuucugaaug

SEQ ID NO: 26334 - RNA, 21 nt, Artificial Sequence
  LRRK2 RNA guide
guucuugucucaacgaguuuc

SEQ ID NO: 26335 - RNA, 21 nt, Artificial Sequence
  LRRK2 RNA guide
guuggcuuguucuugucucaa

SEQ ID NO: 26336 - RNA, 21 nt, Artificial Sequence
  LRRK2 RNA guide
uacaguuggcuuguucuuguc

SEQ ID NO: 26337 - RNA, 21 nt, Artificial Sequence
  LRRK2 RNA guide
ucaacgaguuucugaauggug

SEQ ID NO: 26338 - RNA, 21 nt, Artificial Sequence
  LRRK2 RNA guide
ucaccauucagaaacucguug

SEQ ID NO: 26339 - RNA, 21 nt, Artificial Sequence
  LRRK2 RNA guide
ucagaaacucguugagacaag

SEQ ID NO: 26340 - RNA, 21 nt, Artificial Sequence
  LRRK2 RNA guide
ucguugagacaagaacaagcc

SEQ ID NO: 26341 - RNA, 21 nt, Artificial Sequence
  LRRK2 RNA guide
ucucaacgaguuucugaaugg

SEQ ID NO: 26342 - RNA, 21 nt, Artificial Sequence
  LRRK2 RNA guide
ucuugucucaacgaguuucug

SEQ ID NO: 26343 - RNA, 21 nt, Artificial Sequence
  LRRK2 RNA guide
ugauuucaccauucagaaacu

SEQ ID NO: 26344 - RNA, 21 nt, Artificial Sequence
  LRRK2 RNA guide
uggcuuguucuugucucaacg

SEQ ID NO: 26345 - RNA, 21 nt, Artificial Sequence
  LRRK2 RNA guide
ugucucaacgaguuucugaau

SEQ ID NO: 26346 - RNA, 21 nt, Artificial Sequence
  LRRK2 RNA guide
uguucuugucucaacgaguuu

SEQ ID NO: 26347 - RNA, 21 nt, Artificial Sequence
  LRRK2 RNA guide
uucaccauucagaaacucguu

SEQ ID NO: 26348 - RNA, 21 nt, Artificial Sequence
  LRRK2 RNA guide
uucagaaacucguugagacaa

SEQ ID NO: 26349 - RNA, 21 nt, Artificial Sequence
  LRRK2 RNA guide
uucuugucucaacgaguuucu

SEQ ID NO: 26350 - RNA, 21 nt, Artificial Sequence
  LRRK2 RNA guide
uuggcuuguucuugucucaac

SEQ ID NO: 26351 - RNA, 21 nt, Artificial Sequence
  LRRK2 RNA guide
uugucucaacgaguuucugaa

SEQ ID NO: 26352 - RNA, 21 nt, Artificial Sequence
  LRRK2 RNA guide
uuguucuugucucaacgaguu

SEQ ID NO: 26353 - RNA, 21 nt, Artificial Sequence
  LRRK2 RNA guide
uuucaccauucagaaacucgu

SEQ ID NO: 26354 - RNA, 22 nt, Artificial Sequence
  LRRK2 RNA guide
aaacucguugagacaagaacaa

SEQ ID NO: 26355 - RNA, 22 nt, Artificial Sequence
  LRRK2 RNA guide
aacgaguuucugaauggugaaa

SEQ ID NO: 26356 - RNA, 22 nt, Artificial Sequence
  LRRK2 RNA guide
aacucguugagacaagaacaag

SEQ ID NO: 26357 - RNA, 22 nt, Artificial Sequence
  LRRK2 RNA guide
aaugauuucaccauucagaaac

SEQ ID NO: 26358 - RNA, 22 nt, Artificial Sequence
  LRRK2 RNA guide
acaguuggcuuguucuugucuc

SEQ ID NO: 26359 - RNA, 22 nt, Artificial Sequence
  LRRK2 RNA guide
accauucagaaacucguugaga

SEQ ID NO: 26360 - RNA, 22 nt, Artificial Sequence
  LRRK2 RNA guide
acgaguuucugaauggugaaau

SEQ ID NO: 26361 - RNA, 22 nt, Artificial Sequence
  LRRK2 RNA guide
acucguugagacaagaacaagc

SEQ ID NO: 26362 - RNA, 22 nt, Artificial Sequence
  LRRK2 RNA guide
agaaacucguugagacaagaac

SEQ ID NO: 26363 - RNA, 22 nt, Artificial Sequence
  LRRK2 RNA guide
aguuggcuuguucuugucucaa

SEQ ID NO: 26364 - RNA, 22 nt, Artificial Sequence
  LRRK2 RNA guide
augauuucaccauucagaaacu

SEQ ID NO: 26365 - RNA, 22 nt, Artificial Sequence
  LRRK2 RNA guide
auucagaaacucguugagacaa

SEQ ID NO: 26366 - RNA, 22 nt, Artificial Sequence
  LRRK2 RNA guide
auuucaccauucagaaacucgu

SEQ ID NO: 26367 - RNA, 22 nt, Artificial Sequence
  LRRK2 RNA guide
caacgaguuucugaauggugaa

SEQ ID NO: 26368 - RNA, 22 nt, Artificial Sequence
  LRRK2 RNA guide
caccauucagaaacucguugag

SEQ ID NO: 26369 - RNA, 22 nt, Artificial Sequence
  LRRK2 RNA guide
cagaaacucguugagacaagaa

SEQ ID NO: 26370 - RNA, 22 nt, Artificial Sequence
  LRRK2 RNA guide
caguuggcuuguucuugucuca

SEQ ID NO: 26371 - RNA, 22 nt, Artificial Sequence
  LRRK2 RNA guide
cauucagaaacucguugagaca

SEQ ID NO: 26372 - RNA, 22 nt, Artificial Sequence
  LRRK2 RNA guide
ccauucagaaacucguugagac

SEQ ID NO: 26373 - RNA, 22 nt, Artificial Sequence
  LRRK2 RNA guide
cguugagacaagaacaagccaa

SEQ ID NO: 26374 - RNA, 22 nt, Artificial Sequence
  LRRK2 RNA guide
cuaaugauuucaccauucagaa

SEQ ID NO: 26375 - RNA, 22 nt, Artificial Sequence
  LRRK2 RNA guide
cucaacgaguuucugaauggug

SEQ ID NO: 26376 - RNA, 22 nt, Artificial Sequence
  LRRK2 RNA guide
cucguugagacaagaacaagcc

SEQ ID NO: 26377 - RNA, 22 nt, Artificial Sequence
  LRRK2 RNA guide
cuugucucaacgaguuucugaa

SEQ ID NO: 26378 - RNA, 22 nt, Artificial Sequence
  LRRK2 RNA guide
cuuguucuugucucaacgaguu

SEQ ID NO: 26379 - RNA, 22 nt, Artificial Sequence
  LRRK2 RNA guide
gaaacucguugagacaagaaca

SEQ ID NO: 26380 - RNA, 22 nt, Artificial Sequence
  LRRK2 RNA guide
gauuucaccauucagaaacucg

SEQ ID NO: 26381 - RNA, 22 nt, Artificial Sequence
  LRRK2 RNA guide
gcuuguucuugucucaacgagu

SEQ ID NO: 26382 - RNA, 22 nt, Artificial Sequence
  LRRK2 RNA guide
ggcuuguucuugucucaacgag

SEQ ID NO: 26383 - RNA, 22 nt, Artificial Sequence
  LRRK2 RNA guide
gucucaacgaguuucugaaugg

SEQ ID NO: 26384 - RNA, 22 nt, Artificial Sequence
  LRRK2 RNA guide
guucuugucucaacgaguuucu

SEQ ID NO: 26385 - RNA, 22 nt, Artificial Sequence
  LRRK2 RNA guide
guuggcuuguucuugucucaac

SEQ ID NO: 26386 - RNA, 22 nt, Artificial Sequence
  LRRK2 RNA guide
uacaguuggcuuguucuugucu

SEQ ID NO: 26387 - RNA, 22 nt, Artificial Sequence
  LRRK2 RNA guide
ucaacgaguuucugaaugguga

SEQ ID NO: 26388 - RNA, 22 nt, Artificial Sequence
  LRRK2 RNA guide
ucaccauucagaaacucguuga

SEQ ID NO: 26389 - RNA, 22 nt, Artificial Sequence
  LRRK2 RNA guide
ucagaaacucguugagacaaga

SEQ ID NO: 26390 - RNA, 22 nt, Artificial Sequence
  LRRK2 RNA guide
ucguugagacaagaacaagcca

SEQ ID NO: 26391 - RNA, 22 nt, Artificial Sequence
  LRRK2 RNA guide
ucucaacgaguuucugaauggu

SEQ ID NO: 26392 - RNA, 22 nt, Artificial Sequence
  LRRK2 RNA guide
ucuugucucaacgaguuucuga

SEQ ID NO: 26393 - RNA, 22 nt, Artificial Sequence
  LRRK2 RNA guide
ugauuucaccauucagaaacuc

SEQ ID NO: 26394 - RNA, 22 nt, Artificial Sequence
  LRRK2 RNA guide
uggcuuguucuugucucaacga

SEQ ID NO: 26395 - RNA, 22 nt, Artificial Sequence
  LRRK2 RNA guide
ugucucaacgaguuucugaaug

SEQ ID NO: 26396 - RNA, 22 nt, Artificial Sequence
  LRRK2 RNA guide
uguucuugucucaacgaguuuc

SEQ ID NO: 26397 - RNA, 22 nt, Artificial Sequence
  LRRK2 RNA guide
uuacaguuggcuuguucuuguc

SEQ ID NO: 26398 - RNA, 22 nt, Artificial Sequence
  LRRK2 RNA guide
uucaccauucagaaacucguug

SEQ ID NO: 26399 - RNA, 22 nt, Artificial Sequence
  LRRK2 RNA guide
uucagaaacucguugagacaag

SEQ ID NO: 26400 - RNA, 22 nt, Artificial Sequence
  LRRK2 RNA guide
uucuugucucaacgaguuucug

SEQ ID NO: 26401 - RNA, 22 nt, Artificial Sequence
  LRRK2 RNA guide
uuggcuuguucuugucucaacg

SEQ ID NO: 26402 - RNA, 22 nt, Artificial Sequence
  LRRK2 RNA guide
uugucucaacgaguuucugaau

SEQ ID NO: 26403 - RNA, 22 nt, Artificial Sequence
  LRRK2 RNA guide
uuguucuugucucaacgaguuu

SEQ ID NO: 26404 - RNA, 22 nt, Artificial Sequence
  LRRK2 RNA guide
uuucaccauucagaaacucguu

SEQ ID NO: 26405 - RNA, 20 nt, Artificial Sequence
  LRRK2 RNA guide
aacauuauaacagugguggu

SEQ ID NO: 26406 - RNA, 20 nt, Artificial Sequence
  LRRK2 RNA guide
acauuauaacagugguggua

SEQ ID NO: 26407 - RNA, 20 nt, Artificial Sequence
  LRRK2 RNA guide
accaccacuguuauaauguu

SEQ ID NO: 26408 - RNA, 20 nt, Artificial Sequence
  LRRK2 RNA guide
accacuguuauaauguugga

SEQ ID NO: 26409 - RNA, 20 nt, Artificial Sequence
  LRRK2 RNA guide
acuguuauaauguuggaauc

SEQ ID NO: 26410 - RNA, 20 nt, Artificial Sequence
  LRRK2 RNA guide
agcagugucuaccaccacug

SEQ ID NO: 26411 - RNA, 20 nt, Artificial Sequence
  LRRK2 RNA guide
agcuuucagugauuccaaca

SEQ ID NO: 26412 - RNA, 20 nt, Artificial Sequence
  LRRK2 RNA guide
agugauuccaacauuauaac

SEQ ID NO: 26413 - RNA, 20 nt, Artificial Sequence
  LRRK2 RNA guide
auaauguuggaaucacugaa

SEQ ID NO: 26414 - RNA, 20 nt, Artificial Sequence
  LRRK2 RNA guide
auuauaacaguggugguaga

SEQ ID NO: 26415 - RNA, 20 nt, Artificial Sequence
  LRRK2 RNA guide
auuccaacauuauaacagug

SEQ ID NO: 26416 - RNA, 20 nt, Artificial Sequence
  LRRK2 RNA guide
caacauuauaacaguggugg

SEQ ID NO: 26417 - RNA, 20 nt, Artificial Sequence
  LRRK2 RNA guide
caccacuguuauaauguugg

SEQ ID NO: 26418 - RNA, 20 nt, Artificial Sequence
  LRRK2 RNA guide
cacuguuauaauguuggaau

SEQ ID NO: 26419 - RNA, 20 nt, Artificial Sequence
  LRRK2 RNA guide
cagcuuucagugauuccaac

SEQ ID NO: 26420 - RNA, 20 nt, Artificial Sequence
  LRRK2 RNA guide
cagugauuccaacauuauaa

SEQ ID NO: 26421 - RNA, 20 nt, Artificial Sequence
  LRRK2 RNA guide
cagugucuaccaccacuguu

SEQ ID NO: 26422 - RNA, 20 nt, Artificial Sequence
  LRRK2 RNA guide
cauuauaacaguggugguag

SEQ ID NO: 26423 - RNA, 20 nt, Artificial Sequence
  LRRK2 RNA guide
ccaacauuauaacaguggug

SEQ ID NO: 26424 - RNA, 20 nt, Artificial Sequence
  LRRK2 RNA guide
ccaccacuguuauaauguug

SEQ ID NO: 26425 - RNA, 20 nt, Artificial Sequence
  LRRK2 RNA guide
ccacuguuauaauguuggaa

SEQ ID NO: 26426 - RNA, 20 nt, Artificial Sequence
  LRRK2 RNA guide
cuaccaccacuguuauaaug

SEQ ID NO: 26427 - RNA, 20 nt, Artificial Sequence
  LRRK2 RNA guide
cuguuauaauguuggaauca

SEQ ID NO: 26428 - RNA, 20 nt, Artificial Sequence
  LRRK2 RNA guide
cuuucagugauuccaacauu

SEQ ID NO: 26429 - RNA, 20 nt, Artificial Sequence
  LRRK2 RNA guide
gauuccaacauuauaacagu

SEQ ID NO: 26430 - RNA, 20 nt, Artificial Sequence
  LRRK2 RNA guide
gcagcuuucagugauuccaa

SEQ ID NO: 26431 - RNA, 20 nt, Artificial Sequence
  LRRK2 RNA guide
gcagugucuaccaccacugu

SEQ ID NO: 26432 - RNA, 20 nt, Artificial Sequence
  LRRK2 RNA guide
gcuuucagugauuccaacau

SEQ ID NO: 26433 - RNA, 20 nt, Artificial Sequence
  LRRK2 RNA guide
gucuaccaccacuguuauaa

SEQ ID NO: 26434 - RNA, 20 nt, Artificial Sequence
  LRRK2 RNA guide
gugauuccaacauuauaaca

SEQ ID NO: 26435 - RNA, 20 nt, Artificial Sequence
  LRRK2 RNA guide
gugucuaccaccacuguuau

SEQ ID NO: 26436 - RNA, 20 nt, Artificial Sequence
  LRRK2 RNA guide
guuauaauguuggaaucacu

SEQ ID NO: 26437 - RNA, 20 nt, Artificial Sequence
  LRRK2 RNA guide
uaauguuggaaucacugaaa

SEQ ID NO: 26438 - RNA, 20 nt, Artificial Sequence
  LRRK2 RNA guide
uaccaccacuguuauaaugu

SEQ ID NO: 26439 - RNA, 20 nt, Artificial Sequence
  LRRK2 RNA guide
uauaauguuggaaucacuga

SEQ ID NO: 26440 - RNA, 20 nt, Artificial Sequence
  LRRK2 RNA guide
ucagugauuccaacauuaua

SEQ ID NO: 26441 - RNA, 20 nt, Artificial Sequence
  LRRK2 RNA guide
uccaacauuauaacaguggu

SEQ ID NO: 26442 - RNA, 20 nt, Artificial Sequence
  LRRK2 RNA guide
ucuaccaccacuguuauaau

SEQ ID NO: 26443 - RNA, 20 nt, Artificial Sequence
  LRRK2 RNA guide
ugauuccaacauuauaacag

SEQ ID NO: 26444 - RNA, 20 nt, Artificial Sequence
  LRRK2 RNA guide
ugcagcuuucagugauucca

SEQ ID NO: 26445 - RNA, 20 nt, Artificial Sequence
  LRRK2 RNA guide
ugucuaccaccacuguuaua

SEQ ID NO: 26446 - RNA, 20 nt, Artificial Sequence
  LRRK2 RNA guide
uguuauaauguuggaaucac

SEQ ID NO: 26447 - RNA, 20 nt, Artificial Sequence
  LRRK2 RNA guide
uuauaacaguggugguagac

SEQ ID NO: 26448 - RNA, 20 nt, Artificial Sequence
  LRRK2 RNA guide
uuauaauguuggaaucacug

SEQ ID NO: 26449 - RNA, 20 nt, Artificial Sequence
  LRRK2 RNA guide
uucagugauuccaacauuau

SEQ ID NO: 26450 - RNA, 20 nt, Artificial Sequence
  LRRK2 RNA guide
uuccaacauuauaacagugg

SEQ ID NO: 26451 - RNA, 20 nt, Artificial Sequence
  LRRK2 RNA guide
uuucagugauuccaacauua

SEQ ID NO: 26452 - RNA, 21 nt, Artificial Sequence
  LRRK2 RNA guide
aacauuauaacagugguggua

SEQ ID NO: 26453 - RNA, 21 nt, Artificial Sequence
  LRRK2 RNA guide
acauuauaacaguggugguag

SEQ ID NO: 26454 - RNA, 21 nt, Artificial Sequence
  LRRK2 RNA guide
accaccacuguuauaauguug

SEQ ID NO: 26455 - RNA, 21 nt, Artificial Sequence
  LRRK2 RNA guide
accacuguuauaauguuggaa

SEQ ID NO: 26456 - RNA, 21 nt, Artificial Sequence
  LRRK2 RNA guide
agcagugucuaccaccacugu

SEQ ID NO: 26457 - RNA, 21 nt, Artificial Sequence
  LRRK2 RNA guide
agcuuucagugauuccaacau

SEQ ID NO: 26458 - RNA, 21 nt, Artificial Sequence
  LRRK2 RNA guide
agugucuaccaccacuguuau

SEQ ID NO: 26459 - RNA, 21 nt, Artificial Sequence
  LRRK2 RNA guide
augcagcuuucagugauucca

SEQ ID NO: 26460 - RNA, 21 nt, Artificial Sequence
  LRRK2 RNA guide
auuauaacaguggugguagac

SEQ ID NO: 26461 - RNA, 21 nt, Artificial Sequence
  LRRK2 RNA guide
auuccaacauuauaacagugg

SEQ ID NO: 26462 - RNA, 21 nt, Artificial Sequence
  LRRK2 RNA guide
caacauuauaacagugguggu

SEQ ID NO: 26463 - RNA, 21 nt, Artificial Sequence
  LRRK2 RNA guide
caccacuguuauaauguugga

SEQ ID NO: 26464 - RNA, 21 nt, Artificial Sequence
  LRRK2 RNA guide
cacuguuauaauguuggaauc

SEQ ID NO: 26465 - RNA, 21 nt, Artificial Sequence
  LRRK2 RNA guide
cagcuuucagugauuccaaca

SEQ ID NO: 26466 - RNA, 21 nt, Artificial Sequence
  LRRK2 RNA guide
cagugauuccaacauuauaac

SEQ ID NO: 26467 - RNA, 21 nt, Artificial Sequence
  LRRK2 RNA guide
cagugucuaccaccacuguua

SEQ ID NO: 26468 - RNA, 21 nt, Artificial Sequence
  LRRK2 RNA guide
cauuauaacaguggugguaga

SEQ ID NO: 26469 - RNA, 21 nt, Artificial Sequence
  LRRK2 RNA guide
ccaacauuauaacaguggugg

SEQ ID NO: 26470 - RNA, 21 nt, Artificial Sequence
  LRRK2 RNA guide
ccaccacuguuauaauguugg

SEQ ID NO: 26471 - RNA, 21 nt, Artificial Sequence
  LRRK2 RNA guide
ccacuguuauaauguuggaau

SEQ ID NO: 26472 - RNA, 21 nt, Artificial Sequence
  LRRK2 RNA guide
cuaccaccacuguuauaaugu

SEQ ID NO: 26473 - RNA, 21 nt, Artificial Sequence
  LRRK2 RNA guide
cuguuauaauguuggaaucac

SEQ ID NO: 26474 - RNA, 21 nt, Artificial Sequence
  LRRK2 RNA guide
cuuucagugauuccaacauua

SEQ ID NO: 26475 - RNA, 21 nt, Artificial Sequence
  LRRK2 RNA guide
gagcagugucuaccaccacug

SEQ ID NO: 26476 - RNA, 21 nt, Artificial Sequence
  LRRK2 RNA guide
gauuccaacauuauaacagug

SEQ ID NO: 26477 - RNA, 21 nt, Artificial Sequence
  LRRK2 RNA guide
gcagcuuucagugauuccaac

SEQ ID NO: 26478 - RNA, 21 nt, Artificial Sequence
  LRRK2 RNA guide
gcagugucuaccaccacuguu

SEQ ID NO: 26479 - RNA, 21 nt, Artificial Sequence
  LRRK2 RNA guide
gcuuucagugauuccaacauu

SEQ ID NO: 26480 - RNA, 21 nt, Artificial Sequence
  LRRK2 RNA guide
gucuaccaccacuguuauaau

SEQ ID NO: 26481 - RNA, 21 nt, Artificial Sequence
  LRRK2 RNA guide
gugauuccaacauuauaacag

SEQ ID NO: 26482 - RNA, 21 nt, Artificial Sequence
  LRRK2 RNA guide
gugucuaccaccacuguuaua

SEQ ID NO: 26483 - RNA, 21 nt, Artificial Sequence
  LRRK2 RNA guide
guuauaauguuggaaucacug

SEQ ID NO: 26484 - RNA, 21 nt, Artificial Sequence
  LRRK2 RNA guide
uaauguuggaaucacugaaag

SEQ ID NO: 26485 - RNA, 21 nt, Artificial Sequence
  LRRK2 RNA guide
uaccaccacuguuauaauguu

SEQ ID NO: 26486 - RNA, 21 nt, Artificial Sequence
  LRRK2 RNA guide
uccaacauuauaacaguggug

SEQ ID NO: 26487 - RNA, 21 nt, Artificial Sequence
  LRRK2 RNA guide
ucuaccaccacuguuauaaug

SEQ ID NO: 26488 - RNA, 21 nt, Artificial Sequence
  LRRK2 RNA guide
ugcagcuuucagugauuccaa

SEQ ID NO: 26489 - RNA, 21 nt, Artificial Sequence
  LRRK2 RNA guide
ugucuaccaccacuguuauaa

SEQ ID NO: 26490 - RNA, 21 nt, Artificial Sequence
  LRRK2 RNA guide
uuauaacaguggugguagaca

SEQ ID NO: 26491 - RNA, 21 nt, Artificial Sequence
  LRRK2 RNA guide
uuccaacauuauaacaguggu

SEQ ID NO: 26492 - RNA, 22 nt, Artificial Sequence
  LRRK2 RNA guide
aacauuauaacaguggugguag

SEQ ID NO: 26493 - RNA, 22 nt, Artificial Sequence
  LRRK2 RNA guide
acauuauaacaguggugguaga

SEQ ID NO: 26494 - RNA, 22 nt, Artificial Sequence
  LRRK2 RNA guide
accaccacuguuauaauguugg

SEQ ID NO: 26495 - RNA, 22 nt, Artificial Sequence
  LRRK2 RNA guide
accacuguuauaauguuggaau

SEQ ID NO: 26496 - RNA, 22 nt, Artificial Sequence
  LRRK2 RNA guide
acuguuauaauguuggaaucac

SEQ ID NO: 26497 - RNA, 22 nt, Artificial Sequence
  LRRK2 RNA guide
agagcagugucuaccaccacug

SEQ ID NO: 26498 - RNA, 22 nt, Artificial Sequence
  LRRK2 RNA guide
agcagugucuaccaccacuguu

SEQ ID NO: 26499 - RNA, 22 nt, Artificial Sequence
  LRRK2 RNA guide
agcuuucagugauuccaacauu

SEQ ID NO: 26500 - RNA, 22 nt, Artificial Sequence
  LRRK2 RNA guide
agugauuccaacauuauaacag

SEQ ID NO: 26501 - RNA, 22 nt, Artificial Sequence
  LRRK2 RNA guide
agugucuaccaccacuguuaua

SEQ ID NO: 26502 - RNA, 22 nt, Artificial Sequence
  LRRK2 RNA guide
auaauguuggaaucacugaaag

SEQ ID NO: 26503 - RNA, 22 nt, Artificial Sequence
  LRRK2 RNA guide
augcagcuuucagugauuccaa

SEQ ID NO: 26504 - RNA, 22 nt, Artificial Sequence
  LRRK2 RNA guide
auuauaacaguggugguagaca

SEQ ID NO: 26505 - RNA, 22 nt, Artificial Sequence
  LRRK2 RNA guide
auuccaacauuauaacaguggu

SEQ ID NO: 26506 - RNA, 22 nt, Artificial Sequence
  LRRK2 RNA guide
caacauuauaacagugguggua

SEQ ID NO: 26507 - RNA, 22 nt, Artificial Sequence
  LRRK2 RNA guide
caccacuguuauaauguuggaa

SEQ ID NO: 26508 - RNA, 22 nt, Artificial Sequence
  LRRK2 RNA guide
cacuguuauaauguuggaauca

SEQ ID NO: 26509 - RNA, 22 nt, Artificial Sequence
  LRRK2 RNA guide
cagcuuucagugauuccaacau

SEQ ID NO: 26510 - RNA, 22 nt, Artificial Sequence
  LRRK2 RNA guide
cagugauuccaacauuauaaca

SEQ ID NO: 26511 - RNA, 22 nt, Artificial Sequence
  LRRK2 RNA guide
cagugucuaccaccacuguuau

SEQ ID NO: 26512 - RNA, 22 nt, Artificial Sequence
  LRRK2 RNA guide
cauuauaacaguggugguagac

SEQ ID NO: 26513 - RNA, 22 nt, Artificial Sequence
  LRRK2 RNA guide
ccaacauuauaacagugguggu

SEQ ID NO: 26514 - RNA, 22 nt, Artificial Sequence
  LRRK2 RNA guide
ccaccacuguuauaauguugga

SEQ ID NO: 26515 - RNA, 22 nt, Artificial Sequence
  LRRK2 RNA guide
ccacuguuauaauguuggaauc

SEQ ID NO: 26516 - RNA, 22 nt, Artificial Sequence
  LRRK2 RNA guide
cuaccaccacuguuauaauguu

SEQ ID NO: 26517 - RNA, 22 nt, Artificial Sequence
  LRRK2 RNA guide
cuguuauaauguuggaaucacu

SEQ ID NO: 26518 - RNA, 22 nt, Artificial Sequence
  LRRK2 RNA guide
cuuucagugauuccaacauuau

SEQ ID NO: 26519 - RNA, 22 nt, Artificial Sequence
  LRRK2 RNA guide
gagcagugucuaccaccacugu

SEQ ID NO: 26520 - RNA, 22 nt, Artificial Sequence
  LRRK2 RNA guide
gauuccaacauuauaacagugg

SEQ ID NO: 26521 - RNA, 22 nt, Artificial Sequence
  LRRK2 RNA guide
gcagcuuucagugauuccaaca

SEQ ID NO: 26522 - RNA, 22 nt, Artificial Sequence
  LRRK2 RNA guide
gcagugucuaccaccacuguua

SEQ ID NO: 26523 - RNA, 22 nt, Artificial Sequence
  LRRK2 RNA guide
gcuuucagugauuccaacauua

SEQ ID NO: 26524 - RNA, 22 nt, Artificial Sequence
  LRRK2 RNA guide
gucuaccaccacuguuauaaug

SEQ ID NO: 26525 - RNA, 22 nt, Artificial Sequence
  LRRK2 RNA guide
gugauuccaacauuauaacagu

SEQ ID NO: 26526 - RNA, 22 nt, Artificial Sequence
  LRRK2 RNA guide
gugucuaccaccacuguuauaa

SEQ ID NO: 26527 - RNA, 22 nt, Artificial Sequence
  LRRK2 RNA guide
guuauaauguuggaaucacuga

SEQ ID NO: 26528 - RNA, 22 nt, Artificial Sequence
  LRRK2 RNA guide
uaauguuggaaucacugaaagc

SEQ ID NO: 26529 - RNA, 22 nt, Artificial Sequence
  LRRK2 RNA guide
uaccaccacuguuauaauguug

SEQ ID NO: 26530 - RNA, 22 nt, Artificial Sequence
  LRRK2 RNA guide
uaugcagcuuucagugauucca

SEQ ID NO: 26531 - RNA, 22 nt, Artificial Sequence
  LRRK2 RNA guide
ucagugauuccaacauuauaac

SEQ ID NO: 26532 - RNA, 22 nt, Artificial Sequence
  LRRK2 RNA guide
uccaacauuauaacaguggugg

SEQ ID NO: 26533 - RNA, 22 nt, Artificial Sequence
  LRRK2 RNA guide
ucuaccaccacuguuauaaugu

SEQ ID NO: 26534 - RNA, 22 nt, Artificial Sequence
  LRRK2 RNA guide
ugauuccaacauuauaacagug

SEQ ID NO: 26535 - RNA, 22 nt, Artificial Sequence
  LRRK2 RNA guide
ugcagcuuucagugauuccaac

SEQ ID NO: 26536 - RNA, 22 nt, Artificial Sequence
  LRRK2 RNA guide
ugucuaccaccacuguuauaau

SEQ ID NO: 26537 - RNA, 22 nt, Artificial Sequence
  LRRK2 RNA guide
uguuauaauguuggaaucacug

SEQ ID NO: 26538 - RNA, 22 nt, Artificial Sequence
  LRRK2 RNA guide
uuauaacaguggugguagacac

SEQ ID NO: 26539 - RNA, 22 nt, Artificial Sequence
  LRRK2 RNA guide
uuccaacauuauaacaguggug

SEQ ID NO: 26540 - RNA, 20 nt, Artificial Sequence
  LRRK2 RNA guide
aacaucauaauagugguggu

SEQ ID NO: 26541 - RNA, 20 nt, Artificial Sequence
  LRRK2 RNA guide
aauaguggugguagacacug

SEQ ID NO: 26542 - RNA, 20 nt, Artificial Sequence
  LRRK2 RNA guide
acaucauaauagugguggua

SEQ ID NO: 26543 - RNA, 20 nt, Artificial Sequence
  LRRK2 RNA guide
accaccacuauuaugauguu

SEQ ID NO: 26544 - RNA, 20 nt, Artificial Sequence
  LRRK2 RNA guide
accacuauuaugauguugga

SEQ ID NO: 26545 - RNA, 20 nt, Artificial Sequence
  LRRK2 RNA guide
acuauuaugauguuggaauc

SEQ ID NO: 26546 - RNA, 20 nt, Artificial Sequence
  LRRK2 RNA guide
agagagcagugucuaccacc

SEQ ID NO: 26547 - RNA, 20 nt, Artificial Sequence
  LRRK2 RNA guide
agagcagugucuaccaccac

SEQ ID NO: 26548 - RNA, 20 nt, Artificial Sequence
  LRRK2 RNA guide
agcagugucuaccaccacua

SEQ ID NO: 26549 - RNA, 20 nt, Artificial Sequence
  LRRK2 RNA guide
agugauuccaacaucauaau

SEQ ID NO: 26550 - RNA, 20 nt, Artificial Sequence
  LRRK2 RNA guide
agugucuaccaccacuauua

SEQ ID NO: 26551 - RNA, 20 nt, Artificial Sequence
  LRRK2 RNA guide
auaauaguggugguagacac

SEQ ID NO: 26552 - RNA, 20 nt, Artificial Sequence
  LRRK2 RNA guide
auaguggugguagacacugc

SEQ ID NO: 26553 - RNA, 20 nt, Artificial Sequence
  LRRK2 RNA guide
aucauaauaguggugguaga

SEQ ID NO: 26554 - RNA, 20 nt, Artificial Sequence
  LRRK2 RNA guide
auuccaacaucauaauagug

SEQ ID NO: 26555 - RNA, 20 nt, Artificial Sequence
  LRRK2 RNA guide
caacaucauaauaguggugg

SEQ ID NO: 26556 - RNA, 20 nt, Artificial Sequence
  LRRK2 RNA guide
caccacuauuaugauguugg

SEQ ID NO: 26557 - RNA, 20 nt, Artificial Sequence
  LRRK2 RNA guide
cacuauuaugauguuggaau

SEQ ID NO: 26558 - RNA, 20 nt, Artificial Sequence
  LRRK2 RNA guide
cagugucuaccaccacuauu

SEQ ID NO: 26559 - RNA, 20 nt, Artificial Sequence
  LRRK2 RNA guide
cauaauaguggugguagaca

SEQ ID NO: 26560 - RNA, 20 nt, Artificial Sequence
  LRRK2 RNA guide
caucauaauaguggugguag

SEQ ID NO: 26561 - RNA, 20 nt, Artificial Sequence
  LRRK2 RNA guide
ccaacaucauaauaguggug

SEQ ID NO: 26562 - RNA, 20 nt, Artificial Sequence
  LRRK2 RNA guide
ccaccacuauuaugauguug

SEQ ID NO: 26563 - RNA, 20 nt, Artificial Sequence
  LRRK2 RNA guide
ccacuauuaugauguuggaa

SEQ ID NO: 26564 - RNA, 20 nt, Artificial Sequence
  LRRK2 RNA guide
cuaccaccacuauuaugaug

SEQ ID NO: 26565 - RNA, 20 nt, Artificial Sequence
  LRRK2 RNA guide
cuauuaugauguuggaauca

SEQ ID NO: 26566 - RNA, 20 nt, Artificial Sequence
  LRRK2 RNA guide
cuuucagugauuccaacauc

SEQ ID NO: 26567 - RNA, 20 nt, Artificial Sequence
  LRRK2 RNA guide
gagagcagugucuaccacca

SEQ ID NO: 26568 - RNA, 20 nt, Artificial Sequence
  LRRK2 RNA guide
gagcagugucuaccaccacu

SEQ ID NO: 26569 - RNA, 20 nt, Artificial Sequence
  LRRK2 RNA guide
gauuccaacaucauaauagu

SEQ ID NO: 26570 - RNA, 20 nt, Artificial Sequence
  LRRK2 RNA guide
gcagugucuaccaccacuau

SEQ ID NO: 26571 - RNA, 20 nt, Artificial Sequence
  LRRK2 RNA guide
gucuaccaccacuauuauga

SEQ ID NO: 26572 - RNA, 20 nt, Artificial Sequence
  LRRK2 RNA guide
gugauuccaacaucauaaua

SEQ ID NO: 26573 - RNA, 20 nt, Artificial Sequence
  LRRK2 RNA guide
gugucuaccaccacuauuau

SEQ ID NO: 26574 - RNA, 20 nt, Artificial Sequence
  LRRK2 RNA guide
uaauaguggugguagacacu

SEQ ID NO: 26575 - RNA, 20 nt, Artificial Sequence
  LRRK2 RNA guide
uaccaccacuauuaugaugu

SEQ ID NO: 26576 - RNA, 20 nt, Artificial Sequence
  LRRK2 RNA guide
uagagagcagugucuaccac

SEQ ID NO: 26577 - RNA, 20 nt, Artificial Sequence
  LRRK2 RNA guide
uauuaugauguuggaaucac

SEQ ID NO: 26578 - RNA, 20 nt, Artificial Sequence
  LRRK2 RNA guide
ucagugauuccaacaucaua

SEQ ID NO: 26579 - RNA, 20 nt, Artificial Sequence
  LRRK2 RNA guide
ucauaauaguggugguagac

SEQ ID NO: 26580 - RNA, 20 nt, Artificial Sequence
  LRRK2 RNA guide
uccaacaucauaauaguggu

SEQ ID NO: 26581 - RNA, 20 nt, Artificial Sequence
  LRRK2 RNA guide
ucuaccaccacuauuaugau

SEQ ID NO: 26582 - RNA, 20 nt, Artificial Sequence
  LRRK2 RNA guide
ugauuccaacaucauaauag

SEQ ID NO: 26583 - RNA, 20 nt, Artificial Sequence
  LRRK2 RNA guide
ugucuaccaccacuauuaug

SEQ ID NO: 26584 - RNA, 20 nt, Artificial Sequence
  LRRK2 RNA guide
uucagugauuccaacaucau

SEQ ID NO: 26585 - RNA, 20 nt, Artificial Sequence
  LRRK2 RNA guide
uuccaacaucauaauagugg

SEQ ID NO: 26586 - RNA, 20 nt, Artificial Sequence
  LRRK2 RNA guide
uuucagugauuccaacauca

SEQ ID NO: 26587 - RNA, 21 nt, Artificial Sequence
  LRRK2 RNA guide
aacaucauaauagugguggua

SEQ ID NO: 26588 - RNA, 21 nt, Artificial Sequence
  LRRK2 RNA guide
aauaguggugguagacacugc

SEQ ID NO: 26589 - RNA, 21 nt, Artificial Sequence
  LRRK2 RNA guide
acaucauaauaguggugguag

SEQ ID NO: 26590 - RNA, 21 nt, Artificial Sequence
  LRRK2 RNA guide
accaccacuauuaugauguug

SEQ ID NO: 26591 - RNA, 21 nt, Artificial Sequence
  LRRK2 RNA guide
accacuauuaugauguuggaa

SEQ ID NO: 26592 - RNA, 21 nt, Artificial Sequence
  LRRK2 RNA guide
agagagcagugucuaccacca

SEQ ID NO: 26593 - RNA, 21 nt, Artificial Sequence
  LRRK2 RNA guide
agagcagugucuaccaccacu

SEQ ID NO: 26594 - RNA, 21 nt, Artificial Sequence
  LRRK2 RNA guide
agcagugucuaccaccacuau

SEQ ID NO: 26595 - RNA, 21 nt, Artificial Sequence
  LRRK2 RNA guide
agugucuaccaccacuauuau

SEQ ID NO: 26596 - RNA, 21 nt, Artificial Sequence
  LRRK2 RNA guide
auaauaguggugguagacacu

SEQ ID NO: 26597 - RNA, 21 nt, Artificial Sequence
  LRRK2 RNA guide
auagagagcagugucuaccac

SEQ ID NO: 26598 - RNA, 21 nt, Artificial Sequence
  LRRK2 RNA guide
auaguggugguagacacugcu

SEQ ID NO: 26599 - RNA, 21 nt, Artificial Sequence
  LRRK2 RNA guide
aucauaauaguggugguagac

SEQ ID NO: 26600 - RNA, 21 nt, Artificial Sequence
  LRRK2 RNA guide
auuccaacaucauaauagugg

SEQ ID NO: 26601 - RNA, 21 nt, Artificial Sequence
  LRRK2 RNA guide
caacaucauaauagugguggu

SEQ ID NO: 26602 - RNA, 21 nt, Artificial Sequence
  LRRK2 RNA guide
caccacuauuaugauguugga

SEQ ID NO: 26603 - RNA, 21 nt, Artificial Sequence
  LRRK2 RNA guide
cacuauuaugauguuggaauc

SEQ ID NO: 26604 - RNA, 21 nt, Artificial Sequence
  LRRK2 RNA guide
cagugauuccaacaucauaau

SEQ ID NO: 26605 - RNA, 21 nt, Artificial Sequence
  LRRK2 RNA guide
cagugucuaccaccacuauua

SEQ ID NO: 26606 - RNA, 21 nt, Artificial Sequence
  LRRK2 RNA guide
cauaauaguggugguagacac

SEQ ID NO: 26607 - RNA, 21 nt, Artificial Sequence
  LRRK2 RNA guide
caucauaauaguggugguaga

SEQ ID NO: 26608 - RNA, 21 nt, Artificial Sequence
  LRRK2 RNA guide
ccaacaucauaauaguggugg

SEQ ID NO: 26609 - RNA, 21 nt, Artificial Sequence
  LRRK2 RNA guide
ccaccacuauuaugauguugg

SEQ ID NO: 26610 - RNA, 21 nt, Artificial Sequence
  LRRK2 RNA guide
ccacuauuaugauguuggaau

SEQ ID NO: 26611 - RNA, 21 nt, Artificial Sequence
  LRRK2 RNA guide
cuaccaccacuauuaugaugu

SEQ ID NO: 26612 - RNA, 21 nt, Artificial Sequence
  LRRK2 RNA guide
cuauuaugauguuggaaucac

SEQ ID NO: 26613 - RNA, 21 nt, Artificial Sequence
  LRRK2 RNA guide
cuuucagugauuccaacauca

SEQ ID NO: 26614 - RNA, 21 nt, Artificial Sequence
  LRRK2 RNA guide
gagagcagugucuaccaccac

SEQ ID NO: 26615 - RNA, 21 nt, Artificial Sequence
  LRRK2 RNA guide
gagcagugucuaccaccacua

SEQ ID NO: 26616 - RNA, 21 nt, Artificial Sequence
  LRRK2 RNA guide
gauuccaacaucauaauagug

SEQ ID NO: 26617 - RNA, 21 nt, Artificial Sequence
  LRRK2 RNA guide
gcagugucuaccaccacuauu

SEQ ID NO: 26618 - RNA, 21 nt, Artificial Sequence
  LRRK2 RNA guide
gcuuucagugauuccaacauc

SEQ ID NO: 26619 - RNA, 21 nt, Artificial Sequence
  LRRK2 RNA guide
gucuaccaccacuauuaugau

SEQ ID NO: 26620 - RNA, 21 nt, Artificial Sequence
  LRRK2 RNA guide
gugauuccaacaucauaauag

SEQ ID NO: 26621 - RNA, 21 nt, Artificial Sequence
  LRRK2 RNA guide
gugucuaccaccacuauuaug

SEQ ID NO: 26622 - RNA, 21 nt, Artificial Sequence
  LRRK2 RNA guide
uaauaguggugguagacacug

SEQ ID NO: 26623 - RNA, 21 nt, Artificial Sequence
  LRRK2 RNA guide
uaccaccacuauuaugauguu

SEQ ID NO: 26624 - RNA, 21 nt, Artificial Sequence
  LRRK2 RNA guide
uagagagcagugucuaccacc

SEQ ID NO: 26625 - RNA, 21 nt, Artificial Sequence
  LRRK2 RNA guide
ucagugauuccaacaucauaa

SEQ ID NO: 26626 - RNA, 21 nt, Artificial Sequence
  LRRK2 RNA guide
ucauaauaguggugguagaca

SEQ ID NO: 26627 - RNA, 21 nt, Artificial Sequence
  LRRK2 RNA guide
uccaacaucauaauaguggug

SEQ ID NO: 26628 - RNA, 21 nt, Artificial Sequence
  LRRK2 RNA guide
ucuaccaccacuauuaugaug

SEQ ID NO: 26629 - RNA, 21 nt, Artificial Sequence
  LRRK2 RNA guide
ugucuaccaccacuauuauga

SEQ ID NO: 26630 - RNA, 21 nt, Artificial Sequence
  LRRK2 RNA guide
uucagugauuccaacaucaua

SEQ ID NO: 26631 - RNA, 21 nt, Artificial Sequence
  LRRK2 RNA guide
uuccaacaucauaauaguggu

SEQ ID NO: 26632 - RNA, 21 nt, Artificial Sequence
  LRRK2 RNA guide
uuucagugauuccaacaucau

SEQ ID NO: 26633 - RNA, 22 nt, Artificial Sequence
  LRRK2 RNA guide
aacaucauaauaguggugguag

SEQ ID NO: 26634 - RNA, 22 nt, Artificial Sequence
  LRRK2 RNA guide
aauaguggugguagacacugcu

SEQ ID NO: 26635 - RNA, 22 nt, Artificial Sequence
  LRRK2 RNA guide
acaucauaauaguggugguaga

SEQ ID NO: 26636 - RNA, 22 nt, Artificial Sequence
  LRRK2 RNA guide
accaccacuauuaugauguugg

SEQ ID NO: 26637 - RNA, 22 nt, Artificial Sequence
  LRRK2 RNA guide
accacuauuaugauguuggaau

SEQ ID NO: 26638 - RNA, 22 nt, Artificial Sequence
  LRRK2 RNA guide
acuauuaugauguuggaaucac

SEQ ID NO: 26639 - RNA, 22 nt, Artificial Sequence
  LRRK2 RNA guide
agagagcagugucuaccaccac

SEQ ID NO: 26640 - RNA, 22 nt, Artificial Sequence
  LRRK2 RNA guide
agagcagugucuaccaccacua

SEQ ID NO: 26641 - RNA, 22 nt, Artificial Sequence
  LRRK2 RNA guide
agcagugucuaccaccacuauu

SEQ ID NO: 26642 - RNA, 22 nt, Artificial Sequence
  LRRK2 RNA guide
agcuuucagugauuccaacauc

SEQ ID NO: 26643 - RNA, 22 nt, Artificial Sequence
  LRRK2 RNA guide
agugauuccaacaucauaauag

SEQ ID NO: 26644 - RNA, 22 nt, Artificial Sequence
  LRRK2 RNA guide
agugucuaccaccacuauuaug

SEQ ID NO: 26645 - RNA, 22 nt, Artificial Sequence
  LRRK2 RNA guide
auaauaguggugguagacacug

SEQ ID NO: 26646 - RNA, 22 nt, Artificial Sequence
  LRRK2 RNA guide
auagagagcagugucuaccacc

SEQ ID NO: 26647 - RNA, 22 nt, Artificial Sequence
  LRRK2 RNA guide
auaguggugguagacacugcuc

SEQ ID NO: 26648 - RNA, 22 nt, Artificial Sequence
  LRRK2 RNA guide
aucauaauaguggugguagaca

SEQ ID NO: 26649 - RNA, 22 nt, Artificial Sequence
  LRRK2 RNA guide
auuccaacaucauaauaguggu

SEQ ID NO: 26650 - RNA, 22 nt, Artificial Sequence
  LRRK2 RNA guide
caacaucauaauagugguggua

SEQ ID NO: 26651 - RNA, 22 nt, Artificial Sequence
  LRRK2 RNA guide
caccacuauuaugauguuggaa

SEQ ID NO: 26652 - RNA, 22 nt, Artificial Sequence
  LRRK2 RNA guide
cacuauuaugauguuggaauca

SEQ ID NO: 26653 - RNA, 22 nt, Artificial Sequence
  LRRK2 RNA guide
cagugauuccaacaucauaaua

SEQ ID NO: 26654 - RNA, 22 nt, Artificial Sequence
  LRRK2 RNA guide
cagugucuaccaccacuauuau

SEQ ID NO: 26655 - RNA, 22 nt, Artificial Sequence
  LRRK2 RNA guide
cauaauaguggugguagacacu

SEQ ID NO: 26656 - RNA, 22 nt, Artificial Sequence
  LRRK2 RNA guide
caucauaauaguggugguagac

SEQ ID NO: 26657 - RNA, 22 nt, Artificial Sequence
  LRRK2 RNA guide
ccaacaucauaauagugguggu

SEQ ID NO: 26658 - RNA, 22 nt, Artificial Sequence
  LRRK2 RNA guide
ccaccacuauuaugauguugga

SEQ ID NO: 26659 - RNA, 22 nt, Artificial Sequence
  LRRK2 RNA guide
ccacuauuaugauguuggaauc

SEQ ID NO: 26660 - RNA, 22 nt, Artificial Sequence
  LRRK2 RNA guide
cuaccaccacuauuaugauguu

SEQ ID NO: 26661 - RNA, 22 nt, Artificial Sequence
  LRRK2 RNA guide
cuauuaugauguuggaaucacu

SEQ ID NO: 26662 - RNA, 22 nt, Artificial Sequence
  LRRK2 RNA guide
cuuucagugauuccaacaucau

SEQ ID NO: 26663 - RNA, 22 nt, Artificial Sequence
  LRRK2 RNA guide
gagagcagugucuaccaccacu

SEQ ID NO: 26664 - RNA, 22 nt, Artificial Sequence
  LRRK2 RNA guide
gagcagugucuaccaccacuau

SEQ ID NO: 26665 - RNA, 22 nt, Artificial Sequence
  LRRK2 RNA guide
gauuccaacaucauaauagugg

SEQ ID NO: 26666 - RNA, 22 nt, Artificial Sequence
  LRRK2 RNA guide
gcagugucuaccaccacuauua

SEQ ID NO: 26667 - RNA, 22 nt, Artificial Sequence
  LRRK2 RNA guide
gcuuucagugauuccaacauca

SEQ ID NO: 26668 - RNA, 22 nt, Artificial Sequence
  LRRK2 RNA guide
gucuaccaccacuauuaugaug

SEQ ID NO: 26669 - RNA, 22 nt, Artificial Sequence
  LRRK2 RNA guide
gugauuccaacaucauaauagu

SEQ ID NO: 26670 - RNA, 22 nt, Artificial Sequence
  LRRK2 RNA guide
gugucuaccaccacuauuauga

SEQ ID NO: 26671 - RNA, 22 nt, Artificial Sequence
  LRRK2 RNA guide
uaauaguggugguagacacugc

SEQ ID NO: 26672 - RNA, 22 nt, Artificial Sequence
  LRRK2 RNA guide
uaccaccacuauuaugauguug

SEQ ID NO: 26673 - RNA, 22 nt, Artificial Sequence
  LRRK2 RNA guide
uagagagcagugucuaccacca

SEQ ID NO: 26674 - RNA, 22 nt, Artificial Sequence
  LRRK2 RNA guide
uauagagagcagugucuaccac

SEQ ID NO: 26675 - RNA, 22 nt, Artificial Sequence
  LRRK2 RNA guide
uauuaugauguuggaaucacug

SEQ ID NO: 26676 - RNA, 22 nt, Artificial Sequence
  LRRK2 RNA guide
ucagugauuccaacaucauaau

SEQ ID NO: 26677 - RNA, 22 nt, Artificial Sequence
  LRRK2 RNA guide
ucauaauaguggugguagacac

SEQ ID NO: 26678 - RNA, 22 nt, Artificial Sequence
  LRRK2 RNA guide
uccaacaucauaauaguggugg

SEQ ID NO: 26679 - RNA, 22 nt, Artificial Sequence
  LRRK2 RNA guide
ucuaccaccacuauuaugaugu

SEQ ID NO: 26680 - RNA, 22 nt, Artificial Sequence
  LRRK2 RNA guide
ugauuccaacaucauaauagug

SEQ ID NO: 26681 - RNA, 22 nt, Artificial Sequence
  LRRK2 RNA guide
ugucuaccaccacuauuaugau

SEQ ID NO: 26682 - RNA, 22 nt, Artificial Sequence
  LRRK2 RNA guide
uucagugauuccaacaucauaa

SEQ ID NO: 26683 - RNA, 22 nt, Artificial Sequence
  LRRK2 RNA guide
uuccaacaucauaauaguggug

SEQ ID NO: 26684 - RNA, 22 nt, Artificial Sequence
  LRRK2 RNA guide
uuucagugauuccaacaucaua

SEQ ID NO: 26685 - RNA, 20 nt, Artificial Sequence
  LRRK2 RNA guide
aaaaagugcaugcagucuau

SEQ ID NO: 26686 - RNA, 20 nt, Artificial Sequence
  LRRK2 RNA guide
aaaagugcaugcagucuauu

SEQ ID NO: 26687 - RNA, 20 nt, Artificial Sequence
  LRRK2 RNA guide
aaacucuguggacuaauaga

SEQ ID NO: 26688 - RNA, 20 nt, Artificial Sequence
  LRRK2 RNA guide
aaagugcaugcagucuauua

SEQ ID NO: 26689 - RNA, 20 nt, Artificial Sequence
  LRRK2 RNA guide
aacucuguggacuaauagac

SEQ ID NO: 26690 - RNA, 20 nt, Artificial Sequence
  LRRK2 RNA guide
aagugcaugcagucuauuag

SEQ ID NO: 26691 - RNA, 20 nt, Artificial Sequence
  LRRK2 RNA guide
aauagacugcaugcacuuuu

SEQ ID NO: 26692 - RNA, 20 nt, Artificial Sequence
  LRRK2 RNA guide
accuuaaaaagugcaugcag

SEQ ID NO: 26693 - RNA, 20 nt, Artificial Sequence
  LRRK2 RNA guide
acuaauagacugcaugcacu

SEQ ID NO: 26694 - RNA, 20 nt, Artificial Sequence
  LRRK2 RNA guide
acucuguggacuaauagacu

SEQ ID NO: 26695 - RNA, 20 nt, Artificial Sequence
  LRRK2 RNA guide
acugcaugcacuuuuuaagg

SEQ ID NO: 26696 - RNA, 20 nt, Artificial Sequence
  LRRK2 RNA guide
agacugcaugcacuuuuuaa

SEQ ID NO: 26697 - RNA, 20 nt, Artificial Sequence
  LRRK2 RNA guide
agugcaugcagucuauuagu

SEQ ID NO: 26698 - RNA, 20 nt, Artificial Sequence
  LRRK2 RNA guide
auagacugcaugcacuuuuu

SEQ ID NO: 26699 - RNA, 20 nt, Artificial Sequence
  LRRK2 RNA guide
augcagucuauuaguccaca

SEQ ID NO: 26700 - RNA, 20 nt, Artificial Sequence
  LRRK2 RNA guide
caugcacuuuuuaagguaaa

SEQ ID NO: 26701 - RNA, 20 nt, Artificial Sequence
  LRRK2 RNA guide
caugcagucuauuaguccac

SEQ ID NO: 26702 - RNA, 20 nt, Artificial Sequence
  LRRK2 RNA guide
ccuuaaaaagugcaugcagu

SEQ ID NO: 26703 - RNA, 20 nt, Artificial Sequence
  LRRK2 RNA guide
cuaauagacugcaugcacuu

SEQ ID NO: 26704 - RNA, 20 nt, Artificial Sequence
  LRRK2 RNA guide
cucuguggacuaauagacug

SEQ ID NO: 26705 - RNA, 20 nt, Artificial Sequence
  LRRK2 RNA guide
cugcaugcacuuuuuaaggu

SEQ ID NO: 26706 - RNA, 20 nt, Artificial Sequence
  LRRK2 RNA guide
cuguggacuaauagacugca

SEQ ID NO: 26707 - RNA, 20 nt, Artificial Sequence
  LRRK2 RNA guide
cuuaaaaagugcaugcaguc

SEQ ID NO: 26708 - RNA, 20 nt, Artificial Sequence
  LRRK2 RNA guide
gaauuuaccuuaaaaagugc

SEQ ID NO: 26709 - RNA, 20 nt, Artificial Sequence
  LRRK2 RNA guide
gacuaauagacugcaugcac

SEQ ID NO: 26710 - RNA, 20 nt, Artificial Sequence
  LRRK2 RNA guide
gacugcaugcacuuuuuaag

SEQ ID NO: 26711 - RNA, 20 nt, Artificial Sequence
  LRRK2 RNA guide
gcaugcacuuuuuaagguaa

SEQ ID NO: 26712 - RNA, 20 nt, Artificial Sequence
  LRRK2 RNA guide
gcaugcagucuauuagucca

SEQ ID NO: 26713 - RNA, 20 nt, Artificial Sequence
  LRRK2 RNA guide
ggacuaauagacugcaugca

SEQ ID NO: 26714 - RNA, 20 nt, Artificial Sequence
  LRRK2 RNA guide
gugcaugcagucuauuaguc

SEQ ID NO: 26715 - RNA, 20 nt, Artificial Sequence
  LRRK2 RNA guide
guggacuaauagacugcaug

SEQ ID NO: 26716 - RNA, 20 nt, Artificial Sequence
  LRRK2 RNA guide
uaaaaagugcaugcagucua

SEQ ID NO: 26717 - RNA, 20 nt, Artificial Sequence
  LRRK2 RNA guide
uaauagacugcaugcacuuu

SEQ ID NO: 26718 - RNA, 20 nt, Artificial Sequence
  LRRK2 RNA guide
uaccuuaaaaagugcaugca

SEQ ID NO: 26719 - RNA, 20 nt, Artificial Sequence
  LRRK2 RNA guide
uagacugcaugcacuuuuua

SEQ ID NO: 26720 - RNA, 20 nt, Artificial Sequence
  LRRK2 RNA guide
ucuguggacuaauagacugc

SEQ ID NO: 26721 - RNA, 20 nt, Artificial Sequence
  LRRK2 RNA guide
ugcaugcacuuuuuaaggua

SEQ ID NO: 26722 - RNA, 20 nt, Artificial Sequence
  LRRK2 RNA guide
ugcaugcagucuauuagucc

SEQ ID NO: 26723 - RNA, 20 nt, Artificial Sequence
  LRRK2 RNA guide
uggacuaauagacugcaugc

SEQ ID NO: 26724 - RNA, 20 nt, Artificial Sequence
  LRRK2 RNA guide
uguggacuaauagacugcau

SEQ ID NO: 26725 - RNA, 20 nt, Artificial Sequence
  LRRK2 RNA guide
uuaaaaagugcaugcagucu

SEQ ID NO: 26726 - RNA, 20 nt, Artificial Sequence
  LRRK2 RNA guide
uuaccuuaaaaagugcaugc

SEQ ID NO: 26727 - RNA, 20 nt, Artificial Sequence
  LRRK2 RNA guide
uuuaccuuaaaaagugcaug

SEQ ID NO: 26728 - RNA, 21 nt, Artificial Sequence
  LRRK2 RNA guide
aaaaagugcaugcagucuauu

SEQ ID NO: 26729 - RNA, 21 nt, Artificial Sequence
  LRRK2 RNA guide
aaaacucuguggacuaauaga

SEQ ID NO: 26730 - RNA, 21 nt, Artificial Sequence
  LRRK2 RNA guide
aaaagugcaugcagucuauua

SEQ ID NO: 26731 - RNA, 21 nt, Artificial Sequence
  LRRK2 RNA guide
aaacucuguggacuaauagac

SEQ ID NO: 26732 - RNA, 21 nt, Artificial Sequence
  LRRK2 RNA guide
aaagugcaugcagucuauuag

SEQ ID NO: 26733 - RNA, 21 nt, Artificial Sequence
  LRRK2 RNA guide
aacucuguggacuaauagacu

SEQ ID NO: 26734 - RNA, 21 nt, Artificial Sequence
  LRRK2 RNA guide
aagugcaugcagucuauuagu

SEQ ID NO: 26735 - RNA, 21 nt, Artificial Sequence
  LRRK2 RNA guide
aauagacugcaugcacuuuuu

SEQ ID NO: 26736 - RNA, 21 nt, Artificial Sequence
  LRRK2 RNA guide
accuuaaaaagugcaugcagu

SEQ ID NO: 26737 - RNA, 21 nt, Artificial Sequence
  LRRK2 RNA guide
acuaauagacugcaugcacuu

SEQ ID NO: 26738 - RNA, 21 nt, Artificial Sequence
  LRRK2 RNA guide
acucuguggacuaauagacug

SEQ ID NO: 26739 - RNA, 21 nt, Artificial Sequence
  LRRK2 RNA guide
acugcaugcacuuuuuaaggu

SEQ ID NO: 26740 - RNA, 21 nt, Artificial Sequence
  LRRK2 RNA guide
agacugcaugcacuuuuuaag

SEQ ID NO: 26741 - RNA, 21 nt, Artificial Sequence
  LRRK2 RNA guide
agugcaugcagucuauuaguc

SEQ ID NO: 26742 - RNA, 21 nt, Artificial Sequence
  LRRK2 RNA guide
auagacugcaugcacuuuuua

SEQ ID NO: 26743 - RNA, 21 nt, Artificial Sequence
  LRRK2 RNA guide
augcagucuauuaguccacag

SEQ ID NO: 26744 - RNA, 21 nt, Artificial Sequence
  LRRK2 RNA guide
caugcagucuauuaguccaca

SEQ ID NO: 26745 - RNA, 21 nt, Artificial Sequence
  LRRK2 RNA guide
ccuuaaaaagugcaugcaguc

SEQ ID NO: 26746 - RNA, 21 nt, Artificial Sequence
  LRRK2 RNA guide
cuaauagacugcaugcacuuu

SEQ ID NO: 26747 - RNA, 21 nt, Artificial Sequence
  LRRK2 RNA guide
cucuguggacuaauagacugc

SEQ ID NO: 26748 - RNA, 21 nt, Artificial Sequence
  LRRK2 RNA guide
cugcaugcacuuuuuaaggua

SEQ ID NO: 26749 - RNA, 21 nt, Artificial Sequence
  LRRK2 RNA guide
cuguggacuaauagacugcau

SEQ ID NO: 26750 - RNA, 21 nt, Artificial Sequence
  LRRK2 RNA guide
cuuaaaaagugcaugcagucu

SEQ ID NO: 26751 - RNA, 21 nt, Artificial Sequence
  LRRK2 RNA guide
gacuaauagacugcaugcacu

SEQ ID NO: 26752 - RNA, 21 nt, Artificial Sequence
  LRRK2 RNA guide
gacugcaugcacuuuuuaagg

SEQ ID NO: 26753 - RNA, 21 nt, Artificial Sequence
  LRRK2 RNA guide
gcaugcacuuuuuaagguaaa

SEQ ID NO: 26754 - RNA, 21 nt, Artificial Sequence
  LRRK2 RNA guide
gcaugcagucuauuaguccac

SEQ ID NO: 26755 - RNA, 21 nt, Artificial Sequence
  LRRK2 RNA guide
ggacuaauagacugcaugcac

SEQ ID NO: 26756 - RNA, 21 nt, Artificial Sequence
  LRRK2 RNA guide
gugcaugcagucuauuagucc

SEQ ID NO: 26757 - RNA, 21 nt, Artificial Sequence
  LRRK2 RNA guide
guggacuaauagacugcaugc

SEQ ID NO: 26758 - RNA, 21 nt, Artificial Sequence
  LRRK2 RNA guide
uaaaaagugcaugcagucuau

SEQ ID NO: 26759 - RNA, 21 nt, Artificial Sequence
  LRRK2 RNA guide
uaauagacugcaugcacuuuu

SEQ ID NO: 26760 - RNA, 21 nt, Artificial Sequence
  LRRK2 RNA guide
uaccuuaaaaagugcaugcag

SEQ ID NO: 26761 - RNA, 21 nt, Artificial Sequence
  LRRK2 RNA guide
uagacugcaugcacuuuuuaa

SEQ ID NO: 26762 - RNA, 21 nt, Artificial Sequence
  LRRK2 RNA guide
ucuguggacuaauagacugca

SEQ ID NO: 26763 - RNA, 21 nt, Artificial Sequence
  LRRK2 RNA guide
ugcaugcacuuuuuaagguaa

SEQ ID NO: 26764 - RNA, 21 nt, Artificial Sequence
  LRRK2 RNA guide
ugcaugcagucuauuagucca

SEQ ID NO: 26765 - RNA, 21 nt, Artificial Sequence
  LRRK2 RNA guide
uggacuaauagacugcaugca

SEQ ID NO: 26766 - RNA, 21 nt, Artificial Sequence
  LRRK2 RNA guide
uguggacuaauagacugcaug

SEQ ID NO: 26767 - RNA, 21 nt, Artificial Sequence
  LRRK2 RNA guide
uuaaaaagugcaugcagucua

SEQ ID NO: 26768 - RNA, 21 nt, Artificial Sequence
  LRRK2 RNA guide
uuaccuuaaaaagugcaugca

SEQ ID NO: 26769 - RNA, 21 nt, Artificial Sequence
  LRRK2 RNA guide
uuuaccuuaaaaagugcaugc

SEQ ID NO: 26770 - RNA, 22 nt, Artificial Sequence
  LRRK2 RNA guide
aaaaacucuguggacuaauaga

SEQ ID NO: 26771 - RNA, 22 nt, Artificial Sequence
  LRRK2 RNA guide
aaaaagugcaugcagucuauua

SEQ ID NO: 26772 - RNA, 22 nt, Artificial Sequence
  LRRK2 RNA guide
aaaacucuguggacuaauagac

SEQ ID NO: 26773 - RNA, 22 nt, Artificial Sequence
  LRRK2 RNA guide
aaaagugcaugcagucuauuag

SEQ ID NO: 26774 - RNA, 22 nt, Artificial Sequence
  LRRK2 RNA guide
aaacucuguggacuaauagacu

SEQ ID NO: 26775 - RNA, 22 nt, Artificial Sequence
  LRRK2 RNA guide
aaagugcaugcagucuauuagu

SEQ ID NO: 26776 - RNA, 22 nt, Artificial Sequence
  LRRK2 RNA guide
aacucuguggacuaauagacug

SEQ ID NO: 26777 - RNA, 22 nt, Artificial Sequence
  LRRK2 RNA guide
aagugcaugcagucuauuaguc

SEQ ID NO: 26778 - RNA, 22 nt, Artificial Sequence
  LRRK2 RNA guide
aauagacugcaugcacuuuuua

SEQ ID NO: 26779 - RNA, 22 nt, Artificial Sequence
  LRRK2 RNA guide
accuuaaaaagugcaugcaguc

SEQ ID NO: 26780 - RNA, 22 nt, Artificial Sequence
  LRRK2 RNA guide
acuaauagacugcaugcacuuu

SEQ ID NO: 26781 - RNA, 22 nt, Artificial Sequence
  LRRK2 RNA guide
acucuguggacuaauagacugc

SEQ ID NO: 26782 - RNA, 22 nt, Artificial Sequence
  LRRK2 RNA guide
acugcaugcacuuuuuaaggua

SEQ ID NO: 26783 - RNA, 22 nt, Artificial Sequence
  LRRK2 RNA guide
agacugcaugcacuuuuuaagg

SEQ ID NO: 26784 - RNA, 22 nt, Artificial Sequence
  LRRK2 RNA guide
agugcaugcagucuauuagucc

SEQ ID NO: 26785 - RNA, 22 nt, Artificial Sequence
  LRRK2 RNA guide
auagacugcaugcacuuuuuaa

SEQ ID NO: 26786 - RNA, 22 nt, Artificial Sequence
  LRRK2 RNA guide
augcagucuauuaguccacaga

SEQ ID NO: 26787 - RNA, 22 nt, Artificial Sequence
  LRRK2 RNA guide
auuuaccuuaaaaagugcaugc

SEQ ID NO: 26788 - RNA, 22 nt, Artificial Sequence
  LRRK2 RNA guide
cagaauuuaccuuaaaaagugc

SEQ ID NO: 26789 - RNA, 22 nt, Artificial Sequence
  LRRK2 RNA guide
caugcagucuauuaguccacag

SEQ ID NO: 26790 - RNA, 22 nt, Artificial Sequence
  LRRK2 RNA guide
ccacagaauuuaccuuaaaaag

SEQ ID NO: 26791 - RNA, 22 nt, Artificial Sequence
  LRRK2 RNA guide
ccuuaaaaagugcaugcagucu

SEQ ID NO: 26792 - RNA, 22 nt, Artificial Sequence
  LRRK2 RNA guide
cuaauagacugcaugcacuuuu

SEQ ID NO: 26793 - RNA, 22 nt, Artificial Sequence
  LRRK2 RNA guide
cucuguggacuaauagacugca

SEQ ID NO: 26794 - RNA, 22 nt, Artificial Sequence
  LRRK2 RNA guide
cugcaugcacuuuuuaagguaa

SEQ ID NO: 26795 - RNA, 22 nt, Artificial Sequence
  LRRK2 RNA guide
cuguggacuaauagacugcaug

SEQ ID NO: 26796 - RNA, 22 nt, Artificial Sequence
  LRRK2 RNA guide
cuuaaaaagugcaugcagucua

SEQ ID NO: 26797 - RNA, 22 nt, Artificial Sequence
  LRRK2 RNA guide
gacuaauagacugcaugcacuu

SEQ ID NO: 26798 - RNA, 22 nt, Artificial Sequence
  LRRK2 RNA guide
gacugcaugcacuuuuuaaggu

SEQ ID NO: 26799 - RNA, 22 nt, Artificial Sequence
  LRRK2 RNA guide
gcaugcacuuuuuaagguaaau

SEQ ID NO: 26800 - RNA, 22 nt, Artificial Sequence
  LRRK2 RNA guide
gcaugcagucuauuaguccaca

SEQ ID NO: 26801 - RNA, 22 nt, Artificial Sequence
  LRRK2 RNA guide
ggacuaauagacugcaugcacu

SEQ ID NO: 26802 - RNA, 22 nt, Artificial Sequence
  LRRK2 RNA guide
gugcaugcagucuauuagucca

SEQ ID NO: 26803 - RNA, 22 nt, Artificial Sequence
  LRRK2 RNA guide
guggacuaauagacugcaugca

SEQ ID NO: 26804 - RNA, 22 nt, Artificial Sequence
  LRRK2 RNA guide
uaaaaagugcaugcagucuauu

SEQ ID NO: 26805 - RNA, 22 nt, Artificial Sequence
  LRRK2 RNA guide
uaauagacugcaugcacuuuuu

SEQ ID NO: 26806 - RNA, 22 nt, Artificial Sequence
  LRRK2 RNA guide
uaccuuaaaaagugcaugcagu

SEQ ID NO: 26807 - RNA, 22 nt, Artificial Sequence
  LRRK2 RNA guide
uagacugcaugcacuuuuuaag

SEQ ID NO: 26808 - RNA, 22 nt, Artificial Sequence
  LRRK2 RNA guide
ucuguggacuaauagacugcau

SEQ ID NO: 26809 - RNA, 22 nt, Artificial Sequence
  LRRK2 RNA guide
ugcaugcacuuuuuaagguaaa

SEQ ID NO: 26810 - RNA, 22 nt, Artificial Sequence
  LRRK2 RNA guide
ugcaugcagucuauuaguccac

SEQ ID NO: 26811 - RNA, 22 nt, Artificial Sequence
  LRRK2 RNA guide
uggacuaauagacugcaugcac

SEQ ID NO: 26812 - RNA, 22 nt, Artificial Sequence
  LRRK2 RNA guide
uguggacuaauagacugcaugc

SEQ ID NO: 26813 - RNA, 22 nt, Artificial Sequence
  LRRK2 RNA guide
uuaaaaagugcaugcagucuau

SEQ ID NO: 26814 - RNA, 22 nt, Artificial Sequence
  LRRK2 RNA guide
uuaccuuaaaaagugcaugcag

SEQ ID NO: 26815 - RNA, 22 nt, Artificial Sequence
  LRRK2 RNA guide
uuuaccuuaaaaagugcaugca

SEQ ID NO: 26816 - RNA, 20 nt, Artificial Sequence
  LRRK2 RNA guide
accauuaccuuccuagaacc

SEQ ID NO: 26817 - RNA, 20 nt, Artificial Sequence
  LRRK2 RNA guide
accuuccuagaaccauaaag

SEQ ID NO: 26818 - RNA, 20 nt, Artificial Sequence
  LRRK2 RNA guide
acuuuaugguucuaggaagg

SEQ ID NO: 26819 - RNA, 20 nt, Artificial Sequence
  LRRK2 RNA guide
aggaagguaaugguaaaaga

SEQ ID NO: 26820 - RNA, 20 nt, Artificial Sequence
  LRRK2 RNA guide
auacuuuaugguucuaggaa

SEQ ID NO: 26821 - RNA, 20 nt, Artificial Sequence
  LRRK2 RNA guide
augguucuaggaagguaaug

SEQ ID NO: 26822 - RNA, 20 nt, Artificial Sequence
  LRRK2 RNA guide
auuaccuuccuagaaccaua

SEQ ID NO: 26823 - RNA, 20 nt, Artificial Sequence
  LRRK2 RNA guide
cauuaccuuccuagaaccau

SEQ ID NO: 26824 - RNA, 20 nt, Artificial Sequence
  LRRK2 RNA guide
ccauuaccuuccuagaacca

SEQ ID NO: 26825 - RNA, 20 nt, Artificial Sequence
  LRRK2 RNA guide
ccuuccuagaaccauaaagu

SEQ ID NO: 26826 - RNA, 20 nt, Artificial Sequence
  LRRK2 RNA guide
cuaggaagguaaugguaaaa

SEQ ID NO: 26827 - RNA, 20 nt, Artificial Sequence
  LRRK2 RNA guide
cuuccuagaaccauaaagua

SEQ ID NO: 26828 - RNA, 20 nt, Artificial Sequence
  LRRK2 RNA guide
cuuuaugguucuaggaaggu

SEQ ID NO: 26829 - RNA, 20 nt, Artificial Sequence
  LRRK2 RNA guide
cuuuuaccauuaccuuccua

SEQ ID NO: 26830 - RNA, 20 nt, Artificial Sequence
  LRRK2 RNA guide
gaagguaaugguaaaagaaa

SEQ ID NO: 26831 - RNA, 20 nt, Artificial Sequence
  LRRK2 RNA guide
ggaagguaaugguaaaagaa

SEQ ID NO: 26832 - RNA, 20 nt, Artificial Sequence
  LRRK2 RNA guide
gguucuaggaagguaauggu

SEQ ID NO: 26833 - RNA, 20 nt, Artificial Sequence
  LRRK2 RNA guide
guauacuuuaugguucuagg

SEQ ID NO: 26834 - RNA, 20 nt, Artificial Sequence
  LRRK2 RNA guide
guucuaggaagguaauggua

SEQ ID NO: 26835 - RNA, 20 nt, Artificial Sequence
  LRRK2 RNA guide
guuuucuuuuaccauuaccu

SEQ ID NO: 26836 - RNA, 20 nt, Artificial Sequence
  LRRK2 RNA guide
uaccauuaccuuccuagaac

SEQ ID NO: 26837 - RNA, 20 nt, Artificial Sequence
  LRRK2 RNA guide
uaccuuccuagaaccauaaa

SEQ ID NO: 26838 - RNA, 20 nt, Artificial Sequence
  LRRK2 RNA guide
uacuuuaugguucuaggaag

SEQ ID NO: 26839 - RNA, 20 nt, Artificial Sequence
  LRRK2 RNA guide
uaggaagguaaugguaaaag

SEQ ID NO: 26840 - RNA, 20 nt, Artificial Sequence
  LRRK2 RNA guide
uauacuuuaugguucuagga

SEQ ID NO: 26841 - RNA, 20 nt, Artificial Sequence
  LRRK2 RNA guide
uaugguucuaggaagguaau

SEQ ID NO: 26842 - RNA, 20 nt, Artificial Sequence
  LRRK2 RNA guide
ucuaggaagguaaugguaaa

SEQ ID NO: 26843 - RNA, 20 nt, Artificial Sequence
  LRRK2 RNA guide
ucuuuuaccauuaccuuccu

SEQ ID NO: 26844 - RNA, 20 nt, Artificial Sequence
  LRRK2 RNA guide
ugguucuaggaagguaaugg

SEQ ID NO: 26845 - RNA, 20 nt, Artificial Sequence
  LRRK2 RNA guide
uguauacuuuaugguucuag

SEQ ID NO: 26846 - RNA, 20 nt, Artificial Sequence
  LRRK2 RNA guide
uguuuucuuuuaccauuacc

SEQ ID NO: 26847 - RNA, 20 nt, Artificial Sequence
  LRRK2 RNA guide
uuaccauuaccuuccuagaa

SEQ ID NO: 26848 - RNA, 20 nt, Artificial Sequence
  LRRK2 RNA guide
uuaccuuccuagaaccauaa

SEQ ID NO: 26849 - RNA, 20 nt, Artificial Sequence
  LRRK2 RNA guide
uuaugguucuaggaagguaa

SEQ ID NO: 26850 - RNA, 20 nt, Artificial Sequence
  LRRK2 RNA guide
uuccuagaaccauaaaguau

SEQ ID NO: 26851 - RNA, 20 nt, Artificial Sequence
  LRRK2 RNA guide
uucuaggaagguaaugguaa

SEQ ID NO: 26852 - RNA, 20 nt, Artificial Sequence
  LRRK2 RNA guide
uucuuuuaccauuaccuucc

SEQ ID NO: 26853 - RNA, 20 nt, Artificial Sequence
  LRRK2 RNA guide
uuuaccauuaccuuccuaga

SEQ ID NO: 26854 - RNA, 20 nt, Artificial Sequence
  LRRK2 RNA guide
uuuaugguucuaggaaggua

SEQ ID NO: 26855 - RNA, 20 nt, Artificial Sequence
  LRRK2 RNA guide
uuucuuuuaccauuaccuuc

SEQ ID NO: 26856 - RNA, 20 nt, Artificial Sequence
  LRRK2 RNA guide
uuuuaccauuaccuuccuag

SEQ ID NO: 26857 - RNA, 21 nt, Artificial Sequence
  LRRK2 RNA guide
accauuaccuuccuagaacca

SEQ ID NO: 26858 - RNA, 21 nt, Artificial Sequence
  LRRK2 RNA guide
accuuccuagaaccauaaagu

SEQ ID NO: 26859 - RNA, 21 nt, Artificial Sequence
  LRRK2 RNA guide
acuuuaugguucuaggaaggu

SEQ ID NO: 26860 - RNA, 21 nt, Artificial Sequence
  LRRK2 RNA guide
aggaagguaaugguaaaagaa

SEQ ID NO: 26861 - RNA, 21 nt, Artificial Sequence
  LRRK2 RNA guide
auacuuuaugguucuaggaag

SEQ ID NO: 26862 - RNA, 21 nt, Artificial Sequence
  LRRK2 RNA guide
augguucuaggaagguaaugg

SEQ ID NO: 26863 - RNA, 21 nt, Artificial Sequence
  LRRK2 RNA guide
auuaccuuccuagaaccauaa

SEQ ID NO: 26864 - RNA, 21 nt, Artificial Sequence
  LRRK2 RNA guide
cauuaccuuccuagaaccaua

SEQ ID NO: 26865 - RNA, 21 nt, Artificial Sequence
  LRRK2 RNA guide
ccauuaccuuccuagaaccau

SEQ ID NO: 26866 - RNA, 21 nt, Artificial Sequence
  LRRK2 RNA guide
ccuuccuagaaccauaaagua

SEQ ID NO: 26867 - RNA, 21 nt, Artificial Sequence
  LRRK2 RNA guide
cuaggaagguaaugguaaaag

SEQ ID NO: 26868 - RNA, 21 nt, Artificial Sequence
  LRRK2 RNA guide
cuuccuagaaccauaaaguau

SEQ ID NO: 26869 - RNA, 21 nt, Artificial Sequence
  LRRK2 RNA guide
cuuuaugguucuaggaaggua

SEQ ID NO: 26870 - RNA, 21 nt, Artificial Sequence
  LRRK2 RNA guide
cuuuuaccauuaccuuccuag

SEQ ID NO: 26871 - RNA, 21 nt, Artificial Sequence
  LRRK2 RNA guide
ggaagguaaugguaaaagaaa

SEQ ID NO: 26872 - RNA, 21 nt, Artificial Sequence
  LRRK2 RNA guide
gguucuaggaagguaauggua

SEQ ID NO: 26873 - RNA, 21 nt, Artificial Sequence
  LRRK2 RNA guide
guauacuuuaugguucuagga

SEQ ID NO: 26874 - RNA, 21 nt, Artificial Sequence
  LRRK2 RNA guide
guucuaggaagguaaugguaa

SEQ ID NO: 26875 - RNA, 21 nt, Artificial Sequence
  LRRK2 RNA guide
uaccauuaccuuccuagaacc

SEQ ID NO: 26876 - RNA, 21 nt, Artificial Sequence
  LRRK2 RNA guide
uaccuuccuagaaccauaaag

SEQ ID NO: 26877 - RNA, 21 nt, Artificial Sequence
  LRRK2 RNA guide
uacuuuaugguucuaggaagg

SEQ ID NO: 26878 - RNA, 21 nt, Artificial Sequence
  LRRK2 RNA guide
uaggaagguaaugguaaaaga

SEQ ID NO: 26879 - RNA, 21 nt, Artificial Sequence
  LRRK2 RNA guide
uaugguucuaggaagguaaug

SEQ ID NO: 26880 - RNA, 21 nt, Artificial Sequence
  LRRK2 RNA guide
ucuaggaagguaaugguaaaa

SEQ ID NO: 26881 - RNA, 21 nt, Artificial Sequence
  LRRK2 RNA guide
ucuuuuaccauuaccuuccua

SEQ ID NO: 26882 - RNA, 21 nt, Artificial Sequence
  LRRK2 RNA guide
ugguucuaggaagguaauggu

SEQ ID NO: 26883 - RNA, 21 nt, Artificial Sequence
  LRRK2 RNA guide
uguauacuuuaugguucuagg

SEQ ID NO: 26884 - RNA, 21 nt, Artificial Sequence
  LRRK2 RNA guide
uuaccauuaccuuccuagaac

SEQ ID NO: 26885 - RNA, 21 nt, Artificial Sequence
  LRRK2 RNA guide
uuaccuuccuagaaccauaaa

SEQ ID NO: 26886 - RNA, 21 nt, Artificial Sequence
  LRRK2 RNA guide
uuaugguucuaggaagguaau

SEQ ID NO: 26887 - RNA, 21 nt, Artificial Sequence
  LRRK2 RNA guide
uucuaggaagguaaugguaaa

SEQ ID NO: 26888 - RNA, 21 nt, Artificial Sequence
  LRRK2 RNA guide
uucuuuuaccauuaccuuccu

SEQ ID NO: 26889 - RNA, 21 nt, Artificial Sequence
  LRRK2 RNA guide
uuuaccauuaccuuccuagaa

SEQ ID NO: 26890 - RNA, 21 nt, Artificial Sequence
  LRRK2 RNA guide
uuuaugguucuaggaagguaa

SEQ ID NO: 26891 - RNA, 21 nt, Artificial Sequence
  LRRK2 RNA guide
uuucuuuuaccauuaccuucc

SEQ ID NO: 26892 - RNA, 21 nt, Artificial Sequence
  LRRK2 RNA guide
uuuuaccauuaccuuccuaga

SEQ ID NO: 26893 - RNA, 22 nt, Artificial Sequence
  LRRK2 RNA guide
accauuaccuuccuagaaccau

SEQ ID NO: 26894 - RNA, 22 nt, Artificial Sequence
  LRRK2 RNA guide
accuuccuagaaccauaaagua

SEQ ID NO: 26895 - RNA, 22 nt, Artificial Sequence
  LRRK2 RNA guide
acuuuaugguucuaggaaggua

SEQ ID NO: 26896 - RNA, 22 nt, Artificial Sequence
  LRRK2 RNA guide
aggaagguaaugguaaaagaaa

SEQ ID NO: 26897 - RNA, 22 nt, Artificial Sequence
  LRRK2 RNA guide
auacuuuaugguucuaggaagg

SEQ ID NO: 26898 - RNA, 22 nt, Artificial Sequence
  LRRK2 RNA guide
augguucuaggaagguaauggu

SEQ ID NO: 26899 - RNA, 22 nt, Artificial Sequence
  LRRK2 RNA guide
auguauacuuuaugguucuagg

SEQ ID NO: 26900 - RNA, 22 nt, Artificial Sequence
  LRRK2 RNA guide
auuaccuuccuagaaccauaaa

SEQ ID NO: 26901 - RNA, 22 nt, Artificial Sequence
  LRRK2 RNA guide
cauuaccuuccuagaaccauaa

SEQ ID NO: 26902 - RNA, 22 nt, Artificial Sequence
  LRRK2 RNA guide
ccauuaccuuccuagaaccaua

SEQ ID NO: 26903 - RNA, 22 nt, Artificial Sequence
  LRRK2 RNA guide
ccuuccuagaaccauaaaguau

SEQ ID NO: 26904 - RNA, 22 nt, Artificial Sequence
  LRRK2 RNA guide
ccuuguuuucuuuuaccauuac

SEQ ID NO: 26905 - RNA, 22 nt, Artificial Sequence
  LRRK2 RNA guide
cuaggaagguaaugguaaaaga

SEQ ID NO: 26906 - RNA, 22 nt, Artificial Sequence
  LRRK2 RNA guide
cuuccuagaaccauaaaguaua

SEQ ID NO: 26907 - RNA, 22 nt, Artificial Sequence
  LRRK2 RNA guide
cuuguuuucuuuuaccauuacc

SEQ ID NO: 26908 - RNA, 22 nt, Artificial Sequence
  LRRK2 RNA guide
cuuuaugguucuaggaagguaa

SEQ ID NO: 26909 - RNA, 22 nt, Artificial Sequence
  LRRK2 RNA guide
cuuuuaccauuaccuuccuaga

SEQ ID NO: 26910 - RNA, 22 nt, Artificial Sequence
  LRRK2 RNA guide
gaagguaaugguaaaagaaaac

SEQ ID NO: 26911 - RNA, 22 nt, Artificial Sequence
  LRRK2 RNA guide
ggaagguaaugguaaaagaaaa

SEQ ID NO: 26912 - RNA, 22 nt, Artificial Sequence
  LRRK2 RNA guide
gguucuaggaagguaaugguaa

SEQ ID NO: 26913 - RNA, 22 nt, Artificial Sequence
  LRRK2 RNA guide
guauacuuuaugguucuaggaa

SEQ ID NO: 26914 - RNA, 22 nt, Artificial Sequence
  LRRK2 RNA guide
guucuaggaagguaaugguaaa

SEQ ID NO: 26915 - RNA, 22 nt, Artificial Sequence
  LRRK2 RNA guide
guuuucuuuuaccauuaccuuc

SEQ ID NO: 26916 - RNA, 22 nt, Artificial Sequence
  LRRK2 RNA guide
uaccauuaccuuccuagaacca

SEQ ID NO: 26917 - RNA, 22 nt, Artificial Sequence
  LRRK2 RNA guide
uaccuuccuagaaccauaaagu

SEQ ID NO: 26918 - RNA, 22 nt, Artificial Sequence
  LRRK2 RNA guide
uacuuuaugguucuaggaaggu

SEQ ID NO: 26919 - RNA, 22 nt, Artificial Sequence
  LRRK2 RNA guide
uaggaagguaaugguaaaagaa

SEQ ID NO: 26920 - RNA, 22 nt, Artificial Sequence
  LRRK2 RNA guide
uauacuuuaugguucuaggaag

SEQ ID NO: 26921 - RNA, 22 nt, Artificial Sequence
  LRRK2 RNA guide
uaugguucuaggaagguaaugg

SEQ ID NO: 26922 - RNA, 22 nt, Artificial Sequence
  LRRK2 RNA guide
ucuaggaagguaaugguaaaag

SEQ ID NO: 26923 - RNA, 22 nt, Artificial Sequence
  LRRK2 RNA guide
ucuuuuaccauuaccuuccuag

SEQ ID NO: 26924 - RNA, 22 nt, Artificial Sequence
  LRRK2 RNA guide
ugguucuaggaagguaauggua

SEQ ID NO: 26925 - RNA, 22 nt, Artificial Sequence
  LRRK2 RNA guide
uguauacuuuaugguucuagga

SEQ ID NO: 26926 - RNA, 22 nt, Artificial Sequence
  LRRK2 RNA guide
uuaccauuaccuuccuagaacc

SEQ ID NO: 26927 - RNA, 22 nt, Artificial Sequence
  LRRK2 RNA guide
uuaccuuccuagaaccauaaag

SEQ ID NO: 26928 - RNA, 22 nt, Artificial Sequence
  LRRK2 RNA guide
uuaugguucuaggaagguaaug

SEQ ID NO: 26929 - RNA, 22 nt, Artificial Sequence
  LRRK2 RNA guide
uuccuagaaccauaaaguauac

SEQ ID NO: 26930 - RNA, 22 nt, Artificial Sequence
  LRRK2 RNA guide
uucuaggaagguaaugguaaaa

SEQ ID NO: 26931 - RNA, 22 nt, Artificial Sequence
  LRRK2 RNA guide
uucuuuuaccauuaccuuccua

SEQ ID NO: 26932 - RNA, 22 nt, Artificial Sequence
  LRRK2 RNA guide
uuuaccauuaccuuccuagaac

SEQ ID NO: 26933 - RNA, 22 nt, Artificial Sequence
  LRRK2 RNA guide
uuuaugguucuaggaagguaau

SEQ ID NO: 26934 - RNA, 22 nt, Artificial Sequence
  LRRK2 RNA guide
uuucuuuuaccauuaccuuccu

SEQ ID NO: 26935 - RNA, 22 nt, Artificial Sequence
  LRRK2 RNA guide
uuuuaccauuaccuuccuagaa

SEQ ID NO: 26936 - RNA, 22 nt, Artificial Sequence
  LRRK2 RNA guide
uuuucuuuuaccauuaccuucc

SEQ ID NO: 26937 - RNA, 20 nt, Artificial Sequence
  LRRK2 RNA guide
acaccucccuagaaccauaa

SEQ ID NO: 26938 - RNA, 20 nt, Artificial Sequence
  LRRK2 RNA guide
accauuacaccucccuagaa

SEQ ID NO: 26939 - RNA, 20 nt, Artificial Sequence
  LRRK2 RNA guide
acuuuaugguucuagggagg

SEQ ID NO: 26940 - RNA, 20 nt, Artificial Sequence
  LRRK2 RNA guide
agggagguguaaugguaaaa

SEQ ID NO: 26941 - RNA, 20 nt, Artificial Sequence
  LRRK2 RNA guide
agguguaaugguaaaagaaa

SEQ ID NO: 26942 - RNA, 20 nt, Artificial Sequence
  LRRK2 RNA guide
auacuuuaugguucuaggga

SEQ ID NO: 26943 - RNA, 20 nt, Artificial Sequence
  LRRK2 RNA guide
augguucuagggagguguaa

SEQ ID NO: 26944 - RNA, 20 nt, Artificial Sequence
  LRRK2 RNA guide
auuacaccucccuagaacca

SEQ ID NO: 26945 - RNA, 20 nt, Artificial Sequence
  LRRK2 RNA guide
caccucccuagaaccauaaa

SEQ ID NO: 26946 - RNA, 20 nt, Artificial Sequence
  LRRK2 RNA guide
cauuacaccucccuagaacc

SEQ ID NO: 26947 - RNA, 20 nt, Artificial Sequence
  LRRK2 RNA guide
ccauuacaccucccuagaac

SEQ ID NO: 26948 - RNA, 20 nt, Artificial Sequence
  LRRK2 RNA guide
cuagggagguguaaugguaa

SEQ ID NO: 26949 - RNA, 20 nt, Artificial Sequence
  LRRK2 RNA guide
cuuuaugguucuagggaggu

SEQ ID NO: 26950 - RNA, 20 nt, Artificial Sequence
  LRRK2 RNA guide
cuuuuaccauuacaccuccc

SEQ ID NO: 26951 - RNA, 20 nt, Artificial Sequence
  LRRK2 RNA guide
gagguguaaugguaaaagaa

SEQ ID NO: 26952 - RNA, 20 nt, Artificial Sequence
  LRRK2 RNA guide
ggagguguaaugguaaaaga

SEQ ID NO: 26953 - RNA, 20 nt, Artificial Sequence
  LRRK2 RNA guide
gggagguguaaugguaaaag

SEQ ID NO: 26954 - RNA, 20 nt, Artificial Sequence
  LRRK2 RNA guide
gguucuagggagguguaaug

SEQ ID NO: 26955 - RNA, 20 nt, Artificial Sequence
  LRRK2 RNA guide
guucuagggagguguaaugg

SEQ ID NO: 26956 - RNA, 20 nt, Artificial Sequence
  LRRK2 RNA guide
guuuucuuuuaccauuacac

SEQ ID NO: 26957 - RNA, 20 nt, Artificial Sequence
  LRRK2 RNA guide
uacaccucccuagaaccaua

SEQ ID NO: 26958 - RNA, 20 nt, Artificial Sequence
  LRRK2 RNA guide
uaccauuacaccucccuaga

SEQ ID NO: 26959 - RNA, 20 nt, Artificial Sequence
  LRRK2 RNA guide
uacuuuaugguucuagggag

SEQ ID NO: 26960 - RNA, 20 nt, Artificial Sequence
  LRRK2 RNA guide
uagggagguguaaugguaaa

SEQ ID NO: 26961 - RNA, 20 nt, Artificial Sequence
  LRRK2 RNA guide
uauacuuuaugguucuaggg

SEQ ID NO: 26962 - RNA, 20 nt, Artificial Sequence
  LRRK2 RNA guide
uaugguucuagggaggugua

SEQ ID NO: 26963 - RNA, 20 nt, Artificial Sequence
  LRRK2 RNA guide
ucuagggagguguaauggua

SEQ ID NO: 26964 - RNA, 20 nt, Artificial Sequence
  LRRK2 RNA guide
ucuuuuaccauuacaccucc

SEQ ID NO: 26965 - RNA, 20 nt, Artificial Sequence
  LRRK2 RNA guide
ugguucuagggagguguaau

SEQ ID NO: 26966 - RNA, 20 nt, Artificial Sequence
  LRRK2 RNA guide
uuacaccucccuagaaccau

SEQ ID NO: 26967 - RNA, 20 nt, Artificial Sequence
  LRRK2 RNA guide
uuaccauuacaccucccuag

SEQ ID NO: 26968 - RNA, 20 nt, Artificial Sequence
  LRRK2 RNA guide
uuaugguucuagggaggugu

SEQ ID NO: 26969 - RNA, 20 nt, Artificial Sequence
  LRRK2 RNA guide
uucuagggagguguaauggu

SEQ ID NO: 26970 - RNA, 20 nt, Artificial Sequence
  LRRK2 RNA guide
uucuuuuaccauuacaccuc

SEQ ID NO: 26971 - RNA, 20 nt, Artificial Sequence
  LRRK2 RNA guide
uuuaccauuacaccucccua

SEQ ID NO: 26972 - RNA, 20 nt, Artificial Sequence
  LRRK2 RNA guide
uuuaugguucuagggaggug

SEQ ID NO: 26973 - RNA, 20 nt, Artificial Sequence
  LRRK2 RNA guide
uuucuuuuaccauuacaccu

SEQ ID NO: 26974 - RNA, 20 nt, Artificial Sequence
  LRRK2 RNA guide
uuuuaccauuacaccucccu

SEQ ID NO: 26975 - RNA, 20 nt, Artificial Sequence
  LRRK2 RNA guide
uuuucuuuuaccauuacacc

SEQ ID NO: 26976 - RNA, 21 nt, Artificial Sequence
  LRRK2 RNA guide
acaccucccuagaaccauaaa

SEQ ID NO: 26977 - RNA, 21 nt, Artificial Sequence
  LRRK2 RNA guide
accauuacaccucccuagaac

SEQ ID NO: 26978 - RNA, 21 nt, Artificial Sequence
  LRRK2 RNA guide
acuuuaugguucuagggaggu

SEQ ID NO: 26979 - RNA, 21 nt, Artificial Sequence
  LRRK2 RNA guide
agggagguguaaugguaaaag

SEQ ID NO: 26980 - RNA, 21 nt, Artificial Sequence
  LRRK2 RNA guide
auacuuuaugguucuagggag

SEQ ID NO: 26981 - RNA, 21 nt, Artificial Sequence
  LRRK2 RNA guide
augguucuagggagguguaau

SEQ ID NO: 26982 - RNA, 21 nt, Artificial Sequence
  LRRK2 RNA guide
auuacaccucccuagaaccau

SEQ ID NO: 26983 - RNA, 21 nt, Artificial Sequence
  LRRK2 RNA guide
caccucccuagaaccauaaag

SEQ ID NO: 26984 - RNA, 21 nt, Artificial Sequence
  LRRK2 RNA guide
cauuacaccucccuagaacca

SEQ ID NO: 26985 - RNA, 21 nt, Artificial Sequence
  LRRK2 RNA guide
ccauuacaccucccuagaacc

SEQ ID NO: 26986 - RNA, 21 nt, Artificial Sequence
  LRRK2 RNA guide
cuagggagguguaaugguaaa

SEQ ID NO: 26987 - RNA, 21 nt, Artificial Sequence
  LRRK2 RNA guide
cuuuaugguucuagggaggug

SEQ ID NO: 26988 - RNA, 21 nt, Artificial Sequence
  LRRK2 RNA guide
cuuuuaccauuacaccucccu

SEQ ID NO: 26989 - RNA, 21 nt, Artificial Sequence
  LRRK2 RNA guide
gagguguaaugguaaaagaaa

SEQ ID NO: 26990 - RNA, 21 nt, Artificial Sequence
  LRRK2 RNA guide
ggagguguaaugguaaaagaa

SEQ ID NO: 26991 - RNA, 21 nt, Artificial Sequence
  LRRK2 RNA guide
gggagguguaaugguaaaaga

SEQ ID NO: 26992 - RNA, 21 nt, Artificial Sequence
  LRRK2 RNA guide
gguucuagggagguguaaugg

SEQ ID NO: 26993 - RNA, 21 nt, Artificial Sequence
  LRRK2 RNA guide
guauacuuuaugguucuaggg

SEQ ID NO: 26994 - RNA, 21 nt, Artificial Sequence
  LRRK2 RNA guide
guucuagggagguguaauggu

SEQ ID NO: 26995 - RNA, 21 nt, Artificial Sequence
  LRRK2 RNA guide
guuuucuuuuaccauuacacc

SEQ ID NO: 26996 - RNA, 21 nt, Artificial Sequence
  LRRK2 RNA guide
uacaccucccuagaaccauaa

SEQ ID NO: 26997 - RNA, 21 nt, Artificial Sequence
  LRRK2 RNA guide
uaccauuacaccucccuagaa

SEQ ID NO: 26998 - RNA, 21 nt, Artificial Sequence
  LRRK2 RNA guide
uacuuuaugguucuagggagg

SEQ ID NO: 26999 - RNA, 21 nt, Artificial Sequence
  LRRK2 RNA guide
uagggagguguaaugguaaaa

SEQ ID NO: 27000 - RNA, 21 nt, Artificial Sequence
  LRRK2 RNA guide
uauacuuuaugguucuaggga

SEQ ID NO: 27001 - RNA, 21 nt, Artificial Sequence
  LRRK2 RNA guide
uaugguucuagggagguguaa

SEQ ID NO: 27002 - RNA, 21 nt, Artificial Sequence
  LRRK2 RNA guide
ucuagggagguguaaugguaa

SEQ ID NO: 27003 - RNA, 21 nt, Artificial Sequence
  LRRK2 RNA guide
ucuuuuaccauuacaccuccc

SEQ ID NO: 27004 - RNA, 21 nt, Artificial Sequence
  LRRK2 RNA guide
ugguucuagggagguguaaug

SEQ ID NO: 27005 - RNA, 21 nt, Artificial Sequence
  LRRK2 RNA guide
uuacaccucccuagaaccaua

SEQ ID NO: 27006 - RNA, 21 nt, Artificial Sequence
  LRRK2 RNA guide
uuaccauuacaccucccuaga

SEQ ID NO: 27007 - RNA, 21 nt, Artificial Sequence
  LRRK2 RNA guide
uuaugguucuagggaggugua

SEQ ID NO: 27008 - RNA, 21 nt, Artificial Sequence
  LRRK2 RNA guide
uucuagggagguguaauggua

SEQ ID NO: 27009 - RNA, 21 nt, Artificial Sequence
  LRRK2 RNA guide
uucuuuuaccauuacaccucc

SEQ ID NO: 27010 - RNA, 21 nt, Artificial Sequence
  LRRK2 RNA guide
uuuaccauuacaccucccuag

SEQ ID NO: 27011 - RNA, 21 nt, Artificial Sequence
  LRRK2 RNA guide
uuuaugguucuagggaggugu

SEQ ID NO: 27012 - RNA, 21 nt, Artificial Sequence
  LRRK2 RNA guide
uuucuuuuaccauuacaccuc

SEQ ID NO: 27013 - RNA, 21 nt, Artificial Sequence
  LRRK2 RNA guide
uuuuaccauuacaccucccua

SEQ ID NO: 27014 - RNA, 22 nt, Artificial Sequence
  LRRK2 RNA guide
acaccucccuagaaccauaaag

SEQ ID NO: 27015 - RNA, 22 nt, Artificial Sequence
  LRRK2 RNA guide
accauuacaccucccuagaacc

SEQ ID NO: 27016 - RNA, 22 nt, Artificial Sequence
  LRRK2 RNA guide
acuuuaugguucuagggaggug

SEQ ID NO: 27017 - RNA, 22 nt, Artificial Sequence
  LRRK2 RNA guide
agggagguguaaugguaaaaga

SEQ ID NO: 27018 - RNA, 22 nt, Artificial Sequence
  LRRK2 RNA guide
agguguaaugguaaaagaaaac

SEQ ID NO: 27019 - RNA, 22 nt, Artificial Sequence
  LRRK2 RNA guide
auacuuuaugguucuagggagg

SEQ ID NO: 27020 - RNA, 22 nt, Artificial Sequence
  LRRK2 RNA guide
augguucuagggagguguaaug

SEQ ID NO: 27021 - RNA, 22 nt, Artificial Sequence
  LRRK2 RNA guide
auuacaccucccuagaaccaua

SEQ ID NO: 27022 - RNA, 22 nt, Artificial Sequence
  LRRK2 RNA guide
caccucccuagaaccauaaagu

SEQ ID NO: 27023 - RNA, 22 nt, Artificial Sequence
  LRRK2 RNA guide
cauuacaccucccuagaaccau

SEQ ID NO: 27024 - RNA, 22 nt, Artificial Sequence
  LRRK2 RNA guide
ccauuacaccucccuagaacca

SEQ ID NO: 27025 - RNA, 22 nt, Artificial Sequence
  LRRK2 RNA guide
cuagggagguguaaugguaaaa

SEQ ID NO: 27026 - RNA, 22 nt, Artificial Sequence
  LRRK2 RNA guide
cuuuaugguucuagggaggugu

SEQ ID NO: 27027 - RNA, 22 nt, Artificial Sequence
  LRRK2 RNA guide
cuuuuaccauuacaccucccua

SEQ ID NO: 27028 - RNA, 22 nt, Artificial Sequence
  LRRK2 RNA guide
gagguguaaugguaaaagaaaa

SEQ ID NO: 27029 - RNA, 22 nt, Artificial Sequence
  LRRK2 RNA guide
ggagguguaaugguaaaagaaa

SEQ ID NO: 27030 - RNA, 22 nt, Artificial Sequence
  LRRK2 RNA guide
gggagguguaaugguaaaagaa

SEQ ID NO: 27031 - RNA, 22 nt, Artificial Sequence
  LRRK2 RNA guide
gguucuagggagguguaauggu

SEQ ID NO: 27032 - RNA, 22 nt, Artificial Sequence
  LRRK2 RNA guide
guauacuuuaugguucuaggga

SEQ ID NO: 27033 - RNA, 22 nt, Artificial Sequence
  LRRK2 RNA guide
guucuagggagguguaauggua

SEQ ID NO: 27034 - RNA, 22 nt, Artificial Sequence
  LRRK2 RNA guide
guuuucuuuuaccauuacaccu

SEQ ID NO: 27035 - RNA, 22 nt, Artificial Sequence
  LRRK2 RNA guide
uacaccucccuagaaccauaaa

SEQ ID NO: 27036 - RNA, 22 nt, Artificial Sequence
  LRRK2 RNA guide
uaccauuacaccucccuagaac

SEQ ID NO: 27037 - RNA, 22 nt, Artificial Sequence
  LRRK2 RNA guide
uacuuuaugguucuagggaggu

SEQ ID NO: 27038 - RNA, 22 nt, Artificial Sequence
  LRRK2 RNA guide
uagggagguguaaugguaaaag

SEQ ID NO: 27039 - RNA, 22 nt, Artificial Sequence
  LRRK2 RNA guide
uauacuuuaugguucuagggag

SEQ ID NO: 27040 - RNA, 22 nt, Artificial Sequence
  LRRK2 RNA guide
uaugguucuagggagguguaau

SEQ ID NO: 27041 - RNA, 22 nt, Artificial Sequence
  LRRK2 RNA guide
ucuagggagguguaaugguaaa

SEQ ID NO: 27042 - RNA, 22 nt, Artificial Sequence
  LRRK2 RNA guide
ucuuuuaccauuacaccucccu

SEQ ID NO: 27043 - RNA, 22 nt, Artificial Sequence
  LRRK2 RNA guide
ugguucuagggagguguaaugg

SEQ ID NO: 27044 - RNA, 22 nt, Artificial Sequence
  LRRK2 RNA guide
uguauacuuuaugguucuaggg

SEQ ID NO: 27045 - RNA, 22 nt, Artificial Sequence
  LRRK2 RNA guide
uguuuucuuuuaccauuacacc

SEQ ID NO: 27046 - RNA, 22 nt, Artificial Sequence
  LRRK2 RNA guide
uuacaccucccuagaaccauaa

SEQ ID NO: 27047 - RNA, 22 nt, Artificial Sequence
  LRRK2 RNA guide
uuaccauuacaccucccuagaa

SEQ ID NO: 27048 - RNA, 22 nt, Artificial Sequence
  LRRK2 RNA guide
uuaugguucuagggagguguaa

SEQ ID NO: 27049 - RNA, 22 nt, Artificial Sequence
  LRRK2 RNA guide
uucuagggagguguaaugguaa

SEQ ID NO: 27050 - RNA, 22 nt, Artificial Sequence
  LRRK2 RNA guide
uucuuuuaccauuacaccuccc

SEQ ID NO: 27051 - RNA, 22 nt, Artificial Sequence
  LRRK2 RNA guide
uuuaccauuacaccucccuaga

SEQ ID NO: 27052 - RNA, 22 nt, Artificial Sequence
  LRRK2 RNA guide
uuuaugguucuagggaggugua

SEQ ID NO: 27053 - RNA, 22 nt, Artificial Sequence
  LRRK2 RNA guide
uuucuuuuaccauuacaccucc

SEQ ID NO: 27054 - RNA, 22 nt, Artificial Sequence
  LRRK2 RNA guide
uuuuaccauuacaccucccuag

SEQ ID NO: 27055 - RNA, 22 nt, Artificial Sequence
  LRRK2 RNA guide
uuuucuuuuaccauuacaccuc

SEQ ID NO: 27056 - RNA, 20 nt, Artificial Sequence
  LRRK2 RNA guide
aaaauaucuuauucugggag

SEQ ID NO: 27057 - RNA, 20 nt, Artificial Sequence
  LRRK2 RNA guide
aaacaaggaaucaaaacaca

SEQ ID NO: 27058 - RNA, 20 nt, Artificial Sequence
  LRRK2 RNA guide
aaauaucuuauucugggaga

SEQ ID NO: 27059 - RNA, 20 nt, Artificial Sequence
  LRRK2 RNA guide
aacaaggaaucaaaacacaa

SEQ ID NO: 27060 - RNA, 20 nt, Artificial Sequence
  LRRK2 RNA guide
aauaucuuauucugggagag

SEQ ID NO: 27061 - RNA, 20 nt, Artificial Sequence
  LRRK2 RNA guide
acaaaauaucuuauucuggg

SEQ ID NO: 27062 - RNA, 20 nt, Artificial Sequence
  LRRK2 RNA guide
acaaggaaucaaaacacaaa

SEQ ID NO: 27063 - RNA, 20 nt, Artificial Sequence
  LRRK2 RNA guide
acucucccagaauaagauau

SEQ ID NO: 27064 - RNA, 20 nt, Artificial Sequence
  LRRK2 RNA guide
auaucuuauucugggagagu

SEQ ID NO: 27065 - RNA, 20 nt, Artificial Sequence
  LRRK2 RNA guide
caaaauaucuuauucuggga

SEQ ID NO: 27066 - RNA, 20 nt, Artificial Sequence
  LRRK2 RNA guide
caaggaaucaaaacacaaaa

SEQ ID NO: 27067 - RNA, 20 nt, Artificial Sequence
  LRRK2 RNA guide
cacaaaauaucuuauucugg

SEQ ID NO: 27068 - RNA, 20 nt, Artificial Sequence
  LRRK2 RNA guide
cacucucccagaauaagaua

SEQ ID NO: 27069 - RNA, 20 nt, Artificial Sequence
  LRRK2 RNA guide
ccagaauaagauauuuugug

SEQ ID NO: 27070 - RNA, 20 nt, Artificial Sequence
  LRRK2 RNA guide
cccagaauaagauauuuugu

SEQ ID NO: 27071 - RNA, 20 nt, Artificial Sequence
  LRRK2 RNA guide
cucccagaauaagauauuuu

SEQ ID NO: 27072 - RNA, 20 nt, Artificial Sequence
  LRRK2 RNA guide
cucucccagaauaagauauu

SEQ ID NO: 27073 - RNA, 20 nt, Artificial Sequence
  LRRK2 RNA guide
gguuuucacucucccagaau

SEQ ID NO: 27074 - RNA, 20 nt, Artificial Sequence
  LRRK2 RNA guide
guuuucacucucccagaaua

SEQ ID NO: 27075 - RNA, 20 nt, Artificial Sequence
  LRRK2 RNA guide
uaucuuauucugggagagug

SEQ ID NO: 27076 - RNA, 20 nt, Artificial Sequence
  LRRK2 RNA guide
ucacucucccagaauaagau

SEQ ID NO: 27077 - RNA, 20 nt, Artificial Sequence
  LRRK2 RNA guide
ucccagaauaagauauuuug

SEQ ID NO: 27078 - RNA, 20 nt, Artificial Sequence
  LRRK2 RNA guide
ucucccagaauaagauauuu

SEQ ID NO: 27079 - RNA, 20 nt, Artificial Sequence
  LRRK2 RNA guide
uucacucucccagaauaaga

SEQ ID NO: 27080 - RNA, 20 nt, Artificial Sequence
  LRRK2 RNA guide
uuucacucucccagaauaag

SEQ ID NO: 27081 - RNA, 21 nt, Artificial Sequence
  LRRK2 RNA guide
aaauaucuuauucugggagag

SEQ ID NO: 27082 - RNA, 21 nt, Artificial Sequence
  LRRK2 RNA guide
aauaucuuauucugggagagu

SEQ ID NO: 27083 - RNA, 21 nt, Artificial Sequence
  LRRK2 RNA guide
acucucccagaauaagauauu

SEQ ID NO: 27084 - RNA, 21 nt, Artificial Sequence
  LRRK2 RNA guide
auaucuuauucugggagagug

SEQ ID NO: 27085 - RNA, 21 nt, Artificial Sequence
  LRRK2 RNA guide
caaaauaucuuauucugggag

SEQ ID NO: 27086 - RNA, 21 nt, Artificial Sequence
  LRRK2 RNA guide
cacaaaauaucuuauucuggg

SEQ ID NO: 27087 - RNA, 21 nt, Artificial Sequence
  LRRK2 RNA guide
cacucucccagaauaagauau

SEQ ID NO: 27088 - RNA, 21 nt, Artificial Sequence
  LRRK2 RNA guide
cccagaauaagauauuuugug

SEQ ID NO: 27089 - RNA, 21 nt, Artificial Sequence
  LRRK2 RNA guide
cucccagaauaagauauuuug

SEQ ID NO: 27090 - RNA, 21 nt, Artificial Sequence
  LRRK2 RNA guide
cucucccagaauaagauauuu

SEQ ID NO: 27091 - RNA, 21 nt, Artificial Sequence
  LRRK2 RNA guide
ggguuuucacucucccagaau

SEQ ID NO: 27092 - RNA, 21 nt, Artificial Sequence
  LRRK2 RNA guide
gguuuucacucucccagaaua

SEQ ID NO: 27093 - RNA, 21 nt, Artificial Sequence
  LRRK2 RNA guide
guuuucacucucccagaauaa

SEQ ID NO: 27094 - RNA, 21 nt, Artificial Sequence
  LRRK2 RNA guide
uaucuuauucugggagaguga

SEQ ID NO: 27095 - RNA, 21 nt, Artificial Sequence
  LRRK2 RNA guide
ucacucucccagaauaagaua

SEQ ID NO: 27096 - RNA, 21 nt, Artificial Sequence
  LRRK2 RNA guide
uucacucucccagaauaagau

SEQ ID NO: 27097 - RNA, 21 nt, Artificial Sequence
  LRRK2 RNA guide
uuuucacucucccagaauaag

SEQ ID NO: 27098 - RNA, 22 nt, Artificial Sequence
  LRRK2 RNA guide
aaaauaucuuauucugggagag

SEQ ID NO: 27099 - RNA, 22 nt, Artificial Sequence
  LRRK2 RNA guide
aaauaucuuauucugggagagu

SEQ ID NO: 27100 - RNA, 22 nt, Artificial Sequence
  LRRK2 RNA guide
aauaucuuauucugggagagug

SEQ ID NO: 27101 - RNA, 22 nt, Artificial Sequence
  LRRK2 RNA guide
acaaaauaucuuauucugggag

SEQ ID NO: 27102 - RNA, 22 nt, Artificial Sequence
  LRRK2 RNA guide
acacaaaauaucuuauucuggg

SEQ ID NO: 27103 - RNA, 22 nt, Artificial Sequence
  LRRK2 RNA guide
acucucccagaauaagauauuu

SEQ ID NO: 27104 - RNA, 22 nt, Artificial Sequence
  LRRK2 RNA guide
aggguuuucacucucccagaau

SEQ ID NO: 27105 - RNA, 22 nt, Artificial Sequence
  LRRK2 RNA guide
auaucuuauucugggagaguga

SEQ ID NO: 27106 - RNA, 22 nt, Artificial Sequence
  LRRK2 RNA guide
caaaauaucuuauucugggaga

SEQ ID NO: 27107 - RNA, 22 nt, Artificial Sequence
  LRRK2 RNA guide
cacaaaauaucuuauucuggga

SEQ ID NO: 27108 - RNA, 22 nt, Artificial Sequence
  LRRK2 RNA guide
cacucucccagaauaagauauu

SEQ ID NO: 27109 - RNA, 22 nt, Artificial Sequence
  LRRK2 RNA guide
cccagaauaagauauuuugugu

SEQ ID NO: 27110 - RNA, 22 nt, Artificial Sequence
  LRRK2 RNA guide
cucccagaauaagauauuuugu

SEQ ID NO: 27111 - RNA, 22 nt, Artificial Sequence
  LRRK2 RNA guide
cucucccagaauaagauauuuu

SEQ ID NO: 27112 - RNA, 22 nt, Artificial Sequence
  LRRK2 RNA guide
gaaaacaaggaaucaaaacaca

SEQ ID NO: 27113 - RNA, 22 nt, Artificial Sequence
  LRRK2 RNA guide
ggguuuucacucucccagaaua

SEQ ID NO: 27114 - RNA, 22 nt, Artificial Sequence
  LRRK2 RNA guide
gguuuucacucucccagaauaa

SEQ ID NO: 27115 - RNA, 22 nt, Artificial Sequence
  LRRK2 RNA guide
guuuucacucucccagaauaag

SEQ ID NO: 27116 - RNA, 22 nt, Artificial Sequence
  LRRK2 RNA guide
uaucuuauucugggagagugaa

SEQ ID NO: 27117 - RNA, 22 nt, Artificial Sequence
  LRRK2 RNA guide
ucacucucccagaauaagauau

SEQ ID NO: 27118 - RNA, 22 nt, Artificial Sequence
  LRRK2 RNA guide
ucccagaauaagauauuuugug

SEQ ID NO: 27119 - RNA, 22 nt, Artificial Sequence
  LRRK2 RNA guide
ucucccagaauaagauauuuug

SEQ ID NO: 27120 - RNA, 22 nt, Artificial Sequence
  LRRK2 RNA guide
uucacucucccagaauaagaua

SEQ ID NO: 27121 - RNA, 22 nt, Artificial Sequence
  LRRK2 RNA guide
uuucacucucccagaauaagau

SEQ ID NO: 27122 - RNA, 22 nt, Artificial Sequence
  LRRK2 RNA guide
uuuucacucucccagaauaaga

SEQ ID NO: 27123 - RNA, 20 nt, Artificial Sequence
  LRRK2 RNA guide
aaaacccucugccuucagaa

SEQ ID NO: 27124 - RNA, 20 nt, Artificial Sequence
  LRRK2 RNA guide
aaacccucugccuucagaag

SEQ ID NO: 27125 - RNA, 20 nt, Artificial Sequence
  LRRK2 RNA guide
aaagagcagaguucuucuga

SEQ ID NO: 27126 - RNA, 20 nt, Artificial Sequence
  LRRK2 RNA guide
aacccucugccuucagaaga

SEQ ID NO: 27127 - RNA, 20 nt, Artificial Sequence
  LRRK2 RNA guide
aacucugcucuuuggauagg

SEQ ID NO: 27128 - RNA, 20 nt, Artificial Sequence
  LRRK2 RNA guide
aagaacucugcucuuuggau

SEQ ID NO: 27129 - RNA, 20 nt, Artificial Sequence
  LRRK2 RNA guide
aagagcagaguucuucugaa

SEQ ID NO: 27130 - RNA, 20 nt, Artificial Sequence
  LRRK2 RNA guide
acccucugccuucagaagaa

SEQ ID NO: 27131 - RNA, 20 nt, Artificial Sequence
  LRRK2 RNA guide
acucugcucuuuggauagga

SEQ ID NO: 27132 - RNA, 20 nt, Artificial Sequence
  LRRK2 RNA guide
agaacucugcucuuuggaua

SEQ ID NO: 27133 - RNA, 20 nt, Artificial Sequence
  LRRK2 RNA guide
agaagaacucugcucuuugg

SEQ ID NO: 27134 - RNA, 20 nt, Artificial Sequence
  LRRK2 RNA guide
agagcagaguucuucugaag

SEQ ID NO: 27135 - RNA, 20 nt, Artificial Sequence
  LRRK2 RNA guide
agaguucuucugaaggcaga

SEQ ID NO: 27136 - RNA, 20 nt, Artificial Sequence
  LRRK2 RNA guide
agcagaguucuucugaaggc

SEQ ID NO: 27137 - RNA, 20 nt, Artificial Sequence
  LRRK2 RNA guide
auccaaagagcagaguucuu

SEQ ID NO: 27138 - RNA, 20 nt, Artificial Sequence
  LRRK2 RNA guide
caaagagcagaguucuucug

SEQ ID NO: 27139 - RNA, 20 nt, Artificial Sequence
  LRRK2 RNA guide
cagaagaacucugcucuuug

SEQ ID NO: 27140 - RNA, 20 nt, Artificial Sequence
  LRRK2 RNA guide
cagaguucuucugaaggcag

SEQ ID NO: 27141 - RNA, 20 nt, Artificial Sequence
  LRRK2 RNA guide
caguuccuauccaaagagca

SEQ ID NO: 27142 - RNA, 20 nt, Artificial Sequence
  LRRK2 RNA guide
ccaaagagcagaguucuucu

SEQ ID NO: 27143 - RNA, 20 nt, Artificial Sequence
  LRRK2 RNA guide
ccaguuccuauccaaagagc

SEQ ID NO: 27144 - RNA, 20 nt, Artificial Sequence
  LRRK2 RNA guide
cccucugccuucagaagaac

SEQ ID NO: 27145 - RNA, 20 nt, Artificial Sequence
  LRRK2 RNA guide
ccuauccaaagagcagaguu

SEQ ID NO: 27146 - RNA, 20 nt, Artificial Sequence
  LRRK2 RNA guide
ccucugccuucagaagaacu

SEQ ID NO: 27147 - RNA, 20 nt, Artificial Sequence
  LRRK2 RNA guide
ccuucagaagaacucugcuc

SEQ ID NO: 27148 - RNA, 20 nt, Artificial Sequence
  LRRK2 RNA guide
cuauccaaagagcagaguuc

SEQ ID NO: 27149 - RNA, 20 nt, Artificial Sequence
  LRRK2 RNA guide
cuccaguuccuauccaaaga

SEQ ID NO: 27150 - RNA, 20 nt, Artificial Sequence
  LRRK2 RNA guide
cucugccuucagaagaacuc

SEQ ID NO: 27151 - RNA, 20 nt, Artificial Sequence
  LRRK2 RNA guide
cucugcucuuuggauaggaa

SEQ ID NO: 27152 - RNA, 20 nt, Artificial Sequence
  LRRK2 RNA guide
cugccuucagaagaacucug

SEQ ID NO: 27153 - RNA, 20 nt, Artificial Sequence
  LRRK2 RNA guide
cuucagaagaacucugcucu

SEQ ID NO: 27154 - RNA, 20 nt, Artificial Sequence
  LRRK2 RNA guide
gaacucugcucuuuggauag

SEQ ID NO: 27155 - RNA, 20 nt, Artificial Sequence
  LRRK2 RNA guide
gaagaacucugcucuuugga

SEQ ID NO: 27156 - RNA, 20 nt, Artificial Sequence
  LRRK2 RNA guide
gagcagaguucuucugaagg

SEQ ID NO: 27157 - RNA, 20 nt, Artificial Sequence
  LRRK2 RNA guide
gaguucuucugaaggcagag

SEQ ID NO: 27158 - RNA, 20 nt, Artificial Sequence
  LRRK2 RNA guide
gcagaguucuucugaaggca

SEQ ID NO: 27159 - RNA, 20 nt, Artificial Sequence
  LRRK2 RNA guide
gccuucagaagaacucugcu

SEQ ID NO: 27160 - RNA, 20 nt, Artificial Sequence
  LRRK2 RNA guide
guuccuauccaaagagcaga

SEQ ID NO: 27161 - RNA, 20 nt, Artificial Sequence
  LRRK2 RNA guide
uauccaaagagcagaguucu

SEQ ID NO: 27162 - RNA, 20 nt, Artificial Sequence
  LRRK2 RNA guide
ucagaagaacucugcucuuu

SEQ ID NO: 27163 - RNA, 20 nt, Artificial Sequence
  LRRK2 RNA guide
uccaaagagcagaguucuuc

SEQ ID NO: 27164 - RNA, 20 nt, Artificial Sequence
  LRRK2 RNA guide
uccaguuccuauccaaagag

SEQ ID NO: 27165 - RNA, 20 nt, Artificial Sequence
  LRRK2 RNA guide
uccuauccaaagagcagagu

SEQ ID NO: 27166 - RNA, 20 nt, Artificial Sequence
  LRRK2 RNA guide
ucugccuucagaagaacucu

SEQ ID NO: 27167 - RNA, 20 nt, Artificial Sequence
  LRRK2 RNA guide
ugccuucagaagaacucugc

SEQ ID NO: 27168 - RNA, 20 nt, Artificial Sequence
  LRRK2 RNA guide
uucagaagaacucugcucuu

SEQ ID NO: 27169 - RNA, 20 nt, Artificial Sequence
  LRRK2 RNA guide
uuccuauccaaagagcagag

SEQ ID NO: 27170 - RNA, 21 nt, Artificial Sequence
  LRRK2 RNA guide
aaaacccucugccuucagaag

SEQ ID NO: 27171 - RNA, 21 nt, Artificial Sequence
  LRRK2 RNA guide
aaacccucugccuucagaaga

SEQ ID NO: 27172 - RNA, 21 nt, Artificial Sequence
  LRRK2 RNA guide
aaagagcagaguucuucugaa

SEQ ID NO: 27173 - RNA, 21 nt, Artificial Sequence
  LRRK2 RNA guide
aacccucugccuucagaagaa

SEQ ID NO: 27174 - RNA, 21 nt, Artificial Sequence
  LRRK2 RNA guide
aacucugcucuuuggauagga

SEQ ID NO: 27175 - RNA, 21 nt, Artificial Sequence
  LRRK2 RNA guide
aagaacucugcucuuuggaua

SEQ ID NO: 27176 - RNA, 21 nt, Artificial Sequence
  LRRK2 RNA guide
aagagcagaguucuucugaag

SEQ ID NO: 27177 - RNA, 21 nt, Artificial Sequence
  LRRK2 RNA guide
acccucugccuucagaagaac

SEQ ID NO: 27178 - RNA, 21 nt, Artificial Sequence
  LRRK2 RNA guide
acucugcucuuuggauaggaa

SEQ ID NO: 27179 - RNA, 21 nt, Artificial Sequence
  LRRK2 RNA guide
agaacucugcucuuuggauag

SEQ ID NO: 27180 - RNA, 21 nt, Artificial Sequence
  LRRK2 RNA guide
agaagaacucugcucuuugga

SEQ ID NO: 27181 - RNA, 21 nt, Artificial Sequence
  LRRK2 RNA guide
agagcagaguucuucugaagg

SEQ ID NO: 27182 - RNA, 21 nt, Artificial Sequence
  LRRK2 RNA guide
agaguucuucugaaggcagag

SEQ ID NO: 27183 - RNA, 21 nt, Artificial Sequence
  LRRK2 RNA guide
agcagaguucuucugaaggca

SEQ ID NO: 27184 - RNA, 21 nt, Artificial Sequence
  LRRK2 RNA guide
aguuccuauccaaagagcaga

SEQ ID NO: 27185 - RNA, 21 nt, Artificial Sequence
  LRRK2 RNA guide
auccaaagagcagaguucuuc

SEQ ID NO: 27186 - RNA, 21 nt, Artificial Sequence
  LRRK2 RNA guide
caaagagcagaguucuucuga

SEQ ID NO: 27187 - RNA, 21 nt, Artificial Sequence
  LRRK2 RNA guide
cagaagaacucugcucuuugg

SEQ ID NO: 27188 - RNA, 21 nt, Artificial Sequence
  LRRK2 RNA guide
cagaguucuucugaaggcaga

SEQ ID NO: 27189 - RNA, 21 nt, Artificial Sequence
  LRRK2 RNA guide
caguuccuauccaaagagcag

SEQ ID NO: 27190 - RNA, 21 nt, Artificial Sequence
  LRRK2 RNA guide
ccaaagagcagaguucuucug

SEQ ID NO: 27191 - RNA, 21 nt, Artificial Sequence
  LRRK2 RNA guide
ccaguuccuauccaaagagca

SEQ ID NO: 27192 - RNA, 21 nt, Artificial Sequence
  LRRK2 RNA guide
cccucugccuucagaagaacu

SEQ ID NO: 27193 - RNA, 21 nt, Artificial Sequence
  LRRK2 RNA guide
ccuauccaaagagcagaguuc

SEQ ID NO: 27194 - RNA, 21 nt, Artificial Sequence
  LRRK2 RNA guide
ccuccaguuccuauccaaaga

SEQ ID NO: 27195 - RNA, 21 nt, Artificial Sequence
  LRRK2 RNA guide
ccucugccuucagaagaacuc

SEQ ID NO: 27196 - RNA, 21 nt, Artificial Sequence
  LRRK2 RNA guide
ccuucagaagaacucugcucu

SEQ ID NO: 27197 - RNA, 21 nt, Artificial Sequence
  LRRK2 RNA guide
cuauccaaagagcagaguucu

SEQ ID NO: 27198 - RNA, 21 nt, Artificial Sequence
  LRRK2 RNA guide
cuccaguuccuauccaaagag

SEQ ID NO: 27199 - RNA, 21 nt, Artificial Sequence
  LRRK2 RNA guide
cucugccuucagaagaacucu

SEQ ID NO: 27200 - RNA, 21 nt, Artificial Sequence
  LRRK2 RNA guide
cucugcucuuuggauaggaac

SEQ ID NO: 27201 - RNA, 21 nt, Artificial Sequence
  LRRK2 RNA guide
cugccuucagaagaacucugc

SEQ ID NO: 27202 - RNA, 21 nt, Artificial Sequence
  LRRK2 RNA guide
cuucagaagaacucugcucuu

SEQ ID NO: 27203 - RNA, 21 nt, Artificial Sequence
  LRRK2 RNA guide
gaaaacccucugccuucagaa

SEQ ID NO: 27204 - RNA, 21 nt, Artificial Sequence
  LRRK2 RNA guide
gaacucugcucuuuggauagg

SEQ ID NO: 27205 - RNA, 21 nt, Artificial Sequence
  LRRK2 RNA guide
gaagaacucugcucuuuggau

SEQ ID NO: 27206 - RNA, 21 nt, Artificial Sequence
  LRRK2 RNA guide
gagcagaguucuucugaaggc

SEQ ID NO: 27207 - RNA, 21 nt, Artificial Sequence
  LRRK2 RNA guide
gaguucuucugaaggcagagg

SEQ ID NO: 27208 - RNA, 21 nt, Artificial Sequence
  LRRK2 RNA guide
gcagaguucuucugaaggcag

SEQ ID NO: 27209 - RNA, 21 nt, Artificial Sequence
  LRRK2 RNA guide
gccuucagaagaacucugcuc

SEQ ID NO: 27210 - RNA, 21 nt, Artificial Sequence
  LRRK2 RNA guide
guuccuauccaaagagcagag

SEQ ID NO: 27211 - RNA, 21 nt, Artificial Sequence
  LRRK2 RNA guide
uauccaaagagcagaguucuu

SEQ ID NO: 27212 - RNA, 21 nt, Artificial Sequence
  LRRK2 RNA guide
ucagaagaacucugcucuuug

SEQ ID NO: 27213 - RNA, 21 nt, Artificial Sequence
  LRRK2 RNA guide
uccaaagagcagaguucuucu

SEQ ID NO: 27214 - RNA, 21 nt, Artificial Sequence
  LRRK2 RNA guide
uccaguuccuauccaaagagc

SEQ ID NO: 27215 - RNA, 21 nt, Artificial Sequence
  LRRK2 RNA guide
uccuauccaaagagcagaguu

SEQ ID NO: 27216 - RNA, 21 nt, Artificial Sequence
  LRRK2 RNA guide
ucugccuucagaagaacucug

SEQ ID NO: 27217 - RNA, 21 nt, Artificial Sequence
  LRRK2 RNA guide
ugccuucagaagaacucugcu

SEQ ID NO: 27218 - RNA, 21 nt, Artificial Sequence
  LRRK2 RNA guide
uucagaagaacucugcucuuu

SEQ ID NO: 27219 - RNA, 21 nt, Artificial Sequence
  LRRK2 RNA guide
uuccuauccaaagagcagagu

SEQ ID NO: 27220 - RNA, 22 nt, Artificial Sequence
  LRRK2 RNA guide
aaaacccucugccuucagaaga

SEQ ID NO: 27221 - RNA, 22 nt, Artificial Sequence
  LRRK2 RNA guide
aaacccucugccuucagaagaa

SEQ ID NO: 27222 - RNA, 22 nt, Artificial Sequence
  LRRK2 RNA guide
aaagagcagaguucuucugaag

SEQ ID NO: 27223 - RNA, 22 nt, Artificial Sequence
  LRRK2 RNA guide
aacccucugccuucagaagaac

SEQ ID NO: 27224 - RNA, 22 nt, Artificial Sequence
  LRRK2 RNA guide
aacucugcucuuuggauaggaa

SEQ ID NO: 27225 - RNA, 22 nt, Artificial Sequence
  LRRK2 RNA guide
aagaacucugcucuuuggauag

SEQ ID NO: 27226 - RNA, 22 nt, Artificial Sequence
  LRRK2 RNA guide
aagagcagaguucuucugaagg

SEQ ID NO: 27227 - RNA, 22 nt, Artificial Sequence
  LRRK2 RNA guide
acccucugccuucagaagaacu

SEQ ID NO: 27228 - RNA, 22 nt, Artificial Sequence
  LRRK2 RNA guide
acucugcucuuuggauaggaac

SEQ ID NO: 27229 - RNA, 22 nt, Artificial Sequence
  LRRK2 RNA guide
agaacucugcucuuuggauagg

SEQ ID NO: 27230 - RNA, 22 nt, Artificial Sequence
  LRRK2 RNA guide
agaagaacucugcucuuuggau

SEQ ID NO: 27231 - RNA, 22 nt, Artificial Sequence
  LRRK2 RNA guide
agagcagaguucuucugaaggc

SEQ ID NO: 27232 - RNA, 22 nt, Artificial Sequence
  LRRK2 RNA guide
agaguucuucugaaggcagagg

SEQ ID NO: 27233 - RNA, 22 nt, Artificial Sequence
  LRRK2 RNA guide
agcagaguucuucugaaggcag

SEQ ID NO: 27234 - RNA, 22 nt, Artificial Sequence
  LRRK2 RNA guide
aguuccuauccaaagagcagag

SEQ ID NO: 27235 - RNA, 22 nt, Artificial Sequence
  LRRK2 RNA guide
auccaaagagcagaguucuucu

SEQ ID NO: 27236 - RNA, 22 nt, Artificial Sequence
  LRRK2 RNA guide
caaagagcagaguucuucugaa

SEQ ID NO: 27237 - RNA, 22 nt, Artificial Sequence
  LRRK2 RNA guide
cagaagaacucugcucuuugga

SEQ ID NO: 27238 - RNA, 22 nt, Artificial Sequence
  LRRK2 RNA guide
cagaguucuucugaaggcagag

SEQ ID NO: 27239 - RNA, 22 nt, Artificial Sequence
  LRRK2 RNA guide
caguuccuauccaaagagcaga

SEQ ID NO: 27240 - RNA, 22 nt, Artificial Sequence
  LRRK2 RNA guide
ccaaagagcagaguucuucuga

SEQ ID NO: 27241 - RNA, 22 nt, Artificial Sequence
  LRRK2 RNA guide
ccaguuccuauccaaagagcag

SEQ ID NO: 27242 - RNA, 22 nt, Artificial Sequence
  LRRK2 RNA guide
cccucugccuucagaagaacuc

SEQ ID NO: 27243 - RNA, 22 nt, Artificial Sequence
  LRRK2 RNA guide
ccuauccaaagagcagaguucu

SEQ ID NO: 27244 - RNA, 22 nt, Artificial Sequence
  LRRK2 RNA guide
ccuccaguuccuauccaaagag

SEQ ID NO: 27245 - RNA, 22 nt, Artificial Sequence
  LRRK2 RNA guide
ccucugccuucagaagaacucu

SEQ ID NO: 27246 - RNA, 22 nt, Artificial Sequence
  LRRK2 RNA guide
ccuucagaagaacucugcucuu

SEQ ID NO: 27247 - RNA, 22 nt, Artificial Sequence
  LRRK2 RNA guide
cuauccaaagagcagaguucuu

SEQ ID NO: 27248 - RNA, 22 nt, Artificial Sequence
  LRRK2 RNA guide
cuccaguuccuauccaaagagc

SEQ ID NO: 27249 - RNA, 22 nt, Artificial Sequence
  LRRK2 RNA guide
cucugccuucagaagaacucug

SEQ ID NO: 27250 - RNA, 22 nt, Artificial Sequence
  LRRK2 RNA guide
cucugcucuuuggauaggaacu

SEQ ID NO: 27251 - RNA, 22 nt, Artificial Sequence
  LRRK2 RNA guide
cugccuucagaagaacucugcu

SEQ ID NO: 27252 - RNA, 22 nt, Artificial Sequence
  LRRK2 RNA guide
cuucagaagaacucugcucuuu

SEQ ID NO: 27253 - RNA, 22 nt, Artificial Sequence
  LRRK2 RNA guide
gaaaacccucugccuucagaag

SEQ ID NO: 27254 - RNA, 22 nt, Artificial Sequence
  LRRK2 RNA guide
gaacucugcucuuuggauagga

SEQ ID NO: 27255 - RNA, 22 nt, Artificial Sequence
  LRRK2 RNA guide
gaagaacucugcucuuuggaua

SEQ ID NO: 27256 - RNA, 22 nt, Artificial Sequence
  LRRK2 RNA guide
gagcagaguucuucugaaggca

SEQ ID NO: 27257 - RNA, 22 nt, Artificial Sequence
  LRRK2 RNA guide
gaguucuucugaaggcagaggg

SEQ ID NO: 27258 - RNA, 22 nt, Artificial Sequence
  LRRK2 RNA guide
gcagaguucuucugaaggcaga

SEQ ID NO: 27259 - RNA, 22 nt, Artificial Sequence
  LRRK2 RNA guide
gccuucagaagaacucugcucu

SEQ ID NO: 27260 - RNA, 22 nt, Artificial Sequence
  LRRK2 RNA guide
guuccuauccaaagagcagagu

SEQ ID NO: 27261 - RNA, 22 nt, Artificial Sequence
  LRRK2 RNA guide
uauccaaagagcagaguucuuc

SEQ ID NO: 27262 - RNA, 22 nt, Artificial Sequence
  LRRK2 RNA guide
ucagaagaacucugcucuuugg

SEQ ID NO: 27263 - RNA, 22 nt, Artificial Sequence
  LRRK2 RNA guide
uccaaagagcagaguucuucug

SEQ ID NO: 27264 - RNA, 22 nt, Artificial Sequence
  LRRK2 RNA guide
uccaguuccuauccaaagagca

SEQ ID NO: 27265 - RNA, 22 nt, Artificial Sequence
  LRRK2 RNA guide
uccuauccaaagagcagaguuc

SEQ ID NO: 27266 - RNA, 22 nt, Artificial Sequence
  LRRK2 RNA guide
uccuccaguuccuauccaaaga

SEQ ID NO: 27267 - RNA, 22 nt, Artificial Sequence
  LRRK2 RNA guide
ucugccuucagaagaacucugc

SEQ ID NO: 27268 - RNA, 22 nt, Artificial Sequence
  LRRK2 RNA guide
ugaaaacccucugccuucagaa

SEQ ID NO: 27269 - RNA, 22 nt, Artificial Sequence
  LRRK2 RNA guide
ugccuucagaagaacucugcuc

SEQ ID NO: 27270 - RNA, 22 nt, Artificial Sequence
  LRRK2 RNA guide
uucagaagaacucugcucuuug

SEQ ID NO: 27271 - RNA, 22 nt, Artificial Sequence
  LRRK2 RNA guide
uuccuauccaaagagcagaguu

SEQ ID NO: 27272 - RNA, 20 nt, Artificial Sequence
  LRRK2 RNA guide
aaaacauggccuccuccagu

SEQ ID NO: 27273 - RNA, 20 nt, Artificial Sequence
  LRRK2 RNA guide
aaacauggccuccuccaguu

SEQ ID NO: 27274 - RNA, 20 nt, Artificial Sequence
  LRRK2 RNA guide
aaagauccaggaguaaaaca

SEQ ID NO: 27275 - RNA, 20 nt, Artificial Sequence
  LRRK2 RNA guide
aacauggccuccuccaguuc

SEQ ID NO: 27276 - RNA, 20 nt, Artificial Sequence
  LRRK2 RNA guide
aacuggaggaggccauguuu

SEQ ID NO: 27277 - RNA, 20 nt, Artificial Sequence
  LRRK2 RNA guide
aagauccaggaguaaaacau

SEQ ID NO: 27278 - RNA, 20 nt, Artificial Sequence
  LRRK2 RNA guide
acauggccuccuccaguucc

SEQ ID NO: 27279 - RNA, 20 nt, Artificial Sequence
  LRRK2 RNA guide
acuggaggaggccauguuuu

SEQ ID NO: 27280 - RNA, 20 nt, Artificial Sequence
  LRRK2 RNA guide
agauccaggaguaaaacaug

SEQ ID NO: 27281 - RNA, 20 nt, Artificial Sequence
  LRRK2 RNA guide
aggaacuggaggaggccaug

SEQ ID NO: 27282 - RNA, 20 nt, Artificial Sequence
  LRRK2 RNA guide
aggaggccauguuuuacucc

SEQ ID NO: 27283 - RNA, 20 nt, Artificial Sequence
  LRRK2 RNA guide
aggaguaaaacauggccucc

SEQ ID NO: 27284 - RNA, 20 nt, Artificial Sequence
  LRRK2 RNA guide
aggccauguuuuacuccugg

SEQ ID NO: 27285 - RNA, 20 nt, Artificial Sequence
  LRRK2 RNA guide
aguaaaacauggccuccucc

SEQ ID NO: 27286 - RNA, 20 nt, Artificial Sequence
  LRRK2 RNA guide
aguugaaagauccaggagua

SEQ ID NO: 27287 - RNA, 20 nt, Artificial Sequence
  LRRK2 RNA guide
auaggaacuggaggaggcca

SEQ ID NO: 27288 - RNA, 20 nt, Artificial Sequence
  LRRK2 RNA guide
auccaggaguaaaacauggc

SEQ ID NO: 27289 - RNA, 20 nt, Artificial Sequence
  LRRK2 RNA guide
auguuuuacuccuggaucuu

SEQ ID NO: 27290 - RNA, 20 nt, Artificial Sequence
  LRRK2 RNA guide
caggaguaaaacauggccuc

SEQ ID NO: 27291 - RNA, 20 nt, Artificial Sequence
  LRRK2 RNA guide
cauguuuuacuccuggaucu

SEQ ID NO: 27292 - RNA, 20 nt, Artificial Sequence
  LRRK2 RNA guide
ccaggaguaaaacauggccu

SEQ ID NO: 27293 - RNA, 20 nt, Artificial Sequence
  LRRK2 RNA guide
ccauguuuuacuccuggauc

SEQ ID NO: 27294 - RNA, 20 nt, Artificial Sequence
  LRRK2 RNA guide
cuggaggaggccauguuuua

SEQ ID NO: 27295 - RNA, 20 nt, Artificial Sequence
  LRRK2 RNA guide
gaaagauccaggaguaaaac

SEQ ID NO: 27296 - RNA, 20 nt, Artificial Sequence
  LRRK2 RNA guide
gaacuggaggaggccauguu

SEQ ID NO: 27297 - RNA, 20 nt, Artificial Sequence
  LRRK2 RNA guide
gaggaggccauguuuuacuc

SEQ ID NO: 27298 - RNA, 20 nt, Artificial Sequence
  LRRK2 RNA guide
gaggccauguuuuacuccug

SEQ ID NO: 27299 - RNA, 20 nt, Artificial Sequence
  LRRK2 RNA guide
gaguaaaacauggccuccuc

SEQ ID NO: 27300 - RNA, 20 nt, Artificial Sequence
  LRRK2 RNA guide
gaguugaaagauccaggagu

SEQ ID NO: 27301 - RNA, 20 nt, Artificial Sequence
  LRRK2 RNA guide
gauaggaacuggaggaggcc

SEQ ID NO: 27302 - RNA, 20 nt, Artificial Sequence
  LRRK2 RNA guide
gauccaggaguaaaacaugg

SEQ ID NO: 27303 - RNA, 20 nt, Artificial Sequence
  LRRK2 RNA guide
gccauguuuuacuccuggau

SEQ ID NO: 27304 - RNA, 20 nt, Artificial Sequence
  LRRK2 RNA guide
ggaacuggaggaggccaugu

SEQ ID NO: 27305 - RNA, 20 nt, Artificial Sequence
  LRRK2 RNA guide
ggaggaggccauguuuuacu

SEQ ID NO: 27306 - RNA, 20 nt, Artificial Sequence
  LRRK2 RNA guide
ggaggccauguuuuacuccu

SEQ ID NO: 27307 - RNA, 20 nt, Artificial Sequence
  LRRK2 RNA guide
ggaguaaaacauggccuccu

SEQ ID NO: 27308 - RNA, 20 nt, Artificial Sequence
  LRRK2 RNA guide
ggauaggaacuggaggaggc

SEQ ID NO: 27309 - RNA, 20 nt, Artificial Sequence
  LRRK2 RNA guide
ggccauguuuuacuccugga

SEQ ID NO: 27310 - RNA, 20 nt, Artificial Sequence
  LRRK2 RNA guide
guaaaacauggccuccucca

SEQ ID NO: 27311 - RNA, 20 nt, Artificial Sequence
  LRRK2 RNA guide
uaaaacauggccuccuccag

SEQ ID NO: 27312 - RNA, 20 nt, Artificial Sequence
  LRRK2 RNA guide
uaggaacuggaggaggccau

SEQ ID NO: 27313 - RNA, 20 nt, Artificial Sequence
  LRRK2 RNA guide
uccaggaguaaaacauggcc

SEQ ID NO: 27314 - RNA, 20 nt, Artificial Sequence
  LRRK2 RNA guide
ugaaagauccaggaguaaaa

SEQ ID NO: 27315 - RNA, 20 nt, Artificial Sequence
  LRRK2 RNA guide
uggaggaggccauguuuuac

SEQ ID NO: 27316 - RNA, 20 nt, Artificial Sequence
  LRRK2 RNA guide
uggauaggaacuggaggagg

SEQ ID NO: 27317 - RNA, 20 nt, Artificial Sequence
  LRRK2 RNA guide
uguuuuacuccuggaucuuu

SEQ ID NO: 27318 - RNA, 20 nt, Artificial Sequence
  LRRK2 RNA guide
uugaaagauccaggaguaaa

SEQ ID NO: 27319 - RNA, 21 nt, Artificial Sequence
  LRRK2 RNA guide
aaaacauggccuccuccaguu

SEQ ID NO: 27320 - RNA, 21 nt, Artificial Sequence
  LRRK2 RNA guide
aaacauggccuccuccaguuc

SEQ ID NO: 27321 - RNA, 21 nt, Artificial Sequence
  LRRK2 RNA guide
aaagauccaggaguaaaacau

SEQ ID NO: 27322 - RNA, 21 nt, Artificial Sequence
  LRRK2 RNA guide
aacauggccuccuccaguucc

SEQ ID NO: 27323 - RNA, 21 nt, Artificial Sequence
  LRRK2 RNA guide
aacuggaggaggccauguuuu

SEQ ID NO: 27324 - RNA, 21 nt, Artificial Sequence
  LRRK2 RNA guide
aagauccaggaguaaaacaug

SEQ ID NO: 27325 - RNA, 21 nt, Artificial Sequence
  LRRK2 RNA guide
acauggccuccuccaguuccu

SEQ ID NO: 27326 - RNA, 21 nt, Artificial Sequence
  LRRK2 RNA guide
acuggaggaggccauguuuua

SEQ ID NO: 27327 - RNA, 21 nt, Artificial Sequence
  LRRK2 RNA guide
agauccaggaguaaaacaugg

SEQ ID NO: 27328 - RNA, 21 nt, Artificial Sequence
  LRRK2 RNA guide
aggaacuggaggaggccaugu

SEQ ID NO: 27329 - RNA, 21 nt, Artificial Sequence
  LRRK2 RNA guide
aggaggccauguuuuacuccu

SEQ ID NO: 27330 - RNA, 21 nt, Artificial Sequence
  LRRK2 RNA guide
aggaguaaaacauggccuccu

SEQ ID NO: 27331 - RNA, 21 nt, Artificial Sequence
  LRRK2 RNA guide
aggccauguuuuacuccugga

SEQ ID NO: 27332 - RNA, 21 nt, Artificial Sequence
  LRRK2 RNA guide
aguaaaacauggccuccucca

SEQ ID NO: 27333 - RNA, 21 nt, Artificial Sequence
  LRRK2 RNA guide
aguugaaagauccaggaguaa

SEQ ID NO: 27334 - RNA, 21 nt, Artificial Sequence
  LRRK2 RNA guide
auaggaacuggaggaggccau

SEQ ID NO: 27335 - RNA, 21 nt, Artificial Sequence
  LRRK2 RNA guide
auccaggaguaaaacauggcc

SEQ ID NO: 27336 - RNA, 21 nt, Artificial Sequence
  LRRK2 RNA guide
auguuuuacuccuggaucuuu

SEQ ID NO: 27337 - RNA, 21 nt, Artificial Sequence
  LRRK2 RNA guide
caggaguaaaacauggccucc

SEQ ID NO: 27338 - RNA, 21 nt, Artificial Sequence
  LRRK2 RNA guide
cauguuuuacuccuggaucuu

SEQ ID NO: 27339 - RNA, 21 nt, Artificial Sequence
  LRRK2 RNA guide
ccaggaguaaaacauggccuc

SEQ ID NO: 27340 - RNA, 21 nt, Artificial Sequence
  LRRK2 RNA guide
ccauguuuuacuccuggaucu

SEQ ID NO: 27341 - RNA, 21 nt, Artificial Sequence
  LRRK2 RNA guide
cgaguugaaagauccaggagu

SEQ ID NO: 27342 - RNA, 21 nt, Artificial Sequence
  LRRK2 RNA guide
cuggaggaggccauguuuuac

SEQ ID NO: 27343 - RNA, 21 nt, Artificial Sequence
  LRRK2 RNA guide
gaaagauccaggaguaaaaca

SEQ ID NO: 27344 - RNA, 21 nt, Artificial Sequence
  LRRK2 RNA guide
gaacuggaggaggccauguuu

SEQ ID NO: 27345 - RNA, 21 nt, Artificial Sequence
  LRRK2 RNA guide
gaggaggccauguuuuacucc

SEQ ID NO: 27346 - RNA, 21 nt, Artificial Sequence
  LRRK2 RNA guide
gaggccauguuuuacuccugg

SEQ ID NO: 27347 - RNA, 21 nt, Artificial Sequence
  LRRK2 RNA guide
gaguaaaacauggccuccucc

SEQ ID NO: 27348 - RNA, 21 nt, Artificial Sequence
  LRRK2 RNA guide
gaguugaaagauccaggagua

SEQ ID NO: 27349 - RNA, 21 nt, Artificial Sequence
  LRRK2 RNA guide
gauaggaacuggaggaggcca

SEQ ID NO: 27350 - RNA, 21 nt, Artificial Sequence
  LRRK2 RNA guide
gauccaggaguaaaacauggc

SEQ ID NO: 27351 - RNA, 21 nt, Artificial Sequence
  LRRK2 RNA guide
gccauguuuuacuccuggauc

SEQ ID NO: 27352 - RNA, 21 nt, Artificial Sequence
  LRRK2 RNA guide
ggaacuggaggaggccauguu

SEQ ID NO: 27353 - RNA, 21 nt, Artificial Sequence
  LRRK2 RNA guide
ggaggaggccauguuuuacuc

SEQ ID NO: 27354 - RNA, 21 nt, Artificial Sequence
  LRRK2 RNA guide
ggaggccauguuuuacuccug

SEQ ID NO: 27355 - RNA, 21 nt, Artificial Sequence
  LRRK2 RNA guide
ggaguaaaacauggccuccuc

SEQ ID NO: 27356 - RNA, 21 nt, Artificial Sequence
  LRRK2 RNA guide
ggauaggaacuggaggaggcc

SEQ ID NO: 27357 - RNA, 21 nt, Artificial Sequence
  LRRK2 RNA guide
ggccauguuuuacuccuggau

SEQ ID NO: 27358 - RNA, 21 nt, Artificial Sequence
  LRRK2 RNA guide
guaaaacauggccuccuccag

SEQ ID NO: 27359 - RNA, 21 nt, Artificial Sequence
  LRRK2 RNA guide
guugaaagauccaggaguaaa

SEQ ID NO: 27360 - RNA, 21 nt, Artificial Sequence
  LRRK2 RNA guide
uaaaacauggccuccuccagu

SEQ ID NO: 27361 - RNA, 21 nt, Artificial Sequence
  LRRK2 RNA guide
uaggaacuggaggaggccaug

SEQ ID NO: 27362 - RNA, 21 nt, Artificial Sequence
  LRRK2 RNA guide
uccaggaguaaaacauggccu

SEQ ID NO: 27363 - RNA, 21 nt, Artificial Sequence
  LRRK2 RNA guide
ugaaagauccaggaguaaaac

SEQ ID NO: 27364 - RNA, 21 nt, Artificial Sequence
  LRRK2 RNA guide
uggaggaggccauguuuuacu

SEQ ID NO: 27365 - RNA, 21 nt, Artificial Sequence
  LRRK2 RNA guide
uggauaggaacuggaggaggc

SEQ ID NO: 27366 - RNA, 21 nt, Artificial Sequence
  LRRK2 RNA guide
uguuuuacuccuggaucuuuc

SEQ ID NO: 27367 - RNA, 21 nt, Artificial Sequence
  LRRK2 RNA guide
uugaaagauccaggaguaaaa

SEQ ID NO: 27368 - RNA, 21 nt, Artificial Sequence
  LRRK2 RNA guide
uuggauaggaacuggaggagg

SEQ ID NO: 27369 - RNA, 22 nt, Artificial Sequence
  LRRK2 RNA guide
aaaacauggccuccuccaguuc

SEQ ID NO: 27370 - RNA, 22 nt, Artificial Sequence
  LRRK2 RNA guide
aaacauggccuccuccaguucc

SEQ ID NO: 27371 - RNA, 22 nt, Artificial Sequence
  LRRK2 RNA guide
aaagauccaggaguaaaacaug

SEQ ID NO: 27372 - RNA, 22 nt, Artificial Sequence
  LRRK2 RNA guide
aacauggccuccuccaguuccu

SEQ ID NO: 27373 - RNA, 22 nt, Artificial Sequence
  LRRK2 RNA guide
aacuggaggaggccauguuuua

SEQ ID NO: 27374 - RNA, 22 nt, Artificial Sequence
  LRRK2 RNA guide
aagauccaggaguaaaacaugg

SEQ ID NO: 27375 - RNA, 22 nt, Artificial Sequence
  LRRK2 RNA guide
acauggccuccuccaguuccua

SEQ ID NO: 27376 - RNA, 22 nt, Artificial Sequence
  LRRK2 RNA guide
acgaguugaaagauccaggagu

SEQ ID NO: 27377 - RNA, 22 nt, Artificial Sequence
  LRRK2 RNA guide
acuggaggaggccauguuuuac

SEQ ID NO: 27378 - RNA, 22 nt, Artificial Sequence
  LRRK2 RNA guide
agauccaggaguaaaacauggc

SEQ ID NO: 27379 - RNA, 22 nt, Artificial Sequence
  LRRK2 RNA guide
aggaacuggaggaggccauguu

SEQ ID NO: 27380 - RNA, 22 nt, Artificial Sequence
  LRRK2 RNA guide
aggaggccauguuuuacuccug

SEQ ID NO: 27381 - RNA, 22 nt, Artificial Sequence
  LRRK2 RNA guide
aggaguaaaacauggccuccuc

SEQ ID NO: 27382 - RNA, 22 nt, Artificial Sequence
  LRRK2 RNA guide
aggccauguuuuacuccuggau

SEQ ID NO: 27383 - RNA, 22 nt, Artificial Sequence
  LRRK2 RNA guide
aguaaaacauggccuccuccag

SEQ ID NO: 27384 - RNA, 22 nt, Artificial Sequence
  LRRK2 RNA guide
aguugaaagauccaggaguaaa

SEQ ID NO: 27385 - RNA, 22 nt, Artificial Sequence
  LRRK2 RNA guide
auaggaacuggaggaggccaug

SEQ ID NO: 27386 - RNA, 22 nt, Artificial Sequence
  LRRK2 RNA guide
auccaggaguaaaacauggccu

SEQ ID NO: 27387 - RNA, 22 nt, Artificial Sequence
  LRRK2 RNA guide
auguuuuacuccuggaucuuuc

SEQ ID NO: 27388 - RNA, 22 nt, Artificial Sequence
  LRRK2 RNA guide
caggaguaaaacauggccuccu

SEQ ID NO: 27389 - RNA, 22 nt, Artificial Sequence
  LRRK2 RNA guide
cauguuuuacuccuggaucuuu

SEQ ID NO: 27390 - RNA, 22 nt, Artificial Sequence
  LRRK2 RNA guide
ccaggaguaaaacauggccucc

SEQ ID NO: 27391 - RNA, 22 nt, Artificial Sequence
  LRRK2 RNA guide
ccauguuuuacuccuggaucuu

SEQ ID NO: 27392 - RNA, 22 nt, Artificial Sequence
  LRRK2 RNA guide
cgaguugaaagauccaggagua

SEQ ID NO: 27393 - RNA, 22 nt, Artificial Sequence
  LRRK2 RNA guide
cuggaggaggccauguuuuacu

SEQ ID NO: 27394 - RNA, 22 nt, Artificial Sequence
  LRRK2 RNA guide
gaaagauccaggaguaaaacau

SEQ ID NO: 27395 - RNA, 22 nt, Artificial Sequence
  LRRK2 RNA guide
gaacuggaggaggccauguuuu

SEQ ID NO: 27396 - RNA, 22 nt, Artificial Sequence
  LRRK2 RNA guide
gaggaggccauguuuuacuccu

SEQ ID NO: 27397 - RNA, 22 nt, Artificial Sequence
  LRRK2 RNA guide
gaggccauguuuuacuccugga

SEQ ID NO: 27398 - RNA, 22 nt, Artificial Sequence
  LRRK2 RNA guide
gaguaaaacauggccuccucca

SEQ ID NO: 27399 - RNA, 22 nt, Artificial Sequence
  LRRK2 RNA guide
gaguugaaagauccaggaguaa

SEQ ID NO: 27400 - RNA, 22 nt, Artificial Sequence
  LRRK2 RNA guide
gauaggaacuggaggaggccau

SEQ ID NO: 27401 - RNA, 22 nt, Artificial Sequence
  LRRK2 RNA guide
gauccaggaguaaaacauggcc

SEQ ID NO: 27402 - RNA, 22 nt, Artificial Sequence
  LRRK2 RNA guide
gccauguuuuacuccuggaucu

SEQ ID NO: 27403 - RNA, 22 nt, Artificial Sequence
  LRRK2 RNA guide
ggaacuggaggaggccauguuu

SEQ ID NO: 27404 - RNA, 22 nt, Artificial Sequence
  LRRK2 RNA guide
ggaggaggccauguuuuacucc

SEQ ID NO: 27405 - RNA, 22 nt, Artificial Sequence
  LRRK2 RNA guide
ggaggccauguuuuacuccugg

SEQ ID NO: 27406 - RNA, 22 nt, Artificial Sequence
  LRRK2 RNA guide
ggaguaaaacauggccuccucc

SEQ ID NO: 27407 - RNA, 22 nt, Artificial Sequence
  LRRK2 RNA guide
ggauaggaacuggaggaggcca

SEQ ID NO: 27408 - RNA, 22 nt, Artificial Sequence
  LRRK2 RNA guide
ggccauguuuuacuccuggauc

SEQ ID NO: 27409 - RNA, 22 nt, Artificial Sequence
  LRRK2 RNA guide
guaaaacauggccuccuccagu

SEQ ID NO: 27410 - RNA, 22 nt, Artificial Sequence
  LRRK2 RNA guide
guugaaagauccaggaguaaaa

SEQ ID NO: 27411 - RNA, 22 nt, Artificial Sequence
  LRRK2 RNA guide
uaaaacauggccuccuccaguu

SEQ ID NO: 27412 - RNA, 22 nt, Artificial Sequence
  LRRK2 RNA guide
uaggaacuggaggaggccaugu

SEQ ID NO: 27413 - RNA, 22 nt, Artificial Sequence
  LRRK2 RNA guide
uccaggaguaaaacauggccuc

SEQ ID NO: 27414 - RNA, 22 nt, Artificial Sequence
  LRRK2 RNA guide
ugaaagauccaggaguaaaaca

SEQ ID NO: 27415 - RNA, 22 nt, Artificial Sequence
  LRRK2 RNA guide
uggaggaggccauguuuuacuc

SEQ ID NO: 27416 - RNA, 22 nt, Artificial Sequence
  LRRK2 RNA guide
uggauaggaacuggaggaggcc

SEQ ID NO: 27417 - RNA, 22 nt, Artificial Sequence
  LRRK2 RNA guide
uguuuuacuccuggaucuuuca

SEQ ID NO: 27418 - RNA, 22 nt, Artificial Sequence
  LRRK2 RNA guide
uugaaagauccaggaguaaaac

SEQ ID NO: 27419 - RNA, 22 nt, Artificial Sequence
  LRRK2 RNA guide
uuggauaggaacuggaggaggc

SEQ ID NO: 27420 - RNA, 22 nt, Artificial Sequence
  LRRK2 RNA guide
uuuggauaggaacuggaggagg

SEQ ID NO: 27421 - RNA, 20 nt, Artificial Sequence
  LRRK2 RNA guide
aaacuugccuagcuaugcug

SEQ ID NO: 27422 - RNA, 20 nt, Artificial Sequence
  LRRK2 RNA guide
aaagaaacuugccuagcuau

SEQ ID NO: 27423 - RNA, 20 nt, Artificial Sequence
  LRRK2 RNA guide
aaaggaaagaaacuugccua

SEQ ID NO: 27424 - RNA, 20 nt, Artificial Sequence
  LRRK2 RNA guide
aacuugccuagcuaugcugu

SEQ ID NO: 27425 - RNA, 20 nt, Artificial Sequence
  LRRK2 RNA guide
aagaaacuugccuagcuaug

SEQ ID NO: 27426 - RNA, 20 nt, Artificial Sequence
  LRRK2 RNA guide
aaggaaagaaacuugccuag

SEQ ID NO: 27427 - RNA, 20 nt, Artificial Sequence
  LRRK2 RNA guide
acagcauagcuaggcaaguu

SEQ ID NO: 27428 - RNA, 20 nt, Artificial Sequence
  LRRK2 RNA guide
acuugccuagcuaugcuguc

SEQ ID NO: 27429 - RNA, 20 nt, Artificial Sequence
  LRRK2 RNA guide
agaaacuugccuagcuaugc

SEQ ID NO: 27430 - RNA, 20 nt, Artificial Sequence
  LRRK2 RNA guide
agagucaugaugacagcaua

SEQ ID NO: 27431 - RNA, 20 nt, Artificial Sequence
  LRRK2 RNA guide
agcauagcuaggcaaguuuc

SEQ ID NO: 27432 - RNA, 20 nt, Artificial Sequence
  LRRK2 RNA guide
agcuaugcugucaucaugac

SEQ ID NO: 27433 - RNA, 20 nt, Artificial Sequence
  LRRK2 RNA guide
aggaaagaaacuugccuagc

SEQ ID NO: 27434 - RNA, 20 nt, Artificial Sequence
  LRRK2 RNA guide
agucaugaugacagcauagc

SEQ ID NO: 27435 - RNA, 20 nt, Artificial Sequence
  LRRK2 RNA guide
auagcuaggcaaguuucuuu

SEQ ID NO: 27436 - RNA, 20 nt, Artificial Sequence
  LRRK2 RNA guide
augacagcauagcuaggcaa

SEQ ID NO: 27437 - RNA, 20 nt, Artificial Sequence
  LRRK2 RNA guide
augaugacagcauagcuagg

SEQ ID NO: 27438 - RNA, 20 nt, Artificial Sequence
  LRRK2 RNA guide
cagagucaugaugacagcau

SEQ ID NO: 27439 - RNA, 20 nt, Artificial Sequence
  LRRK2 RNA guide
cagcauagcuaggcaaguuu

SEQ ID NO: 27440 - RNA, 20 nt, Artificial Sequence
  LRRK2 RNA guide
cauagcuaggcaaguuucuu

SEQ ID NO: 27441 - RNA, 20 nt, Artificial Sequence
  LRRK2 RNA guide
caugaugacagcauagcuag

SEQ ID NO: 27442 - RNA, 20 nt, Artificial Sequence
  LRRK2 RNA guide
ccuagcuaugcugucaucau

SEQ ID NO: 27443 - RNA, 20 nt, Artificial Sequence
  LRRK2 RNA guide
cggucagagucaugaugaca

SEQ ID NO: 27444 - RNA, 20 nt, Artificial Sequence
  LRRK2 RNA guide
cuagcuaugcugucaucaug

SEQ ID NO: 27445 - RNA, 20 nt, Artificial Sequence
  LRRK2 RNA guide
cuaugcugucaucaugacuc

SEQ ID NO: 27446 - RNA, 20 nt, Artificial Sequence
  LRRK2 RNA guide
cuugccuagcuaugcuguca

SEQ ID NO: 27447 - RNA, 20 nt, Artificial Sequence
  LRRK2 RNA guide
gaaacuugccuagcuaugcu

SEQ ID NO: 27448 - RNA, 20 nt, Artificial Sequence
  LRRK2 RNA guide
gaaagaaacuugccuagcua

SEQ ID NO: 27449 - RNA, 20 nt, Artificial Sequence
  LRRK2 RNA guide
gacagcauagcuaggcaagu

SEQ ID NO: 27450 - RNA, 20 nt, Artificial Sequence
  LRRK2 RNA guide
gagucaugaugacagcauag

SEQ ID NO: 27451 - RNA, 20 nt, Artificial Sequence
  LRRK2 RNA guide
gaugacagcauagcuaggca

SEQ ID NO: 27452 - RNA, 20 nt, Artificial Sequence
  LRRK2 RNA guide
gcauagcuaggcaaguuucu

SEQ ID NO: 27453 - RNA, 20 nt, Artificial Sequence
  LRRK2 RNA guide
gccuagcuaugcugucauca

SEQ ID NO: 27454 - RNA, 20 nt, Artificial Sequence
  LRRK2 RNA guide
gcuaugcugucaucaugacu

SEQ ID NO: 27455 - RNA, 20 nt, Artificial Sequence
  LRRK2 RNA guide
ggaaagaaacuugccuagcu

SEQ ID NO: 27456 - RNA, 20 nt, Artificial Sequence
  LRRK2 RNA guide
ggucagagucaugaugacag

SEQ ID NO: 27457 - RNA, 20 nt, Artificial Sequence
  LRRK2 RNA guide
gucagagucaugaugacagc

SEQ ID NO: 27458 - RNA, 20 nt, Artificial Sequence
  LRRK2 RNA guide
gucaugaugacagcauagcu

SEQ ID NO: 27459 - RNA, 20 nt, Artificial Sequence
  LRRK2 RNA guide
uaaaggaaagaaacuugccu

SEQ ID NO: 27460 - RNA, 20 nt, Artificial Sequence
  LRRK2 RNA guide
uagcuaugcugucaucauga

SEQ ID NO: 27461 - RNA, 20 nt, Artificial Sequence
  LRRK2 RNA guide
uaugcugucaucaugacucu

SEQ ID NO: 27462 - RNA, 20 nt, Artificial Sequence
  LRRK2 RNA guide
ucagagucaugaugacagca

SEQ ID NO: 27463 - RNA, 20 nt, Artificial Sequence
  LRRK2 RNA guide
ucaugaugacagcauagcua

SEQ ID NO: 27464 - RNA, 20 nt, Artificial Sequence
  LRRK2 RNA guide
ucggucagagucaugaugac

SEQ ID NO: 27465 - RNA, 20 nt, Artificial Sequence
  LRRK2 RNA guide
ugacagcauagcuaggcaag

SEQ ID NO: 27466 - RNA, 20 nt, Artificial Sequence
  LRRK2 RNA guide
ugaugacagcauagcuaggc

SEQ ID NO: 27467 - RNA, 20 nt, Artificial Sequence
  LRRK2 RNA guide
ugccuagcuaugcugucauc

SEQ ID NO: 27468 - RNA, 20 nt, Artificial Sequence
  LRRK2 RNA guide
uugccuagcuaugcugucau

SEQ ID NO: 27469 - RNA, 21 nt, Artificial Sequence
  LRRK2 RNA guide
aaacuugccuagcuaugcugu

SEQ ID NO: 27470 - RNA, 21 nt, Artificial Sequence
  LRRK2 RNA guide
aaagaaacuugccuagcuaug

SEQ ID NO: 27471 - RNA, 21 nt, Artificial Sequence
  LRRK2 RNA guide
aaaggaaagaaacuugccuag

SEQ ID NO: 27472 - RNA, 21 nt, Artificial Sequence
  LRRK2 RNA guide
aacuugccuagcuaugcuguc

SEQ ID NO: 27473 - RNA, 21 nt, Artificial Sequence
  LRRK2 RNA guide
aagaaacuugccuagcuaugc

SEQ ID NO: 27474 - RNA, 21 nt, Artificial Sequence
  LRRK2 RNA guide
aaggaaagaaacuugccuagc

SEQ ID NO: 27475 - RNA, 21 nt, Artificial Sequence
  LRRK2 RNA guide
acagcauagcuaggcaaguuu

SEQ ID NO: 27476 - RNA, 21 nt, Artificial Sequence
  LRRK2 RNA guide
acuugccuagcuaugcuguca

SEQ ID NO: 27477 - RNA, 21 nt, Artificial Sequence
  LRRK2 RNA guide
agaaacuugccuagcuaugcu

SEQ ID NO: 27478 - RNA, 21 nt, Artificial Sequence
  LRRK2 RNA guide
agagucaugaugacagcauag

SEQ ID NO: 27479 - RNA, 21 nt, Artificial Sequence
  LRRK2 RNA guide
agcauagcuaggcaaguuucu

SEQ ID NO: 27480 - RNA, 21 nt, Artificial Sequence
  LRRK2 RNA guide
agcuaugcugucaucaugacu

SEQ ID NO: 27481 - RNA, 21 nt, Artificial Sequence
  LRRK2 RNA guide
aggaaagaaacuugccuagcu

SEQ ID NO: 27482 - RNA, 21 nt, Artificial Sequence
  LRRK2 RNA guide
agucaugaugacagcauagcu

SEQ ID NO: 27483 - RNA, 21 nt, Artificial Sequence
  LRRK2 RNA guide
auagcuaggcaaguuucuuuc

SEQ ID NO: 27484 - RNA, 21 nt, Artificial Sequence
  LRRK2 RNA guide
augacagcauagcuaggcaag

SEQ ID NO: 27485 - RNA, 21 nt, Artificial Sequence
  LRRK2 RNA guide
augaugacagcauagcuaggc

SEQ ID NO: 27486 - RNA, 21 nt, Artificial Sequence
  LRRK2 RNA guide
cagagucaugaugacagcaua

SEQ ID NO: 27487 - RNA, 21 nt, Artificial Sequence
  LRRK2 RNA guide
cagcauagcuaggcaaguuuc

SEQ ID NO: 27488 - RNA, 21 nt, Artificial Sequence
  LRRK2 RNA guide
cauagcuaggcaaguuucuuu

SEQ ID NO: 27489 - RNA, 21 nt, Artificial Sequence
  LRRK2 RNA guide
caugaugacagcauagcuagg

SEQ ID NO: 27490 - RNA, 21 nt, Artificial Sequence
  LRRK2 RNA guide
ccuagcuaugcugucaucaug

SEQ ID NO: 27491 - RNA, 21 nt, Artificial Sequence
  LRRK2 RNA guide
cggucagagucaugaugacag

SEQ ID NO: 27492 - RNA, 21 nt, Artificial Sequence
  LRRK2 RNA guide
cuaaaggaaagaaacuugccu

SEQ ID NO: 27493 - RNA, 21 nt, Artificial Sequence
  LRRK2 RNA guide
cuagcuaugcugucaucauga

SEQ ID NO: 27494 - RNA, 21 nt, Artificial Sequence
  LRRK2 RNA guide
cuaugcugucaucaugacucu

SEQ ID NO: 27495 - RNA, 21 nt, Artificial Sequence
  LRRK2 RNA guide
cuugccuagcuaugcugucau

SEQ ID NO: 27496 - RNA, 21 nt, Artificial Sequence
  LRRK2 RNA guide
gaaacuugccuagcuaugcug

SEQ ID NO: 27497 - RNA, 21 nt, Artificial Sequence
  LRRK2 RNA guide
gaaagaaacuugccuagcuau

SEQ ID NO: 27498 - RNA, 21 nt, Artificial Sequence
  LRRK2 RNA guide
gacagcauagcuaggcaaguu

SEQ ID NO: 27499 - RNA, 21 nt, Artificial Sequence
  LRRK2 RNA guide
gagucaugaugacagcauagc

SEQ ID NO: 27500 - RNA, 21 nt, Artificial Sequence
  LRRK2 RNA guide
gaugacagcauagcuaggcaa

SEQ ID NO: 27501 - RNA, 21 nt, Artificial Sequence
  LRRK2 RNA guide
gcauagcuaggcaaguuucuu

SEQ ID NO: 27502 - RNA, 21 nt, Artificial Sequence
  LRRK2 RNA guide
gccuagcuaugcugucaucau

SEQ ID NO: 27503 - RNA, 21 nt, Artificial Sequence
  LRRK2 RNA guide
gcuaugcugucaucaugacuc

SEQ ID NO: 27504 - RNA, 21 nt, Artificial Sequence
  LRRK2 RNA guide
ggaaagaaacuugccuagcua

SEQ ID NO: 27505 - RNA, 21 nt, Artificial Sequence
  LRRK2 RNA guide
ggucagagucaugaugacagc

SEQ ID NO: 27506 - RNA, 21 nt, Artificial Sequence
  LRRK2 RNA guide
gucagagucaugaugacagca

SEQ ID NO: 27507 - RNA, 21 nt, Artificial Sequence
  LRRK2 RNA guide
gucaugaugacagcauagcua

SEQ ID NO: 27508 - RNA, 21 nt, Artificial Sequence
  LRRK2 RNA guide
uaaaggaaagaaacuugccua

SEQ ID NO: 27509 - RNA, 21 nt, Artificial Sequence
  LRRK2 RNA guide
uagcuaugcugucaucaugac

SEQ ID NO: 27510 - RNA, 21 nt, Artificial Sequence
  LRRK2 RNA guide
uaugcugucaucaugacucug

SEQ ID NO: 27511 - RNA, 21 nt, Artificial Sequence
  LRRK2 RNA guide
ucagagucaugaugacagcau

SEQ ID NO: 27512 - RNA, 21 nt, Artificial Sequence
  LRRK2 RNA guide
ucaugaugacagcauagcuag

SEQ ID NO: 27513 - RNA, 21 nt, Artificial Sequence
  LRRK2 RNA guide
ucggucagagucaugaugaca

SEQ ID NO: 27514 - RNA, 21 nt, Artificial Sequence
  LRRK2 RNA guide
ugacagcauagcuaggcaagu

SEQ ID NO: 27515 - RNA, 21 nt, Artificial Sequence
  LRRK2 RNA guide
ugaugacagcauagcuaggca

SEQ ID NO: 27516 - RNA, 21 nt, Artificial Sequence
  LRRK2 RNA guide
ugccuagcuaugcugucauca

SEQ ID NO: 27517 - RNA, 21 nt, Artificial Sequence
  LRRK2 RNA guide
uucggucagagucaugaugac

SEQ ID NO: 27518 - RNA, 21 nt, Artificial Sequence
  LRRK2 RNA guide
uugccuagcuaugcugucauc

SEQ ID NO: 27519 - RNA, 22 nt, Artificial Sequence
  LRRK2 RNA guide
aaacuugccuagcuaugcuguc

SEQ ID NO: 27520 - RNA, 22 nt, Artificial Sequence
  LRRK2 RNA guide
aaagaaacuugccuagcuaugc

SEQ ID NO: 27521 - RNA, 22 nt, Artificial Sequence
  LRRK2 RNA guide
aaaggaaagaaacuugccuagc

SEQ ID NO: 27522 - RNA, 22 nt, Artificial Sequence
  LRRK2 RNA guide
aacuugccuagcuaugcuguca

SEQ ID NO: 27523 - RNA, 22 nt, Artificial Sequence
  LRRK2 RNA guide
aagaaacuugccuagcuaugcu

SEQ ID NO: 27524 - RNA, 22 nt, Artificial Sequence
  LRRK2 RNA guide
aaggaaagaaacuugccuagcu

SEQ ID NO: 27525 - RNA, 22 nt, Artificial Sequence
  LRRK2 RNA guide
acagcauagcuaggcaaguuuc

SEQ ID NO: 27526 - RNA, 22 nt, Artificial Sequence
  LRRK2 RNA guide
acuugccuagcuaugcugucau

SEQ ID NO: 27527 - RNA, 22 nt, Artificial Sequence
  LRRK2 RNA guide
agaaacuugccuagcuaugcug

SEQ ID NO: 27528 - RNA, 22 nt, Artificial Sequence
  LRRK2 RNA guide
agagucaugaugacagcauagc

SEQ ID NO: 27529 - RNA, 22 nt, Artificial Sequence
  LRRK2 RNA guide
agcauagcuaggcaaguuucuu

SEQ ID NO: 27530 - RNA, 22 nt, Artificial Sequence
  LRRK2 RNA guide
agcuaugcugucaucaugacuc

SEQ ID NO: 27531 - RNA, 22 nt, Artificial Sequence
  LRRK2 RNA guide
aggaaagaaacuugccuagcua

SEQ ID NO: 27532 - RNA, 22 nt, Artificial Sequence
  LRRK2 RNA guide
agucaugaugacagcauagcua

SEQ ID NO: 27533 - RNA, 22 nt, Artificial Sequence
  LRRK2 RNA guide
auagcuaggcaaguuucuuucc

SEQ ID NO: 27534 - RNA, 22 nt, Artificial Sequence
  LRRK2 RNA guide
augacagcauagcuaggcaagu

SEQ ID NO: 27535 - RNA, 22 nt, Artificial Sequence
  LRRK2 RNA guide
augaugacagcauagcuaggca

SEQ ID NO: 27536 - RNA, 22 nt, Artificial Sequence
  LRRK2 RNA guide
auucggucagagucaugaugac

SEQ ID NO: 27537 - RNA, 22 nt, Artificial Sequence
  LRRK2 RNA guide
cagagucaugaugacagcauag

SEQ ID NO: 27538 - RNA, 22 nt, Artificial Sequence
  LRRK2 RNA guide
cagcauagcuaggcaaguuucu

SEQ ID NO: 27539 - RNA, 22 nt, Artificial Sequence
  LRRK2 RNA guide
cauagcuaggcaaguuucuuuc

SEQ ID NO: 27540 - RNA, 22 nt, Artificial Sequence
  LRRK2 RNA guide
caugaugacagcauagcuaggc

SEQ ID NO: 27541 - RNA, 22 nt, Artificial Sequence
  LRRK2 RNA guide
ccuagcuaugcugucaucauga

SEQ ID NO: 27542 - RNA, 22 nt, Artificial Sequence
  LRRK2 RNA guide
cggucagagucaugaugacagc

SEQ ID NO: 27543 - RNA, 22 nt, Artificial Sequence
  LRRK2 RNA guide
cuaaaggaaagaaacuugccua

SEQ ID NO: 27544 - RNA, 22 nt, Artificial Sequence
  LRRK2 RNA guide
cuagcuaugcugucaucaugac

SEQ ID NO: 27545 - RNA, 22 nt, Artificial Sequence
  LRRK2 RNA guide
cuaugcugucaucaugacucug

SEQ ID NO: 27546 - RNA, 22 nt, Artificial Sequence
  LRRK2 RNA guide
cuugccuagcuaugcugucauc

SEQ ID NO: 27547 - RNA, 22 nt, Artificial Sequence
  LRRK2 RNA guide
gaaacuugccuagcuaugcugu

SEQ ID NO: 27548 - RNA, 22 nt, Artificial Sequence
  LRRK2 RNA guide
gaaagaaacuugccuagcuaug

SEQ ID NO: 27549 - RNA, 22 nt, Artificial Sequence
  LRRK2 RNA guide
gacagcauagcuaggcaaguuu

SEQ ID NO: 27550 - RNA, 22 nt, Artificial Sequence
  LRRK2 RNA guide
gagucaugaugacagcauagcu

SEQ ID NO: 27551 - RNA, 22 nt, Artificial Sequence
  LRRK2 RNA guide
gaugacagcauagcuaggcaag

SEQ ID NO: 27552 - RNA, 22 nt, Artificial Sequence
  LRRK2 RNA guide
gcauagcuaggcaaguuucuuu

SEQ ID NO: 27553 - RNA, 22 nt, Artificial Sequence
  LRRK2 RNA guide
gccuagcuaugcugucaucaug

SEQ ID NO: 27554 - RNA, 22 nt, Artificial Sequence
  LRRK2 RNA guide
gcuaugcugucaucaugacucu

SEQ ID NO: 27555 - RNA, 22 nt, Artificial Sequence
  LRRK2 RNA guide
ggaaagaaacuugccuagcuau

SEQ ID NO: 27556 - RNA, 22 nt, Artificial Sequence
  LRRK2 RNA guide
ggucagagucaugaugacagca

SEQ ID NO: 27557 - RNA, 22 nt, Artificial Sequence
  LRRK2 RNA guide
gucagagucaugaugacagcau

SEQ ID NO: 27558 - RNA, 22 nt, Artificial Sequence
  LRRK2 RNA guide
gucaugaugacagcauagcuag

SEQ ID NO: 27559 - RNA, 22 nt, Artificial Sequence
  LRRK2 RNA guide
uaaaggaaagaaacuugccuag

SEQ ID NO: 27560 - RNA, 22 nt, Artificial Sequence
  LRRK2 RNA guide
uagcuaugcugucaucaugacu

SEQ ID NO: 27561 - RNA, 22 nt, Artificial Sequence
  LRRK2 RNA guide
uaugcugucaucaugacucuga

SEQ ID NO: 27562 - RNA, 22 nt, Artificial Sequence
  LRRK2 RNA guide
ucagagucaugaugacagcaua

SEQ ID NO: 27563 - RNA, 22 nt, Artificial Sequence
  LRRK2 RNA guide
ucaugaugacagcauagcuagg

SEQ ID NO: 27564 - RNA, 22 nt, Artificial Sequence
  LRRK2 RNA guide
ucggucagagucaugaugacag

SEQ ID NO: 27565 - RNA, 22 nt, Artificial Sequence
  LRRK2 RNA guide
ucuaaaggaaagaaacuugccu

SEQ ID NO: 27566 - RNA, 22 nt, Artificial Sequence
  LRRK2 RNA guide
ugacagcauagcuaggcaaguu

SEQ ID NO: 27567 - RNA, 22 nt, Artificial Sequence
  LRRK2 RNA guide
ugaugacagcauagcuaggcaa

SEQ ID NO: 27568 - RNA, 22 nt, Artificial Sequence
  LRRK2 RNA guide
ugccuagcuaugcugucaucau

SEQ ID NO: 27569 - RNA, 22 nt, Artificial Sequence
  LRRK2 RNA guide
uucggucagagucaugaugaca

SEQ ID NO: 27570 - RNA, 22 nt, Artificial Sequence
  LRRK2 RNA guide
uugccuagcuaugcugucauca

SEQ ID NO: 27571 - RNA, 20 nt, Artificial Sequence
  LRRK2 RNA guide
aaaggaagccauaaaaaugu

SEQ ID NO: 27572 - RNA, 20 nt, Artificial Sequence
  LRRK2 RNA guide
aagccauaaaaaugucaugc

SEQ ID NO: 27573 - RNA, 20 nt, Artificial Sequence
  LRRK2 RNA guide
aaggaagccauaaaaauguc

SEQ ID NO: 27574 - RNA, 20 nt, Artificial Sequence
  LRRK2 RNA guide
aauaccagcaugacauuuuu

SEQ ID NO: 27575 - RNA, 20 nt, Artificial Sequence
  LRRK2 RNA guide
acauuuuuauggcuuccuuu

SEQ ID NO: 27576 - RNA, 20 nt, Artificial Sequence
  LRRK2 RNA guide
accagcaugacauuuuuaug

SEQ ID NO: 27577 - RNA, 20 nt, Artificial Sequence
  LRRK2 RNA guide
agcaugacauuuuuauggcu

SEQ ID NO: 27578 - RNA, 20 nt, Artificial Sequence
  LRRK2 RNA guide
agccauaaaaaugucaugcu

SEQ ID NO: 27579 - RNA, 20 nt, Artificial Sequence
  LRRK2 RNA guide
aggaagccauaaaaauguca

SEQ ID NO: 27580 - RNA, 20 nt, Artificial Sequence
  LRRK2 RNA guide
auaccagcaugacauuuuua

SEQ ID NO: 27581 - RNA, 20 nt, Artificial Sequence
  LRRK2 RNA guide
augacauuuuuauggcuucc

SEQ ID NO: 27582 - RNA, 20 nt, Artificial Sequence
  LRRK2 RNA guide
auggcuuccuuuacaaaaac

SEQ ID NO: 27583 - RNA, 20 nt, Artificial Sequence
  LRRK2 RNA guide
auuuuuauggcuuccuuuac

SEQ ID NO: 27584 - RNA, 20 nt, Artificial Sequence
  LRRK2 RNA guide
caauaccagcaugacauuuu

SEQ ID NO: 27585 - RNA, 20 nt, Artificial Sequence
  LRRK2 RNA guide
cagcaugacauuuuuauggc

SEQ ID NO: 27586 - RNA, 20 nt, Artificial Sequence
  LRRK2 RNA guide
cauaaaaaugucaugcuggu

SEQ ID NO: 27587 - RNA, 20 nt, Artificial Sequence
  LRRK2 RNA guide
caugacauuuuuauggcuuc

SEQ ID NO: 27588 - RNA, 20 nt, Artificial Sequence
  LRRK2 RNA guide
cauuuuuauggcuuccuuua

SEQ ID NO: 27589 - RNA, 20 nt, Artificial Sequence
  LRRK2 RNA guide
ccagcaugacauuuuuaugg

SEQ ID NO: 27590 - RNA, 20 nt, Artificial Sequence
  LRRK2 RNA guide
ccauaaaaaugucaugcugg

SEQ ID NO: 27591 - RNA, 20 nt, Artificial Sequence
  LRRK2 RNA guide
cccaauaccagcaugacauu

SEQ ID NO: 27592 - RNA, 20 nt, Artificial Sequence
  LRRK2 RNA guide
gaagccauaaaaaugucaug

SEQ ID NO: 27593 - RNA, 20 nt, Artificial Sequence
  LRRK2 RNA guide
gacauuuuuauggcuuccuu

SEQ ID NO: 27594 - RNA, 20 nt, Artificial Sequence
  LRRK2 RNA guide
gcaugacauuuuuauggcuu

SEQ ID NO: 27595 - RNA, 20 nt, Artificial Sequence
  LRRK2 RNA guide
gccauaaaaaugucaugcug

SEQ ID NO: 27596 - RNA, 20 nt, Artificial Sequence
  LRRK2 RNA guide
ggaagccauaaaaaugucau

SEQ ID NO: 27597 - RNA, 20 nt, Artificial Sequence
  LRRK2 RNA guide
guaaaggaagccauaaaaau

SEQ ID NO: 27598 - RNA, 20 nt, Artificial Sequence
  LRRK2 RNA guide
guuuuuguaaaggaagccau

SEQ ID NO: 27599 - RNA, 20 nt, Artificial Sequence
  LRRK2 RNA guide
uaaaggaagccauaaaaaug

SEQ ID NO: 27600 - RNA, 20 nt, Artificial Sequence
  LRRK2 RNA guide
uaccagcaugacauuuuuau

SEQ ID NO: 27601 - RNA, 20 nt, Artificial Sequence
  LRRK2 RNA guide
uauggcuuccuuuacaaaaa

SEQ ID NO: 27602 - RNA, 20 nt, Artificial Sequence
  LRRK2 RNA guide
ugacauuuuuauggcuuccu

SEQ ID NO: 27603 - RNA, 20 nt, Artificial Sequence
  LRRK2 RNA guide
uguaaaggaagccauaaaaa

SEQ ID NO: 27604 - RNA, 20 nt, Artificial Sequence
  LRRK2 RNA guide
uguuuuuguaaaggaagcca

SEQ ID NO: 27605 - RNA, 20 nt, Artificial Sequence
  LRRK2 RNA guide
uuauggcuuccuuuacaaaa

SEQ ID NO: 27606 - RNA, 20 nt, Artificial Sequence
  LRRK2 RNA guide
uuguaaaggaagccauaaaa

SEQ ID NO: 27607 - RNA, 20 nt, Artificial Sequence
  LRRK2 RNA guide
uuguuuuuguaaaggaagcc

SEQ ID NO: 27608 - RNA, 20 nt, Artificial Sequence
  LRRK2 RNA guide
uuuauggcuuccuuuacaaa

SEQ ID NO: 27609 - RNA, 20 nt, Artificial Sequence
  LRRK2 RNA guide
uuuguaaaggaagccauaaa

SEQ ID NO: 27610 - RNA, 20 nt, Artificial Sequence
  LRRK2 RNA guide
uuuguuuuuguaaaggaagc

SEQ ID NO: 27611 - RNA, 20 nt, Artificial Sequence
  LRRK2 RNA guide
uuuuauggcuuccuuuacaa

SEQ ID NO: 27612 - RNA, 20 nt, Artificial Sequence
  LRRK2 RNA guide
uuuuguaaaggaagccauaa

SEQ ID NO: 27613 - RNA, 20 nt, Artificial Sequence
  LRRK2 RNA guide
uuuuuauggcuuccuuuaca

SEQ ID NO: 27614 - RNA, 20 nt, Artificial Sequence
  LRRK2 RNA guide
uuuuuguaaaggaagccaua

SEQ ID NO: 27615 - RNA, 21 nt, Artificial Sequence
  LRRK2 RNA guide
aaaggaagccauaaaaauguc

SEQ ID NO: 27616 - RNA, 21 nt, Artificial Sequence
  LRRK2 RNA guide
aagccauaaaaaugucaugcu

SEQ ID NO: 27617 - RNA, 21 nt, Artificial Sequence
  LRRK2 RNA guide
aaggaagccauaaaaauguca

SEQ ID NO: 27618 - RNA, 21 nt, Artificial Sequence
  LRRK2 RNA guide
accagcaugacauuuuuaugg

SEQ ID NO: 27619 - RNA, 21 nt, Artificial Sequence
  LRRK2 RNA guide
agcaugacauuuuuauggcuu

SEQ ID NO: 27620 - RNA, 21 nt, Artificial Sequence
  LRRK2 RNA guide
agccauaaaaaugucaugcug

SEQ ID NO: 27621 - RNA, 21 nt, Artificial Sequence
  LRRK2 RNA guide
aggaagccauaaaaaugucau

SEQ ID NO: 27622 - RNA, 21 nt, Artificial Sequence
  LRRK2 RNA guide
augacauuuuuauggcuuccu

SEQ ID NO: 27623 - RNA, 21 nt, Artificial Sequence
  LRRK2 RNA guide
auggcuuccuuuacaaaaaca

SEQ ID NO: 27624 - RNA, 21 nt, Artificial Sequence
  LRRK2 RNA guide
caauaccagcaugacauuuuu

SEQ ID NO: 27625 - RNA, 21 nt, Artificial Sequence
  LRRK2 RNA guide
cagcaugacauuuuuauggcu

SEQ ID NO: 27626 - RNA, 21 nt, Artificial Sequence
  LRRK2 RNA guide
cauaaaaaugucaugcuggua

SEQ ID NO: 27627 - RNA, 21 nt, Artificial Sequence
  LRRK2 RNA guide
caugacauuuuuauggcuucc

SEQ ID NO: 27628 - RNA, 21 nt, Artificial Sequence
  LRRK2 RNA guide
cauuuuuauggcuuccuuuac

SEQ ID NO: 27629 - RNA, 21 nt, Artificial Sequence
  LRRK2 RNA guide
ccaauaccagcaugacauuuu

SEQ ID NO: 27630 - RNA, 21 nt, Artificial Sequence
  LRRK2 RNA guide
ccagcaugacauuuuuauggc

SEQ ID NO: 27631 - RNA, 21 nt, Artificial Sequence
  LRRK2 RNA guide
ccauaaaaaugucaugcuggu

SEQ ID NO: 27632 - RNA, 21 nt, Artificial Sequence
  LRRK2 RNA guide
cccaauaccagcaugacauuu

SEQ ID NO: 27633 - RNA, 21 nt, Artificial Sequence
  LRRK2 RNA guide
gaagccauaaaaaugucaugc

SEQ ID NO: 27634 - RNA, 21 nt, Artificial Sequence
  LRRK2 RNA guide
gacauuuuuauggcuuccuuu

SEQ ID NO: 27635 - RNA, 21 nt, Artificial Sequence
  LRRK2 RNA guide
gcaugacauuuuuauggcuuc

SEQ ID NO: 27636 - RNA, 21 nt, Artificial Sequence
  LRRK2 RNA guide
gccauaaaaaugucaugcugg

SEQ ID NO: 27637 - RNA, 21 nt, Artificial Sequence
  LRRK2 RNA guide
gcccaauaccagcaugacauu

SEQ ID NO: 27638 - RNA, 21 nt, Artificial Sequence
  LRRK2 RNA guide
ggaagccauaaaaaugucaug

SEQ ID NO: 27639 - RNA, 21 nt, Artificial Sequence
  LRRK2 RNA guide
guaaaggaagccauaaaaaug

SEQ ID NO: 27640 - RNA, 21 nt, Artificial Sequence
  LRRK2 RNA guide
guuuuuguaaaggaagccaua

SEQ ID NO: 27641 - RNA, 21 nt, Artificial Sequence
  LRRK2 RNA guide
uaccagcaugacauuuuuaug

SEQ ID NO: 27642 - RNA, 21 nt, Artificial Sequence
  LRRK2 RNA guide
uauggcuuccuuuacaaaaac

SEQ ID NO: 27643 - RNA, 21 nt, Artificial Sequence
  LRRK2 RNA guide
ugacauuuuuauggcuuccuu

SEQ ID NO: 27644 - RNA, 21 nt, Artificial Sequence
  LRRK2 RNA guide
uguuuuuguaaaggaagccau

SEQ ID NO: 27645 - RNA, 21 nt, Artificial Sequence
  LRRK2 RNA guide
uuguuuuuguaaaggaagcca

SEQ ID NO: 27646 - RNA, 21 nt, Artificial Sequence
  LRRK2 RNA guide
uuuguuuuuguaaaggaagcc

SEQ ID NO: 27647 - RNA, 22 nt, Artificial Sequence
  LRRK2 RNA guide
aaaggaagccauaaaaauguca

SEQ ID NO: 27648 - RNA, 22 nt, Artificial Sequence
  LRRK2 RNA guide
aagccauaaaaaugucaugcug

SEQ ID NO: 27649 - RNA, 22 nt, Artificial Sequence
  LRRK2 RNA guide
aaggaagccauaaaaaugucau

SEQ ID NO: 27650 - RNA, 22 nt, Artificial Sequence
  LRRK2 RNA guide
acauuuuuauggcuuccuuuac

SEQ ID NO: 27651 - RNA, 22 nt, Artificial Sequence
  LRRK2 RNA guide
accagcaugacauuuuuauggc

SEQ ID NO: 27652 - RNA, 22 nt, Artificial Sequence
  LRRK2 RNA guide
agcaugacauuuuuauggcuuc

SEQ ID NO: 27653 - RNA, 22 nt, Artificial Sequence
  LRRK2 RNA guide
agccauaaaaaugucaugcugg

SEQ ID NO: 27654 - RNA, 22 nt, Artificial Sequence
  LRRK2 RNA guide
agcccaauaccagcaugacauu

SEQ ID NO: 27655 - RNA, 22 nt, Artificial Sequence
  LRRK2 RNA guide
aggaagccauaaaaaugucaug

SEQ ID NO: 27656 - RNA, 22 nt, Artificial Sequence
  LRRK2 RNA guide
auaccagcaugacauuuuuaug

SEQ ID NO: 27657 - RNA, 22 nt, Artificial Sequence
  LRRK2 RNA guide
augacauuuuuauggcuuccuu

SEQ ID NO: 27658 - RNA, 22 nt, Artificial Sequence
  LRRK2 RNA guide
auggcuuccuuuacaaaaacaa

SEQ ID NO: 27659 - RNA, 22 nt, Artificial Sequence
  LRRK2 RNA guide
caauaccagcaugacauuuuua

SEQ ID NO: 27660 - RNA, 22 nt, Artificial Sequence
  LRRK2 RNA guide
cagcaugacauuuuuauggcuu

SEQ ID NO: 27661 - RNA, 22 nt, Artificial Sequence
  LRRK2 RNA guide
cauaaaaaugucaugcugguau

SEQ ID NO: 27662 - RNA, 22 nt, Artificial Sequence
  LRRK2 RNA guide
caugacauuuuuauggcuuccu

SEQ ID NO: 27663 - RNA, 22 nt, Artificial Sequence
  LRRK2 RNA guide
cauuuuuauggcuuccuuuaca

SEQ ID NO: 27664 - RNA, 22 nt, Artificial Sequence
  LRRK2 RNA guide
ccaauaccagcaugacauuuuu

SEQ ID NO: 27665 - RNA, 22 nt, Artificial Sequence
  LRRK2 RNA guide
ccagcaugacauuuuuauggcu

SEQ ID NO: 27666 - RNA, 22 nt, Artificial Sequence
  LRRK2 RNA guide
ccauaaaaaugucaugcuggua

SEQ ID NO: 27667 - RNA, 22 nt, Artificial Sequence
  LRRK2 RNA guide
cccaauaccagcaugacauuuu

SEQ ID NO: 27668 - RNA, 22 nt, Artificial Sequence
  LRRK2 RNA guide
gaagccauaaaaaugucaugcu

SEQ ID NO: 27669 - RNA, 22 nt, Artificial Sequence
  LRRK2 RNA guide
gacauuuuuauggcuuccuuua

SEQ ID NO: 27670 - RNA, 22 nt, Artificial Sequence
  LRRK2 RNA guide
gcaugacauuuuuauggcuucc

SEQ ID NO: 27671 - RNA, 22 nt, Artificial Sequence
  LRRK2 RNA guide
gccauaaaaaugucaugcuggu

SEQ ID NO: 27672 - RNA, 22 nt, Artificial Sequence
  LRRK2 RNA guide
gcccaauaccagcaugacauuu

SEQ ID NO: 27673 - RNA, 22 nt, Artificial Sequence
  LRRK2 RNA guide
ggaagccauaaaaaugucaugc

SEQ ID NO: 27674 - RNA, 22 nt, Artificial Sequence
  LRRK2 RNA guide
guaaaggaagccauaaaaaugu

SEQ ID NO: 27675 - RNA, 22 nt, Artificial Sequence
  LRRK2 RNA guide
guuuuuguaaaggaagccauaa

SEQ ID NO: 27676 - RNA, 22 nt, Artificial Sequence
  LRRK2 RNA guide
uaaaggaagccauaaaaauguc

SEQ ID NO: 27677 - RNA, 22 nt, Artificial Sequence
  LRRK2 RNA guide
uaccagcaugacauuuuuaugg

SEQ ID NO: 27678 - RNA, 22 nt, Artificial Sequence
  LRRK2 RNA guide
uauggcuuccuuuacaaaaaca

SEQ ID NO: 27679 - RNA, 22 nt, Artificial Sequence
  LRRK2 RNA guide
ugacauuuuuauggcuuccuuu

SEQ ID NO: 27680 - RNA, 22 nt, Artificial Sequence
  LRRK2 RNA guide
uguaaaggaagccauaaaaaug

SEQ ID NO: 27681 - RNA, 22 nt, Artificial Sequence
  LRRK2 RNA guide
uguuuuuguaaaggaagccaua

SEQ ID NO: 27682 - RNA, 22 nt, Artificial Sequence
  LRRK2 RNA guide
uuauggcuuccuuuacaaaaac

SEQ ID NO: 27683 - RNA, 22 nt, Artificial Sequence
  LRRK2 RNA guide
uuguuuuuguaaaggaagccau

SEQ ID NO: 27684 - RNA, 22 nt, Artificial Sequence
  LRRK2 RNA guide
uuuguuuuuguaaaggaagcca

SEQ ID NO: 27685 - RNA, 22 nt, Artificial Sequence
  LRRK2 RNA guide
uuuuguuuuuguaaaggaagcc

SEQ ID NO: 27686 - RNA, 20 nt, Artificial Sequence
  LRRK2 RNA guide
aaagauacugaagguacaca

SEQ ID NO: 27687 - RNA, 20 nt, Artificial Sequence
  LRRK2 RNA guide
aaccggaaagauacugaagg

SEQ ID NO: 27688 - RNA, 20 nt, Artificial Sequence
  LRRK2 RNA guide
aagauacugaagguacacaa

SEQ ID NO: 27689 - RNA, 20 nt, Artificial Sequence
  LRRK2 RNA guide
acaaccggaaagauacugaa

SEQ ID NO: 27690 - RNA, 20 nt, Artificial Sequence
  LRRK2 RNA guide
accggaaagauacugaaggu

SEQ ID NO: 27691 - RNA, 20 nt, Artificial Sequence
  LRRK2 RNA guide
accuucaguaucuuuccggu

SEQ ID NO: 27692 - RNA, 20 nt, Artificial Sequence
  LRRK2 RNA guide
agauacugaagguacacaaa

SEQ ID NO: 27693 - RNA, 20 nt, Artificial Sequence
  LRRK2 RNA guide
aguaucuuuccgguuguagc

SEQ ID NO: 27694 - RNA, 20 nt, Artificial Sequence
  LRRK2 RNA guide
aucuuuccgguuguagccca

SEQ ID NO: 27695 - RNA, 20 nt, Artificial Sequence
  LRRK2 RNA guide
auugggcuacaaccggaaag

SEQ ID NO: 27696 - RNA, 20 nt, Artificial Sequence
  LRRK2 RNA guide
caaccggaaagauacugaag

SEQ ID NO: 27697 - RNA, 20 nt, Artificial Sequence
  LRRK2 RNA guide
caguaucuuuccgguuguag

SEQ ID NO: 27698 - RNA, 20 nt, Artificial Sequence
  LRRK2 RNA guide
ccggaaagauacugaaggua

SEQ ID NO: 27699 - RNA, 20 nt, Artificial Sequence
  LRRK2 RNA guide
ccuucaguaucuuuccgguu

SEQ ID NO: 27700 - RNA, 20 nt, Artificial Sequence
  LRRK2 RNA guide
cggaaagauacugaagguac

SEQ ID NO: 27701 - RNA, 20 nt, Artificial Sequence
  LRRK2 RNA guide
cuacaaccggaaagauacug

SEQ ID NO: 27702 - RNA, 20 nt, Artificial Sequence
  LRRK2 RNA guide
cugcuuuuguguaccuucag

SEQ ID NO: 27703 - RNA, 20 nt, Artificial Sequence
  LRRK2 RNA guide
cugguauugggcuacaaccg

SEQ ID NO: 27704 - RNA, 20 nt, Artificial Sequence
  LRRK2 RNA guide
cuucaguaucuuuccgguug

SEQ ID NO: 27705 - RNA, 20 nt, Artificial Sequence
  LRRK2 RNA guide
cuuuuguguaccuucaguau

SEQ ID NO: 27706 - RNA, 20 nt, Artificial Sequence
  LRRK2 RNA guide
gaaagauacugaagguacac

SEQ ID NO: 27707 - RNA, 20 nt, Artificial Sequence
  LRRK2 RNA guide
gcuacaaccggaaagauacu

SEQ ID NO: 27708 - RNA, 20 nt, Artificial Sequence
  LRRK2 RNA guide
gcuuuuguguaccuucagua

SEQ ID NO: 27709 - RNA, 20 nt, Artificial Sequence
  LRRK2 RNA guide
ggaaagauacugaagguaca

SEQ ID NO: 27710 - RNA, 20 nt, Artificial Sequence
  LRRK2 RNA guide
ggcuacaaccggaaagauac

SEQ ID NO: 27711 - RNA, 20 nt, Artificial Sequence
  LRRK2 RNA guide
gggcuacaaccggaaagaua

SEQ ID NO: 27712 - RNA, 20 nt, Artificial Sequence
  LRRK2 RNA guide
gguauugggcuacaaccgga

SEQ ID NO: 27713 - RNA, 20 nt, Artificial Sequence
  LRRK2 RNA guide
guaccuucaguaucuuuccg

SEQ ID NO: 27714 - RNA, 20 nt, Artificial Sequence
  LRRK2 RNA guide
guaucuuuccgguuguagcc

SEQ ID NO: 27715 - RNA, 20 nt, Artificial Sequence
  LRRK2 RNA guide
guauugggcuacaaccggaa

SEQ ID NO: 27716 - RNA, 20 nt, Artificial Sequence
  LRRK2 RNA guide
guguaccuucaguaucuuuc

SEQ ID NO: 27717 - RNA, 20 nt, Artificial Sequence
  LRRK2 RNA guide
uacaaccggaaagauacuga

SEQ ID NO: 27718 - RNA, 20 nt, Artificial Sequence
  LRRK2 RNA guide
uaccuucaguaucuuuccgg

SEQ ID NO: 27719 - RNA, 20 nt, Artificial Sequence
  LRRK2 RNA guide
uaucuuuccgguuguagccc

SEQ ID NO: 27720 - RNA, 20 nt, Artificial Sequence
  LRRK2 RNA guide
uauugggcuacaaccggaaa

SEQ ID NO: 27721 - RNA, 20 nt, Artificial Sequence
  LRRK2 RNA guide
ucaguaucuuuccgguugua

SEQ ID NO: 27722 - RNA, 20 nt, Artificial Sequence
  LRRK2 RNA guide
ucugcuuuuguguaccuuca

SEQ ID NO: 27723 - RNA, 20 nt, Artificial Sequence
  LRRK2 RNA guide
ucuuuccgguuguagcccaa

SEQ ID NO: 27724 - RNA, 20 nt, Artificial Sequence
  LRRK2 RNA guide
ugcuuuuguguaccuucagu

SEQ ID NO: 27725 - RNA, 20 nt, Artificial Sequence
  LRRK2 RNA guide
ugggcuacaaccggaaagau

SEQ ID NO: 27726 - RNA, 20 nt, Artificial Sequence
  LRRK2 RNA guide
ugguauugggcuacaaccgg

SEQ ID NO: 27727 - RNA, 20 nt, Artificial Sequence
  LRRK2 RNA guide
uguaccuucaguaucuuucc

SEQ ID NO: 27728 - RNA, 20 nt, Artificial Sequence
  LRRK2 RNA guide
uguguaccuucaguaucuuu

SEQ ID NO: 27729 - RNA, 20 nt, Artificial Sequence
  LRRK2 RNA guide
uucaguaucuuuccgguugu

SEQ ID NO: 27730 - RNA, 20 nt, Artificial Sequence
  LRRK2 RNA guide
uugggcuacaaccggaaaga

SEQ ID NO: 27731 - RNA, 20 nt, Artificial Sequence
  LRRK2 RNA guide
uuguguaccuucaguaucuu

SEQ ID NO: 27732 - RNA, 20 nt, Artificial Sequence
  LRRK2 RNA guide
uuuguguaccuucaguaucu

SEQ ID NO: 27733 - RNA, 20 nt, Artificial Sequence
  LRRK2 RNA guide
uuuuguguaccuucaguauc

SEQ ID NO: 27734 - RNA, 21 nt, Artificial Sequence
  LRRK2 RNA guide
aaagauacugaagguacacaa

SEQ ID NO: 27735 - RNA, 21 nt, Artificial Sequence
  LRRK2 RNA guide
aaccggaaagauacugaaggu

SEQ ID NO: 27736 - RNA, 21 nt, Artificial Sequence
  LRRK2 RNA guide
aagauacugaagguacacaaa

SEQ ID NO: 27737 - RNA, 21 nt, Artificial Sequence
  LRRK2 RNA guide
acaaccggaaagauacugaag

SEQ ID NO: 27738 - RNA, 21 nt, Artificial Sequence
  LRRK2 RNA guide
accggaaagauacugaaggua

SEQ ID NO: 27739 - RNA, 21 nt, Artificial Sequence
  LRRK2 RNA guide
accuucaguaucuuuccgguu

SEQ ID NO: 27740 - RNA, 21 nt, Artificial Sequence
  LRRK2 RNA guide
agauacugaagguacacaaaa

SEQ ID NO: 27741 - RNA, 21 nt, Artificial Sequence
  LRRK2 RNA guide
aguaucuuuccgguuguagcc

SEQ ID NO: 27742 - RNA, 21 nt, Artificial Sequence
  LRRK2 RNA guide
aucuuuccgguuguagcccaa

SEQ ID NO: 27743 - RNA, 21 nt, Artificial Sequence
  LRRK2 RNA guide
auugggcuacaaccggaaaga

SEQ ID NO: 27744 - RNA, 21 nt, Artificial Sequence
  LRRK2 RNA guide
caaccggaaagauacugaagg

SEQ ID NO: 27745 - RNA, 21 nt, Artificial Sequence
  LRRK2 RNA guide
caguaucuuuccgguuguagc

SEQ ID NO: 27746 - RNA, 21 nt, Artificial Sequence
  LRRK2 RNA guide
ccggaaagauacugaagguac

SEQ ID NO: 27747 - RNA, 21 nt, Artificial Sequence
  LRRK2 RNA guide
ccuucaguaucuuuccgguug

SEQ ID NO: 27748 - RNA, 21 nt, Artificial Sequence
  LRRK2 RNA guide
cggaaagauacugaagguaca

SEQ ID NO: 27749 - RNA, 21 nt, Artificial Sequence
  LRRK2 RNA guide
cuacaaccggaaagauacuga

SEQ ID NO: 27750 - RNA, 21 nt, Artificial Sequence
  LRRK2 RNA guide
cugcuuuuguguaccuucagu

SEQ ID NO: 27751 - RNA, 21 nt, Artificial Sequence
  LRRK2 RNA guide
cugguauugggcuacaaccgg

SEQ ID NO: 27752 - RNA, 21 nt, Artificial Sequence
  LRRK2 RNA guide
cuucaguaucuuuccgguugu

SEQ ID NO: 27753 - RNA, 21 nt, Artificial Sequence
  LRRK2 RNA guide
cuuuuguguaccuucaguauc

SEQ ID NO: 27754 - RNA, 21 nt, Artificial Sequence
  LRRK2 RNA guide
gaaagauacugaagguacaca

SEQ ID NO: 27755 - RNA, 21 nt, Artificial Sequence
  LRRK2 RNA guide
gcuacaaccggaaagauacug

SEQ ID NO: 27756 - RNA, 21 nt, Artificial Sequence
  LRRK2 RNA guide
gcugguauugggcuacaaccg

SEQ ID NO: 27757 - RNA, 21 nt, Artificial Sequence
  LRRK2 RNA guide
gcuuuuguguaccuucaguau

SEQ ID NO: 27758 - RNA, 21 nt, Artificial Sequence
  LRRK2 RNA guide
ggaaagauacugaagguacac

SEQ ID NO: 27759 - RNA, 21 nt, Artificial Sequence
  LRRK2 RNA guide
ggcuacaaccggaaagauacu

SEQ ID NO: 27760 - RNA, 21 nt, Artificial Sequence
  LRRK2 RNA guide
gggcuacaaccggaaagauac

SEQ ID NO: 27761 - RNA, 21 nt, Artificial Sequence
  LRRK2 RNA guide
gguauugggcuacaaccggaa

SEQ ID NO: 27762 - RNA, 21 nt, Artificial Sequence
  LRRK2 RNA guide
guaccuucaguaucuuuccgg

SEQ ID NO: 27763 - RNA, 21 nt, Artificial Sequence
  LRRK2 RNA guide
guaucuuuccgguuguagccc

SEQ ID NO: 27764 - RNA, 21 nt, Artificial Sequence
  LRRK2 RNA guide
guauugggcuacaaccggaaa

SEQ ID NO: 27765 - RNA, 21 nt, Artificial Sequence
  LRRK2 RNA guide
guguaccuucaguaucuuucc

SEQ ID NO: 27766 - RNA, 21 nt, Artificial Sequence
  LRRK2 RNA guide
uacaaccggaaagauacugaa

SEQ ID NO: 27767 - RNA, 21 nt, Artificial Sequence
  LRRK2 RNA guide
uaccuucaguaucuuuccggu

SEQ ID NO: 27768 - RNA, 21 nt, Artificial Sequence
  LRRK2 RNA guide
uaucuuuccgguuguagccca

SEQ ID NO: 27769 - RNA, 21 nt, Artificial Sequence
  LRRK2 RNA guide
uauugggcuacaaccggaaag

SEQ ID NO: 27770 - RNA, 21 nt, Artificial Sequence
  LRRK2 RNA guide
ucaguaucuuuccgguuguag

SEQ ID NO: 27771 - RNA, 21 nt, Artificial Sequence
  LRRK2 RNA guide
ucugcuuuuguguaccuucag

SEQ ID NO: 27772 - RNA, 21 nt, Artificial Sequence
  LRRK2 RNA guide
ucuuuccgguuguagcccaau

SEQ ID NO: 27773 - RNA, 21 nt, Artificial Sequence
  LRRK2 RNA guide
ugcuuuuguguaccuucagua

SEQ ID NO: 27774 - RNA, 21 nt, Artificial Sequence
  LRRK2 RNA guide
ugggcuacaaccggaaagaua

SEQ ID NO: 27775 - RNA, 21 nt, Artificial Sequence
  LRRK2 RNA guide
ugguauugggcuacaaccgga

SEQ ID NO: 27776 - RNA, 21 nt, Artificial Sequence
  LRRK2 RNA guide
uguaccuucaguaucuuuccg

SEQ ID NO: 27777 - RNA, 21 nt, Artificial Sequence
  LRRK2 RNA guide
uguguaccuucaguaucuuuc

SEQ ID NO: 27778 - RNA, 21 nt, Artificial Sequence
  LRRK2 RNA guide
uucaguaucuuuccgguugua

SEQ ID NO: 27779 - RNA, 21 nt, Artificial Sequence
  LRRK2 RNA guide
uucugcuuuuguguaccuuca

SEQ ID NO: 27780 - RNA, 21 nt, Artificial Sequence
  LRRK2 RNA guide
uugggcuacaaccggaaagau

SEQ ID NO: 27781 - RNA, 21 nt, Artificial Sequence
  LRRK2 RNA guide
uuguguaccuucaguaucuuu

SEQ ID NO: 27782 - RNA, 21 nt, Artificial Sequence
  LRRK2 RNA guide
uuuguguaccuucaguaucuu

SEQ ID NO: 27783 - RNA, 21 nt, Artificial Sequence
  LRRK2 RNA guide
uuuuguguaccuucaguaucu

SEQ ID NO: 27784 - RNA, 22 nt, Artificial Sequence
  LRRK2 RNA guide
aaagauacugaagguacacaaa

SEQ ID NO: 27785 - RNA, 22 nt, Artificial Sequence
  LRRK2 RNA guide
aaccggaaagauacugaaggua

SEQ ID NO: 27786 - RNA, 22 nt, Artificial Sequence
  LRRK2 RNA guide
aagauacugaagguacacaaaa

SEQ ID NO: 27787 - RNA, 22 nt, Artificial Sequence
  LRRK2 RNA guide
acaaccggaaagauacugaagg

SEQ ID NO: 27788 - RNA, 22 nt, Artificial Sequence
  LRRK2 RNA guide
accggaaagauacugaagguac

SEQ ID NO: 27789 - RNA, 22 nt, Artificial Sequence
  LRRK2 RNA guide
accuucaguaucuuuccgguug

SEQ ID NO: 27790 - RNA, 22 nt, Artificial Sequence
  LRRK2 RNA guide
agauacugaagguacacaaaag

SEQ ID NO: 27791 - RNA, 22 nt, Artificial Sequence
  LRRK2 RNA guide
aguaucuuuccgguuguagccc

SEQ ID NO: 27792 - RNA, 22 nt, Artificial Sequence
  LRRK2 RNA guide
aucuuuccgguuguagcccaau

SEQ ID NO: 27793 - RNA, 22 nt, Artificial Sequence
  LRRK2 RNA guide
auugggcuacaaccggaaagau

SEQ ID NO: 27794 - RNA, 22 nt, Artificial Sequence
  LRRK2 RNA guide
caaccggaaagauacugaaggu

SEQ ID NO: 27795 - RNA, 22 nt, Artificial Sequence
  LRRK2 RNA guide
caguaucuuuccgguuguagcc

SEQ ID NO: 27796 - RNA, 22 nt, Artificial Sequence
  LRRK2 RNA guide
ccggaaagauacugaagguaca

SEQ ID NO: 27797 - RNA, 22 nt, Artificial Sequence
  LRRK2 RNA guide
ccuucaguaucuuuccgguugu

SEQ ID NO: 27798 - RNA, 22 nt, Artificial Sequence
  LRRK2 RNA guide
cggaaagauacugaagguacac

SEQ ID NO: 27799 - RNA, 22 nt, Artificial Sequence
  LRRK2 RNA guide
cuacaaccggaaagauacugaa

SEQ ID NO: 27800 - RNA, 22 nt, Artificial Sequence
  LRRK2 RNA guide
cugcuuuuguguaccuucagua

SEQ ID NO: 27801 - RNA, 22 nt, Artificial Sequence
  LRRK2 RNA guide
cugguauugggcuacaaccgga

SEQ ID NO: 27802 - RNA, 22 nt, Artificial Sequence
  LRRK2 RNA guide
cuucaguaucuuuccgguugua

SEQ ID NO: 27803 - RNA, 22 nt, Artificial Sequence
  LRRK2 RNA guide
cuuuuguguaccuucaguaucu

SEQ ID NO: 27804 - RNA, 22 nt, Artificial Sequence
  LRRK2 RNA guide
gaaagauacugaagguacacaa

SEQ ID NO: 27805 - RNA, 22 nt, Artificial Sequence
  LRRK2 RNA guide
gcuacaaccggaaagauacuga

SEQ ID NO: 27806 - RNA, 22 nt, Artificial Sequence
  LRRK2 RNA guide
gcugguauugggcuacaaccgg

SEQ ID NO: 27807 - RNA, 22 nt, Artificial Sequence
  LRRK2 RNA guide
gcuuuuguguaccuucaguauc

SEQ ID NO: 27808 - RNA, 22 nt, Artificial Sequence
  LRRK2 RNA guide
ggaaagauacugaagguacaca

SEQ ID NO: 27809 - RNA, 22 nt, Artificial Sequence
  LRRK2 RNA guide
ggcuacaaccggaaagauacug

SEQ ID NO: 27810 - RNA, 22 nt, Artificial Sequence
  LRRK2 RNA guide
gggcuacaaccggaaagauacu

SEQ ID NO: 27811 - RNA, 22 nt, Artificial Sequence
  LRRK2 RNA guide
gguauugggcuacaaccggaaa

SEQ ID NO: 27812 - RNA, 22 nt, Artificial Sequence
  LRRK2 RNA guide
guaccuucaguaucuuuccggu

SEQ ID NO: 27813 - RNA, 22 nt, Artificial Sequence
  LRRK2 RNA guide
guaucuuuccgguuguagccca

SEQ ID NO: 27814 - RNA, 22 nt, Artificial Sequence
  LRRK2 RNA guide
guauugggcuacaaccggaaag

SEQ ID NO: 27815 - RNA, 22 nt, Artificial Sequence
  LRRK2 RNA guide
guguaccuucaguaucuuuccg

SEQ ID NO: 27816 - RNA, 22 nt, Artificial Sequence
  LRRK2 RNA guide
uacaaccggaaagauacugaag

SEQ ID NO: 27817 - RNA, 22 nt, Artificial Sequence
  LRRK2 RNA guide
uaccuucaguaucuuuccgguu

SEQ ID NO: 27818 - RNA, 22 nt, Artificial Sequence
  LRRK2 RNA guide
uaucuuuccgguuguagcccaa

SEQ ID NO: 27819 - RNA, 22 nt, Artificial Sequence
  LRRK2 RNA guide
uauugggcuacaaccggaaaga

SEQ ID NO: 27820 - RNA, 22 nt, Artificial Sequence
  LRRK2 RNA guide
ucaguaucuuuccgguuguagc

SEQ ID NO: 27821 - RNA, 22 nt, Artificial Sequence
  LRRK2 RNA guide
ucugcuuuuguguaccuucagu

SEQ ID NO: 27822 - RNA, 22 nt, Artificial Sequence
  LRRK2 RNA guide
ucuuuccgguuguagcccaaua

SEQ ID NO: 27823 - RNA, 22 nt, Artificial Sequence
  LRRK2 RNA guide
ugcugguauugggcuacaaccg

SEQ ID NO: 27824 - RNA, 22 nt, Artificial Sequence
  LRRK2 RNA guide
ugcuuuuguguaccuucaguau

SEQ ID NO: 27825 - RNA, 22 nt, Artificial Sequence
  LRRK2 RNA guide
ugggcuacaaccggaaagauac

SEQ ID NO: 27826 - RNA, 22 nt, Artificial Sequence
  LRRK2 RNA guide
ugguauugggcuacaaccggaa

SEQ ID NO: 27827 - RNA, 22 nt, Artificial Sequence
  LRRK2 RNA guide
uguaccuucaguaucuuuccgg

SEQ ID NO: 27828 - RNA, 22 nt, Artificial Sequence
  LRRK2 RNA guide
uguguaccuucaguaucuuucc

SEQ ID NO: 27829 - RNA, 22 nt, Artificial Sequence
  LRRK2 RNA guide
uucaguaucuuuccgguuguag

SEQ ID NO: 27830 - RNA, 22 nt, Artificial Sequence
  LRRK2 RNA guide
uucugcuuuuguguaccuucag

SEQ ID NO: 27831 - RNA, 22 nt, Artificial Sequence
  LRRK2 RNA guide
uugggcuacaaccggaaagaua

SEQ ID NO: 27832 - RNA, 22 nt, Artificial Sequence
  LRRK2 RNA guide
uuguguaccuucaguaucuuuc

SEQ ID NO: 27833 - RNA, 22 nt, Artificial Sequence
  LRRK2 RNA guide
uuucugcuuuuguguaccuuca

SEQ ID NO: 27834 - RNA, 22 nt, Artificial Sequence
  LRRK2 RNA guide
uuuguguaccuucaguaucuuu

SEQ ID NO: 27835 - RNA, 22 nt, Artificial Sequence
  LRRK2 RNA guide
uuuuguguaccuucaguaucuu

SEQ ID NO: 27836 - RNA, 20 nt, Artificial Sequence
  LRRK2 RNA guide
aaacggucaagcaagauuua

SEQ ID NO: 27837 - RNA, 20 nt, Artificial Sequence
  LRRK2 RNA guide
aacggucaagcaagauuuau

SEQ ID NO: 27838 - RNA, 20 nt, Artificial Sequence
  LRRK2 RNA guide
aagcaagauuuaucucuaga

SEQ ID NO: 27839 - RNA, 20 nt, Artificial Sequence
  LRRK2 RNA guide
acggucaagcaagauuuauc

SEQ ID NO: 27840 - RNA, 20 nt, Artificial Sequence
  LRRK2 RNA guide
agagauaaaucuugcuugac

SEQ ID NO: 27841 - RNA, 20 nt, Artificial Sequence
  LRRK2 RNA guide
agauaaaucuugcuugaccg

SEQ ID NO: 27842 - RNA, 20 nt, Artificial Sequence
  LRRK2 RNA guide
agcaagauuuaucucuagaa

SEQ ID NO: 27843 - RNA, 20 nt, Artificial Sequence
  LRRK2 RNA guide
auaaaucuugcuugaccguu

SEQ ID NO: 27844 - RNA, 20 nt, Artificial Sequence
  LRRK2 RNA guide
caaacggucaagcaagauuu

SEQ ID NO: 27845 - RNA, 20 nt, Artificial Sequence
  LRRK2 RNA guide
caagcaagauuuaucucuag

SEQ ID NO: 27846 - RNA, 20 nt, Artificial Sequence
  LRRK2 RNA guide
ccaaacggucaagcaagauu

SEQ ID NO: 27847 - RNA, 20 nt, Artificial Sequence
  LRRK2 RNA guide
cccaaacggucaagcaagau

SEQ ID NO: 27848 - RNA, 20 nt, Artificial Sequence
  LRRK2 RNA guide
cggucaagcaagauuuaucu

SEQ ID NO: 27849 - RNA, 20 nt, Artificial Sequence
  LRRK2 RNA guide
cuagagauaaaucuugcuug

SEQ ID NO: 27850 - RNA, 20 nt, Artificial Sequence
  LRRK2 RNA guide
gagauaaaucuugcuugacc

SEQ ID NO: 27851 - RNA, 20 nt, Artificial Sequence
  LRRK2 RNA guide
gauaaaucuugcuugaccgu

SEQ ID NO: 27852 - RNA, 20 nt, Artificial Sequence
  LRRK2 RNA guide
gcaagauuuaucucuagaaa

SEQ ID NO: 27853 - RNA, 20 nt, Artificial Sequence
  LRRK2 RNA guide
ggucaagcaagauuuaucuc

SEQ ID NO: 27854 - RNA, 20 nt, Artificial Sequence
  LRRK2 RNA guide
gucaagcaagauuuaucucu

SEQ ID NO: 27855 - RNA, 20 nt, Artificial Sequence
  LRRK2 RNA guide
gucccaaacggucaagcaag

SEQ ID NO: 27856 - RNA, 20 nt, Artificial Sequence
  LRRK2 RNA guide
uaaaucuugcuugaccguuu

SEQ ID NO: 27857 - RNA, 20 nt, Artificial Sequence
  LRRK2 RNA guide
uagagauaaaucuugcuuga

SEQ ID NO: 27858 - RNA, 20 nt, Artificial Sequence
  LRRK2 RNA guide
ucaagcaagauuuaucucua

SEQ ID NO: 27859 - RNA, 20 nt, Artificial Sequence
  LRRK2 RNA guide
ucccaaacggucaagcaaga

SEQ ID NO: 27860 - RNA, 20 nt, Artificial Sequence
  LRRK2 RNA guide
ucuagagauaaaucuugcuu

SEQ ID NO: 27861 - RNA, 20 nt, Artificial Sequence
  LRRK2 RNA guide
ugucccaaacggucaagcaa

SEQ ID NO: 27862 - RNA, 20 nt, Artificial Sequence
  LRRK2 RNA guide
uucuagagauaaaucuugcu

SEQ ID NO: 27863 - RNA, 20 nt, Artificial Sequence
  LRRK2 RNA guide
uuucuagagauaaaucuugc

SEQ ID NO: 27864 - RNA, 21 nt, Artificial Sequence
  LRRK2 RNA guide
aaacggucaagcaagauuuau

SEQ ID NO: 27865 - RNA, 21 nt, Artificial Sequence
  LRRK2 RNA guide
aacggucaagcaagauuuauc

SEQ ID NO: 27866 - RNA, 21 nt, Artificial Sequence
  LRRK2 RNA guide
acggucaagcaagauuuaucu

SEQ ID NO: 27867 - RNA, 21 nt, Artificial Sequence
  LRRK2 RNA guide
agagauaaaucuugcuugacc

SEQ ID NO: 27868 - RNA, 21 nt, Artificial Sequence
  LRRK2 RNA guide
agauaaaucuugcuugaccgu

SEQ ID NO: 27869 - RNA, 21 nt, Artificial Sequence
  LRRK2 RNA guide
auaaaucuugcuugaccguuu

SEQ ID NO: 27870 - RNA, 21 nt, Artificial Sequence
  LRRK2 RNA guide
augucccaaacggucaagcaa

SEQ ID NO: 27871 - RNA, 21 nt, Artificial Sequence
  LRRK2 RNA guide
caaacggucaagcaagauuua

SEQ ID NO: 27872 - RNA, 21 nt, Artificial Sequence
  LRRK2 RNA guide
caagcaagauuuaucucuaga

SEQ ID NO: 27873 - RNA, 21 nt, Artificial Sequence
  LRRK2 RNA guide
ccaaacggucaagcaagauuu

SEQ ID NO: 27874 - RNA, 21 nt, Artificial Sequence
  LRRK2 RNA guide
cccaaacggucaagcaagauu

SEQ ID NO: 27875 - RNA, 21 nt, Artificial Sequence
  LRRK2 RNA guide
cggucaagcaagauuuaucuc

SEQ ID NO: 27876 - RNA, 21 nt, Artificial Sequence
  LRRK2 RNA guide
cuagagauaaaucuugcuuga

SEQ ID NO: 27877 - RNA, 21 nt, Artificial Sequence
  LRRK2 RNA guide
gagauaaaucuugcuugaccg

SEQ ID NO: 27878 - RNA, 21 nt, Artificial Sequence
  LRRK2 RNA guide
gauaaaucuugcuugaccguu

SEQ ID NO: 27879 - RNA, 21 nt, Artificial Sequence
  LRRK2 RNA guide
ggucaagcaagauuuaucucu

SEQ ID NO: 27880 - RNA, 21 nt, Artificial Sequence
  LRRK2 RNA guide
gucaagcaagauuuaucucua

SEQ ID NO: 27881 - RNA, 21 nt, Artificial Sequence
  LRRK2 RNA guide
gucccaaacggucaagcaaga

SEQ ID NO: 27882 - RNA, 21 nt, Artificial Sequence
  LRRK2 RNA guide
uaaaucuugcuugaccguuug

SEQ ID NO: 27883 - RNA, 21 nt, Artificial Sequence
  LRRK2 RNA guide
uagagauaaaucuugcuugac

SEQ ID NO: 27884 - RNA, 21 nt, Artificial Sequence
  LRRK2 RNA guide
ucaagcaagauuuaucucuag

SEQ ID NO: 27885 - RNA, 21 nt, Artificial Sequence
  LRRK2 RNA guide
ucccaaacggucaagcaagau

SEQ ID NO: 27886 - RNA, 21 nt, Artificial Sequence
  LRRK2 RNA guide
ucuagagauaaaucuugcuug

SEQ ID NO: 27887 - RNA, 21 nt, Artificial Sequence
  LRRK2 RNA guide
ugucccaaacggucaagcaag

SEQ ID NO: 27888 - RNA, 22 nt, Artificial Sequence
  LRRK2 RNA guide
aaacggucaagcaagauuuauc

SEQ ID NO: 27889 - RNA, 22 nt, Artificial Sequence
  LRRK2 RNA guide
aacggucaagcaagauuuaucu

SEQ ID NO: 27890 - RNA, 22 nt, Artificial Sequence
  LRRK2 RNA guide
acggucaagcaagauuuaucuc

SEQ ID NO: 27891 - RNA, 22 nt, Artificial Sequence
  LRRK2 RNA guide
agagauaaaucuugcuugaccg

SEQ ID NO: 27892 - RNA, 22 nt, Artificial Sequence
  LRRK2 RNA guide
agauaaaucuugcuugaccguu

SEQ ID NO: 27893 - RNA, 22 nt, Artificial Sequence
  LRRK2 RNA guide
auaaaucuugcuugaccguuug

SEQ ID NO: 27894 - RNA, 22 nt, Artificial Sequence
  LRRK2 RNA guide
augucccaaacggucaagcaag

SEQ ID NO: 27895 - RNA, 22 nt, Artificial Sequence
  LRRK2 RNA guide
caaacggucaagcaagauuuau

SEQ ID NO: 27896 - RNA, 22 nt, Artificial Sequence
  LRRK2 RNA guide
caagcaagauuuaucucuagaa

SEQ ID NO: 27897 - RNA, 22 nt, Artificial Sequence
  LRRK2 RNA guide
ccaaacggucaagcaagauuua

SEQ ID NO: 27898 - RNA, 22 nt, Artificial Sequence
  LRRK2 RNA guide
cccaaacggucaagcaagauuu

SEQ ID NO: 27899 - RNA, 22 nt, Artificial Sequence
  LRRK2 RNA guide
cggucaagcaagauuuaucucu

SEQ ID NO: 27900 - RNA, 22 nt, Artificial Sequence
  LRRK2 RNA guide
cuagagauaaaucuugcuugac

SEQ ID NO: 27901 - RNA, 22 nt, Artificial Sequence
  LRRK2 RNA guide
gagauaaaucuugcuugaccgu

SEQ ID NO: 27902 - RNA, 22 nt, Artificial Sequence
  LRRK2 RNA guide
gauaaaucuugcuugaccguuu

SEQ ID NO: 27903 - RNA, 22 nt, Artificial Sequence
  LRRK2 RNA guide
gaugucccaaacggucaagcaa

SEQ ID NO: 27904 - RNA, 22 nt, Artificial Sequence
  LRRK2 RNA guide
ggucaagcaagauuuaucucua

SEQ ID NO: 27905 - RNA, 22 nt, Artificial Sequence
  LRRK2 RNA guide
gucaagcaagauuuaucucuag

SEQ ID NO: 27906 - RNA, 22 nt, Artificial Sequence
  LRRK2 RNA guide
gucccaaacggucaagcaagau

SEQ ID NO: 27907 - RNA, 22 nt, Artificial Sequence
  LRRK2 RNA guide
uaaaucuugcuugaccguuugg

SEQ ID NO: 27908 - RNA, 22 nt, Artificial Sequence
  LRRK2 RNA guide
uagagauaaaucuugcuugacc

SEQ ID NO: 27909 - RNA, 22 nt, Artificial Sequence
  LRRK2 RNA guide
ucaagcaagauuuaucucuaga

SEQ ID NO: 27910 - RNA, 22 nt, Artificial Sequence
  LRRK2 RNA guide
ucccaaacggucaagcaagauu

SEQ ID NO: 27911 - RNA, 22 nt, Artificial Sequence
  LRRK2 RNA guide
ucuagagauaaaucuugcuuga

SEQ ID NO: 27912 - RNA, 22 nt, Artificial Sequence
  LRRK2 RNA guide
ugucccaaacggucaagcaaga

SEQ ID NO: 27913 - RNA, 22 nt, Artificial Sequence
  LRRK2 RNA guide
uucuagagauaaaucuugcuug

SEQ ID NO: 27914 - RNA, 20 nt, Artificial Sequence
  LRRK2 RNA guide
aaacggucaagaaagauugu

SEQ ID NO: 27915 - RNA, 20 nt, Artificial Sequence
  LRRK2 RNA guide
aacggucaagaaagauugua

SEQ ID NO: 27916 - RNA, 20 nt, Artificial Sequence
  LRRK2 RNA guide
aagaaagauuguaucucuag

SEQ ID NO: 27917 - RNA, 20 nt, Artificial Sequence
  LRRK2 RNA guide
aaucuuucuugaccguuugg

SEQ ID NO: 27918 - RNA, 20 nt, Artificial Sequence
  LRRK2 RNA guide
acaaucuuucuugaccguuu

SEQ ID NO: 27919 - RNA, 20 nt, Artificial Sequence
  LRRK2 RNA guide
acggucaagaaagauuguau

SEQ ID NO: 27920 - RNA, 20 nt, Artificial Sequence
  LRRK2 RNA guide
agaaagauuguaucucuaga

SEQ ID NO: 27921 - RNA, 20 nt, Artificial Sequence
  LRRK2 RNA guide
agagauacaaucuuucuuga

SEQ ID NO: 27922 - RNA, 20 nt, Artificial Sequence
  LRRK2 RNA guide
agauacaaucuuucuugacc

SEQ ID NO: 27923 - RNA, 20 nt, Artificial Sequence
  LRRK2 RNA guide
agauugaugucccaaacggu

SEQ ID NO: 27924 - RNA, 20 nt, Artificial Sequence
  LRRK2 RNA guide
auacaaucuuucuugaccgu

SEQ ID NO: 27925 - RNA, 20 nt, Artificial Sequence
  LRRK2 RNA guide
aucuuucuugaccguuuggg

SEQ ID NO: 27926 - RNA, 20 nt, Artificial Sequence
  LRRK2 RNA guide
augucccaaacggucaagaa

SEQ ID NO: 27927 - RNA, 20 nt, Artificial Sequence
  LRRK2 RNA guide
auugaugucccaaacgguca

SEQ ID NO: 27928 - RNA, 20 nt, Artificial Sequence
  LRRK2 RNA guide
caaacggucaagaaagauug

SEQ ID NO: 27929 - RNA, 20 nt, Artificial Sequence
  LRRK2 RNA guide
caagaaagauuguaucucua

SEQ ID NO: 27930 - RNA, 20 nt, Artificial Sequence
  LRRK2 RNA guide
caaucuuucuugaccguuug

SEQ ID NO: 27931 - RNA, 20 nt, Artificial Sequence
  LRRK2 RNA guide
ccaaacggucaagaaagauu

SEQ ID NO: 27932 - RNA, 20 nt, Artificial Sequence
  LRRK2 RNA guide
cccaaacggucaagaaagau

SEQ ID NO: 27933 - RNA, 20 nt, Artificial Sequence
  LRRK2 RNA guide
cggucaagaaagauuguauc

SEQ ID NO: 27934 - RNA, 20 nt, Artificial Sequence
  LRRK2 RNA guide
cuagagauacaaucuuucuu

SEQ ID NO: 27935 - RNA, 20 nt, Artificial Sequence
  LRRK2 RNA guide
cuuucuugaccguuugggac

SEQ ID NO: 27936 - RNA, 20 nt, Artificial Sequence
  LRRK2 RNA guide
cuuuuucuagagauacaauc

SEQ ID NO: 27937 - RNA, 20 nt, Artificial Sequence
  LRRK2 RNA guide
gaaagauuguaucucuagaa

SEQ ID NO: 27938 - RNA, 20 nt, Artificial Sequence
  LRRK2 RNA guide
gagauacaaucuuucuugac

SEQ ID NO: 27939 - RNA, 20 nt, Artificial Sequence
  LRRK2 RNA guide
gauacaaucuuucuugaccg

SEQ ID NO: 27940 - RNA, 20 nt, Artificial Sequence
  LRRK2 RNA guide
gaugucccaaacggucaaga

SEQ ID NO: 27941 - RNA, 20 nt, Artificial Sequence
  LRRK2 RNA guide
gauugaugucccaaacgguc

SEQ ID NO: 27942 - RNA, 20 nt, Artificial Sequence
  LRRK2 RNA guide
ggucaagaaagauuguaucu

SEQ ID NO: 27943 - RNA, 20 nt, Artificial Sequence
  LRRK2 RNA guide
gucaagaaagauuguaucuc

SEQ ID NO: 27944 - RNA, 20 nt, Artificial Sequence
  LRRK2 RNA guide
gucccaaacggucaagaaag

SEQ ID NO: 27945 - RNA, 20 nt, Artificial Sequence
  LRRK2 RNA guide
uacaaucuuucuugaccguu

SEQ ID NO: 27946 - RNA, 20 nt, Artificial Sequence
  LRRK2 RNA guide
uagagauacaaucuuucuug

SEQ ID NO: 27947 - RNA, 20 nt, Artificial Sequence
  LRRK2 RNA guide
ucaagaaagauuguaucucu

SEQ ID NO: 27948 - RNA, 20 nt, Artificial Sequence
  LRRK2 RNA guide
ucccaaacggucaagaaaga

SEQ ID NO: 27949 - RNA, 20 nt, Artificial Sequence
  LRRK2 RNA guide
ucuagagauacaaucuuucu

SEQ ID NO: 27950 - RNA, 20 nt, Artificial Sequence
  LRRK2 RNA guide
ucuuucuugaccguuuggga

SEQ ID NO: 27951 - RNA, 20 nt, Artificial Sequence
  LRRK2 RNA guide
ugucccaaacggucaagaaa

SEQ ID NO: 27952 - RNA, 20 nt, Artificial Sequence
  LRRK2 RNA guide
uucuagagauacaaucuuuc

SEQ ID NO: 27953 - RNA, 20 nt, Artificial Sequence
  LRRK2 RNA guide
uucuugaccguuugggacau

SEQ ID NO: 27954 - RNA, 20 nt, Artificial Sequence
  LRRK2 RNA guide
uuucuugaccguuugggaca

SEQ ID NO: 27955 - RNA, 21 nt, Artificial Sequence
  LRRK2 RNA guide
aaacggucaagaaagauugua

SEQ ID NO: 27956 - RNA, 21 nt, Artificial Sequence
  LRRK2 RNA guide
aacggucaagaaagauuguau

SEQ ID NO: 27957 - RNA, 21 nt, Artificial Sequence
  LRRK2 RNA guide
aagauugaugucccaaacggu

SEQ ID NO: 27958 - RNA, 21 nt, Artificial Sequence
  LRRK2 RNA guide
aaucuuucuugaccguuuggg

SEQ ID NO: 27959 - RNA, 21 nt, Artificial Sequence
  LRRK2 RNA guide
acaaucuuucuugaccguuug

SEQ ID NO: 27960 - RNA, 21 nt, Artificial Sequence
  LRRK2 RNA guide
acggucaagaaagauuguauc

SEQ ID NO: 27961 - RNA, 21 nt, Artificial Sequence
  LRRK2 RNA guide
agagauacaaucuuucuugac

SEQ ID NO: 27962 - RNA, 21 nt, Artificial Sequence
  LRRK2 RNA guide
agauacaaucuuucuugaccg

SEQ ID NO: 27963 - RNA, 21 nt, Artificial Sequence
  LRRK2 RNA guide
agauugaugucccaaacgguc

SEQ ID NO: 27964 - RNA, 21 nt, Artificial Sequence
  LRRK2 RNA guide
auacaaucuuucuugaccguu

SEQ ID NO: 27965 - RNA, 21 nt, Artificial Sequence
  LRRK2 RNA guide
aucuuucuugaccguuuggga

SEQ ID NO: 27966 - RNA, 21 nt, Artificial Sequence
  LRRK2 RNA guide
augucccaaacggucaagaaa

SEQ ID NO: 27967 - RNA, 21 nt, Artificial Sequence
  LRRK2 RNA guide
auugaugucccaaacggucaa

SEQ ID NO: 27968 - RNA, 21 nt, Artificial Sequence
  LRRK2 RNA guide
caaacggucaagaaagauugu

SEQ ID NO: 27969 - RNA, 21 nt, Artificial Sequence
  LRRK2 RNA guide
caagaaagauuguaucucuag

SEQ ID NO: 27970 - RNA, 21 nt, Artificial Sequence
  LRRK2 RNA guide
caaucuuucuugaccguuugg

SEQ ID NO: 27971 - RNA, 21 nt, Artificial Sequence
  LRRK2 RNA guide
ccaaacggucaagaaagauug

SEQ ID NO: 27972 - RNA, 21 nt, Artificial Sequence
  LRRK2 RNA guide
cccaaacggucaagaaagauu

SEQ ID NO: 27973 - RNA, 21 nt, Artificial Sequence
  LRRK2 RNA guide
cggucaagaaagauuguaucu

SEQ ID NO: 27974 - RNA, 21 nt, Artificial Sequence
  LRRK2 RNA guide
cuagagauacaaucuuucuug

SEQ ID NO: 27975 - RNA, 21 nt, Artificial Sequence
  LRRK2 RNA guide
cuuucuugaccguuugggaca

SEQ ID NO: 27976 - RNA, 21 nt, Artificial Sequence
  LRRK2 RNA guide
gagauacaaucuuucuugacc

SEQ ID NO: 27977 - RNA, 21 nt, Artificial Sequence
  LRRK2 RNA guide
gauacaaucuuucuugaccgu

SEQ ID NO: 27978 - RNA, 21 nt, Artificial Sequence
  LRRK2 RNA guide
gaugucccaaacggucaagaa

SEQ ID NO: 27979 - RNA, 21 nt, Artificial Sequence
  LRRK2 RNA guide
gauugaugucccaaacgguca

SEQ ID NO: 27980 - RNA, 21 nt, Artificial Sequence
  LRRK2 RNA guide
ggucaagaaagauuguaucuc

SEQ ID NO: 27981 - RNA, 21 nt, Artificial Sequence
  LRRK2 RNA guide
gucaagaaagauuguaucucu

SEQ ID NO: 27982 - RNA, 21 nt, Artificial Sequence
  LRRK2 RNA guide
gucccaaacggucaagaaaga

SEQ ID NO: 27983 - RNA, 21 nt, Artificial Sequence
  LRRK2 RNA guide
uacaaucuuucuugaccguuu

SEQ ID NO: 27984 - RNA, 21 nt, Artificial Sequence
  LRRK2 RNA guide
ucccaaacggucaagaaagau

SEQ ID NO: 27985 - RNA, 21 nt, Artificial Sequence
  LRRK2 RNA guide
ucuuucuugaccguuugggac

SEQ ID NO: 27986 - RNA, 21 nt, Artificial Sequence
  LRRK2 RNA guide
ugaugucccaaacggucaaga

SEQ ID NO: 27987 - RNA, 21 nt, Artificial Sequence
  LRRK2 RNA guide
ugucccaaacggucaagaaag

SEQ ID NO: 27988 - RNA, 21 nt, Artificial Sequence
  LRRK2 RNA guide
uucuugaccguuugggacauc

SEQ ID NO: 27989 - RNA, 21 nt, Artificial Sequence
  LRRK2 RNA guide
uugaugucccaaacggucaag

SEQ ID NO: 27990 - RNA, 21 nt, Artificial Sequence
  LRRK2 RNA guide
uuucuugaccguuugggacau

SEQ ID NO: 27991 - RNA, 22 nt, Artificial Sequence
  LRRK2 RNA guide
aaacggucaagaaagauuguau

SEQ ID NO: 27992 - RNA, 22 nt, Artificial Sequence
  LRRK2 RNA guide
aacggucaagaaagauuguauc

SEQ ID NO: 27993 - RNA, 22 nt, Artificial Sequence
  LRRK2 RNA guide
aagauugaugucccaaacgguc

SEQ ID NO: 27994 - RNA, 22 nt, Artificial Sequence
  LRRK2 RNA guide
aaucuuucuugaccguuuggga

SEQ ID NO: 27995 - RNA, 22 nt, Artificial Sequence
  LRRK2 RNA guide
acaaucuuucuugaccguuugg

SEQ ID NO: 27996 - RNA, 22 nt, Artificial Sequence
  LRRK2 RNA guide
acggucaagaaagauuguaucu

SEQ ID NO: 27997 - RNA, 22 nt, Artificial Sequence
  LRRK2 RNA guide
agagauacaaucuuucuugacc

SEQ ID NO: 27998 - RNA, 22 nt, Artificial Sequence
  LRRK2 RNA guide
agauacaaucuuucuugaccgu

SEQ ID NO: 27999 - RNA, 22 nt, Artificial Sequence
  LRRK2 RNA guide
agauugaugucccaaacgguca

SEQ ID NO: 28000 - RNA, 22 nt, Artificial Sequence
  LRRK2 RNA guide
auacaaucuuucuugaccguuu

SEQ ID NO: 28001 - RNA, 22 nt, Artificial Sequence
  LRRK2 RNA guide
aucuuucuugaccguuugggac

SEQ ID NO: 28002 - RNA, 22 nt, Artificial Sequence
  LRRK2 RNA guide
augucccaaacggucaagaaag

SEQ ID NO: 28003 - RNA, 22 nt, Artificial Sequence
  LRRK2 RNA guide
auugaugucccaaacggucaag

SEQ ID NO: 28004 - RNA, 22 nt, Artificial Sequence
  LRRK2 RNA guide
caaacggucaagaaagauugua

SEQ ID NO: 28005 - RNA, 22 nt, Artificial Sequence
  LRRK2 RNA guide
caagaaagauuguaucucuaga

SEQ ID NO: 28006 - RNA, 22 nt, Artificial Sequence
  LRRK2 RNA guide
caaucuuucuugaccguuuggg

SEQ ID NO: 28007 - RNA, 22 nt, Artificial Sequence
  LRRK2 RNA guide
ccaaacggucaagaaagauugu

SEQ ID NO: 28008 - RNA, 22 nt, Artificial Sequence
  LRRK2 RNA guide
cccaaacggucaagaaagauug

SEQ ID NO: 28009 - RNA, 22 nt, Artificial Sequence
  LRRK2 RNA guide
cggucaagaaagauuguaucuc

SEQ ID NO: 28010 - RNA, 22 nt, Artificial Sequence
  LRRK2 RNA guide
cuagagauacaaucuuucuuga

SEQ ID NO: 28011 - RNA, 22 nt, Artificial Sequence
  LRRK2 RNA guide
cuuucuugaccguuugggacau

SEQ ID NO: 28012 - RNA, 22 nt, Artificial Sequence
  LRRK2 RNA guide
gaagauugaugucccaaacggu

SEQ ID NO: 28013 - RNA, 22 nt, Artificial Sequence
  LRRK2 RNA guide
gagauacaaucuuucuugaccg

SEQ ID NO: 28014 - RNA, 22 nt, Artificial Sequence
  LRRK2 RNA guide
gauacaaucuuucuugaccguu

SEQ ID NO: 28015 - RNA, 22 nt, Artificial Sequence
  LRRK2 RNA guide
gaugucccaaacggucaagaaa

SEQ ID NO: 28016 - RNA, 22 nt, Artificial Sequence
  LRRK2 RNA guide
gauugaugucccaaacggucaa

SEQ ID NO: 28017 - RNA, 22 nt, Artificial Sequence
  LRRK2 RNA guide
ggucaagaaagauuguaucucu

SEQ ID NO: 28018 - RNA, 22 nt, Artificial Sequence
  LRRK2 RNA guide
gucaagaaagauuguaucucua

SEQ ID NO: 28019 - RNA, 22 nt, Artificial Sequence
  LRRK2 RNA guide
gucccaaacggucaagaaagau

SEQ ID NO: 28020 - RNA, 22 nt, Artificial Sequence
  LRRK2 RNA guide
uacaaucuuucuugaccguuug

SEQ ID NO: 28021 - RNA, 22 nt, Artificial Sequence
  LRRK2 RNA guide
uagagauacaaucuuucuugac

SEQ ID NO: 28022 - RNA, 22 nt, Artificial Sequence
  LRRK2 RNA guide
ucaagaaagauuguaucucuag

SEQ ID NO: 28023 - RNA, 22 nt, Artificial Sequence
  LRRK2 RNA guide
ucccaaacggucaagaaagauu

SEQ ID NO: 28024 - RNA, 22 nt, Artificial Sequence
  LRRK2 RNA guide
ucuagagauacaaucuuucuug

SEQ ID NO: 28025 - RNA, 22 nt, Artificial Sequence
  LRRK2 RNA guide
ucuuucuugaccguuugggaca

SEQ ID NO: 28026 - RNA, 22 nt, Artificial Sequence
  LRRK2 RNA guide
ugaugucccaaacggucaagaa

SEQ ID NO: 28027 - RNA, 22 nt, Artificial Sequence
  LRRK2 RNA guide
ugucccaaacggucaagaaaga

SEQ ID NO: 28028 - RNA, 22 nt, Artificial Sequence
  LRRK2 RNA guide
uucuugaccguuugggacauca

SEQ ID NO: 28029 - RNA, 22 nt, Artificial Sequence
  LRRK2 RNA guide
uugaugucccaaacggucaaga

SEQ ID NO: 28030 - RNA, 22 nt, Artificial Sequence
  LRRK2 RNA guide
uuucuugaccguuugggacauc

SEQ ID NO: 28031 - RNA, 20 nt, Artificial Sequence
  LRRK2 RNA guide
aaaaaaugagacgaacaccu

SEQ ID NO: 28032 - RNA, 20 nt, Artificial Sequence
  LRRK2 RNA guide
aaaaaugagacgaacaccug

SEQ ID NO: 28033 - RNA, 20 nt, Artificial Sequence
  LRRK2 RNA guide
aaaaugagacgaacaccugu

SEQ ID NO: 28034 - RNA, 20 nt, Artificial Sequence
  LRRK2 RNA guide
aaaugagacgaacaccuguu

SEQ ID NO: 28035 - RNA, 20 nt, Artificial Sequence
  LRRK2 RNA guide
aacaccuguugaguaagaga

SEQ ID NO: 28036 - RNA, 20 nt, Artificial Sequence
  LRRK2 RNA guide
aacagguguucgucucauuu

SEQ ID NO: 28037 - RNA, 20 nt, Artificial Sequence
  LRRK2 RNA guide
aaugagacgaacaccuguug

SEQ ID NO: 28038 - RNA, 20 nt, Artificial Sequence
  LRRK2 RNA guide
acaccuguugaguaagagag

SEQ ID NO: 28039 - RNA, 20 nt, Artificial Sequence
  LRRK2 RNA guide
acagguguucgucucauuuu

SEQ ID NO: 28040 - RNA, 20 nt, Artificial Sequence
  LRRK2 RNA guide
accuguugaguaagagagaa

SEQ ID NO: 28041 - RNA, 20 nt, Artificial Sequence
  LRRK2 RNA guide
acgaacaccuguugaguaag

SEQ ID NO: 28042 - RNA, 20 nt, Artificial Sequence
  LRRK2 RNA guide
acucaacagguguucgucuc

SEQ ID NO: 28043 - RNA, 20 nt, Artificial Sequence
  LRRK2 RNA guide
agacgaacaccuguugagua

SEQ ID NO: 28044 - RNA, 20 nt, Artificial Sequence
  LRRK2 RNA guide
agcugaaaaaaugagacgaa

SEQ ID NO: 28045 - RNA, 20 nt, Artificial Sequence
  LRRK2 RNA guide
agguguucgucucauuuuuu

SEQ ID NO: 28046 - RNA, 20 nt, Artificial Sequence
  LRRK2 RNA guide
augagacgaacaccuguuga

SEQ ID NO: 28047 - RNA, 20 nt, Artificial Sequence
  LRRK2 RNA guide
auuucucucuuacucaacag

SEQ ID NO: 28048 - RNA, 20 nt, Artificial Sequence
  LRRK2 RNA guide
caacagguguucgucucauu

SEQ ID NO: 28049 - RNA, 20 nt, Artificial Sequence
  LRRK2 RNA guide
caccuguugaguaagagaga

SEQ ID NO: 28050 - RNA, 20 nt, Artificial Sequence
  LRRK2 RNA guide
cagguguucgucucauuuuu

SEQ ID NO: 28051 - RNA, 20 nt, Artificial Sequence
  LRRK2 RNA guide
ccuauuucucucuuacucaa

SEQ ID NO: 28052 - RNA, 20 nt, Artificial Sequence
  LRRK2 RNA guide
cgaacaccuguugaguaaga

SEQ ID NO: 28053 - RNA, 20 nt, Artificial Sequence
  LRRK2 RNA guide
cucaacagguguucgucuca

SEQ ID NO: 28054 - RNA, 20 nt, Artificial Sequence
  LRRK2 RNA guide
cucucuuacucaacaggugu

SEQ ID NO: 28055 - RNA, 20 nt, Artificial Sequence
  LRRK2 RNA guide
cucuuacucaacagguguuc

SEQ ID NO: 28056 - RNA, 20 nt, Artificial Sequence
  LRRK2 RNA guide
cugaaaaaaugagacgaaca

SEQ ID NO: 28057 - RNA, 20 nt, Artificial Sequence
  LRRK2 RNA guide
cuuacucaacagguguucgu

SEQ ID NO: 28058 - RNA, 20 nt, Artificial Sequence
  LRRK2 RNA guide
gaaaaaaugagacgaacacc

SEQ ID NO: 28059 - RNA, 20 nt, Artificial Sequence
  LRRK2 RNA guide
gaacaccuguugaguaagag

SEQ ID NO: 28060 - RNA, 20 nt, Artificial Sequence
  LRRK2 RNA guide
gacgaacaccuguugaguaa

SEQ ID NO: 28061 - RNA, 20 nt, Artificial Sequence
  LRRK2 RNA guide
gagacgaacaccuguugagu

SEQ ID NO: 28062 - RNA, 20 nt, Artificial Sequence
  LRRK2 RNA guide
gcugaaaaaaugagacgaac

SEQ ID NO: 28063 - RNA, 20 nt, Artificial Sequence
  LRRK2 RNA guide
gguguucgucucauuuuuuc

SEQ ID NO: 28064 - RNA, 20 nt, Artificial Sequence
  LRRK2 RNA guide
uacucaacagguguucgucu

SEQ ID NO: 28065 - RNA, 20 nt, Artificial Sequence
  LRRK2 RNA guide
uagcugaaaaaaugagacga

SEQ ID NO: 28066 - RNA, 20 nt, Artificial Sequence
  LRRK2 RNA guide
uauuucucucuuacucaaca

SEQ ID NO: 28067 - RNA, 20 nt, Artificial Sequence
  LRRK2 RNA guide
ucaacagguguucgucucau

SEQ ID NO: 28068 - RNA, 20 nt, Artificial Sequence
  LRRK2 RNA guide
uccuauuucucucuuacuca

SEQ ID NO: 28069 - RNA, 20 nt, Artificial Sequence
  LRRK2 RNA guide
ucucucuuacucaacaggug

SEQ ID NO: 28070 - RNA, 20 nt, Artificial Sequence
  LRRK2 RNA guide
ucucuuacucaacagguguu

SEQ ID NO: 28071 - RNA, 20 nt, Artificial Sequence
  LRRK2 RNA guide
ucuuacucaacagguguucg

SEQ ID NO: 28072 - RNA, 20 nt, Artificial Sequence
  LRRK2 RNA guide
ugaaaaaaugagacgaacac

SEQ ID NO: 28073 - RNA, 20 nt, Artificial Sequence
  LRRK2 RNA guide
ugagacgaacaccuguugag

SEQ ID NO: 28074 - RNA, 20 nt, Artificial Sequence
  LRRK2 RNA guide
uuacucaacagguguucguc

SEQ ID NO: 28075 - RNA, 20 nt, Artificial Sequence
  LRRK2 RNA guide
uuagcugaaaaaaugagacg

SEQ ID NO: 28076 - RNA, 20 nt, Artificial Sequence
  LRRK2 RNA guide
uucucucuuacucaacaggu

SEQ ID NO: 28077 - RNA, 20 nt, Artificial Sequence
  LRRK2 RNA guide
uuucucucuuacucaacagg

SEQ ID NO: 28078 - RNA, 21 nt, Artificial Sequence
  LRRK2 RNA guide
aaaaaaugagacgaacaccug

SEQ ID NO: 28079 - RNA, 21 nt, Artificial Sequence
  LRRK2 RNA guide
aaaaaugagacgaacaccugu

SEQ ID NO: 28080 - RNA, 21 nt, Artificial Sequence
  LRRK2 RNA guide
aaaaugagacgaacaccuguu

SEQ ID NO: 28081 - RNA, 21 nt, Artificial Sequence
  LRRK2 RNA guide
aaaugagacgaacaccuguug

SEQ ID NO: 28082 - RNA, 21 nt, Artificial Sequence
  LRRK2 RNA guide
aacaccuguugaguaagagag

SEQ ID NO: 28083 - RNA, 21 nt, Artificial Sequence
  LRRK2 RNA guide
aacagguguucgucucauuuu

SEQ ID NO: 28084 - RNA, 21 nt, Artificial Sequence
  LRRK2 RNA guide
aaugagacgaacaccuguuga

SEQ ID NO: 28085 - RNA, 21 nt, Artificial Sequence
  LRRK2 RNA guide
acaccuguugaguaagagaga

SEQ ID NO: 28086 - RNA, 21 nt, Artificial Sequence
  LRRK2 RNA guide
acagguguucgucucauuuuu

SEQ ID NO: 28087 - RNA, 21 nt, Artificial Sequence
  LRRK2 RNA guide
accuguugaguaagagagaaa

SEQ ID NO: 28088 - RNA, 21 nt, Artificial Sequence
  LRRK2 RNA guide
acgaacaccuguugaguaaga

SEQ ID NO: 28089 - RNA, 21 nt, Artificial Sequence
  LRRK2 RNA guide
acucaacagguguucgucuca

SEQ ID NO: 28090 - RNA, 21 nt, Artificial Sequence
  LRRK2 RNA guide
agacgaacaccuguugaguaa

SEQ ID NO: 28091 - RNA, 21 nt, Artificial Sequence
  LRRK2 RNA guide
agcugaaaaaaugagacgaac

SEQ ID NO: 28092 - RNA, 21 nt, Artificial Sequence
  LRRK2 RNA guide
agguguucgucucauuuuuuc

SEQ ID NO: 28093 - RNA, 21 nt, Artificial Sequence
  LRRK2 RNA guide
augagacgaacaccuguugag

SEQ ID NO: 28094 - RNA, 21 nt, Artificial Sequence
  LRRK2 RNA guide
auuagcugaaaaaaugagacg

SEQ ID NO: 28095 - RNA, 21 nt, Artificial Sequence
  LRRK2 RNA guide
auuucucucuuacucaacagg

SEQ ID NO: 28096 - RNA, 21 nt, Artificial Sequence
  LRRK2 RNA guide
caacagguguucgucucauuu

SEQ ID NO: 28097 - RNA, 21 nt, Artificial Sequence
  LRRK2 RNA guide
caccuguugaguaagagagaa

SEQ ID NO: 28098 - RNA, 21 nt, Artificial Sequence
  LRRK2 RNA guide
cagguguucgucucauuuuuu

SEQ ID NO: 28099 - RNA, 21 nt, Artificial Sequence
  LRRK2 RNA guide
ccuauuucucucuuacucaac

SEQ ID NO: 28100 - RNA, 21 nt, Artificial Sequence
  LRRK2 RNA guide
cgaacaccuguugaguaagag

SEQ ID NO: 28101 - RNA, 21 nt, Artificial Sequence
  LRRK2 RNA guide
cuauuucucucuuacucaaca

SEQ ID NO: 28102 - RNA, 21 nt, Artificial Sequence
  LRRK2 RNA guide
cucaacagguguucgucucau

SEQ ID NO: 28103 - RNA, 21 nt, Artificial Sequence
  LRRK2 RNA guide
cucucuuacucaacagguguu

SEQ ID NO: 28104 - RNA, 21 nt, Artificial Sequence
  LRRK2 RNA guide
cucuuacucaacagguguucg

SEQ ID NO: 28105 - RNA, 21 nt, Artificial Sequence
  LRRK2 RNA guide
cugaaaaaaugagacgaacac

SEQ ID NO: 28106 - RNA, 21 nt, Artificial Sequence
  LRRK2 RNA guide
cuuacucaacagguguucguc

SEQ ID NO: 28107 - RNA, 21 nt, Artificial Sequence
  LRRK2 RNA guide
gaaaaaaugagacgaacaccu

SEQ ID NO: 28108 - RNA, 21 nt, Artificial Sequence
  LRRK2 RNA guide
gaacaccuguugaguaagaga

SEQ ID NO: 28109 - RNA, 21 nt, Artificial Sequence
  LRRK2 RNA guide
gacgaacaccuguugaguaag

SEQ ID NO: 28110 - RNA, 21 nt, Artificial Sequence
  LRRK2 RNA guide
gagacgaacaccuguugagua

SEQ ID NO: 28111 - RNA, 21 nt, Artificial Sequence
  LRRK2 RNA guide
gcugaaaaaaugagacgaaca

SEQ ID NO: 28112 - RNA, 21 nt, Artificial Sequence
  LRRK2 RNA guide
gguguucgucucauuuuuuca

SEQ ID NO: 28113 - RNA, 21 nt, Artificial Sequence
  LRRK2 RNA guide
uacucaacagguguucgucuc

SEQ ID NO: 28114 - RNA, 21 nt, Artificial Sequence
  LRRK2 RNA guide
uagcugaaaaaaugagacgaa

SEQ ID NO: 28115 - RNA, 21 nt, Artificial Sequence
  LRRK2 RNA guide
uauuucucucuuacucaacag

SEQ ID NO: 28116 - RNA, 21 nt, Artificial Sequence
  LRRK2 RNA guide
ucaacagguguucgucucauu

SEQ ID NO: 28117 - RNA, 21 nt, Artificial Sequence
  LRRK2 RNA guide
uccuauuucucucuuacucaa

SEQ ID NO: 28118 - RNA, 21 nt, Artificial Sequence
  LRRK2 RNA guide
ucucucuuacucaacaggugu

SEQ ID NO: 28119 - RNA, 21 nt, Artificial Sequence
  LRRK2 RNA guide
ucucuuacucaacagguguuc

SEQ ID NO: 28120 - RNA, 21 nt, Artificial Sequence
  LRRK2 RNA guide
ucuuacucaacagguguucgu

SEQ ID NO: 28121 - RNA, 21 nt, Artificial Sequence
  LRRK2 RNA guide
ugaaaaaaugagacgaacacc

SEQ ID NO: 28122 - RNA, 21 nt, Artificial Sequence
  LRRK2 RNA guide
ugagacgaacaccuguugagu

SEQ ID NO: 28123 - RNA, 21 nt, Artificial Sequence
  LRRK2 RNA guide
uuacucaacagguguucgucu

SEQ ID NO: 28124 - RNA, 21 nt, Artificial Sequence
  LRRK2 RNA guide
uuagcugaaaaaaugagacga

SEQ ID NO: 28125 - RNA, 21 nt, Artificial Sequence
  LRRK2 RNA guide
uuccuauuucucucuuacuca

SEQ ID NO: 28126 - RNA, 21 nt, Artificial Sequence
  LRRK2 RNA guide
uucucucuuacucaacaggug

SEQ ID NO: 28127 - RNA, 21 nt, Artificial Sequence
  LRRK2 RNA guide
uuucucucuuacucaacaggu

SEQ ID NO: 28128 - RNA, 22 nt, Artificial Sequence
  LRRK2 RNA guide
aaaaaaugagacgaacaccugu

SEQ ID NO: 28129 - RNA, 22 nt, Artificial Sequence
  LRRK2 RNA guide
aaaaaugagacgaacaccuguu

SEQ ID NO: 28130 - RNA, 22 nt, Artificial Sequence
  LRRK2 RNA guide
aaaaugagacgaacaccuguug

SEQ ID NO: 28131 - RNA, 22 nt, Artificial Sequence
  LRRK2 RNA guide
aaaugagacgaacaccuguuga

SEQ ID NO: 28132 - RNA, 22 nt, Artificial Sequence
  LRRK2 RNA guide
aacaccuguugaguaagagaga

SEQ ID NO: 28133 - RNA, 22 nt, Artificial Sequence
  LRRK2 RNA guide
aacagguguucgucucauuuuu

SEQ ID NO: 28134 - RNA, 22 nt, Artificial Sequence
  LRRK2 RNA guide
aaugagacgaacaccuguugag

SEQ ID NO: 28135 - RNA, 22 nt, Artificial Sequence
  LRRK2 RNA guide
aauuagcugaaaaaaugagacg

SEQ ID NO: 28136 - RNA, 22 nt, Artificial Sequence
  LRRK2 RNA guide
acaccuguugaguaagagagaa

SEQ ID NO: 28137 - RNA, 22 nt, Artificial Sequence
  LRRK2 RNA guide
acagguguucgucucauuuuuu

SEQ ID NO: 28138 - RNA, 22 nt, Artificial Sequence
  LRRK2 RNA guide
accuguugaguaagagagaaau

SEQ ID NO: 28139 - RNA, 22 nt, Artificial Sequence
  LRRK2 RNA guide
acgaacaccuguugaguaagag

SEQ ID NO: 28140 - RNA, 22 nt, Artificial Sequence
  LRRK2 RNA guide
acucaacagguguucgucucau

SEQ ID NO: 28141 - RNA, 22 nt, Artificial Sequence
  LRRK2 RNA guide
agacgaacaccuguugaguaag

SEQ ID NO: 28142 - RNA, 22 nt, Artificial Sequence
  LRRK2 RNA guide
agcugaaaaaaugagacgaaca

SEQ ID NO: 28143 - RNA, 22 nt, Artificial Sequence
  LRRK2 RNA guide
agguguucgucucauuuuuuca

SEQ ID NO: 28144 - RNA, 22 nt, Artificial Sequence
  LRRK2 RNA guide
augagacgaacaccuguugagu

SEQ ID NO: 28145 - RNA, 22 nt, Artificial Sequence
  LRRK2 RNA guide
auuagcugaaaaaaugagacga

SEQ ID NO: 28146 - RNA, 22 nt, Artificial Sequence
  LRRK2 RNA guide
auuccuauuucucucuuacuca

SEQ ID NO: 28147 - RNA, 22 nt, Artificial Sequence
  LRRK2 RNA guide
auuucucucuuacucaacaggu

SEQ ID NO: 28148 - RNA, 22 nt, Artificial Sequence
  LRRK2 RNA guide
caacagguguucgucucauuuu

SEQ ID NO: 28149 - RNA, 22 nt, Artificial Sequence
  LRRK2 RNA guide
caccuguugaguaagagagaaa

SEQ ID NO: 28150 - RNA, 22 nt, Artificial Sequence
  LRRK2 RNA guide
cagguguucgucucauuuuuuc

SEQ ID NO: 28151 - RNA, 22 nt, Artificial Sequence
  LRRK2 RNA guide
ccuauuucucucuuacucaaca

SEQ ID NO: 28152 - RNA, 22 nt, Artificial Sequence
  LRRK2 RNA guide
cgaacaccuguugaguaagaga

SEQ ID NO: 28153 - RNA, 22 nt, Artificial Sequence
  LRRK2 RNA guide
cuauuucucucuuacucaacag

SEQ ID NO: 28154 - RNA, 22 nt, Artificial Sequence
  LRRK2 RNA guide
cucaacagguguucgucucauu

SEQ ID NO: 28155 - RNA, 22 nt, Artificial Sequence
  LRRK2 RNA guide
cucucuuacucaacagguguuc

SEQ ID NO: 28156 - RNA, 22 nt, Artificial Sequence
  LRRK2 RNA guide
cucuuacucaacagguguucgu

SEQ ID NO: 28157 - RNA, 22 nt, Artificial Sequence
  LRRK2 RNA guide
cugaaaaaaugagacgaacacc

SEQ ID NO: 28158 - RNA, 22 nt, Artificial Sequence
  LRRK2 RNA guide
cuuacucaacagguguucgucu

SEQ ID NO: 28159 - RNA, 22 nt, Artificial Sequence
  LRRK2 RNA guide
gaaaaaaugagacgaacaccug

SEQ ID NO: 28160 - RNA, 22 nt, Artificial Sequence
  LRRK2 RNA guide
gaacaccuguugaguaagagag

SEQ ID NO: 28161 - RNA, 22 nt, Artificial Sequence
  LRRK2 RNA guide
gacgaacaccuguugaguaaga

SEQ ID NO: 28162 - RNA, 22 nt, Artificial Sequence
  LRRK2 RNA guide
gagacgaacaccuguugaguaa

SEQ ID NO: 28163 - RNA, 22 nt, Artificial Sequence
  LRRK2 RNA guide
gcugaaaaaaugagacgaacac

SEQ ID NO: 28164 - RNA, 22 nt, Artificial Sequence
  LRRK2 RNA guide
gguguucgucucauuuuuucag

SEQ ID NO: 28165 - RNA, 22 nt, Artificial Sequence
  LRRK2 RNA guide
uacucaacagguguucgucuca

SEQ ID NO: 28166 - RNA, 22 nt, Artificial Sequence
  LRRK2 RNA guide
uagcugaaaaaaugagacgaac

SEQ ID NO: 28167 - RNA, 22 nt, Artificial Sequence
  LRRK2 RNA guide
uauuucucucuuacucaacagg

SEQ ID NO: 28168 - RNA, 22 nt, Artificial Sequence
  LRRK2 RNA guide
ucaacagguguucgucucauuu

SEQ ID NO: 28169 - RNA, 22 nt, Artificial Sequence
  LRRK2 RNA guide
uccuauuucucucuuacucaac

SEQ ID NO: 28170 - RNA, 22 nt, Artificial Sequence
  LRRK2 RNA guide
ucucucuuacucaacagguguu

SEQ ID NO: 28171 - RNA, 22 nt, Artificial Sequence
  LRRK2 RNA guide
ucucuuacucaacagguguucg

SEQ ID NO: 28172 - RNA, 22 nt, Artificial Sequence
  LRRK2 RNA guide
ucuuacucaacagguguucguc

SEQ ID NO: 28173 - RNA, 22 nt, Artificial Sequence
  LRRK2 RNA guide
ugaaaaaaugagacgaacaccu

SEQ ID NO: 28174 - RNA, 22 nt, Artificial Sequence
  LRRK2 RNA guide
ugagacgaacaccuguugagua

SEQ ID NO: 28175 - RNA, 22 nt, Artificial Sequence
  LRRK2 RNA guide
uuacucaacagguguucgucuc

SEQ ID NO: 28176 - RNA, 22 nt, Artificial Sequence
  LRRK2 RNA guide
uuagcugaaaaaaugagacgaa

SEQ ID NO: 28177 - RNA, 22 nt, Artificial Sequence
  LRRK2 RNA guide
uuccuauuucucucuuacucaa

SEQ ID NO: 28178 - RNA, 22 nt, Artificial Sequence
  LRRK2 RNA guide
uucucucuuacucaacaggugu

SEQ ID NO: 28179 - RNA, 22 nt, Artificial Sequence
  LRRK2 RNA guide
uuucucucuuacucaacaggug

SEQ ID NO: 28180 - RNA, 20 nt, Artificial Sequence
  LRRK2 RNA guide
aaaaaugugaguacucuuuc

SEQ ID NO: 28181 - RNA, 20 nt, Artificial Sequence
  LRRK2 RNA guide
aaaaauguucacauggaaag

SEQ ID NO: 28182 - RNA, 20 nt, Artificial Sequence
  LRRK2 RNA guide
aaaaugugaguacucuuucc

SEQ ID NO: 28183 - RNA, 20 nt, Artificial Sequence
  LRRK2 RNA guide
aaaauguucacauggaaaga

SEQ ID NO: 28184 - RNA, 20 nt, Artificial Sequence
  LRRK2 RNA guide
aaaugugaguacucuuucca

SEQ ID NO: 28185 - RNA, 20 nt, Artificial Sequence
  LRRK2 RNA guide
aaauguucacauggaaagag

SEQ ID NO: 28186 - RNA, 20 nt, Artificial Sequence
  LRRK2 RNA guide
aagaguacucacauuuuuug

SEQ ID NO: 28187 - RNA, 20 nt, Artificial Sequence
  LRRK2 RNA guide
aaugugaguacucuuuccau

SEQ ID NO: 28188 - RNA, 20 nt, Artificial Sequence
  LRRK2 RNA guide
aauguucacauggaaagagu

SEQ ID NO: 28189 - RNA, 20 nt, Artificial Sequence
  LRRK2 RNA guide
acauggaaagaguacucaca

SEQ ID NO: 28190 - RNA, 20 nt, Artificial Sequence
  LRRK2 RNA guide
acucuuuccaugugaacauu

SEQ ID NO: 28191 - RNA, 20 nt, Artificial Sequence
  LRRK2 RNA guide
agaguacucacauuuuuuga

SEQ ID NO: 28192 - RNA, 20 nt, Artificial Sequence
  LRRK2 RNA guide
aguacucuuuccaugugaac

SEQ ID NO: 28193 - RNA, 20 nt, Artificial Sequence
  LRRK2 RNA guide
auggaaagaguacucacauu

SEQ ID NO: 28194 - RNA, 20 nt, Artificial Sequence
  LRRK2 RNA guide
augugaguacucuuuccaug

SEQ ID NO: 28195 - RNA, 20 nt, Artificial Sequence
  LRRK2 RNA guide
auguucacauggaaagagua

SEQ ID NO: 28196 - RNA, 20 nt, Artificial Sequence
  LRRK2 RNA guide
caaaaaaugugaguacucuu

SEQ ID NO: 28197 - RNA, 20 nt, Artificial Sequence
  LRRK2 RNA guide
cacauggaaagaguacucac

SEQ ID NO: 28198 - RNA, 20 nt, Artificial Sequence
  LRRK2 RNA guide
cauggaaagaguacucacau

SEQ ID NO: 28199 - RNA, 20 nt, Artificial Sequence
  LRRK2 RNA guide
cucuuuccaugugaacauuu

SEQ ID NO: 28200 - RNA, 20 nt, Artificial Sequence
  LRRK2 RNA guide
gaaagaguacucacauuuuu

SEQ ID NO: 28201 - RNA, 20 nt, Artificial Sequence
  LRRK2 RNA guide
gaguacucacauuuuuugaa

SEQ ID NO: 28202 - RNA, 20 nt, Artificial Sequence
  LRRK2 RNA guide
gaguacucuuuccaugugaa

SEQ ID NO: 28203 - RNA, 20 nt, Artificial Sequence
  LRRK2 RNA guide
gcuauuucaaaaaaugugag

SEQ ID NO: 28204 - RNA, 20 nt, Artificial Sequence
  LRRK2 RNA guide
ggaaagaguacucacauuuu

SEQ ID NO: 28205 - RNA, 20 nt, Artificial Sequence
  LRRK2 RNA guide
guacucuuuccaugugaaca

SEQ ID NO: 28206 - RNA, 20 nt, Artificial Sequence
  LRRK2 RNA guide
gugaguacucuuuccaugug

SEQ ID NO: 28207 - RNA, 20 nt, Artificial Sequence
  LRRK2 RNA guide
guucacauggaaagaguacu

SEQ ID NO: 28208 - RNA, 20 nt, Artificial Sequence
  LRRK2 RNA guide
uacucuuuccaugugaacau

SEQ ID NO: 28209 - RNA, 20 nt, Artificial Sequence
  LRRK2 RNA guide
ucaaaaaaugugaguacucu

SEQ ID NO: 28210 - RNA, 20 nt, Artificial Sequence
  LRRK2 RNA guide
ucacauggaaagaguacuca

SEQ ID NO: 28211 - RNA, 20 nt, Artificial Sequence
  LRRK2 RNA guide
ugaguacucuuuccauguga

SEQ ID NO: 28212 - RNA, 20 nt, Artificial Sequence
  LRRK2 RNA guide
uggaaagaguacucacauuu

SEQ ID NO: 28213 - RNA, 20 nt, Artificial Sequence
  LRRK2 RNA guide
ugugaguacucuuuccaugu

SEQ ID NO: 28214 - RNA, 20 nt, Artificial Sequence
  LRRK2 RNA guide
uguucacauggaaagaguac

SEQ ID NO: 28215 - RNA, 20 nt, Artificial Sequence
  LRRK2 RNA guide
uucaaaaaaugugaguacuc

SEQ ID NO: 28216 - RNA, 20 nt, Artificial Sequence
  LRRK2 RNA guide
uucacauggaaagaguacuc

SEQ ID NO: 28217 - RNA, 21 nt, Artificial Sequence
  LRRK2 RNA guide
aaaaaugugaguacucuuucc

SEQ ID NO: 28218 - RNA, 21 nt, Artificial Sequence
  LRRK2 RNA guide
aaaaugugaguacucuuucca

SEQ ID NO: 28219 - RNA, 21 nt, Artificial Sequence
  LRRK2 RNA guide
aaaauguucacauggaaagag

SEQ ID NO: 28220 - RNA, 21 nt, Artificial Sequence
  LRRK2 RNA guide
aaaugugaguacucuuuccau

SEQ ID NO: 28221 - RNA, 21 nt, Artificial Sequence
  LRRK2 RNA guide
aaauguucacauggaaagagu

SEQ ID NO: 28222 - RNA, 21 nt, Artificial Sequence
  LRRK2 RNA guide
aaugugaguacucuuuccaug

SEQ ID NO: 28223 - RNA, 21 nt, Artificial Sequence
  LRRK2 RNA guide
aauguucacauggaaagagua

SEQ ID NO: 28224 - RNA, 21 nt, Artificial Sequence
  LRRK2 RNA guide
acauggaaagaguacucacau

SEQ ID NO: 28225 - RNA, 21 nt, Artificial Sequence
  LRRK2 RNA guide
acucuuuccaugugaacauuu

SEQ ID NO: 28226 - RNA, 21 nt, Artificial Sequence
  LRRK2 RNA guide
aguacucuuuccaugugaaca

SEQ ID NO: 28227 - RNA, 21 nt, Artificial Sequence
  LRRK2 RNA guide
auggaaagaguacucacauuu

SEQ ID NO: 28228 - RNA, 21 nt, Artificial Sequence
  LRRK2 RNA guide
augugaguacucuuuccaugu

SEQ ID NO: 28229 - RNA, 21 nt, Artificial Sequence
  LRRK2 RNA guide
auguucacauggaaagaguac

SEQ ID NO: 28230 - RNA, 21 nt, Artificial Sequence
  LRRK2 RNA guide
cacauggaaagaguacucaca

SEQ ID NO: 28231 - RNA, 21 nt, Artificial Sequence
  LRRK2 RNA guide
cauggaaagaguacucacauu

SEQ ID NO: 28232 - RNA, 21 nt, Artificial Sequence
  LRRK2 RNA guide
cucuuuccaugugaacauuuu

SEQ ID NO: 28233 - RNA, 21 nt, Artificial Sequence
  LRRK2 RNA guide
gaguacucuuuccaugugaac

SEQ ID NO: 28234 - RNA, 21 nt, Artificial Sequence
  LRRK2 RNA guide
ggaaagaguacucacauuuuu

SEQ ID NO: 28235 - RNA, 21 nt, Artificial Sequence
  LRRK2 RNA guide
guacucuuuccaugugaacau

SEQ ID NO: 28236 - RNA, 21 nt, Artificial Sequence
  LRRK2 RNA guide
gugaguacucuuuccauguga

SEQ ID NO: 28237 - RNA, 21 nt, Artificial Sequence
  LRRK2 RNA guide
guucacauggaaagaguacuc

SEQ ID NO: 28238 - RNA, 21 nt, Artificial Sequence
  LRRK2 RNA guide
uacucuuuccaugugaacauu

SEQ ID NO: 28239 - RNA, 21 nt, Artificial Sequence
  LRRK2 RNA guide
ucacauggaaagaguacucac

SEQ ID NO: 28240 - RNA, 21 nt, Artificial Sequence
  LRRK2 RNA guide
ugaguacucuuuccaugugaa

SEQ ID NO: 28241 - RNA, 21 nt, Artificial Sequence
  LRRK2 RNA guide
uggaaagaguacucacauuuu

SEQ ID NO: 28242 - RNA, 21 nt, Artificial Sequence
  LRRK2 RNA guide
ugugaguacucuuuccaugug

SEQ ID NO: 28243 - RNA, 21 nt, Artificial Sequence
  LRRK2 RNA guide
uguucacauggaaagaguacu

SEQ ID NO: 28244 - RNA, 21 nt, Artificial Sequence
  LRRK2 RNA guide
uucacauggaaagaguacuca

SEQ ID NO: 28245 - RNA, 22 nt, Artificial Sequence
  LRRK2 RNA guide
aaaaaaugugaguacucuuucc

SEQ ID NO: 28246 - RNA, 22 nt, Artificial Sequence
  LRRK2 RNA guide
aaaaaugugaguacucuuucca

SEQ ID NO: 28247 - RNA, 22 nt, Artificial Sequence
  LRRK2 RNA guide
aaaaauguucacauggaaagag

SEQ ID NO: 28248 - RNA, 22 nt, Artificial Sequence
  LRRK2 RNA guide
aaaaugugaguacucuuuccau

SEQ ID NO: 28249 - RNA, 22 nt, Artificial Sequence
  LRRK2 RNA guide
aaaauguucacauggaaagagu

SEQ ID NO: 28250 - RNA, 22 nt, Artificial Sequence
  LRRK2 RNA guide
aaaugugaguacucuuuccaug

SEQ ID NO: 28251 - RNA, 22 nt, Artificial Sequence
  LRRK2 RNA guide
aaauguucacauggaaagagua

SEQ ID NO: 28252 - RNA, 22 nt, Artificial Sequence
  LRRK2 RNA guide
aaugugaguacucuuuccaugu

SEQ ID NO: 28253 - RNA, 22 nt, Artificial Sequence
  LRRK2 RNA guide
aauguucacauggaaagaguac

SEQ ID NO: 28254 - RNA, 22 nt, Artificial Sequence
  LRRK2 RNA guide
acauggaaagaguacucacauu

SEQ ID NO: 28255 - RNA, 22 nt, Artificial Sequence
  LRRK2 RNA guide
acucuuuccaugugaacauuuu

SEQ ID NO: 28256 - RNA, 22 nt, Artificial Sequence
  LRRK2 RNA guide
aguacucuuuccaugugaacau

SEQ ID NO: 28257 - RNA, 22 nt, Artificial Sequence
  LRRK2 RNA guide
auggaaagaguacucacauuuu

SEQ ID NO: 28258 - RNA, 22 nt, Artificial Sequence
  LRRK2 RNA guide
augugaguacucuuuccaugug

SEQ ID NO: 28259 - RNA, 22 nt, Artificial Sequence
  LRRK2 RNA guide
auguucacauggaaagaguacu

SEQ ID NO: 28260 - RNA, 22 nt, Artificial Sequence
  LRRK2 RNA guide
caaaaaaugugaguacucuuuc

SEQ ID NO: 28261 - RNA, 22 nt, Artificial Sequence
  LRRK2 RNA guide
cacauggaaagaguacucacau

SEQ ID NO: 28262 - RNA, 22 nt, Artificial Sequence
  LRRK2 RNA guide
cauggaaagaguacucacauuu

SEQ ID NO: 28263 - RNA, 22 nt, Artificial Sequence
  LRRK2 RNA guide
cgagcuauuucaaaaaauguga

SEQ ID NO: 28264 - RNA, 22 nt, Artificial Sequence
  LRRK2 RNA guide
cucuuuccaugugaacauuuuu

SEQ ID NO: 28265 - RNA, 22 nt, Artificial Sequence
  LRRK2 RNA guide
gaaagaguacucacauuuuuug

SEQ ID NO: 28266 - RNA, 22 nt, Artificial Sequence
  LRRK2 RNA guide
gagcuauuucaaaaaaugugag

SEQ ID NO: 28267 - RNA, 22 nt, Artificial Sequence
  LRRK2 RNA guide
gaguacucuuuccaugugaaca

SEQ ID NO: 28268 - RNA, 22 nt, Artificial Sequence
  LRRK2 RNA guide
ggaaagaguacucacauuuuuu

SEQ ID NO: 28269 - RNA, 22 nt, Artificial Sequence
  LRRK2 RNA guide
guacucuuuccaugugaacauu

SEQ ID NO: 28270 - RNA, 22 nt, Artificial Sequence
  LRRK2 RNA guide
gugaguacucuuuccaugugaa

SEQ ID NO: 28271 - RNA, 22 nt, Artificial Sequence
  LRRK2 RNA guide
guucacauggaaagaguacuca

SEQ ID NO: 28272 - RNA, 22 nt, Artificial Sequence
  LRRK2 RNA guide
uacucuuuccaugugaacauuu

SEQ ID NO: 28273 - RNA, 22 nt, Artificial Sequence
  LRRK2 RNA guide
ucacauggaaagaguacucaca

SEQ ID NO: 28274 - RNA, 22 nt, Artificial Sequence
  LRRK2 RNA guide
ugaguacucuuuccaugugaac

SEQ ID NO: 28275 - RNA, 22 nt, Artificial Sequence
  LRRK2 RNA guide
uggaaagaguacucacauuuuu

SEQ ID NO: 28276 - RNA, 22 nt, Artificial Sequence
  LRRK2 RNA guide
ugugaguacucuuuccauguga

SEQ ID NO: 28277 - RNA, 22 nt, Artificial Sequence
  LRRK2 RNA guide
uguucacauggaaagaguacuc

SEQ ID NO: 28278 - RNA, 22 nt, Artificial Sequence
  LRRK2 RNA guide
uucacauggaaagaguacucac

SEQ ID NO: 28279 - RNA, 20 nt, Artificial Sequence
  LRRK2 RNA guide
aaauagcucguguguaugaa

SEQ ID NO: 28280 - RNA, 20 nt, Artificial Sequence
  LRRK2 RNA guide
aacaugccuucauacacacg

SEQ ID NO: 28281 - RNA, 20 nt, Artificial Sequence
  LRRK2 RNA guide
aauaacaugccuucauacac

SEQ ID NO: 28282 - RNA, 20 nt, Artificial Sequence
  LRRK2 RNA guide
aauagcucguguguaugaag

SEQ ID NO: 28283 - RNA, 20 nt, Artificial Sequence
  LRRK2 RNA guide
acaugccuucauacacacga

SEQ ID NO: 28284 - RNA, 20 nt, Artificial Sequence
  LRRK2 RNA guide
agcucguguguaugaaggca

SEQ ID NO: 28285 - RNA, 20 nt, Artificial Sequence
  LRRK2 RNA guide
auaacaugccuucauacaca

SEQ ID NO: 28286 - RNA, 20 nt, Artificial Sequence
  LRRK2 RNA guide
auaauaacaugccuucauac

SEQ ID NO: 28287 - RNA, 20 nt, Artificial Sequence
  LRRK2 RNA guide
auagcucguguguaugaagg

SEQ ID NO: 28288 - RNA, 20 nt, Artificial Sequence
  LRRK2 RNA guide
augccuucauacacacgagc

SEQ ID NO: 28289 - RNA, 20 nt, Artificial Sequence
  LRRK2 RNA guide
caugccuucauacacacgag

SEQ ID NO: 28290 - RNA, 20 nt, Artificial Sequence
  LRRK2 RNA guide
cguguguaugaaggcauguu

SEQ ID NO: 28291 - RNA, 20 nt, Artificial Sequence
  LRRK2 RNA guide
cucguguguaugaaggcaug

SEQ ID NO: 28292 - RNA, 20 nt, Artificial Sequence
  LRRK2 RNA guide
gaaauagcucguguguauga

SEQ ID NO: 28293 - RNA, 20 nt, Artificial Sequence
  LRRK2 RNA guide
gcucguguguaugaaggcau

SEQ ID NO: 28294 - RNA, 20 nt, Artificial Sequence
  LRRK2 RNA guide
guaugaaggcauguuauuau

SEQ ID NO: 28295 - RNA, 20 nt, Artificial Sequence
  LRRK2 RNA guide
guguaugaaggcauguuauu

SEQ ID NO: 28296 - RNA, 20 nt, Artificial Sequence
  LRRK2 RNA guide
guguguaugaaggcauguua

SEQ ID NO: 28297 - RNA, 20 nt, Artificial Sequence
  LRRK2 RNA guide
uaacaugccuucauacacac

SEQ ID NO: 28298 - RNA, 20 nt, Artificial Sequence
  LRRK2 RNA guide
uaauaacaugccuucauaca

SEQ ID NO: 28299 - RNA, 20 nt, Artificial Sequence
  LRRK2 RNA guide
uagcucguguguaugaaggc

SEQ ID NO: 28300 - RNA, 20 nt, Artificial Sequence
  LRRK2 RNA guide
ucguguguaugaaggcaugu

SEQ ID NO: 28301 - RNA, 20 nt, Artificial Sequence
  LRRK2 RNA guide
ugaaauagcucguguguaug

SEQ ID NO: 28302 - RNA, 20 nt, Artificial Sequence
  LRRK2 RNA guide
ugccuucauacacacgagcu

SEQ ID NO: 28303 - RNA, 20 nt, Artificial Sequence
  LRRK2 RNA guide
uguaugaaggcauguuauua

SEQ ID NO: 28304 - RNA, 20 nt, Artificial Sequence
  LRRK2 RNA guide
uguguaugaaggcauguuau

SEQ ID NO: 28305 - RNA, 21 nt, Artificial Sequence
  LRRK2 RNA guide
aaauagcucguguguaugaag

SEQ ID NO: 28306 - RNA, 21 nt, Artificial Sequence
  LRRK2 RNA guide
aacaugccuucauacacacga

SEQ ID NO: 28307 - RNA, 21 nt, Artificial Sequence
  LRRK2 RNA guide
aauaacaugccuucauacaca

SEQ ID NO: 28308 - RNA, 21 nt, Artificial Sequence
  LRRK2 RNA guide
aauagcucguguguaugaagg

SEQ ID NO: 28309 - RNA, 21 nt, Artificial Sequence
  LRRK2 RNA guide
acaugccuucauacacacgag

SEQ ID NO: 28310 - RNA, 21 nt, Artificial Sequence
  LRRK2 RNA guide
agcucguguguaugaaggcau

SEQ ID NO: 28311 - RNA, 21 nt, Artificial Sequence
  LRRK2 RNA guide
auaacaugccuucauacacac

SEQ ID NO: 28312 - RNA, 21 nt, Artificial Sequence
  LRRK2 RNA guide
auagcucguguguaugaaggc

SEQ ID NO: 28313 - RNA, 21 nt, Artificial Sequence
  LRRK2 RNA guide
augccuucauacacacgagcu

SEQ ID NO: 28314 - RNA, 21 nt, Artificial Sequence
  LRRK2 RNA guide
caugccuucauacacacgagc

SEQ ID NO: 28315 - RNA, 21 nt, Artificial Sequence
  LRRK2 RNA guide
cguguguaugaaggcauguua

SEQ ID NO: 28316 - RNA, 21 nt, Artificial Sequence
  LRRK2 RNA guide
cucguguguaugaaggcaugu

SEQ ID NO: 28317 - RNA, 21 nt, Artificial Sequence
  LRRK2 RNA guide
gaaauagcucguguguaugaa

SEQ ID NO: 28318 - RNA, 21 nt, Artificial Sequence
  LRRK2 RNA guide
gcucguguguaugaaggcaug

SEQ ID NO: 28319 - RNA, 21 nt, Artificial Sequence
  LRRK2 RNA guide
guguaugaaggcauguuauua

SEQ ID NO: 28320 - RNA, 21 nt, Artificial Sequence
  LRRK2 RNA guide
guguguaugaaggcauguuau

SEQ ID NO: 28321 - RNA, 21 nt, Artificial Sequence
  LRRK2 RNA guide
uaacaugccuucauacacacg

SEQ ID NO: 28322 - RNA, 21 nt, Artificial Sequence
  LRRK2 RNA guide
uaauaacaugccuucauacac

SEQ ID NO: 28323 - RNA, 21 nt, Artificial Sequence
  LRRK2 RNA guide
uagcucguguguaugaaggca

SEQ ID NO: 28324 - RNA, 21 nt, Artificial Sequence
  LRRK2 RNA guide
ucguguguaugaaggcauguu

SEQ ID NO: 28325 - RNA, 21 nt, Artificial Sequence
  LRRK2 RNA guide
ugaaauagcucguguguauga

SEQ ID NO: 28326 - RNA, 21 nt, Artificial Sequence
  LRRK2 RNA guide
ugccuucauacacacgagcua

SEQ ID NO: 28327 - RNA, 21 nt, Artificial Sequence
  LRRK2 RNA guide
uguguaugaaggcauguuauu

SEQ ID NO: 28328 - RNA, 21 nt, Artificial Sequence
  LRRK2 RNA guide
uugaaauagcucguguguaug

SEQ ID NO: 28329 - RNA, 22 nt, Artificial Sequence
  LRRK2 RNA guide
aaauagcucguguguaugaagg

SEQ ID NO: 28330 - RNA, 22 nt, Artificial Sequence
  LRRK2 RNA guide
aacaugccuucauacacacgag

SEQ ID NO: 28331 - RNA, 22 nt, Artificial Sequence
  LRRK2 RNA guide
aauaacaugccuucauacacac

SEQ ID NO: 28332 - RNA, 22 nt, Artificial Sequence
  LRRK2 RNA guide
aauagcucguguguaugaaggc

SEQ ID NO: 28333 - RNA, 22 nt, Artificial Sequence
  LRRK2 RNA guide
acaugccuucauacacacgagc

SEQ ID NO: 28334 - RNA, 22 nt, Artificial Sequence
  LRRK2 RNA guide
agcucguguguaugaaggcaug

SEQ ID NO: 28335 - RNA, 22 nt, Artificial Sequence
  LRRK2 RNA guide
auaacaugccuucauacacacg

SEQ ID NO: 28336 - RNA, 22 nt, Artificial Sequence
  LRRK2 RNA guide
auaauaacaugccuucauacac

SEQ ID NO: 28337 - RNA, 22 nt, Artificial Sequence
  LRRK2 RNA guide
auagcucguguguaugaaggca

SEQ ID NO: 28338 - RNA, 22 nt, Artificial Sequence
  LRRK2 RNA guide
augccuucauacacacgagcua

SEQ ID NO: 28339 - RNA, 22 nt, Artificial Sequence
  LRRK2 RNA guide
caugccuucauacacacgagcu

SEQ ID NO: 28340 - RNA, 22 nt, Artificial Sequence
  LRRK2 RNA guide
cguguguaugaaggcauguuau

SEQ ID NO: 28341 - RNA, 22 nt, Artificial Sequence
  LRRK2 RNA guide
cucguguguaugaaggcauguu

SEQ ID NO: 28342 - RNA, 22 nt, Artificial Sequence
  LRRK2 RNA guide
gaaauagcucguguguaugaag

SEQ ID NO: 28343 - RNA, 22 nt, Artificial Sequence
  LRRK2 RNA guide
gcucguguguaugaaggcaugu

SEQ ID NO: 28344 - RNA, 22 nt, Artificial Sequence
  LRRK2 RNA guide
guguaugaaggcauguuauuau

SEQ ID NO: 28345 - RNA, 22 nt, Artificial Sequence
  LRRK2 RNA guide
guguguaugaaggcauguuauu

SEQ ID NO: 28346 - RNA, 22 nt, Artificial Sequence
  LRRK2 RNA guide
uaacaugccuucauacacacga

SEQ ID NO: 28347 - RNA, 22 nt, Artificial Sequence
  LRRK2 RNA guide
uaauaacaugccuucauacaca

SEQ ID NO: 28348 - RNA, 22 nt, Artificial Sequence
  LRRK2 RNA guide
uagcucguguguaugaaggcau

SEQ ID NO: 28349 - RNA, 22 nt, Artificial Sequence
  LRRK2 RNA guide
ucguguguaugaaggcauguua

SEQ ID NO: 28350 - RNA, 22 nt, Artificial Sequence
  LRRK2 RNA guide
ugaaauagcucguguguaugaa

SEQ ID NO: 28351 - RNA, 22 nt, Artificial Sequence
  LRRK2 RNA guide
ugccuucauacacacgagcuau

SEQ ID NO: 28352 - RNA, 22 nt, Artificial Sequence
  LRRK2 RNA guide
uguguaugaaggcauguuauua

SEQ ID NO: 28353 - RNA, 22 nt, Artificial Sequence
  LRRK2 RNA guide
uugaaauagcucguguguauga

SEQ ID NO: 28354 - RNA, 22 nt, Artificial Sequence
  LRRK2 RNA guide
uuugaaauagcucguguguaug

SEQ ID NO: 28355 - RNA, 20 nt, Artificial Sequence
  LRRK2 RNA guide
aauaucaguuacuuucguuc

SEQ ID NO: 28356 - RNA, 20 nt, Artificial Sequence
  LRRK2 RNA guide
aaugaacgaaaguaacugau

SEQ ID NO: 28357 - RNA, 20 nt, Artificial Sequence
  LRRK2 RNA guide
auaucaguuacuuucguuca

SEQ ID NO: 28358 - RNA, 20 nt, Artificial Sequence
  LRRK2 RNA guide
aucaguuacuuucguucauu

SEQ ID NO: 28359 - RNA, 20 nt, Artificial Sequence
  LRRK2 RNA guide
augaacgaaaguaacugaua

SEQ ID NO: 28360 - RNA, 20 nt, Artificial Sequence
  LRRK2 RNA guide
gaacgaaaguaacugauauu

SEQ ID NO: 28361 - RNA, 20 nt, Artificial Sequence
  LRRK2 RNA guide
uaaugaacgaaaguaacuga

SEQ ID NO: 28362 - RNA, 20 nt, Artificial Sequence
  LRRK2 RNA guide
uaucaguuacuuucguucau

SEQ ID NO: 28363 - RNA, 20 nt, Artificial Sequence
  LRRK2 RNA guide
ugaacgaaaguaacugauau

SEQ ID NO: 28364 - RNA, 20 nt, Artificial Sequence
  LRRK2 RNA guide
uuaaugaacgaaaguaacug

SEQ ID NO: 28365 - RNA, 20 nt, Artificial Sequence
  LRRK2 RNA guide
aaaucugugaaguaccuaau

SEQ ID NO: 28366 - RNA, 20 nt, Artificial Sequence
  LRRK2 RNA guide
aaguaccuaauuugaguacu

SEQ ID NO: 28367 - RNA, 20 nt, Artificial Sequence
  LRRK2 RNA guide
aaucugugaaguaccuaauu

SEQ ID NO: 28368 - RNA, 20 nt, Artificial Sequence
  LRRK2 RNA guide
accuaauuugaguacucaua

SEQ ID NO: 28369 - RNA, 20 nt, Artificial Sequence
  LRRK2 RNA guide
acucaaauuagguacuucac

SEQ ID NO: 28370 - RNA, 20 nt, Artificial Sequence
  LRRK2 RNA guide
aguaccuaauuugaguacuc

SEQ ID NO: 28371 - RNA, 20 nt, Artificial Sequence
  LRRK2 RNA guide
aguacucaaauuagguacuu

SEQ ID NO: 28372 - RNA, 20 nt, Artificial Sequence
  LRRK2 RNA guide
aguaugaguacucaaauuag

SEQ ID NO: 28373 - RNA, 20 nt, Artificial Sequence
  LRRK2 RNA guide
auaaaucugugaaguaccua

SEQ ID NO: 28374 - RNA, 20 nt, Artificial Sequence
  LRRK2 RNA guide
aucugugaaguaccuaauuu

SEQ ID NO: 28375 - RNA, 20 nt, Artificial Sequence
  LRRK2 RNA guide
augaguacucaaauuaggua

SEQ ID NO: 28376 - RNA, 20 nt, Artificial Sequence
  LRRK2 RNA guide
ccuaauuugaguacucauac

SEQ ID NO: 28377 - RNA, 20 nt, Artificial Sequence
  LRRK2 RNA guide
cuaauuugaguacucauacu

SEQ ID NO: 28378 - RNA, 20 nt, Artificial Sequence
  LRRK2 RNA guide
cucaaauuagguacuucaca

SEQ ID NO: 28379 - RNA, 20 nt, Artificial Sequence
  LRRK2 RNA guide
cugugaaguaccuaauuuga

SEQ ID NO: 28380 - RNA, 20 nt, Artificial Sequence
  LRRK2 RNA guide
gaaguaccuaauuugaguac

SEQ ID NO: 28381 - RNA, 20 nt, Artificial Sequence
  LRRK2 RNA guide
gaguacucaaauuagguacu

SEQ ID NO: 28382 - RNA, 20 nt, Artificial Sequence
  LRRK2 RNA guide
guaccuaauuugaguacuca

SEQ ID NO: 28383 - RNA, 20 nt, Artificial Sequence
  LRRK2 RNA guide
guacucaaauuagguacuuc

SEQ ID NO: 28384 - RNA, 20 nt, Artificial Sequence
  LRRK2 RNA guide
guaugaguacucaaauuagg

SEQ ID NO: 28385 - RNA, 20 nt, Artificial Sequence
  LRRK2 RNA guide
gugaaguaccuaauuugagu

SEQ ID NO: 28386 - RNA, 20 nt, Artificial Sequence
  LRRK2 RNA guide
uaaaucugugaaguaccuaa

SEQ ID NO: 28387 - RNA, 20 nt, Artificial Sequence
  LRRK2 RNA guide
uaccuaauuugaguacucau

SEQ ID NO: 28388 - RNA, 20 nt, Artificial Sequence
  LRRK2 RNA guide
uacucaaauuagguacuuca

SEQ ID NO: 28389 - RNA, 20 nt, Artificial Sequence
  LRRK2 RNA guide
uaugaguacucaaauuaggu

SEQ ID NO: 28390 - RNA, 20 nt, Artificial Sequence
  LRRK2 RNA guide
ucaaauuagguacuucacag

SEQ ID NO: 28391 - RNA, 20 nt, Artificial Sequence
  LRRK2 RNA guide
ucugugaaguaccuaauuug

SEQ ID NO: 28392 - RNA, 20 nt, Artificial Sequence
  LRRK2 RNA guide
ugaaguaccuaauuugagua

SEQ ID NO: 28393 - RNA, 20 nt, Artificial Sequence
  LRRK2 RNA guide
ugaguacucaaauuagguac

SEQ ID NO: 28394 - RNA, 20 nt, Artificial Sequence
  LRRK2 RNA guide
ugugaaguaccuaauuugag

SEQ ID NO: 28395 - RNA, 21 nt, Artificial Sequence
  LRRK2 RNA guide
aaguaccuaauuugaguacuc

SEQ ID NO: 28396 - RNA, 21 nt, Artificial Sequence
  LRRK2 RNA guide
accuaauuugaguacucauac

SEQ ID NO: 28397 - RNA, 21 nt, Artificial Sequence
  LRRK2 RNA guide
acucaaauuagguacuucaca

SEQ ID NO: 28398 - RNA, 21 nt, Artificial Sequence
  LRRK2 RNA guide
aguaccuaauuugaguacuca

SEQ ID NO: 28399 - RNA, 21 nt, Artificial Sequence
  LRRK2 RNA guide
aguacucaaauuagguacuuc

SEQ ID NO: 28400 - RNA, 21 nt, Artificial Sequence
  LRRK2 RNA guide
aguaugaguacucaaauuagg

SEQ ID NO: 28401 - RNA, 21 nt, Artificial Sequence
  LRRK2 RNA guide
aucugugaaguaccuaauuug

SEQ ID NO: 28402 - RNA, 21 nt, Artificial Sequence
  LRRK2 RNA guide
augaguacucaaauuagguac

SEQ ID NO: 28403 - RNA, 21 nt, Artificial Sequence
  LRRK2 RNA guide
ccuaauuugaguacucauacu

SEQ ID NO: 28404 - RNA, 21 nt, Artificial Sequence
  LRRK2 RNA guide
cucaaauuagguacuucacag

SEQ ID NO: 28405 - RNA, 21 nt, Artificial Sequence
  LRRK2 RNA guide
cugugaaguaccuaauuugag

SEQ ID NO: 28406 - RNA, 21 nt, Artificial Sequence
  LRRK2 RNA guide
gaaguaccuaauuugaguacu

SEQ ID NO: 28407 - RNA, 21 nt, Artificial Sequence
  LRRK2 RNA guide
gaguacucaaauuagguacuu

SEQ ID NO: 28408 - RNA, 21 nt, Artificial Sequence
  LRRK2 RNA guide
guaccuaauuugaguacucau

SEQ ID NO: 28409 - RNA, 21 nt, Artificial Sequence
  LRRK2 RNA guide
guacucaaauuagguacuuca

SEQ ID NO: 28410 - RNA, 21 nt, Artificial Sequence
  LRRK2 RNA guide
guaugaguacucaaauuaggu

SEQ ID NO: 28411 - RNA, 21 nt, Artificial Sequence
  LRRK2 RNA guide
gugaaguaccuaauuugagua

SEQ ID NO: 28412 - RNA, 21 nt, Artificial Sequence
  LRRK2 RNA guide
uacucaaauuagguacuucac

SEQ ID NO: 28413 - RNA, 21 nt, Artificial Sequence
  LRRK2 RNA guide
ucaaauuagguacuucacaga

SEQ ID NO: 28414 - RNA, 21 nt, Artificial Sequence
  LRRK2 RNA guide
ucugugaaguaccuaauuuga

SEQ ID NO: 28415 - RNA, 21 nt, Artificial Sequence
  LRRK2 RNA guide
ugaaguaccuaauuugaguac

SEQ ID NO: 28416 - RNA, 21 nt, Artificial Sequence
  LRRK2 RNA guide
ugaguacucaaauuagguacu

SEQ ID NO: 28417 - RNA, 21 nt, Artificial Sequence
  LRRK2 RNA guide
ugugaaguaccuaauuugagu

SEQ ID NO: 28418 - RNA, 22 nt, Artificial Sequence
  LRRK2 RNA guide
aaguaccuaauuugaguacuca

SEQ ID NO: 28419 - RNA, 22 nt, Artificial Sequence
  LRRK2 RNA guide
aaucugugaaguaccuaauuug

SEQ ID NO: 28420 - RNA, 22 nt, Artificial Sequence
  LRRK2 RNA guide
accuaauuugaguacucauacu

SEQ ID NO: 28421 - RNA, 22 nt, Artificial Sequence
  LRRK2 RNA guide
acucaaauuagguacuucacag

SEQ ID NO: 28422 - RNA, 22 nt, Artificial Sequence
  LRRK2 RNA guide
aguaccuaauuugaguacucau

SEQ ID NO: 28423 - RNA, 22 nt, Artificial Sequence
  LRRK2 RNA guide
aguacucaaauuagguacuuca

SEQ ID NO: 28424 - RNA, 22 nt, Artificial Sequence
  LRRK2 RNA guide
aguaugaguacucaaauuaggu

SEQ ID NO: 28425 - RNA, 22 nt, Artificial Sequence
  LRRK2 RNA guide
aucugugaaguaccuaauuuga

SEQ ID NO: 28426 - RNA, 22 nt, Artificial Sequence
  LRRK2 RNA guide
augaguacucaaauuagguacu

SEQ ID NO: 28427 - RNA, 22 nt, Artificial Sequence
  LRRK2 RNA guide
ccuaauuugaguacucauacua

SEQ ID NO: 28428 - RNA, 22 nt, Artificial Sequence
  LRRK2 RNA guide
cucaaauuagguacuucacaga

SEQ ID NO: 28429 - RNA, 22 nt, Artificial Sequence
  LRRK2 RNA guide
cugugaaguaccuaauuugagu

SEQ ID NO: 28430 - RNA, 22 nt, Artificial Sequence
  LRRK2 RNA guide
gaaguaccuaauuugaguacuc

SEQ ID NO: 28431 - RNA, 22 nt, Artificial Sequence
  LRRK2 RNA guide
gaguacucaaauuagguacuuc

SEQ ID NO: 28432 - RNA, 22 nt, Artificial Sequence
  LRRK2 RNA guide
guaccuaauuugaguacucaua

SEQ ID NO: 28433 - RNA, 22 nt, Artificial Sequence
  LRRK2 RNA guide
guacucaaauuagguacuucac

SEQ ID NO: 28434 - RNA, 22 nt, Artificial Sequence
  LRRK2 RNA guide
guaugaguacucaaauuaggua

SEQ ID NO: 28435 - RNA, 22 nt, Artificial Sequence
  LRRK2 RNA guide
gugaaguaccuaauuugaguac

SEQ ID NO: 28436 - RNA, 22 nt, Artificial Sequence
  LRRK2 RNA guide
uaccuaauuugaguacucauac

SEQ ID NO: 28437 - RNA, 22 nt, Artificial Sequence
  LRRK2 RNA guide
uacucaaauuagguacuucaca

SEQ ID NO: 28438 - RNA, 22 nt, Artificial Sequence
  LRRK2 RNA guide
uaguaugaguacucaaauuagg

SEQ ID NO: 28439 - RNA, 22 nt, Artificial Sequence
  LRRK2 RNA guide
uaugaguacucaaauuagguac

SEQ ID NO: 28440 - RNA, 22 nt, Artificial Sequence
  LRRK2 RNA guide
ucaaauuagguacuucacagau

SEQ ID NO: 28441 - RNA, 22 nt, Artificial Sequence
  LRRK2 RNA guide
ucugugaaguaccuaauuugag

SEQ ID NO: 28442 - RNA, 22 nt, Artificial Sequence
  LRRK2 RNA guide
ugaaguaccuaauuugaguacu

SEQ ID NO: 28443 - RNA, 22 nt, Artificial Sequence
  LRRK2 RNA guide
ugaguacucaaauuagguacuu

SEQ ID NO: 28444 - RNA, 22 nt, Artificial Sequence
  LRRK2 RNA guide
ugugaaguaccuaauuugagua

SEQ ID NO: 28445 - RNA, 20 nt, Artificial Sequence
  LRRK2 RNA guide
aaaaaaugaucggccuuaua

SEQ ID NO: 28446 - RNA, 20 nt, Artificial Sequence
  LRRK2 RNA guide
aaaaaugaucggccuuauaa

SEQ ID NO: 28447 - RNA, 20 nt, Artificial Sequence
  LRRK2 RNA guide
aaaacaaaaaaugaucggcc

SEQ ID NO: 28448 - RNA, 20 nt, Artificial Sequence
  LRRK2 RNA guide
aaaaugaucggccuuauaaa

SEQ ID NO: 28449 - RNA, 20 nt, Artificial Sequence
  LRRK2 RNA guide
aaaauuuauaaggccgauca

SEQ ID NO: 28450 - RNA, 20 nt, Artificial Sequence
  LRRK2 RNA guide
aaacaaaaaaugaucggccu

SEQ ID NO: 28451 - RNA, 20 nt, Artificial Sequence
  LRRK2 RNA guide
aaaugaucggccuuauaaau

SEQ ID NO: 28452 - RNA, 20 nt, Artificial Sequence
  LRRK2 RNA guide
aaauuuauaaggccgaucau

SEQ ID NO: 28453 - RNA, 20 nt, Artificial Sequence
  LRRK2 RNA guide
aacaaaaaaugaucggccuu

SEQ ID NO: 28454 - RNA, 20 nt, Artificial Sequence
  LRRK2 RNA guide
aaggccgaucauuuuuuguu

SEQ ID NO: 28455 - RNA, 20 nt, Artificial Sequence
  LRRK2 RNA guide
aaugaucggccuuauaaauu

SEQ ID NO: 28456 - RNA, 20 nt, Artificial Sequence
  LRRK2 RNA guide
aauuuauaaggccgaucauu

SEQ ID NO: 28457 - RNA, 20 nt, Artificial Sequence
  LRRK2 RNA guide
acaaaaaaugaucggccuua

SEQ ID NO: 28458 - RNA, 20 nt, Artificial Sequence
  LRRK2 RNA guide
acuaaaauuuauaaggccga

SEQ ID NO: 28459 - RNA, 20 nt, Artificial Sequence
  LRRK2 RNA guide
agaaaacaaaaaaugaucgg

SEQ ID NO: 28460 - RNA, 20 nt, Artificial Sequence
  LRRK2 RNA guide
aggccgaucauuuuuuguuu

SEQ ID NO: 28461 - RNA, 20 nt, Artificial Sequence
  LRRK2 RNA guide
auaaggccgaucauuuuuug

SEQ ID NO: 28462 - RNA, 20 nt, Artificial Sequence
  LRRK2 RNA guide
augaucggccuuauaaauuu

SEQ ID NO: 28463 - RNA, 20 nt, Artificial Sequence
  LRRK2 RNA guide
auuuauaaggccgaucauuu

SEQ ID NO: 28464 - RNA, 20 nt, Artificial Sequence
  LRRK2 RNA guide
caaaaaaugaucggccuuau

SEQ ID NO: 28465 - RNA, 20 nt, Artificial Sequence
  LRRK2 RNA guide
ccgaucauuuuuuguuuucu

SEQ ID NO: 28466 - RNA, 20 nt, Artificial Sequence
  LRRK2 RNA guide
cuaaaauuuauaaggccgau

SEQ ID NO: 28467 - RNA, 20 nt, Artificial Sequence
  LRRK2 RNA guide
gaaaacaaaaaaugaucggc

SEQ ID NO: 28468 - RNA, 20 nt, Artificial Sequence
  LRRK2 RNA guide
gccgaucauuuuuuguuuuc

SEQ ID NO: 28469 - RNA, 20 nt, Artificial Sequence
  LRRK2 RNA guide
ggccgaucauuuuuuguuuu

SEQ ID NO: 28470 - RNA, 20 nt, Artificial Sequence
  LRRK2 RNA guide
uaaaauuuauaaggccgauc

SEQ ID NO: 28471 - RNA, 20 nt, Artificial Sequence
  LRRK2 RNA guide
uaaggccgaucauuuuuugu

SEQ ID NO: 28472 - RNA, 20 nt, Artificial Sequence
  LRRK2 RNA guide
uacuaaaauuuauaaggccg

SEQ ID NO: 28473 - RNA, 20 nt, Artificial Sequence
  LRRK2 RNA guide
uauaaggccgaucauuuuuu

SEQ ID NO: 28474 - RNA, 20 nt, Artificial Sequence
  LRRK2 RNA guide
ugaucggccuuauaaauuuu

SEQ ID NO: 28475 - RNA, 20 nt, Artificial Sequence
  LRRK2 RNA guide
uuauaaggccgaucauuuuu

SEQ ID NO: 28476 - RNA, 20 nt, Artificial Sequence
  LRRK2 RNA guide
uuuauaaggccgaucauuuu

SEQ ID NO: 28477 - RNA, 21 nt, Artificial Sequence
  LRRK2 RNA guide
aaaacaaaaaaugaucggccu

SEQ ID NO: 28478 - RNA, 21 nt, Artificial Sequence
  LRRK2 RNA guide
aaacaaaaaaugaucggccuu

SEQ ID NO: 28479 - RNA, 21 nt, Artificial Sequence
  LRRK2 RNA guide
aacaaaaaaugaucggccuua

SEQ ID NO: 28480 - RNA, 21 nt, Artificial Sequence
  LRRK2 RNA guide
aaggccgaucauuuuuuguuu

SEQ ID NO: 28481 - RNA, 21 nt, Artificial Sequence
  LRRK2 RNA guide
acaaaaaaugaucggccuuau

SEQ ID NO: 28482 - RNA, 21 nt, Artificial Sequence
  LRRK2 RNA guide
agaaaacaaaaaaugaucggc

SEQ ID NO: 28483 - RNA, 21 nt, Artificial Sequence
  LRRK2 RNA guide
aggccgaucauuuuuuguuuu

SEQ ID NO: 28484 - RNA, 21 nt, Artificial Sequence
  LRRK2 RNA guide
auaaggccgaucauuuuuugu

SEQ ID NO: 28485 - RNA, 21 nt, Artificial Sequence
  LRRK2 RNA guide
caaaaaaugaucggccuuaua

SEQ ID NO: 28486 - RNA, 21 nt, Artificial Sequence
  LRRK2 RNA guide
cuaaaauuuauaaggccgauc

SEQ ID NO: 28487 - RNA, 21 nt, Artificial Sequence
  LRRK2 RNA guide
gaaaacaaaaaaugaucggcc

SEQ ID NO: 28488 - RNA, 21 nt, Artificial Sequence
  LRRK2 RNA guide
gccgaucauuuuuuguuuucu

SEQ ID NO: 28489 - RNA, 21 nt, Artificial Sequence
  LRRK2 RNA guide
ggccgaucauuuuuuguuuuc

SEQ ID NO: 28490 - RNA, 21 nt, Artificial Sequence
  LRRK2 RNA guide
uaaggccgaucauuuuuuguu

SEQ ID NO: 28491 - RNA, 21 nt, Artificial Sequence
  LRRK2 RNA guide
uauaaggccgaucauuuuuug

SEQ ID NO: 28492 - RNA, 22 nt, Artificial Sequence
  LRRK2 RNA guide
aaaacaaaaaaugaucggccuu

SEQ ID NO: 28493 - RNA, 22 nt, Artificial Sequence
  LRRK2 RNA guide
aaacaaaaaaugaucggccuua

SEQ ID NO: 28494 - RNA, 22 nt, Artificial Sequence
  LRRK2 RNA guide
aacaaaaaaugaucggccuuau

SEQ ID NO: 28495 - RNA, 22 nt, Artificial Sequence
  LRRK2 RNA guide
aagaaaacaaaaaaugaucggc

SEQ ID NO: 28496 - RNA, 22 nt, Artificial Sequence
  LRRK2 RNA guide
aaggccgaucauuuuuuguuuu

SEQ ID NO: 28497 - RNA, 22 nt, Artificial Sequence
  LRRK2 RNA guide
acaaaaaaugaucggccuuaua

SEQ ID NO: 28498 - RNA, 22 nt, Artificial Sequence
  LRRK2 RNA guide
acuaaaauuuauaaggccgauc

SEQ ID NO: 28499 - RNA, 22 nt, Artificial Sequence
  LRRK2 RNA guide
agaaaacaaaaaaugaucggcc

SEQ ID NO: 28500 - RNA, 22 nt, Artificial Sequence
  LRRK2 RNA guide
aggccgaucauuuuuuguuuuc

SEQ ID NO: 28501 - RNA, 22 nt, Artificial Sequence
  LRRK2 RNA guide
auaaggccgaucauuuuuuguu

SEQ ID NO: 28502 - RNA, 22 nt, Artificial Sequence
  LRRK2 RNA guide
caaaaaaugaucggccuuauaa

SEQ ID NO: 28503 - RNA, 22 nt, Artificial Sequence
  LRRK2 RNA guide
caagaaaacaaaaaaugaucgg

SEQ ID NO: 28504 - RNA, 22 nt, Artificial Sequence
  LRRK2 RNA guide
cauacuaaaauuuauaaggccg

SEQ ID NO: 28505 - RNA, 22 nt, Artificial Sequence
  LRRK2 RNA guide
ccauuacagacaagaaaacaaa

SEQ ID NO: 28506 - RNA, 22 nt, Artificial Sequence
  LRRK2 RNA guide
ccgaucauuuuuuguuuucuug

SEQ ID NO: 28507 - RNA, 22 nt, Artificial Sequence
  LRRK2 RNA guide
cuaaaauuuauaaggccgauca

SEQ ID NO: 28508 - RNA, 22 nt, Artificial Sequence
  LRRK2 RNA guide
gaaaacaaaaaaugaucggccu

SEQ ID NO: 28509 - RNA, 22 nt, Artificial Sequence
  LRRK2 RNA guide
gccgaucauuuuuuguuuucuu

SEQ ID NO: 28510 - RNA, 22 nt, Artificial Sequence
  LRRK2 RNA guide
ggccgaucauuuuuuguuuucu

SEQ ID NO: 28511 - RNA, 22 nt, Artificial Sequence
  LRRK2 RNA guide
uaaggccgaucauuuuuuguuu

SEQ ID NO: 28512 - RNA, 22 nt, Artificial Sequence
  LRRK2 RNA guide
uauaaggccgaucauuuuuugu

SEQ ID NO: 28513 - RNA, 22 nt, Artificial Sequence
  LRRK2 RNA guide
ugaucggccuuauaaauuuuag

SEQ ID NO: 28514 - RNA, 22 nt, Artificial Sequence
  LRRK2 RNA guide
uuauaaggccgaucauuuuuug

SEQ ID NO: 28515 - RNA, 20 nt, Artificial Sequence
  LRRK2 RNA guide
aaaucugcaugguauaauga

SEQ ID NO: 28516 - RNA, 20 nt, Artificial Sequence
  LRRK2 RNA guide
aaucugcaugguauaaugaa

SEQ ID NO: 28517 - RNA, 20 nt, Artificial Sequence
  LRRK2 RNA guide
accaugcagauuucuagaaa

SEQ ID NO: 28518 - RNA, 20 nt, Artificial Sequence
  LRRK2 RNA guide
agaaaucugcaugguauaau

SEQ ID NO: 28519 - RNA, 20 nt, Artificial Sequence
  LRRK2 RNA guide
auaccaugcagauuucuaga

SEQ ID NO: 28520 - RNA, 20 nt, Artificial Sequence
  LRRK2 RNA guide
aucugcaugguauaaugaaa

SEQ ID NO: 28521 - RNA, 20 nt, Artificial Sequence
  LRRK2 RNA guide
auuauaccaugcagauuucu

SEQ ID NO: 28522 - RNA, 20 nt, Artificial Sequence
  LRRK2 RNA guide
auuuucauuauaccaugcag

SEQ ID NO: 28523 - RNA, 20 nt, Artificial Sequence
  LRRK2 RNA guide
caugcagauuucuagaaaaa

SEQ ID NO: 28524 - RNA, 20 nt, Artificial Sequence
  LRRK2 RNA guide
cauuauaccaugcagauuuc

SEQ ID NO: 28525 - RNA, 20 nt, Artificial Sequence
  LRRK2 RNA guide
ccaugcagauuucuagaaaa

SEQ ID NO: 28526 - RNA, 20 nt, Artificial Sequence
  LRRK2 RNA guide
cgauuuuucuagaaaucugc

SEQ ID NO: 28527 - RNA, 20 nt, Artificial Sequence
  LRRK2 RNA guide
cuagaaaucugcaugguaua

SEQ ID NO: 28528 - RNA, 20 nt, Artificial Sequence
  LRRK2 RNA guide
cugcaugguauaaugaaaau

SEQ ID NO: 28529 - RNA, 20 nt, Artificial Sequence
  LRRK2 RNA guide
gaaaucugcaugguauaaug

SEQ ID NO: 28530 - RNA, 20 nt, Artificial Sequence
  LRRK2 RNA guide
gauuuuucuagaaaucugca

SEQ ID NO: 28531 - RNA, 20 nt, Artificial Sequence
  LRRK2 RNA guide
gucgauuuuucuagaaaucu

SEQ ID NO: 28532 - RNA, 20 nt, Artificial Sequence
  LRRK2 RNA guide
uaccaugcagauuucuagaa

SEQ ID NO: 28533 - RNA, 20 nt, Artificial Sequence
  LRRK2 RNA guide
uagaaaucugcaugguauaa

SEQ ID NO: 28534 - RNA, 20 nt, Artificial Sequence
  LRRK2 RNA guide
uauaccaugcagauuucuag

SEQ ID NO: 28535 - RNA, 20 nt, Artificial Sequence
  LRRK2 RNA guide
ucauuauaccaugcagauuu

SEQ ID NO: 28536 - RNA, 20 nt, Artificial Sequence
  LRRK2 RNA guide
ucgauuuuucuagaaaucug

SEQ ID NO: 28537 - RNA, 20 nt, Artificial Sequence
  LRRK2 RNA guide
ucuagaaaucugcaugguau

SEQ ID NO: 28538 - RNA, 20 nt, Artificial Sequence
  LRRK2 RNA guide
ucugcaugguauaaugaaaa

SEQ ID NO: 28539 - RNA, 20 nt, Artificial Sequence
  LRRK2 RNA guide
ugucgauuuuucuagaaauc

SEQ ID NO: 28540 - RNA, 20 nt, Artificial Sequence
  LRRK2 RNA guide
uuauaccaugcagauuucua

SEQ ID NO: 28541 - RNA, 20 nt, Artificial Sequence
  LRRK2 RNA guide
uucauuauaccaugcagauu

SEQ ID NO: 28542 - RNA, 20 nt, Artificial Sequence
  LRRK2 RNA guide
uucuagaaaucugcauggua

SEQ ID NO: 28543 - RNA, 20 nt, Artificial Sequence
  LRRK2 RNA guide
uuucauuauaccaugcagau

SEQ ID NO: 28544 - RNA, 20 nt, Artificial Sequence
  LRRK2 RNA guide
uuucuagaaaucugcauggu

SEQ ID NO: 28545 - RNA, 20 nt, Artificial Sequence
  LRRK2 RNA guide
uuuucauuauaccaugcaga

SEQ ID NO: 28546 - RNA, 20 nt, Artificial Sequence
  LRRK2 RNA guide
uuuucuagaaaucugcaugg

SEQ ID NO: 28547 - RNA, 20 nt, Artificial Sequence
  LRRK2 RNA guide
uuuuucuagaaaucugcaug

SEQ ID NO: 28548 - RNA, 21 nt, Artificial Sequence
  LRRK2 RNA guide
accaugcagauuucuagaaaa

SEQ ID NO: 28549 - RNA, 21 nt, Artificial Sequence
  LRRK2 RNA guide
agaaaucugcaugguauaaug

SEQ ID NO: 28550 - RNA, 21 nt, Artificial Sequence
  LRRK2 RNA guide
auaccaugcagauuucuagaa

SEQ ID NO: 28551 - RNA, 21 nt, Artificial Sequence
  LRRK2 RNA guide
cauuauaccaugcagauuucu

SEQ ID NO: 28552 - RNA, 21 nt, Artificial Sequence
  LRRK2 RNA guide
ccaugcagauuucuagaaaaa

SEQ ID NO: 28553 - RNA, 21 nt, Artificial Sequence
  LRRK2 RNA guide
cgauuuuucuagaaaucugca

SEQ ID NO: 28554 - RNA, 21 nt, Artificial Sequence
  LRRK2 RNA guide
cuagaaaucugcaugguauaa

SEQ ID NO: 28555 - RNA, 21 nt, Artificial Sequence
  LRRK2 RNA guide
gaaaucugcaugguauaauga

SEQ ID NO: 28556 - RNA, 21 nt, Artificial Sequence
  LRRK2 RNA guide
gucgauuuuucuagaaaucug

SEQ ID NO: 28557 - RNA, 21 nt, Artificial Sequence
  LRRK2 RNA guide
uaccaugcagauuucuagaaa

SEQ ID NO: 28558 - RNA, 21 nt, Artificial Sequence
  LRRK2 RNA guide
uauaccaugcagauuucuaga

SEQ ID NO: 28559 - RNA, 21 nt, Artificial Sequence
  LRRK2 RNA guide
ucauuauaccaugcagauuuc

SEQ ID NO: 28560 - RNA, 21 nt, Artificial Sequence
  LRRK2 RNA guide
ucgauuuuucuagaaaucugc

SEQ ID NO: 28561 - RNA, 21 nt, Artificial Sequence
  LRRK2 RNA guide
ucuagaaaucugcaugguaua

SEQ ID NO: 28562 - RNA, 21 nt, Artificial Sequence
  LRRK2 RNA guide
uuauaccaugcagauuucuag

SEQ ID NO: 28563 - RNA, 21 nt, Artificial Sequence
  LRRK2 RNA guide
uucuagaaaucugcaugguau

SEQ ID NO: 28564 - RNA, 21 nt, Artificial Sequence
  LRRK2 RNA guide
uuucuagaaaucugcauggua

SEQ ID NO: 28565 - RNA, 21 nt, Artificial Sequence
  LRRK2 RNA guide
uuuucuagaaaucugcauggu

SEQ ID NO: 28566 - RNA, 21 nt, Artificial Sequence
  LRRK2 RNA guide
uuuuucuagaaaucugcaugg

SEQ ID NO: 28567 - RNA, 22 nt, Artificial Sequence
  LRRK2 RNA guide
accaugcagauuucuagaaaaa

SEQ ID NO: 28568 - RNA, 22 nt, Artificial Sequence
  LRRK2 RNA guide
agaaaucugcaugguauaauga

SEQ ID NO: 28569 - RNA, 22 nt, Artificial Sequence
  LRRK2 RNA guide
auaccaugcagauuucuagaaa

SEQ ID NO: 28570 - RNA, 22 nt, Artificial Sequence
  LRRK2 RNA guide
auuauaccaugcagauuucuag

SEQ ID NO: 28571 - RNA, 22 nt, Artificial Sequence
  LRRK2 RNA guide
auuuuucuagaaaucugcaugg

SEQ ID NO: 28572 - RNA, 22 nt, Artificial Sequence
  LRRK2 RNA guide
caugcagauuucuagaaaaauc

SEQ ID NO: 28573 - RNA, 22 nt, Artificial Sequence
  LRRK2 RNA guide
cauuauaccaugcagauuucua

SEQ ID NO: 28574 - RNA, 22 nt, Artificial Sequence
  LRRK2 RNA guide
ccaugcagauuucuagaaaaau

SEQ ID NO: 28575 - RNA, 22 nt, Artificial Sequence
  LRRK2 RNA guide
cgauuuuucuagaaaucugcau

SEQ ID NO: 28576 - RNA, 22 nt, Artificial Sequence
  LRRK2 RNA guide
cuagaaaucugcaugguauaau

SEQ ID NO: 28577 - RNA, 22 nt, Artificial Sequence
  LRRK2 RNA guide
cuugucgauuuuucuagaaauc

SEQ ID NO: 28578 - RNA, 22 nt, Artificial Sequence
  LRRK2 RNA guide
gaaaucugcaugguauaaugaa

SEQ ID NO: 28579 - RNA, 22 nt, Artificial Sequence
  LRRK2 RNA guide
gauuuuucuagaaaucugcaug

SEQ ID NO: 28580 - RNA, 22 nt, Artificial Sequence
  LRRK2 RNA guide
gucgauuuuucuagaaaucugc

SEQ ID NO: 28581 - RNA, 22 nt, Artificial Sequence
  LRRK2 RNA guide
uaccaugcagauuucuagaaaa

SEQ ID NO: 28582 - RNA, 22 nt, Artificial Sequence
  LRRK2 RNA guide
uagaaaucugcaugguauaaug

SEQ ID NO: 28583 - RNA, 22 nt, Artificial Sequence
  LRRK2 RNA guide
uauaccaugcagauuucuagaa

SEQ ID NO: 28584 - RNA, 22 nt, Artificial Sequence
  LRRK2 RNA guide
ucauuauaccaugcagauuucu

SEQ ID NO: 28585 - RNA, 22 nt, Artificial Sequence
  LRRK2 RNA guide
ucgauuuuucuagaaaucugca

SEQ ID NO: 28586 - RNA, 22 nt, Artificial Sequence
  LRRK2 RNA guide
ucuagaaaucugcaugguauaa

SEQ ID NO: 28587 - RNA, 22 nt, Artificial Sequence
  LRRK2 RNA guide
ugucgauuuuucuagaaaucug

SEQ ID NO: 28588 - RNA, 22 nt, Artificial Sequence
  LRRK2 RNA guide
uuauaccaugcagauuucuaga

SEQ ID NO: 28589 - RNA, 22 nt, Artificial Sequence
  LRRK2 RNA guide
uucauuauaccaugcagauuuc

SEQ ID NO: 28590 - RNA, 22 nt, Artificial Sequence
  LRRK2 RNA guide
uucuagaaaucugcaugguaua

SEQ ID NO: 28591 - RNA, 22 nt, Artificial Sequence
  LRRK2 RNA guide
uuucuagaaaucugcaugguau

SEQ ID NO: 28592 - RNA, 22 nt, Artificial Sequence
  LRRK2 RNA guide
uuuucuagaaaucugcauggua

SEQ ID NO: 28593 - RNA, 22 nt, Artificial Sequence
  LRRK2 RNA guide
uuuuucuagaaaucugcauggu

SEQ ID NO: 28594 - RNA, 21 nt, Artificial Sequence
  LRRK2 RNA guide
ggacuuuauuagugcaaauuc

SEQ ID NO: 28595 - RNA, 22 nt, Artificial Sequence
  LRRK2 RNA guide
aggacuuuauuagugcaaauuc

SEQ ID NO: 28596 - RNA, 22 nt, Artificial Sequence
  LRRK2 RNA guide
ggacuuuauuagugcaaauuca

SEQ ID NO: 28597 - RNA, 20 nt, Artificial Sequence
  LRRK2 RNA guide
acaguaugucauguuuuuuc

SEQ ID NO: 28598 - RNA, 20 nt, Artificial Sequence
  LRRK2 RNA guide
caguaugucauguuuuuuca

SEQ ID NO: 28599 - RNA, 20 nt, Artificial Sequence
  LRRK2 RNA guide
cauuuguacuuuuaauggag

SEQ ID NO: 28600 - RNA, 20 nt, Artificial Sequence
  LRRK2 RNA guide
cuccauuaaaaguacaaaug

SEQ ID NO: 28601 - RNA, 20 nt, Artificial Sequence
  LRRK2 RNA guide
gaaaacuccauuaaaaguac

SEQ ID NO: 28602 - RNA, 20 nt, Artificial Sequence
  LRRK2 RNA guide
gacaguaugucauguuuuuu

SEQ ID NO: 28603 - RNA, 21 nt, Artificial Sequence
  LRRK2 RNA guide
gacaguaugucauguuuuuuc

SEQ ID NO: 28604 - RNA, 22 nt, Artificial Sequence
  LRRK2 RNA guide
gacaguaugucauguuuuuuca

SEQ ID NO: 28605 - RNA, 22 nt, Artificial Sequence
  LRRK2 RNA guide
ugacaguaugucauguuuuuuc

SEQ ID NO: 28606 - RNA, 20 nt, Artificial Sequence
  LRRK2 RNA guide
aaaacucuauuaugucuagg

SEQ ID NO: 28607 - RNA, 20 nt, Artificial Sequence
  LRRK2 RNA guide
acauucaaacauagaguuga

SEQ ID NO: 28608 - RNA, 20 nt, Artificial Sequence
  LRRK2 RNA guide
cauucaaacauagaguugaa

SEQ ID NO: 28609 - RNA, 20 nt, Artificial Sequence
  LRRK2 RNA guide
ccuagacauaauagaguuuu

SEQ ID NO: 28610 - RNA, 20 nt, Artificial Sequence
  LRRK2 RNA guide
cuuuccuagacauaauagag

SEQ ID NO: 28611 - RNA, 20 nt, Artificial Sequence
  LRRK2 RNA guide
gucuuuccuagacauaauag

SEQ ID NO: 28612 - RNA, 20 nt, Artificial Sequence
  LRRK2 RNA guide
uccuagacauaauagaguuu

SEQ ID NO: 28613 - RNA, 20 nt, Artificial Sequence
  LRRK2 RNA guide
ucuuuccuagacauaauaga

SEQ ID NO: 28614 - RNA, 20 nt, Artificial Sequence
  LRRK2 RNA guide
uuccuagacauaauagaguu

SEQ ID NO: 28615 - RNA, 20 nt, Artificial Sequence
  LRRK2 RNA guide
uuuccuagacauaauagagu

SEQ ID NO: 28616 - RNA, 21 nt, Artificial Sequence
  LRRK2 RNA guide
cacauucaaacauagaguuga

SEQ ID NO: 28617 - RNA, 21 nt, Artificial Sequence
  LRRK2 RNA guide
cuuuccuagacauaauagagu

SEQ ID NO: 28618 - RNA, 21 nt, Artificial Sequence
  LRRK2 RNA guide
gucuuuccuagacauaauaga

SEQ ID NO: 28619 - RNA, 21 nt, Artificial Sequence
  LRRK2 RNA guide
ucuuuccuagacauaauagag

SEQ ID NO: 28620 - RNA, 21 nt, Artificial Sequence
  LRRK2 RNA guide
ugucuuuccuagacauaauag

SEQ ID NO: 28621 - RNA, 22 nt, Artificial Sequence
  LRRK2 RNA guide
cacauucaaacauagaguugaa

SEQ ID NO: 28622 - RNA, 22 nt, Artificial Sequence
  LRRK2 RNA guide
ccacauucaaacauagaguuga

SEQ ID NO: 28623 - RNA, 22 nt, Artificial Sequence
  LRRK2 RNA guide
cuuuccuagacauaauagaguu

SEQ ID NO: 28624 - RNA, 22 nt, Artificial Sequence
  LRRK2 RNA guide
gucuuuccuagacauaauagag

SEQ ID NO: 28625 - RNA, 22 nt, Artificial Sequence
  LRRK2 RNA guide
gugucuuuccuagacauaauag

SEQ ID NO: 28626 - RNA, 22 nt, Artificial Sequence
  LRRK2 RNA guide
ucuuuccuagacauaauagagu

SEQ ID NO: 28627 - RNA, 22 nt, Artificial Sequence
  LRRK2 RNA guide
ugucuuuccuagacauaauaga

SEQ ID NO: 28628 - RNA, 20 nt, Artificial Sequence
  LRRK2 RNA guide
aaaauucagguuauccacau

SEQ ID NO: 28629 - RNA, 20 nt, Artificial Sequence
  LRRK2 RNA guide
aaauucagguuauccacauu

SEQ ID NO: 28630 - RNA, 20 nt, Artificial Sequence
  LRRK2 RNA guide
aacucuauguuugaaugugg

SEQ ID NO: 28631 - RNA, 20 nt, Artificial Sequence
  LRRK2 RNA guide
aauguggauaaccugaauuu

SEQ ID NO: 28632 - RNA, 20 nt, Artificial Sequence
  LRRK2 RNA guide
aauucagguuauccacauuc

SEQ ID NO: 28633 - RNA, 20 nt, Artificial Sequence
  LRRK2 RNA guide
acaaaauucagguuauccac

SEQ ID NO: 28634 - RNA, 20 nt, Artificial Sequence
  LRRK2 RNA guide
acucuauguuugaaugugga

SEQ ID NO: 28635 - RNA, 20 nt, Artificial Sequence
  LRRK2 RNA guide
agguuauccacauucaaaca

SEQ ID NO: 28636 - RNA, 20 nt, Artificial Sequence
  LRRK2 RNA guide
auacaaaauucagguuaucc

SEQ ID NO: 28637 - RNA, 20 nt, Artificial Sequence
  LRRK2 RNA guide
auguggauaaccugaauuuu

SEQ ID NO: 28638 - RNA, 20 nt, Artificial Sequence
  LRRK2 RNA guide
auguuugaauguggauaacc

SEQ ID NO: 28639 - RNA, 20 nt, Artificial Sequence
  LRRK2 RNA guide
auucagguuauccacauuca

SEQ ID NO: 28640 - RNA, 20 nt, Artificial Sequence
  LRRK2 RNA guide
caaaauucagguuauccaca

SEQ ID NO: 28641 - RNA, 20 nt, Artificial Sequence
  LRRK2 RNA guide
caacucuauguuugaaugug

SEQ ID NO: 28642 - RNA, 20 nt, Artificial Sequence
  LRRK2 RNA guide
cagguuauccacauucaaac

SEQ ID NO: 28643 - RNA, 20 nt, Artificial Sequence
  LRRK2 RNA guide
cuauguuugaauguggauaa

SEQ ID NO: 28644 - RNA, 20 nt, Artificial Sequence
  LRRK2 RNA guide
cucuauguuugaauguggau

SEQ ID NO: 28645 - RNA, 20 nt, Artificial Sequence
  LRRK2 RNA guide
gaauguggauaaccugaauu

SEQ ID NO: 28646 - RNA, 20 nt, Artificial Sequence
  LRRK2 RNA guide
ggauaaccugaauuuuguau

SEQ ID NO: 28647 - RNA, 20 nt, Artificial Sequence
  LRRK2 RNA guide
gguuauccacauucaaacau

SEQ ID NO: 28648 - RNA, 20 nt, Artificial Sequence
  LRRK2 RNA guide
guggauaaccugaauuuugu

SEQ ID NO: 28649 - RNA, 20 nt, Artificial Sequence
  LRRK2 RNA guide
guuauccacauucaaacaua

SEQ ID NO: 28650 - RNA, 20 nt, Artificial Sequence
  LRRK2 RNA guide
guuugaauguggauaaccug

SEQ ID NO: 28651 - RNA, 20 nt, Artificial Sequence
  LRRK2 RNA guide
uacaaaauucagguuaucca

SEQ ID NO: 28652 - RNA, 20 nt, Artificial Sequence
  LRRK2 RNA guide
uauguuugaauguggauaac

SEQ ID NO: 28653 - RNA, 20 nt, Artificial Sequence
  LRRK2 RNA guide
ucagguuauccacauucaaa

SEQ ID NO: 28654 - RNA, 20 nt, Artificial Sequence
  LRRK2 RNA guide
ucuauguuugaauguggaua

SEQ ID NO: 28655 - RNA, 20 nt, Artificial Sequence
  LRRK2 RNA guide
ugaauguggauaaccugaau

SEQ ID NO: 28656 - RNA, 20 nt, Artificial Sequence
  LRRK2 RNA guide
uggauaaccugaauuuugua

SEQ ID NO: 28657 - RNA, 20 nt, Artificial Sequence
  LRRK2 RNA guide
uguggauaaccugaauuuug

SEQ ID NO: 28658 - RNA, 20 nt, Artificial Sequence
  LRRK2 RNA guide
uguuugaauguggauaaccu

SEQ ID NO: 28659 - RNA, 20 nt, Artificial Sequence
  LRRK2 RNA guide
uucagguuauccacauucaa

SEQ ID NO: 28660 - RNA, 20 nt, Artificial Sequence
  LRRK2 RNA guide
uugaauguggauaaccugaa

SEQ ID NO: 28661 - RNA, 20 nt, Artificial Sequence
  LRRK2 RNA guide
uuugaauguggauaaccuga

SEQ ID NO: 28662 - RNA, 21 nt, Artificial Sequence
  LRRK2 RNA guide
aaauucagguuauccacauuc

SEQ ID NO: 28663 - RNA, 21 nt, Artificial Sequence
  LRRK2 RNA guide
aacucuauguuugaaugugga

SEQ ID NO: 28664 - RNA, 21 nt, Artificial Sequence
  LRRK2 RNA guide
aauucagguuauccacauuca

SEQ ID NO: 28665 - RNA, 21 nt, Artificial Sequence
  LRRK2 RNA guide
acaaaauucagguuauccaca

SEQ ID NO: 28666 - RNA, 21 nt, Artificial Sequence
  LRRK2 RNA guide
acucuauguuugaauguggau

SEQ ID NO: 28667 - RNA, 21 nt, Artificial Sequence
  LRRK2 RNA guide
agguuauccacauucaaacau

SEQ ID NO: 28668 - RNA, 21 nt, Artificial Sequence
  LRRK2 RNA guide
auguggauaaccugaauuuug

SEQ ID NO: 28669 - RNA, 21 nt, Artificial Sequence
  LRRK2 RNA guide
auguuugaauguggauaaccu

SEQ ID NO: 28670 - RNA, 21 nt, Artificial Sequence
  LRRK2 RNA guide
auucagguuauccacauucaa

SEQ ID NO: 28671 - RNA, 21 nt, Artificial Sequence
  LRRK2 RNA guide
caaaauucagguuauccacau

SEQ ID NO: 28672 - RNA, 21 nt, Artificial Sequence
  LRRK2 RNA guide
caacucuauguuugaaugugg

SEQ ID NO: 28673 - RNA, 21 nt, Artificial Sequence
  LRRK2 RNA guide
cagguuauccacauucaaaca

SEQ ID NO: 28674 - RNA, 21 nt, Artificial Sequence
  LRRK2 RNA guide
cuauguuugaauguggauaac

SEQ ID NO: 28675 - RNA, 21 nt, Artificial Sequence
  LRRK2 RNA guide
cucuauguuugaauguggaua

SEQ ID NO: 28676 - RNA, 21 nt, Artificial Sequence
  LRRK2 RNA guide
gaauguggauaaccugaauuu

SEQ ID NO: 28677 - RNA, 21 nt, Artificial Sequence
  LRRK2 RNA guide
gguuauccacauucaaacaua

SEQ ID NO: 28678 - RNA, 21 nt, Artificial Sequence
  LRRK2 RNA guide
guggauaaccugaauuuugua

SEQ ID NO: 28679 - RNA, 21 nt, Artificial Sequence
  LRRK2 RNA guide
guuauccacauucaaacauag

SEQ ID NO: 28680 - RNA, 21 nt, Artificial Sequence
  LRRK2 RNA guide
guuugaauguggauaaccuga

SEQ ID NO: 28681 - RNA, 21 nt, Artificial Sequence
  LRRK2 RNA guide
uacaaaauucagguuauccac

SEQ ID NO: 28682 - RNA, 21 nt, Artificial Sequence
  LRRK2 RNA guide
uauguuugaauguggauaacc

SEQ ID NO: 28683 - RNA, 21 nt, Artificial Sequence
  LRRK2 RNA guide
ucaacucuauguuugaaugug

SEQ ID NO: 28684 - RNA, 21 nt, Artificial Sequence
  LRRK2 RNA guide
ucagguuauccacauucaaac

SEQ ID NO: 28685 - RNA, 21 nt, Artificial Sequence
  LRRK2 RNA guide
ugaauguggauaaccugaauu

SEQ ID NO: 28686 - RNA, 21 nt, Artificial Sequence
  LRRK2 RNA guide
uguggauaaccugaauuuugu

SEQ ID NO: 28687 - RNA, 21 nt, Artificial Sequence
  LRRK2 RNA guide
uguuugaauguggauaaccug

SEQ ID NO: 28688 - RNA, 21 nt, Artificial Sequence
  LRRK2 RNA guide
uucagguuauccacauucaaa

SEQ ID NO: 28689 - RNA, 21 nt, Artificial Sequence
  LRRK2 RNA guide
uugaauguggauaaccugaau

SEQ ID NO: 28690 - RNA, 21 nt, Artificial Sequence
  LRRK2 RNA guide
uuugaauguggauaaccugaa

SEQ ID NO: 28691 - RNA, 22 nt, Artificial Sequence
  LRRK2 RNA guide
aaaauucagguuauccacauuc

SEQ ID NO: 28692 - RNA, 22 nt, Artificial Sequence
  LRRK2 RNA guide
aaauucagguuauccacauuca

SEQ ID NO: 28693 - RNA, 22 nt, Artificial Sequence
  LRRK2 RNA guide
aacucuauguuugaauguggau

SEQ ID NO: 28694 - RNA, 22 nt, Artificial Sequence
  LRRK2 RNA guide
aauguggauaaccugaauuuug

SEQ ID NO: 28695 - RNA, 22 nt, Artificial Sequence
  LRRK2 RNA guide
aauucagguuauccacauucaa

SEQ ID NO: 28696 - RNA, 22 nt, Artificial Sequence
  LRRK2 RNA guide
acaaaauucagguuauccacau

SEQ ID NO: 28697 - RNA, 22 nt, Artificial Sequence
  LRRK2 RNA guide
acucuauguuugaauguggaua

SEQ ID NO: 28698 - RNA, 22 nt, Artificial Sequence
  LRRK2 RNA guide
agguuauccacauucaaacaua

SEQ ID NO: 28699 - RNA, 22 nt, Artificial Sequence
  LRRK2 RNA guide
auacaaaauucagguuauccac

SEQ ID NO: 28700 - RNA, 22 nt, Artificial Sequence
  LRRK2 RNA guide
auguggauaaccugaauuuugu

SEQ ID NO: 28701 - RNA, 22 nt, Artificial Sequence
  LRRK2 RNA guide
auguuugaauguggauaaccug

SEQ ID NO: 28702 - RNA, 22 nt, Artificial Sequence
  LRRK2 RNA guide
auucagguuauccacauucaaa

SEQ ID NO: 28703 - RNA, 22 nt, Artificial Sequence
  LRRK2 RNA guide
caaaauucagguuauccacauu

SEQ ID NO: 28704 - RNA, 22 nt, Artificial Sequence
  LRRK2 RNA guide
caacucuauguuugaaugugga

SEQ ID NO: 28705 - RNA, 22 nt, Artificial Sequence
  LRRK2 RNA guide
cagguuauccacauucaaacau

SEQ ID NO: 28706 - RNA, 22 nt, Artificial Sequence
  LRRK2 RNA guide
cuauguuugaauguggauaacc

SEQ ID NO: 28707 - RNA, 22 nt, Artificial Sequence
  LRRK2 RNA guide
cucuauguuugaauguggauaa

SEQ ID NO: 28708 - RNA, 22 nt, Artificial Sequence
  LRRK2 RNA guide
gaauguggauaaccugaauuuu

SEQ ID NO: 28709 - RNA, 22 nt, Artificial Sequence
  LRRK2 RNA guide
gguuauccacauucaaacauag

SEQ ID NO: 28710 - RNA, 22 nt, Artificial Sequence
  LRRK2 RNA guide
guggauaaccugaauuuuguau

SEQ ID NO: 28711 - RNA, 22 nt, Artificial Sequence
  LRRK2 RNA guide
guuauccacauucaaacauaga

SEQ ID NO: 28712 - RNA, 22 nt, Artificial Sequence
  LRRK2 RNA guide
guuugaauguggauaaccugaa

SEQ ID NO: 28713 - RNA, 22 nt, Artificial Sequence
  LRRK2 RNA guide
uacaaaauucagguuauccaca

SEQ ID NO: 28714 - RNA, 22 nt, Artificial Sequence
  LRRK2 RNA guide
uauguuugaauguggauaaccu

SEQ ID NO: 28715 - RNA, 22 nt, Artificial Sequence
  LRRK2 RNA guide
ucaacucuauguuugaaugugg

SEQ ID NO: 28716 - RNA, 22 nt, Artificial Sequence
  LRRK2 RNA guide
ucagguuauccacauucaaaca

SEQ ID NO: 28717 - RNA, 22 nt, Artificial Sequence
  LRRK2 RNA guide
ucuauguuugaauguggauaac

SEQ ID NO: 28718 - RNA, 22 nt, Artificial Sequence
  LRRK2 RNA guide
ugaauguggauaaccugaauuu

SEQ ID NO: 28719 - RNA, 22 nt, Artificial Sequence
  LRRK2 RNA guide
uguggauaaccugaauuuugua

SEQ ID NO: 28720 - RNA, 22 nt, Artificial Sequence
  LRRK2 RNA guide
uguuugaauguggauaaccuga

SEQ ID NO: 28721 - RNA, 22 nt, Artificial Sequence
  LRRK2 RNA guide
uucaacucuauguuugaaugug

SEQ ID NO: 28722 - RNA, 22 nt, Artificial Sequence
  LRRK2 RNA guide
uucagguuauccacauucaaac

SEQ ID NO: 28723 - RNA, 22 nt, Artificial Sequence
  LRRK2 RNA guide
uugaauguggauaaccugaauu

SEQ ID NO: 28724 - RNA, 22 nt, Artificial Sequence
  LRRK2 RNA guide
uuugaauguggauaaccugaau

SEQ ID NO: 28725 - RNA, 20 nt, Artificial Sequence
  LRRK2 RNA guide
aacacuguauuuacacucau

SEQ ID NO: 28726 - RNA, 20 nt, Artificial Sequence
  LRRK2 RNA guide
aaugaguguaaauacagugu

SEQ ID NO: 28727 - RNA, 20 nt, Artificial Sequence
  LRRK2 RNA guide
acacuguauuuacacucauu

SEQ ID NO: 28728 - RNA, 20 nt, Artificial Sequence
  LRRK2 RNA guide
acccugaauuuuguauaaug

SEQ ID NO: 28729 - RNA, 20 nt, Artificial Sequence
  LRRK2 RNA guide
acugaacacuguauuuacac

SEQ ID NO: 28730 - RNA, 20 nt, Artificial Sequence
  LRRK2 RNA guide
augaguguaaauacaguguu

SEQ ID NO: 28731 - RNA, 20 nt, Artificial Sequence
  LRRK2 RNA guide
cacuguauuuacacucauua

SEQ ID NO: 28732 - RNA, 20 nt, Artificial Sequence
  LRRK2 RNA guide
cccugaauuuuguauaauga

SEQ ID NO: 28733 - RNA, 20 nt, Artificial Sequence
  LRRK2 RNA guide
ccugaauuuuguauaaugag

SEQ ID NO: 28734 - RNA, 20 nt, Artificial Sequence
  LRRK2 RNA guide
cucauuauacaaaauucagg

SEQ ID NO: 28735 - RNA, 20 nt, Artificial Sequence
  LRRK2 RNA guide
cugaacacuguauuuacacu

SEQ ID NO: 28736 - RNA, 20 nt, Artificial Sequence
  LRRK2 RNA guide
gaacacuguauuuacacuca

SEQ ID NO: 28737 - RNA, 20 nt, Artificial Sequence
  LRRK2 RNA guide
gacugaacacuguauuuaca

SEQ ID NO: 28738 - RNA, 20 nt, Artificial Sequence
  LRRK2 RNA guide
gauacccugaauuuuguaua

SEQ ID NO: 28739 - RNA, 20 nt, Artificial Sequence
  LRRK2 RNA guide
ggacugaacacuguauuuac

SEQ ID NO: 28740 - RNA, 20 nt, Artificial Sequence
  LRRK2 RNA guide
ggauacccugaauuuuguau

SEQ ID NO: 28741 - RNA, 20 nt, Artificial Sequence
  LRRK2 RNA guide
uaaugaguguaaauacagug

SEQ ID NO: 28742 - RNA, 20 nt, Artificial Sequence
  LRRK2 RNA guide
ucauuauacaaaauucaggg

SEQ ID NO: 28743 - RNA, 20 nt, Artificial Sequence
  LRRK2 RNA guide
ugaacacuguauuuacacuc

SEQ ID NO: 28744 - RNA, 20 nt, Artificial Sequence
  LRRK2 RNA guide
ugaguguaaauacaguguuc

SEQ ID NO: 28745 - RNA, 20 nt, Artificial Sequence
  LRRK2 RNA guide
uggauacccugaauuuugua

SEQ ID NO: 28746 - RNA, 21 nt, Artificial Sequence
  LRRK2 RNA guide
aaggacugaacacuguauuua

SEQ ID NO: 28747 - RNA, 21 nt, Artificial Sequence
  LRRK2 RNA guide
acugaacacuguauuuacacu

SEQ ID NO: 28748 - RNA, 21 nt, Artificial Sequence
  LRRK2 RNA guide
aggacugaacacuguauuuac

SEQ ID NO: 28749 - RNA, 21 nt, Artificial Sequence
  LRRK2 RNA guide
augaguguaaauacaguguuc

SEQ ID NO: 28750 - RNA, 21 nt, Artificial Sequence
  LRRK2 RNA guide
cccugaauuuuguauaaugag

SEQ ID NO: 28751 - RNA, 21 nt, Artificial Sequence
  LRRK2 RNA guide
cucauuauacaaaauucaggg

SEQ ID NO: 28752 - RNA, 21 nt, Artificial Sequence
  LRRK2 RNA guide
cugaacacuguauuuacacuc

SEQ ID NO: 28753 - RNA, 21 nt, Artificial Sequence
  LRRK2 RNA guide
gaacacuguauuuacacucau

SEQ ID NO: 28754 - RNA, 21 nt, Artificial Sequence
  LRRK2 RNA guide
gacugaacacuguauuuacac

SEQ ID NO: 28755 - RNA, 21 nt, Artificial Sequence
  LRRK2 RNA guide
ggacugaacacuguauuuaca

SEQ ID NO: 28756 - RNA, 21 nt, Artificial Sequence
  LRRK2 RNA guide
ggauacccugaauuuuguaua

SEQ ID NO: 28757 - RNA, 21 nt, Artificial Sequence
  LRRK2 RNA guide
guggauacccugaauuuugua

SEQ ID NO: 28758 - RNA, 21 nt, Artificial Sequence
  LRRK2 RNA guide
ugaacacuguauuuacacuca

SEQ ID NO: 28759 - RNA, 21 nt, Artificial Sequence
  LRRK2 RNA guide
ugaguguaaauacaguguuca

SEQ ID NO: 28760 - RNA, 21 nt, Artificial Sequence
  LRRK2 RNA guide
uggauacccugaauuuuguau

SEQ ID NO: 28761 - RNA, 22 nt, Artificial Sequence
  LRRK2 RNA guide
aaggacugaacacuguauuuac

SEQ ID NO: 28762 - RNA, 22 nt, Artificial Sequence
  LRRK2 RNA guide
aaugaguguaaauacaguguuc

SEQ ID NO: 28763 - RNA, 22 nt, Artificial Sequence
  LRRK2 RNA guide
acccugaauuuuguauaaugag

SEQ ID NO: 28764 - RNA, 22 nt, Artificial Sequence
  LRRK2 RNA guide
acucauuauacaaaauucaggg

SEQ ID NO: 28765 - RNA, 22 nt, Artificial Sequence
  LRRK2 RNA guide
acugaacacuguauuuacacuc

SEQ ID NO: 28766 - RNA, 22 nt, Artificial Sequence
  LRRK2 RNA guide
aggacugaacacuguauuuaca

SEQ ID NO: 28767 - RNA, 22 nt, Artificial Sequence
  LRRK2 RNA guide
augaguguaaauacaguguuca

SEQ ID NO: 28768 - RNA, 22 nt, Artificial Sequence
  LRRK2 RNA guide
cacucauuauacaaaauucagg

SEQ ID NO: 28769 - RNA, 22 nt, Artificial Sequence
  LRRK2 RNA guide
cccugaauuuuguauaaugagu

SEQ ID NO: 28770 - RNA, 22 nt, Artificial Sequence
  LRRK2 RNA guide
ccugaauuuuguauaaugagug

SEQ ID NO: 28771 - RNA, 22 nt, Artificial Sequence
  LRRK2 RNA guide
cucauuauacaaaauucagggu

SEQ ID NO: 28772 - RNA, 22 nt, Artificial Sequence
  LRRK2 RNA guide
cugaacacuguauuuacacuca

SEQ ID NO: 28773 - RNA, 22 nt, Artificial Sequence
  LRRK2 RNA guide
gaacacuguauuuacacucauu

SEQ ID NO: 28774 - RNA, 22 nt, Artificial Sequence
  LRRK2 RNA guide
gaaggacugaacacuguauuua

SEQ ID NO: 28775 - RNA, 22 nt, Artificial Sequence
  LRRK2 RNA guide
gacugaacacuguauuuacacu

SEQ ID NO: 28776 - RNA, 22 nt, Artificial Sequence
  LRRK2 RNA guide
ggacugaacacuguauuuacac

SEQ ID NO: 28777 - RNA, 22 nt, Artificial Sequence
  LRRK2 RNA guide
ggauacccugaauuuuguauaa

SEQ ID NO: 28778 - RNA, 22 nt, Artificial Sequence
  LRRK2 RNA guide
guggauacccugaauuuuguau

SEQ ID NO: 28779 - RNA, 22 nt, Artificial Sequence
  LRRK2 RNA guide
ugaacacuguauuuacacucau

SEQ ID NO: 28780 - RNA, 22 nt, Artificial Sequence
  LRRK2 RNA guide
ugaguguaaauacaguguucag

SEQ ID NO: 28781 - RNA, 22 nt, Artificial Sequence
  LRRK2 RNA guide
uggauacccugaauuuuguaua

SEQ ID NO: 28782 - RNA, 22 nt, Artificial Sequence
  LRRK2 RNA guide
uguggauacccugaauuuugua

SEQ ID NO: 28783 - RNA, 20 nt, Artificial Sequence
  LRRK2 RNA guide
aaaagguuucuaucugaaug

SEQ ID NO: 28784 - RNA, 20 nt, Artificial Sequence
  LRRK2 RNA guide
aagguuucuaucugaaugag

SEQ ID NO: 28785 - RNA, 20 nt, Artificial Sequence
  LRRK2 RNA guide
aaugagguaggaucugcagc

SEQ ID NO: 28786 - RNA, 20 nt, Artificial Sequence
  LRRK2 RNA guide
aauuugugaugcugcagauc

SEQ ID NO: 28787 - RNA, 20 nt, Artificial Sequence
  LRRK2 RNA guide
accucauucagauagaaacc

SEQ ID NO: 28788 - RNA, 20 nt, Artificial Sequence
  LRRK2 RNA guide
agauccuaccucauucagau

SEQ ID NO: 28789 - RNA, 20 nt, Artificial Sequence
  LRRK2 RNA guide
agguaggaucugcagcauca

SEQ ID NO: 28790 - RNA, 20 nt, Artificial Sequence
  LRRK2 RNA guide
agguuucuaucugaaugagg

SEQ ID NO: 28791 - RNA, 20 nt, Artificial Sequence
  LRRK2 RNA guide
auccuaccucauucagauag

SEQ ID NO: 28792 - RNA, 20 nt, Artificial Sequence
  LRRK2 RNA guide
aucugaaugagguaggaucu

SEQ ID NO: 28793 - RNA, 20 nt, Artificial Sequence
  LRRK2 RNA guide
augagguaggaucugcagca

SEQ ID NO: 28794 - RNA, 20 nt, Artificial Sequence
  LRRK2 RNA guide
augcugcagauccuaccuca

SEQ ID NO: 28795 - RNA, 20 nt, Artificial Sequence
  LRRK2 RNA guide
auuugugaugcugcagaucc

SEQ ID NO: 28796 - RNA, 20 nt, Artificial Sequence
  LRRK2 RNA guide
cagauccuaccucauucaga

SEQ ID NO: 28797 - RNA, 20 nt, Artificial Sequence
  LRRK2 RNA guide
ccuaccucauucagauagaa

SEQ ID NO: 28798 - RNA, 20 nt, Artificial Sequence
  LRRK2 RNA guide
ccucauucagauagaaaccu

SEQ ID NO: 28799 - RNA, 20 nt, Artificial Sequence
  LRRK2 RNA guide
cuaccucauucagauagaaa

SEQ ID NO: 28800 - RNA, 20 nt, Artificial Sequence
  LRRK2 RNA guide
cuaucugaaugagguaggau

SEQ ID NO: 28801 - RNA, 20 nt, Artificial Sequence
  LRRK2 RNA guide
cugaaugagguaggaucugc

SEQ ID NO: 28802 - RNA, 20 nt, Artificial Sequence
  LRRK2 RNA guide
cugcagauccuaccucauuc

SEQ ID NO: 28803 - RNA, 20 nt, Artificial Sequence
  LRRK2 RNA guide
gaaugagguaggaucugcag

SEQ ID NO: 28804 - RNA, 20 nt, Artificial Sequence
  LRRK2 RNA guide
gagguaggaucugcagcauc

SEQ ID NO: 28805 - RNA, 20 nt, Artificial Sequence
  LRRK2 RNA guide
gauccuaccucauucagaua

SEQ ID NO: 28806 - RNA, 20 nt, Artificial Sequence
  LRRK2 RNA guide
gaugcugcagauccuaccuc

SEQ ID NO: 28807 - RNA, 20 nt, Artificial Sequence
  LRRK2 RNA guide
gcagauccuaccucauucag

SEQ ID NO: 28808 - RNA, 20 nt, Artificial Sequence
  LRRK2 RNA guide
gcugcagauccuaccucauu

SEQ ID NO: 28809 - RNA, 20 nt, Artificial Sequence
  LRRK2 RNA guide
gguuucuaucugaaugaggu

SEQ ID NO: 28810 - RNA, 20 nt, Artificial Sequence
  LRRK2 RNA guide
gugaugcugcagauccuacc

SEQ ID NO: 28811 - RNA, 20 nt, Artificial Sequence
  LRRK2 RNA guide
guuucuaucugaaugaggua

SEQ ID NO: 28812 - RNA, 20 nt, Artificial Sequence
  LRRK2 RNA guide
uaccucauucagauagaaac

SEQ ID NO: 28813 - RNA, 20 nt, Artificial Sequence
  LRRK2 RNA guide
uaucugaaugagguaggauc

SEQ ID NO: 28814 - RNA, 20 nt, Artificial Sequence
  LRRK2 RNA guide
uccuaccucauucagauaga

SEQ ID NO: 28815 - RNA, 20 nt, Artificial Sequence
  LRRK2 RNA guide
ucuaucugaaugagguagga

SEQ ID NO: 28816 - RNA, 20 nt, Artificial Sequence
  LRRK2 RNA guide
ucugaaugagguaggaucug

SEQ ID NO: 28817 - RNA, 20 nt, Artificial Sequence
  LRRK2 RNA guide
ugaaugagguaggaucugca

SEQ ID NO: 28818 - RNA, 20 nt, Artificial Sequence
  LRRK2 RNA guide
ugagguaggaucugcagcau

SEQ ID NO: 28819 - RNA, 20 nt, Artificial Sequence
  LRRK2 RNA guide
ugaugcugcagauccuaccu

SEQ ID NO: 28820 - RNA, 20 nt, Artificial Sequence
  LRRK2 RNA guide
ugcagauccuaccucauuca

SEQ ID NO: 28821 - RNA, 20 nt, Artificial Sequence
  LRRK2 RNA guide
ugcugcagauccuaccucau

SEQ ID NO: 28822 - RNA, 20 nt, Artificial Sequence
  LRRK2 RNA guide
ugugaugcugcagauccuac

SEQ ID NO: 28823 - RNA, 20 nt, Artificial Sequence
  LRRK2 RNA guide
uucuaucugaaugagguagg

SEQ ID NO: 28824 - RNA, 20 nt, Artificial Sequence
  LRRK2 RNA guide
uugugaugcugcagauccua

SEQ ID NO: 28825 - RNA, 20 nt, Artificial Sequence
  LRRK2 RNA guide
uuucuaucugaaugagguag

SEQ ID NO: 28826 - RNA, 20 nt, Artificial Sequence
  LRRK2 RNA guide
uuugugaugcugcagauccu

SEQ ID NO: 28827 - RNA, 21 nt, Artificial Sequence
  LRRK2 RNA guide
aaagguuucuaucugaaugag

SEQ ID NO: 28828 - RNA, 21 nt, Artificial Sequence
  LRRK2 RNA guide
aaauuugugaugcugcagauc

SEQ ID NO: 28829 - RNA, 21 nt, Artificial Sequence
  LRRK2 RNA guide
aagguuucuaucugaaugagg

SEQ ID NO: 28830 - RNA, 21 nt, Artificial Sequence
  LRRK2 RNA guide
aaugagguaggaucugcagca

SEQ ID NO: 28831 - RNA, 21 nt, Artificial Sequence
  LRRK2 RNA guide
aauuugugaugcugcagaucc

SEQ ID NO: 28832 - RNA, 21 nt, Artificial Sequence
  LRRK2 RNA guide
accucauucagauagaaaccu

SEQ ID NO: 28833 - RNA, 21 nt, Artificial Sequence
  LRRK2 RNA guide
agauccuaccucauucagaua

SEQ ID NO: 28834 - RNA, 21 nt, Artificial Sequence
  LRRK2 RNA guide
agguaggaucugcagcaucac

SEQ ID NO: 28835 - RNA, 21 nt, Artificial Sequence
  LRRK2 RNA guide
agguuucuaucugaaugaggu

SEQ ID NO: 28836 - RNA, 21 nt, Artificial Sequence
  LRRK2 RNA guide
auccuaccucauucagauaga

SEQ ID NO: 28837 - RNA, 21 nt, Artificial Sequence
  LRRK2 RNA guide
aucugaaugagguaggaucug

SEQ ID NO: 28838 - RNA, 21 nt, Artificial Sequence
  LRRK2 RNA guide
augagguaggaucugcagcau

SEQ ID NO: 28839 - RNA, 21 nt, Artificial Sequence
  LRRK2 RNA guide
augcugcagauccuaccucau

SEQ ID NO: 28840 - RNA, 21 nt, Artificial Sequence
  LRRK2 RNA guide
auuugugaugcugcagauccu

SEQ ID NO: 28841 - RNA, 21 nt, Artificial Sequence
  LRRK2 RNA guide
cagauccuaccucauucagau

SEQ ID NO: 28842 - RNA, 21 nt, Artificial Sequence
  LRRK2 RNA guide
ccuaccucauucagauagaaa

SEQ ID NO: 28843 - RNA, 21 nt, Artificial Sequence
  LRRK2 RNA guide
ccucauucagauagaaaccuu

SEQ ID NO: 28844 - RNA, 21 nt, Artificial Sequence
  LRRK2 RNA guide
cuaccucauucagauagaaac

SEQ ID NO: 28845 - RNA, 21 nt, Artificial Sequence
  LRRK2 RNA guide
cuaucugaaugagguaggauc

SEQ ID NO: 28846 - RNA, 21 nt, Artificial Sequence
  LRRK2 RNA guide
cugaaugagguaggaucugca

SEQ ID NO: 28847 - RNA, 21 nt, Artificial Sequence
  LRRK2 RNA guide
cugcagauccuaccucauuca

SEQ ID NO: 28848 - RNA, 21 nt, Artificial Sequence
  LRRK2 RNA guide
gaaugagguaggaucugcagc

SEQ ID NO: 28849 - RNA, 21 nt, Artificial Sequence
  LRRK2 RNA guide
gagguaggaucugcagcauca

SEQ ID NO: 28850 - RNA, 21 nt, Artificial Sequence
  LRRK2 RNA guide
gauccuaccucauucagauag

SEQ ID NO: 28851 - RNA, 21 nt, Artificial Sequence
  LRRK2 RNA guide
gaugcugcagauccuaccuca

SEQ ID NO: 28852 - RNA, 21 nt, Artificial Sequence
  LRRK2 RNA guide
gcagauccuaccucauucaga

SEQ ID NO: 28853 - RNA, 21 nt, Artificial Sequence
  LRRK2 RNA guide
gcugcagauccuaccucauuc

SEQ ID NO: 28854 - RNA, 21 nt, Artificial Sequence
  LRRK2 RNA guide
gguuucuaucugaaugaggua

SEQ ID NO: 28855 - RNA, 21 nt, Artificial Sequence
  LRRK2 RNA guide
gugaugcugcagauccuaccu

SEQ ID NO: 28856 - RNA, 21 nt, Artificial Sequence
  LRRK2 RNA guide
guuucuaucugaaugagguag

SEQ ID NO: 28857 - RNA, 21 nt, Artificial Sequence
  LRRK2 RNA guide
uaccucauucagauagaaacc

SEQ ID NO: 28858 - RNA, 21 nt, Artificial Sequence
  LRRK2 RNA guide
uaucugaaugagguaggaucu

SEQ ID NO: 28859 - RNA, 21 nt, Artificial Sequence
  LRRK2 RNA guide
uccuaccucauucagauagaa

SEQ ID NO: 28860 - RNA, 21 nt, Artificial Sequence
  LRRK2 RNA guide
ucuaucugaaugagguaggau

SEQ ID NO: 28861 - RNA, 21 nt, Artificial Sequence
  LRRK2 RNA guide
ucugaaugagguaggaucugc

SEQ ID NO: 28862 - RNA, 21 nt, Artificial Sequence
  LRRK2 RNA guide
ugaaugagguaggaucugcag

SEQ ID NO: 28863 - RNA, 21 nt, Artificial Sequence
  LRRK2 RNA guide
ugagguaggaucugcagcauc

SEQ ID NO: 28864 - RNA, 21 nt, Artificial Sequence
  LRRK2 RNA guide
ugaugcugcagauccuaccuc

SEQ ID NO: 28865 - RNA, 21 nt, Artificial Sequence
  LRRK2 RNA guide
ugcagauccuaccucauucag

SEQ ID NO: 28866 - RNA, 21 nt, Artificial Sequence
  LRRK2 RNA guide
ugcugcagauccuaccucauu

SEQ ID NO: 28867 - RNA, 21 nt, Artificial Sequence
  LRRK2 RNA guide
ugugaugcugcagauccuacc

SEQ ID NO: 28868 - RNA, 21 nt, Artificial Sequence
  LRRK2 RNA guide
uucuaucugaaugagguagga

SEQ ID NO: 28869 - RNA, 21 nt, Artificial Sequence
  LRRK2 RNA guide
uugugaugcugcagauccuac

SEQ ID NO: 28870 - RNA, 21 nt, Artificial Sequence
  LRRK2 RNA guide
uuucuaucugaaugagguagg

SEQ ID NO: 28871 - RNA, 21 nt, Artificial Sequence
  LRRK2 RNA guide
uuugugaugcugcagauccua

SEQ ID NO: 28872 - RNA, 22 nt, Artificial Sequence
  LRRK2 RNA guide
aaaagguuucuaucugaaugag

SEQ ID NO: 28873 - RNA, 22 nt, Artificial Sequence
  LRRK2 RNA guide
aaagguuucuaucugaaugagg

SEQ ID NO: 28874 - RNA, 22 nt, Artificial Sequence
  LRRK2 RNA guide
aaauuugugaugcugcagaucc

SEQ ID NO: 28875 - RNA, 22 nt, Artificial Sequence
  LRRK2 RNA guide
aagguuucuaucugaaugaggu

SEQ ID NO: 28876 - RNA, 22 nt, Artificial Sequence
  LRRK2 RNA guide
aaugagguaggaucugcagcau

SEQ ID NO: 28877 - RNA, 22 nt, Artificial Sequence
  LRRK2 RNA guide
aauuugugaugcugcagauccu

SEQ ID NO: 28878 - RNA, 22 nt, Artificial Sequence
  LRRK2 RNA guide
accucauucagauagaaaccuu

SEQ ID NO: 28879 - RNA, 22 nt, Artificial Sequence
  LRRK2 RNA guide
agauccuaccucauucagauag

SEQ ID NO: 28880 - RNA, 22 nt, Artificial Sequence
  LRRK2 RNA guide
agguaggaucugcagcaucaca

SEQ ID NO: 28881 - RNA, 22 nt, Artificial Sequence
  LRRK2 RNA guide
agguuucuaucugaaugaggua

SEQ ID NO: 28882 - RNA, 22 nt, Artificial Sequence
  LRRK2 RNA guide
auccuaccucauucagauagaa

SEQ ID NO: 28883 - RNA, 22 nt, Artificial Sequence
  LRRK2 RNA guide
aucugaaugagguaggaucugc

SEQ ID NO: 28884 - RNA, 22 nt, Artificial Sequence
  LRRK2 RNA guide
augagguaggaucugcagcauc

SEQ ID NO: 28885 - RNA, 22 nt, Artificial Sequence
  LRRK2 RNA guide
augcugcagauccuaccucauu

SEQ ID NO: 28886 - RNA, 22 nt, Artificial Sequence
  LRRK2 RNA guide
auuugugaugcugcagauccua

SEQ ID NO: 28887 - RNA, 22 nt, Artificial Sequence
  LRRK2 RNA guide
cagauccuaccucauucagaua

SEQ ID NO: 28888 - RNA, 22 nt, Artificial Sequence
  LRRK2 RNA guide
ccuaccucauucagauagaaac

SEQ ID NO: 28889 - RNA, 22 nt, Artificial Sequence
  LRRK2 RNA guide
ccucauucagauagaaaccuuu

SEQ ID NO: 28890 - RNA, 22 nt, Artificial Sequence
  LRRK2 RNA guide
cuaccucauucagauagaaacc

SEQ ID NO: 28891 - RNA, 22 nt, Artificial Sequence
  LRRK2 RNA guide
cuaucugaaugagguaggaucu

SEQ ID NO: 28892 - RNA, 22 nt, Artificial Sequence
  LRRK2 RNA guide
cugaaugagguaggaucugcag

SEQ ID NO: 28893 - RNA, 22 nt, Artificial Sequence
  LRRK2 RNA guide
cugcagauccuaccucauucag

SEQ ID NO: 28894 - RNA, 22 nt, Artificial Sequence
  LRRK2 RNA guide
gaaugagguaggaucugcagca

SEQ ID NO: 28895 - RNA, 22 nt, Artificial Sequence
  LRRK2 RNA guide
gagguaggaucugcagcaucac

SEQ ID NO: 28896 - RNA, 22 nt, Artificial Sequence
  LRRK2 RNA guide
gauccuaccucauucagauaga

SEQ ID NO: 28897 - RNA, 22 nt, Artificial Sequence
  LRRK2 RNA guide
gaugcugcagauccuaccucau

SEQ ID NO: 28898 - RNA, 22 nt, Artificial Sequence
  LRRK2 RNA guide
gcagauccuaccucauucagau

SEQ ID NO: 28899 - RNA, 22 nt, Artificial Sequence
  LRRK2 RNA guide
gcugcagauccuaccucauuca

SEQ ID NO: 28900 - RNA, 22 nt, Artificial Sequence
  LRRK2 RNA guide
gguuucuaucugaaugagguag

SEQ ID NO: 28901 - RNA, 22 nt, Artificial Sequence
  LRRK2 RNA guide
gugaugcugcagauccuaccuc

SEQ ID NO: 28902 - RNA, 22 nt, Artificial Sequence
  LRRK2 RNA guide
guuucuaucugaaugagguagg

SEQ ID NO: 28903 - RNA, 22 nt, Artificial Sequence
  LRRK2 RNA guide
uaaauuugugaugcugcagauc

SEQ ID NO: 28904 - RNA, 22 nt, Artificial Sequence
  LRRK2 RNA guide
uaccucauucagauagaaaccu

SEQ ID NO: 28905 - RNA, 22 nt, Artificial Sequence
  LRRK2 RNA guide
uaucugaaugagguaggaucug

SEQ ID NO: 28906 - RNA, 22 nt, Artificial Sequence
  LRRK2 RNA guide
uccuaccucauucagauagaaa

SEQ ID NO: 28907 - RNA, 22 nt, Artificial Sequence
  LRRK2 RNA guide
ucuaucugaaugagguaggauc

SEQ ID NO: 28908 - RNA, 22 nt, Artificial Sequence
  LRRK2 RNA guide
ucugaaugagguaggaucugca

SEQ ID NO: 28909 - RNA, 22 nt, Artificial Sequence
  LRRK2 RNA guide
ugaaugagguaggaucugcagc

SEQ ID NO: 28910 - RNA, 22 nt, Artificial Sequence
  LRRK2 RNA guide
ugagguaggaucugcagcauca

SEQ ID NO: 28911 - RNA, 22 nt, Artificial Sequence
  LRRK2 RNA guide
ugaugcugcagauccuaccuca

SEQ ID NO: 28912 - RNA, 22 nt, Artificial Sequence
  LRRK2 RNA guide
ugcagauccuaccucauucaga

SEQ ID NO: 28913 - RNA, 22 nt, Artificial Sequence
  LRRK2 RNA guide
ugcugcagauccuaccucauuc

SEQ ID NO: 28914 - RNA, 22 nt, Artificial Sequence
  LRRK2 RNA guide
ugugaugcugcagauccuaccu

SEQ ID NO: 28915 - RNA, 22 nt, Artificial Sequence
  LRRK2 RNA guide
uucuaucugaaugagguaggau

SEQ ID NO: 28916 - RNA, 22 nt, Artificial Sequence
  LRRK2 RNA guide
uugugaugcugcagauccuacc

SEQ ID NO: 28917 - RNA, 22 nt, Artificial Sequence
  LRRK2 RNA guide
uuucuaucugaaugagguagga

SEQ ID NO: 28918 - RNA, 22 nt, Artificial Sequence
  LRRK2 RNA guide
uuugugaugcugcagauccuac

SEQ ID NO: 28919 - RNA, 20 nt, Artificial Sequence
  LRRK2 RNA guide
aauuccacagcuccuaccaa

SEQ ID NO: 28920 - RNA, 20 nt, Artificial Sequence
  LRRK2 RNA guide
acagcuccuaccaagacaau

SEQ ID NO: 28921 - RNA, 20 nt, Artificial Sequence
  LRRK2 RNA guide
accaagacaaugaggauaaa

SEQ ID NO: 28922 - RNA, 20 nt, Artificial Sequence
  LRRK2 RNA guide
agacaaugaggauaaauauc

SEQ ID NO: 28923 - RNA, 20 nt, Artificial Sequence
  LRRK2 RNA guide
agauauuuauccucauuguc

SEQ ID NO: 28924 - RNA, 20 nt, Artificial Sequence
  LRRK2 RNA guide
agcuccuaccaagacaauga

SEQ ID NO: 28925 - RNA, 20 nt, Artificial Sequence
  LRRK2 RNA guide
aguguuagauauuuauccuc

SEQ ID NO: 28926 - RNA, 20 nt, Artificial Sequence
  LRRK2 RNA guide
auccucauugucuugguagg

SEQ ID NO: 28927 - RNA, 20 nt, Artificial Sequence
  LRRK2 RNA guide
auuccacagcuccuaccaag

SEQ ID NO: 28928 - RNA, 20 nt, Artificial Sequence
  LRRK2 RNA guide
auugucuugguaggagcugu

SEQ ID NO: 28929 - RNA, 20 nt, Artificial Sequence
  LRRK2 RNA guide
auuuauccucauugucuugg

SEQ ID NO: 28930 - RNA, 20 nt, Artificial Sequence
  LRRK2 RNA guide
caagacaaugaggauaaaua

SEQ ID NO: 28931 - RNA, 20 nt, Artificial Sequence
  LRRK2 RNA guide
cacagcuccuaccaagacaa

SEQ ID NO: 28932 - RNA, 20 nt, Artificial Sequence
  LRRK2 RNA guide
cagcuccuaccaagacaaug

SEQ ID NO: 28933 - RNA, 20 nt, Artificial Sequence
  LRRK2 RNA guide
cauugucuugguaggagcug

SEQ ID NO: 28934 - RNA, 20 nt, Artificial Sequence
  LRRK2 RNA guide
ccaagacaaugaggauaaau

SEQ ID NO: 28935 - RNA, 20 nt, Artificial Sequence
  LRRK2 RNA guide
ccacagcuccuaccaagaca

SEQ ID NO: 28936 - RNA, 20 nt, Artificial Sequence
  LRRK2 RNA guide
ccuaccaagacaaugaggau

SEQ ID NO: 28937 - RNA, 20 nt, Artificial Sequence
  LRRK2 RNA guide
ccucauugucuugguaggag

SEQ ID NO: 28938 - RNA, 20 nt, Artificial Sequence
  LRRK2 RNA guide
cuaccaagacaaugaggaua

SEQ ID NO: 28939 - RNA, 20 nt, Artificial Sequence
  LRRK2 RNA guide
cucauugucuugguaggagc

SEQ ID NO: 28940 - RNA, 20 nt, Artificial Sequence
  LRRK2 RNA guide
cuccuaccaagacaaugagg

SEQ ID NO: 28941 - RNA, 20 nt, Artificial Sequence
  LRRK2 RNA guide
gaauuccacagcuccuacca

SEQ ID NO: 28942 - RNA, 20 nt, Artificial Sequence
  LRRK2 RNA guide
gacaaugaggauaaauaucu

SEQ ID NO: 28943 - RNA, 20 nt, Artificial Sequence
  LRRK2 RNA guide
gauauuuauccucauugucu

SEQ ID NO: 28944 - RNA, 20 nt, Artificial Sequence
  LRRK2 RNA guide
gcuccuaccaagacaaugag

SEQ ID NO: 28945 - RNA, 20 nt, Artificial Sequence
  LRRK2 RNA guide
guguuagauauuuauccuca

SEQ ID NO: 28946 - RNA, 20 nt, Artificial Sequence
  LRRK2 RNA guide
uaccaagacaaugaggauaa

SEQ ID NO: 28947 - RNA, 20 nt, Artificial Sequence
  LRRK2 RNA guide
uauccucauugucuugguag

SEQ ID NO: 28948 - RNA, 20 nt, Artificial Sequence
  LRRK2 RNA guide
uauuuauccucauugucuug

SEQ ID NO: 28949 - RNA, 20 nt, Artificial Sequence
  LRRK2 RNA guide
ucauugucuugguaggagcu

SEQ ID NO: 28950 - RNA, 20 nt, Artificial Sequence
  LRRK2 RNA guide
uccacagcuccuaccaagac

SEQ ID NO: 28951 - RNA, 20 nt, Artificial Sequence
  LRRK2 RNA guide
uccuaccaagacaaugagga

SEQ ID NO: 28952 - RNA, 20 nt, Artificial Sequence
  LRRK2 RNA guide
uccucauugucuugguagga

SEQ ID NO: 28953 - RNA, 20 nt, Artificial Sequence
  LRRK2 RNA guide
uuauccucauugucuuggua

SEQ ID NO: 28954 - RNA, 20 nt, Artificial Sequence
  LRRK2 RNA guide
uuccacagcuccuaccaaga

SEQ ID NO: 28955 - RNA, 20 nt, Artificial Sequence
  LRRK2 RNA guide
uugucuugguaggagcugug

SEQ ID NO: 28956 - RNA, 20 nt, Artificial Sequence
  LRRK2 RNA guide
uuuauccucauugucuuggu

SEQ ID NO: 28957 - RNA, 21 nt, Artificial Sequence
  LRRK2 RNA guide
aauuccacagcuccuaccaag

SEQ ID NO: 28958 - RNA, 21 nt, Artificial Sequence
  LRRK2 RNA guide
acagcuccuaccaagacaaug

SEQ ID NO: 28959 - RNA, 21 nt, Artificial Sequence
  LRRK2 RNA guide
accaagacaaugaggauaaau

SEQ ID NO: 28960 - RNA, 21 nt, Artificial Sequence
  LRRK2 RNA guide
agaauuccacagcuccuacca

SEQ ID NO: 28961 - RNA, 21 nt, Artificial Sequence
  LRRK2 RNA guide
agcuccuaccaagacaaugag

SEQ ID NO: 28962 - RNA, 21 nt, Artificial Sequence
  LRRK2 RNA guide
auccucauugucuugguagga

SEQ ID NO: 28963 - RNA, 21 nt, Artificial Sequence
  LRRK2 RNA guide
auuccacagcuccuaccaaga

SEQ ID NO: 28964 - RNA, 21 nt, Artificial Sequence
  LRRK2 RNA guide
auugucuugguaggagcugug

SEQ ID NO: 28965 - RNA, 21 nt, Artificial Sequence
  LRRK2 RNA guide
auuuauccucauugucuuggu

SEQ ID NO: 28966 - RNA, 21 nt, Artificial Sequence
  LRRK2 RNA guide
cacagcuccuaccaagacaau

SEQ ID NO: 28967 - RNA, 21 nt, Artificial Sequence
  LRRK2 RNA guide
cagcuccuaccaagacaauga

SEQ ID NO: 28968 - RNA, 21 nt, Artificial Sequence
  LRRK2 RNA guide
cauugucuugguaggagcugu

SEQ ID NO: 28969 - RNA, 21 nt, Artificial Sequence
  LRRK2 RNA guide
ccaagacaaugaggauaaaua

SEQ ID NO: 28970 - RNA, 21 nt, Artificial Sequence
  LRRK2 RNA guide
ccacagcuccuaccaagacaa

SEQ ID NO: 28971 - RNA, 21 nt, Artificial Sequence
  LRRK2 RNA guide
ccuaccaagacaaugaggaua

SEQ ID NO: 28972 - RNA, 21 nt, Artificial Sequence
  LRRK2 RNA guide
ccucauugucuugguaggagc

SEQ ID NO: 28973 - RNA, 21 nt, Artificial Sequence
  LRRK2 RNA guide
cuaccaagacaaugaggauaa

SEQ ID NO: 28974 - RNA, 21 nt, Artificial Sequence
  LRRK2 RNA guide
cucauugucuugguaggagcu

SEQ ID NO: 28975 - RNA, 21 nt, Artificial Sequence
  LRRK2 RNA guide
cuccuaccaagacaaugagga

SEQ ID NO: 28976 - RNA, 21 nt, Artificial Sequence
  LRRK2 RNA guide
gaauuccacagcuccuaccaa

SEQ ID NO: 28977 - RNA, 21 nt, Artificial Sequence
  LRRK2 RNA guide
gcuccuaccaagacaaugagg

(The sequence listing continues in the following parts.)

1. A method for modifying in a cell a mutant allele of the Leucine-rich repeat serine/threonine-protein kinase 2 (LRRK2) gene having a mutation associated with monogenic Parkinson's disease, the method comprising
introducing to the cell a composition comprising:
at least one CRISPR nuclease or a sequence encoding a CRISPR nuclease; and
a first RNA molecule comprising a guide sequence portion having 17-50 nucleotides or a nucleotide sequence encoding the same,
wherein a complex of the CRISPR nuclease and the first RNA molecule affects a double strand break in the mutant allele of the LRRK2 gene.

2. The method of claim 1, wherein the first RNA molecule targets the CRISPR nuclease to the mutation associated with monogenic Parkinson's disease,
wherein the mutation associated with monogenic Parkinson's disease is any one of 12:40225041_C_T, 12:40225058_C_A, 12:40225088_G_A, 12:40225159_G_A, 12:40225233_G_C, 12:40225558_C_T, 12:40225618_T_C, 12:40225628_G_A, 12:40225631_T_C, 12:40232303_A_C, 12:40232345_G_C, 12:40232380_A_C, 12:40232385_T_C, 12:40235634_T_C, 12:40235646_C_G, 12:40235660_A_G, 12:40238078_A_G, 12:40240517_C_T, 12:40240531_T_C, 12:40240594_G_C, 12:40240602_T_C, 12:40243551_CAAT_C, 12:40243556_A_T, 12:40249822_T_G, 12:40249843_C_G, 12:40249854_C_T, 12:40249881_T_C, 12:40249908_A_G, 12:40251273_G_A, 12:40251303_G_A, 12:40251361_A_G, 12:40251366_C_A, 12:40251369_G_A, 12:40251495_C_T, 12:40252906_A_G, 12:40252929_G_A, 12:40252939_C_T, 12:40252952_T_G, 12:40252958_A_C, 12:40252968_G_A, 12:40252974_C_T, 12:40252978_C_T, 12:40252984_C_T, 12:40252988_T_C, 12:40253016_G_A, 12:40257311_A_G, 12:40257341_G_T, 12:40259507_A_G, 12:40259525_A_T, 12:40259534_G_T, 12:40259578_G_A, 12:40263806_A_G, 12:40263875_A_G, 12:40263900_G_A, 12:40263907_T_C, 12:40274646_CC_C, 12:40274881_T_C, 12:40274899_A_G, 12:40274917_G_C, 12:40277933_T_C, 12:40277968_A_C, 12:40277971_A_G, 12:40278025_T_A, 12:40278154_A_G, 12:40278167_C_T, 12:40283881_G_A, 12:40283915_T_C, 12:40283947_C_T, 12:40283966_G_A, 12:40283985_C_A, 12:40283990_T_C, 12:40284061_A_G, 12:40284076_C_A, 12:40284139_T_C, 12:40287363_C_A, 12:40287438_A_G, 12:40287461_A_G, 12:40293555_CTC_CCT, 12:40293607_C_T, 12:40293613_G_A, 12:40293624_G_C, 12:40293626_G_A, 12:40293644_A_G, 12:40294854_T_G, 12:40294862_T_C, 12:40294866_G_T, 12:40294878_C_T, 12:40295448_A_G, 12:40295463_A_G, 12:40295466_G_A, 12:40295535_A_T, 12:40295566_A_G, 12:40295574_A_C, 12:40295581_G_T, 12:40298330_A_G, 12:40298333_C_T, 12:40298346_G_A, 12:40298433_C_G, 12:40298479_G_T, 12:40298488_A_G, 12:40299125_A_G, 12:40299190_C_T, 12:40299196_A_C, 12:40299212_G_A, 12:40299255_T_C, 12:40302866_A_G, 12:40303952_C_A, 12:40303972_C_G, 12:40304000_G_A, 12:40304004_A_G, 12:40304035_A_C, 12:40304040_G_C, 12:40304040_G_T, 12:40304078_G_A, 12:40304141_C_T, 12:40305776_C_T, 12:40305781_T_A, 12:40305791_C_G, 12:40305871_G_A, 12:40305942_G_A, 12:40305946_T_A, 12:40308467_G_T, 12:40308476_A_G, 12:40308481_G_A, 12:40308543_GG_G, 12:40308632_C_A, 12:40308672_G_A, 12:40309174_G_A, 12:40309206_C_T, 12:40309225_A_C, 12:40309226_A_G, 12:40309230_A_G, 12:40309236_G_A, 12:40310434_C_A, 12:40310434_C_G, 12:40310434_C_T, 12:40310435_G_A, 12:40310436_C_T, 12:40310437_G_C, 12:40310440_T_G, 12:40310450_C_T, 12:40310461_G_A, 12:40310471_A_G, 12:40310476_GAT_G, 12:40310515_A_G, 12:40310530_C_T, 12:40310546_G_A, 12:40310554_G_A, 12:40310561_G_A, 12:40314043_G_A, 12:40314059_C_T, 12:40314062_A_G, 12:40314101_C_A, 12:40315266_T_A, 12:40319979_A_T, 12:40319998_T_C, 12:40320043_G_A, 12:40320054_G_C, 12:40320090_A_G, 12:40320094_A_G, 12:40320097_T_C, 12:40320119_A_G, 12:40321114_A_G, 12:40321123_T_C, 12:40322037_C_T, 12:40322038_G_A, 12:40322047_G_A, 12:40322047_G_T, 12:40322134_A_G, 12:40322137_A_C, 12:40322364_T_C, 12:40322386_G_T, 12:40322468_C_A, 12:40323244_C_G, 12:40323255_A_G, 12:40323256_T_C, 12:40323260_G_T, 12:40323270_G_T, 12:40323297_T_C, 12:40328416_G_C, 12:40335008_A_T, 12:40335031_G_A, 12:40335036_C_T, 12:40335037_G_A, 12:40335079_G_T, 12:40340349_C_G, 12:40340361_T_C, 12:40340380_T_C, 12:40340400_G_A, 12:40340404_T_C, 12:40340432_A_G, 12:40340436_A_T, 12:40346818_T_C, 12:40346826_ACTACT_A, 12:40346884_A_G, 12:40348402_G_GTGT, 12:40348475_A_G, 12:40348484_C_T, 12:40351537_A_G, 12:40351572_T_A, 12:40351579_C_T, 12:40351585_G_A, 12:40351605_G_C, 12:40351623_G_T, 12:40351667_C_A, 12:40351680_G_C, 12:40351720_G_C, 12:40351723_A_G, 12:40354304_T_C, 12:40354305_G_T, 12:40354410_G_A, 12:40356126_A_T, 12:40356145_C_T, 12:40359345_C_T, 12:40359422_A_G, 12:40363435_C_T, 12:40363440_C_T, 12:40363541_G_A, 12:40364843_G_A, 12:40364845_G_GGT, 12:40364884_G_A, 12:40364927_A_T, 12:40364960_A_G, 12:40365044_C_T, 12:40367012_T_A, 12:40367050_A_G, 12:40367648_AC_A, 12:40367656_G_T, 12:40367754_T_C, 12:40367849_G_A, 12:40367888_A_C, 12:40367988_C_T, 12:40368042_A_G, 12:40368073_A_C, 12:40368170_C_T, 12:40368262_C_T, 12:40368380_T_A, 12:40368486_G_T, 12:40368516_C_A, 12:40368534_T_G, 12:40368673_A_C, 12:40368736_C_A, 12:40368783_G_T, 12:40368800_T_C, 12:40368807_A_G, 12:40368834_A_G, 12:40368860_C_T, 12:40368905_A_T, 12:40368930_C_T, 12:40368947_C_T, 12:40368951_C_T, 12:40369044_T_C, 12:40369153_T_C, and 12:40369167_G_T; and/or
wherein the guide sequence portion of the first RNA molecule comprises 17-50 contiguous nucleotides containing nucleotides in the sequence set forth in any one of SEQ ID NOs: 1-103,606 that targets a mutation associated with monogenic Parkinson's disease.

3-4. (canceled)

5. The method of claim 1, wherein the first RNA molecule targets the CRISPR nuclease to a SNP position of the mutant allele,
wherein the SNP position is any one of rs1388598, rs28365207, rs7294619, rs10878226, rs1491943, rs1491942, rs1491941, rs11175645, rs4567538, rs12230685, rs11175655, rs11175656, rs1402299410, rs780970090, rs1479481931, rs71078229, rs11175658, rs3057613, rs35642658, rs74324737, rs2708441, rs10631840, rs35991926, rs61931634, rs11175666, rs751672176, rs36024911, rs377568728, rs1279923177, rs2249281, rs10878244, rs138000936, rs10878245, rs10878246, rs10878247, rs954884, rs10878249, rs10784444, rs6581622, rs17519573, rs35987733, rs868476079, rs1399756142, rs1474763022, rs1450276224, rs1191097078, rs1425272990, rs1477924701, rs2404580, rs2404581, rs1388599, rs1388596, rs10878258, rs12371502, rs11175729, rs17443414, rs1486599371, rs7134379, rs7955902, rs1491939, rs1491938, rs7969677, rs2723265, rs7132171, rs10784451, rs10784452, rs1907633, rs1491936, rs1907632, rs2046928, rs2723264, rs17465870, rs10878278, rs11175766, rs11564183, rs11175769, rs17465912, rs17443552, rs17490817, rs11430638, rs4293189, rs10784461, rs7308720, rs10784462, rs10878284, rs11175780, rs11175784, rs11175787, rs144463374, rs73108329, rs12426891, rs4768224, rs11175793, rs10784470, rs12146857, rs11564207, rs7308193, rs10506150, rs76660489, rs10878299, rs373619252, rs10878302, rs11564129, rs7971935, rs11175836, rs4272849, rs10784485, rs10506151, rs7309197, rs7134572, rs11175843, rs147801391, rs376096297, rs7488873, rs11175845, rs7979341, rs1226327150, rs777452337, rs1339001348, rs11175847, rs112859457, rs17466080, rs11175852, rs10784486, rs73108368, rs398019201, rs17519846, rs17466150, rs11175862, rs4310676, rs11564150, rs4318033, rs4473003, rs1429478461, rs886049356, rs11564270, rs17519881, rs17466178, rs17466185, rs11175902, rs76033741, rs56325408, rs7957754, rs11175911, rs12369882, rs11175913, rs4483664, rs66487867, rs1491426750, rs5006481, rs139565575, rs150276517, rs72446556, rs1186032972, rs12820920, rs7966550, rs12314692, rs11175922, rs73102746, rs10784497, rs17443815, rs7957057, rs76607433, rs28365224, rs7962011, rs10878336, rs11175934, rs11175935, rs17491061, rs11175941, rs10878340, rs10784498, rs10878341, rs10784499, rs17484286, rs146071397, rs10878343, rs11564180, rs11175958, rs11175959, rs113772607, rs11564149, rs11175963, rs7305344, rs7133914, rs11175964, rs397805328, rs11175966, rs10784501, rs41286474, rs869212703, rs2069228, rs10784503, rs386376250, rs11564128, rs2896975, rs7302503, rs7137160, rs369794148, rs34709132, rs10467144, rs11175985, rs10784504, rs57421387, rs7973058, rs1427267, rs1427266, rs721713, rs721712, rs721711, rs721709, rs4768227, rs398098159, rs4767969, rs10878356, rs10784506, rs10878358, rs7132073, rs1427265, rs17466339, rs2114569, rs2114568, rs2162469, rs10784509, rs1896254, rs5797667, rs373676201, rs1896253, rs1896252, rs1427263, rs11176013, rs11564148, rs11564205, rs10748030, rs10748031, rs10748032, rs11564177, rs10748033, rs10735931, rs10748034, rs10878368, rs7307276, rs4768229, rs4768230, rs397968969, rs11564204, rs4423250, rs7137665, rs10878371, rs11176022, rs60750674, rs10878372, rs398055492, rs761931834, rs1415940047, rs17466430, rs11176030, rs3747891, rs7298930, rs17444089, rs10878377, rs12316801, rs17444096, rs11564175, rs2404832, rs17466486, rs11564267, rs17520244, rs10506152, rs11176052, rs11176053, rs17444124, rs11564203, rs7307562, rs17520251, rs11461395, rs10506153, rs73275761, rs963243, rs17444145, rs10878386, rs17466521, rs12367542, rs17520278, rs35031086, rs11834950, rs11829088, rs4465428, rs61007767, rs60776971, rs2404834, rs7302841, rs2404835, rs11356084, rs715403, rs715402, rs6581667, rs6581668, rs200521371, rs4767970, rs4767971, rs4767972, rs1427271, rs1427272, rs1427273, rs10735934, rs10732751, rs12306060, rs1365763, rs7963697, rs11316380, rs7963086, rs17491536, rs7956787, rs7956898, rs10506155, rs7954061, rs7957151, rs919174, rs3065921, rs919175, rs1035812, rs1365764, rs397724721, rs17461964, rs10784518, rs4768231, rs4768232, rs3943893, rs2162471, rs1035813, rs10459264, rs10459265, rs11564147, rs10715759, rs7296657, rs7312497, rs10715758, rs10784522, rs796827140, rs74467833, rs7131694, rs12311273, rs58911468, rs35847030, rs1365765, rs66513412, rs2896977, rs199606989, rs1365766, rs10878405, rs11176143, rs7294958, rs61915610, rs7294952, rs59096461, rs59980086, rs4768233, rs4768234, rs4768235, rs7314455, rs7313525, rs7313895, rs7314863, rs7303525, rs7132187, rs7307310, rs11176153, rs11176154, rs7311247, rs7137437, rs75439407, rs73107108, rs1307806388, rs10878409, rs10878410, rs138382676, rs11176161, rs10878412, rs10878413, rs183544696, rs189538849, rs11610569, rs142726158, rs1194726090, rs576444406, rs185723137, rs1179215763, rs71449759, rs61915613, rs140722234, rs191099092, rs113693842, rs112767992, rs34531686, rs12368227, rs12368229, rs3930031, rs7308626, rs890575, rs890575, rs10748040, rs61230125, rs11176165, rs7976715, rs7976724, rs7963987, rs2162472, rs767501990, rs552326490, rs1365381164, rs760911090, rs754028820, rs11564173, rs7306545, rs7306684, rs112259589, rs73277531, rs77689380, rs73277533, rs17462055, rs758880647, rs10784528, rs796949072, rs10784532, rs145580704, rs386376254, rs11836288, rs11564146, rs10784536, rs11277474, rs7971919, rs7962116, rs67512688, rs2896978, rs2404836, rs11176195, rs4767973, rs17444202, rs4768236, rs4768237, rs58724345, rs397897325, rs33962975, rs7134408, rs11835105, rs137858615, rs10878434, rs35403247, rs3761863, rs17444223, rs12426362, rs17466605, rs3789328, rs12426498, rs4768238, rs66737902, rs10878441, rs3886747, rs1365770, rs367772598, rs386376255, rs10784548, rs1465527, rs1465528, rs17444285, rs7968048, rs11609433, rs776238897, rs149833872, rs1299545494, rs4374003, and rs7962370;
wherein the guide sequence portion of the first RNA molecule comprises 17-50 contiguous nucleotides containing nucleotides in the sequence set forth in any one of SEQ ID NOs: 1-103,606 that targets a SNP position of the mutant allele;
wherein the SNP position is in an exon or intron of the LRRK2 mutant allele, or within 3,000 basepairs upstream of the transcription start site or within 3,000 basepairs downstream of the 3′ UTR of the LRRK2 mutant allele; and/or
wherein the SNP position contains a heterozygous SNP.

6-9. (canceled)

10. The method of claim 1, further comprising introducing to the cell a second RNA molecule comprising a guide sequence portion having 17-50 nucleotides or a nucleotide sequence encoding the same, wherein a complex of the second RNA molecule and a CRISPR nuclease affects a second double strand break in the LRRK2 gene.

11. The method of claim 10, wherein the guide sequence portion of the second RNA molecule comprises 17-50 contiguous nucleotides containing nucleotides in the sequence set forth in any one of SEQ ID NOs: 1-103,606 other than the sequence of the first RNA molecule,
wherein the second RNA molecule comprises a non-discriminatory guide portion that targets both functional and mutated LRRK2 alleles;
wherein the second RNA molecule comprises a non-discriminatory guide portion that targets any one of Intron 1 of LRRK2, Intron 49 of LRRK2, Intron 2 of LRRK2, Intron 3 of LRRK2, a 3′ untranslated region (3′ UTR) of LRRK2, and an intergenic region downstream of LRRK2;
wherein the second RNA molecule comprises a non-discriminatory guide portion that targets a sequence that is located within a genomic range selected from any one of 12:40224997-40225496, 12:40225283-40225554, 12:40366506-40367005, 12:40367078-40367643, 12:40225641-40226140, and 12:40235126-40235625; and/or
wherein the second RNA molecule comprises a non-discriminatory guide portion that targets a sequence that is located up to 500 base pairs from an exon that is excised by the first and second RNA molecules.

12-15. (canceled)

16. The method of claim 10, wherein an exon or a portion thereof is excised from the mutant allele of the LRRK2 gene.

17. The method of claim 1, wherein the guide sequence portion of the first RNA molecule comprises 1, 2, 3, 4, or 5 nucleotide mismatches relative to a fully complementary target sequence of the guide sequence portion; or
wherein the guide sequence portion comprises 17-50 contiguous nucleotides containing nucleotides in the sequence set forth in any one of SEQ ID NOs: 1-103,606 modified to contain 1, 2, 3, 4, or 5 nucleotide mismatches relative to a fully complementary target sequence of the guide sequence portion.

18. (canceled)

19. The method of claim 17, wherein the guide sequence portion provides higher targeting specificity to the complex of the CRISPR nuclease and the first RNA molecule relative to a guide sequence portion that has higher complementarity to the mutant allele of the LRRK2 gene.

19. The method of claim 17, wherein the guide sequence portion provides higher targeting specificity to the complex of the CRISPR nuclease and the first RNA molecule relative to a guide sequence portion that has higher complementarity to the mutant allele of the LRRK2 gene.

20. A modified cell obtained by the method of claim 1.

21. The modified cell of claim 20, wherein the modified cell is a stem cell, a neuron, or a dopaminergic cell.

22. A first RNA molecule comprising a guide sequence portion having 17-50 contiguous nucleotides containing nucleotides in the sequence set forth in any one of SEQ ID NOs: 1-103,606, or any one of SEQ ID NOs: 1-103,606 modified to contain 1, 2, 3, 4, or 5 nucleotide mismatches relative to a fully complementary target sequence of the guide sequence portion.

23. A composition comprising the first RNA molecule of claim 22 and at least one CRISPR nuclease.

24. The composition of claim 23, further comprising a second RNA molecule comprising a guide sequence portion having 17-50 contiguous nucleotides, wherein the second RNA molecule targets a LRRK2 allele, and wherein the guide sequence portion of the second RNA molecule is a different sequence from the sequence of the guide sequence portion of the first RNA molecule.

25. The composition of claim 24, wherein the guide sequence portion of the second RNA molecule comprises 17-50 contiguous nucleotides containing nucleotides in the sequence set forth in any one of SEQ ID NOs: 1-103,606, or any one of SEQ ID NOs: 1-103,606 modified to contain 1, 2, 3, 4, or 5 nucleotide mismatches relative to a fully complementary target sequence of the guide sequence portion.

26. A method for inactivating a mutant LRRK2 allele in a cell, the method comprising delivering to the cell the composition of claim 23.

27. A method for treating monogenic Parkinson's disease, the method comprising delivering to a cell of a subject having monogenic Parkinson's disease the composition of claim 23.

28. A method for inactivating a mutant LRRK2 allele in a cell, comprising delivering to the cell the composition of claim 20.

29. A medicament comprising the composition of claim 23 for use in inactivating a mutant LRRK2 allele in a cell, wherein the medicament is administered by delivering to the cell the composition of claim 23.

30. A method for treating ameliorating or preventing monogenic Parkinson's disease, comprising delivering to a cell of a subject having or at risk of having monogenic Parkinson's disease the composition of claim 23.

31. A medicament comprising the composition of claim 23 for use in treating ameliorating or preventing monogenic Parkinson's disease, wherein the medicament is administered by delivering to a cell of a subject having or at risk of having monogenic Parkinson's disease the composition of claim 23.
